United States Patent Application Publication US 2005/0255487 A1 - sequence listing, part 56

SEQ ID NO: 1534228 - RNA, 19 nt, Homo sapiens
  misc_RNA (1)...(19): siRNA sense strand
gagccaugauguccauagu

SEQ ID NO: 1534229 - RNA, 19 nt, Homo sapiens
  misc_RNA (1)...(19): siRNA sense strand
gcacauauugcaacugacu

SEQ ID NO: 1534230 - RNA, 19 nt, Homo sapiens
  misc_RNA (1)...(19): siRNA sense strand
acagaagugucagcgcuuu

SEQ ID NO: 1534231 - RNA, 19 nt, Homo sapiens
  misc_RNA (1)...(19): siRNA sense strand
cauaauuguccucuucuug

SEQ ID NO: 1534232 - RNA, 19 nt, Homo sapiens
  misc_RNA (1)...(19): siRNA sense strand
ggacuggcacauauugcaa

SEQ ID NO: 1534233 - RNA, 19 nt, Homo sapiens
  misc_RNA (1)...(19): siRNA sense strand
uggagaacuucacugcauu

SEQ ID NO: 1534234 - RNA, 19 nt, Homo sapiens
  misc_RNA (1)...(19): siRNA sense strand
aacaaucuccacauucuuu

SEQ ID NO: 1534235 - RNA, 19 nt, Homo sapiens
  misc_RNA (1)...(19): siRNA sense strand
ggagaacuucacugcauuc

SEQ ID NO: 1534236 - RNA, 19 nt, Homo sapiens
  misc_RNA (1)...(19): siRNA sense strand
gcgaggcuaugguagacau

SEQ ID NO: 1534237 - RNA, 19 nt, Homo sapiens
  misc_RNA (1)...(19): siRNA sense strand
uaagcgaggcuaugguaga

SEQ ID NO: 1534238 - RNA, 19 nt, Homo sapiens
  misc_RNA (1)...(19): siRNA sense strand
ggagauuccagauuugucu

SEQ ID NO: 1534239 - RNA, 19 nt, Homo sapiens
  misc_RNA (1)...(19): siRNA sense strand
guucaaucccuauuuaugg

SEQ ID NO: 1534240 - RNA, 19 nt, Homo sapiens
  misc_RNA (1)...(19): siRNA sense strand
ccaucccacuggacucaaa

SEQ ID NO: 1534241 - RNA, 19 nt, Homo sapiens
  misc_RNA (1)...(19): siRNA sense strand
auccuacuguucccuaaua

SEQ ID NO: 1534242 - RNA, 19 nt, Homo sapiens
  misc_RNA (1)...(19): siRNA sense strand
gcucuuuccucuccaccau

SEQ ID NO: 1534243 - RNA, 19 nt, Homo sapiens
  misc_RNA (1)...(19): siRNA sense strand
uguaagcgaggcuauggua

SEQ ID NO: 1534244 - RNA, 19 nt, Homo sapiens
  misc_RNA (1)...(19): siRNA sense strand
ccauaauuguccucuucuu

SEQ ID NO: 1534245 - RNA, 19 nt, Homo sapiens
  misc_RNA (1)...(19): siRNA sense strand
uaauauauggccaucuuuc

SEQ ID NO: 1534246 - RNA, 19 nt, Homo sapiens
  misc_RNA (1)...(19): siRNA sense strand
ugggaggucuaauauaugg

SEQ ID NO: 1534247 - RNA, 19 nt, Homo sapiens
  misc_RNA (1)...(19): siRNA sense strand
gguucaaucccuauuuaug

SEQ ID NO: 1534248 - RNA, 19 nt, Homo sapiens
  misc_RNA (1)...(19): siRNA sense strand
gaaucucagucacuaaaau

SEQ ID NO: 1534249 - RNA, 19 nt, Homo sapiens
  misc_RNA (1)...(19): siRNA sense strand
ucccuaauauuguguugga

SEQ ID NO: 1534250 - RNA, 19 nt, Homo sapiens
  misc_RNA (1)...(19): siRNA sense strand
cagcuuagaguggacauug

SEQ ID NO: 1534251 - RNA, 19 nt, Homo sapiens
  misc_RNA (1)...(19): siRNA sense strand
cagaagugucagcgcuuua

SEQ ID NO: 1534252 - RNA, 19 nt, Homo sapiens
  misc_RNA (1)...(19): siRNA sense strand
uaauuguccucuucuuguc

SEQ ID NO: 1534253 - RNA, 19 nt, Homo sapiens
  misc_RNA (1)...(19): siRNA sense strand
uauauggccaucuuucaga

SEQ ID NO: 1534254 - RNA, 19 nt, Homo sapiens
  misc_RNA (1)...(19): siRNA sense strand
ucacgaucuaugacaauaa

SEQ ID NO: 1534255 - RNA, 19 nt, Homo sapiens
  misc_RNA (1)...(19): siRNA sense strand
ugguagacauagaaaggaa

SEQ ID NO: 1534256 - RNA, 19 nt, Homo sapiens
  misc_RNA (1)...(19): siRNA sense strand
ggaccugguaugugaaucu

SEQ ID NO: 1534257 - RNA, 19 nt, Homo sapiens
  misc_RNA (1)...(19): siRNA sense strand
acccauaauuguccucuuc

SEQ ID NO: 1534258 - RNA, 19 nt, Homo sapiens
  misc_RNA (1)...(19): siRNA sense strand
ucaggacuggcacauauug

SEQ ID NO: 1534259 - RNA, 19 nt, Homo sapiens
  misc_RNA (1)...(19): siRNA sense strand
uuggagaacuucacugcau

SEQ ID NO: 1534260 - RNA, 19 nt, Homo sapiens
  misc_RNA (1)...(19): siRNA sense strand
gggaaacacuuuuauucuc

SEQ ID NO: 1534261 - RNA, 19 nt, Homo sapiens
  misc_RNA (1)...(19): siRNA sense strand
ucuccaccaucgugacuga

SEQ ID NO: 1534262 - RNA, 19 nt, Homo sapiens
  misc_RNA (1)...(19): siRNA sense strand
ugucuacacccauaauugu

SEQ ID NO: 1534263 - RNA, 19 nt, Homo sapiens
  misc_RNA (1)...(19): siRNA sense strand
gaagugucagcgcuuuauc

SEQ ID NO: 1534264 - RNA, 19 nt, Homo sapiens
  misc_RNA (1)...(19): siRNA sense strand
cuacaguguugggcagaug

SEQ ID NO: 1534265 - RNA, 19 nt, Homo sapiens
  misc_RNA (1)...(19): siRNA sense strand
cagcuggccaucucuaaca

SEQ ID NO: 1534266 - RNA, 19 nt, Homo sapiens
  misc_RNA (1)...(19): siRNA sense strand
gguaugugaaucucaguca

SEQ ID NO: 1534267 - RNA, 19 nt, Homo sapiens
  misc_RNA (1)...(19): siRNA sense strand
auaauuguccucuucuugu

SEQ ID NO: 1534268 - RNA, 19 nt, Homo sapiens
  misc_RNA (1)...(19): siRNA sense strand
gguagacauagaaaggaaa

SEQ ID NO: 1534269 - RNA, 19 nt, Homo sapiens
  misc_RNA (1)...(19): siRNA sense strand
cuuccuuguuuacugcaua

SEQ ID NO: 1534270 - RNA, 19 nt, Homo sapiens
  misc_RNA (1)...(19): siRNA sense strand
uuauguuccuacaguguug

SEQ ID NO: 1534271 - RNA, 19 nt, Homo sapiens
  misc_RNA (1)...(19): siRNA sense strand
gaucuaugacaauaauggu

SEQ ID NO: 1534272 - RNA, 19 nt, Homo sapiens
  misc_RNA (1)...(19): siRNA sense strand
gugcuauuauguuccuaca

SEQ ID NO: 1534273 - RNA, 19 nt, Homo sapiens
  misc_RNA (1)...(19): siRNA sense strand
ucugauagcuuucuuuugc

SEQ ID NO: 1534274 - RNA, 19 nt, Homo sapiens
  misc_RNA (1)...(19): siRNA sense strand
gccuaguccugagccauga

SEQ ID NO: 1534275 - RNA, 19 nt, Homo sapiens
  misc_RNA (1)...(19): siRNA sense strand
guaaacaucuggagucauu

SEQ ID NO: 1534276 - RNA, 19 nt, Homo sapiens
  misc_RNA (1)...(19): siRNA sense strand
gaagauggauggcauuaga

SEQ ID NO: 1534277 - RNA, 19 nt, Homo sapiens
  misc_RNA (1)...(19): siRNA sense strand
gcaggaauuucuauuggaa

SEQ ID NO: 1534278 - RNA, 19 nt, Homo sapiens
  misc_RNA (1)...(19): siRNA sense strand
ugacaugacaucuguguua

SEQ ID NO: 1534279 - RNA, 19 nt, Homo sapiens
  misc_RNA (1)...(19): siRNA sense strand
gggaauauaugacaugaca

SEQ ID NO: 1534280 - RNA, 19 nt, Homo sapiens
  misc_RNA (1)...(19): siRNA sense strand
gaagagcgcgcauuacauc

SEQ ID NO: 1534281 - RNA, 19 nt, Homo sapiens
  misc_RNA (1)...(19): siRNA sense strand
ggagucauuugcuggguuu

SEQ ID NO: 1534282 - RNA, 19 nt, Homo sapiens
  misc_RNA (1)...(19): siRNA sense strand
caaaggcuccguucuauca

SEQ ID NO: 1534283 - RNA, 19 nt, Homo sapiens
  misc_RNA (1)...(19): siRNA sense strand
ucacagugcuugcuaugau

SEQ ID NO: 1534284 - RNA, 19 nt, Homo sapiens
  misc_RNA (1)...(19): siRNA sense strand
ggaauuggugcuccuauug

SEQ ID NO: 1534285 - RNA, 19 nt, Homo sapiens
  misc_RNA (1)...(19): siRNA sense strand
ggcaaaggcuccguucuau

SEQ ID NO: 1534286 - RNA, 19 nt, Homo sapiens
  misc_RNA (1)...(19): siRNA sense strand
gagcgguacuuuccagaau

SEQ ID NO: 1534287 - RNA, 19 nt, Homo sapiens
  misc_RNA (1)...(19): siRNA sense strand
uauaugacaugacaucugu

SEQ ID NO: 1534288 - RNA, 19 nt, Homo sapiens
  misc_RNA (1)...(19): siRNA sense strand
ugauugcucuucuugcuuu

SEQ ID NO: 1534289 - RNA, 19 nt, Homo sapiens
  misc_RNA (1)...(19): siRNA sense strand
gcaagugcguccagagaag

SEQ ID NO: 1534290 - RNA, 19 nt, Homo sapiens
  misc_RNA (1)...(19): siRNA sense strand
gaauauaugacaugacauc

SEQ ID NO: 1534291 - RNA, 19 nt, Homo sapiens
  misc_RNA (1)...(19): siRNA sense strand
gauggauggcauuagauua

SEQ ID NO: 1534292 - RNA, 19 nt, Homo sapiens
  misc_RNA (1)...(19): siRNA sense strand
gcagauucaucccaauuac

SEQ ID NO: 1534293 - RNA, 19 nt, Homo sapiens
  misc_RNA (1)...(19): siRNA sense strand
ggauauggagugauuccua

SEQ ID NO: 1534294 - RNA, 19 nt, Homo sapiens
  misc_RNA (1)...(19): siRNA sense strand
ucugugggcuaucaucuuu

SEQ ID NO: 1534295 - RNA, 19 nt, Homo sapiens
  misc_RNA (1)...(19): siRNA sense strand
gcuccguucuaucaucuuu

SEQ ID NO: 1534296 - RNA, 19 nt, Homo sapiens
  misc_RNA (1)...(19): siRNA sense strand
gcuuuccuauucuacauuu

SEQ ID NO: 1534297 - RNA, 19 nt, Homo sapiens
  misc_RNA (1)...(19): siRNA sense strand
gcauccgccuguacaccua

SEQ ID NO: 1534298 - RNA, 19 nt, Homo sapiens
  misc_RNA (1)...(19): siRNA sense strand
guauaugauugcucuucuu

SEQ ID NO: 1534299 - RNA, 19 nt, Homo sapiens
  misc_RNA (1)...(19): siRNA sense strand
gauccuggcaguguucuuu

SEQ ID NO: 1534300 - RNA, 19 nt, Homo sapiens
  misc_RNA (1)...(19): siRNA sense strand
gaauuggugcuccuauugu

SEQ ID NO: 1534301 - RNA, 19 nt, Homo sapiens
  misc_RNA (1)...(19): siRNA sense strand
gcgguacuuuccagaauca

SEQ ID NO: 1534302 - RNA, 19 nt, Homo sapiens
  misc_RNA (1)...(19): siRNA sense strand
auacugggcugcuaugucu

SEQ ID NO: 1534303 - RNA, 19 nt, Homo sapiens
  misc_RNA (1)...(19): siRNA sense strand
uuccaggucuguaugcuuu

SEQ ID NO: 1534304 - RNA, 19 nt, Homo sapiens
  misc_RNA (1)...(19): siRNA sense strand
aauuggugcuccuauugua

SEQ ID NO: 1534305 - RNA, 19 nt, Homo sapiens
  misc_RNA (1)...(19): siRNA sense strand
uggcaaaggcuccguucua

SEQ ID NO: 1534306 - RNA, 19 nt, Homo sapiens
  misc_RNA (1)...(19): siRNA sense strand
gcgcagauucaucccaauu

SEQ ID NO: 1534307 - RNA, 19 nt, Homo sapiens
  misc_RNA (1)...(19): siRNA sense strand
uguguuaccuucagcaagu

SEQ ID NO: 1534308 - RNA, 19 nt, Homo sapiens
  misc_RNA (1)...(19): siRNA sense strand
gauuaugcaggaauuucua

SEQ ID NO: 1534309 - RNA, 19 nt, Homo sapiens
  misc_RNA (1)...(19): siRNA sense strand
cuaugucucaggaguauuu

SEQ ID NO: 1534310 - RNA, 19 nt, Homo sapiens
  misc_RNA (1)...(19): siRNA sense strand
gcuaugauccuggcagugu

SEQ ID NO: 1534311 - RNA, 19 nt, Homo sapiens
  misc_RNA (1)...(19): siRNA sense strand
gaucacagugcuugcuaug

SEQ ID NO: 1534312 - RNA, 19 nt, Homo sapiens
  misc_RNA (1)...(19): siRNA sense strand
cgucagguguacuugauca

SEQ ID NO: 1534313 - RNA, 19 nt, Homo sapiens
  misc_RNA (1)...(19): siRNA sense strand
aaacaucuggagucauuug

SEQ ID NO: 1534314 - RNA, 19 nt, Homo sapiens
  misc_RNA (1)...(19): siRNA sense strand
gcaaaggcuccguucuauc

SEQ ID NO: 1534315 - RNA, 19 nt, Homo sapiens
  misc_RNA (1)...(19): siRNA sense strand
caguaaacaucuggaguca

SEQ ID NO: 1534316 - RNA, 19 nt, Homo sapiens
  misc_RNA (1)...(19): siRNA sense strand
ggaauacugggcugcuaug

SEQ ID NO: 1534317 - RNA, 19 nt, Homo sapiens
  misc_RNA (1)...(19): siRNA sense strand
gacaugacaucuguguuac

SEQ ID NO: 1534318 - RNA, 19 nt, Homo sapiens
  misc_RNA (1)...(19): siRNA sense strand
cuaaugagacaguaaacau

SEQ ID NO: 1534319 - RNA, 19 nt, Homo sapiens
  misc_RNA (1)...(19): siRNA sense strand
cgcagauucaucccaauua

SEQ ID NO: 1534320 - RNA, 19 nt, Homo sapiens
  misc_RNA (1)...(19): siRNA sense strand
ucacuggguuuggcucaau

SEQ ID NO: 1534321 - RNA, 19 nt, Homo sapiens
  misc_RNA (1)...(19): siRNA sense strand
cagcaagugcguccagaga

SEQ ID NO: 1534322 - RNA, 19 nt, Homo sapiens
  misc_RNA (1)...(19): siRNA sense strand
guacuuuccagaaucacuu

SEQ ID NO: 1534323 - RNA, 19 nt, Homo sapiens
  misc_RNA (1)...(19): siRNA sense strand
ggcgucagguguacuugau

SEQ ID NO: 1534324 - RNA, 19 nt, Homo sapiens
  misc_RNA (1)...(19): siRNA sense strand
ggguuucuuucucuucuuc

SEQ ID NO: 1534325 - RNA, 19 nt, Homo sapiens
  misc_RNA (1)...(19): siRNA sense strand
uauaugauugcucuucuug

SEQ ID NO: 1534326 - RNA, 19 nt, Homo sapiens
  misc_RNA (1)...(19): siRNA sense strand
uuuguucuguuucgggaua

SEQ ID NO: 1534327 - RNA, 19 nt, Homo sapiens
  misc_RNA (1)...(19): siRNA sense strand
uaugauugcucuucuugcu

SEQ ID NO: 1534328 - RNA, 19 nt, Homo sapiens
  misc_RNA (1)...(19): siRNA sense strand
cugaagagcgcgcauuaca

SEQ ID NO: 1534329 - RNA, 19 nt, Homo sapiens
  misc_RNA (1)...(19): siRNA sense strand
gcuuugcucugugggcuau

SEQ ID NO: 1534330 - RNA, 19 nt, Homo sapiens
  misc_RNA (1)...(19): siRNA sense strand
ucgaagauggauggcauua

SEQ ID NO: 1534331 - RNA, 19 nt, Homo sapiens
  misc_RNA (1)...(19): siRNA sense strand
aaggacaacccguacauca

SEQ ID NO: 1534332 - RNA, 19 nt, Homo sapiens
  misc_RNA (1)...(19): siRNA sense strand
cguccaggcuguguaucaa

SEQ ID NO: 1534333 - RNA, 19 nt, Homo sapiens
  misc_RNA (1)...(19): siRNA sense strand
uaugcaggaauuucuauug

SEQ ID NO: 1534334 - RNA, 19 nt, Homo sapiens
  misc_RNA (1)...(19): siRNA sense strand
uaaugagacaguaaacauc

SEQ ID NO: 1534335 - RNA, 19 nt, Homo sapiens
  misc_RNA (1)...(19): siRNA sense strand
cguguaauugugauguaua

SEQ ID NO: 1534336 - RNA, 19 nt, Homo sapiens
  misc_RNA (1)...(19): siRNA sense strand
ucuucuugcuuuccuauuc

SEQ ID NO: 1534337 - RNA, 19 nt, Homo sapiens
  misc_RNA (1)...(19): siRNA sense strand
uggauggcauuagauuaug

SEQ ID NO: 1534338 - RNA, 19 nt, Homo sapiens
  misc_RNA (1)...(19): siRNA sense strand
cuucuucacccugggaaua

SEQ ID NO: 1534339 - RNA, 19 nt, Homo sapiens
  misc_RNA (1)...(19): siRNA sense strand
ugcaggaauuucuauugga

SEQ ID NO: 1534340 - RNA, 19 nt, Homo sapiens
  misc_RNA (1)...(19): siRNA sense strand
caagugcguccagagaaga

SEQ ID NO: 1534341 - RNA, 19 nt, Homo sapiens
  misc_RNA (1)...(19): siRNA sense strand
gucauuugcuggguuucuu

SEQ ID NO: 1534342 - RNA, 19 nt, Homo sapiens
  misc_RNA (1)...(19): siRNA sense strand
cccguguaauugugaugua

SEQ ID NO: 1534343 - RNA, 19 nt, Homo sapiens
  misc_RNA (1)...(19): siRNA sense strand
uucgggauauggagugauu

SEQ ID NO: 1534344 - RNA, 19 nt, Homo sapiens
  misc_RNA (1)...(19): siRNA sense strand
ugaucacagugcuugcuau

SEQ ID NO: 1534345 - RNA, 19 nt, Homo sapiens
  misc_RNA (1)...(19): siRNA sense strand
ucaaggacaacccguacau

SEQ ID NO: 1534346 - RNA, 19 nt, Homo sapiens
  misc_RNA (1)...(19): siRNA sense strand
cacagugcuugcuaugauc

SEQ ID NO: 1534347 - RNA, 19 nt, Homo sapiens
  misc_RNA (1)...(19): siRNA sense strand
agauggauggcauuagauu

SEQ ID NO: 1534348 - RNA, 19 nt, Homo sapiens
  misc_RNA (1)...(19): siRNA sense strand
caugacaucuguguuaccu

SEQ ID NO: 1534349 - RNA, 19 nt, Homo sapiens
  misc_RNA (1)...(19): siRNA sense strand
cagcugauuuaucuccuua

SEQ ID NO: 1534350 - RNA, 19 nt, Homo sapiens
  misc_RNA (1)...(19): siRNA sense strand
gaagauaagaaggcgaaga

SEQ ID NO: 1534351 - RNA, 19 nt, Homo sapiens
  misc_RNA (1)...(19): siRNA sense strand
gcagcugauuuaucuccuu

SEQ ID NO: 1534352 - RNA, 19 nt, Homo sapiens
  misc_RNA (1)...(19): siRNA sense strand
gauaagaaggcgaagacau

SEQ ID NO: 1534353 - RNA, 19 nt, Homo sapiens
  misc_RNA (1)...(19): siRNA sense strand
ucgggcagcugauuuaucu

SEQ ID NO: 1534354 - RNA, 19 nt, Homo sapiens
  misc_RNA (1)...(19): siRNA sense strand
uaagaaggcgaagacauga

SEQ ID NO: 1534355 - RNA, 19 nt, Homo sapiens
  misc_RNA (1)...(19): siRNA sense strand
ucugugagaugaagauaag

SEQ ID NO: 1534356 - RNA, 19 nt, Homo sapiens
  misc_RNA (1)...(19): siRNA sense strand
ugaucgggcagcugauuua

SEQ ID NO: 1534357 - RNA, 19 nt, Homo sapiens
  misc_RNA (1)...(19): siRNA sense strand
auaagaaggcgaagacaug

SEQ ID NO: 1534358 - RNA, 19 nt, Homo sapiens
  misc_RNA (1)...(19): siRNA sense strand
cuccuuaccuggucuuugu

SEQ ID NO: 1534359 - RNA, 19 nt, Homo sapiens
  misc_RNA (1)...(19): siRNA sense strand
gugaucgggcagcugauuu

SEQ ID NO: 1534360 - RNA, 19 nt, Homo sapiens
  misc_RNA (1)...(19): siRNA sense strand
gaucgggcagcugauuuau

SEQ ID NO: 1534361 - RNA, 19 nt, Homo sapiens
  misc_RNA (1)...(19): siRNA sense strand
uaccuggucuuuguucaca

SEQ ID NO: 1534362 - RNA, 19 nt, Homo sapiens
  misc_RNA (1)...(19): siRNA sense strand
gaacucagcagcuaccaua

SEQ ID NO: 1534363 - RNA, 19 nt, Homo sapiens
  misc_RNA (1)...(19): siRNA sense strand
gagagaauauagucagaaa

SEQ ID NO: 1534364 - RNA, 19 nt, Homo sapiens
  misc_RNA (1)...(19): siRNA sense strand
gaagggaaguaccgagaug

SEQ ID NO: 1534365 - RNA, 19 nt, Homo sapiens
  misc_RNA (1)...(19): siRNA sense strand
gaacuacgaacgagugaga

SEQ ID NO: 1534366 - RNA, 19 nt, Homo sapiens
  misc_RNA (1)...(19): siRNA sense strand
gaacgagugagagaauaua

SEQ ID NO: 1534367 - RNA, 19 nt, Homo sapiens
  misc_RNA (1)...(19): siRNA sense strand
gagaugcugugaguaggua

SEQ ID NO: 1534368 - RNA, 19 nt, Homo sapiens
  misc_RNA (1)...(19): siRNA sense strand
gagaauauagucagaaagu

SEQ ID NO: 1534369 - RNA, 19 nt, Homo sapiens
  misc_RNA (1)...(19): siRNA sense strand
guaccgagaugcugugagu

SEQ ID NO: 1534370 - RNA, 19 nt, Homo sapiens
  misc_RNA (1)...(19): siRNA sense strand
gaacgacagccugauaaug

SEQ ID NO: 1534371 - RNA, 19 nt, Homo sapiens
  misc_RNA (1)...(19): siRNA sense strand
ccucacgccugaacaagaa

SEQ ID NO: 1534372 - RNA, 19 nt, Homo sapiens
  misc_RNA (1)...(19): siRNA sense strand
gaaaacauauugcauacca

SEQ ID NO: 1534373 - RNA, 19 nt, Homo sapiens
  misc_RNA (1)...(19): siRNA sense strand
gcaggaggcucagcuguac

SEQ ID NO: 1534374 - RNA, 19 nt, Homo sapiens
  misc_RNA (1)...(19): siRNA sense strand
cagacagacugcuauaaca

SEQ ID NO: 1534375 - RNA, 19 nt, Homo sapiens
  misc_RNA (1)...(19): siRNA sense strand
agacugcuauaacaaucua

SEQ ID NO: 1534376 - RNA, 19 nt, Homo sapiens
  misc_RNA (1)...(19): siRNA sense strand
agucagaacucagcagcua

SEQ ID NO: 1534377 - RNA, 19 nt, Homo sapiens
  misc_RNA (1)...(19): siRNA sense strand
aggcucagcuguacaagga

SEQ ID NO: 1534378 - RNA, 19 nt, Homo sapiens
  misc_RNA (1)...(19): siRNA sense strand
agauggagcccgugaacua

SEQ ID NO: 1534379 - RNA, 19 nt, Homo sapiens
  misc_RNA (1)...(19): siRNA sense strand
gugagagaauauagucaga

SEQ ID NO: 1534380 - RNA, 19 nt, Homo sapiens
  misc_RNA (1)...(19): siRNA sense strand
ggaacgacagccugauaau

SEQ ID NO: 1534381 - RNA, 19 nt, Homo sapiens
  misc_RNA (1)...(19): siRNA sense strand
gagucugcccucuccguua

SEQ ID NO: 1534382 - RNA, 19 nt, Homo sapiens
  misc_RNA (1)...(19): siRNA sense strand
ccuccuggcugccgugaau

SEQ ID NO: 1534383 - RNA, 19 nt, Homo sapiens
  misc_RNA (1)...(19): siRNA sense strand
gacagacugcuauaacaau

SEQ ID NO: 1534384 - RNA, 19 nt, Homo sapiens
  misc_RNA (1)...(19): siRNA sense strand
cucagcagcuaccauagaa

SEQ ID NO: 1534385 - RNA, 19 nt, Homo sapiens
  misc_RNA (1)...(19): siRNA sense strand
agacagacugcuauaacaa

SEQ ID NO: 1534386 - RNA, 19 nt, Homo sapiens
  misc_RNA (1)...(19): siRNA sense strand
ggaagggaaguaccgagau

SEQ ID NO: 1534387 - RNA, 19 nt, Homo sapiens
  misc_RNA (1)...(19): siRNA sense strand
cgaacgagugagagaauau

SEQ ID NO: 1534388 - RNA, 19 nt, Homo sapiens
  misc_RNA (1)...(19): siRNA sense strand
acagacugcuauaacaauc

SEQ ID NO: 1534389 - RNA, 19 nt, Homo sapiens
  misc_RNA (1)...(19): siRNA sense strand
acgaacgagugagagaaua

SEQ ID NO: 1534390 - RNA, 19 nt, Homo sapiens
  misc_RNA (1)...(19): siRNA sense strand
ccagacagacugcuauaac

SEQ ID NO: 1534391 - RNA, 19 nt, Homo sapiens
  misc_RNA (1)...(19): siRNA sense strand
cugcuugucuccuucagau

SEQ ID NO: 1534392 - RNA, 19 nt, Homo sapiens
  misc_RNA (1)...(19): siRNA sense strand
gcucuaccugggcauguuu

SEQ ID NO: 1534393 - RNA, 19 nt, Homo sapiens
  misc_RNA (1)...(19): siRNA sense strand
cgagugagagaauauaguc

SEQ ID NO: 1534394 - RNA, 19 nt, Homo sapiens
  misc_RNA (1)...(19): siRNA sense strand
uggaacgacagccugauaa

SEQ ID NO: 1534395 - RNA, 19 nt, Homo sapiens
  misc_RNA (1)...(19): siRNA sense strand
ccacccagacagacugcua

SEQ ID NO: 1534396 - RNA, 19 nt, Homo sapiens
  misc_RNA (1)...(19): siRNA sense strand
ucuagcugcuugucuccuu

SEQ ID NO: 1534397 - RNA, 19 nt, Homo sapiens
  misc_RNA (1)...(19): siRNA sense strand
cuggaacgacagccugaua

SEQ ID NO: 1534398 - RNA, 19 nt, Homo sapiens
  misc_RNA (1)...(19): siRNA sense strand
uaccugggcauguuugguu

SEQ ID NO: 1534399 - RNA, 19 nt, Homo sapiens
  misc_RNA (1)...(19): siRNA sense strand
ucagaaaguccuggaacga

SEQ ID NO: 1534400 - RNA, 19 nt, Homo sapiens
  misc_RNA (1)...(19): siRNA sense strand
uuucgaggauguucugaua

SEQ ID NO: 1534401 - RNA, 19 nt, Homo sapiens
  misc_RNA (1)...(19): siRNA sense strand
gcugggcucuuucgaggau

SEQ ID NO: 1534402 - RNA, 19 nt, Homo sapiens
  misc_RNA (1)...(19): siRNA sense strand
ggaagaggaggagcgauuc

SEQ ID NO: 1534403 - RNA, 19 nt, Homo sapiens
  misc_RNA (1)...(19): siRNA sense strand
aggaagaggaggagcgauu

SEQ ID NO: 1534404 - RNA, 19 nt, Homo sapiens
  misc_RNA (1)...(19): siRNA sense strand
uggaugaggaggaggaaga

SEQ ID NO: 1534405 - RNA, 19 nt, Homo sapiens
  misc_RNA (1)...(19): siRNA sense strand
gaacacaggugcuuggaua

SEQ ID NO: 1534406 - RNA, 19 nt, Homo sapiens
  misc_RNA (1)...(19): siRNA sense strand
gaagacaaauuccacagua

SEQ ID NO: 1534407 - RNA, 19 nt, Homo sapiens
  misc_RNA (1)...(19): siRNA sense strand
gagcuucacucaaguagaa

SEQ ID NO: 1534408 - RNA, 19 nt, Homo sapiens
  misc_RNA (1)...(19): siRNA sense strand
ccagaagaaugccaauaua

SEQ ID NO: 1534409 - RNA, 19 nt, Homo sapiens
  misc_RNA (1)...(19): siRNA sense strand
gaacagcuuaugcauauuu

SEQ ID NO: 1534410 - RNA, 19 nt, Homo sapiens
  misc_RNA (1)...(19): siRNA sense strand
ggaagaggauaucauacuu

SEQ ID NO: 1534411 - RNA, 19 nt, Homo sapiens
  misc_RNA (1)...(19): siRNA sense strand
gcaaagccaagcaaauaua

SEQ ID NO: 1534412 - RNA, 19 nt, Homo sapiens
  misc_RNA (1)...(19): siRNA sense strand
caagauccuuuacuuagaa

SEQ ID NO: 1534413 - RNA, 19 nt, Homo sapiens
  misc_RNA (1)...(19): siRNA sense strand
gccaauauauucaucaguu

SEQ ID NO: 1534414 - RNA, 19 nt, Homo sapiens
  misc_RNA (1)...(19): siRNA sense strand
gaaaagcacuguugaagau

SEQ ID NO: 1534415 - RNA, 19 nt, Homo sapiens
  misc_RNA (1)...(19): siRNA sense strand
caacaacacacauaaauca

SEQ ID NO: 1534416 - RNA, 19 nt, Homo sapiens
  misc_RNA (1)...(19): siRNA sense strand
ccaaacaaccuaaacauau

SEQ ID NO: 1534417 - RNA, 19 nt, Homo sapiens
  misc_RNA (1)...(19): siRNA sense strand
agagguaucucacagguaa

SEQ ID NO: 1534418 - RNA, 19 nt, Homo sapiens
  misc_RNA (1)...(19): siRNA sense strand
ggagaagagucgccaggaa

SEQ ID NO: 1534419 - RNA, 19 nt, Homo sapiens
  misc_RNA (1)...(19): siRNA sense strand
aaaugaggcuguuguaaug

SEQ ID NO: 1534420 - RNA, 19 nt, Homo sapiens
  misc_RNA (1)...(19): siRNA sense strand
gaaaagaacuaaaggucaa

SEQ ID NO: 1534421 - RNA, 19 nt, Homo sapiens
  misc_RNA (1)...(19): siRNA sense strand
cugaacagcuuaugcauau

SEQ ID NO: 1534422 - RNA, 19 nt, Homo sapiens
  misc_RNA (1)...(19): siRNA sense strand
caaucuaucuucaucucua

SEQ ID NO: 1534423 - RNA, 19 nt, Homo sapiens
  misc_RNA (1)...(19): siRNA sense strand
ccagacaacuucaacaaca

SEQ ID NO: 1534424 - RNA, 19 nt, Homo sapiens
  misc_RNA (1)...(19): siRNA sense strand
gaaagggacaguuagucua

SEQ ID NO: 1534425 - RNA, 19 nt, Homo sapiens
  misc_RNA (1)...(19): siRNA sense strand
ccaagauccuuuacuuaga

SEQ ID NO: 1534426 - RNA, 19 nt, Homo sapiens
  misc_RNA (1)...(19): siRNA sense strand
gagccaagcaguuguagaa

SEQ ID NO: 1534427 - RNA, 19 nt, Homo sapiens
  misc_RNA (1)...(19): siRNA sense strand
caucggaacuucaaggaau

SEQ ID NO: 1534428 - RNA, 19 nt, Homo sapiens
  misc_RNA (1)...(19): siRNA sense strand
caauggcucuauucaaguu

SEQ ID NO: 1534429 - RNA, 19 nt, Homo sapiens
  misc_RNA (1)...(19): siRNA sense strand
cuuagaagauuuagaccua

SEQ ID NO: 1534430 - RNA, 19 nt, Homo sapiens
  misc_RNA (1)...(19): siRNA sense strand
gaaagccaguugcacaagu

SEQ ID NO: 1534431 - RNA, 19 nt, Homo sapiens
  misc_RNA (1)...(19): siRNA sense strand
gaacaauuacauacugcua

SEQ ID NO: 1534432 - RNA, 19 nt, Homo sapiens
  misc_RNA (1)...(19): siRNA sense strand
caaauuccacaguaacuaa

SEQ ID NO: 1534433 - RNA, 19 nt, Homo sapiens
  misc_RNA (1)...(19): siRNA sense strand
guuagucuauggccaauug

SEQ ID NO: 1534434 - RNA, 19 nt, Homo sapiens
  misc_RNA (1)...(19): siRNA sense strand
gccaagaaagggacaguua

SEQ ID NO: 1534435 - RNA, 19 nt, Homo sapiens
  misc_RNA (1)...(19): siRNA sense strand
gcauacaacuggaauuacu

SEQ ID NO: 1534436 - RNA, 19 nt, Homo sapiens
  misc_RNA (1)...(19): siRNA sense strand
caacguuacuggcuaucuu

SEQ ID NO: 1534437 - RNA, 19 nt, Homo sapiens
  misc_RNA (1)...(19): siRNA sense strand
ucaaccaaguguucaguuu

SEQ ID NO: 1534438 - RNA, 19 nt, Homo sapiens
  misc_RNA (1)...(19): siRNA sense strand
caacuggaauuacucucaa

SEQ ID NO: 1534439 - RNA, 19 nt, Homo sapiens
  misc_RNA (1)...(19): siRNA sense strand
aaagagauagcaagacuaa

SEQ ID NO: 1534440 - RNA, 19 nt, Homo sapiens
  misc_RNA (1)...(19): siRNA sense strand
gaggacaagucgcaguuau

SEQ ID NO: 1534441 - RNA, 19 nt, Homo sapiens
  misc_RNA (1)...(19): siRNA sense strand
cauuuaaucuggacauaug

SEQ ID NO: 1534442 - RNA, 19 nt, Homo sapiens
  misc_RNA (1)...(19): siRNA sense strand
ccaagcaguuguagaagug

SEQ ID NO: 1534443 - RNA, 19 nt, Homo sapiens
  misc_RNA (1)...(19): siRNA sense strand
ccacugauucccauaaauu

SEQ ID NO: 1534444 - RNA, 19 nt, Homo sapiens
  misc_RNA (1)...(19): siRNA sense strand
gaggaacgcccacugauuc

SEQ ID NO: 1534445 - RNA, 19 nt, Homo sapiens
  misc_RNA (1)...(19): siRNA sense strand
gugaggcacuccuuuauag

SEQ ID NO: 1534446 - RNA, 19 nt, Homo sapiens
  misc_RNA (1)...(19): siRNA sense strand
gauagcagcuccacuucca

SEQ ID NO: 1534447 - RNA, 19 nt, Homo sapiens
  misc_RNA (1)...(19): siRNA sense strand
ucaaggaacauaacaauca

SEQ ID NO: 1534448 - RNA, 19 nt, Homo sapiens
  misc_RNA (1)...(19): siRNA sense strand
ccugacaaccaucauauua

SEQ ID NO: 1534449 - RNA, 19 nt, Homo sapiens
  misc_RNA (1)...(19): siRNA sense strand
ccgcaaagccaagcaaaua

SEQ ID NO: 1534450 - RNA, 19 nt, Homo sapiens
  misc_RNA (1)...(19): siRNA sense strand
gaauuacucucaauaaacc

SEQ ID NO: 1534451 - RNA, 19 nt, Homo sapiens
  misc_RNA (1)...(19): siRNA sense strand
aaagcacuguugaagauuu

SEQ ID NO: 1534452 - RNA, 19 nt, Homo sapiens
  misc_RNA (1)...(19): siRNA sense strand
uaaaugaggcuguuguaau

SEQ ID NO: 1534453 - RNA, 19 nt, Homo sapiens
  misc_RNA (1)...(19): siRNA sense strand
gaagaggauaucauacuug

SEQ ID NO: 1534454 - RNA, 19 nt, Homo sapiens
  misc_RNA (1)...(19): siRNA sense strand
ggacaagucgcaguuauuc

SEQ ID NO: 1534455 - RNA, 19 nt, Homo sapiens
  misc_RNA (1)...(19): siRNA sense strand
uaaacuacacgaagacaaa

SEQ ID NO: 1534456 - RNA, 19 nt, Homo sapiens
  misc_RNA (1)...(19): siRNA sense strand
ggaguggagugaucaugga

SEQ ID NO: 1534457 - RNA, 19 nt, Homo sapiens
  misc_RNA (1)...(19): siRNA sense strand
caucauauuagcaacguua

SEQ ID NO: 1534458 - RNA, 19 nt, Homo sapiens
  misc_RNA (1)...(19): siRNA sense strand
gucaauggcucuauucaag

SEQ ID NO: 1534459 - RNA, 19 nt, Homo sapiens
  misc_RNA (1)...(19): siRNA sense strand
aagaggauaucauacuuga

SEQ ID NO: 1534460 - RNA, 19 nt, Homo sapiens
  misc_RNA (1)...(19): siRNA sense strand
agacuaacaucuggaagaa

SEQ ID NO: 1534461 - RNA, 19 nt, Homo sapiens
  misc_RNA (1)...(19): siRNA sense strand
aaagauggcuacguguuga

SEQ ID NO: 1534462 - RNA, 19 nt, Homo sapiens
  misc_RNA (1)...(19): siRNA sense strand
gaccuaagcagcagugaga

SEQ ID NO: 1534463 - RNA, 19 nt, Homo sapiens
  misc_RNA (1)...(19): siRNA sense strand
gcuuggacauuugauauga

SEQ ID NO: 1534464 - RNA, 19 nt, Homo sapiens
  misc_RNA (1)...(19): siRNA sense strand
ggaauuacucucaauaaac

SEQ ID NO: 1534465 - RNA, 19 nt, Homo sapiens
  misc_RNA (1)...(19): siRNA sense strand
ggaauggucaaggaacaua

SEQ ID NO: 1534466 - RNA, 19 nt, Homo sapiens
  misc_RNA (1)...(19): siRNA sense strand
gcccaagauccuuuacuua

SEQ ID NO: 1534467 - RNA, 19 nt, Homo sapiens
  misc_RNA (1)...(19): siRNA sense strand
ggagaaaacauucaucaaa

SEQ ID NO: 1534468 - RNA, 19 nt, Homo sapiens
  misc_RNA (1)...(19): siRNA sense strand
caaggaauuucagaacaga

SEQ ID NO: 1534469 - RNA, 19 nt, Homo sapiens
  misc_RNA (1)...(19): siRNA sense strand
gaggauaucauacuugaag

SEQ ID NO: 1534470 - RNA, 19 nt, Homo sapiens
  misc_RNA (1)...(19): siRNA sense strand
cagggaagaggauaucaua

SEQ ID NO: 1534471 - RNA, 19 nt, Homo sapiens
  misc_RNA (1)...(19): siRNA sense strand
caacaacaacaacagcaaa

SEQ ID NO: 1534472 - RNA, 19 nt, Homo sapiens
  misc_RNA (1)...(19): siRNA sense strand
aaaguacccuacaaauuag

SEQ ID NO: 1534473 - RNA, 19 nt, Homo sapiens
  misc_RNA (1)...(19): siRNA sense strand
uaaaugaagauuccaagga

SEQ ID NO: 1534474 - RNA, 19 nt, Homo sapiens
  misc_RNA (1)...(19): siRNA sense strand
caaagauggcuacguguug

SEQ ID NO: 1534475 - RNA, 19 nt, Homo sapiens
  misc_RNA (1)...(19): siRNA sense strand
aaaggucaauggcucuauu

SEQ ID NO: 1534476 - RNA, 19 nt, Homo sapiens
  misc_RNA (1)...(19): siRNA sense strand
caucaaaggcagaaacaga

SEQ ID NO: 1534477 - RNA, 19 nt, Homo sapiens
  misc_RNA (1)...(19): siRNA sense strand
aacuagagguucagguaua

SEQ ID NO: 1534478 - RNA, 19 nt, Homo sapiens
  misc_RNA (1)...(19): siRNA sense strand
aagacaaauuccacaguaa

SEQ ID NO: 1534479 - RNA, 19 nt, Homo sapiens
  misc_RNA (1)...(19): siRNA sense strand
gcaagacuaacaucuggaa

SEQ ID NO: 1534480 - RNA, 19 nt, Homo sapiens
  misc_RNA (1)...(19): siRNA sense strand
guuccagugucuguauuua

SEQ ID NO: 1534481 - RNA, 19 nt, Homo sapiens
  misc_RNA (1)...(19): siRNA sense strand
cagcuacuuugccaagaaa

SEQ ID NO: 1534482 - RNA, 19 nt, Homo sapiens
  misc_RNA (1)...(19): siRNA sense strand
caaggaacauaacaaucau

SEQ ID NO: 1534483 - RNA, 19 nt, Homo sapiens
  misc_RNA (1)...(19): siRNA sense strand
cagaagaaugccaauauau

SEQ ID NO: 1534484 - RNA, 19 nt, Homo sapiens
  misc_RNA (1)...(19): siRNA sense strand
acaacaaucuaucuucauc

SEQ ID NO: 1534485 - RNA, 19 nt, Homo sapiens
  misc_RNA (1)...(19): siRNA sense strand
gaaacccaacacagucuuu

SEQ ID NO: 1534486 - RNA, 19 nt, Homo sapiens
  misc_RNA (1)...(19): siRNA sense strand
ggcagaaacagaagaaaga

SEQ ID NO: 1534487 - RNA, 19 nt, Homo sapiens
  misc_RNA (1)...(19): siRNA sense strand
gaagauuccaaggacauaa

SEQ ID NO: 1534488 - RNA, 19 nt, Homo sapiens
  misc_RNA (1)...(19): siRNA sense strand
gagguucagguauaaauga

SEQ ID NO: 1534489 - RNA, 19 nt, Homo sapiens
  misc_RNA (1)...(19): siRNA sense strand
cauaugaugcaccacauuu

SEQ ID NO: 1534490 - RNA, 19 nt, Homo sapiens
  misc_RNA (1)...(19): siRNA sense strand
caaagccaagcaaauauau

SEQ ID NO: 1534491 - RNA, 19 nt, Homo sapiens
  misc_RNA (1)...(19): siRNA sense strand
ugaaaguccaggugaauga

SEQ ID NO: 1534492 - RNA, 19 nt, Homo sapiens
  misc_RNA (1)...(19): siRNA sense strand
ggagcacccuggagaagag

SEQ ID NO: 1534493 - RNA, 19 nt, Homo sapiens
  misc_RNA (1)...(19): siRNA sense strand
guaaugaggaggcguaugg

SEQ ID NO: 1534494 - RNA, 19 nt, Homo sapiens
  misc_RNA (1)...(19): siRNA sense strand
guacuacuuuguuauugca

SEQ ID NO: 1534495 - RNA, 19 nt, Homo sapiens
  misc_RNA (1)...(19): siRNA sense strand
uuacaguucuacaacaguu

SEQ ID NO: 1534496 - RNA, 19 nt, Homo sapiens
  misc_RNA (1)...(19): siRNA sense strand
gcccacugauucccauaaa

SEQ ID NO: 1534497 - RNA, 19 nt, Homo sapiens
  misc_RNA (1)...(19): siRNA sense strand
caucaucagucgucaguac

SEQ ID NO: 1534498 - RNA, 19 nt, Homo sapiens
  misc_RNA (1)...(19): siRNA sense strand
cuucaaacaucugaccuuu

SEQ ID NO: 1534499 - RNA, 19 nt, Homo sapiens
  misc_RNA (1)...(19): siRNA sense strand
ucaagaaacccaacacagu

SEQ ID NO: 1534500 - RNA, 19 nt, Homo sapiens
  misc_RNA (1)...(19): siRNA sense strand
gaccagacaacuucaacaa

SEQ ID NO: 1534501 - RNA, 19 nt, Homo sapiens
  misc_RNA (1)...(19): siRNA sense strand
ggucaaggaacauaacaau

SEQ ID NO: 1534502 - RNA, 19 nt, Homo sapiens
  misc_RNA (1)...(19): siRNA sense strand
ucaaacaucugaccuuuuc

SEQ ID NO: 1534503 - RNA, 19 nt, Homo sapiens
  misc_RNA (1)...(19): siRNA sense strand
gcaagagaacccagagcaa

SEQ ID NO: 1534504 - RNA, 19 nt, Homo sapiens
  misc_RNA (1)...(19): siRNA sense strand
caagagaacccagagcaau

SEQ ID NO: 1534505 - RNA, 19 nt, Homo sapiens
  misc_RNA (1)...(19): siRNA sense strand
ggaccuagcugaagugauc

SEQ ID NO: 1534506 - RNA, 19 nt, Homo sapiens
  misc_RNA (1)...(19): siRNA sense strand
caugauguguggauguuua

SEQ ID NO: 1534507 - RNA, 19 nt, Homo sapiens
  misc_RNA (1)...(19): siRNA sense strand
gcaaaggucuccugaagcu

SEQ ID NO: 1534508 - RNA, 19 nt, Homo sapiens
  misc_RNA (1)...(19): siRNA sense strand
ccgcaaaggucuccugaag

SEQ ID NO: 1534509 - RNA, 19 nt, Homo sapiens
  misc_RNA (1)...(19): siRNA sense strand
cggcuacacucgcucagaa

SEQ ID NO: 1534510 - RNA, 19 nt, Homo sapiens
  misc_RNA (1)...(19): siRNA sense strand
ggacacaagguacagaucu

SEQ ID NO: 1534511 - RNA, 19 nt, Homo sapiens
  misc_RNA (1)...(19): siRNA sense strand
gaggccacaucaacaguca

SEQ ID NO: 1534512 - RNA, 19 nt, Homo sapiens
  misc_RNA (1)...(19): siRNA sense strand
ccgcuuacuuccuggagaa

SEQ ID NO: 1534513 - RNA, 19 nt, Homo sapiens
  misc_RNA (1)...(19): siRNA sense strand
ggaucaagguagccucucu

SEQ ID NO: 1534514 - RNA, 19 nt, Homo sapiens
  misc_RNA (1)...(19): siRNA sense strand
gacacaagguacagaucug

SEQ ID NO: 1534515 - RNA, 19 nt, Homo sapiens
  misc_RNA (1)...(19): siRNA sense strand
ccugugcucuccgcaauga

SEQ ID NO: 1534516 - RNA, 19 nt, Homo sapiens
  misc_RNA (1)...(19): siRNA sense strand
gcagguggaggcacaagau

SEQ ID NO: 1534517 - RNA, 19 nt, Homo sapiens
  misc_RNA (1)...(19): siRNA sense strand
gcuacacucgcucagaauu

SEQ ID NO: 1534518 - RNA, 19 nt, Homo sapiens
  misc_RNA (1)...(19): siRNA sense strand
ucauggaccuagcugaagu

SEQ ID NO: 1534519 - RNA, 19 nt, Homo sapiens
  misc_RNA (1)...(19): siRNA sense strand
gucaugauguguggauguu

SEQ ID NO: 1534520 - RNA, 19 nt, Homo sapiens
  misc_RNA (1)...(19): siRNA sense strand
caucugcacaccuggauca

SEQ ID NO: 1534521 - RNA, 19 nt, Homo sapiens
  misc_RNA (1)...(19): siRNA sense strand
gguagccucucugcacaag

SEQ ID NO: 1534522 - RNA, 19 nt, Homo sapiens
  misc_RNA (1)...(19): siRNA sense strand
ggccacaucaacagucaug

SEQ ID NO: 1534523 - RNA, 19 nt, Homo sapiens
  misc_RNA (1)...(19): siRNA sense strand
cuggagggagguucucuaa

SEQ ID NO: 1534524 - RNA, 19 nt, Homo sapiens
  misc_RNA (1)...(19): siRNA sense strand
acaagaagcucuccaagau

SEQ ID NO: 1534525 - RNA, 19 nt, Homo sapiens
  misc_RNA (1)...(19): siRNA sense strand
gccaagaacuacaucaaau

SEQ ID NO: 1534526 - RNA, 19 nt, Homo sapiens
  misc_RNA (1)...(19): siRNA sense strand
ccacgcagauccacagcuu

SEQ ID NO: 1534527 - RNA, 19 nt, Homo sapiens
  misc_RNA (1)...(19): siRNA sense strand
ggaugcacaagcuaaauaa

SEQ ID NO: 1534528 - RNA, 19 nt, Homo sapiens
  misc_RNA (1)...(19): siRNA sense strand
gacaagaagcucuccaaga

SEQ ID NO: 1534529 - RNA, 19 nt, Homo sapiens
  misc_RNA (1)...(19): siRNA sense strand
ggccaagaacuacaucaaa

SEQ ID NO: 1534530 - RNA, 19 nt, Homo sapiens
  misc_RNA (1)...(19): siRNA sense strand
cggaugcacaagcuaaaua

SEQ ID NO: 1534531 - RNA, 19 nt, Homo sapiens
  misc_RNA (1)...(19): siRNA sense strand
ccaagaacuacaucaaauc

SEQ ID NO: 1534532 - RNA, 19 nt, Homo sapiens
  misc_RNA (1)...(19): siRNA sense strand
cagcggaugcacaagcuaa

SEQ ID NO: 1534533 - RNA, 19 nt, Homo sapiens
  misc_RNA (1)...(19): siRNA sense strand
caagaagcucuccaagauc

SEQ ID NO: 1534534 - RNA, 19 nt, Homo sapiens
  misc_RNA (1)...(19): siRNA sense strand
caagaacuacaucaaaucg

SEQ ID NO: 1534535 - RNA, 19 nt, Homo sapiens
  misc_RNA (1)...(19): siRNA sense strand
ccaccauccugaccauguc

SEQ ID NO: 1534536 - RNA, 19 nt, Homo sapiens
  misc_RNA (1)...(19): siRNA sense strand
ucacgcuggccaagaacua

SEQ ID NO: 1534537 - RNA, 19 nt, Homo sapiens
  misc_RNA (1)...(19): siRNA sense strand
gcagugauucuacaucuuu

SEQ ID NO: 1534538 - RNA, 19 nt, Homo sapiens
  misc_RNA (1)...(19): siRNA sense strand
ggcagugacucauucauug

SEQ ID NO: 1534539 - RNA, 19 nt, Homo sapiens
  misc_RNA (1)...(19): siRNA sense strand
aaaccuuucuugcuaauuc

SEQ ID NO: 1534540 - RNA, 19 nt, Homo sapiens
  misc_RNA (1)...(19): siRNA sense strand
cuacaucuuucccaucuuc

SEQ ID NO: 1534541 - RNA, 19 nt, Homo sapiens
  misc_RNA (1)...(19): siRNA sense strand
agacuucccuucucuagca

SEQ ID NO: 1534542 - RNA, 19 nt, Homo sapiens
  misc_RNA (1)...(19): siRNA sense strand
gcauggccauuauccuuuc

SEQ ID NO: 1534543 - RNA, 19 nt, Homo sapiens
  misc_RNA (1)...(19): siRNA sense strand
cauacugcauggccauuau

SEQ ID NO: 1534544 - RNA, 19 nt, Homo sapiens
  misc_RNA (1)...(19): siRNA sense strand
gcaguggcagugacucauu

SEQ ID NO: 1534545 - RNA, 19 nt, Homo sapiens
  misc_RNA (1)...(19): siRNA sense strand
gcagugacucauucauugu

SEQ ID NO: 1534546 - RNA, 19 nt, Homo sapiens
  misc_RNA (1)...(19): siRNA sense strand
gcauagucuuguuuucuuu

SEQ ID NO: 1534547 - RNA, 19 nt, Homo sapiens
  misc_RNA (1)...(19): siRNA sense strand
cauuauccuuucugcauca

SEQ ID NO: 1534548 - RNA, 19 nt, Homo sapiens
  misc_RNA (1)...(19): siRNA sense strand
cuaauucccaugucuaaca

SEQ ID NO: 1534549 - RNA, 19 nt, Homo sapiens
  misc_RNA (1)...(19): siRNA sense strand
cauccauccuuucagacuu

SEQ ID NO: 1534550 - RNA, 19 nt, Homo sapiens
  misc_RNA (1)...(19): siRNA sense strand
gccauuauccuuucugcau

SEQ ID NO: 1534551 - RNA, 19 nt, Homo sapiens
  misc_RNA (1)...(19): siRNA sense strand
cuccauccauccuuucaga

SEQ ID NO: 1534552 - RNA, 19 nt, Homo sapiens
  misc_RNA (1)...(19): siRNA sense strand
uggcagugacucauucauu

SEQ ID NO: 1534553 - RNA, 19 nt, Homo sapiens
  misc_RNA (1)...(19): siRNA sense strand
ucccaugucuaacacaaca

SEQ ID NO: 1534554 - RNA, 19 nt, Homo sapiens
  misc_RNA (1)...(19): siRNA sense strand
caguggcagugacucauuc

SEQ ID NO: 1534555 - RNA, 19 nt, Homo sapiens
  misc_RNA (1)...(19): siRNA sense strand
acacaacacuuccccauac

SEQ ID NO: 1534556 - RNA, 19 nt, Homo sapiens
  misc_RNA (1)...(19): siRNA sense strand
uuucagacuucccuucucu

SEQ ID NO: 1534557 - RNA, 19 nt, Homo sapiens
  misc_RNA (1)...(19): siRNA sense strand
ucaagaagcugaugaagca

SEQ ID NO: 1534558 - RNA, 19 nt, Homo sapiens
  misc_RNA (1)...(19): siRNA sense strand
gucaagaucugguuccaaa

SEQ ID NO: 1534559 - RNA, 19 nt, Homo sapiens
  misc_RNA (1)...(19): siRNA sense strand
gggaagggcucaggaggaa

SEQ ID NO: 1534560 - RNA, 19 nt, Homo sapiens
  misc_RNA (1)...(19): siRNA sense strand
ccaagaagcuaugcagcaa

SEQ ID NO: 1534561 - RNA, 19 nt, Homo sapiens
  misc_RNA (1)...(19): siRNA sense strand
ucaguucggugcaguccua

SEQ ID NO: 1534562 - RNA, 19 nt, Homo sapiens
  misc_RNA (1)...(19): siRNA sense strand
ccagcaaacucaguaccua

SEQ ID NO: 1534563 - RNA, 19 nt, Homo sapiens
  misc_RNA (1)...(19): siRNA sense strand
gacgauuuauugcaguuug

SEQ ID NO: 1534564 - RNA, 19 nt, Homo sapiens
  misc_RNA (1)...(19): siRNA sense strand
gauccaaguucaagaagcu

SEQ ID NO: 1534565 - RNA, 19 nt, Homo sapiens
  misc_RNA (1)...(19): siRNA sense strand
gaagagcacggugguggaa

SEQ ID NO: 1534566 - RNA, 19 nt, Homo sapiens
  misc_RNA (1)...(19): siRNA sense strand
gcuggaacccuaacucuuc

SEQ ID NO: 1534567 - RNA, 19 nt, Homo sapiens
  misc_RNA (1)...(19): siRNA sense strand
cagcaaaugucuccuucuc

SEQ ID NO: 1534568 - RNA, 19 nt, Homo sapiens
  misc_RNA (1)...(19): siRNA sense strand
cguaaacccaggacgauuu

SEQ ID NO: 1534569 - RNA, 19 nt, Homo sapiens
  misc_RNA (1)...(19): siRNA sense strand
agacucaggucaagaucug

SEQ ID NO: 1534570 - RNA, 19 nt, Homo sapiens
  misc_RNA (1)...(19): siRNA sense strand
gguggaaggcggugaagug

SEQ ID NO: 1534571 - RNA, 19 nt, Homo sapiens
  misc_RNA (1)...(19): siRNA sense strand
aacaagcgauccaaguuca

SEQ ID NO: 1534572 - RNA, 19 nt, Homo sapiens
  misc_RNA (1)...(19): siRNA sense strand
ucacacagacucaggucaa

SEQ ID NO: 1534573 - RNA, 19 nt, Homo sapiens
  misc_RNA (1)...(19): siRNA sense strand
aaacaagcgauccaaguuc

SEQ ID NO: 1534574 - RNA, 19 nt, Homo sapiens
  misc_RNA (1)...(19): siRNA sense strand
aaacccaggacgauuuauu

SEQ ID NO: 1534575 - RNA, 19 nt, Homo sapiens
  misc_RNA (1)...(19): siRNA sense strand
gcacuacuccaugcacugu

SEQ ID NO: 1534576 - RNA, 19 nt, Homo sapiens
  misc_RNA (1)...(19): siRNA sense strand
acuacuccaugcacuguuu

SEQ ID NO: 1534577 - RNA, 19 nt, Homo sapiens
  misc_RNA (1)...(19): siRNA sense strand
gaagggcucaggaggaaac

SEQ ID NO: 1534578 - RNA, 19 nt, Homo sapiens
  misc_RNA (1)...(19): siRNA sense strand
ggagguuccagcaaacuca

SEQ ID NO: 1534579 - RNA, 19 nt, Homo sapiens
  misc_RNA (1)...(19): siRNA sense strand
ggacgauuuauugcaguuu

SEQ ID NO: 1534580 - RNA, 19 nt, Homo sapiens
  misc_RNA (1)...(19): siRNA sense strand
ccagcuacacaucguggua

SEQ ID NO: 1534581 - RNA, 19 nt, Homo sapiens
  misc_RNA (1)...(19): siRNA sense strand
gcuccuauauccccagcua

SEQ ID NO: 1534582 - RNA, 19 nt, Homo sapiens
  misc_RNA (1)...(19): siRNA sense strand
gcagcaaccccaacuuaug

SEQ ID NO: 1534583 - RNA, 19 nt, Homo sapiens
  misc_RNA (1)...(19): siRNA sense strand
cuggaacccuaacucuuca

SEQ ID NO: 1534584 - RNA, 19 nt, Homo sapiens
  misc_RNA (1)...(19): siRNA sense strand
guaaugagcccacaucuga

SEQ ID NO: 1534585 - RNA, 19 nt, Homo sapiens
  misc_RNA (1)...(19): siRNA sense strand
ggaaaugcggacuauauua

SEQ ID NO: 1534586 - RNA, 19 nt, Homo sapiens
  misc_RNA (1)...(19): siRNA sense strand
gagauggucuucugugaca

SEQ ID NO: 1534587 - RNA, 19 nt, Homo sapiens
  misc_RNA (1)...(19): siRNA sense strand
ucaccaagaucucgcauau

SEQ ID NO: 1534588 - RNA, 19 nt, Homo sapiens
  misc_RNA (1)...(19): siRNA sense strand
gcaacgagauggucuucug

SEQ ID NO: 1534589 - RNA, 19 nt, Homo sapiens
  misc_RNA (1)...(19): siRNA sense strand
gaaaugcggacuauauuag

SEQ ID NO: 1534590 - RNA, 19 nt, Homo sapiens
  misc_RNA (1)...(19): siRNA sense strand
gaaacacgccaucugcaaa

SEQ ID NO: 1534591 - RNA, 19 nt, Homo sapiens
  misc_RNA (1)...(19): siRNA sense strand
ugacucagauguccaagug

SEQ ID NO: 1534592 - RNA, 19 nt, Homo sapiens
  misc_RNA (1)...(19): siRNA sense strand
gauggcaccuucuucaaca

SEQ ID NO: 1534593 - RNA, 19 nt, Homo sapiens
  misc_RNA (1)...(19): siRNA sense strand
gcaccugcauccaguguuc

SEQ ID NO: 1534594 - RNA, 19 nt, Homo sapiens
  misc_RNA (1)...(19): siRNA sense strand
gaacgaaacacgccaucug

SEQ ID NO: 1534595 - RNA, 19 nt, Homo sapiens
  misc_RNA (1)...(19): siRNA sense strand
gcagaugaaacuuauugaa

SEQ ID NO: 1534596 - RNA, 19 nt, Homo sapiens
  misc_RNA (1)...(19): siRNA sense strand
uggacgagcugacauuaga

SEQ ID NO: 1534597 - RNA, 19 nt, Homo sapiens
  misc_RNA (1)...(19): siRNA sense strand
gaagaucccggacucauac

SEQ ID NO: 1534598 - RNA, 19 nt, Homo sapiens
  misc_RNA (1)...(19): siRNA sense strand
cagcaagcccuaagccuuu

SEQ ID NO: 1534599 - RNA, 19 nt, Homo sapiens
  misc_RNA (1)...(19): siRNA sense strand
ucggacaucuucucacuug

SEQ ID NO: 1534600 - RNA, 19 nt, Homo sapiens
  misc_RNA (1)...(19): siRNA sense strand
acuggaagcugaagaggaa

SEQ ID NO: 1534601 - RNA, 19 nt, Homo sapiens
  misc_RNA (1)...(19): siRNA sense strand
caagguaacccggagauug

SEQ ID NO: 1534602 - RNA, 19 nt, Homo sapiens
  misc_RNA (1)...(19): siRNA sense strand
gaaacuuauugaacaggau

SEQ ID NO: 1534603 - RNA, 19 nt, Homo sapiens
  misc_RNA (1)...(19): siRNA sense strand
gaucacagcagagaacaug

SEQ ID NO: 1534604 - RNA, 19 nt, Homo sapiens
  misc_RNA (1)...(19): siRNA sense strand
ugaagaucccggacucaua

SEQ ID NO: 1534605 - RNA, 19 nt, Homo sapiens
  misc_RNA (1)...(19): siRNA sense strand
acucggagcuuaaggagau

SEQ ID NO: 1534606 - RNA, 19 nt, Homo sapiens
  misc_RNA (1)...(19): siRNA sense strand
gcuaugacuuggacgagau

SEQ ID NO: 1534607 - RNA, 19 nt, Homo sapiens
  misc_RNA (1)...(19): siRNA sense strand
gaugaaacuuauugaacag

SEQ ID NO: 1534608 - RNA, 19 nt, Homo sapiens
  misc_RNA (1)...(19): siRNA sense strand
uuagaaaucugugcuacau

SEQ ID NO: 1534609 - RNA, 19 nt, Homo sapiens
  misc_RNA (1)...(19): siRNA sense strand
caucagcagugacaacucu

SEQ ID NO: 1534610 - RNA, 19 nt, Homo sapiens
  misc_RNA (1)...(19): siRNA sense strand
gauggcuacuucucugaug

SEQ ID NO: 1534611 - RNA, 19 nt, Homo sapiens
  misc_RNA (1)...(19): siRNA sense strand
gggcagccgcuaugacuug

SEQ ID NO: 1534612 - RNA, 19 nt, Homo sapiens
  misc_RNA (1)...(19): siRNA sense strand
acgaugaggucaaguucaa

SEQ ID NO: 1534613 - RNA, 19 nt, Homo sapiens
  misc_RNA (1)...(19): siRNA sense strand
uauauuagcagacaacgau

SEQ ID NO: 1534614 - RNA, 19 nt, Homo sapiens
  misc_RNA (1)...(19): siRNA sense strand
ggacuauauuagcagacaa

SEQ ID NO: 1534615 - RNA, 19 nt, Homo sapiens
  misc_RNA (1)...(19): siRNA sense strand
cuagagaggguuagaaauc

SEQ ID NO: 1534616 - RNA, 19 nt, Homo sapiens
  misc_RNA (1)...(19): siRNA sense strand
caugucagcugugcccuau

SEQ ID NO: 1534617 - RNA, 19 nt, Homo sapiens
  misc_RNA (1)...(19): siRNA sense strand
cgacaggaaugggagaaag

SEQ ID NO: 1534618 - RNA, 19 nt, Homo sapiens
  misc_RNA (1)...(19): siRNA sense strand
cuccagggcugcugucaga

SEQ ID NO: 1534619 - RNA, 19 nt, Homo sapiens
  misc_RNA (1)...(19): siRNA sense strand
gcuacgggauccucaaggu

SEQ ID NO: 1534620 - RNA, 19 nt, Homo sapiens
  misc_RNA (1)...(19): siRNA sense strand
ugagacugauggcuacuuc

SEQ ID NO: 1534621 - RNA, 19 nt, Homo sapiens
  misc_RNA (1)...(19): siRNA sense strand
cgaaacacgccaucugcaa

SEQ ID NO: 1534622 - RNA, 19 nt, Homo sapiens
  misc_RNA (1)...(19): siRNA sense strand
agacaacgaugaggucaag

SEQ ID NO: 1534623 - RNA, 19 nt, Homo sapiens
  misc_RNA (1)...(19): siRNA sense strand
gaagagaagaggcgaaaau

SEQ ID NO: 1534624 - RNA, 19 nt, Homo sapiens
  misc_RNA (1)...(19): siRNA sense strand
ggcuggagcucaucaacuc

SEQ ID NO: 1534625 - RNA, 19 nt, Homo sapiens
  misc_RNA (1)...(19): siRNA sense strand
caccugcagaugaaacuua

SEQ ID NO: 1534626 - RNA, 19 nt, Homo sapiens
  misc_RNA (1)...(19): siRNA sense strand
ggaccaagugggugcaugu

SEQ ID NO: 1534627 - RNA, 19 nt, Homo sapiens
  misc_RNA (1)...(19): siRNA sense strand
gcuggacgagcugacauua

SEQ ID NO: 1534628 - RNA, 19 nt, Homo sapiens
  misc_RNA (1)...(19): siRNA sense strand
gcagaucacagcagagaac

SEQ ID NO: 1534629 - RNA, 19 nt, Homo sapiens
  misc_RNA (1)...(19): siRNA sense strand
uagagaggguuagaaaucu

SEQ ID NO: 1534630 - RNA, 19 nt, Homo sapiens
  misc_RNA (1)...(19): siRNA sense strand
caacgaugaggucaaguuc

SEQ ID NO: 1534631 - RNA, 19 nt, Homo sapiens
  misc_RNA (1)...(19): siRNA sense strand
ggaaagccaaugccaacca

SEQ ID NO: 1534632 - RNA, 19 nt, Homo sapiens
  misc_RNA (1)...(19): siRNA sense strand
cucaucaacucggagcuua

SEQ ID NO: 1534633 - RNA, 19 nt, Homo sapiens
  misc_RNA (1)...(19): siRNA sense strand
gaggucaaguucaagucau

SEQ ID NO: 1534634 - RNA, 19 nt, Homo sapiens
  misc_RNA (1)...(19): siRNA sense strand
cagcugugcccuauggauu

SEQ ID NO: 1534635 - RNA, 19 nt, Homo sapiens
  misc_RNA (1)...(19): siRNA sense strand
uggaaaugcggacuauauu

SEQ ID NO: 1534636 - RNA, 19 nt, Homo sapiens
  misc_RNA (1)...(19): siRNA sense strand
gagcgacucagauguagag

SEQ ID NO: 1534637 - RNA, 19 nt, Homo sapiens
  misc_RNA (1)...(19): siRNA sense strand
acgagauggucuucuguga

SEQ ID NO: 1534638 - RNA, 19 nt, Homo sapiens
  misc_RNA (1)...(19): siRNA sense strand
ggacgacuccagacaaagc

SEQ ID NO: 1534639 - RNA, 19 nt, Homo sapiens
  misc_RNA (1)...(19): siRNA sense strand
acggacgacuccagacaaa

SEQ ID NO: 1534640 - RNA, 19 nt, Homo sapiens
  misc_RNA (1)...(19): siRNA sense strand
gcacuggucgacuucaucu

SEQ ID NO: 1534641 - RNA, 19 nt, Homo sapiens
  misc_RNA (1)...(19): siRNA sense strand
cuggaaaugcggacuauau

SEQ ID NO: 1534642 - RNA, 19 nt, Homo sapiens
  misc_RNA (1)...(19): siRNA sense strand
ugucagcugugcccuaugg

SEQ ID NO: 1534643 - RNA, 19 nt, Homo sapiens
  misc_RNA (1)...(19): siRNA sense strand
gauccucccaccacuggaa

SEQ ID NO: 1534644 - RNA, 19 nt, Homo sapiens
  misc_RNA (1)...(19): siRNA sense strand
gcaagguaacccggagauu

SEQ ID NO: 1534645 - RNA, 19 nt, Homo sapiens
  misc_RNA (1)...(19): siRNA sense strand
cagaugaaacuuauugaac

SEQ ID NO: 1534646 - RNA, 19 nt, Homo sapiens
  misc_RNA (1)...(19): siRNA sense strand
gauauuccaccugcagaug

SEQ ID NO: 1534647 - RNA, 19 nt, Homo sapiens
  misc_RNA (1)...(19): siRNA sense strand
gaugaggucaaguucaagu

SEQ ID NO: 1534648 - RNA, 19 nt, Homo sapiens
  misc_RNA (1)...(19): siRNA sense strand
ccaaggucagccugcauuu

SEQ ID NO: 1534649 - RNA, 19 nt, Homo sapiens
  misc_RNA (1)...(19): siRNA sense strand
ggucaagggccaccuacca

SEQ ID NO: 1534650 - RNA, 19 nt, Homo sapiens
  misc_RNA (1)...(19): siRNA sense strand
gugcagaucacagcagaga

SEQ ID NO: 1534651 - RNA, 19 nt, Homo sapiens
  misc_RNA (1)...(19): siRNA sense strand
ugacaaggcgcgagagaac

SEQ ID NO: 1534652 - RNA, 19 nt, Homo sapiens
  misc_RNA (1)...(19): siRNA sense strand
gcucagcccggaugacuac

SEQ ID NO: 1534653 - RNA, 19 nt, Homo sapiens
  misc_RNA (1)...(19): siRNA sense strand
gggcguacuggccuccuaa

SEQ ID NO: 1534654 - RNA, 19 nt, Homo sapiens
  misc_RNA (1)...(19): siRNA sense strand
cgucggacaucuucucacu

SEQ ID NO: 1534655 - RNA, 19 nt, Homo sapiens
  misc_RNA (1)...(19): siRNA sense strand
aggagacacugcucagcuu

SEQ ID NO: 1534656 - RNA, 19 nt, Homo sapiens
  misc_RNA (1)...(19): siRNA sense strand
cugcagaugaaacuuauug

SEQ ID NO: 1534657 - RNA, 19 nt, Homo sapiens
  misc_RNA (1)...(19): siRNA sense strand
ggaccuagagaggguuaga

SEQ ID NO: 1534658 - RNA, 19 nt, Homo sapiens
  misc_RNA (1)...(19): siRNA sense strand
guacgacgaggauguuguc

SEQ ID NO: 1534659 - RNA, 19 nt, Homo sapiens
  misc_RNA (1)...(19): siRNA sense strand
uauuccaccugcagaugaa

SEQ ID NO: 1534660 - RNA, 19 nt, Homo sapiens
  misc_RNA (1)...(19): siRNA sense strand
cugaggcacuggucgacuu

SEQ ID NO: 1534661 - RNA, 19 nt, Homo sapiens
  misc_RNA (1)...(19): siRNA sense strand
gcagcuagaggaggacuuc

SEQ ID NO: 1534662 - RNA, 19 nt, Homo sapiens
  misc_RNA (1)...(19): siRNA sense strand
accaagaucucgcauaucc

SEQ ID NO: 1534663 - RNA, 19 nt, Homo sapiens
  misc_RNA (1)...(19): siRNA sense strand
gcgaggaggagccuugaag

SEQ ID NO: 1534664 - RNA, 19 nt, Homo sapiens
  misc_RNA (1)...(19): siRNA sense strand
ugacaagugcaacgucugu

SEQ ID NO: 1534665 - RNA, 19 nt, Homo sapiens
  misc_RNA (1)...(19): siRNA sense strand
caacgagauggucuucugu

SEQ ID NO: 1534666 - RNA, 19 nt, Homo sapiens
  misc_RNA (1)...(19): siRNA sense strand
acaacgaugaggucaaguu

SEQ ID NO: 1534667 - RNA, 19 nt, Homo sapiens
  misc_RNA (1)...(19): siRNA sense strand
gagaggguuagaaaucugu

SEQ ID NO: 1534668 - RNA, 19 nt, Homo sapiens
  misc_RNA (1)...(19): siRNA sense strand
caacgucugugugcaucag

SEQ ID NO: 1534669 - RNA, 19 nt, Homo sapiens
  misc_RNA (1)...(19): siRNA sense strand
ucgacuucaucuaccagua

SEQ ID NO: 1534670 - RNA, 19 nt, Homo sapiens
  misc_RNA (1)...(19): siRNA sense strand
gagaagaggcgaaaauacu

SEQ ID NO: 1534671 - RNA, 19 nt, Homo sapiens
  misc_RNA (1)...(19): siRNA sense strand
agagaggguuagaaaucug

SEQ ID NO: 1534672 - RNA, 19 nt, Homo sapiens
  misc_RNA (1)...(19): siRNA sense strand
ucaacucggagcuuaagga

SEQ ID NO: 1534673 - RNA, 19 nt, Homo sapiens
  misc_RNA (1)...(19): siRNA sense strand
gagacacugcucagcuuca

SEQ ID NO: 1534674 - RNA, 19 nt, Homo sapiens
  misc_RNA (1)...(19): siRNA sense strand
gccuggaaaugcggacuau

SEQ ID NO: 1534675 - RNA, 19 nt, Homo sapiens
  misc_RNA (1)...(19): siRNA sense strand
cgaguacgacgaggauguu

SEQ ID NO: 1534676 - RNA, 19 nt, Homo sapiens
  misc_RNA (1)...(19): siRNA sense strand
gcaggccuguccaccucau

SEQ ID NO: 1534677 - RNA, 19 nt, Homo sapiens
  misc_RNA (1)...(19): siRNA sense strand
aauacuccaucagcaguga

SEQ ID NO: 1534678 - RNA, 19 nt, Homo sapiens
  misc_RNA (1)...(19): siRNA sense strand
gacuugaucacagccauga

SEQ ID NO: 1534679 - RNA, 19 nt, Homo sapiens
  misc_RNA (1)...(19): siRNA sense strand
gccuugaagcccacuagaa

SEQ ID NO: 1534680 - RNA, 19 nt, Homo sapiens
  misc_RNA (1)...(19): siRNA sense strand
gcgaggauggcaacgagau

SEQ ID NO: 1534681 - RNA, 19 nt, Homo sapiens
  misc_RNA (1)...(19): siRNA sense strand
gaacuugggacucuccuuu

SEQ ID NO: 1534682 - RNA, 19 nt, Homo sapiens
  misc_RNA (1)...(19): siRNA sense strand
ggacuggacuuugcaucuu

SEQ ID NO: 1534683 - RNA, 19 nt, Homo sapiens
  misc_RNA (1)...(19): siRNA sense strand
ggacucuccuuucccaaga

SEQ ID NO: 1534684 - RNA, 19 nt, Homo sapiens
  misc_RNA (1)...(19): siRNA sense strand
gcguggagccucaguguga

SEQ ID NO: 1534685 - RNA, 19 nt, Homo sapiens
  misc_RNA (1)...(19): siRNA sense strand
gagaggcccuagccaaugc

SEQ ID NO: 1534686 - RNA, 19 nt, Homo sapiens
  misc_RNA (1)...(19): siRNA sense strand
cccaagacuuccaucacua

SEQ ID NO: 1534687 - RNA, 19 nt, Homo sapiens
  misc_RNA (1)...(19): siRNA sense strand
gacuggacuuugcaucuuc

SEQ ID NO: 1534688 - RNA, 19 nt, Homo sapiens
  misc_RNA (1)...(19): siRNA sense strand
ccacugagguuggggauga

SEQ ID NO: 1534689 - RNA, 19 nt, Homo sapiens
  misc_RNA (1)...(19): siRNA sense strand
gaccacaucagaagaagag

SEQ ID NO: 1534690 - RNA, 19 nt, Homo sapiens
  misc_RNA (1)...(19): siRNA sense strand
agugcugccuggaagauuu

SEQ ID NO: 1534691 - RNA, 19 nt, Homo sapiens
  misc_RNA (1)...(19): siRNA sense strand
gugagaggcccuagccaau

SEQ ID NO: 1534692 - RNA, 19 nt, Homo sapiens
  misc_RNA (1)...(19): siRNA sense strand
gcaccugagccaccuccuu

SEQ ID NO: 1534693 - RNA, 19 nt, Homo sapiens
  misc_RNA (1)...(19): siRNA sense strand
ccaagacuuccaucacuag

SEQ ID NO: 1534694 - RNA, 19 nt, Homo sapiens
  misc_RNA (1)...(19): siRNA sense strand
ggaccacaucagaagaaga

SEQ ID NO: 1534695 - RNA, 19 nt, Homo sapiens
  misc_RNA (1)...(19): siRNA sense strand
ucccaagacuuccaucacu

SEQ ID NO: 1534696 - RNA, 19 nt, Homo sapiens
  misc_RNA (1)...(19): siRNA sense strand
ugagaggcccuagccaaug

SEQ ID NO: 1534697 - RNA, 19 nt, Homo sapiens
  misc_RNA (1)...(19): siRNA sense strand
gaaaggaacuugcauguuu

SEQ ID NO: 1534698 - RNA, 19 nt, Homo sapiens
  misc_RNA (1)...(19): siRNA sense strand
uaugaaagcucucaaguuu

SEQ ID NO: 1534699 - RNA, 19 nt, Homo sapiens
  misc_RNA (1)...(19): siRNA sense strand
gcaccaaacuauuacaaug

SEQ ID NO: 1534700 - RNA, 19 nt, Homo sapiens
  misc_RNA (1)...(19): siRNA sense strand
gugaagcagucgccaaaua

SEQ ID NO: 1534701 - RNA, 19 nt, Homo sapiens
  misc_RNA (1)...(19): siRNA sense strand
ggaccuggguucuacaaug

SEQ ID NO: 1534702 - RNA, 19 nt, Homo sapiens
  misc_RNA (1)...(19): siRNA sense strand
caagagagacuuuaguaau

SEQ ID NO: 1534703 - RNA, 19 nt, Homo sapiens
  misc_RNA (1)...(19): siRNA sense strand
gcaagcauuucaucucuag

SEQ ID NO: 1534704 - RNA, 19 nt, Homo sapiens
  misc_RNA (1)...(19): siRNA sense strand
ccagugaaguacagaaaga

SEQ ID NO: 1534705 - RNA, 19 nt, Homo sapiens
  misc_RNA (1)...(19): siRNA sense strand
gagccggguuuaugucaaa

SEQ ID NO: 1534706 - RNA, 19 nt, Homo sapiens
  misc_RNA (1)...(19): siRNA sense strand
gaaagcaguccuuccucua

SEQ ID NO: 1534707 - RNA, 19 nt, Homo sapiens
  misc_RNA (1)...(19): siRNA sense strand
caacgaaucccuugugaag

SEQ ID NO: 1534708 - RNA, 19 nt, Homo sapiens
  misc_RNA (1)...(19): siRNA sense strand
gaccuggguucuacaaugu

SEQ ID NO: 1534709 - RNA, 19 nt, Homo sapiens
  misc_RNA (1)...(19): siRNA sense strand
gcagucgccaaauacauua

SEQ ID NO: 1534710 - RNA, 19 nt, Homo sapiens
  misc_RNA (1)...(19): siRNA sense strand
aguaugagaucguggacua

SEQ ID NO: 1534711 - RNA, 19 nt, Homo sapiens
  misc_RNA (1)...(19): siRNA sense strand
gcauuaugauaucaacgaa

SEQ ID NO: 1534712 - RNA, 19 nt, Homo sapiens
  misc_RNA (1)...(19): siRNA sense strand
ugagaucguggacuacuua

SEQ ID NO: 1534713 - RNA, 19 nt, Homo sapiens
  misc_RNA (1)...(19): siRNA sense strand
ccaagagagacuuuaguaa

SEQ ID NO: 1534714 - RNA, 19 nt, Homo sapiens
  misc_RNA (1)...(19): siRNA sense strand
guccaacagugucucauug

SEQ ID NO: 1534715 - RNA, 19 nt, Homo sapiens
  misc_RNA (1)...(19): siRNA sense strand
ccuggguucuacaauguua

SEQ ID NO: 1534716 - RNA, 19 nt, Homo sapiens
  misc_RNA (1)...(19): siRNA sense strand
ugaaguacagaaagaauga

SEQ ID NO: 1534717 - RNA, 19 nt, Homo sapiens
  misc_RNA (1)...(19): siRNA sense strand
cuacaacgaggacaagaaa

SEQ ID NO: 1534718 - RNA, 19 nt, Homo sapiens
  misc_RNA (1)...(19): siRNA sense strand
agagagacuuuaguaauuc

SEQ ID NO: 1534719 - RNA, 19 nt, Homo sapiens
  misc_RNA (1)...(19): siRNA sense strand
aaaggaacuugcauguuuc

SEQ ID NO: 1534720 - RNA, 19 nt, Homo sapiens
  misc_RNA (1)...(19): siRNA sense strand
guacagaaagaaugauauc

SEQ ID NO: 1534721 - RNA, 19 nt, Homo sapiens
  misc_RNA (1)...(19): siRNA sense strand
uggacaccaucauuucuaa

SEQ ID NO: 1534722 - RNA, 19 nt, Homo sapiens
  misc_RNA (1)...(19): siRNA sense strand
caucauucguguccaauac

SEQ ID NO: 1534723 - RNA, 19 nt, Homo sapiens
  misc_RNA (1)...(19): siRNA sense strand
cgauuggacaccaucauuu

SEQ ID NO: 1534724 - RNA, 19 nt, Homo sapiens
  misc_RNA (1)...(19): siRNA sense strand
ggacaccaucauuucuaaa

SEQ ID NO: 1534725 - RNA, 19 nt, Homo sapiens
  misc_RNA (1)...(19): siRNA sense strand
gauuggacaccaucauuuc

SEQ ID NO: 1534726 - RNA, 19 nt, Homo sapiens
  misc_RNA (1)...(19): siRNA sense strand
gaagcagucgccaaauaca

SEQ ID NO: 1534727 - RNA, 19 nt, Homo sapiens
  misc_RNA (1)...(19): siRNA sense strand
acgaaucccuugugaagca

SEQ ID NO: 1534728 - RNA, 19 nt, Homo sapiens
  misc_RNA (1)...(19): siRNA sense strand
gugcaucauucguguccaa

SEQ ID NO: 1534729 - RNA, 19 nt, Homo sapiens
  misc_RNA (1)...(19): siRNA sense strand
gcaucauucguguccaaua

SEQ ID NO: 1534730 - RNA, 19 nt, Homo sapiens
  misc_RNA (1)...(19): siRNA sense strand
uccaagagagacuuuagua

SEQ ID NO: 1534731 - RNA, 19 nt, Homo sapiens
  misc_RNA (1)...(19): siRNA sense strand
uuucaucucuagugcauca

SEQ ID NO: 1534732 - RNA, 19 nt, Homo sapiens
  misc_RNA (1)...(19): siRNA sense strand
ccgcaagcauuucaucucu

SEQ ID NO: 1534733 - RNA, 19 nt, Homo sapiens
  misc_RNA (1)...(19): siRNA sense strand
gaacgcacuggcaaacauc

SEQ ID NO: 1534734 - RNA, 19 nt, Homo sapiens
  misc_RNA (1)...(19): siRNA sense strand
acaacgaggacaagaaaug

SEQ ID NO: 1534735 - RNA, 19 nt, Homo sapiens
  misc_RNA (1)...(19): siRNA sense strand
aaaccaaccguggauuaaa

SEQ ID NO: 1534736 - RNA, 19 nt, Homo sapiens
  misc_RNA (1)...(19): siRNA sense strand
ccaacagugucucauuguc

SEQ ID NO: 1534737 - RNA, 19 nt, Homo sapiens
  misc_RNA (1)...(19): siRNA sense strand
cuccugcaccaaacuauua

SEQ ID NO: 1534738 - RNA, 19 nt, Homo sapiens
  misc_RNA (1)...(19): siRNA sense strand
guuccagcauguuccaguu

SEQ ID NO: 1534739 - RNA, 19 nt, Homo sapiens
  misc_RNA (1)...(19): siRNA sense strand
gauuaaaacugacgucaac

SEQ ID NO: 1534740 - RNA, 19 nt, Homo sapiens
  misc_RNA (1)...(19): siRNA sense strand
caauguuauucaccaguca

SEQ ID NO: 1534741 - RNA, 19 nt, Homo sapiens
  misc_RNA (1)...(19): siRNA sense strand
gagagacuuuaguaauucg

SEQ ID NO: 1534742 - RNA, 19 nt, Homo sapiens
  misc_RNA (1)...(19): siRNA sense strand
cagacgugccagugaagua

SEQ ID NO: 1534743 - RNA, 19 nt, Homo sapiens
  misc_RNA (1)...(19): siRNA sense strand
ugaaacuccugcaccaaac

SEQ ID NO: 1534744 - RNA, 19 nt, Homo sapiens
  misc_RNA (1)...(19): siRNA sense strand
cauuucaucucuagugcau

SEQ ID NO: 1534745 - RNA, 19 nt, Homo sapiens
  misc_RNA (1)...(19): siRNA sense strand
gugaaguacagaaagaaug

SEQ ID NO: 1534746 - RNA, 19 nt, Homo sapiens
  misc_RNA (1)...(19): siRNA sense strand
caacgaggacaagaaaugg

SEQ ID NO: 1534747 - RNA, 19 nt, Homo sapiens
  misc_RNA (1)...(19): siRNA sense strand
caucucuagugcaucauuc

SEQ ID NO: 1534748 - RNA, 19 nt, Homo sapiens
  misc_RNA (1)...(19): siRNA sense strand
cgcaagcauuucaucucua

SEQ ID NO: 1534749 - RNA, 19 nt, Homo sapiens
  misc_RNA (1)...(19): siRNA sense strand
gagaaacaacgucuguacu

SEQ ID NO: 1534750 - RNA, 19 nt, Homo sapiens
  misc_RNA (1)...(19): siRNA sense strand
ucccagacgugccagugaa

SEQ ID NO: 1534751 - RNA, 19 nt, Homo sapiens
  misc_RNA (1)...(19): siRNA sense strand
gcauguuucccucaaugug

SEQ ID NO: 1534752 - RNA, 19 nt, Homo sapiens
  misc_RNA (1)...(19): siRNA sense strand
ugaagcagucgccaaauac

SEQ ID NO: 1534753 - RNA, 19 nt, Homo sapiens
  misc_RNA (1)...(19): siRNA sense strand
gcaagcagagaaacaacgu

SEQ ID NO: 1534754 - RNA, 19 nt, Homo sapiens
  misc_RNA (1)...(19): siRNA sense strand
uuacaaugccucugucucu

SEQ ID NO: 1534755 - RNA, 19 nt, Homo sapiens
  misc_RNA (1)...(19): siRNA sense strand
uuaugaaagcucucaaguu

SEQ ID NO: 1534756 - RNA, 19 nt, Homo sapiens
  misc_RNA (1)...(19): siRNA sense strand
aaacuccugcaccaaacua

SEQ ID NO: 1534757 - RNA, 19 nt, Homo sapiens
  misc_RNA (1)...(19): siRNA sense strand
aagcaguccuuccucuaca

SEQ ID NO: 1534758 - RNA, 19 nt, Homo sapiens
  misc_RNA (1)...(19): siRNA sense strand
aagaaaggaacuugcaugu

SEQ ID NO: 1534759 - RNA, 19 nt, Homo sapiens
  misc_RNA (1)...(19): siRNA sense strand
ggcauuaugauaucaacga

SEQ ID NO: 1534760 - RNA, 19 nt, Homo sapiens
  misc_RNA (1)...(19): siRNA sense strand
uugaaacuccugcaccaaa

SEQ ID NO: 1534761 - RNA, 19 nt, Homo sapiens
  misc_RNA (1)...(19): siRNA sense strand
cccgggaccugguuauuac

SEQ ID NO: 1534762 - RNA, 19 nt, Homo sapiens
  misc_RNA (1)...(19): siRNA sense strand
uaucaacgaaucccuugug

SEQ ID NO: 1534763 - RNA, 19 nt, Homo sapiens
  misc_RNA (1)...(19): siRNA sense strand
agaaacaacgucuguacuc

SEQ ID NO: 1534764 - RNA, 19 nt, Homo sapiens
  misc_RNA (1)...(19): siRNA sense strand
ccgauuggacaccaucauu

SEQ ID NO: 1534765 - RNA, 19 nt, Homo sapiens
  misc_RNA (1)...(19): siRNA sense strand
uacaaugccucugucucuu

SEQ ID NO: 1534766 - RNA, 19 nt, Homo sapiens
  misc_RNA (1)...(19): siRNA sense strand
ccagggcauuaugauauca

SEQ ID NO: 1534767 - RNA, 19 nt, Homo sapiens
  misc_RNA (1)...(19): siRNA sense strand
agaaaggaacuugcauguu

SEQ ID NO: 1534768 - RNA, 19 nt, Homo sapiens
  misc_RNA (1)...(19): siRNA sense strand
acaaugccucugucucuug

SEQ ID NO: 1534769 - RNA, 19 nt, Homo sapiens
  misc_RNA (1)...(19): siRNA sense strand
uugcauguuucccucaaug

SEQ ID NO: 1534770 - RNA, 19 nt, Homo sapiens
  misc_RNA (1)...(19): siRNA sense strand
cgagccggguuuaugucaa

SEQ ID NO: 1534771 - RNA, 19 nt, Homo sapiens
  misc_RNA (1)...(19): siRNA sense strand
ccaguugccaagcuuuaug

SEQ ID NO: 1534772 - RNA, 19 nt, Homo sapiens
  misc_RNA (1)...(19): siRNA sense strand
gaaauggaucccgguucug

SEQ ID NO: 1534773 - RNA, 19 nt, Homo sapiens
  misc_RNA (1)...(19): siRNA sense strand
aaccaaccguggauuaaaa

SEQ ID NO: 1534774 - RNA, 19 nt, Homo sapiens
  misc_RNA (1)...(19): siRNA sense strand
caucggauuuuauuuccaa

SEQ ID NO: 1534775 - RNA, 19 nt, Homo sapiens
  misc_RNA (1)...(19): siRNA sense strand
cccagggcauuaugauauc

SEQ ID NO: 1534776 - RNA, 19 nt, Homo sapiens
  misc_RNA (1)...(19): siRNA sense strand
gaaacuccugcaccaaacu

SEQ ID NO: 1534777 - RNA, 19 nt, Homo sapiens
  misc_RNA (1)...(19): siRNA sense strand
guucuacaauguuauucac

SEQ ID NO: 1534778 - RNA, 19 nt, Homo sapiens
  misc_RNA (1)...(19): siRNA sense strand
gaacagaaccuuggagauu

SEQ ID NO: 1534779 - RNA, 19 nt, Homo sapiens
  misc_RNA (1)...(19): siRNA sense strand
caaaugcucugaagguaaa

SEQ ID NO: 1534780 - RNA, 19 nt, Homo sapiens
  misc_RNA (1)...(19): siRNA sense strand
gagcucauguucuccagua

SEQ ID NO: 1534781 - RNA, 19 nt, Homo sapiens
  misc_RNA (1)...(19): siRNA sense strand
ugaaagagcucauguucuc

SEQ ID NO: 1534782 - RNA, 19 nt, Homo sapiens
  misc_RNA (1)...(19): siRNA sense strand
gggaaggacugucgcauuc

SEQ ID NO: 1534783 - RNA, 19 nt, Homo sapiens
  misc_RNA (1)...(19): siRNA sense strand
gaacaggagucugaaagag

SEQ ID NO: 1534784 - RNA, 19 nt, Homo sapiens
  misc_RNA (1)...(19): siRNA sense strand
gcaaaugcucugaagguaa

SEQ ID NO: 1534785 - RNA, 19 nt, Homo sapiens
  misc_RNA (1)...(19): siRNA sense strand
gcagagcaauuccaucagu

SEQ ID NO: 1534786 - RNA, 19 nt, Homo sapiens
  misc_RNA (1)...(19): siRNA sense strand
ccaaagcccuggcaaaugc

SEQ ID NO: 1534787 - RNA, 19 nt, Homo sapiens
  misc_RNA (1)...(19): siRNA sense strand
gcacggacccaaagaagga

SEQ ID NO: 1534788 - RNA, 19 nt, Homo sapiens
  misc_RNA (1)...(19): siRNA sense strand
caagaagaaauacguguuu

SEQ ID NO: 1534789 - RNA, 19 nt, Homo sapiens
  misc_RNA (1)...(19): siRNA sense strand
ugaaagcccucauggaucu

SEQ ID NO: 1534790 - RNA, 19 nt, Homo sapiens
  misc_RNA (1)...(19): siRNA sense strand
ggcaaaugcucugaaggua

SEQ ID NO: 1534791 - RNA, 19 nt, Homo sapiens
  misc_RNA (1)...(19): siRNA sense strand
gcggagaaccagaucagua

SEQ ID NO: 1534792 - RNA, 19 nt, Homo sapiens
  misc_RNA (1)...(19): siRNA sense strand
cagaggccaucaagacaaa

SEQ ID NO: 1534793 - RNA, 19 nt, Homo sapiens
  misc_RNA (1)...(19): siRNA sense strand
gcaacaccguuagggauga

SEQ ID NO: 1534794 - RNA, 19 nt, Homo sapiens
  misc_RNA (1)...(19): siRNA sense strand
ggugaaagcccucauggau

SEQ ID NO: 1534795 - RNA, 19 nt, Homo sapiens
  misc_RNA (1)...(19): siRNA sense strand
gcagacgcuuugaagauca

SEQ ID NO: 1534796 - RNA, 19 nt, Homo sapiens
  misc_RNA (1)...(19): siRNA sense strand
ccagaucccucuuggucaa

SEQ ID NO: 1534797 - RNA, 19 nt, Homo sapiens
  misc_RNA (1)...(19): siRNA sense strand
gcaggacgccucuggacuu

SEQ ID NO: 1534798 - RNA, 19 nt, Homo sapiens
  misc_RNA (1)...(19): siRNA sense strand
gacaagcacuacagcucaa

SEQ ID NO: 1534799 - RNA, 19 nt, Homo sapiens
  misc_RNA (1)...(19): siRNA sense strand
gggccaggaugaucucaga

SEQ ID NO: 1534800 - RNA, 19 nt, Homo sapiens
  misc_RNA (1)...(19): siRNA sense strand
cagcaaugacucaaggaua

SEQ ID NO: 1534801 - RNA, 19 nt, Homo sapiens
  misc_RNA (1)...(19): siRNA sense strand
uccaugggcugcucaagaa

SEQ ID NO: 1534802 - RNA, 19 nt, Homo sapiens
  misc_RNA (1)...(19): siRNA sense strand
cacgugcacuguugaaaug

SEQ ID NO: 1534803 - RNA, 19 nt, Homo sapiens
  misc_RNA (1)...(19): siRNA sense strand
cucauguucuccaguaaua

SEQ ID NO: 1534804 - RNA, 19 nt, Homo sapiens
  misc_RNA (1)...(19): siRNA sense strand
cggagaaccagaucaguaa

SEQ ID NO: 1534805 - RNA, 19 nt, Homo sapiens
  misc_RNA (1)...(19): siRNA sense strand
gaaggacugucgcauucag

SEQ ID NO: 1534806 - RNA, 19 nt, Homo sapiens
  misc_RNA (1)...(19): siRNA sense strand
gaaccagaucaguaacaaa

SEQ ID NO: 1534807 - RNA, 19 nt, Homo sapiens
  misc_RNA (1)...(19): siRNA sense strand
caugaaggcguuuggugua

SEQ ID NO: 1534808 - RNA, 19 nt, Homo sapiens
  misc_RNA (1)...(19): siRNA sense strand
ccucaccagcuuagauuua

SEQ ID NO: 1534809 - RNA, 19 nt, Homo sapiens
  misc_RNA (1)...(19): siRNA sense strand
ggacgccucuggacuucuc

SEQ ID NO: 1534810 - RNA, 19 nt, Homo sapiens
  misc_RNA (1)...(19): siRNA sense strand
gcuuagauuuacaggagaa

SEQ ID NO: 1534811 - RNA, 19 nt, Homo sapiens
  misc_RNA (1)...(19): siRNA sense strand
gcucccacgugcacuguug

SEQ ID NO: 1534812 - RNA, 19 nt, Homo sapiens
  misc_RNA (1)...(19): siRNA sense strand
ugugcgagcucuacucaug

SEQ ID NO: 1534813 - RNA, 19 nt, Homo sapiens
  misc_RNA (1)...(19): siRNA sense strand
gcaguggcagugagagaaa

SEQ ID NO: 1534814 - RNA, 19 nt, Homo sapiens
  misc_RNA (1)...(19): siRNA sense strand
ggcagacgcuuugaagauc

SEQ ID NO: 1534815 - RNA, 19 nt, Homo sapiens
  misc_RNA (1)...(19): siRNA sense strand
gugcacuguugaaauguga

SEQ ID NO: 1534816 - RNA, 19 nt, Homo sapiens
  misc_RNA (1)...(19): siRNA sense strand
gcucuacucaugguacuuu

SEQ ID NO: 1534817 - RNA, 19 nt, Homo sapiens
  misc_RNA (1)...(19): siRNA sense strand
gccaacagcacccugaaga

SEQ ID NO: 1534818 - RNA, 19 nt, Homo sapiens
  misc_RNA (1)...(19): siRNA sense strand
cagaugccuugaagcagaa

SEQ ID NO: 1534819 - RNA, 19 nt, Homo sapiens
  misc_RNA (1)...(19): siRNA sense strand
caaccucuuuccggaaguu

SEQ ID NO: 1534820 - RNA, 19 nt, Homo sapiens
  misc_RNA (1)...(19): siRNA sense strand
agaaauacguguuuuacga

SEQ ID NO: 1534821 - RNA, 19 nt, Homo sapiens
  misc_RNA (1)...(19): siRNA sense strand
agaaccagaucaguaacaa

SEQ ID NO: 1534822 - RNA, 19 nt, Homo sapiens
  misc_RNA (1)...(19): siRNA sense strand
acaggagccucaccagcuu

SEQ ID NO: 1534823 - RNA, 19 nt, Homo sapiens
  misc_RNA (1)...(19): siRNA sense strand
ccacgugcacuguugaaau

SEQ ID NO: 1534824 - RNA, 19 nt, Homo sapiens
  misc_RNA (1)...(19): siRNA sense strand
aacagaaccuuggagauuc

SEQ ID NO: 1534825 - RNA, 19 nt, Homo sapiens
  misc_RNA (1)...(19): siRNA sense strand
gagggaacacgacuucaca

SEQ ID NO: 1534826 - RNA, 19 nt, Homo sapiens
  misc_RNA (1)...(19): siRNA sense strand
ucaagaagaaauacguguu

SEQ ID NO: 1534827 - RNA, 19 nt, Homo sapiens
  misc_RNA (1)...(19): siRNA sense strand
auaucaaucuccagggaaa

SEQ ID NO: 1534828 - RNA, 19 nt, Homo sapiens
  misc_RNA (1)...(19): siRNA sense strand
gaagaaccuggaccugaca

SEQ ID NO: 1534829 - RNA, 19 nt, Homo sapiens
  misc_RNA (1)...(19): siRNA sense strand
gagaaccagaucaguaaca

SEQ ID NO: 1534830 - RNA, 19 nt, Homo sapiens
  misc_RNA (1)...(19): siRNA sense strand
ucuucgaccucuucacuga

SEQ ID NO: 1534831 - RNA, 19 nt, Homo sapiens
  misc_RNA (1)...(19): siRNA sense strand
gaaggcguuugguguagac

SEQ ID NO: 1534832 - RNA, 19 nt, Homo sapiens
  misc_RNA (1)...(19): siRNA sense strand
gccuggaccugcagagcaa

SEQ ID NO: 1534833 - RNA, 19 nt, Homo sapiens
  misc_RNA (1)...(19): siRNA sense strand
ccaacagcacccugaagaa

SEQ ID NO: 1534834 - RNA, 19 nt, Homo sapiens
  misc_RNA (1)...(19): siRNA sense strand
ggagaucaagguguguuug

SEQ ID NO: 1534835 - RNA, 19 nt, Homo sapiens
  misc_RNA (1)...(19): siRNA sense strand
gaucucagaggccaucaag

SEQ ID NO: 1534836 - RNA, 19 nt, Homo sapiens
  misc_RNA (1)...(19): siRNA sense strand
caacagcacccugaagaac

SEQ ID NO: 1534837 - RNA, 19 nt, Homo sapiens
  misc_RNA (1)...(19): siRNA sense strand
gcauucagaagaucagcuu

SEQ ID NO: 1534838 - RNA, 19 nt, Homo sapiens
  misc_RNA (1)...(19): siRNA sense strand
ugaaggcguuugguguaga

SEQ ID NO: 1534839 - RNA, 19 nt, Homo sapiens
  misc_RNA (1)...(19): siRNA sense strand
gcaggugaaagcccucaug

SEQ ID NO: 1534840 - RNA, 19 nt, Homo sapiens
  misc_RNA (1)...(19): siRNA sense strand
aaccacaggcuccagcaua

SEQ ID NO: 1534841 - RNA, 19 nt, Homo sapiens
  misc_RNA (1)...(19): siRNA sense strand
gcugagggaacacgacuuc

SEQ ID NO: 1534842 - RNA, 19 nt, Homo sapiens
  misc_RNA (1)...(19): siRNA sense strand
agcaaugacucaaggauac

SEQ ID NO: 1534843 - RNA, 19 nt, Homo sapiens
  misc_RNA (1)...(19): siRNA sense strand
caacaccguuagggaugau

SEQ ID NO: 1534844 - RNA, 19 nt, Homo sapiens
  misc_RNA (1)...(19): siRNA sense strand
uggcagccgcguauuacua

SEQ ID NO: 1534845 - RNA, 19 nt, Homo sapiens
  misc_RNA (1)...(19): siRNA sense strand
gaggagacguuggcaucgu

SEQ ID NO: 1534846 - RNA, 19 nt, Homo sapiens
  misc_RNA (1)...(19): siRNA sense strand
gcaagaugguggggacauu

SEQ ID NO: 1534847 - RNA, 19 nt, Homo sapiens
  misc_RNA (1)...(19): siRNA sense strand
ggcagccgcguauuacuau

SEQ ID NO: 1534848 - RNA, 19 nt, Homo sapiens
  misc_RNA (1)...(19): siRNA sense strand
ucagaggccaucaagacaa

SEQ ID NO: 1534849 - RNA, 19 nt, Homo sapiens
  misc_RNA (1)...(19): siRNA sense strand
gcucugaagguaaacucaa

SEQ ID NO: 1534850 - RNA, 19 nt, Homo sapiens
  misc_RNA (1)...(19): siRNA sense strand
ccagguggccucaauuggu

SEQ ID NO: 1534851 - RNA, 19 nt, Homo sapiens
  misc_RNA (1)...(19): siRNA sense strand
gagccucaccagcuuagau

SEQ ID NO: 1534852 - RNA, 19 nt, Homo sapiens
  misc_RNA (1)...(19): siRNA sense strand
cugcagagcaauuccauca

SEQ ID NO: 1534853 - RNA, 19 nt, Homo sapiens
  misc_RNA (1)...(19): siRNA sense strand
cugaggcccugaaggugaa

SEQ ID NO: 1534854 - RNA, 19 nt, Homo sapiens
  misc_RNA (1)...(19): siRNA sense strand
ucugaaagagcucauguuc

SEQ ID NO: 1534855 - RNA, 19 nt, Homo sapiens
  misc_RNA (1)...(19): siRNA sense strand
uggcagacgcuuugaagau

SEQ ID NO: 1534856 - RNA, 19 nt, Homo sapiens
  misc_RNA (1)...(19): siRNA sense strand
gacugucgcauucagaaga

SEQ ID NO: 1534857 - RNA, 19 nt, Homo sapiens
  misc_RNA (1)...(19): siRNA sense strand
ggaaggacugucgcauuca

SEQ ID NO: 1534858 - RNA, 19 nt, Homo sapiens
  misc_RNA (1)...(19): siRNA sense strand
agaacaggagucugaaaga

SEQ ID NO: 1534859 - RNA, 19 nt, Homo sapiens
  misc_RNA (1)...(19): siRNA sense strand
accacaggcuccagcauau

SEQ ID NO: 1534860 - RNA, 19 nt, Homo sapiens
  misc_RNA (1)...(19): siRNA sense strand
gcagcaaugacucaaggau

SEQ ID NO: 1534861 - RNA, 19 nt, Homo sapiens
  misc_RNA (1)...(19): siRNA sense strand
caccugcaguggaacuuca

SEQ ID NO: 1534862 - RNA, 19 nt, Homo sapiens
  misc_RNA (1)...(19): siRNA sense strand
gcucauguucuccaguaau

SEQ ID NO: 1534863 - RNA, 19 nt, Homo sapiens
  misc_RNA (1)...(19): siRNA sense strand
gagaucaagguguguuugg

SEQ ID NO: 1534864 - RNA, 19 nt, Homo sapiens
  misc_RNA (1)...(19): siRNA sense strand
caggacgccucuggacuuc

SEQ ID NO: 1534865 - RNA, 19 nt, Homo sapiens
  misc_RNA (1)...(19): siRNA sense strand
gaagaaauacguguuuuac

SEQ ID NO: 1534866 - RNA, 19 nt, Homo sapiens
  misc_RNA (1)...(19): siRNA sense strand
gagcucuacucaugguacu

SEQ ID NO: 1534867 - RNA, 19 nt, Homo sapiens
  misc_RNA (1)...(19): siRNA sense strand
gaggagaucaagguguguu

SEQ ID NO: 1534868 - RNA, 19 nt, Homo sapiens
  misc_RNA (1)...(19): siRNA sense strand
gcaaugacucaaggauaca

SEQ ID NO: 1534869 - RNA, 19 nt, Homo sapiens
  misc_RNA (1)...(19): siRNA sense strand
ggccucaauuggugcuuca

SEQ ID NO: 1534870 - RNA, 19 nt, Homo sapiens
  misc_RNA (1)...(19): siRNA sense strand
gcagccgcguauuacuaug

SEQ ID NO: 1534871 - RNA, 19 nt, Homo sapiens
  misc_RNA (1)...(19): siRNA sense strand
uggaccaccugaucaccaa

SEQ ID NO: 1534872 - RNA, 19 nt, Homo sapiens
  misc_RNA (1)...(19): siRNA sense strand
gcuggaugcugagccaagu

SEQ ID NO: 1534873 - RNA, 19 nt, Homo sapiens
  misc_RNA (1)...(19): siRNA sense strand
gggcugcucaagaagaaau

SEQ ID NO: 1534874 - RNA, 19 nt, Homo sapiens
  misc_RNA (1)...(19): siRNA sense strand
gaggccaucaagacaaaug

SEQ ID NO: 1534875 - RNA, 19 nt, Homo sapiens
  misc_RNA (1)...(19): siRNA sense strand
auucucgacuuaagaggaa

SEQ ID NO: 1534876 - RNA, 19 nt, Homo sapiens
  misc_RNA (1)...(19): siRNA sense strand
gggaacacgacuucacaca

SEQ ID NO: 1534877 - RNA, 19 nt, Homo sapiens
  misc_RNA (1)...(19): siRNA sense strand
ugggcuuccucacgcauuu

SEQ ID NO: 1534878 - RNA, 19 nt, Homo sapiens
  misc_RNA (1)...(19): siRNA sense strand
ugaaauaccugcucuucuu

SEQ ID NO: 1534879 - RNA, 19 nt, Homo sapiens
  misc_RNA (1)...(19): siRNA sense strand
agacaaggcucgagggaaa

SEQ ID NO: 1534880 - RNA, 19 nt, Homo sapiens
  misc_RNA (1)...(19): siRNA sense strand
ugagugagaucaucaacaa

SEQ ID NO: 1534881 - RNA, 19 nt, Homo sapiens
  misc_RNA (1)...(19): siRNA sense strand
ggacuggucucagaacaug

SEQ ID NO: 1534882 - RNA, 19 nt, Homo sapiens
  misc_RNA (1)...(19): siRNA sense strand
gcaaagucaucuacaccaa

SEQ ID NO: 1534883 - RNA, 19 nt, Homo sapiens
  misc_RNA (1)...(19): siRNA sense strand
acacagcaaccuauucuua

SEQ ID NO: 1534884 - RNA, 19 nt, Homo sapiens
  misc_RNA (1)...(19): siRNA sense strand
gaaagugagugagaucauc

SEQ ID NO: 1534885 - RNA, 19 nt, Homo sapiens
  misc_RNA (1)...(19): siRNA sense strand
ugcagaaccucauugauuu

SEQ ID NO: 1534886 - RNA, 19 nt, Homo sapiens
  misc_RNA (1)...(19): siRNA sense strand
ggucucagaacauguauuu

SEQ ID NO: 1534887 - RNA, 19 nt, Homo sapiens
  misc_RNA (1)...(19): siRNA sense strand
guggagggauuuccuacaa

SEQ ID NO: 1534888 - RNA, 19 nt, Homo sapiens
  misc_RNA (1)...(19): siRNA sense strand
aaagucaucuacaccaaug

SEQ ID NO: 1534889 - RNA, 19 nt, Homo sapiens
  misc_RNA (1)...(19): siRNA sense strand
uacaaggacuggucucaga

SEQ ID NO: 1534890 - RNA, 19 nt, Homo sapiens
  misc_RNA (1)...(19): siRNA sense strand
gcaggccuuugacuacuug

SEQ ID NO: 1534891 - RNA, 19 nt, Homo sapiens
  misc_RNA (1)...(19): siRNA sense strand
gcacuaccgagaugacuug

SEQ ID NO: 1534892 - RNA, 19 nt, Homo sapiens
  misc_RNA (1)...(19): siRNA sense strand
cugcagaaccucauugauu

SEQ ID NO: 1534893 - RNA, 19 nt, Homo sapiens
  misc_RNA (1)...(19): siRNA sense strand
gaaauaccugcucuucuuc

SEQ ID NO: 1534894 - RNA, 19 nt, Homo sapiens
  misc_RNA (1)...(19): siRNA sense strand
cuaccgagaugacuuggau

SEQ ID NO: 1534895 - RNA, 19 nt, Homo sapiens
  misc_RNA (1)...(19): siRNA sense strand
ugucuacgcucggcuaaug

SEQ ID NO: 1534896 - RNA, 19 nt, Homo sapiens
  misc_RNA (1)...(19): siRNA sense strand
gagggaaagugagugagau

SEQ ID NO: 1534897 - RNA, 19 nt, Homo sapiens
  misc_RNA (1)...(19): siRNA sense strand
ucucagaacauguauuuca

SEQ ID NO: 1534898 - RNA, 19 nt, Homo sapiens
  misc_RNA (1)...(19): siRNA sense strand
gcuaaugaagcaugcagaa

SEQ ID NO: 1534899 - RNA, 19 nt, Homo sapiens
  misc_RNA (1)...(19): siRNA sense strand
ccuagugaaucagaucaaa

SEQ ID NO: 1534900 - RNA, 19 nt, Homo sapiens
  misc_RNA (1)...(19): siRNA sense strand
uagcugcuguggagggauu

SEQ ID NO: 1534901 - RNA, 19 nt, Homo sapiens
  misc_RNA (1)...(19): siRNA sense strand
ggauacacagcaaccuauu

SEQ ID NO: 1534902 - RNA, 19 nt, Homo sapiens
  misc_RNA (1)...(19): siRNA sense strand
guaugcaggccuuugacua

SEQ ID NO: 1534903 - RNA, 19 nt, Homo sapiens
  misc_RNA (1)...(19): siRNA sense strand
gauccugggcuucgucuuc

SEQ ID NO: 1534904 - RNA, 19 nt, Homo sapiens
  misc_RNA (1)...(19): siRNA sense strand
ucaacuggauacacagcaa

SEQ ID NO: 1534905 - RNA, 19 nt, Homo sapiens
  misc_RNA (1)...(19): siRNA sense strand
uaccugcucuucuucuuca

SEQ ID NO: 1534906 - RNA, 19 nt, Homo sapiens
  misc_RNA (1)...(19): siRNA sense strand
ggaaagugagugagaucau

SEQ ID NO: 1534907 - RNA, 19 nt, Homo sapiens
  misc_RNA (1)...(19): siRNA sense strand
cagaacauguauuucaacu

SEQ ID NO: 1534908 - RNA, 19 nt, Homo sapiens
  misc_RNA (1)...(19): siRNA sense strand
caccuucuguggcugcauu

SEQ ID NO: 1534909 - RNA, 19 nt, Homo sapiens
  misc_RNA (1)...(19): siRNA sense strand
cuuggaagcuagcaaaguc

SEQ ID NO: 1534910 - RNA, 19 nt, Homo sapiens
  misc_RNA (1)...(19): siRNA sense strand
caaagucaucuacaccaau

SEQ ID NO: 1534911 - RNA, 19 nt, Homo sapiens
  misc_RNA (1)...(19): siRNA sense strand
gauacacagcaaccuauuc

SEQ ID NO: 1534912 - RNA, 19 nt, Homo sapiens
  misc_RNA (1)...(19): siRNA sense strand
cgugguggguguccucaug

SEQ ID NO: 1534913 - RNA, 19 nt, Homo sapiens
  misc_RNA (1)...(19): siRNA sense strand
uagugaaucagaucaaaga

SEQ ID NO: 1534914 - RNA, 19 nt, Homo sapiens
  misc_RNA (1)...(19): siRNA sense strand
gaagcuagcaaagucaucu

SEQ ID NO: 1534915 - RNA, 19 nt, Homo sapiens
  misc_RNA (1)...(19): siRNA sense strand
cuacuuggaagcuagcaaa

SEQ ID NO: 1534916 - RNA, 19 nt, Homo sapiens
  misc_RNA (1)...(19): siRNA sense strand
caacugcucagaagacaac

SEQ ID NO: 1534917 - RNA, 19 nt, Homo sapiens
  misc_RNA (1)...(19): siRNA sense strand
guauuucaacugcucagaa

SEQ ID NO: 1534918 - RNA, 19 nt, Homo sapiens
  misc_RNA (1)...(19): siRNA sense strand
ggugaaauaccugcucuuc

SEQ ID NO: 1534919 - RNA, 19 nt, Homo sapiens
  misc_RNA (1)...(19): siRNA sense strand
gaucugcagaaccucauug

SEQ ID NO: 1534920 - RNA, 19 nt, Homo sapiens
  misc_RNA (1)...(19): siRNA sense strand
cgagggaaagugagugaga

SEQ ID NO: 1534921 - RNA, 19 nt, Homo sapiens
  misc_RNA (1)...(19): siRNA sense strand
cucagaacauguauuucaa

SEQ ID NO: 1534922 - RNA, 19 nt, Homo sapiens
  misc_RNA (1)...(19): siRNA sense strand
aaugaagcaugcagaagca

SEQ ID NO: 1534923 - RNA, 19 nt, Homo sapiens
  misc_RNA (1)...(19): siRNA sense strand
uauuucaacugcucagaag

SEQ ID NO: 1534924 - RNA, 19 nt, Homo sapiens
  misc_RNA (1)...(19): siRNA sense strand
gcucuucuucuucaacaug

SEQ ID NO: 1534925 - RNA, 19 nt, Homo sapiens
  misc_RNA (1)...(19): siRNA sense strand
ugacuuggaucugcagaac

SEQ ID NO: 1534926 - RNA, 19 nt, Homo sapiens
  misc_RNA (1)...(19): siRNA sense strand
agcaaccuauucuuacuug

SEQ ID NO: 1534927 - RNA, 19 nt, Homo sapiens
  misc_RNA (1)...(19): siRNA sense strand
caaccuauucuuacuuggu

SEQ ID NO: 1534928 - RNA, 19 nt, Homo sapiens
  misc_RNA (1)...(19): siRNA sense strand
agugagaucaucaacaaug

SEQ ID NO: 1534929 - RNA, 19 nt, Homo sapiens
  misc_RNA (1)...(19): siRNA sense strand
ugucccagauccuagugaa

SEQ ID NO: 1534930 - RNA, 19 nt, Homo sapiens
  misc_RNA (1)...(19): siRNA sense strand
gcgcugcucugugccuuac

SEQ ID NO: 1534931 - RNA, 19 nt, Homo sapiens
  misc_RNA (1)...(19): siRNA sense strand
ucauguuccugcucaccuu

SEQ ID NO: 1534932 - RNA, 19 nt, Homo sapiens
  misc_RNA (1)...(19): siRNA sense strand
gugagaucaucaacaaugc

SEQ ID NO: 1534933 - RNA, 19 nt, Homo sapiens
  misc_RNA (1)...(19): siRNA sense strand
ggccuuugacuacuuggaa

SEQ ID NO: 1534934 - RNA, 19 nt, Homo sapiens
  misc_RNA (1)...(19): siRNA sense strand
cccagauccuagugaauca

SEQ ID NO: 1534935 - RNA, 19 nt, Homo sapiens
  misc_RNA (1)...(19): siRNA sense strand
cagcaaccuauucuuacuu

SEQ ID NO: 1534936 - RNA, 19 nt, Homo sapiens
  misc_RNA (1)...(19): siRNA sense strand
acagcaaccuauucuuacu

SEQ ID NO: 1534937 - RNA, 19 nt, Homo sapiens
  misc_RNA (1)...(19): siRNA sense strand
aaagugagugagaucauca

SEQ ID NO: 1534938 - RNA, 19 nt, Homo sapiens
  misc_RNA (1)...(19): siRNA sense strand
gaccaggcagugaucaaca

SEQ ID NO: 1534939 - RNA, 19 nt, Homo sapiens
  misc_RNA (1)...(19): siRNA sense strand
gcagaaccucauugauuuu

SEQ ID NO: 1534940 - RNA, 19 nt, Homo sapiens
  misc_RNA (1)...(19): siRNA sense strand
uggcuguauugacaaguug

SEQ ID NO: 1534941 - RNA, 19 nt, Homo sapiens
  misc_RNA (1)...(19): siRNA sense strand
gggcauaucuggaaucuga

SEQ ID NO: 1534942 - RNA, 19 nt, Homo sapiens
  misc_RNA (1)...(19): siRNA sense strand
gauccaagcuauccagaaa

SEQ ID NO: 1534943 - RNA, 19 nt, Homo sapiens
  misc_RNA (1)...(19): siRNA sense strand
caugugaacugcacgauaa

SEQ ID NO: 1534944 - RNA, 19 nt, Homo sapiens
  misc_RNA (1)...(19): siRNA sense strand
guucagaaguacaguaauu

SEQ ID NO: 1534945 - RNA, 19 nt, Homo sapiens
  misc_RNA (1)...(19): siRNA sense strand
ggagagacauuaagaagac

SEQ ID NO: 1534946 - RNA, 19 nt, Homo sapiens
  misc_RNA (1)...(19): siRNA sense strand
aggcacagauagaucauua

SEQ ID NO: 1534947 - RNA, 19 nt, Homo sapiens
  misc_RNA (1)...(19): siRNA sense strand
gagcguaacagccuacauu

SEQ ID NO: 1534948 - RNA, 19 nt, Homo sapiens
  misc_RNA (1)...(19): siRNA sense strand
ggucugacacuacugauuu

SEQ ID NO: 1534949 - RNA, 19 nt, Homo sapiens
  misc_RNA (1)...(19): siRNA sense strand
gaacugcacgauaaaggaa

SEQ ID NO: 1534950 - RNA, 19 nt, Homo sapiens
  misc_RNA (1)...(19): siRNA sense strand
gaccaucagcuuuaggaua

SEQ ID NO: 1534951 - RNA, 19 nt, Homo sapiens
  misc_RNA (1)...(19): siRNA sense strand
uuaaagaugcuauggcuaa

SEQ ID NO: 1534952 - RNA, 19 nt, Homo sapiens
  misc_RNA (1)...(19): siRNA sense strand
guuggugccuuguuuaaug

SEQ ID NO: 1534953 - RNA, 19 nt, Homo sapiens
  misc_RNA (1)...(19): siRNA sense strand
ucaguguuccuguuauuua

SEQ ID NO: 1534954 - RNA, 19 nt, Homo sapiens
  misc_RNA (1)...(19): siRNA sense strand
uaaagaugcuauggcuaaa

SEQ ID NO: 1534955 - RNA, 19 nt, Homo sapiens
  misc_RNA (1)...(19): siRNA sense strand
guguugauguggguauuua

SEQ ID NO: 1534956 - RNA, 19 nt, Homo sapiens
  misc_RNA (1)...(19): siRNA sense strand
guacaguaauucugcucuu

SEQ ID NO: 1534957 - RNA, 19 nt, Homo sapiens
  misc_RNA (1)...(19): siRNA sense strand
uaucuaggacuugcaaaua

SEQ ID NO: 1534958 - RNA, 19 nt, Homo sapiens
  misc_RNA (1)...(19): siRNA sense strand
gaagcgcaaagcugaauga

SEQ ID NO: 1534959 - RNA, 19 nt, Homo sapiens
  misc_RNA (1)...(19): siRNA sense strand
ggaaucugaaguugcuaua

SEQ ID NO: 1534960 - RNA, 19 nt, Homo sapiens
  misc_RNA (1)...(19): siRNA sense strand
accaucagcuuuaggauau

SEQ ID NO: 1534961 - RNA, 19 nt, Homo sapiens
  misc_RNA (1)...(19): siRNA sense strand
gaacucaggcgccucuucu

SEQ ID NO: 1534962 - RNA, 19 nt, Homo sapiens
  misc_RNA (1)...(19): siRNA sense strand
aaucugaaguugcuauauc

SEQ ID NO: 1534963 - RNA, 19 nt, Homo sapiens
  misc_RNA (1)...(19): siRNA sense strand
aggaguugguucagaagua

SEQ ID NO: 1534964 - RNA, 19 nt, Homo sapiens
  misc_RNA (1)...(19): siRNA sense strand
gaaguuugcaguguugaug

SEQ ID NO: 1534965 - RNA, 19 nt, Homo sapiens
  misc_RNA (1)...(19): siRNA sense strand
cuauguuggugccuuguuu

SEQ ID NO: 1534966 - RNA, 19 nt, Homo sapiens
  misc_RNA (1)...(19): siRNA sense strand
ggaguugguucagaaguac

SEQ ID NO: 1534967 - RNA, 19 nt, Homo sapiens
  misc_RNA (1)...(19): siRNA sense strand
ggacuugcaaauaagaaug

SEQ ID NO: 1534968 - RNA, 19 nt, Homo sapiens
  misc_RNA (1)...(19): siRNA sense strand
gcucucauuucacucuuca

SEQ ID NO: 1534969 - RNA, 19 nt, Homo sapiens
  misc_RNA (1)...(19): siRNA sense strand
uaucuggaaucugaaguug

SEQ ID NO: 1534970 - RNA, 19 nt, Homo sapiens
  misc_RNA (1)...(19): siRNA sense strand
caguguuccuguuauuuau

SEQ ID NO: 1534971 - RNA, 19 nt, Homo sapiens
  misc_RNA (1)...(19): siRNA sense strand
gaagacuggagugguguuu

SEQ ID NO: 1534972 - RNA, 19 nt, Homo sapiens
  misc_RNA (1)...(19): siRNA sense strand
guguuccuguuauuuauga

SEQ ID NO: 1534973 - RNA, 19 nt, Homo sapiens
  misc_RNA (1)...(19): siRNA sense strand
gauuuuggcucucauuuca

SEQ ID NO: 1534974 - RNA, 19 nt, Homo sapiens
  misc_RNA (1)...(19): siRNA sense strand
ucugugaccaucagcuuua

SEQ ID NO: 1534975 - RNA, 19 nt, Homo sapiens
  misc_RNA (1)...(19): siRNA sense strand
acucaggcgccucuucuua

SEQ ID NO: 1534976 - RNA, 19 nt, Homo sapiens
  misc_RNA (1)...(19): siRNA sense strand
cuucaguguuccuguuauu

SEQ ID NO: 1534977 - RNA, 19 nt, Homo sapiens
  misc_RNA (1)...(19): siRNA sense strand
aucuaggacuugcaaauaa

SEQ ID NO: 1534978 - RNA, 19 nt, Homo sapiens
  misc_RNA (1)...(19): siRNA sense strand
auacaagggugugauccaa

SEQ ID NO: 1534979 - RNA, 19 nt, Homo sapiens
  misc_RNA (1)...(19): siRNA sense strand
ucugaaguuugcaguguug

SEQ ID NO: 1534980 - RNA, 19 nt, Homo sapiens
  misc_RNA (1)...(19): siRNA sense strand
uccaagcuauccagaaauc

SEQ ID NO: 1534981 - RNA, 19 nt, Homo sapiens
  misc_RNA (1)...(19): siRNA sense strand
gauauacaagggugugauc

SEQ ID NO: 1534982 - RNA, 19 nt, Homo sapiens
  misc_RNA (1)...(19): siRNA sense strand
agacuggagugguguuugg

SEQ ID NO: 1534983 - RNA, 19 nt, Homo sapiens
  misc_RNA (1)...(19): siRNA sense strand
aggcgccucuucuuaguug

SEQ ID NO: 1534984 - RNA, 19 nt, Homo sapiens
  misc_RNA (1)...(19): siRNA sense strand
uacaguaauucugcucuug

SEQ ID NO: 1534985 - RNA, 19 nt, Homo sapiens
  misc_RNA (1)...(19): siRNA sense strand
uuaauggucugacacuacu

SEQ ID NO: 1534986 - RNA, 19 nt, Homo sapiens
  misc_RNA (1)...(19): siRNA sense strand
gaaucugaaguugcuauau

SEQ ID NO: 1534987 - RNA, 19 nt, Homo sapiens
  misc_RNA (1)...(19): siRNA sense strand
gaucauuaucuaggacuug

SEQ ID NO: 1534988 - RNA, 19 nt, Homo sapiens
  misc_RNA (1)...(19): siRNA sense strand
ucaggcgccucuucuuagu

SEQ ID NO: 1534989 - RNA, 19 nt, Homo sapiens
  misc_RNA (1)...(19): siRNA sense strand
ugcuauaucugaggaguug

SEQ ID NO: 1534990 - RNA, 19 nt, Homo sapiens
  misc_RNA (1)...(19): siRNA sense strand
ccaucagcuuuaggauaua

SEQ ID NO: 1534991 - RNA, 19 nt, Homo sapiens
  misc_RNA (1)...(19): siRNA sense strand
ucuaggacuugcaaauaag

SEQ ID NO: 1534992 - RNA, 19 nt, Homo sapiens
  misc_RNA (1)...(19): siRNA sense strand
uauguuggugccuuguuua

SEQ ID NO: 1534993 - RNA, 19 nt, Homo sapiens
  misc_RNA (1)...(19): siRNA sense strand
ucucugaaguuugcagugu

SEQ ID NO: 1534994 - RNA, 19 nt, Homo sapiens
  misc_RNA (1)...(19): siRNA sense strand
cagaugaaggccacccauu

SEQ ID NO: 1534995 - RNA, 19 nt, Homo sapiens
  misc_RNA (1)...(19): siRNA sense strand
ucaugugaacugcacgaua

SEQ ID NO: 1534996 - RNA, 19 nt, Homo sapiens
  misc_RNA (1)...(19): siRNA sense strand
uaucugaggaguugguuca

SEQ ID NO: 1534997 - RNA, 19 nt, Homo sapiens
  misc_RNA (1)...(19): siRNA sense strand
guuuaauggucugacacua

SEQ ID NO: 1534998 - RNA, 19 nt, Homo sapiens
  misc_RNA (1)...(19): siRNA sense strand
ggaacucaggcgccucuuc

SEQ ID NO: 1534999 - RNA, 19 nt, Homo sapiens
  misc_RNA (1)...(19): siRNA sense strand
ugacaguauucagcauugu

SEQ ID NO: 1535000 - RNA, 19 nt, Homo sapiens
  misc_RNA (1)...(19): siRNA sense strand
guacuggagagacauuaag

SEQ ID NO: 1535001 - RNA, 19 nt, Homo sapiens
  misc_RNA (1)...(19): siRNA sense strand
cugcuuucauugacaguau

SEQ ID NO: 1535002 - RNA, 19 nt, Homo sapiens
  misc_RNA (1)...(19): siRNA sense strand
ugaacugcacgauaaagga

SEQ ID NO: 1535003 - RNA, 19 nt, Homo sapiens
  misc_RNA (1)...(19): siRNA sense strand
caucagcuuuaggauauac

SEQ ID NO: 1535004 - RNA, 19 nt, Homo sapiens
  misc_RNA (1)...(19): siRNA sense strand
gaauguuaaagaugcuaug

SEQ ID NO: 1535005 - RNA, 19 nt, Homo sapiens
  misc_RNA (1)...(19): siRNA sense strand
uugacaguauucagcauug

SEQ ID NO: 1535006 - RNA, 19 nt, Homo sapiens
  misc_RNA (1)...(19): siRNA sense strand
agaugaaggccacccauuc

SEQ ID NO: 1535007 - RNA, 19 nt, Homo sapiens
  misc_RNA (1)...(19): siRNA sense strand
gaacggcaucaggcacaga

SEQ ID NO: 1535008 - RNA, 19 nt, Homo sapiens
  misc_RNA (1)...(19): siRNA sense strand
gccuauuccugcugcuuuc

SEQ ID NO: 1535009 - RNA, 19 nt, Homo sapiens
  misc_RNA (1)...(19): siRNA sense strand
ucuggaaucugaaguugcu

SEQ ID NO: 1535010 - RNA, 19 nt, Homo sapiens
  misc_RNA (1)...(19): siRNA sense strand
acucuucaguguuccuguu

SEQ ID NO: 1535011 - RNA, 19 nt, Homo sapiens
  misc_RNA (1)...(19): siRNA sense strand
uggagagacauuaagaaga

SEQ ID NO: 1535012 - RNA, 19 nt, Homo sapiens
  misc_RNA (1)...(19): siRNA sense strand
caguaauucugcucuuggu

SEQ ID NO: 1535013 - RNA, 19 nt, Homo sapiens
  misc_RNA (1)...(19): siRNA sense strand
uauuccugcugcuuucauu

SEQ ID NO: 1535014 - RNA, 19 nt, Homo sapiens
  misc_RNA (1)...(19): siRNA sense strand
acaguauucagcauuguga

SEQ ID NO: 1535015 - RNA, 19 nt, Homo sapiens
  misc_RNA (1)...(19): siRNA sense strand
ggcaucaggcacagauaga

SEQ ID NO: 1535016 - RNA, 19 nt, Homo sapiens
  misc_RNA (1)...(19): siRNA sense strand
gcaguguugauguggguau

SEQ ID NO: 1535017 - RNA, 19 nt, Homo sapiens
  misc_RNA (1)...(19): siRNA sense strand
uugauucucugaaguuugc

SEQ ID NO: 1535018 - RNA, 19 nt, Homo sapiens
  misc_RNA (1)...(19): siRNA sense strand
uuaguugauucucugaagu

SEQ ID NO: 1535019 - RNA, 19 nt, Homo sapiens
  misc_RNA (1)...(19): siRNA sense strand
gggcauaucuggaaucuga

SEQ ID NO: 1535020 - RNA, 19 nt, Homo sapiens
  misc_RNA (1)...(19): siRNA sense strand
gauccaagcuauccagaaa

SEQ ID NO: 1535021 - RNA, 19 nt, Homo sapiens
  misc_RNA (1)...(19): siRNA sense strand
caugugaacugcacgauaa

SEQ ID NO: 1535022 - RNA, 19 nt, Homo sapiens
  misc_RNA (1)...(19): siRNA sense strand
guucagaaguacaguaauu

SEQ ID NO: 1535023 - RNA, 19 nt, Homo sapiens
  misc_RNA (1)...(19): siRNA sense strand
ggagagacauuaagaagac

SEQ ID NO: 1535024 - RNA, 19 nt, Homo sapiens
  misc_RNA (1)...(19): siRNA sense strand
aggcacagauagaucauua

SEQ ID NO: 1535025 - RNA, 19 nt, Homo sapiens
  misc_RNA (1)...(19): siRNA sense strand
gagcguaacagccuacauu

SEQ ID NO: 1535026 - RNA, 19 nt, Homo sapiens
  misc_RNA (1)...(19): siRNA sense strand
ggucugacacuacugauuu

SEQ ID NO: 1535027 - RNA, 19 nt, Homo sapiens
  misc_RNA (1)...(19): siRNA sense strand
gaacugcacgauaaaggaa

SEQ ID NO: 1535028 - RNA, 19 nt, Homo sapiens
  misc_RNA (1)...(19): siRNA sense strand
gaccaucagcuuuaggaua

SEQ ID NO: 1535029 - RNA, 19 nt, Homo sapiens
  misc_RNA (1)...(19): siRNA sense strand
uuaaagaugcuauggcuaa

SEQ ID NO: 1535030 - RNA, 19 nt, Homo sapiens
  misc_RNA (1)...(19): siRNA sense strand
guuggugccuuguuuaaug

SEQ ID NO: 1535031 - RNA, 19 nt, Homo sapiens
  misc_RNA (1)...(19): siRNA sense strand
ucaguguuccuguuauuua

SEQ ID NO: 1535032 - RNA, 19 nt, Homo sapiens
  misc_RNA (1)...(19): siRNA sense strand
uaaagaugcuauggcuaaa

SEQ ID NO: 1535033 - RNA, 19 nt, Homo sapiens
  misc_RNA (1)...(19): siRNA sense strand
guguugauguggguauuua

SEQ ID NO: 1535034 - RNA, 19 nt, Homo sapiens
  misc_RNA (1)...(19): siRNA sense strand
guacaguaauucugcucuu

SEQ ID NO: 1535035 - RNA, 19 nt, Homo sapiens
  misc_RNA (1)...(19): siRNA sense strand
uaucuaggacuugcaaaua

SEQ ID NO: 1535036 - RNA, 19 nt, Homo sapiens
  misc_RNA (1)...(19): siRNA sense strand
gaagcgcaaagcugaauga

SEQ ID NO: 1535037 - RNA, 19 nt, Homo sapiens
  misc_RNA (1)...(19): siRNA sense strand
ggaaucugaaguugcuaua

SEQ ID NO: 1535038 - RNA, 19 nt, Homo sapiens
  misc_RNA (1)...(19): siRNA sense strand
accaucagcuuuaggauau

SEQ ID NO: 1535039 - RNA, 19 nt, Homo sapiens
  misc_RNA (1)...(19): siRNA sense strand
gaacucaggcgccucuucu

SEQ ID NO: 1535040 - RNA, 19 nt, Homo sapiens
  misc_RNA (1)...(19): siRNA sense strand
aaucugaaguugcuauauc

SEQ ID NO: 1535041 - RNA, 19 nt, Homo sapiens
  misc_RNA (1)...(19): siRNA sense strand
aggaguugguucagaagua

SEQ ID NO: 1535042 - RNA, 19 nt, Homo sapiens
  misc_RNA (1)...(19): siRNA sense strand
gaaguuugcaguguugaug

SEQ ID NO: 1535043 - RNA, 19 nt, Homo sapiens
  misc_RNA (1)...(19): siRNA sense strand
cuauguuggugccuuguuu

SEQ ID NO: 1535044 - RNA, 19 nt, Homo sapiens
  misc_RNA (1)...(19): siRNA sense strand
ggaguugguucagaaguac

SEQ ID NO: 1535045 - RNA, 19 nt, Homo sapiens
  misc_RNA (1)...(19): siRNA sense strand
ggacuugcaaauaagaaug

SEQ ID NO: 1535046 - RNA, 19 nt, Homo sapiens
  misc_RNA (1)...(19): siRNA sense strand
gcucucauuucacucuuca

SEQ ID NO: 1535047 - RNA, 19 nt, Homo sapiens
  misc_RNA (1)...(19): siRNA sense strand
uaucuggaaucugaaguug

SEQ ID NO: 1535048 - RNA, 19 nt, Homo sapiens
  misc_RNA (1)...(19): siRNA sense strand
caguguuccuguuauuuau

SEQ ID NO: 1535049 - RNA, 19 nt, Homo sapiens
  misc_RNA (1)...(19): siRNA sense strand
gaagacuggagugguguuu

SEQ ID NO: 1535050 - RNA, 19 nt, Homo sapiens
  misc_RNA (1)...(19): siRNA sense strand
guguuccuguuauuuauga

SEQ ID NO: 1535051 - RNA, 19 nt, Homo sapiens
  misc_RNA (1)...(19): siRNA sense strand
gauuuuggcucucauuuca

SEQ ID NO: 1535052 - RNA, 19 nt, Homo sapiens
  misc_RNA (1)...(19): siRNA sense strand
ucugugaccaucagcuuua

SEQ ID NO: 1535053 - RNA, 19 nt, Homo sapiens
  misc_RNA (1)...(19): siRNA sense strand
acucaggcgccucuucuua

SEQ ID NO: 1535054 - RNA, 19 nt, Homo sapiens
  misc_RNA (1)...(19): siRNA sense strand
cuucaguguuccuguuauu

SEQ ID NO: 1535055 - RNA, 19 nt, Homo sapiens
  misc_RNA (1)...(19): siRNA sense strand
aucuaggacuugcaaauaa

SEQ ID NO: 1535056 - RNA, 19 nt, Homo sapiens
  misc_RNA (1)...(19): siRNA sense strand
auacaagggugugauccaa

SEQ ID NO: 1535057 - RNA, 19 nt, Homo sapiens
  misc_RNA (1)...(19): siRNA sense strand
ucugaaguuugcaguguug

SEQ ID NO: 1535058 - RNA, 19 nt, Homo sapiens
  misc_RNA (1)...(19): siRNA sense strand
uccaagcuauccagaaauc

SEQ ID NO: 1535059 - RNA, 19 nt, Homo sapiens
  misc_RNA (1)...(19): siRNA sense strand
gauauacaagggugugauc

SEQ ID NO: 1535060 - RNA, 19 nt, Homo sapiens
  misc_RNA (1)...(19): siRNA sense strand
agacuggagugguguuugg

SEQ ID NO: 1535061 - RNA, 19 nt, Homo sapiens
  misc_RNA (1)...(19): siRNA sense strand
aggcgccucuucuuaguug

SEQ ID NO: 1535062 - RNA, 19 nt, Homo sapiens
  misc_RNA (1)...(19): siRNA sense strand
uacaguaauucugcucuug

SEQ ID NO: 1535063 - RNA, 19 nt, Homo sapiens
  misc_RNA (1)...(19): siRNA sense strand
uuaauggucugacacuacu

SEQ ID NO: 1535064 - RNA, 19 nt, Homo sapiens
  misc_RNA (1)...(19): siRNA sense strand
gaaucugaaguugcuauau

SEQ ID NO: 1535065 - RNA, 19 nt, Homo sapiens
  misc_RNA (1)...(19): siRNA sense strand
gaucauuaucuaggacuug

SEQ ID NO: 1535066 - RNA, 19 nt, Homo sapiens
  misc_RNA (1)...(19): siRNA sense strand
ucaggcgccucuucuuagu

SEQ ID NO: 1535067 - RNA, 19 nt, Homo sapiens
  misc_RNA (1)...(19): siRNA sense strand
ugcuauaucugaggaguug

SEQ ID NO: 1535068 - RNA, 19 nt, Homo sapiens
  misc_RNA (1)...(19): siRNA sense strand
ccaucagcuuuaggauaua

SEQ ID NO: 1535069 - RNA, 19 nt, Homo sapiens
  misc_RNA (1)...(19): siRNA sense strand
ucuaggacuugcaaauaag

SEQ ID NO: 1535070 - RNA, 19 nt, Homo sapiens
  misc_RNA (1)...(19): siRNA sense strand
uauguuggugccuuguuua

SEQ ID NO: 1535071 - RNA, 19 nt, Homo sapiens
  misc_RNA (1)...(19): siRNA sense strand
ucucugaaguuugcagugu

SEQ ID NO: 1535072 - RNA, 19 nt, Homo sapiens
  misc_RNA (1)...(19): siRNA sense strand
cagaugaaggccacccauu

SEQ ID NO: 1535073 - RNA, 19 nt, Homo sapiens
  misc_RNA (1)...(19): siRNA sense strand
ucaugugaacugcacgaua

SEQ ID NO: 1535074 - RNA, 19 nt, Homo sapiens
  misc_RNA (1)...(19): siRNA sense strand
uaucugaggaguugguuca

SEQ ID NO: 1535075 - RNA, 19 nt, Homo sapiens
  misc_RNA (1)...(19): siRNA sense strand
guuuaauggucugacacua

SEQ ID NO: 1535076 - RNA, 19 nt, Homo sapiens
  misc_RNA (1)...(19): siRNA sense strand
ggaacucaggcgccucuuc

SEQ ID NO: 1535077 - RNA, 19 nt, Homo sapiens
  misc_RNA (1)...(19): siRNA sense strand
ugacaguauucagcauugu

SEQ ID NO: 1535078 - RNA, 19 nt, Homo sapiens
  misc_RNA (1)...(19): siRNA sense strand
guacuggagagacauuaag

SEQ ID NO: 1535079 - RNA, 19 nt, Homo sapiens
  misc_RNA (1)...(19): siRNA sense strand
cugcuuucauugacaguau

SEQ ID NO: 1535080 - RNA, 19 nt, Homo sapiens
  misc_RNA (1)...(19): siRNA sense strand
ugaacugcacgauaaagga

SEQ ID NO: 1535081 - RNA, 19 nt, Homo sapiens
  misc_RNA (1)...(19): siRNA sense strand
caucagcuuuaggauauac

SEQ ID NO: 1535082 - RNA, 19 nt, Homo sapiens
  misc_RNA (1)...(19): siRNA sense strand
gaauguuaaagaugcuaug

SEQ ID NO: 1535083 - RNA, 19 nt, Homo sapiens
  misc_RNA (1)...(19): siRNA sense strand
uugacaguauucagcauug

SEQ ID NO: 1535084 - RNA, 19 nt, Homo sapiens
  misc_RNA (1)...(19): siRNA sense strand
agaugaaggccacccauuc

SEQ ID NO: 1535085 - RNA, 19 nt, Homo sapiens
  misc_RNA (1)...(19): siRNA sense strand
gaacggcaucaggcacaga

SEQ ID NO: 1535086 - RNA, 19 nt, Homo sapiens
  misc_RNA (1)...(19): siRNA sense strand
gccuauuccugcugcuuuc

SEQ ID NO: 1535087 - RNA, 19 nt, Homo sapiens
  misc_RNA (1)...(19): siRNA sense strand
ucuggaaucugaaguugcu

SEQ ID NO: 1535088 - RNA, 19 nt, Homo sapiens
  misc_RNA (1)...(19): siRNA sense strand
acucuucaguguuccuguu

SEQ ID NO: 1535089 - RNA, 19 nt, Homo sapiens
  misc_RNA (1)...(19): siRNA sense strand
uggagagacauuaagaaga

SEQ ID NO: 1535090 - RNA, 19 nt, Homo sapiens
  misc_RNA (1)...(19): siRNA sense strand
caguaauucugcucuuggu

SEQ ID NO: 1535091 - RNA, 19 nt, Homo sapiens
  misc_RNA (1)...(19): siRNA sense strand
uauuccugcugcuuucauu

SEQ ID NO: 1535092 - RNA, 19 nt, Homo sapiens
  misc_RNA (1)...(19): siRNA sense strand
acaguauucagcauuguga

SEQ ID NO: 1535093 - RNA, 19 nt, Homo sapiens
  misc_RNA (1)...(19): siRNA sense strand
ggcaucaggcacagauaga

SEQ ID NO: 1535094 - RNA, 19 nt, Homo sapiens
  misc_RNA (1)...(19): siRNA sense strand
gcaguguugauguggguau

SEQ ID NO: 1535095 - RNA, 19 nt, Homo sapiens
  misc_RNA (1)...(19): siRNA sense strand
uugauucucugaaguuugc

SEQ ID NO: 1535096 - RNA, 19 nt, Homo sapiens
  misc_RNA (1)...(19): siRNA sense strand
uuaguugauucucugaagu

SEQ ID NO: 1535097 - RNA, 19 nt, Homo sapiens
  misc_RNA (1)...(19): siRNA sense strand
gggcauaucuggaaucuga

SEQ ID NO: 1535098 - RNA, 19 nt, Homo sapiens
  misc_RNA (1)...(19): siRNA sense strand
gauccaagcuauccagaaa

SEQ ID NO: 1535099 - RNA, 19 nt, Homo sapiens
  misc_RNA (1)...(19): siRNA sense strand
caugugaacugcacgauaa

SEQ ID NO: 1535100 - RNA, 19 nt, Homo sapiens
  misc_RNA (1)...(19): siRNA sense strand
guucagaaguacaguaauu

SEQ ID NO: 1535101 - RNA, 19 nt, Homo sapiens
  misc_RNA (1)...(19): siRNA sense strand
ggagagacauuaagaagac

SEQ ID NO: 1535102 - RNA, 19 nt, Homo sapiens
  misc_RNA (1)...(19): siRNA sense strand
aggcacagauagaucauua

SEQ ID NO: 1535103 - RNA, 19 nt, Homo sapiens
  misc_RNA (1)...(19): siRNA sense strand
gagcguaacagccuacauu

SEQ ID NO: 1535104 - RNA, 19 nt, Homo sapiens
  misc_RNA (1)...(19): siRNA sense strand
ggucugacacuacugauuu

SEQ ID NO: 1535105 - RNA, 19 nt, Homo sapiens
  misc_RNA (1)...(19): siRNA sense strand
gaacugcacgauaaaggaa

SEQ ID NO: 1535106 - RNA, 19 nt, Homo sapiens
  misc_RNA (1)...(19): siRNA sense strand
gaccaucagcuuuaggaua

SEQ ID NO: 1535107 - RNA, 19 nt, Homo sapiens
  misc_RNA (1)...(19): siRNA sense strand
uuaaagaugcuauggcuaa

SEQ ID NO: 1535108 - RNA, 19 nt, Homo sapiens
  misc_RNA (1)...(19): siRNA sense strand
guuggugccuuguuuaaug

SEQ ID NO: 1535109 - RNA, 19 nt, Homo sapiens
  misc_RNA (1)...(19): siRNA sense strand
ucaguguuccuguuauuua

SEQ ID NO: 1535110 - RNA, 19 nt, Homo sapiens
  misc_RNA (1)...(19): siRNA sense strand
uaaagaugcuauggcuaaa

SEQ ID NO: 1535111 - RNA, 19 nt, Homo sapiens
  misc_RNA (1)...(19): siRNA sense strand
guguugauguggguauuua

SEQ ID NO: 1535112 - RNA, 19 nt, Homo sapiens
  misc_RNA (1)...(19): siRNA sense strand
guacaguaauucugcucuu

SEQ ID NO: 1535113 - RNA, 19 nt, Homo sapiens
  misc_RNA (1)...(19): siRNA sense strand
uaucuaggacuugcaaaua

SEQ ID NO: 1535114 - RNA, 19 nt, Homo sapiens
  misc_RNA (1)...(19): siRNA sense strand
gaagcgcaaagcugaauga

SEQ ID NO: 1535115 - RNA, 19 nt, Homo sapiens
  misc_RNA (1)...(19): siRNA sense strand
ggaaucugaaguugcuaua

SEQ ID NO: 1535116 - RNA, 19 nt, Homo sapiens
  misc_RNA (1)...(19): siRNA sense strand
accaucagcuuuaggauau

SEQ ID NO: 1535117 - RNA, 19 nt, Homo sapiens
  misc_RNA (1)...(19): siRNA sense strand
gaacucaggcgccucuucu

SEQ ID NO: 1535118 - RNA, 19 nt, Homo sapiens
  misc_RNA (1)...(19): siRNA sense strand
aaucugaaguugcuauauc

SEQ ID NO: 1535119 - RNA, 19 nt, Homo sapiens
  misc_RNA (1)...(19): siRNA sense strand
aggaguugguucagaagua

SEQ ID NO: 1535120 - RNA, 19 nt, Homo sapiens
  misc_RNA (1)...(19): siRNA sense strand
gaaguuugcaguguugaug

SEQ ID NO: 1535121 - RNA, 19 nt, Homo sapiens
  misc_RNA (1)...(19): siRNA sense strand
cuauguuggugccuuguuu

SEQ ID NO: 1535122 - RNA, 19 nt, Homo sapiens
  misc_RNA (1)...(19): siRNA sense strand
ggaguugguucagaaguac

SEQ ID NO: 1535123 - RNA, 19 nt, Homo sapiens
  misc_RNA (1)...(19): siRNA sense strand
ggacuugcaaauaagaaug

SEQ ID NO: 1535124 - RNA, 19 nt, Homo sapiens
  misc_RNA (1)...(19): siRNA sense strand
gcucucauuucacucuuca

SEQ ID NO: 1535125 - RNA, 19 nt, Homo sapiens
  misc_RNA (1)...(19): siRNA sense strand
uaucuggaaucugaaguug

SEQ ID NO: 1535126 - RNA, 19 nt, Homo sapiens
  misc_RNA (1)...(19): siRNA sense strand
caguguuccuguuauuuau

SEQ ID NO: 1535127 - RNA, 19 nt, Homo sapiens
  misc_RNA (1)...(19): siRNA sense strand
gaagacuggagugguguuu

SEQ ID NO: 1535128 - RNA, 19 nt, Homo sapiens
  misc_RNA (1)...(19): siRNA sense strand
guguuccuguuauuuauga

SEQ ID NO: 1535129 - RNA, 19 nt, Homo sapiens
  misc_RNA (1)...(19): siRNA sense strand
gauuuuggcucucauuuca

SEQ ID NO: 1535130 - RNA, 19 nt, Homo sapiens
  misc_RNA (1)...(19): siRNA sense strand
ucugugaccaucagcuuua

SEQ ID NO: 1535131 - RNA, 19 nt, Homo sapiens
  misc_RNA (1)...(19): siRNA sense strand
acucaggcgccucuucuua

SEQ ID NO: 1535132 - RNA, 19 nt, Homo sapiens
  misc_RNA (1)...(19): siRNA sense strand
cuucaguguuccuguuauu

SEQ ID NO: 1535133 - RNA, 19 nt, Homo sapiens
  misc_RNA (1)...(19): siRNA sense strand
aucuaggacuugcaaauaa

SEQ ID NO: 1535134 - RNA, 19 nt, Homo sapiens
  misc_RNA (1)...(19): siRNA sense strand
auacaagggugugauccaa

SEQ ID NO: 1535135 - RNA, 19 nt, Homo sapiens
  misc_RNA (1)...(19): siRNA sense strand
ucugaaguuugcaguguug

SEQ ID NO: 1535136 - RNA, 19 nt, Homo sapiens
  misc_RNA (1)...(19): siRNA sense strand
uccaagcuauccagaaauc

SEQ ID NO: 1535137 - RNA, 19 nt, Homo sapiens
  misc_RNA (1)...(19): siRNA sense strand
gauauacaagggugugauc

SEQ ID NO: 1535138 - RNA, 19 nt, Homo sapiens
  misc_RNA (1)...(19): siRNA sense strand
agacuggagugguguuugg

SEQ ID NO: 1535139 - RNA, 19 nt, Homo sapiens
  misc_RNA (1)...(19): siRNA sense strand
aggcgccucuucuuaguug

SEQ ID NO: 1535140 - RNA, 19 nt, Homo sapiens
  misc_RNA (1)...(19): siRNA sense strand
uacaguaauucugcucuug

SEQ ID NO: 1535141 - RNA, 19 nt, Homo sapiens
  misc_RNA (1)...(19): siRNA sense strand
uuaauggucugacacuacu

SEQ ID NO: 1535142 - RNA, 19 nt, Homo sapiens
  misc_RNA (1)...(19): siRNA sense strand
gaaucugaaguugcuauau

SEQ ID NO: 1535143 - RNA, 19 nt, Homo sapiens
  misc_RNA (1)...(19): siRNA sense strand
gaucauuaucuaggacuug

SEQ ID NO: 1535144 - RNA, 19 nt, Homo sapiens
  misc_RNA (1)...(19): siRNA sense strand
ucaggcgccucuucuuagu

SEQ ID NO: 1535145 - RNA, 19 nt, Homo sapiens
  misc_RNA (1)...(19): siRNA sense strand
ugcuauaucugaggaguug

SEQ ID NO: 1535146 - RNA, 19 nt, Homo sapiens
  misc_RNA (1)...(19): siRNA sense strand
ccaucagcuuuaggauaua

SEQ ID NO: 1535147 - RNA, 19 nt, Homo sapiens
  misc_RNA (1)...(19): siRNA sense strand
ucuaggacuugcaaauaag

SEQ ID NO: 1535148 - RNA, 19 nt, Homo sapiens
  misc_RNA (1)...(19): siRNA sense strand
uauguuggugccuuguuua

SEQ ID NO: 1535149 - RNA, 19 nt, Homo sapiens
  misc_RNA (1)...(19): siRNA sense strand
ucucugaaguuugcagugu

SEQ ID NO: 1535150 - RNA, 19 nt, Homo sapiens
  misc_RNA (1)...(19): siRNA sense strand
cagaugaaggccacccauu

SEQ ID NO: 1535151 - RNA, 19 nt, Homo sapiens
  misc_RNA (1)...(19): siRNA sense strand
ucaugugaacugcacgaua

SEQ ID NO: 1535152 - RNA, 19 nt, Homo sapiens
  misc_RNA (1)...(19): siRNA sense strand
uaucugaggaguugguuca

SEQ ID NO: 1535153 - RNA, 19 nt, Homo sapiens
  misc_RNA (1)...(19): siRNA sense strand
guuuaauggucugacacua

SEQ ID NO: 1535154 - RNA, 19 nt, Homo sapiens
  misc_RNA (1)...(19): siRNA sense strand
ggaacucaggcgccucuuc

SEQ ID NO: 1535155 - RNA, 19 nt, Homo sapiens
  misc_RNA (1)...(19): siRNA sense strand
ugacaguauucagcauugu

SEQ ID NO: 1535156 - RNA, 19 nt, Homo sapiens
  misc_RNA (1)...(19): siRNA sense strand
guacuggagagacauuaag

SEQ ID NO: 1535157 - RNA, 19 nt, Homo sapiens
  misc_RNA (1)...(19): siRNA sense strand
cugcuuucauugacaguau

SEQ ID NO: 1535158 - RNA, 19 nt, Homo sapiens
  misc_RNA (1)...(19): siRNA sense strand
ugaacugcacgauaaagga

SEQ ID NO: 1535159 - RNA, 19 nt, Homo sapiens
  misc_RNA (1)...(19): siRNA sense strand
caucagcuuuaggauauac

SEQ ID NO: 1535160 - RNA, 19 nt, Homo sapiens
  misc_RNA (1)...(19): siRNA sense strand
gaauguuaaagaugcuaug

SEQ ID NO: 1535161 - RNA, 19 nt, Homo sapiens
  misc_RNA (1)...(19): siRNA sense strand
uugacaguauucagcauug

SEQ ID NO: 1535162 - RNA, 19 nt, Homo sapiens
  misc_RNA (1)...(19): siRNA sense strand
agaugaaggccacccauuc

SEQ ID NO: 1535163 - RNA, 19 nt, Homo sapiens
  misc_RNA (1)...(19): siRNA sense strand
gaacggcaucaggcacaga

SEQ ID NO: 1535164 - RNA, 19 nt, Homo sapiens
  misc_RNA (1)...(19): siRNA sense strand
gccuauuccugcugcuuuc

SEQ ID NO: 1535165 - RNA, 19 nt, Homo sapiens
  misc_RNA (1)...(19): siRNA sense strand
ucuggaaucugaaguugcu

SEQ ID NO: 1535166 - RNA, 19 nt, Homo sapiens
  misc_RNA (1)...(19): siRNA sense strand
acucuucaguguuccuguu

SEQ ID NO: 1535167 - RNA, 19 nt, Homo sapiens
  misc_RNA (1)...(19): siRNA sense strand
uggagagacauuaagaaga

SEQ ID NO: 1535168 - RNA, 19 nt, Homo sapiens
  misc_RNA (1)...(19): siRNA sense strand
caguaauucugcucuuggu

SEQ ID NO: 1535169 - RNA, 19 nt, Homo sapiens
  misc_RNA (1)...(19): siRNA sense strand
uauuccugcugcuuucauu

SEQ ID NO: 1535170 - RNA, 19 nt, Homo sapiens
  misc_RNA (1)...(19): siRNA sense strand
acaguauucagcauuguga

SEQ ID NO: 1535171 - RNA, 19 nt, Homo sapiens
  misc_RNA (1)...(19): siRNA sense strand
ggcaucaggcacagauaga

SEQ ID NO: 1535172 - RNA, 19 nt, Homo sapiens
  misc_RNA (1)...(19): siRNA sense strand
gcaguguugauguggguau

SEQ ID NO: 1535173 - RNA, 19 nt, Homo sapiens
  misc_RNA (1)...(19): siRNA sense strand
uugauucucugaaguuugc

SEQ ID NO: 1535174 - RNA, 19 nt, Homo sapiens
  misc_RNA (1)...(19): siRNA sense strand
uuaguugauucucugaagu

SEQ ID NO: 1535175 - RNA, 19 nt, Homo sapiens
  misc_RNA (1)...(19): siRNA sense strand
gcaagaagcugaaguaugg

SEQ ID NO: 1535176 - RNA, 19 nt, Homo sapiens
  misc_RNA (1)...(19): siRNA sense strand
gaaauccucugucuagaaa

SEQ ID NO: 1535177 - RNA, 19 nt, Homo sapiens
  misc_RNA (1)...(19): siRNA sense strand
gaaagaaaccucagugauu

SEQ ID NO: 1535178 - RNA, 19 nt, Homo sapiens
  misc_RNA (1)...(19): siRNA sense strand
acaaauagcugaagccaaa

SEQ ID NO: 1535179 - RNA, 19 nt, Homo sapiens
  misc_RNA (1)...(19): siRNA sense strand
gaaacagaguugaaauuug

SEQ ID NO: 1535180 - RNA, 19 nt, Homo sapiens
  misc_RNA (1)...(19): siRNA sense strand
gaaaugaugccaaagauga

SEQ ID NO: 1535181 - RNA, 19 nt, Homo sapiens
  misc_RNA (1)...(19): siRNA sense strand
ggagaaagaaaccacauua

SEQ ID NO: 1535182 - RNA, 19 nt, Homo sapiens
  misc_RNA (1)...(19): siRNA sense strand
gaaaugaaacucuauagga

SEQ ID NO: 1535183 - RNA, 19 nt, Homo sapiens
  misc_RNA (1)...(19): siRNA sense strand
aaagaaaccucagugauuu

SEQ ID NO: 1535184 - RNA, 19 nt, Homo sapiens
  misc_RNA (1)...(19): siRNA sense strand
ggaaaauggugcuaacuua

SEQ ID NO: 1535185 - RNA, 19 nt, Homo sapiens
  misc_RNA (1)...(19): siRNA sense strand
gaaguagagucaucuuuag

SEQ ID NO: 1535186 - RNA, 19 nt, Homo sapiens
  misc_RNA (1)...(19): siRNA sense strand
gaagaagaauuggagagaa

SEQ ID NO: 1535187 - RNA, 19 nt, Homo sapiens
  misc_RNA (1)...(19): siRNA sense strand
gauucaugcugcuaaguua

SEQ ID NO: 1535188 - RNA, 19 nt, Homo sapiens
  misc_RNA (1)...(19): siRNA sense strand
gagcuuacagagcauauua

SEQ ID NO: 1535189 - RNA, 19 nt, Homo sapiens
  misc_RNA (1)...(19): siRNA sense strand
ugaaguagagucaucuuua

SEQ ID NO: 1535190 - RNA, 19 nt, Homo sapiens
  misc_RNA (1)...(19): siRNA sense strand
gcugcuaaguuaaauguuu

SEQ ID NO: 1535191 - RNA, 19 nt, Homo sapiens
  misc_RNA (1)...(19): siRNA sense strand
gaacagguccaauucugaa

SEQ ID NO: 1535192 - RNA, 19 nt, Homo sapiens
  misc_RNA (1)...(19): siRNA sense strand
ggaggaaaauuaccgaaua

SEQ ID NO: 1535193 - RNA, 19 nt, Homo sapiens
  misc_RNA (1)...(19): siRNA sense strand
guaugaaggcuaugaagua

SEQ ID NO: 1535194 - RNA, 19 nt, Homo sapiens
  misc_RNA (1)...(19): siRNA sense strand
auagaaagcuagccaaaga

SEQ ID NO: 1535195 - RNA, 19 nt, Homo sapiens
  misc_RNA (1)...(19): siRNA sense strand
gaaauuaacaguggaggaa

SEQ ID NO: 1535196 - RNA, 19 nt, Homo sapiens
  misc_RNA (1)...(19): siRNA sense strand
gaugaaauccucugucuag

SEQ ID NO: 1535197 - RNA, 19 nt, Homo sapiens
  misc_RNA (1)...(19): siRNA sense strand
ugacugaauucuaucaaga

SEQ ID NO: 1535198 - RNA, 19 nt, Homo sapiens
  misc_RNA (1)...(19): siRNA sense strand
gucaaugccuucagaaaug

SEQ ID NO: 1535199 - RNA, 19 nt, Homo sapiens
  misc_RNA (1)...(19): siRNA sense strand
gcaacuggcccuggcuuua

SEQ ID NO: 1535200 - RNA, 19 nt, Homo sapiens
  misc_RNA (1)...(19): siRNA sense strand
caaaguacacgcagaacaa

SEQ ID NO: 1535201 - RNA, 19 nt, Homo sapiens
  misc_RNA (1)...(19): siRNA sense strand
ggagaccuauagaaagcua

SEQ ID NO: 1535202 - RNA, 19 nt, Homo sapiens
  misc_RNA (1)...(19): siRNA sense strand
ucaaagggaagacagauuu

SEQ ID NO: 1535203 - RNA, 19 nt, Homo sapiens
  misc_RNA (1)...(19): siRNA sense strand
aaagaggacaugauaauug

SEQ ID NO: 1535204 - RNA, 19 nt, Homo sapiens
  misc_RNA (1)...(19): siRNA sense strand
gaauugauggcggauauuu

SEQ ID NO: 1535205 - RNA, 19 nt, Homo sapiens
  misc_RNA (1)...(19): siRNA sense strand
guagaaaugaugccaaaga

SEQ ID NO: 1535206 - RNA, 19 nt, Homo sapiens
  misc_RNA (1)...(19): siRNA sense strand
cagcagaacccagaaguuu

SEQ ID NO: 1535207 - RNA, 19 nt, Homo sapiens
  misc_RNA (1)...(19): siRNA sense strand
cuaaugcacuugauguuuc

SEQ ID NO: 1535208 - RNA, 19 nt, Homo sapiens
  misc_RNA (1)...(19): siRNA sense strand
gaauagagggagaagagaa

SEQ ID NO: 1535209 - RNA, 19 nt, Homo sapiens
  misc_RNA (1)...(19): siRNA sense strand
gaagaacgacgggcuauag

SEQ ID NO: 1535210 - RNA, 19 nt, Homo sapiens
  misc_RNA (1)...(19): siRNA sense strand
gaaggcggcagcagaagaa

SEQ ID NO: 1535211 - RNA, 19 nt, Homo sapiens
  misc_RNA (1)...(19): siRNA sense strand
gagaaaagaggacaugaua

SEQ ID NO: 1535212 - RNA, 19 nt, Homo sapiens
  misc_RNA (1)...(19): siRNA sense strand
gugcagcuguuauuggauu

SEQ ID NO: 1535213 - RNA, 19 nt, Homo sapiens
  misc_RNA (1)...(19): siRNA sense strand
caguagaaaugaugccaaa

SEQ ID NO: 1535214 - RNA, 19 nt, Homo sapiens
  misc_RNA (1)...(19): siRNA sense strand
ucagaagcuucaacagaaa

SEQ ID NO: 1535215 - RNA, 19 nt, Homo sapiens
  misc_RNA (1)...(19): siRNA sense strand
gacccugacuggacacuug

SEQ ID NO: 1535216 - RNA, 19 nt, Homo sapiens
  misc_RNA (1)...(19): siRNA sense strand
gaaaggagaagugagugaa

SEQ ID NO: 1535217 - RNA, 19 nt, Homo sapiens
  misc_RNA (1)...(19): siRNA sense strand
gaacgacgggcuauagcaa

SEQ ID NO: 1535218 - RNA, 19 nt, Homo sapiens
  misc_RNA (1)...(19): siRNA sense strand
gaaaagaggacaugauaau

SEQ ID NO: 1535219 - RNA, 19 nt, Homo sapiens
  misc_RNA (1)...(19): siRNA sense strand
gagaaagaaaccacauuau

SEQ ID NO: 1535220 - RNA, 19 nt, Homo sapiens
  misc_RNA (1)...(19): siRNA sense strand
gcaacgcuuucuggacuaa

SEQ ID NO: 1535221 - RNA, 19 nt, Homo sapiens
  misc_RNA (1)...(19): siRNA sense strand
caaaaucccucaaaucaca

SEQ ID NO: 1535222 - RNA, 19 nt, Homo sapiens
  misc_RNA (1)...(19): siRNA sense strand
gcagaagaagcacgaaguu

SEQ ID NO: 1535223 - RNA, 19 nt, Homo sapiens
  misc_RNA (1)...(19): siRNA sense strand
gcagaacccagaaguuuua

SEQ ID NO: 1535224 - RNA, 19 nt, Homo sapiens
  misc_RNA (1)...(19): siRNA sense strand
ccucagugauuuaaggaaa

SEQ ID NO: 1535225 - RNA, 19 nt, Homo sapiens
  misc_RNA (1)...(19): siRNA sense strand
caaaggaagagcuuacaga

SEQ ID NO: 1535226 - RNA, 19 nt, Homo sapiens
  misc_RNA (1)...(19): siRNA sense strand
caacuucagacaagccaua

SEQ ID NO: 1535227 - RNA, 19 nt, Homo sapiens
  misc_RNA (1)...(19): siRNA sense strand
gaagaagcacgaaguuugg

SEQ ID NO: 1535228 - RNA, 19 nt, Homo sapiens
  misc_RNA (1)...(19): siRNA sense strand
auucugaacuugaggauga

SEQ ID NO: 1535229 - RNA, 19 nt, Homo sapiens
  misc_RNA (1)...(19): siRNA sense strand
uagaaaugaugccaaagau

SEQ ID NO: 1535230 - RNA, 19 nt, Homo sapiens
  misc_RNA (1)...(19): siRNA sense strand
ggucaaugccuucagaaau

SEQ ID NO: 1535231 - RNA, 19 nt, Homo sapiens
  misc_RNA (1)...(19): siRNA sense strand
ggaaaggagaagugaguga

SEQ ID NO: 1535232 - RNA, 19 nt, Homo sapiens
  misc_RNA (1)...(19): siRNA sense strand
agaagaagcacgaaguuug

SEQ ID NO: 1535233 - RNA, 19 nt, Homo sapiens
  misc_RNA (1)...(19): siRNA sense strand
gaaagaaaaugcucacaac

SEQ ID NO: 1535234 - RNA, 19 nt, Homo sapiens
  misc_RNA (1)...(19): siRNA sense strand
gaagaugaaaugaaacucu

SEQ ID NO: 1535235 - RNA, 19 nt, Homo sapiens
  misc_RNA (1)...(19): siRNA sense strand
ggacacuugccaaugauga

SEQ ID NO: 1535236 - RNA, 19 nt, Homo sapiens
  misc_RNA (1)...(19): siRNA sense strand
ggaauccaguagaaaugau

SEQ ID NO: 1535237 - RNA, 19 nt, Homo sapiens
  misc_RNA (1)...(19): siRNA sense strand
uauacagucucuagaagau

SEQ ID NO: 1535238 - RNA, 19 nt, Homo sapiens
  misc_RNA (1)...(19): siRNA sense strand
uaaaugugccugauucauc

SEQ ID NO: 1535239 - RNA, 19 nt, Homo sapiens
  misc_RNA (1)...(19): siRNA sense strand
agaaaaugcucacaacaaa

SEQ ID NO: 1535240 - RNA, 19 nt, Homo sapiens
  misc_RNA (1)...(19): siRNA sense strand
uacagucucuagaagauga

SEQ ID NO: 1535241 - RNA, 19 nt, Homo sapiens
  misc_RNA (1)...(19): siRNA sense strand
accaucagauuaccaauga

SEQ ID NO: 1535242 - RNA, 19 nt, Homo sapiens
  misc_RNA (1)...(19): siRNA sense strand
gagaaguuuagaucgguua

SEQ ID NO: 1535243 - RNA, 19 nt, Homo sapiens
  misc_RNA (1)...(19): siRNA sense strand
ggaugaugauaaccuggaa

SEQ ID NO: 1535244 - RNA, 19 nt, Homo sapiens
  misc_RNA (1)...(19): siRNA sense strand
uaacaguggaggaaaauua

SEQ ID NO: 1535245 - RNA, 19 nt, Homo sapiens
  misc_RNA (1)...(19): siRNA sense strand
gagcuucucgagguuauuu

SEQ ID NO: 1535246 - RNA, 19 nt, Homo sapiens
  misc_RNA (1)...(19): siRNA sense strand
caucagauuaccaaugaaa

SEQ ID NO: 1535247 - RNA, 19 nt, Homo sapiens
  misc_RNA (1)...(19): siRNA sense strand
aaaagcagguuauuuccua

SEQ ID NO: 1535248 - RNA, 19 nt, Homo sapiens
  misc_RNA (1)...(19): siRNA sense strand
ugaaauccucugucuagaa

SEQ ID NO: 1535249 - RNA, 19 nt, Homo sapiens
  misc_RNA (1)...(19): siRNA sense strand
gaggaugccagcuuugaga

SEQ ID NO: 1535250 - RNA, 19 nt, Homo sapiens
  misc_RNA (1)...(19): siRNA sense strand
agagucaucuuuagaggau

SEQ ID NO: 1535251 - RNA, 19 nt, Homo sapiens
  misc_RNA (1)...(19): siRNA sense strand
gaacccagaaguuuuaaaa

SEQ ID NO: 1535252 - RNA, 19 nt, Homo sapiens
  misc_RNA (1)...(19): siRNA sense strand
ugaaggcuaugaaguagag

SEQ ID NO: 1535253 - RNA, 19 nt, Homo sapiens
  misc_RNA (1)...(19): siRNA sense strand
gaagagcuuacagagcaua

SEQ ID NO: 1535254 - RNA, 19 nt, Homo sapiens
  misc_RNA (1)...(19): siRNA sense strand
acuggacacuugccaauga

SEQ ID NO: 1535255 - RNA, 19 nt, Homo sapiens
  misc_RNA (1)...(19): siRNA sense strand
gacgggcuauagcaauaaa

SEQ ID NO: 1535256 - RNA, 19 nt, Homo sapiens
  misc_RNA (1)...(19): siRNA sense strand
acgacgggcuauagcaaua

SEQ ID NO: 1535257 - RNA, 19 nt, Homo sapiens
  misc_RNA (1)...(19): siRNA sense strand
aucagaagcuucaacagaa

SEQ ID NO: 1535258 - RNA, 19 nt, Homo sapiens
  misc_RNA (1)...(19): siRNA sense strand
caacuggcccuggcuuuau

SEQ ID NO: 1535259 - RNA, 19 nt, Homo sapiens
  misc_RNA (1)...(19): siRNA sense strand
gcuuacagagcauauuaaa

SEQ ID NO: 1535260 - RNA, 19 nt, Homo sapiens
  misc_RNA (1)...(19): siRNA sense strand
ggaaccauguuuggagcuu

SEQ ID NO: 1535261 - RNA, 19 nt, Homo sapiens
  misc_RNA (1)...(19): siRNA sense strand
uuuagaggaugccagcuuu

SEQ ID NO: 1535262 - RNA, 19 nt, Homo sapiens
  misc_RNA (1)...(19): siRNA sense strand
gaggacaugauaauugguu

SEQ ID NO: 1535263 - RNA, 19 nt, Homo sapiens
  misc_RNA (1)...(19): siRNA sense strand
aagaggacaugauaauugg

SEQ ID NO: 1535264 - RNA, 19 nt, Homo sapiens
  misc_RNA (1)...(19): siRNA sense strand
aaucagaagcuucaacaga

SEQ ID NO: 1535265 - RNA, 19 nt, Homo sapiens
  misc_RNA (1)...(19): siRNA sense strand
guauacagucucuagaaga

SEQ ID NO: 1535266 - RNA, 19 nt, Homo sapiens
  misc_RNA (1)...(19): siRNA sense strand
aaaugugccugauucaucu

SEQ ID NO: 1535267 - RNA, 19 nt, Homo sapiens
  misc_RNA (1)...(19): siRNA sense strand
uaugaaggcuaugaaguag

SEQ ID NO: 1535268 - RNA, 19 nt, Homo sapiens
  misc_RNA (1)...(19): siRNA sense strand
uaaaaugagugaagaacga

SEQ ID NO: 1535269 - RNA, 19 nt, Homo sapiens
  misc_RNA (1)...(19): siRNA sense strand
aagcuucaacagaaacuua

SEQ ID NO: 1535270 - RNA, 19 nt, Homo sapiens
  misc_RNA (1)...(19): siRNA sense strand
uaaugcacuugauguuuca

SEQ ID NO: 1535271 - RNA, 19 nt, Homo sapiens
  misc_RNA (1)...(19): siRNA sense strand
ugagaaggcggcagcagaa

SEQ ID NO: 1535272 - RNA, 19 nt, Homo sapiens
  misc_RNA (1)...(19): siRNA sense strand
aaaccucagugauuuaagg

SEQ ID NO: 1535273 - RNA, 19 nt, Homo sapiens
  misc_RNA (1)...(19): siRNA sense strand
ugaaagaaaccucagugau

SEQ ID NO: 1535274 - RNA, 19 nt, Homo sapiens
  misc_RNA (1)...(19): siRNA sense strand
cagaagaagcacgaaguuu

SEQ ID NO: 1535275 - RNA, 19 nt, Homo sapiens
  misc_RNA (1)...(19): siRNA sense strand
aguaaacacuuguggauga

SEQ ID NO: 1535276 - RNA, 19 nt, Homo sapiens
  misc_RNA (1)...(19): siRNA sense strand
gagcuggacggcaggauuu

SEQ ID NO: 1535277 - RNA, 19 nt, Homo sapiens
  misc_RNA (1)...(19): siRNA sense strand
cacagaaggcgcucaguaa

SEQ ID NO: 1535278 - RNA, 19 nt, Homo sapiens
  misc_RNA (1)...(19): siRNA sense strand
agaaggcgcucaguaaaca

SEQ ID NO: 1535279 - RNA, 19 nt, Homo sapiens
  misc_RNA (1)...(19): siRNA sense strand
acacagaaggcgcucagua

SEQ ID NO: 1535280 - RNA, 19 nt, Homo sapiens
  misc_RNA (1)...(19): siRNA sense strand
acagaaggcgcucaguaaa

SEQ ID NO: 1535281 - RNA, 19 nt, Homo sapiens
  misc_RNA (1)...(19): siRNA sense strand
ggaggcagugcuaccagaa

SEQ ID NO: 1535282 - RNA, 19 nt, Homo sapiens
  misc_RNA (1)...(19): siRNA sense strand
ucaguaaacacuuguggau

SEQ ID NO: 1535283 - RNA, 19 nt, Homo sapiens
  misc_RNA (1)...(19): siRNA sense strand
ucccugagguuggucuuug

SEQ ID NO: 1535284 - RNA, 19 nt, Homo sapiens
  misc_RNA (1)...(19): siRNA sense strand
cagaaggcgcucaguaaac

SEQ ID NO: 1535285 - RNA, 19 nt, Homo sapiens
  misc_RNA (1)...(19): siRNA sense strand
ggaccucuccgacccucau

SEQ ID NO: 1535286 - RNA, 19 nt, Homo sapiens
  misc_RNA (1)...(19): siRNA sense strand
ccaaggacauggacaauga

SEQ ID NO: 1535287 - RNA, 19 nt, Homo sapiens
  misc_RNA (1)...(19): siRNA sense strand
gagaucaagucauuacuga

SEQ ID NO: 1535288 - RNA, 19 nt, Homo sapiens
  misc_RNA (1)...(19): siRNA sense strand
ccaagaugcuucagagaaa

SEQ ID NO: 1535289 - RNA, 19 nt, Homo sapiens
  misc_RNA (1)...(19): siRNA sense strand
auaaggagaucaagucauu

SEQ ID NO: 1535290 - RNA, 19 nt, Homo sapiens
  misc_RNA (1)...(19): siRNA sense strand
ggagcugccugcugcguaa

SEQ ID NO: 1535291 - RNA, 19 nt, Homo sapiens
  misc_RNA (1)...(19): siRNA sense strand
gcagcagguucacgaagaa

SEQ ID NO: 1535292 - RNA, 19 nt, Homo sapiens
  misc_RNA (1)...(19): siRNA sense strand
gcaagcgagaguucaauaa

SEQ ID NO: 1535293 - RNA, 19 nt, Homo sapiens
  misc_RNA (1)...(19): siRNA sense strand
gggugcagcugcccaagaa

SEQ ID NO: 1535294 - RNA, 19 nt, Homo sapiens
  misc_RNA (1)...(19): siRNA sense strand
aagccgagauugaagauga

SEQ ID NO: 1535295 - RNA, 19 nt, Homo sapiens
  misc_RNA (1)...(19): siRNA sense strand
gauugaagaugaagaugag

SEQ ID NO: 1535296 - RNA, 19 nt, Homo sapiens
  misc_RNA (1)...(19): siRNA sense strand
cggguuaccuggccgauga

SEQ ID NO: 1535297 - RNA, 19 nt, Homo sapiens
  misc_RNA (1)...(19): siRNA sense strand
ggccaacgccgaaacaaga

SEQ ID NO: 1535298 - RNA, 19 nt, Homo sapiens
  misc_RNA (1)...(19): siRNA sense strand
gggaaaggccucagucagu

SEQ ID NO: 1535299 - RNA, 19 nt, Homo sapiens
  misc_RNA (1)...(19): siRNA sense strand
aggaugaguucaaggauga

SEQ ID NO: 1535300 - RNA, 19 nt, Homo sapiens
  misc_RNA (1)...(19): siRNA sense strand
gacaaugagggccgugaua

SEQ ID NO: 1535301 - RNA, 19 nt, Homo sapiens
  misc_RNA (1)...(19): siRNA sense strand
cgaccugccuggcuacugu

SEQ ID NO: 1535302 - RNA, 19 nt, Homo sapiens
  misc_RNA (1)...(19): siRNA sense strand
gugauaaagccgagauuga

SEQ ID NO: 1535303 - RNA, 19 nt, Homo sapiens
  misc_RNA (1)...(19): siRNA sense strand
gagaacaggagccaaucuu

SEQ ID NO: 1535304 - RNA, 19 nt, Homo sapiens
  misc_RNA (1)...(19): siRNA sense strand
ugauaaagccgagauugaa

SEQ ID NO: 1535305 - RNA, 19 nt, Homo sapiens
  misc_RNA (1)...(19): siRNA sense strand
caaugagggccgugauaaa

SEQ ID NO: 1535306 - RNA, 19 nt, Homo sapiens
  misc_RNA (1)...(19): siRNA sense strand
cagcuaaacccaccaaugg

SEQ ID NO: 1535307 - RNA, 19 nt, Homo sapiens
  misc_RNA (1)...(19): siRNA sense strand
gccaccagauucaaacuca

SEQ ID NO: 1535308 - RNA, 19 nt, Homo sapiens
  misc_RNA (1)...(19): siRNA sense strand
ggagaucaagucauuacug

SEQ ID NO: 1535309 - RNA, 19 nt, Homo sapiens
  misc_RNA (1)...(19): siRNA sense strand
ucaauaaggagaucaaguc

SEQ ID NO: 1535310 - RNA, 19 nt, Homo sapiens
  misc_RNA (1)...(19): siRNA sense strand
ggaccuuucccugggcuua

SEQ ID NO: 1535311 - RNA, 19 nt, Homo sapiens
  misc_RNA (1)...(19): siRNA sense strand
gcagguucacgaagaagaa

SEQ ID NO: 1535312 - RNA, 19 nt, Homo sapiens
  misc_RNA (1)...(19): siRNA sense strand
gcuuggagcccaccucaga

SEQ ID NO: 1535313 - RNA, 19 nt, Homo sapiens
  misc_RNA (1)...(19): siRNA sense strand
gauaaagccgagauugaag

SEQ ID NO: 1535314 - RNA, 19 nt, Homo sapiens
  misc_RNA (1)...(19): siRNA sense strand
uggcgugccugaagcauca

SEQ ID NO: 1535315 - RNA, 19 nt, Homo sapiens
  misc_RNA (1)...(19): siRNA sense strand
acaaugagggccgugauaa

SEQ ID NO: 1535316 - RNA, 19 nt, Homo sapiens
  misc_RNA (1)...(19): siRNA sense strand
ccucuucccugcccugcaa

SEQ ID NO: 1535317 - RNA, 19 nt, Homo sapiens
  misc_RNA (1)...(19): siRNA sense strand
gcaaguacgaguucgaaaa

SEQ ID NO: 1535318 - RNA, 19 nt, Homo sapiens
  misc_RNA (1)...(19): siRNA sense strand
gaaaaggaccucaguaagc

SEQ ID NO: 1535319 - RNA, 19 nt, Homo sapiens
  misc_RNA (1)...(19): siRNA sense strand
caauaaggagaucaaguca

SEQ ID NO: 1535320 - RNA, 19 nt, Homo sapiens
  misc_RNA (1)...(19): siRNA sense strand
augaggagcucgccgacuu

SEQ ID NO: 1535321 - RNA, 19 nt, Homo sapiens
  misc_RNA (1)...(19): siRNA sense strand
caagcgagaguucaauaag

SEQ ID NO: 1535322 - RNA, 19 nt, Homo sapiens
  misc_RNA (1)...(19): siRNA sense strand
gcaugucucacuucuccaa

SEQ ID NO: 1535323 - RNA, 19 nt, Homo sapiens
  misc_RNA (1)...(19): siRNA sense strand
uaaggagaucaagucauua

SEQ ID NO: 1535324 - RNA, 19 nt, Homo sapiens
  misc_RNA (1)...(19): siRNA sense strand
uggagacagugguggagaa

SEQ ID NO: 1535325 - RNA, 19 nt, Homo sapiens
  misc_RNA (1)...(19): siRNA sense strand
aagaugaagaugaggauga

SEQ ID NO: 1535326 - RNA, 19 nt, Homo sapiens
  misc_RNA (1)...(19): siRNA sense strand
ucuccaaccgccuuuauga

SEQ ID NO: 1535327 - RNA, 19 nt, Homo sapiens
  misc_RNA (1)...(19): siRNA sense strand
agcgagaguucaauaagga

SEQ ID NO: 1535328 - RNA, 19 nt, Homo sapiens
  misc_RNA (1)...(19): siRNA sense strand
cccaagaugcuucagagaa

SEQ ID NO: 1535329 - RNA, 19 nt, Homo sapiens
  misc_RNA (1)...(19): siRNA sense strand
ggaagggaaaggccucagu

SEQ ID NO: 1535330 - RNA, 19 nt, Homo sapiens
  misc_RNA (1)...(19): siRNA sense strand
cgagauugaagaugaagau

SEQ ID NO: 1535331 - RNA, 19 nt, Homo sapiens
  misc_RNA (1)...(19): siRNA sense strand
agaagccgcugcccuccau

SEQ ID NO: 1535332 - RNA, 19 nt, Homo sapiens
  misc_RNA (1)...(19): siRNA sense strand
ccaccagauucaaacucaa

SEQ ID NO: 1535333 - RNA, 19 nt, Homo sapiens
  misc_RNA (1)...(19): siRNA sense strand
gaaccucaagcggcugcua

SEQ ID NO: 1535334 - RNA, 19 nt, Homo sapiens
  misc_RNA (1)...(19): siRNA sense strand
ggacaaugagggccgugau

SEQ ID NO: 1535335 - RNA, 19 nt, Homo sapiens
  misc_RNA (1)...(19): siRNA sense strand
ccagcuaaacccaccaaug

SEQ ID NO: 1535336 - RNA, 19 nt, Homo sapiens
  misc_RNA (1)...(19): siRNA sense strand
aagcgagaguucaauaagg

SEQ ID NO: 1535337 - RNA, 19 nt, Homo sapiens
  misc_RNA (1)...(19): siRNA sense strand
ccagcuccauguccaacug

SEQ ID NO: 1535338 - RNA, 19 nt, Homo sapiens
  misc_RNA (1)...(19): siRNA sense strand
cgaaguccagcaugucuca

SEQ ID NO: 1535339 - RNA, 19 nt, Homo sapiens
  misc_RNA (1)...(19): siRNA sense strand
cgcaagcgagaguucaaua

SEQ ID NO: 1535340 - RNA, 19 nt, Homo sapiens
  misc_RNA (1)...(19): siRNA sense strand
ggagaacaggagccaaucu

SEQ ID NO: 1535341 - RNA, 19 nt, Homo sapiens
  misc_RNA (1)...(19): siRNA sense strand
caagaugcuucagagaaaa

SEQ ID NO: 1535342 - RNA, 19 nt, Homo sapiens
  misc_RNA (1)...(19): siRNA sense strand
aggaugaggacaaggauga

SEQ ID NO: 1535343 - RNA, 19 nt, Homo sapiens
  misc_RNA (1)...(19): siRNA sense strand
agauugaagaugaagauga

SEQ ID NO: 1535344 - RNA, 19 nt, Homo sapiens
  misc_RNA (1)...(19): siRNA sense strand
ggaaccagccacccacacu

SEQ ID NO: 1535345 - RNA, 19 nt, Homo sapiens
  misc_RNA (1)...(19): siRNA sense strand
aaaaggaccucaguaagca

SEQ ID NO: 1535346 - RNA, 19 nt, Homo sapiens
  misc_RNA (1)...(19): siRNA sense strand
aagaugaggaugaguucaa

SEQ ID NO: 1535347 - RNA, 19 nt, Homo sapiens
  misc_RNA (1)...(19): siRNA sense strand
gaagaugaggaugaguuca

SEQ ID NO: 1535348 - RNA, 19 nt, Homo sapiens
  misc_RNA (1)...(19): siRNA sense strand
ucagcccuuuggccacuuu

SEQ ID NO: 1535349 - RNA, 19 nt, Homo sapiens
  misc_RNA (1)...(19): siRNA sense strand
ugaagaugaggaugaguuc

SEQ ID NO: 1535350 - RNA, 19 nt, Homo sapiens
  misc_RNA (1)...(19): siRNA sense strand
gaggccagccacuccaugu

SEQ ID NO: 1535351 - RNA, 19 nt, Homo sapiens
  misc_RNA (1)...(19): siRNA sense strand
agcagcagguucacgaaga

SEQ ID NO: 1535352 - RNA, 19 nt, Homo sapiens
  misc_RNA (1)...(19): siRNA sense strand
gcagcagcagguucacgaa

SEQ ID NO: 1535353 - RNA, 19 nt, Homo sapiens
  misc_RNA (1)...(19): siRNA sense strand
uaaagccgagauugaagau

SEQ ID NO: 1535354 - RNA, 19 nt, Homo sapiens
  misc_RNA (1)...(19): siRNA sense strand
gccgcucccucuacaccaa

SEQ ID NO: 1535355 - RNA, 19 nt, Homo sapiens
  misc_RNA (1)...(19): siRNA sense strand
gaccuuucccugggcuuaa

SEQ ID NO: 1535356 - RNA, 19 nt, Homo sapiens
  misc_RNA (1)...(19): siRNA sense strand
gaaaucaaccagacuauua

SEQ ID NO: 1535357 - RNA, 19 nt, Homo sapiens
  misc_RNA (1)...(19): siRNA sense strand
gaaaugaguuuguucagaa

SEQ ID NO: 1535358 - RNA, 19 nt, Homo sapiens
  misc_RNA (1)...(19): siRNA sense strand
gaacaaaacugaagaauca

SEQ ID NO: 1535359 - RNA, 19 nt, Homo sapiens
  misc_RNA (1)...(19): siRNA sense strand
ugaagaagaugcugcuuua

SEQ ID NO: 1535360 - RNA, 19 nt, Homo sapiens
  misc_RNA (1)...(19): siRNA sense strand
gaaacugccuucuaaagug

SEQ ID NO: 1535361 - RNA, 19 nt, Homo sapiens
  misc_RNA (1)...(19): siRNA sense strand
ggacuauccugauuauuau

SEQ ID NO: 1535362 - RNA, 19 nt, Homo sapiens
  misc_RNA (1)...(19): siRNA sense strand
ugacauggcuucucccaaa

SEQ ID NO: 1535363 - RNA, 19 nt, Homo sapiens
  misc_RNA (1)...(19): siRNA sense strand
gaaacuaaaugaggucuau

SEQ ID NO: 1535364 - RNA, 19 nt, Homo sapiens
  misc_RNA (1)...(19): siRNA sense strand
caacaaaguuccaguuagu

SEQ ID NO: 1535365 - RNA, 19 nt, Homo sapiens
  misc_RNA (1)...(19): siRNA sense strand
gagcauauguuugaaguau

SEQ ID NO: 1535366 - RNA, 19 nt, Homo sapiens
  misc_RNA (1)...(19): siRNA sense strand
ggaagaguaugaugauguu

SEQ ID NO: 1535367 - RNA, 19 nt, Homo sapiens
  misc_RNA (1)...(19): siRNA sense strand
ggacagauucagaaauaua

SEQ ID NO: 1535368 - RNA, 19 nt, Homo sapiens
  misc_RNA (1)...(19): siRNA sense strand
ggagugugaucugaauuua

SEQ ID NO: 1535369 - RNA, 19 nt, Homo sapiens
  misc_RNA (1)...(19): siRNA sense strand
caagaaagcagaauaugaa

SEQ ID NO: 1535370 - RNA, 19 nt, Homo sapiens
  misc_RNA (1)...(19): siRNA sense strand
gaagaaaccugccccauga

SEQ ID NO: 1535371 - RNA, 19 nt, Homo sapiens
  misc_RNA (1)...(19): siRNA sense strand
gcacucagcuauaccacaa

SEQ ID NO: 1535372 - RNA, 19 nt, Homo sapiens
  misc_RNA (1)...(19): siRNA sense strand
gaucugaguugccugacua

SEQ ID NO: 1535373 - RNA, 19 nt, Homo sapiens
  misc_RNA (1)...(19): siRNA sense strand
ugacgaagaugaugaugaa

SEQ ID NO: 1535374 - RNA, 19 nt, Homo sapiens
  misc_RNA (1)...(19): siRNA sense strand
ccacauaucgucuguauug

SEQ ID NO: 1535375 - RNA, 19 nt, Homo sapiens
  misc_RNA (1)...(19): siRNA sense strand
gcauauguuugaaguauug

SEQ ID NO: 1535376 - RNA, 19 nt, Homo sapiens
  misc_RNA (1)...(19): siRNA sense strand
acaagcagaugaagaaauu

SEQ ID NO: 1535377 - RNA, 19 nt, Homo sapiens
  misc_RNA (1)...(19): siRNA sense strand
gaagaaaucaaccagacua

SEQ ID NO: 1535378 - RNA, 19 nt, Homo sapiens
  misc_RNA (1)...(19): siRNA sense strand
gagcuuauccacaaucuuu

SEQ ID NO: 1535379 - RNA, 19 nt, Homo sapiens
  misc_RNA (1)...(19): siRNA sense strand
gcuauaaugugcccaauuc

SEQ ID NO: 1535380 - RNA, 19 nt, Homo sapiens
  misc_RNA (1)...(19): siRNA sense strand
guuaggaguugucggaaua

SEQ ID NO: 1535381 - RNA, 19 nt, Homo sapiens
  misc_RNA (1)...(19): siRNA sense strand
acaaggaggucguuuauca

SEQ ID NO: 1535382 - RNA, 19 nt, Homo sapiens
  misc_RNA (1)...(19): siRNA sense strand
gcaaguguguggucauguu

SEQ ID NO: 1535383 - RNA, 19 nt, Homo sapiens
  misc_RNA (1)...(19): siRNA sense strand
gcucccagguuuauaauga

SEQ ID NO: 1535384 - RNA, 19 nt, Homo sapiens
  misc_RNA (1)...(19): siRNA sense strand
ucggacagauucagaaaua

SEQ ID NO: 1535385 - RNA, 19 nt, Homo sapiens
  misc_RNA (1)...(19): siRNA sense strand
ggaagaugcuacagcgauu

SEQ ID NO: 1535386 - RNA, 19 nt, Homo sapiens
  misc_RNA (1)...(19): siRNA sense strand
ggaggagacuuuccaaucu

SEQ ID NO: 1535387 - RNA, 19 nt, Homo sapiens
  misc_RNA (1)...(19): siRNA sense strand
ugacaaauaugcuggugaa

SEQ ID NO: 1535388 - RNA, 19 nt, Homo sapiens
  misc_RNA (1)...(19): siRNA sense strand
gaagaaauucaaaggauug

SEQ ID NO: 1535389 - RNA, 19 nt, Homo sapiens
  misc_RNA (1)...(19): siRNA sense strand
caacaaguaccaagauauu

SEQ ID NO: 1535390 - RNA, 19 nt, Homo sapiens
  misc_RNA (1)...(19): siRNA sense strand
gccaugaacucuauaauac

SEQ ID NO: 1535391 - RNA, 19 nt, Homo sapiens
  misc_RNA (1)...(19): siRNA sense strand
ccaauggacuugaaaauaa

SEQ ID NO: 1535392 - RNA, 19 nt, Homo sapiens
  misc_RNA (1)...(19): siRNA sense strand
caaauaugcuggugaagag

SEQ ID NO: 1535393 - RNA, 19 nt, Homo sapiens
  misc_RNA (1)...(19): siRNA sense strand
caacaugaguggcuacauc

SEQ ID NO: 1535394 - RNA, 19 nt, Homo sapiens
  misc_RNA (1)...(19): siRNA sense strand
gaaagacugugggaggauu

SEQ ID NO: 1535395 - RNA, 19 nt, Homo sapiens
  misc_RNA (1)...(19): siRNA sense strand
gaacagggcagacuucucu

SEQ ID NO: 1535396 - RNA, 19 nt, Homo sapiens
  misc_RNA (1)...(19): siRNA sense strand
ugacauguauucucggaaa

SEQ ID NO: 1535397 - RNA, 19 nt, Homo sapiens
  misc_RNA (1)...(19): siRNA sense strand
gagauggagcugcauauuu

SEQ ID NO: 1535398 - RNA, 19 nt, Homo sapiens
  misc_RNA (1)...(19): siRNA sense strand
ugacuuugcugauucaaga

SEQ ID NO: 1535399 - RNA, 19 nt, Homo sapiens
  misc_RNA (1)...(19): siRNA sense strand
ggucguuuaucagcaauua

SEQ ID NO: 1535400 - RNA, 19 nt, Homo sapiens
  misc_RNA (1)...(19): siRNA sense strand
gagaugagggcugugauua

SEQ ID NO: 1535401 - RNA, 19 nt, Homo sapiens
  misc_RNA (1)...(19): siRNA sense strand
cauaucgucuguauugaaa

SEQ ID NO: 1535402 - RNA, 19 nt, Homo sapiens
  misc_RNA (1)...(19): siRNA sense strand
gaucccaacuuuccuaaca

SEQ ID NO: 1535403 - RNA, 19 nt, Homo sapiens
  misc_RNA (1)...(19): siRNA sense strand
caauauggcucagaaagug

SEQ ID NO: 1535404 - RNA, 19 nt, Homo sapiens
  misc_RNA (1)...(19): siRNA sense strand
cagaagacuuugugaccua

SEQ ID NO: 1535405 - RNA, 19 nt, Homo sapiens
  misc_RNA (1)...(19): siRNA sense strand
gagcauaacauccgcaaug

SEQ ID NO: 1535406 - RNA, 19 nt, Homo sapiens
  misc_RNA (1)...(19): siRNA sense strand
gccaacaaguaccaagaua

SEQ ID NO: 1535407 - RNA, 19 nt, Homo sapiens
  misc_RNA (1)...(19): siRNA sense strand
gaacgagcaagaaggauga

SEQ ID NO: 1535408 - RNA, 19 nt, Homo sapiens
  misc_RNA (1)...(19): siRNA sense strand
gagagccgcuacaaugaga

SEQ ID NO: 1535409 - RNA, 19 nt, Homo sapiens
  misc_RNA (1)...(19): siRNA sense strand
gagugacuauuacaacaaa

SEQ ID NO: 1535410 - RNA, 19 nt, Homo sapiens
  misc_RNA (1)...(19): siRNA sense strand
ugaguugccugacuacuau

SEQ ID NO: 1535411 - RNA, 19 nt, Homo sapiens
  misc_RNA (1)...(19): siRNA sense strand
ggaaauguccaauggugaa

SEQ ID NO: 1535412 - RNA, 19 nt, Homo sapiens
  misc_RNA (1)...(19): siRNA sense strand
gaagaugucccuguggaaa

SEQ ID NO: 1535413 - RNA, 19 nt, Homo sapiens
  misc_RNA (1)...(19): siRNA sense strand
auaaugauguggagaaaga

SEQ ID NO: 1535414 - RNA, 19 nt, Homo sapiens
  misc_RNA (1)...(19): siRNA sense strand
gcaaaguccuauuauaagc

SEQ ID NO: 1535415 - RNA, 19 nt, Homo sapiens
  misc_RNA (1)...(19): siRNA sense strand
ccaagaaagcagaauauga

SEQ ID NO: 1535416 - RNA, 19 nt, Homo sapiens
  misc_RNA (1)...(19): siRNA sense strand
agugguagaugaugaaauu

SEQ ID NO: 1535417 - RNA, 19 nt, Homo sapiens
  misc_RNA (1)...(19): siRNA sense strand
ggagaaagagagaaaggaa

SEQ ID NO: 1535418 - RNA, 19 nt, Homo sapiens
  misc_RNA (1)...(19): siRNA sense strand
gcauaaugauguggagaaa

SEQ ID NO: 1535419 - RNA, 19 nt, Homo sapiens
  misc_RNA (1)...(19): siRNA sense strand
cuacagcgauucuuuagca

SEQ ID NO: 1535420 - RNA, 19 nt, Homo sapiens
  misc_RNA (1)...(19): siRNA sense strand
gaggagacuuuccaaucuu

SEQ ID NO: 1535421 - RNA, 19 nt, Homo sapiens
  misc_RNA (1)...(19): siRNA sense strand
gcacauauccuggagaagu

SEQ ID NO: 1535422 - RNA, 19 nt, Homo sapiens
  misc_RNA (1)...(19): siRNA sense strand
aagcaucacuuccuuuaug

SEQ ID NO: 1535423 - RNA, 19 nt, Homo sapiens
  misc_RNA (1)...(19): siRNA sense strand
caauggcacuucaauaugg

SEQ ID NO: 1535424 - RNA, 19 nt, Homo sapiens
  misc_RNA (1)...(19): siRNA sense strand
ggaggucguuuaucagcaa

SEQ ID NO: 1535425 - RNA, 19 nt, Homo sapiens
  misc_RNA (1)...(19): siRNA sense strand
ggucauguuugucaaggaa

SEQ ID NO: 1535426 - RNA, 19 nt, Homo sapiens
  misc_RNA (1)...(19): siRNA sense strand
gaugagggcugugauuaag

SEQ ID NO: 1535427 - RNA, 19 nt, Homo sapiens
  misc_RNA (1)...(19): siRNA sense strand
cgaagaugaugaugaagau

SEQ ID NO: 1535428 - RNA, 19 nt, Homo sapiens
  misc_RNA (1)...(19): siRNA sense strand
gaagaauacagacaacuca

SEQ ID NO: 1535429 - RNA, 19 nt, Homo sapiens
  misc_RNA (1)...(19): siRNA sense strand
guacaaggaggucguuuau

SEQ ID NO: 1535430 - RNA, 19 nt, Homo sapiens
  misc_RNA (1)...(19): siRNA sense strand
uaagucaagucuucgaaug

SEQ ID NO: 1535431 - RNA, 19 nt, Homo sapiens
  misc_RNA (1)...(19): siRNA sense strand
acaaugcaaaguccuauua

SEQ ID NO: 1535432 - RNA, 19 nt, Homo sapiens
  misc_RNA (1)...(19): siRNA sense strand
caaaggcagugcaaagaag

SEQ ID NO: 1535433 - RNA, 19 nt, Homo sapiens
  misc_RNA (1)...(19): siRNA sense strand
cuaaagugguagaugauga

SEQ ID NO: 1535434 - RNA, 19 nt, Homo sapiens
  misc_RNA (1)...(19): siRNA sense strand
gaagagggaaugauagaag

SEQ ID NO: 1535435 - RNA, 19 nt, Homo sapiens
  misc_RNA (1)...(19): siRNA sense strand
gagaugaugauauugaaga

SEQ ID NO: 1535436 - RNA, 19 nt, Homo sapiens
  misc_RNA (1)...(19): siRNA sense strand
guuagaagguggagaugau

SEQ ID NO: 1535437 - RNA, 19 nt, Homo sapiens
  misc_RNA (1)...(19): siRNA sense strand
guaccaagauauugacucu

SEQ ID NO: 1535438 - RNA, 19 nt, Homo sapiens
  misc_RNA (1)...(19): siRNA sense strand
ucugugagcucuucauuag

SEQ ID NO: 1535439 - RNA, 19 nt, Homo sapiens
  misc_RNA (1)...(19): siRNA sense strand
gcgacaagcagaugaagaa

SEQ ID NO: 1535440 - RNA, 19 nt, Homo sapiens
  misc_RNA (1)...(19): siRNA sense strand
caaaagaaauagaggaaga

SEQ ID NO: 1535441 - RNA, 19 nt, Homo sapiens
  misc_RNA (1)...(19): siRNA sense strand
gcaccaaagcgaagaaauc

SEQ ID NO: 1535442 - RNA, 19 nt, Homo sapiens
  misc_RNA (1)...(19): siRNA sense strand
ggaaggcuccaaacggaaa

SEQ ID NO: 1535443 - RNA, 19 nt, Homo sapiens
  misc_RNA (1)...(19): siRNA sense strand
ugaguaaucuggaagaaac

SEQ ID NO: 1535444 - RNA, 19 nt, Homo sapiens
  misc_RNA (1)...(19): siRNA sense strand
agccaggacuguagcuuua

SEQ ID NO: 1535445 - RNA, 19 nt, Homo sapiens
  misc_RNA (1)...(19): siRNA sense strand
caaaauacaugacuccaau

SEQ ID NO: 1535446 - RNA, 19 nt, Homo sapiens
  misc_RNA (1)...(19): siRNA sense strand
cauccgcaaugacaaauau

SEQ ID NO: 1535447 - RNA, 19 nt, Homo sapiens
  misc_RNA (1)...(19): siRNA sense strand
uaagaaagcagcgaaugaa

SEQ ID NO: 1535448 - RNA, 19 nt, Homo sapiens
  misc_RNA (1)...(19): siRNA sense strand
uaaccaagggcagcuaaua

SEQ ID NO: 1535449 - RNA, 19 nt, Homo sapiens
  misc_RNA (1)...(19): siRNA sense strand
agaagcagaugacgaagau

SEQ ID NO: 1535450 - RNA, 19 nt, Homo sapiens
  misc_RNA (1)...(19): siRNA sense strand
caaccagacuauuaugaag

SEQ ID NO: 1535451 - RNA, 19 nt, Homo sapiens
  misc_RNA (1)...(19): siRNA sense strand
guugaggacuuugucauga

SEQ ID NO: 1535452 - RNA, 19 nt, Homo sapiens
  misc_RNA (1)...(19): siRNA sense strand
caacugaaauaccagaaaa

SEQ ID NO: 1535453 - RNA, 19 nt, Homo sapiens
  misc_RNA (1)...(19): siRNA sense strand
cggaaagugugcuguguug

SEQ ID NO: 1535454 - RNA, 19 nt, Homo sapiens
  misc_RNA (1)...(19): siRNA sense strand
uaaaggugaugaugagaag

SEQ ID NO: 1535455 - RNA, 19 nt, Homo sapiens
  misc_RNA (1)...(19): siRNA sense strand
ggagggagaugaggacucu

SEQ ID NO: 1535456 - RNA, 19 nt, Homo sapiens
  misc_RNA (1)...(19): siRNA sense strand
gaaaucaaccagacuauua

SEQ ID NO: 1535457 - RNA, 19 nt, Homo sapiens
  misc_RNA (1)...(19): siRNA sense strand
gaaaugaguuuguucagaa

SEQ ID NO: 1535458 - RNA, 19 nt, Homo sapiens
  misc_RNA (1)...(19): siRNA sense strand
gaacaaaacugaagaauca

SEQ ID NO: 1535459 - RNA, 19 nt, Homo sapiens
  misc_RNA (1)...(19): siRNA sense strand
ugaagaagaugcugcuuua

SEQ ID NO: 1535460 - RNA, 19 nt, Homo sapiens
  misc_RNA (1)...(19): siRNA sense strand
gaaacugccuucuaaagug

SEQ ID NO: 1535461 - RNA, 19 nt, Homo sapiens
  misc_RNA (1)...(19): siRNA sense strand
ggacuauccugauuauuau

SEQ ID NO: 1535462 - RNA, 19 nt, Homo sapiens
  misc_RNA (1)...(19): siRNA sense strand
ugacauggcuucucccaaa

SEQ ID NO: 1535463 - RNA, 19 nt, Homo sapiens
  misc_RNA (1)...(19): siRNA sense strand
gaaacuaaaugaggucuau

SEQ ID NO: 1535464 - RNA, 19 nt, Homo sapiens
  misc_RNA (1)...(19): siRNA sense strand
caacaaaguuccaguuagu

SEQ ID NO: 1535465 - RNA, 19 nt, Homo sapiens
  misc_RNA (1)...(19): siRNA sense strand
gagcauauguuugaaguau

SEQ ID NO: 1535466 - RNA, 19 nt, Homo sapiens
  misc_RNA (1)...(19): siRNA sense strand
ggaagaguaugaugauguu

SEQ ID NO: 1535467 - RNA, 19 nt, Homo sapiens
  misc_RNA (1)...(19): siRNA sense strand
ggacagauucagaaauaua

SEQ ID NO: 1535468 - RNA, 19 nt, Homo sapiens
  misc_RNA (1)...(19): siRNA sense strand
ggagugugaucugaauuua

SEQ ID NO: 1535469 - RNA, 19 nt, Homo sapiens
  misc_RNA (1)...(19): siRNA sense strand
caagaaagcagaauaugaa

SEQ ID NO: 1535470 - RNA, 19 nt, Homo sapiens
  misc_RNA (1)...(19): siRNA sense strand
gaagaaaccugccccauga

SEQ ID NO: 1535471 - RNA, 19 nt, Homo sapiens
  misc_RNA (1)...(19): siRNA sense strand
gcacucagcuauaccacaa

SEQ ID NO: 1535472 - RNA, 19 nt, Homo sapiens
  misc_RNA (1)...(19): siRNA sense strand
gaucugaguugccugacua

SEQ ID NO: 1535473 - RNA, 19 nt, Homo sapiens
  misc_RNA (1)...(19): siRNA sense strand
ugacgaagaugaugaugaa

SEQ ID NO: 1535474 - RNA, 19 nt, Homo sapiens
  misc_RNA (1)...(19): siRNA sense strand
ccacauaucgucuguauug

SEQ ID NO: 1535475 - RNA, 19 nt, Homo sapiens
  misc_RNA (1)...(19): siRNA sense strand
gcauauguuugaaguauug

SEQ ID NO: 1535476 - RNA, 19 nt, Homo sapiens
  misc_RNA (1)...(19): siRNA sense strand
acaagcagaugaagaaauu

SEQ ID NO: 1535477 - RNA, 19 nt, Homo sapiens
  misc_RNA (1)...(19): siRNA sense strand
gaagaaaucaaccagacua

SEQ ID NO: 1535478 - RNA, 19 nt, Homo sapiens
  misc_RNA (1)...(19): siRNA sense strand
gagcuuauccacaaucuuu

SEQ ID NO: 1535479 - RNA, 19 nt, Homo sapiens
  misc_RNA (1)...(19): siRNA sense strand
gcuauaaugugcccaauuc

SEQ ID NO: 1535480 - RNA, 19 nt, Homo sapiens
  misc_RNA (1)...(19): siRNA sense strand
guuaggaguugucggaaua

SEQ ID NO: 1535481 - RNA, 19 nt, Homo sapiens
  misc_RNA (1)...(19): siRNA sense strand
acaaggaggucguuuauca

SEQ ID NO: 1535482 - RNA, 19 nt, Homo sapiens
  misc_RNA (1)...(19): siRNA sense strand
gcaaguguguggucauguu

SEQ ID NO: 1535483 - RNA, 19 nt, Homo sapiens
  misc_RNA (1)...(19): siRNA sense strand
gcucccagguuuauaauga

SEQ ID NO: 1535484 - RNA, 19 nt, Homo sapiens
  misc_RNA (1)...(19): siRNA sense strand
ucggacagauucagaaaua

SEQ ID NO: 1535485 - RNA, 19 nt, Homo sapiens
  misc_RNA (1)...(19): siRNA sense strand
ggaagaugcuacagcgauu

SEQ ID NO: 1535486 - RNA, 19 nt, Homo sapiens
  misc_RNA (1)...(19): siRNA sense strand
ggaggagacuuuccaaucu

SEQ ID NO: 1535487 - RNA, 19 nt, Homo sapiens
  misc_RNA (1)...(19): siRNA sense strand
ugacaaauaugcuggugaa

SEQ ID NO: 1535488 - RNA, 19 nt, Homo sapiens
  misc_RNA (1)...(19): siRNA sense strand
gaagaaauucaaaggauug

SEQ ID NO: 1535489 - RNA, 19 nt, Homo sapiens
  misc_RNA (1)...(19): siRNA sense strand
caacaaguaccaagauauu

SEQ ID NO: 1535490 - RNA, 19 nt, Homo sapiens
  misc_RNA (1)...(19): siRNA sense strand
gccaugaacucuauaauac

SEQ ID NO: 1535491 - RNA, 19 nt, Homo sapiens
  misc_RNA (1)...(19): siRNA sense strand
ccaauggacuugaaaauaa

SEQ ID NO: 1535492 - RNA, 19 nt, Homo sapiens
  misc_RNA (1)...(19): siRNA sense strand
caaauaugcuggugaagag

SEQ ID NO: 1535493 - RNA, 19 nt, Homo sapiens
  misc_RNA (1)...(19): siRNA sense strand
caacaugaguggcuacauc

SEQ ID NO: 1535494 - RNA, 19 nt, Homo sapiens
  misc_RNA (1)...(19): siRNA sense strand
gaaagacugugggaggauu

SEQ ID NO: 1535495 - RNA, 19 nt, Homo sapiens
  misc_RNA (1)...(19): siRNA sense strand
gaacagggcagacuucucu

SEQ ID NO: 1535496 - RNA, 19 nt, Homo sapiens
  misc_RNA (1)...(19): siRNA sense strand
ugacauguauucucggaaa

SEQ ID NO: 1535497 - RNA, 19 nt, Homo sapiens
  misc_RNA (1)...(19): siRNA sense strand
gagauggagcugcauauuu

SEQ ID NO: 1535498 - RNA, 19 nt, Homo sapiens
  misc_RNA (1)...(19): siRNA sense strand
ugacuuugcugauucaaga

SEQ ID NO: 1535499 - RNA, 19 nt, Homo sapiens
  misc_RNA (1)...(19): siRNA sense strand
ggucguuuaucagcaauua

SEQ ID NO: 1535500 - RNA, 19 nt, Homo sapiens
  misc_RNA (1)...(19): siRNA sense strand
gagaugagggcugugauua

SEQ ID NO: 1535501 - RNA, 19 nt, Homo sapiens
  misc_RNA (1)...(19): siRNA sense strand
cauaucgucuguauugaaa

SEQ ID NO: 1535502 - RNA, 19 nt, Homo sapiens
  misc_RNA (1)...(19): siRNA sense strand
gaucccaacuuuccuaaca

SEQ ID NO: 1535503 - RNA, 19 nt, Homo sapiens
  misc_RNA (1)...(19): siRNA sense strand
caauauggcucagaaagug

SEQ ID NO: 1535504 - RNA, 19 nt, Homo sapiens
  misc_RNA (1)...(19): siRNA sense strand
cagaagacuuugugaccua

SEQ ID NO: 1535505 - RNA, 19 nt, Homo sapiens
  misc_RNA (1)...(19): siRNA sense strand
gagcauaacauccgcaaug

SEQ ID NO: 1535506 - RNA, 19 nt, Homo sapiens
  misc_RNA (1)...(19): siRNA sense strand
gccaacaaguaccaagaua

SEQ ID NO: 1535507 - RNA, 19 nt, Homo sapiens
  misc_RNA (1)...(19): siRNA sense strand
gaacgagcaagaaggauga

SEQ ID NO: 1535508 - RNA, 19 nt, Homo sapiens
  misc_RNA (1)...(19): siRNA sense strand
gagagccgcuacaaugaga

SEQ ID NO: 1535509 - RNA, 19 nt, Homo sapiens
  misc_RNA (1)...(19): siRNA sense strand
gagugacuauuacaacaaa

SEQ ID NO: 1535510 - RNA, 19 nt, Homo sapiens
  misc_RNA (1)...(19): siRNA sense strand
ugaguugccugacuacuau

SEQ ID NO: 1535511 - RNA, 19 nt, Homo sapiens
  misc_RNA (1)...(19): siRNA sense strand
ggaaauguccaauggugaa

SEQ ID NO: 1535512 - RNA, 19 nt, Homo sapiens
  misc_RNA (1)...(19): siRNA sense strand
gaagaugucccuguggaaa

SEQ ID NO: 1535513 - RNA, 19 nt, Homo sapiens
  misc_RNA (1)...(19): siRNA sense strand
auaaugauguggagaaaga

SEQ ID NO: 1535514 - RNA, 19 nt, Homo sapiens
  misc_RNA (1)...(19): siRNA sense strand
gcaaaguccuauuauaagc

SEQ ID NO: 1535515 - RNA, 19 nt, Homo sapiens
  misc_RNA (1)...(19): siRNA sense strand
ccaagaaagcagaauauga

SEQ ID NO: 1535516 - RNA, 19 nt, Homo sapiens
  misc_RNA (1)...(19): siRNA sense strand
agugguagaugaugaaauu

SEQ ID NO: 1535517 - RNA, 19 nt, Homo sapiens
  misc_RNA (1)...(19): siRNA sense strand
ggagaaagagagaaaggaa

SEQ ID NO: 1535518 - RNA, 19 nt, Homo sapiens
  misc_RNA (1)...(19): siRNA sense strand
gcauaaugauguggagaaa

SEQ ID NO: 1535519 - RNA, 19 nt, Homo sapiens
  misc_RNA (1)...(19): siRNA sense strand
cuacagcgauucuuuagca

SEQ ID NO: 1535520 - RNA, 19 nt, Homo sapiens
  misc_RNA (1)...(19): siRNA sense strand
gaggagacuuuccaaucuu

SEQ ID NO: 1535521 - RNA, 19 nt, Homo sapiens
  misc_RNA (1)...(19): siRNA sense strand
gcacauauccuggagaagu

SEQ ID NO: 1535522 - RNA, 19 nt, Homo sapiens
  misc_RNA (1)...(19): siRNA sense strand
aagcaucacuuccuuuaug

SEQ ID NO: 1535523 - RNA, 19 nt, Homo sapiens
  misc_RNA (1)...(19): siRNA sense strand
caauggcacuucaauaugg

SEQ ID NO: 1535524 - RNA, 19 nt, Homo sapiens
  misc_RNA (1)...(19): siRNA sense strand
ggaggucguuuaucagcaa

SEQ ID NO: 1535525 - RNA, 19 nt, Homo sapiens
  misc_RNA (1)...(19): siRNA sense strand
ggucauguuugucaaggaa

SEQ ID NO: 1535526 - RNA, 19 nt, Homo sapiens
  misc_RNA (1)...(19): siRNA sense strand
gaugagggcugugauuaag

SEQ ID NO: 1535527 - RNA, 19 nt, Homo sapiens
  misc_RNA (1)...(19): siRNA sense strand
cgaagaugaugaugaagau

SEQ ID NO: 1535528 - RNA, 19 nt, Homo sapiens
  misc_RNA (1)...(19): siRNA sense strand
gaagaauacagacaacuca

SEQ ID NO: 1535529 - RNA, 19 nt, Homo sapiens
  misc_RNA (1)...(19): siRNA sense strand
guacaaggaggucguuuau

SEQ ID NO: 1535530 - RNA, 19 nt, Homo sapiens
  misc_RNA (1)...(19): siRNA sense strand
uaagucaagucuucgaaug

SEQ ID NO: 1535531 - RNA, 19 nt, Homo sapiens
  misc_RNA (1)...(19): siRNA sense strand
acaaugcaaaguccuauua

SEQ ID NO: 1535532 - RNA, 19 nt, Homo sapiens
  misc_RNA (1)...(19): siRNA sense strand
caaaggcagugcaaagaag

SEQ ID NO: 1535533 - RNA, 19 nt, Homo sapiens
  misc_RNA (1)...(19): siRNA sense strand
cuaaagugguagaugauga

SEQ ID NO: 1535534 - RNA, 19 nt, Homo sapiens
  misc_RNA (1)...(19): siRNA sense strand
gaagagggaaugauagaag

SEQ ID NO: 1535535 - RNA, 19 nt, Homo sapiens
  misc_RNA (1)...(19): siRNA sense strand
gagaugaugauauugaaga

SEQ ID NO: 1535536 - RNA, 19 nt, Homo sapiens
  misc_RNA (1)...(19): siRNA sense strand
guuagaagguggagaugau

SEQ ID NO: 1535537 - RNA, 19 nt, Homo sapiens
  misc_RNA (1)...(19): siRNA sense strand
guaccaagauauugacucu

SEQ ID NO: 1535538 - RNA, 19 nt, Homo sapiens
  misc_RNA (1)...(19): siRNA sense strand
ucugugagcucuucauuag

SEQ ID NO: 1535539 - RNA, 19 nt, Homo sapiens
  misc_RNA (1)...(19): siRNA sense strand
gcgacaagcagaugaagaa

SEQ ID NO: 1535540 - RNA, 19 nt, Homo sapiens
  misc_RNA (1)...(19): siRNA sense strand
caaaagaaauagaggaaga

SEQ ID NO: 1535541 - RNA, 19 nt, Homo sapiens
  misc_RNA (1)...(19): siRNA sense strand
gcaccaaagcgaagaaauc

SEQ ID NO: 1535542 - RNA, 19 nt, Homo sapiens
  misc_RNA (1)...(19): siRNA sense strand
ggaaggcuccaaacggaaa

SEQ ID NO: 1535543 - RNA, 19 nt, Homo sapiens
  misc_RNA (1)...(19): siRNA sense strand
ugaguaaucuggaagaaac

SEQ ID NO: 1535544 - RNA, 19 nt, Homo sapiens
  misc_RNA (1)...(19): siRNA sense strand
agccaggacuguagcuuua

SEQ ID NO: 1535545 - RNA, 19 nt, Homo sapiens
  misc_RNA (1)...(19): siRNA sense strand
caaaauacaugacuccaau

SEQ ID NO: 1535546 - RNA, 19 nt, Homo sapiens
  misc_RNA (1)...(19): siRNA sense strand
cauccgcaaugacaaauau

SEQ ID NO: 1535547 - RNA, 19 nt, Homo sapiens
  misc_RNA (1)...(19): siRNA sense strand
uaagaaagcagcgaaugaa

SEQ ID NO: 1535548 - RNA, 19 nt, Homo sapiens
  misc_RNA (1)...(19): siRNA sense strand
uaaccaagggcagcuaaua

SEQ ID NO: 1535549 - RNA, 19 nt, Homo sapiens
  misc_RNA (1)...(19): siRNA sense strand
agaagcagaugacgaagau

SEQ ID NO: 1535550 - RNA, 19 nt, Homo sapiens
  misc_RNA (1)...(19): siRNA sense strand
caaccagacuauuaugaag

SEQ ID NO: 1535551 - RNA, 19 nt, Homo sapiens
  misc_RNA (1)...(19): siRNA sense strand
guugaggacuuugucauga

SEQ ID NO: 1535552 - RNA, 19 nt, Homo sapiens
  misc_RNA (1)...(19): siRNA sense strand
caacugaaauaccagaaaa

SEQ ID NO: 1535553 - RNA, 19 nt, Homo sapiens
  misc_RNA (1)...(19): siRNA sense strand
cggaaagugugcuguguug

SEQ ID NO: 1535554 - RNA, 19 nt, Homo sapiens
  misc_RNA (1)...(19): siRNA sense strand
uaaaggugaugaugagaag

SEQ ID NO: 1535555 - RNA, 19 nt, Homo sapiens
  misc_RNA (1)...(19): siRNA sense strand
ggagggagaugaggacucu

SEQ ID NO: 1535556 - RNA, 19 nt, Homo sapiens
  misc_RNA (1)...(19): siRNA sense strand
cagcacauguucucacuua

SEQ ID NO: 1535557 - RNA, 19 nt, Homo sapiens
  misc_RNA (1)...(19): siRNA sense strand
gcacauguucucacuuaaa

SEQ ID NO: 1535558 - RNA, 19 nt, Homo sapiens
  misc_RNA (1)...(19): siRNA sense strand
gaaacuaacacaggaacag

SEQ ID NO: 1535559 - RNA, 19 nt, Homo sapiens
  misc_RNA (1)...(19): siRNA sense strand
cacauguucucacuuaaaa

SEQ ID NO: 1535560 - RNA, 19 nt, Homo sapiens
  misc_RNA (1)...(19): siRNA sense strand
ccauagaaaggaaugagau

SEQ ID NO: 1535561 - RNA, 19 nt, Homo sapiens
  misc_RNA (1)...(19): siRNA sense strand
aaacuaacacaggaacaga

SEQ ID NO: 1535562 - RNA, 19 nt, Homo sapiens
  misc_RNA (1)...(19): siRNA sense strand
ggagcuggaagccauuauc

SEQ ID NO: 1535563 - RNA, 19 nt, Homo sapiens
  misc_RNA (1)...(19): siRNA sense strand
ggaaacuaacacaggaaca

SEQ ID NO: 1535564 - RNA, 19 nt, Homo sapiens
  misc_RNA (1)...(19): siRNA sense strand
gaaaaucaaacagcacaug

SEQ ID NO: 1535565 - RNA, 19 nt, Homo sapiens
  misc_RNA (1)...(19): siRNA sense strand
gaggucaucuuguuugaga

SEQ ID NO: 1535566 - RNA, 19 nt, Homo sapiens
  misc_RNA (1)...(19): siRNA sense strand
gauaucaaaucuacagaca

SEQ ID NO: 1535567 - RNA, 19 nt, Homo sapiens
  misc_RNA (1)...(19): siRNA sense strand
uggagaaccuucccauaaa

SEQ ID NO: 1535568 - RNA, 19 nt, Homo sapiens
  misc_RNA (1)...(19): siRNA sense strand
aaaaugagcuucuuugaga

SEQ ID NO: 1535569 - RNA, 19 nt, Homo sapiens
  misc_RNA (1)...(19): siRNA sense strand
gacguaaccuugggcgaua

SEQ ID NO: 1535570 - RNA, 19 nt, Homo sapiens
  misc_RNA (1)...(19): siRNA sense strand
uaucaaaucuacagacaag

SEQ ID NO: 1535571 - RNA, 19 nt, Homo sapiens
  misc_RNA (1)...(19): siRNA sense strand
ucacggaggcuggagauua

SEQ ID NO: 1535572 - RNA, 19 nt, Homo sapiens
  misc_RNA (1)...(19): siRNA sense strand
gggaagcacucgggcauug

SEQ ID NO: 1535573 - RNA, 19 nt, Homo sapiens
  misc_RNA (1)...(19): siRNA sense strand
ggagaaccuucccauaaac

SEQ ID NO: 1535574 - RNA, 19 nt, Homo sapiens
  misc_RNA (1)...(19): siRNA sense strand
cugcugaacuggaauuaug

SEQ ID NO: 1535575 - RNA, 19 nt, Homo sapiens
  misc_RNA (1)...(19): siRNA sense strand
caacuuugguuucaugaac

SEQ ID NO: 1535576 - RNA, 19 nt, Homo sapiens
  misc_RNA (1)...(19): siRNA sense strand
gaauauugggccucagaaa

SEQ ID NO: 1535577 - RNA, 19 nt, Homo sapiens
  misc_RNA (1)...(19): siRNA sense strand
ugacauggcacagguguuu

SEQ ID NO: 1535578 - RNA, 19 nt, Homo sapiens
  misc_RNA (1)...(19): siRNA sense strand
gaucugucagcaucaauaa

SEQ ID NO: 1535579 - RNA, 19 nt, Homo sapiens
  misc_RNA (1)...(19): siRNA sense strand
gagcagaaaggaauaacug

SEQ ID NO: 1535580 - RNA, 19 nt, Homo sapiens
  misc_RNA (1)...(19): siRNA sense strand
cauggcaaauacagaauga

SEQ ID NO: 1535581 - RNA, 19 nt, Homo sapiens
  misc_RNA (1)...(19): siRNA sense strand
gaaugagcagaaaggaaua

SEQ ID NO: 1535582 - RNA, 19 nt, Homo sapiens
  misc_RNA (1)...(19): siRNA sense strand
ggagggcuuuaccaucuau

SEQ ID NO: 1535583 - RNA, 19 nt, Homo sapiens
  misc_RNA (1)...(19): siRNA sense strand
ggaauaacuggaucuguca

SEQ ID NO: 1535584 - RNA, 19 nt, Homo sapiens
  misc_RNA (1)...(19): siRNA sense strand
ccuacgggcuuguccugua

SEQ ID NO: 1535585 - RNA, 19 nt, Homo sapiens
  misc_RNA (1)...(19): siRNA sense strand
ggauucguguucaucaaug

SEQ ID NO: 1535586 - RNA, 19 nt, Homo sapiens
  misc_RNA (1)...(19): siRNA sense strand
ggaucugucagcaucaaua

SEQ ID NO: 1535587 - RNA, 19 nt, Homo sapiens
  misc_RNA (1)...(19): siRNA sense strand
ggacgcccuauccuacuua

SEQ ID NO: 1535588 - RNA, 19 nt, Homo sapiens
  misc_RNA (1)...(19): siRNA sense strand
cagacaagcccacgcugua

SEQ ID NO: 1535589 - RNA, 19 nt, Homo sapiens
  misc_RNA (1)...(19): siRNA sense strand
ucuauucccuggagaugaa

SEQ ID NO: 1535590 - RNA, 19 nt, Homo sapiens
  misc_RNA (1)...(19): siRNA sense strand
ggcuggagauuacacagaa

SEQ ID NO: 1535591 - RNA, 19 nt, Homo sapiens
  misc_RNA (1)...(19): siRNA sense strand
gggcuuguccuguaugaga

SEQ ID NO: 1535592 - RNA, 19 nt, Homo sapiens
  misc_RNA (1)...(19): siRNA sense strand
ccacauauuucgggaagca

SEQ ID NO: 1535593 - RNA, 19 nt, Homo sapiens
  misc_RNA (1)...(19): siRNA sense strand
gcccuauccuacuuaaaug

SEQ ID NO: 1535594 - RNA, 19 nt, Homo sapiens
  misc_RNA (1)...(19): siRNA sense strand
agaaugagcagaaaggaau

SEQ ID NO: 1535595 - RNA, 19 nt, Homo sapiens
  misc_RNA (1)...(19): siRNA sense strand
gaaucaaggacgagucaau

SEQ ID NO: 1535596 - RNA, 19 nt, Homo sapiens
  misc_RNA (1)...(19): siRNA sense strand
gagaaucaaggacgaguca

SEQ ID NO: 1535597 - RNA, 19 nt, Homo sapiens
  misc_RNA (1)...(19): siRNA sense strand
gaaccuucccauaaacaau

SEQ ID NO: 1535598 - RNA, 19 nt, Homo sapiens
  misc_RNA (1)...(19): siRNA sense strand
acaaugauagggauucuga

SEQ ID NO: 1535599 - RNA, 19 nt, Homo sapiens
  misc_RNA (1)...(19): siRNA sense strand
ugaggauccugguggagaa

SEQ ID NO: 1535600 - RNA, 19 nt, Homo sapiens
  misc_RNA (1)...(19): siRNA sense strand
gggacgcccuauccuacuu

SEQ ID NO: 1535601 - RNA, 19 nt, Homo sapiens
  misc_RNA (1)...(19): siRNA sense strand
cuacgggcuuguccuguau

SEQ ID NO: 1535602 - RNA, 19 nt, Homo sapiens
  misc_RNA (1)...(19): siRNA sense strand
gaguggcucagauaucaaa

SEQ ID NO: 1535603 - RNA, 19 nt, Homo sapiens
  misc_RNA (1)...(19): siRNA sense strand
guaccuuccuggaguuugg

SEQ ID NO: 1535604 - RNA, 19 nt, Homo sapiens
  misc_RNA (1)...(19): siRNA sense strand
gcuggagauuacacagaaa

SEQ ID NO: 1535605 - RNA, 19 nt, Homo sapiens
  misc_RNA (1)...(19): siRNA sense strand
caccagcuaugacuaugau

SEQ ID NO: 1535606 - RNA, 19 nt, Homo sapiens
  misc_RNA (1)...(19): siRNA sense strand
gaaaggaauaacuggaucu

SEQ ID NO: 1535607 - RNA, 19 nt, Homo sapiens
  misc_RNA (1)...(19): siRNA sense strand
aauaaggaccugcacauuc

SEQ ID NO: 1535608 - RNA, 19 nt, Homo sapiens
  misc_RNA (1)...(19): siRNA sense strand
uaauaaggaccugcacauu

SEQ ID NO: 1535609 - RNA, 19 nt, Homo sapiens
  misc_RNA (1)...(19): siRNA sense strand
ggaauauugggccucagaa

SEQ ID NO: 1535610 - RNA, 19 nt, Homo sapiens
  misc_RNA (1)...(19): siRNA sense strand
gagaaccuucccauaaaca

SEQ ID NO: 1535611 - RNA, 19 nt, Homo sapiens
  misc_RNA (1)...(19): siRNA sense strand
cuggagggcuuuaccaucu

SEQ ID NO: 1535612 - RNA, 19 nt, Homo sapiens
  misc_RNA (1)...(19): siRNA sense strand
aaauacagaaugagcagaa

SEQ ID NO: 1535613 - RNA, 19 nt, Homo sapiens
  misc_RNA (1)...(19): siRNA sense strand
ggauccugguggagaauca

SEQ ID NO: 1535614 - RNA, 19 nt, Homo sapiens
  misc_RNA (1)...(19): siRNA sense strand
cacggaggcuggagauuac

SEQ ID NO: 1535615 - RNA, 19 nt, Homo sapiens
  misc_RNA (1)...(19): siRNA sense strand
cagaaaggaauaacuggau

SEQ ID NO: 1535616 - RNA, 19 nt, Homo sapiens
  misc_RNA (1)...(19): siRNA sense strand
gacgcccuauccuacuuaa

SEQ ID NO: 1535617 - RNA, 19 nt, Homo sapiens
  misc_RNA (1)...(19): siRNA sense strand
agacaagcccacgcuguaa

SEQ ID NO: 1535618 - RNA, 19 nt, Homo sapiens
  misc_RNA (1)...(19): siRNA sense strand
aaucaaggacgagucaauu

SEQ ID NO: 1535619 - RNA, 19 nt, Homo sapiens
  misc_RNA (1)...(19): siRNA sense strand
guucaucaauggacguaac

SEQ ID NO: 1535620 - RNA, 19 nt, Homo sapiens
  misc_RNA (1)...(19): siRNA sense strand
ugaacuggaauuauggauu

SEQ ID NO: 1535621 - RNA, 19 nt, Homo sapiens
  misc_RNA (1)...(19): siRNA sense strand
cagaaugagcagaaaggaa

SEQ ID NO: 1535622 - RNA, 19 nt, Homo sapiens
  misc_RNA (1)...(19): siRNA sense strand
auaaggaccugcacauucc

SEQ ID NO: 1535623 - RNA, 19 nt, Homo sapiens
  misc_RNA (1)...(19): siRNA sense strand
ugagccugcugaacuggaa

SEQ ID NO: 1535624 - RNA, 19 nt, Homo sapiens
  misc_RNA (1)...(19): siRNA sense strand
gaaaaugagcuucuuugag

SEQ ID NO: 1535625 - RNA, 19 nt, Homo sapiens
  misc_RNA (1)...(19): siRNA sense strand
ggcuuguccuguaugagaa

SEQ ID NO: 1535626 - RNA, 19 nt, Homo sapiens
  misc_RNA (1)...(19): siRNA sense strand
gaagcacucgggcauuguc

SEQ ID NO: 1535627 - RNA, 19 nt, Homo sapiens
  misc_RNA (1)...(19): siRNA sense strand
uggagggcuuuaccaucua

SEQ ID NO: 1535628 - RNA, 19 nt, Homo sapiens
  misc_RNA (1)...(19): siRNA sense strand
cgcccuauccuacuuaaau

SEQ ID NO: 1535629 - RNA, 19 nt, Homo sapiens
  misc_RNA (1)...(19): siRNA sense strand
aauacagaaugagcagaaa

SEQ ID NO: 1535630 - RNA, 19 nt, Homo sapiens
  misc_RNA (1)...(19): siRNA sense strand
ggaccugcacauuccugaa

SEQ ID NO: 1535631 - RNA, 19 nt, Homo sapiens
  misc_RNA (1)...(19): siRNA sense strand
gagacaaugauagggauuc

SEQ ID NO: 1535632 - RNA, 19 nt, Homo sapiens
  misc_RNA (1)...(19): siRNA sense strand
gcauugucaccagcuauga

SEQ ID NO: 1535633 - RNA, 19 nt, Homo sapiens
  misc_RNA (1)...(19): siRNA sense strand
gauucguguucaucaaugg

SEQ ID NO: 1535634 - RNA, 19 nt, Homo sapiens
  misc_RNA (1)...(19): siRNA sense strand
uuucauggcaaauacagaa

SEQ ID NO: 1535635 - RNA, 19 nt, Homo sapiens
  misc_RNA (1)...(19): siRNA sense strand
gcugcuggcugcacugugu

SEQ ID NO: 1535636 - RNA, 19 nt, Homo sapiens
  misc_RNA (1)...(19): siRNA sense strand
gcucuacgcaccgguguug

SEQ ID NO: 1535637 - RNA, 19 nt, Homo sapiens
  misc_RNA (1)...(19): siRNA sense strand
gugagcaucuacuuaauua

SEQ ID NO: 1535638 - RNA, 19 nt, Homo sapiens
  misc_RNA (1)...(19): siRNA sense strand
agacagaagucauaacuga

SEQ ID NO: 1535639 - RNA, 19 nt, Homo sapiens
  misc_RNA (1)...(19): siRNA sense strand
gaccaaggcucagaaagaa

SEQ ID NO: 1535640 - RNA, 19 nt, Homo sapiens
  misc_RNA (1)...(19): siRNA sense strand
auaaagaucuggagccauu

SEQ ID NO: 1535641 - RNA, 19 nt, Homo sapiens
  misc_RNA (1)...(19): siRNA sense strand
cuaaugguccuucuuauaa

SEQ ID NO: 1535642 - RNA, 19 nt, Homo sapiens
  misc_RNA (1)...(19): siRNA sense strand
gcugacaaauuucauaugu

SEQ ID NO: 1535643 - RNA, 19 nt, Homo sapiens
  misc_RNA (1)...(19): siRNA sense strand
gcuaaugguccuucuuaua

SEQ ID NO: 1535644 - RNA, 19 nt, Homo sapiens
  misc_RNA (1)...(19): siRNA sense strand
cgacagcucuacagaaaca

SEQ ID NO: 1535645 - RNA, 19 nt, Homo sapiens
  misc_RNA (1)...(19): siRNA sense strand
gauauuccacugccaagua

SEQ ID NO: 1535646 - RNA, 19 nt, Homo sapiens
  misc_RNA (1)...(19): siRNA sense strand
gaaaauuguuguugacuug

SEQ ID NO: 1535647 - RNA, 19 nt, Homo sapiens
  misc_RNA (1)...(19): siRNA sense strand
cuuggaagcugaagauauu

SEQ ID NO: 1535648 - RNA, 19 nt, Homo sapiens
  misc_RNA (1)...(19): siRNA sense strand
acacacagcugcaagaucu

SEQ ID NO: 1535649 - RNA, 19 nt, Homo sapiens
  misc_RNA (1)...(19): siRNA sense strand
ucauaugcuuuguuccuua

SEQ ID NO: 1535650 - RNA, 19 nt, Homo sapiens
  misc_RNA (1)...(19): siRNA sense strand
cagccugccucaucuauau

SEQ ID NO: 1535651 - RNA, 19 nt, Homo sapiens
  misc_RNA (1)...(19): siRNA sense strand
gaaaauuacccaaauguga

SEQ ID NO: 1535652 - RNA, 19 nt, Homo sapiens
  misc_RNA (1)...(19): siRNA sense strand
ggaauuauuggaaguuguu

SEQ ID NO: 1535653 - RNA, 19 nt, Homo sapiens
  misc_RNA (1)...(19): siRNA sense strand
gaccacgggcuacaucaua

SEQ ID NO: 1535654 - RNA, 19 nt, Homo sapiens
  misc_RNA (1)...(19): siRNA sense strand
ucaaagacaucaaggaaaa

SEQ ID NO: 1535655 - RNA, 19 nt, Homo sapiens
  misc_RNA (1)...(19): siRNA sense strand
caaccaggauuucacucuu

SEQ ID NO: 1535656 - RNA, 19 nt, Homo sapiens
  misc_RNA (1)...(19): siRNA sense strand
caagaucuaccgaauacaa

SEQ ID NO: 1535657 - RNA, 19 nt, Homo sapiens
  misc_RNA (1)...(19): siRNA sense strand
caucaaagacaucaaggaa

SEQ ID NO: 1535658 - RNA, 19 nt, Homo sapiens
  misc_RNA (1)...(19): siRNA sense strand
ggauuucacucuucaaagc

SEQ ID NO: 1535659 - RNA, 19 nt, Homo sapiens
  misc_RNA (1)...(19): siRNA sense strand
gacaaacaguucguucuuc

SEQ ID NO: 1535660 - RNA, 19 nt, Homo sapiens
  misc_RNA (1)...(19): siRNA sense strand
ugccucaucuauaucaaua

SEQ ID NO: 1535661 - RNA, 19 nt, Homo sapiens
  misc_RNA (1)...(19): siRNA sense strand
guaacagccugccucaucu

SEQ ID NO: 1535662 - RNA, 19 nt, Homo sapiens
  misc_RNA (1)...(19): siRNA sense strand
gcucucaucaacauacuuu

SEQ ID NO: 1535663 - RNA, 19 nt, Homo sapiens
  misc_RNA (1)...(19): siRNA sense strand
ugucgaaccugugcuuuga

SEQ ID NO: 1535664 - RNA, 19 nt, Homo sapiens
  misc_RNA (1)...(19): siRNA sense strand
cagaagucauaacugauug

SEQ ID NO: 1535665 - RNA, 19 nt, Homo sapiens
  misc_RNA (1)...(19): siRNA sense strand
gcugcaagaucuaccgaau

SEQ ID NO: 1535666 - RNA, 19 nt, Homo sapiens
  misc_RNA (1)...(19): siRNA sense strand
cuuauaauggugccaaaua

SEQ ID NO: 1535667 - RNA, 19 nt, Homo sapiens
  misc_RNA (1)...(19): siRNA sense strand
aauauccaauugccuugua

SEQ ID NO: 1535668 - RNA, 19 nt, Homo sapiens
  misc_RNA (1)...(19): siRNA sense strand
uggguuguauggaguuuaa

SEQ ID NO: 1535669 - RNA, 19 nt, Homo sapiens
  misc_RNA (1)...(19): siRNA sense strand
uggcuaaugguccuucuua

SEQ ID NO: 1535670 - RNA, 19 nt, Homo sapiens
  misc_RNA (1)...(19): siRNA sense strand
gcuuugauccuguccugua

SEQ ID NO: 1535671 - RNA, 19 nt, Homo sapiens
  misc_RNA (1)...(19): siRNA sense strand
acagaagucauaacugauu

SEQ ID NO: 1535672 - RNA, 19 nt, Homo sapiens
  misc_RNA (1)...(19): siRNA sense strand
uucgacagcucuacagaaa

SEQ ID NO: 1535673 - RNA, 19 nt, Homo sapiens
  misc_RNA (1)...(19): siRNA sense strand
agaccaaggcucagaaaga

SEQ ID NO: 1535674 - RNA, 19 nt, Homo sapiens
  misc_RNA (1)...(19): siRNA sense strand
ugcaagaucuaccgaauac

SEQ ID NO: 1535675 - RNA, 19 nt, Homo sapiens
  misc_RNA (1)...(19): siRNA sense strand
uuaaauuucucagccauca

SEQ ID NO: 1535676 - RNA, 19 nt, Homo sapiens
  misc_RNA (1)...(19): siRNA sense strand
ugugugagcaucuacuuaa

SEQ ID NO: 1535677 - RNA, 19 nt, Homo sapiens
  misc_RNA (1)...(19): siRNA sense strand
acaaacaguucguucuucu

SEQ ID NO: 1535678 - RNA, 19 nt, Homo sapiens
  misc_RNA (1)...(19): siRNA sense strand
uacaucauaugcuuuguuc

SEQ ID NO: 1535679 - RNA, 19 nt, Homo sapiens
  misc_RNA (1)...(19): siRNA sense strand
agucaaauguggguuguau

SEQ ID NO: 1535680 - RNA, 19 nt, Homo sapiens
  misc_RNA (1)...(19): siRNA sense strand
gaucuaccgaauacaagaa

SEQ ID NO: 1535681 - RNA, 19 nt, Homo sapiens
  misc_RNA (1)...(19): siRNA sense strand
cagccagacagaagucaua

SEQ ID NO: 1535682 - RNA, 19 nt, Homo sapiens
  misc_RNA (1)...(19): siRNA sense strand
auaauggugccaaauauga

SEQ ID NO: 1535683 - RNA, 19 nt, Homo sapiens
  misc_RNA (1)...(19): siRNA sense strand
auauuccacugccaaguaa

SEQ ID NO: 1535684 - RNA, 19 nt, Homo sapiens
  misc_RNA (1)...(19): siRNA sense strand
uacagaagaauacgaauca

SEQ ID NO: 1535685 - RNA, 19 nt, Homo sapiens
  misc_RNA (1)...(19): siRNA sense strand
gaauacaagaacccggauu

SEQ ID NO: 1535686 - RNA, 19 nt, Homo sapiens
  misc_RNA (1)...(19): siRNA sense strand
uagcauuugucagcauuga

SEQ ID NO: 1535687 - RNA, 19 nt, Homo sapiens
  misc_RNA (1)...(19): siRNA sense strand
uggagccauucacguauuu

SEQ ID NO: 1535688 - RNA, 19 nt, Homo sapiens
  misc_RNA (1)...(19): siRNA sense strand
aauacaagaacccggauuu

SEQ ID NO: 1535689 - RNA, 19 nt, Homo sapiens
  misc_RNA (1)...(19): siRNA sense strand
uaacagccugccucaucua

SEQ ID NO: 1535690 - RNA, 19 nt, Homo sapiens
  misc_RNA (1)...(19): siRNA sense strand
aaugguccuucuuauaaug

SEQ ID NO: 1535691 - RNA, 19 nt, Homo sapiens
  misc_RNA (1)...(19): siRNA sense strand
aaauuucucagccaucauu

SEQ ID NO: 1535692 - RNA, 19 nt, Homo sapiens
  misc_RNA (1)...(19): siRNA sense strand
ucaaauguggguuguaugg

SEQ ID NO: 1535693 - RNA, 19 nt, Homo sapiens
  misc_RNA (1)...(19): siRNA sense strand
caggauuucacucuucaaa

SEQ ID NO: 1535694 - RNA, 19 nt, Homo sapiens
  misc_RNA (1)...(19): siRNA sense strand
ccugcuuacucuggcauua

SEQ ID NO: 1535695 - RNA, 19 nt, Homo sapiens
  misc_RNA (1)...(19): siRNA sense strand
caaaagcauuccgcucaaa

SEQ ID NO: 1535696 - RNA, 19 nt, Homo sapiens
  misc_RNA (1)...(19): siRNA sense strand
ccuguacuaucaccucuca

SEQ ID NO: 1535697 - RNA, 19 nt, Homo sapiens
  misc_RNA (1)...(19): siRNA sense strand
gauccuguccuguacuauc

SEQ ID NO: 1535698 - RNA, 19 nt, Homo sapiens
  misc_RNA (1)...(19): siRNA sense strand
ggcuaaugguccuucuuau

SEQ ID NO: 1535699 - RNA, 19 nt, Homo sapiens
  misc_RNA (1)...(19): siRNA sense strand
guucuucugcccaguuuau

SEQ ID NO: 1535700 - RNA, 19 nt, Homo sapiens
  misc_RNA (1)...(19): siRNA sense strand
guaauucgacagcucuaca

SEQ ID NO: 1535701 - RNA, 19 nt, Homo sapiens
  misc_RNA (1)...(19): siRNA sense strand
uauaauggugccaaauaug

SEQ ID NO: 1535702 - RNA, 19 nt, Homo sapiens
  misc_RNA (1)...(19): siRNA sense strand
cugcaagaucuaccgaaua

SEQ ID NO: 1535703 - RNA, 19 nt, Homo sapiens
  misc_RNA (1)...(19): siRNA sense strand
uguacuaucaccucucaaa

SEQ ID NO: 1535704 - RNA, 19 nt, Homo sapiens
  misc_RNA (1)...(19): siRNA sense strand
ccagacagaagucauaacu

SEQ ID NO: 1535705 - RNA, 19 nt, Homo sapiens
  misc_RNA (1)...(19): siRNA sense strand
aaaaggcucucaucaacau

SEQ ID NO: 1535706 - RNA, 19 nt, Homo sapiens
  misc_RNA (1)...(19): siRNA sense strand
cuggagccauucacguauu

SEQ ID NO: 1535707 - RNA, 19 nt, Homo sapiens
  misc_RNA (1)...(19): siRNA sense strand
cauaugcuuuguuccuuac

SEQ ID NO: 1535708 - RNA, 19 nt, Homo sapiens
  misc_RNA (1)...(19): siRNA sense strand
gugugagcaucuacuuaau

SEQ ID NO: 1535709 - RNA, 19 nt, Homo sapiens
  misc_RNA (1)...(19): siRNA sense strand
aaccaggauuucacucuuc

SEQ ID NO: 1535710 - RNA, 19 nt, Homo sapiens
  misc_RNA (1)...(19): siRNA sense strand
gggcuacaucauaugcuuu

SEQ ID NO: 1535711 - RNA, 19 nt, Homo sapiens
  misc_RNA (1)...(19): siRNA sense strand
aaagucaaauguggguugu

SEQ ID NO: 1535712 - RNA, 19 nt, Homo sapiens
  misc_RNA (1)...(19): siRNA sense strand
cagaagaauacgaaucaca

SEQ ID NO: 1535713 - RNA, 19 nt, Homo sapiens
  misc_RNA (1)...(19): siRNA sense strand
ccgauuuccugcuuacucu

SEQ ID NO: 1535714 - RNA, 19 nt, Homo sapiens
  misc_RNA (1)...(19): siRNA sense strand
aguaacagccugccucauc

SEQ ID NO: 1535715 - RNA, 19 nt, Homo sapiens
  misc_RNA (1)...(19): siRNA sense strand
acaggugugugagcaucua

SEQ ID NO: 1535716 - RNA, 19 nt, Homo sapiens
  misc_RNA (1)...(19): siRNA sense strand
cuacaucauaugcuuuguu

SEQ ID NO: 1535717 - RNA, 19 nt, Homo sapiens
  misc_RNA (1)...(19): siRNA sense strand
ugugagcaucuacuuaauu

SEQ ID NO: 1535718 - RNA, 19 nt, Homo sapiens
  misc_RNA (1)...(19): siRNA sense strand
cuuagcauuugucagcauu

SEQ ID NO: 1535719 - RNA, 19 nt, Homo sapiens
  misc_RNA (1)...(19): siRNA sense strand
acagccgauuuccugcuua

SEQ ID NO: 1535720 - RNA, 19 nt, Homo sapiens
  misc_RNA (1)...(19): siRNA sense strand
ggugccaaauaugaugauu

SEQ ID NO: 1535721 - RNA, 19 nt, Homo sapiens
  misc_RNA (1)...(19): siRNA sense strand
uugauccuguccuguacua

SEQ ID NO: 1535722 - RNA, 19 nt, Homo sapiens
  misc_RNA (1)...(19): siRNA sense strand
cgggcuacaucauaugcuu

SEQ ID NO: 1535723 - RNA, 19 nt, Homo sapiens
  misc_RNA (1)...(19): siRNA sense strand
cuucugcccaguuuauaaa

SEQ ID NO: 1535724 - RNA, 19 nt, Homo sapiens
  misc_RNA (1)...(19): siRNA sense strand
ucaaaggucacugagacuu

SEQ ID NO: 1535725 - RNA, 19 nt, Homo sapiens
  misc_RNA (1)...(19): siRNA sense strand
gugugugagcaucuacuua

SEQ ID NO: 1535726 - RNA, 19 nt, Homo sapiens
  misc_RNA (1)...(19): siRNA sense strand
ucgaaccugugcuuugauc

SEQ ID NO: 1535727 - RNA, 19 nt, Homo sapiens
  misc_RNA (1)...(19): siRNA sense strand
gcauugaccgcugucuuca

SEQ ID NO: 1535728 - RNA, 19 nt, Homo sapiens
  misc_RNA (1)...(19): siRNA sense strand
uacagccgauuuccugcuu

SEQ ID NO: 1535729 - RNA, 19 nt, Homo sapiens
  misc_RNA (1)...(19): siRNA sense strand
aaagagaccaaggcucaga

SEQ ID NO: 1535730 - RNA, 19 nt, Homo sapiens
  misc_RNA (1)...(19): siRNA sense strand
gacagaagucauaacugau

SEQ ID NO: 1535731 - RNA, 19 nt, Homo sapiens
  misc_RNA (1)...(19): siRNA sense strand
cugacaaauuucauaugug

SEQ ID NO: 1535732 - RNA, 19 nt, Homo sapiens
  misc_RNA (1)...(19): siRNA sense strand
cuuuguuccuuaccacauu

SEQ ID NO: 1535733 - RNA, 19 nt, Homo sapiens
  misc_RNA (1)...(19): siRNA sense strand
ucuggagucuggcuuauuu

SEQ ID NO: 1535734 - RNA, 19 nt, Homo sapiens
  misc_RNA (1)...(19): siRNA sense strand
ggagggaucuggucaugac

SEQ ID NO: 1535735 - RNA, 19 nt, Homo sapiens
  misc_RNA (1)...(19): siRNA sense strand
uggcuuauuuccagcauuu

SEQ ID NO: 1535736 - RNA, 19 nt, Homo sapiens
  misc_RNA (1)...(19): siRNA sense strand
gaagagauccccagagaga

SEQ ID NO: 1535737 - RNA, 19 nt, Homo sapiens
  misc_RNA (1)...(19): siRNA sense strand
gcagcuggaugagauggaa

SEQ ID NO: 1535738 - RNA, 19 nt, Homo sapiens
  misc_RNA (1)...(19): siRNA sense strand
uggaugagauggaagagau

SEQ ID NO: 1535739 - RNA, 19 nt, Homo sapiens
  misc_RNA (1)...(19): siRNA sense strand
aggagcagcuggaugagau

SEQ ID NO: 1535740 - RNA, 19 nt, Homo sapiens
  misc_RNA (1)...(19): siRNA sense strand
ccagcggccucuccauucu

SEQ ID NO: 1535741 - RNA, 19 nt, Homo sapiens
  misc_RNA (1)...(19): siRNA sense strand
uggaagagauccccagaga

SEQ ID NO: 1535742 - RNA, 19 nt, Homo sapiens
  misc_RNA (1)...(19): siRNA sense strand
caccagcggccucuccauu

SEQ ID NO: 1535743 - RNA, 19 nt, Homo sapiens
  misc_RNA (1)...(19): siRNA sense strand
cccaggagacuacaacuca

SEQ ID NO: 1535744 - RNA, 19 nt, Homo sapiens
  misc_RNA (1)...(19): siRNA sense strand
ucagguggacucagcuuuc

SEQ ID NO: 1535745 - RNA, 19 nt, Homo sapiens
  misc_RNA (1)...(19): siRNA sense strand
cucaggagcagcuggauga

SEQ ID NO: 1535746 - RNA, 19 nt, Homo sapiens
  misc_RNA (1)...(19): siRNA sense strand
gggagaagcugcgcaagua

SEQ ID NO: 1535747 - RNA, 19 nt, Homo sapiens
  misc_RNA (1)...(19): siRNA sense strand
gcacggagacccugaaauu

SEQ ID NO: 1535748 - RNA, 19 nt, Homo sapiens
  misc_RNA (1)...(19): siRNA sense strand
agaagaagcugaucgacaa

SEQ ID NO: 1535749 - RNA, 19 nt, Homo sapiens
  misc_RNA (1)...(19): siRNA sense strand
agacagugcuggcaggaua

SEQ ID NO: 1535750 - RNA, 19 nt, Homo sapiens
  misc_RNA (1)...(19): siRNA sense strand
gcugggagcugggaguaua

SEQ ID NO: 1535751 - RNA, 19 nt, Homo sapiens
  misc_RNA (1)...(19): siRNA sense strand
gagaagacaaugaucaaga

SEQ ID NO: 1535752 - RNA, 19 nt, Homo sapiens
  misc_RNA (1)...(19): siRNA sense strand
gaacauccaccugcuguau

SEQ ID NO: 1535753 - RNA, 19 nt, Homo sapiens
  misc_RNA (1)...(19): siRNA sense strand
gcacacaccugagcuucug

SEQ ID NO: 1535754 - RNA, 19 nt, Homo sapiens
  misc_RNA (1)...(19): siRNA sense strand
cggaugaggucaagaggaa

SEQ ID NO: 1535755 - RNA, 19 nt, Homo sapiens
  misc_RNA (1)...(19): siRNA sense strand
cagcagaaauggaauacca

SEQ ID NO: 1535756 - RNA, 19 nt, Homo sapiens
  misc_RNA (1)...(19): siRNA sense strand
gaacaugcacaaccuacug

SEQ ID NO: 1535757 - RNA, 19 nt, Homo sapiens
  misc_RNA (1)...(19): siRNA sense strand
ggcagaagcuggagagcau

SEQ ID NO: 1535758 - RNA, 19 nt, Homo sapiens
  misc_RNA (1)...(19): siRNA sense strand
ucagagcugucggauauga

SEQ ID NO: 1535759 - RNA, 19 nt, Homo sapiens
  misc_RNA (1)...(19): siRNA sense strand
agaagacaaugaucaagau

SEQ ID NO: 1535760 - RNA, 19 nt, Homo sapiens
  misc_RNA (1)...(19): siRNA sense strand
uggauuaucugaagacagu

SEQ ID NO: 1535761 - RNA, 19 nt, Homo sapiens
  misc_RNA (1)...(19): siRNA sense strand
acauccaccugcuguauuu

SEQ ID NO: 1535762 - RNA, 19 nt, Homo sapiens
  misc_RNA (1)...(19): siRNA sense strand
ugacugcugugguggagaa

SEQ ID NO: 1535763 - RNA, 19 nt, Homo sapiens
  misc_RNA (1)...(19): siRNA sense strand
ccacagcagaaauggaaua

SEQ ID NO: 1535764 - RNA, 19 nt, Homo sapiens
  misc_RNA (1)...(19): siRNA sense strand
ugaaggcccuggugaagca

SEQ ID NO: 1535765 - RNA, 19 nt, Homo sapiens
  misc_RNA (1)...(19): siRNA sense strand
auuuggaccugcuggauua

SEQ ID NO: 1535766 - RNA, 19 nt, Homo sapiens
  misc_RNA (1)...(19): siRNA sense strand
gagaacaacaucgagaaga

SEQ ID NO: 1535767 - RNA, 19 nt, Homo sapiens
  misc_RNA (1)...(19): siRNA sense strand
gaagaucaugucccaagau

SEQ ID NO: 1535768 - RNA, 19 nt, Homo sapiens
  misc_RNA (1)...(19): siRNA sense strand
ugaagaucaugucccaaga

SEQ ID NO: 1535769 - RNA, 19 nt, Homo sapiens
  misc_RNA (1)...(19): siRNA sense strand
ucgacaagauccacacgaa

SEQ ID NO: 1535770 - RNA, 19 nt, Homo sapiens
  misc_RNA (1)...(19): siRNA sense strand
gaucacggaugaggucaag

SEQ ID NO: 1535771 - RNA, 19 nt, Homo sapiens
  misc_RNA (1)...(19): siRNA sense strand
gaacaacaucgagaagaca

SEQ ID NO: 1535772 - RNA, 19 nt, Homo sapiens
  misc_RNA (1)...(19): siRNA sense strand
gucccaagaugccaugaug

SEQ ID NO: 1535773 - RNA, 19 nt, Homo sapiens
  misc_RNA (1)...(19): siRNA sense strand
gaaggucaagagugcugua

SEQ ID NO: 1535774 - RNA, 19 nt, Homo sapiens
  misc_RNA (1)...(19): siRNA sense strand
cgaaggagaccagcgagaa

SEQ ID NO: 1535775 - RNA, 19 nt, Homo sapiens
  misc_RNA (1)...(19): siRNA sense strand
gaaggagaccagcgagaag

SEQ ID NO: 1535776 - RNA, 19 nt, Homo sapiens
  misc_RNA (1)...(19): siRNA sense strand
aagaucaugucccaagaug

SEQ ID NO: 1535777 - RNA, 19 nt, Homo sapiens
  misc_RNA (1)...(19): siRNA sense strand
acggagacccugaaauuga

SEQ ID NO: 1535778 - RNA, 19 nt, Homo sapiens
  misc_RNA (1)...(19): siRNA sense strand
caacaucgagaagacaaug

SEQ ID NO: 1535779 - RNA, 19 nt, Homo sapiens
  misc_RNA (1)...(19): siRNA sense strand
gaggucaagaggaacauga

SEQ ID NO: 1535780 - RNA, 19 nt, Homo sapiens
  misc_RNA (1)...(19): siRNA sense strand
ggagaacaacaucgagaag

SEQ ID NO: 1535781 - RNA, 19 nt, Homo sapiens
  misc_RNA (1)...(19): siRNA sense strand
gagcacggagacccugaaa

SEQ ID NO: 1535782 - RNA, 19 nt, Homo sapiens
  misc_RNA (1)...(19): siRNA sense strand
gaucaucaccagccagaac

SEQ ID NO: 1535783 - RNA, 19 nt, Homo sapiens
  misc_RNA (1)...(19): siRNA sense strand
gaaccuggagcugcagaug

SEQ ID NO: 1535784 - RNA, 19 nt, Homo sapiens
  misc_RNA (1)...(19): siRNA sense strand
aagaggaacaugaggcaaa

SEQ ID NO: 1535785 - RNA, 19 nt, Homo sapiens
  misc_RNA (1)...(19): siRNA sense strand
gaaccucguggucaacuac

SEQ ID NO: 1535786 - RNA, 19 nt, Homo sapiens
  misc_RNA (1)...(19): siRNA sense strand
acccugaaauugaggagaa

SEQ ID NO: 1535787 - RNA, 19 nt, Homo sapiens
  misc_RNA (1)...(19): siRNA sense strand
cggagacccugaaauugag

SEQ ID NO: 1535788 - RNA, 19 nt, Homo sapiens
  misc_RNA (1)...(19): siRNA sense strand
ccagauggacuuggacuuc

SEQ ID NO: 1535789 - RNA, 19 nt, Homo sapiens
  misc_RNA (1)...(19): siRNA sense strand
agaagcugaucgacaagau

SEQ ID NO: 1535790 - RNA, 19 nt, Homo sapiens
  misc_RNA (1)...(19): siRNA sense strand
agaacaacaucgagaagac

SEQ ID NO: 1535791 - RNA, 19 nt, Homo sapiens
  misc_RNA (1)...(19): siRNA sense strand
gaccuccacagcagaaaug

SEQ ID NO: 1535792 - RNA, 19 nt, Homo sapiens
  misc_RNA (1)...(19): siRNA sense strand
ugcagaaccucguggucaa

SEQ ID NO: 1535793 - RNA, 19 nt, Homo sapiens
  misc_RNA (1)...(19): siRNA sense strand
gaggaggccgugcucaagu

SEQ ID NO: 1535794 - RNA, 19 nt, Homo sapiens
  misc_RNA (1)...(19): siRNA sense strand
gaugaggucaagaggaaca

SEQ ID NO: 1535795 - RNA, 19 nt, Homo sapiens
  misc_RNA (1)...(19): siRNA sense strand
aggaggccgugcucaaguu

SEQ ID NO: 1535796 - RNA, 19 nt, Homo sapiens
  misc_RNA (1)...(19): siRNA sense strand
agaggaacacggaggagaa

SEQ ID NO: 1535797 - RNA, 19 nt, Homo sapiens
  misc_RNA (1)...(19): siRNA sense strand
gggagaaccggcucaacca

SEQ ID NO: 1535798 - RNA, 19 nt, Homo sapiens
  misc_RNA (1)...(19): siRNA sense strand
gaagaagcugaucgacaag

SEQ ID NO: 1535799 - RNA, 19 nt, Homo sapiens
  misc_RNA (1)...(19): siRNA sense strand
gaccugcuggauuaucuga

SEQ ID NO: 1535800 - RNA, 19 nt, Homo sapiens
  misc_RNA (1)...(19): siRNA sense strand
ucucacgucugggacauca

SEQ ID NO: 1535801 - RNA, 19 nt, Homo sapiens
  misc_RNA (1)...(19): siRNA sense strand
uggacaagcugcagaaccu

SEQ ID NO: 1535802 - RNA, 19 nt, Homo sapiens
  misc_RNA (1)...(19): siRNA sense strand
agaaccucguggucaacua

SEQ ID NO: 1535803 - RNA, 19 nt, Homo sapiens
  misc_RNA (1)...(19): siRNA sense strand
guauacccacugccaacaa

SEQ ID NO: 1535804 - RNA, 19 nt, Homo sapiens
  misc_RNA (1)...(19): siRNA sense strand
gcugaaggcccuggugaag

SEQ ID NO: 1535805 - RNA, 19 nt, Homo sapiens
  misc_RNA (1)...(19): siRNA sense strand
agaggaacaugaggcaaag

SEQ ID NO: 1535806 - RNA, 19 nt, Homo sapiens
  misc_RNA (1)...(19): siRNA sense strand
ucgagaagacaaugaucaa

SEQ ID NO: 1535807 - RNA, 19 nt, Homo sapiens
  misc_RNA (1)...(19): siRNA sense strand
uauacccacugccaacaag

SEQ ID NO: 1535808 - RNA, 19 nt, Homo sapiens
  misc_RNA (1)...(19): siRNA sense strand
gagagaaugugaccuuguc

SEQ ID NO: 1535809 - RNA, 19 nt, Homo sapiens
  misc_RNA (1)...(19): siRNA sense strand
gcaggaaccuacagaugcu

SEQ ID NO: 1535810 - RNA, 19 nt, Homo sapiens
  misc_RNA (1)...(19): siRNA sense strand
ggagggaccuacagaugcu

SEQ ID NO: 1535811 - RNA, 19 nt, Homo sapiens
  misc_RNA (1)...(19): siRNA sense strand
ggugaaaucagaagagaca

SEQ ID NO: 1535812 - RNA, 19 nt, Homo sapiens
  misc_RNA (1)...(19): siRNA sense strand
agacagucauccugcaaug

SEQ ID NO: 1535813 - RNA, 19 nt, Homo sapiens
  misc_RNA (1)...(19): siRNA sense strand
gugauccacugcuuguuuc

SEQ ID NO: 1535814 - RNA, 19 nt, Homo sapiens
  misc_RNA (1)...(19): siRNA sense strand
ggagagaaugugaccuugu

SEQ ID NO: 1535815 - RNA, 19 nt, Homo sapiens
  misc_RNA (1)...(19): siRNA sense strand
cagcaucaacggaacauuc

SEQ ID NO: 1535816 - RNA, 19 nt, Homo sapiens
  misc_RNA (1)...(19): siRNA sense strand
acagaugcuucggcucuuu

SEQ ID NO: 1535817 - RNA, 19 nt, Homo sapiens
  misc_RNA (1)...(19): siRNA sense strand
caggagagaaugugaccuu

SEQ ID NO: 1535818 - RNA, 19 nt, Homo sapiens
  misc_RNA (1)...(19): siRNA sense strand
acagucauccugcaauguu

SEQ ID NO: 1535819 - RNA, 19 nt, Homo sapiens
  misc_RNA (1)...(19): siRNA sense strand
caaggccaacuucuccauu

SEQ ID NO: 1535820 - RNA, 19 nt, Homo sapiens
  misc_RNA (1)...(19): siRNA sense strand
cuacagaugcuacgguucu

SEQ ID NO: 1535821 - RNA, 19 nt, Homo sapiens
  misc_RNA (1)...(19): siRNA sense strand
gagacagucauccugcaau

SEQ ID NO: 1535822 - RNA, 19 nt, Homo sapiens
  misc_RNA (1)...(19): siRNA sense strand
cagucauccugcaauguug

SEQ ID NO: 1535823 - RNA, 19 nt, Homo sapiens
  misc_RNA (1)...(19): siRNA sense strand
gagagaaugugaccuuguc

SEQ ID NO: 1535824 - RNA, 19 nt, Homo sapiens
  misc_RNA (1)...(19): siRNA sense strand
gcaggaaccuacagaugcu

SEQ ID NO: 1535825 - RNA, 19 nt, Homo sapiens
  misc_RNA (1)...(19): siRNA sense strand
ggagggaccuacagaugcu

SEQ ID NO: 1535826 - RNA, 19 nt, Homo sapiens
  misc_RNA (1)...(19): siRNA sense strand
ggugaaaucagaagagaca

SEQ ID NO: 1535827 - RNA, 19 nt, Homo sapiens
  misc_RNA (1)...(19): siRNA sense strand
agacagucauccugcaaug

SEQ ID NO: 1535828 - RNA, 19 nt, Homo sapiens
  misc_RNA (1)...(19): siRNA sense strand
ccagacaccuacauguucu

SEQ ID NO: 1535829 - RNA, 19 nt, Homo sapiens
  misc_RNA (1)...(19): siRNA sense strand
gugauccacugcuuguuuc

SEQ ID NO: 1535830 - RNA, 19 nt, Homo sapiens
  misc_RNA (1)...(19): siRNA sense strand
ggagagaaugugaccuugu

SEQ ID NO: 1535831 - RNA, 19 nt, Homo sapiens
  misc_RNA (1)...(19): siRNA sense strand
cagcaucaacggaacauuc

SEQ ID NO: 1535832 - RNA, 19 nt, Homo sapiens
  misc_RNA (1)...(19): siRNA sense strand
acagaugcuucggcucuuu

SEQ ID NO: 1535833 - RNA, 19 nt, Homo sapiens
  misc_RNA (1)...(19): siRNA sense strand
caggagagaaugugaccuu

SEQ ID NO: 1535834 - RNA, 19 nt, Homo sapiens
  misc_RNA (1)...(19): siRNA sense strand
acagucauccugcaauguu

SEQ ID NO: 1535835 - RNA, 19 nt, Homo sapiens
  misc_RNA (1)...(19): siRNA sense strand
caaggccaacuucuccauu

SEQ ID NO: 1535836 - RNA, 19 nt, Homo sapiens
  misc_RNA (1)...(19): siRNA sense strand
cuacagaugcuacgguucu

SEQ ID NO: 1535837 - RNA, 19 nt, Homo sapiens
  misc_RNA (1)...(19): siRNA sense strand
gagacagucauccugcaau

SEQ ID NO: 1535838 - RNA, 19 nt, Homo sapiens
  misc_RNA (1)...(19): siRNA sense strand
cagucauccugcaauguug

SEQ ID NO: 1535839 - RNA, 19 nt, Homo sapiens
  misc_RNA (1)...(19): siRNA sense strand
gcaagcaggcgaaucguaa

SEQ ID NO: 1535840 - RNA, 19 nt, Homo sapiens
  misc_RNA (1)...(19): siRNA sense strand
uggcugagaucgagaaauu

SEQ ID NO: 1535841 - RNA, 19 nt, Homo sapiens
  misc_RNA (1)...(19): siRNA sense strand
ccacugccuuccaaagaaa

SEQ ID NO: 1535842 - RNA, 19 nt, Homo sapiens
  misc_RNA (1)...(19): siRNA sense strand
ccaaagaaacgauugaaca

SEQ ID NO: 1535843 - RNA, 19 nt, Homo sapiens
  misc_RNA (1)...(19): siRNA sense strand
agacagagacgcaagagaa

SEQ ID NO: 1535844 - RNA, 19 nt, Homo sapiens
  misc_RNA (1)...(19): siRNA sense strand
gaagcaagcaggcgaaucg

SEQ ID NO: 1535845 - RNA, 19 nt, Homo sapiens
  misc_RNA (1)...(19): siRNA sense strand
gacagagacgcaagagaaa

SEQ ID NO: 1535846 - RNA, 19 nt, Homo sapiens
  misc_RNA (1)...(19): siRNA sense strand
caaagaaacgauugaacag

SEQ ID NO: 1535847 - RNA, 19 nt, Homo sapiens
  misc_RNA (1)...(19): siRNA sense strand
agucgaaacugaagaagac

SEQ ID NO: 1535848 - RNA, 19 nt, Homo sapiens
  misc_RNA (1)...(19): siRNA sense strand
aaacugaagaagacagaga

SEQ ID NO: 1535849 - RNA, 19 nt, Homo sapiens
  misc_RNA (1)...(19): siRNA sense strand
uccacugccuuccaaagaa

SEQ ID NO: 1535850 - RNA, 19 nt, Homo sapiens
  misc_RNA (1)...(19): siRNA sense strand
cgaaacugaagaagacaga

SEQ ID NO: 1535851 - RNA, 19 nt, Homo sapiens
  misc_RNA (1)...(19): siRNA sense strand
gauaagucgaaacugaaga

SEQ ID NO: 1535852 - RNA, 19 nt, Homo sapiens
  misc_RNA (1)...(19): siRNA sense strand
aauccgauauggcugagau

SEQ ID NO: 1535853 - RNA, 19 nt, Homo sapiens
  misc_RNA (1)...(19): siRNA sense strand
gaagacagagacgcaagag

SEQ ID NO: 1535854 - RNA, 19 nt, Homo sapiens
  misc_RNA (1)...(19): siRNA sense strand
cgauugaacaggagaagca

SEQ ID NO: 1535855 - RNA, 19 nt, Homo sapiens
  misc_RNA (1)...(19): siRNA sense strand
cgaagagagugaugugcaa

SEQ ID NO: 1535856 - RNA, 19 nt, Homo sapiens
  misc_RNA (1)...(19): siRNA sense strand
gccgaaagccagcaacuug

SEQ ID NO: 1535857 - RNA, 19 nt, Homo sapiens
  misc_RNA (1)...(19): siRNA sense strand
ggcauccucuccagcguuu

SEQ ID NO: 1535858 - RNA, 19 nt, Homo sapiens
  misc_RNA (1)...(19): siRNA sense strand
ggacgaagagagugaugug

SEQ ID NO: 1535859 - RNA, 19 nt, Homo sapiens
  misc_RNA (1)...(19): siRNA sense strand
gaaagccagcaacuuggaa

SEQ ID NO: 1535860 - RNA, 19 nt, Homo sapiens
  misc_RNA (1)...(19): siRNA sense strand
gaucugggacgaagagagu

SEQ ID NO: 1535861 - RNA, 19 nt, Homo sapiens
  misc_RNA (1)...(19): siRNA sense strand
caagugcuggguccuguga

SEQ ID NO: 1535862 - RNA, 19 nt, Homo sapiens
  misc_RNA (1)...(19): siRNA sense strand
gcccugcucuccugcucuu

SEQ ID NO: 1535863 - RNA, 19 nt, Homo sapiens
  misc_RNA (1)...(19): siRNA sense strand
cuacagagacagccgaaag

SEQ ID NO: 1535864 - RNA, 19 nt, Homo sapiens
  misc_RNA (1)...(19): siRNA sense strand
cggcagcccuacagagaca

SEQ ID NO: 1535865 - RNA, 19 nt, Homo sapiens
  misc_RNA (1)...(19): siRNA sense strand
cgaaagccagcaacuugga

SEQ ID NO: 1535866 - RNA, 19 nt, Homo sapiens
  misc_RNA (1)...(19): siRNA sense strand
gcgggagccuacagaggau

SEQ ID NO: 1535867 - RNA, 19 nt, Homo sapiens
  misc_RNA (1)...(19): siRNA sense strand
gagagugaugugcaagguu

SEQ ID NO: 1535868 - RNA, 19 nt, Homo sapiens
  misc_RNA (1)...(19): siRNA sense strand
gaaggggucucuggacagu

SEQ ID NO: 1535869 - RNA, 19 nt, Homo sapiens
  misc_RNA (1)...(19): siRNA sense strand
caaaugaccuucaggagaa

SEQ ID NO: 1535870 - RNA, 19 nt, Homo sapiens
  misc_RNA (1)...(19): siRNA sense strand
gcaaagaagaaacaacuua

SEQ ID NO: 1535871 - RNA, 19 nt, Homo sapiens
  misc_RNA (1)...(19): siRNA sense strand
gaagaacccuacuccagaa

SEQ ID NO: 1535872 - RNA, 19 nt, Homo sapiens
  misc_RNA (1)...(19): siRNA sense strand
gaagggaaccagcaaagaa

SEQ ID NO: 1535873 - RNA, 19 nt, Homo sapiens
  misc_RNA (1)...(19): siRNA sense strand
gcaguuugaugauaaagga

SEQ ID NO: 1535874 - RNA, 19 nt, Homo sapiens
  misc_RNA (1)...(19): siRNA sense strand
caaagaaacaagacaagaa

SEQ ID NO: 1535875 - RNA, 19 nt, Homo sapiens
  misc_RNA (1)...(19): siRNA sense strand
gacaaggaccggcaaauug

SEQ ID NO: 1535876 - RNA, 19 nt, Homo sapiens
  misc_RNA (1)...(19): siRNA sense strand
gaacucaggcaucaaagga

SEQ ID NO: 1535877 - RNA, 19 nt, Homo sapiens
  misc_RNA (1)...(19): siRNA sense strand
gaggagacccagcaccaua

SEQ ID NO: 1535878 - RNA, 19 nt, Homo sapiens
  misc_RNA (1)...(19): siRNA sense strand
ggaagguccugggaaauca

SEQ ID NO: 1535879 - RNA, 19 nt, Homo sapiens
  misc_RNA (1)...(19): siRNA sense strand
uaaccuugcccuuauguuu

SEQ ID NO: 1535880 - RNA, 19 nt, Homo sapiens
  misc_RNA (1)...(19): siRNA sense strand
ccucauagcuucaugucau

SEQ ID NO: 1535881 - RNA, 19 nt, Homo sapiens
  misc_RNA (1)...(19): siRNA sense strand
gauuaaacacucccagaaa

SEQ ID NO: 1535882 - RNA, 19 nt, Homo sapiens
  misc_RNA (1)...(19): siRNA sense strand
ugaugcaguuugaugauaa

SEQ ID NO: 1535883 - RNA, 19 nt, Homo sapiens
  misc_RNA (1)...(19): siRNA sense strand
ggagaauaucacaaaguua

SEQ ID NO: 1535884 - RNA, 19 nt, Homo sapiens
  misc_RNA (1)...(19): siRNA sense strand
gaugauaaaggaaacaaga

SEQ ID NO: 1535885 - RNA, 19 nt, Homo sapiens
  misc_RNA (1)...(19): siRNA sense strand
ggaaacaagaccaauauac

SEQ ID NO: 1535886 - RNA, 19 nt, Homo sapiens
  misc_RNA (1)...(19): siRNA sense strand
gcaaagaaacaagacaaga

SEQ ID NO: 1535887 - RNA, 19 nt, Homo sapiens
  misc_RNA (1)...(19): siRNA sense strand
aaaggaaacaagaccaaua

SEQ ID NO: 1535888 - RNA, 19 nt, Homo sapiens
  misc_RNA (1)...(19): siRNA sense strand
gaacccuacuccagaaucu

SEQ ID NO: 1535889 - RNA, 19 nt, Homo sapiens
  misc_RNA (1)...(19): siRNA sense strand
gaacaagaugucagccuau

SEQ ID NO: 1535890 - RNA, 19 nt, Homo sapiens
  misc_RNA (1)...(19): siRNA sense strand
gaugucagccuauaaccuu

SEQ ID NO: 1535891 - RNA, 19 nt, Homo sapiens
  misc_RNA (1)...(19): siRNA sense strand
aggagaauaucacaaaguu

SEQ ID NO: 1535892 - RNA, 19 nt, Homo sapiens
  misc_RNA (1)...(19): siRNA sense strand
gaugcaguuugaugauaaa

SEQ ID NO: 1535893 - RNA, 19 nt, Homo sapiens
  misc_RNA (1)...(19): siRNA sense strand
ccagaacucaggcaucaaa

SEQ ID NO: 1535894 - RNA, 19 nt, Homo sapiens
  misc_RNA (1)...(19): siRNA sense strand
gagccucugcugacacaua

SEQ ID NO: 1535895 - RNA, 19 nt, Homo sapiens
  misc_RNA (1)...(19): siRNA sense strand
gcugacacauaaacacuuc

SEQ ID NO: 1535896 - RNA, 19 nt, Homo sapiens
  misc_RNA (1)...(19): siRNA sense strand
aaacggaaccggguagauu

SEQ ID NO: 1535897 - RNA, 19 nt, Homo sapiens
  misc_RNA (1)...(19): siRNA sense strand
acaaggaccggcaaauuga

SEQ ID NO: 1535898 - RNA, 19 nt, Homo sapiens
  misc_RNA (1)...(19): siRNA sense strand
gaugacaccaacaagauug

SEQ ID NO: 1535899 - RNA, 19 nt, Homo sapiens
  misc_RNA (1)...(19): siRNA sense strand
ucaacacguucaugauaug

SEQ ID NO: 1535900 - RNA, 19 nt, Homo sapiens
  misc_RNA (1)...(19): siRNA sense strand
gggauggcuuuuaugauua

SEQ ID NO: 1535901 - RNA, 19 nt, Homo sapiens
  misc_RNA (1)...(19): siRNA sense strand
guuauugcuugaucuccua

SEQ ID NO: 1535902 - RNA, 19 nt, Homo sapiens
  misc_RNA (1)...(19): siRNA sense strand
ggucugaagggaagaaaga

SEQ ID NO: 1535903 - RNA, 19 nt, Homo sapiens
  misc_RNA (1)...(19): siRNA sense strand
gcacugagagagcuguuuc

SEQ ID NO: 1535904 - RNA, 19 nt, Homo sapiens
  misc_RNA (1)...(19): siRNA sense strand
aacaagaugucagccuaua

SEQ ID NO: 1535905 - RNA, 19 nt, Homo sapiens
  misc_RNA (1)...(19): siRNA sense strand
gaaacaagaccaauauacc

SEQ ID NO: 1535906 - RNA, 19 nt, Homo sapiens
  misc_RNA (1)...(19): siRNA sense strand
aaacaagacaagaacaaga

SEQ ID NO: 1535907 - RNA, 19 nt, Homo sapiens
  misc_RNA (1)...(19): siRNA sense strand
aauugaggcucuccaguug

SEQ ID NO: 1535908 - RNA, 19 nt, Homo sapiens
  misc_RNA (1)...(19): siRNA sense strand
acacauaaacacuucaaug

SEQ ID NO: 1535909 - RNA, 19 nt, Homo sapiens
  misc_RNA (1)...(19): siRNA sense strand
gaaacaagacaagaacaag

SEQ ID NO: 1535910 - RNA, 19 nt, Homo sapiens
  misc_RNA (1)...(19): siRNA sense strand
agacaaggaccggcaaauu

SEQ ID NO: 1535911 - RNA, 19 nt, Homo sapiens
  misc_RNA (1)...(19): siRNA sense strand
gccuauaaccuugcccuua

SEQ ID NO: 1535912 - RNA, 19 nt, Homo sapiens
  misc_RNA (1)...(19): siRNA sense strand
caguugcucuuccucauuc

SEQ ID NO: 1535913 - RNA, 19 nt, Homo sapiens
  misc_RNA (1)...(19): siRNA sense strand
aaacacucccagaaacuuu

SEQ ID NO: 1535914 - RNA, 19 nt, Homo sapiens
  misc_RNA (1)...(19): siRNA sense strand
ggccauuggugaauugaag

SEQ ID NO: 1535915 - RNA, 19 nt, Homo sapiens
  misc_RNA (1)...(19): siRNA sense strand
uuucaacacguucaugaua

SEQ ID NO: 1535916 - RNA, 19 nt, Homo sapiens
  misc_RNA (1)...(19): siRNA sense strand
cugauuugaugcaguuuga

SEQ ID NO: 1535917 - RNA, 19 nt, Homo sapiens
  misc_RNA (1)...(19): siRNA sense strand
aaauugaggcucuccaguu

SEQ ID NO: 1535918 - RNA, 19 nt, Homo sapiens
  misc_RNA (1)...(19): siRNA sense strand
gaccuugaccucauagcuu

SEQ ID NO: 1535919 - RNA, 19 nt, Homo sapiens
  misc_RNA (1)...(19): siRNA sense strand
ggauggcuuuuaugauuaa

SEQ ID NO: 1535920 - RNA, 19 nt, Homo sapiens
  misc_RNA (1)...(19): siRNA sense strand
cagcaaagaaacaagacaa

SEQ ID NO: 1535921 - RNA, 19 nt, Homo sapiens
  misc_RNA (1)...(19): siRNA sense strand
ucgcugauuugaugcaguu

SEQ ID NO: 1535922 - RNA, 19 nt, Homo sapiens
  misc_RNA (1)...(19): siRNA sense strand
aaacaagaccaauauacca

SEQ ID NO: 1535923 - RNA, 19 nt, Homo sapiens
  misc_RNA (1)...(19): siRNA sense strand
aaucguaauuugcugaagu

SEQ ID NO: 1535924 - RNA, 19 nt, Homo sapiens
  misc_RNA (1)...(19): siRNA sense strand
agaccaauauaccagacaa

SEQ ID NO: 1535925 - RNA, 19 nt, Homo sapiens
  misc_RNA (1)...(19): siRNA sense strand
aaggaaacaagaccaauau

SEQ ID NO: 1535926 - RNA, 19 nt, Homo sapiens
  misc_RNA (1)...(19): siRNA sense strand
ugggauggcuuuuaugauu

SEQ ID NO: 1535927 - RNA, 19 nt, Homo sapiens
  misc_RNA (1)...(19): siRNA sense strand
agaaacaagacaagaacaa

SEQ ID NO: 1535928 - RNA, 19 nt, Homo sapiens
  misc_RNA (1)...(19): siRNA sense strand
uugaugcaguuugaugaua

SEQ ID NO: 1535929 - RNA, 19 nt, Homo sapiens
  misc_RNA (1)...(19): siRNA sense strand
cagcaaagaagaaacaacu

SEQ ID NO: 1535930 - RNA, 19 nt, Homo sapiens
  misc_RNA (1)...(19): siRNA sense strand
caagaugucagccuauaac

SEQ ID NO: 1535931 - RNA, 19 nt, Homo sapiens
  misc_RNA (1)...(19): siRNA sense strand
ugauuaaacacucccagaa

SEQ ID NO: 1535932 - RNA, 19 nt, Homo sapiens
  misc_RNA (1)...(19): siRNA sense strand
cggaagaggcacugagaga

SEQ ID NO: 1535933 - RNA, 19 nt, Homo sapiens
  misc_RNA (1)...(19): siRNA sense strand
cucauagcuucaugucaua

SEQ ID NO: 1535934 - RNA, 19 nt, Homo sapiens
  misc_RNA (1)...(19): siRNA sense strand
gaaguuauugcuugaucuc

SEQ ID NO: 1535935 - RNA, 19 nt, Homo sapiens
  misc_RNA (1)...(19): siRNA sense strand
caagauugaaguggucuga

SEQ ID NO: 1535936 - RNA, 19 nt, Homo sapiens
  misc_RNA (1)...(19): siRNA sense strand
gaugaugucagaaaagaaa

SEQ ID NO: 1535937 - RNA, 19 nt, Homo sapiens
  misc_RNA (1)...(19): siRNA sense strand
gauuugaugcaguuugaug

SEQ ID NO: 1535938 - RNA, 19 nt, Homo sapiens
  misc_RNA (1)...(19): siRNA sense strand
uucaacacguucaugauau

SEQ ID NO: 1535939 - RNA, 19 nt, Homo sapiens
  misc_RNA (1)...(19): siRNA sense strand
uaaacacucccagaaacuu

SEQ ID NO: 1535940 - RNA, 19 nt, Homo sapiens
  misc_RNA (1)...(19): siRNA sense strand
uaaacagugggauggcuuu

SEQ ID NO: 1535941 - RNA, 19 nt, Homo sapiens
  misc_RNA (1)...(19): siRNA sense strand
ccaauauaccagacaagga

SEQ ID NO: 1535942 - RNA, 19 nt, Homo sapiens
  misc_RNA (1)...(19): siRNA sense strand
agacagcaaagaaacaaga

SEQ ID NO: 1535943 - RNA, 19 nt, Homo sapiens
  misc_RNA (1)...(19): siRNA sense strand
caagacaagaacaagaugu

SEQ ID NO: 1535944 - RNA, 19 nt, Homo sapiens
  misc_RNA (1)...(19): siRNA sense strand
cgaugacaccaacaagauu

SEQ ID NO: 1535945 - RNA, 19 nt, Homo sapiens
  misc_RNA (1)...(19): siRNA sense strand
gaaacggaaccggguagau

SEQ ID NO: 1535946 - RNA, 19 nt, Homo sapiens
  misc_RNA (1)...(19): siRNA sense strand
acaagaugucagccuauaa

SEQ ID NO: 1535947 - RNA, 19 nt, Homo sapiens
  misc_RNA (1)...(19): siRNA sense strand
agauugaaguggucugaag

SEQ ID NO: 1535948 - RNA, 19 nt, Homo sapiens
  misc_RNA (1)...(19): siRNA sense strand
ggaaccagcaaagaaaaua

SEQ ID NO: 1535949 - RNA, 19 nt, Homo sapiens
  misc_RNA (1)...(19): siRNA sense strand
aagggaaccagcaaagaaa

SEQ ID NO: 1535950 - RNA, 19 nt, Homo sapiens
  misc_RNA (1)...(19): siRNA sense strand
ccagacagcaaagaaacaa

SEQ ID NO: 1535951 - RNA, 19 nt, Homo sapiens
  misc_RNA (1)...(19): siRNA sense strand
agccucugcugacacauaa

SEQ ID NO: 1535952 - RNA, 19 nt, Homo sapiens
  misc_RNA (1)...(19): siRNA sense strand
cagagucagcaaagaagaa

SEQ ID NO: 1535953 - RNA, 19 nt, Homo sapiens
  misc_RNA (1)...(19): siRNA sense strand
ucaggagaauaucacaaag

SEQ ID NO: 1535954 - RNA, 19 nt, Homo sapiens
  misc_RNA (1)...(19): siRNA sense strand
uagcuucaugucauacuaa

SEQ ID NO: 1535955 - RNA, 19 nt, Homo sapiens
  misc_RNA (1)...(19): siRNA sense strand
ccaguugcucuuccucauu

SEQ ID NO: 1535956 - RNA, 19 nt, Homo sapiens
  misc_RNA (1)...(19): siRNA sense strand
ugaaguuauugcuugaucu

SEQ ID NO: 1535957 - RNA, 19 nt, Homo sapiens
  misc_RNA (1)...(19): siRNA sense strand
gcaaagaaaauaggaacuu

SEQ ID NO: 1535958 - RNA, 19 nt, Homo sapiens
  misc_RNA (1)...(19): siRNA sense strand
cuucaaugcacaccucaaa

SEQ ID NO: 1535959 - RNA, 19 nt, Homo sapiens
  misc_RNA (1)...(19): siRNA sense strand
cagaugaugucagaaaaga

SEQ ID NO: 1535960 - RNA, 19 nt, Homo sapiens
  misc_RNA (1)...(19): siRNA sense strand
cacauaaacacuucaaugc

SEQ ID NO: 1535961 - RNA, 19 nt, Homo sapiens
  misc_RNA (1)...(19): siRNA sense strand
gcuggcaaagucucagaaa

SEQ ID NO: 1535962 - RNA, 19 nt, Homo sapiens
  misc_RNA (1)...(19): siRNA sense strand
aaagaaacaagacaagaac

SEQ ID NO: 1535963 - RNA, 19 nt, Homo sapiens
  misc_RNA (1)...(19): siRNA sense strand
uaaaggaaacaagaccaau

SEQ ID NO: 1535964 - RNA, 19 nt, Homo sapiens
  misc_RNA (1)...(19): siRNA sense strand
ugaagggaaccagcaaaga

SEQ ID NO: 1535965 - RNA, 19 nt, Homo sapiens
  misc_RNA (1)...(19): siRNA sense strand
cggagccucugcugacaca

SEQ ID NO: 1535966 - RNA, 19 nt, Homo sapiens
  misc_RNA (1)...(19): siRNA sense strand
auuaaacacucccagaaac

SEQ ID NO: 1535967 - RNA, 19 nt, Homo sapiens
  misc_RNA (1)...(19): siRNA sense strand
cugaaguuauugcuugauc

SEQ ID NO: 1535968 - RNA, 19 nt, Homo sapiens
  misc_RNA (1)...(19): siRNA sense strand
gaccuucaggagaauauca

SEQ ID NO: 1535969 - RNA, 19 nt, Homo sapiens
  misc_RNA (1)...(19): siRNA sense strand
gcaaauaccuguuggaugu

SEQ ID NO: 1535970 - RNA, 19 nt, Homo sapiens
  misc_RNA (1)...(19): siRNA sense strand
uaacuugacuggaauucua

SEQ ID NO: 1535971 - RNA, 19 nt, Homo sapiens
  misc_RNA (1)...(19): siRNA sense strand
cagcauaacuugacuggaa

SEQ ID NO: 1535972 - RNA, 19 nt, Homo sapiens
  misc_RNA (1)...(19): siRNA sense strand
gaagauugaugcugcuuau

SEQ ID NO: 1535973 - RNA, 19 nt, Homo sapiens
  misc_RNA (1)...(19): siRNA sense strand
uaagaggauuggagaauuu

SEQ ID NO: 1535974 - RNA, 19 nt, Homo sapiens
  misc_RNA (1)...(19): siRNA sense strand
gaaggaaaggcaaaucuaa

SEQ ID NO: 1535975 - RNA, 19 nt, Homo sapiens
  misc_RNA (1)...(19): siRNA sense strand
ggauuuggaucacaucauu

SEQ ID NO: 1535976 - RNA, 19 nt, Homo sapiens
  misc_RNA (1)...(19): siRNA sense strand
caagcaagguuucuagcua

SEQ ID NO: 1535977 - RNA, 19 nt, Homo sapiens
  misc_RNA (1)...(19): siRNA sense strand
gaacuuguccguccagcua

SEQ ID NO: 1535978 - RNA, 19 nt, Homo sapiens
  misc_RNA (1)...(19): siRNA sense strand
gcaaagcuccugagaaaca

SEQ ID NO: 1535979 - RNA, 19 nt, Homo sapiens
  misc_RNA (1)...(19): siRNA sense strand
gcagagacgauuacaguuu

SEQ ID NO: 1535980 - RNA, 19 nt, Homo sapiens
  misc_RNA (1)...(19): siRNA sense strand
gggaugagcuuuggaacaa

SEQ ID NO: 1535981 - RNA, 19 nt, Homo sapiens
  misc_RNA (1)...(19): siRNA sense strand
gggcgaagcggauggaaua

SEQ ID NO: 1535982 - RNA, 19 nt, Homo sapiens
  misc_RNA (1)...(19): siRNA sense strand
gaccaagucugcagaguca

SEQ ID NO: 1535983 - RNA, 19 nt, Homo sapiens
  misc_RNA (1)...(19): siRNA sense strand
ggaaaggcaaaucuaagua

SEQ ID NO: 1535984 - RNA, 19 nt, Homo sapiens
  misc_RNA (1)...(19): siRNA sense strand
gaguugggaugguugcaua

SEQ ID NO: 1535985 - RNA, 19 nt, Homo sapiens
  misc_RNA (1)...(19): siRNA sense strand
ccaggacgcugcagaccua

SEQ ID NO: 1535986 - RNA, 19 nt, Homo sapiens
  misc_RNA (1)...(19): siRNA sense strand
gcaccaaguuugucaugau

SEQ ID NO: 1535987 - RNA, 19 nt, Homo sapiens
  misc_RNA (1)...(19): siRNA sense strand
gagaauguaugagccacua

SEQ ID NO: 1535988 - RNA, 19 nt, Homo sapiens
  misc_RNA (1)...(19): siRNA sense strand
ugagaaacaugccagaguu

SEQ ID NO: 1535989 - RNA, 19 nt, Homo sapiens
  misc_RNA (1)...(19): siRNA sense strand
augcaaagcuccugagaaa

SEQ ID NO: 1535990 - RNA, 19 nt, Homo sapiens
  misc_RNA (1)...(19): siRNA sense strand
gauuacaguuugaagagaa

SEQ ID NO: 1535991 - RNA, 19 nt, Homo sapiens
  misc_RNA (1)...(19): siRNA sense strand
gaaagagcuuauucgacaa

SEQ ID NO: 1535992 - RNA, 19 nt, Homo sapiens
  misc_RNA (1)...(19): siRNA sense strand
gagagucuucgguuucuua

SEQ ID NO: 1535993 - RNA, 19 nt, Homo sapiens
  misc_RNA (1)...(19): siRNA sense strand
uggaauacauccucacuga

SEQ ID NO: 1535994 - RNA, 19 nt, Homo sapiens
  misc_RNA (1)...(19): siRNA sense strand
ggacacuuaccacgaauuu

SEQ ID NO: 1535995 - RNA, 19 nt, Homo sapiens
  misc_RNA (1)...(19): siRNA sense strand
caaaucagccuucuucaca

SEQ ID NO: 1535996 - RNA, 19 nt, Homo sapiens
  misc_RNA (1)...(19): siRNA sense strand
cgacucgcauggacuuuaa

SEQ ID NO: 1535997 - RNA, 19 nt, Homo sapiens
  misc_RNA (1)...(19): siRNA sense strand
gaauauugacccauuucua

SEQ ID NO: 1535998 - RNA, 19 nt, Homo sapiens
  misc_RNA (1)...(19): siRNA sense strand
ggucaaggagacuuuauaa

SEQ ID NO: 1535999 - RNA, 19 nt, Homo sapiens
  misc_RNA (1)...(19): siRNA sense strand
caucagauccaacaguuaa

SEQ ID NO: 1536000 - RNA, 19 nt, Homo sapiens
  misc_RNA (1)...(19): siRNA sense strand
cagagacgauuacaguuug

SEQ ID NO: 1536001 - RNA, 19 nt, Homo sapiens
  misc_RNA (1)...(19): siRNA sense strand
guuauuugcucaggccuua

SEQ ID NO: 1536002 - RNA, 19 nt, Homo sapiens
  misc_RNA (1)...(19): siRNA sense strand
agaaacagcgugaaauuga

SEQ ID NO: 1536003 - RNA, 19 nt, Homo sapiens
  misc_RNA (1)...(19): siRNA sense strand
ugggaugguugcauaauaa

SEQ ID NO: 1536004 - RNA, 19 nt, Homo sapiens
  misc_RNA (1)...(19): siRNA sense strand
gcucaggccuuaccaagag

SEQ ID NO: 1536005 - RNA, 19 nt, Homo sapiens
  misc_RNA (1)...(19): siRNA sense strand
ugacgagagucuucgguuu

SEQ ID NO: 1536006 - RNA, 19 nt, Homo sapiens
  misc_RNA (1)...(19): siRNA sense strand
gaauacauccucacugaca

SEQ ID NO: 1536007 - RNA, 19 nt, Homo sapiens
  misc_RNA (1)...(19): siRNA sense strand
aaagaaacagcgugaaauu

SEQ ID NO: 1536008 - RNA, 19 nt, Homo sapiens
  misc_RNA (1)...(19): siRNA sense strand
gcucacaguugcgaauauu

SEQ ID NO: 1536009 - RNA, 19 nt, Homo sapiens
  misc_RNA (1)...(19): siRNA sense strand
gaaacagcgugaaauugag

SEQ ID NO: 1536010 - RNA, 19 nt, Homo sapiens
  misc_RNA (1)...(19): siRNA sense strand
gaaaggcaaaucuaaguag

SEQ ID NO: 1536011 - RNA, 19 nt, Homo sapiens
  misc_RNA (1)...(19): siRNA sense strand
ugaggacacuuaccacgaa

SEQ ID NO: 1536012 - RNA, 19 nt, Homo sapiens
  misc_RNA (1)...(19): siRNA sense strand
ggaagauugaugcugcuua

SEQ ID NO: 1536013 - RNA, 19 nt, Homo sapiens
  misc_RNA (1)...(19): siRNA sense strand
gcacuuaauggacuugcua

SEQ ID NO: 1536014 - RNA, 19 nt, Homo sapiens
  misc_RNA (1)...(19): siRNA sense strand
uguuggauguucucaauaa

SEQ ID NO: 1536015 - RNA, 19 nt, Homo sapiens
  misc_RNA (1)...(19): siRNA sense strand
gaugauuccuucguuuaug

SEQ ID NO: 1536016 - RNA, 19 nt, Homo sapiens
  misc_RNA (1)...(19): siRNA sense strand
gaucagacucccacuacaa

SEQ ID NO: 1536017 - RNA, 19 nt, Homo sapiens
  misc_RNA (1)...(19): siRNA sense strand
ggauacgggugguacuaug

SEQ ID NO: 1536018 - RNA, 19 nt, Homo sapiens
  misc_RNA (1)...(19): siRNA sense strand
cagagaauacuaucgauug

SEQ ID NO: 1536019 - RNA, 19 nt, Homo sapiens
  misc_RNA (1)...(19): siRNA sense strand
ggucaauacucuaccucuu

SEQ ID NO: 1536020 - RNA, 19 nt, Homo sapiens
  misc_RNA (1)...(19): siRNA sense strand
caagaaagagcuuauucga

SEQ ID NO: 1536021 - RNA, 19 nt, Homo sapiens
  misc_RNA (1)...(19): siRNA sense strand
guacgucuuucagggcaua

SEQ ID NO: 1536022 - RNA, 19 nt, Homo sapiens
  misc_RNA (1)...(19): siRNA sense strand
gaccuaugaucccaaaaua

SEQ ID NO: 1536023 - RNA, 19 nt, Homo sapiens
  misc_RNA (1)...(19): siRNA sense strand
cagccucgauuaucauguu

SEQ ID NO: 1536024 - RNA, 19 nt, Homo sapiens
  misc_RNA (1)...(19): siRNA sense strand
cugcagaccuauucacaga

SEQ ID NO: 1536025 - RNA, 19 nt, Homo sapiens
  misc_RNA (1)...(19): siRNA sense strand
ucaaggagacuuuauaagg

SEQ ID NO: 1536026 - RNA, 19 nt, Homo sapiens
  misc_RNA (1)...(19): siRNA sense strand
gaggauuggagaauuuaaa

SEQ ID NO: 1536027 - RNA, 19 nt, Homo sapiens
  misc_RNA (1)...(19): siRNA sense strand
ucagaaugcucaagaugca

SEQ ID NO: 1536028 - RNA, 19 nt, Homo sapiens
  misc_RNA (1)...(19): siRNA sense strand
caacuuagagcuguguuug

SEQ ID NO: 1536029 - RNA, 19 nt, Homo sapiens
  misc_RNA (1)...(19): siRNA sense strand
ggaagggacacaugugcaa

SEQ ID NO: 1536030 - RNA, 19 nt, Homo sapiens
  misc_RNA (1)...(19): siRNA sense strand
aagcaagguuucuagcuau

SEQ ID NO: 1536031 - RNA, 19 nt, Homo sapiens
  misc_RNA (1)...(19): siRNA sense strand
gcaguauuacaucacauuu

SEQ ID NO: 1536032 - RNA, 19 nt, Homo sapiens
  misc_RNA (1)...(19): siRNA sense strand
cgaagcggauggaauacau

SEQ ID NO: 1536033 - RNA, 19 nt, Homo sapiens
  misc_RNA (1)...(19): siRNA sense strand
cagcuacgacuuuguauca

SEQ ID NO: 1536034 - RNA, 19 nt, Homo sapiens
  misc_RNA (1)...(19): siRNA sense strand
agauugaugcugcuuauuu

SEQ ID NO: 1536035 - RNA, 19 nt, Homo sapiens
  misc_RNA (1)...(19): siRNA sense strand
gcaaaucuaaguaggucuu

SEQ ID NO: 1536036 - RNA, 19 nt, Homo sapiens
  misc_RNA (1)...(19): siRNA sense strand
uuagagcuguguuugauca

SEQ ID NO: 1536037 - RNA, 19 nt, Homo sapiens
  misc_RNA (1)...(19): siRNA sense strand
gagccacuaccuaagagua

SEQ ID NO: 1536038 - RNA, 19 nt, Homo sapiens
  misc_RNA (1)...(19): siRNA sense strand
uguaugagccacuaccuaa

SEQ ID NO: 1536039 - RNA, 19 nt, Homo sapiens
  misc_RNA (1)...(19): siRNA sense strand
gaacucagagaauacuauc

SEQ ID NO: 1536040 - RNA, 19 nt, Homo sapiens
  misc_RNA (1)...(19): siRNA sense strand
guuacaaaguagaaggaaa

SEQ ID NO: 1536041 - RNA, 19 nt, Homo sapiens
  misc_RNA (1)...(19): siRNA sense strand
auaagaggauuggagaauu

SEQ ID NO: 1536042 - RNA, 19 nt, Homo sapiens
  misc_RNA (1)...(19): siRNA sense strand
gauugaugcugcuuauuuu

SEQ ID NO: 1536043 - RNA, 19 nt, Homo sapiens
  misc_RNA (1)...(19): siRNA sense strand
gcagaccuauucacagacu

SEQ ID NO: 1536044 - RNA, 19 nt, Homo sapiens
  misc_RNA (1)...(19): siRNA sense strand
gcaucagauccaacaguua

SEQ ID NO: 1536045 - RNA, 19 nt, Homo sapiens
  misc_RNA (1)...(19): siRNA sense strand
ggaacucagagaauacuau

SEQ ID NO: 1536046 - RNA, 19 nt, Homo sapiens
  misc_RNA (1)...(19): siRNA sense strand
accaggaacucagagaaua

SEQ ID NO: 1536047 - RNA, 19 nt, Homo sapiens
  misc_RNA (1)...(19): siRNA sense strand
ggacgcugcagaccuauuc

SEQ ID NO: 1536048 - RNA, 19 nt, Homo sapiens
  misc_RNA (1)...(19): siRNA sense strand
ggugguacuauggaaauua

SEQ ID NO: 1536049 - RNA, 19 nt, Homo sapiens
  misc_RNA (1)...(19): siRNA sense strand
ugaccagggugugaauuug

SEQ ID NO: 1536050 - RNA, 19 nt, Homo sapiens
  misc_RNA (1)...(19): siRNA sense strand
gcaccaggaacucagagaa

SEQ ID NO: 1536051 - RNA, 19 nt, Homo sapiens
  misc_RNA (1)...(19): siRNA sense strand
ggugugaauuugggacuug

SEQ ID NO: 1536052 - RNA, 19 nt, Homo sapiens
  misc_RNA (1)...(19): siRNA sense strand
ucacaguugcgaauauuga

SEQ ID NO: 1536053 - RNA, 19 nt, Homo sapiens
  misc_RNA (1)...(19): siRNA sense strand
gacuguggcacgacaagua

SEQ ID NO: 1536054 - RNA, 19 nt, Homo sapiens
  misc_RNA (1)...(19): siRNA sense strand
ccucgugucucauccuguu

SEQ ID NO: 1536055 - RNA, 19 nt, Homo sapiens
  misc_RNA (1)...(19): siRNA sense strand
accaagagaugcccacuca

SEQ ID NO: 1536056 - RNA, 19 nt, Homo sapiens
  misc_RNA (1)...(19): siRNA sense strand
cugcaccagugucacauuu

SEQ ID NO: 1536057 - RNA, 19 nt, Homo sapiens
  misc_RNA (1)...(19): siRNA sense strand
ugacuggaauucuagaaac

SEQ ID NO: 1536058 - RNA, 19 nt, Homo sapiens
  misc_RNA (1)...(19): siRNA sense strand
ccuguuggauguucucaau

SEQ ID NO: 1536059 - RNA, 19 nt, Homo sapiens
  misc_RNA (1)...(19): siRNA sense strand
gaccagcaaauaccuguug

SEQ ID NO: 1536060 - RNA, 19 nt, Homo sapiens
  misc_RNA (1)...(19): siRNA sense strand
gcccagcaguuccaguaug

SEQ ID NO: 1536061 - RNA, 19 nt, Homo sapiens
  misc_RNA (1)...(19): siRNA sense strand
uugggaugguugcauaaua

SEQ ID NO: 1536062 - RNA, 19 nt, Homo sapiens
  misc_RNA (1)...(19): siRNA sense strand
ccaggacagucuaaucaag

SEQ ID NO: 1536063 - RNA, 19 nt, Homo sapiens
  misc_RNA (1)...(19): siRNA sense strand
uaaguaggucuuugagaga

SEQ ID NO: 1536064 - RNA, 19 nt, Homo sapiens
  misc_RNA (1)...(19): siRNA sense strand
ccagggcacuuuuaaauca

SEQ ID NO: 1536065 - RNA, 19 nt, Homo sapiens
  misc_RNA (1)...(19): siRNA sense strand
gcaccagugucacauuuug

SEQ ID NO: 1536066 - RNA, 19 nt, Homo sapiens
  misc_RNA (1)...(19): siRNA sense strand
ccuaagaguauuuaacuuc

SEQ ID NO: 1536067 - RNA, 19 nt, Homo sapiens
  misc_RNA (1)...(19): siRNA sense strand
ccaauugcaacuguguuua

SEQ ID NO: 1536068 - RNA, 19 nt, Homo sapiens
  misc_RNA (1)...(19): siRNA sense strand
guuggauguucucaauaaa

SEQ ID NO: 1536069 - RNA, 19 nt, Homo sapiens
  misc_RNA (1)...(19): siRNA sense strand
ggaagaaguuacagauuua

SEQ ID NO: 1536070 - RNA, 19 nt, Homo sapiens
  misc_RNA (1)...(19): siRNA sense strand
gggaagaaguuacagauuu

SEQ ID NO: 1536071 - RNA, 19 nt, Homo sapiens
  misc_RNA (1)...(19): siRNA sense strand
gcaauuagguauccgaaug

SEQ ID NO: 1536072 - RNA, 19 nt, Homo sapiens
  misc_RNA (1)...(19): siRNA sense strand
gaucuggucugacugaauu

SEQ ID NO: 1536073 - RNA, 19 nt, Homo sapiens
  misc_RNA (1)...(19): siRNA sense strand
gcaagguucuggaugauau

SEQ ID NO: 1536074 - RNA, 19 nt, Homo sapiens
  misc_RNA (1)...(19): siRNA sense strand
cacaauagguuaaucgaaa

SEQ ID NO: 1536075 - RNA, 19 nt, Homo sapiens
  misc_RNA (1)...(19): siRNA sense strand
caaauaaaccagagaaaga

SEQ ID NO: 1536076 - RNA, 19 nt, Homo sapiens
  misc_RNA (1)...(19): siRNA sense strand
ggaauagauuuacagaaga

SEQ ID NO: 1536077 - RNA, 19 nt, Homo sapiens
  misc_RNA (1)...(19): siRNA sense strand
ggacuuuccuacagauauu

SEQ ID NO: 1536078 - RNA, 19 nt, Homo sapiens
  misc_RNA (1)...(19): siRNA sense strand
ggacuuuggccuacaauuu

SEQ ID NO: 1536079 - RNA, 19 nt, Homo sapiens
  misc_RNA (1)...(19): siRNA sense strand
caacaaagcaagucaacaa

SEQ ID NO: 1536080 - RNA, 19 nt, Homo sapiens
  misc_RNA (1)...(19): siRNA sense strand
gauuggcucuggaggauuu

SEQ ID NO: 1536081 - RNA, 19 nt, Homo sapiens
  misc_RNA (1)...(19): siRNA sense strand
gaaagacuaggaauagauu

SEQ ID NO: 1536082 - RNA, 19 nt, Homo sapiens
  misc_RNA (1)...(19): siRNA sense strand
gaaacugauuggauugaug

SEQ ID NO: 1536083 - RNA, 19 nt, Homo sapiens
  misc_RNA (1)...(19): siRNA sense strand
gaaagaugcaagacaugua

SEQ ID NO: 1536084 - RNA, 19 nt, Homo sapiens
  misc_RNA (1)...(19): siRNA sense strand
ccagauauauucaagaagu

SEQ ID NO: 1536085 - RNA, 19 nt, Homo sapiens
  misc_RNA (1)...(19): siRNA sense strand
ggagaagacagaaauauca

SEQ ID NO: 1536086 - RNA, 19 nt, Homo sapiens
  misc_RNA (1)...(19): siRNA sense strand
caaacuuccuauuccauuu

SEQ ID NO: 1536087 - RNA, 19 nt, Homo sapiens
  misc_RNA (1)...(19): siRNA sense strand
gaaagaggagaaacugauu

SEQ ID NO: 1536088 - RNA, 19 nt, Homo sapiens
  misc_RNA (1)...(19): siRNA sense strand
gaacgcaaacaacuugauu

SEQ ID NO: 1536089 - RNA, 19 nt, Homo sapiens
  misc_RNA (1)...(19): siRNA sense strand
gaagacagaaauaucaaga

SEQ ID NO: 1536090 - RNA, 19 nt, Homo sapiens
  misc_RNA (1)...(19): siRNA sense strand
guacuggaauauauacaug

SEQ ID NO: 1536091 - RNA, 19 nt, Homo sapiens
  misc_RNA (1)...(19): siRNA sense strand
gaagaucucaggccagaau

SEQ ID NO: 1536092 - RNA, 19 nt, Homo sapiens
  misc_RNA (1)...(19): siRNA sense strand
cauggaaagugcagaaaga

SEQ ID NO: 1536093 - RNA, 19 nt, Homo sapiens
  misc_RNA (1)...(19): siRNA sense strand
guccagauauauucaagaa

SEQ ID NO: 1536094 - RNA, 19 nt, Homo sapiens
  misc_RNA (1)...(19): siRNA sense strand
uggaggauuuggauugaua

SEQ ID NO: 1536095 - RNA, 19 nt, Homo sapiens
  misc_RNA (1)...(19): siRNA sense strand
ccagaaugguaccuuuaaa

SEQ ID NO: 1536096 - RNA, 19 nt, Homo sapiens
  misc_RNA (1)...(19): siRNA sense strand
ggaaagacuaggaauagau

SEQ ID NO: 1536097 - RNA, 19 nt, Homo sapiens
  misc_RNA (1)...(19): siRNA sense strand
caucauaccuguccuuuug

SEQ ID NO: 1536098 - RNA, 19 nt, Homo sapiens
  misc_RNA (1)...(19): siRNA sense strand
uuugaacccucauggaaua

SEQ ID NO: 1536099 - RNA, 19 nt, Homo sapiens
  misc_RNA (1)...(19): siRNA sense strand
gcugugaaauagcccaauu

SEQ ID NO: 1536100 - RNA, 19 nt, Homo sapiens
  misc_RNA (1)...(19): siRNA sense strand
ggauguacuggaauauaua

SEQ ID NO: 1536101 - RNA, 19 nt, Homo sapiens
  misc_RNA (1)...(19): siRNA sense strand
ccuacaauuucccaguuua

SEQ ID NO: 1536102 - RNA, 19 nt, Homo sapiens
  misc_RNA (1)...(19): siRNA sense strand
aggagaaacugauuggauu

SEQ ID NO: 1536103 - RNA, 19 nt, Homo sapiens
  misc_RNA (1)...(19): siRNA sense strand
agagaaagaugcaagacau

SEQ ID NO: 1536104 - RNA, 19 nt, Homo sapiens
  misc_RNA (1)...(19): siRNA sense strand
caagaaccuuugaaugaag

SEQ ID NO: 1536105 - RNA, 19 nt, Homo sapiens
  misc_RNA (1)...(19): siRNA sense strand
ccacaaacaguaucaggaa

SEQ ID NO: 1536106 - RNA, 19 nt, Homo sapiens
  misc_RNA (1)...(19): siRNA sense strand
aaagucaacuguccugcaa

SEQ ID NO: 1536107 - RNA, 19 nt, Homo sapiens
  misc_RNA (1)...(19): siRNA sense strand
aggaauagauuuacagaag

SEQ ID NO: 1536108 - RNA, 19 nt, Homo sapiens
  misc_RNA (1)...(19): siRNA sense strand
ucaagaaaauggcccguua

SEQ ID NO: 1536109 - RNA, 19 nt, Homo sapiens
  misc_RNA (1)...(19): siRNA sense strand
acagaaauaucaagagucu

SEQ ID NO: 1536110 - RNA, 19 nt, Homo sapiens
  misc_RNA (1)...(19): siRNA sense strand
agacagaaauaucaagagu

SEQ ID NO: 1536111 - RNA, 19 nt, Homo sapiens
  misc_RNA (1)...(19): siRNA sense strand
guacugggcaagaagauug

SEQ ID NO: 1536112 - RNA, 19 nt, Homo sapiens
  misc_RNA (1)...(19): siRNA sense strand
caggaaagcacaaggagaa

SEQ ID NO: 1536113 - RNA, 19 nt, Homo sapiens
  misc_RNA (1)...(19): siRNA sense strand
caaugaagcagcucaggaa

SEQ ID NO: 1536114 - RNA, 19 nt, Homo sapiens
  misc_RNA (1)...(19): siRNA sense strand
uggauguacuggaauauau

SEQ ID NO: 1536115 - RNA, 19 nt, Homo sapiens
  misc_RNA (1)...(19): siRNA sense strand
caaggagaagacagaaaua

SEQ ID NO: 1536116 - RNA, 19 nt, Homo sapiens
  misc_RNA (1)...(19): siRNA sense strand
caaggcacacaauagguua

SEQ ID NO: 1536117 - RNA, 19 nt, Homo sapiens
  misc_RNA (1)...(19): siRNA sense strand
gaagugacguugagauccu

SEQ ID NO: 1536118 - RNA, 19 nt, Homo sapiens
  misc_RNA (1)...(19): siRNA sense strand
gauagaacgcaaacaacuu

SEQ ID NO: 1536119 - RNA, 19 nt, Homo sapiens
  misc_RNA (1)...(19): siRNA sense strand
ccaguuuacucuuagugaa

SEQ ID NO: 1536120 - RNA, 19 nt, Homo sapiens
  misc_RNA (1)...(19): siRNA sense strand
caacauggaaagugcagaa

SEQ ID NO: 1536121 - RNA, 19 nt, Homo sapiens
  misc_RNA (1)...(19): siRNA sense strand
caacaaggcacacaauagg

SEQ ID NO: 1536122 - RNA, 19 nt, Homo sapiens
  misc_RNA (1)...(19): siRNA sense strand
gaauucaagggaagaaguu

SEQ ID NO: 1536123 - RNA, 19 nt, Homo sapiens
  misc_RNA (1)...(19): siRNA sense strand
aaucagcuauacacaauuc

SEQ ID NO: 1536124 - RNA, 19 nt, Homo sapiens
  misc_RNA (1)...(19): siRNA sense strand
caacuguccugcaauuagg

SEQ ID NO: 1536125 - RNA, 19 nt, Homo sapiens
  misc_RNA (1)...(19): siRNA sense strand
gaggagaaacugauuggau

SEQ ID NO: 1536126 - RNA, 19 nt, Homo sapiens
  misc_RNA (1)...(19): siRNA sense strand
ggagaaacugauuggauug

SEQ ID NO: 1536127 - RNA, 19 nt, Homo sapiens
  misc_RNA (1)...(19): siRNA sense strand
gagaagacagaaauaucaa

SEQ ID NO: 1536128 - RNA, 19 nt, Homo sapiens
  misc_RNA (1)...(19): siRNA sense strand
ccacaaauaaaccagagaa

SEQ ID NO: 1536129 - RNA, 19 nt, Homo sapiens
  misc_RNA (1)...(19): siRNA sense strand
ggccuacaauuucccaguu

SEQ ID NO: 1536130 - RNA, 19 nt, Homo sapiens
  misc_RNA (1)...(19): siRNA sense strand
aaggcaagguucuggauga

SEQ ID NO: 1536131 - RNA, 19 nt, Homo sapiens
  misc_RNA (1)...(19): siRNA sense strand
agaaauaucaagagucuca

SEQ ID NO: 1536132 - RNA, 19 nt, Homo sapiens
  misc_RNA (1)...(19): siRNA sense strand
aaacugauuggauugauga

SEQ ID NO: 1536133 - RNA, 19 nt, Homo sapiens
  misc_RNA (1)...(19): siRNA sense strand
gcagaaagaggagaaacug

SEQ ID NO: 1536134 - RNA, 19 nt, Homo sapiens
  misc_RNA (1)...(19): siRNA sense strand
agucaacuguccugcaauu

SEQ ID NO: 1536135 - RNA, 19 nt, Homo sapiens
  misc_RNA (1)...(19): siRNA sense strand
gccagaaugguaccuuuaa

SEQ ID NO: 1536136 - RNA, 19 nt, Homo sapiens
  misc_RNA (1)...(19): siRNA sense strand
ggccagaaugguaccuuua

SEQ ID NO: 1536137 - RNA, 19 nt, Homo sapiens
  misc_RNA (1)...(19): siRNA sense strand
aauguuggauguacuggaa

SEQ ID NO: 1536138 - RNA, 19 nt, Homo sapiens
  misc_RNA (1)...(19): siRNA sense strand
cacaaacaguaucaggaaa

SEQ ID NO: 1536139 - RNA, 19 nt, Homo sapiens
  misc_RNA (1)...(19): siRNA sense strand
gggaacagaaccugaagga

SEQ ID NO: 1536140 - RNA, 19 nt, Homo sapiens
  misc_RNA (1)...(19): siRNA sense strand
gccuacaauuucccaguuu

SEQ ID NO: 1536141 - RNA, 19 nt, Homo sapiens
  misc_RNA (1)...(19): siRNA sense strand
gagaaacugauuggauuga

SEQ ID NO: 1536142 - RNA, 19 nt, Homo sapiens
  misc_RNA (1)...(19): siRNA sense strand
ggauagaacgcaaacaacu

SEQ ID NO: 1536143 - RNA, 19 nt, Homo sapiens
  misc_RNA (1)...(19): siRNA sense strand
ggaaagcacaaggagaaga

SEQ ID NO: 1536144 - RNA, 19 nt, Homo sapiens
  misc_RNA (1)...(19): siRNA sense strand
gaugcaagacauguaguaa

SEQ ID NO: 1536145 - RNA, 19 nt, Homo sapiens
  misc_RNA (1)...(19): siRNA sense strand
guaauggaaagacuaggaa

SEQ ID NO: 1536146 - RNA, 19 nt, Homo sapiens
  misc_RNA (1)...(19): siRNA sense strand
cuaucaagcccucaagaaa

SEQ ID NO: 1536147 - RNA, 19 nt, Homo sapiens
  misc_RNA (1)...(19): siRNA sense strand
acaauucccaaacucauuu

SEQ ID NO: 1536148 - RNA, 19 nt, Homo sapiens
  misc_RNA (1)...(19): siRNA sense strand
gcacaaggagaagacagaa

SEQ ID NO: 1536149 - RNA, 19 nt, Homo sapiens
  misc_RNA (1)...(19): siRNA sense strand
gguucuggaugauauggaa

SEQ ID NO: 1536150 - RNA, 19 nt, Homo sapiens
  misc_RNA (1)...(19): siRNA sense strand
uaaauguccauacuccaaa

SEQ ID NO: 1536151 - RNA, 19 nt, Homo sapiens
  misc_RNA (1)...(19): siRNA sense strand
gaggauuuggauugauaua

SEQ ID NO: 1536152 - RNA, 19 nt, Homo sapiens
  misc_RNA (1)...(19): siRNA sense strand
gaagagacaaacgcagaug

SEQ ID NO: 1536153 - RNA, 19 nt, Homo sapiens
  misc_RNA (1)...(19): siRNA sense strand
gcacggggaucacagacuu

SEQ ID NO: 1536154 - RNA, 19 nt, Homo sapiens
  misc_RNA (1)...(19): siRNA sense strand
aaauacacuuccacaguca

SEQ ID NO: 1536155 - RNA, 19 nt, Homo sapiens
  misc_RNA (1)...(19): siRNA sense strand
ucaagagucucaagaaccu

SEQ ID NO: 1536156 - RNA, 19 nt, Homo sapiens
  misc_RNA (1)...(19): siRNA sense strand
guggauagaacgcaaacaa

SEQ ID NO: 1536157 - RNA, 19 nt, Homo sapiens
  misc_RNA (1)...(19): siRNA sense strand
gacuuuggccuacaauuuc

SEQ ID NO: 1536158 - RNA, 19 nt, Homo sapiens
  misc_RNA (1)...(19): siRNA sense strand
uaucaagagucucaagaac

SEQ ID NO: 1536159 - RNA, 19 nt, Homo sapiens
  misc_RNA (1)...(19): siRNA sense strand
acaaggagaagacagaaau

SEQ ID NO: 1536160 - RNA, 19 nt, Homo sapiens
  misc_RNA (1)...(19): siRNA sense strand
uguuggauguacuggaaua

SEQ ID NO: 1536161 - RNA, 19 nt, Homo sapiens
  misc_RNA (1)...(19): siRNA sense strand
gagaaagaugcaagacaug

SEQ ID NO: 1536162 - RNA, 19 nt, Homo sapiens
  misc_RNA (1)...(19): siRNA sense strand
gguaauggaaagacuagga

SEQ ID NO: 1536163 - RNA, 19 nt, Homo sapiens
  misc_RNA (1)...(19): siRNA sense strand
gaaguuacagauuuauggu

SEQ ID NO: 1536164 - RNA, 19 nt, Homo sapiens
  misc_RNA (1)...(19): siRNA sense strand
gaauuccucuguuuuaugg

SEQ ID NO: 1536165 - RNA, 19 nt, Homo sapiens
  misc_RNA (1)...(19): siRNA sense strand
gaucuccaucuugguauaa

SEQ ID NO: 1536166 - RNA, 19 nt, Homo sapiens
  misc_RNA (1)...(19): siRNA sense strand
ugaagcagcucaggaaagc

SEQ ID NO: 1536167 - RNA, 19 nt, Homo sapiens
  misc_RNA (1)...(19): siRNA sense strand
ucaacaaggcacacaauag

SEQ ID NO: 1536168 - RNA, 19 nt, Homo sapiens
  misc_RNA (1)...(19): siRNA sense strand
ccaaugggaaccacaaaca

SEQ ID NO: 1536169 - RNA, 19 nt, Homo sapiens
  misc_RNA (1)...(19): siRNA sense strand
gcaaaccucuuaugucuuc

SEQ ID NO: 1536170 - RNA, 19 nt, Homo sapiens
  misc_RNA (1)...(19): siRNA sense strand
caccuggacuuaaguaaua

SEQ ID NO: 1536171 - RNA, 19 nt, Homo sapiens
  misc_RNA (1)...(19): siRNA sense strand
ggaaggguaucauuacaga

SEQ ID NO: 1536172 - RNA, 19 nt, Homo sapiens
  misc_RNA (1)...(19): siRNA sense strand
gugcugaccuggacuguga

SEQ ID NO: 1536173 - RNA, 19 nt, Homo sapiens
  misc_RNA (1)...(19): siRNA sense strand
ggacuuaaguaauaauucg

SEQ ID NO: 1536174 - RNA, 19 nt, Homo sapiens
  misc_RNA (1)...(19): siRNA sense strand
ggaaucggguccucuugga

SEQ ID NO: 1536175 - RNA, 19 nt, Homo sapiens
  misc_RNA (1)...(19): siRNA sense strand
gugcgcaaccucuuccuua

SEQ ID NO: 1536176 - RNA, 19 nt, Homo sapiens
  misc_RNA (1)...(19): siRNA sense strand
ccagcaaccacuuccuuua

SEQ ID NO: 1536177 - RNA, 19 nt, Homo sapiens
  misc_RNA (1)...(19): siRNA sense strand
caaccugacacaucuagaa

SEQ ID NO: 1536178 - RNA, 19 nt, Homo sapiens
  misc_RNA (1)...(19): siRNA sense strand
cugcaaaccucuuaugucu

SEQ ID NO: 1536179 - RNA, 19 nt, Homo sapiens
  misc_RNA (1)...(19): siRNA sense strand
gcaccuggacuuaaguaau

SEQ ID NO: 1536180 - RNA, 19 nt, Homo sapiens
  misc_RNA (1)...(19): siRNA sense strand
gcucaaggaaacagaggua

SEQ ID NO: 1536181 - RNA, 19 nt, Homo sapiens
  misc_RNA (1)...(19): siRNA sense strand
cugcagggaucacauggaa

SEQ ID NO: 1536182 - RNA, 19 nt, Homo sapiens
  misc_RNA (1)...(19): siRNA sense strand
ugaccuggcucaaggaaac

SEQ ID NO: 1536183 - RNA, 19 nt, Homo sapiens
  misc_RNA (1)...(19): siRNA sense strand
acauggaaggguaucauua

SEQ ID NO: 1536184 - RNA, 19 nt, Homo sapiens
  misc_RNA (1)...(19): siRNA sense strand
caaggaaacagagguagug

SEQ ID NO: 1536185 - RNA, 19 nt, Homo sapiens
  misc_RNA (1)...(19): siRNA sense strand
ggucugcgacugccacaug

SEQ ID NO: 1536186 - RNA, 19 nt, Homo sapiens
  misc_RNA (1)...(19): siRNA sense strand
gggaugugcuggcccaacu

SEQ ID NO: 1536187 - RNA, 19 nt, Homo sapiens
  misc_RNA (1)...(19): siRNA sense strand
caaggucuaccccacauua

SEQ ID NO: 1536188 - RNA, 19 nt, Homo sapiens
  misc_RNA (1)...(19): siRNA sense strand
gaaucggguccucuuggaa

SEQ ID NO: 1536189 - RNA, 19 nt, Homo sapiens
  misc_RNA (1)...(19): siRNA sense strand
gccagcaaccacuuccuuu

SEQ ID NO: 1536190 - RNA, 19 nt, Homo sapiens
  misc_RNA (1)...(19): siRNA sense strand
aaaaguggaugcauaacau

SEQ ID NO: 1536191 - RNA, 19 nt, Homo sapiens
  misc_RNA (1)...(19): siRNA sense strand
gcaaccacuuccuuuaccu

SEQ ID NO: 1536192 - RNA, 19 nt, Homo sapiens
  misc_RNA (1)...(19): siRNA sense strand
cagcaaccacuuccuuuac

SEQ ID NO: 1536193 - RNA, 19 nt, Homo sapiens
  misc_RNA (1)...(19): siRNA sense strand
ggacugugacccgauucuu

SEQ ID NO: 1536194 - RNA, 19 nt, Homo sapiens
  misc_RNA (1)...(19): siRNA sense strand
ccuggacugugacccgauu

SEQ ID NO: 1536195 - RNA, 19 nt, Homo sapiens
  misc_RNA (1)...(19): siRNA sense strand
cagauuaacgaaccucagu

SEQ ID NO: 1536196 - RNA, 19 nt, Homo sapiens
  misc_RNA (1)...(19): siRNA sense strand
gacugugacccgauucuuc

SEQ ID NO: 1536197 - RNA, 19 nt, Homo sapiens
  misc_RNA (1)...(19): siRNA sense strand
cauggaaggguaucauuac

SEQ ID NO: 1536198 - RNA, 19 nt, Homo sapiens
  misc_RNA (1)...(19): siRNA sense strand
ccugacacaucuagaaagc

SEQ ID NO: 1536199 - RNA, 19 nt, Homo sapiens
  misc_RNA (1)...(19): siRNA sense strand
cggcucaccugugcauauc

SEQ ID NO: 1536200 - RNA, 19 nt, Homo sapiens
  misc_RNA (1)...(19): siRNA sense strand
uuguggaacugauccugaa

SEQ ID NO: 1536201 - RNA, 19 nt, Homo sapiens
  misc_RNA (1)...(19): siRNA sense strand
caucccugcaaaccucuua

SEQ ID NO: 1536202 - RNA, 19 nt, Homo sapiens
  misc_RNA (1)...(19): siRNA sense strand
cacccuggcugaguugcaa

SEQ ID NO: 1536203 - RNA, 19 nt, Homo sapiens
  misc_RNA (1)...(19): siRNA sense strand
gcacaucccaccuuucaua

SEQ ID NO: 1536204 - RNA, 19 nt, Homo sapiens
  misc_RNA (1)...(19): siRNA sense strand
gugacaagauagcuauuua

SEQ ID NO: 1536205 - RNA, 19 nt, Homo sapiens
  misc_RNA (1)...(19): siRNA sense strand
acacugaccuggaacagaa

SEQ ID NO: 1536206 - RNA, 19 nt, Homo sapiens
  misc_RNA (1)...(19): siRNA sense strand
ccaaagcaaucguggaaga

SEQ ID NO: 1536207 - RNA, 19 nt, Homo sapiens
  misc_RNA (1)...(19): siRNA sense strand
aaaggauggugacaagaua

SEQ ID NO: 1536208 - RNA, 19 nt, Homo sapiens
  misc_RNA (1)...(19): siRNA sense strand
uaaggacugugaucucaaa

SEQ ID NO: 1536209 - RNA, 19 nt, Homo sapiens
  misc_RNA (1)...(19): siRNA sense strand
ugacauugcucagggauga

SEQ ID NO: 1536210 - RNA, 19 nt, Homo sapiens
  misc_RNA (1)...(19): siRNA sense strand
aaaccaaggaggaaagaua

SEQ ID NO: 1536211 - RNA, 19 nt, Homo sapiens
  misc_RNA (1)...(19): siRNA sense strand
gaugagagacccaaagcaa

SEQ ID NO: 1536212 - RNA, 19 nt, Homo sapiens
  misc_RNA (1)...(19): siRNA sense strand
ucauaacacugaccuggaa

SEQ ID NO: 1536213 - RNA, 19 nt, Homo sapiens
  misc_RNA (1)...(19): siRNA sense strand
gcaaaugcagccacuggaa

SEQ ID NO: 1536214 - RNA, 19 nt, Homo sapiens
  misc_RNA (1)...(19): siRNA sense strand
gauguccacugagcaaaug

SEQ ID NO: 1536215 - RNA, 19 nt, Homo sapiens
  misc_RNA (1)...(19): siRNA sense strand
caagagagacauccaaagg

SEQ ID NO: 1536216 - RNA, 19 nt, Homo sapiens
  misc_RNA (1)...(19): siRNA sense strand
uuucagaccaguucauuaa

SEQ ID NO: 1536217 - RNA, 19 nt, Homo sapiens
  misc_RNA (1)...(19): siRNA sense strand
aaagauacgauguucaaga

SEQ ID NO: 1536218 - RNA, 19 nt, Homo sapiens
  misc_RNA (1)...(19): siRNA sense strand
cagaccaguucauuaagga

SEQ ID NO: 1536219 - RNA, 19 nt, Homo sapiens
  misc_RNA (1)...(19): siRNA sense strand
aagcaaucguggaagauga

SEQ ID NO: 1536220 - RNA, 19 nt, Homo sapiens
  misc_RNA (1)...(19): siRNA sense strand
uuucauaccagguguguuu

SEQ ID NO: 1536221 - RNA, 19 nt, Homo sapiens
  misc_RNA (1)...(19): siRNA sense strand
aagauacgauguucaagag

SEQ ID NO: 1536222 - RNA, 19 nt, Homo sapiens
  misc_RNA (1)...(19): siRNA sense strand
ggugacaagauagcuauuu

SEQ ID NO: 1536223 - RNA, 19 nt, Homo sapiens
  misc_RNA (1)...(19): siRNA sense strand
ugagagacccaaagcaauc

SEQ ID NO: 1536224 - RNA, 19 nt, Homo sapiens
  misc_RNA (1)...(19): siRNA sense strand
cgaaaaggauggugacaag

SEQ ID NO: 1536225 - RNA, 19 nt, Homo sapiens
  misc_RNA (1)...(19): siRNA sense strand
gauggugacaagauagcua

SEQ ID NO: 1536226 - RNA, 19 nt, Homo sapiens
  misc_RNA (1)...(19): siRNA sense strand
ucagaccaguucauuaagg

SEQ ID NO: 1536227 - RNA, 19 nt, Homo sapiens
  misc_RNA (1)...(19): siRNA sense strand
caucccaccuuucauacca

SEQ ID NO: 1536228 - RNA, 19 nt, Homo sapiens
  misc_RNA (1)...(19): siRNA sense strand
ugaucccuguucuucauaa

SEQ ID NO: 1536229 - RNA, 19 nt, Homo sapiens
  misc_RNA (1)...(19): siRNA sense strand
gcaaaaugaucccuguucu

SEQ ID NO: 1536230 - RNA, 19 nt, Homo sapiens
  misc_RNA (1)...(19): siRNA sense strand
cacuggaagucucagaaga

SEQ ID NO: 1536231 - RNA, 19 nt, Homo sapiens
  misc_RNA (1)...(19): siRNA sense strand
agacagacuggacaagcua

SEQ ID NO: 1536232 - RNA, 19 nt, Homo sapiens
  misc_RNA (1)...(19): siRNA sense strand
gaauguugagucagaccaa

SEQ ID NO: 1536233 - RNA, 19 nt, Homo sapiens
  misc_RNA (1)...(19): siRNA sense strand
auacgauguucaagagaga

SEQ ID NO: 1536234 - RNA, 19 nt, Homo sapiens
  misc_RNA (1)...(19): siRNA sense strand
cacccugaauguugaguca

SEQ ID NO: 1536235 - RNA, 19 nt, Homo sapiens
  misc_RNA (1)...(19): siRNA sense strand
auuaaggacugugaucuca

SEQ ID NO: 1536236 - RNA, 19 nt, Homo sapiens
  misc_RNA (1)...(19): siRNA sense strand
caccugcccugcacauguc

SEQ ID NO: 1536237 - RNA, 19 nt, Homo sapiens
  misc_RNA (1)...(19): siRNA sense strand
aggccacccugaauguuga

SEQ ID NO: 1536238 - RNA, 19 nt, Homo sapiens
  misc_RNA (1)...(19): siRNA sense strand
cugcacaucccaccuuuca

SEQ ID NO: 1536239 - RNA, 19 nt, Homo sapiens
  misc_RNA (1)...(19): siRNA sense strand
cagaagacagacuggacaa

SEQ ID NO: 1536240 - RNA, 19 nt, Homo sapiens
  misc_RNA (1)...(19): siRNA sense strand
caaagcaaucguggaagau

SEQ ID NO: 1536241 - RNA, 19 nt, Homo sapiens
  misc_RNA (1)...(19): siRNA sense strand
gcgcugcacaucccaccuu

SEQ ID NO: 1536242 - RNA, 19 nt, Homo sapiens
  misc_RNA (1)...(19): siRNA sense strand
ugcagcaggugugacauug

SEQ ID NO: 1536243 - RNA, 19 nt, Homo sapiens
  misc_RNA (1)...(19): siRNA sense strand
ggaagaaacugaagaugcu

SEQ ID NO: 1536244 - RNA, 19 nt, Homo sapiens
  misc_RNA (1)...(19): siRNA sense strand
ggacaaagugcucuucuau

SEQ ID NO: 1536245 - RNA, 19 nt, Homo sapiens
  misc_RNA (1)...(19): siRNA sense strand
gcacguccauuggcucuuu

SEQ ID NO: 1536246 - RNA, 19 nt, Homo sapiens
  misc_RNA (1)...(19): siRNA sense strand
caucgggucuuccaggaua

SEQ ID NO: 1536247 - RNA, 19 nt, Homo sapiens
  misc_RNA (1)...(19): siRNA sense strand
gagauugugucccggauug

SEQ ID NO: 1536248 - RNA, 19 nt, Homo sapiens
  misc_RNA (1)...(19): siRNA sense strand
ccucugaagugcuuuauau

SEQ ID NO: 1536249 - RNA, 19 nt, Homo sapiens
  misc_RNA (1)...(19): siRNA sense strand
gguaaagguuccagacaug

SEQ ID NO: 1536250 - RNA, 19 nt, Homo sapiens
  misc_RNA (1)...(19): siRNA sense strand
acaaagugcucuucuaugg

SEQ ID NO: 1536251 - RNA, 19 nt, Homo sapiens
  misc_RNA (1)...(19): siRNA sense strand
gaacaccauugcccuugug

SEQ ID NO: 1536252 - RNA, 19 nt, Homo sapiens
  misc_RNA (1)...(19): siRNA sense strand
gcugguggcugcuguggaa

SEQ ID NO: 1536253 - RNA, 19 nt, Homo sapiens
  misc_RNA (1)...(19): siRNA sense strand
gggacaaagugcucuucua

SEQ ID NO: 1536254 - RNA, 19 nt, Homo sapiens
  misc_RNA (1)...(19): siRNA sense strand
gcacaucggaguacuaaag

SEQ ID NO: 1536255 - RNA, 19 nt, Homo sapiens
  misc_RNA (1)...(19): siRNA sense strand
gaaguucgaccagaucuau

SEQ ID NO: 1536256 - RNA, 19 nt, Homo sapiens
  misc_RNA (1)...(19): siRNA sense strand
caccuugggucacaucaaa

SEQ ID NO: 1536257 - RNA, 19 nt, Homo sapiens
  misc_RNA (1)...(19): siRNA sense strand
ugcaugagcucuacgagaa

SEQ ID NO: 1536258 - RNA, 19 nt, Homo sapiens
  misc_RNA (1)...(19): siRNA sense strand
uggcgaaccucucaucuuc

SEQ ID NO: 1536259 - RNA, 19 nt, Homo sapiens
  misc_RNA (1)...(19): siRNA sense strand
ggaacaccauugcccuugu

SEQ ID NO: 1536260 - RNA, 19 nt, Homo sapiens
  misc_RNA (1)...(19): siRNA sense strand
agacggaccucagcaccua

SEQ ID NO: 1536261 - RNA, 19 nt, Homo sapiens
  misc_RNA (1)...(19): siRNA sense strand
ccagucaccuccauguuca

SEQ ID NO: 1536262 - RNA, 19 nt, Homo sapiens
  misc_RNA (1)...(19): siRNA sense strand
gguccgacgcuacuccuua

SEQ ID NO: 1536263 - RNA, 19 nt, Homo sapiens
  misc_RNA (1)...(19): siRNA sense strand
ucccugggcugacaaggua

SEQ ID NO: 1536264 - RNA, 19 nt, Homo sapiens
  misc_RNA (1)...(19): siRNA sense strand
aaacggucaucgccauuga

SEQ ID NO: 1536265 - RNA, 19 nt, Homo sapiens
  misc_RNA (1)...(19): siRNA sense strand
guccgacgcuacuccuuaa

SEQ ID NO: 1536266 - RNA, 19 nt, Homo sapiens
  misc_RNA (1)...(19): siRNA sense strand
ggaaggaguguguggugaa

SEQ ID NO: 1536267 - RNA, 19 nt, Homo sapiens
  misc_RNA (1)...(19): siRNA sense strand
ccaaguacccggagagcuu

SEQ ID NO: 1536268 - RNA, 19 nt, Homo sapiens
  misc_RNA (1)...(19): siRNA sense strand
gaaggaguguguggugaag

SEQ ID NO: 1536269 - RNA, 19 nt, Homo sapiens
  misc_RNA (1)...(19): siRNA sense strand
ugaagaugcucaacauugc

SEQ ID NO: 1536270 - RNA, 19 nt, Homo sapiens
  misc_RNA (1)...(19): siRNA sense strand
ggacgggcaccuacucaug

SEQ ID NO: 1536271 - RNA, 19 nt, Homo sapiens
  misc_RNA (1)...(19): siRNA sense strand
ucacugggucugccuuuaa

SEQ ID NO: 1536272 - RNA, 19 nt, Homo sapiens
  misc_RNA (1)...(19): siRNA sense strand
ggacgugugccuguucgua

SEQ ID NO: 1536273 - RNA, 19 nt, Homo sapiens
  misc_RNA (1)...(19): siRNA sense strand
gcucaacauugccaagaag

SEQ ID NO: 1536274 - RNA, 19 nt, Homo sapiens
  misc_RNA (1)...(19): siRNA sense strand
ggaugcacaccguaucgua

SEQ ID NO: 1536275 - RNA, 19 nt, Homo sapiens
  misc_RNA (1)...(19): siRNA sense strand
ucacugacuuggcagagau

SEQ ID NO: 1536276 - RNA, 19 nt, Homo sapiens
  misc_RNA (1)...(19): siRNA sense strand
ggagaggagucagauuguc

SEQ ID NO: 1536277 - RNA, 19 nt, Homo sapiens
  misc_RNA (1)...(19): siRNA sense strand
gcggcuacaucaacaaucu

SEQ ID NO: 1536278 - RNA, 19 nt, Homo sapiens
  misc_RNA (1)...(19): siRNA sense strand
ucaagaccauggacuuugg

SEQ ID NO: 1536279 - RNA, 19 nt, Homo sapiens
  misc_RNA (1)...(19): siRNA sense strand
caacgugaccacagauauc

SEQ ID NO: 1536280 - RNA, 19 nt, Homo sapiens
  misc_RNA (1)...(19): siRNA sense strand
cugaagaugcucaacauug

SEQ ID NO: 1536281 - RNA, 19 nt, Homo sapiens
  misc_RNA (1)...(19): siRNA sense strand
gacaaagugcucuucuaug

SEQ ID NO: 1536282 - RNA, 19 nt, Homo sapiens
  misc_RNA (1)...(19): siRNA sense strand
ggaagauuaugcggaaggu

SEQ ID NO: 1536283 - RNA, 19 nt, Homo sapiens
  misc_RNA (1)...(19): siRNA sense strand
guggcaacgucauugagaa

SEQ ID NO: 1536284 - RNA, 19 nt, Homo sapiens
  misc_RNA (1)...(19): siRNA sense strand
gaauggugcuuggcgugau

SEQ ID NO: 1536285 - RNA, 19 nt, Homo sapiens
  misc_RNA (1)...(19): siRNA sense strand
gcgaggcaguggcaagaag

SEQ ID NO: 1536286 - RNA, 19 nt, Homo sapiens
  misc_RNA (1)...(19): siRNA sense strand
gcucuggcuucacugacuu

SEQ ID NO: 1536287 - RNA, 19 nt, Homo sapiens
  misc_RNA (1)...(19): siRNA sense strand
ggaaguucgaccagaucua

SEQ ID NO: 1536288 - RNA, 19 nt, Homo sapiens
  misc_RNA (1)...(19): siRNA sense strand
cagcauccaucgggucuuc

SEQ ID NO: 1536289 - RNA, 19 nt, Homo sapiens
  misc_RNA (1)...(19): siRNA sense strand
gaccucacguacccaguca

SEQ ID NO: 1536290 - RNA, 19 nt, Homo sapiens
  misc_RNA (1)...(19): siRNA sense strand
caccauugcccuugugcua

SEQ ID NO: 1536291 - RNA, 19 nt, Homo sapiens
  misc_RNA (1)...(19): siRNA sense strand
caacauugccaagaagauc

SEQ ID NO: 1536292 - RNA, 19 nt, Homo sapiens
  misc_RNA (1)...(19): siRNA sense strand
gagggcaccuugggucaca

SEQ ID NO: 1536293 - RNA, 19 nt, Homo sapiens
  misc_RNA (1)...(19): siRNA sense strand
ccaagcugaugcggauuga

SEQ ID NO: 1536294 - RNA, 19 nt, Homo sapiens
  misc_RNA (1)...(19): siRNA sense strand
ggucagcaccucagcuaca

SEQ ID NO: 1536295 - RNA, 19 nt, Homo sapiens
  misc_RNA (1)...(19): siRNA sense strand
gcagcuagagguugucaag

SEQ ID NO: 1536296 - RNA, 19 nt, Homo sapiens
  misc_RNA (1)...(19): siRNA sense strand
ccaugcgaguccacaaaga

SEQ ID NO: 1536297 - RNA, 19 nt, Homo sapiens
  misc_RNA (1)...(19): siRNA sense strand
cgguaucgguuccggaaga

SEQ ID NO: 1536298 - RNA, 19 nt, Homo sapiens
  misc_RNA (1)...(19): siRNA sense strand
aaagcuggcaccaucauug

SEQ ID NO: 1536299 - RNA, 19 nt, Homo sapiens
  misc_RNA (1)...(19): siRNA sense strand
aaacugaagaugcucaaca

SEQ ID NO: 1536300 - RNA, 19 nt, Homo sapiens
  misc_RNA (1)...(19): siRNA sense strand
gcaugaggaagaaacugaa

SEQ ID NO: 1536301 - RNA, 19 nt, Homo sapiens
  misc_RNA (1)...(19): siRNA sense strand
caucaccggucaccagcau

SEQ ID NO: 1536302 - RNA, 19 nt, Homo sapiens
  misc_RNA (1)...(19): siRNA sense strand
gagaggagucagauugucu

SEQ ID NO: 1536303 - RNA, 19 nt, Homo sapiens
  misc_RNA (1)...(19): siRNA sense strand
ucgaccagaucuaugaugu

SEQ ID NO: 1536304 - RNA, 19 nt, Homo sapiens
  misc_RNA (1)...(19): siRNA sense strand
accguggaguggcuaaaua

SEQ ID NO: 1536305 - RNA, 19 nt, Homo sapiens
  misc_RNA (1)...(19): siRNA sense strand
ugcuuuauaugcucaagaa

SEQ ID NO: 1536306 - RNA, 19 nt, Homo sapiens
  misc_RNA (1)...(19): siRNA sense strand
gggccaagagcaugacuuc

SEQ ID NO: 1536307 - RNA, 19 nt, Homo sapiens
  misc_RNA (1)...(19): siRNA sense strand
ggacgugagccugcacuuc

SEQ ID NO: 1536308 - RNA, 19 nt, Homo sapiens
  misc_RNA (1)...(19): siRNA sense strand
gaagcccacaucccuggaa

SEQ ID NO: 1536309 - RNA, 19 nt, Homo sapiens
  misc_RNA (1)...(19): siRNA sense strand
acucccaucugcccucuga

SEQ ID NO: 1536310 - RNA, 19 nt, Homo sapiens
  misc_RNA (1)...(19): siRNA sense strand
gcacugccuccgagaugga

SEQ ID NO: 1536311 - RNA, 19 nt, Homo sapiens
  misc_RNA (1)...(19): siRNA sense strand
uucuauggccggaagauua

SEQ ID NO: 1536312 - RNA, 19 nt, Homo sapiens
  misc_RNA (1)...(19): siRNA sense strand
ggccacgcaugaggaagaa

SEQ ID NO: 1536313 - RNA, 19 nt, Homo sapiens
  misc_RNA (1)...(19): siRNA sense strand
gcgaaccucucaucuucac

SEQ ID NO: 1536314 - RNA, 19 nt, Homo sapiens
  misc_RNA (1)...(19): siRNA sense strand
caaagcuggcaccaucauu

SEQ ID NO: 1536315 - RNA, 19 nt, Homo sapiens
  misc_RNA (1)...(19): siRNA sense strand
ccgcggucuucaccaagua

SEQ ID NO: 1536316 - RNA, 19 nt, Homo sapiens
  misc_RNA (1)...(19): siRNA sense strand
ggaggacgugugccuguuc

SEQ ID NO: 1536317 - RNA, 19 nt, Homo sapiens
  misc_RNA (1)...(19): siRNA sense strand
gcaacgucauugagaaaau

SEQ ID NO: 1536318 - RNA, 19 nt, Homo sapiens
  misc_RNA (1)...(19): siRNA sense strand
cccaucgacugcuucaaga

SEQ ID NO: 1536319 - RNA, 19 nt, Homo sapiens
  misc_RNA (1)...(19): siRNA sense strand
uuccagacauggcugaaau

SEQ ID NO: 1536320 - RNA, 19 nt, Homo sapiens
  misc_RNA (1)...(19): siRNA sense strand
ccgugucccugcaagaaga

SEQ ID NO: 1536321 - RNA, 19 nt, Homo sapiens
  misc_RNA (1)...(19): siRNA sense strand
guacgggaaggcgguguuu

SEQ ID NO: 1536322 - RNA, 19 nt, Homo sapiens
  misc_RNA (1)...(19): siRNA sense strand
gauccugcgcauccagaaa

SEQ ID NO: 1536323 - RNA, 19 nt, Homo sapiens
  misc_RNA (1)...(19): siRNA sense strand
cgccuuauccaccuacuga

SEQ ID NO: 1536324 - RNA, 19 nt, Homo sapiens
  misc_RNA (1)...(19): siRNA sense strand
gcccaucgacugcuucaag

SEQ ID NO: 1536325 - RNA, 19 nt, Homo sapiens
  misc_RNA (1)...(19): siRNA sense strand
cgacgcuacuccuuaacag

SEQ ID NO: 1536326 - RNA, 19 nt, Homo sapiens
  misc_RNA (1)...(19): siRNA sense strand
cuacugagccagaaaauuc

SEQ ID NO: 1536327 - RNA, 19 nt, Homo sapiens
  misc_RNA (1)...(19): siRNA sense strand
gccaagcugaugcggauug

SEQ ID NO: 1536328 - RNA, 19 nt, Homo sapiens
  misc_RNA (1)...(19): siRNA sense strand
cagcacugccuccgagaug

SEQ ID NO: 1536329 - RNA, 19 nt, Homo sapiens
  misc_RNA (1)...(19): siRNA sense strand
ccacgagcuaugucucuga

SEQ ID NO: 1536330 - RNA, 19 nt, Homo sapiens
  misc_RNA (1)...(19): siRNA sense strand
ccuuaacagugacaucauc

SEQ ID NO: 1536331 - RNA, 19 nt, Homo sapiens
  misc_RNA (1)...(19): siRNA sense strand
ugaggaagaaacugaagau

SEQ ID NO: 1536332 - RNA, 19 nt, Homo sapiens
  misc_RNA (1)...(19): siRNA sense strand
cugaagugcuuuauaugcu

SEQ ID NO: 1536333 - RNA, 19 nt, Homo sapiens
  misc_RNA (1)...(19): siRNA sense strand
ucaacgugaccacagauau

SEQ ID NO: 1536334 - RNA, 19 nt, Homo sapiens
  misc_RNA (1)...(19): siRNA sense strand
ucggaguacuaaaggcauu

SEQ ID NO: 1536335 - RNA, 19 nt, Homo sapiens
  misc_RNA (1)...(19): siRNA sense strand
ucgcacaucggaguacuaa

SEQ ID NO: 1536336 - RNA, 19 nt, Homo sapiens
  misc_RNA (1)...(19): siRNA sense strand
ggaggaugcacaccguauc

SEQ ID NO: 1536337 - RNA, 19 nt, Homo sapiens
  misc_RNA (1)...(19): siRNA sense strand
aggaguguguggugaagga

SEQ ID NO: 1536338 - RNA, 19 nt, Homo sapiens
  misc_RNA (1)...(19): siRNA sense strand
gaggaagaaacugaagaug

SEQ ID NO: 1536339 - RNA, 19 nt, Homo sapiens
  misc_RNA (1)...(19): siRNA sense strand
uggccuacguguccugugu

SEQ ID NO: 1536340 - RNA, 19 nt, Homo sapiens
  misc_RNA (1)...(19): siRNA sense strand
gggcugacaagguaaaggu

SEQ ID NO: 1536341 - RNA, 19 nt, Homo sapiens
  misc_RNA (1)...(19): siRNA sense strand
ugcggaaggugucacaauc

SEQ ID NO: 1536342 - RNA, 19 nt, Homo sapiens
  misc_RNA (1)...(19): siRNA sense strand
ccgacugcauccucauugu

SEQ ID NO: 1536343 - RNA, 19 nt, Homo sapiens
  misc_RNA (1)...(19): siRNA sense strand
ucaaggagcuaacugauga

SEQ ID NO: 1536344 - RNA, 19 nt, Homo sapiens
  misc_RNA (1)...(19): siRNA sense strand
cagagaagcuuaucacaca

SEQ ID NO: 1536345 - RNA, 19 nt, Homo sapiens
  misc_RNA (1)...(19): siRNA sense strand
acaaucagcuggcacagaa

SEQ ID NO: 1536346 - RNA, 19 nt, Homo sapiens
  misc_RNA (1)...(19): siRNA sense strand
ggagcuaacugaugaagag

SEQ ID NO: 1536347 - RNA, 19 nt, Homo sapiens
  misc_RNA (1)...(19): siRNA sense strand
gaagcaggauacugaggaa

SEQ ID NO: 1536348 - RNA, 19 nt, Homo sapiens
  misc_RNA (1)...(19): siRNA sense strand
uggagaagaucaauaagau

SEQ ID NO: 1536349 - RNA, 19 nt, Homo sapiens
  misc_RNA (1)...(19): siRNA sense strand
cagagaggcugcagcuaga

SEQ ID NO: 1536350 - RNA, 19 nt, Homo sapiens
  misc_RNA (1)...(19): siRNA sense strand
gcuagagauugaccagaaa

SEQ ID NO: 1536351 - RNA, 19 nt, Homo sapiens
  misc_RNA (1)...(19): siRNA sense strand
aagaagggauggcagagaa

SEQ ID NO: 1536352 - RNA, 19 nt, Homo sapiens
  misc_RNA (1)...(19): siRNA sense strand
gaagauuaacccugagaau

SEQ ID NO: 1536353 - RNA, 19 nt, Homo sapiens
  misc_RNA (1)...(19): siRNA sense strand
gaucaacaccaagaagauu

SEQ ID NO: 1536354 - RNA, 19 nt, Homo sapiens
  misc_RNA (1)...(19): siRNA sense strand
gagaucaacaccaagaaga

SEQ ID NO: 1536355 - RNA, 19 nt, Homo sapiens
  misc_RNA (1)...(19): siRNA sense strand
ugaggaagaugaggaggaa

SEQ ID NO: 1536356 - RNA, 19 nt, Homo sapiens
  misc_RNA (1)...(19): siRNA sense strand
gcucuacaaugaagugaag

SEQ ID NO: 1536357 - RNA, 19 nt, Homo sapiens
  misc_RNA (1)...(19): siRNA sense strand
ccaaggaagccaagucaga

SEQ ID NO: 1536358 - RNA, 19 nt, Homo sapiens
  misc_RNA (1)...(19): siRNA sense strand
cagggaagcaggauacuga

SEQ ID NO: 1536359 - RNA, 19 nt, Homo sapiens
  misc_RNA (1)...(19): siRNA sense strand
gaagaagggauggcagaga

SEQ ID NO: 1536360 - RNA, 19 nt, Homo sapiens
  misc_RNA (1)...(19): siRNA sense strand
gcugccaacuucagacgaa

SEQ ID NO: 1536361 - RNA, 19 nt, Homo sapiens
  misc_RNA (1)...(19): siRNA sense strand
gcaggauacugaggaagau

SEQ ID NO: 1536362 - RNA, 19 nt, Homo sapiens
  misc_RNA (1)...(19): siRNA sense strand
ccagugacccugagaucaa

SEQ ID NO: 1536363 - RNA, 19 nt, Homo sapiens
  misc_RNA (1)...(19): siRNA sense strand
caacuucagacgaacagaa

SEQ ID NO: 1536364 - RNA, 19 nt, Homo sapiens
  misc_RNA (1)...(19): siRNA sense strand
ggcugcagcuagagauuga

SEQ ID NO: 1536365 - RNA, 19 nt, Homo sapiens
  misc_RNA (1)...(19): siRNA sense strand
agauuaacccugagaauuc

SEQ ID NO: 1536366 - RNA, 19 nt, Homo sapiens
  misc_RNA (1)...(19): siRNA sense strand
ggagaagaucaauaagaug

SEQ ID NO: 1536367 - RNA, 19 nt, Homo sapiens
  misc_RNA (1)...(19): siRNA sense strand
gaugagaaggacaaaggaa

SEQ ID NO: 1536368 - RNA, 19 nt, Homo sapiens
  misc_RNA (1)...(19): siRNA sense strand
gagaagcuuaucacacaga

SEQ ID NO: 1536369 - RNA, 19 nt, Homo sapiens
  misc_RNA (1)...(19): siRNA sense strand
aagauuaacccugagaauu

SEQ ID NO: 1536370 - RNA, 19 nt, Homo sapiens
  misc_RNA (1)...(19): siRNA sense strand
cagcuuccuucgacgcaaa

SEQ ID NO: 1536371 - RNA, 19 nt, Homo sapiens
  misc_RNA (1)...(19): siRNA sense strand
aagaugaggaggaagauga

SEQ ID NO: 1536372 - RNA, 19 nt, Homo sapiens
  misc_RNA (1)...(19): siRNA sense strand
ccaaggcuaaauucaacua

SEQ ID NO: 1536373 - RNA, 19 nt, Homo sapiens
  misc_RNA (1)...(19): siRNA sense strand
gcgguucgacggcauguug

SEQ ID NO: 1536374 - RNA, 19 nt, Homo sapiens
  misc_RNA (1)...(19): siRNA sense strand
ucaacaccaagaagauuaa

SEQ ID NO: 1536375 - RNA, 19 nt, Homo sapiens
  misc_RNA (1)...(19): siRNA sense strand
gggcagccagcgaucauug

SEQ ID NO: 1536376 - RNA, 19 nt, Homo sapiens
  misc_RNA (1)...(19): siRNA sense strand
gggauggcagagaagcuua

SEQ ID NO: 1536377 - RNA, 19 nt, Homo sapiens
  misc_RNA (1)...(19): siRNA sense strand
ugacugugcaucuggagaa

SEQ ID NO: 1536378 - RNA, 19 nt, Homo sapiens
  misc_RNA (1)...(19): siRNA sense strand
gaaguucauggaucaacau

SEQ ID NO: 1536379 - RNA, 19 nt, Homo sapiens
  misc_RNA (1)...(19): siRNA sense strand
cagacgaacagaagaaaca

SEQ ID NO: 1536380 - RNA, 19 nt, Homo sapiens
  misc_RNA (1)...(19): siRNA sense strand
agaaguucauggaucaaca

SEQ ID NO: 1536381 - RNA, 19 nt, Homo sapiens
  misc_RNA (1)...(19): siRNA sense strand
agcuagagauugaccagaa

SEQ ID NO: 1536382 - RNA, 19 nt, Homo sapiens
  misc_RNA (1)...(19): siRNA sense strand
acccugagaucaacaccaa

SEQ ID NO: 1536383 - RNA, 19 nt, Homo sapiens
  misc_RNA (1)...(19): siRNA sense strand
gcggucccuuucuguguga

SEQ ID NO: 1536384 - RNA, 19 nt, Homo sapiens
  misc_RNA (1)...(19): siRNA sense strand
gaagaugaggaggaagaug

SEQ ID NO: 1536385 - RNA, 19 nt, Homo sapiens
  misc_RNA (1)...(19): siRNA sense strand
gagaggcugcagcuagaga

SEQ ID NO: 1536386 - RNA, 19 nt, Homo sapiens
  misc_RNA (1)...(19): siRNA sense strand
ggaagaugagaaggacaaa

SEQ ID NO: 1536387 - RNA, 19 nt, Homo sapiens
  misc_RNA (1)...(19): siRNA sense strand
gaagaaguucauggaucaa

SEQ ID NO: 1536388 - RNA, 19 nt, Homo sapiens
  misc_RNA (1)...(19): siRNA sense strand
ggccaaggaagccaaguca

SEQ ID NO: 1536389 - RNA, 19 nt, Homo sapiens
  misc_RNA (1)...(19): siRNA sense strand
gauuaacccugagaauucc

SEQ ID NO: 1536390 - RNA, 19 nt, Homo sapiens
  misc_RNA (1)...(19): siRNA sense strand
ggacauggugguggacauc

SEQ ID NO: 1536391 - RNA, 19 nt, Homo sapiens
  misc_RNA (1)...(19): siRNA sense strand
aagcuuaucacacagacuu

SEQ ID NO: 1536392 - RNA, 19 nt, Homo sapiens
  misc_RNA (1)...(19): siRNA sense strand
ggagcucuacaaugaagug

SEQ ID NO: 1536393 - RNA, 19 nt, Homo sapiens
  misc_RNA (1)...(19): siRNA sense strand
ugcaggagcuugugaacac

SEQ ID NO: 1536394 - RNA, 19 nt, Homo sapiens
  misc_RNA (1)...(19): siRNA sense strand
ggaagaugaggaggaagau

SEQ ID NO: 1536395 - RNA, 19 nt, Homo sapiens
  misc_RNA (1)...(19): siRNA sense strand
ggacaaaggaaaacugaag

SEQ ID NO: 1536396 - RNA, 19 nt, Homo sapiens
  misc_RNA (1)...(19): siRNA sense strand
gguggugacugugcaucug

SEQ ID NO: 1536397 - RNA, 19 nt, Homo sapiens
  misc_RNA (1)...(19): siRNA sense strand
ccugagaucaacaccaaga

SEQ ID NO: 1536398 - RNA, 19 nt, Homo sapiens
  misc_RNA (1)...(19): siRNA sense strand
cuggagaagaucaauaaga

SEQ ID NO: 1536399 - RNA, 19 nt, Homo sapiens
  misc_RNA (1)...(19): siRNA sense strand
ugaaagggaaggacauggu

SEQ ID NO: 1536400 - RNA, 19 nt, Homo sapiens
  misc_RNA (1)...(19): siRNA sense strand
ggauggcagagaagcuuau

SEQ ID NO: 1536401 - RNA, 19 nt, Homo sapiens
  misc_RNA (1)...(19): siRNA sense strand
gccgcuugguguccaguga

SEQ ID NO: 1536402 - RNA, 19 nt, Homo sapiens
  misc_RNA (1)...(19): siRNA sense strand
gaagaugagaaggacaaag

SEQ ID NO: 1536403 - RNA, 19 nt, Homo sapiens
  misc_RNA (1)...(19): siRNA sense strand
auggggagcucuacaauga

SEQ ID NO: 1536404 - RNA, 19 nt, Homo sapiens
  misc_RNA (1)...(19): siRNA sense strand
gaacagugggauuauuaua

SEQ ID NO: 1536405 - RNA, 19 nt, Homo sapiens
  misc_RNA (1)...(19): siRNA sense strand
agaaggagauccacucuga

SEQ ID NO: 1536406 - RNA, 19 nt, Homo sapiens
  misc_RNA (1)...(19): siRNA sense strand
cuacaaccgucccuauaaa

SEQ ID NO: 1536407 - RNA, 19 nt, Homo sapiens
  misc_RNA (1)...(19): siRNA sense strand
ugucaucucucaccugaaa

SEQ ID NO: 1536408 - RNA, 19 nt, Homo sapiens
  misc_RNA (1)...(19): siRNA sense strand
caccugaaauuaacaaugu

SEQ ID NO: 1536409 - RNA, 19 nt, Homo sapiens
  misc_RNA (1)...(19): siRNA sense strand
ccacugcccucagaacaaa

SEQ ID NO: 1536410 - RNA, 19 nt, Homo sapiens
  misc_RNA (1)...(19): siRNA sense strand
ggccugaggucuccuaaca

SEQ ID NO: 1536411 - RNA, 19 nt, Homo sapiens
  misc_RNA (1)...(19): siRNA sense strand
caacuuuaccuuccaaaca

SEQ ID NO: 1536412 - RNA, 19 nt, Homo sapiens
  misc_RNA (1)...(19): siRNA sense strand
uggaacagugggauuauua

SEQ ID NO: 1536413 - RNA, 19 nt, Homo sapiens
  misc_RNA (1)...(19): siRNA sense strand
aaccgucccuauaaacuuu

SEQ ID NO: 1536414 - RNA, 19 nt, Homo sapiens
  misc_RNA (1)...(19): siRNA sense strand
aacauucccugcacaguga

SEQ ID NO: 1536415 - RNA, 19 nt, Homo sapiens
  misc_RNA (1)...(19): siRNA sense strand
gaggucuccuaacaacaaa

SEQ ID NO: 1536416 - RNA, 19 nt, Homo sapiens
  misc_RNA (1)...(19): siRNA sense strand
ccuacaaccgucccuauaa

SEQ ID NO: 1536417 - RNA, 19 nt, Homo sapiens
  misc_RNA (1)...(19): siRNA sense strand
ggaacagugggauuauuau

SEQ ID NO: 1536418 - RNA, 19 nt, Homo sapiens
  misc_RNA (1)...(19): siRNA sense strand
cauccugugucacucugua

SEQ ID NO: 1536419 - RNA, 19 nt, Homo sapiens
  misc_RNA (1)...(19): siRNA sense strand
gaagaaggagauccacucu

SEQ ID NO: 1536420 - RNA, 19 nt, Homo sapiens
  misc_RNA (1)...(19): siRNA sense strand
ggucaacuuuaccuuccaa

SEQ ID NO: 1536421 - RNA, 19 nt, Homo sapiens
  misc_RNA (1)...(19): siRNA sense strand
ggccacaagccaagaggua

SEQ ID NO: 1536422 - RNA, 19 nt, Homo sapiens
  misc_RNA (1)...(19): siRNA sense strand
gugucuaucuggucaacuu

SEQ ID NO: 1536423 - RNA, 19 nt, Homo sapiens
  misc_RNA (1)...(19): siRNA sense strand
ugaggucuccuaacaacaa

SEQ ID NO: 1536424 - RNA, 19 nt, Homo sapiens
  misc_RNA (1)...(19): siRNA sense strand
caaccgucccuauaaacuu

SEQ ID NO: 1536425 - RNA, 19 nt, Homo sapiens
  misc_RNA (1)...(19): siRNA sense strand
auaaaucucagacccguuu

SEQ ID NO: 1536426 - RNA, 19 nt, Homo sapiens
  misc_RNA (1)...(19): siRNA sense strand
ggagauccacucugauguc

SEQ ID NO: 1536427 - RNA, 19 nt, Homo sapiens
  misc_RNA (1)...(19): siRNA sense strand
acauggaacagugggauua

SEQ ID NO: 1536428 - RNA, 19 nt, Homo sapiens
  misc_RNA (1)...(19): siRNA sense strand
ucucucaccugaaauuaac

SEQ ID NO: 1536429 - RNA, 19 nt, Homo sapiens
  misc_RNA (1)...(19): siRNA sense strand
ccugaggucuccuaacaac

SEQ ID NO: 1536430 - RNA, 19 nt, Homo sapiens
  misc_RNA (1)...(19): siRNA sense strand
ccacuggagcaccuacuug

SEQ ID NO: 1536431 - RNA, 19 nt, Homo sapiens
  misc_RNA (1)...(19): siRNA sense strand
caucucucaccugaaauua

SEQ ID NO: 1536432 - RNA, 19 nt, Homo sapiens
  misc_RNA (1)...(19): siRNA sense strand
gaaggagauccacucugau

SEQ ID NO: 1536433 - RNA, 19 nt, Homo sapiens
  misc_RNA (1)...(19): siRNA sense strand
aaggagauccacucugaug

SEQ ID NO: 1536434 - RNA, 19 nt, Homo sapiens
  misc_RNA (1)...(19): siRNA sense strand
aacuuuaccuuccaaacau

SEQ ID NO: 1536435 - RNA, 19 nt, Homo sapiens
  misc_RNA (1)...(19): siRNA sense strand
cuacuugccaggcuucuca

SEQ ID NO: 1536436 - RNA, 19 nt, Homo sapiens
  misc_RNA (1)...(19): siRNA sense strand
cauccacugugucuaucug

SEQ ID NO: 1536437 - RNA, 19 nt, Homo sapiens
  misc_RNA (1)...(19): siRNA sense strand
ucaucucucaccugaaauu

SEQ ID NO: 1536438 - RNA, 19 nt, Homo sapiens
  misc_RNA (1)...(19): siRNA sense strand
ccuuuggccuggcauucaa

SEQ ID NO: 1536439 - RNA, 19 nt, Homo sapiens
  misc_RNA (1)...(19): siRNA sense strand
ccacaagccaagagguauc

SEQ ID NO: 1536440 - RNA, 19 nt, Homo sapiens
  misc_RNA (1)...(19): siRNA sense strand
uccuuuggcuuugcccaua

SEQ ID NO: 1536441 - RNA, 19 nt, Homo sapiens
  misc_RNA (1)...(19): siRNA sense strand
ucaccugaaauuaacaaug

SEQ ID NO: 1536442 - RNA, 19 nt, Homo sapiens
  misc_RNA (1)...(19): siRNA sense strand
gagcugggcuuccgcaaga

SEQ ID NO: 1536443 - RNA, 19 nt, Homo sapiens
  misc_RNA (1)...(19): siRNA sense strand
gcaagcaccuggccuaucu

SEQ ID NO: 1536444 - RNA, 19 nt, Homo sapiens
  misc_RNA (1)...(19): siRNA sense strand
gcaccuggccuaucucauu

SEQ ID NO: 1536445 - RNA, 19 nt, Homo sapiens
  misc_RNA (1)...(19): siRNA sense strand
ggaugaagauggcaaaguc

SEQ ID NO: 1536446 - RNA, 19 nt, Homo sapiens
  misc_RNA (1)...(19): siRNA sense strand
gaggacgccuucuggauga

SEQ ID NO: 1536447 - RNA, 19 nt, Homo sapiens
  misc_RNA (1)...(19): siRNA sense strand
gaacucggccuccaucuuc

SEQ ID NO: 1536448 - RNA, 19 nt, Homo sapiens
  misc_RNA (1)...(19): siRNA sense strand
ccaagcagaucgagaagga

SEQ ID NO: 1536449 - RNA, 19 nt, Homo sapiens
  misc_RNA (1)...(19): siRNA sense strand
gaucucaccugggacaaga

SEQ ID NO: 1536450 - RNA, 19 nt, Homo sapiens
  misc_RNA (1)...(19): siRNA sense strand
ccaaggcccugcuggacuu

SEQ ID NO: 1536451 - RNA, 19 nt, Homo sapiens
  misc_RNA (1)...(19): siRNA sense strand
gaagaacagcuccaacgau

SEQ ID NO: 1536452 - RNA, 19 nt, Homo sapiens
  misc_RNA (1)...(19): siRNA sense strand
gaacagcuccaacgaugag

SEQ ID NO: 1536453 - RNA, 19 nt, Homo sapiens
  misc_RNA (1)...(19): siRNA sense strand
ucacaaucgugucucagaa

SEQ ID NO: 1536454 - RNA, 19 nt, Homo sapiens
  misc_RNA (1)...(19): siRNA sense strand
ccaaguacacgcagaagga

SEQ ID NO: 1536455 - RNA, 19 nt, Homo sapiens
  misc_RNA (1)...(19): siRNA sense strand
ggaggucgagagagacuuu

SEQ ID NO: 1536456 - RNA, 19 nt, Homo sapiens
  misc_RNA (1)...(19): siRNA sense strand
agaacgacaucaucacaau

SEQ ID NO: 1536457 - RNA, 19 nt, Homo sapiens
  misc_RNA (1)...(19): siRNA sense strand
ggaagagucagcagagcaa

SEQ ID NO: 1536458 - RNA, 19 nt, Homo sapiens
  misc_RNA (1)...(19): siRNA sense strand
caccuggaguucacccaua

SEQ ID NO: 1536459 - RNA, 19 nt, Homo sapiens
  misc_RNA (1)...(19): siRNA sense strand
cagcagagcaaccagaguu

SEQ ID NO: 1536460 - RNA, 19 nt, Homo sapiens
  misc_RNA (1)...(19): siRNA sense strand
cgaguccucugcugcuuug

SEQ ID NO: 1536461 - RNA, 19 nt, Homo sapiens
  misc_RNA (1)...(19): siRNA sense strand
guucuacuacgaugaguuu

SEQ ID NO: 1536462 - RNA, 19 nt, Homo sapiens
  misc_RNA (1)...(19): siRNA sense strand
ggagcucccugcgaagaga

SEQ ID NO: 1536463 - RNA, 19 nt, Homo sapiens
  misc_RNA (1)...(19): siRNA sense strand
guucgaacauggacugaag

SEQ ID NO: 1536464 - RNA, 19 nt, Homo sapiens
  misc_RNA (1)...(19): siRNA sense strand
gcgcaucugggaccuguuu

SEQ ID NO: 1536465 - RNA, 19 nt, Homo sapiens
  misc_RNA (1)...(19): siRNA sense strand
cggaggaaguccaccauca

SEQ ID NO: 1536466 - RNA, 19 nt, Homo sapiens
  misc_RNA (1)...(19): siRNA sense strand
caccuggccuaucucauug

SEQ ID NO: 1536467 - RNA, 19 nt, Homo sapiens
  misc_RNA (1)...(19): siRNA sense strand
gaguuugguuuccgugugu

SEQ ID NO: 1536468 - RNA, 19 nt, Homo sapiens
  misc_RNA (1)...(19): siRNA sense strand
gaugagcgcagcaaagagu

SEQ ID NO: 1536469 - RNA, 19 nt, Homo sapiens
  misc_RNA (1)...(19): siRNA sense strand
gagcugacuccagacuaua

SEQ ID NO: 1536470 - RNA, 19 nt, Homo sapiens
  misc_RNA (1)...(19): siRNA sense strand
ggguccagaucaaguguga

SEQ ID NO: 1536471 - RNA, 19 nt, Homo sapiens
  misc_RNA (1)...(19): siRNA sense strand
caagaacgacaucaucaca

SEQ ID NO: 1536472 - RNA, 19 nt, Homo sapiens
  misc_RNA (1)...(19): siRNA sense strand
aaccagaguucuacuacga

SEQ ID NO: 1536473 - RNA, 19 nt, Homo sapiens
  misc_RNA (1)...(19): siRNA sense strand
acauugagcugucccugau

SEQ ID NO: 1536474 - RNA, 19 nt, Homo sapiens
  misc_RNA (1)...(19): siRNA sense strand
gaacgacaucaucacaauc

SEQ ID NO: 1536475 - RNA, 19 nt, Homo sapiens
  misc_RNA (1)...(19): siRNA sense strand
guacaaggaagaaggugau

SEQ ID NO: 1536476 - RNA, 19 nt, Homo sapiens
  misc_RNA (1)...(19): siRNA sense strand
agacuuugccuccguguau

SEQ ID NO: 1536477 - RNA, 19 nt, Homo sapiens
  misc_RNA (1)...(19): siRNA sense strand
caucacugcucugcucuuc

SEQ ID NO: 1536478 - RNA, 19 nt, Homo sapiens
  misc_RNA (1)...(19): siRNA sense strand
ggaacucugagcuguccua

SEQ ID NO: 1536479 - RNA, 19 nt, Homo sapiens
  misc_RNA (1)...(19): siRNA sense strand
gcacucaaggccaagaaca

SEQ ID NO: 1536480 - RNA, 19 nt, Homo sapiens
  misc_RNA (1)...(19): siRNA sense strand
gcaaccagaguucuacuac

SEQ ID NO: 1536481 - RNA, 19 nt, Homo sapiens
  misc_RNA (1)...(19): siRNA sense strand
cagccaaguucguggaagu

SEQ ID NO: 1536482 - RNA, 19 nt, Homo sapiens
  misc_RNA (1)...(19): siRNA sense strand
ugaucacacugcacugguu

SEQ ID NO: 1536483 - RNA, 19 nt, Homo sapiens
  misc_RNA (1)...(19): siRNA sense strand
cagagcaaccagaguucua

SEQ ID NO: 1536484 - RNA, 19 nt, Homo sapiens
  misc_RNA (1)...(19): siRNA sense strand
caaggaagaaggugaugag

SEQ ID NO: 1536485 - RNA, 19 nt, Homo sapiens
  misc_RNA (1)...(19): siRNA sense strand
uccaggagcaugacauuga

SEQ ID NO: 1536486 - RNA, 19 nt, Homo sapiens
  misc_RNA (1)...(19): siRNA sense strand
gacuuugccuccguguauu

SEQ ID NO: 1536487 - RNA, 19 nt, Homo sapiens
  misc_RNA (1)...(19): siRNA sense strand
gaagcuccgcucacugauc

SEQ ID NO: 1536488 - RNA, 19 nt, Homo sapiens
  misc_RNA (1)...(19): siRNA sense strand
ccaggagcaugacauugag

SEQ ID NO: 1536489 - RNA, 19 nt, Homo sapiens
  misc_RNA (1)...(19): siRNA sense strand
aagcuccgcucacugaucu

SEQ ID NO: 1536490 - RNA, 19 nt, Homo sapiens
  misc_RNA (1)...(19): siRNA sense strand
ucguggaaguccuggauga

SEQ ID NO: 1536491 - RNA, 19 nt, Homo sapiens
  misc_RNA (1)...(19): siRNA sense strand
caaguacacgcagaaggaa

SEQ ID NO: 1536492 - RNA, 19 nt, Homo sapiens
  misc_RNA (1)...(19): siRNA sense strand
cuacuacgaugaguuuggu

SEQ ID NO: 1536493 - RNA, 19 nt, Homo sapiens
  misc_RNA (1)...(19): siRNA sense strand
ugaagaacagcuccaacga

SEQ ID NO: 1536494 - RNA, 19 nt, Homo sapiens
  misc_RNA (1)...(19): siRNA sense strand
ggauaucccgucgcagaug

SEQ ID NO: 1536495 - RNA, 19 nt, Homo sapiens
  misc_RNA (1)...(19): siRNA sense strand
gcgagauugugaagaacag

SEQ ID NO: 1536496 - RNA, 19 nt, Homo sapiens
  misc_RNA (1)...(19): siRNA sense strand
uggaugagcgcagcaaaga

SEQ ID NO: 1536497 - RNA, 19 nt, Homo sapiens
  misc_RNA (1)...(19): siRNA sense strand
ccaccucauuguccaguac

SEQ ID NO: 1536498 - RNA, 19 nt, Homo sapiens
  misc_RNA (1)...(19): siRNA sense strand
accgcgagauugugaagaa

SEQ ID NO: 1536499 - RNA, 19 nt, Homo sapiens
  misc_RNA (1)...(19): siRNA sense strand
cgucuggugcucuguaaga

SEQ ID NO: 1536500 - RNA, 19 nt, Homo sapiens
  misc_RNA (1)...(19): siRNA sense strand
ucaucacaaucgugucuca

SEQ ID NO: 1536501 - RNA, 19 nt, Homo sapiens
  misc_RNA (1)...(19): siRNA sense strand
gcccugacuccgagcauau

SEQ ID NO: 1536502 - RNA, 19 nt, Homo sapiens
  misc_RNA (1)...(19): siRNA sense strand
gcaagaacgacaucaucac

SEQ ID NO: 1536503 - RNA, 19 nt, Homo sapiens
  misc_RNA (1)...(19): siRNA sense strand
ccagcgugguggacaucaa

SEQ ID NO: 1536504 - RNA, 19 nt, Homo sapiens
  misc_RNA (1)...(19): siRNA sense strand
accuggaguucacccauaa

SEQ ID NO: 1536505 - RNA, 19 nt, Homo sapiens
  misc_RNA (1)...(19): siRNA sense strand
gggcugugcagucugugaa

SEQ ID NO: 1536506 - RNA, 19 nt, Homo sapiens
  misc_RNA (1)...(19): siRNA sense strand
gagacuuugccuccgugua

SEQ ID NO: 1536507 - RNA, 19 nt, Homo sapiens
  misc_RNA (1)...(19): siRNA sense strand
gaggaaguccaccaucacu

SEQ ID NO: 1536508 - RNA, 19 nt, Homo sapiens
  misc_RNA (1)...(19): siRNA sense strand
ggaagagcugauccaguca

SEQ ID NO: 1536509 - RNA, 19 nt, Homo sapiens
  misc_RNA (1)...(19): siRNA sense strand
guccugcgccaccucauug

SEQ ID NO: 1536510 - RNA, 19 nt, Homo sapiens
  misc_RNA (1)...(19): siRNA sense strand
gguccugcgccaccucauu

SEQ ID NO: 1536511 - RNA, 19 nt, Homo sapiens
  misc_RNA (1)...(19): siRNA sense strand
guucacccauaaccacgau

SEQ ID NO: 1536512 - RNA, 19 nt, Homo sapiens
  misc_RNA (1)...(19): siRNA sense strand
cuaccgggcugugcagucu

SEQ ID NO: 1536513 - RNA, 19 nt, Homo sapiens
  misc_RNA (1)...(19): siRNA sense strand
gcaacgagaucgaguacau

SEQ ID NO: 1536514 - RNA, 19 nt, Homo sapiens
  misc_RNA (1)...(19): siRNA sense strand
gcgcuacgauggcaacuug

SEQ ID NO: 1536515 - RNA, 19 nt, Homo sapiens
  misc_RNA (1)...(19): siRNA sense strand
ggaagucccugacaagcau

SEQ ID NO: 1536516 - RNA, 19 nt, Homo sapiens
  misc_RNA (1)...(19): siRNA sense strand
aaacagaccaugcaucaga

SEQ ID NO: 1536517 - RNA, 19 nt, Homo sapiens
  misc_RNA (1)...(19): siRNA sense strand
acaaucagcucaagagucu

SEQ ID NO: 1536518 - RNA, 19 nt, Homo sapiens
  misc_RNA (1)...(19): siRNA sense strand
gcguggaccucucguacaa

SEQ ID NO: 1536519 - RNA, 19 nt, Homo sapiens
  misc_RNA (1)...(19): siRNA sense strand
ggccaacgccauccaguuu

SEQ ID NO: 1536520 - RNA, 19 nt, Homo sapiens
  misc_RNA (1)...(19): siRNA sense strand
ggaauacuacguugauuac

SEQ ID NO: 1536521 - RNA, 19 nt, Homo sapiens
  misc_RNA (1)...(19): siRNA sense strand
agaaacagaccaugcauca

SEQ ID NO: 1536522 - RNA, 19 nt, Homo sapiens
  misc_RNA (1)...(19): siRNA sense strand
uuacaaaccgaaccacauu

SEQ ID NO: 1536523 - RNA, 19 nt, Homo sapiens
  misc_RNA (1)...(19): siRNA sense strand
gaguauggcucguguaccu

SEQ ID NO: 1536524 - RNA, 19 nt, Homo sapiens
  misc_RNA (1)...(19): siRNA sense strand
ccaacgccauccaguuugu

SEQ ID NO: 1536525 - RNA, 19 nt, Homo sapiens
  misc_RNA (1)...(19): siRNA sense strand
aggaauacuacguugauua

SEQ ID NO: 1536526 - RNA, 19 nt, Homo sapiens
  misc_RNA (1)...(19): siRNA sense strand
caccauggcccucaucuuc

SEQ ID NO: 1536527 - RNA, 19 nt, Homo sapiens
  misc_RNA (1)...(19): siRNA sense strand
gauacaaucagcucaagag

SEQ ID NO: 1536528 - RNA, 19 nt, Homo sapiens
  misc_RNA (1)...(19): siRNA sense strand
ccucguggcucagcaacuu

SEQ ID NO: 1536529 - RNA, 19 nt, Homo sapiens
  misc_RNA (1)...(19): siRNA sense strand
ccgggaaccugugggauug

SEQ ID NO: 1536530 - RNA, 19 nt, Homo sapiens
  misc_RNA (1)...(19): siRNA sense strand
ugccaugucugcccaggaa

SEQ ID NO: 1536531 - RNA, 19 nt, Homo sapiens
  misc_RNA (1)...(19): siRNA sense strand
gcugcucggucucugucua

SEQ ID NO: 1536532 - RNA, 19 nt, Homo sapiens
  misc_RNA (1)...(19): siRNA sense strand
gcagcacgacggcacauuc

SEQ ID NO: 1536533 - RNA, 19 nt, Homo sapiens
  misc_RNA (1)...(19): siRNA sense strand
ccaaccagaucacccaacu

SEQ ID NO: 1536534 - RNA, 19 nt, Homo sapiens
  misc_RNA (1)...(19): siRNA sense strand
caggaauacuacguugauu

SEQ ID NO: 1536535 - RNA, 19 nt, Homo sapiens
  misc_RNA (1)...(19): siRNA sense strand
ccaugucugcccaggaaua

SEQ ID NO: 1536536 - RNA, 19 nt, Homo sapiens
  misc_RNA (1)...(19): siRNA sense strand
guggaccucucguacaaca

SEQ ID NO: 1536537 - RNA, 19 nt, Homo sapiens
  misc_RNA (1)...(19): siRNA sense strand
gagggaaugcgagguguga

SEQ ID NO: 1536538 - RNA, 19 nt, Homo sapiens
  misc_RNA (1)...(19): siRNA sense strand
acaaaccgaaccacauuga

SEQ ID NO: 1536539 - RNA, 19 nt, Homo sapiens
  misc_RNA (1)...(19): siRNA sense strand
ggaccucucguacaacaag

SEQ ID NO: 1536540 - RNA, 19 nt, Homo sapiens
  misc_RNA (1)...(19): siRNA sense strand
caucuucuccuuccucauc

SEQ ID NO: 1536541 - RNA, 19 nt, Homo sapiens
  misc_RNA (1)...(19): siRNA sense strand
ccaggaauacuacguugau

SEQ ID NO: 1536542 - RNA, 19 nt, Homo sapiens
  misc_RNA (1)...(19): siRNA sense strand
ggcucuaucuggaucacaa

SEQ ID NO: 1536543 - RNA, 19 nt, Homo sapiens
  misc_RNA (1)...(19): siRNA sense strand
ccaaccgccucaccuacau

SEQ ID NO: 1536544 - RNA, 19 nt, Homo sapiens
  misc_RNA (1)...(19): siRNA sense strand
ccucaaguuucucgacauc

SEQ ID NO: 1536545 - RNA, 19 nt, Homo sapiens
  misc_RNA (1)...(19): siRNA sense strand
gccgggaaccugugggauu

SEQ ID NO: 1536546 - RNA, 19 nt, Homo sapiens
  misc_RNA (1)...(19): siRNA sense strand
ggauacaaucagcucaaga

SEQ ID NO: 1536547 - RNA, 19 nt, Homo sapiens
  misc_RNA (1)...(19): siRNA sense strand
gcagaaacagaccaugcau

SEQ ID NO: 1536548 - RNA, 19 nt, Homo sapiens
  misc_RNA (1)...(19): siRNA sense strand
cgagaacgccgugcagauc

SEQ ID NO: 1536549 - RNA, 19 nt, Homo sapiens
  misc_RNA (1)...(19): siRNA sense strand
gcaggaagcaaaagcagaa

SEQ ID NO: 1536550 - RNA, 19 nt, Homo sapiens
  misc_RNA (1)...(19): siRNA sense strand
cagcucacguggcucuauc

SEQ ID NO: 1536551 - RNA, 19 nt, Homo sapiens
  misc_RNA (1)...(19): siRNA sense strand
gggccaacgccauccaguu

SEQ ID NO: 1536552 - RNA, 19 nt, Homo sapiens
  misc_RNA (1)...(19): siRNA sense strand
gcaccauggcccucaucuu

SEQ ID NO: 1536553 - RNA, 19 nt, Homo sapiens
  misc_RNA (1)...(19): siRNA sense strand
gcagcguggaccucucgua

SEQ ID NO: 1536554 - RNA, 19 nt, Homo sapiens
  misc_RNA (1)...(19): siRNA sense strand
ugucugcccaggaauacua

SEQ ID NO: 1536555 - RNA, 19 nt, Homo sapiens
  misc_RNA (1)...(19): siRNA sense strand
aagcucaccacgcugcaua

SEQ ID NO: 1536556 - RNA, 19 nt, Homo sapiens
  misc_RNA (1)...(19): siRNA sense strand
cagcucagacagugcuuug

SEQ ID NO: 1536557 - RNA, 19 nt, Homo sapiens
  misc_RNA (1)...(19): siRNA sense strand
caacgagaucgaguacaug

SEQ ID NO: 1536558 - RNA, 19 nt, Homo sapiens
  misc_RNA (1)...(19): siRNA sense strand
ccauggcccucaucuucuc

SEQ ID NO: 1536559 - RNA, 19 nt, Homo sapiens
  misc_RNA (1)...(19): siRNA sense strand
cgacaucggauacaaucag

SEQ ID NO: 1536560 - RNA, 19 nt, Homo sapiens
  misc_RNA (1)...(19): siRNA sense strand
ucacccaacugcccaacac

SEQ ID NO: 1536561 - RNA, 19 nt, Homo sapiens
  misc_RNA (1)...(19): siRNA sense strand
acgcagcgcaggaagcaaa

SEQ ID NO: 1536562 - RNA, 19 nt, Homo sapiens
  misc_RNA (1)...(19): siRNA sense strand
cccggauccucaacucuug

SEQ ID NO: 1536563 - RNA, 19 nt, Homo sapiens
  misc_RNA (1)...(19): siRNA sense strand
gcagcucacguggcucuau

SEQ ID NO: 1536564 - RNA, 19 nt, Homo sapiens
  misc_RNA (1)...(19): siRNA sense strand
ggagugcaauggugugauc

SEQ ID NO: 1536565 - RNA, 19 nt, Homo sapiens
  misc_RNA (1)...(19): siRNA sense strand
gugcaauggugugaucaua

SEQ ID NO: 1536566 - RNA, 19 nt, Homo sapiens
  misc_RNA (1)...(19): siRNA sense strand
gcaauggugugaucauagc

SEQ ID NO: 1536567 - RNA, 19 nt, Homo sapiens
  misc_RNA (1)...(19): siRNA sense strand
cuccugagcucaaguaguc

SEQ ID NO: 1536568 - RNA, 19 nt, Homo sapiens
  misc_RNA (1)...(19): siRNA sense strand
cagccaaacucacuaaaua

SEQ ID NO: 1536569 - RNA, 19 nt, Homo sapiens
  misc_RNA (1)...(19): siRNA sense strand
ggugugcgcucaucauaua

SEQ ID NO: 1536570 - RNA, 19 nt, Homo sapiens
  misc_RNA (1)...(19): siRNA sense strand
gaagacaagugaagaagau

SEQ ID NO: 1536571 - RNA, 19 nt, Homo sapiens
  misc_RNA (1)...(19): siRNA sense strand
ccucuucucucaauaagua

SEQ ID NO: 1536572 - RNA, 19 nt, Homo sapiens
  misc_RNA (1)...(19): siRNA sense strand
gcaguugacagccucauuu

SEQ ID NO: 1536573 - RNA, 19 nt, Homo sapiens
  misc_RNA (1)...(19): siRNA sense strand
gaccgagucugcagaaauc

SEQ ID NO: 1536574 - RNA, 19 nt, Homo sapiens
  misc_RNA (1)...(19): siRNA sense strand
gccaacagaugauuugcaa

SEQ ID NO: 1536575 - RNA, 19 nt, Homo sapiens
  misc_RNA (1)...(19): siRNA sense strand
ccagggagcuucugaugag

SEQ ID NO: 1536576 - RNA, 19 nt, Homo sapiens
  misc_RNA (1)...(19): siRNA sense strand
caauaaguauccaguccuu

SEQ ID NO: 1536577 - RNA, 19 nt, Homo sapiens
  misc_RNA (1)...(19): siRNA sense strand
caaacucacuaaauaugca

SEQ ID NO: 1536578 - RNA, 19 nt, Homo sapiens
  misc_RNA (1)...(19): siRNA sense strand
ggaaccaucggaccaagaa

SEQ ID NO: 1536579 - RNA, 19 nt, Homo sapiens
  misc_RNA (1)...(19): siRNA sense strand
gcaguauccgggcucuuua

SEQ ID NO: 1536580 - RNA, 19 nt, Homo sapiens
  misc_RNA (1)...(19): siRNA sense strand
gaggugugcgcucaucaua

SEQ ID NO: 1536581 - RNA, 19 nt, Homo sapiens
  misc_RNA (1)...(19): siRNA sense strand
uaccgacacugcagcauug

SEQ ID NO: 1536582 - RNA, 19 nt, Homo sapiens
  misc_RNA (1)...(19): siRNA sense strand
uauccgggcucuuuaccaa

SEQ ID NO: 1536583 - RNA, 19 nt, Homo sapiens
  misc_RNA (1)...(19): siRNA sense strand
uuucugaccucaccaaauc

SEQ ID NO: 1536584 - RNA, 19 nt, Homo sapiens
  misc_RNA (1)...(19): siRNA sense strand
caacagaugauuugcaaac

SEQ ID NO: 1536585 - RNA, 19 nt, Homo sapiens
  misc_RNA (1)...(19): siRNA sense strand
gcugcuugcuguuagauca

SEQ ID NO: 1536586 - RNA, 19 nt, Homo sapiens
  misc_RNA (1)...(19): siRNA sense strand
cgacacugcagcauugaaa

SEQ ID NO: 1536587 - RNA, 19 nt, Homo sapiens
  misc_RNA (1)...(19): siRNA sense strand
gccaaacucacuaaauaug

SEQ ID NO: 1536588 - RNA, 19 nt, Homo sapiens
  misc_RNA (1)...(19): siRNA sense strand
ucacuaaauaugcacauga

SEQ ID NO: 1536589 - RNA, 19 nt, Homo sapiens
  misc_RNA (1)...(19): siRNA sense strand
gcagccaaacucacuaaau

SEQ ID NO: 1536590 - RNA, 19 nt, Homo sapiens
  misc_RNA (1)...(19): siRNA sense strand
gagacgggcaccaugaaga

SEQ ID NO: 1536591 - RNA, 19 nt, Homo sapiens
  misc_RNA (1)...(19): siRNA sense strand
gcaccaugaagacaaguga

SEQ ID NO: 1536592 - RNA, 19 nt, Homo sapiens
  misc_RNA (1)...(19): siRNA sense strand
ggaggaggaggcuguggaa

SEQ ID NO: 1536593 - RNA, 19 nt, Homo sapiens
  misc_RNA (1)...(19): siRNA sense strand
cuccagccauucccuauga

SEQ ID NO: 1536594 - RNA, 19 nt, Homo sapiens
  misc_RNA (1)...(19): siRNA sense strand
cagaugauuugcaaaccau

SEQ ID NO: 1536595 - RNA, 19 nt, Homo sapiens
  misc_RNA (1)...(19): siRNA sense strand
cacuaaauaugcacaugau

SEQ ID NO: 1536596 - RNA, 19 nt, Homo sapiens
  misc_RNA (1)...(19): siRNA sense strand
ggaggaggcuguggaaacc

SEQ ID NO: 1536597 - RNA, 19 nt, Homo sapiens
  misc_RNA (1)...(19): siRNA sense strand
gacgagacgggcaccauga

SEQ ID NO: 1536598 - RNA, 19 nt, Homo sapiens
  misc_RNA (1)...(19): siRNA sense strand
gaugauuugcaaaccauug

SEQ ID NO: 1536599 - RNA, 19 nt, Homo sapiens
  misc_RNA (1)...(19): siRNA sense strand
gcacccaaaucuccaaacc

SEQ ID NO: 1536600 - RNA, 19 nt, Homo sapiens
  misc_RNA (1)...(19): siRNA sense strand
caugaagacaagugaagaa

SEQ ID NO: 1536601 - RNA, 19 nt, Homo sapiens
  misc_RNA (1)...(19): siRNA sense strand
gggagcuucugaugagauc

SEQ ID NO: 1536602 - RNA, 19 nt, Homo sapiens
  misc_RNA (1)...(19): siRNA sense strand
caaaccagggagcuucuga

SEQ ID NO: 1536603 - RNA, 19 nt, Homo sapiens
  misc_RNA (1)...(19): siRNA sense strand
ggaggaaccaucggaccaa

SEQ ID NO: 1536604 - RNA, 19 nt, Homo sapiens
  misc_RNA (1)...(19): siRNA sense strand
ugaagacaagugaagaaga

SEQ ID NO: 1536605 - RNA, 19 nt, Homo sapiens
  misc_RNA (1)...(19): siRNA sense strand
gauuugcaaaccauuguug

SEQ ID NO: 1536606 - RNA, 19 nt, Homo sapiens
  misc_RNA (1)...(19): siRNA sense strand
uguggaaaccguugccaaa

SEQ ID NO: 1536607 - RNA, 19 nt, Homo sapiens
  misc_RNA (1)...(19): siRNA sense strand
aaagguuuguacgccauuu

SEQ ID NO: 1536608 - RNA, 19 nt, Homo sapiens
  misc_RNA (1)...(19): siRNA sense strand
cagaagccccugugaauau

SEQ ID NO: 1536609 - RNA, 19 nt, Homo sapiens
  misc_RNA (1)...(19): siRNA sense strand
ucaccaaaucucugcaaga

SEQ ID NO: 1536610 - RNA, 19 nt, Homo sapiens
  misc_RNA (1)...(19): siRNA sense strand
acagaugauuugcaaacca

SEQ ID NO: 1536611 - RNA, 19 nt, Homo sapiens
  misc_RNA (1)...(19): siRNA sense strand
uagcaccaccugaguguag

SEQ ID NO: 1536612 - RNA, 19 nt, Homo sapiens
  misc_RNA (1)...(19): siRNA sense strand
cuaccgacacugcagcauu

SEQ ID NO: 1536613 - RNA, 19 nt, Homo sapiens
  misc_RNA (1)...(19): siRNA sense strand
uuccuuccaucaacagaaa

SEQ ID NO: 1536614 - RNA, 19 nt, Homo sapiens
  misc_RNA (1)...(19): siRNA sense strand
ggcuuccucuucucucaau

SEQ ID NO: 1536615 - RNA, 19 nt, Homo sapiens
  misc_RNA (1)...(19): siRNA sense strand
ggaggugugcgcucaucau

SEQ ID NO: 1536616 - RNA, 19 nt, Homo sapiens
  misc_RNA (1)...(19): siRNA sense strand
accaacaggccaaagguuu

SEQ ID NO: 1536617 - RNA, 19 nt, Homo sapiens
  misc_RNA (1)...(19): siRNA sense strand
gguugcugcuugcuguuag

SEQ ID NO: 1536618 - RNA, 19 nt, Homo sapiens
  misc_RNA (1)...(19): siRNA sense strand
gcaacuucuuugucaauuu

SEQ ID NO: 1536619 - RNA, 19 nt, Homo sapiens
  misc_RNA (1)...(19): siRNA sense strand
caacuucuuugucaauuuc

SEQ ID NO: 1536620 - RNA, 19 nt, Homo sapiens
  misc_RNA (1)...(19): siRNA sense strand
ugggagggcugcgcaagaa

SEQ ID NO: 1536621 - RNA, 19 nt, Homo sapiens
  misc_RNA (1)...(19): siRNA sense strand
ccaaagcgcaccgcccaaa

SEQ ID NO: 1536622 - RNA, 19 nt, Homo sapiens
  misc_RNA (1)...(19): siRNA sense strand
aaagaaaaccccucagaga

SEQ ID NO: 1536623 - RNA, 19 nt, Homo sapiens
  misc_RNA (1)...(19): siRNA sense strand
gcacucccucugcaacuuc

SEQ ID NO: 1536624 - RNA, 19 nt, Homo sapiens
  misc_RNA (1)...(19): siRNA sense strand
aaagcgcaccgcccaaaga

SEQ ID NO: 1536625 - RNA, 19 nt, Homo sapiens
  misc_RNA (1)...(19): siRNA sense strand
gcgcaccgcccaaagaaaa

SEQ ID NO: 1536626 - RNA, 19 nt, Homo sapiens
  misc_RNA (1)...(19): siRNA sense strand
ggcacucccucugcaacuu

SEQ ID NO: 1536627 - RNA, 19 nt, Homo sapiens
  misc_RNA (1)...(19): siRNA sense strand
gagaccuacugcgcugaga

SEQ ID NO: 1536628 - RNA, 19 nt, Homo sapiens
  misc_RNA (1)...(19): siRNA sense strand
gcaagagucgcuucacuua

SEQ ID NO: 1536629 - RNA, 19 nt, Homo sapiens
  misc_RNA (1)...(19): siRNA sense strand
gcacuuuccagauauauuu

SEQ ID NO: 1536630 - RNA, 19 nt, Homo sapiens
  misc_RNA (1)...(19): siRNA sense strand
ccagauauauuucaagagu

SEQ ID NO: 1536631 - RNA, 19 nt, Homo sapiens
  misc_RNA (1)...(19): siRNA sense strand
gaagaaguguccaaaacaa

SEQ ID NO: 1536632 - RNA, 19 nt, Homo sapiens
  misc_RNA (1)...(19): siRNA sense strand
aggaaaggcugaagaagug

SEQ ID NO: 1536633 - RNA, 19 nt, Homo sapiens
  misc_RNA (1)...(19): siRNA sense strand
ggaaugaggagaaggaaag

SEQ ID NO: 1536634 - RNA, 19 nt, Homo sapiens
  misc_RNA (1)...(19): siRNA sense strand
ggacguggccguguacuuc

SEQ ID NO: 1536635 - RNA, 19 nt, Homo sapiens
  misc_RNA (1)...(19): siRNA sense strand
gagaaggaaaggcugaaga

SEQ ID NO: 1536636 - RNA, 19 nt, Homo sapiens
  misc_RNA (1)...(19): siRNA sense strand
ucagagcccaucccuguuu

SEQ ID NO: 1536637 - RNA, 19 nt, Homo sapiens
  misc_RNA (1)...(19): siRNA sense strand
uuccggcacuuuccagaua

SEQ ID NO: 1536638 - RNA, 19 nt, Homo sapiens
  misc_RNA (1)...(19): siRNA sense strand
agaaggaaaggcugaagaa

SEQ ID NO: 1536639 - RNA, 19 nt, Homo sapiens
  misc_RNA (1)...(19): siRNA sense strand
gggaugggaaugaggagaa

SEQ ID NO: 1536640 - RNA, 19 nt, Homo sapiens
  misc_RNA (1)...(19): siRNA sense strand
gaaggaaaggcugaagaag

SEQ ID NO: 1536641 - RNA, 19 nt, Homo sapiens
  misc_RNA (1)...(19): siRNA sense strand
gcaagcacacgggcgagaa

SEQ ID NO: 1536642 - RNA, 19 nt, Homo sapiens
  misc_RNA (1)...(19): siRNA sense strand
gcgcugggauuuucaguuc

SEQ ID NO: 1536643 - RNA, 19 nt, Homo sapiens
  misc_RNA (1)...(19): siRNA sense strand
ccggcacuuuccagauaua

SEQ ID NO: 1536644 - RNA, 19 nt, Homo sapiens
  misc_RNA (1)...(19): siRNA sense strand
ggaugggaaugaggagaag

SEQ ID NO: 1536645 - RNA, 19 nt, Homo sapiens
  misc_RNA (1)...(19): siRNA sense strand
aaggaaaggcugaagaagu

SEQ ID NO: 1536646 - RNA, 19 nt, Homo sapiens
  misc_RNA (1)...(19): siRNA sense strand
gggaaugaggagaaggaaa

SEQ ID NO: 1536647 - RNA, 19 nt, Homo sapiens
  misc_RNA (1)...(19): siRNA sense strand
gccagugucaggcgcguuu

SEQ ID NO: 1536648 - RNA, 19 nt, Homo sapiens
  misc_RNA (1)...(19): siRNA sense strand
gcaugaaguggcugucaag

SEQ ID NO: 1536649 - RNA, 19 nt, Homo sapiens
  misc_RNA (1)...(19): siRNA sense strand
gcauacacaccggcgagaa

SEQ ID NO: 1536650 - RNA, 19 nt, Homo sapiens
  misc_RNA (1)...(19): siRNA sense strand
agagguggcgcaugaagug

SEQ ID NO: 1536651 - RNA, 19 nt, Homo sapiens
  misc_RNA (1)...(19): siRNA sense strand
cgcaugaaguggcugucaa

SEQ ID NO: 1536652 - RNA, 19 nt, Homo sapiens
  misc_RNA (1)...(19): siRNA sense strand
gacuguggccgcaacuuca

SEQ ID NO: 1536653 - RNA, 19 nt, Homo sapiens
  misc_RNA (1)...(19): siRNA sense strand
aagagucgcuucacuuacc

SEQ ID NO: 1536654 - RNA, 19 nt, Homo sapiens
  misc_RNA (1)...(19): siRNA sense strand
ggaaguccguuugaugauu

SEQ ID NO: 1536655 - RNA, 19 nt, Homo sapiens
  misc_RNA (1)...(19): siRNA sense strand
gaaguccguuugaugauuc

SEQ ID NO: 1536656 - RNA, 19 nt, Homo sapiens
  misc_RNA (1)...(19): siRNA sense strand
gaaggaaguccguuugaug

SEQ ID NO: 1536657 - RNA, 19 nt, Homo sapiens
  misc_RNA (1)...(19): siRNA sense strand
caagaacacugugcacaug

SEQ ID NO: 1536658 - RNA, 19 nt, Homo sapiens
  misc_RNA (1)...(19): siRNA sense strand
ucgccuaccucaugaagua

SEQ ID NO: 1536659 - RNA, 19 nt, Homo sapiens
  misc_RNA (1)...(19): siRNA sense strand
aaugaucccugacaucuau

SEQ ID NO: 1536660 - RNA, 19 nt, Homo sapiens
  misc_RNA (1)...(19): siRNA sense strand
ugacaucuaugagaaggaa

SEQ ID NO: 1536661 - RNA, 19 nt, Homo sapiens
  misc_RNA (1)...(19): siRNA sense strand
gagaaggaaguccguuuga

SEQ ID NO: 1536662 - RNA, 19 nt, Homo sapiens
  misc_RNA (1)...(19): siRNA sense strand
ggaaugaucccugacaucu

SEQ ID NO: 1536663 - RNA, 19 nt, Homo sapiens
  misc_RNA (1)...(19): siRNA sense strand
gaaugaucccugacaucua

SEQ ID NO: 1536664 - RNA, 19 nt, Homo sapiens
  misc_RNA (1)...(19): siRNA sense strand
ugacuucuuugacccuauu

SEQ ID NO: 1536665 - RNA, 19 nt, Homo sapiens
  misc_RNA (1)...(19): siRNA sense strand
gcaagaacacugugcacau

SEQ ID NO: 1536666 - RNA, 19 nt, Homo sapiens
  misc_RNA (1)...(19): siRNA sense strand
gaagcagggccguacuuug

SEQ ID NO: 1536667 - RNA, 19 nt, Homo sapiens
  misc_RNA (1)...(19): siRNA sense strand
acuaugaguuccaauuguu

SEQ ID NO: 1536668 - RNA, 19 nt, Homo sapiens
  misc_RNA (1)...(19): siRNA sense strand
ucaccauggucaucaaugu

SEQ ID NO: 1536669 - RNA, 19 nt, Homo sapiens
  misc_RNA (1)...(19): siRNA sense strand
ccacuaugaguuccaauug

SEQ ID NO: 1536670 - RNA, 19 nt, Homo sapiens
  misc_RNA (1)...(19): siRNA sense strand
guagugaacaccuuguaug

SEQ ID NO: 1536671 - RNA, 19 nt, Homo sapiens
  misc_RNA (1)...(19): siRNA sense strand
uguaugaggauauccagua

SEQ ID NO: 1536672 - RNA, 19 nt, Homo sapiens
  misc_RNA (1)...(19): siRNA sense strand
aaggaaguccguuugauga

SEQ ID NO: 1536673 - RNA, 19 nt, Homo sapiens
  misc_RNA (1)...(19): siRNA sense strand
ucccugacaucuaugagaa

SEQ ID NO: 1536674 - RNA, 19 nt, Homo sapiens
  misc_RNA (1)...(19): siRNA sense strand
gaacaccuuguaugaggau

SEQ ID NO: 1536675 - RNA, 19 nt, Homo sapiens
  misc_RNA (1)...(19): siRNA sense strand
guaugaggauauccaguac

SEQ ID NO: 1536676 - RNA, 19 nt, Homo sapiens
  misc_RNA (1)...(19): siRNA sense strand
uagugaacaccuuguauga

SEQ ID NO: 1536677 - RNA, 19 nt, Homo sapiens
  misc_RNA (1)...(19): siRNA sense strand
agaaggaaguccguuugau

SEQ ID NO: 1536678 - RNA, 19 nt, Homo sapiens
  misc_RNA (1)...(19): siRNA sense strand
gguagugaacaccuuguau

SEQ ID NO: 1536679 - RNA, 19 nt, Homo sapiens
  misc_RNA (1)...(19): siRNA sense strand
ugagaaggaaguccguuug

SEQ ID NO: 1536680 - RNA, 19 nt, Homo sapiens
  misc_RNA (1)...(19): siRNA sense strand
acacguggaccaagucaug

SEQ ID NO: 1536681 - RNA, 19 nt, Homo sapiens
  misc_RNA (1)...(19): siRNA sense strand
cacuaugaguuccaauugu

SEQ ID NO: 1536682 - RNA, 19 nt, Homo sapiens
  misc_RNA (1)...(19): siRNA sense strand
ugaagcagggccguacuuu

SEQ ID NO: 1536683 - RNA, 19 nt, Homo sapiens
  misc_RNA (1)...(19): siRNA sense strand
caaugucucaguggaggua

SEQ ID NO: 1536684 - RNA, 19 nt, Homo sapiens
  misc_RNA (1)...(19): siRNA sense strand
ugaaguaccacgccauguc

SEQ ID NO: 1536685 - RNA, 19 nt, Homo sapiens
  misc_RNA (1)...(19): siRNA sense strand
uuugaugauuccacuguga

SEQ ID NO: 1536686 - RNA, 19 nt, Homo sapiens
  misc_RNA (1)...(19): siRNA sense strand
ccaaaagccuguauaucag

SEQ ID NO: 1536687 - RNA, 19 nt, Homo sapiens
  misc_RNA (1)...(19): siRNA sense strand
gugccucgccuaccucaug

SEQ ID NO: 1536688 - RNA, 19 nt, Homo sapiens
  misc_RNA (1)...(19): siRNA sense strand
ucagcggccucucgcagau

SEQ ID NO: 1536689 - RNA, 19 nt, Homo sapiens
  misc_RNA (1)...(19): siRNA sense strand
gaucaccauggucaucaau

SEQ ID NO: 1536690 - RNA, 19 nt, Homo sapiens
  misc_RNA (1)...(19): siRNA sense strand
cuaugaguuccaauuguuu

SEQ ID NO: 1536691 - RNA, 19 nt, Homo sapiens
  misc_RNA (1)...(19): siRNA sense strand
gaagucagcucaucucuua

SEQ ID NO: 1536692 - RNA, 19 nt, Homo sapiens
  misc_RNA (1)...(19): siRNA sense strand
gcaaagaauuccauuagug

SEQ ID NO: 1536693 - RNA, 19 nt, Homo sapiens
  misc_RNA (1)...(19): siRNA sense strand
gcauucagauggaugauaa

SEQ ID NO: 1536694 - RNA, 19 nt, Homo sapiens
  misc_RNA (1)...(19): siRNA sense strand
caacaaggccuaccagaaa

SEQ ID NO: 1536695 - RNA, 19 nt, Homo sapiens
  misc_RNA (1)...(19): siRNA sense strand
gacaagagaucagauggua

SEQ ID NO: 1536696 - RNA, 19 nt, Homo sapiens
  misc_RNA (1)...(19): siRNA sense strand
caugucaucuccugauuua

SEQ ID NO: 1536697 - RNA, 19 nt, Homo sapiens
  misc_RNA (1)...(19): siRNA sense strand
gcaaucagcugcagaaggu

SEQ ID NO: 1536698 - RNA, 19 nt, Homo sapiens
  misc_RNA (1)...(19): siRNA sense strand
ucacauugcugauggauga

SEQ ID NO: 1536699 - RNA, 19 nt, Homo sapiens
  misc_RNA (1)...(19): siRNA sense strand
gcagagagaugugaguuug

SEQ ID NO: 1536700 - RNA, 19 nt, Homo sapiens
  misc_RNA (1)...(19): siRNA sense strand
cagaggaccugaugacauu

SEQ ID NO: 1536701 - RNA, 19 nt, Homo sapiens
  misc_RNA (1)...(19): siRNA sense strand
gaaguggcaugucggacua

SEQ ID NO: 1536702 - RNA, 19 nt, Homo sapiens
  misc_RNA (1)...(19): siRNA sense strand
aguauaagcuuccuaaguu

SEQ ID NO: 1536703 - RNA, 19 nt, Homo sapiens
  misc_RNA (1)...(19): siRNA sense strand
gcucaucucuuaucaccaa

SEQ ID NO: 1536704 - RNA, 19 nt, Homo sapiens
  misc_RNA (1)...(19): siRNA sense strand
caacacaauuucucucuca

SEQ ID NO: 1536705 - RNA, 19 nt, Homo sapiens
  misc_RNA (1)...(19): siRNA sense strand
gaugaaccauugcugugua

SEQ ID NO: 1536706 - RNA, 19 nt, Homo sapiens
  misc_RNA (1)...(19): siRNA sense strand
uggauuaucucaucaagaa

SEQ ID NO: 1536707 - RNA, 19 nt, Homo sapiens
  misc_RNA (1)...(19): siRNA sense strand
gcaugagucugaauaguuc

SEQ ID NO: 1536708 - RNA, 19 nt, Homo sapiens
  misc_RNA (1)...(19): siRNA sense strand
gaagcaaagaauuccauua

SEQ ID NO: 1536709 - RNA, 19 nt, Homo sapiens
  misc_RNA (1)...(19): siRNA sense strand
gaaaagaccaagguuauua

SEQ ID NO: 1536710 - RNA, 19 nt, Homo sapiens
  misc_RNA (1)...(19): siRNA sense strand
guauaagcuuccuaaguuu

SEQ ID NO: 1536711 - RNA, 19 nt, Homo sapiens
  misc_RNA (1)...(19): siRNA sense strand
ccaaauaacucugauucug

SEQ ID NO: 1536712 - RNA, 19 nt, Homo sapiens
  misc_RNA (1)...(19): siRNA sense strand
caagauucaugguuggaaa

SEQ ID NO: 1536713 - RNA, 19 nt, Homo sapiens
  misc_RNA (1)...(19): siRNA sense strand
gaagaucugagcacaguga

SEQ ID NO: 1536714 - RNA, 19 nt, Homo sapiens
  misc_RNA (1)...(19): siRNA sense strand
cagcguaccucccacucua

SEQ ID NO: 1536715 - RNA, 19 nt, Homo sapiens
  misc_RNA (1)...(19): siRNA sense strand
gaacuggcgccacguguau

SEQ ID NO: 1536716 - RNA, 19 nt, Homo sapiens
  misc_RNA (1)...(19): siRNA sense strand
gcacagugauccaagaacu

SEQ ID NO: 1536717 - RNA, 19 nt, Homo sapiens
  misc_RNA (1)...(19): siRNA sense strand
cuaagcaagucaucacauu

SEQ ID NO: 1536718 - RNA, 19 nt, Homo sapiens
  misc_RNA (1)...(19): siRNA sense strand
agaaaguuauucagcauug

SEQ ID NO: 1536719 - RNA, 19 nt, Homo sapiens
  misc_RNA (1)...(19): siRNA sense strand
uaagucacauuucuaguag

SEQ ID NO: 1536720 - RNA, 19 nt, Homo sapiens
  misc_RNA (1)...(19): siRNA sense strand
uaaccaggccucuguagaa

SEQ ID NO: 1536721 - RNA, 19 nt, Homo sapiens
  misc_RNA (1)...(19): siRNA sense strand
caagagcauugccaagaug

SEQ ID NO: 1536722 - RNA, 19 nt, Homo sapiens
  misc_RNA (1)...(19): siRNA sense strand
gaaccugaagcaaagaauu

SEQ ID NO: 1536723 - RNA, 19 nt, Homo sapiens
  misc_RNA (1)...(19): siRNA sense strand
cuaguucucugauguuaga

SEQ ID NO: 1536724 - RNA, 19 nt, Homo sapiens
  misc_RNA (1)...(19): siRNA sense strand
agaccaagguuauuauauc

SEQ ID NO: 1536725 - RNA, 19 nt, Homo sapiens
  misc_RNA (1)...(19): siRNA sense strand
uaacucugauucugcuaaa

SEQ ID NO: 1536726 - RNA, 19 nt, Homo sapiens
  misc_RNA (1)...(19): siRNA sense strand
caagcugcaucacuccuuu

SEQ ID NO: 1536727 - RNA, 19 nt, Homo sapiens
  misc_RNA (1)...(19): siRNA sense strand
gaugugaguuuggacaaga

SEQ ID NO: 1536728 - RNA, 19 nt, Homo sapiens
  misc_RNA (1)...(19): siRNA sense strand
cagaagaaguuuguaaucu

SEQ ID NO: 1536729 - RNA, 19 nt, Homo sapiens
  misc_RNA (1)...(19): siRNA sense strand
caaagaauuccauuagugu

SEQ ID NO: 1536730 - RNA, 19 nt, Homo sapiens
  misc_RNA (1)...(19): siRNA sense strand
gcacaauccagcauucaga

SEQ ID NO: 1536731 - RNA, 19 nt, Homo sapiens
  misc_RNA (1)...(19): siRNA sense strand
caucaagaauggaucaaag

SEQ ID NO: 1536732 - RNA, 19 nt, Homo sapiens
  misc_RNA (1)...(19): siRNA sense strand
ugagggagcaucuuccuuu

SEQ ID NO: 1536733 - RNA, 19 nt, Homo sapiens
  misc_RNA (1)...(19): siRNA sense strand
cagauucuacuuuccauaa

SEQ ID NO: 1536734 - RNA, 19 nt, Homo sapiens
  misc_RNA (1)...(19): siRNA sense strand
cagaaggucuuaaaacauu

SEQ ID NO: 1536735 - RNA, 19 nt, Homo sapiens
  misc_RNA (1)...(19): siRNA sense strand
caacaccuccuuccauugu

SEQ ID NO: 1536736 - RNA, 19 nt, Homo sapiens
  misc_RNA (1)...(19): siRNA sense strand
auaaaucccuuacccuaau

SEQ ID NO: 1536737 - RNA, 19 nt, Homo sapiens
  misc_RNA (1)...(19): siRNA sense strand
cccagugucuucugaugua

SEQ ID NO: 1536738 - RNA, 19 nt, Homo sapiens
  misc_RNA (1)...(19): siRNA sense strand
gcauguuggucaaguaaag

SEQ ID NO: 1536739 - RNA, 19 nt, Homo sapiens
  misc_RNA (1)...(19): siRNA sense strand
gcagaagaaguuuguaauc

SEQ ID NO: 1536740 - RNA, 19 nt, Homo sapiens
  misc_RNA (1)...(19): siRNA sense strand
gugcaaggcaggauugaaa

SEQ ID NO: 1536741 - RNA, 19 nt, Homo sapiens
  misc_RNA (1)...(19): siRNA sense strand
aagaauggaucaaagaaag

SEQ ID NO: 1536742 - RNA, 19 nt, Homo sapiens
  misc_RNA (1)...(19): siRNA sense strand
caagaauggaucaaagaaa

SEQ ID NO: 1536743 - RNA, 19 nt, Homo sapiens
  misc_RNA (1)...(19): siRNA sense strand
gagcaugagucugaauagu

SEQ ID NO: 1536744 - RNA, 19 nt, Homo sapiens
  misc_RNA (1)...(19): siRNA sense strand
gagcugccuuuacuagcaa

SEQ ID NO: 1536745 - RNA, 19 nt, Homo sapiens
  misc_RNA (1)...(19): siRNA sense strand
ccaagaacuuaaugucauc

SEQ ID NO: 1536746 - RNA, 19 nt, Homo sapiens
  misc_RNA (1)...(19): siRNA sense strand
caagagaucagaugguauc

SEQ ID NO: 1536747 - RNA, 19 nt, Homo sapiens
  misc_RNA (1)...(19): siRNA sense strand
gaauggaucaaagaaaguu

SEQ ID NO: 1536748 - RNA, 19 nt, Homo sapiens
  misc_RNA (1)...(19): siRNA sense strand
ugucaucaauaacaucuug

SEQ ID NO: 1536749 - RNA, 19 nt, Homo sapiens
  misc_RNA (1)...(19): siRNA sense strand
gaaacacuuccacucaaga

SEQ ID NO: 1536750 - RNA, 19 nt, Homo sapiens
  misc_RNA (1)...(19): siRNA sense strand
uauaaaucccuuacccuaa

SEQ ID NO: 1536751 - RNA, 19 nt, Homo sapiens
  misc_RNA (1)...(19): siRNA sense strand
gauaaaauccucaagacaa

SEQ ID NO: 1536752 - RNA, 19 nt, Homo sapiens
  misc_RNA (1)...(19): siRNA sense strand
ccaggccucuguagaaaca

SEQ ID NO: 1536753 - RNA, 19 nt, Homo sapiens
  misc_RNA (1)...(19): siRNA sense strand
gauuaucucaucaagaaug

SEQ ID NO: 1536754 - RNA, 19 nt, Homo sapiens
  misc_RNA (1)...(19): siRNA sense strand
acagugauccaagaacuua

SEQ ID NO: 1536755 - RNA, 19 nt, Homo sapiens
  misc_RNA (1)...(19): siRNA sense strand
ccagcauguuggucaagua

SEQ ID NO: 1536756 - RNA, 19 nt, Homo sapiens
  misc_RNA (1)...(19): siRNA sense strand
gucagaagcagaagaaguu

SEQ ID NO: 1536757 - RNA, 19 nt, Homo sapiens
  misc_RNA (1)...(19): siRNA sense strand
ccauugcuguguaaagaga

SEQ ID NO: 1536758 - RNA, 19 nt, Homo sapiens
  misc_RNA (1)...(19): siRNA sense strand
ccagagaagucagcucauc

SEQ ID NO: 1536759 - RNA, 19 nt, Homo sapiens
  misc_RNA (1)...(19): siRNA sense strand
guagaaacacucugucucu

SEQ ID NO: 1536760 - RNA, 19 nt, Homo sapiens
  misc_RNA (1)...(19): siRNA sense strand
uccaaucacuugcuuguca

SEQ ID NO: 1536761 - RNA, 19 nt, Homo sapiens
  misc_RNA (1)...(19): siRNA sense strand
acaagagcauugccaagau

SEQ ID NO: 1536762 - RNA, 19 nt, Homo sapiens
  misc_RNA (1)...(19): siRNA sense strand
guaccucccacucuauauu

SEQ ID NO: 1536763 - RNA, 19 nt, Homo sapiens
  misc_RNA (1)...(19): siRNA sense strand
guucucugauguuagauau

SEQ ID NO: 1536764 - RNA, 19 nt, Homo sapiens
  misc_RNA (1)...(19): siRNA sense strand
uugccaagauguucauuug

SEQ ID NO: 1536765 - RNA, 19 nt, Homo sapiens
  misc_RNA (1)...(19): siRNA sense strand
guaucaaagucagauucua

SEQ ID NO: 1536766 - RNA, 19 nt, Homo sapiens
  misc_RNA (1)...(19): siRNA sense strand
aaugauagccucaaucuac

SEQ ID NO: 1536767 - RNA, 19 nt, Homo sapiens
  misc_RNA (1)...(19): siRNA sense strand
cuaccuccuuuaaagauga

SEQ ID NO: 1536768 - RNA, 19 nt, Homo sapiens
  misc_RNA (1)...(19): siRNA sense strand
uaaaucccuuacccuaaug

SEQ ID NO: 1536769 - RNA, 19 nt, Homo sapiens
  misc_RNA (1)...(19): siRNA sense strand
ucaacaaggccuaccagaa

SEQ ID NO: 1536770 - RNA, 19 nt, Homo sapiens
  misc_RNA (1)...(19): siRNA sense strand
gauugaaacaagagcauug

SEQ ID NO: 1536771 - RNA, 19 nt, Homo sapiens
  misc_RNA (1)...(19): siRNA sense strand
gagcacagugauccaagaa

SEQ ID NO: 1536772 - RNA, 19 nt, Homo sapiens
  misc_RNA (1)...(19): siRNA sense strand
cugcaucacuccuuugcuu

SEQ ID NO: 1536773 - RNA, 19 nt, Homo sapiens
  misc_RNA (1)...(19): siRNA sense strand
ucaaugaccaugggaagaa

SEQ ID NO: 1536774 - RNA, 19 nt, Homo sapiens
  misc_RNA (1)...(19): siRNA sense strand
ggaaaaugauagccucaau

SEQ ID NO: 1536775 - RNA, 19 nt, Homo sapiens
  misc_RNA (1)...(19): siRNA sense strand
cgagugaaggagauuguaa

SEQ ID NO: 1536776 - RNA, 19 nt, Homo sapiens
  misc_RNA (1)...(19): siRNA sense strand
ucaagaauggaucaaagaa

SEQ ID NO: 1536777 - RNA, 19 nt, Homo sapiens
  misc_RNA (1)...(19): siRNA sense strand
aaccauugcuguguaaaga

SEQ ID NO: 1536778 - RNA, 19 nt, Homo sapiens
  misc_RNA (1)...(19): siRNA sense strand
gaaccauugcuguguaaag

SEQ ID NO: 1536779 - RNA, 19 nt, Homo sapiens
  misc_RNA (1)...(19): siRNA sense strand
aagcaaagaauuccauuag

SEQ ID NO: 1536780 - RNA, 19 nt, Homo sapiens
  misc_RNA (1)...(19): siRNA sense strand
gcaacaccuccuuccauug

SEQ ID NO: 1536781 - RNA, 19 nt, Homo sapiens
  misc_RNA (1)...(19): siRNA sense strand
gaccaagguuauuauaucc

SEQ ID NO: 1536782 - RNA, 19 nt, Homo sapiens
  misc_RNA (1)...(19): siRNA sense strand
caucucuuaucaccaauuc

SEQ ID NO: 1536783 - RNA, 19 nt, Homo sapiens
  misc_RNA (1)...(19): siRNA sense strand
ucagauggaugauaaaauc

SEQ ID NO: 1536784 - RNA, 19 nt, Homo sapiens
  misc_RNA (1)...(19): siRNA sense strand
agagagaugugaguuugga

SEQ ID NO: 1536785 - RNA, 19 nt, Homo sapiens
  misc_RNA (1)...(19): siRNA sense strand
aagcagaagaaguuuguaa

SEQ ID NO: 1536786 - RNA, 19 nt, Homo sapiens
  misc_RNA (1)...(19): siRNA sense strand
caacagaggaccugaugac

SEQ ID NO: 1536787 - RNA, 19 nt, Homo sapiens
  misc_RNA (1)...(19): siRNA sense strand
cuacagaaacuauguuguc

SEQ ID NO: 1536788 - RNA, 19 nt, Homo sapiens
  misc_RNA (1)...(19): siRNA sense strand
ccagcacaauccagcauuc

SEQ ID NO: 1536789 - RNA, 19 nt, Homo sapiens
  misc_RNA (1)...(19): siRNA sense strand
uccaagaacuuaaugucau

SEQ ID NO: 1536790 - RNA, 19 nt, Homo sapiens
  misc_RNA (1)...(19): siRNA sense strand
caucacuccuuugcuucua

SEQ ID NO: 1536791 - RNA, 19 nt, Homo sapiens
  misc_RNA (1)...(19): siRNA sense strand
gcccaggauuguaauauua

SEQ ID NO: 1536792 - RNA, 19 nt, Homo sapiens
  misc_RNA (1)...(19): siRNA sense strand
gaaagaggcuguggcagau

SEQ ID NO: 1536793 - RNA, 19 nt, Homo sapiens
  misc_RNA (1)...(19): siRNA sense strand
uggagaaccugaucuuaaa

SEQ ID NO: 1536794 - RNA, 19 nt, Homo sapiens
  misc_RNA (1)...(19): siRNA sense strand
caaagcaaccaucguacua

SEQ ID NO: 1536795 - RNA, 19 nt, Homo sapiens
  misc_RNA (1)...(19): siRNA sense strand
cauacacagucuucgaaua

SEQ ID NO: 1536796 - RNA, 19 nt, Homo sapiens
  misc_RNA (1)...(19): siRNA sense strand
gcagauaggaccacguuug

SEQ ID NO: 1536797 - RNA, 19 nt, Homo sapiens
  misc_RNA (1)...(19): siRNA sense strand
agaaacugcuggaguauca

SEQ ID NO: 1536798 - RNA, 19 nt, Homo sapiens
  misc_RNA (1)...(19): siRNA sense strand
ggagacggcucagaaacug

SEQ ID NO: 1536799 - RNA, 19 nt, Homo sapiens
  misc_RNA (1)...(19): siRNA sense strand
gaaauacaggcuugucaau

SEQ ID NO: 1536800 - RNA, 19 nt, Homo sapiens
  misc_RNA (1)...(19): siRNA sense strand
aauacaggcuugucaaugu

SEQ ID NO: 1536801 - RNA, 19 nt, Homo sapiens
  misc_RNA (1)...(19): siRNA sense strand
aaacaacaauagcaaugug

SEQ ID NO: 1536802 - RNA, 19 nt, Homo sapiens
  misc_RNA (1)...(19): siRNA sense strand
gcucugaccuauguccaaa

SEQ ID NO: 1536803 - RNA, 19 nt, Homo sapiens
  misc_RNA (1)...(19): siRNA sense strand
ugaagaggauugcaucaag

SEQ ID NO: 1536804 - RNA, 19 nt, Homo sapiens
  misc_RNA (1)...(19): siRNA sense strand
gcauagagacaacgacaau

SEQ ID NO: 1536805 - RNA, 19 nt, Homo sapiens
  misc_RNA (1)...(19): siRNA sense strand
gaacaucgucagggucauu

SEQ ID NO: 1536806 - RNA, 19 nt, Homo sapiens
  misc_RNA (1)...(19): siRNA sense strand
caauguggcucugcaaaca

SEQ ID NO: 1536807 - RNA, 19 nt, Homo sapiens
  misc_RNA (1)...(19): siRNA sense strand
cucagaaacugcuggagua

SEQ ID NO: 1536808 - RNA, 19 nt, Homo sapiens
  misc_RNA (1)...(19): siRNA sense strand
gugggcaacugcugaaaga

SEQ ID NO: 1536809 - RNA, 19 nt, Homo sapiens
  misc_RNA (1)...(19): siRNA sense strand
gaagagaaucgacccucaa

SEQ ID NO: 1536810 - RNA, 19 nt, Homo sapiens
  misc_RNA (1)...(19): siRNA sense strand
gaaccacaucuucgaguug

SEQ ID NO: 1536811 - RNA, 19 nt, Homo sapiens
  misc_RNA (1)...(19): siRNA sense strand
gagaaucgacccucaaacu

SEQ ID NO: 1536812 - RNA, 19 nt, Homo sapiens
  misc_RNA (1)...(19): siRNA sense strand
ugaccuauguccaaagcaa

SEQ ID NO: 1536813 - RNA, 19 nt, Homo sapiens
  misc_RNA (1)...(19): siRNA sense strand
gcacuugcauagagacaac

SEQ ID NO: 1536814 - RNA, 19 nt, Homo sapiens
  misc_RNA (1)...(19): siRNA sense strand
gagagugggaucauuaauc

SEQ ID NO: 1536815 - RNA, 19 nt, Homo sapiens
  misc_RNA (1)...(19): siRNA sense strand
cagcugacuuggagcaguu

SEQ ID NO: 1536816 - RNA, 19 nt, Homo sapiens
  misc_RNA (1)...(19): siRNA sense strand
gcucauccagcccuucuuu

SEQ ID NO: 1536817 - RNA, 19 nt, Homo sapiens
  misc_RNA (1)...(19): siRNA sense strand
gagaaccugaucuuaaaug

SEQ ID NO: 1536818 - RNA, 19 nt, Homo sapiens
  misc_RNA (1)...(19): siRNA sense strand
guccaaagcaaccaucgua

SEQ ID NO: 1536819 - RNA, 19 nt, Homo sapiens
  misc_RNA (1)...(19): siRNA sense strand
aaccugaucuuaaaugagu

SEQ ID NO: 1536820 - RNA, 19 nt, Homo sapiens
  misc_RNA (1)...(19): siRNA sense strand
agaaccugaucuuaaauga

SEQ ID NO: 1536821 - RNA, 19 nt, Homo sapiens
  misc_RNA (1)...(19): siRNA sense strand
ggaggagaaccacaucuuc

SEQ ID NO: 1536822 - RNA, 19 nt, Homo sapiens
  misc_RNA (1)...(19): siRNA sense strand
ccugacagccuccucauga

SEQ ID NO: 1536823 - RNA, 19 nt, Homo sapiens
  misc_RNA (1)...(19): siRNA sense strand
gaaaacaacaauagcaaug

SEQ ID NO: 1536824 - RNA, 19 nt, Homo sapiens
  misc_RNA (1)...(19): siRNA sense strand
gagagaaacuuggggaaga

SEQ ID NO: 1536825 - RNA, 19 nt, Homo sapiens
  misc_RNA (1)...(19): siRNA sense strand
cuggagaaccugaucuuaa

SEQ ID NO: 1536826 - RNA, 19 nt, Homo sapiens
  misc_RNA (1)...(19): siRNA sense strand
caucgagagugggaucauu

SEQ ID NO: 1536827 - RNA, 19 nt, Homo sapiens
  misc_RNA (1)...(19): siRNA sense strand
aaacuggagagauuuauca

SEQ ID NO: 1536828 - RNA, 19 nt, Homo sapiens
  misc_RNA (1)...(19): siRNA sense strand
ggaccaggacccauacaca

SEQ ID NO: 1536829 - RNA, 19 nt, Homo sapiens
  misc_RNA (1)...(19): siRNA sense strand
aaacugcuggaguaucaua

SEQ ID NO: 1536830 - RNA, 19 nt, Homo sapiens
  misc_RNA (1)...(19): siRNA sense strand
aagcaaccaucguacuaau

SEQ ID NO: 1536831 - RNA, 19 nt, Homo sapiens
  misc_RNA (1)...(19): siRNA sense strand
aagagcaggucaagcugaa

SEQ ID NO: 1536832 - RNA, 19 nt, Homo sapiens
  misc_RNA (1)...(19): siRNA sense strand
gaacccaaaggaugcugaa

SEQ ID NO: 1536833 - RNA, 19 nt, Homo sapiens
  misc_RNA (1)...(19): siRNA sense strand
agaaccacaucuucgaguu

SEQ ID NO: 1536834 - RNA, 19 nt, Homo sapiens
  misc_RNA (1)...(19): siRNA sense strand
cuaccaggcucugaccuau

SEQ ID NO: 1536835 - RNA, 19 nt, Homo sapiens
  misc_RNA (1)...(19): siRNA sense strand
gcaaccaucguacuaaugc

SEQ ID NO: 1536836 - RNA, 19 nt, Homo sapiens
  misc_RNA (1)...(19): siRNA sense strand
ggagaaccugaucuuaaau

SEQ ID NO: 1536837 - RNA, 19 nt, Homo sapiens
  misc_RNA (1)...(19): siRNA sense strand
ggaacucagcugacuugga

SEQ ID NO: 1536838 - RNA, 19 nt, Homo sapiens
  misc_RNA (1)...(19): siRNA sense strand
caggaacucagcugacuug

SEQ ID NO: 1536839 - RNA, 19 nt, Homo sapiens
  misc_RNA (1)...(19): siRNA sense strand
auccagcccuucuuugaaa

SEQ ID NO: 1536840 - RNA, 19 nt, Homo sapiens
  misc_RNA (1)...(19): siRNA sense strand
gggaggagaaccacaucuu

SEQ ID NO: 1536841 - RNA, 19 nt, Homo sapiens
  misc_RNA (1)...(19): siRNA sense strand
aaccacaucuucgaguuga

SEQ ID NO: 1536842 - RNA, 19 nt, Homo sapiens
  misc_RNA (1)...(19): siRNA sense strand
cccaaaggaugcugaagag

SEQ ID NO: 1536843 - RNA, 19 nt, Homo sapiens
  misc_RNA (1)...(19): siRNA sense strand
aaagcaaccaucguacuaa

SEQ ID NO: 1536844 - RNA, 19 nt, Homo sapiens
  misc_RNA (1)...(19): siRNA sense strand
agaaggcuuuaucugcaaa

SEQ ID NO: 1536845 - RNA, 19 nt, Homo sapiens
  misc_RNA (1)...(19): siRNA sense strand
ggucggccaucacccucaa

SEQ ID NO: 1536846 - RNA, 19 nt, Homo sapiens
  misc_RNA (1)...(19): siRNA sense strand
ugcccaggauuguaauauu

SEQ ID NO: 1536847 - RNA, 19 nt, Homo sapiens
  misc_RNA (1)...(19): siRNA sense strand
gaaccugaucuuaaaugag

SEQ ID NO: 1536848 - RNA, 19 nt, Homo sapiens
  misc_RNA (1)...(19): siRNA sense strand
gcuggagacggcucagaaa

SEQ ID NO: 1536849 - RNA, 19 nt, Homo sapiens
  misc_RNA (1)...(19): siRNA sense strand
gaaauccagaaccgucuca

SEQ ID NO: 1536850 - RNA, 19 nt, Homo sapiens
  misc_RNA (1)...(19): siRNA sense strand
gcaauguggcucugcaaac

SEQ ID NO: 1536851 - RNA, 19 nt, Homo sapiens
  misc_RNA (1)...(19): siRNA sense strand
ggacccauacacagucuuc

SEQ ID NO: 1536852 - RNA, 19 nt, Homo sapiens
  misc_RNA (1)...(19): siRNA sense strand
ucauccagcccuucuuuga

SEQ ID NO: 1536853 - RNA, 19 nt, Homo sapiens
  misc_RNA (1)...(19): siRNA sense strand
aggaacgccuggcugaaga

SEQ ID NO: 1536854 - RNA, 19 nt, Homo sapiens
  misc_RNA (1)...(19): siRNA sense strand
cauccagcccuucuuugaa

SEQ ID NO: 1536855 - RNA, 19 nt, Homo sapiens
  misc_RNA (1)...(19): siRNA sense strand
gagcggcugacucugagaa

SEQ ID NO: 1536856 - RNA, 19 nt, Homo sapiens
  misc_RNA (1)...(19): siRNA sense strand
aagagaaucgacccucaaa

SEQ ID NO: 1536857 - RNA, 19 nt, Homo sapiens
  misc_RNA (1)...(19): siRNA sense strand
gcggcugacucugagaaga

SEQ ID NO: 1536858 - RNA, 19 nt, Homo sapiens
  misc_RNA (1)...(19): siRNA sense strand
aagaggcuguggcagauag

SEQ ID NO: 1536859 - RNA, 19 nt, Homo sapiens
  misc_RNA (1)...(19): siRNA sense strand
agaaauacaggcuugucaa

SEQ ID NO: 1536860 - RNA, 19 nt, Homo sapiens
  misc_RNA (1)...(19): siRNA sense strand
cagaaauacaggcuuguca

SEQ ID NO: 1536861 - RNA, 19 nt, Homo sapiens
  misc_RNA (1)...(19): siRNA sense strand
cccucaaacuggagagauu

SEQ ID NO: 1536862 - RNA, 19 nt, Homo sapiens
  misc_RNA (1)...(19): siRNA sense strand
cagacacgguccugaucga

SEQ ID NO: 1536863 - RNA, 19 nt, Homo sapiens
  misc_RNA (1)...(19): siRNA sense strand
gaaaauggaccuguucuac

SEQ ID NO: 1536864 - RNA, 19 nt, Homo sapiens
  misc_RNA (1)...(19): siRNA sense strand
accaggcucugaccuaugu

SEQ ID NO: 1536865 - RNA, 19 nt, Homo sapiens
  misc_RNA (1)...(19): siRNA sense strand
aaugugcccaggauuguaa

SEQ ID NO: 1536866 - RNA, 19 nt, Homo sapiens
  misc_RNA (1)...(19): siRNA sense strand
acacagucuucgaauacau

SEQ ID NO: 1536867 - RNA, 19 nt, Homo sapiens
  misc_RNA (1)...(19): siRNA sense strand
aagaauugauccagucacu

SEQ ID NO: 1536868 - RNA, 19 nt, Homo sapiens
  misc_RNA (1)...(19): siRNA sense strand
cugacagccuccucaugaa

SEQ ID NO: 1536869 - RNA, 19 nt, Homo sapiens
  misc_RNA (1)...(19): siRNA sense strand
caucaagcagggcuggauu

SEQ ID NO: 1536870 - RNA, 19 nt, Homo sapiens
  misc_RNA (1)...(19): siRNA sense strand
cggcugacucugagaagaa

SEQ ID NO: 1536871 - RNA, 19 nt, Homo sapiens
  misc_RNA (1)...(19): siRNA sense strand
caaacuggagagauuuauc

SEQ ID NO: 1536872 - RNA, 19 nt, Homo sapiens
  misc_RNA (1)...(19): siRNA sense strand
ggaguaucauaggaacauc

SEQ ID NO: 1536873 - RNA, 19 nt, Homo sapiens
  misc_RNA (1)...(19): siRNA sense strand
auacacagucuucgaauac

SEQ ID NO: 1536874 - RNA, 19 nt, Homo sapiens
  misc_RNA (1)...(19): siRNA sense strand
ugacuuggagcaguuguau

SEQ ID NO: 1536875 - RNA, 19 nt, Homo sapiens
  misc_RNA (1)...(19): siRNA sense strand
gaaccgccugggcuacaau

SEQ ID NO: 1536876 - RNA, 19 nt, Homo sapiens
  misc_RNA (1)...(19): siRNA sense strand
gagauggcaguuccugaca

SEQ ID NO: 1536877 - RNA, 19 nt, Homo sapiens
  misc_RNA (1)...(19): siRNA sense strand
cagauaggaccacguuugg

SEQ ID NO: 1536878 - RNA, 19 nt, Homo sapiens
  misc_RNA (1)...(19): siRNA sense strand
aaauacaggcuugucaaug

SEQ ID NO: 1536879 - RNA, 19 nt, Homo sapiens
  misc_RNA (1)...(19): siRNA sense strand
auagagacaacgacaaugu

SEQ ID NO: 1536880 - RNA, 19 nt, Homo sapiens
  misc_RNA (1)...(19): siRNA sense strand
ccucaaacuggagagauuu

SEQ ID NO: 1536881 - RNA, 19 nt, Homo sapiens
  misc_RNA (1)...(19): siRNA sense strand
cgacaaugugcccaggauu

SEQ ID NO: 1536882 - RNA, 19 nt, Homo sapiens
  misc_RNA (1)...(19): siRNA sense strand
ccuggagaaccugaucuua

SEQ ID NO: 1536883 - RNA, 19 nt, Homo sapiens
  misc_RNA (1)...(19): siRNA sense strand
ugacuggccacccgaaucu

SEQ ID NO: 1536884 - RNA, 19 nt, Homo sapiens
  misc_RNA (1)...(19): siRNA sense strand
ucgagagugggaucauuaa

SEQ ID NO: 1536885 - RNA, 19 nt, Homo sapiens
  misc_RNA (1)...(19): siRNA sense strand
ugaaccgccugggcuacaa

SEQ ID NO: 1536886 - RNA, 19 nt, Homo sapiens
  misc_RNA (1)...(19): siRNA sense strand
ucgaguugaugcagaacau

SEQ ID NO: 1536887 - RNA, 19 nt, Homo sapiens
  misc_RNA (1)...(19): siRNA sense strand
auacaggcuugucaauguc

SEQ ID NO: 1536888 - RNA, 19 nt, Homo sapiens
  misc_RNA (1)...(19): siRNA sense strand
gaagcaaggucuagaaaug

SEQ ID NO: 1536889 - RNA, 19 nt, Homo sapiens
  misc_RNA (1)...(19): siRNA sense strand
gaauaaagcugugggaaga

SEQ ID NO: 1536890 - RNA, 19 nt, Homo sapiens
  misc_RNA (1)...(19): siRNA sense strand
uaaagugucuucuggauga

SEQ ID NO: 1536891 - RNA, 19 nt, Homo sapiens
  misc_RNA (1)...(19): siRNA sense strand
ucaaaucccuccagaagaa

SEQ ID NO: 1536892 - RNA, 19 nt, Homo sapiens
  misc_RNA (1)...(19): siRNA sense strand
gaucaaaucaggaaagaaa

SEQ ID NO: 1536893 - RNA, 19 nt, Homo sapiens
  misc_RNA (1)...(19): siRNA sense strand
caggaaagcugcucugaga

SEQ ID NO: 1536894 - RNA, 19 nt, Homo sapiens
  misc_RNA (1)...(19): siRNA sense strand
gguagaagaugcagauaug

SEQ ID NO: 1536895 - RNA, 19 nt, Homo sapiens
  misc_RNA (1)...(19): siRNA sense strand
gagaacagaagaacuagua

SEQ ID NO: 1536896 - RNA, 19 nt, Homo sapiens
  misc_RNA (1)...(19): siRNA sense strand
cagaagcucuugucacuga

SEQ ID NO: 1536897 - RNA, 19 nt, Homo sapiens
  misc_RNA (1)...(19): siRNA sense strand
gaagaacuaguaaugauga

SEQ ID NO: 1536898 - RNA, 19 nt, Homo sapiens
  misc_RNA (1)...(19): siRNA sense strand
caucaucucuaaauugcua

SEQ ID NO: 1536899 - RNA, 19 nt, Homo sapiens
  misc_RNA (1)...(19): siRNA sense strand
ccaaggacguuauuauuag

SEQ ID NO: 1536900 - RNA, 19 nt, Homo sapiens
  misc_RNA (1)...(19): siRNA sense strand
ggaaagcugcucugagaaa

SEQ ID NO: 1536901 - RNA, 19 nt, Homo sapiens
  misc_RNA (1)...(19): siRNA sense strand
aaaccuagauggaauuuca

SEQ ID NO: 1536902 - RNA, 19 nt, Homo sapiens
  misc_RNA (1)...(19): siRNA sense strand
ggacuuggaugagaaagau

SEQ ID NO: 1536903 - RNA, 19 nt, Homo sapiens
  misc_RNA (1)...(19): siRNA sense strand
cagauaugcuugagaguga

SEQ ID NO: 1536904 - RNA, 19 nt, Homo sapiens
  misc_RNA (1)...(19): siRNA sense strand
gaagagggaucagaugaag

SEQ ID NO: 1536905 - RNA, 19 nt, Homo sapiens
  misc_RNA (1)...(19): siRNA sense strand
gacuaaagaugcagcagaa

SEQ ID NO: 1536906 - RNA, 19 nt, Homo sapiens
  misc_RNA (1)...(19): siRNA sense strand
gauaaucucugaguguuca

SEQ ID NO: 1536907 - RNA, 19 nt, Homo sapiens
  misc_RNA (1)...(19): siRNA sense strand
cagaagaacuaguaaugau

SEQ ID NO: 1536908 - RNA, 19 nt, Homo sapiens
  misc_RNA (1)...(19): siRNA sense strand
cagaugaacccaaauuaaa

SEQ ID NO: 1536909 - RNA, 19 nt, Homo sapiens
  misc_RNA (1)...(19): siRNA sense strand
ccagguccaucaucucuaa

SEQ ID NO: 1536910 - RNA, 19 nt, Homo sapiens
  misc_RNA (1)...(19): siRNA sense strand
cagaugagcaggagacuaa

SEQ ID NO: 1536911 - RNA, 19 nt, Homo sapiens
  misc_RNA (1)...(19): siRNA sense strand
gagcaacgcgaucugcaua

SEQ ID NO: 1536912 - RNA, 19 nt, Homo sapiens
  misc_RNA (1)...(19): siRNA sense strand
gcagaagaauguaaagaac

SEQ ID NO: 1536913 - RNA, 19 nt, Homo sapiens
  misc_RNA (1)...(19): siRNA sense strand
guaaacacaaccaggauuu

SEQ ID NO: 1536914 - RNA, 19 nt, Homo sapiens
  misc_RNA (1)...(19): siRNA sense strand
ggaagacauugaggacgua

SEQ ID NO: 1536915 - RNA, 19 nt, Homo sapiens
  misc_RNA (1)...(19): siRNA sense strand
ugcagaaacucaauaaaga

SEQ ID NO: 1536916 - RNA, 19 nt, Homo sapiens
  misc_RNA (1)...(19): siRNA sense strand
gagaaaagauacuuaggaa

SEQ ID NO: 1536917 - RNA, 19 nt, Homo sapiens
  misc_RNA (1)...(19): siRNA sense strand
gaacagaagaacuaguaau

SEQ ID NO: 1536918 - RNA, 19 nt, Homo sapiens
  misc_RNA (1)...(19): siRNA sense strand
cuggaugaaugcauacuua

SEQ ID NO: 1536919 - RNA, 19 nt, Homo sapiens
  misc_RNA (1)...(19): siRNA sense strand
caucacgucucucugaaga

SEQ ID NO: 1536920 - RNA, 19 nt, Homo sapiens
  misc_RNA (1)...(19): siRNA sense strand
gaugauccacuguauggua

SEQ ID NO: 1536921 - RNA, 19 nt, Homo sapiens
  misc_RNA (1)...(19): siRNA sense strand
ggucuagaaaugagaauaa

SEQ ID NO: 1536922 - RNA, 19 nt, Homo sapiens
  misc_RNA (1)...(19): siRNA sense strand
ucuaaaggcuacuaucuca

SEQ ID NO: 1536923 - RNA, 19 nt, Homo sapiens
  misc_RNA (1)...(19): siRNA sense strand
ugagagagauugaugaaaa

SEQ ID NO: 1536924 - RNA, 19 nt, Homo sapiens
  misc_RNA (1)...(19): siRNA sense strand
ugaaggacuuggaugagaa

SEQ ID NO: 1536925 - RNA, 19 nt, Homo sapiens
  misc_RNA (1)...(19): siRNA sense strand
uaagagaaacauugaguug

SEQ ID NO: 1536926 - RNA, 19 nt, Homo sapiens
  misc_RNA (1)...(19): siRNA sense strand
ugacugcuguuucugaaga

SEQ ID NO: 1536927 - RNA, 19 nt, Homo sapiens
  misc_RNA (1)...(19): siRNA sense strand
ccacaucacgucucucuga

SEQ ID NO: 1536928 - RNA, 19 nt, Homo sapiens
  misc_RNA (1)...(19): siRNA sense strand
acagagaacagaagaacua

SEQ ID NO: 1536929 - RNA, 19 nt, Homo sapiens
  misc_RNA (1)...(19): siRNA sense strand
uccaaggacguuauuauua

SEQ ID NO: 1536930 - RNA, 19 nt, Homo sapiens
  misc_RNA (1)...(19): siRNA sense strand
ucagaugaacccaaauuaa

SEQ ID NO: 1536931 - RNA, 19 nt, Homo sapiens
  misc_RNA (1)...(19): siRNA sense strand
caacuugaacucugguaaa

SEQ ID NO: 1536932 - RNA, 19 nt, Homo sapiens
  misc_RNA (1)...(19): siRNA sense strand
gcaacgcgaucugcauaau

SEQ ID NO: 1536933 - RNA, 19 nt, Homo sapiens
  misc_RNA (1)...(19): siRNA sense strand
ccugugauguggaaagaaa

SEQ ID NO: 1536934 - RNA, 19 nt, Homo sapiens
  misc_RNA (1)...(19): siRNA sense strand
uaaagaugcagcagaagaa

SEQ ID NO: 1536935 - RNA, 19 nt, Homo sapiens
  misc_RNA (1)...(19): siRNA sense strand
agaauacaauagcagauga

SEQ ID NO: 1536936 - RNA, 19 nt, Homo sapiens
  misc_RNA (1)...(19): siRNA sense strand
gcuacuaucucacuaaagc

SEQ ID NO: 1536937 - RNA, 19 nt, Homo sapiens
  misc_RNA (1)...(19): siRNA sense strand
gaaaagauacuuaggaaca

SEQ ID NO: 1536938 - RNA, 19 nt, Homo sapiens
  misc_RNA (1)...(19): siRNA sense strand
gcaggagacuaaagaugca

SEQ ID NO: 1536939 - RNA, 19 nt, Homo sapiens
  misc_RNA (1)...(19): siRNA sense strand
gguccaucaucucuaaauu

SEQ ID NO: 1536940 - RNA, 19 nt, Homo sapiens
  misc_RNA (1)...(19): siRNA sense strand
ggaugaaugcauacuuaaa

SEQ ID NO: 1536941 - RNA, 19 nt, Homo sapiens
  misc_RNA (1)...(19): siRNA sense strand
gaaagcaguaauacagaga

SEQ ID NO: 1536942 - RNA, 19 nt, Homo sapiens
  misc_RNA (1)...(19): siRNA sense strand
gcagaaacucaauaaagau

SEQ ID NO: 1536943 - RNA, 19 nt, Homo sapiens
  misc_RNA (1)...(19): siRNA sense strand
aagcagagaauaugaaaug

SEQ ID NO: 1536944 - RNA, 19 nt, Homo sapiens
  misc_RNA (1)...(19): siRNA sense strand
guuaaagugucuucuggau

SEQ ID NO: 1536945 - RNA, 19 nt, Homo sapiens
  misc_RNA (1)...(19): siRNA sense strand
gaagaaauuaagucugcaa

SEQ ID NO: 1536946 - RNA, 19 nt, Homo sapiens
  misc_RNA (1)...(19): siRNA sense strand
ucacugaagcagagaauau

SEQ ID NO: 1536947 - RNA, 19 nt, Homo sapiens
  misc_RNA (1)...(19): siRNA sense strand
gaugaaaagcugaaaauga

SEQ ID NO: 1536948 - RNA, 19 nt, Homo sapiens
  misc_RNA (1)...(19): siRNA sense strand
cauaaucggcugagagaga

SEQ ID NO: 1536949 - RNA, 19 nt, Homo sapiens
  misc_RNA (1)...(19): siRNA sense strand
gaaggacuuggaugagaaa

SEQ ID NO: 1536950 - RNA, 19 nt, Homo sapiens
  misc_RNA (1)...(19): siRNA sense strand
gaggugcucucaacagaac

SEQ ID NO: 1536951 - RNA, 19 nt, Homo sapiens
  misc_RNA (1)...(19): siRNA sense strand
caaggacguuauuauuagu

SEQ ID NO: 1536952 - RNA, 19 nt, Homo sapiens
  misc_RNA (1)...(19): siRNA sense strand
ggaaaccuagauggaauuu

SEQ ID NO: 1536953 - RNA, 19 nt, Homo sapiens
  misc_RNA (1)...(19): siRNA sense strand
gagaauacaauagcagaug

SEQ ID NO: 1536954 - RNA, 19 nt, Homo sapiens
  misc_RNA (1)...(19): siRNA sense strand
gucagaagcucuugucacu

SEQ ID NO: 1536955 - RNA, 19 nt, Homo sapiens
  misc_RNA (1)...(19): siRNA sense strand
ccagaaaacugagguagaa

SEQ ID NO: 1536956 - RNA, 19 nt, Homo sapiens
  misc_RNA (1)...(19): siRNA sense strand
aaacaaagguccagaaaac

SEQ ID NO: 1536957 - RNA, 19 nt, Homo sapiens
  misc_RNA (1)...(19): siRNA sense strand
caacagaaccaggauccuu

SEQ ID NO: 1536958 - RNA, 19 nt, Homo sapiens
  misc_RNA (1)...(19): siRNA sense strand
gaacaguuaaagugucuuc

SEQ ID NO: 1536959 - RNA, 19 nt, Homo sapiens
  misc_RNA (1)...(19): siRNA sense strand
ucaagaugcuauucagaag

SEQ ID NO: 1536960 - RNA, 19 nt, Homo sapiens
  misc_RNA (1)...(19): siRNA sense strand
gaaagcugcucugagaaaa

SEQ ID NO: 1536961 - RNA, 19 nt, Homo sapiens
  misc_RNA (1)...(19): siRNA sense strand
uaagaagcaaggucuagaa

SEQ ID NO: 1536962 - RNA, 19 nt, Homo sapiens
  misc_RNA (1)...(19): siRNA sense strand
guaaagaggagauggaaaa

SEQ ID NO: 1536963 - RNA, 19 nt, Homo sapiens
  misc_RNA (1)...(19): siRNA sense strand
gcaacuugaacucugguaa

SEQ ID NO: 1536964 - RNA, 19 nt, Homo sapiens
  misc_RNA (1)...(19): siRNA sense strand
gagcaggagacuaaagaug

SEQ ID NO: 1536965 - RNA, 19 nt, Homo sapiens
  misc_RNA (1)...(19): siRNA sense strand
gcuugagagugaagaaugu

SEQ ID NO: 1536966 - RNA, 19 nt, Homo sapiens
  misc_RNA (1)...(19): siRNA sense strand
caugauggugaaagaaaua

SEQ ID NO: 1536967 - RNA, 19 nt, Homo sapiens
  misc_RNA (1)...(19): siRNA sense strand
aaagaaacaacgcagagaa

SEQ ID NO: 1536968 - RNA, 19 nt, Homo sapiens
  misc_RNA (1)...(19): siRNA sense strand
gggagcagaaguucaaaug

SEQ ID NO: 1536969 - RNA, 19 nt, Homo sapiens
  misc_RNA (1)...(19): siRNA sense strand
auaaagcugugggaagaaa

SEQ ID NO: 1536970 - RNA, 19 nt, Homo sapiens
  misc_RNA (1)...(19): siRNA sense strand
gaugaaugcauacuuaaac

SEQ ID NO: 1536971 - RNA, 19 nt, Homo sapiens
  misc_RNA (1)...(19): siRNA sense strand
guaaaaggauaugaacuug

SEQ ID NO: 1536972 - RNA, 19 nt, Homo sapiens
  misc_RNA (1)...(19): siRNA sense strand
aagaugcuauucagaagau

SEQ ID NO: 1536973 - RNA, 19 nt, Homo sapiens
  misc_RNA (1)...(19): siRNA sense strand
cuaaagaugcagcagaaga

SEQ ID NO: 1536974 - RNA, 19 nt, Homo sapiens
  misc_RNA (1)...(19): siRNA sense strand
ugaagaacaguuaaagugu

SEQ ID NO: 1536975 - RNA, 19 nt, Homo sapiens
  misc_RNA (1)...(19): siRNA sense strand
gcugagagagauugaugaa

SEQ ID NO: 1536976 - RNA, 19 nt, Homo sapiens
  misc_RNA (1)...(19): siRNA sense strand
aaaaccagcuucaaauuca

SEQ ID NO: 1536977 - RNA, 19 nt, Homo sapiens
  misc_RNA (1)...(19): siRNA sense strand
gaaaaucggaauaaucaga

SEQ ID NO: 1536978 - RNA, 19 nt, Homo sapiens
  misc_RNA (1)...(19): siRNA sense strand
caaagaaacaacgcagaga

SEQ ID NO: 1536979 - RNA, 19 nt, Homo sapiens
  misc_RNA (1)...(19): siRNA sense strand
uggaggugcucucaacaga

SEQ ID NO: 1536980 - RNA, 19 nt, Homo sapiens
  misc_RNA (1)...(19): siRNA sense strand
ugaagcagagaauaugaaa

SEQ ID NO: 1536981 - RNA, 19 nt, Homo sapiens
  misc_RNA (1)...(19): siRNA sense strand
agaaacaaagguccagaaa

SEQ ID NO: 1536982 - RNA, 19 nt, Homo sapiens
  misc_RNA (1)...(19): siRNA sense strand
gcuaaaugaaucagaaaca

SEQ ID NO: 1536983 - RNA, 19 nt, Homo sapiens
  misc_RNA (1)...(19): siRNA sense strand
gguaaacacaaccaggauu

SEQ ID NO: 1536984 - RNA, 19 nt, Homo sapiens
  misc_RNA (1)...(19): siRNA sense strand
acauugaguuggccaagga

SEQ ID NO: 1536985 - RNA, 19 nt, Homo sapiens
  misc_RNA (1)...(19): siRNA sense strand
gugugagccuuucaucaga

SEQ ID NO: 1536986 - RNA, 19 nt, Homo sapiens
  misc_RNA (1)...(19): siRNA sense strand
gaaugugaagcuucuaaag

SEQ ID NO: 1536987 - RNA, 19 nt, Homo sapiens
  misc_RNA (1)...(19): siRNA sense strand
gaaaagcugaaaaugauga

SEQ ID NO: 1536988 - RNA, 19 nt, Homo sapiens
  misc_RNA (1)...(19): siRNA sense strand
ucacaaggcuuaucauuaa

SEQ ID NO: 1536989 - RNA, 19 nt, Homo sapiens
  misc_RNA (1)...(19): siRNA sense strand
acaauaagcuucagacauu

SEQ ID NO: 1536990 - RNA, 19 nt, Homo sapiens
  misc_RNA (1)...(19): siRNA sense strand
ccaacaagcucaccaauau

SEQ ID NO: 1536991 - RNA, 19 nt, Homo sapiens
  misc_RNA (1)...(19): siRNA sense strand
gagcauuuguccuuuauuu

SEQ ID NO: 1536992 - RNA, 19 nt, Homo sapiens
  misc_RNA (1)...(19): siRNA sense strand
cagcaacacucucuuauga

SEQ ID NO: 1536993 - RNA, 19 nt, Homo sapiens
  misc_RNA (1)...(19): siRNA sense strand
ccaaagaacugcagaugug

SEQ ID NO: 1536994 - RNA, 19 nt, Homo sapiens
  misc_RNA (1)...(19): siRNA sense strand
gaacaggauucgcuccauu

SEQ ID NO: 1536995 - RNA, 19 nt, Homo sapiens
  misc_RNA (1)...(19): siRNA sense strand
ggaaugacauccaaggaau

SEQ ID NO: 1536996 - RNA, 19 nt, Homo sapiens
  misc_RNA (1)...(19): siRNA sense strand
gcucaaauccaaucaguuu

SEQ ID NO: 1536997 - RNA, 19 nt, Homo sapiens
  misc_RNA (1)...(19): siRNA sense strand
gcaguggaaacauauaaua

SEQ ID NO: 1536998 - RNA, 19 nt, Homo sapiens
  misc_RNA (1)...(19): siRNA sense strand
ucagagagcuugcccaaag

SEQ ID NO: 1536999 - RNA, 19 nt, Homo sapiens
  misc_RNA (1)...(19): siRNA sense strand
gcaacacucucuuaugaag

SEQ ID NO: 1537000 - RNA, 19 nt, Homo sapiens
  misc_RNA (1)...(19): siRNA sense strand
gcgcagagcaagaguauga

SEQ ID NO: 1537001 - RNA, 19 nt, Homo sapiens
  misc_RNA (1)...(19): siRNA sense strand
caagggauccguagacuga

SEQ ID NO: 1537002 - RNA, 19 nt, Homo sapiens
  misc_RNA (1)...(19): siRNA sense strand
ugaaacaacuccagcaaca

SEQ ID NO: 1537003 - RNA, 19 nt, Homo sapiens
  misc_RNA (1)...(19): siRNA sense strand
ggaaauaugugggaaugca

SEQ ID NO: 1537004 - RNA, 19 nt, Homo sapiens
  misc_RNA (1)...(19): siRNA sense strand
gugaugcaguggaaacaua

SEQ ID NO: 1537005 - RNA, 19 nt, Homo sapiens
  misc_RNA (1)...(19): siRNA sense strand
gcaagaguaugagcauguu

SEQ ID NO: 1537006 - RNA, 19 nt, Homo sapiens
  misc_RNA (1)...(19): siRNA sense strand
gaucugggcccugcacaua

SEQ ID NO: 1537007 - RNA, 19 nt, Homo sapiens
  misc_RNA (1)...(19): siRNA sense strand
gaaagcaccaugauaugug

SEQ ID NO: 1537008 - RNA, 19 nt, Homo sapiens
  misc_RNA (1)...(19): siRNA sense strand
gagcauguuucauuucaca

SEQ ID NO: 1537009 - RNA, 19 nt, Homo sapiens
  misc_RNA (1)...(19): siRNA sense strand
ggauauaucgguuaaugga

SEQ ID NO: 1537010 - RNA, 19 nt, Homo sapiens
  misc_RNA (1)...(19): siRNA sense strand
cagcuuauauggcuuuauc

SEQ ID NO: 1537011 - RNA, 19 nt, Homo sapiens
  misc_RNA (1)...(19): siRNA sense strand
gcuggccucuugaaguuaa

SEQ ID NO: 1537012 - RNA, 19 nt, Homo sapiens
  misc_RNA (1)...(19): siRNA sense strand
ggaaagcaccaugauaugu

SEQ ID NO: 1537013 - RNA, 19 nt, Homo sapiens
  misc_RNA (1)...(19): siRNA sense strand
uaaggaaagcaccaugaua

SEQ ID NO: 1537014 - RNA, 19 nt, Homo sapiens
  misc_RNA (1)...(19): siRNA sense strand
gcuuaagaauuucaaagga

SEQ ID NO: 1537015 - RNA, 19 nt, Homo sapiens
  misc_RNA (1)...(19): siRNA sense strand
gucacaaggcuuaucauua

SEQ ID NO: 1537016 - RNA, 19 nt, Homo sapiens
  misc_RNA (1)...(19): siRNA sense strand
cacauugucuggaaauaug

SEQ ID NO: 1537017 - RNA, 19 nt, Homo sapiens
  misc_RNA (1)...(19): siRNA sense strand
gcucacgggugcucagaga

SEQ ID NO: 1537018 - RNA, 19 nt, Homo sapiens
  misc_RNA (1)...(19): siRNA sense strand
agaucuaacucacuaaaga

SEQ ID NO: 1537019 - RNA, 19 nt, Homo sapiens
  misc_RNA (1)...(19): siRNA sense strand
gcaaaauuguguacuguga

SEQ ID NO: 1537020 - RNA, 19 nt, Homo sapiens
  misc_RNA (1)...(19): siRNA sense strand
ccauggauauaucgguuaa

SEQ ID NO: 1537021 - RNA, 19 nt, Homo sapiens
  misc_RNA (1)...(19): siRNA sense strand
accaauaucucacaggaaa

SEQ ID NO: 1537022 - RNA, 19 nt, Homo sapiens
  misc_RNA (1)...(19): siRNA sense strand
gaucaacuuugcucauuuu

SEQ ID NO: 1537023 - RNA, 19 nt, Homo sapiens
  misc_RNA (1)...(19): siRNA sense strand
cuacacugcugcuuguuau

SEQ ID NO: 1537024 - RNA, 19 nt, Homo sapiens
  misc_RNA (1)...(19): siRNA sense strand
uaaagacugugcccauaag

SEQ ID NO: 1537025 - RNA, 19 nt, Homo sapiens
  misc_RNA (1)...(19): siRNA sense strand
uaauaucuguucugaaguc

SEQ ID NO: 1537026 - RNA, 19 nt, Homo sapiens
  misc_RNA (1)...(19): siRNA sense strand
cagggaaugugagguauga

SEQ ID NO: 1537027 - RNA, 19 nt, Homo sapiens
  misc_RNA (1)...(19): siRNA sense strand
ggccuuaaccagcuuauau

SEQ ID NO: 1537028 - RNA, 19 nt, Homo sapiens
  misc_RNA (1)...(19): siRNA sense strand
ucugggcccugcacauaua

SEQ ID NO: 1537029 - RNA, 19 nt, Homo sapiens
  misc_RNA (1)...(19): siRNA sense strand
acaaaugaauuccccuuua

SEQ ID NO: 1537030 - RNA, 19 nt, Homo sapiens
  misc_RNA (1)...(19): siRNA sense strand
cugcagaugugauggcaaa

SEQ ID NO: 1537031 - RNA, 19 nt, Homo sapiens
  misc_RNA (1)...(19): siRNA sense strand
ggucaacacagaaagauca

SEQ ID NO: 1537032 - RNA, 19 nt, Homo sapiens
  misc_RNA (1)...(19): siRNA sense strand
cuggaccucuccuacaaua

SEQ ID NO: 1537033 - RNA, 19 nt, Homo sapiens
  misc_RNA (1)...(19): siRNA sense strand
cuacaagccuacaaacucu

SEQ ID NO: 1537034 - RNA, 19 nt, Homo sapiens
  misc_RNA (1)...(19): siRNA sense strand
gaaugacauccaaggaauu

SEQ ID NO: 1537035 - RNA, 19 nt, Homo sapiens
  misc_RNA (1)...(19): siRNA sense strand
gggaaugacauccaaggaa

SEQ ID NO: 1537036 - RNA, 19 nt, Homo sapiens
  misc_RNA (1)...(19): siRNA sense strand
aagaucaacuuugcucauu

SEQ ID NO: 1537037 - RNA, 19 nt, Homo sapiens
  misc_RNA (1)...(19): siRNA sense strand
acuaaagacugugcccaua

SEQ ID NO: 1537038 - RNA, 19 nt, Homo sapiens
  misc_RNA (1)...(19): siRNA sense strand
aguauuauguggacuacaa

SEQ ID NO: 1537039 - RNA, 19 nt, Homo sapiens
  misc_RNA (1)...(19): siRNA sense strand
aaggaaagcaccaugauau

SEQ ID NO: 1537040 - RNA, 19 nt, Homo sapiens
  misc_RNA (1)...(19): siRNA sense strand
ggacuuggaguuccuuaca

SEQ ID NO: 1537041 - RNA, 19 nt, Homo sapiens
  misc_RNA (1)...(19): siRNA sense strand
cuaaagacugugcccauaa

SEQ ID NO: 1537042 - RNA, 19 nt, Homo sapiens
  misc_RNA (1)...(19): siRNA sense strand
ggucacaaggcuuaucauu

SEQ ID NO: 1537043 - RNA, 19 nt, Homo sapiens
  misc_RNA (1)...(19): siRNA sense strand
ggaccucuccuacaauaag

SEQ ID NO: 1537044 - RNA, 19 nt, Homo sapiens
  misc_RNA (1)...(19): siRNA sense strand
ucggagcauuuguccuuua

SEQ ID NO: 1537045 - RNA, 19 nt, Homo sapiens
  misc_RNA (1)...(19): siRNA sense strand
uaauauccaucacauuguc

SEQ ID NO: 1537046 - RNA, 19 nt, Homo sapiens
  misc_RNA (1)...(19): siRNA sense strand
cagagagcuugcccaaaga

SEQ ID NO: 1537047 - RNA, 19 nt, Homo sapiens
  misc_RNA (1)...(19): siRNA sense strand
gguuagugaugcaguggaa

SEQ ID NO: 1537048 - RNA, 19 nt, Homo sapiens
  misc_RNA (1)...(19): siRNA sense strand
uucagaagcucaaauccaa

SEQ ID NO: 1537049 - RNA, 19 nt, Homo sapiens
  misc_RNA (1)...(19): siRNA sense strand
gcauguuucauuucacaaa

SEQ ID NO: 1537050 - RNA, 19 nt, Homo sapiens
  misc_RNA (1)...(19): siRNA sense strand
cuaacucacuaaagacugu

SEQ ID NO: 1537051 - RNA, 19 nt, Homo sapiens
  misc_RNA (1)...(19): siRNA sense strand
gaguguggcucucuuucuc

SEQ ID NO: 1537052 - RNA, 19 nt, Homo sapiens
  misc_RNA (1)...(19): siRNA sense strand
ccaauccaccuuugaaaca

SEQ ID NO: 1537053 - RNA, 19 nt, Homo sapiens
  misc_RNA (1)...(19): siRNA sense strand
caaaggaaauaaggaaagc

SEQ ID NO: 1537054 - RNA, 19 nt, Homo sapiens
  misc_RNA (1)...(19): siRNA sense strand
gguuugacauggacuugga

SEQ ID NO: 1537055 - RNA, 19 nt, Homo sapiens
  misc_RNA (1)...(19): siRNA sense strand
agaucaacuuugcucauuu

SEQ ID NO: 1537056 - RNA, 19 nt, Homo sapiens
  misc_RNA (1)...(19): siRNA sense strand
ugaucuaugugucuuggaa

SEQ ID NO: 1537057 - RNA, 19 nt, Homo sapiens
  misc_RNA (1)...(19): siRNA sense strand
cuucggaaacucaucauuu

SEQ ID NO: 1537058 - RNA, 19 nt, Homo sapiens
  misc_RNA (1)...(19): siRNA sense strand
uugcuggccucuugaaguu

SEQ ID NO: 1537059 - RNA, 19 nt, Homo sapiens
  misc_RNA (1)...(19): siRNA sense strand
cgaagcuugucccgaaaug

SEQ ID NO: 1537060 - RNA, 19 nt, Homo sapiens
  misc_RNA (1)...(19): siRNA sense strand
gcauucagaagcucaaauc

SEQ ID NO: 1537061 - RNA, 19 nt, Homo sapiens
  misc_RNA (1)...(19): siRNA sense strand
cugauuaucccuagaccua

SEQ ID NO: 1537062 - RNA, 19 nt, Homo sapiens
  misc_RNA (1)...(19): siRNA sense strand
ggaacaggauucgcuccau

SEQ ID NO: 1537063 - RNA, 19 nt, Homo sapiens
  misc_RNA (1)...(19): siRNA sense strand
uccguagacugaaagaauu

SEQ ID NO: 1537064 - RNA, 19 nt, Homo sapiens
  misc_RNA (1)...(19): siRNA sense strand
uaaaacauuucacccaguu

SEQ ID NO: 1537065 - RNA, 19 nt, Homo sapiens
  misc_RNA (1)...(19): siRNA sense strand
caaagaacugcagauguga

SEQ ID NO: 1537066 - RNA, 19 nt, Homo sapiens
  misc_RNA (1)...(19): siRNA sense strand
gaaauaaggaaagcaccau

SEQ ID NO: 1537067 - RNA, 19 nt, Homo sapiens
  misc_RNA (1)...(19): siRNA sense strand
ccgcucaauuuacuuacaa

SEQ ID NO: 1537068 - RNA, 19 nt, Homo sapiens
  misc_RNA (1)...(19): siRNA sense strand
uuucaagacugucggaauc

SEQ ID NO: 1537069 - RNA, 19 nt, Homo sapiens
  misc_RNA (1)...(19): siRNA sense strand
cggagcauuuguccuuuau

SEQ ID NO: 1537070 - RNA, 19 nt, Homo sapiens
  misc_RNA (1)...(19): siRNA sense strand
uuaaaggccuucggaaacu

SEQ ID NO: 1537071 - RNA, 19 nt, Homo sapiens
  misc_RNA (1)...(19): siRNA sense strand
ccuacacugcugcuuguua

SEQ ID NO: 1537072 - RNA, 19 nt, Homo sapiens
  misc_RNA (1)...(19): siRNA sense strand
gagcuugcccaaagaacug

SEQ ID NO: 1537073 - RNA, 19 nt, Homo sapiens
  misc_RNA (1)...(19): siRNA sense strand
ugacauggacuuggaguuc

SEQ ID NO: 1537074 - RNA, 19 nt, Homo sapiens
  misc_RNA (1)...(19): siRNA sense strand
ugcauuugcuggccucuug

SEQ ID NO: 1537075 - RNA, 19 nt, Homo sapiens
  misc_RNA (1)...(19): siRNA sense strand
aacaggauucgcuccauua

SEQ ID NO: 1537076 - RNA, 19 nt, Homo sapiens
  misc_RNA (1)...(19): siRNA sense strand
gcaaucuggaccucuccua

SEQ ID NO: 1537077 - RNA, 19 nt, Homo sapiens
  misc_RNA (1)...(19): siRNA sense strand
acucugagaccauggauau

SEQ ID NO: 1537078 - RNA, 19 nt, Homo sapiens
  misc_RNA (1)...(19): siRNA sense strand
cagaugugauggcaaaauu

SEQ ID NO: 1537079 - RNA, 19 nt, Homo sapiens
  misc_RNA (1)...(19): siRNA sense strand
auucuaagcuccaacaaaa

SEQ ID NO: 1537080 - RNA, 19 nt, Homo sapiens
  misc_RNA (1)...(19): siRNA sense strand
ggaguauuauguggacuac

SEQ ID NO: 1537081 - RNA, 19 nt, Homo sapiens
  misc_RNA (1)...(19): siRNA sense strand
caaaugaauuccccuuuac

SEQ ID NO: 1537082 - RNA, 19 nt, Homo sapiens
  misc_RNA (1)...(19): siRNA sense strand
cuacccagccagcaugaaa

SEQ ID NO: 1537083 - RNA, 19 nt, Homo sapiens
  misc_RNA (1)...(19): siRNA sense strand
ucacauugucuggaaauau

SEQ ID NO: 1537084 - RNA, 19 nt, Homo sapiens
  misc_RNA (1)...(19): siRNA sense strand
caagcucaccaauaucuca

SEQ ID NO: 1537085 - RNA, 19 nt, Homo sapiens
  misc_RNA (1)...(19): siRNA sense strand
uccaacaagcucaccaaua

SEQ ID NO: 1537086 - RNA, 19 nt, Homo sapiens
  misc_RNA (1)...(19): siRNA sense strand
caacaagcucaccaauauc

SEQ ID NO: 1537087 - RNA, 19 nt, Homo sapiens
  misc_RNA (1)...(19): siRNA sense strand
gaucuaugugucuuggaaa

SEQ ID NO: 1537088 - RNA, 19 nt, Homo sapiens
  misc_RNA (1)...(19): siRNA sense strand
gaaccuggauuguguagua

SEQ ID NO: 1537089 - RNA, 19 nt, Homo sapiens
  misc_RNA (1)...(19): siRNA sense strand
gagaaacccuauaaaugua

SEQ ID NO: 1537090 - RNA, 19 nt, Homo sapiens
  misc_RNA (1)...(19): siRNA sense strand
gaaagaaaccauaugauug

SEQ ID NO: 1537091 - RNA, 19 nt, Homo sapiens
  misc_RNA (1)...(19): siRNA sense strand
gagaaacccuauacaugua

SEQ ID NO: 1537092 - RNA, 19 nt, Homo sapiens
  misc_RNA (1)...(19): siRNA sense strand
ggaaagaaaccauaugauu

SEQ ID NO: 1537093 - RNA, 19 nt, Homo sapiens
  misc_RNA (1)...(19): siRNA sense strand
gggaaagccuucaguguuu

SEQ ID NO: 1537094 - RNA, 19 nt, Homo sapiens
  misc_RNA (1)...(19): siRNA sense strand
gaaauggaccucauaaaug

SEQ ID NO: 1537095 - RNA, 19 nt, Homo sapiens
  misc_RNA (1)...(19): siRNA sense strand
ggaaagaccagaacauuga

SEQ ID NO: 1537096 - RNA, 19 nt, Homo sapiens
  misc_RNA (1)...(19): siRNA sense strand
ucuaagaugucguauguua

SEQ ID NO: 1537097 - RNA, 19 nt, Homo sapiens
  misc_RNA (1)...(19): siRNA sense strand
gguaaagccuucacucauu

SEQ ID NO: 1537098 - RNA, 19 nt, Homo sapiens
  misc_RNA (1)...(19): siRNA sense strand
agaagaaucucuacaaaga

SEQ ID NO: 1537099 - RNA, 19 nt, Homo sapiens
  misc_RNA (1)...(19): siRNA sense strand
ggaaagccuucggucauua

SEQ ID NO: 1537100 - RNA, 19 nt, Homo sapiens
  misc_RNA (1)...(19): siRNA sense strand
gcacaaaccacaugaguau

SEQ ID NO: 1537101 - RNA, 19 nt, Homo sapiens
  misc_RNA (1)...(19): siRNA sense strand
ggaaauggaccucauaaau

SEQ ID NO: 1537102 - RNA, 19 nt, Homo sapiens
  misc_RNA (1)...(19): siRNA sense strand
ggagaaaccauauaaaugu

SEQ ID NO: 1537103 - RNA, 19 nt, Homo sapiens
  misc_RNA (1)...(19): siRNA sense strand
gagagaaacccuauaaaug

SEQ ID NO: 1537104 - RNA, 19 nt, Homo sapiens
  misc_RNA (1)...(19): siRNA sense strand
gagagaagccguaugaaug

SEQ ID NO: 1537105 - RNA, 19 nt, Homo sapiens
  misc_RNA (1)...(19): siRNA sense strand
ggagaaaccguaugaaugu

SEQ ID NO: 1537106 - RNA, 19 nt, Homo sapiens
  misc_RNA (1)...(19): siRNA sense strand
ggcaaagccuaccguauuu

SEQ ID NO: 1537107 - RNA, 19 nt, Homo sapiens
  misc_RNA (1)...(19): siRNA sense strand
gcagagaaacccuauaaau

SEQ ID NO: 1537108 - RNA, 19 nt, Homo sapiens
  misc_RNA (1)...(19): siRNA sense strand
ggagagaaacccuauaaau

SEQ ID NO: 1537109 - RNA, 19 nt, Homo sapiens
  misc_RNA (1)...(19): siRNA sense strand
ggagauggaccuuauaaau

SEQ ID NO: 1537110 - RNA, 19 nt, Homo sapiens
  misc_RNA (1)...(19): siRNA sense strand
ggagagaacccguaugaau

SEQ ID NO: 1537111 - RNA, 19 nt, Homo sapiens
  misc_RNA (1)...(19): siRNA sense strand
gaaaccguaugaauguaaa

SEQ ID NO: 1537112 - RNA, 19 nt, Homo sapiens
  misc_RNA (1)...(19): siRNA sense strand
ggucauucaucccuuaauu

SEQ ID NO: 1537113 - RNA, 19 nt, Homo sapiens
  misc_RNA (1)...(19): siRNA sense strand
agagaaaccuuaugagugu

SEQ ID NO: 1537114 - RNA, 19 nt, Homo sapiens
  misc_RNA (1)...(19): siRNA sense strand
gagagaaacccuauacaug

SEQ ID NO: 1537115 - RNA, 19 nt, Homo sapiens
  misc_RNA (1)...(19): siRNA sense strand
ggaaagcauucagucguuu

SEQ ID NO: 1537116 - RNA, 19 nt, Homo sapiens
  misc_RNA (1)...(19): siRNA sense strand
ggagauggaccucauaaau

SEQ ID NO: 1537117 - RNA, 19 nt, Homo sapiens
  misc_RNA (1)...(19): siRNA sense strand
gagagaaacccuaugaaug

SEQ ID NO: 1537118 - RNA, 19 nt, Homo sapiens
  misc_RNA (1)...(19): siRNA sense strand
aaauggaccucauaaaugu

SEQ ID NO: 1537119 - RNA, 19 nt, Homo sapiens
  misc_RNA (1)...(19): siRNA sense strand
ucagaagaaucucuacaaa

SEQ ID NO: 1537120 - RNA, 19 nt, Homo sapiens
  misc_RNA (1)...(19): siRNA sense strand
gaagucauaugauaaugca

SEQ ID NO: 1537121 - RNA, 19 nt, Homo sapiens
  misc_RNA (1)...(19): siRNA sense strand
gagauggaccuuauaaaug

SEQ ID NO: 1537122 - RNA, 19 nt, Homo sapiens
  misc_RNA (1)...(19): siRNA sense strand
uaccacaacucauuucaaa

SEQ ID NO: 1537123 - RNA, 19 nt, Homo sapiens
  misc_RNA (1)...(19): siRNA sense strand
gagaaaccauaugaaugua

SEQ ID NO: 1537124 - RNA, 19 nt, Homo sapiens
  misc_RNA (1)...(19): siRNA sense strand
ggagagaaaccauaugaau

SEQ ID NO: 1537125 - RNA, 19 nt, Homo sapiens
  misc_RNA (1)...(19): siRNA sense strand
gagagaacccguaugaaug

SEQ ID NO: 1537126 - RNA, 19 nt, Homo sapiens
  misc_RNA (1)...(19): siRNA sense strand
gagauggaccucauaaaug

SEQ ID NO: 1537127 - RNA, 19 nt, Homo sapiens
  misc_RNA (1)...(19): siRNA sense strand
guaaagccuucacucauuc

SEQ ID NO: 1537128 - RNA, 19 nt, Homo sapiens
  misc_RNA (1)...(19): siRNA sense strand
gaaaccauaugaauguaag

SEQ ID NO: 1537129 - RNA, 19 nt, Homo sapiens
  misc_RNA (1)...(19): siRNA sense strand
gggaaagcauucagucguu

SEQ ID NO: 1537130 - RNA, 19 nt, Homo sapiens
  misc_RNA (1)...(19): siRNA sense strand
gagaaacccuauaaaugca

SEQ ID NO: 1537131 - RNA, 19 nt, Homo sapiens
  misc_RNA (1)...(19): siRNA sense strand
ggagagaaacccuaugaau

SEQ ID NO: 1537132 - RNA, 19 nt, Homo sapiens
  misc_RNA (1)...(19): siRNA sense strand
gagaaaccguaugaaugua

SEQ ID NO: 1537133 - RNA, 19 nt, Homo sapiens
  misc_RNA (1)...(19): siRNA sense strand
guucuugucuaauacauga

SEQ ID NO: 1537134 - RNA, 19 nt, Homo sapiens
  misc_RNA (1)...(19): siRNA sense strand
cagagaaacccuauaaaug

SEQ ID NO: 1537135 - RNA, 19 nt, Homo sapiens
  misc_RNA (1)...(19): siRNA sense strand
gagagaaaccauaugaaug

SEQ ID NO: 1537136 - RNA, 19 nt, Homo sapiens
  misc_RNA (1)...(19): siRNA sense strand
ccucauaaaugcaagguau

SEQ ID NO: 1537137 - RNA, 19 nt, Homo sapiens
  misc_RNA (1)...(19): siRNA sense strand
ucuaaagccuucccugauu

SEQ ID NO: 1537138 - RNA, 19 nt, Homo sapiens
  misc_RNA (1)...(19): siRNA sense strand
agauggaccuuauaaaugu

SEQ ID NO: 1537139 - RNA, 19 nt, Homo sapiens
  misc_RNA (1)...(19): siRNA sense strand
agagagaaauccuaugaau

SEQ ID NO: 1537140 - RNA, 19 nt, Homo sapiens
  misc_RNA (1)...(19): siRNA sense strand
gagaagccguaugaaugua

SEQ ID NO: 1537141 - RNA, 19 nt, Homo sapiens
  misc_RNA (1)...(19): siRNA sense strand
ggagagaagccguaugaau

SEQ ID NO: 1537142 - RNA, 19 nt, Homo sapiens
  misc_RNA (1)...(19): siRNA sense strand
gaaacccuauacauguaaa

SEQ ID NO: 1537143 - RNA, 19 nt, Homo sapiens
  misc_RNA (1)...(19): siRNA sense strand
ggaacucaauguggagaaa

SEQ ID NO: 1537144 - RNA, 19 nt, Homo sapiens
  misc_RNA (1)...(19): siRNA sense strand
agagaaauccuaugaaugu

SEQ ID NO: 1537145 - RNA, 19 nt, Homo sapiens
  misc_RNA (1)...(19): siRNA sense strand
agagaaacccuauaaaugu

SEQ ID NO: 1537146 - RNA, 19 nt, Homo sapiens
  misc_RNA (1)...(19): siRNA sense strand
gggaaagcauuaucucauc

SEQ ID NO: 1537147 - RNA, 19 nt, Homo sapiens
  misc_RNA (1)...(19): siRNA sense strand
gggagaaaccauauaaaug

SEQ ID NO: 1537148 - RNA, 19 nt, Homo sapiens
  misc_RNA (1)...(19): siRNA sense strand
ggauguggcugugaacuuc

SEQ ID NO: 1537149 - RNA, 19 nt, Homo sapiens
  misc_RNA (1)...(19): siRNA sense strand
gaagccagauacgcauaaa

SEQ ID NO: 1537150 - RNA, 19 nt, Homo sapiens
  misc_RNA (1)...(19): siRNA sense strand
ggagagaaaccuuaugagu

SEQ ID NO: 1537151 - RNA, 19 nt, Homo sapiens
  misc_RNA (1)...(19): siRNA sense strand
gggagaaaccguaugaaug

SEQ ID NO: 1537152 - RNA, 19 nt, Homo sapiens
  misc_RNA (1)...(19): siRNA sense strand
ggagagaaacccuauacau

SEQ ID NO: 1537153 - RNA, 19 nt, Homo sapiens
  misc_RNA (1)...(19): siRNA sense strand
gaauucacaugagagagaa

SEQ ID NO: 1537154 - RNA, 19 nt, Homo sapiens
  misc_RNA (1)...(19): siRNA sense strand
gcaaagucaugaaagaacu

SEQ ID NO: 1537155 - RNA, 19 nt, Homo sapiens
  misc_RNA (1)...(19): siRNA sense strand
gauggaccuuauaaaugua

SEQ ID NO: 1537156 - RNA, 19 nt, Homo sapiens
  misc_RNA (1)...(19): siRNA sense strand
gauuccaguucuugucuaa

SEQ ID NO: 1537157 - RNA, 19 nt, Homo sapiens
  misc_RNA (1)...(19): siRNA sense strand
ucucaucgcucaagcuuuc

SEQ ID NO: 1537158 - RNA, 19 nt, Homo sapiens
  misc_RNA (1)...(19): siRNA sense strand
gagaagccauaugagugua

SEQ ID NO: 1537159 - RNA, 19 nt, Homo sapiens
  misc_RNA (1)...(19): siRNA sense strand
ggagagaagccauaugagu

SEQ ID NO: 1537160 - RNA, 19 nt, Homo sapiens
  misc_RNA (1)...(19): siRNA sense strand
ccacaacucauuucaaaca

SEQ ID NO: 1537161 - RNA, 19 nt, Homo sapiens
  misc_RNA (1)...(19): siRNA sense strand
gaauguaagcaguguucua

SEQ ID NO: 1537162 - RNA, 19 nt, Homo sapiens
  misc_RNA (1)...(19): siRNA sense strand
ucuaagacaugaaagaaca

SEQ ID NO: 1537163 - RNA, 19 nt, Homo sapiens
  misc_RNA (1)...(19): siRNA sense strand
ugagagagaaauccuauga

SEQ ID NO: 1537164 - RNA, 19 nt, Homo sapiens
  misc_RNA (1)...(19): siRNA sense strand
uaagaugucguauguuaga

SEQ ID NO: 1537165 - RNA, 19 nt, Homo sapiens
  misc_RNA (1)...(19): siRNA sense strand
ggacucacacugcagagaa

SEQ ID NO: 1537166 - RNA, 19 nt, Homo sapiens
  misc_RNA (1)...(19): siRNA sense strand
cuaguucacugcaaaguca

SEQ ID NO: 1537167 - RNA, 19 nt, Homo sapiens
  misc_RNA (1)...(19): siRNA sense strand
ucuaagacaugaaagaaca

SEQ ID NO: 1537168 - RNA, 19 nt, Homo sapiens
  misc_RNA (1)...(19): siRNA sense strand
gugggaaagccuucaguua

SEQ ID NO: 1537169 - RNA, 19 nt, Homo sapiens
  misc_RNA (1)...(19): siRNA sense strand
gagagaaauccuaugaaug

SEQ ID NO: 1537170 - RNA, 19 nt, Homo sapiens
  misc_RNA (1)...(19): siRNA sense strand
uggcaaagccuaccguauu

SEQ ID NO: 1537171 - RNA, 19 nt, Homo sapiens
  misc_RNA (1)...(19): siRNA sense strand
uuccaguucuugucuaaua

SEQ ID NO: 1537172 - RNA, 19 nt, Homo sapiens
  misc_RNA (1)...(19): siRNA sense strand
agacaugaaagaacacaua

SEQ ID NO: 1537173 - RNA, 19 nt, Homo sapiens
  misc_RNA (1)...(19): siRNA sense strand
agacaugaaagaacacaua

SEQ ID NO: 1537174 - RNA, 19 nt, Homo sapiens
  misc_RNA (1)...(19): siRNA sense strand
agagaaaccauaugaaugu

SEQ ID NO: 1537175 - RNA, 19 nt, Homo sapiens
  misc_RNA (1)...(19): siRNA sense strand
gagaacccguaugaaugua

SEQ ID NO: 1537176 - RNA, 19 nt, Homo sapiens
  misc_RNA (1)...(19): siRNA sense strand
agagaaacccuauacaugu

SEQ ID NO: 1537177 - RNA, 19 nt, Homo sapiens
  misc_RNA (1)...(19): siRNA sense strand
gaaagaccagaacauugaa

SEQ ID NO: 1537178 - RNA, 19 nt, Homo sapiens
  misc_RNA (1)...(19): siRNA sense strand
guaugaauguaaacagugu

SEQ ID NO: 1537179 - RNA, 19 nt, Homo sapiens
  misc_RNA (1)...(19): siRNA sense strand
ugggaaaccuucaaagaca

SEQ ID NO: 1537180 - RNA, 19 nt, Homo sapiens
  misc_RNA (1)...(19): siRNA sense strand
gcauuugcuucucucaguu

SEQ ID NO: 1537181 - RNA, 19 nt, Homo sapiens
  misc_RNA (1)...(19): siRNA sense strand
gcauuugcuucucucaguu

SEQ ID NO: 1537182 - RNA, 19 nt, Homo sapiens
  misc_RNA (1)...(19): siRNA sense strand
guaaagauggaacucaaug

SEQ ID NO: 1537183 - RNA, 19 nt, Homo sapiens
  misc_RNA (1)...(19): siRNA sense strand
uaaaugcacacuugggaaa

SEQ ID NO: 1537184 - RNA, 19 nt, Homo sapiens
  misc_RNA (1)...(19): siRNA sense strand
gcagugugggaaagcauua

SEQ ID NO: 1537185 - RNA, 19 nt, Homo sapiens
  misc_RNA (1)...(19): siRNA sense strand
gaacucacacuggagagaa

SEQ ID NO: 1537186 - RNA, 19 nt, Homo sapiens
  misc_RNA (1)...(19): siRNA sense strand
gaacucacacuggagagaa

SEQ ID NO: 1537187 - RNA, 19 nt, Homo sapiens
  misc_RNA (1)...(19): siRNA sense strand
gcguggagauggaccuuau

SEQ ID NO: 1537188 - RNA, 19 nt, Homo sapiens
  misc_RNA (1)...(19): siRNA sense strand
ggacugcacugaaaucuuu

SEQ ID NO: 1537189 - RNA, 19 nt, Homo sapiens
  misc_RNA (1)...(19): siRNA sense strand
caaagaaacuccauuuaug

SEQ ID NO: 1537190 - RNA, 19 nt, Homo sapiens
  misc_RNA (1)...(19): siRNA sense strand
cgaaagaacucaugagaga

SEQ ID NO: 1537191 - RNA, 19 nt, Homo sapiens
  misc_RNA (1)...(19): siRNA sense strand
gagaaaccguauaaaugua

SEQ ID NO: 1537192 - RNA, 19 nt, Homo sapiens
  misc_RNA (1)...(19): siRNA sense strand
gagaauacaugcagcugaa

SEQ ID NO: 1537193 - RNA, 19 nt, Homo sapiens
  misc_RNA (1)...(19): siRNA sense strand
ggagagagacccuauaaau

SEQ ID NO: 1537194 - RNA, 19 nt, Homo sapiens
  misc_RNA (1)...(19): siRNA sense strand
cgaaggaacugcagccaaa

SEQ ID NO: 1537195 - RNA, 19 nt, Homo sapiens
  misc_RNA (1)...(19): siRNA sense strand
gagagaaaccguauaaaug

SEQ ID NO: 1537196 - RNA, 19 nt, Homo sapiens
  misc_RNA (1)...(19): siRNA sense strand
gggaaaugcuucagucaga

SEQ ID NO: 1537197 - RNA, 19 nt, Homo sapiens
  misc_RNA (1)...(19): siRNA sense strand
ggagagaaaccguauaaau

SEQ ID NO: 1537198 - RNA, 19 nt, Homo sapiens
  misc_RNA (1)...(19): siRNA sense strand
gaagggcuccugauaguga

SEQ ID NO: 1537199 - RNA, 19 nt, Homo sapiens
  misc_RNA (1)...(19): siRNA sense strand
gaaagcuucucucggaguu

SEQ ID NO: 1537200 - RNA, 19 nt, Homo sapiens
  misc_RNA (1)...(19): siRNA sense strand
ggaaacagcacgagaguca

SEQ ID NO: 1537201 - RNA, 19 nt, Homo sapiens
  misc_RNA (1)...(19): siRNA sense strand
gagagacccuauaaauguu

SEQ ID NO: 1537202 - RNA, 19 nt, Homo sapiens
  misc_RNA (1)...(19): siRNA sense strand
ucuaacaacucaaaccuaa

SEQ ID NO: 1537203 - RNA, 19 nt, Homo sapiens
  misc_RNA (1)...(19): siRNA sense strand
ccaaagaaacuccauuuau

SEQ ID NO: 1537204 - RNA, 19 nt, Homo sapiens
  misc_RNA (1)...(19): siRNA sense strand
gaacccacguuuccuguca

SEQ ID NO: 1537205 - RNA, 19 nt, Homo sapiens
  misc_RNA (1)...(19): siRNA sense strand
gaacagaagugcuuuugga

SEQ ID NO: 1537206 - RNA, 19 nt, Homo sapiens
  misc_RNA (1)...(19): siRNA sense strand
ggggaaaacuucucucaua

SEQ ID NO: 1537207 - RNA, 19 nt, Homo sapiens
  misc_RNA (1)...(19): siRNA sense strand
gggaagggcuccugauagu

SEQ ID NO: 1537208 - RNA, 19 nt, Homo sapiens
  misc_RNA (1)...(19): siRNA sense strand
gcaggagaguuaugagaau

SEQ ID NO: 1537209 - RNA, 19 nt, Homo sapiens
  misc_RNA (1)...(19): siRNA sense strand
ucucggaguucccgucuua

SEQ ID NO: 1537210 - RNA, 19 nt, Homo sapiens
  misc_RNA (1)...(19): siRNA sense strand
gagagagacccuauaaaug

SEQ ID NO: 1537211 - RNA, 19 nt, Homo sapiens
  misc_RNA (1)...(19): siRNA sense strand
ccaguugccugagagcuua

SEQ ID NO: 1537212 - RNA, 19 nt, Homo sapiens
  misc_RNA (1)...(19): siRNA sense strand
ggaaaugcuucagucagaa

SEQ ID NO: 1537213 - RNA, 19 nt, Homo sapiens
  misc_RNA (1)...(19): siRNA sense strand
gguguggacugcacugaaa

SEQ ID NO: 1537214 - RNA, 19 nt, Homo sapiens
  misc_RNA (1)...(19): siRNA sense strand
gagaagagaaauuugagaa

SEQ ID NO: 1537215 - RNA, 19 nt, Homo sapiens
  misc_RNA (1)...(19): siRNA sense strand
uagaggacguggcaaugua

SEQ ID NO: 1537216 - RNA, 19 nt, Homo sapiens
  misc_RNA (1)...(19): siRNA sense strand
guucacaccucgucauuca

SEQ ID NO: 1537217 - RNA, 19 nt, Homo sapiens
  misc_RNA (1)...(19): siRNA sense strand
ggacaaggaggaaagcuau

SEQ ID NO: 1537218 - RNA, 19 nt, Homo sapiens
  misc_RNA (1)...(19): siRNA sense strand
gaagcucuuugaauguuug

SEQ ID NO: 1537219 - RNA, 19 nt, Homo sapiens
  misc_RNA (1)...(19): siRNA sense strand
gggagaagcccuacaagug

SEQ ID NO: 1537220 - RNA, 19 nt, Homo sapiens
  misc_RNA (1)...(19): siRNA sense strand
ggagagcgaccuuauaagu

SEQ ID NO: 1537221 - RNA, 19 nt, Homo sapiens
  misc_RNA (1)...(19): siRNA sense strand
guauaaauguacccuuugu

SEQ ID NO: 1537222 - RNA, 19 nt, Homo sapiens
  misc_RNA (1)...(19): siRNA sense strand
agagagacccuauaaaugu

SEQ ID NO: 1537223 - RNA, 19 nt, Homo sapiens
  misc_RNA (1)...(19): siRNA sense strand
gacaacaggucacaaacca

SEQ ID NO: 1537224 - RNA, 19 nt, Homo sapiens
  misc_RNA (1)...(19): siRNA sense strand
gccaaagaaacuccauuua

SEQ ID NO: 1537225 - RNA, 19 nt, Homo sapiens
  misc_RNA (1)...(19): siRNA sense strand
ggagaucuuugcucacagu

SEQ ID NO: 1537226 - RNA, 19 nt, Homo sapiens
  misc_RNA (1)...(19): siRNA sense strand
gagaggaggcccacaagug

SEQ ID NO: 1537227 - RNA, 19 nt, Homo sapiens
  misc_RNA (1)...(19): siRNA sense strand
gcacgaaggagcagaucuu

SEQ ID NO: 1537228 - RNA, 19 nt, Homo sapiens
  misc_RNA (1)...(19): siRNA sense strand
gaaaacuucucucauagau

SEQ ID NO: 1537229 - RNA, 19 nt, Homo sapiens
  misc_RNA (1)...(19): siRNA sense strand
ccguauaaauguacccuuu

SEQ ID NO: 1537230 - RNA, 19 nt, Homo sapiens
  misc_RNA (1)...(19): siRNA sense strand
gcugaaagacuguguaugg

SEQ ID NO: 1537231 - RNA, 19 nt, Homo sapiens
  misc_RNA (1)...(19): siRNA sense strand
caggagagaaaccguauaa

SEQ ID NO: 1537232 - RNA, 19 nt, Homo sapiens
  misc_RNA (1)...(19): siRNA sense strand
gcaugcaccucaccagaca

SEQ ID NO: 1537233 - RNA, 19 nt, Homo sapiens
  misc_RNA (1)...(19): siRNA sense strand
ucacuggagucucacauuc

SEQ ID NO: 1537234 - RNA, 19 nt, Homo sapiens
  misc_RNA (1)...(19): siRNA sense strand
agagaaaccguauaaaugu

SEQ ID NO: 1537235 - RNA, 19 nt, Homo sapiens
  misc_RNA (1)...(19): siRNA sense strand
cgaaggagcagaucuugga

SEQ ID NO: 1537236 - RNA, 19 nt, Homo sapiens
  misc_RNA (1)...(19): siRNA sense strand
ccauuuaugucccuugugu

SEQ ID NO: 1537237 - RNA, 19 nt, Homo sapiens
  misc_RNA (1)...(19): siRNA sense strand
agagaacucacacagguua

SEQ ID NO: 1537238 - RNA, 19 nt, Homo sapiens
  misc_RNA (1)...(19): siRNA sense strand
gaaauuugagaaccuggaa

SEQ ID NO: 1537239 - RNA, 19 nt, Homo sapiens
  misc_RNA (1)...(19): siRNA sense strand
agagcgaccuuauaagugu

SEQ ID NO: 1537240 - RNA, 19 nt, Homo sapiens
  misc_RNA (1)...(19): siRNA sense strand
gaagguguuccgucuguau

SEQ ID NO: 1537241 - RNA, 19 nt, Homo sapiens
  misc_RNA (1)...(19): siRNA sense strand
gaacacacacaggagagaa

SEQ ID NO: 1537242 - RNA, 19 nt, Homo sapiens
  misc_RNA (1)...(19): siRNA sense strand
uaaaggagagggcauuauc

SEQ ID NO: 1537243 - RNA, 19 nt, Homo sapiens
  misc_RNA (1)...(19): siRNA sense strand
caugagagagagagacuuu

SEQ ID NO: 1537244 - RNA, 19 nt, Homo sapiens
  misc_RNA (1)...(19): siRNA sense strand
acacggugcaggagaguua

SEQ ID NO: 1537245 - RNA, 19 nt, Homo sapiens
  misc_RNA (1)...(19): siRNA sense strand
gaacugcagccaaagaaac

SEQ ID NO: 1537246 - RNA, 19 nt, Homo sapiens
  misc_RNA (1)...(19): siRNA sense strand
gagagcgaccuuauaagug

SEQ ID NO: 1537247 - RNA, 19 nt, Homo sapiens
  misc_RNA (1)...(19): siRNA sense strand
gaagggaacauggaagaca

SEQ ID NO: 1537248 - RNA, 19 nt, Homo sapiens
  misc_RNA (1)...(19): siRNA sense strand
ugagacaacaggucacaaa

SEQ ID NO: 1537249 - RNA, 19 nt, Homo sapiens
  misc_RNA (1)...(19): siRNA sense strand
uggaggauaugcagagaga

SEQ ID NO: 1537250 - RNA, 19 nt, Homo sapiens
  misc_RNA (1)...(19): siRNA sense strand
ggagaguuaugagaaugug

SEQ ID NO: 1537251 - RNA, 19 nt, Homo sapiens
  misc_RNA (1)...(19): siRNA sense strand
gagaauccacacaggagaa

SEQ ID NO: 1537252 - RNA, 19 nt, Homo sapiens
  misc_RNA (1)...(19): siRNA sense strand
aaagaacucaugagagaga

SEQ ID NO: 1537253 - RNA, 19 nt, Homo sapiens
  misc_RNA (1)...(19): siRNA sense strand
ggaacugcagccaaagaaa

SEQ ID NO: 1537254 - RNA, 19 nt, Homo sapiens
  misc_RNA (1)...(19): siRNA sense strand
caggagaagagaaauuuga

SEQ ID NO: 1537255 - RNA, 19 nt, Homo sapiens
  misc_RNA (1)...(19): siRNA sense strand
ggagaagagaaauuugaga

SEQ ID NO: 1537256 - RNA, 19 nt, Homo sapiens
  misc_RNA (1)...(19): siRNA sense strand
ggccugagaugcgcacgaa

SEQ ID NO: 1537257 - RNA, 19 nt, Homo sapiens
  misc_RNA (1)...(19): siRNA sense strand
cuggagagcgaccuuauaa

SEQ ID NO: 1537258 - RNA, 19 nt, Homo sapiens
  misc_RNA (1)...(19): siRNA sense strand
cuaauuaggcaccagagaa

SEQ ID NO: 1537259 - RNA, 19 nt, Homo sapiens
  misc_RNA (1)...(19): siRNA sense strand
gggcaucaggauccuagua

SEQ ID NO: 1537260 - RNA, 19 nt, Homo sapiens
  misc_RNA (1)...(19): siRNA sense strand
ggcaucaggauccuaguaa

SEQ ID NO: 1537261 - RNA, 19 nt, Homo sapiens
  misc_RNA (1)...(19): siRNA sense strand
agagagagcuugggagacu

SEQ ID NO: 1537262 - RNA, 19 nt, Homo sapiens
  misc_RNA (1)...(19): siRNA sense strand
cgggagagagacccuauaa

SEQ ID NO: 1537263 - RNA, 19 nt, Homo sapiens
  misc_RNA (1)...(19): siRNA sense strand
aagaagcggugacccuugu

SEQ ID NO: 1537264 - RNA, 19 nt, Homo sapiens
  misc_RNA (1)...(19): siRNA sense strand
caucaggauccuaguaaga

SEQ ID NO: 1537265 - RNA, 19 nt, Homo sapiens
  misc_RNA (1)...(19): siRNA sense strand
gagcugggaagaccucaug

SEQ ID NO: 1537266 - RNA, 19 nt, Homo sapiens
  misc_RNA (1)...(19): siRNA sense strand
gcaucaggauccuaguaag

SEQ ID NO: 1537267 - RNA, 19 nt, Homo sapiens
  misc_RNA (1)...(19): siRNA sense strand
gggacaaggaggaaagcua

SEQ ID NO: 1537268 - RNA, 19 nt, Homo sapiens
  misc_RNA (1)...(19): siRNA sense strand
caggagaguuaugagaaug

SEQ ID NO: 1537269 - RNA, 19 nt, Homo sapiens
  misc_RNA (1)...(19): siRNA sense strand
cccuaucagugcaacauuu

SEQ ID NO: 1537270 - RNA, 19 nt, Homo sapiens
  misc_RNA (1)...(19): siRNA sense strand
agaagcucuuugaauguuu

SEQ ID NO: 1537271 - RNA, 19 nt, Homo sapiens
  misc_RNA (1)...(19): siRNA sense strand
ucuuggagcugcugguguu

SEQ ID NO: 1537272 - RNA, 19 nt, Homo sapiens
  misc_RNA (1)...(19): siRNA sense strand
cccuauaaauguucugaau

SEQ ID NO: 1537273 - RNA, 19 nt, Homo sapiens
  misc_RNA (1)...(19): siRNA sense strand
gaauacaugcagcugaaag

SEQ ID NO: 1537274 - RNA, 19 nt, Homo sapiens
  misc_RNA (1)...(19): siRNA sense strand
uaauuaggcaccagagaau

SEQ ID NO: 1537275 - RNA, 19 nt, Homo sapiens
  misc_RNA (1)...(19): siRNA sense strand
aagggaacauggaagacaa

SEQ ID NO: 1537276 - RNA, 19 nt, Homo sapiens
  misc_RNA (1)...(19): siRNA sense strand
guucccgucuuaugaguca

SEQ ID NO: 1537277 - RNA, 19 nt, Homo sapiens
  misc_RNA (1)...(19): siRNA sense strand
gggaaaacuucucucauag

SEQ ID NO: 1537278 - RNA, 19 nt, Homo sapiens
  misc_RNA (1)...(19): siRNA sense strand
caccagacaucagagaaca

SEQ ID NO: 1537279 - RNA, 19 nt, Homo sapiens
  misc_RNA (1)...(19): siRNA sense strand
guaaaggagagggcauuau

SEQ ID NO: 1537280 - RNA, 19 nt, Homo sapiens
  misc_RNA (1)...(19): siRNA sense strand
gggagagagacccuauaaa

SEQ ID NO: 1537281 - RNA, 19 nt, Homo sapiens
  misc_RNA (1)...(19): siRNA sense strand
cacgaaagaacucaugaga

SEQ ID NO: 1537282 - RNA, 19 nt, Homo sapiens
  misc_RNA (1)...(19): siRNA sense strand
ggugagaagcccuaucagu

SEQ ID NO: 1537283 - RNA, 19 nt, Homo sapiens
  misc_RNA (1)...(19): siRNA sense strand
gaguucacaccucgucauu

SEQ ID NO: 1537284 - RNA, 19 nt, Homo sapiens
  misc_RNA (1)...(19): siRNA sense strand
gcagcugaaagacugugua

SEQ ID NO: 1537285 - RNA, 19 nt, Homo sapiens
  misc_RNA (1)...(19): siRNA sense strand
cggaguucccgucuuauga

SEQ ID NO: 1537286 - RNA, 19 nt, Homo sapiens
  misc_RNA (1)...(19): siRNA sense strand
cccuauaccugucaugagu

SEQ ID NO: 1537287 - RNA, 19 nt, Homo sapiens
  misc_RNA (1)...(19): siRNA sense strand
gagagucaccgagcuucaa

SEQ ID NO: 1537288 - RNA, 19 nt, Homo sapiens
  misc_RNA (1)...(19): siRNA sense strand
gcaaagggacgucagacaa

SEQ ID NO: 1537289 - RNA, 19 nt, Homo sapiens
  misc_RNA (1)...(19): siRNA sense strand
caaagggacgucagacaag

SEQ ID NO: 1537290 - RNA, 19 nt, Homo sapiens
  misc_RNA (1)...(19): siRNA sense strand
aaagggacgucagacaagu

SEQ ID NO: 1537291 - RNA, 19 nt, Homo sapiens
  misc_RNA (1)...(19): siRNA sense strand
gcaaaggggcgucggacaa

SEQ ID NO: 1537292 - RNA, 19 nt, Homo sapiens
  misc_RNA (1)...(19): siRNA sense strand
cauccaagguuuagauuua

SEQ ID NO: 1537293 - RNA, 19 nt, Homo sapiens
  misc_RNA (1)...(19): siRNA sense strand
caagaaggcucccuaugaa

SEQ ID NO: 1537294 - RNA, 19 nt, Homo sapiens
  misc_RNA (1)...(19): siRNA sense strand
ggagauccaucagagaaua

SEQ ID NO: 1537295 - RNA, 19 nt, Homo sapiens
  misc_RNA (1)...(19): siRNA sense strand
gaagcgcacuuuaccuuug

SEQ ID NO: 1537296 - RNA, 19 nt, Homo sapiens
  misc_RNA (1)...(19): siRNA sense strand
gcaggaacccuucuacaaa

SEQ ID NO: 1537297 - RNA, 19 nt, Homo sapiens
  misc_RNA (1)...(19): siRNA sense strand
gaagaaggucgaaguuauu

SEQ ID NO: 1537298 - RNA, 19 nt, Homo sapiens
  misc_RNA (1)...(19): siRNA sense strand
gagccgacauccaagguuu

SEQ ID NO: 1537299 - RNA, 19 nt, Homo sapiens
  misc_RNA (1)...(19): siRNA sense strand
agaagaaggucgaaguuau

SEQ ID NO: 1537300 - RNA, 19 nt, Homo sapiens
  misc_RNA (1)...(19): siRNA sense strand
ggagccaaaugugauuaua

SEQ ID NO: 1537301 - RNA, 19 nt, Homo sapiens
  misc_RNA (1)...(19): siRNA sense strand
caucagagaauaagaagaa

SEQ ID NO: 1537302 - RNA, 19 nt, Homo sapiens
  misc_RNA (1)...(19): siRNA sense strand
gaaggaggcaucugagguu

SEQ ID NO: 1537303 - RNA, 19 nt, Homo sapiens
  misc_RNA (1)...(19): siRNA sense strand
acaagaaggcucccuauga

SEQ ID NO: 1537304 - RNA, 19 nt, Homo sapiens
  misc_RNA (1)...(19): siRNA sense strand
caagugcagcagauucuua

SEQ ID NO: 1537305 - RNA, 19 nt, Homo sapiens
  misc_RNA (1)...(19): siRNA sense strand
gagaagaagccuacaugga

SEQ ID NO: 1537306 - RNA, 19 nt, Homo sapiens
  misc_RNA (1)...(19): siRNA sense strand
cagcuaagguucugucucu

SEQ ID NO: 1537307 - RNA, 19 nt, Homo sapiens
  misc_RNA (1)...(19): siRNA sense strand
ggaauuacuccuugucugu

SEQ ID NO: 1537308 - RNA, 19 nt, Homo sapiens
  misc_RNA (1)...(19): siRNA sense strand
ggacggaauuacuccuugu

SEQ ID NO: 1537309 - RNA, 19 nt, Homo sapiens
  misc_RNA (1)...(19): siRNA sense strand
ccaagaaggaggcaucuga

SEQ ID NO: 1537310 - RNA, 19 nt, Homo sapiens
  misc_RNA (1)...(19): siRNA sense strand
caaugaaacccaagaagga

SEQ ID NO: 1537311 - RNA, 19 nt, Homo sapiens
  misc_RNA (1)...(19): siRNA sense strand
ggaagcgcacuuuaccuuu

SEQ ID NO: 1537312 - RNA, 19 nt, Homo sapiens
  misc_RNA (1)...(19): siRNA sense strand
ggcccuaccuggaagcaaa

SEQ ID NO: 1537313 - RNA, 19 nt, Homo sapiens
  misc_RNA (1)...(19): siRNA sense strand
uuauggagauucuuaguuc

SEQ ID NO: 1537314 - RNA, 19 nt, Homo sapiens
  misc_RNA (1)...(19): siRNA sense strand
agacagagagucagcacua

SEQ ID NO: 1537315 - RNA, 19 nt, Homo sapiens
  misc_RNA (1)...(19): siRNA sense strand
gggcacugaucaaggagaa

SEQ ID NO: 1537316 - RNA, 19 nt, Homo sapiens
  misc_RNA (1)...(19): siRNA sense strand
gacaauagaaagcucauca

SEQ ID NO: 1537317 - RNA, 19 nt, Homo sapiens
  misc_RNA (1)...(19): siRNA sense strand
ugaaaccauugcccuucua

SEQ ID NO: 1537318 - RNA, 19 nt, Homo sapiens
  misc_RNA (1)...(19): siRNA sense strand
caauagaaagcucaucaga

SEQ ID NO: 1537319 - RNA, 19 nt, Homo sapiens
  misc_RNA (1)...(19): siRNA sense strand
ggaagaugcgccugacugu

SEQ ID NO: 1537320 - RNA, 19 nt, Homo sapiens
  misc_RNA (1)...(19): siRNA sense strand
gcccucaggucccucuuug

SEQ ID NO: 1537321 - RNA, 19 nt, Homo sapiens
  misc_RNA (1)...(19): siRNA sense strand
ccaggugcuucuuggcuuu

SEQ ID NO: 1537322 - RNA, 19 nt, Homo sapiens
  misc_RNA (1)...(19): siRNA sense strand
uaagaagaaggucgaaguu

SEQ ID NO: 1537323 - RNA, 19 nt, Homo sapiens
  misc_RNA (1)...(19): siRNA sense strand
aagaagaaggucgaaguua

SEQ ID NO: 1537324 - RNA, 19 nt, Homo sapiens
  misc_RNA (1)...(19): siRNA sense strand
gacagagagucagcacuau

SEQ ID NO: 1537325 - RNA, 19 nt, Homo sapiens
  misc_RNA (1)...(19): siRNA sense strand
gaaaccauugcccuucuau

SEQ ID NO: 1537326 - RNA, 19 nt, Homo sapiens
  misc_RNA (1)...(19): siRNA sense strand
gagauccaucagagaauaa

SEQ ID NO: 1537327 - RNA, 19 nt, Homo sapiens
  misc_RNA (1)...(19): siRNA sense strand
gcacugaucaaggagaaau

SEQ ID NO: 1537328 - RNA, 19 nt, Homo sapiens
  misc_RNA (1)...(19): siRNA sense strand
cuuaguuccuguucagauu

SEQ ID NO: 1537329 - RNA, 19 nt, Homo sapiens
  misc_RNA (1)...(19): siRNA sense strand
ggauccuggugcccaauga

SEQ ID NO: 1537330 - RNA, 19 nt, Homo sapiens
  misc_RNA (1)...(19): siRNA sense strand
aaccauugcccuucuauga

SEQ ID NO: 1537331 - RNA, 19 nt, Homo sapiens
  misc_RNA (1)...(19): siRNA sense strand
uuucauuucuucagacaga

SEQ ID NO: 1537332 - RNA, 19 nt, Homo sapiens
  misc_RNA (1)...(19): siRNA sense strand
gggauuuccuguccagucu

SEQ ID NO: 1537333 - RNA, 19 nt, Homo sapiens
  misc_RNA (1)...(19): siRNA sense strand
ggaggcaucugagguuugc

SEQ ID NO: 1537334 - RNA, 19 nt, Homo sapiens
  misc_RNA (1)...(19): siRNA sense strand
cuucgaugcugcccuuuau

SEQ ID NO: 1537335 - RNA, 19 nt, Homo sapiens
  misc_RNA (1)...(19): siRNA sense strand
caggaacccuucuacaaaa

SEQ ID NO: 1537336 - RNA, 19 nt, Homo sapiens
  misc_RNA (1)...(19): siRNA sense strand
ccucugaucucucccuucu

SEQ ID NO: 1537337 - RNA, 19 nt, Homo sapiens
  misc_RNA (1)...(19): siRNA sense strand
ccauacaggugcagcuaag

SEQ ID NO: 1537338 - RNA, 19 nt, Homo sapiens
  misc_RNA (1)...(19): siRNA sense strand
ucaccucacuagaugaaca

SEQ ID NO: 1537339 - RNA, 19 nt, Homo sapiens
  misc_RNA (1)...(19): siRNA sense strand
cgacauccaagguuuagau

SEQ ID NO: 1537340 - RNA, 19 nt, Homo sapiens
  misc_RNA (1)...(19): siRNA sense strand
gaaggcucccuaugaaucu

SEQ ID NO: 1537341 - RNA, 19 nt, Homo sapiens
  misc_RNA (1)...(19): siRNA sense strand
gcgccugacugucccuugu

SEQ ID NO: 1537342 - RNA, 19 nt, Homo sapiens
  misc_RNA (1)...(19): siRNA sense strand
caaggucaaugggaaacug

SEQ ID NO: 1537343 - RNA, 19 nt, Homo sapiens
  misc_RNA (1)...(19): siRNA sense strand
cuaaggagcccugcuaugg

SEQ ID NO: 1537344 - RNA, 19 nt, Homo sapiens
  misc_RNA (1)...(19): siRNA sense strand
caauuggucaucugaguuc

SEQ ID NO: 1537345 - RNA, 19 nt, Homo sapiens
  misc_RNA (1)...(19): siRNA sense strand
gacaagaaggcucccuaug

SEQ ID NO: 1537346 - RNA, 19 nt, Homo sapiens
  misc_RNA (1)...(19): siRNA sense strand
cugcugacccugacaguga

SEQ ID NO: 1537347 - RNA, 19 nt, Homo sapiens
  misc_RNA (1)...(19): siRNA sense strand
gugcuaaggagcccugcua

SEQ ID NO: 1537348 - RNA, 19 nt, Homo sapiens
  misc_RNA (1)...(19): siRNA sense strand
gaaggucgaaguuauugac

SEQ ID NO: 1537349 - RNA, 19 nt, Homo sapiens
  misc_RNA (1)...(19): siRNA sense strand
ucugaucucucccuucucu

SEQ ID NO: 1537350 - RNA, 19 nt, Homo sapiens
  misc_RNA (1)...(19): siRNA sense strand
ugucaucaccucacuagau

SEQ ID NO: 1537351 - RNA, 19 nt, Homo sapiens
  misc_RNA (1)...(19): siRNA sense strand
gcuucgaugcugcccuuua

SEQ ID NO: 1537352 - RNA, 19 nt, Homo sapiens
  misc_RNA (1)...(19): siRNA sense strand
gucaauuggucaucugagu

SEQ ID NO: 1537353 - RNA, 19 nt, Homo sapiens
  misc_RNA (1)...(19): siRNA sense strand
gcuaagguucugucucugu

SEQ ID NO: 1537354 - RNA, 19 nt, Homo sapiens
  misc_RNA (1)...(19): siRNA sense strand
cccuaugaaucucuuauca

SEQ ID NO: 1537355 - RNA, 19 nt, Homo sapiens
  misc_RNA (1)...(19): siRNA sense strand
ccuggcaccucuccuguag

SEQ ID NO: 1537356 - RNA, 19 nt, Homo sapiens
  misc_RNA (1)...(19): siRNA sense strand
gcuaaggagcccugcuaug

SEQ ID NO: 1537357 - RNA, 19 nt, Homo sapiens
  misc_RNA (1)...(19): siRNA sense strand
gcucugcaccuccugaagu

SEQ ID NO: 1537358 - RNA, 19 nt, Homo sapiens
  misc_RNA (1)...(19): siRNA sense strand
ccaaaugugauuauaccau

SEQ ID NO: 1537359 - RNA, 19 nt, Homo sapiens
  misc_RNA (1)...(19): siRNA sense strand
caucauuucccuggacuga

SEQ ID NO: 1537360 - RNA, 19 nt, Homo sapiens
  misc_RNA (1)...(19): siRNA sense strand
agaaggcucccuaugaauc

SEQ ID NO: 1537361 - RNA, 19 nt, Homo sapiens
  misc_RNA (1)...(19): siRNA sense strand
ccaggagccaaaugugauu

SEQ ID NO: 1537362 - RNA, 19 nt, Homo sapiens
  misc_RNA (1)...(19): siRNA sense strand
ugacaagaaggcucccuau

SEQ ID NO: 1537363 - RNA, 19 nt, Homo sapiens
  misc_RNA (1)...(19): siRNA sense strand
gagccaaaugugauuauac

SEQ ID NO: 1537364 - RNA, 19 nt, Homo sapiens
  misc_RNA (1)...(19): siRNA sense strand
ugcagcagauucuuacauc

SEQ ID NO: 1537365 - RNA, 19 nt, Homo sapiens
  misc_RNA (1)...(19): siRNA sense strand
gacauccaagguuuagauu

SEQ ID NO: 1537366 - RNA, 19 nt, Homo sapiens
  misc_RNA (1)...(19): siRNA sense strand
cuaccaagaagcacuguuc

SEQ ID NO: 1537367 - RNA, 19 nt, Homo sapiens
  misc_RNA (1)...(19): siRNA sense strand
aaggaggcaucugagguuu

SEQ ID NO: 1537368 - RNA, 19 nt, Homo sapiens
  misc_RNA (1)...(19): siRNA sense strand
ucaauuggucaucugaguu

SEQ ID NO: 1537369 - RNA, 19 nt, Homo sapiens
  misc_RNA (1)...(19): siRNA sense strand
gaugcugcccuuuaucuac

SEQ ID NO: 1537370 - RNA, 19 nt, Homo sapiens
  misc_RNA (1)...(19): siRNA sense strand
ggaugcccuuggccacuuc

SEQ ID NO: 1537371 - RNA, 19 nt, Homo sapiens
  misc_RNA (1)...(19): siRNA sense strand
gagcuccaggugcuucuug

SEQ ID NO: 1537372 - RNA, 19 nt, Homo sapiens
  misc_RNA (1)...(19): siRNA sense strand
gaauaagaagaaggucgaa

SEQ ID NO: 1537373 - RNA, 19 nt, Homo sapiens
  misc_RNA (1)...(19): siRNA sense strand
acccugaugucaccaugaa

SEQ ID NO: 1537374 - RNA, 19 nt, Homo sapiens
  misc_RNA (1)...(19): siRNA sense strand
acagaugaaugagaagaag

SEQ ID NO: 1537375 - RNA, 19 nt, Homo sapiens
  misc_RNA (1)...(19): siRNA sense strand
gccaggagccaaaugugau

SEQ ID NO: 1537376 - RNA, 19 nt, Homo sapiens
  misc_RNA (1)...(19): siRNA sense strand
ggccgugucagcagcauug

SEQ ID NO: 1537377 - RNA, 19 nt, Homo sapiens
  misc_RNA (1)...(19): siRNA sense strand
cagagaauaagaagaaggu

SEQ ID NO: 1537378 - RNA, 19 nt, Homo sapiens
  misc_RNA (1)...(19): siRNA sense strand
ugcaggaacccuucuacaa

SEQ ID NO: 1537379 - RNA, 19 nt, Homo sapiens
  misc_RNA (1)...(19): siRNA sense strand
cagagagucagcacuaugg

SEQ ID NO: 1537380 - RNA, 19 nt, Homo sapiens
  misc_RNA (1)...(19): siRNA sense strand
cagccauccucggugcuaa

SEQ ID NO: 1537381 - RNA, 19 nt, Homo sapiens
  misc_RNA (1)...(19): siRNA sense strand
aauagaaagcucaucagau

SEQ ID NO: 1537382 - RNA, 19 nt, Homo sapiens
  misc_RNA (1)...(19): siRNA sense strand
gagauucuuaguuccuguu

SEQ ID NO: 1537383 - RNA, 19 nt, Homo sapiens
  misc_RNA (1)...(19): siRNA sense strand
gagguggccacuacaaguc

SEQ ID NO: 1537384 - RNA, 19 nt, Homo sapiens
  misc_RNA (1)...(19): siRNA sense strand
cagcaagugcagcagauuc

SEQ ID NO: 1537385 - RNA, 19 nt, Homo sapiens
  misc_RNA (1)...(19): siRNA sense strand
gaugaagaucaaagagcuu

SEQ ID NO: 1537386 - RNA, 19 nt, Homo sapiens
  misc_RNA (1)...(19): siRNA sense strand
gaugucaccaugaaaccau

SEQ ID NO: 1537387 - RNA, 19 nt, Homo sapiens
  misc_RNA (1)...(19): siRNA sense strand
gcaagugcagcagauucuu

SEQ ID NO: 1537388 - RNA, 19 nt, Homo sapiens
  misc_RNA (1)...(19): siRNA sense strand
caggagccaaaugugauua

SEQ ID NO: 1537389 - RNA, 19 nt, Homo sapiens
  misc_RNA (1)...(19): siRNA sense strand
gauccuggugcccaaugaa

SEQ ID NO: 1537390 - RNA, 19 nt, Homo sapiens
  misc_RNA (1)...(19): siRNA sense strand
ccuaguguccagaugaaga

SEQ ID NO: 1537391 - RNA, 19 nt, Homo sapiens
  misc_RNA (1)...(19): siRNA sense strand
ggagccgacauccaagguu

SEQ ID NO: 1537392 - RNA, 19 nt, Homo sapiens
  misc_RNA (1)...(19): siRNA sense strand
ggaaagagauugacauaaa

SEQ ID NO: 1537393 - RNA, 19 nt, Homo sapiens
  misc_RNA (1)...(19): siRNA sense strand
gagagaagaugauguugga

SEQ ID NO: 1537394 - RNA, 19 nt, Homo sapiens
  misc_RNA (1)...(19): siRNA sense strand
gagcaggccuguuggaaau

SEQ ID NO: 1537395 - RNA, 19 nt, Homo sapiens
  misc_RNA (1)...(19): siRNA sense strand
gaucagcacccuaaagaaa

SEQ ID NO: 1537396 - RNA, 19 nt, Homo sapiens
  misc_RNA (1)...(19): siRNA sense strand
gcaagugugucgcaauguu

SEQ ID NO: 1537397 - RNA, 19 nt, Homo sapiens
  misc_RNA (1)...(19): siRNA sense strand
ggagaugaauacuuuacuu

SEQ ID NO: 1537398 - RNA, 19 nt, Homo sapiens
  misc_RNA (1)...(19): siRNA sense strand
gcaaggcauuggaugauau

SEQ ID NO: 1537399 - RNA, 19 nt, Homo sapiens
  misc_RNA (1)...(19): siRNA sense strand
gcccaugccuugacagaaa

SEQ ID NO: 1537400 - RNA, 19 nt, Homo sapiens
  misc_RNA (1)...(19): siRNA sense strand
ccaagacuauugcagauau

SEQ ID NO: 1537401 - RNA, 19 nt, Homo sapiens
  misc_RNA (1)...(19): siRNA sense strand
caagaacccucgcauugug

SEQ ID NO: 1537402 - RNA, 19 nt, Homo sapiens
  misc_RNA (1)...(19): siRNA sense strand
gauaugaucagcacccuaa

SEQ ID NO: 1537403 - RNA, 19 nt, Homo sapiens
  misc_RNA (1)...(19): siRNA sense strand
cugugaagcugcagacuua

SEQ ID NO: 1537404 - RNA, 19 nt, Homo sapiens
  misc_RNA (1)...(19): siRNA sense strand
gggaccacaucaguaauua

SEQ ID NO: 1537405 - RNA, 19 nt, Homo sapiens
  misc_RNA (1)...(19): siRNA sense strand
ggagaaagccagacugaca

SEQ ID NO: 1537406 - RNA, 19 nt, Homo sapiens
  misc_RNA (1)...(19): siRNA sense strand
guacuuugguggacaugaa

SEQ ID NO: 1537407 - RNA, 19 nt, Homo sapiens
  misc_RNA (1)...(19): siRNA sense strand
gauaucauccgaacauguu

SEQ ID NO: 1537408 - RNA, 19 nt, Homo sapiens
  misc_RNA (1)...(19): siRNA sense strand
gcauugugcugcuggauuc

SEQ ID NO: 1537409 - RNA, 19 nt, Homo sapiens
  misc_RNA (1)...(19): siRNA sense strand
ggccaugacugguguggaa

SEQ ID NO: 1537410 - RNA, 19 nt, Homo sapiens
  misc_RNA (1)...(19): siRNA sense strand
gcagauaucauccgaacau

SEQ ID NO: 1537411 - RNA, 19 nt, Homo sapiens
  misc_RNA (1)...(19): siRNA sense strand
gaccacaucaguaauuauu

SEQ ID NO: 1537412 - RNA, 19 nt, Homo sapiens
  misc_RNA (1)...(19): siRNA sense strand
ccaaguccaugaugaagau

SEQ ID NO: 1537413 - RNA, 19 nt, Homo sapiens
  misc_RNA (1)...(19): siRNA sense strand
ugaaggaacugggcauaug

SEQ ID NO: 1537414 - RNA, 19 nt, Homo sapiens
  misc_RNA (1)...(19): siRNA sense strand
ccaaguccaugaucgaaau

SEQ ID NO: 1537415 - RNA, 19 nt, Homo sapiens
  misc_RNA (1)...(19): siRNA sense strand
cagaggaacugagagaaga

SEQ ID NO: 1537416 - RNA, 19 nt, Homo sapiens
  misc_RNA (1)...(19): siRNA sense strand
aucaacagcucuauuacua

SEQ ID NO: 1537417 - RNA, 19 nt, Homo sapiens
  misc_RNA (1)...(19): siRNA sense strand
gagaauggucggaaagaga

SEQ ID NO: 1537418 - RNA, 19 nt, Homo sapiens
  misc_RNA (1)...(19): siRNA sense strand
ccacaucaguaauuauucu

SEQ ID NO: 1537419 - RNA, 19 nt, Homo sapiens
  misc_RNA (1)...(19): siRNA sense strand
gaacugagagaagaugaug

SEQ ID NO: 1537420 - RNA, 19 nt, Homo sapiens
  misc_RNA (1)...(19): siRNA sense strand
gcucagcacuaccuuaugc

SEQ ID NO: 1537421 - RNA, 19 nt, Homo sapiens
  misc_RNA (1)...(19): siRNA sense strand
ugacugguguggaacaaug

SEQ ID NO: 1537422 - RNA, 19 nt, Homo sapiens
  misc_RNA (1)...(19): siRNA sense strand
ggagcaggccuguuggaaa

SEQ ID NO: 1537423 - RNA, 19 nt, Homo sapiens
  misc_RNA (1)...(19): siRNA sense strand
ggcauuggaugauaugauc

SEQ ID NO: 1537424 - RNA, 19 nt, Homo sapiens
  misc_RNA (1)...(19): siRNA sense strand
agacugacauugagauuac

SEQ ID NO: 1537425 - RNA, 19 nt, Homo sapiens
  misc_RNA (1)...(19): siRNA sense strand
gacccaggaugaagagguu

SEQ ID NO: 1537426 - RNA, 19 nt, Homo sapiens
  misc_RNA (1)...(19): siRNA sense strand
gacagacaauaaucgcauu

SEQ ID NO: 1537427 - RNA, 19 nt, Homo sapiens
  misc_RNA (1)...(19): siRNA sense strand
ggucaucuuuggcuugcaa

SEQ ID NO: 1537428 - RNA, 19 nt, Homo sapiens
  misc_RNA (1)...(19): siRNA sense strand
uuucaucacugacugcaaa

SEQ ID NO: 1537429 - RNA, 19 nt, Homo sapiens
  misc_RNA (1)...(19): siRNA sense strand
acagugauaugaugcugaa

SEQ ID NO: 1537430 - RNA, 19 nt, Homo sapiens
  misc_RNA (1)...(19): siRNA sense strand
ugaagcugcagacuuauaa

SEQ ID NO: 1537431 - RNA, 19 nt, Homo sapiens
  misc_RNA (1)...(19): siRNA sense strand
gcuggauucuucucuggaa

SEQ ID NO: 1537432 - RNA, 19 nt, Homo sapiens
  misc_RNA (1)...(19): siRNA sense strand
gaugaccaaugauggcaau

SEQ ID NO: 1537433 - RNA, 19 nt, Homo sapiens
  misc_RNA (1)...(19): siRNA sense strand
caagaaaauuggagaugaa

SEQ ID NO: 1537434 - RNA, 19 nt, Homo sapiens
  misc_RNA (1)...(19): siRNA sense strand
caucaaugcugccaagacu

SEQ ID NO: 1537435 - RNA, 19 nt, Homo sapiens
  misc_RNA (1)...(19): siRNA sense strand
ugaggagaauggucggaaa

SEQ ID NO: 1537436 - RNA, 19 nt, Homo sapiens
  misc_RNA (1)...(19): siRNA sense strand
gcagcucugugaggacauu

SEQ ID NO: 1537437 - RNA, 19 nt, Homo sapiens
  misc_RNA (1)...(19): siRNA sense strand
gaacacaaagcgugaaucc

SEQ ID NO: 1537438 - RNA, 19 nt, Homo sapiens
  misc_RNA (1)...(19): siRNA sense strand
gcugcagacuuauaagaca

SEQ ID NO: 1537439 - RNA, 19 nt, Homo sapiens
  misc_RNA (1)...(19): siRNA sense strand
gcaggccuguuggaaauca

SEQ ID NO: 1537440 - RNA, 19 nt, Homo sapiens
  misc_RNA (1)...(19): siRNA sense strand
gaaaggagaaagccagacu

SEQ ID NO: 1537441 - RNA, 19 nt, Homo sapiens
  misc_RNA (1)...(19): siRNA sense strand
ggaauacaagaaaggagaa

SEQ ID NO: 1537442 - RNA, 19 nt, Homo sapiens
  misc_RNA (1)...(19): siRNA sense strand
ggagaauggucggaaagag

SEQ ID NO: 1537443 - RNA, 19 nt, Homo sapiens
  misc_RNA (1)...(19): siRNA sense strand
gugaagcugcagacuuaua

SEQ ID NO: 1537444 - RNA, 19 nt, Homo sapiens
  misc_RNA (1)...(19): siRNA sense strand
cgcaaggcauuggaugaua

SEQ ID NO: 1537445 - RNA, 19 nt, Homo sapiens
  misc_RNA (1)...(19): siRNA sense strand
gaaggaacugggcauaugg

SEQ ID NO: 1537446 - RNA, 19 nt, Homo sapiens
  misc_RNA (1)...(19): siRNA sense strand
ggacuucacccgaauucuc

SEQ ID NO: 1537447 - RNA, 19 nt, Homo sapiens
  misc_RNA (1)...(19): siRNA sense strand
gcagaguccggaagacaga

SEQ ID NO: 1537448 - RNA, 19 nt, Homo sapiens
  misc_RNA (1)...(19): siRNA sense strand
cccaaggccugcaccauuc

SEQ ID NO: 1537449 - RNA, 19 nt, Homo sapiens
  misc_RNA (1)...(19): siRNA sense strand
gaccagaggaacugagaga

SEQ ID NO: 1537450 - RNA, 19 nt, Homo sapiens
  misc_RNA (1)...(19): siRNA sense strand
gagucaugauuaacaagga

SEQ ID NO: 1537451 - RNA, 19 nt, Homo sapiens
  misc_RNA (1)...(19): siRNA sense strand
ucggaaagagauugacaua

SEQ ID NO: 1537452 - RNA, 19 nt, Homo sapiens
  misc_RNA (1)...(19): siRNA sense strand
guucugcuacugcgaauug

SEQ ID NO: 1537453 - RNA, 19 nt, Homo sapiens
  misc_RNA (1)...(19): siRNA sense strand
aaaguucaaucuggaaaca

SEQ ID NO: 1537454 - RNA, 19 nt, Homo sapiens
  misc_RNA (1)...(19): siRNA sense strand
gugaggacauuauccaacu

SEQ ID NO: 1537455 - RNA, 19 nt, Homo sapiens
  misc_RNA (1)...(19): siRNA sense strand
ucaaugcugccaagacuau

SEQ ID NO: 1537456 - RNA, 19 nt, Homo sapiens
  misc_RNA (1)...(19): siRNA sense strand
guggagucaugauuaacaa

SEQ ID NO: 1537457 - RNA, 19 nt, Homo sapiens
  misc_RNA (1)...(19): siRNA sense strand
ggaugaagagguuggagau

SEQ ID NO: 1537458 - RNA, 19 nt, Homo sapiens
  misc_RNA (1)...(19): siRNA sense strand
gaggacauuauccaacuga

SEQ ID NO: 1537459 - RNA, 19 nt, Homo sapiens
  misc_RNA (1)...(19): siRNA sense strand
cagacugacauugagauua

SEQ ID NO: 1537460 - RNA, 19 nt, Homo sapiens
  misc_RNA (1)...(19): siRNA sense strand
gagaaagccagacugacau

SEQ ID NO: 1537461 - RNA, 19 nt, Homo sapiens
  misc_RNA (1)...(19): siRNA sense strand
ccuggaugcugucaagaug

SEQ ID NO: 1537462 - RNA, 19 nt, Homo sapiens
  misc_RNA (1)...(19): siRNA sense strand
gugauaugaugcugaacau

SEQ ID NO: 1537463 - RNA, 19 nt, Homo sapiens
  misc_RNA (1)...(19): siRNA sense strand
ggaagacagacaauaaucg

SEQ ID NO: 1537464 - RNA, 19 nt, Homo sapiens
  misc_RNA (1)...(19): siRNA sense strand
agauuuagcucagcacuac

SEQ ID NO: 1537465 - RNA, 19 nt, Homo sapiens
  misc_RNA (1)...(19): siRNA sense strand
gaaagccagacugacauug

SEQ ID NO: 1537466 - RNA, 19 nt, Homo sapiens
  misc_RNA (1)...(19): siRNA sense strand
gugcuuaccgcaaggcauu

SEQ ID NO: 1537467 - RNA, 19 nt, Homo sapiens
  misc_RNA (1)...(19): siRNA sense strand
guggaacaauggccauaca

SEQ ID NO: 1537468 - RNA, 19 nt, Homo sapiens
  misc_RNA (1)...(19): siRNA sense strand
aaagccagacugacauuga

SEQ ID NO: 1537469 - RNA, 19 nt, Homo sapiens
  misc_RNA (1)...(19): siRNA sense strand
gaauacaagaaaggagaaa

SEQ ID NO: 1537470 - RNA, 19 nt, Homo sapiens
  misc_RNA (1)...(19): siRNA sense strand
ucaagaacccucgcauugu

SEQ ID NO: 1537471 - RNA, 19 nt, Homo sapiens
  misc_RNA (1)...(19): siRNA sense strand
gacccaaguccaugaugaa

SEQ ID NO: 1537472 - RNA, 19 nt, Homo sapiens
  misc_RNA (1)...(19): siRNA sense strand
ccaagcacacccaggagaa

SEQ ID NO: 1537473 - RNA, 19 nt, Homo sapiens
  misc_RNA (1)...(19): siRNA sense strand
ucaagaaaauuggagauga

SEQ ID NO: 1537474 - RNA, 19 nt, Homo sapiens
  misc_RNA (1)...(19): siRNA sense strand
ggacauuauccaacugaag

SEQ ID NO: 1537475 - RNA, 19 nt, Homo sapiens
  misc_RNA (1)...(19): siRNA sense strand
ggaccacaucaguaauuau

SEQ ID NO: 1537476 - RNA, 19 nt, Homo sapiens
  misc_RNA (1)...(19): siRNA sense strand
caagacuauugcagauauc

SEQ ID NO: 1537477 - RNA, 19 nt, Homo sapiens
  misc_RNA (1)...(19): siRNA sense strand
gaaaauuggagaugaauac

SEQ ID NO: 1537478 - RNA, 19 nt, Homo sapiens
  misc_RNA (1)...(19): siRNA sense strand
uaucaagaacccucgcauu

SEQ ID NO: 1537479 - RNA, 19 nt, Homo sapiens
  misc_RNA (1)...(19): siRNA sense strand
cagugacagugauaugaug

SEQ ID NO: 1537480 - RNA, 19 nt, Homo sapiens
  misc_RNA (1)...(19): siRNA sense strand
caucaucaacagcucuauu

SEQ ID NO: 1537481 - RNA, 19 nt, Homo sapiens
  misc_RNA (1)...(19): siRNA sense strand
uagcucagcacuaccuuau

SEQ ID NO: 1537482 - RNA, 19 nt, Homo sapiens
  misc_RNA (1)...(19): siRNA sense strand
gccaagacuauugcagaua

SEQ ID NO: 1537483 - RNA, 19 nt, Homo sapiens
  misc_RNA (1)...(19): siRNA sense strand
caguggugaucagugcuua

SEQ ID NO: 1537484 - RNA, 19 nt, Homo sapiens
  misc_RNA (1)...(19): siRNA sense strand
ugcguggagucaugauuaa

SEQ ID NO: 1537485 - RNA, 19 nt, Homo sapiens
  misc_RNA (1)...(19): siRNA sense strand
uugcguggagucaugauua

SEQ ID NO: 1537486 - RNA, 19 nt, Homo sapiens
  misc_RNA (1)...(19): siRNA sense strand
cuggaggcaucauugaaga

SEQ ID NO: 1537487 - RNA, 19 nt, Homo sapiens
  misc_RNA (1)...(19): siRNA sense strand
gaaaaguucaaucuggaaa

SEQ ID NO: 1537488 - RNA, 19 nt, Homo sapiens
  misc_RNA (1)...(19): siRNA sense strand
ggaggacuucacccgaauu

SEQ ID NO: 1537489 - RNA, 19 nt, Homo sapiens
  misc_RNA (1)...(19): siRNA sense strand
ugucuugcguggagucaug

SEQ ID NO: 1537490 - RNA, 19 nt, Homo sapiens
  misc_RNA (1)...(19): siRNA sense strand
ucacagccauccgcagagu

SEQ ID NO: 1537491 - RNA, 19 nt, Homo sapiens
  misc_RNA (1)...(19): siRNA sense strand
guacccugauccagaacug

SEQ ID NO: 1537492 - RNA, 19 nt, Homo sapiens
  misc_RNA (1)...(19): siRNA sense strand
ucaaagagcaaaucaaaga

SEQ ID NO: 1537493 - RNA, 19 nt, Homo sapiens
  misc_RNA (1)...(19): siRNA sense strand
gagcaaaucaaagaacuaa

SEQ ID NO: 1537494 - RNA, 19 nt, Homo sapiens
  misc_RNA (1)...(19): siRNA sense strand
gaaaagccauuugauguau

SEQ ID NO: 1537495 - RNA, 19 nt, Homo sapiens
  misc_RNA (1)...(19): siRNA sense strand
caagugugguagcuauuga

SEQ ID NO: 1537496 - RNA, 19 nt, Homo sapiens
  misc_RNA (1)...(19): siRNA sense strand
ccucaaagagcaaaucaaa

SEQ ID NO: 1537497 - RNA, 19 nt, Homo sapiens
  misc_RNA (1)...(19): siRNA sense strand
cgagcaagcuauggaucua

SEQ ID NO: 1537498 - RNA, 19 nt, Homo sapiens
  misc_RNA (1)...(19): siRNA sense strand
ggagaacaaucugcugaag

SEQ ID NO: 1537499 - RNA, 19 nt, Homo sapiens
  misc_RNA (1)...(19): siRNA sense strand
gugcaagugugguagcuau

SEQ ID NO: 1537500 - RNA, 19 nt, Homo sapiens
  misc_RNA (1)...(19): siRNA sense strand
gagaacaaucugcugaaga

SEQ ID NO: 1537501 - RNA, 19 nt, Homo sapiens
  misc_RNA (1)...(19): siRNA sense strand
gcaagugugguagcuauug

SEQ ID NO: 1537502 - RNA, 19 nt, Homo sapiens
  misc_RNA (1)...(19): siRNA sense strand
caaagagcaaaucaaagaa

SEQ ID NO: 1537503 - RNA, 19 nt, Homo sapiens
  misc_RNA (1)...(19): siRNA sense strand
cugagcagcuugcccaguu

SEQ ID NO: 1537504 - RNA, 19 nt, Homo sapiens
  misc_RNA (1)...(19): siRNA sense strand
agaacaaucugcugaagac

SEQ ID NO: 1537505 - RNA, 19 nt, Homo sapiens
  misc_RNA (1)...(19): siRNA sense strand
gguagcuauugacaacaaa

SEQ ID NO: 1537506 - RNA, 19 nt, Homo sapiens
  misc_RNA (1)...(19): siRNA sense strand
gauguaugcggucagagaa

SEQ ID NO: 1537507 - RNA, 19 nt, Homo sapiens
  misc_RNA (1)...(19): siRNA sense strand
ugagcagcuugcccaguuu

SEQ ID NO: 1537508 - RNA, 19 nt, Homo sapiens
  misc_RNA (1)...(19): siRNA sense strand
caagcuauggaucuaguga

SEQ ID NO: 1537509 - RNA, 19 nt, Homo sapiens
  misc_RNA (1)...(19): siRNA sense strand
ucgcagggcucaggaccaa

SEQ ID NO: 1537510 - RNA, 19 nt, Homo sapiens
  misc_RNA (1)...(19): siRNA sense strand
ugaaaagccauuugaugua

SEQ ID NO: 1537511 - RNA, 19 nt, Homo sapiens
  misc_RNA (1)...(19): siRNA sense strand
ugugguagcuauugacaac

SEQ ID NO: 1537512 - RNA, 19 nt, Homo sapiens
  misc_RNA (1)...(19): siRNA sense strand
agcuauggaucuagugaaa

SEQ ID NO: 1537513 - RNA, 19 nt, Homo sapiens
  misc_RNA (1)...(19): siRNA sense strand
ugguagcuauugacaacaa

SEQ ID NO: 1537514 - RNA, 19 nt, Homo sapiens
  misc_RNA (1)...(19): siRNA sense strand
uguaugcggucagagaaga

SEQ ID NO: 1537515 - RNA, 19 nt, Homo sapiens
  misc_RNA (1)...(19): siRNA sense strand
acaaucugcugaagacacu

SEQ ID NO: 1537516 - RNA, 19 nt, Homo sapiens
  misc_RNA (1)...(19): siRNA sense strand
gugaaaagccauuugaugu

SEQ ID NO: 1537517 - RNA, 19 nt, Homo sapiens
  misc_RNA (1)...(19): siRNA sense strand
ugauguaugcggucagaga

SEQ ID NO: 1537518 - RNA, 19 nt, Homo sapiens
  misc_RNA (1)...(19): siRNA sense strand
aagagcaaaucaaagaacu

SEQ ID NO: 1537519 - RNA, 19 nt, Homo sapiens
  misc_RNA (1)...(19): siRNA sense strand
caaaaucgagcaagcuaug

SEQ ID NO: 1537520 - RNA, 19 nt, Homo sapiens
  misc_RNA (1)...(19): siRNA sense strand
gagcagcuugcccaguuuc

SEQ ID NO: 1537521 - RNA, 19 nt, Homo sapiens
  misc_RNA (1)...(19): siRNA sense strand
ggccaguccugagcagcuu

SEQ ID NO: 1537522 - RNA, 19 nt, Homo sapiens
  misc_RNA (1)...(19): siRNA sense strand
gaacaaucugcugaagaca

SEQ ID NO: 1537523 - RNA, 19 nt, Homo sapiens
  misc_RNA (1)...(19): siRNA sense strand
aaagccauuugauguaugc

SEQ ID NO: 1537524 - RNA, 19 nt, Homo sapiens
  misc_RNA (1)...(19): siRNA sense strand
ucaaagagcaaaucaaaga

SEQ ID NO: 1537525 - RNA, 19 nt, Homo sapiens
  misc_RNA (1)...(19): siRNA sense strand
gagcaaaucaaagaacuaa

SEQ ID NO: 1537526 - RNA, 19 nt, Homo sapiens
  misc_RNA (1)...(19): siRNA sense strand
gaaaagccauuugauguau

SEQ ID NO: 1537527 - RNA, 19 nt, Homo sapiens
  misc_RNA (1)...(19): siRNA sense strand
caagugugguagcuauuga

SEQ ID NO: 1537528 - RNA, 19 nt, Homo sapiens
  misc_RNA (1)...(19): siRNA sense strand
ccucaaagagcaaaucaaa

SEQ ID NO: 1537529 - RNA, 19 nt, Homo sapiens
  misc_RNA (1)...(19): siRNA sense strand
cgagcaagcuauggaucua

SEQ ID NO: 1537530 - RNA, 19 nt, Homo sapiens
  misc_RNA (1)...(19): siRNA sense strand
ggagaacaaucugcugaag

SEQ ID NO: 1537531 - RNA, 19 nt, Homo sapiens
  misc_RNA (1)...(19): siRNA sense strand
gugcaagugugguagcuau

SEQ ID NO: 1537532 - RNA, 19 nt, Homo sapiens
  misc_RNA (1)...(19): siRNA sense strand
gagaacaaucugcugaaga

SEQ ID NO: 1537533 - RNA, 19 nt, Homo sapiens
  misc_RNA (1)...(19): siRNA sense strand
gcaagugugguagcuauug

SEQ ID NO: 1537534 - RNA, 19 nt, Homo sapiens
  misc_RNA (1)...(19): siRNA sense strand
caaagagcaaaucaaagaa

SEQ ID NO: 1537535 - RNA, 19 nt, Homo sapiens
  misc_RNA (1)...(19): siRNA sense strand
cugagcagcuugcccaguu

SEQ ID NO: 1537536 - RNA, 19 nt, Homo sapiens
  misc_RNA (1)...(19): siRNA sense strand
agaacaaucugcugaagac

SEQ ID NO: 1537537 - RNA, 19 nt, Homo sapiens
  misc_RNA (1)...(19): siRNA sense strand
gguagcuauugacaacaaa

SEQ ID NO: 1537538 - RNA, 19 nt, Homo sapiens
  misc_RNA (1)...(19): siRNA sense strand
gauguaugcggucagagaa

SEQ ID NO: 1537539 - RNA, 19 nt, Homo sapiens
  misc_RNA (1)...(19): siRNA sense strand
ugagcagcuugcccaguuu

SEQ ID NO: 1537540 - RNA, 19 nt, Homo sapiens
  misc_RNA (1)...(19): siRNA sense strand
caagcuauggaucuaguga

SEQ ID NO: 1537541 - RNA, 19 nt, Homo sapiens
  misc_RNA (1)...(19): siRNA sense strand
ucgcagggcucaggaccaa

SEQ ID NO: 1537542 - RNA, 19 nt, Homo sapiens
  misc_RNA (1)...(19): siRNA sense strand
ugaaaagccauuugaugua

SEQ ID NO: 1537543 - RNA, 19 nt, Homo sapiens
  misc_RNA (1)...(19): siRNA sense strand
ugugguagcuauugacaac

SEQ ID NO: 1537544 - RNA, 19 nt, Homo sapiens
  misc_RNA (1)...(19): siRNA sense strand
agcuauggaucuagugaaa

SEQ ID NO: 1537545 - RNA, 19 nt, Homo sapiens
  misc_RNA (1)...(19): siRNA sense strand
ugguagcuauugacaacaa

SEQ ID NO: 1537546 - RNA, 19 nt, Homo sapiens
  misc_RNA (1)...(19): siRNA sense strand
uguaugcggucagagaaga

SEQ ID NO: 1537547 - RNA, 19 nt, Homo sapiens
  misc_RNA (1)...(19): siRNA sense strand
acaaucugcugaagacacu

SEQ ID NO: 1537548 - RNA, 19 nt, Homo sapiens
  misc_RNA (1)...(19): siRNA sense strand
gugaaaagccauuugaugu

SEQ ID NO: 1537549 - RNA, 19 nt, Homo sapiens
  misc_RNA (1)...(19): siRNA sense strand
ugauguaugcggucagaga

SEQ ID NO: 1537550 - RNA, 19 nt, Homo sapiens
  misc_RNA (1)...(19): siRNA sense strand
aagagcaaaucaaagaacu

SEQ ID NO: 1537551 - RNA, 19 nt, Homo sapiens
  misc_RNA (1)...(19): siRNA sense strand
caaaaucgagcaagcuaug

SEQ ID NO: 1537552 - RNA, 19 nt, Homo sapiens
  misc_RNA (1)...(19): siRNA sense strand
gagcagcuugcccaguuuc

SEQ ID NO: 1537553 - RNA, 19 nt, Homo sapiens
  misc_RNA (1)...(19): siRNA sense strand
ggccaguccugagcagcuu

SEQ ID NO: 1537554 - RNA, 19 nt, Homo sapiens
  misc_RNA (1)...(19): siRNA sense strand
gaacaaucugcugaagaca

SEQ ID NO: 1537555 - RNA, 19 nt, Homo sapiens
  misc_RNA (1)...(19): siRNA sense strand
aaagccauuugauguaugc

SEQ ID NO: 1537556 - RNA, 19 nt, Homo sapiens
  misc_RNA (1)...(19): siRNA sense strand
gaguggaacugcuucuuug

SEQ ID NO: 1537557 - RNA, 19 nt, Homo sapiens
  misc_RNA (1)...(19): siRNA sense strand
gaacgaguacgccuucaug

SEQ ID NO: 1537558 - RNA, 19 nt, Homo sapiens
  misc_RNA (1)...(19): siRNA sense strand
ggaguggaacugcuucuuu

SEQ ID NO: 1537559 - RNA, 19 nt, Homo sapiens
  misc_RNA (1)...(19): siRNA sense strand
gaacugcgacuccagauac

SEQ ID NO: 1537560 - RNA, 19 nt, Homo sapiens
  misc_RNA (1)...(19): siRNA sense strand
gagcugcgccacacacuca

SEQ ID NO: 1537561 - RNA, 19 nt, Homo sapiens
  misc_RNA (1)...(19): siRNA sense strand
gcugguuccuggacaacaa

SEQ ID NO: 1537562 - RNA, 19 nt, Homo sapiens
  misc_RNA (1)...(19): siRNA sense strand
cauccaagucugagaagaa

SEQ ID NO: 1537563 - RNA, 19 nt, Homo sapiens
  misc_RNA (1)...(19): siRNA sense strand
gaacgcaaacauggucuuc

SEQ ID NO: 1537564 - RNA, 19 nt, Homo sapiens
  misc_RNA (1)...(19): siRNA sense strand
caagcaguaucgccacaca

SEQ ID NO: 1537565 - RNA, 19 nt, Homo sapiens
  misc_RNA (1)...(19): siRNA sense strand
agaugaacguggcccaguu

SEQ ID NO: 1537566 - RNA, 19 nt, Homo sapiens
  misc_RNA (1)...(19): siRNA sense strand
gggcuucauccaagucuga

SEQ ID NO: 1537567 - RNA, 19 nt, Homo sapiens
  misc_RNA (1)...(19): siRNA sense strand
agucugagaagaacgagua

SEQ ID NO: 1537568 - RNA, 19 nt, Homo sapiens
  misc_RNA (1)...(19): siRNA sense strand
acgcaaacauggucuucau

SEQ ID NO: 1537569 - RNA, 19 nt, Homo sapiens
  misc_RNA (1)...(19): siRNA sense strand
guggugcaguggcuguuug

SEQ ID NO: 1537570 - RNA, 19 nt, Homo sapiens
  misc_RNA (1)...(19): siRNA sense strand
gcgaggaguggaacugcuu

SEQ ID NO: 1537571 - RNA, 19 nt, Homo sapiens
  misc_RNA (1)...(19): siRNA sense strand
agaacugcgacuccagaua

SEQ ID NO: 1537572 - RNA, 19 nt, Homo sapiens
  misc_RNA (1)...(19): siRNA sense strand
ccaagucugagaagaacga

SEQ ID NO: 1537573 - RNA, 19 nt, Homo sapiens
  misc_RNA (1)...(19): siRNA sense strand
cagacugcgucgacacgau

SEQ ID NO: 1537574 - RNA, 19 nt, Homo sapiens
  misc_RNA (1)...(19): siRNA sense strand
uaacaucacugcauuaugg

SEQ ID NO: 1537575 - RNA, 19 nt, Homo sapiens
  misc_RNA (1)...(19): siRNA sense strand
gaaccacgguaaccaucua

SEQ ID NO: 1537576 - RNA, 19 nt, Homo sapiens
  misc_RNA (1)...(19): siRNA sense strand
gaaccucacucgacugaca

SEQ ID NO: 1537577 - RNA, 19 nt, Homo sapiens
  misc_RNA (1)...(19): siRNA sense strand
caagauuucugacaucauc

SEQ ID NO: 1537578 - RNA, 19 nt, Homo sapiens
  misc_RNA (1)...(19): siRNA sense strand
gcacgugucuggaugugau

SEQ ID NO: 1537579 - RNA, 19 nt, Homo sapiens
  misc_RNA (1)...(19): siRNA sense strand
gugggagucuggauaauga

SEQ ID NO: 1537580 - RNA, 19 nt, Homo sapiens
  misc_RNA (1)...(19): siRNA sense strand
ccacaucuguuucgcuuuc

SEQ ID NO: 1537581 - RNA, 19 nt, Homo sapiens
  misc_RNA (1)...(19): siRNA sense strand
guaauuaccuucgaagcau

SEQ ID NO: 1537582 - RNA, 19 nt, Homo sapiens
  misc_RNA (1)...(19): siRNA sense strand
ccaccugccucaagauuuc

SEQ ID NO: 1537583 - RNA, 19 nt, Homo sapiens
  misc_RNA (1)...(19): siRNA sense strand
acagauacauggccauugu

SEQ ID NO: 1537584 - RNA, 19 nt, Homo sapiens
  misc_RNA (1)...(19): siRNA sense strand
cuauagcuguaucuucaua

SEQ ID NO: 1537585 - RNA, 19 nt, Homo sapiens
  misc_RNA (1)...(19): siRNA sense strand
cuauaaagacccagauaaa

SEQ ID NO: 1537586 - RNA, 19 nt, Homo sapiens
  misc_RNA (1)...(19): siRNA sense strand
ucauuagugucaugcuaua

SEQ ID NO: 1537587 - RNA, 19 nt, Homo sapiens
  misc_RNA (1)...(19): siRNA sense strand
auaaagacccagauaaaga

SEQ ID NO: 1537588 - RNA, 19 nt, Homo sapiens
  misc_RNA (1)...(19): siRNA sense strand
aaggagaaguccauaagga

SEQ ID NO: 1537589 - RNA, 19 nt, Homo sapiens
  misc_RNA (1)...(19): siRNA sense strand
ucuacuacaucguuucaaa

SEQ ID NO: 1537590 - RNA, 19 nt, Homo sapiens
  misc_RNA (1)...(19): siRNA sense strand
ggcauuaguggacuugaua

SEQ ID NO: 1537591 - RNA, 19 nt, Homo sapiens
  misc_RNA (1)...(19): siRNA sense strand
cuucuugccuuuauuagug

SEQ ID NO: 1537592 - RNA, 19 nt, Homo sapiens
  misc_RNA (1)...(19): siRNA sense strand
uggaugugauucucuacua

SEQ ID NO: 1537593 - RNA, 19 nt, Homo sapiens
  misc_RNA (1)...(19): siRNA sense strand
gcuacuuggucauuauuca

SEQ ID NO: 1537594 - RNA, 19 nt, Homo sapiens
  misc_RNA (1)...(19): siRNA sense strand
aagaagagaaccacgguaa

SEQ ID NO: 1537595 - RNA, 19 nt, Homo sapiens
  misc_RNA (1)...(19): siRNA sense strand
uugcagcccuugucuucua

SEQ ID NO: 1537596 - RNA, 19 nt, Homo sapiens
  misc_RNA (1)...(19): siRNA sense strand
gcuauaccguaauuaccuu

SEQ ID NO: 1537597 - RNA, 19 nt, Homo sapiens
  misc_RNA (1)...(19): siRNA sense strand
gagaaguccauaaggauca

SEQ ID NO: 1537598 - RNA, 19 nt, Homo sapiens
  misc_RNA (1)...(19): siRNA sense strand
uaacagcucacauccagau

SEQ ID NO: 1537599 - RNA, 19 nt, Homo sapiens
  misc_RNA (1)...(19): siRNA sense strand
ggugcuacuuggucauuau

SEQ ID NO: 1537600 - RNA, 19 nt, Homo sapiens
  misc_RNA (1)...(19): siRNA sense strand
agcuguaucuucauaauug

SEQ ID NO: 1537601 - RNA, 19 nt, Homo sapiens
  misc_RNA (1)...(19): siRNA sense strand
gucaugcuauaccguaauu

SEQ ID NO: 1537602 - RNA, 19 nt, Homo sapiens
  misc_RNA (1)...(19): siRNA sense strand
ccagaugaauacaaaauug

SEQ ID NO: 1537603 - RNA, 19 nt, Homo sapiens
  misc_RNA (1)...(19): siRNA sense strand
gacuuuacccuuucgaaug

SEQ ID NO: 1537604 - RNA, 19 nt, Homo sapiens
  misc_RNA (1)...(19): siRNA sense strand
ccacgguaaccaucuauau

SEQ ID NO: 1537605 - RNA, 19 nt, Homo sapiens
  misc_RNA (1)...(19): siRNA sense strand
ggaugugauucucuacuac

SEQ ID NO: 1537606 - RNA, 19 nt, Homo sapiens
  misc_RNA (1)...(19): siRNA sense strand
ccugaacaaucaagaucaa

SEQ ID NO: 1537607 - RNA, 19 nt, Homo sapiens
  misc_RNA (1)...(19): siRNA sense strand
ucugacaucaucuaucuaa

SEQ ID NO: 1537608 - RNA, 19 nt, Homo sapiens
  misc_RNA (1)...(19): siRNA sense strand
ucuauaaagacccagauaa

SEQ ID NO: 1537609 - RNA, 19 nt, Homo sapiens
  misc_RNA (1)...(19): siRNA sense strand
caggugcucgucugcuuua

SEQ ID NO: 1537610 - RNA, 19 nt, Homo sapiens
  misc_RNA (1)...(19): siRNA sense strand
auaaugacuuuacccuuuc

SEQ ID NO: 1537611 - RNA, 19 nt, Homo sapiens
  misc_RNA (1)...(19): siRNA sense strand
gcucgagucauuaguguca

SEQ ID NO: 1537612 - RNA, 19 nt, Homo sapiens
  misc_RNA (1)...(19): siRNA sense strand
gcugaaacccaaagucaag

SEQ ID NO: 1537613 - RNA, 19 nt, Homo sapiens
  misc_RNA (1)...(19): siRNA sense strand
gcaggacgucuaagcugaa

SEQ ID NO: 1537614 - RNA, 19 nt, Homo sapiens
  misc_RNA (1)...(19): siRNA sense strand
gcccuugucuucuauagcu

SEQ ID NO: 1537615 - RNA, 19 nt, Homo sapiens
  misc_RNA (1)...(19): siRNA sense strand
aagaucaaccugucccuuu

SEQ ID NO: 1537616 - RNA, 19 nt, Homo sapiens
  misc_RNA (1)...(19): siRNA sense strand
guacgccaaagaacuuaaa

SEQ ID NO: 1537617 - RNA, 19 nt, Homo sapiens
  misc_RNA (1)...(19): siRNA sense strand
cuacggucacuaagcaaua

SEQ ID NO: 1537618 - RNA, 19 nt, Homo sapiens
  misc_RNA (1)...(19): siRNA sense strand
gggugcuacuuggucauua

SEQ ID NO: 1537619 - RNA, 19 nt, Homo sapiens
  misc_RNA (1)...(19): siRNA sense strand
uauuagugcugacagauac

SEQ ID NO: 1537620 - RNA, 19 nt, Homo sapiens
  misc_RNA (1)...(19): siRNA sense strand
uuucugacaucaucuaucu

SEQ ID NO: 1537621 - RNA, 19 nt, Homo sapiens
  misc_RNA (1)...(19): siRNA sense strand
ccucaagauuucugacauc

SEQ ID NO: 1537622 - RNA, 19 nt, Homo sapiens
  misc_RNA (1)...(19): siRNA sense strand
ucaguuguaccaccaagaa

SEQ ID NO: 1537623 - RNA, 19 nt, Homo sapiens
  misc_RNA (1)...(19): siRNA sense strand
uuuaccaccuuccucauga

SEQ ID NO: 1537624 - RNA, 19 nt, Homo sapiens
  misc_RNA (1)...(19): siRNA sense strand
ucaaggagaaguccauaag

SEQ ID NO: 1537625 - RNA, 19 nt, Homo sapiens
  misc_RNA (1)...(19): siRNA sense strand
uggcuucuugccuuuauua

SEQ ID NO: 1537626 - RNA, 19 nt, Homo sapiens
  misc_RNA (1)...(19): siRNA sense strand
uuuccgaucugguagucua

SEQ ID NO: 1537627 - RNA, 19 nt, Homo sapiens
  misc_RNA (1)...(19): siRNA sense strand
agucauuagugucaugcua

SEQ ID NO: 1537628 - RNA, 19 nt, Homo sapiens
  misc_RNA (1)...(19): siRNA sense strand
uucuauagcuguaucuuca

SEQ ID NO: 1537629 - RNA, 19 nt, Homo sapiens
  misc_RNA (1)...(19): siRNA sense strand
acgguaaccaucuauauga

SEQ ID NO: 1537630 - RNA, 19 nt, Homo sapiens
  misc_RNA (1)...(19): siRNA sense strand
guuaacaucacugcauuau

SEQ ID NO: 1537631 - RNA, 19 nt, Homo sapiens
  misc_RNA (1)...(19): siRNA sense strand
gugcucgucugcuuuaugc

SEQ ID NO: 1537632 - RNA, 19 nt, Homo sapiens
  misc_RNA (1)...(19): siRNA sense strand
caggacgucuaagcugaaa

SEQ ID NO: 1537633 - RNA, 19 nt, Homo sapiens
  misc_RNA (1)...(19): siRNA sense strand
uauaaagacccagauaaag

SEQ ID NO: 1537634 - RNA, 19 nt, Homo sapiens
  misc_RNA (1)...(19): siRNA sense strand
ccucugcuacugcucuaua

SEQ ID NO: 1537635 - RNA, 19 nt, Homo sapiens
  misc_RNA (1)...(19): siRNA sense strand
gaucaaccugucccuuuua

SEQ ID NO: 1537636 - RNA, 19 nt, Homo sapiens
  misc_RNA (1)...(19): siRNA sense strand
cuguuucgcuuuccugaug

SEQ ID NO: 1537637 - RNA, 19 nt, Homo sapiens
  misc_RNA (1)...(19): siRNA sense strand
uaaagacccagauaaagac

SEQ ID NO: 1537638 - RNA, 19 nt, Homo sapiens
  misc_RNA (1)...(19): siRNA sense strand
gaagagaaccacgguaacc

SEQ ID NO: 1537639 - RNA, 19 nt, Homo sapiens
  misc_RNA (1)...(19): siRNA sense strand
cauuauggguuuucaguug

SEQ ID NO: 1537640 - RNA, 19 nt, Homo sapiens
  misc_RNA (1)...(19): siRNA sense strand
cgaaguacgccaaagaacu

SEQ ID NO: 1537641 - RNA, 19 nt, Homo sapiens
  misc_RNA (1)...(19): siRNA sense strand
gccgaaguacgccaaagaa

SEQ ID NO: 1537642 - RNA, 19 nt, Homo sapiens
  misc_RNA (1)...(19): siRNA sense strand
uauggcuucuugccuuuau

SEQ ID NO: 1537643 - RNA, 19 nt, Homo sapiens
  misc_RNA (1)...(19): siRNA sense strand
acuuuacccuuucgaaugu

SEQ ID NO: 1537644 - RNA, 19 nt, Homo sapiens
  misc_RNA (1)...(19): siRNA sense strand
ggucacuaagcaauauaaa

SEQ ID NO: 1537645 - RNA, 19 nt, Homo sapiens
  misc_RNA (1)...(19): siRNA sense strand
cuucgaagcaugcgcagaa

SEQ ID NO: 1537646 - RNA, 19 nt, Homo sapiens
  misc_RNA (1)...(19): siRNA sense strand
uaccguaauuaccuucgaa

SEQ ID NO: 1537647 - RNA, 19 nt, Homo sapiens
  misc_RNA (1)...(19): siRNA sense strand
ccauaaggaucaucaucac

SEQ ID NO: 1537648 - RNA, 19 nt, Homo sapiens
  misc_RNA (1)...(19): siRNA sense strand
aacccaaagucaaggagaa

SEQ ID NO: 1537649 - RNA, 19 nt, Homo sapiens
  misc_RNA (1)...(19): siRNA sense strand
gacaucaucuaucuaaaag

SEQ ID NO: 1537650 - RNA, 19 nt, Homo sapiens
  misc_RNA (1)...(19): siRNA sense strand
gaacaaucaagaucaaccu

SEQ ID NO: 1537651 - RNA, 19 nt, Homo sapiens
  misc_RNA (1)...(19): siRNA sense strand
ugacagauacauggccauu

SEQ ID NO: 1537652 - RNA, 19 nt, Homo sapiens
  misc_RNA (1)...(19): siRNA sense strand
uuauuagugcugacagaua

SEQ ID NO: 1537653 - RNA, 19 nt, Homo sapiens
  misc_RNA (1)...(19): siRNA sense strand
ccauuguacagccgaagua

SEQ ID NO: 1537654 - RNA, 19 nt, Homo sapiens
  misc_RNA (1)...(19): siRNA sense strand
agucuacggucacuaagca

SEQ ID NO: 1537655 - RNA, 19 nt, Homo sapiens
  misc_RNA (1)...(19): siRNA sense strand
gaugugauucucuacuaca

SEQ ID NO: 1537656 - RNA, 19 nt, Homo sapiens
  misc_RNA (1)...(19): siRNA sense strand
aagcugaaacccaaaguca

SEQ ID NO: 1537657 - RNA, 19 nt, Homo sapiens
  misc_RNA (1)...(19): siRNA sense strand
gcauuaguggacuugauau

SEQ ID NO: 1537658 - RNA, 19 nt, Homo sapiens
  misc_RNA (1)...(19): siRNA sense strand
ugacuuuacccuuucgaau

SEQ ID NO: 1537659 - RNA, 19 nt, Homo sapiens
  misc_RNA (1)...(19): siRNA sense strand
uuggagcucucacaguguu

SEQ ID NO: 1537660 - RNA, 19 nt, Homo sapiens
  misc_RNA (1)...(19): siRNA sense strand
gucuggaugugauucucua

SEQ ID NO: 1537661 - RNA, 19 nt, Homo sapiens
  misc_RNA (1)...(19): siRNA sense strand
uuuauggcuucuugccuuu

SEQ ID NO: 1537662 - RNA, 19 nt, Homo sapiens
  misc_RNA (1)...(19): siRNA sense strand
caugauugggugcuacuug

SEQ ID NO: 1537663 - RNA, 19 nt, Homo sapiens
  misc_RNA (1)...(19): siRNA sense strand
uacggucacuaagcaauau

SEQ ID NO: 1537664 - RNA, 19 nt, Homo sapiens
  misc_RNA (1)...(19): siRNA sense strand
gugucaugcuauaccguaa

SEQ ID NO: 1537665 - RNA, 19 nt, Homo sapiens
  misc_RNA (1)...(19): siRNA sense strand
cgguaaccaucuauaugau

SEQ ID NO: 1537666 - RNA, 19 nt, Homo sapiens
  misc_RNA (1)...(19): siRNA sense strand
cacgguaaccaucuauaug

SEQ ID NO: 1537667 - RNA, 19 nt, Homo sapiens
  misc_RNA (1)...(19): siRNA sense strand
uuaccaccuuccucaugaa

SEQ ID NO: 1537668 - RNA, 19 nt, Homo sapiens
  misc_RNA (1)...(19): siRNA sense strand
uuuaugcccuuccacaucu

SEQ ID NO: 1537669 - RNA, 19 nt, Homo sapiens
  misc_RNA (1)...(19): siRNA sense strand
gccaccugccucaagauuu

SEQ ID NO: 1537670 - RNA, 19 nt, Homo sapiens
  misc_RNA (1)...(19): siRNA sense strand
ugcuacugcucuauaaaga

SEQ ID NO: 1537671 - RNA, 19 nt, Homo sapiens
  misc_RNA (1)...(19): siRNA sense strand
uuguuaacaucacugcauu

SEQ ID NO: 1537672 - RNA, 19 nt, Homo sapiens
  misc_RNA (1)...(19): siRNA sense strand
cguaauuaccuucgaagca

SEQ ID NO: 1537673 - RNA, 19 nt, Homo sapiens
  misc_RNA (1)...(19): siRNA sense strand
gauucucuacuacaucguu

SEQ ID NO: 1537674 - RNA, 19 nt, Homo sapiens
  misc_RNA (1)...(19): siRNA sense strand
ggaaguaaguuguauagaa

SEQ ID NO: 1537675 - RNA, 19 nt, Homo sapiens
  misc_RNA (1)...(19): siRNA sense strand
gaucggauguguucauuaa

SEQ ID NO: 1537676 - RNA, 19 nt, Homo sapiens
  misc_RNA (1)...(19): siRNA sense strand
cuacagagcuccagagauu

SEQ ID NO: 1537677 - RNA, 19 nt, Homo sapiens
  misc_RNA (1)...(19): siRNA sense strand
ugagaaagcugauagaaga

SEQ ID NO: 1537678 - RNA, 19 nt, Homo sapiens
  misc_RNA (1)...(19): siRNA sense strand
gaacagagguauuuuggua

SEQ ID NO: 1537679 - RNA, 19 nt, Homo sapiens
  misc_RNA (1)...(19): siRNA sense strand
gguagaaacuuuggaaauu

SEQ ID NO: 1537680 - RNA, 19 nt, Homo sapiens
  misc_RNA (1)...(19): siRNA sense strand
gcugauugaugcagauuua

SEQ ID NO: 1537681 - RNA, 19 nt, Homo sapiens
  misc_RNA (1)...(19): siRNA sense strand
ggaaagaugucgaggaagu

SEQ ID NO: 1537682 - RNA, 19 nt, Homo sapiens
  misc_RNA (1)...(19): siRNA sense strand
aaacagauaugucucauuc

SEQ ID NO: 1537683 - RNA, 19 nt, Homo sapiens
  misc_RNA (1)...(19): siRNA sense strand
ggaaugaagucuaaagaag

SEQ ID NO: 1537684 - RNA, 19 nt, Homo sapiens
  misc_RNA (1)...(19): siRNA sense strand
gagaggaaauaaaugcuuu

SEQ ID NO: 1537685 - RNA, 19 nt, Homo sapiens
  misc_RNA (1)...(19): siRNA sense strand
gaagagaauuuguuagucu

SEQ ID NO: 1537686 - RNA, 19 nt, Homo sapiens
  misc_RNA (1)...(19): siRNA sense strand
gaagacagcaagcuuauau

SEQ ID NO: 1537687 - RNA, 19 nt, Homo sapiens
  misc_RNA (1)...(19): siRNA sense strand
ugaagaaacucaaaguaga

SEQ ID NO: 1537688 - RNA, 19 nt, Homo sapiens
  misc_RNA (1)...(19): siRNA sense strand
gaucagauucgauacauuu

SEQ ID NO: 1537689 - RNA, 19 nt, Homo sapiens
  misc_RNA (1)...(19): siRNA sense strand
gaagugagcauauuagcaa

SEQ ID NO: 1537690 - RNA, 19 nt, Homo sapiens
  misc_RNA (1)...(19): siRNA sense strand
caagaaaguaguugugaua

SEQ ID NO: 1537691 - RNA, 19 nt, Homo sapiens
  misc_RNA (1)...(19): siRNA sense strand
gcauuuauuucuccaaaga

SEQ ID NO: 1537692 - RNA, 19 nt, Homo sapiens
  misc_RNA (1)...(19): siRNA sense strand
cgaauaguaugucagauga

SEQ ID NO: 1537693 - RNA, 19 nt, Homo sapiens
  misc_RNA (1)...(19): siRNA sense strand
gcaagagaccgaauaguau

SEQ ID NO: 1537694 - RNA, 19 nt, Homo sapiens
  misc_RNA (1)...(19): siRNA sense strand
gaccacaucugcucauuca

SEQ ID NO: 1537695 - RNA, 19 nt, Homo sapiens
  misc_RNA (1)...(19): siRNA sense strand
ccagagacauucacucaga

SEQ ID NO: 1537696 - RNA, 19 nt, Homo sapiens
  misc_RNA (1)...(19): siRNA sense strand
aaacacagauucuauaugc

SEQ ID NO: 1537697 - RNA, 19 nt, Homo sapiens
  misc_RNA (1)...(19): siRNA sense strand
gaaggugacuaucaguuag

SEQ ID NO: 1537698 - RNA, 19 nt, Homo sapiens
  misc_RNA (1)...(19): siRNA sense strand
gauaauacaguuccacuug

SEQ ID NO: 1537699 - RNA, 19 nt, Homo sapiens
  misc_RNA (1)...(19): siRNA sense strand
cagcagacauugauuaucu

SEQ ID NO: 1537700 - RNA, 19 nt, Homo sapiens
  misc_RNA (1)...(19): siRNA sense strand
ccagagcacuuugaauauu

SEQ ID NO: 1537701 - RNA, 19 nt, Homo sapiens
  misc_RNA (1)...(19): siRNA sense strand
gaaagcugauagaagagaa

SEQ ID NO: 1537702 - RNA, 19 nt, Homo sapiens
  misc_RNA (1)...(19): siRNA sense strand
caacaaaacucagccagua

SEQ ID NO: 1537703 - RNA, 19 nt, Homo sapiens
  misc_RNA (1)...(19): siRNA sense strand
guaaaguccuguuuucaua

SEQ ID NO: 1537704 - RNA, 19 nt, Homo sapiens
  misc_RNA (1)...(19): siRNA sense strand
guagaaacuuuggaaauuc

SEQ ID NO: 1537705 - RNA, 19 nt, Homo sapiens
  misc_RNA (1)...(19): siRNA sense strand
gaugugugauugcagaauu

SEQ ID NO: 1537706 - RNA, 19 nt, Homo sapiens
  misc_RNA (1)...(19): siRNA sense strand
gaaauccagugacaguugu

SEQ ID NO: 1537707 - RNA, 19 nt, Homo sapiens
  misc_RNA (1)...(19): siRNA sense strand
gugaggaguuggauaauca

SEQ ID NO: 1537708 - RNA, 19 nt, Homo sapiens
  misc_RNA (1)...(19): siRNA sense strand
gcaaacacagauucuauau

SEQ ID NO: 1537709 - RNA, 19 nt, Homo sapiens
  misc_RNA (1)...(19): siRNA sense strand
gcaagaaaguaguugugau

SEQ ID NO: 1537710 - RNA, 19 nt, Homo sapiens
  misc_RNA (1)...(19): siRNA sense strand
cuacuacacuaacuucuga

SEQ ID NO: 1537711 - RNA, 19 nt, Homo sapiens
  misc_RNA (1)...(19): siRNA sense strand
ggaaggaagugaucuuuug

SEQ ID NO: 1537712 - RNA, 19 nt, Homo sapiens
  misc_RNA (1)...(19): siRNA sense strand
gaagucuuaugcuccauga

SEQ ID NO: 1537713 - RNA, 19 nt, Homo sapiens
  misc_RNA (1)...(19): siRNA sense strand
cagauugcauuuccuagaa

SEQ ID NO: 1537714 - RNA, 19 nt, Homo sapiens
  misc_RNA (1)...(19): siRNA sense strand
gaaggagaggcaagaaauu

SEQ ID NO: 1537715 - RNA, 19 nt, Homo sapiens
  misc_RNA (1)...(19): siRNA sense strand
ggaaauccagugacaguug

SEQ ID NO: 1537716 - RNA, 19 nt, Homo sapiens
  misc_RNA (1)...(19): siRNA sense strand
ugaacacagugauggauuu

SEQ ID NO: 1537717 - RNA, 19 nt, Homo sapiens
  misc_RNA (1)...(19): siRNA sense strand
cagcauccaacuuauaaua

SEQ ID NO: 1537718 - RNA, 19 nt, Homo sapiens
  misc_RNA (1)...(19): siRNA sense strand
caucaagaguggaauggaa

SEQ ID NO: 1537719 - RNA, 19 nt, Homo sapiens
  misc_RNA (1)...(19): siRNA sense strand
gaccaggaguucuuucuca

SEQ ID NO: 1537720 - RNA, 19 nt, Homo sapiens
  misc_RNA (1)...(19): siRNA sense strand
caauaaggguagauaauac

SEQ ID NO: 1537721 - RNA, 19 nt, Homo sapiens
  misc_RNA (1)...(19): siRNA sense strand
gccaagcaguuguguauuc

SEQ ID NO: 1537722 - RNA, 19 nt, Homo sapiens
  misc_RNA (1)...(19): siRNA sense strand
gcagauugucgaugaauug

SEQ ID NO: 1537723 - RNA, 19 nt, Homo sapiens
  misc_RNA (1)...(19): siRNA sense strand
cagagcacuuugaauauug

SEQ ID NO: 1537724 - RNA, 19 nt, Homo sapiens
  misc_RNA (1)...(19): siRNA sense strand
gaagagaggaaauaaaugc

SEQ ID NO: 1537725 - RNA, 19 nt, Homo sapiens
  misc_RNA (1)...(19): siRNA sense strand
gagccaagcaguuguguau

SEQ ID NO: 1537726 - RNA, 19 nt, Homo sapiens
  misc_RNA (1)...(19): siRNA sense strand
gaugaauuguccauacuuc

SEQ ID NO: 1537727 - RNA, 19 nt, Homo sapiens
  misc_RNA (1)...(19): siRNA sense strand
gcauccaacuuauaauauc

SEQ ID NO: 1537728 - RNA, 19 nt, Homo sapiens
  misc_RNA (1)...(19): siRNA sense strand
aguaauccauucacucuuu

SEQ ID NO: 1537729 - RNA, 19 nt, Homo sapiens
  misc_RNA (1)...(19): siRNA sense strand
gaauauugaucggaugugu

SEQ ID NO: 1537730 - RNA, 19 nt, Homo sapiens
  misc_RNA (1)...(19): siRNA sense strand
cggcaaaccaucauuauug

SEQ ID NO: 1537731 - RNA, 19 nt, Homo sapiens
  misc_RNA (1)...(19): siRNA sense strand
ccucauagcaaccauguaa

SEQ ID NO: 1537732 - RNA, 19 nt, Homo sapiens
  misc_RNA (1)...(19): siRNA sense strand
gguacuaaauccacaagau

SEQ ID NO: 1537733 - RNA, 19 nt, Homo sapiens
  misc_RNA (1)...(19): siRNA sense strand
gauugaagcgcaagaguga

SEQ ID NO: 1537734 - RNA, 19 nt, Homo sapiens
  misc_RNA (1)...(19): siRNA sense strand
ccaccuggcuggaaauaca

SEQ ID NO: 1537735 - RNA, 19 nt, Homo sapiens
  misc_RNA (1)...(19): siRNA sense strand
agaguggaauggaaacuuu

SEQ ID NO: 1537736 - RNA, 19 nt, Homo sapiens
  misc_RNA (1)...(19): siRNA sense strand
gaagagcaagaaaguaguu

SEQ ID NO: 1537737 - RNA, 19 nt, Homo sapiens
  misc_RNA (1)...(19): siRNA sense strand
guaaagguagucuagauug

SEQ ID NO: 1537738 - RNA, 19 nt, Homo sapiens
  misc_RNA (1)...(19): siRNA sense strand
gaaagaugucgaggaagua

SEQ ID NO: 1537739 - RNA, 19 nt, Homo sapiens
  misc_RNA (1)...(19): siRNA sense strand
ugaccaaucagauaacuuu

SEQ ID NO: 1537740 - RNA, 19 nt, Homo sapiens
  misc_RNA (1)...(19): siRNA sense strand
caaagaaacagauaugucu

SEQ ID NO: 1537741 - RNA, 19 nt, Homo sapiens
  misc_RNA (1)...(19): siRNA sense strand
ucaaauagaagugagcaua

SEQ ID NO: 1537742 - RNA, 19 nt, Homo sapiens
  misc_RNA (1)...(19): siRNA sense strand
gcuuucaguuggaguaauu

SEQ ID NO: 1537743 - RNA, 19 nt, Homo sapiens
  misc_RNA (1)...(19): siRNA sense strand
ccagcugucuguucuguug

SEQ ID NO: 1537744 - RNA, 19 nt, Homo sapiens
  misc_RNA (1)...(19): siRNA sense strand
ccacauucagcauuuauuu

SEQ ID NO: 1537745 - RNA, 19 nt, Homo sapiens
  misc_RNA (1)...(19): siRNA sense strand
gcugaugaauauaacuuug

SEQ ID NO: 1537746 - RNA, 19 nt, Homo sapiens
  misc_RNA (1)...(19): siRNA sense strand
cagcauuuauuucuccaaa

SEQ ID NO: 1537747 - RNA, 19 nt, Homo sapiens
  misc_RNA (1)...(19): siRNA sense strand
gguaaacccaccaguuauu

SEQ ID NO: 1537748 - RNA, 19 nt, Homo sapiens
  misc_RNA (1)...(19): siRNA sense strand
guaagucccaccuaaauuc

SEQ ID NO: 1537749 - RNA, 19 nt, Homo sapiens
  misc_RNA (1)...(19): siRNA sense strand
gcaaagaaacagauauguc

SEQ ID NO: 1537750 - RNA, 19 nt, Homo sapiens
  misc_RNA (1)...(19): siRNA sense strand
agaaggugacuaucaguua

SEQ ID NO: 1537751 - RNA, 19 nt, Homo sapiens
  misc_RNA (1)...(19): siRNA sense strand
gaaacuauccacggaccua

SEQ ID NO: 1537752 - RNA, 19 nt, Homo sapiens
  misc_RNA (1)...(19): siRNA sense strand
ugccagagcacuuugaaua

SEQ ID NO: 1537753 - RNA, 19 nt, Homo sapiens
  misc_RNA (1)...(19): siRNA sense strand
ugggaaagaugucgaggaa

SEQ ID NO: 1537754 - RNA, 19 nt, Homo sapiens
  misc_RNA (1)...(19): siRNA sense strand
gauuaaagacauuggaaga

SEQ ID NO: 1537755 - RNA, 19 nt, Homo sapiens
  misc_RNA (1)...(19): siRNA sense strand
ccauagacauguggucauu

SEQ ID NO: 1537756 - RNA, 19 nt, Homo sapiens
  misc_RNA (1)...(19): siRNA sense strand
cagacaaagauaccauuua

SEQ ID NO: 1537757 - RNA, 19 nt, Homo sapiens
  misc_RNA (1)...(19): siRNA sense strand
ccacggaccuaugugaaug

SEQ ID NO: 1537758 - RNA, 19 nt, Homo sapiens
  misc_RNA (1)...(19): siRNA sense strand
ggcaaacacagauucuaua

SEQ ID NO: 1537759 - RNA, 19 nt, Homo sapiens
  misc_RNA (1)...(19): siRNA sense strand
uaaagguagucuagauugu

SEQ ID NO: 1537760 - RNA, 19 nt, Homo sapiens
  misc_RNA (1)...(19): siRNA sense strand
cagcaaucauuauaacuca

SEQ ID NO: 1537761 - RNA, 19 nt, Homo sapiens
  misc_RNA (1)...(19): siRNA sense strand
ucaacagucuggaugaugu

SEQ ID NO: 1537762 - RNA, 19 nt, Homo sapiens
  misc_RNA (1)...(19): siRNA sense strand
caaauagaagugagcauau

SEQ ID NO: 1537763 - RNA, 19 nt, Homo sapiens
  misc_RNA (1)...(19): siRNA sense strand
aagcuuauauuccuacuag

SEQ ID NO: 1537764 - RNA, 19 nt, Homo sapiens
  misc_RNA (1)...(19): siRNA sense strand
ugcaagagaccgaauagua

SEQ ID NO: 1537765 - RNA, 19 nt, Homo sapiens
  misc_RNA (1)...(19): siRNA sense strand
cggauguguucauuaagua

SEQ ID NO: 1537766 - RNA, 19 nt, Homo sapiens
  misc_RNA (1)...(19): siRNA sense strand
gcgcaagagugaggaguug

SEQ ID NO: 1537767 - RNA, 19 nt, Homo sapiens
  misc_RNA (1)...(19): siRNA sense strand
uaucccacauucagcauuu

SEQ ID NO: 1537768 - RNA, 19 nt, Homo sapiens
  misc_RNA (1)...(19): siRNA sense strand
ggaaugggagccaggaaga

SEQ ID NO: 1537769 - RNA, 19 nt, Homo sapiens
  misc_RNA (1)...(19): siRNA sense strand
caggagccuuggaguauga

SEQ ID NO: 1537770 - RNA, 19 nt, Homo sapiens
  misc_RNA (1)...(19): siRNA sense strand
cagagaauauuauguuggu

SEQ ID NO: 1537771 - RNA, 19 nt, Homo sapiens
  misc_RNA (1)...(19): siRNA sense strand
uaaccauacuuguuuaguc

SEQ ID NO: 1537772 - RNA, 19 nt, Homo sapiens
  misc_RNA (1)...(19): siRNA sense strand
guaguuaaaugcuggaaaa

SEQ ID NO: 1537773 - RNA, 19 nt, Homo sapiens
  misc_RNA (1)...(19): siRNA sense strand
ccaccacauucuuacauug

SEQ ID NO: 1537774 - RNA, 19 nt, Homo sapiens
  misc_RNA (1)...(19): siRNA sense strand
gcaggcagcuuacaaguug

SEQ ID NO: 1537775 - RNA, 19 nt, Homo sapiens
  misc_RNA (1)...(19): siRNA sense strand
ugaauaaacucaccagcuu

SEQ ID NO: 1537776 - RNA, 19 nt, Homo sapiens
  misc_RNA (1)...(19): siRNA sense strand
caaguuggaugcauauuca

SEQ ID NO: 1537777 - RNA, 19 nt, Homo sapiens
  misc_RNA (1)...(19): siRNA sense strand
ggacuuaaaccagaaauau

SEQ ID NO: 1537778 - RNA, 19 nt, Homo sapiens
  misc_RNA (1)...(19): siRNA sense strand
uaaaggacuuaaaccagaa

SEQ ID NO: 1537779 - RNA, 19 nt, Homo sapiens
  misc_RNA (1)...(19): siRNA sense strand
gcuauaaacauuaguagga

SEQ ID NO: 1537780 - RNA, 19 nt, Homo sapiens
  misc_RNA (1)...(19): siRNA sense strand
cuuacaaguuggaugcaua

SEQ ID NO: 1537781 - RNA, 19 nt, Homo sapiens
  misc_RNA (1)...(19): siRNA sense strand
cuugaaguaucuugaaaug

SEQ ID NO: 1537782 - RNA, 19 nt, Homo sapiens
  misc_RNA (1)...(19): siRNA sense strand
gcagguagcagcucuugag

SEQ ID NO: 1537783 - RNA, 19 nt, Homo sapiens
  misc_RNA (1)...(19): siRNA sense strand
guaggaacuuaaaggacuu

SEQ ID NO: 1537784 - RNA, 19 nt, Homo sapiens
  misc_RNA (1)...(19): siRNA sense strand
ggccaccagugaagacuau

SEQ ID NO: 1537785 - RNA, 19 nt, Homo sapiens
  misc_RNA (1)...(19): siRNA sense strand
acuauaagcuccuggaaaa

SEQ ID NO: 1537786 - RNA, 19 nt, Homo sapiens
  misc_RNA (1)...(19): siRNA sense strand
gacuauaagcuccuggaaa

SEQ ID NO: 1537787 - RNA, 19 nt, Homo sapiens
  misc_RNA (1)...(19): siRNA sense strand
gacuuaaaccagaaauaug

SEQ ID NO: 1537788 - RNA, 19 nt, Homo sapiens
  misc_RNA (1)...(19): siRNA sense strand
ccaccagugaagacuauaa

SEQ ID NO: 1537789 - RNA, 19 nt, Homo sapiens
  misc_RNA (1)...(19): siRNA sense strand
aauaaacucaccagcuuga

SEQ ID NO: 1537790 - RNA, 19 nt, Homo sapiens
  misc_RNA (1)...(19): siRNA sense strand
gagcaggcagcuuacaagu

SEQ ID NO: 1537791 - RNA, 19 nt, Homo sapiens
  misc_RNA (1)...(19): siRNA sense strand
ucuccaaaauggccacuua

SEQ ID NO: 1537792 - RNA, 19 nt, Homo sapiens
  misc_RNA (1)...(19): siRNA sense strand
uauaagcuccuggaaaaua

SEQ ID NO: 1537793 - RNA, 19 nt, Homo sapiens
  misc_RNA (1)...(19): siRNA sense strand
ucaccagcuugaaguaucu

SEQ ID NO: 1537794 - RNA, 19 nt, Homo sapiens
  misc_RNA (1)...(19): siRNA sense strand
aaacucaccagcuugaagu

SEQ ID NO: 1537795 - RNA, 19 nt, Homo sapiens
  misc_RNA (1)...(19): siRNA sense strand
cagcuugaaguaucuugaa

SEQ ID NO: 1537796 - RNA, 19 nt, Homo sapiens
  misc_RNA (1)...(19): siRNA sense strand
acaaguuggaugcauauuc

SEQ ID NO: 1537797 - RNA, 19 nt, Homo sapiens
  misc_RNA (1)...(19): siRNA sense strand
gaagcuggagaagcgauga

SEQ ID NO: 1537798 - RNA, 19 nt, Homo sapiens
  misc_RNA (1)...(19): siRNA sense strand
ggaagccaaguacaagaag

SEQ ID NO: 1537799 - RNA, 19 nt, Homo sapiens
  misc_RNA (1)...(19): siRNA sense strand
uaaacucaccagcuugaag

SEQ ID NO: 1537800 - RNA, 19 nt, Homo sapiens
  misc_RNA (1)...(19): siRNA sense strand
uuacaaguuggaugcauau

SEQ ID NO: 1537801 - RNA, 19 nt, Homo sapiens
  misc_RNA (1)...(19): siRNA sense strand
gcuugaaguaucuugaaau

SEQ ID NO: 1537802 - RNA, 19 nt, Homo sapiens
  misc_RNA (1)...(19): siRNA sense strand
uuaguaggaacuuaaagga

SEQ ID NO: 1537803 - RNA, 19 nt, Homo sapiens
  misc_RNA (1)...(19): siRNA sense strand
uggaagccaaguacaagaa

SEQ ID NO: 1537804 - RNA, 19 nt, Homo sapiens
  misc_RNA (1)...(19): siRNA sense strand
gcagaggcuuggcucauuu

SEQ ID NO: 1537805 - RNA, 19 nt, Homo sapiens
  misc_RNA (1)...(19): siRNA sense strand
ggcagaggcuuggcucauu

SEQ ID NO: 1537806 - RNA, 19 nt, Homo sapiens
  misc_RNA (1)...(19): siRNA sense strand
ggacugcggucagcuuugg

SEQ ID NO: 1537807 - RNA, 19 nt, Homo sapiens
  misc_RNA (1)...(19): siRNA sense strand
ggaagcaccguccuguuuc

SEQ ID NO: 1537808 - RNA, 19 nt, Homo sapiens
  misc_RNA (1)...(19): siRNA sense strand
uggaagcaccguccuguuu

SEQ ID NO: 1537809 - RNA, 19 nt, Homo sapiens
  misc_RNA (1)...(19): siRNA sense strand
gaagcaccguccuguuucg

SEQ ID NO: 1537810 - RNA, 19 nt, Homo sapiens
  misc_RNA (1)...(19): siRNA sense strand
uccuggagcuccucuggaa

SEQ ID NO: 1537811 - RNA, 19 nt, Homo sapiens
  misc_RNA (1)...(19): siRNA sense strand
aaugugaccgcuucccuaa

SEQ ID NO: 1537812 - RNA, 19 nt, Homo sapiens
  misc_RNA (1)...(19): siRNA sense strand
caacgcagcuauggccuua

SEQ ID NO: 1537813 - RNA, 19 nt, Homo sapiens
  misc_RNA (1)...(19): siRNA sense strand
gcaaggaugacacguauug

SEQ ID NO: 1537814 - RNA, 19 nt, Homo sapiens
  misc_RNA (1)...(19): siRNA sense strand
gcuauggccuuaacaaauc

SEQ ID NO: 1537815 - RNA, 19 nt, Homo sapiens
  misc_RNA (1)...(19): siRNA sense strand
ccaaugaauuugaggaaga

SEQ ID NO: 1537816 - RNA, 19 nt, Homo sapiens
  misc_RNA (1)...(19): siRNA sense strand
gcucugcggugcuguuuga

SEQ ID NO: 1537817 - RNA, 19 nt, Homo sapiens
  misc_RNA (1)...(19): siRNA sense strand
gaaaauggauccaauaagg

SEQ ID NO: 1537818 - RNA, 19 nt, Homo sapiens
  misc_RNA (1)...(19): siRNA sense strand
gcagcuuguugaaccguua

SEQ ID NO: 1537819 - RNA, 19 nt, Homo sapiens
  misc_RNA (1)...(19): siRNA sense strand
gaaggcaacuuugucuauc

SEQ ID NO: 1537820 - RNA, 19 nt, Homo sapiens
  misc_RNA (1)...(19): siRNA sense strand
gcaagacgucggcuuaaga

SEQ ID NO: 1537821 - RNA, 19 nt, Homo sapiens
  misc_RNA (1)...(19): siRNA sense strand
ccagaagucgucccauaua

SEQ ID NO: 1537822 - RNA, 19 nt, Homo sapiens
  misc_RNA (1)...(19): siRNA sense strand
agacgucggcuuaagaaua

SEQ ID NO: 1537823 - RNA, 19 nt, Homo sapiens
  misc_RNA (1)...(19): siRNA sense strand
ugacucauguucugaagau

SEQ ID NO: 1537824 - RNA, 19 nt, Homo sapiens
  misc_RNA (1)...(19): siRNA sense strand
ugaaagcgcagcuaacaga

SEQ ID NO: 1537825 - RNA, 19 nt, Homo sapiens
  misc_RNA (1)...(19): siRNA sense strand
aguaaagacugucaaagug

SEQ ID NO: 1537826 - RNA, 19 nt, Homo sapiens
  misc_RNA (1)...(19): siRNA sense strand
uagcagaaguaaagacugu

SEQ ID NO: 1537827 - RNA, 19 nt, Homo sapiens
  misc_RNA (1)...(19): siRNA sense strand
ccauauagcagaaguaaag

SEQ ID NO: 1537828 - RNA, 19 nt, Homo sapiens
  misc_RNA (1)...(19): siRNA sense strand
ggaacuaccagcugcauca

SEQ ID NO: 1537829 - RNA, 19 nt, Homo sapiens
  misc_RNA (1)...(19): siRNA sense strand
aagcaaggaugacacguau

SEQ ID NO: 1537830 - RNA, 19 nt, Homo sapiens
  misc_RNA (1)...(19): siRNA sense strand
gacgucggcuuaagaauac

SEQ ID NO: 1537831 - RNA, 19 nt, Homo sapiens
  misc_RNA (1)...(19): siRNA sense strand
caaugaauuugaggaagaa

SEQ ID NO: 1537832 - RNA, 19 nt, Homo sapiens
  misc_RNA (1)...(19): siRNA sense strand
gcugaacggcuuagcguaa

SEQ ID NO: 1537833 - RNA, 19 nt, Homo sapiens
  misc_RNA (1)...(19): siRNA sense strand
caagcaaggaugacacgua

SEQ ID NO: 1537834 - RNA, 19 nt, Homo sapiens
  misc_RNA (1)...(19): siRNA sense strand
uagugcaggugucaaauug

SEQ ID NO: 1537835 - RNA, 19 nt, Homo sapiens
  misc_RNA (1)...(19): siRNA sense strand
gcaggugucaaauugguuu

SEQ ID NO: 1537836 - RNA, 19 nt, Homo sapiens
  misc_RNA (1)...(19): siRNA sense strand
caagacgucggcuuaagaa

SEQ ID NO: 1537837 - RNA, 19 nt, Homo sapiens
  misc_RNA (1)...(19): siRNA sense strand
gaagucgucccauauagca

SEQ ID NO: 1537838 - RNA, 19 nt, Homo sapiens
  misc_RNA (1)...(19): siRNA sense strand
cagaagucgucccauauag

SEQ ID NO: 1537839 - RNA, 19 nt, Homo sapiens
  misc_RNA (1)...(19): siRNA sense strand
gaaacugaaggcaacuuug

SEQ ID NO: 1537840 - RNA, 19 nt, Homo sapiens
  misc_RNA (1)...(19): siRNA sense strand
cguaagcagugaugacuca

SEQ ID NO: 1537841 - RNA, 19 nt, Homo sapiens
  misc_RNA (1)...(19): siRNA sense strand
ggacaaccucggccugaga

SEQ ID NO: 1537842 - RNA, 19 nt, Homo sapiens
  misc_RNA (1)...(19): siRNA sense strand
gaaagcgcagcuaacagaa

SEQ ID NO: 1537843 - RNA, 19 nt, Homo sapiens
  misc_RNA (1)...(19): siRNA sense strand
guugaaccguuaccuuaau

SEQ ID NO: 1537844 - RNA, 19 nt, Homo sapiens
  misc_RNA (1)...(19): siRNA sense strand
ggagaucaacgcagcuaug

SEQ ID NO: 1537845 - RNA, 19 nt, Homo sapiens
  misc_RNA (1)...(19): siRNA sense strand
caagaacccacaugaacga

SEQ ID NO: 1537846 - RNA, 19 nt, Homo sapiens
  misc_RNA (1)...(19): siRNA sense strand
caaguauguucaaggcaau

SEQ ID NO: 1537847 - RNA, 19 nt, Homo sapiens
  misc_RNA (1)...(19): siRNA sense strand
gaauuagugucuccaucgu

SEQ ID NO: 1537848 - RNA, 19 nt, Homo sapiens
  misc_RNA (1)...(19): siRNA sense strand
gaaaccacucgggaucuuu

SEQ ID NO: 1537849 - RNA, 19 nt, Homo sapiens
  misc_RNA (1)...(19): siRNA sense strand
gcucgcagaugacgcuagu

SEQ ID NO: 1537850 - RNA, 19 nt, Homo sapiens
  misc_RNA (1)...(19): siRNA sense strand
ccaccaagaccgagaagau

SEQ ID NO: 1537851 - RNA, 19 nt, Homo sapiens
  misc_RNA (1)...(19): siRNA sense strand
caccaagaccgagaagaua

SEQ ID NO: 1537852 - RNA, 19 nt, Homo sapiens
  misc_RNA (1)...(19): siRNA sense strand
ugaaggcaacuuugucuau

SEQ ID NO: 1537853 - RNA, 19 nt, Homo sapiens
  misc_RNA (1)...(19): siRNA sense strand
agaauucggucaucaaagc

SEQ ID NO: 1537854 - RNA, 19 nt, Homo sapiens
  misc_RNA (1)...(19): siRNA sense strand
cacgaacacuaccaugaug

SEQ ID NO: 1537855 - RNA, 19 nt, Homo sapiens
  misc_RNA (1)...(19): siRNA sense strand
ggugaaagcgcagcuaaca

SEQ ID NO: 1537856 - RNA, 19 nt, Homo sapiens
  misc_RNA (1)...(19): siRNA sense strand
ccacgaacacuaccaugau

SEQ ID NO: 1537857 - RNA, 19 nt, Homo sapiens
  misc_RNA (1)...(19): siRNA sense strand
ccagcugcaucauccagaa

SEQ ID NO: 1537858 - RNA, 19 nt, Homo sapiens
  misc_RNA (1)...(19): siRNA sense strand
gcagcuauggccuuaacaa

SEQ ID NO: 1537859 - RNA, 19 nt, Homo sapiens
  misc_RNA (1)...(19): siRNA sense strand
aaacugaaggcaacuuugu

SEQ ID NO: 1537860 - RNA, 19 nt, Homo sapiens
  misc_RNA (1)...(19): siRNA sense strand
gcagaaguaaagacuguca

SEQ ID NO: 1537861 - RNA, 19 nt, Homo sapiens
  misc_RNA (1)...(19): siRNA sense strand
gcgggaaggugaggcacaa

SEQ ID NO: 1537862 - RNA, 19 nt, Homo sapiens
  misc_RNA (1)...(19): siRNA sense strand
gaaguaaagacugucaaag

SEQ ID NO: 1537863 - RNA, 19 nt, Homo sapiens
  misc_RNA (1)...(19): siRNA sense strand
ugagaauucggucaucaaa

SEQ ID NO: 1537864 - RNA, 19 nt, Homo sapiens
  misc_RNA (1)...(19): siRNA sense strand
cagcuauggccuuaacaaa

SEQ ID NO: 1537865 - RNA, 19 nt, Homo sapiens
  misc_RNA (1)...(19): siRNA sense strand
aaugcaagacgucggcuua

SEQ ID NO: 1537866 - RNA, 19 nt, Homo sapiens
  misc_RNA (1)...(19): siRNA sense strand
auccagaagucgucccaua

SEQ ID NO: 1537867 - RNA, 19 nt, Homo sapiens
  misc_RNA (1)...(19): siRNA sense strand
gugcaggugucaaauuggu

SEQ ID NO: 1537868 - RNA, 19 nt, Homo sapiens
  misc_RNA (1)...(19): siRNA sense strand
gaacaccaucgucuucaac

SEQ ID NO: 1537869 - RNA, 19 nt, Homo sapiens
  misc_RNA (1)...(19): siRNA sense strand
agaaguaaagacugucaaa

SEQ ID NO: 1537870 - RNA, 19 nt, Homo sapiens
  misc_RNA (1)...(19): siRNA sense strand
gcugggcuuugagaauaaa

SEQ ID NO: 1537871 - RNA, 19 nt, Homo sapiens
  misc_RNA (1)...(19): siRNA sense strand
gccacgaacacuaccauga

SEQ ID NO: 1537872 - RNA, 19 nt, Homo sapiens
  misc_RNA (1)...(19): siRNA sense strand
agaaaccacucgggaucuu

SEQ ID NO: 1537873 - RNA, 19 nt, Homo sapiens
  misc_RNA (1)...(19): siRNA sense strand
gaagaauuagugucuccau

SEQ ID NO: 1537874 - RNA, 19 nt, Homo sapiens
  misc_RNA (1)...(19): siRNA sense strand
agaaacugaaggcaacuuu

SEQ ID NO: 1537875 - RNA, 19 nt, Homo sapiens
  misc_RNA (1)...(19): siRNA sense strand
ccaaauacaagagcagcuu

SEQ ID NO: 1537876 - RNA, 19 nt, Homo sapiens
  misc_RNA (1)...(19): siRNA sense strand
aaguaaagacugucaaagu

SEQ ID NO: 1537877 - RNA, 19 nt, Homo sapiens
  misc_RNA (1)...(19): siRNA sense strand
ggaccaagcaaggaugaca

SEQ ID NO: 1537878 - RNA, 19 nt, Homo sapiens
  misc_RNA (1)...(19): siRNA sense strand
uaaugacucuuugagacau

SEQ ID NO: 1537879 - RNA, 19 nt, Homo sapiens
  misc_RNA (1)...(19): siRNA sense strand
uuguugaaccguuaccuua

SEQ ID NO: 1537880 - RNA, 19 nt, Homo sapiens
  misc_RNA (1)...(19): siRNA sense strand
gagaaaauccuccaagaac

SEQ ID NO: 1537881 - RNA, 19 nt, Homo sapiens
  misc_RNA (1)...(19): siRNA sense strand
ugaggaagaauuagugucu

SEQ ID NO: 1537882 - RNA, 19 nt, Homo sapiens
  misc_RNA (1)...(19): siRNA sense strand
gacaaacugcagggaacua

SEQ ID NO: 1537883 - RNA, 19 nt, Homo sapiens
  misc_RNA (1)...(19): siRNA sense strand
gaaaaggaccaagcaagga

SEQ ID NO: 1537884 - RNA, 19 nt, Homo sapiens
  misc_RNA (1)...(19): siRNA sense strand
uuaccuuaaugacucuuug

SEQ ID NO: 1537885 - RNA, 19 nt, Homo sapiens
  misc_RNA (1)...(19): siRNA sense strand
cuagugcaggugucaaauu

SEQ ID NO: 1537886 - RNA, 19 nt, Homo sapiens
  misc_RNA (1)...(19): siRNA sense strand
guucgacagccagauuuaa

SEQ ID NO: 1537887 - RNA, 19 nt, Homo sapiens
  misc_RNA (1)...(19): siRNA sense strand
gagaucaacgcagcuaugg

SEQ ID NO: 1537888 - RNA, 19 nt, Homo sapiens
  misc_RNA (1)...(19): siRNA sense strand
ccuccaagaacccacauga

SEQ ID NO: 1537889 - RNA, 19 nt, Homo sapiens
  misc_RNA (1)...(19): siRNA sense strand
acaccaucgucuucaacaa

SEQ ID NO: 1537890 - RNA, 19 nt, Homo sapiens
  misc_RNA (1)...(19): siRNA sense strand
aaagcgcagcuaacagaaa

SEQ ID NO: 1537891 - RNA, 19 nt, Homo sapiens
  misc_RNA (1)...(19): siRNA sense strand
gcuuaagaauaccguucga

SEQ ID NO: 1537892 - RNA, 19 nt, Homo sapiens
  misc_RNA (1)...(19): siRNA sense strand
aagcgcagcuaacagaaaa

SEQ ID NO: 1537893 - RNA, 19 nt, Homo sapiens
  misc_RNA (1)...(19): siRNA sense strand
gagaauucggucaucaaag

SEQ ID NO: 1537894 - RNA, 19 nt, Homo sapiens
  misc_RNA (1)...(19): siRNA sense strand
uuaaugacucuuugagaca

SEQ ID NO: 1537895 - RNA, 19 nt, Homo sapiens
  misc_RNA (1)...(19): siRNA sense strand
gugagaauucggucaucaa

SEQ ID NO: 1537896 - RNA, 19 nt, Homo sapiens
  misc_RNA (1)...(19): siRNA sense strand
gaacuaccagcugcaucau

SEQ ID NO: 1537897 - RNA, 19 nt, Homo sapiens
  misc_RNA (1)...(19): siRNA sense strand
aggaugacacguauuggaa

SEQ ID NO: 1537898 - RNA, 19 nt, Homo sapiens
  misc_RNA (1)...(19): siRNA sense strand
uugaaccguuaccuuaaug

SEQ ID NO: 1537899 - RNA, 19 nt, Homo sapiens
  misc_RNA (1)...(19): siRNA sense strand
uguugaaccguuaccuuaa

SEQ ID NO: 1537900 - RNA, 19 nt, Homo sapiens
  misc_RNA (1)...(19): siRNA sense strand
ggcaaugcugaacggcuua

SEQ ID NO: 1537901 - RNA, 19 nt, Homo sapiens
  misc_RNA (1)...(19): siRNA sense strand
gaagaaagaugccaaauuc

SEQ ID NO: 1537902 - RNA, 19 nt, Homo sapiens
  misc_RNA (1)...(19): siRNA sense strand
ggaaguggcugaugacuau

SEQ ID NO: 1537903 - RNA, 19 nt, Homo sapiens
  misc_RNA (1)...(19): siRNA sense strand
gaagauaugccgacacuuu

SEQ ID NO: 1537904 - RNA, 19 nt, Homo sapiens
  misc_RNA (1)...(19): siRNA sense strand
caagaaagcuaagcauuga

SEQ ID NO: 1537905 - RNA, 19 nt, Homo sapiens
  misc_RNA (1)...(19): siRNA sense strand
gaagagcgauggaagaaca

SEQ ID NO: 1537906 - RNA, 19 nt, Homo sapiens
  misc_RNA (1)...(19): siRNA sense strand
ggaaagacuccguaucuaa

SEQ ID NO: 1537907 - RNA, 19 nt, Homo sapiens
  misc_RNA (1)...(19): siRNA sense strand
gaaauucucucgucaacgu

SEQ ID NO: 1537908 - RNA, 19 nt, Homo sapiens
  misc_RNA (1)...(19): siRNA sense strand
aaacaaagccagugaagaa

SEQ ID NO: 1537909 - RNA, 19 nt, Homo sapiens
  misc_RNA (1)...(19): siRNA sense strand
gcaagaaagcuaagcauug

SEQ ID NO: 1537910 - RNA, 19 nt, Homo sapiens
  misc_RNA (1)...(19): siRNA sense strand
agaaggagguggauaaaga

SEQ ID NO: 1537911 - RNA, 19 nt, Homo sapiens
  misc_RNA (1)...(19): siRNA sense strand
gaagagucgugccuacuga

SEQ ID NO: 1537912 - RNA, 19 nt, Homo sapiens
  misc_RNA (1)...(19): siRNA sense strand
caacacaggugagacagaa

SEQ ID NO: 1537913 - RNA, 19 nt, Homo sapiens
  misc_RNA (1)...(19): siRNA sense strand
gcaagacacagaaauagaa

SEQ ID NO: 1537914 - RNA, 19 nt, Homo sapiens
  misc_RNA (1)...(19): siRNA sense strand
caaagaaacacuggagaua

SEQ ID NO: 1537915 - RNA, 19 nt, Homo sapiens
  misc_RNA (1)...(19): siRNA sense strand
aagaaacacuggagauauu

SEQ ID NO: 1537916 - RNA, 19 nt, Homo sapiens
  misc_RNA (1)...(19): siRNA sense strand
ugagagacauaaacaagaa

SEQ ID NO: 1537917 - RNA, 19 nt, Homo sapiens
  misc_RNA (1)...(19): siRNA sense strand
gaacuggcaagaaagcuaa

SEQ ID NO: 1537918 - RNA, 19 nt, Homo sapiens
  misc_RNA (1)...(19): siRNA sense strand
cagaggaaguggcugauga

SEQ ID NO: 1537919 - RNA, 19 nt, Homo sapiens
  misc_RNA (1)...(19): siRNA sense strand
gaacugagaagagaauaug

SEQ ID NO: 1537920 - RNA, 19 nt, Homo sapiens
  misc_RNA (1)...(19): siRNA sense strand
cuggagauauucagaagua

SEQ ID NO: 1537921 - RNA, 19 nt, Homo sapiens
  misc_RNA (1)...(19): siRNA sense strand
gcagucaguuaauagaaga

SEQ ID NO: 1537922 - RNA, 19 nt, Homo sapiens
  misc_RNA (1)...(19): siRNA sense strand
gaggaagaaucccaaagau

SEQ ID NO: 1537923 - RNA, 19 nt, Homo sapiens
  misc_RNA (1)...(19): siRNA sense strand
gaacaggacagguuauugg

SEQ ID NO: 1537924 - RNA, 19 nt, Homo sapiens
  misc_RNA (1)...(19): siRNA sense strand
gacacuuucuccacagaua

SEQ ID NO: 1537925 - RNA, 19 nt, Homo sapiens
  misc_RNA (1)...(19): siRNA sense strand
uaccauacccgaagaaauu

SEQ ID NO: 1537926 - RNA, 19 nt, Homo sapiens
  misc_RNA (1)...(19): siRNA sense strand
agagaucacuguaagguau

SEQ ID NO: 1537927 - RNA, 19 nt, Homo sapiens
  misc_RNA (1)...(19): siRNA sense strand
gacauugacaguagugaua

SEQ ID NO: 1537928 - RNA, 19 nt, Homo sapiens
  misc_RNA (1)...(19): siRNA sense strand
gaaagacuccguaucuaag

SEQ ID NO: 1537929 - RNA, 19 nt, Homo sapiens
  misc_RNA (1)...(19): siRNA sense strand
gauggaagaacaacugaaa

SEQ ID NO: 1537930 - RNA, 19 nt, Homo sapiens
  misc_RNA (1)...(19): siRNA sense strand
gaacuguggacgauaauuc

SEQ ID NO: 1537931 - RNA, 19 nt, Homo sapiens
  misc_RNA (1)...(19): siRNA sense strand
guggaacuguggacgauaa

SEQ ID NO: 1537932 - RNA, 19 nt, Homo sapiens
  misc_RNA (1)...(19): siRNA sense strand
ggagguggauaaagagcaa

SEQ ID NO: 1537933 - RNA, 19 nt, Homo sapiens
  misc_RNA (1)...(19): siRNA sense strand
gagaagagaauaugaagag

SEQ ID NO: 1537934 - RNA, 19 nt, Homo sapiens
  misc_RNA (1)...(19): siRNA sense strand
cuaaggacauugacaguag

SEQ ID NO: 1537935 - RNA, 19 nt, Homo sapiens
  misc_RNA (1)...(19): siRNA sense strand
ggacagguuauuggcauua

SEQ ID NO: 1537936 - RNA, 19 nt, Homo sapiens
  misc_RNA (1)...(19): siRNA sense strand
gagcaucuacuguuugaga

SEQ ID NO: 1537937 - RNA, 19 nt, Homo sapiens
  misc_RNA (1)...(19): siRNA sense strand
gaaagaugccaaauucuac

SEQ ID NO: 1537938 - RNA, 19 nt, Homo sapiens
  misc_RNA (1)...(19): siRNA sense strand
aagagaauaugaagaggaa

SEQ ID NO: 1537939 - RNA, 19 nt, Homo sapiens
  misc_RNA (1)...(19): siRNA sense strand
caaagccagugaagaauac

SEQ ID NO: 1537940 - RNA, 19 nt, Homo sapiens
  misc_RNA (1)...(19): siRNA sense strand
ugacaguagugauaggaaa

SEQ ID NO: 1537941 - RNA, 19 nt, Homo sapiens
  misc_RNA (1)...(19): siRNA sense strand
ucaagaggaaacagaaaua

SEQ ID NO: 1537942 - RNA, 19 nt, Homo sapiens
  misc_RNA (1)...(19): siRNA sense strand
agucaaggauccaugcuuu

SEQ ID NO: 1537943 - RNA, 19 nt, Homo sapiens
  misc_RNA (1)...(19): siRNA sense strand
gggaaagaguuaugugucu

SEQ ID NO: 1537944 - RNA, 19 nt, Homo sapiens
  misc_RNA (1)...(19): siRNA sense strand
caacagggcaagacacaga

SEQ ID NO: 1537945 - RNA, 19 nt, Homo sapiens
  misc_RNA (1)...(19): siRNA sense strand
ggagauauucagaaguauu

SEQ ID NO: 1537946 - RNA, 19 nt, Homo sapiens
  misc_RNA (1)...(19): siRNA sense strand
caagaggaaacagaaauaa

SEQ ID NO: 1537947 - RNA, 19 nt, Homo sapiens
  misc_RNA (1)...(19): siRNA sense strand
guaaggagauuuccaaaag

SEQ ID NO: 1537948 - RNA, 19 nt, Homo sapiens
  misc_RNA (1)...(19): siRNA sense strand
aagaauacauacagagguu

SEQ ID NO: 1537949 - RNA, 19 nt, Homo sapiens
  misc_RNA (1)...(19): siRNA sense strand
ucagagaugcacaaaguaa

SEQ ID NO: 1537950 - RNA, 19 nt, Homo sapiens
  misc_RNA (1)...(19): siRNA sense strand
gaagcagucaguuaauaga

SEQ ID NO: 1537951 - RNA, 19 nt, Homo sapiens
  misc_RNA (1)...(19): siRNA sense strand
agaguuaugugucuuaagu

SEQ ID NO: 1537952 - RNA, 19 nt, Homo sapiens
  misc_RNA (1)...(19): siRNA sense strand
agaaagcuaagcauugaua

SEQ ID NO: 1537953 - RNA, 19 nt, Homo sapiens
  misc_RNA (1)...(19): siRNA sense strand
uuucagagaugcacaaagu

SEQ ID NO: 1537954 - RNA, 19 nt, Homo sapiens
  misc_RNA (1)...(19): siRNA sense strand
ggaaacaacacaggugaga

SEQ ID NO: 1537955 - RNA, 19 nt, Homo sapiens
  misc_RNA (1)...(19): siRNA sense strand
gaacaaacaaagaaacacu

SEQ ID NO: 1537956 - RNA, 19 nt, Homo sapiens
  misc_RNA (1)...(19): siRNA sense strand
acagauaucccuuggaguu

SEQ ID NO: 1537957 - RNA, 19 nt, Homo sapiens
  misc_RNA (1)...(19): siRNA sense strand
acaaagccagugaagaaua

SEQ ID NO: 1537958 - RNA, 19 nt, Homo sapiens
  misc_RNA (1)...(19): siRNA sense strand
agaagaacaggacagguua

SEQ ID NO: 1537959 - RNA, 19 nt, Homo sapiens
  misc_RNA (1)...(19): siRNA sense strand
gcaaucaugggaaagaguu

SEQ ID NO: 1537960 - RNA, 19 nt, Homo sapiens
  misc_RNA (1)...(19): siRNA sense strand
ggaacuggcaagaaagcua

SEQ ID NO: 1537961 - RNA, 19 nt, Homo sapiens
  misc_RNA (1)...(19): siRNA sense strand
gagaauaugaagaggaaau

SEQ ID NO: 1537962 - RNA, 19 nt, Homo sapiens
  misc_RNA (1)...(19): siRNA sense strand
agaagaaagaugccaaauu

SEQ ID NO: 1537963 - RNA, 19 nt, Homo sapiens
  misc_RNA (1)...(19): siRNA sense strand
uugaagcagucaguuaaua

SEQ ID NO: 1537964 - RNA, 19 nt, Homo sapiens
  misc_RNA (1)...(19): siRNA sense strand
cagacaaagugcuaaaugg

SEQ ID NO: 1537965 - RNA, 19 nt, Homo sapiens
  misc_RNA (1)...(19): siRNA sense strand
gcagauucuucaauagagu

SEQ ID NO: 1537966 - RNA, 19 nt, Homo sapiens
  misc_RNA (1)...(19): siRNA sense strand
uacaagaagucaggaaaga

SEQ ID NO: 1537967 - RNA, 19 nt, Homo sapiens
  misc_RNA (1)...(19): siRNA sense strand
acaccgaaaucucaguuug

SEQ ID NO: 1537968 - RNA, 19 nt, Homo sapiens
  misc_RNA (1)...(19): siRNA sense strand
augaggaacuggcaagaaa

SEQ ID NO: 1537969 - RNA, 19 nt, Homo sapiens
  misc_RNA (1)...(19): siRNA sense strand
cuuuaaagaugcaguugaa

SEQ ID NO: 1537970 - RNA, 19 nt, Homo sapiens
  misc_RNA (1)...(19): siRNA sense strand
gaucaagaggaaacagaaa

SEQ ID NO: 1537971 - RNA, 19 nt, Homo sapiens
  misc_RNA (1)...(19): siRNA sense strand
gcgaagagcgauggaagaa

SEQ ID NO: 1537972 - RNA, 19 nt, Homo sapiens
  misc_RNA (1)...(19): siRNA sense strand
uagagcgucuggccaagaa

SEQ ID NO: 1537973 - RNA, 19 nt, Homo sapiens
  misc_RNA (1)...(19): siRNA sense strand
ugacacagacaaauggaaa

SEQ ID NO: 1537974 - RNA, 19 nt, Homo sapiens
  misc_RNA (1)...(19): siRNA sense strand
caguucgucugcucaguaa

SEQ ID NO: 1537975 - RNA, 19 nt, Homo sapiens
  misc_RNA (1)...(19): siRNA sense strand
ccaaagaugggaacuucaa

SEQ ID NO: 1537976 - RNA, 19 nt, Homo sapiens
  misc_RNA (1)...(19): siRNA sense strand
gcuaagcauugauauuaac

SEQ ID NO: 1537977 - RNA, 19 nt, Homo sapiens
  misc_RNA (1)...(19): siRNA sense strand
gaaagcuaagcauugauau

SEQ ID NO: 1537978 - RNA, 19 nt, Homo sapiens
  misc_RNA (1)...(19): siRNA sense strand
guuauuggcauuacaacuu

SEQ ID NO: 1537979 - RNA, 19 nt, Homo sapiens
  misc_RNA (1)...(19): siRNA sense strand
uggagcaucuacuguuuga

SEQ ID NO: 1537980 - RNA, 19 nt, Homo sapiens
  misc_RNA (1)...(19): siRNA sense strand
gagaacaaggugcagauuc

SEQ ID NO: 1537981 - RNA, 19 nt, Homo sapiens
  misc_RNA (1)...(19): siRNA sense strand
uagaagauaugccgacacu

SEQ ID NO: 1537982 - RNA, 19 nt, Homo sapiens
  misc_RNA (1)...(19): siRNA sense strand
gaagaacaggacagguuau

SEQ ID NO: 1537983 - RNA, 19 nt, Homo sapiens
  misc_RNA (1)...(19): siRNA sense strand
gaaggaaacgucaaaacaa

SEQ ID NO: 1537984 - RNA, 19 nt, Homo sapiens
  misc_RNA (1)...(19): siRNA sense strand
gaacaaggugcagauucuu

SEQ ID NO: 1537985 - RNA, 19 nt, Homo sapiens
  misc_RNA (1)...(19): siRNA sense strand
aaagaaacacuggagauau

SEQ ID NO: 1537986 - RNA, 19 nt, Homo sapiens
  misc_RNA (1)...(19): siRNA sense strand
caggaaagacuccguaucu

SEQ ID NO: 1537987 - RNA, 19 nt, Homo sapiens
  misc_RNA (1)...(19): siRNA sense strand
cccagggagugcaagcuua

SEQ ID NO: 1537988 - RNA, 19 nt, Homo sapiens
  misc_RNA (1)...(19): siRNA sense strand
aagaacaacugaaaaguga

SEQ ID NO: 1537989 - RNA, 19 nt, Homo sapiens
  misc_RNA (1)...(19): siRNA sense strand
cagccuagcauuucacaga

SEQ ID NO: 1537990 - RNA, 19 nt, Homo sapiens
  misc_RNA (1)...(19): siRNA sense strand
auaggcaagugucuuuaaa

SEQ ID NO: 1537991 - RNA, 19 nt, Homo sapiens
  misc_RNA (1)...(19): siRNA sense strand
uaaauggacagaggaagaa

SEQ ID NO: 1537992 - RNA, 19 nt, Homo sapiens
  misc_RNA (1)...(19): siRNA sense strand
aggugcagauucuucaaua

SEQ ID NO: 1537993 - RNA, 19 nt, Homo sapiens
  misc_RNA (1)...(19): siRNA sense strand
cucugaagcuguacaagaa

SEQ ID NO: 1537994 - RNA, 19 nt, Homo sapiens
  misc_RNA (1)...(19): siRNA sense strand
ggaacugagaagagaauau

SEQ ID NO: 1537995 - RNA, 19 nt, Homo sapiens
  misc_RNA (1)...(19): siRNA sense strand
ccagacaaagugcuaaaug

SEQ ID NO: 1537996 - RNA, 19 nt, Homo sapiens
  misc_RNA (1)...(19): siRNA sense strand
aaacaagaccaagcaauca

SEQ ID NO: 1537997 - RNA, 19 nt, Homo sapiens
  misc_RNA (1)...(19): siRNA sense strand
gugcagauucuucaauaga

SEQ ID NO: 1537998 - RNA, 19 nt, Homo sapiens
  misc_RNA (1)...(19): siRNA sense strand
aaaggcaaacucacacaaa

SEQ ID NO: 1537999 - RNA, 19 nt, Homo sapiens
  misc_RNA (1)...(19): siRNA sense strand
uuucagauguuucagagau

SEQ ID NO: 1538000 - RNA, 19 nt, Homo sapiens
  misc_RNA (1)...(19): siRNA sense strand
cuacuagagaucacuguaa

SEQ ID NO: 1538001 - RNA, 19 nt, Homo sapiens
  misc_RNA (1)...(19): siRNA sense strand
gcaaguuccuccuaagaua

SEQ ID NO: 1538002 - RNA, 19 nt, Homo sapiens
  misc_RNA (1)...(19): siRNA sense strand
caacuuugcuccuacuauu

SEQ ID NO: 1538003 - RNA, 19 nt, Homo sapiens
  misc_RNA (1)...(19): siRNA sense strand
gcaguggccugauaagaug

SEQ ID NO: 1538004 - RNA, 19 nt, Homo sapiens
  misc_RNA (1)...(19): siRNA sense strand
ggaaccaacgucacucuua

SEQ ID NO: 1538005 - RNA, 19 nt, Homo sapiens
  misc_RNA (1)...(19): siRNA sense strand
caacgucacucuuacuugu

SEQ ID NO: 1538006 - RNA, 19 nt, Homo sapiens
  misc_RNA (1)...(19): siRNA sense strand
cugaaccggucaaguauua

SEQ ID NO: 1538007 - RNA, 19 nt, Homo sapiens
  misc_RNA (1)...(19): siRNA sense strand
ggacauuuauggaauuaca

SEQ ID NO: 1538008 - RNA, 19 nt, Homo sapiens
  misc_RNA (1)...(19): siRNA sense strand
ggacuacagccuccagaua

SEQ ID NO: 1538009 - RNA, 19 nt, Homo sapiens
  misc_RNA (1)...(19): siRNA sense strand
ggacaauauuuggacauuu

SEQ ID NO: 1538010 - RNA, 19 nt, Homo sapiens
  misc_RNA (1)...(19): siRNA sense strand
caacauacacccagaacaa

SEQ ID NO: 1538011 - RNA, 19 nt, Homo sapiens
  misc_RNA (1)...(19): siRNA sense strand
caagauccauucucacugu

SEQ ID NO: 1538012 - RNA, 19 nt, Homo sapiens
  misc_RNA (1)...(19): siRNA sense strand
gaauguagaugugacagau

SEQ ID NO: 1538013 - RNA, 19 nt, Homo sapiens
  misc_RNA (1)...(19): siRNA sense strand
gaaccaacgucacucuuac

SEQ ID NO: 1538014 - RNA, 19 nt, Homo sapiens
  misc_RNA (1)...(19): siRNA sense strand
ggccaacaaggaauuauua

SEQ ID NO: 1538015 - RNA, 19 nt, Homo sapiens
  misc_RNA (1)...(19): siRNA sense strand
gauccucgaguuucaauuu

SEQ ID NO: 1538016 - RNA, 19 nt, Homo sapiens
  misc_RNA (1)...(19): siRNA sense strand
ccucuuaacccuccaagua

SEQ ID NO: 1538017 - RNA, 19 nt, Homo sapiens
  misc_RNA (1)...(19): siRNA sense strand
gugcuuagguguuauuugg

SEQ ID NO: 1538018 - RNA, 19 nt, Homo sapiens
  misc_RNA (1)...(19): siRNA sense strand
gaaccggucaaguauuauu

SEQ ID NO: 1538019 - RNA, 19 nt, Homo sapiens
  misc_RNA (1)...(19): siRNA sense strand
gcucuucaauggccaacaa

SEQ ID NO: 1538020 - RNA, 19 nt, Homo sapiens
  misc_RNA (1)...(19): siRNA sense strand
ggacgcaguggccugauaa

SEQ ID NO: 1538021 - RNA, 19 nt, Homo sapiens
  misc_RNA (1)...(19): siRNA sense strand
cggcggugcuuagguguua

SEQ ID NO: 1538022 - RNA, 19 nt, Homo sapiens
  misc_RNA (1)...(19): siRNA sense strand
gagcacuucggcaauuaua

SEQ ID NO: 1538023 - RNA, 19 nt, Homo sapiens
  misc_RNA (1)...(19): siRNA sense strand
gcuuagguguuauuuggaa

SEQ ID NO: 1538024 - RNA, 19 nt, Homo sapiens
  misc_RNA (1)...(19): siRNA sense strand
uggcugaaccggucaagua

SEQ ID NO: 1538025 - RNA, 19 nt, Homo sapiens
  misc_RNA (1)...(19): siRNA sense strand
aaugcgagccugccucuua

SEQ ID NO: 1538026 - RNA, 19 nt, Homo sapiens
  misc_RNA (1)...(19): siRNA sense strand
ccauacacguguucuguuc

SEQ ID NO: 1538027 - RNA, 19 nt, Homo sapiens
  misc_RNA (1)...(19): siRNA sense strand
caggagcacuucggcaauu

SEQ ID NO: 1538028 - RNA, 19 nt, Homo sapiens
  misc_RNA (1)...(19): siRNA sense strand
ccagaugugaggaaaguaa

SEQ ID NO: 1538029 - RNA, 19 nt, Homo sapiens
  misc_RNA (1)...(19): siRNA sense strand
aaccagagccuuucauuuc

SEQ ID NO: 1538030 - RNA, 19 nt, Homo sapiens
  misc_RNA (1)...(19): siRNA sense strand
cgggagcgcugauguucuu

SEQ ID NO: 1538031 - RNA, 19 nt, Homo sapiens
  misc_RNA (1)...(19): siRNA sense strand
acaacaugauggucagaaa

SEQ ID NO: 1538032 - RNA, 19 nt, Homo sapiens
  misc_RNA (1)...(19): siRNA sense strand
ccagagccuuucauuucuu

SEQ ID NO: 1538033 - RNA, 19 nt, Homo sapiens
  misc_RNA (1)...(19): siRNA sense strand
aaaccagagccuuucauuu

SEQ ID NO: 1538034 - RNA, 19 nt, Homo sapiens
  misc_RNA (1)...(19): siRNA sense strand
guacagcccaguauggaau

SEQ ID NO: 1538035 - RNA, 19 nt, Homo sapiens
  misc_RNA (1)...(19): siRNA sense strand
gaugugucauucccagaug

SEQ ID NO: 1538036 - RNA, 19 nt, Homo sapiens
  misc_RNA (1)...(19): siRNA sense strand
gcugguaccuuguguugac

SEQ ID NO: 1538037 - RNA, 19 nt, Homo sapiens
  misc_RNA (1)...(19): siRNA sense strand
gucaguggauccucgaguu

SEQ ID NO: 1538038 - RNA, 19 nt, Homo sapiens
  misc_RNA (1)...(19): siRNA sense strand
guacaaaggagagaagaag

SEQ ID NO: 1538039 - RNA, 19 nt, Homo sapiens
  misc_RNA (1)...(19): siRNA sense strand
ugacaucucaaaugauaug

SEQ ID NO: 1538040 - RNA, 19 nt, Homo sapiens
  misc_RNA (1)...(19): siRNA sense strand
caaguuccuccuaagauau

SEQ ID NO: 1538041 - RNA, 19 nt, Homo sapiens
  misc_RNA (1)...(19): siRNA sense strand
cagagccuuucauuucuug

SEQ ID NO: 1538042 - RNA, 19 nt, Homo sapiens
  misc_RNA (1)...(19): siRNA sense strand
cggacgcaguggccugaua

SEQ ID NO: 1538043 - RNA, 19 nt, Homo sapiens
  misc_RNA (1)...(19): siRNA sense strand
gauccauucucacuguuac

SEQ ID NO: 1538044 - RNA, 19 nt, Homo sapiens
  misc_RNA (1)...(19): siRNA sense strand
gcacuucggcaauuauacu

SEQ ID NO: 1538045 - RNA, 19 nt, Homo sapiens
  misc_RNA (1)...(19): siRNA sense strand
uggacaauauuuggacauu

SEQ ID NO: 1538046 - RNA, 19 nt, Homo sapiens
  misc_RNA (1)...(19): siRNA sense strand
ccaacaagcuaggcacaac

SEQ ID NO: 1538047 - RNA, 19 nt, Homo sapiens
  misc_RNA (1)...(19): siRNA sense strand
aggagcacuucggcaauua

SEQ ID NO: 1538048 - RNA, 19 nt, Homo sapiens
  misc_RNA (1)...(19): siRNA sense strand
caaguacagcccaguaugg

SEQ ID NO: 1538049 - RNA, 19 nt, Homo sapiens
  misc_RNA (1)...(19): siRNA sense strand
gacuacagccuccagauac

SEQ ID NO: 1538050 - RNA, 19 nt, Homo sapiens
  misc_RNA (1)...(19): siRNA sense strand
cagcauauucuaccugaag

SEQ ID NO: 1538051 - RNA, 19 nt, Homo sapiens
  misc_RNA (1)...(19): siRNA sense strand
ccaaguacagcccaguaug

SEQ ID NO: 1538052 - RNA, 19 nt, Homo sapiens
  misc_RNA (1)...(19): siRNA sense strand
augcgagccugccucuuaa

SEQ ID NO: 1538053 - RNA, 19 nt, Homo sapiens
  misc_RNA (1)...(19): siRNA sense strand
gugcaaguuccuccuaaga

SEQ ID NO: 1538054 - RNA, 19 nt, Homo sapiens
  misc_RNA (1)...(19): siRNA sense strand
ccucgaguuucaauuucaa

SEQ ID NO: 1538055 - RNA, 19 nt, Homo sapiens
  misc_RNA (1)...(19): siRNA sense strand
auguagaugugacagauga

SEQ ID NO: 1538056 - RNA, 19 nt, Homo sapiens
  misc_RNA (1)...(19): siRNA sense strand
acgucacucuuacuuguuu

SEQ ID NO: 1538057 - RNA, 19 nt, Homo sapiens
  misc_RNA (1)...(19): siRNA sense strand
ggagcacuucggcaauuau

SEQ ID NO: 1538058 - RNA, 19 nt, Homo sapiens
  misc_RNA (1)...(19): siRNA sense strand
caauggccaacaaggaauu

SEQ ID NO: 1538059 - RNA, 19 nt, Homo sapiens
  misc_RNA (1)...(19): siRNA sense strand
cuccagccuuugaauggua

SEQ ID NO: 1538060 - RNA, 19 nt, Homo sapiens
  misc_RNA (1)...(19): siRNA sense strand
ucaguggauccucgaguuu

SEQ ID NO: 1538061 - RNA, 19 nt, Homo sapiens
  misc_RNA (1)...(19): siRNA sense strand
caagcuaggcacaaccaau

SEQ ID NO: 1538062 - RNA, 19 nt, Homo sapiens
  misc_RNA (1)...(19): siRNA sense strand
agcacaagauccauucuca

SEQ ID NO: 1538063 - RNA, 19 nt, Homo sapiens
  misc_RNA (1)...(19): siRNA sense strand
gguacaaaggagagaagaa

SEQ ID NO: 1538064 - RNA, 19 nt, Homo sapiens
  misc_RNA (1)...(19): siRNA sense strand
gaaaguaaaaguuguuguc

SEQ ID NO: 1538065 - RNA, 19 nt, Homo sapiens
  misc_RNA (1)...(19): siRNA sense strand
ccuacuauucaggaaauua

SEQ ID NO: 1538066 - RNA, 19 nt, Homo sapiens
  misc_RNA (1)...(19): siRNA sense strand
aagcuaggcacaaccaaug

SEQ ID NO: 1538067 - RNA, 19 nt, Homo sapiens
  misc_RNA (1)...(19): siRNA sense strand
gcugaaccggucaaguauu

SEQ ID NO: 1538068 - RNA, 19 nt, Homo sapiens
  misc_RNA (1)...(19): siRNA sense strand
gccaacaaggaauuauuau

SEQ ID NO: 1538069 - RNA, 19 nt, Homo sapiens
  misc_RNA (1)...(19): siRNA sense strand
acagcccaguauggaauua

SEQ ID NO: 1538070 - RNA, 19 nt, Homo sapiens
  misc_RNA (1)...(19): siRNA sense strand
cuucggcaauuauacuugu

SEQ ID NO: 1538071 - RNA, 19 nt, Homo sapiens
  misc_RNA (1)...(19): siRNA sense strand
gcccauacacguguucugu

SEQ ID NO: 1538072 - RNA, 19 nt, Homo sapiens
  misc_RNA (1)...(19): siRNA sense strand
cgcaguggccugauaagau

SEQ ID NO: 1538073 - RNA, 19 nt, Homo sapiens
  misc_RNA (1)...(19): siRNA sense strand
cagaugugaggaaaguaaa

SEQ ID NO: 1538074 - RNA, 19 nt, Homo sapiens
  misc_RNA (1)...(19): siRNA sense strand
ccaacgucacucuuacuug

SEQ ID NO: 1538075 - RNA, 19 nt, Homo sapiens
  misc_RNA (1)...(19): siRNA sense strand
ugaaggaaccaacgucacu

SEQ ID NO: 1538076 - RNA, 19 nt, Homo sapiens
  misc_RNA (1)...(19): siRNA sense strand
aaguuccuccuaagauaua

SEQ ID NO: 1538077 - RNA, 19 nt, Homo sapiens
  misc_RNA (1)...(19): siRNA sense strand
guagaugugacagaugaug

SEQ ID NO: 1538078 - RNA, 19 nt, Homo sapiens
  misc_RNA (1)...(19): siRNA sense strand
gacaacaugauggucagaa

SEQ ID NO: 1538079 - RNA, 19 nt, Homo sapiens
  misc_RNA (1)...(19): siRNA sense strand
ucccagaugugaggaaagu

SEQ ID NO: 1538080 - RNA, 19 nt, Homo sapiens
  misc_RNA (1)...(19): siRNA sense strand
ggacaacaugauggucaga

SEQ ID NO: 1538081 - RNA, 19 nt, Homo sapiens
  misc_RNA (1)...(19): siRNA sense strand
ucuuaacccuccaaguaca

SEQ ID NO: 1538082 - RNA, 19 nt, Homo sapiens
  misc_RNA (1)...(19): siRNA sense strand
cacaagauccauucucacu

SEQ ID NO: 1538083 - RNA, 19 nt, Homo sapiens
  misc_RNA (1)...(19): siRNA sense strand
gcaaagggacgucggagaa

SEQ ID NO: 1538084 - RNA, 19 nt, Homo sapiens
  misc_RNA (1)...(19): siRNA sense strand
gcaagaagagcugcugcuu

SEQ ID NO: 1538085 - RNA, 19 nt, Homo sapiens
  misc_RNA (1)...(19): siRNA sense strand
caugggcugugccaagugu

SEQ ID NO: 1538086 - RNA, 19 nt, Homo sapiens
  misc_RNA (1)...(19): siRNA sense strand
aaagggacgucggagaagu

SEQ ID NO: 1538087 - RNA, 19 nt, Homo sapiens
  misc_RNA (1)...(19): siRNA sense strand
gacaagaaauucacaguca

SEQ ID NO: 1538088 - RNA, 19 nt, Homo sapiens
  misc_RNA (1)...(19): siRNA sense strand
ccaaggagcucccauuucu

SEQ ID NO: 1538089 - RNA, 19 nt, Homo sapiens
  misc_RNA (1)...(19): siRNA sense strand
ggcaggaccagaacaauua

SEQ ID NO: 1538090 - RNA, 19 nt, Homo sapiens
  misc_RNA (1)...(19): siRNA sense strand
gggcagcucuccaaucuca

SEQ ID NO: 1538091 - RNA, 19 nt, Homo sapiens
  misc_RNA (1)...(19): siRNA sense strand
gaggacgccuugagcauga

SEQ ID NO: 1538092 - RNA, 19 nt, Homo sapiens
  misc_RNA (1)...(19): siRNA sense strand
gcaaagcgggucccauuga

SEQ ID NO: 1538093 - RNA, 19 nt, Homo sapiens
  misc_RNA (1)...(19): siRNA sense strand
gaaauucacagucaaguac

SEQ ID NO: 1538094 - RNA, 19 nt, Homo sapiens
  misc_RNA (1)...(19): siRNA sense strand
agaaacacaugggcuauga

SEQ ID NO: 1538095 - RNA, 19 nt, Homo sapiens
  misc_RNA (1)...(19): siRNA sense strand
gcagaccacuuccagacau

SEQ ID NO: 1538096 - RNA, 19 nt, Homo sapiens
  misc_RNA (1)...(19): siRNA sense strand
cagcaaagcgggucccauu

SEQ ID NO: 1538097 - RNA, 19 nt, Homo sapiens
  misc_RNA (1)...(19): siRNA sense strand
gcaccgcagccuugccuua

SEQ ID NO: 1538098 - RNA, 19 nt, Homo sapiens
  misc_RNA (1)...(19): siRNA sense strand
aggaagaaaucacuggaaa

SEQ ID NO: 1538099 - RNA, 19 nt, Homo sapiens
  misc_RNA (1)...(19): siRNA sense strand
cacccaaccuguucaccua

SEQ ID NO: 1538100 - RNA, 19 nt, Homo sapiens
  misc_RNA (1)...(19): siRNA sense strand
gggcaggaccagaacaauu

SEQ ID NO: 1538101 - RNA, 19 nt, Homo sapiens
  misc_RNA (1)...(19): siRNA sense strand
ucaaguacccacagaacaa

SEQ ID NO: 1538102 - RNA, 19 nt, Homo sapiens
  misc_RNA (1)...(19): siRNA sense strand
ccaccgaugacaagaaauu

SEQ ID NO: 1538103 - RNA, 19 nt, Homo sapiens
  misc_RNA (1)...(19): siRNA sense strand
ggcccuaccuucugaccaa

SEQ ID NO: 1538104 - RNA, 19 nt, Homo sapiens
  misc_RNA (1)...(19): siRNA sense strand
gcaggaccagaacaauuaa

SEQ ID NO: 1538105 - RNA, 19 nt, Homo sapiens
  misc_RNA (1)...(19): siRNA sense strand
ccagccuucuccucucaua

SEQ ID NO: 1538106 - RNA, 19 nt, Homo sapiens
  misc_RNA (1)...(19): siRNA sense strand
acaagaaauucacagucaa

SEQ ID NO: 1538107 - RNA, 19 nt, Homo sapiens
  misc_RNA (1)...(19): siRNA sense strand
caaagcgggucccauugag

SEQ ID NO: 1538108 - RNA, 19 nt, Homo sapiens
  misc_RNA (1)...(19): siRNA sense strand
ucaacuccaucuccaagga

SEQ ID NO: 1538109 - RNA, 19 nt, Homo sapiens
  misc_RNA (1)...(19): siRNA sense strand
guacgagugcaacauaugu

SEQ ID NO: 1538110 - RNA, 19 nt, Homo sapiens
  misc_RNA (1)...(19): siRNA sense strand
agaaauucacagucaagua

SEQ ID NO: 1538111 - RNA, 19 nt, Homo sapiens
  misc_RNA (1)...(19): siRNA sense strand
cauggcaucuccagcaaag

SEQ ID NO: 1538112 - RNA, 19 nt, Homo sapiens
  misc_RNA (1)...(19): siRNA sense strand
uuauggcgguggcaucuga

SEQ ID NO: 1538113 - RNA, 19 nt, Homo sapiens
  misc_RNA (1)...(19): siRNA sense strand
caagaaauucacagucaag

SEQ ID NO: 1538114 - RNA, 19 nt, Homo sapiens
  misc_RNA (1)...(19): siRNA sense strand
gcccagccuucuccucuca

SEQ ID NO: 1538115 - RNA, 19 nt, Homo sapiens
  misc_RNA (1)...(19): siRNA sense strand
ggcauggcaucuccagcaa

SEQ ID NO: 1538116 - RNA, 19 nt, Homo sapiens
  misc_RNA (1)...(19): siRNA sense strand
gagaaacacaugggcuaug

SEQ ID NO: 1538117 - RNA, 19 nt, Homo sapiens
  misc_RNA (1)...(19): siRNA sense strand
cuccaccgaugacaagaaa

SEQ ID NO: 1538118 - RNA, 19 nt, Homo sapiens
  misc_RNA (1)...(19): siRNA sense strand
gaagaaaucacuggaaaag

SEQ ID NO: 1538119 - RNA, 19 nt, Homo sapiens
  misc_RNA (1)...(19): siRNA sense strand
ccaagccucuggccaagcu

SEQ ID NO: 1538120 - RNA, 19 nt, Homo sapiens
  misc_RNA (1)...(19): siRNA sense strand
ccuguacgagugcaacaua

SEQ ID NO: 1538121 - RNA, 19 nt, Homo sapiens
  misc_RNA (1)...(19): siRNA sense strand
aaagaagaauggcaaaauc

SEQ ID NO: 1538122 - RNA, 19 nt, Homo sapiens
  misc_RNA (1)...(19): siRNA sense strand
caccaccgcugcagaacag

SEQ ID NO: 1538123 - RNA, 19 nt, Homo sapiens
  misc_RNA (1)...(19): siRNA sense strand
ggcgguggcaucugagaaa

SEQ ID NO: 1538124 - RNA, 19 nt, Homo sapiens
  misc_RNA (1)...(19): siRNA sense strand
aaacacaugggcuaugaca

SEQ ID NO: 1538125 - RNA, 19 nt, Homo sapiens
  misc_RNA (1)...(19): siRNA sense strand
acaaggacaagcugggaaa

SEQ ID NO: 1538126 - RNA, 19 nt, Homo sapiens
  misc_RNA (1)...(19): siRNA sense strand
acagucaaguacccacaga

SEQ ID NO: 1538127 - RNA, 19 nt, Homo sapiens
  misc_RNA (1)...(19): siRNA sense strand
ggaagaaaucacuggaaaa

SEQ ID NO: 1538128 - RNA, 19 nt, Homo sapiens
  misc_RNA (1)...(19): siRNA sense strand
cagaccacuuccagacaug

SEQ ID NO: 1538129 - RNA, 19 nt, Homo sapiens
  misc_RNA (1)...(19): siRNA sense strand
gggaaagcaagagcaguga

SEQ ID NO: 1538130 - RNA, 19 nt, Homo sapiens
  misc_RNA (1)...(19): siRNA sense strand
gcauggcaucuccagcaaa

SEQ ID NO: 1538131 - RNA, 19 nt, Homo sapiens
  misc_RNA (1)...(19): siRNA sense strand
uggccugccuugcccaaug

SEQ ID NO: 1538132 - RNA, 19 nt, Homo sapiens
  misc_RNA (1)...(19): siRNA sense strand
aagcgggucccauugaguu

SEQ ID NO: 1538133 - RNA, 19 nt, Homo sapiens
  misc_RNA (1)...(19): siRNA sense strand
caggaagaaaucacuggaa

SEQ ID NO: 1538134 - RNA, 19 nt, Homo sapiens
  misc_RNA (1)...(19): siRNA sense strand
gcagcucuccaaucucaag

SEQ ID NO: 1538135 - RNA, 19 nt, Homo sapiens
  misc_RNA (1)...(19): siRNA sense strand
gggaaaacagccagaaaga

SEQ ID NO: 1538136 - RNA, 19 nt, Homo sapiens
  misc_RNA (1)...(19): siRNA sense strand
ccuaccuucugaccaaugu

SEQ ID NO: 1538137 - RNA, 19 nt, Homo sapiens
  misc_RNA (1)...(19): siRNA sense strand
augccuagccugcugauga

SEQ ID NO: 1538138 - RNA, 19 nt, Homo sapiens
  misc_RNA (1)...(19): siRNA sense strand
caaacaaacuugcugaaua

SEQ ID NO: 1538139 - RNA, 19 nt, Homo sapiens
  misc_RNA (1)...(19): siRNA sense strand
gaaaagagcuuagggaaua

SEQ ID NO: 1538140 - RNA, 19 nt, Homo sapiens
  misc_RNA (1)...(19): siRNA sense strand
gaaaggaacauucgcaaua

SEQ ID NO: 1538141 - RNA, 19 nt, Homo sapiens
  misc_RNA (1)...(19): siRNA sense strand
ggacuuaaccuauauacua

SEQ ID NO: 1538142 - RNA, 19 nt, Homo sapiens
  misc_RNA (1)...(19): siRNA sense strand
gcagaaagcuggaacaagu

SEQ ID NO: 1538143 - RNA, 19 nt, Homo sapiens
  misc_RNA (1)...(19): siRNA sense strand
caacauagccacccgaaua

SEQ ID NO: 1538144 - RNA, 19 nt, Homo sapiens
  misc_RNA (1)...(19): siRNA sense strand
ggaaacaugucacagauug

SEQ ID NO: 1538145 - RNA, 19 nt, Homo sapiens
  misc_RNA (1)...(19): siRNA sense strand
gcaaagagucugagaaauu

SEQ ID NO: 1538146 - RNA, 19 nt, Homo sapiens
  misc_RNA (1)...(19): siRNA sense strand
gaauaugacuggccgauug

SEQ ID NO: 1538147 - RNA, 19 nt, Homo sapiens
  misc_RNA (1)...(19): siRNA sense strand
gaagugagcugagaaguuc

SEQ ID NO: 1538148 - RNA, 19 nt, Homo sapiens
  misc_RNA (1)...(19): siRNA sense strand
gcagaaagcuucccugucu

SEQ ID NO: 1538149 - RNA, 19 nt, Homo sapiens
  misc_RNA (1)...(19): siRNA sense strand
gcuguuagcucagauauuu

SEQ ID NO: 1538150 - RNA, 19 nt, Homo sapiens
  misc_RNA (1)...(19): siRNA sense strand
caauaaacccucagacuua

SEQ ID NO: 1538151 - RNA, 19 nt, Homo sapiens
  misc_RNA (1)...(19): siRNA sense strand
ccagggagccucuaauuua

SEQ ID NO: 1538152 - RNA, 19 nt, Homo sapiens
  misc_RNA (1)...(19): siRNA sense strand
gagagggucuucagaugua

SEQ ID NO: 1538153 - RNA, 19 nt, Homo sapiens
  misc_RNA (1)...(19): siRNA sense strand
ugucuuagaugguguaaua

SEQ ID NO: 1538154 - RNA, 19 nt, Homo sapiens
  misc_RNA (1)...(19): siRNA sense strand
gaaagaagacagcaagauu

SEQ ID NO: 1538155 - RNA, 19 nt, Homo sapiens
  misc_RNA (1)...(19): siRNA sense strand
caaacuugcugaauaugua

SEQ ID NO: 1538156 - RNA, 19 nt, Homo sapiens
  misc_RNA (1)...(19): siRNA sense strand
aaacaagccuccaaauuau

SEQ ID NO: 1538157 - RNA, 19 nt, Homo sapiens
  misc_RNA (1)...(19): siRNA sense strand
acagagagcuccaugcuuu

SEQ ID NO: 1538158 - RNA, 19 nt, Homo sapiens
  misc_RNA (1)...(19): siRNA sense strand
gcaugcagcuugacagaaa

SEQ ID NO: 1538159 - RNA, 19 nt, Homo sapiens
  misc_RNA (1)...(19): siRNA sense strand
gaggacagauucagagaaa

SEQ ID NO: 1538160 - RNA, 19 nt, Homo sapiens
  misc_RNA (1)...(19): siRNA sense strand
gaagacagcauuccucuga

SEQ ID NO: 1538161 - RNA, 19 nt, Homo sapiens
  misc_RNA (1)...(19): siRNA sense strand
cauguuagcucaaagacua

SEQ ID NO: 1538162 - RNA, 19 nt, Homo sapiens
  misc_RNA (1)...(19): siRNA sense strand
guucauggcucuucauuau

SEQ ID NO: 1538163 - RNA, 19 nt, Homo sapiens
  misc_RNA (1)...(19): siRNA sense strand
ugacagagauggcuccaaa

SEQ ID NO: 1538164 - RNA, 19 nt, Homo sapiens
  misc_RNA (1)...(19): siRNA sense strand
cagcaucgguucacucuuu

SEQ ID NO: 1538165 - RNA, 19 nt, Homo sapiens
  misc_RNA (1)...(19): siRNA sense strand
gcagcccucucuucaauaa

SEQ ID NO: 1538166 - RNA, 19 nt, Homo sapiens
  misc_RNA (1)...(19): siRNA sense strand
gaacuaagagaaaccauug

SEQ ID NO: 1538167 - RNA, 19 nt, Homo sapiens
  misc_RNA (1)...(19): siRNA sense strand
caaagagucugagaaauuc

SEQ ID NO: 1538168 - RNA, 19 nt, Homo sapiens
  misc_RNA (1)...(19): siRNA sense strand
gcauacugcucuuccgaua

SEQ ID NO: 1538169 - RNA, 19 nt, Homo sapiens
  misc_RNA (1)...(19): siRNA sense strand
ggcaucaucucaacaguuu

SEQ ID NO: 1538170 - RNA, 19 nt, Homo sapiens
  misc_RNA (1)...(19): siRNA sense strand
gaacagugcagugcugaua

SEQ ID NO: 1538171 - RNA, 19 nt, Homo sapiens
  misc_RNA (1)...(19): siRNA sense strand
caucucagcuuucagcaaa

SEQ ID NO: 1538172 - RNA, 19 nt, Homo sapiens
  misc_RNA (1)...(19): siRNA sense strand
gaaacaagaagaaugagaa

SEQ ID NO: 1538173 - RNA, 19 nt, Homo sapiens
  misc_RNA (1)...(19): siRNA sense strand
cuacaaagauggacuuauc

SEQ ID NO: 1538174 - RNA, 19 nt, Homo sapiens
  misc_RNA (1)...(19): siRNA sense strand
gaagccaccugucucagaa

SEQ ID NO: 1538175 - RNA, 19 nt, Homo sapiens
  misc_RNA (1)...(19): siRNA sense strand
ugugaaaucuuccucagua

SEQ ID NO: 1538176 - RNA, 19 nt, Homo sapiens
  misc_RNA (1)...(19): siRNA sense strand
gaagaaaacucauagagau

SEQ ID NO: 1538177 - RNA, 19 nt, Homo sapiens
  misc_RNA (1)...(19): siRNA sense strand
caaagacuacccuacaaua

SEQ ID NO: 1538178 - RNA, 19 nt, Homo sapiens
  misc_RNA (1)...(19): siRNA sense strand
aaaggaacauucgcaauaa

SEQ ID NO: 1538179 - RNA, 19 nt, Homo sapiens
  misc_RNA (1)...(19): siRNA sense strand
gagagagggucuucagaug

SEQ ID NO: 1538180 - RNA, 19 nt, Homo sapiens
  misc_RNA (1)...(19): siRNA sense strand
cagaagauguuggguauga

SEQ ID NO: 1538181 - RNA, 19 nt, Homo sapiens
  misc_RNA (1)...(19): siRNA sense strand
cagggagccucuaauuuaa

SEQ ID NO: 1538182 - RNA, 19 nt, Homo sapiens
  misc_RNA (1)...(19): siRNA sense strand
gaucuacucucucagaaag

SEQ ID NO: 1538183 - RNA, 19 nt, Homo sapiens
  misc_RNA (1)...(19): siRNA sense strand
cuacagauguuauaagcuu

SEQ ID NO: 1538184 - RNA, 19 nt, Homo sapiens
  misc_RNA (1)...(19): siRNA sense strand
aaaugaagguaccgcuuua

SEQ ID NO: 1538185 - RNA, 19 nt, Homo sapiens
  misc_RNA (1)...(19): siRNA sense strand
aaaccaggcucuaaaguuc

SEQ ID NO: 1538186 - RNA, 19 nt, Homo sapiens
  misc_RNA (1)...(19): siRNA sense strand
caagugggaugucuuagau

SEQ ID NO: 1538187 - RNA, 19 nt, Homo sapiens
  misc_RNA (1)...(19): siRNA sense strand
uugaagagcuuacugauuc

SEQ ID NO: 1538188 - RNA, 19 nt, Homo sapiens
  misc_RNA (1)...(19): siRNA sense strand
gcagugaccuggacauguc

SEQ ID NO: 1538189 - RNA, 19 nt, Homo sapiens
  misc_RNA (1)...(19): siRNA sense strand
agugguggcucaacaaaua

SEQ ID NO: 1538190 - RNA, 19 nt, Homo sapiens
  misc_RNA (1)...(19): siRNA sense strand
gcaaggauacuccgagcua

SEQ ID NO: 1538191 - RNA, 19 nt, Homo sapiens
  misc_RNA (1)...(19): siRNA sense strand
gcagacagcugggaugaca

SEQ ID NO: 1538192 - RNA, 19 nt, Homo sapiens
  misc_RNA (1)...(19): siRNA sense strand
guugaugucugccuuaguu

SEQ ID NO: 1538193 - RNA, 19 nt, Homo sapiens
  misc_RNA (1)...(19): siRNA sense strand
gaaaauaguuuggacaguu

SEQ ID NO: 1538194 - RNA, 19 nt, Homo sapiens
  misc_RNA (1)...(19): siRNA sense strand
guuauaagcuuaagucacu

SEQ ID NO: 1538195 - RNA, 19 nt, Homo sapiens
  misc_RNA (1)...(19): siRNA sense strand
agacuuaacuacagauguu

SEQ ID NO: 1538196 - RNA, 19 nt, Homo sapiens
  misc_RNA (1)...(19): siRNA sense strand
gauaugcaacucagucuaa

SEQ ID NO: 1538197 - RNA, 19 nt, Homo sapiens
  misc_RNA (1)...(19): siRNA sense strand
ucuaucugcugaagaaaua

SEQ ID NO: 1538198 - RNA, 19 nt, Homo sapiens
  misc_RNA (1)...(19): siRNA sense strand
gcucccaguuguaauaauu

SEQ ID NO: 1538199 - RNA, 19 nt, Homo sapiens
  misc_RNA (1)...(19): siRNA sense strand
caaaaggaaucugaacuua

SEQ ID NO: 1538200 - RNA, 19 nt, Homo sapiens
  misc_RNA (1)...(19): siRNA sense strand
gaaaucuuccucaguaaug

SEQ ID NO: 1538201 - RNA, 19 nt, Homo sapiens
  misc_RNA (1)...(19): siRNA sense strand
gauguugugcugcauguua

SEQ ID NO: 1538202 - RNA, 19 nt, Homo sapiens
  misc_RNA (1)...(19): siRNA sense strand
gaugacagcaguucaguga

SEQ ID NO: 1538203 - RNA, 19 nt, Homo sapiens
  misc_RNA (1)...(19): siRNA sense strand
ugaaggcccugaaacaaga

SEQ ID NO: 1538204 - RNA, 19 nt, Homo sapiens
  misc_RNA (1)...(19): siRNA sense strand
gcaaguccaugaaugucaa

SEQ ID NO: 1538205 - RNA, 19 nt, Homo sapiens
  misc_RNA (1)...(19): siRNA sense strand
aaaacaagccuccaaauua

SEQ ID NO: 1538206 - RNA, 19 nt, Homo sapiens
  misc_RNA (1)...(19): siRNA sense strand
gaaggaccauacccaacuu

SEQ ID NO: 1538207 - RNA, 19 nt, Homo sapiens
  misc_RNA (1)...(19): siRNA sense strand
gaaauugaaaggaacauuc

SEQ ID NO: 1538208 - RNA, 19 nt, Homo sapiens
  misc_RNA (1)...(19): siRNA sense strand
aaacaagccuuugggaaga

SEQ ID NO: 1538209 - RNA, 19 nt, Homo sapiens
  misc_RNA (1)...(19): siRNA sense strand
uaugaugacucccagcuuu

SEQ ID NO: 1538210 - RNA, 19 nt, Homo sapiens
  misc_RNA (1)...(19): siRNA sense strand
gaaaaccgaugaugccaaa

SEQ ID NO: 1538211 - RNA, 19 nt, Homo sapiens
  misc_RNA (1)...(19): siRNA sense strand
caaagauggacuuaucaua

SEQ ID NO: 1538212 - RNA, 19 nt, Homo sapiens
  misc_RNA (1)...(19): siRNA sense strand
ggagcucccaguuguaaua

SEQ ID NO: 1538213 - RNA, 19 nt, Homo sapiens
  misc_RNA (1)...(19): siRNA sense strand
gugcagugcugauaauaau

SEQ ID NO: 1538214 - RNA, 19 nt, Homo sapiens
  misc_RNA (1)...(19): siRNA sense strand
aaccaaaucuggaaggaaa

SEQ ID NO: 1538215 - RNA, 19 nt, Homo sapiens
  misc_RNA (1)...(19): siRNA sense strand
ggucaaagccugugcauac

SEQ ID NO: 1538216 - RNA, 19 nt, Homo sapiens
  misc_RNA (1)...(19): siRNA sense strand
gaagacagcaagauuuaca

SEQ ID NO: 1538217 - RNA, 19 nt, Homo sapiens
  misc_RNA (1)...(19): siRNA sense strand
ggaagugagcugagaaguu

SEQ ID NO: 1538218 - RNA, 19 nt, Homo sapiens
  misc_RNA (1)...(19): siRNA sense strand
cagcagcccucucuucaau

SEQ ID NO: 1538219 - RNA, 19 nt, Homo sapiens
  misc_RNA (1)...(19): siRNA sense strand
agaagaaugagaacaguua

SEQ ID NO: 1538220 - RNA, 19 nt, Homo sapiens
  misc_RNA (1)...(19): siRNA sense strand
gaauagugguggcucaaca

SEQ ID NO: 1538221 - RNA, 19 nt, Homo sapiens
  misc_RNA (1)...(19): siRNA sense strand
agaaauccaugcuugagaa

SEQ ID NO: 1538222 - RNA, 19 nt, Homo sapiens
  misc_RNA (1)...(19): siRNA sense strand
caacaacaguacuaucagu

SEQ ID NO: 1538223 - RNA, 19 nt, Homo sapiens
  misc_RNA (1)...(19): siRNA sense strand
acagcaagauuuacacuga

SEQ ID NO: 1538224 - RNA, 19 nt, Homo sapiens
  misc_RNA (1)...(19): siRNA sense strand
ucaaucgucuucaggugua

SEQ ID NO: 1538225 - RNA, 19 nt, Homo sapiens
  misc_RNA (1)...(19): siRNA sense strand
gaguggagcucccaguugu

SEQ ID NO: 1538226 - RNA, 19 nt, Homo sapiens
  misc_RNA (1)...(19): siRNA sense strand
guacuggaaagaccuauuu

SEQ ID NO: 1538227 - RNA, 19 nt, Homo sapiens
  misc_RNA (1)...(19): siRNA sense strand
aaagauggccgcaguguga

SEQ ID NO: 1538228 - RNA, 19 nt, Homo sapiens
  misc_RNA (1)...(19): siRNA sense strand
guaaugcccagcccuagua

SEQ ID NO: 1538229 - RNA, 19 nt, Homo sapiens
  misc_RNA (1)...(19): siRNA sense strand
uaagaaaccaaguggagua

SEQ ID NO: 1538230 - RNA, 19 nt, Homo sapiens
  misc_RNA (1)...(19): siRNA sense strand
caaagugucaccuaaguug

SEQ ID NO: 1538231 - RNA, 19 nt, Homo sapiens
  misc_RNA (1)...(19): siRNA sense strand
gaaauucaagcuagucaau

SEQ ID NO: 1538232 - RNA, 19 nt, Homo sapiens
  misc_RNA (1)...(19): siRNA sense strand
gagaacggguagugugaga

SEQ ID NO: 1538233 - RNA, 19 nt, Homo sapiens
  misc_RNA (1)...(19): siRNA sense strand
gaagauguuggguaugaaa

SEQ ID NO: 1538234 - RNA, 19 nt, Homo sapiens
  misc_RNA (1)...(19): siRNA sense strand
aaagaagacagcaagauuu

SEQ ID NO: 1538235 - RNA, 19 nt, Homo sapiens
  misc_RNA (1)...(19): siRNA sense strand
aagaagacagcaagauuua

SEQ ID NO: 1538236 - RNA, 19 nt, Homo sapiens
  misc_RNA (1)...(19): siRNA sense strand
ucacagaauuauacucuca

SEQ ID NO: 1538237 - RNA, 19 nt, Homo sapiens
  misc_RNA (1)...(19): siRNA sense strand
ggcagaaacugguaacaca

SEQ ID NO: 1538238 - RNA, 19 nt, Homo sapiens
  misc_RNA (1)...(19): siRNA sense strand
ggaaagagcuuguacaguu

SEQ ID NO: 1538239 - RNA, 19 nt, Homo sapiens
  misc_RNA (1)...(19): siRNA sense strand
gaaagagcuuguacaguua

SEQ ID NO: 1538240 - RNA, 19 nt, Homo sapiens
  misc_RNA (1)...(19): siRNA sense strand
gaagauaggacggaaauua

SEQ ID NO: 1538241 - RNA, 19 nt, Homo sapiens
  misc_RNA (1)...(19): siRNA sense strand
gaaacugaguccauucuuu

SEQ ID NO: 1538242 - RNA, 19 nt, Homo sapiens
  misc_RNA (1)...(19): siRNA sense strand
ucacucagcuucagccuua

SEQ ID NO: 1538243 - RNA, 19 nt, Homo sapiens
  misc_RNA (1)...(19): siRNA sense strand
gagaucagccuccuucuua

SEQ ID NO: 1538244 - RNA, 19 nt, Homo sapiens
  misc_RNA (1)...(19): siRNA sense strand
gagcauaucugagccaauu

SEQ ID NO: 1538245 - RNA, 19 nt, Homo sapiens
  misc_RNA (1)...(19): siRNA sense strand
caagaccucuguaccaaua

SEQ ID NO: 1538246 - RNA, 19 nt, Homo sapiens
  misc_RNA (1)...(19): siRNA sense strand
ggacggaaauuaagcaaau

SEQ ID NO: 1538247 - RNA, 19 nt, Homo sapiens
  misc_RNA (1)...(19): siRNA sense strand
ccagauaacuguuugcauu

SEQ ID NO: 1538248 - RNA, 19 nt, Homo sapiens
  misc_RNA (1)...(19): siRNA sense strand
gcacagccaccaugacuua

SEQ ID NO: 1538249 - RNA, 19 nt, Homo sapiens
  misc_RNA (1)...(19): siRNA sense strand
ggacaaaugcguugaagaa

SEQ ID NO: 1538250 - RNA, 19 nt, Homo sapiens
  misc_RNA (1)...(19): siRNA sense strand
ggagcaacaucaccaagua

SEQ ID NO: 1538251 - RNA, 19 nt, Homo sapiens
  misc_RNA (1)...(19): siRNA sense strand
ucacaaauaugcaugcaaa

SEQ ID NO: 1538252 - RNA, 19 nt, Homo sapiens
  misc_RNA (1)...(19): siRNA sense strand
gauaaggccuauuuccaaa

SEQ ID NO: 1538253 - RNA, 19 nt, Homo sapiens
  misc_RNA (1)...(19): siRNA sense strand
gaaccugucucuccucuuc

SEQ ID NO: 1538254 - RNA, 19 nt, Homo sapiens
  misc_RNA (1)...(19): siRNA sense strand
gaaagaggccucaaaauaa

SEQ ID NO: 1538255 - RNA, 19 nt, Homo sapiens
  misc_RNA (1)...(19): siRNA sense strand
ccacaagguucaaggagua

SEQ ID NO: 1538256 - RNA, 19 nt, Homo sapiens
  misc_RNA (1)...(19): siRNA sense strand
gauggaaucuaucgccuuu

SEQ ID NO: 1538257 - RNA, 19 nt, Homo sapiens
  misc_RNA (1)...(19): siRNA sense strand
caacgugacuggcuauuuc

SEQ ID NO: 1538258 - RNA, 19 nt, Homo sapiens
  misc_RNA (1)...(19): siRNA sense strand
ccaccaaacugcugacauu

SEQ ID NO: 1538259 - RNA, 19 nt, Homo sapiens
  misc_RNA (1)...(19): siRNA sense strand
uaaaucagauccugggaaa

SEQ ID NO: 1538260 - RNA, 19 nt, Homo sapiens
  misc_RNA (1)...(19): siRNA sense strand
ggagaguggugcuuccuuu

SEQ ID NO: 1538261 - RNA, 19 nt, Homo sapiens
  misc_RNA (1)...(19): siRNA sense strand
gcacagggcacaccaagaa

SEQ ID NO: 1538262 - RNA, 19 nt, Homo sapiens
  misc_RNA (1)...(19): siRNA sense strand
gaaagaaagaggccucaaa

SEQ ID NO: 1538263 - RNA, 19 nt, Homo sapiens
  misc_RNA (1)...(19): siRNA sense strand
gagcccaacugaagauaaa

SEQ ID NO: 1538264 - RNA, 19 nt, Homo sapiens
  misc_RNA (1)...(19): siRNA sense strand
gggagcaccuucuaaauuc

SEQ ID NO: 1538265 - RNA, 19 nt, Homo sapiens
  misc_RNA (1)...(19): siRNA sense strand
ggagaggaccgcuucuaua

SEQ ID NO: 1538266 - RNA, 19 nt, Homo sapiens
  misc_RNA (1)...(19): siRNA sense strand
gaaagggaugccacaaaua

SEQ ID NO: 1538267 - RNA, 19 nt, Homo sapiens
  misc_RNA (1)...(19): siRNA sense strand
gaggaccgcuucuauagga

SEQ ID NO: 1538268 - RNA, 19 nt, Homo sapiens
  misc_RNA (1)...(19): siRNA sense strand
ccagguggcugcugaagaa

SEQ ID NO: 1538269 - RNA, 19 nt, Homo sapiens
  misc_RNA (1)...(19): siRNA sense strand
gggaaaucaucaucuguuu

SEQ ID NO: 1538270 - RNA, 19 nt, Homo sapiens
  misc_RNA (1)...(19): siRNA sense strand
augauaaccuggaagauua

SEQ ID NO: 1538271 - RNA, 19 nt, Homo sapiens
  misc_RNA (1)...(19): siRNA sense strand
gagcuggccaguuagauua

SEQ ID NO: 1538272 - RNA, 19 nt, Homo sapiens
  misc_RNA (1)...(19): siRNA sense strand
aaacugaguccauucuuua

SEQ ID NO: 1538273 - RNA, 19 nt, Homo sapiens
  misc_RNA (1)...(19): siRNA sense strand
ggaaagaggaucagucugu

SEQ ID NO: 1538274 - RNA, 19 nt, Homo sapiens
  misc_RNA (1)...(19): siRNA sense strand
gauaaucuguccaguucuu

SEQ ID NO: 1538275 - RNA, 19 nt, Homo sapiens
  misc_RNA (1)...(19): siRNA sense strand
ucccacaccuccuaauuua

SEQ ID NO: 1538276 - RNA, 19 nt, Homo sapiens
  misc_RNA (1)...(19): siRNA sense strand
cagcauucauugagagaua

SEQ ID NO: 1538277 - RNA, 19 nt, Homo sapiens
  misc_RNA (1)...(19): siRNA sense strand
gacaugggcugcagucuuc

SEQ ID NO: 1538278 - RNA, 19 nt, Homo sapiens
  misc_RNA (1)...(19): siRNA sense strand
uaagaugauugcugccaua

SEQ ID NO: 1538279 - RNA, 19 nt, Homo sapiens
  misc_RNA (1)...(19): siRNA sense strand
gagacuacgccaugaauuu

SEQ ID NO: 1538280 - RNA, 19 nt, Homo sapiens
  misc_RNA (1)...(19): siRNA sense strand
ccagugugcuguaccagua

SEQ ID NO: 1538281 - RNA, 19 nt, Homo sapiens
  misc_RNA (1)...(19): siRNA sense strand
gaguaugugucuucuuuga

SEQ ID NO: 1538282 - RNA, 19 nt, Homo sapiens
  misc_RNA (1)...(19): siRNA sense strand
ccaucacccuuuagaauuu

SEQ ID NO: 1538283 - RNA, 19 nt, Homo sapiens
  misc_RNA (1)...(19): siRNA sense strand
gaacagcagcuuucaugga

SEQ ID NO: 1538284 - RNA, 19 nt, Homo sapiens
  misc_RNA (1)...(19): siRNA sense strand
uaaaccaagugccaauaaa

SEQ ID NO: 1538285 - RNA, 19 nt, Homo sapiens
  misc_RNA (1)...(19): siRNA sense strand
guacaagcagcaaccaaua

SEQ ID NO: 1538286 - RNA, 19 nt, Homo sapiens
  misc_RNA (1)...(19): siRNA sense strand
gagaaacacuccagagacu

SEQ ID NO: 1538287 - RNA, 19 nt, Homo sapiens
  misc_RNA (1)...(19): siRNA sense strand
ucgaguaugugucuucuuu

SEQ ID NO: 1538288 - RNA, 19 nt, Homo sapiens
  misc_RNA (1)...(19): siRNA sense strand
acagauccaugcagaauga

SEQ ID NO: 1538289 - RNA, 19 nt, Homo sapiens
  misc_RNA (1)...(19): siRNA sense strand
caaacccucugcuuaccua

SEQ ID NO: 1538290 - RNA, 19 nt, Homo sapiens
  misc_RNA (1)...(19): siRNA sense strand
guacaguuaugcugguuug

SEQ ID NO: 1538291 - RNA, 19 nt, Homo sapiens
  misc_RNA (1)...(19): siRNA sense strand
ccaggaugauggagaguaa

SEQ ID NO: 1538292 - RNA, 19 nt, Homo sapiens
  misc_RNA (1)...(19): siRNA sense strand
agaaagggaugccacaaau

SEQ ID NO: 1538293 - RNA, 19 nt, Homo sapiens
  misc_RNA (1)...(19): siRNA sense strand
ucuaagccauccuccuuua

SEQ ID NO: 1538294 - RNA, 19 nt, Homo sapiens
  misc_RNA (1)...(19): siRNA sense strand
gcccuuaugucuccucauu

SEQ ID NO: 1538295 - RNA, 19 nt, Homo sapiens
  misc_RNA (1)...(19): siRNA sense strand
ccaggauacuccaaggaua

SEQ ID NO: 1538296 - RNA, 19 nt, Homo sapiens
  misc_RNA (1)...(19): siRNA sense strand
ccaugggucuucguuauaa

SEQ ID NO: 1538297 - RNA, 19 nt, Homo sapiens
  misc_RNA (1)...(19): siRNA sense strand
ccaagaagcauaugaaucu

SEQ ID NO: 1538298 - RNA, 19 nt, Homo sapiens
  misc_RNA (1)...(19): siRNA sense strand
gcaaaucaccuucuaugag

SEQ ID NO: 1538299 - RNA, 19 nt, Homo sapiens
  misc_RNA (1)...(19): siRNA sense strand
gguggcugcugaagaagua

SEQ ID NO: 1538300 - RNA, 19 nt, Homo sapiens
  misc_RNA (1)...(19): siRNA sense strand
caaaugcguugaagaaagg

SEQ ID NO: 1538301 - RNA, 19 nt, Homo sapiens
  misc_RNA (1)...(19): siRNA sense strand
uaauugaguucccacuuga

SEQ ID NO: 1538302 - RNA, 19 nt, Homo sapiens
  misc_RNA (1)...(19): siRNA sense strand
agacuuugcuuucuacaau

SEQ ID NO: 1538303 - RNA, 19 nt, Homo sapiens
  misc_RNA (1)...(19): siRNA sense strand
ugagacaguugcccaagaa

SEQ ID NO: 1538304 - RNA, 19 nt, Homo sapiens
  misc_RNA (1)...(19): siRNA sense strand
aaggagggcugcuucauau

SEQ ID NO: 1538305 - RNA, 19 nt, Homo sapiens
  misc_RNA (1)...(19): siRNA sense strand
gaaccgcuguaacuccuau

SEQ ID NO: 1538306 - RNA, 19 nt, Homo sapiens
  misc_RNA (1)...(19): siRNA sense strand
gccaugaauuugacucuga

SEQ ID NO: 1538307 - RNA, 19 nt, Homo sapiens
  misc_RNA (1)...(19): siRNA sense strand
gagaggaccgcuucuauag

SEQ ID NO: 1538308 - RNA, 19 nt, Homo sapiens
  misc_RNA (1)...(19): siRNA sense strand
ugacuuacaugacaacuac

SEQ ID NO: 1538309 - RNA, 19 nt, Homo sapiens
  misc_RNA (1)...(19): siRNA sense strand
gguaguagccaaugucaga

SEQ ID NO: 1538310 - RNA, 19 nt, Homo sapiens
  misc_RNA (1)...(19): siRNA sense strand
gaacacaagcucaggucaa

SEQ ID NO: 1538311 - RNA, 19 nt, Homo sapiens
  misc_RNA (1)...(19): siRNA sense strand
agaaggaccugcugcacuu

SEQ ID NO: 1538312 - RNA, 19 nt, Homo sapiens
  misc_RNA (1)...(19): siRNA sense strand
guucuucuaguuccuauua

SEQ ID NO: 1538313 - RNA, 19 nt, Homo sapiens
  misc_RNA (1)...(19): siRNA sense strand
gauaacuguuugcauuuca

SEQ ID NO: 1538314 - RNA, 19 nt, Homo sapiens
  misc_RNA (1)...(19): siRNA sense strand
ggacgaugcauugccuuua

SEQ ID NO: 1538315 - RNA, 19 nt, Homo sapiens
  misc_RNA (1)...(19): siRNA sense strand
gaugaagaaaggcugauaa

SEQ ID NO: 1538316 - RNA, 19 nt, Homo sapiens
  misc_RNA (1)...(19): siRNA sense strand
ccacagagcaggaccuaug

SEQ ID NO: 1538317 - RNA, 19 nt, Homo sapiens
  misc_RNA (1)...(19): siRNA sense strand
cagaaugcaucaucuucaa

SEQ ID NO: 1538318 - RNA, 19 nt, Homo sapiens
  misc_RNA (1)...(19): siRNA sense strand
ccaaaccuguuaagaucaa

SEQ ID NO: 1538319 - RNA, 19 nt, Homo sapiens
  misc_RNA (1)...(19): siRNA sense strand
gaaaacaaaugagacaguu

SEQ ID NO: 1538320 - RNA, 19 nt, Homo sapiens
  misc_RNA (1)...(19): siRNA sense strand
caccagcaguucaaauuau

SEQ ID NO: 1538321 - RNA, 19 nt, Homo sapiens
  misc_RNA (1)...(19): siRNA sense strand
ccaccagcaguucaaauua

SEQ ID NO: 1538322 - RNA, 19 nt, Homo sapiens
  misc_RNA (1)...(19): siRNA sense strand
cagcaagccucaacucagu

SEQ ID NO: 1538323 - RNA, 19 nt, Homo sapiens
  misc_RNA (1)...(19): siRNA sense strand
gaguaaggcuguagcuucu

SEQ ID NO: 1538324 - RNA, 19 nt, Homo sapiens
  misc_RNA (1)...(19): siRNA sense strand
acacuggaguuccugauga

SEQ ID NO: 1538325 - RNA, 19 nt, Homo sapiens
  misc_RNA (1)...(19): siRNA sense strand
cgacuugggugggaucuau

SEQ ID NO: 1538326 - RNA, 19 nt, Homo sapiens
  misc_RNA (1)...(19): siRNA sense strand
caggagcaguuacccauga

SEQ ID NO: 1538327 - RNA, 19 nt, Homo sapiens
  misc_RNA (1)...(19): siRNA sense strand
cgcuguaacuccuaugaua

SEQ ID NO: 1538328 - RNA, 19 nt, Homo sapiens
  misc_RNA (1)...(19): siRNA sense strand
gagugagccuucagagaug

SEQ ID NO: 1538329 - RNA, 19 nt, Homo sapiens
  misc_RNA (1)...(19): siRNA sense strand
agaaagaggccucaaaaua

SEQ ID NO: 1538330 - RNA, 19 nt, Homo sapiens
  misc_RNA (1)...(19): siRNA sense strand
ggacagagcccaccaucac

SEQ ID NO: 1538331 - RNA, 19 nt, Homo sapiens
  misc_RNA (1)...(19): siRNA sense strand
caacgaccauaauguaguc

SEQ ID NO: 1538332 - RNA, 19 nt, Homo sapiens
  misc_RNA (1)...(19): siRNA sense strand
gcagagcagccaccaguug

SEQ ID NO: 1538333 - RNA, 19 nt, Homo sapiens
  misc_RNA (1)...(19): siRNA sense strand
uuaagcaaaucaccuucua

SEQ ID NO: 1538334 - RNA, 19 nt, Homo sapiens
  misc_RNA (1)...(19): siRNA sense strand
gauaaaccaagugccaaua

SEQ ID NO: 1538335 - RNA, 19 nt, Homo sapiens
  misc_RNA (1)...(19): siRNA sense strand
ccagcuguaugagaaauuu

SEQ ID NO: 1538336 - RNA, 19 nt, Homo sapiens
  misc_RNA (1)...(19): siRNA sense strand
cuacagguauagcccauau

SEQ ID NO: 1538337 - RNA, 19 nt, Homo sapiens
  misc_RNA (1)...(19): siRNA sense strand
gauaaaaucuacccuccuu

SEQ ID NO: 1538338 - RNA, 19 nt, Homo sapiens
  misc_RNA (1)...(19): siRNA sense strand
gaagaacgcuauuuauuug

SEQ ID NO: 1538339 - RNA, 19 nt, Homo sapiens
  misc_RNA (1)...(19): siRNA sense strand
gaauauggcugcccucuga

SEQ ID NO: 1538340 - RNA, 19 nt, Homo sapiens
  misc_RNA (1)...(19): siRNA sense strand
gcacacagauggccacauu

SEQ ID NO: 1538341 - RNA, 19 nt, Homo sapiens
  misc_RNA (1)...(19): siRNA sense strand
gaauguagauuaugagaga

SEQ ID NO: 1538342 - RNA, 19 nt, Homo sapiens
  misc_RNA (1)...(19): siRNA sense strand
ggaaaucuaucaaugcuau

SEQ ID NO: 1538343 - RNA, 19 nt, Homo sapiens
  misc_RNA (1)...(19): siRNA sense strand
gaaggaacauuauuuacug

SEQ ID NO: 1538344 - RNA, 19 nt, Homo sapiens
  misc_RNA (1)...(19): siRNA sense strand
gguguugggucaauuauuu

SEQ ID NO: 1538345 - RNA, 19 nt, Homo sapiens
  misc_RNA (1)...(19): siRNA sense strand
gcacagacauggaagucaa

SEQ ID NO: 1538346 - RNA, 19 nt, Homo sapiens
  misc_RNA (1)...(19): siRNA sense strand
ucacacaacugauucauuc

SEQ ID NO: 1538347 - RNA, 19 nt, Homo sapiens
  misc_RNA (1)...(19): siRNA sense strand
gaacaagcauaguaucuac

SEQ ID NO: 1538348 - RNA, 19 nt, Homo sapiens
  misc_RNA (1)...(19): siRNA sense strand
ugaagaagaacgcuauuua

SEQ ID NO: 1538349 - RNA, 19 nt, Homo sapiens
  misc_RNA (1)...(19): siRNA sense strand
uaaaggagauuagaggaaa

SEQ ID NO: 1538350 - RNA, 19 nt, Homo sapiens
  misc_RNA (1)...(19): siRNA sense strand
gaagaagaacgcuauuuau

SEQ ID NO: 1538351 - RNA, 19 nt, Homo sapiens
  misc_RNA (1)...(19): siRNA sense strand
gauaauggcuauguuaaag

SEQ ID NO: 1538352 - RNA, 19 nt, Homo sapiens
  misc_RNA (1)...(19): siRNA sense strand
gcuguuggcugugaugaua

SEQ ID NO: 1538353 - RNA, 19 nt, Homo sapiens
  misc_RNA (1)...(19): siRNA sense strand
gaagcaaauuucauagugu

SEQ ID NO: 1538354 - RNA, 19 nt, Homo sapiens
  misc_RNA (1)...(19): siRNA sense strand
gaugauaauggcuauguua

SEQ ID NO: 1538355 - RNA, 19 nt, Homo sapiens
  misc_RNA (1)...(19): siRNA sense strand
gaugauggcacaauacaaa

SEQ ID NO: 1538356 - RNA, 19 nt, Homo sapiens
  misc_RNA (1)...(19): siRNA sense strand
uuaaagacguugaagcaaa

SEQ ID NO: 1538357 - RNA, 19 nt, Homo sapiens
  misc_RNA (1)...(19): siRNA sense strand
gauccauucuucuuaaguu

SEQ ID NO: 1538358 - RNA, 19 nt, Homo sapiens
  misc_RNA (1)...(19): siRNA sense strand
guacaucuggucaaacaua

SEQ ID NO: 1538359 - RNA, 19 nt, Homo sapiens
  misc_RNA (1)...(19): siRNA sense strand
gucaugagauuuccuuuga

SEQ ID NO: 1538360 - RNA, 19 nt, Homo sapiens
  misc_RNA (1)...(19): siRNA sense strand
uaccugaaauuccugguua

SEQ ID NO: 1538361 - RNA, 19 nt, Homo sapiens
  misc_RNA (1)...(19): siRNA sense strand
ugacagauauggagaccuu

SEQ ID NO: 1538362 - RNA, 19 nt, Homo sapiens
  misc_RNA (1)...(19): siRNA sense strand
ggaagaagaagcaccuuug

SEQ ID NO: 1538363 - RNA, 19 nt, Homo sapiens
  misc_RNA (1)...(19): siRNA sense strand
uaaagacguugaagcaaau

SEQ ID NO: 1538364 - RNA, 19 nt, Homo sapiens
  misc_RNA (1)...(19): siRNA sense strand
cagagugccuccagacauu

SEQ ID NO: 1538365 - RNA, 19 nt, Homo sapiens
  misc_RNA (1)...(19): siRNA sense strand
gacaaaagaugaugcacua

SEQ ID NO: 1538366 - RNA, 19 nt, Homo sapiens
  misc_RNA (1)...(19): siRNA sense strand
ggacucagaucgucuaucc

SEQ ID NO: 1538367 - RNA, 19 nt, Homo sapiens
  misc_RNA (1)...(19): siRNA sense strand
ggaacaagcauaguaucua

SEQ ID NO: 1538368 - RNA, 19 nt, Homo sapiens
  misc_RNA (1)...(19): siRNA sense strand
caauacaaauacaggacua

SEQ ID NO: 1538369 - RNA, 19 nt, Homo sapiens
  misc_RNA (1)...(19): siRNA sense strand
guauagcuuucacaacaaa

SEQ ID NO: 1538370 - RNA, 19 nt, Homo sapiens
  misc_RNA (1)...(19): siRNA sense strand
acacuggucuguauguuau

SEQ ID NO: 1538371 - RNA, 19 nt, Homo sapiens
  misc_RNA (1)...(19): siRNA sense strand
acaagagagucaugagauu

SEQ ID NO: 1538372 - RNA, 19 nt, Homo sapiens
  misc_RNA (1)...(19): siRNA sense strand
guaguugcaucugcuguuu

SEQ ID NO: 1538373 - RNA, 19 nt, Homo sapiens
  misc_RNA (1)...(19): siRNA sense strand
aaguauagcuuucacaaca

SEQ ID NO: 1538374 - RNA, 19 nt, Homo sapiens
  misc_RNA (1)...(19): siRNA sense strand
uaaguuugccagauuagua

SEQ ID NO: 1538375 - RNA, 19 nt, Homo sapiens
  misc_RNA (1)...(19): siRNA sense strand
gaguguggcucaugugauc

SEQ ID NO: 1538376 - RNA, 19 nt, Homo sapiens
  misc_RNA (1)...(19): siRNA sense strand
ugauugaacuuaacaagca

SEQ ID NO: 1538377 - RNA, 19 nt, Homo sapiens
  misc_RNA (1)...(19): siRNA sense strand
gugcagauccugaugaguu

SEQ ID NO: 1538378 - RNA, 19 nt, Homo sapiens
  misc_RNA (1)...(19): siRNA sense strand
ccagaaguacuauuaaguu

SEQ ID NO: 1538379 - RNA, 19 nt, Homo sapiens
  misc_RNA (1)...(19): siRNA sense strand
gggaggaauuguaaaucuu

SEQ ID NO: 1538380 - RNA, 19 nt, Homo sapiens
  misc_RNA (1)...(19): siRNA sense strand
cgacagaauugcguuguuc

SEQ ID NO: 1538381 - RNA, 19 nt, Homo sapiens
  misc_RNA (1)...(19): siRNA sense strand
gcacagagugguuguuuac

SEQ ID NO: 1538382 - RNA, 19 nt, Homo sapiens
  misc_RNA (1)...(19): siRNA sense strand
caaaagguguuccaaauag

SEQ ID NO: 1538383 - RNA, 19 nt, Homo sapiens
  misc_RNA (1)...(19): siRNA sense strand
uaaguuagaguaugaagga

SEQ ID NO: 1538384 - RNA, 19 nt, Homo sapiens
  misc_RNA (1)...(19): siRNA sense strand
gaccauaccugaaauuccu

SEQ ID NO: 1538385 - RNA, 19 nt, Homo sapiens
  misc_RNA (1)...(19): siRNA sense strand
uaacaagcaccucccacua

SEQ ID NO: 1538386 - RNA, 19 nt, Homo sapiens
  misc_RNA (1)...(19): siRNA sense strand
ggcacagagugguuguuua

SEQ ID NO: 1538387 - RNA, 19 nt, Homo sapiens
  misc_RNA (1)...(19): siRNA sense strand
caagagagucaugagauuu

SEQ ID NO: 1538388 - RNA, 19 nt, Homo sapiens
  misc_RNA (1)...(19): siRNA sense strand
uuaaguacaucuggucaaa

SEQ ID NO: 1538389 - RNA, 19 nt, Homo sapiens
  misc_RNA (1)...(19): siRNA sense strand
ucaaugcuaucaaaugaca

SEQ ID NO: 1538390 - RNA, 19 nt, Homo sapiens
  misc_RNA (1)...(19): siRNA sense strand
caggauuacugcuauggaa

SEQ ID NO: 1538391 - RNA, 19 nt, Homo sapiens
  misc_RNA (1)...(19): siRNA sense strand
cagagugguuguuuacaug

SEQ ID NO: 1538392 - RNA, 19 nt, Homo sapiens
  misc_RNA (1)...(19): siRNA sense strand
agggaugacuauagcuuua

SEQ ID NO: 1538393 - RNA, 19 nt, Homo sapiens
  misc_RNA (1)...(19): siRNA sense strand
ccacuaacagcccaaacua

SEQ ID NO: 1538394 - RNA, 19 nt, Homo sapiens
  misc_RNA (1)...(19): siRNA sense strand
ggacauggaaaucuaucaa

SEQ ID NO: 1538395 - RNA, 19 nt, Homo sapiens
  misc_RNA (1)...(19): siRNA sense strand
uuacccagcuuaucacugu

SEQ ID NO: 1538396 - RNA, 19 nt, Homo sapiens
  misc_RNA (1)...(19): siRNA sense strand
gcaccucccacuagaagaa

SEQ ID NO: 1538397 - RNA, 19 nt, Homo sapiens
  misc_RNA (1)...(19): siRNA sense strand
ggaacauuauuuacugagu

SEQ ID NO: 1538398 - RNA, 19 nt, Homo sapiens
  misc_RNA (1)...(19): siRNA sense strand
aaagacaaaugcccauaca

SEQ ID NO: 1538399 - RNA, 19 nt, Homo sapiens
  misc_RNA (1)...(19): siRNA sense strand
ggacaaauuacacaacaag

SEQ ID NO: 1538400 - RNA, 19 nt, Homo sapiens
  misc_RNA (1)...(19): siRNA sense strand
cagcauuauucaugaaguu

SEQ ID NO: 1538401 - RNA, 19 nt, Homo sapiens
  misc_RNA (1)...(19): siRNA sense strand
cacaacugauucauucaaa

SEQ ID NO: 1538402 - RNA, 19 nt, Homo sapiens
  misc_RNA (1)...(19): siRNA sense strand
ggaugacuauagcuuuaau

SEQ ID NO: 1538403 - RNA, 19 nt, Homo sapiens
  misc_RNA (1)...(19): siRNA sense strand
cagaucgucuauccagaaa

SEQ ID NO: 1538404 - RNA, 19 nt, Homo sapiens
  misc_RNA (1)...(19): siRNA sense strand
caucuggucaaacauauuu

SEQ ID NO: 1538405 - RNA, 19 nt, Homo sapiens
  misc_RNA (1)...(19): siRNA sense strand
acaacaagagcauucauuu

SEQ ID NO: 1538406 - RNA, 19 nt, Homo sapiens
  misc_RNA (1)...(19): siRNA sense strand
ugacagcauuauucaugaa

SEQ ID NO: 1538407 - RNA, 19 nt, Homo sapiens
  misc_RNA (1)...(19): siRNA sense strand
ggagugugccagaaacuug

SEQ ID NO: 1538408 - RNA, 19 nt, Homo sapiens
  misc_RNA (1)...(19): siRNA sense strand
aggcuugacuucacagaaa

SEQ ID NO: 1538409 - RNA, 19 nt, Homo sapiens
  misc_RNA (1)...(19): siRNA sense strand
gagagaauaucugauuacu

SEQ ID NO: 1538410 - RNA, 19 nt, Homo sapiens
  misc_RNA (1)...(19): siRNA sense strand
uaacaacuuuacccagcuu

SEQ ID NO: 1538411 - RNA, 19 nt, Homo sapiens
  misc_RNA (1)...(19): siRNA sense strand
acaagcaccucccacuaga

SEQ ID NO: 1538412 - RNA, 19 nt, Homo sapiens
  misc_RNA (1)...(19): siRNA sense strand
agacaaaugcccauacaug

SEQ ID NO: 1538413 - RNA, 19 nt, Homo sapiens
  misc_RNA (1)...(19): siRNA sense strand
ucuuaaguuugccagauua

SEQ ID NO: 1538414 - RNA, 19 nt, Homo sapiens
  misc_RNA (1)...(19): siRNA sense strand
gauuagaggaaaccaaguu

SEQ ID NO: 1538415 - RNA, 19 nt, Homo sapiens
  misc_RNA (1)...(19): siRNA sense strand
acauggaaaucuaucaaug

SEQ ID NO: 1538416 - RNA, 19 nt, Homo sapiens
  misc_RNA (1)...(19): siRNA sense strand
ucggauccauucuucuuaa

SEQ ID NO: 1538417 - RNA, 19 nt, Homo sapiens
  misc_RNA (1)...(19): siRNA sense strand
ccacgugguagucaauuaa

SEQ ID NO: 1538418 - RNA, 19 nt, Homo sapiens
  misc_RNA (1)...(19): siRNA sense strand
ucucauacuugcuuucugu

SEQ ID NO: 1538419 - RNA, 19 nt, Homo sapiens
  misc_RNA (1)...(19): siRNA sense strand
caugagauuuccuuugaag

SEQ ID NO: 1538420 - RNA, 19 nt, Homo sapiens
  misc_RNA (1)...(19): siRNA sense strand
cccaagacuuuacauuaga

SEQ ID NO: 1538421 - RNA, 19 nt, Homo sapiens
  misc_RNA (1)...(19): siRNA sense strand
ggaggaauuguaaaucuuc

SEQ ID NO: 1538422 - RNA, 19 nt, Homo sapiens
  misc_RNA (1)...(19): siRNA sense strand
cuauagaguuagacauuuc

SEQ ID NO: 1538423 - RNA, 19 nt, Homo sapiens
  misc_RNA (1)...(19): siRNA sense strand
gaaagugcagauccugaug

SEQ ID NO: 1538424 - RNA, 19 nt, Homo sapiens
  misc_RNA (1)...(19): siRNA sense strand
agucauaucugaggcauca

SEQ ID NO: 1538425 - RNA, 19 nt, Homo sapiens
  misc_RNA (1)...(19): siRNA sense strand
ccaagacuuuacauuagau

SEQ ID NO: 1538426 - RNA, 19 nt, Homo sapiens
  misc_RNA (1)...(19): siRNA sense strand
ucccaagacuuuacauuag

SEQ ID NO: 1538427 - RNA, 19 nt, Homo sapiens
  misc_RNA (1)...(19): siRNA sense strand
auuaaaggcuaaaggaaga

SEQ ID NO: 1538428 - RNA, 19 nt, Homo sapiens
  misc_RNA (1)...(19): siRNA sense strand
uggaauuacuggcauuuca

SEQ ID NO: 1538429 - RNA, 19 nt, Homo sapiens
  misc_RNA (1)...(19): siRNA sense strand
agacugggaggaauuguaa

SEQ ID NO: 1538430 - RNA, 19 nt, Homo sapiens
  misc_RNA (1)...(19): siRNA sense strand
uuucaggauugcuuuauug

SEQ ID NO: 1538431 - RNA, 19 nt, Homo sapiens
  misc_RNA (1)...(19): siRNA sense strand
agaaaacacuggucuguau

SEQ ID NO: 1538432 - RNA, 19 nt, Homo sapiens
  misc_RNA (1)...(19): siRNA sense strand
ucuggaagcacaaaguaua

SEQ ID NO: 1538433 - RNA, 19 nt, Homo sapiens
  misc_RNA (1)...(19): siRNA sense strand
ucugagugaugaugaaaga

SEQ ID NO: 1538434 - RNA, 19 nt, Homo sapiens
  misc_RNA (1)...(19): siRNA sense strand
guguuaccaugccacauuu

SEQ ID NO: 1538435 - RNA, 19 nt, Homo sapiens
  misc_RNA (1)...(19): siRNA sense strand
gagaguaagguauauuugg

SEQ ID NO: 1538436 - RNA, 19 nt, Homo sapiens
  misc_RNA (1)...(19): siRNA sense strand
guuucgaccuagugaauau

SEQ ID NO: 1538437 - RNA, 19 nt, Homo sapiens
  misc_RNA (1)...(19): siRNA sense strand
guuagaguaugaaggaaca

SEQ ID NO: 1538438 - RNA, 19 nt, Homo sapiens
  misc_RNA (1)...(19): siRNA sense strand
gaaagaacgugugaauauu

SEQ ID NO: 1538439 - RNA, 19 nt, Homo sapiens
  misc_RNA (1)...(19): siRNA sense strand
ugaaagaacgugugaauau

SEQ ID NO: 1538440 - RNA, 19 nt, Homo sapiens
  misc_RNA (1)...(19): siRNA sense strand
gggagaaauuugaugauga

SEQ ID NO: 1538441 - RNA, 19 nt, Homo sapiens
  misc_RNA (1)...(19): siRNA sense strand
gaaauuugaugaugagaac

SEQ ID NO: 1538442 - RNA, 19 nt, Homo sapiens
  misc_RNA (1)...(19): siRNA sense strand
ggucaacuccgucgucuuu

SEQ ID NO: 1538443 - RNA, 19 nt, Homo sapiens
  misc_RNA (1)...(19): siRNA sense strand
ggagaaauuugaugaugag

SEQ ID NO: 1538444 - RNA, 19 nt, Homo sapiens
  misc_RNA (1)...(19): siRNA sense strand
uuauaaggguuccugcuuu

SEQ ID NO: 1538445 - RNA, 19 nt, Homo sapiens
  misc_RNA (1)...(19): siRNA sense strand
ucugagcacuggagagaaa

SEQ ID NO: 1538446 - RNA, 19 nt, Homo sapiens
  misc_RNA (1)...(19): siRNA sense strand
gaucaccauugcugacugu

SEQ ID NO: 1538447 - RNA, 19 nt, Homo sapiens
  misc_RNA (1)...(19): siRNA sense strand
aaagaacgugugaauauug

SEQ ID NO: 1538448 - RNA, 19 nt, Homo sapiens
  misc_RNA (1)...(19): siRNA sense strand
gcacuggagagaaaggauu

SEQ ID NO: 1538449 - RNA, 19 nt, Homo sapiens
  misc_RNA (1)...(19): siRNA sense strand
ggugaaagaacgugugaau

SEQ ID NO: 1538450 - RNA, 19 nt, Homo sapiens
  misc_RNA (1)...(19): siRNA sense strand
uauaaggguuccugcuuuc

SEQ ID NO: 1538451 - RNA, 19 nt, Homo sapiens
  misc_RNA (1)...(19): siRNA sense strand
gugaaagaacgugugaaua

SEQ ID NO: 1538452 - RNA, 19 nt, Homo sapiens
  misc_RNA (1)...(19): siRNA sense strand
gcaagaccagcaagaagau

SEQ ID NO: 1538453 - RNA, 19 nt, Homo sapiens
  misc_RNA (1)...(19): siRNA sense strand
gcaucuccaucaaacuguu

SEQ ID NO: 1538454 - RNA, 19 nt, Homo sapiens
  misc_RNA (1)...(19): siRNA sense strand
ugacuguggacaauucuaa

SEQ ID NO: 1538455 - RNA, 19 nt, Homo sapiens
  misc_RNA (1)...(19): siRNA sense strand
cacuuuggguacaggaaua

SEQ ID NO: 1538456 - RNA, 19 nt, Homo sapiens
  misc_RNA (1)...(19): siRNA sense strand
ggaauagcaagaccagcaa

SEQ ID NO: 1538457 - RNA, 19 nt, Homo sapiens
  misc_RNA (1)...(19): siRNA sense strand
aagaacgugugaauauugu

SEQ ID NO: 1538458 - RNA, 19 nt, Homo sapiens
  misc_RNA (1)...(19): siRNA sense strand
uacagguucuggcaucuug

SEQ ID NO: 1538459 - RNA, 19 nt, Homo sapiens
  misc_RNA (1)...(19): siRNA sense strand
gcaaaugcuggacccaaca

SEQ ID NO: 1538460 - RNA, 19 nt, Homo sapiens
  misc_RNA (1)...(19): siRNA sense strand
caucugugcugccaagacu

SEQ ID NO: 1538461 - RNA, 19 nt, Homo sapiens
  misc_RNA (1)...(19): siRNA sense strand
ggccgcaucuccaucaaac

SEQ ID NO: 1538462 - RNA, 19 nt, Homo sapiens
  misc_RNA (1)...(19): siRNA sense strand
gcacuuuggguacaggaau

SEQ ID NO: 1538463 - RNA, 19 nt, Homo sapiens
  misc_RNA (1)...(19): siRNA sense strand
guuauaaggguuccugcuu

SEQ ID NO: 1538464 - RNA, 19 nt, Homo sapiens
  misc_RNA (1)...(19): siRNA sense strand
aaccucauccgaaagcaua

SEQ ID NO: 1538465 - RNA, 19 nt, Homo sapiens
  misc_RNA (1)...(19): siRNA sense strand
guucuggcaucuuguccau

SEQ ID NO: 1538466 - RNA, 19 nt, Homo sapiens
  misc_RNA (1)...(19): siRNA sense strand
gaaccucauccgaaagcau

SEQ ID NO: 1538467 - RNA, 19 nt, Homo sapiens
  misc_RNA (1)...(19): siRNA sense strand
gguuccugcuuucacagaa

SEQ ID NO: 1538468 - RNA, 19 nt, Homo sapiens
  misc_RNA (1)...(19): siRNA sense strand
gugguuggauggcaagcau

SEQ ID NO: 1538469 - RNA, 19 nt, Homo sapiens
  misc_RNA (1)...(19): siRNA sense strand
ggggagaaauuugaugaug

SEQ ID NO: 1538470 - RNA, 19 nt, Homo sapiens
  misc_RNA (1)...(19): siRNA sense strand
guuccugcuuucacagaau

SEQ ID NO: 1538471 - RNA, 19 nt, Homo sapiens
  misc_RNA (1)...(19): siRNA sense strand
gagaaccucauccgaaagc

SEQ ID NO: 1538472 - RNA, 19 nt, Homo sapiens
  misc_RNA (1)...(19): siRNA sense strand
uuccaggguuuauguguca

SEQ ID NO: 1538473 - RNA, 19 nt, Homo sapiens
  misc_RNA (1)...(19): siRNA sense strand
cagcaagaagaucaccauu

SEQ ID NO: 1538474 - RNA, 19 nt, Homo sapiens
  misc_RNA (1)...(19): siRNA sense strand
ucacagcacuccauguuua

SEQ ID NO: 1538475 - RNA, 19 nt, Homo sapiens
  misc_RNA (1)...(19): siRNA sense strand
gagcagauaucaucaaagu

SEQ ID NO: 1538476 - RNA, 19 nt, Homo sapiens
  misc_RNA (1)...(19): siRNA sense strand
gagaagugauugagaggaa

SEQ ID NO: 1538477 - RNA, 19 nt, Homo sapiens
  misc_RNA (1)...(19): siRNA sense strand
cagaaugccugcagaaugu

SEQ ID NO: 1538478 - RNA, 19 nt, Homo sapiens
  misc_RNA (1)...(19): siRNA sense strand
gagccgagguggaucuuga

SEQ ID NO: 1538479 - RNA, 19 nt, Homo sapiens
  misc_RNA (1)...(19): siRNA sense strand
ggagugugcuggagaagug

SEQ ID NO: 1538480 - RNA, 19 nt, Homo sapiens
  misc_RNA (1)...(19): siRNA sense strand
gaaauucaaagcagaccua

SEQ ID NO: 1538481 - RNA, 19 nt, Homo sapiens
  misc_RNA (1)...(19): siRNA sense strand
caggagaaaugguagaaga

SEQ ID NO: 1538482 - RNA, 19 nt, Homo sapiens
  misc_RNA (1)...(19): siRNA sense strand
cagcaauucauaagcauua

SEQ ID NO: 1538483 - RNA, 19 nt, Homo sapiens
  misc_RNA (1)...(19): siRNA sense strand
ccacaaaucacccagaaug

SEQ ID NO: 1538484 - RNA, 19 nt, Homo sapiens
  misc_RNA (1)...(19): siRNA sense strand
caggaggaguugcugagua

SEQ ID NO: 1538485 - RNA, 19 nt, Homo sapiens
  misc_RNA (1)...(19): siRNA sense strand
gaaaugguagaagagcuua

SEQ ID NO: 1538486 - RNA, 19 nt, Homo sapiens
  misc_RNA (1)...(19): siRNA sense strand
gaauguagccgugaguuca

SEQ ID NO: 1538487 - RNA, 19 nt, Homo sapiens
  misc_RNA (1)...(19): siRNA sense strand
uuacagcaauucauaagca

SEQ ID NO: 1538488 - RNA, 19 nt, Homo sapiens
  misc_RNA (1)...(19): siRNA sense strand
cggagcagauaucaucaaa

SEQ ID NO: 1538489 - RNA, 19 nt, Homo sapiens
  misc_RNA (1)...(19): siRNA sense strand
ugccacagguuaaguuuau

SEQ ID NO: 1538490 - RNA, 19 nt, Homo sapiens
  misc_RNA (1)...(19): siRNA sense strand
ggguaagacuguggaaguu

SEQ ID NO: 1538491 - RNA, 19 nt, Homo sapiens
  misc_RNA (1)...(19): siRNA sense strand
ccacagguuaaguuuauuu

SEQ ID NO: 1538492 - RNA, 19 nt, Homo sapiens
  misc_RNA (1)...(19): siRNA sense strand
ggugacaggagaaauggua

SEQ ID NO: 1538493 - RNA, 19 nt, Homo sapiens
  misc_RNA (1)...(19): siRNA sense strand
uuacaaaggagauguggaa

SEQ ID NO: 1538494 - RNA, 19 nt, Homo sapiens
  misc_RNA (1)...(19): siRNA sense strand
ccagaaugccugcagaaug

SEQ ID NO: 1538495 - RNA, 19 nt, Homo sapiens
  misc_RNA (1)...(19): siRNA sense strand
caauggguauucagaacau

SEQ ID NO: 1538496 - RNA, 19 nt, Homo sapiens
  misc_RNA (1)...(19): siRNA sense strand
gcagugggcagaaugaucu

SEQ ID NO: 1538497 - RNA, 19 nt, Homo sapiens
  misc_RNA (1)...(19): siRNA sense strand
gaacguggugacaggagaa

SEQ ID NO: 1538498 - RNA, 19 nt, Homo sapiens
  misc_RNA (1)...(19): siRNA sense strand
gcagaccuacucagggauu

SEQ ID NO: 1538499 - RNA, 19 nt, Homo sapiens
  misc_RNA (1)...(19): siRNA sense strand
gaaacuuguccgugccaaa

SEQ ID NO: 1538500 - RNA, 19 nt, Homo sapiens
  misc_RNA (1)...(19): siRNA sense strand
ggauguggccaauggguau

SEQ ID NO: 1538501 - RNA, 19 nt, Homo sapiens
  misc_RNA (1)...(19): siRNA sense strand
gcucugacaccgccaugaa

SEQ ID NO: 1538502 - RNA, 19 nt, Homo sapiens
  misc_RNA (1)...(19): siRNA sense strand
ccagcugagugccgucauu

SEQ ID NO: 1538503 - RNA, 19 nt, Homo sapiens
  misc_RNA (1)...(19): siRNA sense strand
ugagauggcagccgugaug

SEQ ID NO: 1538504 - RNA, 19 nt, Homo sapiens
  misc_RNA (1)...(19): siRNA sense strand
gauggcagccgugauguca

SEQ ID NO: 1538505 - RNA, 19 nt, Homo sapiens
  misc_RNA (1)...(19): siRNA sense strand
gccaauggguauucagaac

SEQ ID NO: 1538506 - RNA, 19 nt, Homo sapiens
  misc_RNA (1)...(19): siRNA sense strand
caagcacgcaggaggaguu

SEQ ID NO: 1538507 - RNA, 19 nt, Homo sapiens
  misc_RNA (1)...(19): siRNA sense strand
ggacacugugggcacguuu

SEQ ID NO: 1538508 - RNA, 19 nt, Homo sapiens
  misc_RNA (1)...(19): siRNA sense strand
caaaggagauguggaaaac

SEQ ID NO: 1538509 - RNA, 19 nt, Homo sapiens
  misc_RNA (1)...(19): siRNA sense strand
caucaaagugggaguugga

SEQ ID NO: 1538510 - RNA, 19 nt, Homo sapiens
  misc_RNA (1)...(19): siRNA sense strand
gcaccuucacguuucgaaa

SEQ ID NO: 1538511 - RNA, 19 nt, Homo sapiens
  misc_RNA (1)...(19): siRNA sense strand
ugucacagcacuccauguu

SEQ ID NO: 1538512 - RNA, 19 nt, Homo sapiens
  misc_RNA (1)...(19): siRNA sense strand
aagcggagcagccucaaga

SEQ ID NO: 1538513 - RNA, 19 nt, Homo sapiens
  misc_RNA (1)...(19): siRNA sense strand
cagaacauuuuguggaauu

SEQ ID NO: 1538514 - RNA, 19 nt, Homo sapiens
  misc_RNA (1)...(19): siRNA sense strand
ugccacaaaucacccagaa

SEQ ID NO: 1538515 - RNA, 19 nt, Homo sapiens
  misc_RNA (1)...(19): siRNA sense strand
uggaagcucuuugccacaa

SEQ ID NO: 1538516 - RNA, 19 nt, Homo sapiens
  misc_RNA (1)...(19): siRNA sense strand
acuuguccgugccaaauuu

SEQ ID NO: 1538517 - RNA, 19 nt, Homo sapiens
  misc_RNA (1)...(19): siRNA sense strand
ggaccucaagcucgacuuc

SEQ ID NO: 1538518 - RNA, 19 nt, Homo sapiens
  misc_RNA (1)...(19): siRNA sense strand
gacaggagaaaugguagaa

SEQ ID NO: 1538519 - RNA, 19 nt, Homo sapiens
  misc_RNA (1)...(19): siRNA sense strand
gugccaaauuuccugaaca

SEQ ID NO: 1538520 - RNA, 19 nt, Homo sapiens
  misc_RNA (1)...(19): siRNA sense strand
aaacuuguccgugccaaau

SEQ ID NO: 1538521 - RNA, 19 nt, Homo sapiens
  misc_RNA (1)...(19): siRNA sense strand
uaaguuuauuugccuggau

SEQ ID NO: 1538522 - RNA, 19 nt, Homo sapiens
  misc_RNA (1)...(19): siRNA sense strand
gaagggccacaucaucucu

SEQ ID NO: 1538523 - RNA, 19 nt, Homo sapiens
  misc_RNA (1)...(19): siRNA sense strand
ucacguuucgaaauucaaa

SEQ ID NO: 1538524 - RNA, 19 nt, Homo sapiens
  misc_RNA (1)...(19): siRNA sense strand
cuuuggagcuggagcagau

SEQ ID NO: 1538525 - RNA, 19 nt, Homo sapiens
  misc_RNA (1)...(19): siRNA sense strand
ggaacggacggaagcucaa

SEQ ID NO: 1538526 - RNA, 19 nt, Homo sapiens
  misc_RNA (1)...(19): siRNA sense strand
ggaauguuuucgggucaua

SEQ ID NO: 1538527 - RNA, 19 nt, Homo sapiens
  misc_RNA (1)...(19): siRNA sense strand
gugccacagguuaaguuua

SEQ ID NO: 1538528 - RNA, 19 nt, Homo sapiens
  misc_RNA (1)...(19): siRNA sense strand
uggccaacauggacacugu

SEQ ID NO: 1538529 - RNA, 19 nt, Homo sapiens
  misc_RNA (1)...(19): siRNA sense strand
caucaucguggccaacaug

SEQ ID NO: 1538530 - RNA, 19 nt, Homo sapiens
  misc_RNA (1)...(19): siRNA sense strand
guggaauucgugaaacuug

SEQ ID NO: 1538531 - RNA, 19 nt, Homo sapiens
  misc_RNA (1)...(19): siRNA sense strand
gccuggauguggccaaugg

SEQ ID NO: 1538532 - RNA, 19 nt, Homo sapiens
  misc_RNA (1)...(19): siRNA sense strand
ggaauucgugaaacuuguc

SEQ ID NO: 1538533 - RNA, 19 nt, Homo sapiens
  misc_RNA (1)...(19): siRNA sense strand
uggaauucgugaaacuugu

SEQ ID NO: 1538534 - RNA, 19 nt, Homo sapiens
  misc_RNA (1)...(19): siRNA sense strand
ccaauggguauucagaaca

SEQ ID NO: 1538535 - RNA, 19 nt, Homo sapiens
  misc_RNA (1)...(19): siRNA sense strand
ggccaauggguauucagaa

SEQ ID NO: 1538536 - RNA, 19 nt, Homo sapiens
  misc_RNA (1)...(19): siRNA sense strand
gcaggagggcaacauucau

SEQ ID NO: 1538537 - RNA, 19 nt, Homo sapiens
  misc_RNA (1)...(19): siRNA sense strand
aggaggaguugcugaguac

SEQ ID NO: 1538538 - RNA, 19 nt, Homo sapiens
  misc_RNA (1)...(19): siRNA sense strand
acaccgccaugaacaagca

SEQ ID NO: 1538539 - RNA, 19 nt, Homo sapiens
  misc_RNA (1)...(19): siRNA sense strand
gaacggacggaagcucaag

SEQ ID NO: 1538540 - RNA, 19 nt, Homo sapiens
  misc_RNA (1)...(19): siRNA sense strand
caugcugggaggaauguuu

SEQ ID NO: 1538541 - RNA, 19 nt, Homo sapiens
  misc_RNA (1)...(19): siRNA sense strand
agaaaugguagaagagcuu

SEQ ID NO: 1538542 - RNA, 19 nt, Homo sapiens
  misc_RNA (1)...(19): siRNA sense strand
ucuacgggaugagcucuga

SEQ ID NO: 1538543 - RNA, 19 nt, Homo sapiens
  misc_RNA (1)...(19): siRNA sense strand
cagcaggagggcaacauuc

SEQ ID NO: 1538544 - RNA, 19 nt, Homo sapiens
  misc_RNA (1)...(19): siRNA sense strand
gguaagacuguggaaguuc

SEQ ID NO: 1538545 - RNA, 19 nt, Homo sapiens
  misc_RNA (1)...(19): siRNA sense strand
gccacagguuaaguuuauu

SEQ ID NO: 1538546 - RNA, 19 nt, Homo sapiens
  misc_RNA (1)...(19): siRNA sense strand
aggaguugcugaguacaga

SEQ ID NO: 1538547 - RNA, 19 nt, Homo sapiens
  misc_RNA (1)...(19): siRNA sense strand
cuucacguuucgaaauuca

SEQ ID NO: 1538548 - RNA, 19 nt, Homo sapiens
  misc_RNA (1)...(19): siRNA sense strand
ccagaaagaacaccgaguu

SEQ ID NO: 1538549 - RNA, 19 nt, Homo sapiens
  misc_RNA (1)...(19): siRNA sense strand
cucagaagaucuccagaaa

SEQ ID NO: 1538550 - RNA, 19 nt, Homo sapiens
  misc_RNA (1)...(19): siRNA sense strand
cgacaggccugaagaucgu

SEQ ID NO: 1538551 - RNA, 19 nt, Homo sapiens
  misc_RNA (1)...(19): siRNA sense strand
caagcgaccucucugaaaa

SEQ ID NO: 1538552 - RNA, 19 nt, Homo sapiens
  misc_RNA (1)...(19): siRNA sense strand
gcaccgacuuguccaucga

SEQ ID NO: 1538553 - RNA, 19 nt, Homo sapiens
  misc_RNA (1)...(19): siRNA sense strand
ccaagcgaccucucugaaa

SEQ ID NO: 1538554 - RNA, 19 nt, Homo sapiens
  misc_RNA (1)...(19): siRNA sense strand
uggaggacguggauuggaa

SEQ ID NO: 1538555 - RNA, 19 nt, Homo sapiens
  misc_RNA (1)...(19): siRNA sense strand
aggccgagcugcagaacuu

SEQ ID NO: 1538556 - RNA, 19 nt, Homo sapiens
  misc_RNA (1)...(19): siRNA sense strand
cagcagggacucagaagau

SEQ ID NO: 1538557 - RNA, 19 nt, Homo sapiens
  misc_RNA (1)...(19): siRNA sense strand
cagaagaucuccagaaaac

SEQ ID NO: 1538558 - RNA, 19 nt, Homo sapiens
  misc_RNA (1)...(19): siRNA sense strand
cgaccucucugaaaacauu

SEQ ID NO: 1538559 - RNA, 19 nt, Homo sapiens
  misc_RNA (1)...(19): siRNA sense strand
guucgggugugccggaaga

SEQ ID NO: 1538560 - RNA, 19 nt, Homo sapiens
  misc_RNA (1)...(19): siRNA sense strand
ggacugucggcuccagaaa

SEQ ID NO: 1538561 - RNA, 19 nt, Homo sapiens
  misc_RNA (1)...(19): siRNA sense strand
acugucggcuccagaaaga

SEQ ID NO: 1538562 - RNA, 19 nt, Homo sapiens
  misc_RNA (1)...(19): siRNA sense strand
agaagcugauccaggaguu

SEQ ID NO: 1538563 - RNA, 19 nt, Homo sapiens
  misc_RNA (1)...(19): siRNA sense strand
caagaggagcucccacagu

SEQ ID NO: 1538564 - RNA, 19 nt, Homo sapiens
  misc_RNA (1)...(19): siRNA sense strand
gcagaaccagguccagaag

SEQ ID NO: 1538565 - RNA, 19 nt, Homo sapiens
  misc_RNA (1)...(19): siRNA sense strand
ggaguugaaggaacagaag

SEQ ID NO: 1538566 - RNA, 19 nt, Homo sapiens
  misc_RNA (1)...(19): siRNA sense strand
gagaaguucguccgcaucu

SEQ ID NO: 1538567 - RNA, 19 nt, Homo sapiens
  misc_RNA (1)...(19): siRNA sense strand
cccaaccucuucaccaaca

SEQ ID NO: 1538568 - RNA, 19 nt, Homo sapiens
  misc_RNA (1)...(19): siRNA sense strand
agaaacuccugcagaacca

SEQ ID NO: 1538569 - RNA, 19 nt, Homo sapiens
  misc_RNA (1)...(19): siRNA sense strand
gacccgcaguuggcucuug

SEQ ID NO: 1538570 - RNA, 19 nt, Homo sapiens
  misc_RNA (1)...(19): siRNA sense strand
cuacagcagggacucagaa

SEQ ID NO: 1538571 - RNA, 19 nt, Homo sapiens
  misc_RNA (1)...(19): siRNA sense strand
gaagcugauccaggaguug

SEQ ID NO: 1538572 - RNA, 19 nt, Homo sapiens
  misc_RNA (1)...(19): siRNA sense strand
gcggugggccauccagaau

SEQ ID NO: 1538573 - RNA, 19 nt, Homo sapiens
  misc_RNA (1)...(19): siRNA sense strand
uccaggaguugaaggaaca

SEQ ID NO: 1538574 - RNA, 19 nt, Homo sapiens
  misc_RNA (1)...(19): siRNA sense strand
ggacccaagcgaccucucu

SEQ ID NO: 1538575 - RNA, 19 nt, Homo sapiens
  misc_RNA (1)...(19): siRNA sense strand
gauccaggaguugaaggaa

SEQ ID NO: 1538576 - RNA, 19 nt, Homo sapiens
  misc_RNA (1)...(19): siRNA sense strand
cugaagaucguggcuguga

SEQ ID NO: 1538577 - RNA, 19 nt, Homo sapiens
  misc_RNA (1)...(19): siRNA sense strand
gcagggacucagaagaucu

SEQ ID NO: 1538578 - RNA, 19 nt, Homo sapiens
  misc_RNA (1)...(19): siRNA sense strand
agaaccagguccagaagcu

SEQ ID NO: 1538579 - RNA, 19 nt, Homo sapiens
  misc_RNA (1)...(19): siRNA sense strand
gauaaucagucaguaguca

SEQ ID NO: 1538580 - RNA, 19 nt, Homo sapiens
  misc_RNA (1)...(19): siRNA sense strand
cagcuaagacucaauggua

SEQ ID NO: 1538581 - RNA, 19 nt, Homo sapiens
  misc_RNA (1)...(19): siRNA sense strand
caagagacaugcacugaac

SEQ ID NO: 1538582 - RNA, 19 nt, Homo sapiens
  misc_RNA (1)...(19): siRNA sense strand
gaagauaaucagucaguag

SEQ ID NO: 1538583 - RNA, 19 nt, Homo sapiens
  misc_RNA (1)...(19): siRNA sense strand
ugaacuggaugcuaaacuu

SEQ ID NO: 1538584 - RNA, 19 nt, Homo sapiens
  misc_RNA (1)...(19): siRNA sense strand
gaacuggaugcuaaacuug

SEQ ID NO: 1538585 - RNA, 19 nt, Homo sapiens
  misc_RNA (1)...(19): siRNA sense strand
gaagauaaucgagaaauac

SEQ ID NO: 1538586 - RNA, 19 nt, Homo sapiens
  misc_RNA (1)...(19): siRNA sense strand
gacaugcacugaacuucug

SEQ ID NO: 1538587 - RNA, 19 nt, Homo sapiens
  misc_RNA (1)...(19): siRNA sense strand
caacccagaccagaagaua

SEQ ID NO: 1538588 - RNA, 19 nt, Homo sapiens
  misc_RNA (1)...(19): siRNA sense strand
augcugaacuggaugcuaa

SEQ ID NO: 1538589 - RNA, 19 nt, Homo sapiens
  misc_RNA (1)...(19): siRNA sense strand
cgagaaauaccagcuaaga

SEQ ID NO: 1538590 - RNA, 19 nt, Homo sapiens
  misc_RNA (1)...(19): siRNA sense strand
guagucagaagaaugcaaa

SEQ ID NO: 1538591 - RNA, 19 nt, Homo sapiens
  misc_RNA (1)...(19): siRNA sense strand
aagacucaaugguaugaaa

SEQ ID NO: 1538592 - RNA, 19 nt, Homo sapiens
  misc_RNA (1)...(19): siRNA sense strand
agaagauaaucagucagua

SEQ ID NO: 1538593 - RNA, 19 nt, Homo sapiens
  misc_RNA (1)...(19): siRNA sense strand
ucagaagaaugcaaaagaa

SEQ ID NO: 1538594 - RNA, 19 nt, Homo sapiens
  misc_RNA (1)...(19): siRNA sense strand
gguggcgucugaugcugaa

SEQ ID NO: 1538595 - RNA, 19 nt, Homo sapiens
  misc_RNA (1)...(19): siRNA sense strand
cagaagauaaucagucagu

SEQ ID NO: 1538596 - RNA, 19 nt, Homo sapiens
  misc_RNA (1)...(19): siRNA sense strand
gcaaaagaaauacuggaaa

SEQ ID NO: 1538597 - RNA, 19 nt, Homo sapiens
  misc_RNA (1)...(19): siRNA sense strand
agaaauaccagcuaagacu

SEQ ID NO: 1538598 - RNA, 19 nt, Homo sapiens
  misc_RNA (1)...(19): siRNA sense strand
ucaagagacaugcacugaa

SEQ ID NO: 1538599 - RNA, 19 nt, Homo sapiens
  misc_RNA (1)...(19): siRNA sense strand
gcuaagacucaaugguaug

SEQ ID NO: 1538600 - RNA, 19 nt, Homo sapiens
  misc_RNA (1)...(19): siRNA sense strand
accagaagauaaucaguca

SEQ ID NO: 1538601 - RNA, 19 nt, Homo sapiens
  misc_RNA (1)...(19): siRNA sense strand
aaaagaggaugagcacuug

SEQ ID NO: 1538602 - RNA, 19 nt, Homo sapiens
  misc_RNA (1)...(19): siRNA sense strand
uaucaaagcaacaggaaaa

SEQ ID NO: 1538603 - RNA, 19 nt, Homo sapiens
  misc_RNA (1)...(19): siRNA sense strand
gggcaacccagaccagaag

SEQ ID NO: 1538604 - RNA, 19 nt, Homo sapiens
  misc_RNA (1)...(19): siRNA sense strand
gagaaauaccagcuaagac

SEQ ID NO: 1538605 - RNA, 19 nt, Homo sapiens
  misc_RNA (1)...(19): siRNA sense strand
cuaagacucaaugguauga

SEQ ID NO: 1538606 - RNA, 19 nt, Homo sapiens
  misc_RNA (1)...(19): siRNA sense strand
acucaaugguaugaaauca

SEQ ID NO: 1538607 - RNA, 19 nt, Homo sapiens
  misc_RNA (1)...(19): siRNA sense strand
agaagaagcugcugcuaaa

SEQ ID NO: 1538608 - RNA, 19 nt, Homo sapiens
  misc_RNA (1)...(19): siRNA sense strand
gaaauaauaccauccaugu

SEQ ID NO: 1538609 - RNA, 19 nt, Homo sapiens
  misc_RNA (1)...(19): siRNA sense strand
acacgaagguuggaaauaa

SEQ ID NO: 1538610 - RNA, 19 nt, Homo sapiens
  misc_RNA (1)...(19): siRNA sense strand
aaacuuaccucccagcuau

SEQ ID NO: 1538611 - RNA, 19 nt, Homo sapiens
  misc_RNA (1)...(19): siRNA sense strand
ccgagaaauucacaagaua

SEQ ID NO: 1538612 - RNA, 19 nt, Homo sapiens
  misc_RNA (1)...(19): siRNA sense strand
gagccugacugaagagaug

SEQ ID NO: 1538613 - RNA, 19 nt, Homo sapiens
  misc_RNA (1)...(19): siRNA sense strand
gagaggagccugacugaag

SEQ ID NO: 1538614 - RNA, 19 nt, Homo sapiens
  misc_RNA (1)...(19): siRNA sense strand
gcuaaagcaucaucagaag

SEQ ID NO: 1538615 - RNA, 19 nt, Homo sapiens
  misc_RNA (1)...(19): siRNA sense strand
cagaagaagcugcugcuaa

SEQ ID NO: 1538616 - RNA, 19 nt, Homo sapiens
  misc_RNA (1)...(19): siRNA sense strand
ggacacgcagcacaaauug

SEQ ID NO: 1538617 - RNA, 19 nt, Homo sapiens
  misc_RNA (1)...(19): siRNA sense strand
caaauggucuuuucagaga

SEQ ID NO: 1538618 - RNA, 19 nt, Homo sapiens
  misc_RNA (1)...(19): siRNA sense strand
cgagaaauucacaagauaa

SEQ ID NO: 1538619 - RNA, 19 nt, Homo sapiens
  misc_RNA (1)...(19): siRNA sense strand
acaaugagaccaacacaga

SEQ ID NO: 1538620 - RNA, 19 nt, Homo sapiens
  misc_RNA (1)...(19): siRNA sense strand
uaaagcaucaucagaagug

SEQ ID NO: 1538621 - RNA, 19 nt, Homo sapiens
  misc_RNA (1)...(19): siRNA sense strand
gaaauucacaagauaacca

SEQ ID NO: 1538622 - RNA, 19 nt, Homo sapiens
  misc_RNA (1)...(19): siRNA sense strand
gaagugaaccuggcaaacu

SEQ ID NO: 1538623 - RNA, 19 nt, Homo sapiens
  misc_RNA (1)...(19): siRNA sense strand
ccagagagguccccgauga

SEQ ID NO: 1538624 - RNA, 19 nt, Homo sapiens
  misc_RNA (1)...(19): siRNA sense strand
agaggagccugacugaaga

SEQ ID NO: 1538625 - RNA, 19 nt, Homo sapiens
  misc_RNA (1)...(19): siRNA sense strand
gcagcgcgguggaagagau

SEQ ID NO: 1538626 - RNA, 19 nt, Homo sapiens
  misc_RNA (1)...(19): siRNA sense strand
gaccucggcuccagucaag

SEQ ID NO: 1538627 - RNA, 19 nt, Homo sapiens
  misc_RNA (1)...(19): siRNA sense strand
cagagacaguuaucacauc

SEQ ID NO: 1538628 - RNA, 19 nt, Homo sapiens
  misc_RNA (1)...(19): siRNA sense strand
gccacagccugguguaugu

SEQ ID NO: 1538629 - RNA, 19 nt, Homo sapiens
  misc_RNA (1)...(19): siRNA sense strand
caaacuuaccucccagcua

SEQ ID NO: 1538630 - RNA, 19 nt, Homo sapiens
  misc_RNA (1)...(19): siRNA sense strand
caacacagacacgaagguu

SEQ ID NO: 1538631 - RNA, 19 nt, Homo sapiens
  misc_RNA (1)...(19): siRNA sense strand
cacgaagguuggaaauaau

SEQ ID NO: 1538632 - RNA, 19 nt, Homo sapiens
  misc_RNA (1)...(19): siRNA sense strand
gacacgaagguuggaaaua

SEQ ID NO: 1538633 - RNA, 19 nt, Homo sapiens
  misc_RNA (1)...(19): siRNA sense strand
ccucccagcuaucacaaug

SEQ ID NO: 1538634 - RNA, 19 nt, Homo sapiens
  misc_RNA (1)...(19): siRNA sense strand
ggaggacacgcagcacaaa

SEQ ID NO: 1538635 - RNA, 19 nt, Homo sapiens
  misc_RNA (1)...(19): siRNA sense strand
gacaaauggucuuuucaga

SEQ ID NO: 1538636 - RNA, 19 nt, Homo sapiens
  misc_RNA (1)...(19): siRNA sense strand
ggagcuagagccugaugga

SEQ ID NO: 1538637 - RNA, 19 nt, Homo sapiens
  misc_RNA (1)...(19): siRNA sense strand
ccagagaggccugcuguuc

SEQ ID NO: 1538638 - RNA, 19 nt, Homo sapiens
  misc_RNA (1)...(19): siRNA sense strand
agagauggaggcagaagaa

SEQ ID NO: 1538639 - RNA, 19 nt, Homo sapiens
  misc_RNA (1)...(19): siRNA sense strand
gcaccgagaaauucacaag

SEQ ID NO: 1538640 - RNA, 19 nt, Homo sapiens
  misc_RNA (1)...(19): siRNA sense strand
ccaugugcaccgagaaauu

SEQ ID NO: 1538641 - RNA, 19 nt, Homo sapiens
  misc_RNA (1)...(19): siRNA sense strand
ggccugcuguucccugugu

SEQ ID NO: 1538642 - RNA, 19 nt, Homo sapiens
  misc_RNA (1)...(19): siRNA sense strand
gaaggagccacgagugcau

SEQ ID NO: 1538643 - RNA, 19 nt, Homo sapiens
  misc_RNA (1)...(19): siRNA sense strand
gagaaauucacaagauaac

SEQ ID NO: 1538644 - RNA, 19 nt, Homo sapiens
  misc_RNA (1)...(19): siRNA sense strand
acgaagguuggaaauaaua

SEQ ID NO: 1538645 - RNA, 19 nt, Homo sapiens
  misc_RNA (1)...(19): siRNA sense strand
accgagaaauucacaagau

SEQ ID NO: 1538646 - RNA, 19 nt, Homo sapiens
  misc_RNA (1)...(19): siRNA sense strand
agagacaguuaucacaucu

SEQ ID NO: 1538647 - RNA, 19 nt, Homo sapiens
  misc_RNA (1)...(19): siRNA sense strand
guggagaccagcugugugu

SEQ ID NO: 1538648 - RNA, 19 nt, Homo sapiens
  misc_RNA (1)...(19): siRNA sense strand
ggagaggagccugacugaa

SEQ ID NO: 1538649 - RNA, 19 nt, Homo sapiens
  misc_RNA (1)...(19): siRNA sense strand
gugcugugccuuccagaga

SEQ ID NO: 1538650 - RNA, 19 nt, Homo sapiens
  misc_RNA (1)...(19): siRNA sense strand
gaggacacgcagcacaaau

SEQ ID NO: 1538651 - RNA, 19 nt, Homo sapiens
  misc_RNA (1)...(19): siRNA sense strand
gaagagauggaggcagaag

SEQ ID NO: 1538652 - RNA, 19 nt, Homo sapiens
  misc_RNA (1)...(19): siRNA sense strand
gaaccuggcaaacuuaccu

SEQ ID NO: 1538653 - RNA, 19 nt, Homo sapiens
  misc_RNA (1)...(19): siRNA sense strand
gaagaagcugcugcuaaag

SEQ ID NO: 1538654 - RNA, 19 nt, Homo sapiens
  misc_RNA (1)...(19): siRNA sense strand
agggcgagcuuugccauga

SEQ ID NO: 1538655 - RNA, 19 nt, Homo sapiens
  misc_RNA (1)...(19): siRNA sense strand
cagaagugaaccuggcaaa

SEQ ID NO: 1538656 - RNA, 19 nt, Homo sapiens
  misc_RNA (1)...(19): siRNA sense strand
caucaucgacgaggacugu

SEQ ID NO: 1538657 - RNA, 19 nt, Homo sapiens
  misc_RNA (1)...(19): siRNA sense strand
gauggaggcagaagaagcu

SEQ ID NO: 1538658 - RNA, 19 nt, Homo sapiens
  misc_RNA (1)...(19): siRNA sense strand
gcuaucacaaugagaccaa

SEQ ID NO: 1538659 - RNA, 19 nt, Homo sapiens
  misc_RNA (1)...(19): siRNA sense strand
ccucaucaccugggagcua

SEQ ID NO: 1538660 - RNA, 19 nt, Homo sapiens
  misc_RNA (1)...(19): siRNA sense strand
gacgaagaaggcagaagga

SEQ ID NO: 1538661 - RNA, 19 nt, Homo sapiens
  misc_RNA (1)...(19): siRNA sense strand
caugugcaccgagaaauuc

SEQ ID NO: 1538662 - RNA, 19 nt, Homo sapiens
  misc_RNA (1)...(19): siRNA sense strand
ucagagacaguuaucacau

SEQ ID NO: 1538663 - RNA, 19 nt, Homo sapiens
  misc_RNA (1)...(19): siRNA sense strand
aaagcaucaucagaaguga

SEQ ID NO: 1538664 - RNA, 19 nt, Homo sapiens
  misc_RNA (1)...(19): siRNA sense strand
gagccacgagugcaucauc

SEQ ID NO: 1538665 - RNA, 19 nt, Homo sapiens
  misc_RNA (1)...(19): siRNA sense strand
agaagaagcugcugcuaaa

SEQ ID NO: 1538666 - RNA, 19 nt, Homo sapiens
  misc_RNA (1)...(19): siRNA sense strand
gaaauaauaccauccaugu

SEQ ID NO: 1538667 - RNA, 19 nt, Homo sapiens
  misc_RNA (1)...(19): siRNA sense strand
acacgaagguuggaaauaa

SEQ ID NO: 1538668 - RNA, 19 nt, Homo sapiens
  misc_RNA (1)...(19): siRNA sense strand
aaacuuaccucccagcuau

SEQ ID NO: 1538669 - RNA, 19 nt, Homo sapiens
  misc_RNA (1)...(19): siRNA sense strand
ccgagaaauucacaagaua

SEQ ID NO: 1538670 - RNA, 19 nt, Homo sapiens
  misc_RNA (1)...(19): siRNA sense strand
gagccugacugaagagaug

SEQ ID NO: 1538671 - RNA, 19 nt, Homo sapiens
  misc_RNA (1)...(19): siRNA sense strand
gagaggagccugacugaag

SEQ ID NO: 1538672 - RNA, 19 nt, Homo sapiens
  misc_RNA (1)...(19): siRNA sense strand
gcuaaagcaucaucagaag

SEQ ID NO: 1538673 - RNA, 19 nt, Homo sapiens
  misc_RNA (1)...(19): siRNA sense strand
cagaagaagcugcugcuaa

SEQ ID NO: 1538674 - RNA, 19 nt, Homo sapiens
  misc_RNA (1)...(19): siRNA sense strand
ggacacgcagcacaaauug

SEQ ID NO: 1538675 - RNA, 19 nt, Homo sapiens
  misc_RNA (1)...(19): siRNA sense strand
caaauggucuuuucagaga

SEQ ID NO: 1538676 - RNA, 19 nt, Homo sapiens
  misc_RNA (1)...(19): siRNA sense strand
cgagaaauucacaagauaa

SEQ ID NO: 1538677 - RNA, 19 nt, Homo sapiens
  misc_RNA (1)...(19): siRNA sense strand
acaaugagaccaacacaga

SEQ ID NO: 1538678 - RNA, 19 nt, Homo sapiens
  misc_RNA (1)...(19): siRNA sense strand
uaaagcaucaucagaagug

SEQ ID NO: 1538679 - RNA, 19 nt, Homo sapiens
  misc_RNA (1)...(19): siRNA sense strand
gaaauucacaagauaacca

SEQ ID NO: 1538680 - RNA, 19 nt, Homo sapiens
  misc_RNA (1)...(19): siRNA sense strand
gaagugaaccuggcaaacu

SEQ ID NO: 1538681 - RNA, 19 nt, Homo sapiens
  misc_RNA (1)...(19): siRNA sense strand
ccagagagguccccgauga

SEQ ID NO: 1538682 - RNA, 19 nt, Homo sapiens
  misc_RNA (1)...(19): siRNA sense strand
agaggagccugacugaaga

SEQ ID NO: 1538683 - RNA, 19 nt, Homo sapiens
  misc_RNA (1)...(19): siRNA sense strand
gcagcgcgguggaagagau

SEQ ID NO: 1538684 - RNA, 19 nt, Homo sapiens
  misc_RNA (1)...(19): siRNA sense strand
gaccucggcuccagucaag

SEQ ID NO: 1538685 - RNA, 19 nt, Homo sapiens
  misc_RNA (1)...(19): siRNA sense strand
cagagacaguuaucacauc

SEQ ID NO: 1538686 - RNA, 19 nt, Homo sapiens
  misc_RNA (1)...(19): siRNA sense strand
gccacagccugguguaugu

SEQ ID NO: 1538687 - RNA, 19 nt, Homo sapiens
  misc_RNA (1)...(19): siRNA sense strand
caaacuuaccucccagcua

SEQ ID NO: 1538688 - RNA, 19 nt, Homo sapiens
  misc_RNA (1)...(19): siRNA sense strand
caacacagacacgaagguu

SEQ ID NO: 1538689 - RNA, 19 nt, Homo sapiens
  misc_RNA (1)...(19): siRNA sense strand
cacgaagguuggaaauaau

SEQ ID NO: 1538690 - RNA, 19 nt, Homo sapiens
  misc_RNA (1)...(19): siRNA sense strand
gacacgaagguuggaaaua

SEQ ID NO: 1538691 - RNA, 19 nt, Homo sapiens
  misc_RNA (1)...(19): siRNA sense strand
ccucccagcuaucacaaug

SEQ ID NO: 1538692 - RNA, 19 nt, Homo sapiens
  misc_RNA (1)...(19): siRNA sense strand
ggaggacacgcagcacaaa

SEQ ID NO: 1538693 - RNA, 19 nt, Homo sapiens
  misc_RNA (1)...(19): siRNA sense strand
gacaaauggucuuuucaga

SEQ ID NO: 1538694 - RNA, 19 nt, Homo sapiens
  misc_RNA (1)...(19): siRNA sense strand
ggagcuagagccugaugga

SEQ ID NO: 1538695 - RNA, 19 nt, Homo sapiens
  misc_RNA (1)...(19): siRNA sense strand
ccagagaggccugcuguuc

SEQ ID NO: 1538696 - RNA, 19 nt, Homo sapiens
  misc_RNA (1)...(19): siRNA sense strand
agagauggaggcagaagaa

SEQ ID NO: 1538697 - RNA, 19 nt, Homo sapiens
  misc_RNA (1)...(19): siRNA sense strand
gcaccgagaaauucacaag

SEQ ID NO: 1538698 - RNA, 19 nt, Homo sapiens
  misc_RNA (1)...(19): siRNA sense strand
ccaugugcaccgagaaauu

SEQ ID NO: 1538699 - RNA, 19 nt, Homo sapiens
  misc_RNA (1)...(19): siRNA sense strand
ggccugcuguucccugugu

SEQ ID NO: 1538700 - RNA, 19 nt, Homo sapiens
  misc_RNA (1)...(19): siRNA sense strand
gaaggagccacgagugcau

SEQ ID NO: 1538701 - RNA, 19 nt, Homo sapiens
  misc_RNA (1)...(19): siRNA sense strand
gagaaauucacaagauaac

SEQ ID NO: 1538702 - RNA, 19 nt, Homo sapiens
  misc_RNA (1)...(19): siRNA sense strand
acgaagguuggaaauaaua

SEQ ID NO: 1538703 - RNA, 19 nt, Homo sapiens
  misc_RNA (1)...(19): siRNA sense strand
accgagaaauucacaagau

SEQ ID NO: 1538704 - RNA, 19 nt, Homo sapiens
  misc_RNA (1)...(19): siRNA sense strand
agagacaguuaucacaucu

SEQ ID NO: 1538705 - RNA, 19 nt, Homo sapiens
  misc_RNA (1)...(19): siRNA sense strand
guggagaccagcugugugu

SEQ ID NO: 1538706 - RNA, 19 nt, Homo sapiens
  misc_RNA (1)...(19): siRNA sense strand
ggagaggagccugacugaa

SEQ ID NO: 1538707 - RNA, 19 nt, Homo sapiens
  misc_RNA (1)...(19): siRNA sense strand
gugcugugccuuccagaga

SEQ ID NO: 1538708 - RNA, 19 nt, Homo sapiens
  misc_RNA (1)...(19): siRNA sense strand
gaggacacgcagcacaaau

SEQ ID NO: 1538709 - RNA, 19 nt, Homo sapiens
  misc_RNA (1)...(19): siRNA sense strand
gaagagauggaggcagaag

SEQ ID NO: 1538710 - RNA, 19 nt, Homo sapiens
  misc_RNA (1)...(19): siRNA sense strand
gaaccuggcaaacuuaccu

SEQ ID NO: 1538711 - RNA, 19 nt, Homo sapiens
  misc_RNA (1)...(19): siRNA sense strand
gaagaagcugcugcuaaag

SEQ ID NO: 1538712 - RNA, 19 nt, Homo sapiens
  misc_RNA (1)...(19): siRNA sense strand
agggcgagcuuugccauga

SEQ ID NO: 1538713 - RNA, 19 nt, Homo sapiens
  misc_RNA (1)...(19): siRNA sense strand
cagaagugaaccuggcaaa

SEQ ID NO: 1538714 - RNA, 19 nt, Homo sapiens
  misc_RNA (1)...(19): siRNA sense strand
caucaucgacgaggacugu

SEQ ID NO: 1538715 - RNA, 19 nt, Homo sapiens
  misc_RNA (1)...(19): siRNA sense strand
gauggaggcagaagaagcu

SEQ ID NO: 1538716 - RNA, 19 nt, Homo sapiens
  misc_RNA (1)...(19): siRNA sense strand
gcuaucacaaugagaccaa

SEQ ID NO: 1538717 - RNA, 19 nt, Homo sapiens
  misc_RNA (1)...(19): siRNA sense strand
ccucaucaccugggagcua

SEQ ID NO: 1538718 - RNA, 19 nt, Homo sapiens
  misc_RNA (1)...(19): siRNA sense strand
gacgaagaaggcagaagga

SEQ ID NO: 1538719 - RNA, 19 nt, Homo sapiens
  misc_RNA (1)...(19): siRNA sense strand
caugugcaccgagaaauuc

SEQ ID NO: 1538720 - RNA, 19 nt, Homo sapiens
  misc_RNA (1)...(19): siRNA sense strand
ucagagacaguuaucacau

SEQ ID NO: 1538721 - RNA, 19 nt, Homo sapiens
  misc_RNA (1)...(19): siRNA sense strand
aaagcaucaucagaaguga

SEQ ID NO: 1538722 - RNA, 19 nt, Homo sapiens
  misc_RNA (1)...(19): siRNA sense strand
gagccacgagugcaucauc

SEQ ID NO: 1538723 - RNA, 19 nt, Homo sapiens
  misc_RNA (1)...(19): siRNA sense strand
agaagaagcugcugcuaaa

SEQ ID NO: 1538724 - RNA, 19 nt, Homo sapiens
  misc_RNA (1)...(19): siRNA sense strand
gaaauaauaccauccaugu

SEQ ID NO: 1538725 - RNA, 19 nt, Homo sapiens
  misc_RNA (1)...(19): siRNA sense strand
acacgaagguuggaaauaa

SEQ ID NO: 1538726 - RNA, 19 nt, Homo sapiens
  misc_RNA (1)...(19): siRNA sense strand
aaacuuaccucccagcuau

SEQ ID NO: 1538727 - RNA, 19 nt, Homo sapiens
  misc_RNA (1)...(19): siRNA sense strand
ccgagaaauucacaagaua

SEQ ID NO: 1538728 - RNA, 19 nt, Homo sapiens
  misc_RNA (1)...(19): siRNA sense strand
gagccugacugaagagaug

SEQ ID NO: 1538729 - RNA, 19 nt, Homo sapiens
  misc_RNA (1)...(19): siRNA sense strand
gagaggagccugacugaag

SEQ ID NO: 1538730 - RNA, 19 nt, Homo sapiens
  misc_RNA (1)...(19): siRNA sense strand
gcuaaagcaucaucagaag

SEQ ID NO: 1538731 - RNA, 19 nt, Homo sapiens
  misc_RNA (1)...(19): siRNA sense strand
cagaagaagcugcugcuaa

SEQ ID NO: 1538732 - RNA, 19 nt, Homo sapiens
  misc_RNA (1)...(19): siRNA sense strand
ggacacgcagcacaaauug

SEQ ID NO: 1538733 - RNA, 19 nt, Homo sapiens
  misc_RNA (1)...(19): siRNA sense strand
caaauggucuuuucagaga

SEQ ID NO: 1538734 - RNA, 19 nt, Homo sapiens
  misc_RNA (1)...(19): siRNA sense strand
cgagaaauucacaagauaa

SEQ ID NO: 1538735 - RNA, 19 nt, Homo sapiens
  misc_RNA (1)...(19): siRNA sense strand
acaaugagaccaacacaga

SEQ ID NO: 1538736 - RNA, 19 nt, Homo sapiens
  misc_RNA (1)...(19): siRNA sense strand
uaaagcaucaucagaagug

SEQ ID NO: 1538737 - RNA, 19 nt, Homo sapiens
  misc_RNA (1)...(19): siRNA sense strand
gaaauucacaagauaacca

SEQ ID NO: 1538738 - RNA, 19 nt, Homo sapiens
  misc_RNA (1)...(19): siRNA sense strand
gaagugaaccuggcaaacu

SEQ ID NO: 1538739 - RNA, 19 nt, Homo sapiens
  misc_RNA (1)...(19): siRNA sense strand
ccagagagguccccgauga

SEQ ID NO: 1538740 - RNA, 19 nt, Homo sapiens
  misc_RNA (1)...(19): siRNA sense strand
agaggagccugacugaaga

SEQ ID NO: 1538741 - RNA, 19 nt, Homo sapiens
  misc_RNA (1)...(19): siRNA sense strand
gcagcgcgguggaagagau

SEQ ID NO: 1538742 - RNA, 19 nt, Homo sapiens
  misc_RNA (1)...(19): siRNA sense strand
gaccucggcuccagucaag

SEQ ID NO: 1538743 - RNA, 19 nt, Homo sapiens
  misc_RNA (1)...(19): siRNA sense strand
cagagacaguuaucacauc

SEQ ID NO: 1538744 - RNA, 19 nt, Homo sapiens
  misc_RNA (1)...(19): siRNA sense strand
gccacagccugguguaugu

SEQ ID NO: 1538745 - RNA, 19 nt, Homo sapiens
  misc_RNA (1)...(19): siRNA sense strand
caaacuuaccucccagcua

SEQ ID NO: 1538746 - RNA, 19 nt, Homo sapiens
  misc_RNA (1)...(19): siRNA sense strand
caacacagacacgaagguu

SEQ ID NO: 1538747 - RNA, 19 nt, Homo sapiens
  misc_RNA (1)...(19): siRNA sense strand
cacgaagguuggaaauaau

SEQ ID NO: 1538748 - RNA, 19 nt, Homo sapiens
  misc_RNA (1)...(19): siRNA sense strand
gacacgaagguuggaaaua

SEQ ID NO: 1538749 - RNA, 19 nt, Homo sapiens
  misc_RNA (1)...(19): siRNA sense strand
ccucccagcuaucacaaug

SEQ ID NO: 1538750 - RNA, 19 nt, Homo sapiens
  misc_RNA (1)...(19): siRNA sense strand
ggaggacacgcagcacaaa

SEQ ID NO: 1538751 - RNA, 19 nt, Homo sapiens
  misc_RNA (1)...(19): siRNA sense strand
gacaaauggucuuuucaga

SEQ ID NO: 1538752 - RNA, 19 nt, Homo sapiens
  misc_RNA (1)...(19): siRNA sense strand
ggagcuagagccugaugga

SEQ ID NO: 1538753 - RNA, 19 nt, Homo sapiens
  misc_RNA (1)...(19): siRNA sense strand
ccagagaggccugcuguuc

SEQ ID NO: 1538754 - RNA, 19 nt, Homo sapiens
  misc_RNA (1)...(19): siRNA sense strand
agagauggaggcagaagaa

SEQ ID NO: 1538755 - RNA, 19 nt, Homo sapiens
  misc_RNA (1)...(19): siRNA sense strand
gcaccgagaaauucacaag

SEQ ID NO: 1538756 - RNA, 19 nt, Homo sapiens
  misc_RNA (1)...(19): siRNA sense strand
ccaugugcaccgagaaauu

SEQ ID NO: 1538757 - RNA, 19 nt, Homo sapiens
  misc_RNA (1)...(19): siRNA sense strand
ggccugcuguucccugugu

SEQ ID NO: 1538758 - RNA, 19 nt, Homo sapiens
  misc_RNA (1)...(19): siRNA sense strand
gaaggagccacgagugcau

SEQ ID NO: 1538759 - RNA, 19 nt, Homo sapiens
  misc_RNA (1)...(19): siRNA sense strand
gagaaauucacaagauaac

SEQ ID NO: 1538760 - RNA, 19 nt, Homo sapiens
  misc_RNA (1)...(19): siRNA sense strand
acgaagguuggaaauaaua

SEQ ID NO: 1538761 - RNA, 19 nt, Homo sapiens
  misc_RNA (1)...(19): siRNA sense strand
accgagaaauucacaagau

SEQ ID NO: 1538762 - RNA, 19 nt, Homo sapiens
  misc_RNA (1)...(19): siRNA sense strand
agagacaguuaucacaucu

SEQ ID NO: 1538763 - RNA, 19 nt, Homo sapiens
  misc_RNA (1)...(19): siRNA sense strand
guggagaccagcugugugu

SEQ ID NO: 1538764 - RNA, 19 nt, Homo sapiens
  misc_RNA (1)...(19): siRNA sense strand
ggagaggagccugacugaa

SEQ ID NO: 1538765 - RNA, 19 nt, Homo sapiens
  misc_RNA (1)...(19): siRNA sense strand
gugcugugccuuccagaga

SEQ ID NO: 1538766 - RNA, 19 nt, Homo sapiens
  misc_RNA (1)...(19): siRNA sense strand
gaggacacgcagcacaaau

SEQ ID NO: 1538767 - RNA, 19 nt, Homo sapiens
  misc_RNA (1)...(19): siRNA sense strand
gaagagauggaggcagaag

SEQ ID NO: 1538768 - RNA, 19 nt, Homo sapiens
  misc_RNA (1)...(19): siRNA sense strand
gaaccuggcaaacuuaccu

SEQ ID NO: 1538769 - RNA, 19 nt, Homo sapiens
  misc_RNA (1)...(19): siRNA sense strand
gaagaagcugcugcuaaag

SEQ ID NO: 1538770 - RNA, 19 nt, Homo sapiens
  misc_RNA (1)...(19): siRNA sense strand
agggcgagcuuugccauga

SEQ ID NO: 1538771 - RNA, 19 nt, Homo sapiens
  misc_RNA (1)...(19): siRNA sense strand
cagaagugaaccuggcaaa

SEQ ID NO: 1538772 - RNA, 19 nt, Homo sapiens
  misc_RNA (1)...(19): siRNA sense strand
caucaucgacgaggacugu

SEQ ID NO: 1538773 - RNA, 19 nt, Homo sapiens
  misc_RNA (1)...(19): siRNA sense strand
gauggaggcagaagaagcu

SEQ ID NO: 1538774 - RNA, 19 nt, Homo sapiens
  misc_RNA (1)...(19): siRNA sense strand
gcuaucacaaugagaccaa

SEQ ID NO: 1538775 - RNA, 19 nt, Homo sapiens
  misc_RNA (1)...(19): siRNA sense strand
ccucaucaccugggagcua

SEQ ID NO: 1538776 - RNA, 19 nt, Homo sapiens
  misc_RNA (1)...(19): siRNA sense strand
gacgaagaaggcagaagga

SEQ ID NO: 1538777 - RNA, 19 nt, Homo sapiens
  misc_RNA (1)...(19): siRNA sense strand
caugugcaccgagaaauuc

SEQ ID NO: 1538778 - RNA, 19 nt, Homo sapiens
  misc_RNA (1)...(19): siRNA sense strand
ucagagacaguuaucacau

SEQ ID NO: 1538779 - RNA, 19 nt, Homo sapiens
  misc_RNA (1)...(19): siRNA sense strand
aaagcaucaucagaaguga

SEQ ID NO: 1538780 - RNA, 19 nt, Homo sapiens
  misc_RNA (1)...(19): siRNA sense strand
gagccacgagugcaucauc

SEQ ID NO: 1538781 - RNA, 19 nt, Homo sapiens
  misc_RNA (1)...(19): siRNA sense strand
agaagaagcugcugcuaaa

SEQ ID NO: 1538782 - RNA, 19 nt, Homo sapiens
  misc_RNA (1)...(19): siRNA sense strand
gaaauaauaccauccaugu

SEQ ID NO: 1538783 - RNA, 19 nt, Homo sapiens
  misc_RNA (1)...(19): siRNA sense strand
acacgaagguuggaaauaa

SEQ ID NO: 1538784 - RNA, 19 nt, Homo sapiens
  misc_RNA (1)...(19): siRNA sense strand
aaacuuaccucccagcuau

SEQ ID NO: 1538785 - RNA, 19 nt, Homo sapiens
  misc_RNA (1)...(19): siRNA sense strand
ccgagaaauucacaagaua

SEQ ID NO: 1538786 - RNA, 19 nt, Homo sapiens
  misc_RNA (1)...(19): siRNA sense strand
gagccugacugaagagaug

SEQ ID NO: 1538787 - RNA, 19 nt, Homo sapiens
  misc_RNA (1)...(19): siRNA sense strand
gagaggagccugacugaag

SEQ ID NO: 1538788 - RNA, 19 nt, Homo sapiens
  misc_RNA (1)...(19): siRNA sense strand
gcuaaagcaucaucagaag

SEQ ID NO: 1538789 - RNA, 19 nt, Homo sapiens
  misc_RNA (1)...(19): siRNA sense strand
cagaagaagcugcugcuaa

SEQ ID NO: 1538790 - RNA, 19 nt, Homo sapiens
  misc_RNA (1)...(19): siRNA sense strand
ggacacgcagcacaaauug

SEQ ID NO: 1538791 - RNA, 19 nt, Homo sapiens
  misc_RNA (1)...(19): siRNA sense strand
caaauggucuuuucagaga

SEQ ID NO: 1538792 - RNA, 19 nt, Homo sapiens
  misc_RNA (1)...(19): siRNA sense strand
cgagaaauucacaagauaa

SEQ ID NO: 1538793 - RNA, 19 nt, Homo sapiens
  misc_RNA (1)...(19): siRNA sense strand
acaaugagaccaacacaga

SEQ ID NO: 1538794 - RNA, 19 nt, Homo sapiens
  misc_RNA (1)...(19): siRNA sense strand
uaaagcaucaucagaagug

SEQ ID NO: 1538795 - RNA, 19 nt, Homo sapiens
  misc_RNA (1)...(19): siRNA sense strand
gaaauucacaagauaacca

SEQ ID NO: 1538796 - RNA, 19 nt, Homo sapiens
  misc_RNA (1)...(19): siRNA sense strand
gaagugaaccuggcaaacu

SEQ ID NO: 1538797 - RNA, 19 nt, Homo sapiens
  misc_RNA (1)...(19): siRNA sense strand
ccagagagguccccgauga

SEQ ID NO: 1538798 - RNA, 19 nt, Homo sapiens
  misc_RNA (1)...(19): siRNA sense strand
agaggagccugacugaaga

SEQ ID NO: 1538799 - RNA, 19 nt, Homo sapiens
  misc_RNA (1)...(19): siRNA sense strand
gcagcgcgguggaagagau

SEQ ID NO: 1538800 - RNA, 19 nt, Homo sapiens
  misc_RNA (1)...(19): siRNA sense strand
gaccucggcuccagucaag

SEQ ID NO: 1538801 - RNA, 19 nt, Homo sapiens
  misc_RNA (1)...(19): siRNA sense strand
cagagacaguuaucacauc

SEQ ID NO: 1538802 - RNA, 19 nt, Homo sapiens
  misc_RNA (1)...(19): siRNA sense strand
gccacagccugguguaugu

SEQ ID NO: 1538803 - RNA, 19 nt, Homo sapiens
  misc_RNA (1)...(19): siRNA sense strand
caaacuuaccucccagcua

SEQ ID NO: 1538804 - RNA, 19 nt, Homo sapiens
  misc_RNA (1)...(19): siRNA sense strand
caacacagacacgaagguu

SEQ ID NO: 1538805 - RNA, 19 nt, Homo sapiens
  misc_RNA (1)...(19): siRNA sense strand
cacgaagguuggaaauaau

SEQ ID NO: 1538806 - RNA, 19 nt, Homo sapiens
  misc_RNA (1)...(19): siRNA sense strand
gacacgaagguuggaaaua

SEQ ID NO: 1538807 - RNA, 19 nt, Homo sapiens
  misc_RNA (1)...(19): siRNA sense strand
ccucccagcuaucacaaug

SEQ ID NO: 1538808 - RNA, 19 nt, Homo sapiens
  misc_RNA (1)...(19): siRNA sense strand
ggaggacacgcagcacaaa

SEQ ID NO: 1538809 - RNA, 19 nt, Homo sapiens
  misc_RNA (1)...(19): siRNA sense strand
gacaaauggucuuuucaga

SEQ ID NO: 1538810 - RNA, 19 nt, Homo sapiens
  misc_RNA (1)...(19): siRNA sense strand
ggagcuagagccugaugga

SEQ ID NO: 1538811 - RNA, 19 nt, Homo sapiens
  misc_RNA (1)...(19): siRNA sense strand
ccagagaggccugcuguuc

SEQ ID NO: 1538812 - RNA, 19 nt, Homo sapiens
  misc_RNA (1)...(19): siRNA sense strand
agagauggaggcagaagaa

SEQ ID NO: 1538813 - RNA, 19 nt, Homo sapiens
  misc_RNA (1)...(19): siRNA sense strand
gcaccgagaaauucacaag

SEQ ID NO: 1538814 - RNA, 19 nt, Homo sapiens
  misc_RNA (1)...(19): siRNA sense strand
ccaugugcaccgagaaauu

SEQ ID NO: 1538815 - RNA, 19 nt, Homo sapiens
  misc_RNA (1)...(19): siRNA sense strand
ggccugcuguucccugugu

SEQ ID NO: 1538816 - RNA, 19 nt, Homo sapiens
  misc_RNA (1)...(19): siRNA sense strand
gaaggagccacgagugcau

SEQ ID NO: 1538817 - RNA, 19 nt, Homo sapiens
  misc_RNA (1)...(19): siRNA sense strand
gagaaauucacaagauaac

SEQ ID NO: 1538818 - RNA, 19 nt, Homo sapiens
  misc_RNA (1)...(19): siRNA sense strand
acgaagguuggaaauaaua

SEQ ID NO: 1538819 - RNA, 19 nt, Homo sapiens
  misc_RNA (1)...(19): siRNA sense strand
accgagaaauucacaagau

SEQ ID NO: 1538820 - RNA, 19 nt, Homo sapiens
  misc_RNA (1)...(19): siRNA sense strand
agagacaguuaucacaucu

SEQ ID NO: 1538821 - RNA, 19 nt, Homo sapiens
  misc_RNA (1)...(19): siRNA sense strand
guggagaccagcugugugu

SEQ ID NO: 1538822 - RNA, 19 nt, Homo sapiens
  misc_RNA (1)...(19): siRNA sense strand
ggagaggagccugacugaa

SEQ ID NO: 1538823 - RNA, 19 nt, Homo sapiens
  misc_RNA (1)...(19): siRNA sense strand
gugcugugccuuccagaga

SEQ ID NO: 1538824 - RNA, 19 nt, Homo sapiens
  misc_RNA (1)...(19): siRNA sense strand
gaggacacgcagcacaaau

SEQ ID NO: 1538825 - RNA, 19 nt, Homo sapiens
  misc_RNA (1)...(19): siRNA sense strand
gaagagauggaggcagaag

SEQ ID NO: 1538826 - RNA, 19 nt, Homo sapiens
  misc_RNA (1)...(19): siRNA sense strand
gaaccuggcaaacuuaccu

SEQ ID NO: 1538827 - RNA, 19 nt, Homo sapiens
  misc_RNA (1)...(19): siRNA sense strand
gaagaagcugcugcuaaag

SEQ ID NO: 1538828 - RNA, 19 nt, Homo sapiens
  misc_RNA (1)...(19): siRNA sense strand
agggcgagcuuugccauga

SEQ ID NO: 1538829 - RNA, 19 nt, Homo sapiens
  misc_RNA (1)...(19): siRNA sense strand
cagaagugaaccuggcaaa

SEQ ID NO: 1538830 - RNA, 19 nt, Homo sapiens
  misc_RNA (1)...(19): siRNA sense strand
caucaucgacgaggacugu

SEQ ID NO: 1538831 - RNA, 19 nt, Homo sapiens
  misc_RNA (1)...(19): siRNA sense strand
gauggaggcagaagaagcu

SEQ ID NO: 1538832 - RNA, 19 nt, Homo sapiens
  misc_RNA (1)...(19): siRNA sense strand
gcuaucacaaugagaccaa

SEQ ID NO: 1538833 - RNA, 19 nt, Homo sapiens
  misc_RNA (1)...(19): siRNA sense strand
ccucaucaccugggagcua

SEQ ID NO: 1538834 - RNA, 19 nt, Homo sapiens
  misc_RNA (1)...(19): siRNA sense strand
gacgaagaaggcagaagga

SEQ ID NO: 1538835 - RNA, 19 nt, Homo sapiens
  misc_RNA (1)...(19): siRNA sense strand
caugugcaccgagaaauuc

SEQ ID NO: 1538836 - RNA, 19 nt, Homo sapiens
  misc_RNA (1)...(19): siRNA sense strand
ucagagacaguuaucacau

SEQ ID NO: 1538837 - RNA, 19 nt, Homo sapiens
  misc_RNA (1)...(19): siRNA sense strand
aaagcaucaucagaaguga

SEQ ID NO: 1538838 - RNA, 19 nt, Homo sapiens
  misc_RNA (1)...(19): siRNA sense strand
gagccacgagugcaucauc

SEQ ID NO: 1538839 - RNA, 19 nt, Homo sapiens
  misc_RNA (1)...(19): siRNA sense strand
ggagagaggugaagaacaa

SEQ ID NO: 1538840 - RNA, 19 nt, Homo sapiens
  misc_RNA (1)...(19): siRNA sense strand
gaucaaggaugccauaguc

SEQ ID NO: 1538841 - RNA, 19 nt, Homo sapiens
  misc_RNA (1)...(19): siRNA sense strand
cgacaacugugcugaguga

SEQ ID NO: 1538842 - RNA, 19 nt, Homo sapiens
  misc_RNA (1)...(19): siRNA sense strand
gagacaacccguucggaua

SEQ ID NO: 1538843 - RNA, 19 nt, Homo sapiens
  misc_RNA (1)...(19): siRNA sense strand
gcgcagcacucucaucauc

SEQ ID NO: 1538844 - RNA, 19 nt, Homo sapiens
  misc_RNA (1)...(19): siRNA sense strand
gaggaacugugcuguguag

SEQ ID NO: 1538845 - RNA, 19 nt, Homo sapiens
  misc_RNA (1)...(19): siRNA sense strand
ccucaaggaucacaaagug

SEQ ID NO: 1538846 - RNA, 19 nt, Homo sapiens
  misc_RNA (1)...(19): siRNA sense strand
ucgccuggcugcugcaaua

SEQ ID NO: 1538847 - RNA, 19 nt, Homo sapiens
  misc_RNA (1)...(19): siRNA sense strand
guagaccaaucugagcaua

SEQ ID NO: 1538848 - RNA, 19 nt, Homo sapiens
  misc_RNA (1)...(19): siRNA sense strand
gaagucaaccuggaggaaa

SEQ ID NO: 1538849 - RNA, 19 nt, Homo sapiens
  misc_RNA (1)...(19): siRNA sense strand
gcaucucacuugggaaaug

SEQ ID NO: 1538850 - RNA, 19 nt, Homo sapiens
  misc_RNA (1)...(19): siRNA sense strand
gagcuugaccggaccauca

SEQ ID NO: 1538851 - RNA, 19 nt, Homo sapiens
  misc_RNA (1)...(19): siRNA sense strand
caucacaccuaccaagaag

SEQ ID NO: 1538852 - RNA, 19 nt, Homo sapiens
  misc_RNA (1)...(19): siRNA sense strand
aacgggagcuccauccaaa

SEQ ID NO: 1538853 - RNA, 19 nt, Homo sapiens
  misc_RNA (1)...(19): siRNA sense strand
gggcaucucacuugggaaa

SEQ ID NO: 1538854 - RNA, 19 nt, Homo sapiens
  misc_RNA (1)...(19): siRNA sense strand
gcaucacaccuaccaagaa

SEQ ID NO: 1538855 - RNA, 19 nt, Homo sapiens
  misc_RNA (1)...(19): siRNA sense strand
gaggugcgguucccagucu

SEQ ID NO: 1538856 - RNA, 19 nt, Homo sapiens
  misc_RNA (1)...(19): siRNA sense strand
caucucacuugggaaauga

SEQ ID NO: 1538857 - RNA, 19 nt, Homo sapiens
  misc_RNA (1)...(19): siRNA sense strand
gacaacccguucggauauu

SEQ ID NO: 1538858 - RNA, 19 nt, Homo sapiens
  misc_RNA (1)...(19): siRNA sense strand
gcagcacucucaucaucuc

SEQ ID NO: 1538859 - RNA, 19 nt, Homo sapiens
  misc_RNA (1)...(19): siRNA sense strand
ggagcugacccucaaagug

SEQ ID NO: 1538860 - RNA, 19 nt, Homo sapiens
  misc_RNA (1)...(19): siRNA sense strand
caucaucucugguguuucc

SEQ ID NO: 1538861 - RNA, 19 nt, Homo sapiens
  misc_RNA (1)...(19): siRNA sense strand
guauagacggcaaauuaga

SEQ ID NO: 1538862 - RNA, 19 nt, Homo sapiens
  misc_RNA (1)...(19): siRNA sense strand
agacaacccguucggauau

SEQ ID NO: 1538863 - RNA, 19 nt, Homo sapiens
  misc_RNA (1)...(19): siRNA sense strand
gagguggaguggacagaag

SEQ ID NO: 1538864 - RNA, 19 nt, Homo sapiens
  misc_RNA (1)...(19): siRNA sense strand
ccaagaagacacccaccaa

SEQ ID NO: 1538865 - RNA, 19 nt, Homo sapiens
  misc_RNA (1)...(19): siRNA sense strand
ggaagucaaccuggaggaa

SEQ ID NO: 1538866 - RNA, 19 nt, Homo sapiens
  misc_RNA (1)...(19): siRNA sense strand
ccaggaagcagacgagaca

SEQ ID NO: 1538867 - RNA, 19 nt, Homo sapiens
  misc_RNA (1)...(19): siRNA sense strand
agcaauaccucccauagca

SEQ ID NO: 1538868 - RNA, 19 nt, Homo sapiens
  misc_RNA (1)...(19): siRNA sense strand
gcaccauugucaccacagu

SEQ ID NO: 1538869 - RNA, 19 nt, Homo sapiens
  misc_RNA (1)...(19): siRNA sense strand
ccgaggaacugugcugugu

SEQ ID NO: 1538870 - RNA, 19 nt, Homo sapiens
  misc_RNA (1)...(19): siRNA sense strand
agacaguugugcccacuca

SEQ ID NO: 1538871 - RNA, 19 nt, Homo sapiens
  misc_RNA (1)...(19): siRNA sense strand
gacgacaacugugcugagu

SEQ ID NO: 1538872 - RNA, 19 nt, Homo sapiens
  misc_RNA (1)...(19): siRNA sense strand
ggaaggcaccgaggaacug

SEQ ID NO: 1538873 - RNA, 19 nt, Homo sapiens
  misc_RNA (1)...(19): siRNA sense strand
gcacccagccagccaugau

SEQ ID NO: 1538874 - RNA, 19 nt, Homo sapiens
  misc_RNA (1)...(19): siRNA sense strand
gaugauauugagucggaaa

SEQ ID NO: 1538875 - RNA, 19 nt, Homo sapiens
  misc_RNA (1)...(19): siRNA sense strand
ccgagaagacgacaacugu

SEQ ID NO: 1538876 - RNA, 19 nt, Homo sapiens
  misc_RNA (1)...(19): siRNA sense strand
gagccagcaucagucaugu

SEQ ID NO: 1538877 - RNA, 19 nt, Homo sapiens
  misc_RNA (1)...(19): siRNA sense strand
acaacccguucggauauuu

SEQ ID NO: 1538878 - RNA, 19 nt, Homo sapiens
  misc_RNA (1)...(19): siRNA sense strand
gccagcaucagucauguga

SEQ ID NO: 1538879 - RNA, 19 nt, Homo sapiens
  misc_RNA (1)...(19): siRNA sense strand
gagaggugaagaacaagug

SEQ ID NO: 1538880 - RNA, 19 nt, Homo sapiens
  misc_RNA (1)...(19): siRNA sense strand
cucaucaucucugguguuu

SEQ ID NO: 1538881 - RNA, 19 nt, Homo sapiens
  misc_RNA (1)...(19): siRNA sense strand
gugagaagccacccaugau

SEQ ID NO: 1538882 - RNA, 19 nt, Homo sapiens
  misc_RNA (1)...(19): siRNA sense strand
ugagaagccacccaugaug

SEQ ID NO: 1538883 - RNA, 19 nt, Homo sapiens
  misc_RNA (1)...(19): siRNA sense strand
gcccagaucucagccuaac

SEQ ID NO: 1538884 - RNA, 19 nt, Homo sapiens
  misc_RNA (1)...(19): siRNA sense strand
aagccucagugcaggauga

SEQ ID NO: 1538885 - RNA, 19 nt, Homo sapiens
  misc_RNA (1)...(19): siRNA sense strand
gcuggaaggcaccgaggaa

SEQ ID NO: 1538886 - RNA, 19 nt, Homo sapiens
  misc_RNA (1)...(19): siRNA sense strand
ucccacaaguguccaggaa

SEQ ID NO: 1538887 - RNA, 19 nt, Homo sapiens
  misc_RNA (1)...(19): siRNA sense strand
ucacaccuaccaagaagau

SEQ ID NO: 1538888 - RNA, 19 nt, Homo sapiens
  misc_RNA (1)...(19): siRNA sense strand
ucaagucuuuccgggagaa

SEQ ID NO: 1538889 - RNA, 19 nt, Homo sapiens
  misc_RNA (1)...(19): siRNA sense strand
acaccuaccaagaagauug

SEQ ID NO: 1538890 - RNA, 19 nt, Homo sapiens
  misc_RNA (1)...(19): siRNA sense strand
caacggcuuggacccugua

SEQ ID NO: 1538891 - RNA, 19 nt, Homo sapiens
  misc_RNA (1)...(19): siRNA sense strand
aagucaaccuggaggaaau

SEQ ID NO: 1538892 - RNA, 19 nt, Homo sapiens
  misc_RNA (1)...(19): siRNA sense strand
aaacccaaggccaauggua

SEQ ID NO: 1538893 - RNA, 19 nt, Homo sapiens
  misc_RNA (1)...(19): siRNA sense strand
ccucuucaccucccucaga

SEQ ID NO: 1538894 - RNA, 19 nt, Homo sapiens
  misc_RNA (1)...(19): siRNA sense strand
uauccugggccuucacuga

SEQ ID NO: 1538895 - RNA, 19 nt, Homo sapiens
  misc_RNA (1)...(19): siRNA sense strand
ccauggcaguggagcuuca

SEQ ID NO: 1538896 - RNA, 19 nt, Homo sapiens
  misc_RNA (1)...(19): siRNA sense strand
aaacgggagcuccauccaa

SEQ ID NO: 1538897 - RNA, 19 nt, Homo sapiens
  misc_RNA (1)...(19): siRNA sense strand
ccagcaauaccucccauag

SEQ ID NO: 1538898 - RNA, 19 nt, Homo sapiens
  misc_RNA (1)...(19): siRNA sense strand
cgaggaacugugcugugua

SEQ ID NO: 1538899 - RNA, 19 nt, Homo sapiens
  misc_RNA (1)...(19): siRNA sense strand
gaaacgggagcuccaucca

SEQ ID NO: 1538900 - RNA, 19 nt, Homo sapiens
  misc_RNA (1)...(19): siRNA sense strand
ccagagccagcaucaguca

SEQ ID NO: 1538901 - RNA, 19 nt, Homo sapiens
  misc_RNA (1)...(19): siRNA sense strand
gaaggcaccgaggaacugu

SEQ ID NO: 1538902 - RNA, 19 nt, Homo sapiens
  misc_RNA (1)...(19): siRNA sense strand
agugagaagccacccauga

SEQ ID NO: 1538903 - RNA, 19 nt, Homo sapiens
  misc_RNA (1)...(19): siRNA sense strand
aacccaaggccaaugguaa

SEQ ID NO: 1538904 - RNA, 19 nt, Homo sapiens
  misc_RNA (1)...(19): siRNA sense strand
ucucugguguuuccaaggu

SEQ ID NO: 1538905 - RNA, 19 nt, Homo sapiens
  misc_RNA (1)...(19): siRNA sense strand
aagcgcagcacucucauca

SEQ ID NO: 1538906 - RNA, 19 nt, Homo sapiens
  misc_RNA (1)...(19): siRNA sense strand
agguggaggugaccgagaa

SEQ ID NO: 1538907 - RNA, 19 nt, Homo sapiens
  misc_RNA (1)...(19): siRNA sense strand
cguauagacggcaaauuag

SEQ ID NO: 1538908 - RNA, 19 nt, Homo sapiens
  misc_RNA (1)...(19): siRNA sense strand
aaucugagcauaccauggu

SEQ ID NO: 1538909 - RNA, 19 nt, Homo sapiens
  misc_RNA (1)...(19): siRNA sense strand
ggaacugugcuguguagcu

SEQ ID NO: 1538910 - RNA, 19 nt, Homo sapiens
  misc_RNA (1)...(19): siRNA sense strand
cagcggcacuaagcucauc

SEQ ID NO: 1538911 - RNA, 19 nt, Homo sapiens
  misc_RNA (1)...(19): siRNA sense strand
ucucuagucccacaagugu

SEQ ID NO: 1538912 - RNA, 19 nt, Homo sapiens
  misc_RNA (1)...(19): siRNA sense strand
ccucgcugcucacgguguu

SEQ ID NO: 1538913 - RNA, 19 nt, Homo sapiens
  misc_RNA (1)...(19): siRNA sense strand
gaacagugcuacaaaucaa

SEQ ID NO: 1538914 - RNA, 19 nt, Homo sapiens
  misc_RNA (1)...(19): siRNA sense strand
caacauaucacuauuggaa

SEQ ID NO: 1538915 - RNA, 19 nt, Homo sapiens
  misc_RNA (1)...(19): siRNA sense strand
ggaaggaggugauguucug

SEQ ID NO: 1538916 - RNA, 19 nt, Homo sapiens
  misc_RNA (1)...(19): siRNA sense strand
gauauacucuucgagaauu

SEQ ID NO: 1538917 - RNA, 19 nt, Homo sapiens
  misc_RNA (1)...(19): siRNA sense strand
gaagaagaaccauacuauu

SEQ ID NO: 1538918 - RNA, 19 nt, Homo sapiens
  misc_RNA (1)...(19): siRNA sense strand
ucacagagacgacaagaaa

SEQ ID NO: 1538919 - RNA, 19 nt, Homo sapiens
  misc_RNA (1)...(19): siRNA sense strand
ggaagauugugcccaaguu

SEQ ID NO: 1538920 - RNA, 19 nt, Homo sapiens
  misc_RNA (1)...(19): siRNA sense strand
ugaagaauggcaagaaaua

SEQ ID NO: 1538921 - RNA, 19 nt, Homo sapiens
  misc_RNA (1)...(19): siRNA sense strand
gaggugauguucugauuag

SEQ ID NO: 1538922 - RNA, 19 nt, Homo sapiens
  misc_RNA (1)...(19): siRNA sense strand
ggguaaagcccaacuggua

SEQ ID NO: 1538923 - RNA, 19 nt, Homo sapiens
  misc_RNA (1)...(19): siRNA sense strand
ggauaauggugaagcaaga

SEQ ID NO: 1538924 - RNA, 19 nt, Homo sapiens
  misc_RNA (1)...(19): siRNA sense strand
guaacaagcacaccaaaga

SEQ ID NO: 1538925 - RNA, 19 nt, Homo sapiens
  misc_RNA (1)...(19): siRNA sense strand
ggcagaaggugaagaggaa

SEQ ID NO: 1538926 - RNA, 19 nt, Homo sapiens
  misc_RNA (1)...(19): siRNA sense strand
gccaauguguuaggauaua

SEQ ID NO: 1538927 - RNA, 19 nt, Homo sapiens
  misc_RNA (1)...(19): siRNA sense strand
gaggccaaauucccaguaa

SEQ ID NO: 1538928 - RNA, 19 nt, Homo sapiens
  misc_RNA (1)...(19): siRNA sense strand
ggaggugauguucugauua

SEQ ID NO: 1538929 - RNA, 19 nt, Homo sapiens
  misc_RNA (1)...(19): siRNA sense strand
gagacuggcauggauauaa

SEQ ID NO: 1538930 - RNA, 19 nt, Homo sapiens
  misc_RNA (1)...(19): siRNA sense strand
gaagaauggcaagaaauau

SEQ ID NO: 1538931 - RNA, 19 nt, Homo sapiens
  misc_RNA (1)...(19): siRNA sense strand
ggaacagugcuacaaauca

SEQ ID NO: 1538932 - RNA, 19 nt, Homo sapiens
  misc_RNA (1)...(19): siRNA sense strand
uaacaagcacaccaaagaa

SEQ ID NO: 1538933 - RNA, 19 nt, Homo sapiens
  misc_RNA (1)...(19): siRNA sense strand
gcaaggagaccaauaucca

SEQ ID NO: 1538934 - RNA, 19 nt, Homo sapiens
  misc_RNA (1)...(19): siRNA sense strand
ccugaagaauggcaagaaa

SEQ ID NO: 1538935 - RNA, 19 nt, Homo sapiens
  misc_RNA (1)...(19): siRNA sense strand
aagcagugaugauaaugaa

SEQ ID NO: 1538936 - RNA, 19 nt, Homo sapiens
  misc_RNA (1)...(19): siRNA sense strand
gaagauugugcccaaguug

SEQ ID NO: 1538937 - RNA, 19 nt, Homo sapiens
  misc_RNA (1)...(19): siRNA sense strand
aaauugagcuggcaaaaga

SEQ ID NO: 1538938 - RNA, 19 nt, Homo sapiens
  misc_RNA (1)...(19): siRNA sense strand
agaagaagaaccauacuau

SEQ ID NO: 1538939 - RNA, 19 nt, Homo sapiens
  misc_RNA (1)...(19): siRNA sense strand
gauauaagaagaagaacca

SEQ ID NO: 1538940 - RNA, 19 nt, Homo sapiens
  misc_RNA (1)...(19): siRNA sense strand
ggauauacucuucgagaau

SEQ ID NO: 1538941 - RNA, 19 nt, Homo sapiens
  misc_RNA (1)...(19): siRNA sense strand
gaaagcucuuccuccucua

SEQ ID NO: 1538942 - RNA, 19 nt, Homo sapiens
  misc_RNA (1)...(19): siRNA sense strand
uggcauggauauaagaaga

SEQ ID NO: 1538943 - RNA, 19 nt, Homo sapiens
  misc_RNA (1)...(19): siRNA sense strand
cacaagcagugaugauaau

SEQ ID NO: 1538944 - RNA, 19 nt, Homo sapiens
  misc_RNA (1)...(19): siRNA sense strand
gugauguucugauuagugu

SEQ ID NO: 1538945 - RNA, 19 nt, Homo sapiens
  misc_RNA (1)...(19): siRNA sense strand
aagcccaacugguaucaaa

SEQ ID NO: 1538946 - RNA, 19 nt, Homo sapiens
  misc_RNA (1)...(19): siRNA sense strand
agaagaaccauacuauuag

SEQ ID NO: 1538947 - RNA, 19 nt, Homo sapiens
  misc_RNA (1)...(19): siRNA sense strand
gguaaagcccaacugguau

SEQ ID NO: 1538948 - RNA, 19 nt, Homo sapiens
  misc_RNA (1)...(19): siRNA sense strand
gauguucugauuaguguug

SEQ ID NO: 1538949 - RNA, 19 nt, Homo sapiens
  misc_RNA (1)...(19): siRNA sense strand
caagcagugaugauaauga

SEQ ID NO: 1538950 - RNA, 19 nt, Homo sapiens
  misc_RNA (1)...(19): siRNA sense strand
ugcuacaaaucaagguuua

SEQ ID NO: 1538951 - RNA, 19 nt, Homo sapiens
  misc_RNA (1)...(19): siRNA sense strand
gaagcaagacaaugaaagc

SEQ ID NO: 1538952 - RNA, 19 nt, Homo sapiens
  misc_RNA (1)...(19): siRNA sense strand
aaucaagguuuaccgagau

SEQ ID NO: 1538953 - RNA, 19 nt, Homo sapiens
  misc_RNA (1)...(19): siRNA sense strand
acauaucacuauuggaaca

SEQ ID NO: 1538954 - RNA, 19 nt, Homo sapiens
  misc_RNA (1)...(19): siRNA sense strand
gaagaggaaggaggugaug

SEQ ID NO: 1538955 - RNA, 19 nt, Homo sapiens
  misc_RNA (1)...(19): siRNA sense strand
cauacuggauaauggugaa

SEQ ID NO: 1538956 - RNA, 19 nt, Homo sapiens
  misc_RNA (1)...(19): siRNA sense strand
acagagacgacaagaaaga

SEQ ID NO: 1538957 - RNA, 19 nt, Homo sapiens
  misc_RNA (1)...(19): siRNA sense strand
gcauggauauaagaagaag

SEQ ID NO: 1538958 - RNA, 19 nt, Homo sapiens
  misc_RNA (1)...(19): siRNA sense strand
agacuggcauggauauaag

SEQ ID NO: 1538959 - RNA, 19 nt, Homo sapiens
  misc_RNA (1)...(19): siRNA sense strand
guuaggauauacucuucga

SEQ ID NO: 1538960 - RNA, 19 nt, Homo sapiens
  misc_RNA (1)...(19): siRNA sense strand
ggaaaagacauuaauugug

SEQ ID NO: 1538961 - RNA, 19 nt, Homo sapiens
  misc_RNA (1)...(19): siRNA sense strand
uuacagcuuuugcaacaua

SEQ ID NO: 1538962 - RNA, 19 nt, Homo sapiens
  misc_RNA (1)...(19): siRNA sense strand
gaauggcaagaaauauaug

SEQ ID NO: 1538963 - RNA, 19 nt, Homo sapiens
  misc_RNA (1)...(19): siRNA sense strand
aagaagaagaaccauacua

SEQ ID NO: 1538964 - RNA, 19 nt, Homo sapiens
  misc_RNA (1)...(19): siRNA sense strand
ggccaaauucccaguaaca

SEQ ID NO: 1538965 - RNA, 19 nt, Homo sapiens
  misc_RNA (1)...(19): siRNA sense strand
aggauauacucuucgagaa

SEQ ID NO: 1538966 - RNA, 19 nt, Homo sapiens
  misc_RNA (1)...(19): siRNA sense strand
aggaggugauguucugauu

SEQ ID NO: 1538967 - RNA, 19 nt, Homo sapiens
  misc_RNA (1)...(19): siRNA sense strand
gcagugaugauaaugaaaa

SEQ ID NO: 1538968 - RNA, 19 nt, Homo sapiens
  misc_RNA (1)...(19): siRNA sense strand
augccaauguguuaggaua

SEQ ID NO: 1538969 - RNA, 19 nt, Homo sapiens
  misc_RNA (1)...(19): siRNA sense strand
cauuaauugugacgugaug

SEQ ID NO: 1538970 - RNA, 19 nt, Homo sapiens
  misc_RNA (1)...(19): siRNA sense strand
uuuaaucccugaggccaaa

SEQ ID NO: 1538971 - RNA, 19 nt, Homo sapiens
  misc_RNA (1)...(19): siRNA sense strand
guguuaggauauacucuuc

SEQ ID NO: 1538972 - RNA, 19 nt, Homo sapiens
  misc_RNA (1)...(19): siRNA sense strand
ggugauguucugauuagug

SEQ ID NO: 1538973 - RNA, 19 nt, Homo sapiens
  misc_RNA (1)...(19): siRNA sense strand
cauuuuggcuggaagauug

SEQ ID NO: 1538974 - RNA, 19 nt, Homo sapiens
  misc_RNA (1)...(19): siRNA sense strand
ggugaagcaagacaaugaa

SEQ ID NO: 1538975 - RNA, 19 nt, Homo sapiens
  misc_RNA (1)...(19): siRNA sense strand
gaaggaggugauguucuga

SEQ ID NO: 1538976 - RNA, 19 nt, Homo sapiens
  misc_RNA (1)...(19): siRNA sense strand
gugcuacaaaucaagguuu

SEQ ID NO: 1538977 - RNA, 19 nt, Homo sapiens
  misc_RNA (1)...(19): siRNA sense strand
guaaagcccaacugguauc

SEQ ID NO: 1538978 - RNA, 19 nt, Homo sapiens
  misc_RNA (1)...(19): siRNA sense strand
aacaagcacaccaaagaaa

SEQ ID NO: 1538979 - RNA, 19 nt, Homo sapiens
  misc_RNA (1)...(19): siRNA sense strand
ccaaauucccaguaacaag

SEQ ID NO: 1538980 - RNA, 19 nt, Homo sapiens
  misc_RNA (1)...(19): siRNA sense strand
gaaaauugagcuggcaaaa

SEQ ID NO: 1538981 - RNA, 19 nt, Homo sapiens
  misc_RNA (1)...(19): siRNA sense strand
gaggaaggaggugauguuc

SEQ ID NO: 1538982 - RNA, 19 nt, Homo sapiens
  misc_RNA (1)...(19): siRNA sense strand
gugaagcaagacaaugaaa

SEQ ID NO: 1538983 - RNA, 19 nt, Homo sapiens
  misc_RNA (1)...(19): siRNA sense strand
gagacgacaagaaagaagu

SEQ ID NO: 1538984 - RNA, 19 nt, Homo sapiens
  misc_RNA (1)...(19): siRNA sense strand
agauauccguggucaacug

SEQ ID NO: 1538985 - RNA, 19 nt, Homo sapiens
  misc_RNA (1)...(19): siRNA sense strand
ugcaacauaucacuauugg

SEQ ID NO: 1538986 - RNA, 19 nt, Homo sapiens
  misc_RNA (1)...(19): siRNA sense strand
agaggaaggaggugauguu

SEQ ID NO: 1538987 - RNA, 19 nt, Homo sapiens
  misc_RNA (1)...(19): siRNA sense strand
ccaguaacaagcacaccaa

SEQ ID NO: 1538988 - RNA, 19 nt, Homo sapiens
  misc_RNA (1)...(19): siRNA sense strand
caaggagaccaauauccau

SEQ ID NO: 1538989 - RNA, 19 nt, Homo sapiens
  misc_RNA (1)...(19): siRNA sense strand
gcacaccaaagaaaauuga

SEQ ID NO: 1538990 - RNA, 19 nt, Homo sapiens
  misc_RNA (1)...(19): siRNA sense strand
uuggaacagugcuacaaau

SEQ ID NO: 1538991 - RNA, 19 nt, Homo sapiens
  misc_RNA (1)...(19): siRNA sense strand
uggugaagcaagacaauga

SEQ ID NO: 1538992 - RNA, 19 nt, Homo sapiens
  misc_RNA (1)...(19): siRNA sense strand
cagagacgacaagaaagaa

SEQ ID NO: 1538993 - RNA, 19 nt, Homo sapiens
  misc_RNA (1)...(19): siRNA sense strand
auaagaagaagaaccauac

SEQ ID NO: 1538994 - RNA, 19 nt, Homo sapiens
  misc_RNA (1)...(19): siRNA sense strand
cagagacuggcauggauau

SEQ ID NO: 1538995 - RNA, 19 nt, Homo sapiens
  misc_RNA (1)...(19): siRNA sense strand
ccaauguguuaggauauac

SEQ ID NO: 1538996 - RNA, 19 nt, Homo sapiens
  misc_RNA (1)...(19): siRNA sense strand
gauauccguggucaacugu

SEQ ID NO: 1538997 - RNA, 19 nt, Homo sapiens
  misc_RNA (1)...(19): siRNA sense strand
ccaacugguaucaaagguu

SEQ ID NO: 1538998 - RNA, 19 nt, Homo sapiens
  misc_RNA (1)...(19): siRNA sense strand
gccaaauucccaguaacaa

SEQ ID NO: 1538999 - RNA, 19 nt, Homo sapiens
  misc_RNA (1)...(19): siRNA sense strand
auugugacgugaugauuca

SEQ ID NO: 1539000 - RNA, 19 nt, Homo sapiens
  misc_RNA (1)...(19): siRNA sense strand
ccugcaaggagaccaauau

SEQ ID NO: 1539001 - RNA, 19 nt, Homo sapiens
  misc_RNA (1)...(19): siRNA sense strand
gauauucucuguuaugguu

SEQ ID NO: 1539002 - RNA, 19 nt, Homo sapiens
  misc_RNA (1)...(19): siRNA sense strand
caaaguaaguggcuucaug

SEQ ID NO: 1539003 - RNA, 19 nt, Homo sapiens
  misc_RNA (1)...(19): siRNA sense strand
gaagauggaaagcaaagua

SEQ ID NO: 1539004 - RNA, 19 nt, Homo sapiens
  misc_RNA (1)...(19): siRNA sense strand
ugaagaagauggaaagcaa

SEQ ID NO: 1539005 - RNA, 19 nt, Homo sapiens
  misc_RNA (1)...(19): siRNA sense strand
gcaguuagaugguguuugc

SEQ ID NO: 1539006 - RNA, 19 nt, Homo sapiens
  misc_RNA (1)...(19): siRNA sense strand
uaugguucgucaugaauua

SEQ ID NO: 1539007 - RNA, 19 nt, Homo sapiens
  misc_RNA (1)...(19): siRNA sense strand
gcaccacaguuguuucuag

SEQ ID NO: 1539008 - RNA, 19 nt, Homo sapiens
  misc_RNA (1)...(19): siRNA sense strand
gaaccgagguacuacuuuu

SEQ ID NO: 1539009 - RNA, 19 nt, Homo sapiens
  misc_RNA (1)...(19): siRNA sense strand
gucagucacuuucuauauu

SEQ ID NO: 1539010 - RNA, 19 nt, Homo sapiens
  misc_RNA (1)...(19): siRNA sense strand
caugaaggccauaaacuuu

SEQ ID NO: 1539011 - RNA, 19 nt, Homo sapiens
  misc_RNA (1)...(19): siRNA sense strand
gaaggccuacagacacuua

SEQ ID NO: 1539012 - RNA, 19 nt, Homo sapiens
  misc_RNA (1)...(19): siRNA sense strand
uggaacuucuggaguguua

SEQ ID NO: 1539013 - RNA, 19 nt, Homo sapiens
  misc_RNA (1)...(19): siRNA sense strand
caccagcgcuuucccucua

SEQ ID NO: 1539014 - RNA, 19 nt, Homo sapiens
  misc_RNA (1)...(19): siRNA sense strand
cagaaaaccuggaggaauu

SEQ ID NO: 1539015 - RNA, 19 nt, Homo sapiens
  misc_RNA (1)...(19): siRNA sense strand
uagaugguguuugcaauuu

SEQ ID NO: 1539016 - RNA, 19 nt, Homo sapiens
  misc_RNA (1)...(19): siRNA sense strand
ucauaaacgugcugaguca

SEQ ID NO: 1539017 - RNA, 19 nt, Homo sapiens
  misc_RNA (1)...(19): siRNA sense strand
acacuuaggucauuacaac

SEQ ID NO: 1539018 - RNA, 19 nt, Homo sapiens
  misc_RNA (1)...(19): siRNA sense strand
gaagaagauggaaagcaaa

SEQ ID NO: 1539019 - RNA, 19 nt, Homo sapiens
  misc_RNA (1)...(19): siRNA sense strand
gcagcuccguucauuaagu

SEQ ID NO: 1539020 - RNA, 19 nt, Homo sapiens
  misc_RNA (1)...(19): siRNA sense strand
cggcagcuccguucauuaa

SEQ ID NO: 1539021 - RNA, 19 nt, Homo sapiens
  misc_RNA (1)...(19): siRNA sense strand
gaugguguuugcaauuuua

SEQ ID NO: 1539022 - RNA, 19 nt, Homo sapiens
  misc_RNA (1)...(19): siRNA sense strand
gcauccaaauguacuucaa

SEQ ID NO: 1539023 - RNA, 19 nt, Homo sapiens
  misc_RNA (1)...(19): siRNA sense strand
ccacagcaccacaguuguu

SEQ ID NO: 1539024 - RNA, 19 nt, Homo sapiens
  misc_RNA (1)...(19): siRNA sense strand
gagaaccgagguacuacuu

SEQ ID NO: 1539025 - RNA, 19 nt, Homo sapiens
  misc_RNA (1)...(19): siRNA sense strand
aaaguaaguggcuucauga

SEQ ID NO: 1539026 - RNA, 19 nt, Homo sapiens
  misc_RNA (1)...(19): siRNA sense strand
acagacacuuaggucauua

SEQ ID NO: 1539027 - RNA, 19 nt, Homo sapiens
  misc_RNA (1)...(19): siRNA sense strand
caaaagcggagcaaaauga

SEQ ID NO: 1539028 - RNA, 19 nt, Homo sapiens
  misc_RNA (1)...(19): siRNA sense strand
cagaaauaccggcagauau

SEQ ID NO: 1539029 - RNA, 19 nt, Homo sapiens
  misc_RNA (1)...(19): siRNA sense strand
acagaaauaccggcagaua

SEQ ID NO: 1539030 - RNA, 19 nt, Homo sapiens
  misc_RNA (1)...(19): siRNA sense strand
ggauaucgucaccaucuga

SEQ ID NO: 1539031 - RNA, 19 nt, Homo sapiens
  misc_RNA (1)...(19): siRNA sense strand
ugaaaugcauggagaucuc

SEQ ID NO: 1539032 - RNA, 19 nt, Homo sapiens
  misc_RNA (1)...(19): siRNA sense strand
gagcgaggacugcauccaa

SEQ ID NO: 1539033 - RNA, 19 nt, Homo sapiens
  misc_RNA (1)...(19): siRNA sense strand
aaaauugcgugacugagua

SEQ ID NO: 1539034 - RNA, 19 nt, Homo sapiens
  misc_RNA (1)...(19): siRNA sense strand
gcacaguugcaguuagaug

SEQ ID NO: 1539035 - RNA, 19 nt, Homo sapiens
  misc_RNA (1)...(19): siRNA sense strand
aaagaaaggaagagcaguu

SEQ ID NO: 1539036 - RNA, 19 nt, Homo sapiens
  misc_RNA (1)...(19): siRNA sense strand
uacagacacuuaggucauu

SEQ ID NO: 1539037 - RNA, 19 nt, Homo sapiens
  misc_RNA (1)...(19): siRNA sense strand
gaacuucuggaguguuauc

SEQ ID NO: 1539038 - RNA, 19 nt, Homo sapiens
  misc_RNA (1)...(19): siRNA sense strand
cagccuuucccaaaucaua

SEQ ID NO: 1539039 - RNA, 19 nt, Homo sapiens
  misc_RNA (1)...(19): siRNA sense strand
gauggaaagcaaaguaagu

SEQ ID NO: 1539040 - RNA, 19 nt, Homo sapiens
  misc_RNA (1)...(19): siRNA sense strand
gagcugaugcuggaacuuc

SEQ ID NO: 1539041 - RNA, 19 nt, Homo sapiens
  misc_RNA (1)...(19): siRNA sense strand
gcccguuucucuuuaccuu

SEQ ID NO: 1539042 - RNA, 19 nt, Homo sapiens
  misc_RNA (1)...(19): siRNA sense strand
guuagaugguguuugcaau

SEQ ID NO: 1539043 - RNA, 19 nt, Homo sapiens
  misc_RNA (1)...(19): siRNA sense strand
ccaaaggagaaccgaggua

SEQ ID NO: 1539044 - RNA, 19 nt, Homo sapiens
  misc_RNA (1)...(19): siRNA sense strand
gaggacugcauccaaaugu

SEQ ID NO: 1539045 - RNA, 19 nt, Homo sapiens
  misc_RNA (1)...(19): siRNA sense strand
guacaugaaggccauaaac

SEQ ID NO: 1539046 - RNA, 19 nt, Homo sapiens
  misc_RNA (1)...(19): siRNA sense strand
guccacagcaccacaguug

SEQ ID NO: 1539047 - RNA, 19 nt, Homo sapiens
  misc_RNA (1)...(19): siRNA sense strand
guccgugguuggcacauug

SEQ ID NO: 1539048 - RNA, 19 nt, Homo sapiens
  misc_RNA (1)...(19): siRNA sense strand
ggacugcauccaaauguac

SEQ ID NO: 1539049 - RNA, 19 nt, Homo sapiens
  misc_RNA (1)...(19): siRNA sense strand
gcacauugccgucuuuccu

SEQ ID NO: 1539050 - RNA, 19 nt, Homo sapiens
  misc_RNA (1)...(19): siRNA sense strand
aaggagaaccgagguacua

SEQ ID NO: 1539051 - RNA, 19 nt, Homo sapiens
  misc_RNA (1)...(19): siRNA sense strand
uccauuagccugucaguca

SEQ ID NO: 1539052 - RNA, 19 nt, Homo sapiens
  misc_RNA (1)...(19): siRNA sense strand
ugaauuaauggacgaacuu

SEQ ID NO: 1539053 - RNA, 19 nt, Homo sapiens
  misc_RNA (1)...(19): siRNA sense strand
gaaaauugcgugacugagu

SEQ ID NO: 1539054 - RNA, 19 nt, Homo sapiens
  misc_RNA (1)...(19): siRNA sense strand
ccucaagccuggauaucgu

SEQ ID NO: 1539055 - RNA, 19 nt, Homo sapiens
  misc_RNA (1)...(19): siRNA sense strand
caccugcccguuucucuuu

SEQ ID NO: 1539056 - RNA, 19 nt, Homo sapiens
  misc_RNA (1)...(19): siRNA sense strand
gaaaggaagagcaguucac

SEQ ID NO: 1539057 - RNA, 19 nt, Homo sapiens
  misc_RNA (1)...(19): siRNA sense strand
ugaggaaggccuacagaca

SEQ ID NO: 1539058 - RNA, 19 nt, Homo sapiens
  misc_RNA (1)...(19): siRNA sense strand
acaugaaggccauaaacuu

SEQ ID NO: 1539059 - RNA, 19 nt, Homo sapiens
  misc_RNA (1)...(19): siRNA sense strand
cagcuccguucauuaaguc

SEQ ID NO: 1539060 - RNA, 19 nt, Homo sapiens
  misc_RNA (1)...(19): siRNA sense strand
aaaccuggaggaauuugaa

SEQ ID NO: 1539061 - RNA, 19 nt, Homo sapiens
  misc_RNA (1)...(19): siRNA sense strand
agacugaggaggaagacaa

SEQ ID NO: 1539062 - RNA, 19 nt, Homo sapiens
  misc_RNA (1)...(19): siRNA sense strand
aagauggaaagcaaaguaa

SEQ ID NO: 1539063 - RNA, 19 nt, Homo sapiens
  misc_RNA (1)...(19): siRNA sense strand
aggacugcauccaaaugua

SEQ ID NO: 1539064 - RNA, 19 nt, Homo sapiens
  misc_RNA (1)...(19): siRNA sense strand
gccugucagucacuuucua

SEQ ID NO: 1539065 - RNA, 19 nt, Homo sapiens
  misc_RNA (1)...(19): siRNA sense strand
uguuaugguucgucaugaa

SEQ ID NO: 1539066 - RNA, 19 nt, Homo sapiens
  misc_RNA (1)...(19): siRNA sense strand
ccguuucucuuuaccuuuc

SEQ ID NO: 1539067 - RNA, 19 nt, Homo sapiens
  misc_RNA (1)...(19): siRNA sense strand
gaccugaagaagauggaaa

SEQ ID NO: 1539068 - RNA, 19 nt, Homo sapiens
  misc_RNA (1)...(19): siRNA sense strand
gcuggaacuucuggagugu

SEQ ID NO: 1539069 - RNA, 19 nt, Homo sapiens
  misc_RNA (1)...(19): siRNA sense strand
uuagaugguguuugcaauu

SEQ ID NO: 1539070 - RNA, 19 nt, Homo sapiens
  misc_RNA (1)...(19): siRNA sense strand
gguccgugguuggcacauu

SEQ ID NO: 1539071 - RNA, 19 nt, Homo sapiens
  misc_RNA (1)...(19): siRNA sense strand
ugucagucacuuucuauau

SEQ ID NO: 1539072 - RNA, 19 nt, Homo sapiens
  misc_RNA (1)...(19): siRNA sense strand
gaauuaauggacgaacuuc

SEQ ID NO: 1539073 - RNA, 19 nt, Homo sapiens
  misc_RNA (1)...(19): siRNA sense strand
gguucgucaugaauuaaug

SEQ ID NO: 1539074 - RNA, 19 nt, Homo sapiens
  misc_RNA (1)...(19): siRNA sense strand
gugcagggcccagaugugu

SEQ ID NO: 1539075 - RNA, 19 nt, Homo sapiens
  misc_RNA (1)...(19): siRNA sense strand
ggacaaaaggcaaagaaag

SEQ ID NO: 1539076 - RNA, 19 nt, Homo sapiens
  misc_RNA (1)...(19): siRNA sense strand
ugaaggccauaaacuuugc

SEQ ID NO: 1539077 - RNA, 19 nt, Homo sapiens
  misc_RNA (1)...(19): siRNA sense strand
agcgaggacugcauccaaa

SEQ ID NO: 1539078 - RNA, 19 nt, Homo sapiens
  misc_RNA (1)...(19): siRNA sense strand
cacauugccgucuuuccua

SEQ ID NO: 1539079 - RNA, 19 nt, Homo sapiens
  misc_RNA (1)...(19): siRNA sense strand
agucucacgugccacagaa

SEQ ID NO: 1539080 - RNA, 19 nt, Homo sapiens
  misc_RNA (1)...(19): siRNA sense strand
cuacagacacuuaggucau

SEQ ID NO: 1539081 - RNA, 19 nt, Homo sapiens
  misc_RNA (1)...(19): siRNA sense strand
caucugauccccagccuuu

SEQ ID NO: 1539082 - RNA, 19 nt, Homo sapiens
  misc_RNA (1)...(19): siRNA sense strand
cgaggacugcauccaaaug

SEQ ID NO: 1539083 - RNA, 19 nt, Homo sapiens
  misc_RNA (1)...(19): siRNA sense strand
uuuaccaggugacaucaau

SEQ ID NO: 1539084 - RNA, 19 nt, Homo sapiens
  misc_RNA (1)...(19): siRNA sense strand
ucuggaguguuaucugcaa

SEQ ID NO: 1539085 - RNA, 19 nt, Homo sapiens
  misc_RNA (1)...(19): siRNA sense strand
gauaucgucaccaucugau

SEQ ID NO: 1539086 - RNA, 19 nt, Homo sapiens
  misc_RNA (1)...(19): siRNA sense strand
gcgaggacugcauccaaau

SEQ ID NO: 1539087 - RNA, 19 nt, Homo sapiens
  misc_RNA (1)...(19): siRNA sense strand
cgucuuuccuaccuguguu

SEQ ID NO: 1539088 - RNA, 19 nt, Homo sapiens
  misc_RNA (1)...(19): siRNA sense strand
gcgcuuucccucuaucagu

SEQ ID NO: 1539089 - RNA, 19 nt, Homo sapiens
  misc_RNA (1)...(19): siRNA sense strand
uuacaaccaccagcgcuuu

SEQ ID NO: 1539090 - RNA, 19 nt, Homo sapiens
  misc_RNA (1)...(19): siRNA sense strand
ugauuuaccaggugacauc

SEQ ID NO: 1539091 - RNA, 19 nt, Homo sapiens
  misc_RNA (1)...(19): siRNA sense strand
gcacaacuauugagagauu

SEQ ID NO: 1539092 - RNA, 19 nt, Homo sapiens
  misc_RNA (1)...(19): siRNA sense strand
uaaagcaacuccaugaaga

SEQ ID NO: 1539093 - RNA, 19 nt, Homo sapiens
  misc_RNA (1)...(19): siRNA sense strand
gaaacaggcuaaucuugca

SEQ ID NO: 1539094 - RNA, 19 nt, Homo sapiens
  misc_RNA (1)...(19): siRNA sense strand
uuaaagaacuucagcaaag

SEQ ID NO: 1539095 - RNA, 19 nt, Homo sapiens
  misc_RNA (1)...(19): siRNA sense strand
ggaaacaauccacgagaaa

SEQ ID NO: 1539096 - RNA, 19 nt, Homo sapiens
  misc_RNA (1)...(19): siRNA sense strand
gcaaaggcuuggagaaguc

SEQ ID NO: 1539097 - RNA, 19 nt, Homo sapiens
  misc_RNA (1)...(19): siRNA sense strand
gaaaucaaacauugccaaa

SEQ ID NO: 1539098 - RNA, 19 nt, Homo sapiens
  misc_RNA (1)...(19): siRNA sense strand
ggaugacgauugccaaaca

SEQ ID NO: 1539099 - RNA, 19 nt, Homo sapiens
  misc_RNA (1)...(19): siRNA sense strand
gagaacagguaccuucaag

SEQ ID NO: 1539100 - RNA, 19 nt, Homo sapiens
  misc_RNA (1)...(19): siRNA sense strand
gaacagguaccuucaagag

SEQ ID NO: 1539101 - RNA, 19 nt, Homo sapiens
  misc_RNA (1)...(19): siRNA sense strand
gauuaaagcaacuccauga

SEQ ID NO: 1539102 - RNA, 19 nt, Homo sapiens
  misc_RNA (1)...(19): siRNA sense strand
gcacgagaaccgcaucauu

SEQ ID NO: 1539103 - RNA, 19 nt, Homo sapiens
  misc_RNA (1)...(19): siRNA sense strand
caaagcaaguucaggaucu

SEQ ID NO: 1539104 - RNA, 19 nt, Homo sapiens
  misc_RNA (1)...(19): siRNA sense strand
gagcuaaggaacagauuga

SEQ ID NO: 1539105 - RNA, 19 nt, Homo sapiens
  misc_RNA (1)...(19): siRNA sense strand
ggaccgaaauaaacaucug

SEQ ID NO: 1539106 - RNA, 19 nt, Homo sapiens
  misc_RNA (1)...(19): siRNA sense strand
gggagaagaaauuaaagaa

SEQ ID NO: 1539107 - RNA, 19 nt, Homo sapiens
  misc_RNA (1)...(19): siRNA sense strand
ggaugcagccucccagcua

SEQ ID NO: 1539108 - RNA, 19 nt, Homo sapiens
  misc_RNA (1)...(19): siRNA sense strand
accaggagcugaaccauau

SEQ ID NO: 1539109 - RNA, 19 nt, Homo sapiens
  misc_RNA (1)...(19): siRNA sense strand
aaauaaacaucugggagaa

SEQ ID NO: 1539110 - RNA, 19 nt, Homo sapiens
  misc_RNA (1)...(19): siRNA sense strand
gcuucaggauguuaaagaa

SEQ ID NO: 1539111 - RNA, 19 nt, Homo sapiens
  misc_RNA (1)...(19): siRNA sense strand
gaugacgauugccaaacaa

SEQ ID NO: 1539112 - RNA, 19 nt, Homo sapiens
  misc_RNA (1)...(19): siRNA sense strand
uggacgagcuucaggaugu

SEQ ID NO: 1539113 - RNA, 19 nt, Homo sapiens
  misc_RNA (1)...(19): siRNA sense strand
auaaacaucugggagaaga

SEQ ID NO: 1539114 - RNA, 19 nt, Homo sapiens
  misc_RNA (1)...(19): siRNA sense strand
ggacgagcuucaggauguu

SEQ ID NO: 1539115 - RNA, 19 nt, Homo sapiens
  misc_RNA (1)...(19): siRNA sense strand
ccaugagcgugaagacuug

SEQ ID NO: 1539116 - RNA, 19 nt, Homo sapiens
  misc_RNA (1)...(19): siRNA sense strand
cacgagaaccgcaucauug

SEQ ID NO: 1539117 - RNA, 19 nt, Homo sapiens
  misc_RNA (1)...(19): siRNA sense strand
caucugggagaagaaauua

SEQ ID NO: 1539118 - RNA, 19 nt, Homo sapiens
  misc_RNA (1)...(19): siRNA sense strand
gcucggagacgaagcaauc

SEQ ID NO: 1539119 - RNA, 19 nt, Homo sapiens
  misc_RNA (1)...(19): siRNA sense strand
uaaagaacuucagcaaagg

SEQ ID NO: 1539120 - RNA, 19 nt, Homo sapiens
  misc_RNA (1)...(19): siRNA sense strand
ggagaacagguaccuucaa

SEQ ID NO: 1539121 - RNA, 19 nt, Homo sapiens
  misc_RNA (1)...(19): siRNA sense strand
ccugaaaucucuggcaaca

SEQ ID NO: 1539122 - RNA, 19 nt, Homo sapiens
  misc_RNA (1)...(19): siRNA sense strand
aaacauugccaaauacaag

SEQ ID NO: 1539123 - RNA, 19 nt, Homo sapiens
  misc_RNA (1)...(19): siRNA sense strand
aaaggaaacaggcuaaucu

SEQ ID NO: 1539124 - RNA, 19 nt, Homo sapiens
  misc_RNA (1)...(19): siRNA sense strand
agaggcaaaccaacaagua

SEQ ID NO: 1539125 - RNA, 19 nt, Homo sapiens
  misc_RNA (1)...(19): siRNA sense strand
uugcacaacuauugagaga

SEQ ID NO: 1539126 - RNA, 19 nt, Homo sapiens
  misc_RNA (1)...(19): siRNA sense strand
gcaaguucaggaucugcua

SEQ ID NO: 1539127 - RNA, 19 nt, Homo sapiens
  misc_RNA (1)...(19): siRNA sense strand
gaggaugacgauugccaaa

SEQ ID NO: 1539128 - RNA, 19 nt, Homo sapiens
  misc_RNA (1)...(19): siRNA sense strand
ggagaagaaauuaaagaac

SEQ ID NO: 1539129 - RNA, 19 nt, Homo sapiens
  misc_RNA (1)...(19): siRNA sense strand
ucaggauguuaaagaagaa

SEQ ID NO: 1539130 - RNA, 19 nt, Homo sapiens
  misc_RNA (1)...(19): siRNA sense strand
gaaguaccgagagcugauu

SEQ ID NO: 1539131 - RNA, 19 nt, Homo sapiens
  misc_RNA (1)...(19): siRNA sense strand
gcuaaucuugcacaacuau

SEQ ID NO: 1539132 - RNA, 19 nt, Homo sapiens
  misc_RNA (1)...(19): siRNA sense strand
aggaacagauugagucucu

SEQ ID NO: 1539133 - RNA, 19 nt, Homo sapiens
  misc_RNA (1)...(19): siRNA sense strand
gagauuaaagcaacuccau

SEQ ID NO: 1539134 - RNA, 19 nt, Homo sapiens
  misc_RNA (1)...(19): siRNA sense strand
gcugaaccauauccugagu

SEQ ID NO: 1539135 - RNA, 19 nt, Homo sapiens
  misc_RNA (1)...(19): siRNA sense strand
caaacauugccaaauacaa

SEQ ID NO: 1539136 - RNA, 19 nt, Homo sapiens
  misc_RNA (1)...(19): siRNA sense strand
gaggcaaaccaacaaguag

SEQ ID NO: 1539137 - RNA, 19 nt, Homo sapiens
  misc_RNA (1)...(19): siRNA sense strand
aaacaucugggagaagaaa

SEQ ID NO: 1539138 - RNA, 19 nt, Homo sapiens
  misc_RNA (1)...(19): siRNA sense strand
uaaucuugcacaacuauug

SEQ ID NO: 1539139 - RNA, 19 nt, Homo sapiens
  misc_RNA (1)...(19): siRNA sense strand
aggcuaaucuugcacaacu

SEQ ID NO: 1539140 - RNA, 19 nt, Homo sapiens
  misc_RNA (1)...(19): siRNA sense strand
gaaacaauccacgagaaaa

SEQ ID NO: 1539141 - RNA, 19 nt, Homo sapiens
  misc_RNA (1)...(19): siRNA sense strand
cagguaccuucaagagaga

SEQ ID NO: 1539142 - RNA, 19 nt, Homo sapiens
  misc_RNA (1)...(19): siRNA sense strand
uucaggauguuaaagaaga

SEQ ID NO: 1539143 - RNA, 19 nt, Homo sapiens
  misc_RNA (1)...(19): siRNA sense strand
ucugggagaagaaauuaaa

SEQ ID NO: 1539144 - RNA, 19 nt, Homo sapiens
  misc_RNA (1)...(19): siRNA sense strand
cagcaaaggcuuggagaag

SEQ ID NO: 1539145 - RNA, 19 nt, Homo sapiens
  misc_RNA (1)...(19): siRNA sense strand
ugacguggacgcccugugu

SEQ ID NO: 1539146 - RNA, 19 nt, Homo sapiens
  misc_RNA (1)...(19): siRNA sense strand
gcaaucggcgugcgacacu

SEQ ID NO: 1539147 - RNA, 19 nt, Homo sapiens
  misc_RNA (1)...(19): siRNA sense strand
guaccuucaagagagauua

SEQ ID NO: 1539148 - RNA, 19 nt, Homo sapiens
  misc_RNA (1)...(19): siRNA sense strand
acgagaaccgcaucauuga

SEQ ID NO: 1539149 - RNA, 19 nt, Homo sapiens
  misc_RNA (1)...(19): siRNA sense strand
gcuaaggaacagauugagu

SEQ ID NO: 1539150 - RNA, 19 nt, Homo sapiens
  misc_RNA (1)...(19): siRNA sense strand
ggcuaaucuugcacaacua

SEQ ID NO: 1539151 - RNA, 19 nt, Homo sapiens
  misc_RNA (1)...(19): siRNA sense strand
ucaagagagauuaaagcaa

SEQ ID NO: 1539152 - RNA, 19 nt, Homo sapiens
  misc_RNA (1)...(19): siRNA sense strand
gcuacuccgcaguccauuu

SEQ ID NO: 1539153 - RNA, 19 nt, Homo sapiens
  misc_RNA (1)...(19): siRNA sense strand
gcuagagcgagcuaaggaa

SEQ ID NO: 1539154 - RNA, 19 nt, Homo sapiens
  misc_RNA (1)...(19): siRNA sense strand
caccagaggcaaaccaaca

SEQ ID NO: 1539155 - RNA, 19 nt, Homo sapiens
  misc_RNA (1)...(19): siRNA sense strand
cuacuccgcaguccauuuc

SEQ ID NO: 1539156 - RNA, 19 nt, Homo sapiens
  misc_RNA (1)...(19): siRNA sense strand
uuaaagcaacuccaugaag

SEQ ID NO: 1539157 - RNA, 19 nt, Homo sapiens
  misc_RNA (1)...(19): siRNA sense strand
aaccaggagcugaaccaua

SEQ ID NO: 1539158 - RNA, 19 nt, Homo sapiens
  misc_RNA (1)...(19): siRNA sense strand
gacgagcuucaggauguua

SEQ ID NO: 1539159 - RNA, 19 nt, Homo sapiens
  misc_RNA (1)...(19): siRNA sense strand
ucucaggaccgaaauaaac

SEQ ID NO: 1539160 - RNA, 19 nt, Homo sapiens
  misc_RNA (1)...(19): siRNA sense strand
gauucucaggaccgaaaua

SEQ ID NO: 1539161 - RNA, 19 nt, Homo sapiens
  misc_RNA (1)...(19): siRNA sense strand
gacguggacgcccugugua

SEQ ID NO: 1539162 - RNA, 19 nt, Homo sapiens
  misc_RNA (1)...(19): siRNA sense strand
acaaaggcucggagacgaa

SEQ ID NO: 1539163 - RNA, 19 nt, Homo sapiens
  misc_RNA (1)...(19): siRNA sense strand
ucaaacauugccaaauaca

SEQ ID NO: 1539164 - RNA, 19 nt, Homo sapiens
  misc_RNA (1)...(19): siRNA sense strand
cccaugagcgugaagacuu

SEQ ID NO: 1539165 - RNA, 19 nt, Homo sapiens
  misc_RNA (1)...(19): siRNA sense strand
gacgauugccaaacaaagg

SEQ ID NO: 1539166 - RNA, 19 nt, Homo sapiens
  misc_RNA (1)...(19): siRNA sense strand
aguccugucugcaaagcaa

SEQ ID NO: 1539167 - RNA, 19 nt, Homo sapiens
  misc_RNA (1)...(19): siRNA sense strand
aaucuugcacaacuauuga

SEQ ID NO: 1539168 - RNA, 19 nt, Homo sapiens
  misc_RNA (1)...(19): siRNA sense strand
gagagcagcuucuguauug

SEQ ID NO: 1539169 - RNA, 19 nt, Homo sapiens
  misc_RNA (1)...(19): siRNA sense strand
gcaggaagguugaugcuuu

SEQ ID NO: 1539170 - RNA, 19 nt, Homo sapiens
  misc_RNA (1)...(19): siRNA sense strand
ggaagaugauucuggauaa

SEQ ID NO: 1539171 - RNA, 19 nt, Homo sapiens
  misc_RNA (1)...(19): siRNA sense strand
caaauugccucgucaaaga

SEQ ID NO: 1539172 - RNA, 19 nt, Homo sapiens
  misc_RNA (1)...(19): siRNA sense strand
aaacaacuguaaccagaua

SEQ ID NO: 1539173 - RNA, 19 nt, Homo sapiens
  misc_RNA (1)...(19): siRNA sense strand
gacaaaagccugaaauuua

SEQ ID NO: 1539174 - RNA, 19 nt, Homo sapiens
  misc_RNA (1)...(19): siRNA sense strand
aagcaggauuucuguauua

SEQ ID NO: 1539175 - RNA, 19 nt, Homo sapiens
  misc_RNA (1)...(19): siRNA sense strand
gggauuggauuauauugaa

SEQ ID NO: 1539176 - RNA, 19 nt, Homo sapiens
  misc_RNA (1)...(19): siRNA sense strand
agaagagacuauucagaua

SEQ ID NO: 1539177 - RNA, 19 nt, Homo sapiens
  misc_RNA (1)...(19): siRNA sense strand
gugaugaacuuaugggaaa

SEQ ID NO: 1539178 - RNA, 19 nt, Homo sapiens
  misc_RNA (1)...(19): siRNA sense strand
gaagaaccacuuuaaacaa

SEQ ID NO: 1539179 - RNA, 19 nt, Homo sapiens
  misc_RNA (1)...(19): siRNA sense strand
uagaggagauuauugaaga

SEQ ID NO: 1539180 - RNA, 19 nt, Homo sapiens
  misc_RNA (1)...(19): siRNA sense strand
caggauuucuguauuauga

SEQ ID NO: 1539181 - RNA, 19 nt, Homo sapiens
  misc_RNA (1)...(19): siRNA sense strand
gagaagagacuauucagau

SEQ ID NO: 1539182 - RNA, 19 nt, Homo sapiens
  misc_RNA (1)...(19): siRNA sense strand
gcacagaaaguacaaguca

SEQ ID NO: 1539183 - RNA, 19 nt, Homo sapiens
  misc_RNA (1)...(19): siRNA sense strand
ggaaaggguucaggguuga

SEQ ID NO: 1539184 - RNA, 19 nt, Homo sapiens
  misc_RNA (1)...(19): siRNA sense strand
caucugggauuggauuaua

SEQ ID NO: 1539185 - RNA, 19 nt, Homo sapiens
  misc_RNA (1)...(19): siRNA sense strand
gaaggacacagaaggaauu

SEQ ID NO: 1539186 - RNA, 19 nt, Homo sapiens
  misc_RNA (1)...(19): siRNA sense strand
gcagacgggugccuugaug

SEQ ID NO: 1539187 - RNA, 19 nt, Homo sapiens
  misc_RNA (1)...(19): siRNA sense strand
gaagguugaugcuuuggau

SEQ ID NO: 1539188 - RNA, 19 nt, Homo sapiens
  misc_RNA (1)...(19): siRNA sense strand
gcagagcguuccucaugga

SEQ ID NO: 1539189 - RNA, 19 nt, Homo sapiens
  misc_RNA (1)...(19): siRNA sense strand
ucagugugcugguuaaaga

SEQ ID NO: 1539190 - RNA, 19 nt, Homo sapiens
  misc_RNA (1)...(19): siRNA sense strand
caaaagaucucccaguaug

SEQ ID NO: 1539191 - RNA, 19 nt, Homo sapiens
  misc_RNA (1)...(19): siRNA sense strand
cagagaagaaccacuuuaa

SEQ ID NO: 1539192 - RNA, 19 nt, Homo sapiens
  misc_RNA (1)...(19): siRNA sense strand
gguccaaggugaaggguau

SEQ ID NO: 1539193 - RNA, 19 nt, Homo sapiens
  misc_RNA (1)...(19): siRNA sense strand
gagaagaaccacuuuaaac

SEQ ID NO: 1539194 - RNA, 19 nt, Homo sapiens
  misc_RNA (1)...(19): siRNA sense strand
aaccagagcuccucgaugu

SEQ ID NO: 1539195 - RNA, 19 nt, Homo sapiens
  misc_RNA (1)...(19): siRNA sense strand
aaugaagacuccuguguga

SEQ ID NO: 1539196 - RNA, 19 nt, Homo sapiens
  misc_RNA (1)...(19): siRNA sense strand
gauauucacggaugccuuu

SEQ ID NO: 1539197 - RNA, 19 nt, Homo sapiens
  misc_RNA (1)...(19): siRNA sense strand
ggaaaccgguggaaaugac

SEQ ID NO: 1539198 - RNA, 19 nt, Homo sapiens
  misc_RNA (1)...(19): siRNA sense strand
ggacaaaagccugaaauuu

SEQ ID NO: 1539199 - RNA, 19 nt, Homo sapiens
  misc_RNA (1)...(19): siRNA sense strand
gaaaaugagcucagugauu

SEQ ID NO: 1539200 - RNA, 19 nt, Homo sapiens
  misc_RNA (1)...(19): siRNA sense strand
aaagcaggauuucuguauu

SEQ ID NO: 1539201 - RNA, 19 nt, Homo sapiens
  misc_RNA (1)...(19): siRNA sense strand
ggagauuauugaagaugga

SEQ ID NO: 1539202 - RNA, 19 nt, Homo sapiens
  misc_RNA (1)...(19): siRNA sense strand
gaaccacuuuaaacaacug

SEQ ID NO: 1539203 - RNA, 19 nt, Homo sapiens
  misc_RNA (1)...(19): siRNA sense strand
caaggugaaggguaucaua

SEQ ID NO: 1539204 - RNA, 19 nt, Homo sapiens
  misc_RNA (1)...(19): siRNA sense strand
uaugagagcagcuucugua

SEQ ID NO: 1539205 - RNA, 19 nt, Homo sapiens
  misc_RNA (1)...(19): siRNA sense strand
caaagcagaaagugaagaa

SEQ ID NO: 1539206 - RNA, 19 nt, Homo sapiens
  misc_RNA (1)...(19): siRNA sense strand
gacaagaccaagaggauau

SEQ ID NO: 1539207 - RNA, 19 nt, Homo sapiens
  misc_RNA (1)...(19): siRNA sense strand
ccacgagcgucccacuuga

SEQ ID NO: 1539208 - RNA, 19 nt, Homo sapiens
  misc_RNA (1)...(19): siRNA sense strand
gucaaagaguggacaguga

SEQ ID NO: 1539209 - RNA, 19 nt, Homo sapiens
  misc_RNA (1)...(19): siRNA sense strand
caaacucuuuacuucugua

SEQ ID NO: 1539210 - RNA, 19 nt, Homo sapiens
  misc_RNA (1)...(19): siRNA sense strand
gauuuggucgucuucauuu

SEQ ID NO: 1539211 - RNA, 19 nt, Homo sapiens
  misc_RNA (1)...(19): siRNA sense strand
caggaagguugaugcuuug

SEQ ID NO: 1539212 - RNA, 19 nt, Homo sapiens
  misc_RNA (1)...(19): siRNA sense strand
ucauagaggagauuauuga

SEQ ID NO: 1539213 - RNA, 19 nt, Homo sapiens
  misc_RNA (1)...(19): siRNA sense strand
ucacggaugccuuugauau

SEQ ID NO: 1539214 - RNA, 19 nt, Homo sapiens
  misc_RNA (1)...(19): siRNA sense strand
caacucggguucggauguu

SEQ ID NO: 1539215 - RNA, 19 nt, Homo sapiens
  misc_RNA (1)...(19): siRNA sense strand
ccucaaagcagaaagugaa

SEQ ID NO: 1539216 - RNA, 19 nt, Homo sapiens
  misc_RNA (1)...(19): siRNA sense strand
gaucaacagaggaugaaga

SEQ ID NO: 1539217 - RNA, 19 nt, Homo sapiens
  misc_RNA (1)...(19): siRNA sense strand
uauugaagauggagaaagu

SEQ ID NO: 1539218 - RNA, 19 nt, Homo sapiens
  misc_RNA (1)...(19): siRNA sense strand
ucagagaagaaccacuuua

SEQ ID NO: 1539219 - RNA, 19 nt, Homo sapiens
  misc_RNA (1)...(19): siRNA sense strand
gaagaugauucuggauaac

SEQ ID NO: 1539220 - RNA, 19 nt, Homo sapiens
  misc_RNA (1)...(19): siRNA sense strand
ggaugaagagcaacuuuua

SEQ ID NO: 1539221 - RNA, 19 nt, Homo sapiens
  misc_RNA (1)...(19): siRNA sense strand
gagcagcuucuguauugaa

SEQ ID NO: 1539222 - RNA, 19 nt, Homo sapiens
  misc_RNA (1)...(19): siRNA sense strand
aaaaugagcucagugauuc

SEQ ID NO: 1539223 - RNA, 19 nt, Homo sapiens
  misc_RNA (1)...(19): siRNA sense strand
gcagaaagugaagaagaaa

SEQ ID NO: 1539224 - RNA, 19 nt, Homo sapiens
  misc_RNA (1)...(19): siRNA sense strand
guaagaagauggggcauga

SEQ ID NO: 1539225 - RNA, 19 nt, Homo sapiens
  misc_RNA (1)...(19): siRNA sense strand
uaucaauccuucaaacucu

SEQ ID NO: 1539226 - RNA, 19 nt, Homo sapiens
  misc_RNA (1)...(19): siRNA sense strand
agaagaaccacuuuaaaca

SEQ ID NO: 1539227 - RNA, 19 nt, Homo sapiens
  misc_RNA (1)...(19): siRNA sense strand
uacaaaagaucucccagua

SEQ ID NO: 1539228 - RNA, 19 nt, Homo sapiens
  misc_RNA (1)...(19): siRNA sense strand
cccgaagacuccaccaauu

SEQ ID NO: 1539229 - RNA, 19 nt, Homo sapiens
  misc_RNA (1)...(19): siRNA sense strand
cggaagaugauucuggaua

SEQ ID NO: 1539230 - RNA, 19 nt, Homo sapiens
  misc_RNA (1)...(19): siRNA sense strand
ggauuucuguauuaugaag

SEQ ID NO: 1539231 - RNA, 19 nt, Homo sapiens
  misc_RNA (1)...(19): siRNA sense strand
aaagcuguguuaaaugaug

SEQ ID NO: 1539232 - RNA, 19 nt, Homo sapiens
  misc_RNA (1)...(19): siRNA sense strand
ugaaguuaaagcuguguua

SEQ ID NO: 1539233 - RNA, 19 nt, Homo sapiens
  misc_RNA (1)...(19): siRNA sense strand
ggugaaggguaucauagag

SEQ ID NO: 1539234 - RNA, 19 nt, Homo sapiens
  misc_RNA (1)...(19): siRNA sense strand
cucaagacaucaaauuuca

SEQ ID NO: 1539235 - RNA, 19 nt, Homo sapiens
  misc_RNA (1)...(19): siRNA sense strand
cagcuucuguauugaaauc

SEQ ID NO: 1539236 - RNA, 19 nt, Homo sapiens
  misc_RNA (1)...(19): siRNA sense strand
gaagauggggcaugaugua

SEQ ID NO: 1539237 - RNA, 19 nt, Homo sapiens
  misc_RNA (1)...(19): siRNA sense strand
gaggaugaagagcaacuuu

SEQ ID NO: 1539238 - RNA, 19 nt, Homo sapiens
  misc_RNA (1)...(19): siRNA sense strand
ccgcagagcguuccucaug

SEQ ID NO: 1539239 - RNA, 19 nt, Homo sapiens
  misc_RNA (1)...(19): siRNA sense strand
uaaccaugcuuuauaugac

SEQ ID NO: 1539240 - RNA, 19 nt, Homo sapiens
  misc_RNA (1)...(19): siRNA sense strand
acacaugagcggaagauga

SEQ ID NO: 1539241 - RNA, 19 nt, Homo sapiens
  misc_RNA (1)...(19): siRNA sense strand
agagaagaaccacuuuaaa

SEQ ID NO: 1539242 - RNA, 19 nt, Homo sapiens
  misc_RNA (1)...(19): siRNA sense strand
ugacaagaccaagaggaua

SEQ ID NO: 1539243 - RNA, 19 nt, Homo sapiens
  misc_RNA (1)...(19): siRNA sense strand
gaccuugucagcuguguga

SEQ ID NO: 1539244 - RNA, 19 nt, Homo sapiens
  misc_RNA (1)...(19): siRNA sense strand
uaaaguaaggucggacaaa

SEQ ID NO: 1539245 - RNA, 19 nt, Homo sapiens
  misc_RNA (1)...(19): siRNA sense strand
ucucugccauucacaauca

SEQ ID NO: 1539246 - RNA, 19 nt, Homo sapiens
  misc_RNA (1)...(19): siRNA sense strand
ccacuuuaaacaacuguaa

SEQ ID NO: 1539247 - RNA, 19 nt, Homo sapiens
  misc_RNA (1)...(19): siRNA sense strand
ucuccuggcugaucgaaug

SEQ ID NO: 1539248 - RNA, 19 nt, Homo sapiens
  misc_RNA (1)...(19): siRNA sense strand
agcagaaagugaagaagaa

SEQ ID NO: 1539249 - RNA, 19 nt, Homo sapiens
  misc_RNA (1)...(19): siRNA sense strand
ccgaagacuccaccaauug

SEQ ID NO: 1539250 - RNA, 19 nt, Homo sapiens
  misc_RNA (1)...(19): siRNA sense strand
caguaugcgugucagagaa

SEQ ID NO: 1539251 - RNA, 19 nt, Homo sapiens
  misc_RNA (1)...(19): siRNA sense strand
gaagagcaacuuuuacaga

SEQ ID NO: 1539252 - RNA, 19 nt, Homo sapiens
  misc_RNA (1)...(19): siRNA sense strand
ccuucaaacucuuuacuuc

SEQ ID NO: 1539253 - RNA, 19 nt, Homo sapiens
  misc_RNA (1)...(19): siRNA sense strand
gaagacuccugugugacau

SEQ ID NO: 1539254 - RNA, 19 nt, Homo sapiens
  misc_RNA (1)...(19): siRNA sense strand
cacggaugccuuugauaua

SEQ ID NO: 1539255 - RNA, 19 nt, Homo sapiens
  misc_RNA (1)...(19): siRNA sense strand
caggauggguuucagaacu

SEQ ID NO: 1539256 - RNA, 19 nt, Homo sapiens
  misc_RNA (1)...(19): siRNA sense strand
uguguuaaaugaugaacga

SEQ ID NO: 1539257 - RNA, 19 nt, Homo sapiens
  misc_RNA (1)...(19): siRNA sense strand
caagacaucaaauuucaag

SEQ ID NO: 1539258 - RNA, 19 nt, Homo sapiens
  misc_RNA (1)...(19): siRNA sense strand
gcugaucgaaugcauagga

SEQ ID NO: 1539259 - RNA, 19 nt, Homo sapiens
  misc_RNA (1)...(19): siRNA sense strand
gaaccgugggaaagaaaug

SEQ ID NO: 1539260 - RNA, 19 nt, Homo sapiens
  misc_RNA (1)...(19): siRNA sense strand
gaaugcagaaagcaggauu

SEQ ID NO: 1539261 - RNA, 19 nt, Homo sapiens
  misc_RNA (1)...(19): siRNA sense strand
ccugaaauuuacacgaaug

SEQ ID NO: 1539262 - RNA, 19 nt, Homo sapiens
  misc_RNA (1)...(19): siRNA sense strand
cgauaucaauccuucaaac

SEQ ID NO: 1539263 - RNA, 19 nt, Homo sapiens
  misc_RNA (1)...(19): siRNA sense strand
agacuccugugugacauuu

SEQ ID NO: 1539264 - RNA, 19 nt, Homo sapiens
  misc_RNA (1)...(19): siRNA sense strand
gcagggaaaccgguggaaa

SEQ ID NO: 1539265 - RNA, 19 nt, Homo sapiens
  misc_RNA (1)...(19): siRNA sense strand
ccucaagacaucaaauuuc

SEQ ID NO: 1539266 - RNA, 19 nt, Homo sapiens
  misc_RNA (1)...(19): siRNA sense strand
guacaagucagcucacaac

SEQ ID NO: 1539267 - RNA, 19 nt, Homo sapiens
  misc_RNA (1)...(19): siRNA sense strand
aagaaccacuuuaaacaac

SEQ ID NO: 1539268 - RNA, 19 nt, Homo sapiens
  misc_RNA (1)...(19): siRNA sense strand
ggagcaagcugaagaggaa

SEQ ID NO: 1539269 - RNA, 19 nt, Homo sapiens
  misc_RNA (1)...(19): siRNA sense strand
gccaaugucuaaagaauuu

SEQ ID NO: 1539270 - RNA, 19 nt, Homo sapiens
  misc_RNA (1)...(19): siRNA sense strand
aaaggaagcuuaauaugga

SEQ ID NO: 1539271 - RNA, 19 nt, Homo sapiens
  misc_RNA (1)...(19): siRNA sense strand
gaaucagacucuucacauu

SEQ ID NO: 1539272 - RNA, 19 nt, Homo sapiens
  misc_RNA (1)...(19): siRNA sense strand
gaacaaacacaggcaaauu

SEQ ID NO: 1539273 - RNA, 19 nt, Homo sapiens
  misc_RNA (1)...(19): siRNA sense strand
gcaaaaugcuccaaagaaa

SEQ ID NO: 1539274 - RNA, 19 nt, Homo sapiens
  misc_RNA (1)...(19): siRNA sense strand
uagcagauauuguugaaga

SEQ ID NO: 1539275 - RNA, 19 nt, Homo sapiens
  misc_RNA (1)...(19): siRNA sense strand
gaccauagcagauauuguu

SEQ ID NO: 1539276 - RNA, 19 nt, Homo sapiens
  misc_RNA (1)...(19): siRNA sense strand
gauauugacuuggauaauc

SEQ ID NO: 1539277 - RNA, 19 nt, Homo sapiens
  misc_RNA (1)...(19): siRNA sense strand
gggaugauaguuacgauua

SEQ ID NO: 1539278 - RNA, 19 nt, Homo sapiens
  misc_RNA (1)...(19): siRNA sense strand
ccaguaggauggugugaaa

SEQ ID NO: 1539279 - RNA, 19 nt, Homo sapiens
  misc_RNA (1)...(19): siRNA sense strand
gaagauauugacuuggaua

SEQ ID NO: 1539280 - RNA, 19 nt, Homo sapiens
  misc_RNA (1)...(19): siRNA sense strand
gaaaagaagcccaaggaua

SEQ ID NO: 1539281 - RNA, 19 nt, Homo sapiens
  misc_RNA (1)...(19): siRNA sense strand
uagcggagguuugugguua

SEQ ID NO: 1539282 - RNA, 19 nt, Homo sapiens
  misc_RNA (1)...(19): siRNA sense strand
gagaauggaagaacucuga

SEQ ID NO: 1539283 - RNA, 19 nt, Homo sapiens
  misc_RNA (1)...(19): siRNA sense strand
gaacgaaugaccugaagau

SEQ ID NO: 1539284 - RNA, 19 nt, Homo sapiens
  misc_RNA (1)...(19): siRNA sense strand
gaauggaagaacucugaua

SEQ ID NO: 1539285 - RNA, 19 nt, Homo sapiens
  misc_RNA (1)...(19): siRNA sense strand
gaguaaagguucauuuuga

SEQ ID NO: 1539286 - RNA, 19 nt, Homo sapiens
  misc_RNA (1)...(19): siRNA sense strand
cauagcagauauuguugaa

SEQ ID NO: 1539287 - RNA, 19 nt, Homo sapiens
  misc_RNA (1)...(19): siRNA sense strand
ugacuuggauaaucucuuc

SEQ ID NO: 1539288 - RNA, 19 nt, Homo sapiens
  misc_RNA (1)...(19): siRNA sense strand
aagaagauauugacuugga

SEQ ID NO: 1539289 - RNA, 19 nt, Homo sapiens
  misc_RNA (1)...(19): siRNA sense strand
cuaaugggccaaugucuaa

SEQ ID NO: 1539290 - RNA, 19 nt, Homo sapiens
  misc_RNA (1)...(19): siRNA sense strand
ggaagcuacucaaaccaau

SEQ ID NO: 1539291 - RNA, 19 nt, Homo sapiens
  misc_RNA (1)...(19): siRNA sense strand
gaaacagcccaacaggaaa

SEQ ID NO: 1539292 - RNA, 19 nt, Homo sapiens
  misc_RNA (1)...(19): siRNA sense strand
gggccaaugucuaaagaau

SEQ ID NO: 1539293 - RNA, 19 nt, Homo sapiens
  misc_RNA (1)...(19): siRNA sense strand
gauuacuggugcgauguua

SEQ ID NO: 1539294 - RNA, 19 nt, Homo sapiens
  misc_RNA (1)...(19): siRNA sense strand
ugacauucauccaguagga

SEQ ID NO: 1539295 - RNA, 19 nt, Homo sapiens
  misc_RNA (1)...(19): siRNA sense strand
ugccaaauaugaaacuuga

SEQ ID NO: 1539296 - RNA, 19 nt, Homo sapiens
  misc_RNA (1)...(19): siRNA sense strand
gaacugcacaucccuaagg

SEQ ID NO: 1539297 - RNA, 19 nt, Homo sapiens
  misc_RNA (1)...(19): siRNA sense strand
ggaaaaggaagcuuaauau

SEQ ID NO: 1539298 - RNA, 19 nt, Homo sapiens
  misc_RNA (1)...(19): siRNA sense strand
uguugaagaucgcuuacua

SEQ ID NO: 1539299 - RNA, 19 nt, Homo sapiens
  misc_RNA (1)...(19): siRNA sense strand
gagauuagaaggcauugau

SEQ ID NO: 1539300 - RNA, 19 nt, Homo sapiens
  misc_RNA (1)...(19): siRNA sense strand
gaacuucaauggaaaacau

SEQ ID NO: 1539301 - RNA, 19 nt, Homo sapiens
  misc_RNA (1)...(19): siRNA sense strand
ggaaucagacucuucacau

SEQ ID NO: 1539302 - RNA, 19 nt, Homo sapiens
  misc_RNA (1)...(19): siRNA sense strand
uaaagaauuucagguugga

SEQ ID NO: 1539303 - RNA, 19 nt, Homo sapiens
  misc_RNA (1)...(19): siRNA sense strand
agaaacagaaguccuaaug

SEQ ID NO: 1539304 - RNA, 19 nt, Homo sapiens
  misc_RNA (1)...(19): siRNA sense strand
gagaacaaacacaggcaaa

SEQ ID NO: 1539305 - RNA, 19 nt, Homo sapiens
  misc_RNA (1)...(19): siRNA sense strand
cgaaugaccugaagauccu

SEQ ID NO: 1539306 - RNA, 19 nt, Homo sapiens
  misc_RNA (1)...(19): siRNA sense strand
guugaugaccaaagaguaa

SEQ ID NO: 1539307 - RNA, 19 nt, Homo sapiens
  misc_RNA (1)...(19): siRNA sense strand
gauuguagauguugaugac

SEQ ID NO: 1539308 - RNA, 19 nt, Homo sapiens
  misc_RNA (1)...(19): siRNA sense strand
caacacuucacgaucguuu

SEQ ID NO: 1539309 - RNA, 19 nt, Homo sapiens
  misc_RNA (1)...(19): siRNA sense strand
gaaacagaaguccuaaugg

SEQ ID NO: 1539310 - RNA, 19 nt, Homo sapiens
  misc_RNA (1)...(19): siRNA sense strand
aacaaacacaggcaaauuu

SEQ ID NO: 1539311 - RNA, 19 nt, Homo sapiens
  misc_RNA (1)...(19): siRNA sense strand
gcacagggagcauggucuu

SEQ ID NO: 1539312 - RNA, 19 nt, Homo sapiens
  misc_RNA (1)...(19): siRNA sense strand
aggcaaauuuggaaucaga

SEQ ID NO: 1539313 - RNA, 19 nt, Homo sapiens
  misc_RNA (1)...(19): siRNA sense strand
uggaagaacucugauagca

SEQ ID NO: 1539314 - RNA, 19 nt, Homo sapiens
  misc_RNA (1)...(19): siRNA sense strand
cuugaaggccugcaaauug

SEQ ID NO: 1539315 - RNA, 19 nt, Homo sapiens
  misc_RNA (1)...(19): siRNA sense strand
ggagugguacuugaaagaa

SEQ ID NO: 1539316 - RNA, 19 nt, Homo sapiens
  misc_RNA (1)...(19): siRNA sense strand
caagcugucuguccuacuc

SEQ ID NO: 1539317 - RNA, 19 nt, Homo sapiens
  misc_RNA (1)...(19): siRNA sense strand
uuugacaacugggaugaua

SEQ ID NO: 1539318 - RNA, 19 nt, Homo sapiens
  misc_RNA (1)...(19): siRNA sense strand
gaauuucagguuggaauga

SEQ ID NO: 1539319 - RNA, 19 nt, Homo sapiens
  misc_RNA (1)...(19): siRNA sense strand
aaacacaggcaaauuugga

SEQ ID NO: 1539320 - RNA, 19 nt, Homo sapiens
  misc_RNA (1)...(19): siRNA sense strand
gcgaacgaaugaccugaag

SEQ ID NO: 1539321 - RNA, 19 nt, Homo sapiens
  misc_RNA (1)...(19): siRNA sense strand
gaaaaggaagcuuaauaug

SEQ ID NO: 1539322 - RNA, 19 nt, Homo sapiens
  misc_RNA (1)...(19): siRNA sense strand
cgacauccaucgguauucu

SEQ ID NO: 1539323 - RNA, 19 nt, Homo sapiens
  misc_RNA (1)...(19): siRNA sense strand
gaggcagacagcccugaua

SEQ ID NO: 1539324 - RNA, 19 nt, Homo sapiens
  misc_RNA (1)...(19): siRNA sense strand
gcacaaccccuuugaguca

SEQ ID NO: 1539325 - RNA, 19 nt, Homo sapiens
  misc_RNA (1)...(19): siRNA sense strand
ggaugauaguuacgauuac

SEQ ID NO: 1539326 - RNA, 19 nt, Homo sapiens
  misc_RNA (1)...(19): siRNA sense strand
gaagcuacucaaaccaaug

SEQ ID NO: 1539327 - RNA, 19 nt, Homo sapiens
  misc_RNA (1)...(19): siRNA sense strand
gaugauaguuacgauuacu

SEQ ID NO: 1539328 - RNA, 19 nt, Homo sapiens
  misc_RNA (1)...(19): siRNA sense strand
ccaaauaugaaacuugaag

SEQ ID NO: 1539329 - RNA, 19 nt, Homo sapiens
  misc_RNA (1)...(19): siRNA sense strand
aaaagccucuguaguuuga

SEQ ID NO: 1539330 - RNA, 19 nt, Homo sapiens
  misc_RNA (1)...(19): siRNA sense strand
agauguugaugaccaaaga

SEQ ID NO: 1539331 - RNA, 19 nt, Homo sapiens
  misc_RNA (1)...(19): siRNA sense strand
gugaaaagaccaaacauga

SEQ ID NO: 1539332 - RNA, 19 nt, Homo sapiens
  misc_RNA (1)...(19): siRNA sense strand
guacagcaggcaaaguguu

SEQ ID NO: 1539333 - RNA, 19 nt, Homo sapiens
  misc_RNA (1)...(19): siRNA sense strand
ccuaaugggccaaugucua

SEQ ID NO: 1539334 - RNA, 19 nt, Homo sapiens
  misc_RNA (1)...(19): siRNA sense strand
ggaggcaacacuucacgau

SEQ ID NO: 1539335 - RNA, 19 nt, Homo sapiens
  misc_RNA (1)...(19): siRNA sense strand
gcagacagcccugauaucc

SEQ ID NO: 1539336 - RNA, 19 nt, Homo sapiens
  misc_RNA (1)...(19): siRNA sense strand
ggacggacgcuuggagcaa

SEQ ID NO: 1539337 - RNA, 19 nt, Homo sapiens
  misc_RNA (1)...(19): siRNA sense strand
gggagugguacuugaaaga

SEQ ID NO: 1539338 - RNA, 19 nt, Homo sapiens
  misc_RNA (1)...(19): siRNA sense strand
aaaagaagcccaaggauag

SEQ ID NO: 1539339 - RNA, 19 nt, Homo sapiens
  misc_RNA (1)...(19): siRNA sense strand
acaggcaaauuuggaauca

SEQ ID NO: 1539340 - RNA, 19 nt, Homo sapiens
  misc_RNA (1)...(19): siRNA sense strand
ggccaaugucuaaagaauu

SEQ ID NO: 1539341 - RNA, 19 nt, Homo sapiens
  misc_RNA (1)...(19): siRNA sense strand
guuugugguuaccgucuaa

SEQ ID NO: 1539342 - RNA, 19 nt, Homo sapiens
  misc_RNA (1)...(19): siRNA sense strand
ccuguaaucccagcacuuu

SEQ ID NO: 1539343 - RNA, 19 nt, Homo sapiens
  misc_RNA (1)...(19): siRNA sense strand
ccgaucggauggugugaug

SEQ ID NO: 1539344 - RNA, 19 nt, Homo sapiens
  misc_RNA (1)...(19): siRNA sense strand
gauguuaauagcccuuaug

SEQ ID NO: 1539345 - RNA, 19 nt, Homo sapiens
  misc_RNA (1)...(19): siRNA sense strand
gcagauauuguugaagauc

SEQ ID NO: 1539346 - RNA, 19 nt, Homo sapiens
  misc_RNA (1)...(19): siRNA sense strand
gaagugccacagcgaacga

SEQ ID NO: 1539347 - RNA, 19 nt, Homo sapiens
  misc_RNA (1)...(19): siRNA sense strand
cagauuggaaugagauuag

SEQ ID NO: 1539348 - RNA, 19 nt, Homo sapiens
  misc_RNA (1)...(19): siRNA sense strand
aaucagacucuucacauuc

SEQ ID NO: 1539349 - RNA, 19 nt, Homo sapiens
  misc_RNA (1)...(19): siRNA sense strand
gaaaagaccaaacaugaac

SEQ ID NO: 1539350 - RNA, 19 nt, Homo sapiens
  misc_RNA (1)...(19): siRNA sense strand
gguuugugguuaccgucua

SEQ ID NO: 1539351 - RNA, 19 nt, Homo sapiens
  misc_RNA (1)...(19): siRNA sense strand
gguauucugugugcuuucu

SEQ ID NO: 1539352 - RNA, 19 nt, Homo sapiens
  misc_RNA (1)...(19): siRNA sense strand
gagugguacuugaaagaac

SEQ ID NO: 1539353 - RNA, 19 nt, Homo sapiens
  misc_RNA (1)...(19): siRNA sense strand
guacuugaaagaacagaag

SEQ ID NO: 1539354 - RNA, 19 nt, Homo sapiens
  misc_RNA (1)...(19): siRNA sense strand
ucagauuggaaugagauua

SEQ ID NO: 1539355 - RNA, 19 nt, Homo sapiens
  misc_RNA (1)...(19): siRNA sense strand
ggaagcuuaauauggauuc

SEQ ID NO: 1539356 - RNA, 19 nt, Homo sapiens
  misc_RNA (1)...(19): siRNA sense strand
ucacgaucguuugagagaa

SEQ ID NO: 1539357 - RNA, 19 nt, Homo sapiens
  misc_RNA (1)...(19): siRNA sense strand
acacuucacgaucguuuga

SEQ ID NO: 1539358 - RNA, 19 nt, Homo sapiens
  misc_RNA (1)...(19): siRNA sense strand
gaucggauggugugauguc

SEQ ID NO: 1539359 - RNA, 19 nt, Homo sapiens
  misc_RNA (1)...(19): siRNA sense strand
caaagaguaaagguucauu

SEQ ID NO: 1539360 - RNA, 19 nt, Homo sapiens
  misc_RNA (1)...(19): siRNA sense strand
ugaccaaagaguaaagguu

SEQ ID NO: 1539361 - RNA, 19 nt, Homo sapiens
  misc_RNA (1)...(19): siRNA sense strand
gguuaucccaauccagaaa

SEQ ID NO: 1539362 - RNA, 19 nt, Homo sapiens
  misc_RNA (1)...(19): siRNA sense strand
ggucaagcugucuguccua

SEQ ID NO: 1539363 - RNA, 19 nt, Homo sapiens
  misc_RNA (1)...(19): siRNA sense strand
uuggauggauuacuugaag

SEQ ID NO: 1539364 - RNA, 19 nt, Homo sapiens
  misc_RNA (1)...(19): siRNA sense strand
uacagcaggcaaaguguuu

SEQ ID NO: 1539365 - RNA, 19 nt, Homo sapiens
  misc_RNA (1)...(19): siRNA sense strand
ucaggagaauggaagaacu

SEQ ID NO: 1539366 - RNA, 19 nt, Homo sapiens
  misc_RNA (1)...(19): siRNA sense strand
ccauagcagauauuguuga

SEQ ID NO: 1539367 - RNA, 19 nt, Homo sapiens
  misc_RNA (1)...(19): siRNA sense strand
ggacaucacagugcuuuug

SEQ ID NO: 1539368 - RNA, 19 nt, Homo sapiens
  misc_RNA (1)...(19): siRNA sense strand
gaaagaacgucaucaguug

SEQ ID NO: 1539369 - RNA, 19 nt, Homo sapiens
  misc_RNA (1)...(19): siRNA sense strand
gaagaaagcccuugaugaa

SEQ ID NO: 1539370 - RNA, 19 nt, Homo sapiens
  misc_RNA (1)...(19): siRNA sense strand
gaagacaacugcaaaguca

SEQ ID NO: 1539371 - RNA, 19 nt, Homo sapiens
  misc_RNA (1)...(19): siRNA sense strand
gagagaaacuacaaagaaa

SEQ ID NO: 1539372 - RNA, 19 nt, Homo sapiens
  misc_RNA (1)...(19): siRNA sense strand
ggaacaagcucuccagaca

SEQ ID NO: 1539373 - RNA, 19 nt, Homo sapiens
  misc_RNA (1)...(19): siRNA sense strand
ggaaaccucuucucacuuc

SEQ ID NO: 1539374 - RNA, 19 nt, Homo sapiens
  misc_RNA (1)...(19): siRNA sense strand
ggaaagaacgucaucaguu

SEQ ID NO: 1539375 - RNA, 19 nt, Homo sapiens
  misc_RNA (1)...(19): siRNA sense strand
gaaagagagucagaaguug

SEQ ID NO: 1539376 - RNA, 19 nt, Homo sapiens
  misc_RNA (1)...(19): siRNA sense strand
ggugaaaucuauucuugaa

SEQ ID NO: 1539377 - RNA, 19 nt, Homo sapiens
  misc_RNA (1)...(19): siRNA sense strand
gaagacaacaggaaacuug

SEQ ID NO: 1539378 - RNA, 19 nt, Homo sapiens
  misc_RNA (1)...(19): siRNA sense strand
uaaccugccuucuaugaaa

SEQ ID NO: 1539379 - RNA, 19 nt, Homo sapiens
  misc_RNA (1)...(19): siRNA sense strand
aaacaaagcuagaucacau

SEQ ID NO: 1539380 - RNA, 19 nt, Homo sapiens
  misc_RNA (1)...(19): siRNA sense strand
gcaaggugcucuggagaaa

SEQ ID NO: 1539381 - RNA, 19 nt, Homo sapiens
  misc_RNA (1)...(19): siRNA sense strand
gaacuugagcgacagaauu

SEQ ID NO: 1539382 - RNA, 19 nt, Homo sapiens
  misc_RNA (1)...(19): siRNA sense strand
gaaaacaucucaggauauu

SEQ ID NO: 1539383 - RNA, 19 nt, Homo sapiens
  misc_RNA (1)...(19): siRNA sense strand
gcacaacagugagauugaa

SEQ ID NO: 1539384 - RNA, 19 nt, Homo sapiens
  misc_RNA (1)...(19): siRNA sense strand
ucuaggaucucucuaaaga

SEQ ID NO: 1539385 - RNA, 19 nt, Homo sapiens
  misc_RNA (1)...(19): siRNA sense strand
cgaauaaugcucagaauau

SEQ ID NO: 1539386 - RNA, 19 nt, Homo sapiens
  misc_RNA (1)...(19): siRNA sense strand
gcggagggauucagagauu

SEQ ID NO: 1539387 - RNA, 19 nt, Homo sapiens
  misc_RNA (1)...(19): siRNA sense strand
gaaagaaagggaucucaau

SEQ ID NO: 1539388 - RNA, 19 nt, Homo sapiens
  misc_RNA (1)...(19): siRNA sense strand
gcaccuaaccugccuucua

SEQ ID NO: 1539389 - RNA, 19 nt, Homo sapiens
  misc_RNA (1)...(19): siRNA sense strand
aaagggaucucaaucaaca

SEQ ID NO: 1539390 - RNA, 19 nt, Homo sapiens
  misc_RNA (1)...(19): siRNA sense strand
ugaaagagagucagaaguu

SEQ ID NO: 1539391 - RNA, 19 nt, Homo sapiens
  misc_RNA (1)...(19): siRNA sense strand
ggaaguggcugagcugaag

SEQ ID NO: 1539392 - RNA, 19 nt, Homo sapiens
  misc_RNA (1)...(19): siRNA sense strand
caaaguggaagcagaauug

SEQ ID NO: 1539393 - RNA, 19 nt, Homo sapiens
  misc_RNA (1)...(19): siRNA sense strand
caccuaaccugccuucuau

SEQ ID NO: 1539394 - RNA, 19 nt, Homo sapiens
  misc_RNA (1)...(19): siRNA sense strand
agaaagggaucucaaucaa

SEQ ID NO: 1539395 - RNA, 19 nt, Homo sapiens
  misc_RNA (1)...(19): siRNA sense strand
ucaaagaccggaugacuga

SEQ ID NO: 1539396 - RNA, 19 nt, Homo sapiens
  misc_RNA (1)...(19): siRNA sense strand
gcgaauaaugcucagaaua

SEQ ID NO: 1539397 - RNA, 19 nt, Homo sapiens
  misc_RNA (1)...(19): siRNA sense strand
uaaagaagacaacugcaaa

SEQ ID NO: 1539398 - RNA, 19 nt, Homo sapiens
  misc_RNA (1)...(19): siRNA sense strand
aaacaggacucggugaaau

SEQ ID NO: 1539399 - RNA, 19 nt, Homo sapiens
  misc_RNA (1)...(19): siRNA sense strand
aaauuaagcuccacuuguc

SEQ ID NO: 1539400 - RNA, 19 nt, Homo sapiens
  misc_RNA (1)...(19): siRNA sense strand
gcaauuggaaagcaaagaa

SEQ ID NO: 1539401 - RNA, 19 nt, Homo sapiens
  misc_RNA (1)...(19): siRNA sense strand
acagugaagugucguaaug

SEQ ID NO: 1539402 - RNA, 19 nt, Homo sapiens
  misc_RNA (1)...(19): siRNA sense strand
aaagcuagaucacauucaa

SEQ ID NO: 1539403 - RNA, 19 nt, Homo sapiens
  misc_RNA (1)...(19): siRNA sense strand
caagcucuccagacaaaua

SEQ ID NO: 1539404 - RNA, 19 nt, Homo sapiens
  misc_RNA (1)...(19): siRNA sense strand
gaacagugaagugucguaa

SEQ ID NO: 1539405 - RNA, 19 nt, Homo sapiens
  misc_RNA (1)...(19): siRNA sense strand
gaacaagcucuccagacaa

SEQ ID NO: 1539406 - RNA, 19 nt, Homo sapiens
  misc_RNA (1)...(19): siRNA sense strand
gaaaguacaaauagagcuu

SEQ ID NO: 1539407 - RNA, 19 nt, Homo sapiens
  misc_RNA (1)...(19): siRNA sense strand
caagaaggugggaaacuuu

SEQ ID NO: 1539408 - RNA, 19 nt, Homo sapiens
  misc_RNA (1)...(19): siRNA sense strand
ucacaaucauguuggagaa

SEQ ID NO: 1539409 - RNA, 19 nt, Homo sapiens
  misc_RNA (1)...(19): siRNA sense strand
uagaaaggaugaagguugu

SEQ ID NO: 1539410 - RNA, 19 nt, Homo sapiens
  misc_RNA (1)...(19): siRNA sense strand
aacaagcucuccagacaaa

SEQ ID NO: 1539411 - RNA, 19 nt, Homo sapiens
  misc_RNA (1)...(19): siRNA sense strand
gaacgucaucaguugguuu

SEQ ID NO: 1539412 - RNA, 19 nt, Homo sapiens
  misc_RNA (1)...(19): siRNA sense strand
caaauuaagcuccacuugu

SEQ ID NO: 1539413 - RNA, 19 nt, Homo sapiens
  misc_RNA (1)...(19): siRNA sense strand
acagaaacuugcagagcua

SEQ ID NO: 1539414 - RNA, 19 nt, Homo sapiens
  misc_RNA (1)...(19): siRNA sense strand
ugaagaaagcccuugauga

SEQ ID NO: 1539415 - RNA, 19 nt, Homo sapiens
  misc_RNA (1)...(19): siRNA sense strand
gacagaauuuggaaaccuu

SEQ ID NO: 1539416 - RNA, 19 nt, Homo sapiens
  misc_RNA (1)...(19): siRNA sense strand
acaagaaggugggaaacuu

SEQ ID NO: 1539417 - RNA, 19 nt, Homo sapiens
  misc_RNA (1)...(19): siRNA sense strand
agagagaaacuacaaagaa

SEQ ID NO: 1539418 - RNA, 19 nt, Homo sapiens
  misc_RNA (1)...(19): siRNA sense strand
gacaaauaaucaucugcaa

SEQ ID NO: 1539419 - RNA, 19 nt, Homo sapiens
  misc_RNA (1)...(19): siRNA sense strand
caaagucacaaucauguug

SEQ ID NO: 1539420 - RNA, 19 nt, Homo sapiens
  misc_RNA (1)...(19): siRNA sense strand
gucagaaguugaaagaaga

SEQ ID NO: 1539421 - RNA, 19 nt, Homo sapiens
  misc_RNA (1)...(19): siRNA sense strand
caaauaaucaucugcaaac

SEQ ID NO: 1539422 - RNA, 19 nt, Homo sapiens
  misc_RNA (1)...(19): siRNA sense strand
ggagaaaguacaaauagag

SEQ ID NO: 1539423 - RNA, 19 nt, Homo sapiens
  misc_RNA (1)...(19): siRNA sense strand
cgugugagcuuugcaccua

SEQ ID NO: 1539424 - RNA, 19 nt, Homo sapiens
  misc_RNA (1)...(19): siRNA sense strand
ccaggaugcuugucaugga

SEQ ID NO: 1539425 - RNA, 19 nt, Homo sapiens
  misc_RNA (1)...(19): siRNA sense strand
ucggugaaaucuauucuug

SEQ ID NO: 1539426 - RNA, 19 nt, Homo sapiens
  misc_RNA (1)...(19): siRNA sense strand
gaaaggaugaagguuguau

SEQ ID NO: 1539427 - RNA, 19 nt, Homo sapiens
  misc_RNA (1)...(19): siRNA sense strand
gagagagaaacuacaaaga

SEQ ID NO: 1539428 - RNA, 19 nt, Homo sapiens
  misc_RNA (1)...(19): siRNA sense strand
agagaggacugcaucuuca

SEQ ID NO: 1539429 - RNA, 19 nt, Homo sapiens
  misc_RNA (1)...(19): siRNA sense strand
uugcaggccucaagaaaga

SEQ ID NO: 1539430 - RNA, 19 nt, Homo sapiens
  misc_RNA (1)...(19): siRNA sense strand
ggcagaagcuaaagaagac

SEQ ID NO: 1539431 - RNA, 19 nt, Homo sapiens
  misc_RNA (1)...(19): siRNA sense strand
caagagcaauuggaaagca

SEQ ID NO: 1539432 - RNA, 19 nt, Homo sapiens
  misc_RNA (1)...(19): siRNA sense strand
gaaacuugcagagcuagaa

SEQ ID NO: 1539433 - RNA, 19 nt, Homo sapiens
  misc_RNA (1)...(19): siRNA sense strand
gagcugcgacagaaacuug

SEQ ID NO: 1539434 - RNA, 19 nt, Homo sapiens
  misc_RNA (1)...(19): siRNA sense strand
gagaaacuacaaagaaagu

SEQ ID NO: 1539435 - RNA, 19 nt, Homo sapiens
  misc_RNA (1)...(19): siRNA sense strand
cagaauauagaaaggauga

SEQ ID NO: 1539436 - RNA, 19 nt, Homo sapiens
  misc_RNA (1)...(19): siRNA sense strand
gcaaagucacaaucauguu

SEQ ID NO: 1539437 - RNA, 19 nt, Homo sapiens
  misc_RNA (1)...(19): siRNA sense strand
gagcuugggcggagggauu

SEQ ID NO: 1539438 - RNA, 19 nt, Homo sapiens
  misc_RNA (1)...(19): siRNA sense strand
acaggaaacuugcuaugag

SEQ ID NO: 1539439 - RNA, 19 nt, Homo sapiens
  misc_RNA (1)...(19): siRNA sense strand
gccucaagaccuuuaauaa

SEQ ID NO: 1539440 - RNA, 19 nt, Homo sapiens
  misc_RNA (1)...(19): siRNA sense strand
gaaagcccuugaugaagcu

SEQ ID NO: 1539441 - RNA, 19 nt, Homo sapiens
  misc_RNA (1)...(19): siRNA sense strand
uggcugagcugaagaaagc

SEQ ID NO: 1539442 - RNA, 19 nt, Homo sapiens
  misc_RNA (1)...(19): siRNA sense strand
gugcuggcuucucacagua

SEQ ID NO: 1539443 - RNA, 19 nt, Homo sapiens
  misc_RNA (1)...(19): siRNA sense strand
ucaguugguuugccuagug

SEQ ID NO: 1539444 - RNA, 19 nt, Homo sapiens
  misc_RNA (1)...(19): siRNA sense strand
acaauuggcagaagcuaaa

SEQ ID NO: 1539445 - RNA, 19 nt, Homo sapiens
  misc_RNA (1)...(19): siRNA sense strand
acucuaggaucucucuaaa

SEQ ID NO: 1539446 - RNA, 19 nt, Homo sapiens
  misc_RNA (1)...(19): siRNA sense strand
caggaaacuugcuaugagu

SEQ ID NO: 1539447 - RNA, 19 nt, Homo sapiens
  misc_RNA (1)...(19): siRNA sense strand
caacaggaaacuugcuaug

SEQ ID NO: 1539448 - RNA, 19 nt, Homo sapiens
  misc_RNA (1)...(19): siRNA sense strand
gauugcaggccucaagaaa

SEQ ID NO: 1539449 - RNA, 19 nt, Homo sapiens
  misc_RNA (1)...(19): siRNA sense strand
uggagaaaguacaaauaga

SEQ ID NO: 1539450 - RNA, 19 nt, Homo sapiens
  misc_RNA (1)...(19): siRNA sense strand
aaagagagucagaaguuga

SEQ ID NO: 1539451 - RNA, 19 nt, Homo sapiens
  misc_RNA (1)...(19): siRNA sense strand
ggucccauguaaacaguau

SEQ ID NO: 1539452 - RNA, 19 nt, Homo sapiens
  misc_RNA (1)...(19): siRNA sense strand
agucagaaguugaaagaag

SEQ ID NO: 1539453 - RNA, 19 nt, Homo sapiens
  misc_RNA (1)...(19): siRNA sense strand
aaacaucucaggauauugg

SEQ ID NO: 1539454 - RNA, 19 nt, Homo sapiens
  misc_RNA (1)...(19): siRNA sense strand
gacaauuggcagaagcuaa

SEQ ID NO: 1539455 - RNA, 19 nt, Homo sapiens
  misc_RNA (1)...(19): siRNA sense strand
gauauuggagacucuagga

SEQ ID NO: 1539456 - RNA, 19 nt, Homo sapiens
  misc_RNA (1)...(19): siRNA sense strand
ggaaagcaaagaacuugag

SEQ ID NO: 1539457 - RNA, 19 nt, Homo sapiens
  misc_RNA (1)...(19): siRNA sense strand
gacaacaggaaacuugcua

SEQ ID NO: 1539458 - RNA, 19 nt, Homo sapiens
  misc_RNA (1)...(19): siRNA sense strand
gaaagggaucucaaucaac

SEQ ID NO: 1539459 - RNA, 19 nt, Homo sapiens
  misc_RNA (1)...(19): siRNA sense strand
uaggaucucucuaaagacu

SEQ ID NO: 1539460 - RNA, 19 nt, Homo sapiens
  misc_RNA (1)...(19): siRNA sense strand
uagagaagacaacaggaaa

SEQ ID NO: 1539461 - RNA, 19 nt, Homo sapiens
  misc_RNA (1)...(19): siRNA sense strand
cagcuaaggcgaauaaugc

SEQ ID NO: 1539462 - RNA, 19 nt, Homo sapiens
  misc_RNA (1)...(19): siRNA sense strand
uaacuucagaucaguggaa

SEQ ID NO: 1539463 - RNA, 19 nt, Homo sapiens
  misc_RNA (1)...(19): siRNA sense strand
aaaaggaaauccccagaga

SEQ ID NO: 1539464 - RNA, 19 nt, Homo sapiens
  misc_RNA (1)...(19): siRNA sense strand
gaauauagaaaggaugaag

SEQ ID NO: 1539465 - RNA, 19 nt, Homo sapiens
  misc_RNA (1)...(19): siRNA sense strand
ccaaauuaagcuccacuug

SEQ ID NO: 1539466 - RNA, 19 nt, Homo sapiens
  misc_RNA (1)...(19): siRNA sense strand
acaaucauguuggagaaug

SEQ ID NO: 1539467 - RNA, 19 nt, Homo sapiens
  misc_RNA (1)...(19): siRNA sense strand
cuaaagaagacaacugcaa

SEQ ID NO: 1539468 - RNA, 19 nt, Homo sapiens
  misc_RNA (1)...(19): siRNA sense strand
ucagacagauuccuaauua

SEQ ID NO: 1539469 - RNA, 19 nt, Homo sapiens
  misc_RNA (1)...(19): siRNA sense strand
uaacauaccuggaugauag

SEQ ID NO: 1539470 - RNA, 19 nt, Homo sapiens
  misc_RNA (1)...(19): siRNA sense strand
gaacgagaacggaagauuu

SEQ ID NO: 1539471 - RNA, 19 nt, Homo sapiens
  misc_RNA (1)...(19): siRNA sense strand
cagcacaagcuuuauauua

SEQ ID NO: 1539472 - RNA, 19 nt, Homo sapiens
  misc_RNA (1)...(19): siRNA sense strand
ggaagaugaugaugaaaca

SEQ ID NO: 1539473 - RNA, 19 nt, Homo sapiens
  misc_RNA (1)...(19): siRNA sense strand
gacuaaagcacuuaacaua

SEQ ID NO: 1539474 - RNA, 19 nt, Homo sapiens
  misc_RNA (1)...(19): siRNA sense strand
gaagauggagcuauuuguu

SEQ ID NO: 1539475 - RNA, 19 nt, Homo sapiens
  misc_RNA (1)...(19): siRNA sense strand
gaagaucacagacagcauu

SEQ ID NO: 1539476 - RNA, 19 nt, Homo sapiens
  misc_RNA (1)...(19): siRNA sense strand
gaaacuggaugcucuuaac

SEQ ID NO: 1539477 - RNA, 19 nt, Homo sapiens
  misc_RNA (1)...(19): siRNA sense strand
caagaguguuugaggcuuu

SEQ ID NO: 1539478 - RNA, 19 nt, Homo sapiens
  misc_RNA (1)...(19): siRNA sense strand
gaggucaucucgagcuuga

SEQ ID NO: 1539479 - RNA, 19 nt, Homo sapiens
  misc_RNA (1)...(19): siRNA sense strand
gagagagagucaagagaga

SEQ ID NO: 1539480 - RNA, 19 nt, Homo sapiens
  misc_RNA (1)...(19): siRNA sense strand
ggcagaagauggagcuauu

SEQ ID NO: 1539481 - RNA, 19 nt, Homo sapiens
  misc_RNA (1)...(19): siRNA sense strand
ugaccuaccugacuuggaa

SEQ ID NO: 1539482 - RNA, 19 nt, Homo sapiens
  misc_RNA (1)...(19): siRNA sense strand
ggagcuauuuguuaaggaa

SEQ ID NO: 1539483 - RNA, 19 nt, Homo sapiens
  misc_RNA (1)...(19): siRNA sense strand
agauggagcuauuuguuaa

SEQ ID NO: 1539484 - RNA, 19 nt, Homo sapiens
  misc_RNA (1)...(19): siRNA sense strand
ccauuagacuggagacaaa

SEQ ID NO: 1539485 - RNA, 19 nt, Homo sapiens
  misc_RNA (1)...(19): siRNA sense strand
gcacuuaacauaccuggau

SEQ ID NO: 1539486 - RNA, 19 nt, Homo sapiens
  misc_RNA (1)...(19): siRNA sense strand
gcagggagcggaagaagau

SEQ ID NO: 1539487 - RNA, 19 nt, Homo sapiens
  misc_RNA (1)...(19): siRNA sense strand
uugagaaccuggaagagua

SEQ ID NO: 1539488 - RNA, 19 nt, Homo sapiens
  misc_RNA (1)...(19): siRNA sense strand
gcagagcaauggaauacag

SEQ ID NO: 1539489 - RNA, 19 nt, Homo sapiens
  misc_RNA (1)...(19): siRNA sense strand
gacgagcucugcccggaaa

SEQ ID NO: 1539490 - RNA, 19 nt, Homo sapiens
  misc_RNA (1)...(19): siRNA sense strand
gagaacggaagauuuagaa

SEQ ID NO: 1539491 - RNA, 19 nt, Homo sapiens
  misc_RNA (1)...(19): siRNA sense strand
uggaaagcaugcccgauuu

SEQ ID NO: 1539492 - RNA, 19 nt, Homo sapiens
  misc_RNA (1)...(19): siRNA sense strand
gaucacagacagcauugaa

SEQ ID NO: 1539493 - RNA, 19 nt, Homo sapiens
  misc_RNA (1)...(19): siRNA sense strand
gagcuugagugaugacagu

SEQ ID NO: 1539494 - RNA, 19 nt, Homo sapiens
  misc_RNA (1)...(19): siRNA sense strand
cagcaacaauuacaucaag

SEQ ID NO: 1539495 - RNA, 19 nt, Homo sapiens
  misc_RNA (1)...(19): siRNA sense strand
gaacggaagauuuagaaac

SEQ ID NO: 1539496 - RNA, 19 nt, Homo sapiens
  misc_RNA (1)...(19): siRNA sense strand
aaaugaacuugcuccguaa

SEQ ID NO: 1539497 - RNA, 19 nt, Homo sapiens
  misc_RNA (1)...(19): siRNA sense strand
ggacagcgacuuccuugca

SEQ ID NO: 1539498 - RNA, 19 nt, Homo sapiens
  misc_RNA (1)...(19): siRNA sense strand
aauaugugcuuuccgaaga

SEQ ID NO: 1539499 - RNA, 19 nt, Homo sapiens
  misc_RNA (1)...(19): siRNA sense strand
aaacaaggcagaagaugga

SEQ ID NO: 1539500 - RNA, 19 nt, Homo sapiens
  misc_RNA (1)...(19): siRNA sense strand
gaccaguguuuccaaagga

SEQ ID NO: 1539501 - RNA, 19 nt, Homo sapiens
  misc_RNA (1)...(19): siRNA sense strand
gcucuuaaccucagcaaca

SEQ ID NO: 1539502 - RNA, 19 nt, Homo sapiens
  misc_RNA (1)...(19): siRNA sense strand
gaacuugauggaacgagaa

SEQ ID NO: 1539503 - RNA, 19 nt, Homo sapiens
  misc_RNA (1)...(19): siRNA sense strand
aagauggagcuauuuguua

SEQ ID NO: 1539504 - RNA, 19 nt, Homo sapiens
  misc_RNA (1)...(19): siRNA sense strand
ggaaagcaugcccgauuug

SEQ ID NO: 1539505 - RNA, 19 nt, Homo sapiens
  misc_RNA (1)...(19): siRNA sense strand
aacgagaacggaagauuua

SEQ ID NO: 1539506 - RNA, 19 nt, Homo sapiens
  misc_RNA (1)...(19): siRNA sense strand
gcugagacccugcuacugu

SEQ ID NO: 1539507 - RNA, 19 nt, Homo sapiens
  misc_RNA (1)...(19): siRNA sense strand
gcugagacccugcuacugu

SEQ ID NO: 1539508 - RNA, 19 nt, Homo sapiens
  misc_RNA (1)...(19): siRNA sense strand
acaauuacaucaagaccau

SEQ ID NO: 1539509 - RNA, 19 nt, Homo sapiens
  misc_RNA (1)...(19): siRNA sense strand
cgugggaccucacugcauu

SEQ ID NO: 1539510 - RNA, 19 nt, Homo sapiens
  misc_RNA (1)...(19): siRNA sense strand
gcauugagaaccuggaaga

SEQ ID NO: 1539511 - RNA, 19 nt, Homo sapiens
  misc_RNA (1)...(19): siRNA sense strand
ggaacgagaacggaagauu

SEQ ID NO: 1539512 - RNA, 19 nt, Homo sapiens
  misc_RNA (1)...(19): siRNA sense strand
cuuggaagaugaugaugaa

SEQ ID NO: 1539513 - RNA, 19 nt, Homo sapiens
  misc_RNA (1)...(19): siRNA sense strand
ggaggacauucagcaucua

SEQ ID NO: 1539514 - RNA, 19 nt, Homo sapiens
  misc_RNA (1)...(19): siRNA sense strand
gcagaagauggagcuauuu

SEQ ID NO: 1539515 - RNA, 19 nt, Homo sapiens
  misc_RNA (1)...(19): siRNA sense strand
gcacaagcuuuauauuacc

SEQ ID NO: 1539516 - RNA, 19 nt, Homo sapiens
  misc_RNA (1)...(19): siRNA sense strand
gaugauagaccaguguuuc

SEQ ID NO: 1539517 - RNA, 19 nt, Homo sapiens
  misc_RNA (1)...(19): siRNA sense strand
ggacauucagcaucuacaa

SEQ ID NO: 1539518 - RNA, 19 nt, Homo sapiens
  misc_RNA (1)...(19): siRNA sense strand
acagauuccuaauuacaga

SEQ ID NO: 1539519 - RNA, 19 nt, Homo sapiens
  misc_RNA (1)...(19): siRNA sense strand
gcaauggaauacagaaaau

SEQ ID NO: 1539520 - RNA, 19 nt, Homo sapiens
  misc_RNA (1)...(19): siRNA sense strand
uaaaggagaggauggagau

SEQ ID NO: 1539521 - RNA, 19 nt, Homo sapiens
  misc_RNA (1)...(19): siRNA sense strand
uaaaggagaggauggagau

SEQ ID NO: 1539522 - RNA, 19 nt, Homo sapiens
  misc_RNA (1)...(19): siRNA sense strand
ccuggaaccucugcagaaa

SEQ ID NO: 1539523 - RNA, 19 nt, Homo sapiens
  misc_RNA (1)...(19): siRNA sense strand
gcuaagagggacucggaaa

SEQ ID NO: 1539524 - RNA, 19 nt, Homo sapiens
  misc_RNA (1)...(19): siRNA sense strand
uaccugacuuggaagauga

SEQ ID NO: 1539525 - RNA, 19 nt, Homo sapiens
  misc_RNA (1)...(19): siRNA sense strand
gagaaacaaggcagaagau

SEQ ID NO: 1539526 - RNA, 19 nt, Homo sapiens
  misc_RNA (1)...(19): siRNA sense strand
gagcaauggaauacagaaa

SEQ ID NO: 1539527 - RNA, 19 nt, Homo sapiens
  misc_RNA (1)...(19): siRNA sense strand
gaacuugcuccguaaaauu

SEQ ID NO: 1539528 - RNA, 19 nt, Homo sapiens
  misc_RNA (1)...(19): siRNA sense strand
gcccuucacagacaucuuu

SEQ ID NO: 1539529 - RNA, 19 nt, Homo sapiens
  misc_RNA (1)...(19): siRNA sense strand
uaaaggagaggacggagau

SEQ ID NO: 1539530 - RNA, 19 nt, Homo sapiens
  misc_RNA (1)...(19): siRNA sense strand
ugaguugcguugccucuuc

SEQ ID NO: 1539531 - RNA, 19 nt, Homo sapiens
  misc_RNA (1)...(19): siRNA sense strand
cgauuugcguguacugaau

SEQ ID NO: 1539532 - RNA, 19 nt, Homo sapiens
  misc_RNA (1)...(19): siRNA sense strand
uauuugcagucucuaaaga

SEQ ID NO: 1539533 - RNA, 19 nt, Homo sapiens
  misc_RNA (1)...(19): siRNA sense strand
gcagcacaagcuuuauauu

SEQ ID NO: 1539534 - RNA, 19 nt, Homo sapiens
  misc_RNA (1)...(19): siRNA sense strand
cuaaagcacuuaacauacc

SEQ ID NO: 1539535 - RNA, 19 nt, Homo sapiens
  misc_RNA (1)...(19): siRNA sense strand
cagaagauggagcuauuug

SEQ ID NO: 1539536 - RNA, 19 nt, Homo sapiens
  misc_RNA (1)...(19): siRNA sense strand
gcagauggcccacaaucac

SEQ ID NO: 1539537 - RNA, 19 nt, Homo sapiens
  misc_RNA (1)...(19): siRNA sense strand
gagaggauggagaucaaga

SEQ ID NO: 1539538 - RNA, 19 nt, Homo sapiens
  misc_RNA (1)...(19): siRNA sense strand
cagaugauggugagaaugu

SEQ ID NO: 1539539 - RNA, 19 nt, Homo sapiens
  misc_RNA (1)...(19): siRNA sense strand
guacgacuaaagcacuuaa

SEQ ID NO: 1539540 - RNA, 19 nt, Homo sapiens
  misc_RNA (1)...(19): siRNA sense strand
ucccaguccugaacacauu

SEQ ID NO: 1539541 - RNA, 19 nt, Homo sapiens
  misc_RNA (1)...(19): siRNA sense strand
ccggagauccugagcauuc

SEQ ID NO: 1539542 - RNA, 19 nt, Homo sapiens
  misc_RNA (1)...(19): siRNA sense strand
agacagauuccuaauuaca

SEQ ID NO: 1539543 - RNA, 19 nt, Homo sapiens
  misc_RNA (1)...(19): siRNA sense strand
agcacaagcuuuauauuac

SEQ ID NO: 1539544 - RNA, 19 nt, Homo sapiens
  misc_RNA (1)...(19): siRNA sense strand
guuaucagacagauuccua

SEQ ID NO: 1539545 - RNA, 19 nt, Homo sapiens
  misc_RNA (1)...(19): siRNA sense strand
cagcaccgaaagcaucaua

SEQ ID NO: 1539546 - RNA, 19 nt, Homo sapiens
  misc_RNA (1)...(19): siRNA sense strand
uaagagggacucggaaauc

SEQ ID NO: 1539547 - RNA, 19 nt, Homo sapiens
  misc_RNA (1)...(19): siRNA sense strand
cuaccugacuuggaagaug

SEQ ID NO: 1539548 - RNA, 19 nt, Homo sapiens
  misc_RNA (1)...(19): siRNA sense strand
cgacuaaagcacuuaacau

SEQ ID NO: 1539549 - RNA, 19 nt, Homo sapiens
  misc_RNA (1)...(19): siRNA sense strand
gcagaaacuggaugcucuu

SEQ ID NO: 1539550 - RNA, 19 nt, Homo sapiens
  misc_RNA (1)...(19): siRNA sense strand
ggaagauuuagaaaccauu

SEQ ID NO: 1539551 - RNA, 19 nt, Homo sapiens
  misc_RNA (1)...(19): siRNA sense strand
gauagaccaguguuuccaa

SEQ ID NO: 1539552 - RNA, 19 nt, Homo sapiens
  misc_RNA (1)...(19): siRNA sense strand
cagaaacuggaugcucuua

SEQ ID NO: 1539553 - RNA, 19 nt, Homo sapiens
  misc_RNA (1)...(19): siRNA sense strand
agagacgugugucggaguu

SEQ ID NO: 1539554 - RNA, 19 nt, Homo sapiens
  misc_RNA (1)...(19): siRNA sense strand
cuucacagacaucuuuaaa

SEQ ID NO: 1539555 - RNA, 19 nt, Homo sapiens
  misc_RNA (1)...(19): siRNA sense strand
cgagaacggaagauuuaga

SEQ ID NO: 1539556 - RNA, 19 nt, Homo sapiens
  misc_RNA (1)...(19): siRNA sense strand
caccgccugugaagguuaa

SEQ ID NO: 1539557 - RNA, 19 nt, Homo sapiens
  misc_RNA (1)...(19): siRNA sense strand
uggaggacauucagcaucu

SEQ ID NO: 1539558 - RNA, 19 nt, Homo sapiens
  misc_RNA (1)...(19): siRNA sense strand
agagaaacaaggcagaaga

SEQ ID NO: 1539559 - RNA, 19 nt, Homo sapiens
  misc_RNA (1)...(19): siRNA sense strand
auagaccaguguuuccaaa

SEQ ID NO: 1539560 - RNA, 19 nt, Homo sapiens
  misc_RNA (1)...(19): siRNA sense strand
ggaugauagaccaguguuu

SEQ ID NO: 1539561 - RNA, 19 nt, Homo sapiens
  misc_RNA (1)...(19): siRNA sense strand
cauugcagauggcccacaa

SEQ ID NO: 1539562 - RNA, 19 nt, Homo sapiens
  misc_RNA (1)...(19): siRNA sense strand
uggaaaaccugcccacaga

SEQ ID NO: 1539563 - RNA, 19 nt, Homo sapiens
  misc_RNA (1)...(19): siRNA sense strand
gaccagaauaugugcuuuc

SEQ ID NO: 1539564 - RNA, 19 nt, Homo sapiens
  misc_RNA (1)...(19): siRNA sense strand
uggaagaccagaauaugug

SEQ ID NO: 1539565 - RNA, 19 nt, Homo sapiens
  misc_RNA (1)...(19): siRNA sense strand
gaaccuggaagaguacaca

SEQ ID NO: 1539566 - RNA, 19 nt, Homo sapiens
  misc_RNA (1)...(19): siRNA sense strand
gauuugcguguacugaauu

SEQ ID NO: 1539567 - RNA, 19 nt, Homo sapiens
  misc_RNA (1)...(19): siRNA sense strand
ugccucuucuugcaaauga

SEQ ID NO: 1539568 - RNA, 19 nt, Homo sapiens
  misc_RNA (1)...(19): siRNA sense strand
gaagagaguuguccaguga

SEQ ID NO: 1539569 - RNA, 19 nt, Homo sapiens
  misc_RNA (1)...(19): siRNA sense strand
gggaagaucucaaugaaug

SEQ ID NO: 1539570 - RNA, 19 nt, Homo sapiens
  misc_RNA (1)...(19): siRNA sense strand
gcaccaaaguauauugauu

SEQ ID NO: 1539571 - RNA, 19 nt, Homo sapiens
  misc_RNA (1)...(19): siRNA sense strand
caaagaauuucaugucugu

SEQ ID NO: 1539572 - RNA, 19 nt, Homo sapiens
  misc_RNA (1)...(19): siRNA sense strand
ggaggaagcacaucuaaau

SEQ ID NO: 1539573 - RNA, 19 nt, Homo sapiens
  misc_RNA (1)...(19): siRNA sense strand
gcagauggaacgaacauaa

SEQ ID NO: 1539574 - RNA, 19 nt, Homo sapiens
  misc_RNA (1)...(19): siRNA sense strand
ggaagcacaucuaaauaca

SEQ ID NO: 1539575 - RNA, 19 nt, Homo sapiens
  misc_RNA (1)...(19): siRNA sense strand
gaggaagcacaucuaaaua

SEQ ID NO: 1539576 - RNA, 19 nt, Homo sapiens
  misc_RNA (1)...(19): siRNA sense strand
guccaggaauucaaccuua

SEQ ID NO: 1539577 - RNA, 19 nt, Homo sapiens
  misc_RNA (1)...(19): siRNA sense strand
gaugagacguuauuuccau

SEQ ID NO: 1539578 - RNA, 19 nt, Homo sapiens
  misc_RNA (1)...(19): siRNA sense strand
gaacgaacauaaagaaacc

SEQ ID NO: 1539579 - RNA, 19 nt, Homo sapiens
  misc_RNA (1)...(19): siRNA sense strand
gguagucgcucuucuaaaa

SEQ ID NO: 1539580 - RNA, 19 nt, Homo sapiens
  misc_RNA (1)...(19): siRNA sense strand
ggguuuaugcucacauuua

SEQ ID NO: 1539581 - RNA, 19 nt, Homo sapiens
  misc_RNA (1)...(19): siRNA sense strand
gguuuaugcucacauuuau

SEQ ID NO: 1539582 - RNA, 19 nt, Homo sapiens
  misc_RNA (1)...(19): siRNA sense strand
ucaccaguaugagcucuua

SEQ ID NO: 1539583 - RNA, 19 nt, Homo sapiens
  misc_RNA (1)...(19): siRNA sense strand
caacaugcuuuauggaacu

SEQ ID NO: 1539584 - RNA, 19 nt, Homo sapiens
  misc_RNA (1)...(19): siRNA sense strand
gaugucagcuggcccaaaa

SEQ ID NO: 1539585 - RNA, 19 nt, Homo sapiens
  misc_RNA (1)...(19): siRNA sense strand
gcucugcaccaaaguauau

SEQ ID NO: 1539586 - RNA, 19 nt, Homo sapiens
  misc_RNA (1)...(19): siRNA sense strand
augaauggguugcaguuaa

SEQ ID NO: 1539587 - RNA, 19 nt, Homo sapiens
  misc_RNA (1)...(19): siRNA sense strand
aagcacaucuaaauacauc

SEQ ID NO: 1539588 - RNA, 19 nt, Homo sapiens
  misc_RNA (1)...(19): siRNA sense strand
ggaacgaacauaaagaaac

SEQ ID NO: 1539589 - RNA, 19 nt, Homo sapiens
  misc_RNA (1)...(19): siRNA sense strand
caaccuuauugauagaaga

SEQ ID NO: 1539590 - RNA, 19 nt, Homo sapiens
  misc_RNA (1)...(19): siRNA sense strand
gcacaucuaaauacaucuu

SEQ ID NO: 1539591 - RNA, 19 nt, Homo sapiens
  misc_RNA (1)...(19): siRNA sense strand
ucggauggcugucaugcuu

SEQ ID NO: 1539592 - RNA, 19 nt, Homo sapiens
  misc_RNA (1)...(19): siRNA sense strand
aaucagaucaacaugcuuu

SEQ ID NO: 1539593 - RNA, 19 nt, Homo sapiens
  misc_RNA (1)...(19): siRNA sense strand
cagauggaacgaacauaaa

SEQ ID NO: 1539594 - RNA, 19 nt, Homo sapiens
  misc_RNA (1)...(19): siRNA sense strand
ucaaucagaucaacaugcu

SEQ ID NO: 1539595 - RNA, 19 nt, Homo sapiens
  misc_RNA (1)...(19): siRNA sense strand
agacguuauuuccaucaaa

SEQ ID NO: 1539596 - RNA, 19 nt, Homo sapiens
  misc_RNA (1)...(19): siRNA sense strand
gagacguuauuuccaucaa

SEQ ID NO: 1539597 - RNA, 19 nt, Homo sapiens
  misc_RNA (1)...(19): siRNA sense strand
gaugaugagacguuauuuc

SEQ ID NO: 1539598 - RNA, 19 nt, Homo sapiens
  misc_RNA (1)...(19): siRNA sense strand
guuggaugaugagacguua

SEQ ID NO: 1539599 - RNA, 19 nt, Homo sapiens
  misc_RNA (1)...(19): siRNA sense strand
gauggaacgaacauaaaga

SEQ ID NO: 1539600 - RNA, 19 nt, Homo sapiens
  misc_RNA (1)...(19): siRNA sense strand
agaggguucucaccaguau

SEQ ID NO: 1539601 - RNA, 19 nt, Homo sapiens
  misc_RNA (1)...(19): siRNA sense strand
ucacauuuaucaucagcau

SEQ ID NO: 1539602 - RNA, 19 nt, Homo sapiens
  misc_RNA (1)...(19): siRNA sense strand
uugauuacuugaugacuug

SEQ ID NO: 1539603 - RNA, 19 nt, Homo sapiens
  misc_RNA (1)...(19): siRNA sense strand
ggugucccguucccaaaga

SEQ ID NO: 1539604 - RNA, 19 nt, Homo sapiens
  misc_RNA (1)...(19): siRNA sense strand
uccaagaacugauugaaaa

SEQ ID NO: 1539605 - RNA, 19 nt, Homo sapiens
  misc_RNA (1)...(19): siRNA sense strand
auacucaaacgccucuuua

SEQ ID NO: 1539606 - RNA, 19 nt, Homo sapiens
  misc_RNA (1)...(19): siRNA sense strand
ugaauggguugcaguuaac

SEQ ID NO: 1539607 - RNA, 19 nt, Homo sapiens
  misc_RNA (1)...(19): siRNA sense strand
gcaccacuccaagaacuga

SEQ ID NO: 1539608 - RNA, 19 nt, Homo sapiens
  misc_RNA (1)...(19): siRNA sense strand
cagaucaacaugcuuuaug

SEQ ID NO: 1539609 - RNA, 19 nt, Homo sapiens
  misc_RNA (1)...(19): siRNA sense strand
gaucaacaugcuuuaugga

SEQ ID NO: 1539610 - RNA, 19 nt, Homo sapiens
  misc_RNA (1)...(19): siRNA sense strand
auacaucuuucaagcacuu

SEQ ID NO: 1539611 - RNA, 19 nt, Homo sapiens
  misc_RNA (1)...(19): siRNA sense strand
caggaggaagcacaucuaa

SEQ ID NO: 1539612 - RNA, 19 nt, Homo sapiens
  misc_RNA (1)...(19): siRNA sense strand
caaugaauggguugcaguu

SEQ ID NO: 1539613 - RNA, 19 nt, Homo sapiens
  misc_RNA (1)...(19): siRNA sense strand
aguaugagcucuuaaaaca

SEQ ID NO: 1539614 - RNA, 19 nt, Homo sapiens
  misc_RNA (1)...(19): siRNA sense strand
agagaguuguccagugaug

SEQ ID NO: 1539615 - RNA, 19 nt, Homo sapiens
  misc_RNA (1)...(19): siRNA sense strand
ccaggaauucaaccuuauu

SEQ ID NO: 1539616 - RNA, 19 nt, Homo sapiens
  misc_RNA (1)...(19): siRNA sense strand
gaagcacaucuaaauacau

SEQ ID NO: 1539617 - RNA, 19 nt, Homo sapiens
  misc_RNA (1)...(19): siRNA sense strand
uaggguuuaugcucacauu

SEQ ID NO: 1539618 - RNA, 19 nt, Homo sapiens
  misc_RNA (1)...(19): siRNA sense strand
gacguuauuuccaucaaaa

SEQ ID NO: 1539619 - RNA, 19 nt, Homo sapiens
  misc_RNA (1)...(19): siRNA sense strand
aaacucaccucaaaagaca

SEQ ID NO: 1539620 - RNA, 19 nt, Homo sapiens
  misc_RNA (1)...(19): siRNA sense strand
cccaaagaauuucaugucu

SEQ ID NO: 1539621 - RNA, 19 nt, Homo sapiens
  misc_RNA (1)...(19): siRNA sense strand
uuaacacuguggauuucuu

SEQ ID NO: 1539622 - RNA, 19 nt, Homo sapiens
  misc_RNA (1)...(19): siRNA sense strand
cacuguggauuucuucaau

SEQ ID NO: 1539623 - RNA, 19 nt, Homo sapiens
  misc_RNA (1)...(19): siRNA sense strand
agaucaacaugcuuuaugg

SEQ ID NO: 1539624 - RNA, 19 nt, Homo sapiens
  misc_RNA (1)...(19): siRNA sense strand
gaguaucauugggcagaug

SEQ ID NO: 1539625 - RNA, 19 nt, Homo sapiens
  misc_RNA (1)...(19): siRNA sense strand
gauccagcuucaggaggaa

SEQ ID NO: 1539626 - RNA, 19 nt, Homo sapiens
  misc_RNA (1)...(19): siRNA sense strand
caggaauucaaccuuauug

SEQ ID NO: 1539627 - RNA, 19 nt, Homo sapiens
  misc_RNA (1)...(19): siRNA sense strand
cagaggguucucaccagua

SEQ ID NO: 1539628 - RNA, 19 nt, Homo sapiens
  misc_RNA (1)...(19): siRNA sense strand
ucaggaggaagcacaucua

SEQ ID NO: 1539629 - RNA, 19 nt, Homo sapiens
  misc_RNA (1)...(19): siRNA sense strand
ccuuauugauagaagagaa

SEQ ID NO: 1539630 - RNA, 19 nt, Homo sapiens
  misc_RNA (1)...(19): siRNA sense strand
ggaacuaucacagacuucu

SEQ ID NO: 1539631 - RNA, 19 nt, Homo sapiens
  misc_RNA (1)...(19): siRNA sense strand
uccaggaauucaaccuuau

SEQ ID NO: 1539632 - RNA, 19 nt, Homo sapiens
  misc_RNA (1)...(19): siRNA sense strand
ggaugaugagacguuauuu

SEQ ID NO: 1539633 - RNA, 19 nt, Homo sapiens
  misc_RNA (1)...(19): siRNA sense strand
uggaugaugagacguuauu

SEQ ID NO: 1539634 - RNA, 19 nt, Homo sapiens
  misc_RNA (1)...(19): siRNA sense strand
aggaccaguuggaugauga

SEQ ID NO: 1539635 - RNA, 19 nt, Homo sapiens
  misc_RNA (1)...(19): siRNA sense strand
uaacacuguggauuucuuc

SEQ ID NO: 1539636 - RNA, 19 nt, Homo sapiens
  misc_RNA (1)...(19): siRNA sense strand
augcucacauuuaucauca

SEQ ID NO: 1539637 - RNA, 19 nt, Homo sapiens
  misc_RNA (1)...(19): siRNA sense strand
aaaccaaagaagaacauuc

SEQ ID NO: 1539638 - RNA, 19 nt, Homo sapiens
  misc_RNA (1)...(19): siRNA sense strand
ggaagaucucaaugaaugg

SEQ ID NO: 1539639 - RNA, 19 nt, Homo sapiens
  misc_RNA (1)...(19): siRNA sense strand
gggcagauggaacgaacau

SEQ ID NO: 1539640 - RNA, 19 nt, Homo sapiens
  misc_RNA (1)...(19): siRNA sense strand
uauacucaaacgccucuuu

SEQ ID NO: 1539641 - RNA, 19 nt, Homo sapiens
  misc_RNA (1)...(19): siRNA sense strand
gcaaauaaaugccaccuua

SEQ ID NO: 1539642 - RNA, 19 nt, Homo sapiens
  misc_RNA (1)...(19): siRNA sense strand
agagauggcugaagauaua

SEQ ID NO: 1539643 - RNA, 19 nt, Homo sapiens
  misc_RNA (1)...(19): siRNA sense strand
guauggaacuucucacaaa

SEQ ID NO: 1539644 - RNA, 19 nt, Homo sapiens
  misc_RNA (1)...(19): siRNA sense strand
gagcagugccuacucaaua

SEQ ID NO: 1539645 - RNA, 19 nt, Homo sapiens
  misc_RNA (1)...(19): siRNA sense strand
cagauagacuuaugaaaga

SEQ ID NO: 1539646 - RNA, 19 nt, Homo sapiens
  misc_RNA (1)...(19): siRNA sense strand
uuauaugacuggcauguua

SEQ ID NO: 1539647 - RNA, 19 nt, Homo sapiens
  misc_RNA (1)...(19): siRNA sense strand
gaugcuagaucaaccacua

SEQ ID NO: 1539648 - RNA, 19 nt, Homo sapiens
  misc_RNA (1)...(19): siRNA sense strand
gcccaacaauccuauaauu

SEQ ID NO: 1539649 - RNA, 19 nt, Homo sapiens
  misc_RNA (1)...(19): siRNA sense strand
aaggauaacuuuccauuug

SEQ ID NO: 1539650 - RNA, 19 nt, Homo sapiens
  misc_RNA (1)...(19): siRNA sense strand
caauugaagugguugauau

SEQ ID NO: 1539651 - RNA, 19 nt, Homo sapiens
  misc_RNA (1)...(19): siRNA sense strand
gaagagauggcugaagaua

SEQ ID NO: 1539652 - RNA, 19 nt, Homo sapiens
  misc_RNA (1)...(19): siRNA sense strand
gcaccuggauguugagaug

SEQ ID NO: 1539653 - RNA, 19 nt, Homo sapiens
  misc_RNA (1)...(19): siRNA sense strand
ggaagaagaagaagagaug

SEQ ID NO: 1539654 - RNA, 19 nt, Homo sapiens
  misc_RNA (1)...(19): siRNA sense strand
gguguuaccuguucucuca

SEQ ID NO: 1539655 - RNA, 19 nt, Homo sapiens
  misc_RNA (1)...(19): siRNA sense strand
aagaagagauggcugaaga

SEQ ID NO: 1539656 - RNA, 19 nt, Homo sapiens
  misc_RNA (1)...(19): siRNA sense strand
ugaagugguugauauguga

SEQ ID NO: 1539657 - RNA, 19 nt, Homo sapiens
  misc_RNA (1)...(19): siRNA sense strand
gaagaagagccuauuagug

SEQ ID NO: 1539658 - RNA, 19 nt, Homo sapiens
  misc_RNA (1)...(19): siRNA sense strand
uauauaaccuuccuaagca

SEQ ID NO: 1539659 - RNA, 19 nt, Homo sapiens
  misc_RNA (1)...(19): siRNA sense strand
ggaggagcauuauguaugg

SEQ ID NO: 1539660 - RNA, 19 nt, Homo sapiens
  misc_RNA (1)...(19): siRNA sense strand
ucaaaggcaagaccauuua

SEQ ID NO: 1539661 - RNA, 19 nt, Homo sapiens
  misc_RNA (1)...(19): siRNA sense strand
cuaagcaccuggauguuga

SEQ ID NO: 1539662 - RNA, 19 nt, Homo sapiens
  misc_RNA (1)...(19): siRNA sense strand
caacaucacggaauccuau

SEQ ID NO: 1539663 - RNA, 19 nt, Homo sapiens
  misc_RNA (1)...(19): siRNA sense strand
ugaaagagcucagggacau

SEQ ID NO: 1539664 - RNA, 19 nt, Homo sapiens
  misc_RNA (1)...(19): siRNA sense strand
gaacaacaauuugcuucgu

SEQ ID NO: 1539665 - RNA, 19 nt, Homo sapiens
  misc_RNA (1)...(19): siRNA sense strand
ggaagaagagccuauuagu

SEQ ID NO: 1539666 - RNA, 19 nt, Homo sapiens
  misc_RNA (1)...(19): siRNA sense strand
gcaauugaagugguugaua

SEQ ID NO: 1539667 - RNA, 19 nt, Homo sapiens
  misc_RNA (1)...(19): siRNA sense strand
uagaagacuuagaucacua

SEQ ID NO: 1539668 - RNA, 19 nt, Homo sapiens
  misc_RNA (1)...(19): siRNA sense strand
gcagaagguugacccugau

SEQ ID NO: 1539669 - RNA, 19 nt, Homo sapiens
  misc_RNA (1)...(19): siRNA sense strand
acuaugagaugaaggaaga

SEQ ID NO: 1539670 - RNA, 19 nt, Homo sapiens
  misc_RNA (1)...(19): siRNA sense strand
agacuuagaucacuaugag

SEQ ID NO: 1539671 - RNA, 19 nt, Homo sapiens
  misc_RNA (1)...(19): siRNA sense strand
gaaggaagaagagccuauu

SEQ ID NO: 1539672 - RNA, 19 nt, Homo sapiens
  misc_RNA (1)...(19): siRNA sense strand
ggauaacuuuccauuugau

SEQ ID NO: 1539673 - RNA, 19 nt, Homo sapiens
  misc_RNA (1)...(19): siRNA sense strand
gucagaggaugaaggaauu

SEQ ID NO: 1539674 - RNA, 19 nt, Homo sapiens
  misc_RNA (1)...(19): siRNA sense strand
cgauaugguuuguggauuc

SEQ ID NO: 1539675 - RNA, 19 nt, Homo sapiens
  misc_RNA (1)...(19): siRNA sense strand
agaagaagaggaagaagaa

SEQ ID NO: 1539676 - RNA, 19 nt, Homo sapiens
  misc_RNA (1)...(19): siRNA sense strand
caacaauccuauaauucca

SEQ ID NO: 1539677 - RNA, 19 nt, Homo sapiens
  misc_RNA (1)...(19): siRNA sense strand
ucagauagacuuaugaaag

SEQ ID NO: 1539678 - RNA, 19 nt, Homo sapiens
  misc_RNA (1)...(19): siRNA sense strand
gaggaugaaggaauugaaa

SEQ ID NO: 1539679 - RNA, 19 nt, Homo sapiens
  misc_RNA (1)...(19): siRNA sense strand
gagcccaacaauccuauaa

SEQ ID NO: 1539680 - RNA, 19 nt, Homo sapiens
  misc_RNA (1)...(19): siRNA sense strand
caaaggcaagaccauuuaa

SEQ ID NO: 1539681 - RNA, 19 nt, Homo sapiens
  misc_RNA (1)...(19): siRNA sense strand
ggaauccuauccaucuucu

SEQ ID NO: 1539682 - RNA, 19 nt, Homo sapiens
  misc_RNA (1)...(19): siRNA sense strand
cgagugguguuaccuguuc

SEQ ID NO: 1539683 - RNA, 19 nt, Homo sapiens
  misc_RNA (1)...(19): siRNA sense strand
ugacuggcauguuaaacug

SEQ ID NO: 1539684 - RNA, 19 nt, Homo sapiens
  misc_RNA (1)...(19): siRNA sense strand
gaacgucuagaagauacua

SEQ ID NO: 1539685 - RNA, 19 nt, Homo sapiens
  misc_RNA (1)...(19): siRNA sense strand
uagaaucggucaucaugca

SEQ ID NO: 1539686 - RNA, 19 nt, Homo sapiens
  misc_RNA (1)...(19): siRNA sense strand
gaaagagcucagggacaua

SEQ ID NO: 1539687 - RNA, 19 nt, Homo sapiens
  misc_RNA (1)...(19): siRNA sense strand
gaaugggacaacagaagaa

SEQ ID NO: 1539688 - RNA, 19 nt, Homo sapiens
  misc_RNA (1)...(19): siRNA sense strand
gaagauacuaagaacaaca

SEQ ID NO: 1539689 - RNA, 19 nt, Homo sapiens
  misc_RNA (1)...(19): siRNA sense strand
uuagaucacuaugagauga

SEQ ID NO: 1539690 - RNA, 19 nt, Homo sapiens
  misc_RNA (1)...(19): siRNA sense strand
aggauaacuuuccauuuga

SEQ ID NO: 1539691 - RNA, 19 nt, Homo sapiens
  misc_RNA (1)...(19): siRNA sense strand
gcucagggacauauacaga

SEQ ID NO: 1539692 - RNA, 19 nt, Homo sapiens
  misc_RNA (1)...(19): siRNA sense strand
acagaucacagaguuauaa

SEQ ID NO: 1539693 - RNA, 19 nt, Homo sapiens
  misc_RNA (1)...(19): siRNA sense strand
caagagcccaacaauccua

SEQ ID NO: 1539694 - RNA, 19 nt, Homo sapiens
  misc_RNA (1)...(19): siRNA sense strand
cagaagaagaggaagaaga

SEQ ID NO: 1539695 - RNA, 19 nt, Homo sapiens
  misc_RNA (1)...(19): siRNA sense strand
ucaauagaaucggucauca

SEQ ID NO: 1539696 - RNA, 19 nt, Homo sapiens
  misc_RNA (1)...(19): siRNA sense strand
auauacagaucacagaguu

SEQ ID NO: 1539697 - RNA, 19 nt, Homo sapiens
  misc_RNA (1)...(19): siRNA sense strand
agugcaagcuucagauaga

SEQ ID NO: 1539698 - RNA, 19 nt, Homo sapiens
  misc_RNA (1)...(19): siRNA sense strand
gcaaagccagagugcaguu

SEQ ID NO: 1539699 - RNA, 19 nt, Homo sapiens
  misc_RNA (1)...(19): siRNA sense strand
gaagguugacccugauagu

SEQ ID NO: 1539700 - RNA, 19 nt, Homo sapiens
  misc_RNA (1)...(19): siRNA sense strand
gaaucggucaucaugcaaa

SEQ ID NO: 1539701 - RNA, 19 nt, Homo sapiens
  misc_RNA (1)...(19): siRNA sense strand
agaagaggaagaagaagaa

SEQ ID NO: 1539702 - RNA, 19 nt, Homo sapiens
  misc_RNA (1)...(19): siRNA sense strand
guacaccccuccaaaggaa

SEQ ID NO: 1539703 - RNA, 19 nt, Homo sapiens
  misc_RNA (1)...(19): siRNA sense strand
gguggaggagcauuaugua

SEQ ID NO: 1539704 - RNA, 19 nt, Homo sapiens
  misc_RNA (1)...(19): siRNA sense strand
uccauuugauccuccauuu

SEQ ID NO: 1539705 - RNA, 19 nt, Homo sapiens
  misc_RNA (1)...(19): siRNA sense strand
ucagggacauauacagauc

SEQ ID NO: 1539706 - RNA, 19 nt, Homo sapiens
  misc_RNA (1)...(19): siRNA sense strand
gaagauauagaagacuuag

SEQ ID NO: 1539707 - RNA, 19 nt, Homo sapiens
  misc_RNA (1)...(19): siRNA sense strand
cugaagauauagaagacuu

SEQ ID NO: 1539708 - RNA, 19 nt, Homo sapiens
  misc_RNA (1)...(19): siRNA sense strand
acaagaaccacgagcgauu

SEQ ID NO: 1539709 - RNA, 19 nt, Homo sapiens
  misc_RNA (1)...(19): siRNA sense strand
ggucaucaugcaaauaaau

SEQ ID NO: 1539710 - RNA, 19 nt, Homo sapiens
  misc_RNA (1)...(19): siRNA sense strand
gcaacaucacggaauccua

SEQ ID NO: 1539711 - RNA, 19 nt, Homo sapiens
  misc_RNA (1)...(19): siRNA sense strand
caaauaaaugccaccuuag

SEQ ID NO: 1539712 - RNA, 19 nt, Homo sapiens
  misc_RNA (1)...(19): siRNA sense strand
ucugaagacccaaaucuga

SEQ ID NO: 1539713 - RNA, 19 nt, Homo sapiens
  misc_RNA (1)...(19): siRNA sense strand
ucagugcaagcuucagaua

SEQ ID NO: 1539714 - RNA, 19 nt, Homo sapiens
  misc_RNA (1)...(19): siRNA sense strand
aauagaaucggucaucaug

SEQ ID NO: 1539715 - RNA, 19 nt, Homo sapiens
  misc_RNA (1)...(19): siRNA sense strand
uaugguuuguggauucuga

SEQ ID NO: 1539716 - RNA, 19 nt, Homo sapiens
  misc_RNA (1)...(19): siRNA sense strand
ucuagaagauacuaagaac

SEQ ID NO: 1539717 - RNA, 19 nt, Homo sapiens
  misc_RNA (1)...(19): siRNA sense strand
ucggucaucaugcaaauaa

SEQ ID NO: 1539718 - RNA, 19 nt, Homo sapiens
  misc_RNA (1)...(19): siRNA sense strand
cauuugauccuccauuugu

SEQ ID NO: 1539719 - RNA, 19 nt, Homo sapiens
  misc_RNA (1)...(19): siRNA sense strand
aaggaagaagagccuauua

SEQ ID NO: 1539720 - RNA, 19 nt, Homo sapiens
  misc_RNA (1)...(19): siRNA sense strand
ucuggaacgucuagaagau

SEQ ID NO: 1539721 - RNA, 19 nt, Homo sapiens
  misc_RNA (1)...(19): siRNA sense strand
gauaugguuuguggauucu

SEQ ID NO: 1539722 - RNA, 19 nt, Homo sapiens
  misc_RNA (1)...(19): siRNA sense strand
uaaaugccaccuuagucaa

SEQ ID NO: 1539723 - RNA, 19 nt, Homo sapiens
  misc_RNA (1)...(19): siRNA sense strand
ggaagacucaaaggcaaga

SEQ ID NO: 1539724 - RNA, 19 nt, Homo sapiens
  misc_RNA (1)...(19): siRNA sense strand
aaaggcaagaccauuuaaa

SEQ ID NO: 1539725 - RNA, 19 nt, Homo sapiens
  misc_RNA (1)...(19): siRNA sense strand
aaauaaaugccaccuuagu

SEQ ID NO: 1539726 - RNA, 19 nt, Homo sapiens
  misc_RNA (1)...(19): siRNA sense strand
aagaagaggaagaagaaga

SEQ ID NO: 1539727 - RNA, 19 nt, Homo sapiens
  misc_RNA (1)...(19): siRNA sense strand
uggaggagcauuauguaug

SEQ ID NO: 1539728 - RNA, 19 nt, Homo sapiens
  misc_RNA (1)...(19): siRNA sense strand
uauaugacuggcauguuaa

SEQ ID NO: 1539729 - RNA, 19 nt, Homo sapiens
  misc_RNA (1)...(19): siRNA sense strand
gacauauacagaucacaga

SEQ ID NO: 1539730 - RNA, 19 nt, Homo sapiens
  misc_RNA (1)...(19): siRNA sense strand
ggucagugcaagcuucaga

SEQ ID NO: 1539731 - RNA, 19 nt, Homo sapiens
  misc_RNA (1)...(19): siRNA sense strand
aaagucagaggaugaagga

SEQ ID NO: 1539732 - RNA, 19 nt, Homo sapiens
  misc_RNA (1)...(19): siRNA sense strand
ccuaagcaccuggauguug

SEQ ID NO: 1539733 - RNA, 19 nt, Homo sapiens
  misc_RNA (1)...(19): siRNA sense strand
ccaacaauccuauaauucc

SEQ ID NO: 1539734 - RNA, 19 nt, Homo sapiens
  misc_RNA (1)...(19): siRNA sense strand
aaaugccaccuuagucaaa

SEQ ID NO: 1539735 - RNA, 19 nt, Homo sapiens
  misc_RNA (1)...(19): siRNA sense strand
auaaaugccaccuuaguca

SEQ ID NO: 1539736 - RNA, 19 nt, Homo sapiens
  misc_RNA (1)...(19): siRNA sense strand
ugaaguuccuggcguccau

SEQ ID NO: 1539737 - RNA, 19 nt, Homo sapiens
  misc_RNA (1)...(19): siRNA sense strand
gcaagcuucagauagacuu

SEQ ID NO: 1539738 - RNA, 19 nt, Homo sapiens
  misc_RNA (1)...(19): siRNA sense strand
caagaaccacgagcgauuc

SEQ ID NO: 1539739 - RNA, 19 nt, Homo sapiens
  misc_RNA (1)...(19): siRNA sense strand
caagcuucagauagacuua

SEQ ID NO: 1539740 - RNA, 19 nt, Homo sapiens
  misc_RNA (1)...(19): siRNA sense strand
ggagcagugccuacucaau

SEQ ID NO: 1539741 - RNA, 19 nt, Homo sapiens
  misc_RNA (1)...(19): siRNA sense strand
ggaagggacuuaagagaaa

SEQ ID NO: 1539742 - RNA, 19 nt, Homo sapiens
  misc_RNA (1)...(19): siRNA sense strand
gaguaaagcuagcaaagga

SEQ ID NO: 1539743 - RNA, 19 nt, Homo sapiens
  misc_RNA (1)...(19): siRNA sense strand
gcacuuggcuuucguuacc

SEQ ID NO: 1539744 - RNA, 19 nt, Homo sapiens
  misc_RNA (1)...(19): siRNA sense strand
gaggagggcuuugauagag

SEQ ID NO: 1539745 - RNA, 19 nt, Homo sapiens
  misc_RNA (1)...(19): siRNA sense strand
gauagagaggcaagaguaa

SEQ ID NO: 1539746 - RNA, 19 nt, Homo sapiens
  misc_RNA (1)...(19): siRNA sense strand
ggaggagggcuuugauaga

SEQ ID NO: 1539747 - RNA, 19 nt, Homo sapiens
  misc_RNA (1)...(19): siRNA sense strand
gaagguggaagagcaggua

SEQ ID NO: 1539748 - RNA, 19 nt, Homo sapiens
  misc_RNA (1)...(19): siRNA sense strand
ugauagagaggcaagagua

SEQ ID NO: 1539749 - RNA, 19 nt, Homo sapiens
  misc_RNA (1)...(19): siRNA sense strand
gaagggacuuaagagaaag

SEQ ID NO: 1539750 - RNA, 19 nt, Homo sapiens
  misc_RNA (1)...(19): siRNA sense strand
ccggaaguauugauuagug

SEQ ID NO: 1539751 - RNA, 19 nt, Homo sapiens
  misc_RNA (1)...(19): siRNA sense strand
ggccggaaguauugauuag

SEQ ID NO: 1539752 - RNA, 19 nt, Homo sapiens
  misc_RNA (1)...(19): siRNA sense strand
ggagagagccucgggguuu

SEQ ID NO: 1539753 - RNA, 19 nt, Homo sapiens
  misc_RNA (1)...(19): siRNA sense strand
gggaggagggcuuugauag

SEQ ID NO: 1539754 - RNA, 19 nt, Homo sapiens
  misc_RNA (1)...(19): siRNA sense strand
gcucacugcacuuggcuuu

SEQ ID NO: 1539755 - RNA, 19 nt, Homo sapiens
  misc_RNA (1)...(19): siRNA sense strand
ggcguggcgugguaccuuu

SEQ ID NO: 1539756 - RNA, 19 nt, Homo sapiens
  misc_RNA (1)...(19): siRNA sense strand
uggaagggacuuaagagaa

SEQ ID NO: 1539757 - RNA, 19 nt, Homo sapiens
  misc_RNA (1)...(19): siRNA sense strand
caagaguaaagcuagcaaa

SEQ ID NO: 1539758 - RNA, 19 nt, Homo sapiens
  misc_RNA (1)...(19): siRNA sense strand
gcaagaguaaagcuagcaa

SEQ ID NO: 1539759 - RNA, 19 nt, Homo sapiens
  misc_RNA (1)...(19): siRNA sense strand
gagagagccucgggguuuu

SEQ ID NO: 1539760 - RNA, 19 nt, Homo sapiens
  misc_RNA (1)...(19): siRNA sense strand
acacgugucugugcaaggu

SEQ ID NO: 1539761 - RNA, 19 nt, Homo sapiens
  misc_RNA (1)...(19): siRNA sense strand
gaagggcguggccugaagu

SEQ ID NO: 1539762 - RNA, 19 nt, Homo sapiens
  misc_RNA (1)...(19): siRNA sense strand
uugaggcacgggagaguua

SEQ ID NO: 1539763 - RNA, 19 nt, Homo sapiens
  misc_RNA (1)...(19): siRNA sense strand
ucacugcacuuggcuuucg

SEQ ID NO: 1539764 - RNA, 19 nt, Homo sapiens
  misc_RNA (1)...(19): siRNA sense strand
guggaagggacuuaagaga

SEQ ID NO: 1539765 - RNA, 19 nt, Homo sapiens
  misc_RNA (1)...(19): siRNA sense strand
ucaugcuccuggccucuga

SEQ ID NO: 1539766 - RNA, 19 nt, Homo sapiens
  misc_RNA (1)...(19): siRNA sense strand
gggcgacuuuaccuacaag

SEQ ID NO: 1539767 - RNA, 19 nt, Homo sapiens
  misc_RNA (1)...(19): siRNA sense strand
gcgauucugggucguagga

SEQ ID NO: 1539768 - RNA, 19 nt, Homo sapiens
  misc_RNA (1)...(19): siRNA sense strand
uagagaggcaagaguaaag

SEQ ID NO: 1539769 - RNA, 19 nt, Homo sapiens
  misc_RNA (1)...(19): siRNA sense strand
gaagugggcagggccaaaa

SEQ ID NO: 1539770 - RNA, 19 nt, Homo sapiens
  misc_RNA (1)...(19): siRNA sense strand
gaaauucagugaucucuuc

SEQ ID NO: 1539771 - RNA, 19 nt, Homo sapiens
  misc_RNA (1)...(19): siRNA sense strand
ggacuuagcucuggugagu

SEQ ID NO: 1539772 - RNA, 19 nt, Homo sapiens
  misc_RNA (1)...(19): siRNA sense strand
gagagaaguuuccugaguu

SEQ ID NO: 1539773 - RNA, 19 nt, Homo sapiens
  misc_RNA (1)...(19): siRNA sense strand
caacuucuauccaccauug

SEQ ID NO: 1539774 - RNA, 19 nt, Homo sapiens
  misc_RNA (1)...(19): siRNA sense strand
gaaagccucuguaccuaau

SEQ ID NO: 1539775 - RNA, 19 nt, Homo sapiens
  misc_RNA (1)...(19): siRNA sense strand
acacagaguuuccagauga

SEQ ID NO: 1539776 - RNA, 19 nt, Homo sapiens
  misc_RNA (1)...(19): siRNA sense strand
gaugagaguugcuaugaca

SEQ ID NO: 1539777 - RNA, 19 nt, Homo sapiens
  misc_RNA (1)...(19): siRNA sense strand
agacucaguucucaacaua

SEQ ID NO: 1539778 - RNA, 19 nt, Homo sapiens
  misc_RNA (1)...(19): siRNA sense strand
gcggagagcugcugaacau

SEQ ID NO: 1539779 - RNA, 19 nt, Homo sapiens
  misc_RNA (1)...(19): siRNA sense strand
ggacaaaguacuccagcua

SEQ ID NO: 1539780 - RNA, 19 nt, Homo sapiens
  misc_RNA (1)...(19): siRNA sense strand
gcgaggagauggugaagau

SEQ ID NO: 1539781 - RNA, 19 nt, Homo sapiens
  misc_RNA (1)...(19): siRNA sense strand
gcaugaauauuguccugaa

SEQ ID NO: 1539782 - RNA, 19 nt, Homo sapiens
  misc_RNA (1)...(19): siRNA sense strand
cagcuucucucuacuucua

SEQ ID NO: 1539783 - RNA, 19 nt, Homo sapiens
  misc_RNA (1)...(19): siRNA sense strand
ggaggagucuguaggaaag

SEQ ID NO: 1539784 - RNA, 19 nt, Homo sapiens
  misc_RNA (1)...(19): siRNA sense strand
gcuaccaccugcucuacua

SEQ ID NO: 1539785 - RNA, 19 nt, Homo sapiens
  misc_RNA (1)...(19): siRNA sense strand
guacucaguuggugugguu

SEQ ID NO: 1539786 - RNA, 19 nt, Homo sapiens
  misc_RNA (1)...(19): siRNA sense strand
ggaaagccucuguaccuaa

SEQ ID NO: 1539787 - RNA, 19 nt, Homo sapiens
  misc_RNA (1)...(19): siRNA sense strand
ggaaagguguaugagcauu

SEQ ID NO: 1539788 - RNA, 19 nt, Homo sapiens
  misc_RNA (1)...(19): siRNA sense strand
uaagacuacuucagaaugu

SEQ ID NO: 1539789 - RNA, 19 nt, Homo sapiens
  misc_RNA (1)...(19): siRNA sense strand
ggagagcugcugaacauga

SEQ ID NO: 1539790 - RNA, 19 nt, Homo sapiens
  misc_RNA (1)...(19): siRNA sense strand
ugacgaagcccacaagaug

SEQ ID NO: 1539791 - RNA, 19 nt, Homo sapiens
  misc_RNA (1)...(19): siRNA sense strand
gaucguggcuguuauugac

SEQ ID NO: 1539792 - RNA, 19 nt, Homo sapiens
  misc_RNA (1)...(19): siRNA sense strand
gaggagagauuggaaaggu

SEQ ID NO: 1539793 - RNA, 19 nt, Homo sapiens
  misc_RNA (1)...(19): siRNA sense strand
gaagagcagcauccucauu

SEQ ID NO: 1539794 - RNA, 19 nt, Homo sapiens
  misc_RNA (1)...(19): siRNA sense strand
agacaaggauagcauuaug

SEQ ID NO: 1539795 - RNA, 19 nt, Homo sapiens
  misc_RNA (1)...(19): siRNA sense strand
ucagaauguugcuaggaua

SEQ ID NO: 1539796 - RNA, 19 nt, Homo sapiens
  misc_RNA (1)...(19): siRNA sense strand
caaaagcgauaccaagauu

SEQ ID NO: 1539797 - RNA, 19 nt, Homo sapiens
  misc_RNA (1)...(19): siRNA sense strand
ucaagucccugcucaucaa

SEQ ID NO: 1539798 - RNA, 19 nt, Homo sapiens
  misc_RNA (1)...(19): siRNA sense strand
acaaccauaugucggauaa

SEQ ID NO: 1539799 - RNA, 19 nt, Homo sapiens
  misc_RNA (1)...(19): siRNA sense strand
gggcaaugcugagagagaa

SEQ ID NO: 1539800 - RNA, 19 nt, Homo sapiens
  misc_RNA (1)...(19): siRNA sense strand
agacuaaacuccucuucau

SEQ ID NO: 1539801 - RNA, 19 nt, Homo sapiens
  misc_RNA (1)...(19): siRNA sense strand
gggagaccuuugagcagua

SEQ ID NO: 1539802 - RNA, 19 nt, Homo sapiens
  misc_RNA (1)...(19): siRNA sense strand
gaaccuguacgagucauuu

SEQ ID NO: 1539803 - RNA, 19 nt, Homo sapiens
  misc_RNA (1)...(19): siRNA sense strand
ggagagagaagccaaugau

SEQ ID NO: 1539804 - RNA, 19 nt, Homo sapiens
  misc_RNA (1)...(19): siRNA sense strand
aagaggaucucaacagcaa

SEQ ID NO: 1539805 - RNA, 19 nt, Homo sapiens
  misc_RNA (1)...(19): siRNA sense strand
cuaaugaaguacugaguuc

SEQ ID NO: 1539806 - RNA, 19 nt, Homo sapiens
  misc_RNA (1)...(19): siRNA sense strand
ucauugccauggcuguuua

SEQ ID NO: 1539807 - RNA, 19 nt, Homo sapiens
  misc_RNA (1)...(19): siRNA sense strand
gauugcagguggagauguu

SEQ ID NO: 1539808 - RNA, 19 nt, Homo sapiens
  misc_RNA (1)...(19): siRNA sense strand
ccucuguaccuaauauuua

SEQ ID NO: 1539809 - RNA, 19 nt, Homo sapiens
  misc_RNA (1)...(19): siRNA sense strand
caacagcagcuucucucua

SEQ ID NO: 1539810 - RNA, 19 nt, Homo sapiens
  misc_RNA (1)...(19): siRNA sense strand
gaaagguguaugagcauug

SEQ ID NO: 1539811 - RNA, 19 nt, Homo sapiens
  misc_RNA (1)...(19): siRNA sense strand
ccauggcuguuuacacgua

SEQ ID NO: 1539812 - RNA, 19 nt, Homo sapiens
  misc_RNA (1)...(19): siRNA sense strand
gagaguugcuaugacaaug

SEQ ID NO: 1539813 - RNA, 19 nt, Homo sapiens
  misc_RNA (1)...(19): siRNA sense strand
gagagcugcugaacaugau

SEQ ID NO: 1539814 - RNA, 19 nt, Homo sapiens
  misc_RNA (1)...(19): siRNA sense strand
cugcacaccugccugauga

SEQ ID NO: 1539815 - RNA, 19 nt, Homo sapiens
  misc_RNA (1)...(19): siRNA sense strand
gaucucaacagcaaaggaa

SEQ ID NO: 1539816 - RNA, 19 nt, Homo sapiens
  misc_RNA (1)...(19): siRNA sense strand
guaagacuacuucagaaug

SEQ ID NO: 1539817 - RNA, 19 nt, Homo sapiens
  misc_RNA (1)...(19): siRNA sense strand
ggaggaauaugaggacucu

SEQ ID NO: 1539818 - RNA, 19 nt, Homo sapiens
  misc_RNA (1)...(19): siRNA sense strand
cgugauggcaugaauauug

SEQ ID NO: 1539819 - RNA, 19 nt, Homo sapiens
  misc_RNA (1)...(19): siRNA sense strand
agagagaaguuuccugagu

SEQ ID NO: 1539820 - RNA, 19 nt, Homo sapiens
  misc_RNA (1)...(19): siRNA sense strand
ccagacaaggauagcauua

SEQ ID NO: 1539821 - RNA, 19 nt, Homo sapiens
  misc_RNA (1)...(19): siRNA sense strand
aauuugaacugcuuuggaa

SEQ ID NO: 1539822 - RNA, 19 nt, Homo sapiens
  misc_RNA (1)...(19): siRNA sense strand
cauggaaugucugaugauu

SEQ ID NO: 1539823 - RNA, 19 nt, Homo sapiens
  misc_RNA (1)...(19): siRNA sense strand
ucuccgagcuauaucagaa

SEQ ID NO: 1539824 - RNA, 19 nt, Homo sapiens
  misc_RNA (1)...(19): siRNA sense strand
gugauggcaugaauauugu

SEQ ID NO: 1539825 - RNA, 19 nt, Homo sapiens
  misc_RNA (1)...(19): siRNA sense strand
uaugucagaugcaggaaga

SEQ ID NO: 1539826 - RNA, 19 nt, Homo sapiens
  misc_RNA (1)...(19): siRNA sense strand
gggaguggguccugaagag

SEQ ID NO: 1539827 - RNA, 19 nt, Homo sapiens
  misc_RNA (1)...(19): siRNA sense strand
acaccuagcuccccuguuu

SEQ ID NO: 1539828 - RNA, 19 nt, Homo sapiens
  misc_RNA (1)...(19): siRNA sense strand
aaaugucgcugccuccaau

SEQ ID NO: 1539829 - RNA, 19 nt, Homo sapiens
  misc_RNA (1)...(19): siRNA sense strand
uggaaugucugaugauugg

SEQ ID NO: 1539830 - RNA, 19 nt, Homo sapiens
  misc_RNA (1)...(19): siRNA sense strand
gggagccgaugguguuugu

SEQ ID NO: 1539831 - RNA, 19 nt, Homo sapiens
  misc_RNA (1)...(19): siRNA sense strand
gaccuucucuccgagcuau

SEQ ID NO: 1539832 - RNA, 19 nt, Homo sapiens
  misc_RNA (1)...(19): siRNA sense strand
gacaaggauagcauuauga

SEQ ID NO: 1539833 - RNA, 19 nt, Homo sapiens
  misc_RNA (1)...(19): siRNA sense strand
gaauuugaacugcuuugga

SEQ ID NO: 1539834 - RNA, 19 nt, Homo sapiens
  misc_RNA (1)...(19): siRNA sense strand
uaggauaccagaauuugaa

SEQ ID NO: 1539835 - RNA, 19 nt, Homo sapiens
  misc_RNA (1)...(19): siRNA sense strand
ggagaccuuugagcaguau

SEQ ID NO: 1539836 - RNA, 19 nt, Homo sapiens
  misc_RNA (1)...(19): siRNA sense strand
aaacuccucuucaugacau

SEQ ID NO: 1539837 - RNA, 19 nt, Homo sapiens
  misc_RNA (1)...(19): siRNA sense strand
cccaagcccagaaguguua

SEQ ID NO: 1539838 - RNA, 19 nt, Homo sapiens
  misc_RNA (1)...(19): siRNA sense strand
ggaugccaaggaugaguua

SEQ ID NO: 1539839 - RNA, 19 nt, Homo sapiens
  misc_RNA (1)...(19): siRNA sense strand
guaguccacccuucuaaug

SEQ ID NO: 1539840 - RNA, 19 nt, Homo sapiens
  misc_RNA (1)...(19): siRNA sense strand
guaugacguuuaugaagca

SEQ ID NO: 1539841 - RNA, 19 nt, Homo sapiens
  misc_RNA (1)...(19): siRNA sense strand
gcuaggauaccagaauuug

SEQ ID NO: 1539842 - RNA, 19 nt, Homo sapiens
  misc_RNA (1)...(19): siRNA sense strand
cuaccaagcggaaacgaaa

SEQ ID NO: 1539843 - RNA, 19 nt, Homo sapiens
  misc_RNA (1)...(19): siRNA sense strand
cagccugccucgcaagaga

SEQ ID NO: 1539844 - RNA, 19 nt, Homo sapiens
  misc_RNA (1)...(19): siRNA sense strand
cagaagcagcccaagauug

SEQ ID NO: 1539845 - RNA, 19 nt, Homo sapiens
  misc_RNA (1)...(19): siRNA sense strand
acuaaacuccucuucauga

SEQ ID NO: 1539846 - RNA, 19 nt, Homo sapiens
  misc_RNA (1)...(19): siRNA sense strand
ucaaccagauacuuaugga

SEQ ID NO: 1539847 - RNA, 19 nt, Homo sapiens
  misc_RNA (1)...(19): siRNA sense strand
gacgaagcccacaagauga

SEQ ID NO: 1539848 - RNA, 19 nt, Homo sapiens
  misc_RNA (1)...(19): siRNA sense strand
guaugagcauugugacauc

SEQ ID NO: 1539849 - RNA, 19 nt, Homo sapiens
  misc_RNA (1)...(19): siRNA sense strand
acaaaguacuccagcuaca

SEQ ID NO: 1539850 - RNA, 19 nt, Homo sapiens
  misc_RNA (1)...(19): siRNA sense strand
gcagauugcagguggagau

SEQ ID NO: 1539851 - RNA, 19 nt, Homo sapiens
  misc_RNA (1)...(19): siRNA sense strand
gagccgaugguguuuguau

SEQ ID NO: 1539852 - RNA, 19 nt, Homo sapiens
  misc_RNA (1)...(19): siRNA sense strand
caacaccaagcagaacuuu

SEQ ID NO: 1539853 - RNA, 19 nt, Homo sapiens
  misc_RNA (1)...(19): siRNA sense strand
caacagcaaaggaaagaag

SEQ ID NO: 1539854 - RNA, 19 nt, Homo sapiens
  misc_RNA (1)...(19): siRNA sense strand
agagaaguuuccugaguuc

SEQ ID NO: 1539855 - RNA, 19 nt, Homo sapiens
  misc_RNA (1)...(19): siRNA sense strand
gagacuaaacuccucuuca

SEQ ID NO: 1539856 - RNA, 19 nt, Homo sapiens
  misc_RNA (1)...(19): siRNA sense strand
ggacauggagacuaaacuc

SEQ ID NO: 1539857 - RNA, 19 nt, Homo sapiens
  misc_RNA (1)...(19): siRNA sense strand
ucaagaacaucccgaaaau

SEQ ID NO: 1539858 - RNA, 19 nt, Homo sapiens
  misc_RNA (1)...(19): siRNA sense strand
ggugcgauuuggucaacaa

SEQ ID NO: 1539859 - RNA, 19 nt, Homo sapiens
  misc_RNA (1)...(19): siRNA sense strand
cagaagaggaagacacgaa

SEQ ID NO: 1539860 - RNA, 19 nt, Homo sapiens
  misc_RNA (1)...(19): siRNA sense strand
gcucuucaaggcccacuuu

SEQ ID NO: 1539861 - RNA, 19 nt, Homo sapiens
  misc_RNA (1)...(19): siRNA sense strand
cggauaaggaugagaguug

SEQ ID NO: 1539862 - RNA, 19 nt, Homo sapiens
  misc_RNA (1)...(19): siRNA sense strand
aaggauagcauuaugaaca

SEQ ID NO: 1539863 - RNA, 19 nt, Homo sapiens
  misc_RNA (1)...(19): siRNA sense strand
acaaggauagcauuaugaa

SEQ ID NO: 1539864 - RNA, 19 nt, Homo sapiens
  misc_RNA (1)...(19): siRNA sense strand
ugcagcaccucaaauacaa

SEQ ID NO: 1539865 - RNA, 19 nt, Homo sapiens
  misc_RNA (1)...(19): siRNA sense strand
gccacgugaugauggguaa

SEQ ID NO: 1539866 - RNA, 19 nt, Homo sapiens
  misc_RNA (1)...(19): siRNA sense strand
acaccugccugaugaugga

SEQ ID NO: 1539867 - RNA, 19 nt, Homo sapiens
  misc_RNA (1)...(19): siRNA sense strand
ggaggagccaguugauauc

SEQ ID NO: 1539868 - RNA, 19 nt, Homo sapiens
  misc_RNA (1)...(19): siRNA sense strand
uggaggagccaguugauau

SEQ ID NO: 1539869 - RNA, 19 nt, Homo sapiens
  misc_RNA (1)...(19): siRNA sense strand
auaaggagcugcgggcaau

SEQ ID NO: 1539870 - RNA, 19 nt, Homo sapiens
  misc_RNA (1)...(19): siRNA sense strand
gaaccuggcuucuguauuu

SEQ ID NO: 1539871 - RNA, 19 nt, Homo sapiens
  misc_RNA (1)...(19): siRNA sense strand
ggagcaggcuguacuauua

SEQ ID NO: 1539872 - RNA, 19 nt, Homo sapiens
  misc_RNA (1)...(19): siRNA sense strand
ggaguuauguggacacuaa

SEQ ID NO: 1539873 - RNA, 19 nt, Homo sapiens
  misc_RNA (1)...(19): siRNA sense strand
gcaggauccuuacuucuug

SEQ ID NO: 1539874 - RNA, 19 nt, Homo sapiens
  misc_RNA (1)...(19): siRNA sense strand
gccuugggcuugacauuua

SEQ ID NO: 1539875 - RNA, 19 nt, Homo sapiens
  misc_RNA (1)...(19): siRNA sense strand
ccacagaccugaggauugu

SEQ ID NO: 1539876 - RNA, 19 nt, Homo sapiens
  misc_RNA (1)...(19): siRNA sense strand
ccauguaccuggagcauug

SEQ ID NO: 1539877 - RNA, 19 nt, Homo sapiens
  misc_RNA (1)...(19): siRNA sense strand
caaagaaggguauagagaa

SEQ ID NO: 1539878 - RNA, 19 nt, Homo sapiens
  misc_RNA (1)...(19): siRNA sense strand
guucuucugugucuaaauu

SEQ ID NO: 1539879 - RNA, 19 nt, Homo sapiens
  misc_RNA (1)...(19): siRNA sense strand
gggaauuuguggaaagaaa

SEQ ID NO: 1539880 - RNA, 19 nt, Homo sapiens
  misc_RNA (1)...(19): siRNA sense strand
agaaggguauagagaauaa

SEQ ID NO: 1539881 - RNA, 19 nt, Homo sapiens
  misc_RNA (1)...(19): siRNA sense strand
ggaccaggacuaugauaaa

SEQ ID NO: 1539882 - RNA, 19 nt, Homo sapiens
  misc_RNA (1)...(19): siRNA sense strand
ggauuguccuugggaauuu

SEQ ID NO: 1539883 - RNA, 19 nt, Homo sapiens
  misc_RNA (1)...(19): siRNA sense strand
gaggauuguuggaauaaau

SEQ ID NO: 1539884 - RNA, 19 nt, Homo sapiens
  misc_RNA (1)...(19): siRNA sense strand
ggagcaggauccuuacuuc

SEQ ID NO: 1539885 - RNA, 19 nt, Homo sapiens
  misc_RNA (1)...(19): siRNA sense strand
cuggagacauuucaacuuu

SEQ ID NO: 1539886 - RNA, 19 nt, Homo sapiens
  misc_RNA (1)...(19): siRNA sense strand
aaagaaggguauagagaau

SEQ ID NO: 1539887 - RNA, 19 nt, Homo sapiens
  misc_RNA (1)...(19): siRNA sense strand
uuacuuggauggucugcua

SEQ ID NO: 1539888 - RNA, 19 nt, Homo sapiens
  misc_RNA (1)...(19): siRNA sense strand
guacaugcucucccucuuu

SEQ ID NO: 1539889 - RNA, 19 nt, Homo sapiens
  misc_RNA (1)...(19): siRNA sense strand
gauuuacacucuagacauc

SEQ ID NO: 1539890 - RNA, 19 nt, Homo sapiens
  misc_RNA (1)...(19): siRNA sense strand
gagcaggcuguacuauuaa

SEQ ID NO: 1539891 - RNA, 19 nt, Homo sapiens
  misc_RNA (1)...(19): siRNA sense strand
ccugaggauuguuggaaua

SEQ ID NO: 1539892 - RNA, 19 nt, Homo sapiens
  misc_RNA (1)...(19): siRNA sense strand
gcucugcgguucggagaaa

SEQ ID NO: 1539893 - RNA, 19 nt, Homo sapiens
  misc_RNA (1)...(19): siRNA sense strand
aauagccgcuggagacauu

SEQ ID NO: 1539894 - RNA, 19 nt, Homo sapiens
  misc_RNA (1)...(19): siRNA sense strand
gucaucaccuacccacuaa

SEQ ID NO: 1539895 - RNA, 19 nt, Homo sapiens
  misc_RNA (1)...(19): siRNA sense strand
uguggacacuaauauauga

SEQ ID NO: 1539896 - RNA, 19 nt, Homo sapiens
  misc_RNA (1)...(19): siRNA sense strand
aaacaaagaaggguauaga

SEQ ID NO: 1539897 - RNA, 19 nt, Homo sapiens
  misc_RNA (1)...(19): siRNA sense strand
gaaaagaagacagacaaaa

SEQ ID NO: 1539898 - RNA, 19 nt, Homo sapiens
  misc_RNA (1)...(19): siRNA sense strand
acaaagaaggguauagaga

SEQ ID NO: 1539899 - RNA, 19 nt, Homo sapiens
  misc_RNA (1)...(19): siRNA sense strand
uacaugcucucccucuuug

SEQ ID NO: 1539900 - RNA, 19 nt, Homo sapiens
  misc_RNA (1)...(19): siRNA sense strand
ucugggagcaggauccuua

SEQ ID NO: 1539901 - RNA, 19 nt, Homo sapiens
  misc_RNA (1)...(19): siRNA sense strand
guaccuggagcauugguuu

SEQ ID NO: 1539902 - RNA, 19 nt, Homo sapiens
  misc_RNA (1)...(19): siRNA sense strand
gacagacugcucccuacua

SEQ ID NO: 1539903 - RNA, 19 nt, Homo sapiens
  misc_RNA (1)...(19): siRNA sense strand
cacuggagcuauucugaug

SEQ ID NO: 1539904 - RNA, 19 nt, Homo sapiens
  misc_RNA (1)...(19): siRNA sense strand
ggaaagaaaagaagacaga

SEQ ID NO: 1539905 - RNA, 19 nt, Homo sapiens
  misc_RNA (1)...(19): siRNA sense strand
gcacuggguguucuucugu

SEQ ID NO: 1539906 - RNA, 19 nt, Homo sapiens
  misc_RNA (1)...(19): siRNA sense strand
gggaccaggacuaugauaa

SEQ ID NO: 1539907 - RNA, 19 nt, Homo sapiens
  misc_RNA (1)...(19): siRNA sense strand
gcuguacuauuaaugacau

SEQ ID NO: 1539908 - RNA, 19 nt, Homo sapiens
  misc_RNA (1)...(19): siRNA sense strand
gggauuguccuugggaauu

SEQ ID NO: 1539909 - RNA, 19 nt, Homo sapiens
  misc_RNA (1)...(19): siRNA sense strand
gagaugauguuuugauugg

SEQ ID NO: 1539910 - RNA, 19 nt, Homo sapiens
  misc_RNA (1)...(19): siRNA sense strand
cuguuugccugccucuuua

SEQ ID NO: 1539911 - RNA, 19 nt, Homo sapiens
  misc_RNA (1)...(19): siRNA sense strand
ggagacauuucaacuuuuc

SEQ ID NO: 1539912 - RNA, 19 nt, Homo sapiens
  misc_RNA (1)...(19): siRNA sense strand
ggacaaaagagaugauguu

SEQ ID NO: 1539913 - RNA, 19 nt, Homo sapiens
  misc_RNA (1)...(19): siRNA sense strand
gcacuggagcuauucugau

SEQ ID NO: 1539914 - RNA, 19 nt, Homo sapiens
  misc_RNA (1)...(19): siRNA sense strand
caccagauuuacacucuag

SEQ ID NO: 1539915 - RNA, 19 nt, Homo sapiens
  misc_RNA (1)...(19): siRNA sense strand
ugucaucaccuacccacua

SEQ ID NO: 1539916 - RNA, 19 nt, Homo sapiens
  misc_RNA (1)...(19): siRNA sense strand
gaacagccaaucguccaau

SEQ ID NO: 1539917 - RNA, 19 nt, Homo sapiens
  misc_RNA (1)...(19): siRNA sense strand
gaccaggacuaugauaaaa

SEQ ID NO: 1539918 - RNA, 19 nt, Homo sapiens
  misc_RNA (1)...(19): siRNA sense strand
gguguucuucugugucuaa

SEQ ID NO: 1539919 - RNA, 19 nt, Homo sapiens
  misc_RNA (1)...(19): siRNA sense strand
caaccgaacacugggacua

SEQ ID NO: 1539920 - RNA, 19 nt, Homo sapiens
  misc_RNA (1)...(19): siRNA sense strand
ucaccuacccacuaaugaa

SEQ ID NO: 1539921 - RNA, 19 nt, Homo sapiens
  misc_RNA (1)...(19): siRNA sense strand
gguacaugcucucccucuu

SEQ ID NO: 1539922 - RNA, 19 nt, Homo sapiens
  misc_RNA (1)...(19): siRNA sense strand
aacagccaaucguccaaua

SEQ ID NO: 1539923 - RNA, 19 nt, Homo sapiens
  misc_RNA (1)...(19): siRNA sense strand
ccgaacacugggacuaaua

SEQ ID NO: 1539924 - RNA, 19 nt, Homo sapiens
  misc_RNA (1)...(19): siRNA sense strand
ucaccagauuuacacucua

SEQ ID NO: 1539925 - RNA, 19 nt, Homo sapiens
  misc_RNA (1)...(19): siRNA sense strand
gauccuuacuucuugucau

SEQ ID NO: 1539926 - RNA, 19 nt, Homo sapiens
  misc_RNA (1)...(19): siRNA sense strand
uggauggucugcuaucaag

SEQ ID NO: 1539927 - RNA, 19 nt, Homo sapiens
  misc_RNA (1)...(19): siRNA sense strand
caucaccuacccacuaaug

SEQ ID NO: 1539928 - RNA, 19 nt, Homo sapiens
  misc_RNA (1)...(19): siRNA sense strand
ugauuggucuuaagucaac

SEQ ID NO: 1539929 - RNA, 19 nt, Homo sapiens
  misc_RNA (1)...(19): siRNA sense strand
gcuggagacauuucaacuu

SEQ ID NO: 1539930 - RNA, 19 nt, Homo sapiens
  misc_RNA (1)...(19): siRNA sense strand
ugaggauuguuggaauaaa

SEQ ID NO: 1539931 - RNA, 19 nt, Homo sapiens
  misc_RNA (1)...(19): siRNA sense strand
gggagcaggauccuuacuu

SEQ ID NO: 1539932 - RNA, 19 nt, Homo sapiens
  misc_RNA (1)...(19): siRNA sense strand
caggcuguacuauuaauga

SEQ ID NO: 1539933 - RNA, 19 nt, Homo sapiens
  misc_RNA (1)...(19): siRNA sense strand
gauuguccuugggaauuug

SEQ ID NO: 1539934 - RNA, 19 nt, Homo sapiens
  misc_RNA (1)...(19): siRNA sense strand
gaccugaggauuguuggaa

SEQ ID NO: 1539935 - RNA, 19 nt, Homo sapiens
  misc_RNA (1)...(19): siRNA sense strand
gcuguaggagcccaucuga

SEQ ID NO: 1539936 - RNA, 19 nt, Homo sapiens
  misc_RNA (1)...(19): siRNA sense strand
guuauguggacacuaauau

SEQ ID NO: 1539937 - RNA, 19 nt, Homo sapiens
  misc_RNA (1)...(19): siRNA sense strand
gggcuugacauuuaauugg

SEQ ID NO: 1539938 - RNA, 19 nt, Homo sapiens
  misc_RNA (1)...(19): siRNA sense strand
caccuacccacuaaugaaa

SEQ ID NO: 1539939 - RNA, 19 nt, Homo sapiens
  misc_RNA (1)...(19): siRNA sense strand
aaccuggcuucuguauuua

SEQ ID NO: 1539940 - RNA, 19 nt, Homo sapiens
  misc_RNA (1)...(19): siRNA sense strand
ggaaccuggcuucuguauu

SEQ ID NO: 1539941 - RNA, 19 nt, Homo sapiens
  misc_RNA (1)...(19): siRNA sense strand
acagacugcucccuacuac

SEQ ID NO: 1539942 - RNA, 19 nt, Homo sapiens
  misc_RNA (1)...(19): siRNA sense strand
gcuucuguauuuaccaugu

SEQ ID NO: 1539943 - RNA, 19 nt, Homo sapiens
  misc_RNA (1)...(19): siRNA sense strand
ugugggaccaggacuauga

SEQ ID NO: 1539944 - RNA, 19 nt, Homo sapiens
  misc_RNA (1)...(19): siRNA sense strand
ccuugggcuugacauuuaa

SEQ ID NO: 1539945 - RNA, 19 nt, Homo sapiens
  misc_RNA (1)...(19): siRNA sense strand
cuucuguauuuaccaugua

SEQ ID NO: 1539946 - RNA, 19 nt, Homo sapiens
  misc_RNA (1)...(19): siRNA sense strand
aagaaggguauagagaaua

SEQ ID NO: 1539947 - RNA, 19 nt, Homo sapiens
  misc_RNA (1)...(19): siRNA sense strand
gaagacagacaaaacaaag

SEQ ID NO: 1539948 - RNA, 19 nt, Homo sapiens
  misc_RNA (1)...(19): siRNA sense strand
uuugauuggucuuaaguca

SEQ ID NO: 1539949 - RNA, 19 nt, Homo sapiens
  misc_RNA (1)...(19): siRNA sense strand
ucuguuugccugccucuuu

SEQ ID NO: 1539950 - RNA, 19 nt, Homo sapiens
  misc_RNA (1)...(19): siRNA sense strand
auuggaaccuggcuucugu

SEQ ID NO: 1539951 - RNA, 19 nt, Homo sapiens
  misc_RNA (1)...(19): siRNA sense strand
gugucuaaauuacuacagu

SEQ ID NO: 1539952 - RNA, 19 nt, Homo sapiens
  misc_RNA (1)...(19): siRNA sense strand
gaaggguauagagaauaaa

SEQ ID NO: 1539953 - RNA, 19 nt, Homo sapiens
  misc_RNA (1)...(19): siRNA sense strand
ggcacuggguguucuucug

SEQ ID NO: 1539954 - RNA, 19 nt, Homo sapiens
  misc_RNA (1)...(19): siRNA sense strand
cgaacacugggacuaauag

SEQ ID NO: 1539955 - RNA, 19 nt, Homo sapiens
  misc_RNA (1)...(19): siRNA sense strand
ggugugaacaguggacaga

SEQ ID NO: 1539956 - RNA, 19 nt, Homo sapiens
  misc_RNA (1)...(19): siRNA sense strand
guacuauuaaugacaugug

SEQ ID NO: 1539957 - RNA, 19 nt, Homo sapiens
  misc_RNA (1)...(19): siRNA sense strand
gcaggcuguacuauuaaug

SEQ ID NO: 1539958 - RNA, 19 nt, Homo sapiens
  misc_RNA (1)...(19): siRNA sense strand
ccugugauccaucuguuug

SEQ ID NO: 1539959 - RNA, 19 nt, Homo sapiens
  misc_RNA (1)...(19): siRNA sense strand
gagcaggauccuuacuucu

SEQ ID NO: 1539960 - RNA, 19 nt, Homo sapiens
  misc_RNA (1)...(19): siRNA sense strand
ggacagacugcucccuacu

SEQ ID NO: 1539961 - RNA, 19 nt, Homo sapiens
  misc_RNA (1)...(19): siRNA sense strand
caggauccuuacuucuugu

SEQ ID NO: 1539962 - RNA, 19 nt, Homo sapiens
  misc_RNA (1)...(19): siRNA sense strand
ggcacuggagcuauucuga

SEQ ID NO: 1539963 - RNA, 19 nt, Homo sapiens
  misc_RNA (1)...(19): siRNA sense strand
uguaggagcccaucugacu

SEQ ID NO: 1539964 - RNA, 19 nt, Homo sapiens
  misc_RNA (1)...(19): siRNA sense strand
ccuagugggugugaacagu

SEQ ID NO: 1539965 - RNA, 19 nt, Homo sapiens
  misc_RNA (1)...(19): siRNA sense strand
uggagcaggcuguacuauu

SEQ ID NO: 1539966 - RNA, 19 nt, Homo sapiens
  misc_RNA (1)...(19): siRNA sense strand
gaagagaaagaacaagaaa

SEQ ID NO: 1539967 - RNA, 19 nt, Homo sapiens
  misc_RNA (1)...(19): siRNA sense strand
cagaggaagucacuaaauc

SEQ ID NO: 1539968 - RNA, 19 nt, Homo sapiens
  misc_RNA (1)...(19): siRNA sense strand
ggaagagaaagaacaagaa

SEQ ID NO: 1539969 - RNA, 19 nt, Homo sapiens
  misc_RNA (1)...(19): siRNA sense strand
caacgaccacauccucaua

SEQ ID NO: 1539970 - RNA, 19 nt, Homo sapiens
  misc_RNA (1)...(19): siRNA sense strand
gaccacauccucauagaga

SEQ ID NO: 1539971 - RNA, 19 nt, Homo sapiens
  misc_RNA (1)...(19): siRNA sense strand
cagcugaccuggccgagau

SEQ ID NO: 1539972 - RNA, 19 nt, Homo sapiens
  misc_RNA (1)...(19): siRNA sense strand
ggaaccagacgcagaggaa

SEQ ID NO: 1539973 - RNA, 19 nt, Homo sapiens
  misc_RNA (1)...(19): siRNA sense strand
gaggaggacucagauaucg

SEQ ID NO: 1539974 - RNA, 19 nt, Homo sapiens
  misc_RNA (1)...(19): siRNA sense strand
ggaaccggccacagaagaa

SEQ ID NO: 1539975 - RNA, 19 nt, Homo sapiens
  misc_RNA (1)...(19): siRNA sense strand
cagaggaaccggccacaga

SEQ ID NO: 1539976 - RNA, 19 nt, Homo sapiens
  misc_RNA (1)...(19): siRNA sense strand
ggaugaagaggcccaagau

SEQ ID NO: 1539977 - RNA, 19 nt, Homo sapiens
  misc_RNA (1)...(19): siRNA sense strand
auagagaaccgucaacuca

SEQ ID NO: 1539978 - RNA, 19 nt, Homo sapiens
  misc_RNA (1)...(19): siRNA sense strand
ggaggaagaggaggaggaa

SEQ ID NO: 1539979 - RNA, 19 nt, Homo sapiens
  misc_RNA (1)...(19): siRNA sense strand
ccagaggaagucacuaaau

SEQ ID NO: 1539980 - RNA, 19 nt, Homo sapiens
  misc_RNA (1)...(19): siRNA sense strand
cgaggaagagaaagaacaa

SEQ ID NO: 1539981 - RNA, 19 nt, Homo sapiens
  misc_RNA (1)...(19): siRNA sense strand
gaugaagaggcccaagaug

SEQ ID NO: 1539982 - RNA, 19 nt, Homo sapiens
  misc_RNA (1)...(19): siRNA sense strand
gggaugaagaggcccaaga

SEQ ID NO: 1539983 - RNA, 19 nt, Homo sapiens
  misc_RNA (1)...(19): siRNA sense strand
ccgaggaggacucagauau

SEQ ID NO: 1539984 - RNA, 19 nt, Homo sapiens
  misc_RNA (1)...(19): siRNA sense strand
cgaggaggacucagauauc

SEQ ID NO: 1539985 - RNA, 19 nt, Homo sapiens
  misc_RNA (1)...(19): siRNA sense strand
gcgaggaagagaaagaaca

SEQ ID NO: 1539986 - RNA, 19 nt, Homo sapiens
  misc_RNA (1)...(19): siRNA sense strand
gaggaagucacuaaaucuc

SEQ ID NO: 1539987 - RNA, 19 nt, Homo sapiens
  misc_RNA (1)...(19): siRNA sense strand
ucucagaggaggccacaga

SEQ ID NO: 1539988 - RNA, 19 nt, Homo sapiens
  misc_RNA (1)...(19): siRNA sense strand
agaggaaccggccacagaa

SEQ ID NO: 1539989 - RNA, 19 nt, Homo sapiens
  misc_RNA (1)...(19): siRNA sense strand
ggaagaggaggaggaagag

SEQ ID NO: 1539990 - RNA, 19 nt, Homo sapiens
  misc_RNA (1)...(19): siRNA sense strand
caaggugaagaacuccaaa

SEQ ID NO: 1539991 - RNA, 19 nt, Homo sapiens
  misc_RNA (1)...(19): siRNA sense strand
aggaagaggaggaggaaga

SEQ ID NO: 1539992 - RNA, 19 nt, Homo sapiens
  misc_RNA (1)...(19): siRNA sense strand
aaaacaaggugaagaacuc

SEQ ID NO: 1539993 - RNA, 19 nt, Homo sapiens
  misc_RNA (1)...(19): siRNA sense strand
agaggaggccacagaggaa

SEQ ID NO: 1539994 - RNA, 19 nt, Homo sapiens
  misc_RNA (1)...(19): siRNA sense strand
aggaagagaaagaacaaga

SEQ ID NO: 1539995 - RNA, 19 nt, Homo sapiens
  misc_RNA (1)...(19): siRNA sense strand
ugaagaggcccaagaugcu

SEQ ID NO: 1539996 - RNA, 19 nt, Homo sapiens
  misc_RNA (1)...(19): siRNA sense strand
ggaaggagcuggagaaucu

SEQ ID NO: 1539997 - RNA, 19 nt, Homo sapiens
  misc_RNA (1)...(19): siRNA sense strand
gaucuuggcugaacuaagg

SEQ ID NO: 1539998 - RNA, 19 nt, Homo sapiens
  misc_RNA (1)...(19): siRNA sense strand
ugaaguaucugcaaaugga

SEQ ID NO: 1539999 - RNA, 19 nt, Homo sapiens
  misc_RNA (1)...(19): siRNA sense strand
ucacugagcucacgcuuca

SEQ ID NO: 1540000 - RNA, 19 nt, Homo sapiens
  misc_RNA (1)...(19): siRNA sense strand
ucacacagcaacagcaaua

SEQ ID NO: 1540001 - RNA, 19 nt, Homo sapiens
  misc_RNA (1)...(19): siRNA sense strand
gcagagcagcuucaaguug

SEQ ID NO: 1540002 - RNA, 19 nt, Homo sapiens
  misc_RNA (1)...(19): siRNA sense strand
cagagcagcuucaaguugu

SEQ ID NO: 1540003 - RNA, 19 nt, Homo sapiens
  misc_RNA (1)...(19): siRNA sense strand
gcaauaaggagcugaagca

SEQ ID NO: 1540004 - RNA, 19 nt, Homo sapiens
  misc_RNA (1)...(19): siRNA sense strand
cagagcaggugcacacguu

SEQ ID NO: 1540005 - RNA, 19 nt, Homo sapiens
  misc_RNA (1)...(19): siRNA sense strand
gcugaaguaucugcaaaug

SEQ ID NO: 1540006 - RNA, 19 nt, Homo sapiens
  misc_RNA (1)...(19): siRNA sense strand
gcuucaaguuguacugauu

SEQ ID NO: 1540007 - RNA, 19 nt, Homo sapiens
  misc_RNA (1)...(19): siRNA sense strand
uacaggagcuggagacgau

SEQ ID NO: 1540008 - RNA, 19 nt, Homo sapiens
  misc_RNA (1)...(19): siRNA sense strand
uggaguggcugaaguaucu

SEQ ID NO: 1540009 - RNA, 19 nt, Homo sapiens
  misc_RNA (1)...(19): siRNA sense strand
aggcagggaugcaguguga

SEQ ID NO: 1540010 - RNA, 19 nt, Homo sapiens
  misc_RNA (1)...(19): siRNA sense strand
gcaggagaacucagcuuug

SEQ ID NO: 1540011 - RNA, 19 nt, Homo sapiens
  misc_RNA (1)...(19): siRNA sense strand
gcacagcaugagucgagua

SEQ ID NO: 1540012 - RNA, 19 nt, Homo sapiens
  misc_RNA (1)...(19): siRNA sense strand
gagagcaguaugccgagua

SEQ ID NO: 1540013 - RNA, 19 nt, Homo sapiens
  misc_RNA (1)...(19): siRNA sense strand
caggagaacucagcuuugg

SEQ ID NO: 1540014 - RNA, 19 nt, Homo sapiens
  misc_RNA (1)...(19): siRNA sense strand
gagacgaucuuggcugaac

SEQ ID NO: 1540015 - RNA, 19 nt, Homo sapiens
  misc_RNA (1)...(19): siRNA sense strand
gagagagugcacagcauga

SEQ ID NO: 1540016 - RNA, 19 nt, Homo sapiens
  misc_RNA (1)...(19): siRNA sense strand
caaguuguacugauugaca

SEQ ID NO: 1540017 - RNA, 19 nt, Homo sapiens
  misc_RNA (1)...(19): siRNA sense strand
gagcaggugcacacguuga

SEQ ID NO: 1540018 - RNA, 19 nt, Homo sapiens
  misc_RNA (1)...(19): siRNA sense strand
uggcugaaguaucugcaaa

SEQ ID NO: 1540019 - RNA, 19 nt, Homo sapiens
  misc_RNA (1)...(19): siRNA sense strand
cagcaugagucgaguacag

SEQ ID NO: 1540020 - RNA, 19 nt, Homo sapiens
  misc_RNA (1)...(19): siRNA sense strand
gaaucuggcaggacagcuu

SEQ ID NO: 1540021 - RNA, 19 nt, Homo sapiens
  misc_RNA (1)...(19): siRNA sense strand
ugauggaguggcugaagua

SEQ ID NO: 1540022 - RNA, 19 nt, Homo sapiens
  misc_RNA (1)...(19): siRNA sense strand
gugauggaguggcugaagu

SEQ ID NO: 1540023 - RNA, 19 nt, Homo sapiens
  misc_RNA (1)...(19): siRNA sense strand
aaauggagagagagcagua

SEQ ID NO: 1540024 - RNA, 19 nt, Homo sapiens
  misc_RNA (1)...(19): siRNA sense strand
agagcagcuucaaguugua

SEQ ID NO: 1540025 - RNA, 19 nt, Homo sapiens
  misc_RNA (1)...(19): siRNA sense strand
uggcagagcagcuucaagu

SEQ ID NO: 1540026 - RNA, 19 nt, Homo sapiens
  misc_RNA (1)...(19): siRNA sense strand
agagcaguaugccgaguau

SEQ ID NO: 1540027 - RNA, 19 nt, Homo sapiens
  misc_RNA (1)...(19): siRNA sense strand
ggucacacagcaacagcaa

SEQ ID NO: 1540028 - RNA, 19 nt, Homo sapiens
  misc_RNA (1)...(19): siRNA sense strand
cgaaguggagcagaagcua

SEQ ID NO: 1540029 - RNA, 19 nt, Homo sapiens
  misc_RNA (1)...(19): siRNA sense strand
gacgaucuuggcugaacua

SEQ ID NO: 1540030 - RNA, 19 nt, Homo sapiens
  misc_RNA (1)...(19): siRNA sense strand
ugacuuggaggagcugaaa

SEQ ID NO: 1540031 - RNA, 19 nt, Homo sapiens
  misc_RNA (1)...(19): siRNA sense strand
guaucugcauggagagagu

SEQ ID NO: 1540032 - RNA, 19 nt, Homo sapiens
  misc_RNA (1)...(19): siRNA sense strand
aggcugagcaccuguggaa

SEQ ID NO: 1540033 - RNA, 19 nt, Homo sapiens
  misc_RNA (1)...(19): siRNA sense strand
gcaguaugccgaguaucug

SEQ ID NO: 1540034 - RNA, 19 nt, Homo sapiens
  misc_RNA (1)...(19): siRNA sense strand
gaagcugucucaaagagua

SEQ ID NO: 1540035 - RNA, 19 nt, Homo sapiens
  misc_RNA (1)...(19): siRNA sense strand
ccaagaagcugucucaaag

SEQ ID NO: 1540036 - RNA, 19 nt, Homo sapiens
  misc_RNA (1)...(19): siRNA sense strand
gcaaggcaauaucaucauu

SEQ ID NO: 1540037 - RNA, 19 nt, Homo sapiens
  misc_RNA (1)...(19): siRNA sense strand
gcaaauauaaggucaugaa

SEQ ID NO: 1540038 - RNA, 19 nt, Homo sapiens
  misc_RNA (1)...(19): siRNA sense strand
gaaaguaaacguaccaaca

SEQ ID NO: 1540039 - RNA, 19 nt, Homo sapiens
  misc_RNA (1)...(19): siRNA sense strand
ggcaauaucaucauuacua

SEQ ID NO: 1540040 - RNA, 19 nt, Homo sapiens
  misc_RNA (1)...(19): siRNA sense strand
caaagaguauacaaaguca

SEQ ID NO: 1540041 - RNA, 19 nt, Homo sapiens
  misc_RNA (1)...(19): siRNA sense strand
aauauaaggucaugaagga

SEQ ID NO: 1540042 - RNA, 19 nt, Homo sapiens
  misc_RNA (1)...(19): siRNA sense strand
gcacaaguccuucccaaag

SEQ ID NO: 1540043 - RNA, 19 nt, Homo sapiens
  misc_RNA (1)...(19): siRNA sense strand
caaggcaauaucaucauua

SEQ ID NO: 1540044 - RNA, 19 nt, Homo sapiens
  misc_RNA (1)...(19): siRNA sense strand
caaagacgcaaggaaagua

SEQ ID NO: 1540045 - RNA, 19 nt, Homo sapiens
  misc_RNA (1)...(19): siRNA sense strand
auacaaagauucggaguca

SEQ ID NO: 1540046 - RNA, 19 nt, Homo sapiens
  misc_RNA (1)...(19): siRNA sense strand
cacaaguccuucccaaaga

SEQ ID NO: 1540047 - RNA, 19 nt, Homo sapiens
  misc_RNA (1)...(19): siRNA sense strand
cagcaggaauuaugugaca

SEQ ID NO: 1540048 - RNA, 19 nt, Homo sapiens
  misc_RNA (1)...(19): siRNA sense strand
gcaccaagaagcugucuca

SEQ ID NO: 1540049 - RNA, 19 nt, Homo sapiens
  misc_RNA (1)...(19): siRNA sense strand
ccagaacccaggcaaauau

SEQ ID NO: 1540050 - RNA, 19 nt, Homo sapiens
  misc_RNA (1)...(19): siRNA sense strand
aaaguaaacguaccaacaa

SEQ ID NO: 1540051 - RNA, 19 nt, Homo sapiens
  misc_RNA (1)...(19): siRNA sense strand
aagcaaagacgcaaggaaa

SEQ ID NO: 1540052 - RNA, 19 nt, Homo sapiens
  misc_RNA (1)...(19): siRNA sense strand
gaagcaaagacgcaaggaa

SEQ ID NO: 1540053 - RNA, 19 nt, Homo sapiens
  misc_RNA (1)...(19): siRNA sense strand
ucaagcagcaggaauuaug

SEQ ID NO: 1540054 - RNA, 19 nt, Homo sapiens
  misc_RNA (1)...(19): siRNA sense strand
gcaaagacgcaaggaaagu

SEQ ID NO: 1540055 - RNA, 19 nt, Homo sapiens
  misc_RNA (1)...(19): siRNA sense strand
gggcaaggcaauaucauca

SEQ ID NO: 1540056 - RNA, 19 nt, Homo sapiens
  misc_RNA (1)...(19): siRNA sense strand
guaaacguaccaacaagug

SEQ ID NO: 1540057 - RNA, 19 nt, Homo sapiens
  misc_RNA (1)...(19): siRNA sense strand
ucaaagaguauacaaaguc

SEQ ID NO: 1540058 - RNA, 19 nt, Homo sapiens
  misc_RNA (1)...(19): siRNA sense strand
gagucaagcagcaggaauu

SEQ ID NO: 1540059 - RNA, 19 nt, Homo sapiens
  misc_RNA (1)...(19): siRNA sense strand
gaacccaggcaaauauaag

SEQ ID NO: 1540060 - RNA, 19 nt, Homo sapiens
  misc_RNA (1)...(19): siRNA sense strand
gcagguugaugucagaaaa

SEQ ID NO: 1540061 - RNA, 19 nt, Homo sapiens
  misc_RNA (1)...(19): siRNA sense strand
ucagugcccuggaggugaa

SEQ ID NO: 1540062 - RNA, 19 nt, Homo sapiens
  misc_RNA (1)...(19): siRNA sense strand
ggcaugagcagguugaugu

SEQ ID NO: 1540063 - RNA, 19 nt, Homo sapiens
  misc_RNA (1)...(19): siRNA sense strand
aaauauaggagcaccaaga

SEQ ID NO: 1540064 - RNA, 19 nt, Homo sapiens
  misc_RNA (1)...(19): siRNA sense strand
caagaagcugucucaaaga

SEQ ID NO: 1540065 - RNA, 19 nt, Homo sapiens
  misc_RNA (1)...(19): siRNA sense strand
cagaacccaggcaaauaua

SEQ ID NO: 1540066 - RNA, 19 nt, Homo sapiens
  misc_RNA (1)...(19): siRNA sense strand
gccacacccugcagaaaca

SEQ ID NO: 1540067 - RNA, 19 nt, Homo sapiens
  misc_RNA (1)...(19): siRNA sense strand
aagaagcugucucaaagag

SEQ ID NO: 1540068 - RNA, 19 nt, Homo sapiens
  misc_RNA (1)...(19): siRNA sense strand
aaagacgcaaggaaaguaa

SEQ ID NO: 1540069 - RNA, 19 nt, Homo sapiens
  misc_RNA (1)...(19): siRNA sense strand
acaaguccuucccaaagau

SEQ ID NO: 1540070 - RNA, 19 nt, Homo sapiens
  misc_RNA (1)...(19): siRNA sense strand
ugagcagguugaugucaga

SEQ ID NO: 1540071 - RNA, 19 nt, Homo sapiens
  misc_RNA (1)...(19): siRNA sense strand
gaaaauacaccaauaaccu

SEQ ID NO: 1540072 - RNA, 19 nt, Homo sapiens
  misc_RNA (1)...(19): siRNA sense strand
gcuagauauugacagaauc

SEQ ID NO: 1540073 - RNA, 19 nt, Homo sapiens
  misc_RNA (1)...(19): siRNA sense strand
ucucaaagaguauacaaag

SEQ ID NO: 1540074 - RNA, 19 nt, Homo sapiens
  misc_RNA (1)...(19): siRNA sense strand
ggcacucccugugguauuc

SEQ ID NO: 1540075 - RNA, 19 nt, Homo sapiens
  misc_RNA (1)...(19): siRNA sense strand
uggccuauucugcauauaa

SEQ ID NO: 1540076 - RNA, 19 nt, Homo sapiens
  misc_RNA (1)...(19): siRNA sense strand
aauauaggagcaccaagaa

SEQ ID NO: 1540077 - RNA, 19 nt, Homo sapiens
  misc_RNA (1)...(19): siRNA sense strand
gucagaaaauacaccaaua

SEQ ID NO: 1540078 - RNA, 19 nt, Homo sapiens
  misc_RNA (1)...(19): siRNA sense strand
ggauugugcaugagaugga

SEQ ID NO: 1540079 - RNA, 19 nt, Homo sapiens
  misc_RNA (1)...(19): siRNA sense strand
ggccuauucugcauauaac

SEQ ID NO: 1540080 - RNA, 19 nt, Homo sapiens
  misc_RNA (1)...(19): siRNA sense strand
ccagaaucauccacugcau

SEQ ID NO: 1540081 - RNA, 19 nt, Homo sapiens
  misc_RNA (1)...(19): siRNA sense strand
auaaggucaugaaggagaa

SEQ ID NO: 1540082 - RNA, 19 nt, Homo sapiens
  misc_RNA (1)...(19): siRNA sense strand
ugcuagauauugacagaau

SEQ ID NO: 1540083 - RNA, 19 nt, Homo sapiens
  misc_RNA (1)...(19): siRNA sense strand
gauguuuucugggcgcuua

SEQ ID NO: 1540084 - RNA, 19 nt, Homo sapiens
  misc_RNA (1)...(19): siRNA sense strand
acaaagauucggagucaag

SEQ ID NO: 1540085 - RNA, 19 nt, Homo sapiens
  misc_RNA (1)...(19): siRNA sense strand
cccagaacccaggcaaaua

SEQ ID NO: 1540086 - RNA, 19 nt, Homo sapiens
  misc_RNA (1)...(19): siRNA sense strand
aggcaaauauaaggucaug

SEQ ID NO: 1540087 - RNA, 19 nt, Homo sapiens
  misc_RNA (1)...(19): siRNA sense strand
caagcagcaggaauuaugu

SEQ ID NO: 1540088 - RNA, 19 nt, Homo sapiens
  misc_RNA (1)...(19): siRNA sense strand
agucaagcagcaggaauua

SEQ ID NO: 1540089 - RNA, 19 nt, Homo sapiens
  misc_RNA (1)...(19): siRNA sense strand
gauguucauacaaagauuc

SEQ ID NO: 1540090 - RNA, 19 nt, Homo sapiens
  misc_RNA (1)...(19): siRNA sense strand
accaagaagcugucucaaa

SEQ ID NO: 1540091 - RNA, 19 nt, Homo sapiens
  misc_RNA (1)...(19): siRNA sense strand
caaauauaaggucaugaag

SEQ ID NO: 1540092 - RNA, 19 nt, Homo sapiens
  misc_RNA (1)...(19): siRNA sense strand
aaggcaauaucaucauuac

SEQ ID NO: 1540093 - RNA, 19 nt, Homo sapiens
  misc_RNA (1)...(19): siRNA sense strand
gguauucuacagcccaaau

SEQ ID NO: 1540094 - RNA, 19 nt, Homo sapiens
  misc_RNA (1)...(19): siRNA sense strand
cguggccuauucugcauau

SEQ ID NO: 1540095 - RNA, 19 nt, Homo sapiens
  misc_RNA (1)...(19): siRNA sense strand
cuagauauugacagaauca

SEQ ID NO: 1540096 - RNA, 19 nt, Homo sapiens
  misc_RNA (1)...(19): siRNA sense strand
cgcaaggaaaguaaacgua

SEQ ID NO: 1540097 - RNA, 19 nt, Homo sapiens
  misc_RNA (1)...(19): siRNA sense strand
agaacccaggcaaauauaa

SEQ ID NO: 1540098 - RNA, 19 nt, Homo sapiens
  misc_RNA (1)...(19): siRNA sense strand
gcagacuggacaaaauaua

SEQ ID NO: 1540099 - RNA, 19 nt, Homo sapiens
  misc_RNA (1)...(19): siRNA sense strand
uuugcuagauauugacaga

SEQ ID NO: 1540100 - RNA, 19 nt, Homo sapiens
  misc_RNA (1)...(19): siRNA sense strand
ggagucaagcagcaggaau

SEQ ID NO: 1540101 - RNA, 19 nt, Homo sapiens
  misc_RNA (1)...(19): siRNA sense strand
cucaaagaguauacaaagu

SEQ ID NO: 1540102 - RNA, 19 nt, Homo sapiens
  misc_RNA (1)...(19): siRNA sense strand
caagaugcauuguccucua

SEQ ID NO: 1540103 - RNA, 19 nt, Homo sapiens
  misc_RNA (1)...(19): siRNA sense strand
gccaauagauauaguucuu

SEQ ID NO: 1540104 - RNA, 19 nt, Homo sapiens
  misc_RNA (1)...(19): siRNA sense strand
gcaggagaguuuaaagaca

SEQ ID NO: 1540105 - RNA, 19 nt, Homo sapiens
  misc_RNA (1)...(19): siRNA sense strand
gaaucacugccaauagaua

SEQ ID NO: 1540106 - RNA, 19 nt, Homo sapiens
  misc_RNA (1)...(19): siRNA sense strand
ucgaaucacugcgucguua

SEQ ID NO: 1540107 - RNA, 19 nt, Homo sapiens
  misc_RNA (1)...(19): siRNA sense strand
agacauggaugccacuuca

SEQ ID NO: 1540108 - RNA, 19 nt, Homo sapiens
  misc_RNA (1)...(19): siRNA sense strand
gcgcagcaucguucuuaua

SEQ ID NO: 1540109 - RNA, 19 nt, Homo sapiens
  misc_RNA (1)...(19): siRNA sense strand
ggaaucacccauccuuuua

SEQ ID NO: 1540110 - RNA, 19 nt, Homo sapiens
  misc_RNA (1)...(19): siRNA sense strand
cuucuggccuuugcaguua

SEQ ID NO: 1540111 - RNA, 19 nt, Homo sapiens
  misc_RNA (1)...(19): siRNA sense strand
ccuuugcaguuaccuguua

SEQ ID NO: 1540112 - RNA, 19 nt, Homo sapiens
  misc_RNA (1)...(19): siRNA sense strand
caggagaguuuaaagacau

SEQ ID NO: 1540113 - RNA, 19 nt, Homo sapiens
  misc_RNA (1)...(19): siRNA sense strand
agauauaguucuucagaca

SEQ ID NO: 1540114 - RNA, 19 nt, Homo sapiens
  misc_RNA (1)...(19): siRNA sense strand
aagaugcauuguccucuaa

SEQ ID NO: 1540115 - RNA, 19 nt, Homo sapiens
  misc_RNA (1)...(19): siRNA sense strand
ggaugccacuucagaacug

SEQ ID NO: 1540116 - RNA, 19 nt, Homo sapiens
  misc_RNA (1)...(19): siRNA sense strand
gcagcaucguucuuauaug

SEQ ID NO: 1540117 - RNA, 19 nt, Homo sapiens
  misc_RNA (1)...(19): siRNA sense strand
ggauacagcaaauucuuca

SEQ ID NO: 1540118 - RNA, 19 nt, Homo sapiens
  misc_RNA (1)...(19): siRNA sense strand
augaaucacugccaauaga

SEQ ID NO: 1540119 - RNA, 19 nt, Homo sapiens
  misc_RNA (1)...(19): siRNA sense strand
ucauauugcaggagaguuu

SEQ ID NO: 1540120 - RNA, 19 nt, Homo sapiens
  misc_RNA (1)...(19): siRNA sense strand
ucuaacacaucauugaagu

SEQ ID NO: 1540121 - RNA, 19 nt, Homo sapiens
  misc_RNA (1)...(19): siRNA sense strand
gcauuguccucuaacacau

SEQ ID NO: 1540122 - RNA, 19 nt, Homo sapiens
  misc_RNA (1)...(19): siRNA sense strand
gaugaaucacugccaauag

SEQ ID NO: 1540123 - RNA, 19 nt, Homo sapiens
  misc_RNA (1)...(19): siRNA sense strand
guuacgguauaguucauau

SEQ ID NO: 1540124 - RNA, 19 nt, Homo sapiens
  misc_RNA (1)...(19): siRNA sense strand
caucauugaaguuacgaaa

SEQ ID NO: 1540125 - RNA, 19 nt, Homo sapiens
  misc_RNA (1)...(19): siRNA sense strand
uuugauacguuaaggaauc

SEQ ID NO: 1540126 - RNA, 19 nt, Homo sapiens
  misc_RNA (1)...(19): siRNA sense strand
gaugcauuguccucuaaca

SEQ ID NO: 1540127 - RNA, 19 nt, Homo sapiens
  misc_RNA (1)...(19): siRNA sense strand
uaaucaucguggucgagua

SEQ ID NO: 1540128 - RNA, 19 nt, Homo sapiens
  misc_RNA (1)...(19): siRNA sense strand
cgguauaguucauauugca

SEQ ID NO: 1540129 - RNA, 19 nt, Homo sapiens
  misc_RNA (1)...(19): siRNA sense strand
cauuugauacguuaaggaa

SEQ ID NO: 1540130 - RNA, 19 nt, Homo sapiens
  misc_RNA (1)...(19): siRNA sense strand
guucuuauaugcgauuaac

SEQ ID NO: 1540131 - RNA, 19 nt, Homo sapiens
  misc_RNA (1)...(19): siRNA sense strand
cauauugcaggagaguuua

SEQ ID NO: 1540132 - RNA, 19 nt, Homo sapiens
  misc_RNA (1)...(19): siRNA sense strand
cagcaaauucuucaaacca

SEQ ID NO: 1540133 - RNA, 19 nt, Homo sapiens
  misc_RNA (1)...(19): siRNA sense strand
cgaaucacugcgucguuaa

SEQ ID NO: 1540134 - RNA, 19 nt, Homo sapiens
  misc_RNA (1)...(19): siRNA sense strand
agaugaaucacugccaaua

SEQ ID NO: 1540135 - RNA, 19 nt, Homo sapiens
  misc_RNA (1)...(19): siRNA sense strand
uacgguauaguucauauug

SEQ ID NO: 1540136 - RNA, 19 nt, Homo sapiens
  misc_RNA (1)...(19): siRNA sense strand
caucguggucgaguacuuu

SEQ ID NO: 1540137 - RNA, 19 nt, Homo sapiens
  misc_RNA (1)...(19): siRNA sense strand
cugcgcagcaucguucuua

SEQ ID NO: 1540138 - RNA, 19 nt, Homo sapiens
  misc_RNA (1)...(19): siRNA sense strand
agcaaauucuucaaaccaa

SEQ ID NO: 1540139 - RNA, 19 nt, Homo sapiens
  misc_RNA (1)...(19): siRNA sense strand
ccucuaacacaucauugaa

SEQ ID NO: 1540140 - RNA, 19 nt, Homo sapiens
  misc_RNA (1)...(19): siRNA sense strand
ggugggcaucggucucuuu

SEQ ID NO: 1540141 - RNA, 19 nt, Homo sapiens
  misc_RNA (1)...(19): siRNA sense strand
cuucaaaccaagaugcauu

SEQ ID NO: 1540142 - RNA, 19 nt, Homo sapiens
  misc_RNA (1)...(19): siRNA sense strand
cgcagcaucguucuuauau

SEQ ID NO: 1540143 - RNA, 19 nt, Homo sapiens
  misc_RNA (1)...(19): siRNA sense strand
aaucacugccaauagauau

SEQ ID NO: 1540144 - RNA, 19 nt, Homo sapiens
  misc_RNA (1)...(19): siRNA sense strand
acacaucauugaaguuacg

SEQ ID NO: 1540145 - RNA, 19 nt, Homo sapiens
  misc_RNA (1)...(19): siRNA sense strand
ggccuucggauacagcaaa

SEQ ID NO: 1540146 - RNA, 19 nt, Homo sapiens
  misc_RNA (1)...(19): siRNA sense strand
uacagcaaauucuucaaac

SEQ ID NO: 1540147 - RNA, 19 nt, Homo sapiens
  misc_RNA (1)...(19): siRNA sense strand
agacacuucuggccuuugc

SEQ ID NO: 1540148 - RNA, 19 nt, Homo sapiens
  misc_RNA (1)...(19): siRNA sense strand
gacauuugauacguuaagg

SEQ ID NO: 1540149 - RNA, 19 nt, Homo sapiens
  misc_RNA (1)...(19): siRNA sense strand
gcaggugucuucccucgaa

SEQ ID NO: 1540150 - RNA, 19 nt, Homo sapiens
  misc_RNA (1)...(19): siRNA sense strand
gcacagguaucugcuucua

SEQ ID NO: 1540151 - RNA, 19 nt, Homo sapiens
  misc_RNA (1)...(19): siRNA sense strand
ucugggagguuucaucuuu

SEQ ID NO: 1540152 - RNA, 19 nt, Homo sapiens
  misc_RNA (1)...(19): siRNA sense strand
gguaucugcuucuacaaga

SEQ ID NO: 1540153 - RNA, 19 nt, Homo sapiens
  misc_RNA (1)...(19): siRNA sense strand
caucugaagugguuaagca

SEQ ID NO: 1540154 - RNA, 19 nt, Homo sapiens
  misc_RNA (1)...(19): siRNA sense strand
acagguaucugcuucuaca

SEQ ID NO: 1540155 - RNA, 19 nt, Homo sapiens
  misc_RNA (1)...(19): siRNA sense strand
gauucgaguuccaucugaa

SEQ ID NO: 1540156 - RNA, 19 nt, Homo sapiens
  misc_RNA (1)...(19): siRNA sense strand
gugguugccugccugauuc

SEQ ID NO: 1540157 - RNA, 19 nt, Homo sapiens
  misc_RNA (1)...(19): siRNA sense strand
gcagagggcacagguaucu

SEQ ID NO: 1540158 - RNA, 19 nt, Homo sapiens
  misc_RNA (1)...(19): siRNA sense strand
caagaauuacgcuggcaaa

SEQ ID NO: 1540159 - RNA, 19 nt, Homo sapiens
  misc_RNA (1)...(19): siRNA sense strand
guuggaaguuggcagaaag

SEQ ID NO: 1540160 - RNA, 19 nt, Homo sapiens
  misc_RNA (1)...(19): siRNA sense strand
ugauucgaguuccaucuga

SEQ ID NO: 1540161 - RNA, 19 nt, Homo sapiens
  misc_RNA (1)...(19): siRNA sense strand
gcacugcugaugggaaugu

SEQ ID NO: 1540162 - RNA, 19 nt, Homo sapiens
  misc_RNA (1)...(19): siRNA sense strand
ggaaguuggcagaaagagu

SEQ ID NO: 1540163 - RNA, 19 nt, Homo sapiens
  misc_RNA (1)...(19): siRNA sense strand
ccaucagucugggagguuu

SEQ ID NO: 1540164 - RNA, 19 nt, Homo sapiens
  misc_RNA (1)...(19): siRNA sense strand
gggcuggcaggauuauuug

SEQ ID NO: 1540165 - RNA, 19 nt, Homo sapiens
  misc_RNA (1)...(19): siRNA sense strand
gguuguaucgaggcuauaa

SEQ ID NO: 1540166 - RNA, 19 nt, Homo sapiens
  misc_RNA (1)...(19): siRNA sense strand
gguccaguuucccuuaugg

SEQ ID NO: 1540167 - RNA, 19 nt, Homo sapiens
  misc_RNA (1)...(19): siRNA sense strand
aagcagagggcacagguau

SEQ ID NO: 1540168 - RNA, 19 nt, Homo sapiens
  misc_RNA (1)...(19): siRNA sense strand
gguggauucuuggcaguca

SEQ ID NO: 1540169 - RNA, 19 nt, Homo sapiens
  misc_RNA (1)...(19): siRNA sense strand
aggaucaugugguggauuc

SEQ ID NO: 1540170 - RNA, 19 nt, Homo sapiens
  misc_RNA (1)...(19): siRNA sense strand
gcaggaucaugugguggau

SEQ ID NO: 1540171 - RNA, 19 nt, Homo sapiens
  misc_RNA (1)...(19): siRNA sense strand
cuacaagaacauuucagau

SEQ ID NO: 1540172 - RNA, 19 nt, Homo sapiens
  misc_RNA (1)...(19): siRNA sense strand
gaucaugugguggauucuu

SEQ ID NO: 1540173 - RNA, 19 nt, Homo sapiens
  misc_RNA (1)...(19): siRNA sense strand
ucuacaagaacauuucaga

SEQ ID NO: 1540174 - RNA, 19 nt, Homo sapiens
  misc_RNA (1)...(19): siRNA sense strand
uaagcagagggcacaggua

SEQ ID NO: 1540175 - RNA, 19 nt, Homo sapiens
  misc_RNA (1)...(19): siRNA sense strand
uggaguagauucugucuuu

SEQ ID NO: 1540176 - RNA, 19 nt, Homo sapiens
  misc_RNA (1)...(19): siRNA sense strand
acaaaggacuggucaggaa

SEQ ID NO: 1540177 - RNA, 19 nt, Homo sapiens
  misc_RNA (1)...(19): siRNA sense strand
gaccgggacuuucagaguu

SEQ ID NO: 1540178 - RNA, 19 nt, Homo sapiens
  misc_RNA (1)...(19): siRNA sense strand
gagcaccaguggcccauug

SEQ ID NO: 1540179 - RNA, 19 nt, Homo sapiens
  misc_RNA (1)...(19): siRNA sense strand
gcucuauccucuugcugua

SEQ ID NO: 1540180 - RNA, 19 nt, Homo sapiens
  misc_RNA (1)...(19): siRNA sense strand
uggagugagucccaaguua

SEQ ID NO: 1540181 - RNA, 19 nt, Homo sapiens
  misc_RNA (1)...(19): siRNA sense strand
ggaugagaguuuccaaugg

SEQ ID NO: 1540182 - RNA, 19 nt, Homo sapiens
  misc_RNA (1)...(19): siRNA sense strand
caaguuacccugccacaca

SEQ ID NO: 1540183 - RNA, 19 nt, Homo sapiens
  misc_RNA (1)...(19): siRNA sense strand
aaacagaugcugcgcucua

SEQ ID NO: 1540184 - RNA, 19 nt, Homo sapiens
  misc_RNA (1)...(19): siRNA sense strand
ggaguagauucugucuuug

SEQ ID NO: 1540185 - RNA, 19 nt, Homo sapiens
  misc_RNA (1)...(19): siRNA sense strand
gaagugcagcugugcuuuc

SEQ ID NO: 1540186 - RNA, 19 nt, Homo sapiens
  misc_RNA (1)...(19): siRNA sense strand
gacagucacuaugugcaaa

SEQ ID NO: 1540187 - RNA, 19 nt, Homo sapiens
  misc_RNA (1)...(19): siRNA sense strand
gaaggagccucagauucag

SEQ ID NO: 1540188 - RNA, 19 nt, Homo sapiens
  misc_RNA (1)...(19): siRNA sense strand
ccuggaaucuggagugagu

SEQ ID NO: 1540189 - RNA, 19 nt, Homo sapiens
  misc_RNA (1)...(19): siRNA sense strand
ucacagcucagccaccaaa

SEQ ID NO: 1540190 - RNA, 19 nt, Homo sapiens
  misc_RNA (1)...(19): siRNA sense strand
gugcagcugugcuuucaag

SEQ ID NO: 1540191 - RNA, 19 nt, Homo sapiens
  misc_RNA (1)...(19): siRNA sense strand
gcugcgcucuauccucuug

SEQ ID NO: 1540192 - RNA, 19 nt, Homo sapiens
  misc_RNA (1)...(19): siRNA sense strand
caucagaguugcgcacgau

SEQ ID NO: 1540193 - RNA, 19 nt, Homo sapiens
  misc_RNA (1)...(19): siRNA sense strand
gucacuaugugcaaacaga

SEQ ID NO: 1540194 - RNA, 19 nt, Homo sapiens
  misc_RNA (1)...(19): siRNA sense strand
ggaccgggacuuucagagu

SEQ ID NO: 1540195 - RNA, 19 nt, Homo sapiens
  misc_RNA (1)...(19): siRNA sense strand
ggagugagucccaaguuac

SEQ ID NO: 1540196 - RNA, 19 nt, Homo sapiens
  misc_RNA (1)...(19): siRNA sense strand
uuucagaguuucagacaag

SEQ ID NO: 1540197 - RNA, 19 nt, Homo sapiens
  misc_RNA (1)...(19): siRNA sense strand
ucaguggaguagauucugu

SEQ ID NO: 1540198 - RNA, 19 nt, Homo sapiens
  misc_RNA (1)...(19): siRNA sense strand
gagccucagauucagauga

SEQ ID NO: 1540199 - RNA, 19 nt, Homo sapiens
  misc_RNA (1)...(19): siRNA sense strand
caagucagccuuuugcaaa

SEQ ID NO: 1540200 - RNA, 19 nt, Homo sapiens
  misc_RNA (1)...(19): siRNA sense strand
cagcucagccaccaaagug

SEQ ID NO: 1540201 - RNA, 19 nt, Homo sapiens
  misc_RNA (1)...(19): siRNA sense strand
gcacgaugaacaacaaagg

SEQ ID NO: 1540202 - RNA, 19 nt, Homo sapiens
  misc_RNA (1)...(19): siRNA sense strand
ucuauccucuugcuguaug

SEQ ID NO: 1540203 - RNA, 19 nt, Homo sapiens
  misc_RNA (1)...(19): siRNA sense strand
gaguagauucugucuuugg

SEQ ID NO: 1540204 - RNA, 19 nt, Homo sapiens
  misc_RNA (1)...(19): siRNA sense strand
ggacuuucagaguuucaga

SEQ ID NO: 1540205 - RNA, 19 nt, Homo sapiens
  misc_RNA (1)...(19): siRNA sense strand
cagaguugcgcacgaugaa

SEQ ID NO: 1540206 - RNA, 19 nt, Homo sapiens
  misc_RNA (1)...(19): siRNA sense strand
gaguugcgcacgaugaaca

SEQ ID NO: 1540207 - RNA, 19 nt, Homo sapiens
  misc_RNA (1)...(19): siRNA sense strand
ucagaguugcgcacgauga

SEQ ID NO: 1540208 - RNA, 19 nt, Homo sapiens
  misc_RNA (1)...(19): siRNA sense strand
acacacaccguccgaccuu

SEQ ID NO: 1540209 - RNA, 19 nt, Homo sapiens
  misc_RNA (1)...(19): siRNA sense strand
gcagcugugcuuucaagag

SEQ ID NO: 1540210 - RNA, 19 nt, Homo sapiens
  misc_RNA (1)...(19): siRNA sense strand
accgggacuuucagaguuu

SEQ ID NO: 1540211 - RNA, 19 nt, Homo sapiens
  misc_RNA (1)...(19): siRNA sense strand
ccuccaagcacccauucaa

SEQ ID NO: 1540212 - RNA, 19 nt, Homo sapiens
  misc_RNA (1)...(19): siRNA sense strand
aacagaugcugcgcucuau

SEQ ID NO: 1540213 - RNA, 19 nt, Homo sapiens
  misc_RNA (1)...(19): siRNA sense strand
ugaaagcccucuccucuug

SEQ ID NO: 1540214 - RNA, 19 nt, Homo sapiens
  misc_RNA (1)...(19): siRNA sense strand
ccugugaggucuucaacuu

SEQ ID NO: 1540215 - RNA, 19 nt, Homo sapiens
  misc_RNA (1)...(19): siRNA sense strand
ccacggcucaccugacuuu

SEQ ID NO: 1540216 - RNA, 19 nt, Homo sapiens
  misc_RNA (1)...(19): siRNA sense strand
agacuuacaucguguucug

SEQ ID NO: 1540217 - RNA, 19 nt, Homo sapiens
  misc_RNA (1)...(19): siRNA sense strand
gucaaggacucacugaaag

SEQ ID NO: 1540218 - RNA, 19 nt, Homo sapiens
  misc_RNA (1)...(19): siRNA sense strand
ucaccugacuuuuguuauu

SEQ ID NO: 1540219 - RNA, 19 nt, Homo sapiens
  misc_RNA (1)...(19): siRNA sense strand
ccucuccucuugugucugu

SEQ ID NO: 1540220 - RNA, 19 nt, Homo sapiens
  misc_RNA (1)...(19): siRNA sense strand
ucugugggcaggccgauua

SEQ ID NO: 1540221 - RNA, 19 nt, Homo sapiens
  misc_RNA (1)...(19): siRNA sense strand
cuggagagccaaccucaaa

SEQ ID NO: 1540222 - RNA, 19 nt, Homo sapiens
  misc_RNA (1)...(19): siRNA sense strand
gaagacuuacaucguguuc

SEQ ID NO: 1540223 - RNA, 19 nt, Homo sapiens
  misc_RNA (1)...(19): siRNA sense strand
gaaaacuggccccaucuga

SEQ ID NO: 1540224 - RNA, 19 nt, Homo sapiens
  misc_RNA (1)...(19): siRNA sense strand
caaugaagacuuacaucgu

SEQ ID NO: 1540225 - RNA, 19 nt, Homo sapiens
  misc_RNA (1)...(19): siRNA sense strand
gaaagcccucuccucuugu

SEQ ID NO: 1540226 - RNA, 19 nt, Homo sapiens
  misc_RNA (1)...(19): siRNA sense strand
ggagagccaaccucaaagg

SEQ ID NO: 1540227 - RNA, 19 nt, Homo sapiens
  misc_RNA (1)...(19): siRNA sense strand
ucagcuuccuucccaguca

SEQ ID NO: 1540228 - RNA, 19 nt, Homo sapiens
  misc_RNA (1)...(19): siRNA sense strand
aaagcccucuccucuugug

SEQ ID NO: 1540229 - RNA, 19 nt, Homo sapiens
  misc_RNA (1)...(19): siRNA sense strand
aaaggcaccauccgugaga

SEQ ID NO: 1540230 - RNA, 19 nt, Homo sapiens
  misc_RNA (1)...(19): siRNA sense strand
ccccaccaaugaagacuua

SEQ ID NO: 1540231 - RNA, 19 nt, Homo sapiens
  misc_RNA (1)...(19): siRNA sense strand
gcucaccugacuuuuguua

SEQ ID NO: 1540232 - RNA, 19 nt, Homo sapiens
  misc_RNA (1)...(19): siRNA sense strand
guagagagcuggauucuga

SEQ ID NO: 1540233 - RNA, 19 nt, Homo sapiens
  misc_RNA (1)...(19): siRNA sense strand
gcacaaucauuaagucaua

SEQ ID NO: 1540234 - RNA, 19 nt, Homo sapiens
  misc_RNA (1)...(19): siRNA sense strand
gaaauaagccaacuaauag

SEQ ID NO: 1540235 - RNA, 19 nt, Homo sapiens
  misc_RNA (1)...(19): siRNA sense strand
aaacagaggaguucuauua

SEQ ID NO: 1540236 - RNA, 19 nt, Homo sapiens
  misc_RNA (1)...(19): siRNA sense strand
ccaaggaucugcuuucaaa

SEQ ID NO: 1540237 - RNA, 19 nt, Homo sapiens
  misc_RNA (1)...(19): siRNA sense strand
uaaauuagcuguaggaagu

SEQ ID NO: 1540238 - RNA, 19 nt, Homo sapiens
  misc_RNA (1)...(19): siRNA sense strand
aagaagaccuugauaauga

SEQ ID NO: 1540239 - RNA, 19 nt, Homo sapiens
  misc_RNA (1)...(19): siRNA sense strand
guacacagaugauacagaa

SEQ ID NO: 1540240 - RNA, 19 nt, Homo sapiens
  misc_RNA (1)...(19): siRNA sense strand
gggauucaaugacaaauuu

SEQ ID NO: 1540241 - RNA, 19 nt, Homo sapiens
  misc_RNA (1)...(19): siRNA sense strand
ggaaacagcacaggaauaa

SEQ ID NO: 1540242 - RNA, 19 nt, Homo sapiens
  misc_RNA (1)...(19): siRNA sense strand
ggagcuauaucaccaguuu

SEQ ID NO: 1540243 - RNA, 19 nt, Homo sapiens
  misc_RNA (1)...(19): siRNA sense strand
ccaaagaugucacuucaga

SEQ ID NO: 1540244 - RNA, 19 nt, Homo sapiens
  misc_RNA (1)...(19): siRNA sense strand
gaaacuuccugcccuacua

SEQ ID NO: 1540245 - RNA, 19 nt, Homo sapiens
  misc_RNA (1)...(19): siRNA sense strand
ggaauaaaguuagugagaa

SEQ ID NO: 1540246 - RNA, 19 nt, Homo sapiens
  misc_RNA (1)...(19): siRNA sense strand
cagcauaucagaugacuua

SEQ ID NO: 1540247 - RNA, 19 nt, Homo sapiens
  misc_RNA (1)...(19): siRNA sense strand
ccaacaacacuuucuauua

SEQ ID NO: 1540248 - RNA, 19 nt, Homo sapiens
  misc_RNA (1)...(19): siRNA sense strand
gagcaggcauugaagauau

SEQ ID NO: 1540249 - RNA, 19 nt, Homo sapiens
  misc_RNA (1)...(19): siRNA sense strand
gcaaggauuugaagaagau

SEQ ID NO: 1540250 - RNA, 19 nt, Homo sapiens
  misc_RNA (1)...(19): siRNA sense strand
gcagggauccuuucaaguu

SEQ ID NO: 1540251 - RNA, 19 nt, Homo sapiens
  misc_RNA (1)...(19): siRNA sense strand
uggauaagcuacagaauga

SEQ ID NO: 1540252 - RNA, 19 nt, Homo sapiens
  misc_RNA (1)...(19): siRNA sense strand
gaaaggauccagaaacuag

SEQ ID NO: 1540253 - RNA, 19 nt, Homo sapiens
  misc_RNA (1)...(19): siRNA sense strand
gaaggccgucuuaaaguua

SEQ ID NO: 1540254 - RNA, 19 nt, Homo sapiens
  misc_RNA (1)...(19): siRNA sense strand
gaagaagaccuugauaaug

SEQ ID NO: 1540255 - RNA, 19 nt, Homo sapiens
  misc_RNA (1)...(19): siRNA sense strand
gcuacaagcucuaacacuu

SEQ ID NO: 1540256 - RNA, 19 nt, Homo sapiens
  misc_RNA (1)...(19): siRNA sense strand
ggacuuacacuucgucuug

SEQ ID NO: 1540257 - RNA, 19 nt, Homo sapiens
  misc_RNA (1)...(19): siRNA sense strand
cagaggaguucuauuaaga

SEQ ID NO: 1540258 - RNA, 19 nt, Homo sapiens
  misc_RNA (1)...(19): siRNA sense strand
guuagaauguagcagguua

SEQ ID NO: 1540259 - RNA, 19 nt, Homo sapiens
  misc_RNA (1)...(19): siRNA sense strand
gaauaccuuuccaaauuga

SEQ ID NO: 1540260 - RNA, 19 nt, Homo sapiens
  misc_RNA (1)...(19): siRNA sense strand
gaauguagcagguuacuca

SEQ ID NO: 1540261 - RNA, 19 nt, Homo sapiens
  misc_RNA (1)...(19): siRNA sense strand
gaguuaagcaguaguguuu

SEQ ID NO: 1540262 - RNA, 19 nt, Homo sapiens
  misc_RNA (1)...(19): siRNA sense strand
gcucuaacacuucuuauga

SEQ ID NO: 1540263 - RNA, 19 nt, Homo sapiens
  misc_RNA (1)...(19): siRNA sense strand
gcacaggaauaaaguuagu

SEQ ID NO: 1540264 - RNA, 19 nt, Homo sapiens
  misc_RNA (1)...(19): siRNA sense strand
gcacuacgcaaucugagua

SEQ ID NO: 1540265 - RNA, 19 nt, Homo sapiens
  misc_RNA (1)...(19): siRNA sense strand
gaaaguagagagcuggauu

SEQ ID NO: 1540266 - RNA, 19 nt, Homo sapiens
  misc_RNA (1)...(19): siRNA sense strand
ggccaaagaugucacuuca

SEQ ID NO: 1540267 - RNA, 19 nt, Homo sapiens
  misc_RNA (1)...(19): siRNA sense strand
gcaauuuguuggacagaug

SEQ ID NO: 1540268 - RNA, 19 nt, Homo sapiens
  misc_RNA (1)...(19): siRNA sense strand
acacuugaguuaagcagua

SEQ ID NO: 1540269 - RNA, 19 nt, Homo sapiens
  misc_RNA (1)...(19): siRNA sense strand
uguagcagguuacucauuu

SEQ ID NO: 1540270 - RNA, 19 nt, Homo sapiens
  misc_RNA (1)...(19): siRNA sense strand
gcuagcaagucagucaaua

SEQ ID NO: 1540271 - RNA, 19 nt, Homo sapiens
  misc_RNA (1)...(19): siRNA sense strand
cagauggguuuaacagaaa

SEQ ID NO: 1540272 - RNA, 19 nt, Homo sapiens
  misc_RNA (1)...(19): siRNA sense strand
acagauggguuuaacagaa

SEQ ID NO: 1540273 - RNA, 19 nt, Homo sapiens
  misc_RNA (1)...(19): siRNA sense strand
ucaaccagcucaagaagau

SEQ ID NO: 1540274 - RNA, 19 nt, Homo sapiens
  misc_RNA (1)...(19): siRNA sense strand
caauacuaguucucguuua

SEQ ID NO: 1540275 - RNA, 19 nt, Homo sapiens
  misc_RNA (1)...(19): siRNA sense strand
aaacucgccugcugcaauu

SEQ ID NO: 1540276 - RNA, 19 nt, Homo sapiens
  misc_RNA (1)...(19): siRNA sense strand
ugaaggccgucuuaaaguu

SEQ ID NO: 1540277 - RNA, 19 nt, Homo sapiens
  misc_RNA (1)...(19): siRNA sense strand
ugaagaagaugaagagcau

SEQ ID NO: 1540278 - RNA, 19 nt, Homo sapiens
  misc_RNA (1)...(19): siRNA sense strand
guacuuaaacauugcauug

SEQ ID NO: 1540279 - RNA, 19 nt, Homo sapiens
  misc_RNA (1)...(19): siRNA sense strand
auacaacaaugggcacuua

SEQ ID NO: 1540280 - RNA, 19 nt, Homo sapiens
  misc_RNA (1)...(19): siRNA sense strand
cagaagaagaccuugauaa

SEQ ID NO: 1540281 - RNA, 19 nt, Homo sapiens
  misc_RNA (1)...(19): siRNA sense strand
gauaagcuacagaaugaaa

SEQ ID NO: 1540282 - RNA, 19 nt, Homo sapiens
  misc_RNA (1)...(19): siRNA sense strand
cugcaaguguugaagcuua

SEQ ID NO: 1540283 - RNA, 19 nt, Homo sapiens
  misc_RNA (1)...(19): siRNA sense strand
ugggaggucucaucuguuu

SEQ ID NO: 1540284 - RNA, 19 nt, Homo sapiens
  misc_RNA (1)...(19): siRNA sense strand
cuacagagcaggcauugaa

SEQ ID NO: 1540285 - RNA, 19 nt, Homo sapiens
  misc_RNA (1)...(19): siRNA sense strand
cagcacaggaauaaaguua

SEQ ID NO: 1540286 - RNA, 19 nt, Homo sapiens
  misc_RNA (1)...(19): siRNA sense strand
ugacauuacuauucacuuc

SEQ ID NO: 1540287 - RNA, 19 nt, Homo sapiens
  misc_RNA (1)...(19): siRNA sense strand
ggaaauuuacaaaguguug

SEQ ID NO: 1540288 - RNA, 19 nt, Homo sapiens
  misc_RNA (1)...(19): siRNA sense strand
gacaaggcauauuaucaau

SEQ ID NO: 1540289 - RNA, 19 nt, Homo sapiens
  misc_RNA (1)...(19): siRNA sense strand
cagagcauccuguuuguuu

SEQ ID NO: 1540290 - RNA, 19 nt, Homo sapiens
  misc_RNA (1)...(19): siRNA sense strand
caccuccucuuguagauaa

SEQ ID NO: 1540291 - RNA, 19 nt, Homo sapiens
  misc_RNA (1)...(19): siRNA sense strand
gauaacagacccagcacaa

SEQ ID NO: 1540292 - RNA, 19 nt, Homo sapiens
  misc_RNA (1)...(19): siRNA sense strand
gaaaggcuacaagcucuaa

SEQ ID NO: 1540293 - RNA, 19 nt, Homo sapiens
  misc_RNA (1)...(19): siRNA sense strand
auaauucccuuguuagaga

SEQ ID NO: 1540294 - RNA, 19 nt, Homo sapiens
  misc_RNA (1)...(19): siRNA sense strand
ugaaauugaucaggaguug

SEQ ID NO: 1540295 - RNA, 19 nt, Homo sapiens
  misc_RNA (1)...(19): siRNA sense strand
gguuugacaaggcauauua

SEQ ID NO: 1540296 - RNA, 19 nt, Homo sapiens
  misc_RNA (1)...(19): siRNA sense strand
ucacagguacuuaaacauu

SEQ ID NO: 1540297 - RNA, 19 nt, Homo sapiens
  misc_RNA (1)...(19): siRNA sense strand
gaaccagagcauccuguuu

SEQ ID NO: 1540298 - RNA, 19 nt, Homo sapiens
  misc_RNA (1)...(19): siRNA sense strand
guucaaagaugaggcacaa

SEQ ID NO: 1540299 - RNA, 19 nt, Homo sapiens
  misc_RNA (1)...(19): siRNA sense strand
gaagcuagcaagucaguca

SEQ ID NO: 1540300 - RNA, 19 nt, Homo sapiens
  misc_RNA (1)...(19): siRNA sense strand
ugacagagaggcaaauguu

SEQ ID NO: 1540301 - RNA, 19 nt, Homo sapiens
  misc_RNA (1)...(19): siRNA sense strand
ugacaaggcauauuaucaa

SEQ ID NO: 1540302 - RNA, 19 nt, Homo sapiens
  misc_RNA (1)...(19): siRNA sense strand
guaauaagcuaggaaaaug

SEQ ID NO: 1540303 - RNA, 19 nt, Homo sapiens
  misc_RNA (1)...(19): siRNA sense strand
caaaaugaguucaaagaug

SEQ ID NO: 1540304 - RNA, 19 nt, Homo sapiens
  misc_RNA (1)...(19): siRNA sense strand
gcaguaguguuugggaaga

SEQ ID NO: 1540305 - RNA, 19 nt, Homo sapiens
  misc_RNA (1)...(19): siRNA sense strand
gcgggagacuugcuacuuc

SEQ ID NO: 1540306 - RNA, 19 nt, Homo sapiens
  misc_RNA (1)...(19): siRNA sense strand
uagaguucauguuggauaa

SEQ ID NO: 1540307 - RNA, 19 nt, Homo sapiens
  misc_RNA (1)...(19): siRNA sense strand
ggaaaggauccagaaacua

SEQ ID NO: 1540308 - RNA, 19 nt, Homo sapiens
  misc_RNA (1)...(19): siRNA sense strand
uaaagaaauuggucgugau

SEQ ID NO: 1540309 - RNA, 19 nt, Homo sapiens
  misc_RNA (1)...(19): siRNA sense strand
ccauuugguugaagaaguu

SEQ ID NO: 1540310 - RNA, 19 nt, Homo sapiens
  misc_RNA (1)...(19): siRNA sense strand
aaagaugucacuucagaaa

SEQ ID NO: 1540311 - RNA, 19 nt, Homo sapiens
  misc_RNA (1)...(19): siRNA sense strand
gcaagaaguggccaaagau

SEQ ID NO: 1540312 - RNA, 19 nt, Homo sapiens
  misc_RNA (1)...(19): siRNA sense strand
gaugaagagcauauccaua

SEQ ID NO: 1540313 - RNA, 19 nt, Homo sapiens
  misc_RNA (1)...(19): siRNA sense strand
gggcuugccuacagaggaa

SEQ ID NO: 1540314 - RNA, 19 nt, Homo sapiens
  misc_RNA (1)...(19): siRNA sense strand
gggaaacagcacaggaaua

SEQ ID NO: 1540315 - RNA, 19 nt, Homo sapiens
  misc_RNA (1)...(19): siRNA sense strand
gaauagacaggacacugaa

SEQ ID NO: 1540316 - RNA, 19 nt, Homo sapiens
  misc_RNA (1)...(19): siRNA sense strand
caaaagggauucaaugaca

SEQ ID NO: 1540317 - RNA, 19 nt, Homo sapiens
  misc_RNA (1)...(19): siRNA sense strand
gcucaugccaaucggguua

SEQ ID NO: 1540318 - RNA, 19 nt, Homo sapiens
  misc_RNA (1)...(19): siRNA sense strand
cacagguacuuaaacauug

SEQ ID NO: 1540319 - RNA, 19 nt, Homo sapiens
  misc_RNA (1)...(19): siRNA sense strand
caagcucuaacacuucuua

SEQ ID NO: 1540320 - RNA, 19 nt, Homo sapiens
  misc_RNA (1)...(19): siRNA sense strand
cuacaucaaacacggaaua

SEQ ID NO: 1540321 - RNA, 19 nt, Homo sapiens
  misc_RNA (1)...(19): siRNA sense strand
uaacagacccagcacaagu

SEQ ID NO: 1540322 - RNA, 19 nt, Homo sapiens
  misc_RNA (1)...(19): siRNA sense strand
gcauaucagaugacuuauu

SEQ ID NO: 1540323 - RNA, 19 nt, Homo sapiens
  misc_RNA (1)...(19): siRNA sense strand
agaagaagaccuugauaau

SEQ ID NO: 1540324 - RNA, 19 nt, Homo sapiens
  misc_RNA (1)...(19): siRNA sense strand
gaucaggaguuggaacaca

SEQ ID NO: 1540325 - RNA, 19 nt, Homo sapiens
  misc_RNA (1)...(19): siRNA sense strand
cgaauagacaggacacuga

SEQ ID NO: 1540326 - RNA, 19 nt, Homo sapiens
  misc_RNA (1)...(19): siRNA sense strand
uaaagaggagcaauuuguu

SEQ ID NO: 1540327 - RNA, 19 nt, Homo sapiens
  misc_RNA (1)...(19): siRNA sense strand
gaaccgcacuacgcaaucu

SEQ ID NO: 1540328 - RNA, 19 nt, Homo sapiens
  misc_RNA (1)...(19): siRNA sense strand
guugggaggucucaucugu

SEQ ID NO: 1540329 - RNA, 19 nt, Homo sapiens
  misc_RNA (1)...(19): siRNA sense strand
cuaaagaggagcaauuugu

SEQ ID NO: 1540330 - RNA, 19 nt, Homo sapiens
  misc_RNA (1)...(19): siRNA sense strand
gaaauuggucgugaucugu

SEQ ID NO: 1540331 - RNA, 19 nt, Homo sapiens
  misc_RNA (1)...(19): siRNA sense strand
caacacgucagacaacgaa

SEQ ID NO: 1540332 - RNA, 19 nt, Homo sapiens
  misc_RNA (1)...(19): siRNA sense strand
ccaccaacgugcugcuuua

SEQ ID NO: 1540333 - RNA, 19 nt, Homo sapiens
  misc_RNA (1)...(19): siRNA sense strand
gggccaccuucaucuguuu

SEQ ID NO: 1540334 - RNA, 19 nt, Homo sapiens
  misc_RNA (1)...(19): siRNA sense strand
gauguacuggcccuuugua

SEQ ID NO: 1540335 - RNA, 19 nt, Homo sapiens
  misc_RNA (1)...(19): siRNA sense strand
cgaguggauugauguacug

SEQ ID NO: 1540336 - RNA, 19 nt, Homo sapiens
  misc_RNA (1)...(19): siRNA sense strand
guacagcugaccaacuuca

SEQ ID NO: 1540337 - RNA, 19 nt, Homo sapiens
  misc_RNA (1)...(19): siRNA sense strand
uuguacagcugaccaacuu

SEQ ID NO: 1540338 - RNA, 19 nt, Homo sapiens
  misc_RNA (1)...(19): siRNA sense strand
gaccuuccacgccaacuuc

SEQ ID NO: 1540339 - RNA, 19 nt, Homo sapiens
  misc_RNA (1)...(19): siRNA sense strand
ggucucggccuucuauguc

SEQ ID NO: 1540340 - RNA, 19 nt, Homo sapiens
  misc_RNA (1)...(19): siRNA sense strand
uaugucgaguggauugaug

SEQ ID NO: 1540341 - RNA, 19 nt, Homo sapiens
  misc_RNA (1)...(19): siRNA sense strand
gaccaacuucagccuuguu

SEQ ID NO: 1540342 - RNA, 19 nt, Homo sapiens
  misc_RNA (1)...(19): siRNA sense strand
gagaggaacugccaggaua

SEQ ID NO: 1540343 - RNA, 19 nt, Homo sapiens
  misc_RNA (1)...(19): siRNA sense strand
caacgggacuguaaauuga

SEQ ID NO: 1540344 - RNA, 19 nt, Homo sapiens
  misc_RNA (1)...(19): siRNA sense strand
gcuauaagcuucucaucaa

SEQ ID NO: 1540345 - RNA, 19 nt, Homo sapiens
  misc_RNA (1)...(19): siRNA sense strand
gcuuugagcuuaccaagaa

SEQ ID NO: 1540346 - RNA, 19 nt, Homo sapiens
  misc_RNA (1)...(19): siRNA sense strand
caacaucccuggcaauuac

SEQ ID NO: 1540347 - RNA, 19 nt, Homo sapiens
  misc_RNA (1)...(19): siRNA sense strand
ggaaugaauugcaugaaca

SEQ ID NO: 1540348 - RNA, 19 nt, Homo sapiens
  misc_RNA (1)...(19): siRNA sense strand
caacgggccuccuucaaga

SEQ ID NO: 1540349 - RNA, 19 nt, Homo sapiens
  misc_RNA (1)...(19): siRNA sense strand
gcagagcugugucaacaug

SEQ ID NO: 1540350 - RNA, 19 nt, Homo sapiens
  misc_RNA (1)...(19): siRNA sense strand
gaucaaggaugccaaaugc

SEQ ID NO: 1540351 - RNA, 19 nt, Homo sapiens
  misc_RNA (1)...(19): siRNA sense strand
gcacuggaauggcaaagau

SEQ ID NO: 1540352 - RNA, 19 nt, Homo sapiens
  misc_RNA (1)...(19): siRNA sense strand
gaaaggaucccugaagaug

SEQ ID NO: 1540353 - RNA, 19 nt, Homo sapiens
  misc_RNA (1)...(19): siRNA sense strand
ugaauugcaugaacaagaa

SEQ ID NO: 1540354 - RNA, 19 nt, Homo sapiens
  misc_RNA (1)...(19): siRNA sense strand
uggcaggccuugauuauga

SEQ ID NO: 1540355 - RNA, 19 nt, Homo sapiens
  misc_RNA (1)...(19): siRNA sense strand
aggaagacgugcaaagaua

SEQ ID NO: 1540356 - RNA, 19 nt, Homo sapiens
  misc_RNA (1)...(19): siRNA sense strand
acaaggagaugcugccaaa

SEQ ID NO: 1540357 - RNA, 19 nt, Homo sapiens
  misc_RNA (1)...(19): siRNA sense strand
cauccuccauuaccacuua

SEQ ID NO: 1540358 - RNA, 19 nt, Homo sapiens
  misc_RNA (1)...(19): siRNA sense strand
ugaguucacuggcuauauu

SEQ ID NO: 1540359 - RNA, 19 nt, Homo sapiens
  misc_RNA (1)...(19): siRNA sense strand
caagaaaggcuauaagcuu

SEQ ID NO: 1540360 - RNA, 19 nt, Homo sapiens
  misc_RNA (1)...(19): siRNA sense strand
gaagacgugcaaagauaua

SEQ ID NO: 1540361 - RNA, 19 nt, Homo sapiens
  misc_RNA (1)...(19): siRNA sense strand
gacaguaagugccaugaug

SEQ ID NO: 1540362 - RNA, 19 nt, Homo sapiens
  misc_RNA (1)...(19): siRNA sense strand
caagauccuuaucguggua

SEQ ID NO: 1540363 - RNA, 19 nt, Homo sapiens
  misc_RNA (1)...(19): siRNA sense strand
gaaggaaugaauugcauga

SEQ ID NO: 1540364 - RNA, 19 nt, Homo sapiens
  misc_RNA (1)...(19): siRNA sense strand
ccaagacugugacaccaaa

SEQ ID NO: 1540365 - RNA, 19 nt, Homo sapiens
  misc_RNA (1)...(19): siRNA sense strand
cugcagugcuguccauuaa

SEQ ID NO: 1540366 - RNA, 19 nt, Homo sapiens
  misc_RNA (1)...(19): siRNA sense strand
gcccguggcuuccagauuc

SEQ ID NO: 1540367 - RNA, 19 nt, Homo sapiens
  misc_RNA (1)...(19): siRNA sense strand
ugaaugccguccuggcuuu

SEQ ID NO: 1540368 - RNA, 19 nt, Homo sapiens
  misc_RNA (1)...(19): siRNA sense strand
gagugcaucuggaacauca

SEQ ID NO: 1540369 - RNA, 19 nt, Homo sapiens
  misc_RNA (1)...(19): siRNA sense strand
gaaccaacgggacuguaaa

SEQ ID NO: 1540370 - RNA, 19 nt, Homo sapiens
  misc_RNA (1)...(19): siRNA sense strand
gcagugcuguccauuaaac

SEQ ID NO: 1540371 - RNA, 19 nt, Homo sapiens
  misc_RNA (1)...(19): siRNA sense strand
gaagaaggaaugaauugca

SEQ ID NO: 1540372 - RNA, 19 nt, Homo sapiens
  misc_RNA (1)...(19): siRNA sense strand
ggaagacgugcaaagauau

SEQ ID NO: 1540373 - RNA, 19 nt, Homo sapiens
  misc_RNA (1)...(19): siRNA sense strand
gauuccaccuggcacauga

SEQ ID NO: 1540374 - RNA, 19 nt, Homo sapiens
  misc_RNA (1)...(19): siRNA sense strand
aaacacaagcacagacuuu

SEQ ID NO: 1540375 - RNA, 19 nt, Homo sapiens
  misc_RNA (1)...(19): siRNA sense strand
caaccggucuggcaagaag

SEQ ID NO: 1540376 - RNA, 19 nt, Homo sapiens
  misc_RNA (1)...(19): siRNA sense strand
ccaacgggacuguaaauug

SEQ ID NO: 1540377 - RNA, 19 nt, Homo sapiens
  misc_RNA (1)...(19): siRNA sense strand
cguccuggcuuugagcuua

SEQ ID NO: 1540378 - RNA, 19 nt, Homo sapiens
  misc_RNA (1)...(19): siRNA sense strand
gugcaaagauauagaugag

SEQ ID NO: 1540379 - RNA, 19 nt, Homo sapiens
  misc_RNA (1)...(19): siRNA sense strand
gaugagugccgcuuaaaca

SEQ ID NO: 1540380 - RNA, 19 nt, Homo sapiens
  misc_RNA (1)...(19): siRNA sense strand
gcucaucaaggccuucuuu

SEQ ID NO: 1540381 - RNA, 19 nt, Homo sapiens
  misc_RNA (1)...(19): siRNA sense strand
cugcuccgcuccaaaguuu

SEQ ID NO: 1540382 - RNA, 19 nt, Homo sapiens
  misc_RNA (1)...(19): siRNA sense strand
cagaagaaggaaugaauug

SEQ ID NO: 1540383 - RNA, 19 nt, Homo sapiens
  misc_RNA (1)...(19): siRNA sense strand
gcuccaaaguuuccagcuu

SEQ ID NO: 1540384 - RNA, 19 nt, Homo sapiens
  misc_RNA (1)...(19): siRNA sense strand
aaauugacaugcaacuaug

SEQ ID NO: 1540385 - RNA, 19 nt, Homo sapiens
  misc_RNA (1)...(19): siRNA sense strand
ggccaacacucuguagaug

SEQ ID NO: 1540386 - RNA, 19 nt, Homo sapiens
  misc_RNA (1)...(19): siRNA sense strand
cugaaaggaucccugaaga

SEQ ID NO: 1540387 - RNA, 19 nt, Homo sapiens
  misc_RNA (1)...(19): siRNA sense strand
gaaugaauugcaugaacaa

SEQ ID NO: 1540388 - RNA, 19 nt, Homo sapiens
  misc_RNA (1)...(19): siRNA sense strand
ggaacugccaggauauaga

SEQ ID NO: 1540389 - RNA, 19 nt, Homo sapiens
  misc_RNA (1)...(19): siRNA sense strand
gaggaacugccaggauaua

SEQ ID NO: 1540390 - RNA, 19 nt, Homo sapiens
  misc_RNA (1)...(19): siRNA sense strand
ugacaugcaacuaugguaa

SEQ ID NO: 1540391 - RNA, 19 nt, Homo sapiens
  misc_RNA (1)...(19): siRNA sense strand
gaagacauugugcgagaug

SEQ ID NO: 1540392 - RNA, 19 nt, Homo sapiens
  misc_RNA (1)...(19): siRNA sense strand
ucauccaccuuaaguguga

SEQ ID NO: 1540393 - RNA, 19 nt, Homo sapiens
  misc_RNA (1)...(19): siRNA sense strand
caucguggcuaccuguugu

SEQ ID NO: 1540394 - RNA, 19 nt, Homo sapiens
  misc_RNA (1)...(19): siRNA sense strand
auagaugagugccgcuuaa

SEQ ID NO: 1540395 - RNA, 19 nt, Homo sapiens
  misc_RNA (1)...(19): siRNA sense strand
ggacaagaagcucaucaag

SEQ ID NO: 1540396 - RNA, 19 nt, Homo sapiens
  misc_RNA (1)...(19): siRNA sense strand
uggaucaacuucaagacaa

SEQ ID NO: 1540397 - RNA, 19 nt, Homo sapiens
  misc_RNA (1)...(19): siRNA sense strand
gaagcaggacggacccuau

SEQ ID NO: 1540398 - RNA, 19 nt, Homo sapiens
  misc_RNA (1)...(19): siRNA sense strand
agaggaggcuggcagaauc

SEQ ID NO: 1540399 - RNA, 19 nt, Homo sapiens
  misc_RNA (1)...(19): siRNA sense strand
gcacaugacggacacaacu

SEQ ID NO: 1540400 - RNA, 19 nt, Homo sapiens
  misc_RNA (1)...(19): siRNA sense strand
ggacggcaaacacugcaaa

SEQ ID NO: 1540401 - RNA, 19 nt, Homo sapiens
  misc_RNA (1)...(19): siRNA sense strand
caagaucaaggaugccaaa

SEQ ID NO: 1540402 - RNA, 19 nt, Homo sapiens
  misc_RNA (1)...(19): siRNA sense strand
cggcugccauaucaaguuu

SEQ ID NO: 1540403 - RNA, 19 nt, Homo sapiens
  misc_RNA (1)...(19): siRNA sense strand
guaaauugacaugcaacua

SEQ ID NO: 1540404 - RNA, 19 nt, Homo sapiens
  misc_RNA (1)...(19): siRNA sense strand
ccagaagaaggaaugaauu

SEQ ID NO: 1540405 - RNA, 19 nt, Homo sapiens
  misc_RNA (1)...(19): siRNA sense strand
ggucagagccgaagaaacc

SEQ ID NO: 1540406 - RNA, 19 nt, Homo sapiens
  misc_RNA (1)...(19): siRNA sense strand
gaccugugcugucaacaac

SEQ ID NO: 1540407 - RNA, 19 nt, Homo sapiens
  misc_RNA (1)...(19): siRNA sense strand
cgacuuccgucagaacuuc

SEQ ID NO: 1540408 - RNA, 19 nt, Homo sapiens
  misc_RNA (1)...(19): siRNA sense strand
gcccgcagggaacguauua

SEQ ID NO: 1540409 - RNA, 19 nt, Homo sapiens
  misc_RNA (1)...(19): siRNA sense strand
ugaagaugcucagaaaguc

SEQ ID NO: 1540410 - RNA, 19 nt, Homo sapiens
  misc_RNA (1)...(19): siRNA sense strand
guggcuaccuguuguaugg

SEQ ID NO: 1540411 - RNA, 19 nt, Homo sapiens
  misc_RNA (1)...(19): siRNA sense strand
cgguguaccugcuaugaug

SEQ ID NO: 1540412 - RNA, 19 nt, Homo sapiens
  misc_RNA (1)...(19): siRNA sense strand
gaaacacaagcacagacuu

SEQ ID NO: 1540413 - RNA, 19 nt, Homo sapiens
  misc_RNA (1)...(19): siRNA sense strand
ccagggcacuacuacaaca

SEQ ID NO: 1540414 - RNA, 19 nt, Homo sapiens
  misc_RNA (1)...(19): siRNA sense strand
auuaugagcuggcccacaa

SEQ ID NO: 1540415 - RNA, 19 nt, Homo sapiens
  misc_RNA (1)...(19): siRNA sense strand
ucaacaucccuggcaauua

SEQ ID NO: 1540416 - RNA, 19 nt, Homo sapiens
  misc_RNA (1)...(19): siRNA sense strand
gcaagaaaggcuauaagcu

SEQ ID NO: 1540417 - RNA, 19 nt, Homo sapiens
  misc_RNA (1)...(19): siRNA sense strand
gaaaggcuauaagcuucuc

SEQ ID NO: 1540418 - RNA, 19 nt, Homo sapiens
  misc_RNA (1)...(19): siRNA sense strand
ccuaugaugaggacuauga

SEQ ID NO: 1540419 - RNA, 19 nt, Homo sapiens
  misc_RNA (1)...(19): siRNA sense strand
gcuuccagauucccuaugu

SEQ ID NO: 1540420 - RNA, 19 nt, Homo sapiens
  misc_RNA (1)...(19): siRNA sense strand
ggaucaacuucaagacaag

SEQ ID NO: 1540421 - RNA, 19 nt, Homo sapiens
  misc_RNA (1)...(19): siRNA sense strand
ucaccuucauccaccuuaa

SEQ ID NO: 1540422 - RNA, 19 nt, Homo sapiens
  misc_RNA (1)...(19): siRNA sense strand
gcugcagugcuguccauua

SEQ ID NO: 1540423 - RNA, 19 nt, Homo sapiens
  misc_RNA (1)...(19): siRNA sense strand
acacagagaaacacaagga

SEQ ID NO: 1540424 - RNA, 19 nt, Homo sapiens
  misc_RNA (1)...(19): siRNA sense strand
gaacugccaggauauagac

SEQ ID NO: 1540425 - RNA, 19 nt, Homo sapiens
  misc_RNA (1)...(19): siRNA sense strand
augagcagcugguagaaga

SEQ ID NO: 1540426 - RNA, 19 nt, Homo sapiens
  misc_RNA (1)...(19): siRNA sense strand
ggacuaugagcagcuggua

SEQ ID NO: 1540427 - RNA, 19 nt, Homo sapiens
  misc_RNA (1)...(19): siRNA sense strand
agacgaguguuccuuugau

SEQ ID NO: 1540428 - RNA, 19 nt, Homo sapiens
  misc_RNA (1)...(19): siRNA sense strand
cugcaagucuggcuacaca

SEQ ID NO: 1540429 - RNA, 19 nt, Homo sapiens
  misc_RNA (1)...(19): siRNA sense strand
gacuguaaauugacaugca

SEQ ID NO: 1540430 - RNA, 19 nt, Homo sapiens
  misc_RNA (1)...(19): siRNA sense strand
ucaaguacacagagaaaca

SEQ ID NO: 1540431 - RNA, 19 nt, Homo sapiens
  misc_RNA (1)...(19): siRNA sense strand
uauagacgaguguuccuuu

SEQ ID NO: 1540432 - RNA, 19 nt, Homo sapiens
  misc_RNA (1)...(19): siRNA sense strand
gcaacacagugggcagcuu

SEQ ID NO: 1540433 - RNA, 19 nt, Homo sapiens
  misc_RNA (1)...(19): siRNA sense strand
gcugccauaucaaguuugu

SEQ ID NO: 1540434 - RNA, 19 nt, Homo sapiens
  misc_RNA (1)...(19): siRNA sense strand
caacaugaugggcagcuau

SEQ ID NO: 1540435 - RNA, 19 nt, Homo sapiens
  misc_RNA (1)...(19): siRNA sense strand
guacacagagaaacacaag

SEQ ID NO: 1540436 - RNA, 19 nt, Homo sapiens
  misc_RNA (1)...(19): siRNA sense strand
cccaagcgcaagauccuua

SEQ ID NO: 1540437 - RNA, 19 nt, Homo sapiens
  misc_RNA (1)...(19): siRNA sense strand
ggaacagcaccaacuccaa

SEQ ID NO: 1540438 - RNA, 19 nt, Homo sapiens
  misc_RNA (1)...(19): siRNA sense strand
aagaaggaaugaauugcau

SEQ ID NO: 1540439 - RNA, 19 nt, Homo sapiens
  misc_RNA (1)...(19): siRNA sense strand
gccagaagaaggaaugaau

SEQ ID NO: 1540440 - RNA, 19 nt, Homo sapiens
  misc_RNA (1)...(19): siRNA sense strand
uaccugcuaugauggauuc

SEQ ID NO: 1540441 - RNA, 19 nt, Homo sapiens
  misc_RNA (1)...(19): siRNA sense strand
cagagaaacacaaggagau

SEQ ID NO: 1540442 - RNA, 19 nt, Homo sapiens
  misc_RNA (1)...(19): siRNA sense strand
gaacaaagauugagaacca

SEQ ID NO: 1540443 - RNA, 19 nt, Homo sapiens
  misc_RNA (1)...(19): siRNA sense strand
uaacaaaccuuccacaaau

SEQ ID NO: 1540444 - RNA, 19 nt, Homo sapiens
  misc_RNA (1)...(19): siRNA sense strand
cgugaugccuuucauauaa

SEQ ID NO: 1540445 - RNA, 19 nt, Homo sapiens
  misc_RNA (1)...(19): siRNA sense strand
gagaaaagcuauugaaaug

SEQ ID NO: 1540446 - RNA, 19 nt, Homo sapiens
  misc_RNA (1)...(19): siRNA sense strand
ggagaacuaccuaauuuaa

SEQ ID NO: 1540447 - RNA, 19 nt, Homo sapiens
  misc_RNA (1)...(19): siRNA sense strand
gaugaucucacaacuauaa

SEQ ID NO: 1540448 - RNA, 19 nt, Homo sapiens
  misc_RNA (1)...(19): siRNA sense strand
ccacaggacuugcacaaau

SEQ ID NO: 1540449 - RNA, 19 nt, Homo sapiens
  misc_RNA (1)...(19): siRNA sense strand
cagaagaaguguaugcaaa

SEQ ID NO: 1540450 - RNA, 19 nt, Homo sapiens
  misc_RNA (1)...(19): siRNA sense strand
ggaccagucucucaccaaa

SEQ ID NO: 1540451 - RNA, 19 nt, Homo sapiens
  misc_RNA (1)...(19): siRNA sense strand
caacagcccugccucuuuc

SEQ ID NO: 1540452 - RNA, 19 nt, Homo sapiens
  misc_RNA (1)...(19): siRNA sense strand
gaugaaauaugaacguugu

SEQ ID NO: 1540453 - RNA, 19 nt, Homo sapiens
  misc_RNA (1)...(19): siRNA sense strand
guacgaaacuugagaucug

SEQ ID NO: 1540454 - RNA, 19 nt, Homo sapiens
  misc_RNA (1)...(19): siRNA sense strand
ugaaggugaugaaauauga

SEQ ID NO: 1540455 - RNA, 19 nt, Homo sapiens
  misc_RNA (1)...(19): siRNA sense strand
gaagaaguguaugcaaaga

SEQ ID NO: 1540456 - RNA, 19 nt, Homo sapiens
  misc_RNA (1)...(19): siRNA sense strand
cuugagaucugaauguaua

SEQ ID NO: 1540457 - RNA, 19 nt, Homo sapiens
  misc_RNA (1)...(19): siRNA sense strand
gaaauuaggagcucaugga

SEQ ID NO: 1540458 - RNA, 19 nt, Homo sapiens
  misc_RNA (1)...(19): siRNA sense strand
uaaaugaagucuugaaggu

SEQ ID NO: 1540459 - RNA, 19 nt, Homo sapiens
  misc_RNA (1)...(19): siRNA sense strand
aaucuuaccucucgaauuc

SEQ ID NO: 1540460 - RNA, 19 nt, Homo sapiens
  misc_RNA (1)...(19): siRNA sense strand
gcagucaguuucaucauca

SEQ ID NO: 1540461 - RNA, 19 nt, Homo sapiens
  misc_RNA (1)...(19): siRNA sense strand
guaacaaaccuuccacaaa

SEQ ID NO: 1540462 - RNA, 19 nt, Homo sapiens
  misc_RNA (1)...(19): siRNA sense strand
gaagaggaguuuaugaaaa

SEQ ID NO: 1540463 - RNA, 19 nt, Homo sapiens
  misc_RNA (1)...(19): siRNA sense strand
ccaauaugcuuuagaugga

SEQ ID NO: 1540464 - RNA, 19 nt, Homo sapiens
  misc_RNA (1)...(19): siRNA sense strand
gaaaauauuggaccacuua

SEQ ID NO: 1540465 - RNA, 19 nt, Homo sapiens
  misc_RNA (1)...(19): siRNA sense strand
aaacagaacuaaagaacca

SEQ ID NO: 1540466 - RNA, 19 nt, Homo sapiens
  misc_RNA (1)...(19): siRNA sense strand
ucuugaaggugaugaaaua

SEQ ID NO: 1540467 - RNA, 19 nt, Homo sapiens
  misc_RNA (1)...(19): siRNA sense strand
ugucagauguugcaaagaa

SEQ ID NO: 1540468 - RNA, 19 nt, Homo sapiens
  misc_RNA (1)...(19): siRNA sense strand
caagauuuguugcaaugaa

SEQ ID NO: 1540469 - RNA, 19 nt, Homo sapiens
  misc_RNA (1)...(19): siRNA sense strand
gaauuuagcauggcugauu

SEQ ID NO: 1540470 - RNA, 19 nt, Homo sapiens
  misc_RNA (1)...(19): siRNA sense strand
ucaaauggaugcugaacau

SEQ ID NO: 1540471 - RNA, 19 nt, Homo sapiens
  misc_RNA (1)...(19): siRNA sense strand
ucaggaaaaugcacaauua

SEQ ID NO: 1540472 - RNA, 19 nt, Homo sapiens
  misc_RNA (1)...(19): siRNA sense strand
caagcaagauuuggaaugu

SEQ ID NO: 1540473 - RNA, 19 nt, Homo sapiens
  misc_RNA (1)...(19): siRNA sense strand
gaaaagcuauugaaaugga

SEQ ID NO: 1540474 - RNA, 19 nt, Homo sapiens
  misc_RNA (1)...(19): siRNA sense strand
ccaccaaugucuccgcuuu

SEQ ID NO: 1540475 - RNA, 19 nt, Homo sapiens
  misc_RNA (1)...(19): siRNA sense strand
agagagaaguuguuaguuc

SEQ ID NO: 1540476 - RNA, 19 nt, Homo sapiens
  misc_RNA (1)...(19): siRNA sense strand
uuggagaacuaccuaauuu

SEQ ID NO: 1540477 - RNA, 19 nt, Homo sapiens
  misc_RNA (1)...(19): siRNA sense strand
gaaccacaauagcauguag

SEQ ID NO: 1540478 - RNA, 19 nt, Homo sapiens
  misc_RNA (1)...(19): siRNA sense strand
gauaucaaguggaauuagu

SEQ ID NO: 1540479 - RNA, 19 nt, Homo sapiens
  misc_RNA (1)...(19): siRNA sense strand
gcaauaggauagaugugau

SEQ ID NO: 1540480 - RNA, 19 nt, Homo sapiens
  misc_RNA (1)...(19): siRNA sense strand
ccacagcucucugaaggaa

SEQ ID NO: 1540481 - RNA, 19 nt, Homo sapiens
  misc_RNA (1)...(19): siRNA sense strand
gaacuaaagaaccaauuca

SEQ ID NO: 1540482 - RNA, 19 nt, Homo sapiens
  misc_RNA (1)...(19): siRNA sense strand
gauacgaggcucugaagaa

SEQ ID NO: 1540483 - RNA, 19 nt, Homo sapiens
  misc_RNA (1)...(19): siRNA sense strand
ucauuugacugaagagaaa

SEQ ID NO: 1540484 - RNA, 19 nt, Homo sapiens
  misc_RNA (1)...(19): siRNA sense strand
gcaaggagaauggcauaaa

SEQ ID NO: 1540485 - RNA, 19 nt, Homo sapiens
  misc_RNA (1)...(19): siRNA sense strand
aaacagaugauacgcuuaa

SEQ ID NO: 1540486 - RNA, 19 nt, Homo sapiens
  misc_RNA (1)...(19): siRNA sense strand
gcacaaucaaagagaauuu

SEQ ID NO: 1540487 - RNA, 19 nt, Homo sapiens
  misc_RNA (1)...(19): siRNA sense strand
gcugaaccgugaugccuuu

SEQ ID NO: 1540488 - RNA, 19 nt, Homo sapiens
  misc_RNA (1)...(19): siRNA sense strand
acaauagcauguagucuug

SEQ ID NO: 1540489 - RNA, 19 nt, Homo sapiens
  misc_RNA (1)...(19): siRNA sense strand
gaaguagcuuuccucaagu

SEQ ID NO: 1540490 - RNA, 19 nt, Homo sapiens
  misc_RNA (1)...(19): siRNA sense strand
ggucaccgcuuucgagaag

SEQ ID NO: 1540491 - RNA, 19 nt, Homo sapiens
  misc_RNA (1)...(19): siRNA sense strand
gcaaagaauacagagagua

SEQ ID NO: 1540492 - RNA, 19 nt, Homo sapiens
  misc_RNA (1)...(19): siRNA sense strand
ucaguuucaucaucagaua

SEQ ID NO: 1540493 - RNA, 19 nt, Homo sapiens
  misc_RNA (1)...(19): siRNA sense strand
uaagcaacauaaccaagaa

SEQ ID NO: 1540494 - RNA, 19 nt, Homo sapiens
  misc_RNA (1)...(19): siRNA sense strand
ugaaacauaugagguauag

SEQ ID NO: 1540495 - RNA, 19 nt, Homo sapiens
  misc_RNA (1)...(19): siRNA sense strand
acaaaugcauugccagaug

SEQ ID NO: 1540496 - RNA, 19 nt, Homo sapiens
  misc_RNA (1)...(19): siRNA sense strand
gaaagacacaaaccagaau

SEQ ID NO: 1540497 - RNA, 19 nt, Homo sapiens
  misc_RNA (1)...(19): siRNA sense strand
aacaaaccuuccacaaaua

SEQ ID NO: 1540498 - RNA, 19 nt, Homo sapiens
  misc_RNA (1)...(19): siRNA sense strand
gaauguauaggauuggaaa

SEQ ID NO: 1540499 - RNA, 19 nt, Homo sapiens
  misc_RNA (1)...(19): siRNA sense strand
uaugaugaccacaguaaua

SEQ ID NO: 1540500 - RNA, 19 nt, Homo sapiens
  misc_RNA (1)...(19): siRNA sense strand
gaaccaccgucugacuuga

SEQ ID NO: 1540501 - RNA, 19 nt, Homo sapiens
  misc_RNA (1)...(19): siRNA sense strand
gagacagacuacuccagaa

SEQ ID NO: 1540502 - RNA, 19 nt, Homo sapiens
  misc_RNA (1)...(19): siRNA sense strand
aaaccacuguaucagauuu

SEQ ID NO: 1540503 - RNA, 19 nt, Homo sapiens
  misc_RNA (1)...(19): siRNA sense strand
ggaaaauucuccauuguca

SEQ ID NO: 1540504 - RNA, 19 nt, Homo sapiens
  misc_RNA (1)...(19): siRNA sense strand
gaccaaauuucagaaggaa

SEQ ID NO: 1540505 - RNA, 19 nt, Homo sapiens
  misc_RNA (1)...(19): siRNA sense strand
gagugaacauguuugacaa

SEQ ID NO: 1540506 - RNA, 19 nt, Homo sapiens
  misc_RNA (1)...(19): siRNA sense strand
gguccuaaguuuauucauc

SEQ ID NO: 1540507 - RNA, 19 nt, Homo sapiens
  misc_RNA (1)...(19): siRNA sense strand
ggacaccugugauuugcau

SEQ ID NO: 1540508 - RNA, 19 nt, Homo sapiens
  misc_RNA (1)...(19): siRNA sense strand
gaugaaccaccaacacaaa

SEQ ID NO: 1540509 - RNA, 19 nt, Homo sapiens
  misc_RNA (1)...(19): siRNA sense strand
aaagagagagaaguuguua

SEQ ID NO: 1540510 - RNA, 19 nt, Homo sapiens
  misc_RNA (1)...(19): siRNA sense strand
guuguuaguucgguccuua

SEQ ID NO: 1540511 - RNA, 19 nt, Homo sapiens
  misc_RNA (1)...(19): siRNA sense strand
ggagugaacauguuugaca

SEQ ID NO: 1540512 - RNA, 19 nt, Homo sapiens
  misc_RNA (1)...(19): siRNA sense strand
gcagugaagaggaguuuau

SEQ ID NO: 1540513 - RNA, 19 nt, Homo sapiens
  misc_RNA (1)...(19): siRNA sense strand
auaagagccuugaugcaaa

SEQ ID NO: 1540514 - RNA, 19 nt, Homo sapiens
  misc_RNA (1)...(19): siRNA sense strand
aaauggaacccuaugauga

SEQ ID NO: 1540515 - RNA, 19 nt, Homo sapiens
  misc_RNA (1)...(19): siRNA sense strand
cgaaagacacaaaccagaa

SEQ ID NO: 1540516 - RNA, 19 nt, Homo sapiens
  misc_RNA (1)...(19): siRNA sense strand
gcaagauuuggaauguuua

SEQ ID NO: 1540517 - RNA, 19 nt, Homo sapiens
  misc_RNA (1)...(19): siRNA sense strand
gagggucuuugccagcuaa

SEQ ID NO: 1540518 - RNA, 19 nt, Homo sapiens
  misc_RNA (1)...(19): siRNA sense strand
ugucuccgcuuucguuuga

SEQ ID NO: 1540519 - RNA, 19 nt, Homo sapiens
  misc_RNA (1)...(19): siRNA sense strand
gaaccgugaugccuuucau

SEQ ID NO: 1540520 - RNA, 19 nt, Homo sapiens
  misc_RNA (1)...(19): siRNA sense strand
auacgaggcucugaagaaa

SEQ ID NO: 1540521 - RNA, 19 nt, Homo sapiens
  misc_RNA (1)...(19): siRNA sense strand
uuucagauaucaaguggaa

SEQ ID NO: 1540522 - RNA, 19 nt, Homo sapiens
  misc_RNA (1)...(19): siRNA sense strand
gcgagugugugccucagaa

SEQ ID NO: 1540523 - RNA, 19 nt, Homo sapiens
  misc_RNA (1)...(19): siRNA sense strand
agaaaccacuguaucagau

SEQ ID NO: 1540524 - RNA, 19 nt, Homo sapiens
  misc_RNA (1)...(19): siRNA sense strand
auuaggagcucauggagaa

SEQ ID NO: 1540525 - RNA, 19 nt, Homo sapiens
  misc_RNA (1)...(19): siRNA sense strand
caaagaauacagagaguag

SEQ ID NO: 1540526 - RNA, 19 nt, Homo sapiens
  misc_RNA (1)...(19): siRNA sense strand
ucaaguuguugguucacua

SEQ ID NO: 1540527 - RNA, 19 nt, Homo sapiens
  misc_RNA (1)...(19): siRNA sense strand
ucagauaucaaguggaauu

SEQ ID NO: 1540528 - RNA, 19 nt, Homo sapiens
  misc_RNA (1)...(19): siRNA sense strand
ugaagaggaguuuaugaaa

SEQ ID NO: 1540529 - RNA, 19 nt, Homo sapiens
  misc_RNA (1)...(19): siRNA sense strand
gugaagaggaguuuaugaa

SEQ ID NO: 1540530 - RNA, 19 nt, Homo sapiens
  misc_RNA (1)...(19): siRNA sense strand
gaagaaaacagaacuaaag

SEQ ID NO: 1540531 - RNA, 19 nt, Homo sapiens
  misc_RNA (1)...(19): siRNA sense strand
ccagaaaacuugauaacug

SEQ ID NO: 1540532 - RNA, 19 nt, Homo sapiens
  misc_RNA (1)...(19): siRNA sense strand
guaguucagaggccaauuu

SEQ ID NO: 1540533 - RNA, 19 nt, Homo sapiens
  misc_RNA (1)...(19): siRNA sense strand
agcaagauuuggaauguuu

SEQ ID NO: 1540534 - RNA, 19 nt, Homo sapiens
  misc_RNA (1)...(19): siRNA sense strand
gcaagcaagauuuggaaug

SEQ ID NO: 1540535 - RNA, 19 nt, Homo sapiens
  misc_RNA (1)...(19): siRNA sense strand
gcucuuacuugacaaaauu

SEQ ID NO: 1540536 - RNA, 19 nt, Homo sapiens
  misc_RNA (1)...(19): siRNA sense strand
gaaaccacuguaucagauu

SEQ ID NO: 1540537 - RNA, 19 nt, Homo sapiens
  misc_RNA (1)...(19): siRNA sense strand
agagaaguauugccagaau

SEQ ID NO: 1540538 - RNA, 19 nt, Homo sapiens
  misc_RNA (1)...(19): siRNA sense strand
ccaacagcccugccucuuu

SEQ ID NO: 1540539 - RNA, 19 nt, Homo sapiens
  misc_RNA (1)...(19): siRNA sense strand
caaggagaauggcauaaaa

SEQ ID NO: 1540540 - RNA, 19 nt, Homo sapiens
  misc_RNA (1)...(19): siRNA sense strand
gagaaguauugccagaauc

SEQ ID NO: 1540541 - RNA, 19 nt, Homo sapiens
  misc_RNA (1)...(19): siRNA sense strand
ccagaaucauuaccugugu

SEQ ID NO: 1540542 - RNA, 19 nt, Homo sapiens
  misc_RNA (1)...(19): siRNA sense strand
gaagucaucuccuacuauu

SEQ ID NO: 1540543 - RNA, 19 nt, Homo sapiens
  misc_RNA (1)...(19): siRNA sense strand
gaaagcaggacaagaacua

SEQ ID NO: 1540544 - RNA, 19 nt, Homo sapiens
  misc_RNA (1)...(19): siRNA sense strand
ggaagacuaugcuggaguu

SEQ ID NO: 1540545 - RNA, 19 nt, Homo sapiens
  misc_RNA (1)...(19): siRNA sense strand
gaacguugugucaauguua

SEQ ID NO: 1540546 - RNA, 19 nt, Homo sapiens
  misc_RNA (1)...(19): siRNA sense strand
ucaacucccucuucaauga

SEQ ID NO: 1540547 - RNA, 19 nt, Homo sapiens
  misc_RNA (1)...(19): siRNA sense strand
ggacauaaccuuggaaucu

SEQ ID NO: 1540548 - RNA, 19 nt, Homo sapiens
  misc_RNA (1)...(19): siRNA sense strand
gagcgggacucaccaggaa

SEQ ID NO: 1540549 - RNA, 19 nt, Homo sapiens
  misc_RNA (1)...(19): siRNA sense strand
gaucaacucccucuucaau

SEQ ID NO: 1540550 - RNA, 19 nt, Homo sapiens
  misc_RNA (1)...(19): siRNA sense strand
gaugaucagcugagccuua

SEQ ID NO: 1540551 - RNA, 19 nt, Homo sapiens
  misc_RNA (1)...(19): siRNA sense strand
uuucagugcugcuuaagua

SEQ ID NO: 1540552 - RNA, 19 nt, Homo sapiens
  misc_RNA (1)...(19): siRNA sense strand
ccaaggaauucauuaugga

SEQ ID NO: 1540553 - RNA, 19 nt, Homo sapiens
  misc_RNA (1)...(19): siRNA sense strand
gcccuggacuggaucauga

SEQ ID NO: 1540554 - RNA, 19 nt, Homo sapiens
  misc_RNA (1)...(19): siRNA sense strand
caggaaagcaggacaagaa

SEQ ID NO: 1540555 - RNA, 19 nt, Homo sapiens
  misc_RNA (1)...(19): siRNA sense strand
gacaagaacuacgguuuua

SEQ ID NO: 1540556 - RNA, 19 nt, Homo sapiens
  misc_RNA (1)...(19): siRNA sense strand
gaacuacgguuuuacaaag

SEQ ID NO: 1540557 - RNA, 19 nt, Homo sapiens
  misc_RNA (1)...(19): siRNA sense strand
agacuaugcuggaguuuca

SEQ ID NO: 1540558 - RNA, 19 nt, Homo sapiens
  misc_RNA (1)...(19): siRNA sense strand
ugacucagaucugcaguga

SEQ ID NO: 1540559 - RNA, 19 nt, Homo sapiens
  misc_RNA (1)...(19): siRNA sense strand
gaauggcccugaggcaguu

SEQ ID NO: 1540560 - RNA, 19 nt, Homo sapiens
  misc_RNA (1)...(19): siRNA sense strand
ggaagucaucuccuacuau

SEQ ID NO: 1540561 - RNA, 19 nt, Homo sapiens
  misc_RNA (1)...(19): siRNA sense strand
ucaguauucucuagaugaa

SEQ ID NO: 1540562 - RNA, 19 nt, Homo sapiens
  misc_RNA (1)...(19): siRNA sense strand
uauggaaaguguucaggaa

SEQ ID NO: 1540563 - RNA, 19 nt, Homo sapiens
  misc_RNA (1)...(19): siRNA sense strand
caccuuagaugaugcagau

SEQ ID NO: 1540564 - RNA, 19 nt, Homo sapiens
  misc_RNA (1)...(19): siRNA sense strand
caacuuucagugcugcuua

SEQ ID NO: 1540565 - RNA, 19 nt, Homo sapiens
  misc_RNA (1)...(19): siRNA sense strand
ggccucccuuugugaguua

SEQ ID NO: 1540566 - RNA, 19 nt, Homo sapiens
  misc_RNA (1)...(19): siRNA sense strand
ggaaaguguucaggaagca

SEQ ID NO: 1540567 - RNA, 19 nt, Homo sapiens
  misc_RNA (1)...(19): siRNA sense strand
gugaaggugugguggucua

SEQ ID NO: 1540568 - RNA, 19 nt, Homo sapiens
  misc_RNA (1)...(19): siRNA sense strand
gaucaccaaggaauucauu

SEQ ID NO: 1540569 - RNA, 19 nt, Homo sapiens
  misc_RNA (1)...(19): siRNA sense strand
ggaauucauuauggaaagu

SEQ ID NO: 1540570 - RNA, 19 nt, Homo sapiens
  misc_RNA (1)...(19): siRNA sense strand
caccaggaauugucucuca

SEQ ID NO: 1540571 - RNA, 19 nt, Homo sapiens
  misc_RNA (1)...(19): siRNA sense strand
cuauugcacuggaauggaa

SEQ ID NO: 1540572 - RNA, 19 nt, Homo sapiens
  misc_RNA (1)...(19): siRNA sense strand
gacauaaccuuggaaucuc

SEQ ID NO: 1540573 - RNA, 19 nt, Homo sapiens
  misc_RNA (1)...(19): siRNA sense strand
ggacaagaacuacgguuuu

SEQ ID NO: 1540574 - RNA, 19 nt, Homo sapiens
  misc_RNA (1)...(19): siRNA sense strand
gcaggaucaccaaggaauu

SEQ ID NO: 1540575 - RNA, 19 nt, Homo sapiens
  misc_RNA (1)...(19): siRNA sense strand
caggaauugucucucaaga

SEQ ID NO: 1540576 - RNA, 19 nt, Homo sapiens
  misc_RNA (1)...(19): siRNA sense strand
caaggaauucauuauggaa

SEQ ID NO: 1540577 - RNA, 19 nt, Homo sapiens
  misc_RNA (1)...(19): siRNA sense strand
ggacucaccaggaauuguc

SEQ ID NO: 1540578 - RNA, 19 nt, Homo sapiens
  misc_RNA (1)...(19): siRNA sense strand
aaagcaagcagcagcagaa

SEQ ID NO: 1540579 - RNA, 19 nt, Homo sapiens
  misc_RNA (1)...(19): siRNA sense strand
ggaggaagccaggaaagca

SEQ ID NO: 1540580 - RNA, 19 nt, Homo sapiens
  misc_RNA (1)...(19): siRNA sense strand
cagcuaaaguggcccugau

SEQ ID NO: 1540581 - RNA, 19 nt, Homo sapiens
  misc_RNA (1)...(19): siRNA sense strand
aaggugugguggucuauga

SEQ ID NO: 1540582 - RNA, 19 nt, Homo sapiens
  misc_RNA (1)...(19): siRNA sense strand
acacaucauugcccaaguc

SEQ ID NO: 1540583 - RNA, 19 nt, Homo sapiens
  misc_RNA (1)...(19): siRNA sense strand
gggccucccuuugugaguu

SEQ ID NO: 1540584 - RNA, 19 nt, Homo sapiens
  misc_RNA (1)...(19): siRNA sense strand
acuacaugcuggagucaaa

SEQ ID NO: 1540585 - RNA, 19 nt, Homo sapiens
  misc_RNA (1)...(19): siRNA sense strand
ugucaauguuacaggaauu

SEQ ID NO: 1540586 - RNA, 19 nt, Homo sapiens
  misc_RNA (1)...(19): siRNA sense strand
ugaacguugugucaauguu

SEQ ID NO: 1540587 - RNA, 19 nt, Homo sapiens
  misc_RNA (1)...(19): siRNA sense strand
caggcgggaugcagcuaaa

SEQ ID NO: 1540588 - RNA, 19 nt, Homo sapiens
  misc_RNA (1)...(19): siRNA sense strand
uggacuggaucaugaagga

SEQ ID NO: 1540589 - RNA, 19 nt, Homo sapiens
  misc_RNA (1)...(19): siRNA sense strand
caggagcugaugaccauuu

SEQ ID NO: 1540590 - RNA, 19 nt, Homo sapiens
  misc_RNA (1)...(19): siRNA sense strand
ucaccaaggaauucauuau

SEQ ID NO: 1540591 - RNA, 19 nt, Homo sapiens
  misc_RNA (1)...(19): siRNA sense strand
gcuaaaguggcccugauca

SEQ ID NO: 1540592 - RNA, 19 nt, Homo sapiens
  misc_RNA (1)...(19): siRNA sense strand
caccaaggaauucauuaug

SEQ ID NO: 1540593 - RNA, 19 nt, Homo sapiens
  misc_RNA (1)...(19): siRNA sense strand
cugaucaacucccucuuca

SEQ ID NO: 1540594 - RNA, 19 nt, Homo sapiens
  misc_RNA (1)...(19): siRNA sense strand
gaugaccauuuuccaacua

SEQ ID NO: 1540595 - RNA, 19 nt, Homo sapiens
  misc_RNA (1)...(19): siRNA sense strand
gcgggacucaccaggaauu

SEQ ID NO: 1540596 - RNA, 19 nt, Homo sapiens
  misc_RNA (1)...(19): siRNA sense strand
gaaggcugcauucccaagu

SEQ ID NO: 1540597 - RNA, 19 nt, Homo sapiens
  misc_RNA (1)...(19): siRNA sense strand
uaaaguggcccugaucaac

SEQ ID NO: 1540598 - RNA, 19 nt, Homo sapiens
  misc_RNA (1)...(19): siRNA sense strand
accaaggaauucauuaugg

SEQ ID NO: 1540599 - RNA, 19 nt, Homo sapiens
  misc_RNA (1)...(19): siRNA sense strand
uuacaggaauuuugggaaa

SEQ ID NO: 1540600 - RNA, 19 nt, Homo sapiens
  misc_RNA (1)...(19): siRNA sense strand
caacuauugcacuggaaug

SEQ ID NO: 1540601 - RNA, 19 nt, Homo sapiens
  misc_RNA (1)...(19): siRNA sense strand
agacuugaacguuguguca

SEQ ID NO: 1540602 - RNA, 19 nt, Homo sapiens
  misc_RNA (1)...(19): siRNA sense strand
agucuugccucacagagau

SEQ ID NO: 1540603 - RNA, 19 nt, Homo sapiens
  misc_RNA (1)...(19): siRNA sense strand
cuaaaagcccuucgugaaa

SEQ ID NO: 1540604 - RNA, 19 nt, Homo sapiens
  misc_RNA (1)...(19): siRNA sense strand
cuaaaguggcccugaucaa

SEQ ID NO: 1540605 - RNA, 19 nt, Homo sapiens
  misc_RNA (1)...(19): siRNA sense strand
gagauccggcucuagucuu

SEQ ID NO: 1540606 - RNA, 19 nt, Homo sapiens
  misc_RNA (1)...(19): siRNA sense strand
ucucaguauucucuagaug

SEQ ID NO: 1540607 - RNA, 19 nt, Homo sapiens
  misc_RNA (1)...(19): siRNA sense strand
cagcggcaccuuagaugau

SEQ ID NO: 1540608 - RNA, 19 nt, Homo sapiens
  misc_RNA (1)...(19): siRNA sense strand
gaagacuaugcuggaguuu

SEQ ID NO: 1540609 - RNA, 19 nt, Homo sapiens
  misc_RNA (1)...(19): siRNA sense strand
ggaaagcaggacaagaacu

SEQ ID NO: 1540610 - RNA, 19 nt, Homo sapiens
  misc_RNA (1)...(19): siRNA sense strand
agauccggcucuagucuuc

SEQ ID NO: 1540611 - RNA, 19 nt, Homo sapiens
  misc_RNA (1)...(19): siRNA sense strand
ccagcggcaccuuagauga

SEQ ID NO: 1540612 - RNA, 19 nt, Homo sapiens
  misc_RNA (1)...(19): siRNA sense strand
ccuaaaagcccuucgugaa

SEQ ID NO: 1540613 - RNA, 19 nt, Homo sapiens
  misc_RNA (1)...(19): siRNA sense strand
aggcugcauucccaaguga

SEQ ID NO: 1540614 - RNA, 19 nt, Homo sapiens
  misc_RNA (1)...(19): siRNA sense strand
ccuuagaugaugcagauga

SEQ ID NO: 1540615 - RNA, 19 nt, Homo sapiens
  misc_RNA (1)...(19): siRNA sense strand
gaaggugugguggucuaug

SEQ ID NO: 1540616 - RNA, 19 nt, Homo sapiens
  misc_RNA (1)...(19): siRNA sense strand
gugucaauguuacaggaau

SEQ ID NO: 1540617 - RNA, 19 nt, Homo sapiens
  misc_RNA (1)...(19): siRNA sense strand
acauggcccuggacuggau

SEQ ID NO: 1540618 - RNA, 19 nt, Homo sapiens
  misc_RNA (1)...(19): siRNA sense strand
aggaauucauuauggaaag

SEQ ID NO: 1540619 - RNA, 19 nt, Homo sapiens
  misc_RNA (1)...(19): siRNA sense strand
caggaucaccaaggaauuc

SEQ ID NO: 1540620 - RNA, 19 nt, Homo sapiens
  misc_RNA (1)...(19): siRNA sense strand
ccuacuacguguccaccua

SEQ ID NO: 1540621 - RNA, 19 nt, Homo sapiens
  misc_RNA (1)...(19): siRNA sense strand
gcugcagccucugggauga

SEQ ID NO: 1540622 - RNA, 19 nt, Homo sapiens
  misc_RNA (1)...(19): siRNA sense strand
ugacccugcucgcuucauc

SEQ ID NO: 1540623 - RNA, 19 nt, Homo sapiens
  misc_RNA (1)...(19): siRNA sense strand
agcuguggcucaccuacua

SEQ ID NO: 1540624 - RNA, 19 nt, Homo sapiens
  misc_RNA (1)...(19): siRNA sense strand
cugcuucucuaccuguuca

SEQ ID NO: 1540625 - RNA, 19 nt, Homo sapiens
  misc_RNA (1)...(19): siRNA sense strand
ugaaguaccucacccauga

SEQ ID NO: 1540626 - RNA, 19 nt, Homo sapiens
  misc_RNA (1)...(19): siRNA sense strand
gaaacaagaugcugagacu

SEQ ID NO: 1540627 - RNA, 19 nt, Homo sapiens
  misc_RNA (1)...(19): siRNA sense strand
ggaaggagcacaggaaaca

SEQ ID NO: 1540628 - RNA, 19 nt, Homo sapiens
  misc_RNA (1)...(19): siRNA sense strand
gccaacggcuucccaagug

SEQ ID NO: 1540629 - RNA, 19 nt, Homo sapiens
  misc_RNA (1)...(19): siRNA sense strand
gcaacaucaucgucaccaa

SEQ ID NO: 1540630 - RNA, 19 nt, Homo sapiens
  misc_RNA (1)...(19): siRNA sense strand
uccagaagcuucacuuugg

SEQ ID NO: 1540631 - RNA, 19 nt, Homo sapiens
  misc_RNA (1)...(19): siRNA sense strand
gaagcuucacuuuggauga

SEQ ID NO: 1540632 - RNA, 19 nt, Homo sapiens
  misc_RNA (1)...(19): siRNA sense strand
ccagaagcuucacuuugga

SEQ ID NO: 1540633 - RNA, 19 nt, Homo sapiens
  misc_RNA (1)...(19): siRNA sense strand
gagcacaggaaacaagaug

SEQ ID NO: 1540634 - RNA, 19 nt, Homo sapiens
  misc_RNA (1)...(19): siRNA sense strand
agacgcaucugacaugaac

SEQ ID NO: 1540635 - RNA, 19 nt, Homo sapiens
  misc_RNA (1)...(19): siRNA sense strand
uaacccaccggaaaucaga

SEQ ID NO: 1540636 - RNA, 19 nt, Homo sapiens
  misc_RNA (1)...(19): siRNA sense strand
ccuccgagccugaagaugu

SEQ ID NO: 1540637 - RNA, 19 nt, Homo sapiens
  misc_RNA (1)...(19): siRNA sense strand
gggcaucaccgugcaguuc

SEQ ID NO: 1540638 - RNA, 19 nt, Homo sapiens
  misc_RNA (1)...(19): siRNA sense strand
gcuccagaagcuucacuuu

SEQ ID NO: 1540639 - RNA, 19 nt, Homo sapiens
  misc_RNA (1)...(19): siRNA sense strand
guuauggcgcagaagauuu

SEQ ID NO: 1540640 - RNA, 19 nt, Homo sapiens
  misc_RNA (1)...(19): siRNA sense strand
gaaggagcacaggaaacaa

SEQ ID NO: 1540641 - RNA, 19 nt, Homo sapiens
  misc_RNA (1)...(19): siRNA sense strand
gcuucacuuuggaugauga

SEQ ID NO: 1540642 - RNA, 19 nt, Homo sapiens
  misc_RNA (1)...(19): siRNA sense strand
augaugagagccugaagua

SEQ ID NO: 1540643 - RNA, 19 nt, Homo sapiens
  misc_RNA (1)...(19): siRNA sense strand
aagcuucacuuuggaugau

SEQ ID NO: 1540644 - RNA, 19 nt, Homo sapiens
  misc_RNA (1)...(19): siRNA sense strand
gcacaggaaacaagaugcu

SEQ ID NO: 1540645 - RNA, 19 nt, Homo sapiens
  misc_RNA (1)...(19): siRNA sense strand
gaugaugagagccugaagu

SEQ ID NO: 1540646 - RNA, 19 nt, Homo sapiens
  misc_RNA (1)...(19): siRNA sense strand
gccuguaacccaccggaaa

SEQ ID NO: 1540647 - RNA, 19 nt, Homo sapiens
  misc_RNA (1)...(19): siRNA sense strand
ggccaacggcuucccaagu

SEQ ID NO: 1540648 - RNA, 19 nt, Homo sapiens
  misc_RNA (1)...(19): siRNA sense strand
gaaaugccauguagugaau

SEQ ID NO: 1540649 - RNA, 19 nt, Homo sapiens
  misc_RNA (1)...(19): siRNA sense strand
gaaggcagcccuccugaaa

SEQ ID NO: 1540650 - RNA, 19 nt, Homo sapiens
  misc_RNA (1)...(19): siRNA sense strand
gcacugcccugcccaugau

SEQ ID NO: 1540651 - RNA, 19 nt, Homo sapiens
  misc_RNA (1)...(19): siRNA sense strand
cagaagcacugcgaaagaa

SEQ ID NO: 1540652 - RNA, 19 nt, Homo sapiens
  misc_RNA (1)...(19): siRNA sense strand
gagagaacaucgagaucau

SEQ ID NO: 1540653 - RNA, 19 nt, Homo sapiens
  misc_RNA (1)...(19): siRNA sense strand
ccaagcagaccuacccaua

SEQ ID NO: 1540654 - RNA, 19 nt, Homo sapiens
  misc_RNA (1)...(19): siRNA sense strand
gcagagagaacaucgagau

SEQ ID NO: 1540655 - RNA, 19 nt, Homo sapiens
  misc_RNA (1)...(19): siRNA sense strand
ccaggaugcuauguguuua

SEQ ID NO: 1540656 - RNA, 19 nt, Homo sapiens
  misc_RNA (1)...(19): siRNA sense strand
gagagugaauuggaugaug

SEQ ID NO: 1540657 - RNA, 19 nt, Homo sapiens
  misc_RNA (1)...(19): siRNA sense strand
agagugaauuggaugauga

SEQ ID NO: 1540658 - RNA, 19 nt, Homo sapiens
  misc_RNA (1)...(19): siRNA sense strand
ucucagaaaugccauguag

SEQ ID NO: 1540659 - RNA, 19 nt, Homo sapiens
  misc_RNA (1)...(19): siRNA sense strand
gaagcacugcgaaagaaga

SEQ ID NO: 1540660 - RNA, 19 nt, Homo sapiens
  misc_RNA (1)...(19): siRNA sense strand
ucagaaaugccauguagug

SEQ ID NO: 1540661 - RNA, 19 nt, Homo sapiens
  misc_RNA (1)...(19): siRNA sense strand
uaauaaauccagagaccaa

SEQ ID NO: 1540662 - RNA, 19 nt, Homo sapiens
  misc_RNA (1)...(19): siRNA sense strand
gaucuguacccgccuguug

SEQ ID NO: 1540663 - RNA, 19 nt, Homo sapiens
  misc_RNA (1)...(19): siRNA sense strand
ccagaagcacugcgaaaga

SEQ ID NO: 1540664 - RNA, 19 nt, Homo sapiens
  misc_RNA (1)...(19): siRNA sense strand
ucuacuugguuguguguaa

SEQ ID NO: 1540665 - RNA, 19 nt, Homo sapiens
  misc_RNA (1)...(19): siRNA sense strand
ccaccagccuccugagaag

SEQ ID NO: 1540666 - RNA, 19 nt, Homo sapiens
  misc_RNA (1)...(19): siRNA sense strand
gaaggccaacucccgcaaa

SEQ ID NO: 1540667 - RNA, 19 nt, Homo sapiens
  misc_RNA (1)...(19): siRNA sense strand
cagcagcaccuucucuguu

SEQ ID NO: 1540668 - RNA, 19 nt, Homo sapiens
  misc_RNA (1)...(19): siRNA sense strand
gcagaccuacccauacugu

SEQ ID NO: 1540669 - RNA, 19 nt, Homo sapiens
  misc_RNA (1)...(19): siRNA sense strand
ggaaggagugcgaccucaa

SEQ ID NO: 1540670 - RNA, 19 nt, Homo sapiens
  misc_RNA (1)...(19): siRNA sense strand
gcaagcugccgccuuccaa

SEQ ID NO: 1540671 - RNA, 19 nt, Homo sapiens
  misc_RNA (1)...(19): siRNA sense strand
gcucagcacucagcuccau

SEQ ID NO: 1540672 - RNA, 19 nt, Homo sapiens
  misc_RNA (1)...(19): siRNA sense strand
agaaaugccauguagugaa

SEQ ID NO: 1540673 - RNA, 19 nt, Homo sapiens
  misc_RNA (1)...(19): siRNA sense strand
ccugccagcucucagaaau

SEQ ID NO: 1540674 - RNA, 19 nt, Homo sapiens
  misc_RNA (1)...(19): siRNA sense strand
gccucaagcuuuccagaag

SEQ ID NO: 1540675 - RNA, 19 nt, Homo sapiens
  misc_RNA (1)...(19): siRNA sense strand
cccaggaugcuauguguuu

SEQ ID NO: 1540676 - RNA, 19 nt, Homo sapiens
  misc_RNA (1)...(19): siRNA sense strand
aagcagaccuacccauacu

SEQ ID NO: 1540677 - RNA, 19 nt, Homo sapiens
  misc_RNA (1)...(19): siRNA sense strand
cagaaaugccauguaguga

SEQ ID NO: 1540678 - RNA, 19 nt, Homo sapiens
  misc_RNA (1)...(19): siRNA sense strand
gccagcaagucauccaaag

SEQ ID NO: 1540679 - RNA, 19 nt, Homo sapiens
  misc_RNA (1)...(19): siRNA sense strand
ggaagauggcucggaagga

SEQ ID NO: 1540680 - RNA, 19 nt, Homo sapiens
  misc_RNA (1)...(19): siRNA sense strand
gaaggagugcgaccucaac

SEQ ID NO: 1540681 - RNA, 19 nt, Homo sapiens
  misc_RNA (1)...(19): siRNA sense strand
gaaccuccuggcagagaga

SEQ ID NO: 1540682 - RNA, 19 nt, Homo sapiens
  misc_RNA (1)...(19): siRNA sense strand
aaagaagacauguccaucu

SEQ ID NO: 1540683 - RNA, 19 nt, Homo sapiens
  misc_RNA (1)...(19): siRNA sense strand
gcaagauccacucaguaca

SEQ ID NO: 1540684 - RNA, 19 nt, Homo sapiens
  misc_RNA (1)...(19): siRNA sense strand
ggugagcccaggaugcuau

SEQ ID NO: 1540685 - RNA, 19 nt, Homo sapiens
  misc_RNA (1)...(19): siRNA sense strand
gccaccagccuccugagaa

SEQ ID NO: 1540686 - RNA, 19 nt, Homo sapiens
  misc_RNA (1)...(19): siRNA sense strand
gcaccucagcacacacaug

SEQ ID NO: 1540687 - RNA, 19 nt, Homo sapiens
  misc_RNA (1)...(19): siRNA sense strand
ccaugaugacuucuacuug

SEQ ID NO: 1540688 - RNA, 19 nt, Homo sapiens
  misc_RNA (1)...(19): siRNA sense strand
ccugcaagauccacucagu

SEQ ID NO: 1540689 - RNA, 19 nt, Homo sapiens
  misc_RNA (1)...(19): siRNA sense strand
gcacugcgaaagaagacau

SEQ ID NO: 1540690 - RNA, 19 nt, Homo sapiens
  misc_RNA (1)...(19): siRNA sense strand
caagcagaccuacccauac

SEQ ID NO: 1540691 - RNA, 19 nt, Homo sapiens
  misc_RNA (1)...(19): siRNA sense strand
cugagaagacccagaagga

SEQ ID NO: 1540692 - RNA, 19 nt, Homo sapiens
  misc_RNA (1)...(19): siRNA sense strand
ugacccucauuaaagaaga

SEQ ID NO: 1540693 - RNA, 19 nt, Homo sapiens
  misc_RNA (1)...(19): siRNA sense strand
agagagaacaucgagauca

SEQ ID NO: 1540694 - RNA, 19 nt, Homo sapiens
  misc_RNA (1)...(19): siRNA sense strand
agcagcaccuucucuguuc

SEQ ID NO: 1540695 - RNA, 19 nt, Homo sapiens
  misc_RNA (1)...(19): siRNA sense strand
gagugaauuggaugaugaa

SEQ ID NO: 1540696 - RNA, 19 nt, Homo sapiens
  misc_RNA (1)...(19): siRNA sense strand
caaggacuccccuggaaaa

SEQ ID NO: 1540697 - RNA, 19 nt, Homo sapiens
  misc_RNA (1)...(19): siRNA sense strand
ggccagcaagucauccaaa

SEQ ID NO: 1540698 - RNA, 19 nt, Homo sapiens
  misc_RNA (1)...(19): siRNA sense strand
caccucagcacacacaugu

SEQ ID NO: 1540699 - RNA, 19 nt, Homo sapiens
  misc_RNA (1)...(19): siRNA sense strand
caagauccacucaguacac

SEQ ID NO: 1540700 - RNA, 19 nt, Homo sapiens
  misc_RNA (1)...(19): siRNA sense strand
ucucgaaagcggaaguuau

SEQ ID NO: 1540701 - RNA, 19 nt, Homo sapiens
  misc_RNA (1)...(19): siRNA sense strand
caggcguucugcaccuuug

SEQ ID NO: 1540702 - RNA, 19 nt, Homo sapiens
  misc_RNA (1)...(19): siRNA sense strand
agaagacccagaaggacaa

SEQ ID NO: 1540703 - RNA, 19 nt, Homo sapiens
  misc_RNA (1)...(19): siRNA sense strand
gaucccaccggcagcugaa

SEQ ID NO: 1540704 - RNA, 19 nt, Homo sapiens
  misc_RNA (1)...(19): siRNA sense strand
uuaaagaagacauguccau

SEQ ID NO: 1540705 - RNA, 19 nt, Homo sapiens
  misc_RNA (1)...(19): siRNA sense strand
gcugagcugucgcaacuua

SEQ ID NO: 1540706 - RNA, 19 nt, Homo sapiens
  misc_RNA (1)...(19): siRNA sense strand
ggcaagaucuggagcaaga

SEQ ID NO: 1540707 - RNA, 19 nt, Homo sapiens
  misc_RNA (1)...(19): siRNA sense strand
gcaagaagcugcacaucac

SEQ ID NO: 1540708 - RNA, 19 nt, Homo sapiens
  misc_RNA (1)...(19): siRNA sense strand
ccaacgcgcuggcggaauu

SEQ ID NO: 1540709 - RNA, 19 nt, Homo sapiens
  misc_RNA (1)...(19): siRNA sense strand
ggaagaagcacaaguucga

SEQ ID NO: 1540710 - RNA, 19 nt, Homo sapiens
  misc_RNA (1)...(19): siRNA sense strand
gagcugucgcaacuuauua

SEQ ID NO: 1540711 - RNA, 19 nt, Homo sapiens
  misc_RNA (1)...(19): siRNA sense strand
caacuuacaccgugcucua

SEQ ID NO: 1540712 - RNA, 19 nt, Homo sapiens
  misc_RNA (1)...(19): siRNA sense strand
ggcacgagcugaagcacaa

SEQ ID NO: 1540713 - RNA, 19 nt, Homo sapiens
  misc_RNA (1)...(19): siRNA sense strand
ggacccugcugcuauaaac

SEQ ID NO: 1540714 - RNA, 19 nt, Homo sapiens
  misc_RNA (1)...(19): siRNA sense strand
cacggacccugcugcuaua

SEQ ID NO: 1540715 - RNA, 19 nt, Homo sapiens
  misc_RNA (1)...(19): siRNA sense strand
cgucagggcaccaagauga

SEQ ID NO: 1540716 - RNA, 19 nt, Homo sapiens
  misc_RNA (1)...(19): siRNA sense strand
cuagcgaggacccaacuua

SEQ ID NO: 1540717 - RNA, 19 nt, Homo sapiens
  misc_RNA (1)...(19): siRNA sense strand
uggauacucuggagaaugg

SEQ ID NO: 1540718 - RNA, 19 nt, Homo sapiens
  misc_RNA (1)...(19): siRNA sense strand
ccauggcccugcugcucua

SEQ ID NO: 1540719 - RNA, 19 nt, Homo sapiens
  misc_RNA (1)...(19): siRNA sense strand
acacggacccugcugcuau

SEQ ID NO: 1540720 - RNA, 19 nt, Homo sapiens
  misc_RNA (1)...(19): siRNA sense strand
cccaagggcuacgcuguga

SEQ ID NO: 1540721 - RNA, 19 nt, Homo sapiens
  misc_RNA (1)...(19): siRNA sense strand
aggcugagcugucgcaacu

SEQ ID NO: 1540722 - RNA, 19 nt, Homo sapiens
  misc_RNA (1)...(19): siRNA sense strand
ggaagaggaagaggagcaa

SEQ ID NO: 1540723 - RNA, 19 nt, Homo sapiens
  misc_RNA (1)...(19): siRNA sense strand
gaagcacaaggccgugaug

SEQ ID NO: 1540724 - RNA, 19 nt, Homo sapiens
  misc_RNA (1)...(19): siRNA sense strand
cguggaagaagcacaaguu

SEQ ID NO: 1540725 - RNA, 19 nt, Homo sapiens
  misc_RNA (1)...(19): siRNA sense strand
gcaaugccaccaccaucca

SEQ ID NO: 1540726 - RNA, 19 nt, Homo sapiens
  misc_RNA (1)...(19): siRNA sense strand
gcugugagccugcacuacu

SEQ ID NO: 1540727 - RNA, 19 nt, Homo sapiens
  misc_RNA (1)...(19): siRNA sense strand
ggaauuuaaacgccucaag

SEQ ID NO: 1540728 - RNA, 19 nt, Homo sapiens
  misc_RNA (1)...(19): siRNA sense strand
cgcaagaagcugcacauca

SEQ ID NO: 1540729 - RNA, 19 nt, Homo sapiens
  misc_RNA (1)...(19): siRNA sense strand
gcagcgagagcuccaucga

SEQ ID NO: 1540730 - RNA, 19 nt, Homo sapiens
  misc_RNA (1)...(19): siRNA sense strand
ugagcugucgcaacuuauu

SEQ ID NO: 1540731 - RNA, 19 nt, Homo sapiens
  misc_RNA (1)...(19): siRNA sense strand
ggucuucgccuggguguac

SEQ ID NO: 1540732 - RNA, 19 nt, Homo sapiens
  misc_RNA (1)...(19): siRNA sense strand
gcuccaagcgcaagaagcu

SEQ ID NO: 1540733 - RNA, 19 nt, Homo sapiens
  misc_RNA (1)...(19): siRNA sense strand
caaaggagcuggagagaug

SEQ ID NO: 1540734 - RNA, 19 nt, Homo sapiens
  misc_RNA (1)...(19): siRNA sense strand
uuaaacaggugaaacauga

SEQ ID NO: 1540735 - RNA, 19 nt, Homo sapiens
  misc_RNA (1)...(19): siRNA sense strand
ggagagauguuagaagaug

SEQ ID NO: 1540736 - RNA, 19 nt, Homo sapiens
  misc_RNA (1)...(19): siRNA sense strand
gaaacaugaucagcaaguu

SEQ ID NO: 1540737 - RNA, 19 nt, Homo sapiens
  misc_RNA (1)...(19): siRNA sense strand
ggugaaacaugaucagcaa

SEQ ID NO: 1540738 - RNA, 19 nt, Homo sapiens
  misc_RNA (1)...(19): siRNA sense strand
gcugacgaguggcgguuua

SEQ ID NO: 1540739 - RNA, 19 nt, Homo sapiens
  misc_RNA (1)...(19): siRNA sense strand
cuggagagauguuagaaga

SEQ ID NO: 1540740 - RNA, 19 nt, Homo sapiens
  misc_RNA (1)...(19): siRNA sense strand
aaacaugaucagcaaguug

SEQ ID NO: 1540741 - RNA, 19 nt, Homo sapiens
  misc_RNA (1)...(19): siRNA sense strand
uagcugguuugguagaaga

SEQ ID NO: 1540742 - RNA, 19 nt, Homo sapiens
  misc_RNA (1)...(19): siRNA sense strand
gagcuggagagauguuaga

SEQ ID NO: 1540743 - RNA, 19 nt, Homo sapiens
  misc_RNA (1)...(19): siRNA sense strand
ggaucugguuucagugucu

SEQ ID NO: 1540744 - RNA, 19 nt, Homo sapiens
  misc_RNA (1)...(19): siRNA sense strand
caaguugcucggauggaaa

SEQ ID NO: 1540745 - RNA, 19 nt, Homo sapiens
  misc_RNA (1)...(19): siRNA sense strand
ugaaacaugaucagcaagu

SEQ ID NO: 1540746 - RNA, 19 nt, Homo sapiens
  misc_RNA (1)...(19): siRNA sense strand
aaacaggugaaacaugauc

SEQ ID NO: 1540747 - RNA, 19 nt, Homo sapiens
  misc_RNA (1)...(19): siRNA sense strand
gcaguuggauggcuuauua

SEQ ID NO: 1540748 - RNA, 19 nt, Homo sapiens
  misc_RNA (1)...(19): siRNA sense strand
gaaaggauguaaccauuga

SEQ ID NO: 1540749 - RNA, 19 nt, Homo sapiens
  misc_RNA (1)...(19): siRNA sense strand
gaacuugcuuugauuaaca

SEQ ID NO: 1540750 - RNA, 19 nt, Homo sapiens
  misc_RNA (1)...(19): siRNA sense strand
agaaaggucuguggauuua

SEQ ID NO: 1540751 - RNA, 19 nt, Homo sapiens
  misc_RNA (1)...(19): siRNA sense strand
cacauggacugguuaaaua

SEQ ID NO: 1540752 - RNA, 19 nt, Homo sapiens
  misc_RNA (1)...(19): siRNA sense strand
guacauagauuggaaaugg

SEQ ID NO: 1540753 - RNA, 19 nt, Homo sapiens
  misc_RNA (1)...(19): siRNA sense strand
uagaagagauucaacagaa

SEQ ID NO: 1540754 - RNA, 19 nt, Homo sapiens
  misc_RNA (1)...(19): siRNA sense strand
gaaaucagcaagagaaaga

SEQ ID NO: 1540755 - RNA, 19 nt, Homo sapiens
  misc_RNA (1)...(19): siRNA sense strand
gaacuuaaucagcaaauug

SEQ ID NO: 1540756 - RNA, 19 nt, Homo sapiens
  misc_RNA (1)...(19): siRNA sense strand
gaagagagaguacauagau

SEQ ID NO: 1540757 - RNA, 19 nt, Homo sapiens
  misc_RNA (1)...(19): siRNA sense strand
gaagauaugcagcuuagaa

SEQ ID NO: 1540758 - RNA, 19 nt, Homo sapiens
  misc_RNA (1)...(19): siRNA sense strand
ccaacaaauugacucguua

SEQ ID NO: 1540759 - RNA, 19 nt, Homo sapiens
  misc_RNA (1)...(19): siRNA sense strand
gcagaaacacgaagagauu

SEQ ID NO: 1540760 - RNA, 19 nt, Homo sapiens
  misc_RNA (1)...(19): siRNA sense strand
uauagaaccaugccaauua

SEQ ID NO: 1540761 - RNA, 19 nt, Homo sapiens
  misc_RNA (1)...(19): siRNA sense strand
agacuuggcuuugagguua

SEQ ID NO: 1540762 - RNA, 19 nt, Homo sapiens
  misc_RNA (1)...(19): siRNA sense strand
ggaggccucaguaauauua

SEQ ID NO: 1540763 - RNA, 19 nt, Homo sapiens
  misc_RNA (1)...(19): siRNA sense strand
gcugagacauccugaaaug

SEQ ID NO: 1540764 - RNA, 19 nt, Homo sapiens
  misc_RNA (1)...(19): siRNA sense strand
gagaguacauagauuggaa

SEQ ID NO: 1540765 - RNA, 19 nt, Homo sapiens
  misc_RNA (1)...(19): siRNA sense strand
ggaugaaacuaguuaaucu

SEQ ID NO: 1540766 - RNA, 19 nt, Homo sapiens
  misc_RNA (1)...(19): siRNA sense strand
aaacaaagaugugaagaca

SEQ ID NO: 1540767 - RNA, 19 nt, Homo sapiens
  misc_RNA (1)...(19): siRNA sense strand
ugaggaagaucuuguggaa

SEQ ID NO: 1540768 - RNA, 19 nt, Homo sapiens
  misc_RNA (1)...(19): siRNA sense strand
gcugaggugucccuuguuu

SEQ ID NO: 1540769 - RNA, 19 nt, Homo sapiens
  misc_RNA (1)...(19): siRNA sense strand
ggaaaucacuuuuggauag

SEQ ID NO: 1540770 - RNA, 19 nt, Homo sapiens
  misc_RNA (1)...(19): siRNA sense strand
acagagcacuuaugacuau

SEQ ID NO: 1540771 - RNA, 19 nt, Homo sapiens
  misc_RNA (1)...(19): siRNA sense strand
gcaguagaauggcuaagug

SEQ ID NO: 1540772 - RNA, 19 nt, Homo sapiens
  misc_RNA (1)...(19): siRNA sense strand
uaaagucacugcagcaaca

SEQ ID NO: 1540773 - RNA, 19 nt, Homo sapiens
  misc_RNA (1)...(19): siRNA sense strand
caauggaagugauaaagga

SEQ ID NO: 1540774 - RNA, 19 nt, Homo sapiens
  misc_RNA (1)...(19): siRNA sense strand
aaagaaaggucuguggauu

SEQ ID NO: 1540775 - RNA, 19 nt, Homo sapiens
  misc_RNA (1)...(19): siRNA sense strand
cagaagagccugaagcuau

SEQ ID NO: 1540776 - RNA, 19 nt, Homo sapiens
  misc_RNA (1)...(19): siRNA sense strand
gcacagagcacuuaugacu

SEQ ID NO: 1540777 - RNA, 19 nt, Homo sapiens
  misc_RNA (1)...(19): siRNA sense strand
gaugugggauugcaagguu

SEQ ID NO: 1540778 - RNA, 19 nt, Homo sapiens
  misc_RNA (1)...(19): siRNA sense strand
gcacacaguuagaagagau

SEQ ID NO: 1540779 - RNA, 19 nt, Homo sapiens
  misc_RNA (1)...(19): siRNA sense strand
gauaagaaaguaacgcauu

SEQ ID NO: 1540780 - RNA, 19 nt, Homo sapiens
  misc_RNA (1)...(19): siRNA sense strand
gaacagaguauggaaacaa

SEQ ID NO: 1540781 - RNA, 19 nt, Homo sapiens
  misc_RNA (1)...(19): siRNA sense strand
gagcaucgauucagcaaac

SEQ ID NO: 1540782 - RNA, 19 nt, Homo sapiens
  misc_RNA (1)...(19): siRNA sense strand
caaaggaaucuacaucauu

SEQ ID NO: 1540783 - RNA, 19 nt, Homo sapiens
  misc_RNA (1)...(19): siRNA sense strand
gaggagcaauuugaugaaa

SEQ ID NO: 1540784 - RNA, 19 nt, Homo sapiens
  misc_RNA (1)...(19): siRNA sense strand
gaugaauucugggauaaga

SEQ ID NO: 1540785 - RNA, 19 nt, Homo sapiens
  misc_RNA (1)...(19): siRNA sense strand
guguaaggcuagaggauuu

SEQ ID NO: 1540786 - RNA, 19 nt, Homo sapiens
  misc_RNA (1)...(19): siRNA sense strand
gcuuaagacucacaucaga

SEQ ID NO: 1540787 - RNA, 19 nt, Homo sapiens
  misc_RNA (1)...(19): siRNA sense strand
gguuaaagaugcuucagau

SEQ ID NO: 1540788 - RNA, 19 nt, Homo sapiens
  misc_RNA (1)...(19): siRNA sense strand
gacagggcaugaauuguug

SEQ ID NO: 1540789 - RNA, 19 nt, Homo sapiens
  misc_RNA (1)...(19): siRNA sense strand
aaaggucuguggauuuaaa

SEQ ID NO: 1540790 - RNA, 19 nt, Homo sapiens
  misc_RNA (1)...(19): siRNA sense strand
gaugaacuugcuuugauua

SEQ ID NO: 1540791 - RNA, 19 nt, Homo sapiens
  misc_RNA (1)...(19): siRNA sense strand
uagaugaacuugcuuugau

SEQ ID NO: 1540792 - RNA, 19 nt, Homo sapiens
  misc_RNA (1)...(19): siRNA sense strand
gugaaugguuugcagugua

SEQ ID NO: 1540793 - RNA, 19 nt, Homo sapiens
  misc_RNA (1)...(19): siRNA sense strand
gugggagucucaccuauga

SEQ ID NO: 1540794 - RNA, 19 nt, Homo sapiens
  misc_RNA (1)...(19): siRNA sense strand
caagugacauggcuucuac

SEQ ID NO: 1540795 - RNA, 19 nt, Homo sapiens
  misc_RNA (1)...(19): siRNA sense strand
agaagagccugaagcuauu

SEQ ID NO: 1540796 - RNA, 19 nt, Homo sapiens
  misc_RNA (1)...(19): siRNA sense strand
ggaacuuaaucagcaaauu

SEQ ID NO: 1540797 - RNA, 19 nt, Homo sapiens
  misc_RNA (1)...(19): siRNA sense strand
gaaagaaaggucuguggau

SEQ ID NO: 1540798 - RNA, 19 nt, Homo sapiens
  misc_RNA (1)...(19): siRNA sense strand
ggaaacaauuuacaauagc

SEQ ID NO: 1540799 - RNA, 19 nt, Homo sapiens
  misc_RNA (1)...(19): siRNA sense strand
gccaacaaauugacucguu

SEQ ID NO: 1540800 - RNA, 19 nt, Homo sapiens
  misc_RNA (1)...(19): siRNA sense strand
gggcgaugaugcucaagaa

SEQ ID NO: 1540801 - RNA, 19 nt, Homo sapiens
  misc_RNA (1)...(19): siRNA sense strand
uaaagaugcuucagauggu

SEQ ID NO: 1540802 - RNA, 19 nt, Homo sapiens
  misc_RNA (1)...(19): siRNA sense strand
uggaaaggauguaaccauu

SEQ ID NO: 1540803 - RNA, 19 nt, Homo sapiens
  misc_RNA (1)...(19): siRNA sense strand
auagaaccaugccaauuaa

SEQ ID NO: 1540804 - RNA, 19 nt, Homo sapiens
  misc_RNA (1)...(19): siRNA sense strand
gguaaagccagaugaauuc

SEQ ID NO: 1540805 - RNA, 19 nt, Homo sapiens
  misc_RNA (1)...(19): siRNA sense strand
gacaggaugaaacuaguua

SEQ ID NO: 1540806 - RNA, 19 nt, Homo sapiens
  misc_RNA (1)...(19): siRNA sense strand
ggaaaggauguaaccauug

SEQ ID NO: 1540807 - RNA, 19 nt, Homo sapiens
  misc_RNA (1)...(19): siRNA sense strand
uuacagcagcgucgauuua

SEQ ID NO: 1540808 - RNA, 19 nt, Homo sapiens
  misc_RNA (1)...(19): siRNA sense strand
agaagggccuggaucagaa

SEQ ID NO: 1540809 - RNA, 19 nt, Homo sapiens
  misc_RNA (1)...(19): siRNA sense strand
cugaagcuauuaaugauga

SEQ ID NO: 1540810 - RNA, 19 nt, Homo sapiens
  misc_RNA (1)...(19): siRNA sense strand
gaagagccugaagcuauua

SEQ ID NO: 1540811 - RNA, 19 nt, Homo sapiens
  misc_RNA (1)...(19): siRNA sense strand
ggucuccuauggaugauga

SEQ ID NO: 1540812 - RNA, 19 nt, Homo sapiens
  misc_RNA (1)...(19): siRNA sense strand
aauagcaucugaagagaga

SEQ ID NO: 1540813 - RNA, 19 nt, Homo sapiens
  misc_RNA (1)...(19): siRNA sense strand
guagaugugcgaagguuaa

SEQ ID NO: 1540814 - RNA, 19 nt, Homo sapiens
  misc_RNA (1)...(19): siRNA sense strand
caguguauguggaacuuaa

SEQ ID NO: 1540815 - RNA, 19 nt, Homo sapiens
  misc_RNA (1)...(19): siRNA sense strand
agccacagguuaugaaauu

SEQ ID NO: 1540816 - RNA, 19 nt, Homo sapiens
  misc_RNA (1)...(19): siRNA sense strand
gcaguugggaaaucacuuu

SEQ ID NO: 1540817 - RNA, 19 nt, Homo sapiens
  misc_RNA (1)...(19): siRNA sense strand
cagcuggaauuuaggcaaa

SEQ ID NO: 1540818 - RNA, 19 nt, Homo sapiens
  misc_RNA (1)...(19): siRNA sense strand
cagcugaggugucccuugu

SEQ ID NO: 1540819 - RNA, 19 nt, Homo sapiens
  misc_RNA (1)...(19): siRNA sense strand
gaagaucuuguggaacuaa

SEQ ID NO: 1540820 - RNA, 19 nt, Homo sapiens
  misc_RNA (1)...(19): siRNA sense strand
ggaagaucuuguggaacua

SEQ ID NO: 1540821 - RNA, 19 nt, Homo sapiens
  misc_RNA (1)...(19): siRNA sense strand
ugaaugguuugcaguguau

SEQ ID NO: 1540822 - RNA, 19 nt, Homo sapiens
  misc_RNA (1)...(19): siRNA sense strand
uaaaggaaaucagcaagag

SEQ ID NO: 1540823 - RNA, 19 nt, Homo sapiens
  misc_RNA (1)...(19): siRNA sense strand
ugagcugagugucaccuua

SEQ ID NO: 1540824 - RNA, 19 nt, Homo sapiens
  misc_RNA (1)...(19): siRNA sense strand
uuggauagauuaacuguuc

SEQ ID NO: 1540825 - RNA, 19 nt, Homo sapiens
  misc_RNA (1)...(19): siRNA sense strand
gauggaaccgaacaauauu

SEQ ID NO: 1540826 - RNA, 19 nt, Homo sapiens
  misc_RNA (1)...(19): siRNA sense strand
ugauggaaccgaacaauau

SEQ ID NO: 1540827 - RNA, 19 nt, Homo sapiens
  misc_RNA (1)...(19): siRNA sense strand
gcacagccacagguuauga

SEQ ID NO: 1540828 - RNA, 19 nt, Homo sapiens
  misc_RNA (1)...(19): siRNA sense strand
cagaguauggaaacaauuu

SEQ ID NO: 1540829 - RNA, 19 nt, Homo sapiens
  misc_RNA (1)...(19): siRNA sense strand
gcaguuguuuaaaugugaa

SEQ ID NO: 1540830 - RNA, 19 nt, Homo sapiens
  misc_RNA (1)...(19): siRNA sense strand
gucaaggucuccuggauca

SEQ ID NO: 1540831 - RNA, 19 nt, Homo sapiens
  misc_RNA (1)...(19): siRNA sense strand
gauguugugcguagaugua

SEQ ID NO: 1540832 - RNA, 19 nt, Homo sapiens
  misc_RNA (1)...(19): siRNA sense strand
ucacugcagcaacaacuua

SEQ ID NO: 1540833 - RNA, 19 nt, Homo sapiens
  misc_RNA (1)...(19): siRNA sense strand
gagauucaacagaagguaa

SEQ ID NO: 1540834 - RNA, 19 nt, Homo sapiens
  misc_RNA (1)...(19): siRNA sense strand
gagacaggaugaaacuagu

SEQ ID NO: 1540835 - RNA, 19 nt, Homo sapiens
  misc_RNA (1)...(19): siRNA sense strand
gcuauugcauuucacucaa

SEQ ID NO: 1540836 - RNA, 19 nt, Homo sapiens
  misc_RNA (1)...(19): siRNA sense strand
ccacauacaaggagugaug

SEQ ID NO: 1540837 - RNA, 19 nt, Homo sapiens
  misc_RNA (1)...(19): siRNA sense strand
ggauagacuuggcuuugag

SEQ ID NO: 1540838 - RNA, 19 nt, Homo sapiens
  misc_RNA (1)...(19): siRNA sense strand
ccagcacagugaaugguuu

SEQ ID NO: 1540839 - RNA, 19 nt, Homo sapiens
  misc_RNA (1)...(19): siRNA sense strand
gaaguuuguaggcaacgua

SEQ ID NO: 1540840 - RNA, 19 nt, Homo sapiens
  misc_RNA (1)...(19): siRNA sense strand
gccacagguuaugaaauua

SEQ ID NO: 1540841 - RNA, 19 nt, Homo sapiens
  misc_RNA (1)...(19): siRNA sense strand
agacagggcaugaauuguu

SEQ ID NO: 1540842 - RNA, 19 nt, Homo sapiens
  misc_RNA (1)...(19): siRNA sense strand
gucuguggauuuaaacuuu

SEQ ID NO: 1540843 - RNA, 19 nt, Homo sapiens
  misc_RNA (1)...(19): siRNA sense strand
uuaaauaagaggcugguuu

SEQ ID NO: 1540844 - RNA, 19 nt, Homo sapiens
  misc_RNA (1)...(19): siRNA sense strand
gaugugcgaagguuaaaga

SEQ ID NO: 1540845 - RNA, 19 nt, Homo sapiens
  misc_RNA (1)...(19): siRNA sense strand
gauggaagauaugcagcuu

SEQ ID NO: 1540846 - RNA, 19 nt, Homo sapiens
  misc_RNA (1)...(19): siRNA sense strand
ucagacagggcaugaauug

SEQ ID NO: 1540847 - RNA, 19 nt, Homo sapiens
  misc_RNA (1)...(19): siRNA sense strand
gaacucaccaugauuguua

SEQ ID NO: 1540848 - RNA, 19 nt, Homo sapiens
  misc_RNA (1)...(19): siRNA sense strand
gagaaggcauugaugauuu

SEQ ID NO: 1540849 - RNA, 19 nt, Homo sapiens
  misc_RNA (1)...(19): siRNA sense strand
gaacuauacuuuccugaga

SEQ ID NO: 1540850 - RNA, 19 nt, Homo sapiens
  misc_RNA (1)...(19): siRNA sense strand
ggauagaacccucaugaaa

SEQ ID NO: 1540851 - RNA, 19 nt, Homo sapiens
  misc_RNA (1)...(19): siRNA sense strand
ugaaagaacucaccaugau

SEQ ID NO: 1540852 - RNA, 19 nt, Homo sapiens
  misc_RNA (1)...(19): siRNA sense strand
gaacuucagccauauaugu

SEQ ID NO: 1540853 - RNA, 19 nt, Homo sapiens
  misc_RNA (1)...(19): siRNA sense strand
gaaagccucuaccggaaga

SEQ ID NO: 1540854 - RNA, 19 nt, Homo sapiens
  misc_RNA (1)...(19): siRNA sense strand
ucacaagucuuuccuaucu

SEQ ID NO: 1540855 - RNA, 19 nt, Homo sapiens
  misc_RNA (1)...(19): siRNA sense strand
ggacauuucuaacucuuuc

SEQ ID NO: 1540856 - RNA, 19 nt, Homo sapiens
  misc_RNA (1)...(19): siRNA sense strand
guaagcagggucaauauuu

SEQ ID NO: 1540857 - RNA, 19 nt, Homo sapiens
  misc_RNA (1)...(19): siRNA sense strand
gauuaucagcuauguguua

SEQ ID NO: 1540858 - RNA, 19 nt, Homo sapiens
  misc_RNA (1)...(19): siRNA sense strand
gaaagaacucaccaugauu

SEQ ID NO: 1540859 - RNA, 19 nt, Homo sapiens
  misc_RNA (1)...(19): siRNA sense strand
gaaaguguuauaaggagua

SEQ ID NO: 1540860 - RNA, 19 nt, Homo sapiens
  misc_RNA (1)...(19): siRNA sense strand
gguaacagcugcucuacag

SEQ ID NO: 1540861 - RNA, 19 nt, Homo sapiens
  misc_RNA (1)...(19): siRNA sense strand
agacgaaacuauugugguu

SEQ ID NO: 1540862 - RNA, 19 nt, Homo sapiens
  misc_RNA (1)...(19): siRNA sense strand
cugaaacucugauugcuuu

SEQ ID NO: 1540863 - RNA, 19 nt, Homo sapiens
  misc_RNA (1)...(19): siRNA sense strand
cagaaaauccugaacauua

SEQ ID NO: 1540864 - RNA, 19 nt, Homo sapiens
  misc_RNA (1)...(19): siRNA sense strand
gcaaugucaucuuaaugga

SEQ ID NO: 1540865 - RNA, 19 nt, Homo sapiens
  misc_RNA (1)...(19): siRNA sense strand
gagcuugggacauuucuaa

SEQ ID NO: 1540866 - RNA, 19 nt, Homo sapiens
  misc_RNA (1)...(19): siRNA sense strand
cccgagaaauuacagauaa

SEQ ID NO: 1540867 - RNA, 19 nt, Homo sapiens
  misc_RNA (1)...(19): siRNA sense strand
cauggaagauagaguaaau

SEQ ID NO: 1540868 - RNA, 19 nt, Homo sapiens
  misc_RNA (1)...(19): siRNA sense strand
ggagaaggcauugaugauu

SEQ ID NO: 1540869 - RNA, 19 nt, Homo sapiens
  misc_RNA (1)...(19): siRNA sense strand
gcauauugauuaccagcuu

SEQ ID NO: 1540870 - RNA, 19 nt, Homo sapiens
  misc_RNA (1)...(19): siRNA sense strand
ugaaagaacacauggaaga

SEQ ID NO: 1540871 - RNA, 19 nt, Homo sapiens
  misc_RNA (1)...(19): siRNA sense strand
caucacaagucuuuccuau

SEQ ID NO: 1540872 - RNA, 19 nt, Homo sapiens
  misc_RNA (1)...(19): siRNA sense strand
ggaagauuaucagcuaugu

SEQ ID NO: 1540873 - RNA, 19 nt, Homo sapiens
  misc_RNA (1)...(19): siRNA sense strand
uaugaggucuuccuucaga

SEQ ID NO: 1540874 - RNA, 19 nt, Homo sapiens
  misc_RNA (1)...(19): siRNA sense strand
agaaauaggacaagaaugu

SEQ ID NO: 1540875 - RNA, 19 nt, Homo sapiens
  misc_RNA (1)...(19): siRNA sense strand
aaagugaugugcagaaucu

SEQ ID NO: 1540876 - RNA, 19 nt, Homo sapiens
  misc_RNA (1)...(19): siRNA sense strand
cagaaacaacagcaaauuu

SEQ ID NO: 1540877 - RNA, 19 nt, Homo sapiens
  misc_RNA (1)...(19): siRNA sense strand
cuauuaagaugcaagucua

SEQ ID NO: 1540878 - RNA, 19 nt, Homo sapiens
  misc_RNA (1)...(19): siRNA sense strand
aaacugauguguguagaau

SEQ ID NO: 1540879 - RNA, 19 nt, Homo sapiens
  misc_RNA (1)...(19): siRNA sense strand
ucacucacauucagccauu

SEQ ID NO: 1540880 - RNA, 19 nt, Homo sapiens
  misc_RNA (1)...(19): siRNA sense strand
acacagccauccuugagaa

SEQ ID NO: 1540881 - RNA, 19 nt, Homo sapiens
  misc_RNA (1)...(19): siRNA sense strand
gaggagaaggcauugauga

SEQ ID NO: 1540882 - RNA, 19 nt, Homo sapiens
  misc_RNA (1)...(19): siRNA sense strand
aggcagagcuugggacauu

SEQ ID NO: 1540883 - RNA, 19 nt, Homo sapiens
  misc_RNA (1)...(19): siRNA sense strand
guaauggcuuuaacaugga

SEQ ID NO: 1540884 - RNA, 19 nt, Homo sapiens
  misc_RNA (1)...(19): siRNA sense strand
gcauauucauuugcagaaa

SEQ ID NO: 1540885 - RNA, 19 nt, Homo sapiens
  misc_RNA (1)...(19): siRNA sense strand
guuaggagcccaucuggaa

SEQ ID NO: 1540886 - RNA, 19 nt, Homo sapiens
  misc_RNA (1)...(19): siRNA sense strand
aauaugaggucuuccuuca

SEQ ID NO: 1540887 - RNA, 19 nt, Homo sapiens
  misc_RNA (1)...(19): siRNA sense strand
gcagaaucuuguuaagcuu

SEQ ID NO: 1540888 - RNA, 19 nt, Homo sapiens
  misc_RNA (1)...(19): siRNA sense strand
acacauggaagauagagua

SEQ ID NO: 1540889 - RNA, 19 nt, Homo sapiens
  misc_RNA (1)...(19): siRNA sense strand
caacucaggccgaaagugu

SEQ ID NO: 1540890 - RNA, 19 nt, Homo sapiens
  misc_RNA (1)...(19): siRNA sense strand
gaaagaacacauggaagau

SEQ ID NO: 1540891 - RNA, 19 nt, Homo sapiens
  misc_RNA (1)...(19): siRNA sense strand
caaagaacgccagcugaaa

SEQ ID NO: 1540892 - RNA, 19 nt, Homo sapiens
  misc_RNA (1)...(19): siRNA sense strand
gaguggaauuucucgaaga

SEQ ID NO: 1540893 - RNA, 19 nt, Homo sapiens
  misc_RNA (1)...(19): siRNA sense strand
gaaagcuguuguccuggau

SEQ ID NO: 1540894 - RNA, 19 nt, Homo sapiens
  misc_RNA (1)...(19): siRNA sense strand
auggagagauuguuucuga

SEQ ID NO: 1540895 - RNA, 19 nt, Homo sapiens
  misc_RNA (1)...(19): siRNA sense strand
aaagaacucaccaugauug

SEQ ID NO: 1540896 - RNA, 19 nt, Homo sapiens
  misc_RNA (1)...(19): siRNA sense strand
ucuguuacccgagaaauua

SEQ ID NO: 1540897 - RNA, 19 nt, Homo sapiens
  misc_RNA (1)...(19): siRNA sense strand
gauagaacccucaugaaaa

SEQ ID NO: 1540898 - RNA, 19 nt, Homo sapiens
  misc_RNA (1)...(19): siRNA sense strand
aaagaacacauggaagaua

SEQ ID NO: 1540899 - RNA, 19 nt, Homo sapiens
  misc_RNA (1)...(19): siRNA sense strand
aaagauagcggucccaaca

SEQ ID NO: 1540900 - RNA, 19 nt, Homo sapiens
  misc_RNA (1)...(19): siRNA sense strand
agaaggcauugaugauuug

SEQ ID NO: 1540901 - RNA, 19 nt, Homo sapiens
  misc_RNA (1)...(19): siRNA sense strand
gaugugcagaaucuuguua

SEQ ID NO: 1540902 - RNA, 19 nt, Homo sapiens
  misc_RNA (1)...(19): siRNA sense strand
acugauguguguagaauga

SEQ ID NO: 1540903 - RNA, 19 nt, Homo sapiens
  misc_RNA (1)...(19): siRNA sense strand
gaaauaggacaagaaugug

SEQ ID NO: 1540904 - RNA, 19 nt, Homo sapiens
  misc_RNA (1)...(19): siRNA sense strand
aagaacacauggaagauag

SEQ ID NO: 1540905 - RNA, 19 nt, Homo sapiens
  misc_RNA (1)...(19): siRNA sense strand
ggccgaaaguguuauaagg

SEQ ID NO: 1540906 - RNA, 19 nt, Homo sapiens
  misc_RNA (1)...(19): siRNA sense strand
cagguaagcagggucaaua

SEQ ID NO: 1540907 - RNA, 19 nt, Homo sapiens
  misc_RNA (1)...(19): siRNA sense strand
ggauccaaguaauggcuuu

SEQ ID NO: 1540908 - RNA, 19 nt, Homo sapiens
  misc_RNA (1)...(19): siRNA sense strand
uauuggaacuucaucaaca

SEQ ID NO: 1540909 - RNA, 19 nt, Homo sapiens
  misc_RNA (1)...(19): siRNA sense strand
gaaguggaaaugaugacaa

SEQ ID NO: 1540910 - RNA, 19 nt, Homo sapiens
  misc_RNA (1)...(19): siRNA sense strand
gaaaagugaugugcagaau

SEQ ID NO: 1540911 - RNA, 19 nt, Homo sapiens
  misc_RNA (1)...(19): siRNA sense strand
gguaagcagggucaauauu

SEQ ID NO: 1540912 - RNA, 19 nt, Homo sapiens
  misc_RNA (1)...(19): siRNA sense strand
ccagaaacaacagcaaauu

SEQ ID NO: 1540913 - RNA, 19 nt, Homo sapiens
  misc_RNA (1)...(19): siRNA sense strand
uaauggagcgacugugaaa

SEQ ID NO: 1540914 - RNA, 19 nt, Homo sapiens
  misc_RNA (1)...(19): siRNA sense strand
agagagugaugcaauguca

SEQ ID NO: 1540915 - RNA, 19 nt, Homo sapiens
  misc_RNA (1)...(19): siRNA sense strand
uauaauuacuggugcucaa

SEQ ID NO: 1540916 - RNA, 19 nt, Homo sapiens
  misc_RNA (1)...(19): siRNA sense strand
cuucagccauauauguuaa

SEQ ID NO: 1540917 - RNA, 19 nt, Homo sapiens
  misc_RNA (1)...(19): siRNA sense strand
guugguguccucaguaauu

SEQ ID NO: 1540918 - RNA, 19 nt, Homo sapiens
  misc_RNA (1)...(19): siRNA sense strand
cgagaaauaggacaagaau

SEQ ID NO: 1540919 - RNA, 19 nt, Homo sapiens
  misc_RNA (1)...(19): siRNA sense strand
aaguggaaaugaugacaaa

SEQ ID NO: 1540920 - RNA, 19 nt, Homo sapiens
  misc_RNA (1)...(19): siRNA sense strand
caagaaguggaaaugauga

SEQ ID NO: 1540921 - RNA, 19 nt, Homo sapiens
  misc_RNA (1)...(19): siRNA sense strand
gagcccaucuggaacaacu

SEQ ID NO: 1540922 - RNA, 19 nt, Homo sapiens
  misc_RNA (1)...(19): siRNA sense strand
uccaggaaauccagcaauu

SEQ ID NO: 1540923 - RNA, 19 nt, Homo sapiens
  misc_RNA (1)...(19): siRNA sense strand
acaagucuuuccuaucuuc

SEQ ID NO: 1540924 - RNA, 19 nt, Homo sapiens
  misc_RNA (1)...(19): siRNA sense strand
ugacucggcuauuggauac

SEQ ID NO: 1540925 - RNA, 19 nt, Homo sapiens
  misc_RNA (1)...(19): siRNA sense strand
uaagcagggucaauauuuu

SEQ ID NO: 1540926 - RNA, 19 nt, Homo sapiens
  misc_RNA (1)...(19): siRNA sense strand
gagcgacugugaaaacuga

SEQ ID NO: 1540927 - RNA, 19 nt, Homo sapiens
  misc_RNA (1)...(19): siRNA sense strand
ggucuuccuucagaucauu

SEQ ID NO: 1540928 - RNA, 19 nt, Homo sapiens
  misc_RNA (1)...(19): siRNA sense strand
caugauuguuacuggaauu

SEQ ID NO: 1540929 - RNA, 19 nt, Homo sapiens
  misc_RNA (1)...(19): siRNA sense strand
acaaagaacgccagcugaa

SEQ ID NO: 1540930 - RNA, 19 nt, Homo sapiens
  misc_RNA (1)...(19): siRNA sense strand
ucaagaaguggaaaugaug

SEQ ID NO: 1540931 - RNA, 19 nt, Homo sapiens
  misc_RNA (1)...(19): siRNA sense strand
gcaagacgaaacuauugug

SEQ ID NO: 1540932 - RNA, 19 nt, Homo sapiens
  misc_RNA (1)...(19): siRNA sense strand
gcucaagaaguggaaauga

SEQ ID NO: 1540933 - RNA, 19 nt, Homo sapiens
  misc_RNA (1)...(19): siRNA sense strand
caaguaauggcuuuaacau

SEQ ID NO: 1540934 - RNA, 19 nt, Homo sapiens
  misc_RNA (1)...(19): siRNA sense strand
ugauguguguagaaugaaa

SEQ ID NO: 1540935 - RNA, 19 nt, Homo sapiens
  misc_RNA (1)...(19): siRNA sense strand
cgaaucgaguggaauuucu

SEQ ID NO: 1540936 - RNA, 19 nt, Homo sapiens
  misc_RNA (1)...(19): siRNA sense strand
ucauugcacuuucuacucu

SEQ ID NO: 1540937 - RNA, 19 nt, Homo sapiens
  misc_RNA (1)...(19): siRNA sense strand
gcccauggagagauuguuu

SEQ ID NO: 1540938 - RNA, 19 nt, Homo sapiens
  misc_RNA (1)...(19): siRNA sense strand
gccaacgacccacucauga

SEQ ID NO: 1540939 - RNA, 19 nt, Homo sapiens
  misc_RNA (1)...(19): siRNA sense strand
cccaacaucacaagucuuu

SEQ ID NO: 1540940 - RNA, 19 nt, Homo sapiens
  misc_RNA (1)...(19): siRNA sense strand
cagaaucuuguuaagcuuu

SEQ ID NO: 1540941 - RNA, 19 nt, Homo sapiens
  misc_RNA (1)...(19): siRNA sense strand
aaugaaagaacacauggaa

SEQ ID NO: 1540942 - RNA, 19 nt, Homo sapiens
  misc_RNA (1)...(19): siRNA sense strand
cuugggugcucacgaacua

SEQ ID NO: 1540943 - RNA, 19 nt, Homo sapiens
  misc_RNA (1)...(19): siRNA sense strand
gcuuuaacauggauagaac

SEQ ID NO: 1540944 - RNA, 19 nt, Homo sapiens
  misc_RNA (1)...(19): siRNA sense strand
ccaaguaauggcuuuaaca

SEQ ID NO: 1540945 - RNA, 19 nt, Homo sapiens
  misc_RNA (1)...(19): siRNA sense strand
gcuaaagaagaauuggaaa

SEQ ID NO: 1540946 - RNA, 19 nt, Homo sapiens
  misc_RNA (1)...(19): siRNA sense strand
ccuggacacuauuaagaug

SEQ ID NO: 1540947 - RNA, 19 nt, Homo sapiens
  misc_RNA (1)...(19): siRNA sense strand
cauugugucuggauaaaua

SEQ ID NO: 1540948 - RNA, 19 nt, Homo sapiens
  misc_RNA (1)...(19): siRNA sense strand
gaaagaaucauggauacaa

SEQ ID NO: 1540949 - RNA, 19 nt, Homo sapiens
  misc_RNA (1)...(19): siRNA sense strand
gcauggcgcugccggauau

SEQ ID NO: 1540950 - RNA, 19 nt, Homo sapiens
  misc_RNA (1)...(19): siRNA sense strand
ccacguggcuacuuguuug

SEQ ID NO: 1540951 - RNA, 19 nt, Homo sapiens
  misc_RNA (1)...(19): siRNA sense strand
gcacagagccaagaagaau

SEQ ID NO: 1540952 - RNA, 19 nt, Homo sapiens
  misc_RNA (1)...(19): siRNA sense strand
gccagagacuugugaaaga

SEQ ID NO: 1540953 - RNA, 19 nt, Homo sapiens
  misc_RNA (1)...(19): siRNA sense strand
ucacagcucuuuucuauug

SEQ ID NO: 1540954 - RNA, 19 nt, Homo sapiens
  misc_RNA (1)...(19): siRNA sense strand
ggugacagaucucuaagca

SEQ ID NO: 1540955 - RNA, 19 nt, Homo sapiens
  misc_RNA (1)...(19): siRNA sense strand
ccagagacuugugaaagaa

SEQ ID NO: 1540956 - RNA, 19 nt, Homo sapiens
  misc_RNA (1)...(19): siRNA sense strand
ggacacaggguuacuugga

SEQ ID NO: 1540957 - RNA, 19 nt, Homo sapiens
  misc_RNA (1)...(19): siRNA sense strand
gaugaagggugugaucgau

SEQ ID NO: 1540958 - RNA, 19 nt, Homo sapiens
  misc_RNA (1)...(19): siRNA sense strand
ucaacaaucgcacaacaaa

SEQ ID NO: 1540959 - RNA, 19 nt, Homo sapiens
  misc_RNA (1)...(19): siRNA sense strand
gugaaagaaucauggauac

SEQ ID NO: 1540960 - RNA, 19 nt, Homo sapiens
  misc_RNA (1)...(19): siRNA sense strand
gaucgauggauuacaugua

SEQ ID NO: 1540961 - RNA, 19 nt, Homo sapiens
  misc_RNA (1)...(19): siRNA sense strand
guucuuaccugcggguuau

SEQ ID NO: 1540962 - RNA, 19 nt, Homo sapiens
  misc_RNA (1)...(19): siRNA sense strand
ggaucacacugaccuugga

SEQ ID NO: 1540963 - RNA, 19 nt, Homo sapiens
  misc_RNA (1)...(19): siRNA sense strand
uagcugcguuggagaauca

SEQ ID NO: 1540964 - RNA, 19 nt, Homo sapiens
  misc_RNA (1)...(19): siRNA sense strand
agaaucaaaucaucaagca

SEQ ID NO: 1540965 - RNA, 19 nt, Homo sapiens
  misc_RNA (1)...(19): siRNA sense strand
gcuacuuguuugugugauu

SEQ ID NO: 1540966 - RNA, 19 nt, Homo sapiens
  misc_RNA (1)...(19): siRNA sense strand
gcauuuauacuugcccuuu

SEQ ID NO: 1540967 - RNA, 19 nt, Homo sapiens
  misc_RNA (1)...(19): siRNA sense strand
ugaggagaauggaucauca

SEQ ID NO: 1540968 - RNA, 19 nt, Homo sapiens
  misc_RNA (1)...(19): siRNA sense strand
ugugaaagaaucauggaua

SEQ ID NO: 1540969 - RNA, 19 nt, Homo sapiens
  misc_RNA (1)...(19): siRNA sense strand
ccgaagaaccugaauugga

SEQ ID NO: 1540970 - RNA, 19 nt, Homo sapiens
  misc_RNA (1)...(19): siRNA sense strand
ccggauauguggcaucugu

SEQ ID NO: 1540971 - RNA, 19 nt, Homo sapiens
  misc_RNA (1)...(19): siRNA sense strand
aaagugaacaucagcauca

SEQ ID NO: 1540972 - RNA, 19 nt, Homo sapiens
  misc_RNA (1)...(19): siRNA sense strand
caucguggacacaggguua

SEQ ID NO: 1540973 - RNA, 19 nt, Homo sapiens
  misc_RNA (1)...(19): siRNA sense strand
gacacaggguuacuuggau

SEQ ID NO: 1540974 - RNA, 19 nt, Homo sapiens
  misc_RNA (1)...(19): siRNA sense strand
agaaccacguggcuacuug

SEQ ID NO: 1540975 - RNA, 19 nt, Homo sapiens
  misc_RNA (1)...(19): siRNA sense strand
gguuauuucugauacucuu

SEQ ID NO: 1540976 - RNA, 19 nt, Homo sapiens
  misc_RNA (1)...(19): siRNA sense strand
guccuggaguuuaugcaaa

SEQ ID NO: 1540977 - RNA, 19 nt, Homo sapiens
  misc_RNA (1)...(19): siRNA sense strand
cuacuuguuugugugauug

SEQ ID NO: 1540978 - RNA, 19 nt, Homo sapiens
  misc_RNA (1)...(19): siRNA sense strand
gauaaauagcugcguugga

SEQ ID NO: 1540979 - RNA, 19 nt, Homo sapiens
  misc_RNA (1)...(19): siRNA sense strand
caucauugugucuggauaa

SEQ ID NO: 1540980 - RNA, 19 nt, Homo sapiens
  misc_RNA (1)...(19): siRNA sense strand
ucugaucgccuccgaauuc

SEQ ID NO: 1540981 - RNA, 19 nt, Homo sapiens
  misc_RNA (1)...(19): siRNA sense strand
ugugaucgauggauuacau

SEQ ID NO: 1540982 - RNA, 19 nt, Homo sapiens
  misc_RNA (1)...(19): siRNA sense strand
ucucaacaaucgcacaaca

SEQ ID NO: 1540983 - RNA, 19 nt, Homo sapiens
  misc_RNA (1)...(19): siRNA sense strand
cuauuguccuggaguuuau

SEQ ID NO: 1540984 - RNA, 19 nt, Homo sapiens
  misc_RNA (1)...(19): siRNA sense strand
cuucacagcucuuuucuau

SEQ ID NO: 1540985 - RNA, 19 nt, Homo sapiens
  misc_RNA (1)...(19): siRNA sense strand
gaucgccuccgaauuccuu

SEQ ID NO: 1540986 - RNA, 19 nt, Homo sapiens
  misc_RNA (1)...(19): siRNA sense strand
gaucaacaucagcuacaau

SEQ ID NO: 1540987 - RNA, 19 nt, Homo sapiens
  misc_RNA (1)...(19): siRNA sense strand
guuggagaaucaaaucauc

SEQ ID NO: 1540988 - RNA, 19 nt, Homo sapiens
  misc_RNA (1)...(19): siRNA sense strand
uggagugccugagcagaaa

SEQ ID NO: 1540989 - RNA, 19 nt, Homo sapiens
  misc_RNA (1)...(19): siRNA sense strand
ucuauuguccuggaguuua

SEQ ID NO: 1540990 - RNA, 19 nt, Homo sapiens
  misc_RNA (1)...(19): siRNA sense strand
gggugugaucgauggauua

SEQ ID NO: 1540991 - RNA, 19 nt, Homo sapiens
  misc_RNA (1)...(19): siRNA sense strand
ggauauguggcaucugugu

SEQ ID NO: 1540992 - RNA, 19 nt, Homo sapiens
  misc_RNA (1)...(19): siRNA sense strand
caucaucccuccgcuuguc

SEQ ID NO: 1540993 - RNA, 19 nt, Homo sapiens
  misc_RNA (1)...(19): siRNA sense strand
guucagcuggcgguucuua

SEQ ID NO: 1540994 - RNA, 19 nt, Homo sapiens
  misc_RNA (1)...(19): siRNA sense strand
aaccgaagaaccugaauug

SEQ ID NO: 1540995 - RNA, 19 nt, Homo sapiens
  misc_RNA (1)...(19): siRNA sense strand
ggaugaagggugugaucga

SEQ ID NO: 1540996 - RNA, 19 nt, Homo sapiens
  misc_RNA (1)...(19): siRNA sense strand
gaaccacguggcuacuugu

SEQ ID NO: 1540997 - RNA, 19 nt, Homo sapiens
  misc_RNA (1)...(19): siRNA sense strand
ucauggauacaauuucuga

SEQ ID NO: 1540998 - RNA, 19 nt, Homo sapiens
  misc_RNA (1)...(19): siRNA sense strand
gaaucauggauacaauuuc

SEQ ID NO: 1540999 - RNA, 19 nt, Homo sapiens
  misc_RNA (1)...(19): siRNA sense strand
uaacagaaggaaagaacag

SEQ ID NO: 1541000 - RNA, 19 nt, Homo sapiens
  misc_RNA (1)...(19): siRNA sense strand
gacaccauuuguagagaca

SEQ ID NO: 1541001 - RNA, 19 nt, Homo sapiens
  misc_RNA (1)...(19): siRNA sense strand
gaccuuggacaccauuugu

SEQ ID NO: 1541002 - RNA, 19 nt, Homo sapiens
  misc_RNA (1)...(19): siRNA sense strand
cauguggcuuccuggcauu

SEQ ID NO: 1541003 - RNA, 19 nt, Homo sapiens
  misc_RNA (1)...(19): siRNA sense strand
caccauuuguagagacaga

SEQ ID NO: 1541004 - RNA, 19 nt, Homo sapiens
  misc_RNA (1)...(19): siRNA sense strand
aaauagcugcguuggagaa

SEQ ID NO: 1541005 - RNA, 19 nt, Homo sapiens
  misc_RNA (1)...(19): siRNA sense strand
ucaucauugugucuggaua

SEQ ID NO: 1541006 - RNA, 19 nt, Homo sapiens
  misc_RNA (1)...(19): siRNA sense strand
aaaccgaagaaccugaauu

SEQ ID NO: 1541007 - RNA, 19 nt, Homo sapiens
  misc_RNA (1)...(19): siRNA sense strand
gcaucugugugaggagaau

SEQ ID NO: 1541008 - RNA, 19 nt, Homo sapiens
  misc_RNA (1)...(19): siRNA sense strand
gaaaaccgaagaaccugaa

SEQ ID NO: 1541009 - RNA, 19 nt, Homo sapiens
  misc_RNA (1)...(19): siRNA sense strand
cugccugucuuccuucaug

SEQ ID NO: 1541010 - RNA, 19 nt, Homo sapiens
  misc_RNA (1)...(19): siRNA sense strand
caacaaucgcacaacaaag

SEQ ID NO: 1541011 - RNA, 19 nt, Homo sapiens
  misc_RNA (1)...(19): siRNA sense strand
gugguacucugugaucauc

SEQ ID NO: 1541012 - RNA, 19 nt, Homo sapiens
  misc_RNA (1)...(19): siRNA sense strand
gcucggcucuguccuucac

SEQ ID NO: 1541013 - RNA, 19 nt, Homo sapiens
  misc_RNA (1)...(19): siRNA sense strand
gugcugcugcgaguacaua

SEQ ID NO: 1541014 - RNA, 19 nt, Homo sapiens
  misc_RNA (1)...(19): siRNA sense strand
acucuuagccuugcacaga

SEQ ID NO: 1541015 - RNA, 19 nt, Homo sapiens
  misc_RNA (1)...(19): siRNA sense strand
ccugagccuuggacuguuc

SEQ ID NO: 1541016 - RNA, 19 nt, Homo sapiens
  misc_RNA (1)...(19): siRNA sense strand
acuacuaccucacuaacag

SEQ ID NO: 1541017 - RNA, 19 nt, Homo sapiens
  misc_RNA (1)...(19): siRNA sense strand
gcagaaaagggcaggagaa

SEQ ID NO: 1541018 - RNA, 19 nt, Homo sapiens
  misc_RNA (1)...(19): siRNA sense strand
ucacuaacagaaggaaaga

SEQ ID NO: 1541019 - RNA, 19 nt, Homo sapiens
  misc_RNA (1)...(19): siRNA sense strand
gccuuggacuguucucucu

SEQ ID NO: 1541020 - RNA, 19 nt, Homo sapiens
  misc_RNA (1)...(19): siRNA sense strand
agagacuugugaaagaauc

SEQ ID NO: 1541021 - RNA, 19 nt, Homo sapiens
  misc_RNA (1)...(19): siRNA sense strand
gaggagaauggaucaucau

SEQ ID NO: 1541022 - RNA, 19 nt, Homo sapiens
  misc_RNA (1)...(19): siRNA sense strand
gguucuuaccugcggguua

SEQ ID NO: 1541023 - RNA, 19 nt, Homo sapiens
  misc_RNA (1)...(19): siRNA sense strand
guacuacuaccucacuaac

SEQ ID NO: 1541024 - RNA, 19 nt, Homo sapiens
  misc_RNA (1)...(19): siRNA sense strand
gaagauggcuugugggaaa

SEQ ID NO: 1541025 - RNA, 19 nt, Homo sapiens
  misc_RNA (1)...(19): siRNA sense strand
gcaggaggaccaaugauua

SEQ ID NO: 1541026 - RNA, 19 nt, Homo sapiens
  misc_RNA (1)...(19): siRNA sense strand
cauauuagaucuaccuuga

SEQ ID NO: 1541027 - RNA, 19 nt, Homo sapiens
  misc_RNA (1)...(19): siRNA sense strand
gcaccaagaugacaagcaa

SEQ ID NO: 1541028 - RNA, 19 nt, Homo sapiens
  misc_RNA (1)...(19): siRNA sense strand
gaaauaaagcccuacucua

SEQ ID NO: 1541029 - RNA, 19 nt, Homo sapiens
  misc_RNA (1)...(19): siRNA sense strand
gcauugcugucaacauuaa

SEQ ID NO: 1541030 - RNA, 19 nt, Homo sapiens
  misc_RNA (1)...(19): siRNA sense strand
uagagaaucuuuccacuuc

SEQ ID NO: 1541031 - RNA, 19 nt, Homo sapiens
  misc_RNA (1)...(19): siRNA sense strand
aaaccacuuuccaguaaua

SEQ ID NO: 1541032 - RNA, 19 nt, Homo sapiens
  misc_RNA (1)...(19): siRNA sense strand
gcaagaagaugacauucac

SEQ ID NO: 1541033 - RNA, 19 nt, Homo sapiens
  misc_RNA (1)...(19): siRNA sense strand
gaaagagccagacuucuca

SEQ ID NO: 1541034 - RNA, 19 nt, Homo sapiens
  misc_RNA (1)...(19): siRNA sense strand
cauuaagacugcagagauu

SEQ ID NO: 1541035 - RNA, 19 nt, Homo sapiens
  misc_RNA (1)...(19): siRNA sense strand
gaagaugacauucacuuag

SEQ ID NO: 1541036 - RNA, 19 nt, Homo sapiens
  misc_RNA (1)...(19): siRNA sense strand
ggacaccauuuccacaugu

SEQ ID NO: 1541037 - RNA, 19 nt, Homo sapiens
  misc_RNA (1)...(19): siRNA sense strand
ggaaguacaccuuguugga

SEQ ID NO: 1541038 - RNA, 19 nt, Homo sapiens
  misc_RNA (1)...(19): siRNA sense strand
ggaaagagccagacuucuc

SEQ ID NO: 1541039 - RNA, 19 nt, Homo sapiens
  misc_RNA (1)...(19): siRNA sense strand
uggcauugcugucaacauu

SEQ ID NO: 1541040 - RNA, 19 nt, Homo sapiens
  misc_RNA (1)...(19): siRNA sense strand
ggaaauaaagcccuacucu

SEQ ID NO: 1541041 - RNA, 19 nt, Homo sapiens
  misc_RNA (1)...(19): siRNA sense strand
cauuaugugugacagaauu

SEQ ID NO: 1541042 - RNA, 19 nt, Homo sapiens
  misc_RNA (1)...(19): siRNA sense strand
gaggaaagagccagacuuc

SEQ ID NO: 1541043 - RNA, 19 nt, Homo sapiens
  misc_RNA (1)...(19): siRNA sense strand
ugacggaaccgacaccaaa

SEQ ID NO: 1541044 - RNA, 19 nt, Homo sapiens
  misc_RNA (1)...(19): siRNA sense strand
uauuagaucuaccuugaug

SEQ ID NO: 1541045 - RNA, 19 nt, Homo sapiens
  misc_RNA (1)...(19): siRNA sense strand
gacagaacaacuucguaua

SEQ ID NO: 1541046 - RNA, 19 nt, Homo sapiens
  misc_RNA (1)...(19): siRNA sense strand
gcagagauuuacagagcau

SEQ ID NO: 1541047 - RNA, 19 nt, Homo sapiens
  misc_RNA (1)...(19): siRNA sense strand
aaauaaagcccuacucuac

SEQ ID NO: 1541048 - RNA, 19 nt, Homo sapiens
  misc_RNA (1)...(19): siRNA sense strand
ccaguaauauauggcauug

SEQ ID NO: 1541049 - RNA, 19 nt, Homo sapiens
  misc_RNA (1)...(19): siRNA sense strand
auaaagcccuacucuacaa

SEQ ID NO: 1541050 - RNA, 19 nt, Homo sapiens
  misc_RNA (1)...(19): siRNA sense strand
uuacagagcauccuuucaa

SEQ ID NO: 1541051 - RNA, 19 nt, Homo sapiens
  misc_RNA (1)...(19): siRNA sense strand
ccacuuuccaguaauauau

SEQ ID NO: 1541052 - RNA, 19 nt, Homo sapiens
  misc_RNA (1)...(19): siRNA sense strand
guggaaggcuggaaguaca

SEQ ID NO: 1541053 - RNA, 19 nt, Homo sapiens
  misc_RNA (1)...(19): siRNA sense strand
gcagagacagaacaacuuc

SEQ ID NO: 1541054 - RNA, 19 nt, Homo sapiens
  misc_RNA (1)...(19): siRNA sense strand
agaagaugacauucacuua

SEQ ID NO: 1541055 - RNA, 19 nt, Homo sapiens
  misc_RNA (1)...(19): siRNA sense strand
acaagcaaauacuagagaa

SEQ ID NO: 1541056 - RNA, 19 nt, Homo sapiens
  misc_RNA (1)...(19): siRNA sense strand
gaacauauuagaucuaccu

SEQ ID NO: 1541057 - RNA, 19 nt, Homo sapiens
  misc_RNA (1)...(19): siRNA sense strand
gaucaugaacuccauaaaa

SEQ ID NO: 1541058 - RNA, 19 nt, Homo sapiens
  misc_RNA (1)...(19): siRNA sense strand
cucaucaacuucuuaguga

SEQ ID NO: 1541059 - RNA, 19 nt, Homo sapiens
  misc_RNA (1)...(19): siRNA sense strand
gccacuacuugucacauug

SEQ ID NO: 1541060 - RNA, 19 nt, Homo sapiens
  misc_RNA (1)...(19): siRNA sense strand
agaacaacuucguauagga

SEQ ID NO: 1541061 - RNA, 19 nt, Homo sapiens
  misc_RNA (1)...(19): siRNA sense strand
uuaagacugcagagauuua

SEQ ID NO: 1541062 - RNA, 19 nt, Homo sapiens
  misc_RNA (1)...(19): siRNA sense strand
aagaugacauucacuuagu

SEQ ID NO: 1541063 - RNA, 19 nt, Homo sapiens
  misc_RNA (1)...(19): siRNA sense strand
ccaccugcuugacacauug

SEQ ID NO: 1541064 - RNA, 19 nt, Homo sapiens
  misc_RNA (1)...(19): siRNA sense strand
caaagagagcuugcaguga

SEQ ID NO: 1541065 - RNA, 19 nt, Homo sapiens
  misc_RNA (1)...(19): siRNA sense strand
gcaaauacuagagaaucuu

SEQ ID NO: 1541066 - RNA, 19 nt, Homo sapiens
  misc_RNA (1)...(19): siRNA sense strand
caagaugacaagcaaauac

SEQ ID NO: 1541067 - RNA, 19 nt, Homo sapiens
  misc_RNA (1)...(19): siRNA sense strand
ccaagaugacaagcaaaua

SEQ ID NO: 1541068 - RNA, 19 nt, Homo sapiens
  misc_RNA (1)...(19): siRNA sense strand
gacaagcaaauacuagaga

SEQ ID NO: 1541069 - RNA, 19 nt, Homo sapiens
  misc_RNA (1)...(19): siRNA sense strand
gaauuugacaggcaagaag

SEQ ID NO: 1541070 - RNA, 19 nt, Homo sapiens
  misc_RNA (1)...(19): siRNA sense strand
cagaacaacuucguauagg

SEQ ID NO: 1541071 - RNA, 19 nt, Homo sapiens
  misc_RNA (1)...(19): siRNA sense strand
agacagaacaacuucguau

SEQ ID NO: 1541072 - RNA, 19 nt, Homo sapiens
  misc_RNA (1)...(19): siRNA sense strand
gaggaccaaugauuagcau

SEQ ID NO: 1541073 - RNA, 19 nt, Homo sapiens
  misc_RNA (1)...(19): siRNA sense strand
cagagcauccuuucaagau

SEQ ID NO: 1541074 - RNA, 19 nt, Homo sapiens
  misc_RNA (1)...(19): siRNA sense strand
uuaaaugaccgggaagaaa

SEQ ID NO: 1541075 - RNA, 19 nt, Homo sapiens
  misc_RNA (1)...(19): siRNA sense strand
cccagggccuucuguaugu

SEQ ID NO: 1541076 - RNA, 19 nt, Homo sapiens
  misc_RNA (1)...(19): siRNA sense strand
gagacagaacaacuucgua

SEQ ID NO: 1541077 - RNA, 19 nt, Homo sapiens
  misc_RNA (1)...(19): siRNA sense strand
gcagugaccuccccaaagg

SEQ ID NO: 1541078 - RNA, 19 nt, Homo sapiens
  misc_RNA (1)...(19): siRNA sense strand
gaugacaagcaaauacuag

SEQ ID NO: 1541079 - RNA, 19 nt, Homo sapiens
  misc_RNA (1)...(19): siRNA sense strand
ggaggaaagagccagacuu

SEQ ID NO: 1541080 - RNA, 19 nt, Homo sapiens
  misc_RNA (1)...(19): siRNA sense strand
gccaccugcuugacacauu

SEQ ID NO: 1541081 - RNA, 19 nt, Homo sapiens
  misc_RNA (1)...(19): siRNA sense strand
ggcauugcugucaacauua

SEQ ID NO: 1541082 - RNA, 19 nt, Homo sapiens
  misc_RNA (1)...(19): siRNA sense strand
uaaaugaccgggaagaaaa

SEQ ID NO: 1541083 - RNA, 19 nt, Homo sapiens
  misc_RNA (1)...(19): siRNA sense strand
ggcaagaagaugacauuca

SEQ ID NO: 1541084 - RNA, 19 nt, Homo sapiens
  misc_RNA (1)...(19): siRNA sense strand
acagaacaacuucguauag

SEQ ID NO: 1541085 - RNA, 19 nt, Homo sapiens
  misc_RNA (1)...(19): siRNA sense strand
uauauggcauugcugucaa

SEQ ID NO: 1541086 - RNA, 19 nt, Homo sapiens
  misc_RNA (1)...(19): siRNA sense strand
caucaacuucuuagugaau

SEQ ID NO: 1541087 - RNA, 19 nt, Homo sapiens
  misc_RNA (1)...(19): siRNA sense strand
aaaacucacucaucaacuu

SEQ ID NO: 1541088 - RNA, 19 nt, Homo sapiens
  misc_RNA (1)...(19): siRNA sense strand
gaugaugccacuacuuguc

SEQ ID NO: 1541089 - RNA, 19 nt, Homo sapiens
  misc_RNA (1)...(19): siRNA sense strand
gagguccccuugaucauga

SEQ ID NO: 1541090 - RNA, 19 nt, Homo sapiens
  misc_RNA (1)...(19): siRNA sense strand
caacuucuuagugaauuug

SEQ ID NO: 1541091 - RNA, 19 nt, Homo sapiens
  misc_RNA (1)...(19): siRNA sense strand
gauuuacagagcauccuuu

SEQ ID NO: 1541092 - RNA, 19 nt, Homo sapiens
  misc_RNA (1)...(19): siRNA sense strand
caggcaagaagaugacauu

SEQ ID NO: 1541093 - RNA, 19 nt, Homo sapiens
  misc_RNA (1)...(19): siRNA sense strand
ugccacuacuugucacauu

SEQ ID NO: 1541094 - RNA, 19 nt, Homo sapiens
  misc_RNA (1)...(19): siRNA sense strand
uuagaucuaccuugauguu

SEQ ID NO: 1541095 - RNA, 19 nt, Homo sapiens
  misc_RNA (1)...(19): siRNA sense strand
ggaggaccaaugauuagca

SEQ ID NO: 1541096 - RNA, 19 nt, Homo sapiens
  misc_RNA (1)...(19): siRNA sense strand
gcuggaaguacaccuuguu

SEQ ID NO: 1541097 - RNA, 19 nt, Homo sapiens
  misc_RNA (1)...(19): siRNA sense strand
cuagagaaucuuuccacuu

SEQ ID NO: 1541098 - RNA, 19 nt, Homo sapiens
  misc_RNA (1)...(19): siRNA sense strand
guacuccuggacaccauuu

SEQ ID NO: 1541099 - RNA, 19 nt, Homo sapiens
  misc_RNA (1)...(19): siRNA sense strand
aguaauauauggcauugcu

SEQ ID NO: 1541100 - RNA, 19 nt, Homo sapiens
  misc_RNA (1)...(19): siRNA sense strand
ucaucaacuucuuagugaa

SEQ ID NO: 1541101 - RNA, 19 nt, Homo sapiens
  misc_RNA (1)...(19): siRNA sense strand
ccacccgccuuuggaggaa

SEQ ID NO: 1541102 - RNA, 19 nt, Homo sapiens
  misc_RNA (1)...(19): siRNA sense strand
gacaccauuuccacaugug

SEQ ID NO: 1541103 - RNA, 19 nt, Homo sapiens
  misc_RNA (1)...(19): siRNA sense strand
cugaugaugccacuacuug

SEQ ID NO: 1541104 - RNA, 19 nt, Homo sapiens
  misc_RNA (1)...(19): siRNA sense strand
aagaagaugacauucacuu

SEQ ID NO: 1541105 - RNA, 19 nt, Homo sapiens
  misc_RNA (1)...(19): siRNA sense strand
caggaggaccaaugauuag

SEQ ID NO: 1541106 - RNA, 19 nt, Homo sapiens
  misc_RNA (1)...(19): siRNA sense strand
aauaaagcccuacucuaca

SEQ ID NO: 1541107 - RNA, 19 nt, Homo sapiens
  misc_RNA (1)...(19): siRNA sense strand
caagcaaauacuagagaau

SEQ ID NO: 1541108 - RNA, 19 nt, Homo sapiens
  misc_RNA (1)...(19): siRNA sense strand
cauuuaugaugcagagaca

SEQ ID NO: 1541109 - RNA, 19 nt, Homo sapiens
  misc_RNA (1)...(19): siRNA sense strand
uaaagcccuacucuacaaa

SEQ ID NO: 1541110 - RNA, 19 nt, Homo sapiens
  misc_RNA (1)...(19): siRNA sense strand
uacagagcauccuuucaag

SEQ ID NO: 1541111 - RNA, 19 nt, Homo sapiens
  misc_RNA (1)...(19): siRNA sense strand
acauuaagacugcagagau

SEQ ID NO: 1541112 - RNA, 19 nt, Homo sapiens
  misc_RNA (1)...(19): siRNA sense strand
ccagggccuucuguauguu

SEQ ID NO: 1541113 - RNA, 19 nt, Homo sapiens
  misc_RNA (1)...(19): siRNA sense strand
agaucuaccuugauguuuu

SEQ ID NO: 1541114 - RNA, 19 nt, Homo sapiens
  misc_RNA (1)...(19): siRNA sense strand
acucaucaacuucuuagug

SEQ ID NO: 1541115 - RNA, 19 nt, Homo sapiens
  misc_RNA (1)...(19): siRNA sense strand
aagcaaauacuagagaauc

SEQ ID NO: 1541116 - RNA, 19 nt, Homo sapiens
  misc_RNA (1)...(19): siRNA sense strand
agagcauccuuucaagauc

SEQ ID NO: 1541117 - RNA, 19 nt, Homo sapiens
  misc_RNA (1)...(19): siRNA sense strand
ggauggaccuggacacauu

SEQ ID NO: 1541118 - RNA, 19 nt, Homo sapiens
  misc_RNA (1)...(19): siRNA sense strand
aaaggucccuccaucauuu

SEQ ID NO: 1541119 - RNA, 19 nt, Homo sapiens
  misc_RNA (1)...(19): siRNA sense strand
ccaagaggcucacccacaa

SEQ ID NO: 1541120 - RNA, 19 nt, Homo sapiens
  misc_RNA (1)...(19): siRNA sense strand
gaacaccugucaccucaag

SEQ ID NO: 1541121 - RNA, 19 nt, Homo sapiens
  misc_RNA (1)...(19): siRNA sense strand
guggaacacuggccucuuu

SEQ ID NO: 1541122 - RNA, 19 nt, Homo sapiens
  misc_RNA (1)...(19): siRNA sense strand
ggacugggcccacaacaug

SEQ ID NO: 1541123 - RNA, 19 nt, Homo sapiens
  misc_RNA (1)...(19): siRNA sense strand
gagaugcgccugcuagaga

SEQ ID NO: 1541124 - RNA, 19 nt, Homo sapiens
  misc_RNA (1)...(19): siRNA sense strand
gcagugauguauguuguuc

SEQ ID NO: 1541125 - RNA, 19 nt, Homo sapiens
  misc_RNA (1)...(19): siRNA sense strand
gagauggaguuugaagaga

SEQ ID NO: 1541126 - RNA, 19 nt, Homo sapiens
  misc_RNA (1)...(19): siRNA sense strand
caucauuuccucauuggua

SEQ ID NO: 1541127 - RNA, 19 nt, Homo sapiens
  misc_RNA (1)...(19): siRNA sense strand
cacauccagugaccaguua

SEQ ID NO: 1541128 - RNA, 19 nt, Homo sapiens
  misc_RNA (1)...(19): siRNA sense strand
caaaggucccuccaucauu

SEQ ID NO: 1541129 - RNA, 19 nt, Homo sapiens
  misc_RNA (1)...(19): siRNA sense strand
gcaaaggucccuccaucau

SEQ ID NO: 1541130 - RNA, 19 nt, Homo sapiens
  misc_RNA (1)...(19): siRNA sense strand
ccacagggcaccauguuug

SEQ ID NO: 1541131 - RNA, 19 nt, Homo sapiens
  misc_RNA (1)...(19): siRNA sense strand
acaacuggcuuacugacuu

SEQ ID NO: 1541132 - RNA, 19 nt, Homo sapiens
  misc_RNA (1)...(19): siRNA sense strand
gauggaguuugaagagaga

SEQ ID NO: 1541133 - RNA, 19 nt, Homo sapiens
  misc_RNA (1)...(19): siRNA sense strand
gggcugccuuugagaaaug

SEQ ID NO: 1541134 - RNA, 19 nt, Homo sapiens
  misc_RNA (1)...(19): siRNA sense strand
caugagacccagaaauuug

SEQ ID NO: 1541135 - RNA, 19 nt, Homo sapiens
  misc_RNA (1)...(19): siRNA sense strand
gugaguuuguggagaguuu

SEQ ID NO: 1541136 - RNA, 19 nt, Homo sapiens
  misc_RNA (1)...(19): siRNA sense strand
ugauaagccugcuguucuu

SEQ ID NO: 1541137 - RNA, 19 nt, Homo sapiens
  misc_RNA (1)...(19): siRNA sense strand
caacuggcuuacugacuuc

SEQ ID NO: 1541138 - RNA, 19 nt, Homo sapiens
  misc_RNA (1)...(19): siRNA sense strand
gcgaaugagugaggagaug

SEQ ID NO: 1541139 - RNA, 19 nt, Homo sapiens
  misc_RNA (1)...(19): siRNA sense strand
gugagcaccuguuccugaa

SEQ ID NO: 1541140 - RNA, 19 nt, Homo sapiens
  misc_RNA (1)...(19): siRNA sense strand
gcccugcaccugugaguuu

SEQ ID NO: 1541141 - RNA, 19 nt, Homo sapiens
  misc_RNA (1)...(19): siRNA sense strand
ucaagugccuccagaucau

SEQ ID NO: 1541142 - RNA, 19 nt, Homo sapiens
  misc_RNA (1)...(19): siRNA sense strand
gauggaccuggacacauua

SEQ ID NO: 1541143 - RNA, 19 nt, Homo sapiens
  misc_RNA (1)...(19): siRNA sense strand
gaaccggccuuugauucca

SEQ ID NO: 1541144 - RNA, 19 nt, Homo sapiens
  misc_RNA (1)...(19): siRNA sense strand
ugcuagagauggaguuuga

SEQ ID NO: 1541145 - RNA, 19 nt, Homo sapiens
  misc_RNA (1)...(19): siRNA sense strand
uuacaaacacuauguccaa

SEQ ID NO: 1541146 - RNA, 19 nt, Homo sapiens
  misc_RNA (1)...(19): siRNA sense strand
ccaugagacccagaaauuu

SEQ ID NO: 1541147 - RNA, 19 nt, Homo sapiens
  misc_RNA (1)...(19): siRNA sense strand
ggagucggcagcuggagaa

SEQ ID NO: 1541148 - RNA, 19 nt, Homo sapiens
  misc_RNA (1)...(19): siRNA sense strand
gcaccggcuuccaccuaga

SEQ ID NO: 1541149 - RNA, 19 nt, Homo sapiens
  misc_RNA (1)...(19): siRNA sense strand
uccaugagacccagaaauu

SEQ ID NO: 1541150 - RNA, 19 nt, Homo sapiens
  misc_RNA (1)...(19): siRNA sense strand
gaggaggaaguccguguug

SEQ ID NO: 1541151 - RNA, 19 nt, Homo sapiens
  misc_RNA (1)...(19): siRNA sense strand
ucaggccgcuuucucucaa

SEQ ID NO: 1541152 - RNA, 19 nt, Homo sapiens
  misc_RNA (1)...(19): siRNA sense strand
caaacacuauguccaaaau

SEQ ID NO: 1541153 - RNA, 19 nt, Homo sapiens
  misc_RNA (1)...(19): siRNA sense strand
ggaggaaguccguguuguc

SEQ ID NO: 1541154 - RNA, 19 nt, Homo sapiens
  misc_RNA (1)...(19): siRNA sense strand
uacaaacacuauguccaaa

SEQ ID NO: 1541155 - RNA, 19 nt, Homo sapiens
  misc_RNA (1)...(19): siRNA sense strand
gugauaagccugcuguucu

SEQ ID NO: 1541156 - RNA, 19 nt, Homo sapiens
  misc_RNA (1)...(19): siRNA sense strand
gcaugaaccggccuuugau

SEQ ID NO: 1541157 - RNA, 19 nt, Homo sapiens
  misc_RNA (1)...(19): siRNA sense strand
cacaggcaguggaagaguu

SEQ ID NO: 1541158 - RNA, 19 nt, Homo sapiens
  misc_RNA (1)...(19): siRNA sense strand
cauccucacuucuuaccau

SEQ ID NO: 1541159 - RNA, 19 nt, Homo sapiens
  misc_RNA (1)...(19): siRNA sense strand
uggagaagcgaaugaguga

SEQ ID NO: 1541160 - RNA, 19 nt, Homo sapiens
  misc_RNA (1)...(19): siRNA sense strand
ggacauucucugguucuug

SEQ ID NO: 1541161 - RNA, 19 nt, Homo sapiens
  misc_RNA (1)...(19): siRNA sense strand
caggagacacauccaguga

SEQ ID NO: 1541162 - RNA, 19 nt, Homo sapiens
  misc_RNA (1)...(19): siRNA sense strand
ggaggaggaaguccguguu

SEQ ID NO: 1541163 - RNA, 19 nt, Homo sapiens
  misc_RNA (1)...(19): siRNA sense strand
ggaacaugaugggcaaugc

SEQ ID NO: 1541164 - RNA, 19 nt, Homo sapiens
  misc_RNA (1)...(19): siRNA sense strand
ggcagaaggcagagaacuu

SEQ ID NO: 1541165 - RNA, 19 nt, Homo sapiens
  misc_RNA (1)...(19): siRNA sense strand
uggcagugauguauguugu

SEQ ID NO: 1541166 - RNA, 19 nt, Homo sapiens
  misc_RNA (1)...(19): siRNA sense strand
ucuuacaacuggcuuacug

SEQ ID NO: 1541167 - RNA, 19 nt, Homo sapiens
  misc_RNA (1)...(19): siRNA sense strand
gcaagcuccggcuggacua

SEQ ID NO: 1541168 - RNA, 19 nt, Homo sapiens
  misc_RNA (1)...(19): siRNA sense strand
gauauccuggugcccauug

SEQ ID NO: 1541169 - RNA, 19 nt, Homo sapiens
  misc_RNA (1)...(19): siRNA sense strand
gcugguggagucagaaugu

SEQ ID NO: 1541170 - RNA, 19 nt, Homo sapiens
  misc_RNA (1)...(19): siRNA sense strand
gagacccagaaauuugaua

SEQ ID NO: 1541171 - RNA, 19 nt, Homo sapiens
  misc_RNA (1)...(19): siRNA sense strand
gccggucaaucucuuccaa

SEQ ID NO: 1541172 - RNA, 19 nt, Homo sapiens
  misc_RNA (1)...(19): siRNA sense strand
cuccaucauuuccucauug

SEQ ID NO: 1541173 - RNA, 19 nt, Homo sapiens
  misc_RNA (1)...(19): siRNA sense strand
guucuuggcagugauguau

SEQ ID NO: 1541174 - RNA, 19 nt, Homo sapiens
  misc_RNA (1)...(19): siRNA sense strand
gauaagccugcuguucuug

SEQ ID NO: 1541175 - RNA, 19 nt, Homo sapiens
  misc_RNA (1)...(19): siRNA sense strand
caugaaccggccuuugauu

SEQ ID NO: 1541176 - RNA, 19 nt, Homo sapiens
  misc_RNA (1)...(19): siRNA sense strand
ccuccaucauuuccucauu

SEQ ID NO: 1541177 - RNA, 19 nt, Homo sapiens
  misc_RNA (1)...(19): siRNA sense strand
acacauccagugaccaguu

SEQ ID NO: 1541178 - RNA, 19 nt, Homo sapiens
  misc_RNA (1)...(19): siRNA sense strand
ggaaugcugagccggucaa

SEQ ID NO: 1541179 - RNA, 19 nt, Homo sapiens
  misc_RNA (1)...(19): siRNA sense strand
cccacaacaugcucucuca

SEQ ID NO: 1541180 - RNA, 19 nt, Homo sapiens
  misc_RNA (1)...(19): siRNA sense strand
ucucaugcaccucuugcua

SEQ ID NO: 1541181 - RNA, 19 nt, Homo sapiens
  misc_RNA (1)...(19): siRNA sense strand
gccccauccucacuucuua

SEQ ID NO: 1541182 - RNA, 19 nt, Homo sapiens
  misc_RNA (1)...(19): siRNA sense strand
cggucaaucucuuccaaca

SEQ ID NO: 1541183 - RNA, 19 nt, Homo sapiens
  misc_RNA (1)...(19): siRNA sense strand
ccucacuucuuaccauuuu

SEQ ID NO: 1541184 - RNA, 19 nt, Homo sapiens
  misc_RNA (1)...(19): siRNA sense strand
ccugucaccucuuacaacu

SEQ ID NO: 1541185 - RNA, 19 nt, Homo sapiens
  misc_RNA (1)...(19): siRNA sense strand
ucuccuacuucuccagaug

SEQ ID NO: 1541186 - RNA, 19 nt, Homo sapiens
  misc_RNA (1)...(19): siRNA sense strand
guaugacuuuaaacucagu

SEQ ID NO: 1541187 - RNA, 19 nt, Homo sapiens
  misc_RNA (1)...(19): siRNA sense strand
aagaggcucacccacaauu

SEQ ID NO: 1541188 - RNA, 19 nt, Homo sapiens
  misc_RNA (1)...(19): siRNA sense strand
agcaugaaccggccuuuga

SEQ ID NO: 1541189 - RNA, 19 nt, Homo sapiens
  misc_RNA (1)...(19): siRNA sense strand
guuguucaccacccucuga

SEQ ID NO: 1541190 - RNA, 19 nt, Homo sapiens
  misc_RNA (1)...(19): siRNA sense strand
uggucuaccuggugaguca

SEQ ID NO: 1541191 - RNA, 19 nt, Homo sapiens
  misc_RNA (1)...(19): siRNA sense strand
aucauuuccucauugguaa

SEQ ID NO: 1541192 - RNA, 19 nt, Homo sapiens
  misc_RNA (1)...(19): siRNA sense strand
caagugccuccagaucauu

SEQ ID NO: 1541193 - RNA, 19 nt, Homo sapiens
  misc_RNA (1)...(19): siRNA sense strand
agaccaagauccagaaaga

SEQ ID NO: 1541194 - RNA, 19 nt, Homo sapiens
  misc_RNA (1)...(19): siRNA sense strand
gcuaccagcugcccaucua

SEQ ID NO: 1541195 - RNA, 19 nt, Homo sapiens
  misc_RNA (1)...(19): siRNA sense strand
gcaaugagccccugaagaa

SEQ ID NO: 1541196 - RNA, 19 nt, Homo sapiens
  misc_RNA (1)...(19): siRNA sense strand
agaaagagcggcuuaagug

SEQ ID NO: 1541197 - RNA, 19 nt, Homo sapiens
  misc_RNA (1)...(19): siRNA sense strand
gaucugggaugcccucaag

SEQ ID NO: 1541198 - RNA, 19 nt, Homo sapiens
  misc_RNA (1)...(19): siRNA sense strand
ccgggaagcugcucacaga

SEQ ID NO: 1541199 - RNA, 19 nt, Homo sapiens
  misc_RNA (1)...(19): siRNA sense strand
gagcaaacgggaugaguuc

SEQ ID NO: 1541200 - RNA, 19 nt, Homo sapiens
  misc_RNA (1)...(19): siRNA sense strand
gaagaaagagcggcuuaag

SEQ ID NO: 1541201 - RNA, 19 nt, Homo sapiens
  misc_RNA (1)...(19): siRNA sense strand
ccaagauccagaaagauuu

SEQ ID NO: 1541202 - RNA, 19 nt, Homo sapiens
  misc_RNA (1)...(19): siRNA sense strand
aagagcggcuuaaguggaa

SEQ ID NO: 1541203 - RNA, 19 nt, Homo sapiens
  misc_RNA (1)...(19): siRNA sense strand
ccagaaagauuuugucauc

SEQ ID NO: 1541204 - RNA, 19 nt, Homo sapiens
  misc_RNA (1)...(19): siRNA sense strand
ggagcaaacgggaugaguu

SEQ ID NO: 1541205 - RNA, 19 nt, Homo sapiens
  misc_RNA (1)...(19): siRNA sense strand
gcaaacgggaugaguucug

SEQ ID NO: 1541206 - RNA, 19 nt, Homo sapiens
  misc_RNA (1)...(19): siRNA sense strand
caagcgagcaggacgcaau

SEQ ID NO: 1541207 - RNA, 19 nt, Homo sapiens
  misc_RNA (1)...(19): siRNA sense strand
ggagaccaagauccagaaa

SEQ ID NO: 1541208 - RNA, 19 nt, Homo sapiens
  misc_RNA (1)...(19): siRNA sense strand
acacagcgccugccuucga

SEQ ID NO: 1541209 - RNA, 19 nt, Homo sapiens
  misc_RNA (1)...(19): siRNA sense strand
gccgugaguucccgcugaa

SEQ ID NO: 1541210 - RNA, 19 nt, Homo sapiens
  misc_RNA (1)...(19): siRNA sense strand
ugaagaaagagcggcuuaa

SEQ ID NO: 1541211 - RNA, 19 nt, Homo sapiens
  misc_RNA (1)...(19): siRNA sense strand
accaagauccagaaagauu

SEQ ID NO: 1541212 - RNA, 19 nt, Homo sapiens
  misc_RNA (1)...(19): siRNA sense strand
cugaagaaagagcggcuua

SEQ ID NO: 1541213 - RNA, 19 nt, Homo sapiens
  misc_RNA (1)...(19): siRNA sense strand
ucauccaggucaucaucaa

SEQ ID NO: 1541214 - RNA, 19 nt, Homo sapiens
  misc_RNA (1)...(19): siRNA sense strand
gcccaucuacugccuguca

SEQ ID NO: 1541215 - RNA, 19 nt, Homo sapiens
  misc_RNA (1)...(19): siRNA sense strand
cauggcacccucugugaau

SEQ ID NO: 1541216 - RNA, 19 nt, Homo sapiens
  misc_RNA (1)...(19): siRNA sense strand
uggcagcggugguucuucu

SEQ ID NO: 1541217 - RNA, 19 nt, Homo sapiens
  misc_RNA (1)...(19): siRNA sense strand
aagaaagagcggcuuaagu

SEQ ID NO: 1541218 - RNA, 19 nt, Homo sapiens
  misc_RNA (1)...(19): siRNA sense strand
caaauaugcugcugaguuu

SEQ ID NO: 1541219 - RNA, 19 nt, Homo sapiens
  misc_RNA (1)...(19): siRNA sense strand
gaagagggcuuuauugaac

SEQ ID NO: 1541220 - RNA, 19 nt, Homo sapiens
  misc_RNA (1)...(19): siRNA sense strand
gaauaugccuuccggaaau

SEQ ID NO: 1541221 - RNA, 19 nt, Homo sapiens
  misc_RNA (1)...(19): siRNA sense strand
ggagguggcugccgaugaa

SEQ ID NO: 1541222 - RNA, 19 nt, Homo sapiens
  misc_RNA (1)...(19): siRNA sense strand
cagcauggcuucaacuuca

SEQ ID NO: 1541223 - RNA, 19 nt, Homo sapiens
  misc_RNA (1)...(19): siRNA sense strand
ccauaaagacagcuaauuu

SEQ ID NO: 1541224 - RNA, 19 nt, Homo sapiens
  misc_RNA (1)...(19): siRNA sense strand
ggaagagggcuuuauugaa

SEQ ID NO: 1541225 - RNA, 19 nt, Homo sapiens
  misc_RNA (1)...(19): siRNA sense strand
ugagggaccauauugauua

SEQ ID NO: 1541226 - RNA, 19 nt, Homo sapiens
  misc_RNA (1)...(19): siRNA sense strand
gcucaaguguucaaucuca

SEQ ID NO: 1541227 - RNA, 19 nt, Homo sapiens
  misc_RNA (1)...(19): siRNA sense strand
ugauagagcuaccucagaa

SEQ ID NO: 1541228 - RNA, 19 nt, Homo sapiens
  misc_RNA (1)...(19): siRNA sense strand
gcuacacaauggccuuaua

SEQ ID NO: 1541229 - RNA, 19 nt, Homo sapiens
  misc_RNA (1)...(19): siRNA sense strand
ccaaauaugcugcugaguu

SEQ ID NO: 1541230 - RNA, 19 nt, Homo sapiens
  misc_RNA (1)...(19): siRNA sense strand
gcaacaacuucaaggagau

SEQ ID NO: 1541231 - RNA, 19 nt, Homo sapiens
  misc_RNA (1)...(19): siRNA sense strand
cagcaucugugacaacuuc

SEQ ID NO: 1541232 - RNA, 19 nt, Homo sapiens
  misc_RNA (1)...(19): siRNA sense strand
uaugacagguuaugugaug

SEQ ID NO: 1541233 - RNA, 19 nt, Homo sapiens
  misc_RNA (1)...(19): siRNA sense strand
acaauggccuuauagacuu

SEQ ID NO: 1541234 - RNA, 19 nt, Homo sapiens
  misc_RNA (1)...(19): siRNA sense strand
gacccuggcucccugaaug

SEQ ID NO: 1541235 - RNA, 19 nt, Homo sapiens
  misc_RNA (1)...(19): siRNA sense strand
gugacaacuucucggcuua

SEQ ID NO: 1541236 - RNA, 19 nt, Homo sapiens
  misc_RNA (1)...(19): siRNA sense strand
cgacgguggugucagcaaa

SEQ ID NO: 1541237 - RNA, 19 nt, Homo sapiens
  misc_RNA (1)...(19): siRNA sense strand
ccaaagcccacaaucagaa

SEQ ID NO: 1541238 - RNA, 19 nt, Homo sapiens
  misc_RNA (1)...(19): siRNA sense strand
ggaagaguuugcugaacca

SEQ ID NO: 1541239 - RNA, 19 nt, Homo sapiens
  misc_RNA (1)...(19): siRNA sense strand
gcaaugacaagggugauga

SEQ ID NO: 1541240 - RNA, 19 nt, Homo sapiens
  misc_RNA (1)...(19): siRNA sense strand
gcaacuauccuuccagcau

SEQ ID NO: 1541241 - RNA, 19 nt, Homo sapiens
  misc_RNA (1)...(19): siRNA sense strand
cauaaagacagcuaauuuc

SEQ ID NO: 1541242 - RNA, 19 nt, Homo sapiens
  misc_RNA (1)...(19): siRNA sense strand
guuaugugauggccuaugu

SEQ ID NO: 1541243 - RNA, 19 nt, Homo sapiens
  misc_RNA (1)...(19): siRNA sense strand
cggaagagggcuuuauuga

SEQ ID NO: 1541244 - RNA, 19 nt, Homo sapiens
  misc_RNA (1)...(19): siRNA sense strand
uuucguggccuccuacuua

SEQ ID NO: 1541245 - RNA, 19 nt, Homo sapiens
  misc_RNA (1)...(19): siRNA sense strand
gcaaagcaacaacuucaag

SEQ ID NO: 1541246 - RNA, 19 nt, Homo sapiens
  misc_RNA (1)...(19): siRNA sense strand
gaaccagugcauugaggaa

SEQ ID NO: 1541247 - RNA, 19 nt, Homo sapiens
  misc_RNA (1)...(19): siRNA sense strand
gcaugagggaccauauuga

SEQ ID NO: 1541248 - RNA, 19 nt, Homo sapiens
  misc_RNA (1)...(19): siRNA sense strand
ggccugaaauagcugauag

SEQ ID NO: 1541249 - RNA, 19 nt, Homo sapiens
  misc_RNA (1)...(19): siRNA sense strand
caucaagccugaagaaacc

SEQ ID NO: 1541250 - RNA, 19 nt, Homo sapiens
  misc_RNA (1)...(19): siRNA sense strand
gcagcaaggccugaaauag

SEQ ID NO: 1541251 - RNA, 19 nt, Homo sapiens
  misc_RNA (1)...(19): siRNA sense strand
gugcaaagcaacaacuuca

SEQ ID NO: 1541252 - RNA, 19 nt, Homo sapiens
  misc_RNA (1)...(19): siRNA sense strand
ugaaugccacaauaaggua

SEQ ID NO: 1541253 - RNA, 19 nt, Homo sapiens
  misc_RNA (1)...(19): siRNA sense strand
gcaucaagccugaagaaac

SEQ ID NO: 1541254 - RNA, 19 nt, Homo sapiens
  misc_RNA (1)...(19): siRNA sense strand
caauggccuuauagacuug

SEQ ID NO: 1541255 - RNA, 19 nt, Homo sapiens
  misc_RNA (1)...(19): siRNA sense strand
caacuucaaccagcaguau

SEQ ID NO: 1541256 - RNA, 19 nt, Homo sapiens
  misc_RNA (1)...(19): siRNA sense strand
cuaucuggcucaaguguuc

SEQ ID NO: 1541257 - RNA, 19 nt, Homo sapiens
  misc_RNA (1)...(19): siRNA sense strand
cuucaccgcugaccugugu

SEQ ID NO: 1541258 - RNA, 19 nt, Homo sapiens
  misc_RNA (1)...(19): siRNA sense strand
ggcagcaaggccugaaaua

SEQ ID NO: 1541259 - RNA, 19 nt, Homo sapiens
  misc_RNA (1)...(19): siRNA sense strand
ggaugguccucccaagaag

SEQ ID NO: 1541260 - RNA, 19 nt, Homo sapiens
  misc_RNA (1)...(19): siRNA sense strand
agaauaugccuuccggaaa

SEQ ID NO: 1541261 - RNA, 19 nt, Homo sapiens
  misc_RNA (1)...(19): siRNA sense strand
gagggaccauauugauuac

SEQ ID NO: 1541262 - RNA, 19 nt, Homo sapiens
  misc_RNA (1)...(19): siRNA sense strand
agacaagggugaacauucc

SEQ ID NO: 1541263 - RNA, 19 nt, Homo sapiens
  misc_RNA (1)...(19): siRNA sense strand
gcaccgggcugguuuugau

SEQ ID NO: 1541264 - RNA, 19 nt, Homo sapiens
  misc_RNA (1)...(19): siRNA sense strand
gauacagcauggcuucaac

SEQ ID NO: 1541265 - RNA, 19 nt, Homo sapiens
  misc_RNA (1)...(19): siRNA sense strand
ucauagaaccaaagucugu

SEQ ID NO: 1541266 - RNA, 19 nt, Homo sapiens
  misc_RNA (1)...(19): siRNA sense strand
uagacuugguguuccugua

SEQ ID NO: 1541267 - RNA, 19 nt, Homo sapiens
  misc_RNA (1)...(19): siRNA sense strand
ugugauggccuauguggaa

SEQ ID NO: 1541268 - RNA, 19 nt, Homo sapiens
  misc_RNA (1)...(19): siRNA sense strand
gacaacuucucggcuuaug

SEQ ID NO: 1541269 - RNA, 19 nt, Homo sapiens
  misc_RNA (1)...(19): siRNA sense strand
gauguucccagcaggcauu

SEQ ID NO: 1541270 - RNA, 19 nt, Homo sapiens
  misc_RNA (1)...(19): siRNA sense strand
ggagcuaguaguccagguu

SEQ ID NO: 1541271 - RNA, 19 nt, Homo sapiens
  misc_RNA (1)...(19): siRNA sense strand
uguccucagucucacgaua

SEQ ID NO: 1541272 - RNA, 19 nt, Homo sapiens
  misc_RNA (1)...(19): siRNA sense strand
cagcaugagggaccauauu

SEQ ID NO: 1541273 - RNA, 19 nt, Homo sapiens
  misc_RNA (1)...(19): siRNA sense strand
gggugaacauuccuaucug

SEQ ID NO: 1541274 - RNA, 19 nt, Homo sapiens
  misc_RNA (1)...(19): siRNA sense strand
cagugacgauggcgcaguu

SEQ ID NO: 1541275 - RNA, 19 nt, Homo sapiens
  misc_RNA (1)...(19): siRNA sense strand
caaagucugugcaguuccu

SEQ ID NO: 1541276 - RNA, 19 nt, Homo sapiens
  misc_RNA (1)...(19): siRNA sense strand
uagcaucaagccugaagaa

SEQ ID NO: 1541277 - RNA, 19 nt, Homo sapiens
  misc_RNA (1)...(19): siRNA sense strand
gccauaaagacagcuaauu

SEQ ID NO: 1541278 - RNA, 19 nt, Homo sapiens
  misc_RNA (1)...(19): siRNA sense strand
ccgcugaccugugugagau

SEQ ID NO: 1541279 - RNA, 19 nt, Homo sapiens
  misc_RNA (1)...(19): siRNA sense strand
cacaauggccuuauagacu

SEQ ID NO: 1541280 - RNA, 19 nt, Homo sapiens
  misc_RNA (1)...(19): siRNA sense strand
guuacaaggccguguguca

SEQ ID NO: 1541281 - RNA, 19 nt, Homo sapiens
  misc_RNA (1)...(19): siRNA sense strand
gauugcaccgggcugguuu

SEQ ID NO: 1541282 - RNA, 19 nt, Homo sapiens
  misc_RNA (1)...(19): siRNA sense strand
cagcaaggccugaaauagc

SEQ ID NO: 1541283 - RNA, 19 nt, Homo sapiens
  misc_RNA (1)...(19): siRNA sense strand
ggaaccugccucacuccaa

SEQ ID NO: 1541284 - RNA, 19 nt, Homo sapiens
  misc_RNA (1)...(19): siRNA sense strand
caugagggaccauauugau

SEQ ID NO: 1541285 - RNA, 19 nt, Homo sapiens
  misc_RNA (1)...(19): siRNA sense strand
aggcauuuaugacaccaaa

SEQ ID NO: 1541286 - RNA, 19 nt, Homo sapiens
  misc_RNA (1)...(19): siRNA sense strand
uaguggaugugcaaagcaa

SEQ ID NO: 1541287 - RNA, 19 nt, Homo sapiens
  misc_RNA (1)...(19): siRNA sense strand
uggcucaaguguucaaucu

SEQ ID NO: 1541288 - RNA, 19 nt, Homo sapiens
  misc_RNA (1)...(19): siRNA sense strand
cagacaagggugaacauuc

SEQ ID NO: 1541289 - RNA, 19 nt, Homo sapiens
  misc_RNA (1)...(19): siRNA sense strand
gcaacccaccguccucauc

SEQ ID NO: 1541290 - RNA, 19 nt, Homo sapiens
  misc_RNA (1)...(19): siRNA sense strand
gaaugccacaauaagguau

SEQ ID NO: 1541291 - RNA, 19 nt, Homo sapiens
  misc_RNA (1)...(19): siRNA sense strand
caaggcauccccuaccaua

SEQ ID NO: 1541292 - RNA, 19 nt, Homo sapiens
  misc_RNA (1)...(19): siRNA sense strand
gauggccuauguggaagug

SEQ ID NO: 1541293 - RNA, 19 nt, Homo sapiens
  misc_RNA (1)...(19): siRNA sense strand
ggccuccuacuuagaauau

SEQ ID NO: 1541294 - RNA, 19 nt, Homo sapiens
  misc_RNA (1)...(19): siRNA sense strand
guucccagcaggcauuuau

SEQ ID NO: 1541295 - RNA, 19 nt, Homo sapiens
  misc_RNA (1)...(19): siRNA sense strand
caagggugaacauuccuau

SEQ ID NO: 1541296 - RNA, 19 nt, Homo sapiens
  misc_RNA (1)...(19): siRNA sense strand
ugaccugugugagauguuc

SEQ ID NO: 1541297 - RNA, 19 nt, Homo sapiens
  misc_RNA (1)...(19): siRNA sense strand
aaccaaagucugugcaguu

SEQ ID NO: 1541298 - RNA, 19 nt, Homo sapiens
  misc_RNA (1)...(19): siRNA sense strand
ucacucugcugugcaugga

SEQ ID NO: 1541299 - RNA, 19 nt, Homo sapiens
  misc_RNA (1)...(19): siRNA sense strand
cucccugaaugccacaaua

SEQ ID NO: 1541300 - RNA, 19 nt, Homo sapiens
  misc_RNA (1)...(19): siRNA sense strand
gauagcaucaagccugaag

SEQ ID NO: 1541301 - RNA, 19 nt, Homo sapiens
  misc_RNA (1)...(19): siRNA sense strand
aaacggaagagggcuuuau

SEQ ID NO: 1541302 - RNA, 19 nt, Homo sapiens
  misc_RNA (1)...(19): siRNA sense strand
cacaguguccucagucuca

SEQ ID NO: 1541303 - RNA, 19 nt, Homo sapiens
  misc_RNA (1)...(19): siRNA sense strand
acaggaagaguuugcugaa

SEQ ID NO: 1541304 - RNA, 19 nt, Homo sapiens
  misc_RNA (1)...(19): siRNA sense strand
ugucauagaaccaaagucu

SEQ ID NO: 1541305 - RNA, 19 nt, Homo sapiens
  misc_RNA (1)...(19): siRNA sense strand
gagccagagccagucagua

SEQ ID NO: 1541306 - RNA, 19 nt, Homo sapiens
  misc_RNA (1)...(19): siRNA sense strand
caacaacuucaaggagaug

SEQ ID NO: 1541307 - RNA, 19 nt, Homo sapiens
  misc_RNA (1)...(19): siRNA sense strand
uaaagacagcuaauuucgu

SEQ ID NO: 1541308 - RNA, 19 nt, Homo sapiens
  misc_RNA (1)...(19): siRNA sense strand
ccaccagcaucugugacaa

SEQ ID NO: 1541309 - RNA, 19 nt, Homo sapiens
  misc_RNA (1)...(19): siRNA sense strand
gcauugaggaacguuacaa

SEQ ID NO: 1541310 - RNA, 19 nt, Homo sapiens
  misc_RNA (1)...(19): siRNA sense strand
gcugaccugugugagaugu

SEQ ID NO: 1541311 - RNA, 19 nt, Homo sapiens
  misc_RNA (1)...(19): siRNA sense strand
gagagucugggaaccuuca

SEQ ID NO: 1541312 - RNA, 19 nt, Homo sapiens
  misc_RNA (1)...(19): siRNA sense strand
cuacacaauggccuuauag

SEQ ID NO: 1541313 - RNA, 19 nt, Homo sapiens
  misc_RNA (1)...(19): siRNA sense strand
ggagccaagccaguccuaa

SEQ ID NO: 1541314 - RNA, 19 nt, Homo sapiens
  misc_RNA (1)...(19): siRNA sense strand
agaagaugaagcucacuug

SEQ ID NO: 1541315 - RNA, 19 nt, Homo sapiens
  misc_RNA (1)...(19): siRNA sense strand
cagaagaugaagcucacuu

SEQ ID NO: 1541316 - RNA, 19 nt, Homo sapiens
  misc_RNA (1)...(19): siRNA sense strand
ggauugcaccgggcugguu

SEQ ID NO: 1541317 - RNA, 19 nt, Homo sapiens
  misc_RNA (1)...(19): siRNA sense strand
gagccaagccaguccuaac

SEQ ID NO: 1541318 - RNA, 19 nt, Homo sapiens
  misc_RNA (1)...(19): siRNA sense strand
ucaccuaccuguccauuga

SEQ ID NO: 1541319 - RNA, 19 nt, Homo sapiens
  misc_RNA (1)...(19): siRNA sense strand
uagcaaggaugaagaaguc

SEQ ID NO: 1541320 - RNA, 19 nt, Homo sapiens
  misc_RNA (1)...(19): siRNA sense strand
cggauacucuucugguuug

SEQ ID NO: 1541321 - RNA, 19 nt, Homo sapiens
  misc_RNA (1)...(19): siRNA sense strand
gcagagcgccaucaugauc

SEQ ID NO: 1541322 - RNA, 19 nt, Homo sapiens
  misc_RNA (1)...(19): siRNA sense strand
ggaugaagaagucaagguu

SEQ ID NO: 1541323 - RNA, 19 nt, Homo sapiens
  misc_RNA (1)...(19): siRNA sense strand
gcggauacucuucugguuu

SEQ ID NO: 1541324 - RNA, 19 nt, Homo sapiens
  misc_RNA (1)...(19): siRNA sense strand
ggagcagcuucucggacua

SEQ ID NO: 1541325 - RNA, 19 nt, Homo sapiens
  misc_RNA (1)...(19): siRNA sense strand
gcagauagcaaggaugaag

SEQ ID NO: 1541326 - RNA, 19 nt, Homo sapiens
  misc_RNA (1)...(19): siRNA sense strand
ucaagauggugcucaugug

SEQ ID NO: 1541327 - RNA, 19 nt, Homo sapiens
  misc_RNA (1)...(19): siRNA sense strand
gcaaggaugaagaagucaa

SEQ ID NO: 1541328 - RNA, 19 nt, Homo sapiens
  misc_RNA (1)...(19): siRNA sense strand
cauugacuccgcccuguuu

SEQ ID NO: 1541329 - RNA, 19 nt, Homo sapiens
  misc_RNA (1)...(19): siRNA sense strand
auacucuucugguuuggaa

SEQ ID NO: 1541330 - RNA, 19 nt, Homo sapiens
  misc_RNA (1)...(19): siRNA sense strand
ccaugcugcugaugcugaa

SEQ ID NO: 1541331 - RNA, 19 nt, Homo sapiens
  misc_RNA (1)...(19): siRNA sense strand
cugcagauagcaaggauga

SEQ ID NO: 1541332 - RNA, 19 nt, Homo sapiens
  misc_RNA (1)...(19): siRNA sense strand
ugcccuacgucccgcagua

SEQ ID NO: 1541333 - RNA, 19 nt, Homo sapiens
  misc_RNA (1)...(19): siRNA sense strand
gagggcaugagcaucaaga

SEQ ID NO: 1541334 - RNA, 19 nt, Homo sapiens
  misc_RNA (1)...(19): siRNA sense strand
cagauagcaaggaugaaga

SEQ ID NO: 1541335 - RNA, 19 nt, Homo sapiens
  misc_RNA (1)...(19): siRNA sense strand
ccacggagggcaugagcau

SEQ ID NO: 1541336 - RNA, 19 nt, Homo sapiens
  misc_RNA (1)...(19): siRNA sense strand
gcacaaagugguagaauau

SEQ ID NO: 1541337 - RNA, 19 nt, Homo sapiens
  misc_RNA (1)...(19): siRNA sense strand
gaaauccaguugcggcuuu

SEQ ID NO: 1541338 - RNA, 19 nt, Homo sapiens
  misc_RNA (1)...(19): siRNA sense strand
gcaguggucuucucuuguu

SEQ ID NO: 1541339 - RNA, 19 nt, Homo sapiens
  misc_RNA (1)...(19): siRNA sense strand
gaucuuggccaaugacaua

SEQ ID NO: 1541340 - RNA, 19 nt, Homo sapiens
  misc_RNA (1)...(19): siRNA sense strand
gaauggcuauuacacuaaa

SEQ ID NO: 1541341 - RNA, 19 nt, Homo sapiens
  misc_RNA (1)...(19): siRNA sense strand
gccaagcccugucuaggua

SEQ ID NO: 1541342 - RNA, 19 nt, Homo sapiens
  misc_RNA (1)...(19): siRNA sense strand
ugaacagacugaauccuuu

SEQ ID NO: 1541343 - RNA, 19 nt, Homo sapiens
  misc_RNA (1)...(19): siRNA sense strand
gaugaagaccuugcagaua

SEQ ID NO: 1541344 - RNA, 19 nt, Homo sapiens
  misc_RNA (1)...(19): siRNA sense strand
gcagauagucuucaucagu

SEQ ID NO: 1541345 - RNA, 19 nt, Homo sapiens
  misc_RNA (1)...(19): siRNA sense strand
ggaauggcuauuacacuaa

SEQ ID NO: 1541346 - RNA, 19 nt, Homo sapiens
  misc_RNA (1)...(19): siRNA sense strand
aggaauggcuauuacacua

SEQ ID NO: 1541347 - RNA, 19 nt, Homo sapiens
  misc_RNA (1)...(19): siRNA sense strand
acaaagugguagaauauuc

SEQ ID NO: 1541348 - RNA, 19 nt, Homo sapiens
  misc_RNA (1)...(19): siRNA sense strand
gaauugaacagacugaauc

SEQ ID NO: 1541349 - RNA, 19 nt, Homo sapiens
  misc_RNA (1)...(19): siRNA sense strand
cuauagaacucgaguacug

SEQ ID NO: 1541350 - RNA, 19 nt, Homo sapiens
  misc_RNA (1)...(19): siRNA sense strand
gaacucgaguacugauugg

SEQ ID NO: 1541351 - RNA, 19 nt, Homo sapiens
  misc_RNA (1)...(19): siRNA sense strand
gguagaauauucacuuuug

SEQ ID NO: 1541352 - RNA, 19 nt, Homo sapiens
  misc_RNA (1)...(19): siRNA sense strand
gggaguggauguggagcua

SEQ ID NO: 1541353 - RNA, 19 nt, Homo sapiens
  misc_RNA (1)...(19): siRNA sense strand
gugguagaauauucacuuu

SEQ ID NO: 1541354 - RNA, 19 nt, Homo sapiens
  misc_RNA (1)...(19): siRNA sense strand
gcuauuacacuaaauugug

SEQ ID NO: 1541355 - RNA, 19 nt, Homo sapiens
  misc_RNA (1)...(19): siRNA sense strand
aagcaguggucuucucuug

SEQ ID NO: 1541356 - RNA, 19 nt, Homo sapiens
  misc_RNA (1)...(19): siRNA sense strand
ugcacaaagugguagaaua

SEQ ID NO: 1541357 - RNA, 19 nt, Homo sapiens
  misc_RNA (1)...(19): siRNA sense strand
augaagaccuugcagauag

SEQ ID NO: 1541358 - RNA, 19 nt, Homo sapiens
  misc_RNA (1)...(19): siRNA sense strand
caaagugguagaauauuca

SEQ ID NO: 1541359 - RNA, 19 nt, Homo sapiens
  misc_RNA (1)...(19): siRNA sense strand
uaagugggaccuuguuguu

SEQ ID NO: 1541360 - RNA, 19 nt, Homo sapiens
  misc_RNA (1)...(19): siRNA sense strand
gaauuuggaacaagauaag

SEQ ID NO: 1541361 - RNA, 19 nt, Homo sapiens
  misc_RNA (1)...(19): siRNA sense strand
gacacagcauucagcauca

SEQ ID NO: 1541362 - RNA, 19 nt, Homo sapiens
  misc_RNA (1)...(19): siRNA sense strand
gaggagaacacugaaguca

SEQ ID NO: 1541363 - RNA, 19 nt, Homo sapiens
  misc_RNA (1)...(19): siRNA sense strand
gauaagugggaccuuguug

SEQ ID NO: 1541364 - RNA, 19 nt, Homo sapiens
  misc_RNA (1)...(19): siRNA sense strand
gaguggauguggagcuaca

SEQ ID NO: 1541365 - RNA, 19 nt, Homo sapiens
  misc_RNA (1)...(19): siRNA sense strand
gaacagacugaauccuuuu

SEQ ID NO: 1541366 - RNA, 19 nt, Homo sapiens
  misc_RNA (1)...(19): siRNA sense strand
cagcaucaccugcacaaag

SEQ ID NO: 1541367 - RNA, 19 nt, Homo sapiens
  misc_RNA (1)...(19): siRNA sense strand
ugaagaccuugcagauagu

SEQ ID NO: 1541368 - RNA, 19 nt, Homo sapiens
  misc_RNA (1)...(19): siRNA sense strand
gauccuuacugggcaaucu

SEQ ID NO: 1541369 - RNA, 19 nt, Homo sapiens
  misc_RNA (1)...(19): siRNA sense strand
ggaaagcacacaggaacca

SEQ ID NO: 1541370 - RNA, 19 nt, Homo sapiens
  misc_RNA (1)...(19): siRNA sense strand
gagucuagguuggaaagca

SEQ ID NO: 1541371 - RNA, 19 nt, Homo sapiens
  misc_RNA (1)...(19): siRNA sense strand
ggcgauauguuuuaugaug

SEQ ID NO: 1541372 - RNA, 19 nt, Homo sapiens
  misc_RNA (1)...(19): siRNA sense strand
gcuauugcugcuaagauga

SEQ ID NO: 1541373 - RNA, 19 nt, Homo sapiens
  misc_RNA (1)...(19): siRNA sense strand
gcgauauguuuuaugauga

SEQ ID NO: 1541374 - RNA, 19 nt, Homo sapiens
  misc_RNA (1)...(19): siRNA sense strand
ggagucuacuaggcaggaa

SEQ ID NO: 1541375 - RNA, 19 nt, Homo sapiens
  misc_RNA (1)...(19): siRNA sense strand
ugaauugaacagacugaau

SEQ ID NO: 1541376 - RNA, 19 nt, Homo sapiens
  misc_RNA (1)...(19): siRNA sense strand
agaacucgaguacugauug

SEQ ID NO: 1541377 - RNA, 19 nt, Homo sapiens
  misc_RNA (1)...(19): siRNA sense strand
ggccaagcccugucuaggu

SEQ ID NO: 1541378 - RNA, 19 nt, Homo sapiens
  misc_RNA (1)...(19): siRNA sense strand
ggaggagaacacugaaguc

SEQ ID NO: 1541379 - RNA, 19 nt, Homo sapiens
  misc_RNA (1)...(19): siRNA sense strand
caaauucuggugggagaga

SEQ ID NO: 1541380 - RNA, 19 nt, Homo sapiens
  misc_RNA (1)...(19): siRNA sense strand
ugaugaagaccuugcagau

SEQ ID NO: 1541381 - RNA, 19 nt, Homo sapiens
  misc_RNA (1)...(19): siRNA sense strand
cugaauccuuuuccuauuu

SEQ ID NO: 1541382 - RNA, 19 nt, Homo sapiens
  misc_RNA (1)...(19): siRNA sense strand
caguggucuucucuuguuu

SEQ ID NO: 1541383 - RNA, 19 nt, Homo sapiens
  misc_RNA (1)...(19): siRNA sense strand
gaggaaaaucuguauuaga

SEQ ID NO: 1541384 - RNA, 19 nt, Homo sapiens
  misc_RNA (1)...(19): siRNA sense strand
agcaucaccugcacaaagu

SEQ ID NO: 1541385 - RNA, 19 nt, Homo sapiens
  misc_RNA (1)...(19): siRNA sense strand
gcaggaauggcuauuacac

SEQ ID NO: 1541386 - RNA, 19 nt, Homo sapiens
  misc_RNA (1)...(19): siRNA sense strand
uauagaacucgaguacuga

SEQ ID NO: 1541387 - RNA, 19 nt, Homo sapiens
  misc_RNA (1)...(19): siRNA sense strand
ucaccugcacaaaguggua

SEQ ID NO: 1541388 - RNA, 19 nt, Homo sapiens
  misc_RNA (1)...(19): siRNA sense strand
uugcaggaauggcuauuac

SEQ ID NO: 1541389 - RNA, 19 nt, Homo sapiens
  misc_RNA (1)...(19): siRNA sense strand
ggaauucgguccuacuuca

SEQ ID NO: 1541390 - RNA, 19 nt, Homo sapiens
  misc_RNA (1)...(19): siRNA sense strand
caacaccuaucucuucuac

SEQ ID NO: 1541391 - RNA, 19 nt, Homo sapiens
  misc_RNA (1)...(19): siRNA sense strand
aaucaacuuuggcauguuu

SEQ ID NO: 1541392 - RNA, 19 nt, Homo sapiens
  misc_RNA (1)...(19): siRNA sense strand
ggaugggccucuucuacug

SEQ ID NO: 1541393 - RNA, 19 nt, Homo sapiens
  misc_RNA (1)...(19): siRNA sense strand
gaauagcgucuuccucuuc

SEQ ID NO: 1541394 - RNA, 19 nt, Homo sapiens
  misc_RNA (1)...(19): siRNA sense strand
gaaguacacccuccugaag

SEQ ID NO: 1541395 - RNA, 19 nt, Homo sapiens
  misc_RNA (1)...(19): siRNA sense strand
caaggaggagucccuguuu

SEQ ID NO: 1541396 - RNA, 19 nt, Homo sapiens
  misc_RNA (1)...(19): siRNA sense strand
gacaagagcagcugugagu

SEQ ID NO: 1541397 - RNA, 19 nt, Homo sapiens
  misc_RNA (1)...(19): siRNA sense strand
ggaagcagccaccaucaag

SEQ ID NO: 1541398 - RNA, 19 nt, Homo sapiens
  misc_RNA (1)...(19): siRNA sense strand
acaaucaacuuuggcaugu

SEQ ID NO: 1541399 - RNA, 19 nt, Homo sapiens
  misc_RNA (1)...(19): siRNA sense strand
gaagcagccaccaucaaga

SEQ ID NO: 1541400 - RNA, 19 nt, Homo sapiens
  misc_RNA (1)...(19): siRNA sense strand
ugaauagcgucuuccucuu

SEQ ID NO: 1541401 - RNA, 19 nt, Homo sapiens
  misc_RNA (1)...(19): siRNA sense strand
ggcagggccuucaccaaca

SEQ ID NO: 1541402 - RNA, 19 nt, Homo sapiens
  misc_RNA (1)...(19): siRNA sense strand
caccaacaccuaucucuuc

SEQ ID NO: 1541403 - RNA, 19 nt, Homo sapiens
  misc_RNA (1)...(19): siRNA sense strand
gccaaggucuucuccucau

SEQ ID NO: 1541404 - RNA, 19 nt, Homo sapiens
  misc_RNA (1)...(19): siRNA sense strand
uguacaagcugaguaucuu

SEQ ID NO: 1541405 - RNA, 19 nt, Homo sapiens
  misc_RNA (1)...(19): siRNA sense strand
gagacaagagcagcuguga

SEQ ID NO: 1541406 - RNA, 19 nt, Homo sapiens
  misc_RNA (1)...(19): siRNA sense strand
ggcagacggucaccuggau

SEQ ID NO: 1541407 - RNA, 19 nt, Homo sapiens
  misc_RNA (1)...(19): siRNA sense strand
aguacacccuccugaagaa

SEQ ID NO: 1541408 - RNA, 19 nt, Homo sapiens
  misc_RNA (1)...(19): siRNA sense strand
ccaaggucuucuccucaug

SEQ ID NO: 1541409 - RNA, 19 nt, Homo sapiens
  misc_RNA (1)...(19): siRNA sense strand
gaagaacuccagggcaucu

SEQ ID NO: 1541410 - RNA, 19 nt, Homo sapiens
  misc_RNA (1)...(19): siRNA sense strand
caacguuugugacuaucag

SEQ ID NO: 1541411 - RNA, 19 nt, Homo sapiens
  misc_RNA (1)...(19): siRNA sense strand
gcagcuccguguacagcau

SEQ ID NO: 1541412 - RNA, 19 nt, Homo sapiens
  misc_RNA (1)...(19): siRNA sense strand
uguggcagguucaggagaa

SEQ ID NO: 1541413 - RNA, 19 nt, Homo sapiens
  misc_RNA (1)...(19): siRNA sense strand
ucaagaagcaugagaucag

SEQ ID NO: 1541414 - RNA, 19 nt, Homo sapiens
  misc_RNA (1)...(19): siRNA sense strand
aagcagccaccaucaagaa

SEQ ID NO: 1541415 - RNA, 19 nt, Homo sapiens
  misc_RNA (1)...(19): siRNA sense strand
caaucaacuuuggcauguu

SEQ ID NO: 1541416 - RNA, 19 nt, Homo sapiens
  misc_RNA (1)...(19): siRNA sense strand
agaaguacacccuccugaa

SEQ ID NO: 1541417 - RNA, 19 nt, Homo sapiens
  misc_RNA (1)...(19): siRNA sense strand
gagaacuacccucccaaca

SEQ ID NO: 1541418 - RNA, 19 nt, Homo sapiens
  misc_RNA (1)...(19): siRNA sense strand
ucaucgcccuggucaacuu

SEQ ID NO: 1541419 - RNA, 19 nt, Homo sapiens
  misc_RNA (1)...(19): siRNA sense strand
gagguuccacaaucaacuu

SEQ ID NO: 1541420 - RNA, 19 nt, Homo sapiens
  misc_RNA (1)...(19): siRNA sense strand
gaucagcaacgaguucaag

SEQ ID NO: 1541421 - RNA, 19 nt, Homo sapiens
  misc_RNA (1)...(19): siRNA sense strand
guuccacaaucaacuuugg

SEQ ID NO: 1541422 - RNA, 19 nt, Homo sapiens
  misc_RNA (1)...(19): siRNA sense strand
cagcuccaccuucuucuuc

SEQ ID NO: 1541423 - RNA, 19 nt, Homo sapiens
  misc_RNA (1)...(19): siRNA sense strand
guacaagcugaguaucuuc

SEQ ID NO: 1541424 - RNA, 19 nt, Homo sapiens
  misc_RNA (1)...(19): siRNA sense strand
cagccaccaucaagaagca

SEQ ID NO: 1541425 - RNA, 19 nt, Homo sapiens
  misc_RNA (1)...(19): siRNA sense strand
cuucugggcuaccaaguac

SEQ ID NO: 1541426 - RNA, 19 nt, Homo sapiens
  misc_RNA (1)...(19): siRNA sense strand
cagaccauacugugcauug

SEQ ID NO: 1541427 - RNA, 19 nt, Homo sapiens
  misc_RNA (1)...(19): siRNA sense strand
acaaggaggagucccuguu

SEQ ID NO: 1541428 - RNA, 19 nt, Homo sapiens
  misc_RNA (1)...(19): siRNA sense strand
caucaagaagcaugagauc

SEQ ID NO: 1541429 - RNA, 19 nt, Homo sapiens
  misc_RNA (1)...(19): siRNA sense strand
uuccucaccuucuacauca

SEQ ID NO: 1541430 - RNA, 19 nt, Homo sapiens
  misc_RNA (1)...(19): siRNA sense strand
aaggaggagucccuguuuc

SEQ ID NO: 1541431 - RNA, 19 nt, Homo sapiens
  misc_RNA (1)...(19): siRNA sense strand
guacucacaggacaacaag

SEQ ID NO: 1541432 - RNA, 19 nt, Homo sapiens
  misc_RNA (1)...(19): siRNA sense strand
ggccaucagcgccaucuuc

SEQ ID NO: 1541433 - RNA, 19 nt, Homo sapiens
  misc_RNA (1)...(19): siRNA sense strand
ccaaguacucacaggacaa

SEQ ID NO: 1541434 - RNA, 19 nt, Homo sapiens
  misc_RNA (1)...(19): siRNA sense strand
caagcugaguaucuucaac

SEQ ID NO: 1541435 - RNA, 19 nt, Homo sapiens
  misc_RNA (1)...(19): siRNA sense strand
uaucagugcugggagaacu

SEQ ID NO: 1541436 - RNA, 19 nt, Homo sapiens
  misc_RNA (1)...(19): siRNA sense strand
ggucaucgcccuggucaac

SEQ ID NO: 1541437 - RNA, 19 nt, Homo sapiens
  misc_RNA (1)...(19): siRNA sense strand
uguuucugcugcuccagua

SEQ ID NO: 1541438 - RNA, 19 nt, Homo sapiens
  misc_RNA (1)...(19): siRNA sense strand
gcagggccuucaccaacac

SEQ ID NO: 1541439 - RNA, 19 nt, Homo sapiens
  misc_RNA (1)...(19): siRNA sense strand
ccucuucggcacaggaauu

SEQ ID NO: 1541440 - RNA, 19 nt, Homo sapiens
  misc_RNA (1)...(19): siRNA sense strand
guucugggccuggcuggaa

SEQ ID NO: 1541441 - RNA, 19 nt, Homo sapiens
  misc_RNA (1)...(19): siRNA sense strand
ggaggagucccuguuucug

SEQ ID NO: 1541442 - RNA, 19 nt, Homo sapiens
  misc_RNA (1)...(19): siRNA sense strand
gagaucagcaacgaguuca

SEQ ID NO: 1541443 - RNA, 19 nt, Homo sapiens
  misc_RNA (1)...(19): siRNA sense strand
ugagaucagcaacgaguuc

SEQ ID NO: 1541444 - RNA, 19 nt, Homo sapiens
  misc_RNA (1)...(19): siRNA sense strand
gaaucucacucaggcaugu

SEQ ID NO: 1541445 - RNA, 19 nt, Homo sapiens
  misc_RNA (1)...(19): siRNA sense strand
agagaacccuggcugaauc

SEQ ID NO: 1541446 - RNA, 19 nt, Homo sapiens
  misc_RNA (1)...(19): siRNA sense strand
gugcuaagcuacacagacu

SEQ ID NO: 1541447 - RNA, 19 nt, Homo sapiens
  misc_RNA (1)...(19): siRNA sense strand
uacacagacuggauucaga

SEQ ID NO: 1541448 - RNA, 19 nt, Homo sapiens
  misc_RNA (1)...(19): siRNA sense strand
gaacccuggcugaaucuca

SEQ ID NO: 1541449 - RNA, 19 nt, Homo sapiens
  misc_RNA (1)...(19): siRNA sense strand
ccaagacacccaggaagga

SEQ ID NO: 1541450 - RNA, 19 nt, Homo sapiens
  misc_RNA (1)...(19): siRNA sense strand
cagacuggauucagagaac

SEQ ID NO: 1541451 - RNA, 19 nt, Homo sapiens
  misc_RNA (1)...(19): siRNA sense strand
cagagaacccuggcugaau

SEQ ID NO: 1541452 - RNA, 19 nt, Homo sapiens
  misc_RNA (1)...(19): siRNA sense strand
acccagugcugcugcuuga

SEQ ID NO: 1541453 - RNA, 19 nt, Homo sapiens
  misc_RNA (1)...(19): siRNA sense strand
cuugagcuguugaccguau

SEQ ID NO: 1541454 - RNA, 19 nt, Homo sapiens
  misc_RNA (1)...(19): siRNA sense strand
gcaaugaccuguguguuga

SEQ ID NO: 1541455 - RNA, 19 nt, Homo sapiens
  misc_RNA (1)...(19): siRNA sense strand
uaacagaagccaaacaaga

SEQ ID NO: 1541456 - RNA, 19 nt, Homo sapiens
  misc_RNA (1)...(19): siRNA sense strand
gcaaccaugugcaaauuca

SEQ ID NO: 1541457 - RNA, 19 nt, Homo sapiens
  misc_RNA (1)...(19): siRNA sense strand
ggaaauggagcgaaggaaa

SEQ ID NO: 1541458 - RNA, 19 nt, Homo sapiens
  misc_RNA (1)...(19): siRNA sense strand
caaacaagaggauaaauuc

SEQ ID NO: 1541459 - RNA, 19 nt, Homo sapiens
  misc_RNA (1)...(19): siRNA sense strand
ccaaacaagaggauaaauu

SEQ ID NO: 1541460 - RNA, 19 nt, Homo sapiens
  misc_RNA (1)...(19): siRNA sense strand
gcucuuggcuuggaaguuc

SEQ ID NO: 1541461 - RNA, 19 nt, Homo sapiens
  misc_RNA (1)...(19): siRNA sense strand
gcaacuacagugaagauga

SEQ ID NO: 1541462 - RNA, 19 nt, Homo sapiens
  misc_RNA (1)...(19): siRNA sense strand
aaggaucucuaccgguuua

SEQ ID NO: 1541463 - RNA, 19 nt, Homo sapiens
  misc_RNA (1)...(19): siRNA sense strand
caacuacagugaagaugag

SEQ ID NO: 1541464 - RNA, 19 nt, Homo sapiens
  misc_RNA (1)...(19): siRNA sense strand
gcaaagauuggaagaacug

SEQ ID NO: 1541465 - RNA, 19 nt, Homo sapiens
  misc_RNA (1)...(19): siRNA sense strand
uaaacuuccuaacagagaa

SEQ ID NO: 1541466 - RNA, 19 nt, Homo sapiens
  misc_RNA (1)...(19): siRNA sense strand
caagccagguggagauauc

SEQ ID NO: 1541467 - RNA, 19 nt, Homo sapiens
  misc_RNA (1)...(19): siRNA sense strand
ggaccaauggcuaaacuuc

SEQ ID NO: 1541468 - RNA, 19 nt, Homo sapiens
  misc_RNA (1)...(19): siRNA sense strand
ggagggaguccaaguccaa

SEQ ID NO: 1541469 - RNA, 19 nt, Homo sapiens
  misc_RNA (1)...(19): siRNA sense strand
gaagggagaggugcacuca

SEQ ID NO: 1541470 - RNA, 19 nt, Homo sapiens
  misc_RNA (1)...(19): siRNA sense strand
acaagaggauaaauucaag

SEQ ID NO: 1541471 - RNA, 19 nt, Homo sapiens
  misc_RNA (1)...(19): siRNA sense strand
gcgggaagaugcaauuuug

SEQ ID NO: 1541472 - RNA, 19 nt, Homo sapiens
  misc_RNA (1)...(19): siRNA sense strand
gaaauggagcgaaggaaaa

SEQ ID NO: 1541473 - RNA, 19 nt, Homo sapiens
  misc_RNA (1)...(19): siRNA sense strand
guggagauauccucgucaa

SEQ ID NO: 1541474 - RNA, 19 nt, Homo sapiens
  misc_RNA (1)...(19): siRNA sense strand
acgguucccuagccucuua

SEQ ID NO: 1541475 - RNA, 19 nt, Homo sapiens
  misc_RNA (1)...(19): siRNA sense strand
uggcuaaacuuccuaacag

SEQ ID NO: 1541476 - RNA, 19 nt, Homo sapiens
  misc_RNA (1)...(19): siRNA sense strand
ggcuaaacuuccuaacaga

SEQ ID NO: 1541477 - RNA, 19 nt, Homo sapiens
  misc_RNA (1)...(19): siRNA sense strand
gccagugugucaccaagug

SEQ ID NO: 1541478 - RNA, 19 nt, Homo sapiens
  misc_RNA (1)...(19): siRNA sense strand
agaacaauccuccgguauu

SEQ ID NO: 1541479 - RNA, 19 nt, Homo sapiens
  misc_RNA (1)...(19): siRNA sense strand
cgguuuacauuucaguuug

SEQ ID NO: 1541480 - RNA, 19 nt, Homo sapiens
  misc_RNA (1)...(19): siRNA sense strand
gcaaauucaccaggaagga

SEQ ID NO: 1541481 - RNA, 19 nt, Homo sapiens
  misc_RNA (1)...(19): siRNA sense strand
ccucuuaacagaagccaaa

SEQ ID NO: 1541482 - RNA, 19 nt, Homo sapiens
  misc_RNA (1)...(19): siRNA sense strand
agacagcauugacggaauc

SEQ ID NO: 1541483 - RNA, 19 nt, Homo sapiens
  misc_RNA (1)...(19): siRNA sense strand
ucccuagccucuuaacaga

SEQ ID NO: 1541484 - RNA, 19 nt, Homo sapiens
  misc_RNA (1)...(19): siRNA sense strand
gaagccaaacaagaggaua

SEQ ID NO: 1541485 - RNA, 19 nt, Homo sapiens
  misc_RNA (1)...(19): siRNA sense strand
gucacugcaucgggaaaua

SEQ ID NO: 1541486 - RNA, 19 nt, Homo sapiens
  misc_RNA (1)...(19): siRNA sense strand
gucccgaggagcagacuua

SEQ ID NO: 1541487 - RNA, 19 nt, Homo sapiens
  misc_RNA (1)...(19): siRNA sense strand
cuaaacuuccuaacagaga

SEQ ID NO: 1541488 - RNA, 19 nt, Homo sapiens
  misc_RNA (1)...(19): siRNA sense strand
gagcgggaagaugcaauuu

SEQ ID NO: 1541489 - RNA, 19 nt, Homo sapiens
  misc_RNA (1)...(19): siRNA sense strand
uguggaaacuagucuuuac

SEQ ID NO: 1541490 - RNA, 19 nt, Homo sapiens
  misc_RNA (1)...(19): siRNA sense strand
uaaauucaaggaucucuac

SEQ ID NO: 1541491 - RNA, 19 nt, Homo sapiens
  misc_RNA (1)...(19): siRNA sense strand
ccuagccucuuaacagaag

SEQ ID NO: 1541492 - RNA, 19 nt, Homo sapiens
  misc_RNA (1)...(19): siRNA sense strand
cagcauugacggaaucugu

SEQ ID NO: 1541493 - RNA, 19 nt, Homo sapiens
  misc_RNA (1)...(19): siRNA sense strand
ugcaaugaccuguguguug

SEQ ID NO: 1541494 - RNA, 19 nt, Homo sapiens
  misc_RNA (1)...(19): siRNA sense strand
caucgacccugggcagcaa

SEQ ID NO: 1541495 - RNA, 19 nt, Homo sapiens
  misc_RNA (1)...(19): siRNA sense strand
gugcugcucuuggcuugga

SEQ ID NO: 1541496 - RNA, 19 nt, Homo sapiens
  misc_RNA (1)...(19): siRNA sense strand
aauaagugcagacagcauu

SEQ ID NO: 1541497 - RNA, 19 nt, Homo sapiens
  misc_RNA (1)...(19): siRNA sense strand
cagacagcauugacggaau

SEQ ID NO: 1541498 - RNA, 19 nt, Homo sapiens
  misc_RNA (1)...(19): siRNA sense strand
aagccaaacaagaggauaa

SEQ ID NO: 1541499 - RNA, 19 nt, Homo sapiens
  misc_RNA (1)...(19): siRNA sense strand
gcaucucccgggacacuug

SEQ ID NO: 1541500 - RNA, 19 nt, Homo sapiens
  misc_RNA (1)...(19): siRNA sense strand
ggccuggacucugaagaag

SEQ ID NO: 1541501 - RNA, 19 nt, Homo sapiens
  misc_RNA (1)...(19): siRNA sense strand
cagcaacuacagugaagau

SEQ ID NO: 1541502 - RNA, 19 nt, Homo sapiens
  misc_RNA (1)...(19): siRNA sense strand
aggauaaauucaaggaucu

SEQ ID NO: 1541503 - RNA, 19 nt, Homo sapiens
  misc_RNA (1)...(19): siRNA sense strand
cgggacacuuggaacaugu

SEQ ID NO: 1541504 - RNA, 19 nt, Homo sapiens
  misc_RNA (1)...(19): siRNA sense strand
cagaacaauccuccgguau

SEQ ID NO: 1541505 - RNA, 19 nt, Homo sapiens
  misc_RNA (1)...(19): siRNA sense strand
aguuuggccuggacucuga

SEQ ID NO: 1541506 - RNA, 19 nt, Homo sapiens
  misc_RNA (1)...(19): siRNA sense strand
ucucuaccgguuuacauuu

SEQ ID NO: 1541507 - RNA, 19 nt, Homo sapiens
  misc_RNA (1)...(19): siRNA sense strand
gaucucuaccgguuuacau

SEQ ID NO: 1541508 - RNA, 19 nt, Homo sapiens
  misc_RNA (1)...(19): siRNA sense strand
caaggaucucuaccgguuu

SEQ ID NO: 1541509 - RNA, 19 nt, Homo sapiens
  misc_RNA (1)...(19): siRNA sense strand
ggaaggcauggagcgcuuu

SEQ ID NO: 1541510 - RNA, 19 nt, Homo sapiens
  misc_RNA (1)...(19): siRNA sense strand
caauggcuaaacuuccuaa

SEQ ID NO: 1541511 - RNA, 19 nt, Homo sapiens
  misc_RNA (1)...(19): siRNA sense strand
ccaaugccgaggagucuuc

SEQ ID NO: 1541512 - RNA, 19 nt, Homo sapiens
  misc_RNA (1)...(19): siRNA sense strand
gguuuacauuucaguuugg

SEQ ID NO: 1541513 - RNA, 19 nt, Homo sapiens
  misc_RNA (1)...(19): siRNA sense strand
cuuaacagaagccaaacaa

SEQ ID NO: 1541514 - RNA, 19 nt, Homo sapiens
  misc_RNA (1)...(19): siRNA sense strand
ccaacguccucgggagaug

SEQ ID NO: 1541515 - RNA, 19 nt, Homo sapiens
  misc_RNA (1)...(19): siRNA sense strand
uugcaaagauuggaagaac

SEQ ID NO: 1541516 - RNA, 19 nt, Homo sapiens
  misc_RNA (1)...(19): siRNA sense strand
gauggcugcaaagcaauaa

SEQ ID NO: 1541517 - RNA, 19 nt, Homo sapiens
  misc_RNA (1)...(19): siRNA sense strand
ugauggcugcaaagcaaua

SEQ ID NO: 1541518 - RNA, 19 nt, Homo sapiens
  misc_RNA (1)...(19): siRNA sense strand
ggcaagccagguggagaua

SEQ ID NO: 1541519 - RNA, 19 nt, Homo sapiens
  misc_RNA (1)...(19): siRNA sense strand
caagucucuuugacaccuu

SEQ ID NO: 1541520 - RNA, 19 nt, Homo sapiens
  misc_RNA (1)...(19): siRNA sense strand
ccucagcaacuacagugaa

SEQ ID NO: 1541521 - RNA, 19 nt, Homo sapiens
  misc_RNA (1)...(19): siRNA sense strand
ccgggacacuuggaacaug

SEQ ID NO: 1541522 - RNA, 19 nt, Homo sapiens
  misc_RNA (1)...(19): siRNA sense strand
ccgguuuacauuucaguuu

SEQ ID NO: 1541523 - RNA, 19 nt, Homo sapiens
  misc_RNA (1)...(19): siRNA sense strand
gcaagccagguggagauau

SEQ ID NO: 1541524 - RNA, 19 nt, Homo sapiens
  misc_RNA (1)...(19): siRNA sense strand
gcaaagccaucaucauuaa

SEQ ID NO: 1541525 - RNA, 19 nt, Homo sapiens
  misc_RNA (1)...(19): siRNA sense strand
ggacuuagaugagcuuaau

SEQ ID NO: 1541526 - RNA, 19 nt, Homo sapiens
  misc_RNA (1)...(19): siRNA sense strand
gaacaaacucauccaagaa

SEQ ID NO: 1541527 - RNA, 19 nt, Homo sapiens
  misc_RNA (1)...(19): siRNA sense strand
gaaagucaaucucugucuu

SEQ ID NO: 1541528 - RNA, 19 nt, Homo sapiens
  misc_RNA (1)...(19): siRNA sense strand
ugaacaaacucauccaaga

SEQ ID NO: 1541529 - RNA, 19 nt, Homo sapiens
  misc_RNA (1)...(19): siRNA sense strand
ggagcgaggugcaguugaa

SEQ ID NO: 1541530 - RNA, 19 nt, Homo sapiens
  misc_RNA (1)...(19): siRNA sense strand
gagcucggguggaggaauu

SEQ ID NO: 1541531 - RNA, 19 nt, Homo sapiens
  misc_RNA (1)...(19): siRNA sense strand
gaaagacugcugcaccauu

SEQ ID NO: 1541532 - RNA, 19 nt, Homo sapiens
  misc_RNA (1)...(19): siRNA sense strand
ggaauacgacgaccagaga

SEQ ID NO: 1541533 - RNA, 19 nt, Homo sapiens
  misc_RNA (1)...(19): siRNA sense strand
guagucgcauguuguauga

SEQ ID NO: 1541534 - RNA, 19 nt, Homo sapiens
  misc_RNA (1)...(19): siRNA sense strand
gacaaucaguaaauggaaa

SEQ ID NO: 1541535 - RNA, 19 nt, Homo sapiens
  misc_RNA (1)...(19): siRNA sense strand
agagagcgcuggagauuca

SEQ ID NO: 1541536 - RNA, 19 nt, Homo sapiens
  misc_RNA (1)...(19): siRNA sense strand
ggaguagucgcauguugua

SEQ ID NO: 1541537 - RNA, 19 nt, Homo sapiens
  misc_RNA (1)...(19): siRNA sense strand
gcaacaugcuggaacaucu

SEQ ID NO: 1541538 - RNA, 19 nt, Homo sapiens
  misc_RNA (1)...(19): siRNA sense strand
guaagaaggacaaugaaug

SEQ ID NO: 1541539 - RNA, 19 nt, Homo sapiens
  misc_RNA (1)...(19): siRNA sense strand
gaagauuacugaggaagag

SEQ ID NO: 1541540 - RNA, 19 nt, Homo sapiens
  misc_RNA (1)...(19): siRNA sense strand
aaagacugcugcaccauug

SEQ ID NO: 1541541 - RNA, 19 nt, Homo sapiens
  misc_RNA (1)...(19): siRNA sense strand
caaacucauccaagaauuu

SEQ ID NO: 1541542 - RNA, 19 nt, Homo sapiens
  misc_RNA (1)...(19): siRNA sense strand
gcaccgccauugagcaugu

SEQ ID NO: 1541543 - RNA, 19 nt, Homo sapiens
  misc_RNA (1)...(19): siRNA sense strand
agccaaggauuucaucuuu

SEQ ID NO: 1541544 - RNA, 19 nt, Homo sapiens
  misc_RNA (1)...(19): siRNA sense strand
uaucagcauuguccuauca

SEQ ID NO: 1541545 - RNA, 19 nt, Homo sapiens
  misc_RNA (1)...(19): siRNA sense strand
gucaaucucugucuuuauc

SEQ ID NO: 1541546 - RNA, 19 nt, Homo sapiens
  misc_RNA (1)...(19): siRNA sense strand
agucgcauguuguaugaua

SEQ ID NO: 1541547 - RNA, 19 nt, Homo sapiens
  misc_RNA (1)...(19): siRNA sense strand
ggacaaucaguaaauggaa

SEQ ID NO: 1541548 - RNA, 19 nt, Homo sapiens
  misc_RNA (1)...(19): siRNA sense strand
gcucauggagaaccacuuu

SEQ ID NO: 1541549 - RNA, 19 nt, Homo sapiens
  misc_RNA (1)...(19): siRNA sense strand
gaauggcggcuguccuuug

SEQ ID NO: 1541550 - RNA, 19 nt, Homo sapiens
  misc_RNA (1)...(19): siRNA sense strand
cugcaaagccaucaucauu

SEQ ID NO: 1541551 - RNA, 19 nt, Homo sapiens
  misc_RNA (1)...(19): siRNA sense strand
acaaacucauccaagaauu

SEQ ID NO: 1541552 - RNA, 19 nt, Homo sapiens
  misc_RNA (1)...(19): siRNA sense strand
ggaagauuacugaggaaga

SEQ ID NO: 1541553 - RNA, 19 nt, Homo sapiens
  misc_RNA (1)...(19): siRNA sense strand
gcauuguccuaucagaaau

SEQ ID NO: 1541554 - RNA, 19 nt, Homo sapiens
  misc_RNA (1)...(19): siRNA sense strand
ugacuaugauauggacuuu

SEQ ID NO: 1541555 - RNA, 19 nt, Homo sapiens
  misc_RNA (1)...(19): siRNA sense strand
gaggugcaguugaagaagu

SEQ ID NO: 1541556 - RNA, 19 nt, Homo sapiens
  misc_RNA (1)...(19): siRNA sense strand
guaaucagccugugacacu

SEQ ID NO: 1541557 - RNA, 19 nt, Homo sapiens
  misc_RNA (1)...(19): siRNA sense strand
ugcaaagccaucaucauua

SEQ ID NO: 1541558 - RNA, 19 nt, Homo sapiens
  misc_RNA (1)...(19): siRNA sense strand
gggaugggaagauuacuga

SEQ ID NO: 1541559 - RNA, 19 nt, Homo sapiens
  misc_RNA (1)...(19): siRNA sense strand
ggaauugaacaaacucauc

SEQ ID NO: 1541560 - RNA, 19 nt, Homo sapiens
  misc_RNA (1)...(19): siRNA sense strand
gccuucggcucuuugauga

SEQ ID NO: 1541561 - RNA, 19 nt, Homo sapiens
  misc_RNA (1)...(19): siRNA sense strand
uaagaaggacaaugaaugg

SEQ ID NO: 1541562 - RNA, 19 nt, Homo sapiens
  misc_RNA (1)...(19): siRNA sense strand
gaccaucaucuccaucauu

SEQ ID NO: 1541563 - RNA, 19 nt, Homo sapiens
  misc_RNA (1)...(19): siRNA sense strand
ugcaaaagcuggaccaaaa

SEQ ID NO: 1541564 - RNA, 19 nt, Homo sapiens
  misc_RNA (1)...(19): siRNA sense strand
gauauugucccugugguau

SEQ ID NO: 1541565 - RNA, 19 nt, Homo sapiens
  misc_RNA (1)...(19): siRNA sense strand
ccaaaguggcugacugguu

SEQ ID NO: 1541566 - RNA, 19 nt, Homo sapiens
  misc_RNA (1)...(19): siRNA sense strand
cccggaagcuguccucugu

SEQ ID NO: 1541567 - RNA, 19 nt, Homo sapiens
  misc_RNA (1)...(19): siRNA sense strand
caaucucugucuuuaucaa

SEQ ID NO: 1541568 - RNA, 19 nt, Homo sapiens
  misc_RNA (1)...(19): siRNA sense strand
aagucaaucucugucuuua

SEQ ID NO: 1541569 - RNA, 19 nt, Homo sapiens
  misc_RNA (1)...(19): siRNA sense strand
ugacugagaacccgggaaa

SEQ ID NO: 1541570 - RNA, 19 nt, Homo sapiens
  misc_RNA (1)...(19): siRNA sense strand
gcgaggugcaguugaagaa

SEQ ID NO: 1541571 - RNA, 19 nt, Homo sapiens
  misc_RNA (1)...(19): siRNA sense strand
gguaagaaggacaaugaau

SEQ ID NO: 1541572 - RNA, 19 nt, Homo sapiens
  misc_RNA (1)...(19): siRNA sense strand
ugcagcagcuagugacuga

SEQ ID NO: 1541573 - RNA, 19 nt, Homo sapiens
  misc_RNA (1)...(19): siRNA sense strand
agacuaugcagcccacuuu

SEQ ID NO: 1541574 - RNA, 19 nt, Homo sapiens
  misc_RNA (1)...(19): siRNA sense strand
caagcugcaugaccguaau

SEQ ID NO: 1541575 - RNA, 19 nt, Homo sapiens
  misc_RNA (1)...(19): siRNA sense strand
uaucaauccugacgauguc

SEQ ID NO: 1541576 - RNA, 19 nt, Homo sapiens
  misc_RNA (1)...(19): siRNA sense strand
gcugcaccauuguagauca

SEQ ID NO: 1541577 - RNA, 19 nt, Homo sapiens
  misc_RNA (1)...(19): siRNA sense strand
cuaugacucuaucagcauu

SEQ ID NO: 1541578 - RNA, 19 nt, Homo sapiens
  misc_RNA (1)...(19): siRNA sense strand
guacugacuaugauaugga

SEQ ID NO: 1541579 - RNA, 19 nt, Homo sapiens
  misc_RNA (1)...(19): siRNA sense strand
gcacuugcgcaccgccauu

SEQ ID NO: 1541580 - RNA, 19 nt, Homo sapiens
  misc_RNA (1)...(19): siRNA sense strand
ucacacagccaaggauuuc

SEQ ID NO: 1541581 - RNA, 19 nt, Homo sapiens
  misc_RNA (1)...(19): siRNA sense strand
cauguuguaugauauuguc

SEQ ID NO: 1541582 - RNA, 19 nt, Homo sapiens
  misc_RNA (1)...(19): siRNA sense strand
gggacaaucaguaaaugga

SEQ ID NO: 1541583 - RNA, 19 nt, Homo sapiens
  misc_RNA (1)...(19): siRNA sense strand
acuaugauauggacuuuac

SEQ ID NO: 1541584 - RNA, 19 nt, Homo sapiens
  misc_RNA (1)...(19): siRNA sense strand
ccaaggauuucaucuuuuc

SEQ ID NO: 1541585 - RNA, 19 nt, Homo sapiens
  misc_RNA (1)...(19): siRNA sense strand
ugguggaccuggacuuaga

SEQ ID NO: 1541586 - RNA, 19 nt, Homo sapiens
  misc_RNA (1)...(19): siRNA sense strand
caaagccaucaucauuaaa

SEQ ID NO: 1541587 - RNA, 19 nt, Homo sapiens
  misc_RNA (1)...(19): siRNA sense strand
gggaguagucgcauguugu

SEQ ID NO: 1541588 - RNA, 19 nt, Homo sapiens
  misc_RNA (1)...(19): siRNA sense strand
ggaccaucaucuccaucau

SEQ ID NO: 1541589 - RNA, 19 nt, Homo sapiens
  misc_RNA (1)...(19): siRNA sense strand
ggaccuggacuuagaugag

SEQ ID NO: 1541590 - RNA, 19 nt, Homo sapiens
  misc_RNA (1)...(19): siRNA sense strand
uccaguggcuaaugaauac

SEQ ID NO: 1541591 - RNA, 19 nt, Homo sapiens
  misc_RNA (1)...(19): siRNA sense strand
ucccugggcuguaacaaca

SEQ ID NO: 1541592 - RNA, 19 nt, Homo sapiens
  misc_RNA (1)...(19): siRNA sense strand
ggaaagucaaucucugucu

SEQ ID NO: 1541593 - RNA, 19 nt, Homo sapiens
  misc_RNA (1)...(19): siRNA sense strand
gguacugacuaugauaugg

SEQ ID NO: 1541594 - RNA, 19 nt, Homo sapiens
  misc_RNA (1)...(19): siRNA sense strand
accaucaucuccaucauuc

SEQ ID NO: 1541595 - RNA, 19 nt, Homo sapiens
  misc_RNA (1)...(19): siRNA sense strand
ugagaacccgggaaaguca

SEQ ID NO: 1541596 - RNA, 19 nt, Homo sapiens
  misc_RNA (1)...(19): siRNA sense strand
gaccguaaucagccuguga

SEQ ID NO: 1541597 - RNA, 19 nt, Homo sapiens
  misc_RNA (1)...(19): siRNA sense strand
guagggaguagucgcaugu

SEQ ID NO: 1541598 - RNA, 19 nt, Homo sapiens
  misc_RNA (1)...(19): siRNA sense strand
guggaggaauugaacaaac

SEQ ID NO: 1541599 - RNA, 19 nt, Homo sapiens
  misc_RNA (1)...(19): siRNA sense strand
cuucucaccuaccaaagug

SEQ ID NO: 1541600 - RNA, 19 nt, Homo sapiens
  misc_RNA (1)...(19): siRNA sense strand
uccaagaauuuacgaagca

SEQ ID NO: 1541601 - RNA, 19 nt, Homo sapiens
  misc_RNA (1)...(19): siRNA sense strand
ucaagcugcaugaccguaa

SEQ ID NO: 1541602 - RNA, 19 nt, Homo sapiens
  misc_RNA (1)...(19): siRNA sense strand
aacacugucuggucaacaa

SEQ ID NO: 1541603 - RNA, 19 nt, Homo sapiens
  misc_RNA (1)...(19): siRNA sense strand
gcaacacugucuggucaac

SEQ ID NO: 1541604 - RNA, 19 nt, Homo sapiens
  misc_RNA (1)...(19): siRNA sense strand
cagcauuguccuaucagaa

SEQ ID NO: 1541605 - RNA, 19 nt, Homo sapiens
  misc_RNA (1)...(19): siRNA sense strand
caccaacuacuucuucuca

SEQ ID NO: 1541606 - RNA, 19 nt, Homo sapiens
  misc_RNA (1)...(19): siRNA sense strand
gcaccauuguagaucacau

SEQ ID NO: 1541607 - RNA, 19 nt, Homo sapiens
  misc_RNA (1)...(19): siRNA sense strand
cagcagcuagugacugaga

SEQ ID NO: 1541608 - RNA, 19 nt, Homo sapiens
  misc_RNA (1)...(19): siRNA sense strand
gagcuccagaggcgaggua

SEQ ID NO: 1541609 - RNA, 19 nt, Homo sapiens
  misc_RNA (1)...(19): siRNA sense strand
aggguaagaaggacaauga

SEQ ID NO: 1541610 - RNA, 19 nt, Homo sapiens
  misc_RNA (1)...(19): siRNA sense strand
uggaggaauugaacaaacu

SEQ ID NO: 1541611 - RNA, 19 nt, Homo sapiens
  misc_RNA (1)...(19): siRNA sense strand
caucaucuccaucauucug

SEQ ID NO: 1541612 - RNA, 19 nt, Homo sapiens
  misc_RNA (1)...(19): siRNA sense strand
guggcugacugguucuaug

SEQ ID NO: 1541613 - RNA, 19 nt, Homo sapiens
  misc_RNA (1)...(19): siRNA sense strand
cgugguggaccuggacuua

SEQ ID NO: 1541614 - RNA, 19 nt, Homo sapiens
  misc_RNA (1)...(19): siRNA sense strand
gccaaggauuucaucuuuu

SEQ ID NO: 1541615 - RNA, 19 nt, Homo sapiens
  misc_RNA (1)...(19): siRNA sense strand
agacugcugcaccauugua

SEQ ID NO: 1541616 - RNA, 19 nt, Homo sapiens
  misc_RNA (1)...(19): siRNA sense strand
gaugaggggacaaucagua

SEQ ID NO: 1541617 - RNA, 19 nt, Homo sapiens
  misc_RNA (1)...(19): siRNA sense strand
acagacuuccugccaacua

SEQ ID NO: 1541618 - RNA, 19 nt, Homo sapiens
  misc_RNA (1)...(19): siRNA sense strand
uaucaccugcggagcauga

SEQ ID NO: 1541619 - RNA, 19 nt, Homo sapiens
  misc_RNA (1)...(19): siRNA sense strand
ugaggaagaggucaucagu

SEQ ID NO: 1541620 - RNA, 19 nt, Homo sapiens
  misc_RNA (1)...(19): siRNA sense strand
gagggaugccaaagguaga

SEQ ID NO: 1541621 - RNA, 19 nt, Homo sapiens
  misc_RNA (1)...(19): siRNA sense strand
cauuguccuaucagaaaua

SEQ ID NO: 1541622 - RNA, 19 nt, Homo sapiens
  misc_RNA (1)...(19): siRNA sense strand
ucagcauuguccuaucaga

SEQ ID NO: 1541623 - RNA, 19 nt, Homo sapiens
  misc_RNA (1)...(19): siRNA sense strand
gguggaggaauugaacaaa

SEQ ID NO: 1541624 - RNA, 19 nt, Homo sapiens
  misc_RNA (1)...(19): siRNA sense strand
ggaggaagcugaagaagua

SEQ ID NO: 1541625 - RNA, 19 nt, Homo sapiens
  misc_RNA (1)...(19): siRNA sense strand
gaagaaguacggcaagaau

SEQ ID NO: 1541626 - RNA, 19 nt, Homo sapiens
  misc_RNA (1)...(19): siRNA sense strand
gcaagaaugucgggaaggu

SEQ ID NO: 1541627 - RNA, 19 nt, Homo sapiens
  misc_RNA (1)...(19): siRNA sense strand
ggaaggucaucaucaaagg

SEQ ID NO: 1541628 - RNA, 19 nt, Homo sapiens
  misc_RNA (1)...(19): siRNA sense strand
gaaggucaucaucaaagga

SEQ ID NO: 1541629 - RNA, 19 nt, Homo sapiens
  misc_RNA (1)...(19): siRNA sense strand
ucgggaaggucaucaucaa

SEQ ID NO: 1541630 - RNA, 19 nt, Homo sapiens
  misc_RNA (1)...(19): siRNA sense strand
gggaaggucaucaucaaag

SEQ ID NO: 1541631 - RNA, 19 nt, Homo sapiens
  misc_RNA (1)...(19): siRNA sense strand
agaaguacggcaagaaugu

SEQ ID NO: 1541632 - RNA, 19 nt, Homo sapiens
  misc_RNA (1)...(19): siRNA sense strand
ugaagaaguacggcaagaa

SEQ ID NO: 1541633 - RNA, 19 nt, Homo sapiens
  misc_RNA (1)...(19): siRNA sense strand
ggaagagguaccggaggaa

SEQ ID NO: 1541634 - RNA, 19 nt, Homo sapiens
  misc_RNA (1)...(19): siRNA sense strand
gaaguacggcaagaauguc

SEQ ID NO: 1541635 - RNA, 19 nt, Homo sapiens
  misc_RNA (1)...(19): siRNA sense strand
cugaagaaguacggcaaga

SEQ ID NO: 1541636 - RNA, 19 nt, Homo sapiens
  misc_RNA (1)...(19): siRNA sense strand
ggaaacaacuaaaucuaga

SEQ ID NO: 1541637 - RNA, 19 nt, Homo sapiens
  misc_RNA (1)...(19): siRNA sense strand
gcagauggguuuguuauug

SEQ ID NO: 1541638 - RNA, 19 nt, Homo sapiens
  misc_RNA (1)...(19): siRNA sense strand
cuaaaucaauggccaaauu

SEQ ID NO: 1541639 - RNA, 19 nt, Homo sapiens
  misc_RNA (1)...(19): siRNA sense strand
acagugagguuucuuacua

SEQ ID NO: 1541640 - RNA, 19 nt, Homo sapiens
  misc_RNA (1)...(19): siRNA sense strand
gaaaggaaacaacuaaauc

SEQ ID NO: 1541641 - RNA, 19 nt, Homo sapiens
  misc_RNA (1)...(19): siRNA sense strand
ggaaaggaaacaacuaaau

SEQ ID NO: 1541642 - RNA, 19 nt, Homo sapiens
  misc_RNA (1)...(19): siRNA sense strand
uaaaagagcuguggaauca

SEQ ID NO: 1541643 - RNA, 19 nt, Homo sapiens
  misc_RNA (1)...(19): siRNA sense strand
agaaauauaugacccuugu

SEQ ID NO: 1541644 - RNA, 19 nt, Homo sapiens
  misc_RNA (1)...(19): siRNA sense strand
ggaaagagaaggaaaucug

SEQ ID NO: 1541645 - RNA, 19 nt, Homo sapiens
  misc_RNA (1)...(19): siRNA sense strand
auaagaagcacuuguguuu

SEQ ID NO: 1541646 - RNA, 19 nt, Homo sapiens
  misc_RNA (1)...(19): siRNA sense strand
cugauaaacuucaaacuca

SEQ ID NO: 1541647 - RNA, 19 nt, Homo sapiens
  misc_RNA (1)...(19): siRNA sense strand
agugauaggucuucauuug

SEQ ID NO: 1541648 - RNA, 19 nt, Homo sapiens
  misc_RNA (1)...(19): siRNA sense strand
gaaagagaaggaaaucugu

SEQ ID NO: 1541649 - RNA, 19 nt, Homo sapiens
  misc_RNA (1)...(19): siRNA sense strand
gagcuucacugggcagaug

SEQ ID NO: 1541650 - RNA, 19 nt, Homo sapiens
  misc_RNA (1)...(19): siRNA sense strand
ucaaacuucuugcaucuca

SEQ ID NO: 1541651 - RNA, 19 nt, Homo sapiens
  misc_RNA (1)...(19): siRNA sense strand
cagugagguuucuuacuaa

SEQ ID NO: 1541652 - RNA, 19 nt, Homo sapiens
  misc_RNA (1)...(19): siRNA sense strand
gagguggaaaugauguuua

SEQ ID NO: 1541653 - RNA, 19 nt, Homo sapiens
  misc_RNA (1)...(19): siRNA sense strand
cagauggguuuguuauugu

SEQ ID NO: 1541654 - RNA, 19 nt, Homo sapiens
  misc_RNA (1)...(19): siRNA sense strand
gcacuuguguuuggaaagg

SEQ ID NO: 1541655 - RNA, 19 nt, Homo sapiens
  misc_RNA (1)...(19): siRNA sense strand
ccaauucugugaacugucu

SEQ ID NO: 1541656 - RNA, 19 nt, Homo sapiens
  misc_RNA (1)...(19): siRNA sense strand
gguuuguuauuguguauga

SEQ ID NO: 1541657 - RNA, 19 nt, Homo sapiens
  misc_RNA (1)...(19): siRNA sense strand
gaaaaccgaugccaauucu

SEQ ID NO: 1541658 - RNA, 19 nt, Homo sapiens
  misc_RNA (1)...(19): siRNA sense strand
aagaagcacuuguguuugg

SEQ ID NO: 1541659 - RNA, 19 nt, Homo sapiens
  misc_RNA (1)...(19): siRNA sense strand
caguggaucuaaaucaaug

SEQ ID NO: 1541660 - RNA, 19 nt, Homo sapiens
  misc_RNA (1)...(19): siRNA sense strand
caaaagcgcugaucuacag

SEQ ID NO: 1541661 - RNA, 19 nt, Homo sapiens
  misc_RNA (1)...(19): siRNA sense strand
ucacugggcagauggguuu

SEQ ID NO: 1541662 - RNA, 19 nt, Homo sapiens
  misc_RNA (1)...(19): siRNA sense strand
gcaaaauucucccucacaa

SEQ ID NO: 1541663 - RNA, 19 nt, Homo sapiens
  misc_RNA (1)...(19): siRNA sense strand
cuucuugcaucucaaauau

SEQ ID NO: 1541664 - RNA, 19 nt, Homo sapiens
  misc_RNA (1)...(19): siRNA sense strand
gagguuggcugggaagaag

SEQ ID NO: 1541665 - RNA, 19 nt, Homo sapiens
  misc_RNA (1)...(19): siRNA sense strand
gagaaggaaaucuguuuag

SEQ ID NO: 1541666 - RNA, 19 nt, Homo sapiens
  misc_RNA (1)...(19): siRNA sense strand
gcgcugaucuacagaaucc

SEQ ID NO: 1541667 - RNA, 19 nt, Homo sapiens
  misc_RNA (1)...(19): siRNA sense strand
gggcagauggguuuguuau

SEQ ID NO: 1541668 - RNA, 19 nt, Homo sapiens
  misc_RNA (1)...(19): siRNA sense strand
agagaaggaaaucuguuua

SEQ ID NO: 1541669 - RNA, 19 nt, Homo sapiens
  misc_RNA (1)...(19): siRNA sense strand
gauaggucuucauuugcuu

SEQ ID NO: 1541670 - RNA, 19 nt, Homo sapiens
  misc_RNA (1)...(19): siRNA sense strand
ucagugauaggucuucauu

SEQ ID NO: 1541671 - RNA, 19 nt, Homo sapiens
  misc_RNA (1)...(19): siRNA sense strand
aagagaaggaaaucuguuu

SEQ ID NO: 1541672 - RNA, 19 nt, Homo sapiens
  misc_RNA (1)...(19): siRNA sense strand
ggacauccugauaaacuuc

SEQ ID NO: 1541673 - RNA, 19 nt, Homo sapiens
  misc_RNA (1)...(19): siRNA sense strand
ggagguggaaaugauguuu

SEQ ID NO: 1541674 - RNA, 19 nt, Homo sapiens
  misc_RNA (1)...(19): siRNA sense strand
ggcaacaaacgagaucuuu

SEQ ID NO: 1541675 - RNA, 19 nt, Homo sapiens
  misc_RNA (1)...(19): siRNA sense strand
uaugacccuuguucucaaa

SEQ ID NO: 1541676 - RNA, 19 nt, Homo sapiens
  misc_RNA (1)...(19): siRNA sense strand
cccaguggaucuaaaucaa

SEQ ID NO: 1541677 - RNA, 19 nt, Homo sapiens
  misc_RNA (1)...(19): siRNA sense strand
aacgagaucuuugucaugu

SEQ ID NO: 1541678 - RNA, 19 nt, Homo sapiens
  misc_RNA (1)...(19): siRNA sense strand
aaauauaugacccuuguuc

SEQ ID NO: 1541679 - RNA, 19 nt, Homo sapiens
  misc_RNA (1)...(19): siRNA sense strand
aaaccgaugccaauucugu

SEQ ID NO: 1541680 - RNA, 19 nt, Homo sapiens
  misc_RNA (1)...(19): siRNA sense strand
uguggaaucagcaguguuu

SEQ ID NO: 1541681 - RNA, 19 nt, Homo sapiens
  misc_RNA (1)...(19): siRNA sense strand
gagccacaaacuagucauu

SEQ ID NO: 1541682 - RNA, 19 nt, Homo sapiens
  misc_RNA (1)...(19): siRNA sense strand
uauaugacccuuguucuca

SEQ ID NO: 1541683 - RNA, 19 nt, Homo sapiens
  misc_RNA (1)...(19): siRNA sense strand
aaacuucuugcaucucaaa

SEQ ID NO: 1541684 - RNA, 19 nt, Homo sapiens
  misc_RNA (1)...(19): siRNA sense strand
ugauaggucuucauuugcu

SEQ ID NO: 1541685 - RNA, 19 nt, Homo sapiens
  misc_RNA (1)...(19): siRNA sense strand
uauaagaagcacuuguguu

SEQ ID NO: 1541686 - RNA, 19 nt, Homo sapiens
  misc_RNA (1)...(19): siRNA sense strand
uaagaagcacuuguguuug

SEQ ID NO: 1541687 - RNA, 19 nt, Homo sapiens
  misc_RNA (1)...(19): siRNA sense strand
gaaauauaugacccuuguu

SEQ ID NO: 1541688 - RNA, 19 nt, Homo sapiens
  misc_RNA (1)...(19): siRNA sense strand
gaagcacuuguguuuggaa

SEQ ID NO: 1541689 - RNA, 19 nt, Homo sapiens
  misc_RNA (1)...(19): siRNA sense strand
ucagaauuaucaaggacau

SEQ ID NO: 1541690 - RNA, 19 nt, Homo sapiens
  misc_RNA (1)...(19): siRNA sense strand
aaacgagaucuuugucaug

SEQ ID NO: 1541691 - RNA, 19 nt, Homo sapiens
  misc_RNA (1)...(19): siRNA sense strand
agguggaaaugauguuuau

SEQ ID NO: 1541692 - RNA, 19 nt, Homo sapiens
  misc_RNA (1)...(19): siRNA sense strand
uuacuaagcgauucauugg

SEQ ID NO: 1541693 - RNA, 19 nt, Homo sapiens
  misc_RNA (1)...(19): siRNA sense strand
ggaaaaccgaugccaauuc

SEQ ID NO: 1541694 - RNA, 19 nt, Homo sapiens
  misc_RNA (1)...(19): siRNA sense strand
guuauuguguaugacauca

SEQ ID NO: 1541695 - RNA, 19 nt, Homo sapiens
  misc_RNA (1)...(19): siRNA sense strand
aaagagaaggaaaucuguu

SEQ ID NO: 1541696 - RNA, 19 nt, Homo sapiens
  misc_RNA (1)...(19): siRNA sense strand
caaacuucuugcaucucaa

SEQ ID NO: 1541697 - RNA, 19 nt, Homo sapiens
  misc_RNA (1)...(19): siRNA sense strand
aagcacuuguguuuggaaa

SEQ ID NO: 1541698 - RNA, 19 nt, Homo sapiens
  misc_RNA (1)...(19): siRNA sense strand
acaaaagcccuuacaguga

SEQ ID NO: 1541699 - RNA, 19 nt, Homo sapiens
  misc_RNA (1)...(19): siRNA sense strand
uuggaaaggaaacaacuaa

SEQ ID NO: 1541700 - RNA, 19 nt, Homo sapiens
  misc_RNA (1)...(19): siRNA sense strand
ccaguggaucuaaaucaau

SEQ ID NO: 1541701 - RNA, 19 nt, Homo sapiens
  misc_RNA (1)...(19): siRNA sense strand
ucuauaagaagcacuugug

SEQ ID NO: 1541702 - RNA, 19 nt, Homo sapiens
  misc_RNA (1)...(19): siRNA sense strand
ccugauaaacuucaaacuc

SEQ ID NO: 1541703 - RNA, 19 nt, Homo sapiens
  misc_RNA (1)...(19): siRNA sense strand
ggcagauggguuuguuauu

SEQ ID NO: 1541704 - RNA, 19 nt, Homo sapiens
  misc_RNA (1)...(19): siRNA sense strand
uauuguguaugacaucagu

SEQ ID NO: 1541705 - RNA, 19 nt, Homo sapiens
  misc_RNA (1)...(19): siRNA sense strand
guauuuggaaagagaagga

SEQ ID NO: 1541706 - RNA, 19 nt, Homo sapiens
  misc_RNA (1)...(19): siRNA sense strand
aggaaacaacuaaaucuag

SEQ ID NO: 1541707 - RNA, 19 nt, Homo sapiens
  misc_RNA (1)...(19): siRNA sense strand
ucucaaacacagaaagcaa

SEQ ID NO: 1541708 - RNA, 19 nt, Homo sapiens
  misc_RNA (1)...(19): siRNA sense strand
gcaagaaccugcuaugcua

SEQ ID NO: 1541709 - RNA, 19 nt, Homo sapiens
  misc_RNA (1)...(19): siRNA sense strand
gaacggagcgcucucuuca

SEQ ID NO: 1541710 - RNA, 19 nt, Homo sapiens
  misc_RNA (1)...(19): siRNA sense strand
ccaaucuucuuuauaggua

SEQ ID NO: 1541711 - RNA, 19 nt, Homo sapiens
  misc_RNA (1)...(19): siRNA sense strand
ccuccaaucuucuuuauag

SEQ ID NO: 1541712 - RNA, 19 nt, Homo sapiens
  misc_RNA (1)...(19): siRNA sense strand
ggagcgcucucuucaguag

SEQ ID NO: 1541713 - RNA, 19 nt, Homo sapiens
  misc_RNA (1)...(19): siRNA sense strand
ccaagaccgugcaggugua

SEQ ID NO: 1541714 - RNA, 19 nt, Homo sapiens
  misc_RNA (1)...(19): siRNA sense strand
cagcgaaucaucaaaggua

SEQ ID NO: 1541715 - RNA, 19 nt, Homo sapiens
  misc_RNA (1)...(19): siRNA sense strand
ggccacgacuaccaaauug

SEQ ID NO: 1541716 - RNA, 19 nt, Homo sapiens
  misc_RNA (1)...(19): siRNA sense strand
gagcuggccuccaucuaca

SEQ ID NO: 1541717 - RNA, 19 nt, Homo sapiens
  misc_RNA (1)...(19): siRNA sense strand
gaugcggccuccaaucuuc

SEQ ID NO: 1541718 - RNA, 19 nt, Homo sapiens
  misc_RNA (1)...(19): siRNA sense strand
caagaucagcgaaucauca

SEQ ID NO: 1541719 - RNA, 19 nt, Homo sapiens
  misc_RNA (1)...(19): siRNA sense strand
acaaagacuucguguacau

SEQ ID NO: 1541720 - RNA, 19 nt, Homo sapiens
  misc_RNA (1)...(19): siRNA sense strand
ggccagaggacaagaagaa

SEQ ID NO: 1541721 - RNA, 19 nt, Homo sapiens
  misc_RNA (1)...(19): siRNA sense strand
gaucagcgaaucaucaaag

SEQ ID NO: 1541722 - RNA, 19 nt, Homo sapiens
  misc_RNA (1)...(19): siRNA sense strand
agaaggagguggagcugau

SEQ ID NO: 1541723 - RNA, 19 nt, Homo sapiens
  misc_RNA (1)...(19): siRNA sense strand
gggccacgacuaccaaauu

SEQ ID NO: 1541724 - RNA, 19 nt, Homo sapiens
  misc_RNA (1)...(19): siRNA sense strand
gcgaaucaucaaagguaua

SEQ ID NO: 1541725 - RNA, 19 nt, Homo sapiens
  misc_RNA (1)...(19): siRNA sense strand
ggaucaagguggccuccau

SEQ ID NO: 1541726 - RNA, 19 nt, Homo sapiens
  misc_RNA (1)...(19): siRNA sense strand
guagacuucugcugugagu

SEQ ID NO: 1541727 - RNA, 19 nt, Homo sapiens
  misc_RNA (1)...(19): siRNA sense strand
ggacggugguagacuucug

SEQ ID NO: 1541728 - RNA, 19 nt, Homo sapiens
  misc_RNA (1)...(19): siRNA sense strand
cagaggacaagaagaagaa

SEQ ID NO: 1541729 - RNA, 19 nt, Homo sapiens
  misc_RNA (1)...(19): siRNA sense strand
ggccuccaaucuucuuuau

SEQ ID NO: 1541730 - RNA, 19 nt, Homo sapiens
  misc_RNA (1)...(19): siRNA sense strand
gagcagugggucaaagaga

SEQ ID NO: 1541731 - RNA, 19 nt, Homo sapiens
  misc_RNA (1)...(19): siRNA sense strand
cauacaagaucagcgaauc

SEQ ID NO: 1541732 - RNA, 19 nt, Homo sapiens
  misc_RNA (1)...(19): siRNA sense strand
ucaaggccgugguggacuu

SEQ ID NO: 1541733 - RNA, 19 nt, Homo sapiens
  misc_RNA (1)...(19): siRNA sense strand
gcgaggacaacuaccugua

SEQ ID NO: 1541734 - RNA, 19 nt, Homo sapiens
  misc_RNA (1)...(19): siRNA sense strand
gaacgucuccaugcagaag

SEQ ID NO: 1541735 - RNA, 19 nt, Homo sapiens
  misc_RNA (1)...(19): siRNA sense strand
caagaagaagaaaggcaaa

SEQ ID NO: 1541736 - RNA, 19 nt, Homo sapiens
  misc_RNA (1)...(19): siRNA sense strand
caagguggccuccaugaac

SEQ ID NO: 1541737 - RNA, 19 nt, Homo sapiens
  misc_RNA (1)...(19): siRNA sense strand
guaaacaguggaucaaggu

SEQ ID NO: 1541738 - RNA, 19 nt, Homo sapiens
  misc_RNA (1)...(19): siRNA sense strand
ugcagaagcugugugucua

SEQ ID NO: 1541739 - RNA, 19 nt, Homo sapiens
  misc_RNA (1)...(19): siRNA sense strand
caacugcgagggcuucauc

SEQ ID NO: 1541740 - RNA, 19 nt, Homo sapiens
  misc_RNA (1)...(19): siRNA sense strand
gaaccagcgccguguggau

SEQ ID NO: 1541741 - RNA, 19 nt, Homo sapiens
  misc_RNA (1)...(19): siRNA sense strand
ggaugcggccuccaaucuu

SEQ ID NO: 1541742 - RNA, 19 nt, Homo sapiens
  misc_RNA (1)...(19): siRNA sense strand
ccagaggacaagaagaaga

SEQ ID NO: 1541743 - RNA, 19 nt, Homo sapiens
  misc_RNA (1)...(19): siRNA sense strand
cuacuucaacuccauguuc

SEQ ID NO: 1541744 - RNA, 19 nt, Homo sapiens
  misc_RNA (1)...(19): siRNA sense strand
acggagcgcucucuucagu

SEQ ID NO: 1541745 - RNA, 19 nt, Homo sapiens
  misc_RNA (1)...(19): siRNA sense strand
gccgugcgcuaccacaaca

SEQ ID NO: 1541746 - RNA, 19 nt, Homo sapiens
  misc_RNA (1)...(19): siRNA sense strand
gggaugcggccuccaaucu

SEQ ID NO: 1541747 - RNA, 19 nt, Homo sapiens
  misc_RNA (1)...(19): siRNA sense strand
gcgacuacuucaacuccau

SEQ ID NO: 1541748 - RNA, 19 nt, Homo sapiens
  misc_RNA (1)...(19): siRNA sense strand
gcgagcagugggucaaaga

SEQ ID NO: 1541749 - RNA, 19 nt, Homo sapiens
  misc_RNA (1)...(19): siRNA sense strand
gcggcaacauugacuacgu

SEQ ID NO: 1541750 - RNA, 19 nt, Homo sapiens
  misc_RNA (1)...(19): siRNA sense strand
aacacugccuucuccaaga

SEQ ID NO: 1541751 - RNA, 19 nt, Homo sapiens
  misc_RNA (1)...(19): siRNA sense strand
ggcuacagcugggagaaca

SEQ ID NO: 1541752 - RNA, 19 nt, Homo sapiens
  misc_RNA (1)...(19): siRNA sense strand
ucaacuccauguucaccau

SEQ ID NO: 1541753 - RNA, 19 nt, Homo sapiens
  misc_RNA (1)...(19): siRNA sense strand
gcagaucuggacgguggua

SEQ ID NO: 1541754 - RNA, 19 nt, Homo sapiens
  misc_RNA (1)...(19): siRNA sense strand
ucagugacgacaccugcua

SEQ ID NO: 1541755 - RNA, 19 nt, Homo sapiens
  misc_RNA (1)...(19): siRNA sense strand
cgggcaccaucuacaaaga

SEQ ID NO: 1541756 - RNA, 19 nt, Homo sapiens
  misc_RNA (1)...(19): siRNA sense strand
gagugucucggccauacaa

SEQ ID NO: 1541757 - RNA, 19 nt, Homo sapiens
  misc_RNA (1)...(19): siRNA sense strand
ucaagguggccuccaugaa

SEQ ID NO: 1541758 - RNA, 19 nt, Homo sapiens
  misc_RNA (1)...(19): siRNA sense strand
gcuggauggcggcaacauu

SEQ ID NO: 1541759 - RNA, 19 nt, Homo sapiens
  misc_RNA (1)...(19): siRNA sense strand
ucuggacggugguagacuu

SEQ ID NO: 1541760 - RNA, 19 nt, Homo sapiens
  misc_RNA (1)...(19): siRNA sense strand
cuaccuugccuccaucgaa

SEQ ID NO: 1541761 - RNA, 19 nt, Homo sapiens
  misc_RNA (1)...(19): siRNA sense strand
ccguguggauuucuaccuu

SEQ ID NO: 1541762 - RNA, 19 nt, Homo sapiens
  misc_RNA (1)...(19): siRNA sense strand
gcagaagcugugugucuac

SEQ ID NO: 1541763 - RNA, 19 nt, Homo sapiens
  misc_RNA (1)...(19): siRNA sense strand
cuggauggcggcaacauug

SEQ ID NO: 1541764 - RNA, 19 nt, Homo sapiens
  misc_RNA (1)...(19): siRNA sense strand
gagcgagcagugggucaaa

SEQ ID NO: 1541765 - RNA, 19 nt, Homo sapiens
  misc_RNA (1)...(19): siRNA sense strand
uacuucaacuccauguuca

SEQ ID NO: 1541766 - RNA, 19 nt, Homo sapiens
  misc_RNA (1)...(19): siRNA sense strand
ucucggccauacaagauca

SEQ ID NO: 1541767 - RNA, 19 nt, Homo sapiens
  misc_RNA (1)...(19): siRNA sense strand
gugcagcgacuacuucaac

SEQ ID NO: 1541768 - RNA, 19 nt, Homo sapiens
  misc_RNA (1)...(19): siRNA sense strand
gagacguacagucccaaga

SEQ ID NO: 1541769 - RNA, 19 nt, Homo sapiens
  misc_RNA (1)...(19): siRNA sense strand
gcaacaagauucugcuuca

SEQ ID NO: 1541770 - RNA, 19 nt, Homo sapiens
  misc_RNA (1)...(19): siRNA sense strand
ggacuacgauggcaacaag

SEQ ID NO: 1541771 - RNA, 19 nt, Homo sapiens
  misc_RNA (1)...(19): siRNA sense strand
gaacgggccaguccuguga

SEQ ID NO: 1541772 - RNA, 19 nt, Homo sapiens
  misc_RNA (1)...(19): siRNA sense strand
gaagcgaccuugcaaaaga

SEQ ID NO: 1541773 - RNA, 19 nt, Homo sapiens
  misc_RNA (1)...(19): siRNA sense strand
gggccaguccugugaaaua

SEQ ID NO: 1541774 - RNA, 19 nt, Homo sapiens
  misc_RNA (1)...(19): siRNA sense strand
ggccaugacuguccaucuu

SEQ ID NO: 1541775 - RNA, 19 nt, Homo sapiens
  misc_RNA (1)...(19): siRNA sense strand
gugcgguggugccaucaua

SEQ ID NO: 1541776 - RNA, 19 nt, Homo sapiens
  misc_RNA (1)...(19): siRNA sense strand
cuucggugcugcaguuuaa

SEQ ID NO: 1541777 - RNA, 19 nt, Homo sapiens
  misc_RNA (1)...(19): siRNA sense strand
gagagaagcgaccuugcaa

SEQ ID NO: 1541778 - RNA, 19 nt, Homo sapiens
  misc_RNA (1)...(19): siRNA sense strand
caagagaucggccaguuag

SEQ ID NO: 1541779 - RNA, 19 nt, Homo sapiens
  misc_RNA (1)...(19): siRNA sense strand
ucaagagaucggccaguua

SEQ ID NO: 1541780 - RNA, 19 nt, Homo sapiens
  misc_RNA (1)...(19): siRNA sense strand
ccugugaaauacugugaaa

SEQ ID NO: 1541781 - RNA, 19 nt, Homo sapiens
  misc_RNA (1)...(19): siRNA sense strand
ggaaggcugugucccuacu

SEQ ID NO: 1541782 - RNA, 19 nt, Homo sapiens
  misc_RNA (1)...(19): siRNA sense strand
gaugggagucuuccucugu

SEQ ID NO: 1541783 - RNA, 19 nt, Homo sapiens
  misc_RNA (1)...(19): siRNA sense strand
gaagacgccaucagacucu

SEQ ID NO: 1541784 - RNA, 19 nt, Homo sapiens
  misc_RNA (1)...(19): siRNA sense strand
ggauguccguguugcucuu

SEQ ID NO: 1541785 - RNA, 19 nt, Homo sapiens
  misc_RNA (1)...(19): siRNA sense strand
gagaagcgaccuugcaaaa

SEQ ID NO: 1541786 - RNA, 19 nt, Homo sapiens
  misc_RNA (1)...(19): siRNA sense strand
acagucagcugcccaucug

SEQ ID NO: 1541787 - RNA, 19 nt, Homo sapiens
  misc_RNA (1)...(19): siRNA sense strand
gcacuguggcuccgagauc

SEQ ID NO: 1541788 - RNA, 19 nt, Homo sapiens
  misc_RNA (1)...(19): siRNA sense strand
gguggcagacucaggacua

SEQ ID NO: 1541789 - RNA, 19 nt, Homo sapiens
  misc_RNA (1)...(19): siRNA sense strand
gcuccuggauugcauuugc

SEQ ID NO: 1541790 - RNA, 19 nt, Homo sapiens
  misc_RNA (1)...(19): siRNA sense strand
ccaguuagugccucugcua

SEQ ID NO: 1541791 - RNA, 19 nt, Homo sapiens
  misc_RNA (1)...(19): siRNA sense strand
agucuucggugcugcaguu

SEQ ID NO: 1541792 - RNA, 19 nt, Homo sapiens
  misc_RNA (1)...(19): siRNA sense strand
guuuaagguucaagagauc

SEQ ID NO: 1541793 - RNA, 19 nt, Homo sapiens
  misc_RNA (1)...(19): siRNA sense strand
ggccaguccugugaaauac

SEQ ID NO: 1541794 - RNA, 19 nt, Homo sapiens
  misc_RNA (1)...(19): siRNA sense strand
ccaucagacucuacgagau

SEQ ID NO: 1541795 - RNA, 19 nt, Homo sapiens
  misc_RNA (1)...(19): siRNA sense strand
aaggcugugucccuacuuu

SEQ ID NO: 1541796 - RNA, 19 nt, Homo sapiens
  misc_RNA (1)...(19): siRNA sense strand
caacaagauucugcuucag

SEQ ID NO: 1541797 - RNA, 19 nt, Homo sapiens
  misc_RNA (1)...(19): siRNA sense strand
cuaugaagacgccaucaga

SEQ ID NO: 1541798 - RNA, 19 nt, Homo sapiens
  misc_RNA (1)...(19): siRNA sense strand
ucuacagccuggacaguca

SEQ ID NO: 1541799 - RNA, 19 nt, Homo sapiens
  misc_RNA (1)...(19): siRNA sense strand
cuucagagaugggagucuu

SEQ ID NO: 1541800 - RNA, 19 nt, Homo sapiens
  misc_RNA (1)...(19): siRNA sense strand
agaugauccugcagagaga

SEQ ID NO: 1541801 - RNA, 19 nt, Homo sapiens
  misc_RNA (1)...(19): siRNA sense strand
aguuuaagguucaagagau

SEQ ID NO: 1541802 - RNA, 19 nt, Homo sapiens
  misc_RNA (1)...(19): siRNA sense strand
uucaagagaucggccaguu

SEQ ID NO: 1541803 - RNA, 19 nt, Homo sapiens
  misc_RNA (1)...(19): siRNA sense strand
uccaagcggucccgguuuc

SEQ ID NO: 1541804 - RNA, 19 nt, Homo sapiens
  misc_RNA (1)...(19): siRNA sense strand
cuacgauggcaacaagauu

SEQ ID NO: 1541805 - RNA, 19 nt, Homo sapiens
  misc_RNA (1)...(19): siRNA sense strand
ccaaucaggaguucuacag

SEQ ID NO: 1541806 - RNA, 19 nt, Homo sapiens
  misc_RNA (1)...(19): siRNA sense strand
cagaagagcugcaguccua

SEQ ID NO: 1541807 - RNA, 19 nt, Homo sapiens
  misc_RNA (1)...(19): siRNA sense strand
gaagggagauuagaugcua

SEQ ID NO: 1541808 - RNA, 19 nt, Homo sapiens
  misc_RNA (1)...(19): siRNA sense strand
caaaggacguucaggaaau

SEQ ID NO: 1541809 - RNA, 19 nt, Homo sapiens
  misc_RNA (1)...(19): siRNA sense strand
gcagugggcuaaucauuuc

SEQ ID NO: 1541810 - RNA, 19 nt, Homo sapiens
  misc_RNA (1)...(19): siRNA sense strand
ccaccuagaugauaaugaa

SEQ ID NO: 1541811 - RNA, 19 nt, Homo sapiens
  misc_RNA (1)...(19): siRNA sense strand
ugauagagcugaauaugga

SEQ ID NO: 1541812 - RNA, 19 nt, Homo sapiens
  misc_RNA (1)...(19): siRNA sense strand
gagaauaacguccacaaga

SEQ ID NO: 1541813 - RNA, 19 nt, Homo sapiens
  misc_RNA (1)...(19): siRNA sense strand
gcagcacucugaccucuga

SEQ ID NO: 1541814 - RNA, 19 nt, Homo sapiens
  misc_RNA (1)...(19): siRNA sense strand
caagguugccuauggaaua

SEQ ID NO: 1541815 - RNA, 19 nt, Homo sapiens
  misc_RNA (1)...(19): siRNA sense strand
cuacaucgcugaggauuau

SEQ ID NO: 1541816 - RNA, 19 nt, Homo sapiens
  misc_RNA (1)...(19): siRNA sense strand
uggaaagcaugaaugauuu

SEQ ID NO: 1541817 - RNA, 19 nt, Homo sapiens
  misc_RNA (1)...(19): siRNA sense strand
ugaaccaccuagaugauaa

SEQ ID NO: 1541818 - RNA, 19 nt, Homo sapiens
  misc_RNA (1)...(19): siRNA sense strand
uggaggagauucugcauga

SEQ ID NO: 1541819 - RNA, 19 nt, Homo sapiens
  misc_RNA (1)...(19): siRNA sense strand
ggcgguguccugauuauua

SEQ ID NO: 1541820 - RNA, 19 nt, Homo sapiens
  misc_RNA (1)...(19): siRNA sense strand
agaaggaacuguuggagau

SEQ ID NO: 1541821 - RNA, 19 nt, Homo sapiens
  misc_RNA (1)...(19): siRNA sense strand
guggaaagcaugaaugauu

SEQ ID NO: 1541822 - RNA, 19 nt, Homo sapiens
  misc_RNA (1)...(19): siRNA sense strand
agaauaacguccacaagau

SEQ ID NO: 1541823 - RNA, 19 nt, Homo sapiens
  misc_RNA (1)...(19): siRNA sense strand
gcaggaacuucuagaggau

SEQ ID NO: 1541824 - RNA, 19 nt, Homo sapiens
  misc_RNA (1)...(19): siRNA sense strand
gaaagaguaugaagaaaag

SEQ ID NO: 1541825 - RNA, 19 nt, Homo sapiens
  misc_RNA (1)...(19): siRNA sense strand
ggauuauguggaagaauua

SEQ ID NO: 1541826 - RNA, 19 nt, Homo sapiens
  misc_RNA (1)...(19): siRNA sense strand
gaagauguggaaagcauga

SEQ ID NO: 1541827 - RNA, 19 nt, Homo sapiens
  misc_RNA (1)...(19): siRNA sense strand
ggagcaggcuaagcagaaa

SEQ ID NO: 1541828 - RNA, 19 nt, Homo sapiens
  misc_RNA (1)...(19): siRNA sense strand
gaauaacguccacaagaug

SEQ ID NO: 1541829 - RNA, 19 nt, Homo sapiens
  misc_RNA (1)...(19): siRNA sense strand
cagcauaucaucagcuauu

SEQ ID NO: 1541830 - RNA, 19 nt, Homo sapiens
  misc_RNA (1)...(19): siRNA sense strand
caggaaagaguaugaagaa

SEQ ID NO: 1541831 - RNA, 19 nt, Homo sapiens
  misc_RNA (1)...(19): siRNA sense strand
aggauuauguggaagaauu

SEQ ID NO: 1541832 - RNA, 19 nt, Homo sapiens
  misc_RNA (1)...(19): siRNA sense strand
gauaaugaaguuuggauca

SEQ ID NO: 1541833 - RNA, 19 nt, Homo sapiens
  misc_RNA (1)...(19): siRNA sense strand
caagaugcagcucccauuu

SEQ ID NO: 1541834 - RNA, 19 nt, Homo sapiens
  misc_RNA (1)...(19): siRNA sense strand
gcgguguccugauuauuau

SEQ ID NO: 1541835 - RNA, 19 nt, Homo sapiens
  misc_RNA (1)...(19): siRNA sense strand
ccaaaggacguucaggaaa

SEQ ID NO: 1541836 - RNA, 19 nt, Homo sapiens
  misc_RNA (1)...(19): siRNA sense strand
aaauggcgguguccugauu

SEQ ID NO: 1541837 - RNA, 19 nt, Homo sapiens
  misc_RNA (1)...(19): siRNA sense strand
gaauggagaaggaacuguu

SEQ ID NO: 1541838 - RNA, 19 nt, Homo sapiens
  misc_RNA (1)...(19): siRNA sense strand
gaagccaagcagcugguua

SEQ ID NO: 1541839 - RNA, 19 nt, Homo sapiens
  misc_RNA (1)...(19): siRNA sense strand
ggaaagaguaugaagaaaa

SEQ ID NO: 1541840 - RNA, 19 nt, Homo sapiens
  misc_RNA (1)...(19): siRNA sense strand
ccagccaucucucauagga

SEQ ID NO: 1541841 - RNA, 19 nt, Homo sapiens
  misc_RNA (1)...(19): siRNA sense strand
ggcagcauaucaucagcua

SEQ ID NO: 1541842 - RNA, 19 nt, Homo sapiens
  misc_RNA (1)...(19): siRNA sense strand
ggaagaauuacacaaaugg

SEQ ID NO: 1541843 - RNA, 19 nt, Homo sapiens
  misc_RNA (1)...(19): siRNA sense strand
guggaagaauuacacaaau

SEQ ID NO: 1541844 - RNA, 19 nt, Homo sapiens
  misc_RNA (1)...(19): siRNA sense strand
ggaauagacagccucuuca

SEQ ID NO: 1541845 - RNA, 19 nt, Homo sapiens
  misc_RNA (1)...(19): siRNA sense strand
uggaagaauuacacaaaug

SEQ ID NO: 1541846 - RNA, 19 nt, Homo sapiens
  misc_RNA (1)...(19): siRNA sense strand
aggaaaugcugguucagaa

SEQ ID NO: 1541847 - RNA, 19 nt, Homo sapiens
  misc_RNA (1)...(19): siRNA sense strand
uaucaucagcuauuuguug

SEQ ID NO: 1541848 - RNA, 19 nt, Homo sapiens
  misc_RNA (1)...(19): siRNA sense strand
aauucgagcuccagagauu

SEQ ID NO: 1541849 - RNA, 19 nt, Homo sapiens
  misc_RNA (1)...(19): siRNA sense strand
gaagaacaggcugggauug

SEQ ID NO: 1541850 - RNA, 19 nt, Homo sapiens
  misc_RNA (1)...(19): siRNA sense strand
gcucgugacugggccuuga

SEQ ID NO: 1541851 - RNA, 19 nt, Homo sapiens
  misc_RNA (1)...(19): siRNA sense strand
guagacagcaagccagaga

SEQ ID NO: 1541852 - RNA, 19 nt, Homo sapiens
  misc_RNA (1)...(19): siRNA sense strand
ccuagaugauaaugaaguu

SEQ ID NO: 1541853 - RNA, 19 nt, Homo sapiens
  misc_RNA (1)...(19): siRNA sense strand
gcaaaugaugucugagcuu

SEQ ID NO: 1541854 - RNA, 19 nt, Homo sapiens
  misc_RNA (1)...(19): siRNA sense strand
aaaggacguucaggaaaug

SEQ ID NO: 1541855 - RNA, 19 nt, Homo sapiens
  misc_RNA (1)...(19): siRNA sense strand
ucuagaggauggccagaug

SEQ ID NO: 1541856 - RNA, 19 nt, Homo sapiens
  misc_RNA (1)...(19): siRNA sense strand
aauguauccuggcaugaaa

SEQ ID NO: 1541857 - RNA, 19 nt, Homo sapiens
  misc_RNA (1)...(19): siRNA sense strand
caauguauccuggcaugaa

SEQ ID NO: 1541858 - RNA, 19 nt, Homo sapiens
  misc_RNA (1)...(19): siRNA sense strand
uaacuuggcagcauaucau

SEQ ID NO: 1541859 - RNA, 19 nt, Homo sapiens
  misc_RNA (1)...(19): siRNA sense strand
acaauaagccaaagaacuc

SEQ ID NO: 1541860 - RNA, 19 nt, Homo sapiens
  misc_RNA (1)...(19): siRNA sense strand
cacggcaaaugaugucuga

SEQ ID NO: 1541861 - RNA, 19 nt, Homo sapiens
  misc_RNA (1)...(19): siRNA sense strand
ccacuguauucacggcaaa

SEQ ID NO: 1541862 - RNA, 19 nt, Homo sapiens
  misc_RNA (1)...(19): siRNA sense strand
gcuacaucgcugaggauua

SEQ ID NO: 1541863 - RNA, 19 nt, Homo sapiens
  misc_RNA (1)...(19): siRNA sense strand
gaugugcagugggcuaauc

SEQ ID NO: 1541864 - RNA, 19 nt, Homo sapiens
  misc_RNA (1)...(19): siRNA sense strand
gcauaucaucagcuauuug

SEQ ID NO: 1541865 - RNA, 19 nt, Homo sapiens
  misc_RNA (1)...(19): siRNA sense strand
uggaagauguggaaagcau

SEQ ID NO: 1541866 - RNA, 19 nt, Homo sapiens
  misc_RNA (1)...(19): siRNA sense strand
cuaaucauuucaucuggau

SEQ ID NO: 1541867 - RNA, 19 nt, Homo sapiens
  misc_RNA (1)...(19): siRNA sense strand
gggcuaaucauuucaucug

SEQ ID NO: 1541868 - RNA, 19 nt, Homo sapiens
  misc_RNA (1)...(19): siRNA sense strand
aggaguugcugcuggacua

SEQ ID NO: 1541869 - RNA, 19 nt, Homo sapiens
  misc_RNA (1)...(19): siRNA sense strand
ccaggaaagaguaugaaga

SEQ ID NO: 1541870 - RNA, 19 nt, Homo sapiens
  misc_RNA (1)...(19): siRNA sense strand
cauaucaucagcuauuugu

SEQ ID NO: 1541871 - RNA, 19 nt, Homo sapiens
  misc_RNA (1)...(19): siRNA sense strand
guugaucaucccauaguuu

SEQ ID NO: 1541872 - RNA, 19 nt, Homo sapiens
  misc_RNA (1)...(19): siRNA sense strand
gaaccaccuagaugauaau

SEQ ID NO: 1541873 - RNA, 19 nt, Homo sapiens
  misc_RNA (1)...(19): siRNA sense strand
uagacagccucuucagcuu

SEQ ID NO: 1541874 - RNA, 19 nt, Homo sapiens
  misc_RNA (1)...(19): siRNA sense strand
agaagccggucaccacugu

SEQ ID NO: 1541875 - RNA, 19 nt, Homo sapiens
  misc_RNA (1)...(19): siRNA sense strand
gaagagcugcaguccuaca

SEQ ID NO: 1541876 - RNA, 19 nt, Homo sapiens
  misc_RNA (1)...(19): siRNA sense strand
uguuuaacuuggcagcaua

SEQ ID NO: 1541877 - RNA, 19 nt, Homo sapiens
  misc_RNA (1)...(19): siRNA sense strand
gaaggaacuguuggagaug

SEQ ID NO: 1541878 - RNA, 19 nt, Homo sapiens
  misc_RNA (1)...(19): siRNA sense strand
gcuauuuguugggacagaa

SEQ ID NO: 1541879 - RNA, 19 nt, Homo sapiens
  misc_RNA (1)...(19): siRNA sense strand
gaauauggacuccccagaa

SEQ ID NO: 1541880 - RNA, 19 nt, Homo sapiens
  misc_RNA (1)...(19): siRNA sense strand
gacagccucuucagcuucu

SEQ ID NO: 1541881 - RNA, 19 nt, Homo sapiens
  misc_RNA (1)...(19): siRNA sense strand
aaggaacuguuggagauga

SEQ ID NO: 1541882 - RNA, 19 nt, Homo sapiens
  misc_RNA (1)...(19): siRNA sense strand
uggaauagacagccucuuc

SEQ ID NO: 1541883 - RNA, 19 nt, Homo sapiens
  misc_RNA (1)...(19): siRNA sense strand
gaauagacagccucuucag

SEQ ID NO: 1541884 - RNA, 19 nt, Homo sapiens
  misc_RNA (1)...(19): siRNA sense strand
gaucaccaggaaagaguau

SEQ ID NO: 1541885 - RNA, 19 nt, Homo sapiens
  misc_RNA (1)...(19): siRNA sense strand
aaguuuggaucaccaggaa

SEQ ID NO: 1541886 - RNA, 19 nt, Homo sapiens
  misc_RNA (1)...(19): siRNA sense strand
aaugaugucugagcuucuu

SEQ ID NO: 1541887 - RNA, 19 nt, Homo sapiens
  misc_RNA (1)...(19): siRNA sense strand
aguacauucuggacaggua

SEQ ID NO: 1541888 - RNA, 19 nt, Homo sapiens
  misc_RNA (1)...(19): siRNA sense strand
gauguggaaagcaugaaug

SEQ ID NO: 1541889 - RNA, 19 nt, Homo sapiens
  misc_RNA (1)...(19): siRNA sense strand
ugaggauuauguggaagaa

SEQ ID NO: 1541890 - RNA, 19 nt, Homo sapiens
  misc_RNA (1)...(19): siRNA sense strand
ugcagugggcuaaucauuu

SEQ ID NO: 1541891 - RNA, 19 nt, Homo sapiens
  misc_RNA (1)...(19): siRNA sense strand
ucaccaggaaagaguauga

SEQ ID NO: 1541892 - RNA, 19 nt, Homo sapiens
  misc_RNA (1)...(19): siRNA sense strand
ggaucaccaggaaagagua

SEQ ID NO: 1541893 - RNA, 19 nt, Homo sapiens
  misc_RNA (1)...(19): siRNA sense strand
gauggaucaguuucacaaa

SEQ ID NO: 1541894 - RNA, 19 nt, Homo sapiens
  misc_RNA (1)...(19): siRNA sense strand
gguguccugauuauuauga

SEQ ID NO: 1541895 - RNA, 19 nt, Homo sapiens
  misc_RNA (1)...(19): siRNA sense strand
gugcagugggcuaaucauu

SEQ ID NO: 1541896 - RNA, 19 nt, Homo sapiens
  misc_RNA (1)...(19): siRNA sense strand
agaagaacaggcugggauu

SEQ ID NO: 1541897 - RNA, 19 nt, Homo sapiens
  misc_RNA (1)...(19): siRNA sense strand
agaauucgagcuccagaga

SEQ ID NO: 1541898 - RNA, 19 nt, Homo sapiens
  misc_RNA (1)...(19): siRNA sense strand
uuagaagggagauuagaug

SEQ ID NO: 1541899 - RNA, 19 nt, Homo sapiens
  misc_RNA (1)...(19): siRNA sense strand
aggaaagaguaugaagaaa

SEQ ID NO: 1541900 - RNA, 19 nt, Homo sapiens
  misc_RNA (1)...(19): siRNA sense strand
ggaccgacugcuauaugug

SEQ ID NO: 1541901 - RNA, 19 nt, Homo sapiens
  misc_RNA (1)...(19): siRNA sense strand
uggaccgacugcuauaugu

SEQ ID NO: 1541902 - RNA, 19 nt, Homo sapiens
  misc_RNA (1)...(19): siRNA sense strand
caggaaaugcugguucaga

SEQ ID NO: 1541903 - RNA, 19 nt, Homo sapiens
  misc_RNA (1)...(19): siRNA sense strand
aagccagaauggagaagga

SEQ ID NO: 1541904 - RNA, 19 nt, Homo sapiens
  misc_RNA (1)...(19): siRNA sense strand
ugaaagccagaauggagaa

SEQ ID NO: 1541905 - RNA, 19 nt, Homo sapiens
  misc_RNA (1)...(19): siRNA sense strand
gcaugaaagccagaaugga

SEQ ID NO: 1541906 - RNA, 19 nt, Homo sapiens
  misc_RNA (1)...(19): siRNA sense strand
ggcagaaacuggacacaau

SEQ ID NO: 1541907 - RNA, 19 nt, Homo sapiens
  misc_RNA (1)...(19): siRNA sense strand
gagcuucuguuuggcauga

SEQ ID NO: 1541908 - RNA, 19 nt, Homo sapiens
  misc_RNA (1)...(19): siRNA sense strand
ggaacggccuacucuccuu

SEQ ID NO: 1541909 - RNA, 19 nt, Homo sapiens
  misc_RNA (1)...(19): siRNA sense strand
gcagaaacuggacacaaug

SEQ ID NO: 1541910 - RNA, 19 nt, Homo sapiens
  misc_RNA (1)...(19): siRNA sense strand
cugaugaccucaccggauu

SEQ ID NO: 1541911 - RNA, 19 nt, Homo sapiens
  misc_RNA (1)...(19): siRNA sense strand
ggcuggagcuucuguuugg

SEQ ID NO: 1541912 - RNA, 19 nt, Homo sapiens
  misc_RNA (1)...(19): siRNA sense strand
gaauucuucuucacuccau

SEQ ID NO: 1541913 - RNA, 19 nt, Homo sapiens
  misc_RNA (1)...(19): siRNA sense strand
gacguguucuccacugaug

SEQ ID NO: 1541914 - RNA, 19 nt, Homo sapiens
  misc_RNA (1)...(19): siRNA sense strand
gcagccagaggaaggguuu

SEQ ID NO: 1541915 - RNA, 19 nt, Homo sapiens
  misc_RNA (1)...(19): siRNA sense strand
agaaagagaggcaaaauga

SEQ ID NO: 1541916 - RNA, 19 nt, Homo sapiens
  misc_RNA (1)...(19): siRNA sense strand
gccgcuugcugcuggauga

SEQ ID NO: 1541917 - RNA, 19 nt, Homo sapiens
  misc_RNA (1)...(19): siRNA sense strand
cugcaggaauucuucuuca

SEQ ID NO: 1541918 - RNA, 19 nt, Homo sapiens
  misc_RNA (1)...(19): siRNA sense strand
ccagagaaagagaggcaaa

SEQ ID NO: 1541919 - RNA, 19 nt, Homo sapiens
  misc_RNA (1)...(19): siRNA sense strand
gcaggaauucuucuucacu

SEQ ID NO: 1541920 - RNA, 19 nt, Homo sapiens
  misc_RNA (1)...(19): siRNA sense strand
cuucuucacuccauuugca

SEQ ID NO: 1541921 - RNA, 19 nt, Homo sapiens
  misc_RNA (1)...(19): siRNA sense strand
cagaaacuggacacaaugu

SEQ ID NO: 1541922 - RNA, 19 nt, Homo sapiens
  misc_RNA (1)...(19): siRNA sense strand
ccucgucacccgucauuuc

SEQ ID NO: 1541923 - RNA, 19 nt, Homo sapiens
  misc_RNA (1)...(19): siRNA sense strand
ggacguguucuccacugau

SEQ ID NO: 1541924 - RNA, 19 nt, Homo sapiens
  misc_RNA (1)...(19): siRNA sense strand
ucacuccaguagucagcaa

SEQ ID NO: 1541925 - RNA, 19 nt, Homo sapiens
  misc_RNA (1)...(19): siRNA sense strand
cucuguggcugcaggaauu

SEQ ID NO: 1541926 - RNA, 19 nt, Homo sapiens
  misc_RNA (1)...(19): siRNA sense strand
ggaggugauggacguguuc

SEQ ID NO: 1541927 - RNA, 19 nt, Homo sapiens
  misc_RNA (1)...(19): siRNA sense strand
cuucaggcccagagaaaga

SEQ ID NO: 1541928 - RNA, 19 nt, Homo sapiens
  misc_RNA (1)...(19): siRNA sense strand
ccucucggcuggagcuucu

SEQ ID NO: 1541929 - RNA, 19 nt, Homo sapiens
  misc_RNA (1)...(19): siRNA sense strand
gagaaagagaggcaaaaug

SEQ ID NO: 1541930 - RNA, 19 nt, Homo sapiens
  misc_RNA (1)...(19): siRNA sense strand
gcaggaggcuaaagagaua

SEQ ID NO: 1541931 - RNA, 19 nt, Homo sapiens
  misc_RNA (1)...(19): siRNA sense strand
uggcugagaugaaggaaua

SEQ ID NO: 1541932 - RNA, 19 nt, Homo sapiens
  misc_RNA (1)...(19): siRNA sense strand
gagaagcaugcaacaauua

SEQ ID NO: 1541933 - RNA, 19 nt, Homo sapiens
  misc_RNA (1)...(19): siRNA sense strand
ugacauaucuugggucuuc

SEQ ID NO: 1541934 - RNA, 19 nt, Homo sapiens
  misc_RNA (1)...(19): siRNA sense strand
ggaaacugauggaacucua

SEQ ID NO: 1541935 - RNA, 19 nt, Homo sapiens
  misc_RNA (1)...(19): siRNA sense strand
gaacccaccugccauacau

SEQ ID NO: 1541936 - RNA, 19 nt, Homo sapiens
  misc_RNA (1)...(19): siRNA sense strand
gggaucagcucuugcuuca

SEQ ID NO: 1541937 - RNA, 19 nt, Homo sapiens
  misc_RNA (1)...(19): siRNA sense strand
gagcucagccggucuauca

SEQ ID NO: 1541938 - RNA, 19 nt, Homo sapiens
  misc_RNA (1)...(19): siRNA sense strand
gaucagcucuugcuucacu

SEQ ID NO: 1541939 - RNA, 19 nt, Homo sapiens
  misc_RNA (1)...(19): siRNA sense strand
acuaagggcuucagucuug

SEQ ID NO: 1541940 - RNA, 19 nt, Homo sapiens
  misc_RNA (1)...(19): siRNA sense strand
gagcaaguaugaaagaaac

SEQ ID NO: 1541941 - RNA, 19 nt, Homo sapiens
  misc_RNA (1)...(19): siRNA sense strand
gcaaacggcuuggcugucu

SEQ ID NO: 1541942 - RNA, 19 nt, Homo sapiens
  misc_RNA (1)...(19): siRNA sense strand
gagaugaaggaauacauaa

SEQ ID NO: 1541943 - RNA, 19 nt, Homo sapiens
  misc_RNA (1)...(19): siRNA sense strand
gaucaucaauuggaaucaa

SEQ ID NO: 1541944 - RNA, 19 nt, Homo sapiens
  misc_RNA (1)...(19): siRNA sense strand
agaacaaucugccaguuau

SEQ ID NO: 1541945 - RNA, 19 nt, Homo sapiens
  misc_RNA (1)...(19): siRNA sense strand
ggugauggaugaacugcaa

SEQ ID NO: 1541946 - RNA, 19 nt, Homo sapiens
  misc_RNA (1)...(19): siRNA sense strand
gaauucaccuuggcucuag

SEQ ID NO: 1541947 - RNA, 19 nt, Homo sapiens
  misc_RNA (1)...(19): siRNA sense strand
agagaagcaugcaacaauu

SEQ ID NO: 1541948 - RNA, 19 nt, Homo sapiens
  misc_RNA (1)...(19): siRNA sense strand
ucauuugucuccucaagaa

SEQ ID NO: 1541949 - RNA, 19 nt, Homo sapiens
  misc_RNA (1)...(19): siRNA sense strand
caagaacaaucugccaguu

SEQ ID NO: 1541950 - RNA, 19 nt, Homo sapiens
  misc_RNA (1)...(19): siRNA sense strand
guacagcucggaaagagaa

SEQ ID NO: 1541951 - RNA, 19 nt, Homo sapiens
  misc_RNA (1)...(19): siRNA sense strand
cagacggacuggaaacuga

SEQ ID NO: 1541952 - RNA, 19 nt, Homo sapiens
  misc_RNA (1)...(19): siRNA sense strand
uaucuugggucuucucaga

SEQ ID NO: 1541953 - RNA, 19 nt, Homo sapiens
  misc_RNA (1)...(19): siRNA sense strand
gucuaucagugucgauuua

SEQ ID NO: 1541954 - RNA, 19 nt, Homo sapiens
  misc_RNA (1)...(19): siRNA sense strand
caauuggaaucaagucuca

SEQ ID NO: 1541955 - RNA, 19 nt, Homo sapiens
  misc_RNA (1)...(19): siRNA sense strand
gaaggaauacauaacaaag

SEQ ID NO: 1541956 - RNA, 19 nt, Homo sapiens
  misc_RNA (1)...(19): siRNA sense strand
ucaaggcguuucagaggaa

SEQ ID NO: 1541957 - RNA, 19 nt, Homo sapiens
  misc_RNA (1)...(19): siRNA sense strand
gaucucagccaccaggaaa

SEQ ID NO: 1541958 - RNA, 19 nt, Homo sapiens
  misc_RNA (1)...(19): siRNA sense strand
aaacuugaaccuuuccuaa

SEQ ID NO: 1541959 - RNA, 19 nt, Homo sapiens
  misc_RNA (1)...(19): siRNA sense strand
gaugaaggaauacauaaca

SEQ ID NO: 1541960 - RNA, 19 nt, Homo sapiens
  misc_RNA (1)...(19): siRNA sense strand
ugagaugaaggaauacaua

SEQ ID NO: 1541961 - RNA, 19 nt, Homo sapiens
  misc_RNA (1)...(19): siRNA sense strand
cgauuuagcagaaagcaaa

SEQ ID NO: 1541962 - RNA, 19 nt, Homo sapiens
  misc_RNA (1)...(19): siRNA sense strand
gaaagagaagcaugcaaca

SEQ ID NO: 1541963 - RNA, 19 nt, Homo sapiens
  misc_RNA (1)...(19): siRNA sense strand
guauggaguuggugaugga

SEQ ID NO: 1541964 - RNA, 19 nt, Homo sapiens
  misc_RNA (1)...(19): siRNA sense strand
gauauuguccagaggauca

SEQ ID NO: 1541965 - RNA, 19 nt, Homo sapiens
  misc_RNA (1)...(19): siRNA sense strand
aagaacaaucugccaguua

SEQ ID NO: 1541966 - RNA, 19 nt, Homo sapiens
  misc_RNA (1)...(19): siRNA sense strand
caaaauuacugaggucaaa

SEQ ID NO: 1541967 - RNA, 19 nt, Homo sapiens
  misc_RNA (1)...(19): siRNA sense strand
gagauauuguccagaggau

SEQ ID NO: 1541968 - RNA, 19 nt, Homo sapiens
  misc_RNA (1)...(19): siRNA sense strand
cagugucgauuuagcagaa

SEQ ID NO: 1541969 - RNA, 19 nt, Homo sapiens
  misc_RNA (1)...(19): siRNA sense strand
ggaccagugaugucuaaga

SEQ ID NO: 1541970 - RNA, 19 nt, Homo sapiens
  misc_RNA (1)...(19): siRNA sense strand
caaaguggaaccuaugaca

SEQ ID NO: 1541971 - RNA, 19 nt, Homo sapiens
  misc_RNA (1)...(19): siRNA sense strand
aaggaccagugaugucuaa

SEQ ID NO: 1541972 - RNA, 19 nt, Homo sapiens
  misc_RNA (1)...(19): siRNA sense strand
gcgagcaaguaugaaagaa

SEQ ID NO: 1541973 - RNA, 19 nt, Homo sapiens
  misc_RNA (1)...(19): siRNA sense strand
ggucaaaguggaaccuaug

SEQ ID NO: 1541974 - RNA, 19 nt, Homo sapiens
  misc_RNA (1)...(19): siRNA sense strand
gaagcaugcaacaauuaga

SEQ ID NO: 1541975 - RNA, 19 nt, Homo sapiens
  misc_RNA (1)...(19): siRNA sense strand
aagagaagcaugcaacaau

SEQ ID NO: 1541976 - RNA, 19 nt, Homo sapiens
  misc_RNA (1)...(19): siRNA sense strand
uggaguuggugauggauga

SEQ ID NO: 1541977 - RNA, 19 nt, Homo sapiens
  misc_RNA (1)...(19): siRNA sense strand
gaacaaucugccaguuauc

SEQ ID NO: 1541978 - RNA, 19 nt, Homo sapiens
  misc_RNA (1)...(19): siRNA sense strand
acagaacccaccugccaua

SEQ ID NO: 1541979 - RNA, 19 nt, Homo sapiens
  misc_RNA (1)...(19): siRNA sense strand
ccaguucccaguucucuau

SEQ ID NO: 1541980 - RNA, 19 nt, Homo sapiens
  misc_RNA (1)...(19): siRNA sense strand
cgagcaaguaugaaagaaa

SEQ ID NO: 1541981 - RNA, 19 nt, Homo sapiens
  misc_RNA (1)...(19): siRNA sense strand
aaacagcugcaggccuuua

SEQ ID NO: 1541982 - RNA, 19 nt, Homo sapiens
  misc_RNA (1)...(19): siRNA sense strand
gcaaggaucagugaaacag

SEQ ID NO: 1541983 - RNA, 19 nt, Homo sapiens
  misc_RNA (1)...(19): siRNA sense strand
guucccaguucucuauuca

SEQ ID NO: 1541984 - RNA, 19 nt, Homo sapiens
  misc_RNA (1)...(19): siRNA sense strand
ucccaguucucuauucaga

SEQ ID NO: 1541985 - RNA, 19 nt, Homo sapiens
  misc_RNA (1)...(19): siRNA sense strand
gacuugggaucagcucuug

SEQ ID NO: 1541986 - RNA, 19 nt, Homo sapiens
  misc_RNA (1)...(19): siRNA sense strand
gcggcgagcaaguaugaaa

SEQ ID NO: 1541987 - RNA, 19 nt, Homo sapiens
  misc_RNA (1)...(19): siRNA sense strand
uuacagaaccagagcaaag

SEQ ID NO: 1541988 - RNA, 19 nt, Homo sapiens
  misc_RNA (1)...(19): siRNA sense strand
ggucuaucagugucgauuu

SEQ ID NO: 1541989 - RNA, 19 nt, Homo sapiens
  misc_RNA (1)...(19): siRNA sense strand
cuguggaaguguuugcuaa

SEQ ID NO: 1541990 - RNA, 19 nt, Homo sapiens
  misc_RNA (1)...(19): siRNA sense strand
ggacuggaaacugauggaa

SEQ ID NO: 1541991 - RNA, 19 nt, Homo sapiens
  misc_RNA (1)...(19): siRNA sense strand
gcaaguaugaaagaaacga

SEQ ID NO: 1541992 - RNA, 19 nt, Homo sapiens
  misc_RNA (1)...(19): siRNA sense strand
caguacagcucggaaagag

SEQ ID NO: 1541993 - RNA, 19 nt, Homo sapiens
  misc_RNA (1)...(19): siRNA sense strand
gagaugaaucaaggcguuu

SEQ ID NO: 1541994 - RNA, 19 nt, Homo sapiens
  misc_RNA (1)...(19): siRNA sense strand
aagcaucuucucuuucuga

SEQ ID NO: 1541995 - RNA, 19 nt, Homo sapiens
  misc_RNA (1)...(19): siRNA sense strand
gaaacugauggaacucuac

SEQ ID NO: 1541996 - RNA, 19 nt, Homo sapiens
  misc_RNA (1)...(19): siRNA sense strand
ggaugaacugcaaggauca

SEQ ID NO: 1541997 - RNA, 19 nt, Homo sapiens
  misc_RNA (1)...(19): siRNA sense strand
caacugaggccaaaauuac

SEQ ID NO: 1541998 - RNA, 19 nt, Homo sapiens
  misc_RNA (1)...(19): siRNA sense strand
caaguaugaaagaaacgaa

SEQ ID NO: 1541999 - RNA, 19 nt, Homo sapiens
  misc_RNA (1)...(19): siRNA sense strand
uccagaaggugucaguaca

SEQ ID NO: 1542000 - RNA, 19 nt, Homo sapiens
  misc_RNA (1)...(19): siRNA sense strand
aaaccugacuaccagaaaa

SEQ ID NO: 1542001 - RNA, 19 nt, Homo sapiens
  misc_RNA (1)...(19): siRNA sense strand
cagcaggaggcuaaagaga

SEQ ID NO: 1542002 - RNA, 19 nt, Homo sapiens
  misc_RNA (1)...(19): siRNA sense strand
gcagacggacuggaaacug

SEQ ID NO: 1542003 - RNA, 19 nt, Homo sapiens
  misc_RNA (1)...(19): siRNA sense strand
aaagagaagcaugcaacaa

SEQ ID NO: 1542004 - RNA, 19 nt, Homo sapiens
  misc_RNA (1)...(19): siRNA sense strand
ucaguccuguggaaguguu

SEQ ID NO: 1542005 - RNA, 19 nt, Homo sapiens
  misc_RNA (1)...(19): siRNA sense strand
acacuaagggcuucagucu

SEQ ID NO: 1542006 - RNA, 19 nt, Homo sapiens
  misc_RNA (1)...(19): siRNA sense strand
gcugcaggccuuuauggau

SEQ ID NO: 1542007 - RNA, 19 nt, Homo sapiens
  misc_RNA (1)...(19): siRNA sense strand
gaaacagcugcaggccuuu

SEQ ID NO: 1542008 - RNA, 19 nt, Homo sapiens
  misc_RNA (1)...(19): siRNA sense strand
uaucaagacaggaggcaau

SEQ ID NO: 1542009 - RNA, 19 nt, Homo sapiens
  misc_RNA (1)...(19): siRNA sense strand
aggaucaacugaggccaaa

SEQ ID NO: 1542010 - RNA, 19 nt, Homo sapiens
  misc_RNA (1)...(19): siRNA sense strand
ggcgagcaaguaugaaaga

SEQ ID NO: 1542011 - RNA, 19 nt, Homo sapiens
  misc_RNA (1)...(19): siRNA sense strand
cuaagggcuucagucuuga

SEQ ID NO: 1542012 - RNA, 19 nt, Homo sapiens
  misc_RNA (1)...(19): siRNA sense strand
gcuuggcugucuccugcuu

SEQ ID NO: 1542013 - RNA, 19 nt, Homo sapiens
  misc_RNA (1)...(19): siRNA sense strand
acuggaaacugauggaacu

SEQ ID NO: 1542014 - RNA, 19 nt, Homo sapiens
  misc_RNA (1)...(19): siRNA sense strand
gaagucgcugcaucccauu

SEQ ID NO: 1542015 - RNA, 19 nt, Homo sapiens
  misc_RNA (1)...(19): siRNA sense strand
gcuuuccaguucccaguuc

SEQ ID NO: 1542016 - RNA, 19 nt, Homo sapiens
  misc_RNA (1)...(19): siRNA sense strand
ucucaguccuguggaagug

SEQ ID NO: 1542017 - RNA, 19 nt, Homo sapiens
  misc_RNA (1)...(19): siRNA sense strand
guacccagugcuuccagaa

SEQ ID NO: 1542018 - RNA, 19 nt, Homo sapiens
  misc_RNA (1)...(19): siRNA sense strand
agaauucaccuuggcucua

SEQ ID NO: 1542019 - RNA, 19 nt, Homo sapiens
  misc_RNA (1)...(19): siRNA sense strand
cuuuagaacgucagacuug

SEQ ID NO: 1542020 - RNA, 19 nt, Homo sapiens
  misc_RNA (1)...(19): siRNA sense strand
gagccaaagcaucuucucu

SEQ ID NO: 1542021 - RNA, 19 nt, Homo sapiens
  misc_RNA (1)...(19): siRNA sense strand
gcaggccuuuauggaugaa

SEQ ID NO: 1542022 - RNA, 19 nt, Homo sapiens
  misc_RNA (1)...(19): siRNA sense strand
ugcaggccuuuauggauga

SEQ ID NO: 1542023 - RNA, 19 nt, Homo sapiens
  misc_RNA (1)...(19): siRNA sense strand
gucaaaguggaaccuauga

SEQ ID NO: 1542024 - RNA, 19 nt, Homo sapiens
  misc_RNA (1)...(19): siRNA sense strand
gaaaugcaguuguuuaucg

SEQ ID NO: 1542025 - RNA, 19 nt, Homo sapiens
  misc_RNA (1)...(19): siRNA sense strand
aaugggagauacaacuuua

SEQ ID NO: 1542026 - RNA, 19 nt, Homo sapiens
  misc_RNA (1)...(19): siRNA sense strand
gagaacggcaacuccaaua

SEQ ID NO: 1542027 - RNA, 19 nt, Homo sapiens
  misc_RNA (1)...(19): siRNA sense strand
agaaugaccugcugacauc

SEQ ID NO: 1542028 - RNA, 19 nt, Homo sapiens
  misc_RNA (1)...(19): siRNA sense strand
ggaccacgcugaggaacga

SEQ ID NO: 1542029 - RNA, 19 nt, Homo sapiens
  misc_RNA (1)...(19): siRNA sense strand
gaaugggagauacaacuuu

SEQ ID NO: 1542030 - RNA, 19 nt, Homo sapiens
  misc_RNA (1)...(19): siRNA sense strand
gaacggcaacuccaauaag

SEQ ID NO: 1542031 - RNA, 19 nt, Homo sapiens
  misc_RNA (1)...(19): siRNA sense strand
ccaauaaggcccaguucaa

SEQ ID NO: 1542032 - RNA, 19 nt, Homo sapiens
  misc_RNA (1)...(19): siRNA sense strand
gaacagccacccuucugau

SEQ ID NO: 1542033 - RNA, 19 nt, Homo sapiens
  misc_RNA (1)...(19): siRNA sense strand
gagaaugaaugggagauac

SEQ ID NO: 1542034 - RNA, 19 nt, Homo sapiens
  misc_RNA (1)...(19): siRNA sense strand
acaccaacgugauugagaa

SEQ ID NO: 1542035 - RNA, 19 nt, Homo sapiens
  misc_RNA (1)...(19): siRNA sense strand
ggaacagccacccuucuga

SEQ ID NO: 1542036 - RNA, 19 nt, Homo sapiens
  misc_RNA (1)...(19): siRNA sense strand
ucccauaccucagaauuau

SEQ ID NO: 1542037 - RNA, 19 nt, Homo sapiens
  misc_RNA (1)...(19): siRNA sense strand
uuaccgaaaugcaguuguu

SEQ ID NO: 1542038 - RNA, 19 nt, Homo sapiens
  misc_RNA (1)...(19): siRNA sense strand
gcuaccagguguucuacga

SEQ ID NO: 1542039 - RNA, 19 nt, Homo sapiens
  misc_RNA (1)...(19): siRNA sense strand
guuaugugguccuuauugu

SEQ ID NO: 1542040 - RNA, 19 nt, Homo sapiens
  misc_RNA (1)...(19): siRNA sense strand
cuacugcgccuuccagaau

SEQ ID NO: 1542041 - RNA, 19 nt, Homo sapiens
  misc_RNA (1)...(19): siRNA sense strand
ccacggcgcugggaauuuu

SEQ ID NO: 1542042 - RNA, 19 nt, Homo sapiens
  misc_RNA (1)...(19): siRNA sense strand
gaucgugcgcuaccagaga

SEQ ID NO: 1542043 - RNA, 19 nt, Homo sapiens
  misc_RNA (1)...(19): siRNA sense strand
ccgguuaugugguccuuau

SEQ ID NO: 1542044 - RNA, 19 nt, Homo sapiens
  misc_RNA (1)...(19): siRNA sense strand
gaaugaaugggagauacaa

SEQ ID NO: 1542045 - RNA, 19 nt, Homo sapiens
  misc_RNA (1)...(19): siRNA sense strand
ccgaaaugcaguuguuuau

SEQ ID NO: 1542046 - RNA, 19 nt, Homo sapiens
  misc_RNA (1)...(19): siRNA sense strand
gguuaugugguccuuauug

SEQ ID NO: 1542047 - RNA, 19 nt, Homo sapiens
  misc_RNA (1)...(19): siRNA sense strand
caauaaggcccaguucaag

SEQ ID NO: 1542048 - RNA, 19 nt, Homo sapiens
  misc_RNA (1)...(19): siRNA sense strand
uaccagguguucuacgaau

SEQ ID NO: 1542049 - RNA, 19 nt, Homo sapiens
  misc_RNA (1)...(19): siRNA sense strand
gggaacagccacccuucug

SEQ ID NO: 1542050 - RNA, 19 nt, Homo sapiens
  misc_RNA (1)...(19): siRNA sense strand
cagaaugaccugcugacau

SEQ ID NO: 1542051 - RNA, 19 nt, Homo sapiens
  misc_RNA (1)...(19): siRNA sense strand
ccauaccucagaauuauag

SEQ ID NO: 1542052 - RNA, 19 nt, Homo sapiens
  misc_RNA (1)...(19): siRNA sense strand
agaacggcaacuccaauaa

SEQ ID NO: 1542053 - RNA, 19 nt, Homo sapiens
  misc_RNA (1)...(19): siRNA sense strand
acacauacaccaacgugau

SEQ ID NO: 1542054 - RNA, 19 nt, Homo sapiens
  misc_RNA (1)...(19): siRNA sense strand
cccaucaccuucagcuuca

SEQ ID NO: 1542055 - RNA, 19 nt, Homo sapiens
  misc_RNA (1)...(19): siRNA sense strand
cacauacaccaacgugauu

SEQ ID NO: 1542056 - RNA, 19 nt, Homo sapiens
  misc_RNA (1)...(19): siRNA sense strand
ucagcuaccagguguucua

SEQ ID NO: 1542057 - RNA, 19 nt, Homo sapiens
  misc_RNA (1)...(19): siRNA sense strand
ugggagauacaacuuuaaa

SEQ ID NO: 1542058 - RNA, 19 nt, Homo sapiens
  misc_RNA (1)...(19): siRNA sense strand
ugaaugggagauacaacuu

SEQ ID NO: 1542059 - RNA, 19 nt, Homo sapiens
  misc_RNA (1)...(19): siRNA sense strand
ggagccacgugcaaaauca

SEQ ID NO: 1542060 - RNA, 19 nt, Homo sapiens
  misc_RNA (1)...(19): siRNA sense strand
accagguguucuacgaaua

SEQ ID NO: 1542061 - RNA, 19 nt, Homo sapiens
  misc_RNA (1)...(19): siRNA sense strand
ccagguguucuacgaauag

SEQ ID NO: 1542062 - RNA, 19 nt, Homo sapiens
  misc_RNA (1)...(19): siRNA sense strand
caucauccaccaccugaag

SEQ ID NO: 1542063 - RNA, 19 nt, Homo sapiens
  misc_RNA (1)...(19): siRNA sense strand
cgaaaugcaguuguuuauc

SEQ ID NO: 1542064 - RNA, 19 nt, Homo sapiens
  misc_RNA (1)...(19): siRNA sense strand
agagaaugaaugggagaua

SEQ ID NO: 1542065 - RNA, 19 nt, Homo sapiens
  misc_RNA (1)...(19): siRNA sense strand
accuucagcuucauuaaca

SEQ ID NO: 1542066 - RNA, 19 nt, Homo sapiens
  misc_RNA (1)...(19): siRNA sense strand
ucagaauuauagcgugucu

SEQ ID NO: 1542067 - RNA, 19 nt, Homo sapiens
  misc_RNA (1)...(19): siRNA sense strand
cagagcaacaugacgaaca

SEQ ID NO: 1542068 - RNA, 19 nt, Homo sapiens
  misc_RNA (1)...(19): siRNA sense strand
cucccauaccucagaauua

SEQ ID NO: 1542069 - RNA, 19 nt, Homo sapiens
  misc_RNA (1)...(19): siRNA sense strand
gaacaaagaugaauagaug

SEQ ID NO: 1542070 - RNA, 19 nt, Homo sapiens
  misc_RNA (1)...(19): siRNA sense strand
gaagaaagauggauagaug

SEQ ID NO: 1542071 - RNA, 19 nt, Homo sapiens
  misc_RNA (1)...(19): siRNA sense strand
gaaguaagguaggaagaaa

SEQ ID NO: 1542072 - RNA, 19 nt, Homo sapiens
  misc_RNA (1)...(19): siRNA sense strand
gaaagaaggaggaaauaug

SEQ ID NO: 1542073 - RNA, 19 nt, Homo sapiens
  misc_RNA (1)...(19): siRNA sense strand
gaaggaagaaagauggaua

SEQ ID NO: 1542074 - RNA, 19 nt, Homo sapiens
  misc_RNA (1)...(19): siRNA sense strand
gaaggaacaaagaugaaua

SEQ ID NO: 1542075 - RNA, 19 nt, Homo sapiens
  misc_RNA (1)...(19): siRNA sense strand
gaaaggaagaaguaaggua

SEQ ID NO: 1542076 - RNA, 19 nt, Homo sapiens
  misc_RNA (1)...(19): siRNA sense strand
gaaagaggaagucaaggaa

SEQ ID NO: 1542077 - RNA, 19 nt, Homo sapiens
  misc_RNA (1)...(19): siRNA sense strand
gggaagaaaggaagaagua

SEQ ID NO: 1542078 - RNA, 19 nt, Homo sapiens
  misc_RNA (1)...(19): siRNA sense strand
gaaagaagggagagaggaa

SEQ ID NO: 1542079 - RNA, 19 nt, Homo sapiens
  misc_RNA (1)...(19): siRNA sense strand
gaaagaagggagagaggaa

SEQ ID NO: 1542080 - RNA, 19 nt, Homo sapiens
  misc_RNA (1)...(19): siRNA sense strand
ggaaagaggaagucaagga

SEQ ID NO: 1542081 - RNA, 19 nt, Homo sapiens
  misc_RNA (1)...(19): siRNA sense strand
gaaggaggaaauauggaua

SEQ ID NO: 1542082 - RNA, 19 nt, Homo sapiens
  misc_RNA (1)...(19): siRNA sense strand
gaaggaaggauauauggau

SEQ ID NO: 1542083 - RNA, 19 nt, Homo sapiens
  misc_RNA (1)...(19): siRNA sense strand
gaaggaaggaagaaagaug

SEQ ID NO: 1542084 - RNA, 19 nt, Homo sapiens
  misc_RNA (1)...(19): siRNA sense strand
ggaaggauauauggaugga

SEQ ID NO: 1542085 - RNA, 19 nt, Homo sapiens
  misc_RNA (1)...(19): siRNA sense strand
gaaggaaggaaggauauau

SEQ ID NO: 1542086 - RNA, 19 nt, Homo sapiens
  misc_RNA (1)...(19): siRNA sense strand
ggaaagaaggaggaaauau

SEQ ID NO: 1542087 - RNA, 19 nt, Homo sapiens
  misc_RNA (1)...(19): siRNA sense strand
gaggaaggaacaaagauga

SEQ ID NO: 1542088 - RNA, 19 nt, Homo sapiens
  misc_RNA (1)...(19): siRNA sense strand
gaagaaggaggaaggaaca

SEQ ID NO: 1542089 - RNA, 19 nt, Homo sapiens
  misc_RNA (1)...(19): siRNA sense strand
gagaaggaaggaagaaaga

SEQ ID NO: 1542090 - RNA, 19 nt, Homo sapiens
  misc_RNA (1)...(19): siRNA sense strand
gaaagauggauagauggua

SEQ ID NO: 1542091 - RNA, 19 nt, Homo sapiens
  misc_RNA (1)...(19): siRNA sense strand
ggaagaaaggaagaaguaa

SEQ ID NO: 1542092 - RNA, 19 nt, Homo sapiens
  misc_RNA (1)...(19): siRNA sense strand
augaauagauggauagaug

SEQ ID NO: 1542093 - RNA, 19 nt, Homo sapiens
  misc_RNA (1)...(19): siRNA sense strand
ggaaggaaggaaggauaua

SEQ ID NO: 1542094 - RNA, 19 nt, Homo sapiens
  misc_RNA (1)...(19): siRNA sense strand
gaagaaaggaagaaguaag

SEQ ID NO: 1542095 - RNA, 19 nt, Homo sapiens
  misc_RNA (1)...(19): siRNA sense strand
ggaacaaagaugaauagau

SEQ ID NO: 1542096 - RNA, 19 nt, Homo sapiens
  misc_RNA (1)...(19): siRNA sense strand
ggagagaggagagaaggaa

SEQ ID NO: 1542097 - RNA, 19 nt, Homo sapiens
  misc_RNA (1)...(19): siRNA sense strand
ggaaggaaggaaagaagga

SEQ ID NO: 1542098 - RNA, 19 nt, Homo sapiens
  misc_RNA (1)...(19): siRNA sense strand
gaauggauggcaagaagga

SEQ ID NO: 1542099 - RNA, 19 nt, Homo sapiens
  misc_RNA (1)...(19): siRNA sense strand
ggaggaaggaacaaagaug

SEQ ID NO: 1542100 - RNA, 19 nt, Homo sapiens
  misc_RNA (1)...(19): siRNA sense strand
gaaagaggaaagaggaagu

SEQ ID NO: 1542101 - RNA, 19 nt, Homo sapiens
  misc_RNA (1)...(19): siRNA sense strand
gagagaggaaggaaggaaa

SEQ ID NO: 1542102 - RNA, 19 nt, Homo sapiens
  misc_RNA (1)...(19): siRNA sense strand
gagagaggaaggaaggaaa

SEQ ID NO: 1542103 - RNA, 19 nt, Homo sapiens
  misc_RNA (1)...(19): siRNA sense strand
gaggaaagaggaagucaag

SEQ ID NO: 1542104 - RNA, 19 nt, Homo sapiens
  misc_RNA (1)...(19): siRNA sense strand
gaaggaggaaggaacaaag

SEQ ID NO: 1542105 - RNA, 19 nt, Homo sapiens
  misc_RNA (1)...(19): siRNA sense strand
gaauagauggauagaugga

SEQ ID NO: 1542106 - RNA, 19 nt, Homo sapiens
  misc_RNA (1)...(19): siRNA sense strand
ggaaggaacaaagaugaau

SEQ ID NO: 1542107 - RNA, 19 nt, Homo sapiens
  misc_RNA (1)...(19): siRNA sense strand
ggaagaaagauggauagau

SEQ ID NO: 1542108 - RNA, 19 nt, Homo sapiens
  misc_RNA (1)...(19): siRNA sense strand
ggagggaggagggaagaaa

SEQ ID NO: 1542109 - RNA, 19 nt, Homo sapiens
  misc_RNA (1)...(19): siRNA sense strand
ggaaggaaggauauaugga

SEQ ID NO: 1542110 - RNA, 19 nt, Homo sapiens
  misc_RNA (1)...(19): siRNA sense strand
auggauagaugguaggaaa

SEQ ID NO: 1542111 - RNA, 19 nt, Homo sapiens
  misc_RNA (1)...(19): siRNA sense strand
gauauaugcaugaauggau

SEQ ID NO: 1542112 - RNA, 19 nt, Homo sapiens
  misc_RNA (1)...(19): siRNA sense strand
gagagaaggaaggaagaaa

SEQ ID NO: 1542113 - RNA, 19 nt, Homo sapiens
  misc_RNA (1)...(19): siRNA sense strand
ggagagaaggaaggaagaa

SEQ ID NO: 1542114 - RNA, 19 nt, Homo sapiens
  misc_RNA (1)...(19): siRNA sense strand
gaagggagagaggaaggaa

SEQ ID NO: 1542115 - RNA, 19 nt, Homo sapiens
  misc_RNA (1)...(19): siRNA sense strand
gaagggagagaggaaggaa

SEQ ID NO: 1542116 - RNA, 19 nt, Homo sapiens
  misc_RNA (1)...(19): siRNA sense strand
gggaaggaaggaaggauau

SEQ ID NO: 1542117 - RNA, 19 nt, Homo sapiens
  misc_RNA (1)...(19): siRNA sense strand
ggagagaggaaggaaggaa

SEQ ID NO: 1542118 - RNA, 19 nt, Homo sapiens
  misc_RNA (1)...(19): siRNA sense strand
aaagaaggaggaaauaugg

SEQ ID NO: 1542119 - RNA, 19 nt, Homo sapiens
  misc_RNA (1)...(19): siRNA sense strand
ggagagaggaaggaaggaa

SEQ ID NO: 1542120 - RNA, 19 nt, Homo sapiens
  misc_RNA (1)...(19): siRNA sense strand
ggagggaggagagaaggaa

SEQ ID NO: 1542121 - RNA, 19 nt, Homo sapiens
  misc_RNA (1)...(19): siRNA sense strand
ggaaggagagagggagaga

SEQ ID NO: 1542122 - RNA, 19 nt, Homo sapiens
  misc_RNA (1)...(19): siRNA sense strand
ggaagaaguaagguaggaa

SEQ ID NO: 1542123 - RNA, 19 nt, Homo sapiens
  misc_RNA (1)...(19): siRNA sense strand
auggauauaugcaugaaug

SEQ ID NO: 1542124 - RNA, 19 nt, Homo sapiens
  misc_RNA (1)...(19): siRNA sense strand
gaaggaaagaaggaggaaa

SEQ ID NO: 1542125 - RNA, 19 nt, Homo sapiens
  misc_RNA (1)...(19): siRNA sense strand
ggaggagggaagaaaggaa

SEQ ID NO: 1542126 - RNA, 19 nt, Homo sapiens
  misc_RNA (1)...(19): siRNA sense strand
gaggaaggaaggaaagaag

SEQ ID NO: 1542127 - RNA, 19 nt, Homo sapiens
  misc_RNA (1)...(19): siRNA sense strand
gaggaaggaaggaaagaag

SEQ ID NO: 1542128 - RNA, 19 nt, Homo sapiens
  misc_RNA (1)...(19): siRNA sense strand
ugacaggaagggaaggaaa

SEQ ID NO: 1542129 - RNA, 19 nt, Homo sapiens
  misc_RNA (1)...(19): siRNA sense strand
ggaaggaaagaaggaggaa

SEQ ID NO: 1542130 - RNA, 19 nt, Homo sapiens
  misc_RNA (1)...(19): siRNA sense strand
gaaggaaagaagggagaga

SEQ ID NO: 1542131 - RNA, 19 nt, Homo sapiens
  misc_RNA (1)...(19): siRNA sense strand
gaaggaaagaagggagaga

SEQ ID NO: 1542132 - RNA, 19 nt, Homo sapiens
  misc_RNA (1)...(19): siRNA sense strand
auggauagauggaagaaag

SEQ ID NO: 1542133 - RNA, 19 nt, Homo sapiens
  misc_RNA (1)...(19): siRNA sense strand
ggagggaagaaaggaagaa

SEQ ID NO: 1542134 - RNA, 19 nt, Homo sapiens
  misc_RNA (1)...(19): siRNA sense strand
ggauauaugcaugaaugga

SEQ ID NO: 1542135 - RNA, 19 nt, Homo sapiens
  misc_RNA (1)...(19): siRNA sense strand
gagaggagagaaggaagga

SEQ ID NO: 1542136 - RNA, 19 nt, Homo sapiens
  misc_RNA (1)...(19): siRNA sense strand
gagaggaaggaaggaaaga

SEQ ID NO: 1542137 - RNA, 19 nt, Homo sapiens
  misc_RNA (1)...(19): siRNA sense strand
gagaggaaggaaggaaaga

SEQ ID NO: 1542138 - RNA, 19 nt, Homo sapiens
  misc_RNA (1)...(19): siRNA sense strand
gauagauggaagaaaggaa

SEQ ID NO: 1542139 - RNA, 19 nt, Homo sapiens
  misc_RNA (1)...(19): siRNA sense strand
acaaagaugaauagaugga

SEQ ID NO: 1542140 - RNA, 19 nt, Homo sapiens
  misc_RNA (1)...(19): siRNA sense strand
aaggaaagaaggaggaaau

SEQ ID NO: 1542141 - RNA, 19 nt, Homo sapiens
  misc_RNA (1)...(19): siRNA sense strand
agaaguaagguaggaagaa

SEQ ID NO: 1542142 - RNA, 19 nt, Homo sapiens
  misc_RNA (1)...(19): siRNA sense strand
ggauauauggauggagaga

SEQ ID NO: 1542143 - RNA, 19 nt, Homo sapiens
  misc_RNA (1)...(19): siRNA sense strand
augaauggauggcaagaag

SEQ ID NO: 1542144 - RNA, 19 nt, Homo sapiens
  misc_RNA (1)...(19): siRNA sense strand
ggauagauggaagaaagga

SEQ ID NO: 1542145 - RNA, 19 nt, Homo sapiens
  misc_RNA (1)...(19): siRNA sense strand
aggaagaaguaagguagga

SEQ ID NO: 1542146 - RNA, 19 nt, Homo sapiens
  misc_RNA (1)...(19): siRNA sense strand
ggagggagggaggagagaa

SEQ ID NO: 1542147 - RNA, 19 nt, Homo sapiens
  misc_RNA (1)...(19): siRNA sense strand
auagauggaagaaaggaaa

SEQ ID NO: 1542148 - RNA, 19 nt, Homo sapiens
  misc_RNA (1)...(19): siRNA sense strand
ggaaggaagaaagauggau

SEQ ID NO: 1542149 - RNA, 19 nt, Homo sapiens
  misc_RNA (1)...(19): siRNA sense strand
aggaaagaaggaggaaaua

SEQ ID NO: 1542150 - RNA, 19 nt, Homo sapiens
  misc_RNA (1)...(19): siRNA sense strand
agaaggaggaaggaacaaa

SEQ ID NO: 1542151 - RNA, 19 nt, Homo sapiens
  misc_RNA (1)...(19): siRNA sense strand
agaaggaggaaauauggau

SEQ ID NO: 1542152 - RNA, 19 nt, Homo sapiens
  misc_RNA (1)...(19): siRNA sense strand
gcaugaggcugaaaucuuc

SEQ ID NO: 1542153 - RNA, 19 nt, Homo sapiens
  misc_RNA (1)...(19): siRNA sense strand
ccaaggagcuggucgacau

SEQ ID NO: 1542154 - RNA, 19 nt, Homo sapiens
  misc_RNA (1)...(19): siRNA sense strand
gaucacaacccaccaccua

SEQ ID NO: 1542155 - RNA, 19 nt, Homo sapiens
  misc_RNA (1)...(19): siRNA sense strand
gcagaggucccaccagauc

SEQ ID NO: 1542156 - RNA, 19 nt, Homo sapiens
  misc_RNA (1)...(19): siRNA sense strand
ccagaucuagcgcucaaua

SEQ ID NO: 1542157 - RNA, 19 nt, Homo sapiens
  misc_RNA (1)...(19): siRNA sense strand
cccaagagcucagacacaa

SEQ ID NO: 1542158 - RNA, 19 nt, Homo sapiens
  misc_RNA (1)...(19): siRNA sense strand
caacccaccaccuacauga

SEQ ID NO: 1542159 - RNA, 19 nt, Homo sapiens
  misc_RNA (1)...(19): siRNA sense strand
caccagaucuagcgcucaa

SEQ ID NO: 1542160 - RNA, 19 nt, Homo sapiens
  misc_RNA (1)...(19): siRNA sense strand
caagagcucagacacaaag

SEQ ID NO: 1542161 - RNA, 19 nt, Homo sapiens
  misc_RNA (1)...(19): siRNA sense strand
gagcuggucgacauucaga

SEQ ID NO: 1542162 - RNA, 19 nt, Homo sapiens
  misc_RNA (1)...(19): siRNA sense strand
gaucuagcgcucaauaagg

SEQ ID NO: 1542163 - RNA, 19 nt, Homo sapiens
  misc_RNA (1)...(19): siRNA sense strand
gcugaagagugagauccuu

SEQ ID NO: 1542164 - RNA, 19 nt, Homo sapiens
  misc_RNA (1)...(19): siRNA sense strand
gcacuggugacgcgugugu

SEQ ID NO: 1542165 - RNA, 19 nt, Homo sapiens
  misc_RNA (1)...(19): siRNA sense strand
cagaucuagcgcucaauaa

SEQ ID NO: 1542166 - RNA, 19 nt, Homo sapiens
  misc_RNA (1)...(19): siRNA sense strand
agugggcgcuggagcauca

SEQ ID NO: 1542167 - RNA, 19 nt, Homo sapiens
  misc_RNA (1)...(19): siRNA sense strand
gagagggcagcaccagaga

SEQ ID NO: 1542168 - RNA, 19 nt, Homo sapiens
  misc_RNA (1)...(19): siRNA sense strand
gccaggagagggacuuuua

SEQ ID NO: 1542169 - RNA, 19 nt, Homo sapiens
  misc_RNA (1)...(19): siRNA sense strand
ccaagagcucagacacaaa

SEQ ID NO: 1542170 - RNA, 19 nt, Homo sapiens
  misc_RNA (1)...(19): siRNA sense strand
gaagugggcgcuggagcau

SEQ ID NO: 1542171 - RNA, 19 nt, Homo sapiens
  misc_RNA (1)...(19): siRNA sense strand
caaggagcuggucgacauu

SEQ ID NO: 1542172 - RNA, 19 nt, Homo sapiens
  misc_RNA (1)...(19): siRNA sense strand
ggucgacauucagaucaca

SEQ ID NO: 1542173 - RNA, 19 nt, Homo sapiens
  misc_RNA (1)...(19): siRNA sense strand
ccaccuacaugagcagcau

SEQ ID NO: 1542174 - RNA, 19 nt, Homo sapiens
  misc_RNA (1)...(19): siRNA sense strand
ucacaacccaccaccuaca

SEQ ID NO: 1542175 - RNA, 19 nt, Homo sapiens
  misc_RNA (1)...(19): siRNA sense strand
gaacaaaccuuaccuuuau

SEQ ID NO: 1542176 - RNA, 19 nt, Homo sapiens
  misc_RNA (1)...(19): siRNA sense strand
gaacugcagugaacucuuu

SEQ ID NO: 1542177 - RNA, 19 nt, Homo sapiens
  misc_RNA (1)...(19): siRNA sense strand
ggaacaaaccuuaccuuua

SEQ ID NO: 1542178 - RNA, 19 nt, Homo sapiens
  misc_RNA (1)...(19): siRNA sense strand
gagaauggaacaaaccuua

SEQ ID NO: 1542179 - RNA, 19 nt, Homo sapiens
  misc_RNA (1)...(19): siRNA sense strand
aauauaaccugguaucuga

SEQ ID NO: 1542180 - RNA, 19 nt, Homo sapiens
  misc_RNA (1)...(19): siRNA sense strand
gacuaucccuugaugauuu

SEQ ID NO: 1542181 - RNA, 19 nt, Homo sapiens
  misc_RNA (1)...(19): siRNA sense strand
cagaagaaguagaguugua

SEQ ID NO: 1542182 - RNA, 19 nt, Homo sapiens
  misc_RNA (1)...(19): siRNA sense strand
gaaguagaguuguauuugg

SEQ ID NO: 1542183 - RNA, 19 nt, Homo sapiens
  misc_RNA (1)...(19): siRNA sense strand
gcaggagcccucuaucuuu

SEQ ID NO: 1542184 - RNA, 19 nt, Homo sapiens
  misc_RNA (1)...(19): siRNA sense strand
ggaaauaucaaacaucauc

SEQ ID NO: 1542185 - RNA, 19 nt, Homo sapiens
  misc_RNA (1)...(19): siRNA sense strand
caagaugcaccauacauuu

SEQ ID NO: 1542186 - RNA, 19 nt, Homo sapiens
  misc_RNA (1)...(19): siRNA sense strand
gaaaagcgcugauuguuac

SEQ ID NO: 1542187 - RNA, 19 nt, Homo sapiens
  misc_RNA (1)...(19): siRNA sense strand
cagcauccauuguguuuau

SEQ ID NO: 1542188 - RNA, 19 nt, Homo sapiens
  misc_RNA (1)...(19): siRNA sense strand
ugaccugucuuugaauaua

SEQ ID NO: 1542189 - RNA, 19 nt, Homo sapiens
  misc_RNA (1)...(19): siRNA sense strand
ggugauguguauuguauau

SEQ ID NO: 1542190 - RNA, 19 nt, Homo sapiens
  misc_RNA (1)...(19): siRNA sense strand
gcaagaugcaccauacauu

SEQ ID NO: 1542191 - RNA, 19 nt, Homo sapiens
  misc_RNA (1)...(19): siRNA sense strand
agacugaucuugcuuccuu

SEQ ID NO: 1542192 - RNA, 19 nt, Homo sapiens
  misc_RNA (1)...(19): siRNA sense strand
gaccugucuuugaauauaa

SEQ ID NO: 1542193 - RNA, 19 nt, Homo sapiens
  misc_RNA (1)...(19): siRNA sense strand
gaacccaauggaaauagua

SEQ ID NO: 1542194 - RNA, 19 nt, Homo sapiens
  misc_RNA (1)...(19): siRNA sense strand
uaacaaagcacaggaagau

SEQ ID NO: 1542195 - RNA, 19 nt, Homo sapiens
  misc_RNA (1)...(19): siRNA sense strand
gaagggguccucagaguua

SEQ ID NO: 1542196 - RNA, 19 nt, Homo sapiens
  misc_RNA (1)...(19): siRNA sense strand
ugaagacuaucccuugaug

SEQ ID NO: 1542197 - RNA, 19 nt, Homo sapiens
  misc_RNA (1)...(19): siRNA sense strand
cgaaugaucacacacuuug

SEQ ID NO: 1542198 - RNA, 19 nt, Homo sapiens
  misc_RNA (1)...(19): siRNA sense strand
ugaaguggguagaagagaa

SEQ ID NO: 1542199 - RNA, 19 nt, Homo sapiens
  misc_RNA (1)...(19): siRNA sense strand
caagaacccaauggaaaua

SEQ ID NO: 1542200 - RNA, 19 nt, Homo sapiens
  misc_RNA (1)...(19): siRNA sense strand
gagaaguaccaaacaagaa

SEQ ID NO: 1542201 - RNA, 19 nt, Homo sapiens
  misc_RNA (1)...(19): siRNA sense strand
gagccuaugcugaaagaaa

SEQ ID NO: 1542202 - RNA, 19 nt, Homo sapiens
  misc_RNA (1)...(19): siRNA sense strand
caugaaccauugcaaacuu

SEQ ID NO: 1542203 - RNA, 19 nt, Homo sapiens
  misc_RNA (1)...(19): siRNA sense strand
gauuggugcugucaucuuc

SEQ ID NO: 1542204 - RNA, 19 nt, Homo sapiens
  misc_RNA (1)...(19): siRNA sense strand
uaccaugacuguugaagug

SEQ ID NO: 1542205 - RNA, 19 nt, Homo sapiens
  misc_RNA (1)...(19): siRNA sense strand
gaagaaguagaguuguauu

SEQ ID NO: 1542206 - RNA, 19 nt, Homo sapiens
  misc_RNA (1)...(19): siRNA sense strand
acaggaagaugauuugaag

SEQ ID NO: 1542207 - RNA, 19 nt, Homo sapiens
  misc_RNA (1)...(19): siRNA sense strand
augaauaccucacacuuga

SEQ ID NO: 1542208 - RNA, 19 nt, Homo sapiens
  misc_RNA (1)...(19): siRNA sense strand
gaauauaaccugguaucug

SEQ ID NO: 1542209 - RNA, 19 nt, Homo sapiens
  misc_RNA (1)...(19): siRNA sense strand
ggaaugaaaaugagaagua

SEQ ID NO: 1542210 - RNA, 19 nt, Homo sapiens
  misc_RNA (1)...(19): siRNA sense strand
gcagugaacucuuuaaaac

SEQ ID NO: 1542211 - RNA, 19 nt, Homo sapiens
  misc_RNA (1)...(19): siRNA sense strand
ugggaaauaucaaacauca

SEQ ID NO: 1542212 - RNA, 19 nt, Homo sapiens
  misc_RNA (1)...(19): siRNA sense strand
guagaguuguauuuggaaa

SEQ ID NO: 1542213 - RNA, 19 nt, Homo sapiens
  misc_RNA (1)...(19): siRNA sense strand
agaaagcuuugaaggaaug

SEQ ID NO: 1542214 - RNA, 19 nt, Homo sapiens
  misc_RNA (1)...(19): siRNA sense strand
gguguugccugucauucuu

SEQ ID NO: 1542215 - RNA, 19 nt, Homo sapiens
  misc_RNA (1)...(19): siRNA sense strand
uaugcggaauuucagaaua

SEQ ID NO: 1542216 - RNA, 19 nt, Homo sapiens
  misc_RNA (1)...(19): siRNA sense strand
aaacaagaacccaauggaa

SEQ ID NO: 1542217 - RNA, 19 nt, Homo sapiens
  misc_RNA (1)...(19): siRNA sense strand
uuuauuagccugacucaaa

SEQ ID NO: 1542218 - RNA, 19 nt, Homo sapiens
  misc_RNA (1)...(19): siRNA sense strand
gcugguggauauuuauuag

SEQ ID NO: 1542219 - RNA, 19 nt, Homo sapiens
  misc_RNA (1)...(19): siRNA sense strand
gaacccuggucaucauagu

SEQ ID NO: 1542220 - RNA, 19 nt, Homo sapiens
  misc_RNA (1)...(19): siRNA sense strand
gaacgaaugaucacacacu

SEQ ID NO: 1542221 - RNA, 19 nt, Homo sapiens
  misc_RNA (1)...(19): siRNA sense strand
acaaagcacaggaagauga

SEQ ID NO: 1542222 - RNA, 19 nt, Homo sapiens
  misc_RNA (1)...(19): siRNA sense strand
gaaguuugauggagaaccu

SEQ ID NO: 1542223 - RNA, 19 nt, Homo sapiens
  misc_RNA (1)...(19): siRNA sense strand
gauccucuuugucaucaug

SEQ ID NO: 1542224 - RNA, 19 nt, Homo sapiens
  misc_RNA (1)...(19): siRNA sense strand
guaaaacucucuuuguauc

SEQ ID NO: 1542225 - RNA, 19 nt, Homo sapiens
  misc_RNA (1)...(19): siRNA sense strand
gaugaggaacgaaugauca

SEQ ID NO: 1542226 - RNA, 19 nt, Homo sapiens
  misc_RNA (1)...(19): siRNA sense strand
ugugaccugucuuugaaua

SEQ ID NO: 1542227 - RNA, 19 nt, Homo sapiens
  misc_RNA (1)...(19): siRNA sense strand
ccucacacuugaagacuau

SEQ ID NO: 1542228 - RNA, 19 nt, Homo sapiens
  misc_RNA (1)...(19): siRNA sense strand
uagccugacucaaacaaug

SEQ ID NO: 1542229 - RNA, 19 nt, Homo sapiens
  misc_RNA (1)...(19): siRNA sense strand
cuugugaccugucuuugaa

SEQ ID NO: 1542230 - RNA, 19 nt, Homo sapiens
  misc_RNA (1)...(19): siRNA sense strand
ugucuucuaugcggaauuu

SEQ ID NO: 1542231 - RNA, 19 nt, Homo sapiens
  misc_RNA (1)...(19): siRNA sense strand
ggauucagaugaggaacga

SEQ ID NO: 1542232 - RNA, 19 nt, Homo sapiens
  misc_RNA (1)...(19): siRNA sense strand
gaaguggguagaagagaau

SEQ ID NO: 1542233 - RNA, 19 nt, Homo sapiens
  misc_RNA (1)...(19): siRNA sense strand
caaacaagaacccaaugga

SEQ ID NO: 1542234 - RNA, 19 nt, Homo sapiens
  misc_RNA (1)...(19): siRNA sense strand
aaugagaaguaccaaacaa

SEQ ID NO: 1542235 - RNA, 19 nt, Homo sapiens
  misc_RNA (1)...(19): siRNA sense strand
aaacuucggaggaacauug

SEQ ID NO: 1542236 - RNA, 19 nt, Homo sapiens
  misc_RNA (1)...(19): siRNA sense strand
ggcagaagaaguagaguug

SEQ ID NO: 1542237 - RNA, 19 nt, Homo sapiens
  misc_RNA (1)...(19): siRNA sense strand
ucagaaauaccacuaucuu

SEQ ID NO: 1542238 - RNA, 19 nt, Homo sapiens
  misc_RNA (1)...(19): siRNA sense strand
ccucaaaggaaucaucaaa

SEQ ID NO: 1542239 - RNA, 19 nt, Homo sapiens
  misc_RNA (1)...(19): siRNA sense strand
aacaagaacccaauggaaa

SEQ ID NO: 1542240 - RNA, 19 nt, Homo sapiens
  misc_RNA (1)...(19): siRNA sense strand
aaaggagccuaugcugaaa

SEQ ID NO: 1542241 - RNA, 19 nt, Homo sapiens
  misc_RNA (1)...(19): siRNA sense strand
gaagacuaucccuugauga

SEQ ID NO: 1542242 - RNA, 19 nt, Homo sapiens
  misc_RNA (1)...(19): siRNA sense strand
gcucacccgucaccacugu

SEQ ID NO: 1542243 - RNA, 19 nt, Homo sapiens
  misc_RNA (1)...(19): siRNA sense strand
ugaaaagcgcugauuguua

SEQ ID NO: 1542244 - RNA, 19 nt, Homo sapiens
  misc_RNA (1)...(19): siRNA sense strand
gcacaggaagaugauuuga

SEQ ID NO: 1542245 - RNA, 19 nt, Homo sapiens
  misc_RNA (1)...(19): siRNA sense strand
ggaggaggaugaacaaaag

SEQ ID NO: 1542246 - RNA, 19 nt, Homo sapiens
  misc_RNA (1)...(19): siRNA sense strand
ggcagcauccauuguguuu

SEQ ID NO: 1542247 - RNA, 19 nt, Homo sapiens
  misc_RNA (1)...(19): siRNA sense strand
cauagucagucugggauau

SEQ ID NO: 1542248 - RNA, 19 nt, Homo sapiens
  misc_RNA (1)...(19): siRNA sense strand
uaaggagaauggaacaaac

SEQ ID NO: 1542249 - RNA, 19 nt, Homo sapiens
  misc_RNA (1)...(19): siRNA sense strand
gaccuuuucuggagauuuu

SEQ ID NO: 1542250 - RNA, 19 nt, Homo sapiens
  misc_RNA (1)...(19): siRNA sense strand
ucauaagguuguaguagca

SEQ ID NO: 1542251 - RNA, 19 nt, Homo sapiens
  misc_RNA (1)...(19): siRNA sense strand
acaagaacccaauggaaau

SEQ ID NO: 1542252 - RNA, 19 nt, Homo sapiens
  misc_RNA (1)...(19): siRNA sense strand
ugagaaguaccaaacaaga

SEQ ID NO: 1542253 - RNA, 19 nt, Homo sapiens
  misc_RNA (1)...(19): siRNA sense strand
gcaguggcagcauccauug

SEQ ID NO: 1542254 - RNA, 19 nt, Homo sapiens
  misc_RNA (1)...(19): siRNA sense strand
aaguagaguuguauuugga

SEQ ID NO: 1542255 - RNA, 19 nt, Homo sapiens
  misc_RNA (1)...(19): siRNA sense strand
ugugacagauguagcacuu

SEQ ID NO: 1542256 - RNA, 19 nt, Homo sapiens
  misc_RNA (1)...(19): siRNA sense strand
ggaagaggaggaggaugaa

SEQ ID NO: 1542257 - RNA, 19 nt, Homo sapiens
  misc_RNA (1)...(19): siRNA sense strand
ggaggaacauuguaaaacu

SEQ ID NO: 1542258 - RNA, 19 nt, Homo sapiens
  misc_RNA (1)...(19): siRNA sense strand
agaaguagaguuguauuug

SEQ ID NO: 1542259 - RNA, 19 nt, Homo sapiens
  misc_RNA (1)...(19): siRNA sense strand
caucaaaauuguuccagaa

SEQ ID NO: 1542260 - RNA, 19 nt, Homo sapiens
  misc_RNA (1)...(19): siRNA sense strand
gaauaccucacacuugaag

SEQ ID NO: 1542261 - RNA, 19 nt, Homo sapiens
  misc_RNA (1)...(19): siRNA sense strand
ccaugacuguugaagugaa

SEQ ID NO: 1542262 - RNA, 19 nt, Homo sapiens
  misc_RNA (1)...(19): siRNA sense strand
cuaaggagaauggaacaaa

SEQ ID NO: 1542263 - RNA, 19 nt, Homo sapiens
  misc_RNA (1)...(19): siRNA sense strand
cugcguggcuucagguguu

SEQ ID NO: 1542264 - RNA, 19 nt, Homo sapiens
  misc_RNA (1)...(19): siRNA sense strand
gcgaccaucugcaaacaac

SEQ ID NO: 1542265 - RNA, 19 nt, Homo sapiens
  misc_RNA (1)...(19): siRNA sense strand
gcucgaacccuggucauca

SEQ ID NO: 1542266 - RNA, 19 nt, Homo sapiens
  misc_RNA (1)...(19): siRNA sense strand
aggcuugucugggaaauau

SEQ ID NO: 1542267 - RNA, 19 nt, Homo sapiens
  misc_RNA (1)...(19): siRNA sense strand
gaaaauucacugaguaauc

SEQ ID NO: 1542268 - RNA, 19 nt, Homo sapiens
  misc_RNA (1)...(19): siRNA sense strand
guacauauuggcauuucau

SEQ ID NO: 1542269 - RNA, 19 nt, Homo sapiens
  misc_RNA (1)...(19): siRNA sense strand
gaaugaucacacacuuuga

SEQ ID NO: 1542270 - RNA, 19 nt, Homo sapiens
  misc_RNA (1)...(19): siRNA sense strand
cucaaacaaugaagcuauu

SEQ ID NO: 1542271 - RNA, 19 nt, Homo sapiens
  misc_RNA (1)...(19): siRNA sense strand
gccuugugcugguggauau

SEQ ID NO: 1542272 - RNA, 19 nt, Homo sapiens
  misc_RNA (1)...(19): siRNA sense strand
caggagcccucuaucuuuu

SEQ ID NO: 1542273 - RNA, 19 nt, Homo sapiens
  misc_RNA (1)...(19): siRNA sense strand
augcggaauuucagaauau

SEQ ID NO: 1542274 - RNA, 19 nt, Homo sapiens
  misc_RNA (1)...(19): siRNA sense strand
ccugaaguuugauggagaa

SEQ ID NO: 1542275 - RNA, 19 nt, Homo sapiens
  misc_RNA (1)...(19): siRNA sense strand
gaagaaaccucauuacaug

SEQ ID NO: 1542276 - RNA, 19 nt, Homo sapiens
  misc_RNA (1)...(19): siRNA sense strand
gaacaacagucagaagaaa

SEQ ID NO: 1542277 - RNA, 19 nt, Homo sapiens
  misc_RNA (1)...(19): siRNA sense strand
aaaccaauguguuaccuuu

SEQ ID NO: 1542278 - RNA, 19 nt, Homo sapiens
  misc_RNA (1)...(19): siRNA sense strand
aagagugggucuccuauuu

SEQ ID NO: 1542279 - RNA, 19 nt, Homo sapiens
  misc_RNA (1)...(19): siRNA sense strand
gugaagaaguuagaagaaa

SEQ ID NO: 1542280 - RNA, 19 nt, Homo sapiens
  misc_RNA (1)...(19): siRNA sense strand
ggaugaagaugacgauugg

SEQ ID NO: 1542281 - RNA, 19 nt, Homo sapiens
  misc_RNA (1)...(19): siRNA sense strand
ggaccaaggugaacaacag

SEQ ID NO: 1542282 - RNA, 19 nt, Homo sapiens
  misc_RNA (1)...(19): siRNA sense strand
gaagaaaacgcaaguacua

SEQ ID NO: 1542283 - RNA, 19 nt, Homo sapiens
  misc_RNA (1)...(19): siRNA sense strand
ggauguuccucuguagaua

SEQ ID NO: 1542284 - RNA, 19 nt, Homo sapiens
  misc_RNA (1)...(19): siRNA sense strand
gagaagaaaccucauuaca

SEQ ID NO: 1542285 - RNA, 19 nt, Homo sapiens
  misc_RNA (1)...(19): siRNA sense strand
gggauaagcagcaucuuga

SEQ ID NO: 1542286 - RNA, 19 nt, Homo sapiens
  misc_RNA (1)...(19): siRNA sense strand
gaaaccucauuacauggaa

SEQ ID NO: 1542287 - RNA, 19 nt, Homo sapiens
  misc_RNA (1)...(19): siRNA sense strand
cagauaaggcccagaauuc

SEQ ID NO: 1542288 - RNA, 19 nt, Homo sapiens
  misc_RNA (1)...(19): siRNA sense strand
guacagauaaggcccagaa

SEQ ID NO: 1542289 - RNA, 19 nt, Homo sapiens
  misc_RNA (1)...(19): siRNA sense strand
gagguugaguacacaguga

SEQ ID NO: 1542290 - RNA, 19 nt, Homo sapiens
  misc_RNA (1)...(19): siRNA sense strand
uagauaacaucaagucauc

SEQ ID NO: 1542291 - RNA, 19 nt, Homo sapiens
  misc_RNA (1)...(19): siRNA sense strand
agaaacagcagaaacagaa

SEQ ID NO: 1542292 - RNA, 19 nt, Homo sapiens
  misc_RNA (1)...(19): siRNA sense strand
gaagagugggucuccuauu

SEQ ID NO: 1542293 - RNA, 19 nt, Homo sapiens
  misc_RNA (1)...(19): siRNA sense strand
uugacaaccuguuuauuga

SEQ ID NO: 1542294 - RNA, 19 nt, Homo sapiens
  misc_RNA (1)...(19): siRNA sense strand
uuacagaggaucaccauug

SEQ ID NO: 1542295 - RNA, 19 nt, Homo sapiens
  misc_RNA (1)...(19): siRNA sense strand
gacaaccuguuuauugaca

SEQ ID NO: 1542296 - RNA, 19 nt, Homo sapiens
  misc_RNA (1)...(19): siRNA sense strand
caaauugcccgacaaaggu

SEQ ID NO: 1542297 - RNA, 19 nt, Homo sapiens
  misc_RNA (1)...(19): siRNA sense strand
gauacuucaucacuaguuc

SEQ ID NO: 1542298 - RNA, 19 nt, Homo sapiens
  misc_RNA (1)...(19): siRNA sense strand
gacgauugguccucugaug

SEQ ID NO: 1542299 - RNA, 19 nt, Homo sapiens
  misc_RNA (1)...(19): siRNA sense strand
gauguuccucuguagauaa

SEQ ID NO: 1542300 - RNA, 19 nt, Homo sapiens
  misc_RNA (1)...(19): siRNA sense strand
gggcccagcuuccagcaau

SEQ ID NO: 1542301 - RNA, 19 nt, Homo sapiens
  misc_RNA (1)...(19): siRNA sense strand
gcaaagcucgcagcgcaaa

SEQ ID NO: 1542302 - RNA, 19 nt, Homo sapiens
  misc_RNA (1)...(19): siRNA sense strand
ggucuccuauuuccucaga

SEQ ID NO: 1542303 - RNA, 19 nt, Homo sapiens
  misc_RNA (1)...(19): siRNA sense strand
acugaaagcugcuauugca

SEQ ID NO: 1542304 - RNA, 19 nt, Homo sapiens
  misc_RNA (1)...(19): siRNA sense strand
agaagaaaccucauuacau

SEQ ID NO: 1542305 - RNA, 19 nt, Homo sapiens
  misc_RNA (1)...(19): siRNA sense strand
ugcagaaugugaagaaguu

SEQ ID NO: 1542306 - RNA, 19 nt, Homo sapiens
  misc_RNA (1)...(19): siRNA sense strand
gaaguaagggaugaagaug

SEQ ID NO: 1542307 - RNA, 19 nt, Homo sapiens
  misc_RNA (1)...(19): siRNA sense strand
gggaugaagaugacgauug

SEQ ID NO: 1542308 - RNA, 19 nt, Homo sapiens
  misc_RNA (1)...(19): siRNA sense strand
ccagcugcguaaauuuaaa

SEQ ID NO: 1542309 - RNA, 19 nt, Homo sapiens
  misc_RNA (1)...(19): siRNA sense strand
cagcagaaacagaauuaug

SEQ ID NO: 1542310 - RNA, 19 nt, Homo sapiens
  misc_RNA (1)...(19): siRNA sense strand
aaacugaaagcugcuauug

SEQ ID NO: 1542311 - RNA, 19 nt, Homo sapiens
  misc_RNA (1)...(19): siRNA sense strand
cacagcagcucggcuucua

SEQ ID NO: 1542312 - RNA, 19 nt, Homo sapiens
  misc_RNA (1)...(19): siRNA sense strand
gcagaaugugaagaaguua

SEQ ID NO: 1542313 - RNA, 19 nt, Homo sapiens
  misc_RNA (1)...(19): siRNA sense strand
ggagauaccgagaaguaag

SEQ ID NO: 1542314 - RNA, 19 nt, Homo sapiens
  misc_RNA (1)...(19): siRNA sense strand
cagaagagugggucuccua

SEQ ID NO: 1542315 - RNA, 19 nt, Homo sapiens
  misc_RNA (1)...(19): siRNA sense strand
guagauaacaucaagucau

SEQ ID NO: 1542316 - RNA, 19 nt, Homo sapiens
  misc_RNA (1)...(19): siRNA sense strand
gugaacaacagucagaaga

SEQ ID NO: 1542317 - RNA, 19 nt, Homo sapiens
  misc_RNA (1)...(19): siRNA sense strand
ucagggagauaccgagaag

SEQ ID NO: 1542318 - RNA, 19 nt, Homo sapiens
  misc_RNA (1)...(19): siRNA sense strand
augaggagaugcaagcaaa

SEQ ID NO: 1542319 - RNA, 19 nt, Homo sapiens
  misc_RNA (1)...(19): siRNA sense strand
acauggaagugcuagaaau

SEQ ID NO: 1542320 - RNA, 19 nt, Homo sapiens
  misc_RNA (1)...(19): siRNA sense strand
ccuguuaguuuagacugua

SEQ ID NO: 1542321 - RNA, 19 nt, Homo sapiens
  misc_RNA (1)...(19): siRNA sense strand
aaacagcagaaacagaauu

SEQ ID NO: 1542322 - RNA, 19 nt, Homo sapiens
  misc_RNA (1)...(19): siRNA sense strand
guugauguggguacagaua

SEQ ID NO: 1542323 - RNA, 19 nt, Homo sapiens
  misc_RNA (1)...(19): siRNA sense strand
gcggaguuauaauccagaa

SEQ ID NO: 1542324 - RNA, 19 nt, Homo sapiens
  misc_RNA (1)...(19): siRNA sense strand
ugaacaacagucagaagaa

SEQ ID NO: 1542325 - RNA, 19 nt, Homo sapiens
  misc_RNA (1)...(19): siRNA sense strand
ggcccagcuuccagcaaua

SEQ ID NO: 1542326 - RNA, 19 nt, Homo sapiens
  misc_RNA (1)...(19): siRNA sense strand
acagauaaggcccagaauu

SEQ ID NO: 1542327 - RNA, 19 nt, Homo sapiens
  misc_RNA (1)...(19): siRNA sense strand
uaguuuagacuguaagcua

SEQ ID NO: 1542328 - RNA, 19 nt, Homo sapiens
  misc_RNA (1)...(19): siRNA sense strand
gagaaguaagggaugaaga

SEQ ID NO: 1542329 - RNA, 19 nt, Homo sapiens
  misc_RNA (1)...(19): siRNA sense strand
gaaacagcagaaacagaau

SEQ ID NO: 1542330 - RNA, 19 nt, Homo sapiens
  misc_RNA (1)...(19): siRNA sense strand
uuugacaaccuguuuauug

SEQ ID NO: 1542331 - RNA, 19 nt, Homo sapiens
  misc_RNA (1)...(19): siRNA sense strand
uaacaucaagucaucucaa

SEQ ID NO: 1542332 - RNA, 19 nt, Homo sapiens
  misc_RNA (1)...(19): siRNA sense strand
gaacuugacaggccuuucc

SEQ ID NO: 1542333 - RNA, 19 nt, Homo sapiens
  misc_RNA (1)...(19): siRNA sense strand
gggagauaccgagaaguaa

SEQ ID NO: 1542334 - RNA, 19 nt, Homo sapiens
  misc_RNA (1)...(19): siRNA sense strand
agggagauaccgagaagua

SEQ ID NO: 1542335 - RNA, 19 nt, Homo sapiens
  misc_RNA (1)...(19): siRNA sense strand
gcagaaacagaauuaugag

SEQ ID NO: 1542336 - RNA, 19 nt, Homo sapiens
  misc_RNA (1)...(19): siRNA sense strand
aacagcagaaacagaauua

SEQ ID NO: 1542337 - RNA, 19 nt, Homo sapiens
  misc_RNA (1)...(19): siRNA sense strand
ggcaucguguuucaaguca

SEQ ID NO: 1542338 - RNA, 19 nt, Homo sapiens
  misc_RNA (1)...(19): siRNA sense strand
gaaaacgcaaguacuaaga

SEQ ID NO: 1542339 - RNA, 19 nt, Homo sapiens
  misc_RNA (1)...(19): siRNA sense strand
gagcugcgggaaauguuga

SEQ ID NO: 1542340 - RNA, 19 nt, Homo sapiens
  misc_RNA (1)...(19): siRNA sense strand
agcagaaacagaauuauga

SEQ ID NO: 1542341 - RNA, 19 nt, Homo sapiens
  misc_RNA (1)...(19): siRNA sense strand
caaacugaaagcugcuauu

SEQ ID NO: 1542342 - RNA, 19 nt, Homo sapiens
  misc_RNA (1)...(19): siRNA sense strand
ugaaggugaugaagagacu

SEQ ID NO: 1542343 - RNA, 19 nt, Homo sapiens
  misc_RNA (1)...(19): siRNA sense strand
guccucugaugaauucuga

SEQ ID NO: 1542344 - RNA, 19 nt, Homo sapiens
  misc_RNA (1)...(19): siRNA sense strand
cgauugguccucugaugaa

SEQ ID NO: 1542345 - RNA, 19 nt, Homo sapiens
  misc_RNA (1)...(19): siRNA sense strand
cauggaagugcuagaaaug

SEQ ID NO: 1542346 - RNA, 19 nt, Homo sapiens
  misc_RNA (1)...(19): siRNA sense strand
aaacgcaaguacuaagaac

SEQ ID NO: 1542347 - RNA, 19 nt, Homo sapiens
  misc_RNA (1)...(19): siRNA sense strand
cagcuuugacaaccuguuu

SEQ ID NO: 1542348 - RNA, 19 nt, Homo sapiens
  misc_RNA (1)...(19): siRNA sense strand
caucguguuucaagucaag

SEQ ID NO: 1542349 - RNA, 19 nt, Homo sapiens
  misc_RNA (1)...(19): siRNA sense strand
ggguaccaccuucaucuga

SEQ ID NO: 1542350 - RNA, 19 nt, Homo sapiens
  misc_RNA (1)...(19): siRNA sense strand
uugaguacacagugaauaa

SEQ ID NO: 1542351 - RNA, 19 nt, Homo sapiens
  misc_RNA (1)...(19): siRNA sense strand
cuucagagguugaguacac

SEQ ID NO: 1542352 - RNA, 19 nt, Homo sapiens
  misc_RNA (1)...(19): siRNA sense strand
agacuucagagguugagua

SEQ ID NO: 1542353 - RNA, 19 nt, Homo sapiens
  misc_RNA (1)...(19): siRNA sense strand
cagaaacagcagaaacaga

SEQ ID NO: 1542354 - RNA, 19 nt, Homo sapiens
  misc_RNA (1)...(19): siRNA sense strand
ccuuggcacuucagaaaca

SEQ ID NO: 1542355 - RNA, 19 nt, Homo sapiens
  misc_RNA (1)...(19): siRNA sense strand
ucaagucaagcggaagaua

SEQ ID NO: 1542356 - RNA, 19 nt, Homo sapiens
  misc_RNA (1)...(19): siRNA sense strand
agaaguaagggaugaagau

SEQ ID NO: 1542357 - RNA, 19 nt, Homo sapiens
  misc_RNA (1)...(19): siRNA sense strand
gcuagaaaugcgagccaaa

SEQ ID NO: 1542358 - RNA, 19 nt, Homo sapiens
  misc_RNA (1)...(19): siRNA sense strand
gacuguaagcuaaggcaaa

SEQ ID NO: 1542359 - RNA, 19 nt, Homo sapiens
  misc_RNA (1)...(19): siRNA sense strand
gauaacaucaagucaucuc

SEQ ID NO: 1542360 - RNA, 19 nt, Homo sapiens
  misc_RNA (1)...(19): siRNA sense strand
gauugguccucugaugaau

SEQ ID NO: 1542361 - RNA, 19 nt, Homo sapiens
  misc_RNA (1)...(19): siRNA sense strand
aaaagcaauugcagaaguu

SEQ ID NO: 1542362 - RNA, 19 nt, Homo sapiens
  misc_RNA (1)...(19): siRNA sense strand
aagaauccuuggcacuuca

SEQ ID NO: 1542363 - RNA, 19 nt, Homo sapiens
  misc_RNA (1)...(19): siRNA sense strand
agaagaauccuuggcacuu

SEQ ID NO: 1542364 - RNA, 19 nt, Homo sapiens
  misc_RNA (1)...(19): siRNA sense strand
ggagcugcgggaaauguug

SEQ ID NO: 1542365 - RNA, 19 nt, Homo sapiens
  misc_RNA (1)...(19): siRNA sense strand
gaucaccauugcggaccaa

SEQ ID NO: 1542366 - RNA, 19 nt, Homo sapiens
  misc_RNA (1)...(19): siRNA sense strand
caagucaagcggaagauac

SEQ ID NO: 1542367 - RNA, 19 nt, Homo sapiens
  misc_RNA (1)...(19): siRNA sense strand
uuacauggaagugcuagaa

SEQ ID NO: 1542368 - RNA, 19 nt, Homo sapiens
  misc_RNA (1)...(19): siRNA sense strand
gaaugugaagaaguuagaa

SEQ ID NO: 1542369 - RNA, 19 nt, Homo sapiens
  misc_RNA (1)...(19): siRNA sense strand
ggauaagcagcaucuugau

SEQ ID NO: 1542370 - RNA, 19 nt, Homo sapiens
  misc_RNA (1)...(19): siRNA sense strand
ucuagucauugccagaaga

SEQ ID NO: 1542371 - RNA, 19 nt, Homo sapiens
  misc_RNA (1)...(19): siRNA sense strand
gcuuugacaaccuguuuau

SEQ ID NO: 1542372 - RNA, 19 nt, Homo sapiens
  misc_RNA (1)...(19): siRNA sense strand
gagugggucuccuauuucc

SEQ ID NO: 1542373 - RNA, 19 nt, Homo sapiens
  misc_RNA (1)...(19): siRNA sense strand
agaaaccucauuacaugga

SEQ ID NO: 1542374 - RNA, 19 nt, Homo sapiens
  misc_RNA (1)...(19): siRNA sense strand
cccgauacuugauacuuca

SEQ ID NO: 1542375 - RNA, 19 nt, Homo sapiens
  misc_RNA (1)...(19): siRNA sense strand
gaaccugcccuccaaguuu

SEQ ID NO: 1542376 - RNA, 19 nt, Homo sapiens
  misc_RNA (1)...(19): siRNA sense strand
ggaggagauugaagaguuu

SEQ ID NO: 1542377 - RNA, 19 nt, Homo sapiens
  misc_RNA (1)...(19): siRNA sense strand
gcagcaagauguacaccaa

SEQ ID NO: 1542378 - RNA, 19 nt, Homo sapiens
  misc_RNA (1)...(19): siRNA sense strand
uggaggagauugaagaguu

SEQ ID NO: 1542379 - RNA, 19 nt, Homo sapiens
  misc_RNA (1)...(19): siRNA sense strand
caucuuggacuuccuauug

SEQ ID NO: 1542380 - RNA, 19 nt, Homo sapiens
  misc_RNA (1)...(19): siRNA sense strand
gaacccagccgcagaacuc

SEQ ID NO: 1542381 - RNA, 19 nt, Homo sapiens
  misc_RNA (1)...(19): siRNA sense strand
caagaacccagccgcagaa

SEQ ID NO: 1542382 - RNA, 19 nt, Homo sapiens
  misc_RNA (1)...(19): siRNA sense strand
ccgcagaacucaucaaaau

SEQ ID NO: 1542383 - RNA, 19 nt, Homo sapiens
  misc_RNA (1)...(19): siRNA sense strand
guacccuccuccaacuuga

SEQ ID NO: 1542384 - RNA, 19 nt, Homo sapiens
  misc_RNA (1)...(19): siRNA sense strand
gcgaccaccucuccaagca

SEQ ID NO: 1542385 - RNA, 19 nt, Homo sapiens
  misc_RNA (1)...(19): siRNA sense strand
ggacagcaucuuggacuuc

SEQ ID NO: 1542386 - RNA, 19 nt, Homo sapiens
  misc_RNA (1)...(19): siRNA sense strand
cauggagccuggagucaag

SEQ ID NO: 1542387 - RNA, 19 nt, Homo sapiens
  misc_RNA (1)...(19): siRNA sense strand
gagccaggacagcaucuug

SEQ ID NO: 1542388 - RNA, 19 nt, Homo sapiens
  misc_RNA (1)...(19): siRNA sense strand
gggcagcggcaguagcauu

SEQ ID NO: 1542389 - RNA, 19 nt, Homo sapiens
  misc_RNA (1)...(19): siRNA sense strand
ccucacccgucucugaaga

SEQ ID NO: 1542390 - RNA, 19 nt, Homo sapiens
  misc_RNA (1)...(19): siRNA sense strand
aaccugcccuccaaguuug

SEQ ID NO: 1542391 - RNA, 19 nt, Homo sapiens
  misc_RNA (1)...(19): siRNA sense strand
cccagagaaugucaagguu

SEQ ID NO: 1542392 - RNA, 19 nt, Homo sapiens
  misc_RNA (1)...(19): siRNA sense strand
gccagaaguuccccaagaa

SEQ ID NO: 1542393 - RNA, 19 nt, Homo sapiens
  misc_RNA (1)...(19): siRNA sense strand
gguacccuccuccaacuug

SEQ ID NO: 1542394 - RNA, 19 nt, Homo sapiens
  misc_RNA (1)...(19): siRNA sense strand
ggccagaaguuccccaaga

SEQ ID NO: 1542395 - RNA, 19 nt, Homo sapiens
  misc_RNA (1)...(19): siRNA sense strand
gaacuucucgucgccaaaa

SEQ ID NO: 1542396 - RNA, 19 nt, Homo sapiens
  misc_RNA (1)...(19): siRNA sense strand
gcccucugcuccugcuaug

SEQ ID NO: 1542397 - RNA, 19 nt, Homo sapiens
  misc_RNA (1)...(19): siRNA sense strand
ucacccgucucugaagaug

SEQ ID NO: 1542398 - RNA, 19 nt, Homo sapiens
  misc_RNA (1)...(19): siRNA sense strand
ggcagcggcaguagcauug

SEQ ID NO: 1542399 - RNA, 19 nt, Homo sapiens
  misc_RNA (1)...(19): siRNA sense strand
cagcaucuuggacuuccua

SEQ ID NO: 1542400 - RNA, 19 nt, Homo sapiens
  misc_RNA (1)...(19): siRNA sense strand
cagcaagauguacaccaaa

SEQ ID NO: 1542401 - RNA, 19 nt, Homo sapiens
  misc_RNA (1)...(19): siRNA sense strand
ugaaccugcccuccaaguu

SEQ ID NO: 1542402 - RNA, 19 nt, Homo sapiens
  misc_RNA (1)...(19): siRNA sense strand
gugguacccuccuccaacu

SEQ ID NO: 1542403 - RNA, 19 nt, Homo sapiens
  misc_RNA (1)...(19): siRNA sense strand
gcccucacccgucucugaa

SEQ ID NO: 1542404 - RNA, 19 nt, Homo sapiens
  misc_RNA (1)...(19): siRNA sense strand
caagccaaguuccauauua

SEQ ID NO: 1542405 - RNA, 19 nt, Homo sapiens
  misc_RNA (1)...(19): siRNA sense strand
ccaaggaucuucccaucua

SEQ ID NO: 1542406 - RNA, 19 nt, Homo sapiens
  misc_RNA (1)...(19): siRNA sense strand
gaacagauaagaauggauu

SEQ ID NO: 1542407 - RNA, 19 nt, Homo sapiens
  misc_RNA (1)...(19): siRNA sense strand
cagcuugucuucucuguuu

SEQ ID NO: 1542408 - RNA, 19 nt, Homo sapiens
  misc_RNA (1)...(19): siRNA sense strand
acaaauggccuaccugaua

SEQ ID NO: 1542409 - RNA, 19 nt, Homo sapiens
  misc_RNA (1)...(19): siRNA sense strand
ugacagaugccaacuuaua

SEQ ID NO: 1542410 - RNA, 19 nt, Homo sapiens
  misc_RNA (1)...(19): siRNA sense strand
ggcaacagauuuacaguau

SEQ ID NO: 1542411 - RNA, 19 nt, Homo sapiens
  misc_RNA (1)...(19): siRNA sense strand
uaugagcaauccugcauua

SEQ ID NO: 1542412 - RNA, 19 nt, Homo sapiens
  misc_RNA (1)...(19): siRNA sense strand
gcaaagccauugagagagu

SEQ ID NO: 1542413 - RNA, 19 nt, Homo sapiens
  misc_RNA (1)...(19): siRNA sense strand
ugugacagaugccaacuua

SEQ ID NO: 1542414 - RNA, 19 nt, Homo sapiens
  misc_RNA (1)...(19): siRNA sense strand
caacuugccuuguuaacca

SEQ ID NO: 1542415 - RNA, 19 nt, Homo sapiens
  misc_RNA (1)...(19): siRNA sense strand
guccaugggugaacaauug

SEQ ID NO: 1542416 - RNA, 19 nt, Homo sapiens
  misc_RNA (1)...(19): siRNA sense strand
ggaaaacacuggcgaacaa

SEQ ID NO: 1542417 - RNA, 19 nt, Homo sapiens
  misc_RNA (1)...(19): siRNA sense strand
ggugauggcugcuccuuuc

SEQ ID NO: 1542418 - RNA, 19 nt, Homo sapiens
  misc_RNA (1)...(19): siRNA sense strand
auucagaaguccaguauuu

SEQ ID NO: 1542419 - RNA, 19 nt, Homo sapiens
  misc_RNA (1)...(19): siRNA sense strand
gcaacagauuuacaguauu

SEQ ID NO: 1542420 - RNA, 19 nt, Homo sapiens
  misc_RNA (1)...(19): siRNA sense strand
cagcuuggguuucaguaaa

SEQ ID NO: 1542421 - RNA, 19 nt, Homo sapiens
  misc_RNA (1)...(19): siRNA sense strand
ggauucagcuuggguuuca

SEQ ID NO: 1542422 - RNA, 19 nt, Homo sapiens
  misc_RNA (1)...(19): siRNA sense strand
gacagaugccaacuuauaa

SEQ ID NO: 1542423 - RNA, 19 nt, Homo sapiens
  misc_RNA (1)...(19): siRNA sense strand
caaauggccuaccugauac

SEQ ID NO: 1542424 - RNA, 19 nt, Homo sapiens
  misc_RNA (1)...(19): siRNA sense strand
gaagaaguacugguugcua

SEQ ID NO: 1542425 - RNA, 19 nt, Homo sapiens
  misc_RNA (1)...(19): siRNA sense strand
ggacggagagcagcauaaa

SEQ ID NO: 1542426 - RNA, 19 nt, Homo sapiens
  misc_RNA (1)...(19): siRNA sense strand
ccagaucgcugccaucacu

SEQ ID NO: 1542427 - RNA, 19 nt, Homo sapiens
  misc_RNA (1)...(19): siRNA sense strand
ucccagagccaccuucuua

SEQ ID NO: 1542428 - RNA, 19 nt, Homo sapiens
  misc_RNA (1)...(19): siRNA sense strand
agaauuccaucucucuuau

SEQ ID NO: 1542429 - RNA, 19 nt, Homo sapiens
  misc_RNA (1)...(19): siRNA sense strand
gcaaagcugguaugagcaa

SEQ ID NO: 1542430 - RNA, 19 nt, Homo sapiens
  misc_RNA (1)...(19): siRNA sense strand
aagccaaguuccauauuau

SEQ ID NO: 1542431 - RNA, 19 nt, Homo sapiens
  misc_RNA (1)...(19): siRNA sense strand
agagccaccuucuuacuga

SEQ ID NO: 1542432 - RNA, 19 nt, Homo sapiens
  misc_RNA (1)...(19): siRNA sense strand
caauguuugucuggucaua

SEQ ID NO: 1542433 - RNA, 19 nt, Homo sapiens
  misc_RNA (1)...(19): siRNA sense strand
gauggcugcuccuuuccaa

SEQ ID NO: 1542434 - RNA, 19 nt, Homo sapiens
  misc_RNA (1)...(19): siRNA sense strand
gagcaauccugcauuaacc

SEQ ID NO: 1542435 - RNA, 19 nt, Homo sapiens
  misc_RNA (1)...(19): siRNA sense strand
caaggaucuucccaucuau

SEQ ID NO: 1542436 - RNA, 19 nt, Homo sapiens
  misc_RNA (1)...(19): siRNA sense strand
uuuccaacuugccuuguua

SEQ ID NO: 1542437 - RNA, 19 nt, Homo sapiens
  misc_RNA (1)...(19): siRNA sense strand
cgacauggaacagauaaga

SEQ ID NO: 1542438 - RNA, 19 nt, Homo sapiens
  misc_RNA (1)...(19): siRNA sense strand
uaucauuguuggcuaguca

SEQ ID NO: 1542439 - RNA, 19 nt, Homo sapiens
  misc_RNA (1)...(19): siRNA sense strand
gcauucagaaguccaguau

SEQ ID NO: 1542440 - RNA, 19 nt, Homo sapiens
  misc_RNA (1)...(19): siRNA sense strand
gagaagcccaucaggaagu

SEQ ID NO: 1542441 - RNA, 19 nt, Homo sapiens
  misc_RNA (1)...(19): siRNA sense strand
ucucugcucuacugccuuu

SEQ ID NO: 1542442 - RNA, 19 nt, Homo sapiens
  misc_RNA (1)...(19): siRNA sense strand
cugcaaagccauugagaga

SEQ ID NO: 1542443 - RNA, 19 nt, Homo sapiens
  misc_RNA (1)...(19): siRNA sense strand
aaacacuggcgaacaaguu

SEQ ID NO: 1542444 - RNA, 19 nt, Homo sapiens
  misc_RNA (1)...(19): siRNA sense strand
gcagcuauguuuucuguca

SEQ ID NO: 1542445 - RNA, 19 nt, Homo sapiens
  misc_RNA (1)...(19): siRNA sense strand
gacauggaacagauaagaa

SEQ ID NO: 1542446 - RNA, 19 nt, Homo sapiens
  misc_RNA (1)...(19): siRNA sense strand
aggagaagcccaucaggaa

SEQ ID NO: 1542447 - RNA, 19 nt, Homo sapiens
  misc_RNA (1)...(19): siRNA sense strand
gugcauaguguccauggaa

SEQ ID NO: 1542448 - RNA, 19 nt, Homo sapiens
  misc_RNA (1)...(19): siRNA sense strand
uuagaggcauucagaaguc

SEQ ID NO: 1542449 - RNA, 19 nt, Homo sapiens
  misc_RNA (1)...(19): siRNA sense strand
cuuauucucugcucuacug

SEQ ID NO: 1542450 - RNA, 19 nt, Homo sapiens
  misc_RNA (1)...(19): siRNA sense strand
cgucugugauaaauguauu

SEQ ID NO: 1542451 - RNA, 19 nt, Homo sapiens
  misc_RNA (1)...(19): siRNA sense strand
gagagagccaagaggagaa

SEQ ID NO: 1542452 - RNA, 19 nt, Homo sapiens
  misc_RNA (1)...(19): siRNA sense strand
cggcaacagauuuacagua

SEQ ID NO: 1542453 - RNA, 19 nt, Homo sapiens
  misc_RNA (1)...(19): siRNA sense strand
gaucuucccaucuauacca

SEQ ID NO: 1542454 - RNA, 19 nt, Homo sapiens
  misc_RNA (1)...(19): siRNA sense strand
acagaugccaacuuauaaa

SEQ ID NO: 1542455 - RNA, 19 nt, Homo sapiens
  misc_RNA (1)...(19): siRNA sense strand
gcugcuccuuuccaacuug

SEQ ID NO: 1542456 - RNA, 19 nt, Homo sapiens
  misc_RNA (1)...(19): siRNA sense strand
uggccuaccugauacucaa

SEQ ID NO: 1542457 - RNA, 19 nt, Homo sapiens
  misc_RNA (1)...(19): siRNA sense strand
gugaugagaagaaguacug

SEQ ID NO: 1542458 - RNA, 19 nt, Homo sapiens
  misc_RNA (1)...(19): siRNA sense strand
gaauuccaucucucuuaug

SEQ ID NO: 1542459 - RNA, 19 nt, Homo sapiens
  misc_RNA (1)...(19): siRNA sense strand
gguaugagcaauccugcau

SEQ ID NO: 1542460 - RNA, 19 nt, Homo sapiens
  misc_RNA (1)...(19): siRNA sense strand
aaccaucaguuuccugcaa

SEQ ID NO: 1542461 - RNA, 19 nt, Homo sapiens
  misc_RNA (1)...(19): siRNA sense strand
uacauuagaggcauucaga

SEQ ID NO: 1542462 - RNA, 19 nt, Homo sapiens
  misc_RNA (1)...(19): siRNA sense strand
aagauuuguuggagagaga

SEQ ID NO: 1542463 - RNA, 19 nt, Homo sapiens
  misc_RNA (1)...(19): siRNA sense strand
cagagaaagauuuguugga

SEQ ID NO: 1542464 - RNA, 19 nt, Homo sapiens
  misc_RNA (1)...(19): siRNA sense strand
agaagcccaucaggaaguu

SEQ ID NO: 1542465 - RNA, 19 nt, Homo sapiens
  misc_RNA (1)...(19): siRNA sense strand
cagcauaaacccaggaaaa

SEQ ID NO: 1542466 - RNA, 19 nt, Homo sapiens
  misc_RNA (1)...(19): siRNA sense strand
gagccaccuucuuacugau

SEQ ID NO: 1542467 - RNA, 19 nt, Homo sapiens
  misc_RNA (1)...(19): siRNA sense strand
ugcauaguguccauggaaa

SEQ ID NO: 1542468 - RNA, 19 nt, Homo sapiens
  misc_RNA (1)...(19): siRNA sense strand
ucaaaagaauuccaucucu

SEQ ID NO: 1542469 - RNA, 19 nt, Homo sapiens
  misc_RNA (1)...(19): siRNA sense strand
guacugguugcuacccauu

SEQ ID NO: 1542470 - RNA, 19 nt, Homo sapiens
  misc_RNA (1)...(19): siRNA sense strand
uggaacagauaagaaugga

SEQ ID NO: 1542471 - RNA, 19 nt, Homo sapiens
  misc_RNA (1)...(19): siRNA sense strand
cuguuuggcuaucauuguu

SEQ ID NO: 1542472 - RNA, 19 nt, Homo sapiens
  misc_RNA (1)...(19): siRNA sense strand
ggcgggugcuguacuggau

SEQ ID NO: 1542473 - RNA, 19 nt, Homo sapiens
  misc_RNA (1)...(19): siRNA sense strand
gcccaucaggaaguucuua

SEQ ID NO: 1542474 - RNA, 19 nt, Homo sapiens
  misc_RNA (1)...(19): siRNA sense strand
gaaagauuuguuggagaga

SEQ ID NO: 1542475 - RNA, 19 nt, Homo sapiens
  misc_RNA (1)...(19): siRNA sense strand
cuccgucugugauaaaugu

SEQ ID NO: 1542476 - RNA, 19 nt, Homo sapiens
  misc_RNA (1)...(19): siRNA sense strand
acauggaacagauaagaau

SEQ ID NO: 1542477 - RNA, 19 nt, Homo sapiens
  misc_RNA (1)...(19): siRNA sense strand
ucaagccaaguuccauauu

SEQ ID NO: 1542478 - RNA, 19 nt, Homo sapiens
  misc_RNA (1)...(19): siRNA sense strand
ucugucagcuugucuucuc

SEQ ID NO: 1542479 - RNA, 19 nt, Homo sapiens
  misc_RNA (1)...(19): siRNA sense strand
gaaaaugcaaagcugguau

SEQ ID NO: 1542480 - RNA, 19 nt, Homo sapiens
  misc_RNA (1)...(19): siRNA sense strand
caagaggagaagcccauca

SEQ ID NO: 1542481 - RNA, 19 nt, Homo sapiens
  misc_RNA (1)...(19): siRNA sense strand
gccaccuucuuacugauuc

SEQ ID NO: 1542482 - RNA, 19 nt, Homo sapiens
  misc_RNA (1)...(19): siRNA sense strand
aaggaucuucccaucuaua

SEQ ID NO: 1542483 - RNA, 19 nt, Homo sapiens
  misc_RNA (1)...(19): siRNA sense strand
cuuaugcagagaaagauuu

SEQ ID NO: 1542484 - RNA, 19 nt, Homo sapiens
  misc_RNA (1)...(19): siRNA sense strand
gccauccgauacugugaca

SEQ ID NO: 1542485 - RNA, 19 nt, Homo sapiens
  misc_RNA (1)...(19): siRNA sense strand
ugucuggagccauccgaua

SEQ ID NO: 1542486 - RNA, 19 nt, Homo sapiens
  misc_RNA (1)...(19): siRNA sense strand
cauggaaaaugagacuuaa

SEQ ID NO: 1542487 - RNA, 19 nt, Homo sapiens
  misc_RNA (1)...(19): siRNA sense strand
ccauggaaaaugagacuua

SEQ ID NO: 1542488 - RNA, 19 nt, Homo sapiens
  misc_RNA (1)...(19): siRNA sense strand
caaagcugguaugagcaau

SEQ ID NO: 1542489 - RNA, 19 nt, Homo sapiens
  misc_RNA (1)...(19): siRNA sense strand
ccauccagcugugcauagu

SEQ ID NO: 1542490 - RNA, 19 nt, Homo sapiens
  misc_RNA (1)...(19): siRNA sense strand
acucaagccaaguuccaua

SEQ ID NO: 1542491 - RNA, 19 nt, Homo sapiens
  misc_RNA (1)...(19): siRNA sense strand
gacaaauggccuaccugau

SEQ ID NO: 1542492 - RNA, 19 nt, Homo sapiens
  misc_RNA (1)...(19): siRNA sense strand
ggaguuggcuugcuucaua

SEQ ID NO: 1542493 - RNA, 19 nt, Homo sapiens
  misc_RNA (1)...(19): siRNA sense strand
guucggaucuuuggaauua

SEQ ID NO: 1542494 - RNA, 19 nt, Homo sapiens
  misc_RNA (1)...(19): siRNA sense strand
gcaaggcuccuaacucauu

SEQ ID NO: 1542495 - RNA, 19 nt, Homo sapiens
  misc_RNA (1)...(19): siRNA sense strand
gcuuggacuuuaacaaaua

SEQ ID NO: 1542496 - RNA, 19 nt, Homo sapiens
  misc_RNA (1)...(19): siRNA sense strand
ccaacucacuucauccuaa

SEQ ID NO: 1542497 - RNA, 19 nt, Homo sapiens
  misc_RNA (1)...(19): siRNA sense strand
gggaacaacuggacuaugg

SEQ ID NO: 1542498 - RNA, 19 nt, Homo sapiens
  misc_RNA (1)...(19): siRNA sense strand
ggaguacaguuuacaucuu

SEQ ID NO: 1542499 - RNA, 19 nt, Homo sapiens
  misc_RNA (1)...(19): siRNA sense strand
caacucacuucauccuaaa

SEQ ID NO: 1542500 - RNA, 19 nt, Homo sapiens
  misc_RNA (1)...(19): siRNA sense strand
ccaaauacccgugucauga

SEQ ID NO: 1542501 - RNA, 19 nt, Homo sapiens
  misc_RNA (1)...(19): siRNA sense strand
aagcaaggcuccuaacuca

SEQ ID NO: 1542502 - RNA, 19 nt, Homo sapiens
  misc_RNA (1)...(19): siRNA sense strand
gaguacaguuuacaucuuc

SEQ ID NO: 1542503 - RNA, 19 nt, Homo sapiens
  misc_RNA (1)...(19): siRNA sense strand
ggacuauggaguacaguuu

SEQ ID NO: 1542504 - RNA, 19 nt, Homo sapiens
  misc_RNA (1)...(19): siRNA sense strand
gcaaguuucuauacgaagu

SEQ ID NO: 1542505 - RNA, 19 nt, Homo sapiens
  misc_RNA (1)...(19): siRNA sense strand
acagugaagugaauccaaa

SEQ ID NO: 1542506 - RNA, 19 nt, Homo sapiens
  misc_RNA (1)...(19): siRNA sense strand
caaauacccgugucaugaa

SEQ ID NO: 1542507 - RNA, 19 nt, Homo sapiens
  misc_RNA (1)...(19): siRNA sense strand
cagcuucucuccugagugu

SEQ ID NO: 1542508 - RNA, 19 nt, Homo sapiens
  misc_RNA (1)...(19): siRNA sense strand
gacuauggaguacaguuua

SEQ ID NO: 1542509 - RNA, 19 nt, Homo sapiens
  misc_RNA (1)...(19): siRNA sense strand
caaggcuccuaacucauug

SEQ ID NO: 1542510 - RNA, 19 nt, Homo sapiens
  misc_RNA (1)...(19): siRNA sense strand
gguaaagcaaggcuccuaa

SEQ ID NO: 1542511 - RNA, 19 nt, Homo sapiens
  misc_RNA (1)...(19): siRNA sense strand
caacuggacuauggaguac

SEQ ID NO: 1542512 - RNA, 19 nt, Homo sapiens
  misc_RNA (1)...(19): siRNA sense strand
gaguuggcuugcuucauau

SEQ ID NO: 1542513 - RNA, 19 nt, Homo sapiens
  misc_RNA (1)...(19): siRNA sense strand
cgaaguaugauccaacuca

SEQ ID NO: 1542514 - RNA, 19 nt, Homo sapiens
  misc_RNA (1)...(19): siRNA sense strand
ucuccugaguguacuaauu

SEQ ID NO: 1542515 - RNA, 19 nt, Homo sapiens
  misc_RNA (1)...(19): siRNA sense strand
ccuguugcuuggacuuuaa

SEQ ID NO: 1542516 - RNA, 19 nt, Homo sapiens
  misc_RNA (1)...(19): siRNA sense strand
uggcaaguuucuauacgaa

SEQ ID NO: 1542517 - RNA, 19 nt, Homo sapiens
  misc_RNA (1)...(19): siRNA sense strand
acaacuggacuauggagua

SEQ ID NO: 1542518 - RNA, 19 nt, Homo sapiens
  misc_RNA (1)...(19): siRNA sense strand
aggaacaccuuucgaaacu

SEQ ID NO: 1542519 - RNA, 19 nt, Homo sapiens
  misc_RNA (1)...(19): siRNA sense strand
caaguuucuauacgaagua

SEQ ID NO: 1542520 - RNA, 19 nt, Homo sapiens
  misc_RNA (1)...(19): siRNA sense strand
gcauucccuucuucagugu

SEQ ID NO: 1542521 - RNA, 19 nt, Homo sapiens
  misc_RNA (1)...(19): siRNA sense strand
acauaugcauugggaguug

SEQ ID NO: 1542522 - RNA, 19 nt, Homo sapiens
  misc_RNA (1)...(19): siRNA sense strand
ggaguugcccacagugaag

SEQ ID NO: 1542523 - RNA, 19 nt, Homo sapiens
  misc_RNA (1)...(19): siRNA sense strand
ggaacaacuggacuaugga

SEQ ID NO: 1542524 - RNA, 19 nt, Homo sapiens
  misc_RNA (1)...(19): siRNA sense strand
ugauccaacucacuucauc

SEQ ID NO: 1542525 - RNA, 19 nt, Homo sapiens
  misc_RNA (1)...(19): siRNA sense strand
gguguucggaucuuuggaa

SEQ ID NO: 1542526 - RNA, 19 nt, Homo sapiens
  misc_RNA (1)...(19): siRNA sense strand
uugcuuggacuuuaacaaa

SEQ ID NO: 1542527 - RNA, 19 nt, Homo sapiens
  misc_RNA (1)...(19): siRNA sense strand
ucggaucuuuggaauuaau

SEQ ID NO: 1542528 - RNA, 19 nt, Homo sapiens
  misc_RNA (1)...(19): siRNA sense strand
acucagcauucccuucuuc

SEQ ID NO: 1542529 - RNA, 19 nt, Homo sapiens
  misc_RNA (1)...(19): siRNA sense strand
ggaacaccuuucgaaacuc

SEQ ID NO: 1542530 - RNA, 19 nt, Homo sapiens
  misc_RNA (1)...(19): siRNA sense strand
cagcauucccuucuucagu

SEQ ID NO: 1542531 - RNA, 19 nt, Homo sapiens
  misc_RNA (1)...(19): siRNA sense strand
cuucuucaguguuccuguu

SEQ ID NO: 1542532 - RNA, 19 nt, Homo sapiens
  misc_RNA (1)...(19): siRNA sense strand
ggguaaagcaaggcuccua

SEQ ID NO: 1542533 - RNA, 19 nt, Homo sapiens
  misc_RNA (1)...(19): siRNA sense strand
ugaagugaauccaaauacc

SEQ ID NO: 1542534 - RNA, 19 nt, Homo sapiens
  misc_RNA (1)...(19): siRNA sense strand
gugaagugaauccaaauac

SEQ ID NO: 1542535 - RNA, 19 nt, Homo sapiens
  misc_RNA (1)...(19): siRNA sense strand
ccacaacuacaugguguuc

SEQ ID NO: 1542536 - RNA, 19 nt, Homo sapiens
  misc_RNA (1)...(19): siRNA sense strand
uaaagcaaggcuccuaacu

SEQ ID NO: 1542537 - RNA, 19 nt, Homo sapiens
  misc_RNA (1)...(19): siRNA sense strand
caaaaugccacaacuacau

SEQ ID NO: 1542538 - RNA, 19 nt, Homo sapiens
  misc_RNA (1)...(19): siRNA sense strand
cuugcuucauauugucuua

SEQ ID NO: 1542539 - RNA, 19 nt, Homo sapiens
  misc_RNA (1)...(19): siRNA sense strand
gacauaugcauugggaguu

SEQ ID NO: 1542540 - RNA, 19 nt, Homo sapiens
  misc_RNA (1)...(19): siRNA sense strand
gauaagaccuugcauagag

SEQ ID NO: 1542541 - RNA, 19 nt, Homo sapiens
  misc_RNA (1)...(19): siRNA sense strand
gcacaacccuucuuuacug

SEQ ID NO: 1542542 - RNA, 19 nt, Homo sapiens
  misc_RNA (1)...(19): siRNA sense strand
gaaccuuacuguguuauau

SEQ ID NO: 1542543 - RNA, 19 nt, Homo sapiens
  misc_RNA (1)...(19): siRNA sense strand
gcaauuuguuucccauuug

SEQ ID NO: 1542544 - RNA, 19 nt, Homo sapiens
  misc_RNA (1)...(19): siRNA sense strand
caaaaucucucgccucuaa

SEQ ID NO: 1542545 - RNA, 19 nt, Homo sapiens
  misc_RNA (1)...(19): siRNA sense strand
caucaccgcuucuauacaa

SEQ ID NO: 1542546 - RNA, 19 nt, Homo sapiens
  misc_RNA (1)...(19): siRNA sense strand
ccucagaucugcaauuugu

SEQ ID NO: 1542547 - RNA, 19 nt, Homo sapiens
  misc_RNA (1)...(19): siRNA sense strand
ccaauuggcuagcaggauu

SEQ ID NO: 1542548 - RNA, 19 nt, Homo sapiens
  misc_RNA (1)...(19): siRNA sense strand
ccaugcagcugacaacauu

SEQ ID NO: 1542549 - RNA, 19 nt, Homo sapiens
  misc_RNA (1)...(19): siRNA sense strand
ggcacuuacucauucauua

SEQ ID NO: 1542550 - RNA, 19 nt, Homo sapiens
  misc_RNA (1)...(19): siRNA sense strand
gcaucagugucaccagaua

SEQ ID NO: 1542551 - RNA, 19 nt, Homo sapiens
  misc_RNA (1)...(19): siRNA sense strand
ggacgugucuggcugugau

SEQ ID NO: 1542552 - RNA, 19 nt, Homo sapiens
  misc_RNA (1)...(19): siRNA sense strand
guucagauauccucagauc

SEQ ID NO: 1542553 - RNA, 19 nt, Homo sapiens
  misc_RNA (1)...(19): siRNA sense strand
ccacacagcuugucuaccu

SEQ ID NO: 1542554 - RNA, 19 nt, Homo sapiens
  misc_RNA (1)...(19): siRNA sense strand
ggauuuaugcugcuucuug

SEQ ID NO: 1542555 - RNA, 19 nt, Homo sapiens
  misc_RNA (1)...(19): siRNA sense strand
aaagauaagaccuugcaua

SEQ ID NO: 1542556 - RNA, 19 nt, Homo sapiens
  misc_RNA (1)...(19): siRNA sense strand
gagcugaggcgcuguuuca

SEQ ID NO: 1542557 - RNA, 19 nt, Homo sapiens
  misc_RNA (1)...(19): siRNA sense strand
uagagcaccuuacuacuuc

SEQ ID NO: 1542558 - RNA, 19 nt, Homo sapiens
  misc_RNA (1)...(19): siRNA sense strand
gcauagagcaccuuacuac

SEQ ID NO: 1542559 - RNA, 19 nt, Homo sapiens
  misc_RNA (1)...(19): siRNA sense strand
uuccuuggguuucauaaua

SEQ ID NO: 1542560 - RNA, 19 nt, Homo sapiens
  misc_RNA (1)...(19): siRNA sense strand
gcccaucaccgcuucuaua

SEQ ID NO: 1542561 - RNA, 19 nt, Homo sapiens
  misc_RNA (1)...(19): siRNA sense strand
gaacuggacuuuucauggu

SEQ ID NO: 1542562 - RNA, 19 nt, Homo sapiens
  misc_RNA (1)...(19): siRNA sense strand
gcaaacaccacaggcagaa

SEQ ID NO: 1542563 - RNA, 19 nt, Homo sapiens
  misc_RNA (1)...(19): siRNA sense strand
gcacuuacucauucauuag

SEQ ID NO: 1542564 - RNA, 19 nt, Homo sapiens
  misc_RNA (1)...(19): siRNA sense strand
gaaggcuauuggucuuaga

SEQ ID NO: 1542565 - RNA, 19 nt, Homo sapiens
  misc_RNA (1)...(19): siRNA sense strand
gcugcugucuggaugaguu

SEQ ID NO: 1542566 - RNA, 19 nt, Homo sapiens
  misc_RNA (1)...(19): siRNA sense strand
ucagaucugcaauuuguuu

SEQ ID NO: 1542567 - RNA, 19 nt, Homo sapiens
  misc_RNA (1)...(19): siRNA sense strand
ggaaccuuacuguguuaua

SEQ ID NO: 1542568 - RNA, 19 nt, Homo sapiens
  misc_RNA (1)...(19): siRNA sense strand
caauuuguuucccauuugu

SEQ ID NO: 1542569 - RNA, 19 nt, Homo sapiens
  misc_RNA (1)...(19): siRNA sense strand
ugcaauuuguuucccauuu

SEQ ID NO: 1542570 - RNA, 19 nt, Homo sapiens
  misc_RNA (1)...(19): siRNA sense strand
cgugggcacuuacucauuc

SEQ ID NO: 1542571 - RNA, 19 nt, Homo sapiens
  misc_RNA (1)...(19): siRNA sense strand
gaagccaguccaguuugua

SEQ ID NO: 1542572 - RNA, 19 nt, Homo sapiens
  misc_RNA (1)...(19): siRNA sense strand
cagugucaccagauacuua

SEQ ID NO: 1542573 - RNA, 19 nt, Homo sapiens
  misc_RNA (1)...(19): siRNA sense strand
gagaaaagaaucagcagaa

SEQ ID NO: 1542574 - RNA, 19 nt, Homo sapiens
  misc_RNA (1)...(19): siRNA sense strand
aaaugaagccaguccaguu

SEQ ID NO: 1542575 - RNA, 19 nt, Homo sapiens
  misc_RNA (1)...(19): siRNA sense strand
cagggcuaaugauuccuua

SEQ ID NO: 1542576 - RNA, 19 nt, Homo sapiens
  misc_RNA (1)...(19): siRNA sense strand
aagauaagaccuugcauag

SEQ ID NO: 1542577 - RNA, 19 nt, Homo sapiens
  misc_RNA (1)...(19): siRNA sense strand
ugaagccaguccaguuugu

SEQ ID NO: 1542578 - RNA, 19 nt, Homo sapiens
  misc_RNA (1)...(19): siRNA sense strand
cagcacaacccuucuuuac

SEQ ID NO: 1542579 - RNA, 19 nt, Homo sapiens
  misc_RNA (1)...(19): siRNA sense strand
ugcaagagggccuguagua

SEQ ID NO: 1542580 - RNA, 19 nt, Homo sapiens
  misc_RNA (1)...(19): siRNA sense strand
gaaaagaaucagcagaaug

SEQ ID NO: 1542581 - RNA, 19 nt, Homo sapiens
  misc_RNA (1)...(19): siRNA sense strand
aaacaccacaggcagaaga

SEQ ID NO: 1542582 - RNA, 19 nt, Homo sapiens
  misc_RNA (1)...(19): siRNA sense strand
agggaaccuuacuguguua

SEQ ID NO: 1542583 - RNA, 19 nt, Homo sapiens
  misc_RNA (1)...(19): siRNA sense strand
ccuaccugguggccuguua

SEQ ID NO: 1542584 - RNA, 19 nt, Homo sapiens
  misc_RNA (1)...(19): siRNA sense strand
aaugaagccaguccaguuu

SEQ ID NO: 1542585 - RNA, 19 nt, Homo sapiens
  misc_RNA (1)...(19): siRNA sense strand
ucagcacaacccuucuuua

SEQ ID NO: 1542586 - RNA, 19 nt, Homo sapiens
  misc_RNA (1)...(19): siRNA sense strand
gauauccucagaucugcaa

SEQ ID NO: 1542587 - RNA, 19 nt, Homo sapiens
  misc_RNA (1)...(19): siRNA sense strand
gcaagagggccuguaguac

SEQ ID NO: 1542588 - RNA, 19 nt, Homo sapiens
  misc_RNA (1)...(19): siRNA sense strand
uagcagcagucagccagaa

SEQ ID NO: 1542589 - RNA, 19 nt, Homo sapiens
  misc_RNA (1)...(19): siRNA sense strand
ugaaagauaagaccuugca

SEQ ID NO: 1542590 - RNA, 19 nt, Homo sapiens
  misc_RNA (1)...(19): siRNA sense strand
gcaaccuccugaucuccau

SEQ ID NO: 1542591 - RNA, 19 nt, Homo sapiens
  misc_RNA (1)...(19): siRNA sense strand
auagagcaccuuacuacuu

SEQ ID NO: 1542592 - RNA, 19 nt, Homo sapiens
  misc_RNA (1)...(19): siRNA sense strand
ccucuaacagccuuucuga

SEQ ID NO: 1542593 - RNA, 19 nt, Homo sapiens
  misc_RNA (1)...(19): siRNA sense strand
gggcacuuacucauucauu

SEQ ID NO: 1542594 - RNA, 19 nt, Homo sapiens
  misc_RNA (1)...(19): siRNA sense strand
gucaccagauacuuagcua

SEQ ID NO: 1542595 - RNA, 19 nt, Homo sapiens
  misc_RNA (1)...(19): siRNA sense strand
uguaugguguggacucugu

SEQ ID NO: 1542596 - RNA, 19 nt, Homo sapiens
  misc_RNA (1)...(19): siRNA sense strand
auacaaagaggcugaccuu

SEQ ID NO: 1542597 - RNA, 19 nt, Homo sapiens
  misc_RNA (1)...(19): siRNA sense strand
gcagaagaaggcuauuggu

SEQ ID NO: 1542598 - RNA, 19 nt, Homo sapiens
  misc_RNA (1)...(19): siRNA sense strand
aaaagaaucagcagaaugu

SEQ ID NO: 1542599 - RNA, 19 nt, Homo sapiens
  misc_RNA (1)...(19): siRNA sense strand
aagagggccuguaguacca

SEQ ID NO: 1542600 - RNA, 19 nt, Homo sapiens
  misc_RNA (1)...(19): siRNA sense strand
caccgcuucuauacaaaga

SEQ ID NO: 1542601 - RNA, 19 nt, Homo sapiens
  misc_RNA (1)...(19): siRNA sense strand
caauuggcuagcaggauuu

SEQ ID NO: 1542602 - RNA, 19 nt, Homo sapiens
  misc_RNA (1)...(19): siRNA sense strand
auccucagaucugcaauuu

SEQ ID NO: 1542603 - RNA, 19 nt, Homo sapiens
  misc_RNA (1)...(19): siRNA sense strand
uuuccacacugcuuucaug

SEQ ID NO: 1542604 - RNA, 19 nt, Homo sapiens
  misc_RNA (1)...(19): siRNA sense strand
cuuaugggacucugacuug

SEQ ID NO: 1542605 - RNA, 19 nt, Homo sapiens
  misc_RNA (1)...(19): siRNA sense strand
uguuggaucuuugcuguuc

SEQ ID NO: 1542606 - RNA, 19 nt, Homo sapiens
  misc_RNA (1)...(19): siRNA sense strand
ucaaugcgccuuccaacac

SEQ ID NO: 1542607 - RNA, 19 nt, Homo sapiens
  misc_RNA (1)...(19): siRNA sense strand
acacugcuuucaugcucuu

SEQ ID NO: 1542608 - RNA, 19 nt, Homo sapiens
  misc_RNA (1)...(19): siRNA sense strand
agaaggcuauuggucuuag

SEQ ID NO: 1542609 - RNA, 19 nt, Homo sapiens
  misc_RNA (1)...(19): siRNA sense strand
ggcagaagaaggcuauugg

SEQ ID NO: 1542610 - RNA, 19 nt, Homo sapiens
  misc_RNA (1)...(19): siRNA sense strand
cugguggccuguuauugga

SEQ ID NO: 1542611 - RNA, 19 nt, Homo sapiens
  misc_RNA (1)...(19): siRNA sense strand
gccuguuauuggagaguuu

SEQ ID NO: 1542612 - RNA, 19 nt, Homo sapiens
  misc_RNA (1)...(19): siRNA sense strand
accuuacuguguuauauga

SEQ ID NO: 1542613 - RNA, 19 nt, Homo sapiens
  misc_RNA (1)...(19): siRNA sense strand
ggaaauggcucuggacaug

SEQ ID NO: 1542614 - RNA, 19 nt, Homo sapiens
  misc_RNA (1)...(19): siRNA sense strand
ggacauggcccugaacaua

SEQ ID NO: 1542615 - RNA, 19 nt, Homo sapiens
  misc_RNA (1)...(19): siRNA sense strand
ggaaucgccuccauaaaga

SEQ ID NO: 1542616 - RNA, 19 nt, Homo sapiens
  misc_RNA (1)...(19): siRNA sense strand
gacagaagguggcgugaaa

SEQ ID NO: 1542617 - RNA, 19 nt, Homo sapiens
  misc_RNA (1)...(19): siRNA sense strand
gagaaacccaaguucauua

SEQ ID NO: 1542618 - RNA, 19 nt, Homo sapiens
  misc_RNA (1)...(19): siRNA sense strand
ggaagagggugccacaaag

SEQ ID NO: 1542619 - RNA, 19 nt, Homo sapiens
  misc_RNA (1)...(19): siRNA sense strand
gcaguggccuccuggaugu

SEQ ID NO: 1542620 - RNA, 19 nt, Homo sapiens
  misc_RNA (1)...(19): siRNA sense strand
gcaaagacaaggagaggaa

SEQ ID NO: 1542621 - RNA, 19 nt, Homo sapiens
  misc_RNA (1)...(19): siRNA sense strand
gaugagggauguccugcuu

SEQ ID NO: 1542622 - RNA, 19 nt, Homo sapiens
  misc_RNA (1)...(19): siRNA sense strand
gaacauaggcucggaacca

SEQ ID NO: 1542623 - RNA, 19 nt, Homo sapiens
  misc_RNA (1)...(19): siRNA sense strand
gccaugaacuugcaagagu

SEQ ID NO: 1542624 - RNA, 19 nt, Homo sapiens
  misc_RNA (1)...(19): siRNA sense strand
guucauuacugcagccaaa

SEQ ID NO: 1542625 - RNA, 19 nt, Homo sapiens
  misc_RNA (1)...(19): siRNA sense strand
agagaagccuagcgaagaa

SEQ ID NO: 1542626 - RNA, 19 nt, Homo sapiens
  misc_RNA (1)...(19): siRNA sense strand
ugagaugccuccgaccuuu

SEQ ID NO: 1542627 - RNA, 19 nt, Homo sapiens
  misc_RNA (1)...(19): siRNA sense strand
ugagguugccgauaagaua

SEQ ID NO: 1542628 - RNA, 19 nt, Homo sapiens
  misc_RNA (1)...(19): siRNA sense strand
gcagcgguuucuucuucua

SEQ ID NO: 1542629 - RNA, 19 nt, Homo sapiens
  misc_RNA (1)...(19): siRNA sense strand
gaagagggugccacaaagu

SEQ ID NO: 1542630 - RNA, 19 nt, Homo sapiens
  misc_RNA (1)...(19): siRNA sense strand
gaccagaagacuauucaga

SEQ ID NO: 1542631 - RNA, 19 nt, Homo sapiens
  misc_RNA (1)...(19): siRNA sense strand
cuuccugucccauauauua

SEQ ID NO: 1542632 - RNA, 19 nt, Homo sapiens
  misc_RNA (1)...(19): siRNA sense strand
agccugagguugccgauaa

SEQ ID NO: 1542633 - RNA, 19 nt, Homo sapiens
  misc_RNA (1)...(19): siRNA sense strand
ggugaugcgucuggccaua

SEQ ID NO: 1542634 - RNA, 19 nt, Homo sapiens
  misc_RNA (1)...(19): siRNA sense strand
cgagaaacccaaguucauu

SEQ ID NO: 1542635 - RNA, 19 nt, Homo sapiens
  misc_RNA (1)...(19): siRNA sense strand
uggaaggucucucuguguu

SEQ ID NO: 1542636 - RNA, 19 nt, Homo sapiens
  misc_RNA (1)...(19): siRNA sense strand
ggaagucgaagggcaaaga

SEQ ID NO: 1542637 - RNA, 19 nt, Homo sapiens
  misc_RNA (1)...(19): siRNA sense strand
gcuuagaccagaagacuau

SEQ ID NO: 1542638 - RNA, 19 nt, Homo sapiens
  misc_RNA (1)...(19): siRNA sense strand
gaaaugcuaacuccugucu

SEQ ID NO: 1542639 - RNA, 19 nt, Homo sapiens
  misc_RNA (1)...(19): siRNA sense strand
gggacaauuuccucugugu

SEQ ID NO: 1542640 - RNA, 19 nt, Homo sapiens
  misc_RNA (1)...(19): siRNA sense strand
gagcuuccugucccauaua

SEQ ID NO: 1542641 - RNA, 19 nt, Homo sapiens
  misc_RNA (1)...(19): siRNA sense strand
cugcagcgguuucuucuuc

SEQ ID NO: 1542642 - RNA, 19 nt, Homo sapiens
  misc_RNA (1)...(19): siRNA sense strand
gcagaacaccagugacuac

SEQ ID NO: 1542643 - RNA, 19 nt, Homo sapiens
  misc_RNA (1)...(19): siRNA sense strand
agagauuggucgccaugaa

SEQ ID NO: 1542644 - RNA, 19 nt, Homo sapiens
  misc_RNA (1)...(19): siRNA sense strand
gugaggacauggcccugaa

SEQ ID NO: 1542645 - RNA, 19 nt, Homo sapiens
  misc_RNA (1)...(19): siRNA sense strand
aaacccaaguucauuacug

SEQ ID NO: 1542646 - RNA, 19 nt, Homo sapiens
  misc_RNA (1)...(19): siRNA sense strand
ucacugagcagcauuuuaa

SEQ ID NO: 1542647 - RNA, 19 nt, Homo sapiens
  misc_RNA (1)...(19): siRNA sense strand
agaagcugcuggcggacua

SEQ ID NO: 1542648 - RNA, 19 nt, Homo sapiens
  misc_RNA (1)...(19): siRNA sense strand
gagagcuuccugucccaua

SEQ ID NO: 1542649 - RNA, 19 nt, Homo sapiens
  misc_RNA (1)...(19): siRNA sense strand
uuuaaccucuugaaugaga

SEQ ID NO: 1542650 - RNA, 19 nt, Homo sapiens
  misc_RNA (1)...(19): siRNA sense strand
gacauggcccugaacauag

SEQ ID NO: 1542651 - RNA, 19 nt, Homo sapiens
  misc_RNA (1)...(19): siRNA sense strand
cagagacgaugagggaugu

SEQ ID NO: 1542652 - RNA, 19 nt, Homo sapiens
  misc_RNA (1)...(19): siRNA sense strand
uaaagaagagacagaaggu

SEQ ID NO: 1542653 - RNA, 19 nt, Homo sapiens
  misc_RNA (1)...(19): siRNA sense strand
uauugucacuucaagacuu

SEQ ID NO: 1542654 - RNA, 19 nt, Homo sapiens
  misc_RNA (1)...(19): siRNA sense strand
agauaguccuggucacaga

SEQ ID NO: 1542655 - RNA, 19 nt, Homo sapiens
  misc_RNA (1)...(19): siRNA sense strand
ucaacuugguccuguaugg

SEQ ID NO: 1542656 - RNA, 19 nt, Homo sapiens
  misc_RNA (1)...(19): siRNA sense strand
gaagccaauuggagaaacg

SEQ ID NO: 1542657 - RNA, 19 nt, Homo sapiens
  misc_RNA (1)...(19): siRNA sense strand
gaaucgccuccauaaagaa

SEQ ID NO: 1542658 - RNA, 19 nt, Homo sapiens
  misc_RNA (1)...(19): siRNA sense strand
gcaucauagucgacucaga

SEQ ID NO: 1542659 - RNA, 19 nt, Homo sapiens
  misc_RNA (1)...(19): siRNA sense strand
aagagaagccuagcgaaga

SEQ ID NO: 1542660 - RNA, 19 nt, Homo sapiens
  misc_RNA (1)...(19): siRNA sense strand
gguuucuucuucuauggaa

SEQ ID NO: 1542661 - RNA, 19 nt, Homo sapiens
  misc_RNA (1)...(19): siRNA sense strand
ggagcuggagguagaggaa

SEQ ID NO: 1542662 - RNA, 19 nt, Homo sapiens
  misc_RNA (1)...(19): siRNA sense strand
gaaccaaggcgaggcuucu

SEQ ID NO: 1542663 - RNA, 19 nt, Homo sapiens
  misc_RNA (1)...(19): siRNA sense strand
ggaagccaauuggagaaac

SEQ ID NO: 1542664 - RNA, 19 nt, Homo sapiens
  misc_RNA (1)...(19): siRNA sense strand
ccauaaagaagagacagaa

SEQ ID NO: 1542665 - RNA, 19 nt, Homo sapiens
  misc_RNA (1)...(19): siRNA sense strand
aggaagagggugccacaaa

SEQ ID NO: 1542666 - RNA, 19 nt, Homo sapiens
  misc_RNA (1)...(19): siRNA sense strand
ccagggcccagaaaugcua

SEQ ID NO: 1542667 - RNA, 19 nt, Homo sapiens
  misc_RNA (1)...(19): siRNA sense strand
uaagauaguccuggucaca

SEQ ID NO: 1542668 - RNA, 19 nt, Homo sapiens
  misc_RNA (1)...(19): siRNA sense strand
gccugcagguggaagagaa

SEQ ID NO: 1542669 - RNA, 19 nt, Homo sapiens
  misc_RNA (1)...(19): siRNA sense strand
ggagaggcgaggaccugaa

SEQ ID NO: 1542670 - RNA, 19 nt, Homo sapiens
  misc_RNA (1)...(19): siRNA sense strand
gagcucugccugccugugu

SEQ ID NO: 1542671 - RNA, 19 nt, Homo sapiens
  misc_RNA (1)...(19): siRNA sense strand
gcucaacuugguccuguau

SEQ ID NO: 1542672 - RNA, 19 nt, Homo sapiens
  misc_RNA (1)...(19): siRNA sense strand
caagcucggccucguggaa

SEQ ID NO: 1542673 - RNA, 19 nt, Homo sapiens
  misc_RNA (1)...(19): siRNA sense strand
ggaaggucucucuguguuc

SEQ ID NO: 1542674 - RNA, 19 nt, Homo sapiens
  misc_RNA (1)...(19): siRNA sense strand
cauaggcucggaaccagaa

SEQ ID NO: 1542675 - RNA, 19 nt, Homo sapiens
  misc_RNA (1)...(19): siRNA sense strand
gguguacagugaggacaug

SEQ ID NO: 1542676 - RNA, 19 nt, Homo sapiens
  misc_RNA (1)...(19): siRNA sense strand
cagcuccggugccaagaca

SEQ ID NO: 1542677 - RNA, 19 nt, Homo sapiens
  misc_RNA (1)...(19): siRNA sense strand
caaagacaaggagaggaaa

SEQ ID NO: 1542678 - RNA, 19 nt, Homo sapiens
  misc_RNA (1)...(19): siRNA sense strand
agagcuuccugucccauau

SEQ ID NO: 1542679 - RNA, 19 nt, Homo sapiens
  misc_RNA (1)...(19): siRNA sense strand
ggacaugcuccaguucauc

SEQ ID NO: 1542680 - RNA, 19 nt, Homo sapiens
  misc_RNA (1)...(19): siRNA sense strand
ucuauggaauggagagcuu

SEQ ID NO: 1542681 - RNA, 19 nt, Homo sapiens
  misc_RNA (1)...(19): siRNA sense strand
aaagauuccaagacacauu

SEQ ID NO: 1542682 - RNA, 19 nt, Homo sapiens
  misc_RNA (1)...(19): siRNA sense strand
aggcccagguguacaguga

SEQ ID NO: 1542683 - RNA, 19 nt, Homo sapiens
  misc_RNA (1)...(19): siRNA sense strand
ugaguugcuuagaccagaa

SEQ ID NO: 1542684 - RNA, 19 nt, Homo sapiens
  misc_RNA (1)...(19): siRNA sense strand
gggaagccaauuggagaaa

SEQ ID NO: 1542685 - RNA, 19 nt, Homo sapiens
  misc_RNA (1)...(19): siRNA sense strand
cgacucagacaacuucaag

SEQ ID NO: 1542686 - RNA, 19 nt, Homo sapiens
  misc_RNA (1)...(19): siRNA sense strand
cagggccuauugucacuuc

SEQ ID NO: 1542687 - RNA, 19 nt, Homo sapiens
  misc_RNA (1)...(19): siRNA sense strand
aagggacaauuuccucugu

SEQ ID NO: 1542688 - RNA, 19 nt, Homo sapiens
  misc_RNA (1)...(19): siRNA sense strand
gagaggcgaggaccugaag

SEQ ID NO: 1542689 - RNA, 19 nt, Homo sapiens
  misc_RNA (1)...(19): siRNA sense strand
uauauuaguggagagauug

SEQ ID NO: 1542690 - RNA, 19 nt, Homo sapiens
  misc_RNA (1)...(19): siRNA sense strand
gaaagauuccaagacacau

SEQ ID NO: 1542691 - RNA, 19 nt, Homo sapiens
  misc_RNA (1)...(19): siRNA sense strand
gagguugccgauaagauag

SEQ ID NO: 1542692 - RNA, 19 nt, Homo sapiens
  misc_RNA (1)...(19): siRNA sense strand
uuacugcagccaaaggaaa

SEQ ID NO: 1542693 - RNA, 19 nt, Homo sapiens
  misc_RNA (1)...(19): siRNA sense strand
cgggacaucugggaagcaa

SEQ ID NO: 1542694 - RNA, 19 nt, Homo sapiens
  misc_RNA (1)...(19): siRNA sense strand
cuccaucacccaagacauu

SEQ ID NO: 1542695 - RNA, 19 nt, Homo sapiens
  misc_RNA (1)...(19): siRNA sense strand
cagcguccagggccuauug

SEQ ID NO: 1542696 - RNA, 19 nt, Homo sapiens
  misc_RNA (1)...(19): siRNA sense strand
gagcuucugcagccgcuau

SEQ ID NO: 1542697 - RNA, 19 nt, Homo sapiens
  misc_RNA (1)...(19): siRNA sense strand
uggagaugguggagugugu

SEQ ID NO: 1542698 - RNA, 19 nt, Homo sapiens
  misc_RNA (1)...(19): siRNA sense strand
gagauuggucgccaugaac

SEQ ID NO: 1542699 - RNA, 19 nt, Homo sapiens
  misc_RNA (1)...(19): siRNA sense strand
cggacuaucugcagaacac

SEQ ID NO: 1542700 - RNA, 19 nt, Homo sapiens
  misc_RNA (1)...(19): siRNA sense strand
cuucaaaugcuguggaauc

SEQ ID NO: 1542701 - RNA, 19 nt, Homo sapiens
  misc_RNA (1)...(19): siRNA sense strand
gacaugcuccaguucaucu

SEQ ID NO: 1542702 - RNA, 19 nt, Homo sapiens
  misc_RNA (1)...(19): siRNA sense strand
aaacggugcgucuccuuca

SEQ ID NO: 1542703 - RNA, 19 nt, Homo sapiens
  misc_RNA (1)...(19): siRNA sense strand
gcgguuucuucuucuaugg

SEQ ID NO: 1542704 - RNA, 19 nt, Homo sapiens
  misc_RNA (1)...(19): siRNA sense strand
cagcugcagcgguuucuuc

SEQ ID NO: 1542705 - RNA, 19 nt, Homo sapiens
  misc_RNA (1)...(19): siRNA sense strand
ggccuauugucacuucaag

SEQ ID NO: 1542706 - RNA, 19 nt, Homo sapiens
  misc_RNA (1)...(19): siRNA sense strand
gugaugcgucuggccauaa

SEQ ID NO: 1542707 - RNA, 19 nt, Homo sapiens
  misc_RNA (1)...(19): siRNA sense strand
cgacgaggcggugaaccaa

SEQ ID NO: 1542708 - RNA, 19 nt, Homo sapiens
  misc_RNA (1)...(19): siRNA sense strand
gaggacauggcccugaaca

SEQ ID NO: 1542709 - RNA, 19 nt, Homo sapiens
  misc_RNA (1)...(19): siRNA sense strand
cuagaaagguuuaugguaa

SEQ ID NO: 1542710 - RNA, 19 nt, Homo sapiens
  misc_RNA (1)...(19): siRNA sense strand
gccaagagauaauaagaga

SEQ ID NO: 1542711 - RNA, 19 nt, Homo sapiens
  misc_RNA (1)...(19): siRNA sense strand
gcaagugcuuucauccaaa

SEQ ID NO: 1542712 - RNA, 19 nt, Homo sapiens
  misc_RNA (1)...(19): siRNA sense strand
ccacagagacgauugaaga

SEQ ID NO: 1542713 - RNA, 19 nt, Homo sapiens
  misc_RNA (1)...(19): siRNA sense strand
uccuugaacuuccgaauua

SEQ ID NO: 1542714 - RNA, 19 nt, Homo sapiens
  misc_RNA (1)...(19): siRNA sense strand
gaaauccuagaaagguuua

SEQ ID NO: 1542715 - RNA, 19 nt, Homo sapiens
  misc_RNA (1)...(19): siRNA sense strand
aagaagaacugcuggaauc

SEQ ID NO: 1542716 - RNA, 19 nt, Homo sapiens
  misc_RNA (1)...(19): siRNA sense strand
caagagauaauaagagaga

SEQ ID NO: 1542717 - RNA, 19 nt, Homo sapiens
  misc_RNA (1)...(19): siRNA sense strand
gcucuaggcuaucuacaca

SEQ ID NO: 1542718 - RNA, 19 nt, Homo sapiens
  misc_RNA (1)...(19): siRNA sense strand
uaggcuaucuacacacuaa

SEQ ID NO: 1542719 - RNA, 19 nt, Homo sapiens
  misc_RNA (1)...(19): siRNA sense strand
gcauugcugaguucucuua

SEQ ID NO: 1542720 - RNA, 19 nt, Homo sapiens
  misc_RNA (1)...(19): siRNA sense strand
ugaguucucuuaugcaauc

SEQ ID NO: 1542721 - RNA, 19 nt, Homo sapiens
  misc_RNA (1)...(19): siRNA sense strand
gcugaguucucuuaugcaa

SEQ ID NO: 1542722 - RNA, 19 nt, Homo sapiens
  misc_RNA (1)...(19): siRNA sense strand
caacauuacagucuugaau

SEQ ID NO: 1542723 - RNA, 19 nt, Homo sapiens
  misc_RNA (1)...(19): siRNA sense strand
uagaaauccuagaaagguu

SEQ ID NO: 1542724 - RNA, 19 nt, Homo sapiens
  misc_RNA (1)...(19): siRNA sense strand
cagcaacauuacagucuug

SEQ ID NO: 1542725 - RNA, 19 nt, Homo sapiens
  misc_RNA (1)...(19): siRNA sense strand
guagaaauccuagaaaggu

SEQ ID NO: 1542726 - RNA, 19 nt, Homo sapiens
  misc_RNA (1)...(19): siRNA sense strand
caaguuuacucuccgucuu

SEQ ID NO: 1542727 - RNA, 19 nt, Homo sapiens
  misc_RNA (1)...(19): siRNA sense strand
aagaacugcuggaaucaga

SEQ ID NO: 1542728 - RNA, 19 nt, Homo sapiens
  misc_RNA (1)...(19): siRNA sense strand
ugcaugaacccauauauga

SEQ ID NO: 1542729 - RNA, 19 nt, Homo sapiens
  misc_RNA (1)...(19): siRNA sense strand
ggaguugucgccacagaga

SEQ ID NO: 1542730 - RNA, 19 nt, Homo sapiens
  misc_RNA (1)...(19): siRNA sense strand
gaauuggagggcucugaaa

SEQ ID NO: 1542731 - RNA, 19 nt, Homo sapiens
  misc_RNA (1)...(19): siRNA sense strand
uugcagagcaucacuggua

SEQ ID NO: 1542732 - RNA, 19 nt, Homo sapiens
  misc_RNA (1)...(19): siRNA sense strand
uaaagaagaacugcuggaa

SEQ ID NO: 1542733 - RNA, 19 nt, Homo sapiens
  misc_RNA (1)...(19): siRNA sense strand
acaauggugucuggagaaa

SEQ ID NO: 1542734 - RNA, 19 nt, Homo sapiens
  misc_RNA (1)...(19): siRNA sense strand
gggcuucaauugagaacuc

SEQ ID NO: 1542735 - RNA, 19 nt, Homo sapiens
  misc_RNA (1)...(19): siRNA sense strand
ccuccaggcucuaggcuau

SEQ ID NO: 1542736 - RNA, 19 nt, Homo sapiens
  misc_RNA (1)...(19): siRNA sense strand
ugaaacagcagcuugucaa

SEQ ID NO: 1542737 - RNA, 19 nt, Homo sapiens
  misc_RNA (1)...(19): siRNA sense strand
aauggugucuggagaaauc

SEQ ID NO: 1542738 - RNA, 19 nt, Homo sapiens
  misc_RNA (1)...(19): siRNA sense strand
ucuacacacuaaagaagaa

SEQ ID NO: 1542739 - RNA, 19 nt, Homo sapiens
  misc_RNA (1)...(19): siRNA sense strand
cgucuugugucauguguuc

SEQ ID NO: 1542740 - RNA, 19 nt, Homo sapiens
  misc_RNA (1)...(19): siRNA sense strand
ccuagaaagguuuauggua

SEQ ID NO: 1542741 - RNA, 19 nt, Homo sapiens
  misc_RNA (1)...(19): siRNA sense strand
caugaacccauauaugaga

SEQ ID NO: 1542742 - RNA, 19 nt, Homo sapiens
  misc_RNA (1)...(19): siRNA sense strand
uggucuaucuucugcauga

SEQ ID NO: 1542743 - RNA, 19 nt, Homo sapiens
  misc_RNA (1)...(19): siRNA sense strand
acaauccagccaagagaua

SEQ ID NO: 1542744 - RNA, 19 nt, Homo sapiens
  misc_RNA (1)...(19): siRNA sense strand
ccacaauccagccaagaga

SEQ ID NO: 1542745 - RNA, 19 nt, Homo sapiens
  misc_RNA (1)...(19): siRNA sense strand
gagacgcuccuagagguuu

SEQ ID NO: 1542746 - RNA, 19 nt, Homo sapiens
  misc_RNA (1)...(19): siRNA sense strand
gaacuuccgaauuaaucug

SEQ ID NO: 1542747 - RNA, 19 nt, Homo sapiens
  misc_RNA (1)...(19): siRNA sense strand
ucagcaacauuacagucuu

SEQ ID NO: 1542748 - RNA, 19 nt, Homo sapiens
  misc_RNA (1)...(19): siRNA sense strand
gauugaagacgcccugcuu

SEQ ID NO: 1542749 - RNA, 19 nt, Homo sapiens
  misc_RNA (1)...(19): siRNA sense strand
gcagagcaucacugguauu

SEQ ID NO: 1542750 - RNA, 19 nt, Homo sapiens
  misc_RNA (1)...(19): siRNA sense strand
ccucguugacuuucaguuu

SEQ ID NO: 1542751 - RNA, 19 nt, Homo sapiens
  misc_RNA (1)...(19): siRNA sense strand
cagccaagagauaauaaga

SEQ ID NO: 1542752 - RNA, 19 nt, Homo sapiens
  misc_RNA (1)...(19): siRNA sense strand
gcaugaacccauauaugag

SEQ ID NO: 1542753 - RNA, 19 nt, Homo sapiens
  misc_RNA (1)...(19): siRNA sense strand
gcaugcaaccugccugaca

SEQ ID NO: 1542754 - RNA, 19 nt, Homo sapiens
  misc_RNA (1)...(19): siRNA sense strand
gcuguagaaauccuagaaa

SEQ ID NO: 1542755 - RNA, 19 nt, Homo sapiens
  misc_RNA (1)...(19): siRNA sense strand
caagugcuuucauccaaaa

SEQ ID NO: 1542756 - RNA, 19 nt, Homo sapiens
  misc_RNA (1)...(19): siRNA sense strand
caauccagccaagagauaa

SEQ ID NO: 1542757 - RNA, 19 nt, Homo sapiens
  misc_RNA (1)...(19): siRNA sense strand
agaaauccuagaaagguuu

SEQ ID NO: 1542758 - RNA, 19 nt, Homo sapiens
  misc_RNA (1)...(19): siRNA sense strand
ucuccugucugaacaaugg

SEQ ID NO: 1542759 - RNA, 19 nt, Homo sapiens
  misc_RNA (1)...(19): siRNA sense strand
agacuguugcuuccucuaa

SEQ ID NO: 1542760 - RNA, 19 nt, Homo sapiens
  misc_RNA (1)...(19): siRNA sense strand
cuuaugcaauccugacuca

SEQ ID NO: 1542761 - RNA, 19 nt, Homo sapiens
  misc_RNA (1)...(19): siRNA sense strand
ucacuuggcccagcagaau

SEQ ID NO: 1542762 - RNA, 19 nt, Homo sapiens
  misc_RNA (1)...(19): siRNA sense strand
gacuuucaguuuggaguug

SEQ ID NO: 1542763 - RNA, 19 nt, Homo sapiens
  misc_RNA (1)...(19): siRNA sense strand
aaagaagaacugcuggaau

SEQ ID NO: 1542764 - RNA, 19 nt, Homo sapiens
  misc_RNA (1)...(19): siRNA sense strand
cagagcaucacugguauug

SEQ ID NO: 1542765 - RNA, 19 nt, Homo sapiens
  misc_RNA (1)...(19): siRNA sense strand
aggauacaauggcuguuug

SEQ ID NO: 1542766 - RNA, 19 nt, Homo sapiens
  misc_RNA (1)...(19): siRNA sense strand
gcuaucuacacacuaaaga

SEQ ID NO: 1542767 - RNA, 19 nt, Homo sapiens
  misc_RNA (1)...(19): siRNA sense strand
gcuguuggcaguaggaauc

SEQ ID NO: 1542768 - RNA, 19 nt, Homo sapiens
  misc_RNA (1)...(19): siRNA sense strand
gcaacauuacagucuugaa

SEQ ID NO: 1542769 - RNA, 19 nt, Homo sapiens
  misc_RNA (1)...(19): siRNA sense strand
uaggauacaauggcuguuu

SEQ ID NO: 1542770 - RNA, 19 nt, Homo sapiens
  misc_RNA (1)...(19): siRNA sense strand
ccuugaacuuccgaauuaa

SEQ ID NO: 1542771 - RNA, 19 nt, Homo sapiens
  misc_RNA (1)...(19): siRNA sense strand
agaaaucugugagcuacca

SEQ ID NO: 1542772 - RNA, 19 nt, Homo sapiens
  misc_RNA (1)...(19): siRNA sense strand
gaaacagcagcuugucaac

SEQ ID NO: 1542773 - RNA, 19 nt, Homo sapiens
  misc_RNA (1)...(19): siRNA sense strand
gaucggccucccucguuga

SEQ ID NO: 1542774 - RNA, 19 nt, Homo sapiens
  misc_RNA (1)...(19): siRNA sense strand
aagacgcccugcuucacuu

SEQ ID NO: 1542775 - RNA, 19 nt, Homo sapiens
  misc_RNA (1)...(19): siRNA sense strand
auacaauggcuguuugguu

SEQ ID NO: 1542776 - RNA, 19 nt, Homo sapiens
  misc_RNA (1)...(19): siRNA sense strand
ccacuccccuggcauaugu

SEQ ID NO: 1542777 - RNA, 19 nt, Homo sapiens
  misc_RNA (1)...(19): siRNA sense strand
cuguagaaauccuagaaag

SEQ ID NO: 1542778 - RNA, 19 nt, Homo sapiens
  misc_RNA (1)...(19): siRNA sense strand
cucguugacuuucaguuug

SEQ ID NO: 1542779 - RNA, 19 nt, Homo sapiens
  misc_RNA (1)...(19): siRNA sense strand
uugcugaguucucuuaugc

SEQ ID NO: 1542780 - RNA, 19 nt, Homo sapiens
  misc_RNA (1)...(19): siRNA sense strand
cggccucccucguugacuu

SEQ ID NO: 1542781 - RNA, 19 nt, Homo sapiens
  misc_RNA (1)...(19): siRNA sense strand
gaagaacugcuggaaucag

SEQ ID NO: 1542782 - RNA, 19 nt, Homo sapiens
  misc_RNA (1)...(19): siRNA sense strand
guccuugaacuuccgaauu

SEQ ID NO: 1542783 - RNA, 19 nt, Homo sapiens
  misc_RNA (1)...(19): siRNA sense strand
aaacagcagcuugucaaca

SEQ ID NO: 1542784 - RNA, 19 nt, Homo sapiens
  misc_RNA (1)...(19): siRNA sense strand
ggucuaucuucugcaugaa

SEQ ID NO: 1542785 - RNA, 19 nt, Homo sapiens
  misc_RNA (1)...(19): siRNA sense strand
uaucuacacacuaaagaag

SEQ ID NO: 1542786 - RNA, 19 nt, Homo sapiens
  misc_RNA (1)...(19): siRNA sense strand
uggagaaaucugugagcua

SEQ ID NO: 1542787 - RNA, 19 nt, Homo sapiens
  misc_RNA (1)...(19): siRNA sense strand
ggacaagaagagguauuua

SEQ ID NO: 1542788 - RNA, 19 nt, Homo sapiens
  misc_RNA (1)...(19): siRNA sense strand
ugccagaucuuuacacuca

SEQ ID NO: 1542789 - RNA, 19 nt, Homo sapiens
  misc_RNA (1)...(19): siRNA sense strand
ggugguaacuguggcagaa

SEQ ID NO: 1542790 - RNA, 19 nt, Homo sapiens
  misc_RNA (1)...(19): siRNA sense strand
ccaggugucccuuccauuu

SEQ ID NO: 1542791 - RNA, 19 nt, Homo sapiens
  misc_RNA (1)...(19): siRNA sense strand
ccacaccguuaccuuacuu

SEQ ID NO: 1542792 - RNA, 19 nt, Homo sapiens
  misc_RNA (1)...(19): siRNA sense strand
cagaauccauuuuagguuu

SEQ ID NO: 1542793 - RNA, 19 nt, Homo sapiens
  misc_RNA (1)...(19): siRNA sense strand
agaaggacaagaagaggua

SEQ ID NO: 1542794 - RNA, 19 nt, Homo sapiens
  misc_RNA (1)...(19): siRNA sense strand
caccguuaccuuacuuaua

SEQ ID NO: 1542795 - RNA, 19 nt, Homo sapiens
  misc_RNA (1)...(19): siRNA sense strand
cugcuucuccuacugguua

SEQ ID NO: 1542796 - RNA, 19 nt, Homo sapiens
  misc_RNA (1)...(19): siRNA sense strand
cagaagaagacuccagaga

SEQ ID NO: 1542797 - RNA, 19 nt, Homo sapiens
  misc_RNA (1)...(19): siRNA sense strand
accguuaccuuacuuauag

SEQ ID NO: 1542798 - RNA, 19 nt, Homo sapiens
  misc_RNA (1)...(19): siRNA sense strand
gaaggcccagaauccauuu

SEQ ID NO: 1542799 - RNA, 19 nt, Homo sapiens
  misc_RNA (1)...(19): siRNA sense strand
gcugguuggugguaacugu

SEQ ID NO: 1542800 - RNA, 19 nt, Homo sapiens
  misc_RNA (1)...(19): siRNA sense strand
cgaaggcccagaauccauu

SEQ ID NO: 1542801 - RNA, 19 nt, Homo sapiens
  misc_RNA (1)...(19): siRNA sense strand
gacaagaagagguauuuac

SEQ ID NO: 1542802 - RNA, 19 nt, Homo sapiens
  misc_RNA (1)...(19): siRNA sense strand
gcccagcccaucacaaaga

SEQ ID NO: 1542803 - RNA, 19 nt, Homo sapiens
  misc_RNA (1)...(19): siRNA sense strand
uuuauuggccacaccguua

SEQ ID NO: 1542804 - RNA, 19 nt, Homo sapiens
  misc_RNA (1)...(19): siRNA sense strand
ccacgaaggcccagaaucc

SEQ ID NO: 1542805 - RNA, 19 nt, Homo sapiens
  misc_RNA (1)...(19): siRNA sense strand
uggccacaccguuaccuua

SEQ ID NO: 1542806 - RNA, 19 nt, Homo sapiens
  misc_RNA (1)...(19): siRNA sense strand
gcuaccgacugccagaucu

SEQ ID NO: 1542807 - RNA, 19 nt, Homo sapiens
  misc_RNA (1)...(19): siRNA sense strand
agaagacuccagagaggaa

SEQ ID NO: 1542808 - RNA, 19 nt, Homo sapiens
  misc_RNA (1)...(19): siRNA sense strand
gaccuuucgucccuucaag

SEQ ID NO: 1542809 - RNA, 19 nt, Homo sapiens
  misc_RNA (1)...(19): siRNA sense strand
agagaggaagcucaucuga

SEQ ID NO: 1542810 - RNA, 19 nt, Homo sapiens
  misc_RNA (1)...(19): siRNA sense strand
agacacugcuucuccuacu

SEQ ID NO: 1542811 - RNA, 19 nt, Homo sapiens
  misc_RNA (1)...(19): siRNA sense strand
guaugcugguuggugguaa

SEQ ID NO: 1542812 - RNA, 19 nt, Homo sapiens
  misc_RNA (1)...(19): siRNA sense strand
gacacugcuucuccuacug

SEQ ID NO: 1542813 - RNA, 19 nt, Homo sapiens
  misc_RNA (1)...(19): siRNA sense strand
ccagagaggaagcucaucu

SEQ ID NO: 1542814 - RNA, 19 nt, Homo sapiens
  misc_RNA (1)...(19): siRNA sense strand
ggcagaaggacaagaagag

SEQ ID NO: 1542815 - RNA, 19 nt, Homo sapiens
  misc_RNA (1)...(19): siRNA sense strand
cgaggaguccggucacaag

SEQ ID NO: 1542816 - RNA, 19 nt, Homo sapiens
  misc_RNA (1)...(19): siRNA sense strand
gaaggacaagaagagguau

SEQ ID NO: 1542817 - RNA, 19 nt, Homo sapiens
  misc_RNA (1)...(19): siRNA sense strand
gguaugcugguugguggua

SEQ ID NO: 1542818 - RNA, 19 nt, Homo sapiens
  misc_RNA (1)...(19): siRNA sense strand
uaaccaccguuuuccauuc

SEQ ID NO: 1542819 - RNA, 19 nt, Homo sapiens
  misc_RNA (1)...(19): siRNA sense strand
ccuggagauucacaaaaua

SEQ ID NO: 1542820 - RNA, 19 nt, Homo sapiens
  misc_RNA (1)...(19): siRNA sense strand
gagaaggaguauugacuaa

SEQ ID NO: 1542821 - RNA, 19 nt, Homo sapiens
  misc_RNA (1)...(19): siRNA sense strand
gaaggaguauugacuaagu

SEQ ID NO: 1542822 - RNA, 19 nt, Homo sapiens
  misc_RNA (1)...(19): siRNA sense strand
gcaauauugucauccagaa

SEQ ID NO: 1542823 - RNA, 19 nt, Homo sapiens
  misc_RNA (1)...(19): siRNA sense strand
gagggagacuuaaggaaug

SEQ ID NO: 1542824 - RNA, 19 nt, Homo sapiens
  misc_RNA (1)...(19): siRNA sense strand
ugaagucuccuuuaaauga

SEQ ID NO: 1542825 - RNA, 19 nt, Homo sapiens
  misc_RNA (1)...(19): siRNA sense strand
gaagacacccaguaaugaa

SEQ ID NO: 1542826 - RNA, 19 nt, Homo sapiens
  misc_RNA (1)...(19): siRNA sense strand
ggaagacacccaguaauga

SEQ ID NO: 1542827 - RNA, 19 nt, Homo sapiens
  misc_RNA (1)...(19): siRNA sense strand
ucauugaagucuccuuuaa

SEQ ID NO: 1542828 - RNA, 19 nt, Homo sapiens
  misc_RNA (1)...(19): siRNA sense strand
caaagaugagggagacuua

SEQ ID NO: 1542829 - RNA, 19 nt, Homo sapiens
  misc_RNA (1)...(19): siRNA sense strand
ggagaaggaguauugacua

SEQ ID NO: 1542830 - RNA, 19 nt, Homo sapiens
  misc_RNA (1)...(19): siRNA sense strand
gaagucuccuuuaaaugau

SEQ ID NO: 1542831 - RNA, 19 nt, Homo sapiens
  misc_RNA (1)...(19): siRNA sense strand
gcaaacagugaagcaaaua

SEQ ID NO: 1542832 - RNA, 19 nt, Homo sapiens
  misc_RNA (1)...(19): siRNA sense strand
gggaagacacccaguaaug

SEQ ID NO: 1542833 - RNA, 19 nt, Homo sapiens
  misc_RNA (1)...(19): siRNA sense strand
ggucaaccuuuaacuauac

SEQ ID NO: 1542834 - RNA, 19 nt, Homo sapiens
  misc_RNA (1)...(19): siRNA sense strand
gaagcaaauacuagacgua

SEQ ID NO: 1542835 - RNA, 19 nt, Homo sapiens
  misc_RNA (1)...(19): siRNA sense strand
gaaaucagaauggaugaau

SEQ ID NO: 1542836 - RNA, 19 nt, Homo sapiens
  misc_RNA (1)...(19): siRNA sense strand
aggaauggauggcuaauca

SEQ ID NO: 1542837 - RNA, 19 nt, Homo sapiens
  misc_RNA (1)...(19): siRNA sense strand
ggcaaacagugaagcaaau

SEQ ID NO: 1542838 - RNA, 19 nt, Homo sapiens
  misc_RNA (1)...(19): siRNA sense strand
gcaaaauucacaccuguua

SEQ ID NO: 1542839 - RNA, 19 nt, Homo sapiens
  misc_RNA (1)...(19): siRNA sense strand
ugacuaaguugugcaggaa

SEQ ID NO: 1542840 - RNA, 19 nt, Homo sapiens
  misc_RNA (1)...(19): siRNA sense strand
ugaggcaacuguauguaug

SEQ ID NO: 1542841 - RNA, 19 nt, Homo sapiens
  misc_RNA (1)...(19): siRNA sense strand
ugauaugucugaugaugau

SEQ ID NO: 1542842 - RNA, 19 nt, Homo sapiens
  misc_RNA (1)...(19): siRNA sense strand
gagcagcuggucaaccuuu

SEQ ID NO: 1542843 - RNA, 19 nt, Homo sapiens
  misc_RNA (1)...(19): siRNA sense strand
agacaccaacuaaaucuuu

SEQ ID NO: 1542844 - RNA, 19 nt, Homo sapiens
  misc_RNA (1)...(19): siRNA sense strand
gaugaugacgaugaugaua

SEQ ID NO: 1542845 - RNA, 19 nt, Homo sapiens
  misc_RNA (1)...(19): siRNA sense strand
uggucaaccuuuaacuaua

SEQ ID NO: 1542846 - RNA, 19 nt, Homo sapiens
  misc_RNA (1)...(19): siRNA sense strand
guggaucgcuuggcaaaca

SEQ ID NO: 1542847 - RNA, 19 nt, Homo sapiens
  misc_RNA (1)...(19): siRNA sense strand
uaaucaagacaccaacuaa

SEQ ID NO: 1542848 - RNA, 19 nt, Homo sapiens
  misc_RNA (1)...(19): siRNA sense strand
gcuggucaaccuuuaacua

SEQ ID NO: 1542849 - RNA, 19 nt, Homo sapiens
  misc_RNA (1)...(19): siRNA sense strand
gcccaaagcaaggcaguuu

SEQ ID NO: 1542850 - RNA, 19 nt, Homo sapiens
  misc_RNA (1)...(19): siRNA sense strand
aaugauaugucugaugaug

SEQ ID NO: 1542851 - RNA, 19 nt, Homo sapiens
  misc_RNA (1)...(19): siRNA sense strand
gcagcuggucaaccuuuaa

SEQ ID NO: 1542852 - RNA, 19 nt, Homo sapiens
  misc_RNA (1)...(19): siRNA sense strand
guauguaugcguugucaga

SEQ ID NO: 1542853 - RNA, 19 nt, Homo sapiens
  misc_RNA (1)...(19): siRNA sense strand
caagacaccaacuaaaucu

SEQ ID NO: 1542854 - RNA, 19 nt, Homo sapiens
  misc_RNA (1)...(19): siRNA sense strand
gaauggauggcuaaucaag

SEQ ID NO: 1542855 - RNA, 19 nt, Homo sapiens
  misc_RNA (1)...(19): siRNA sense strand
ucaagacaccaacuaaauc

SEQ ID NO: 1542856 - RNA, 19 nt, Homo sapiens
  misc_RNA (1)...(19): siRNA sense strand
uggaaaaugucacuauuga

SEQ ID NO: 1542857 - RNA, 19 nt, Homo sapiens
  misc_RNA (1)...(19): siRNA sense strand
ugugggcccugcucugaaa

SEQ ID NO: 1542858 - RNA, 19 nt, Homo sapiens
  misc_RNA (1)...(19): siRNA sense strand
gaugagggagacuuaagga

SEQ ID NO: 1542859 - RNA, 19 nt, Homo sapiens
  misc_RNA (1)...(19): siRNA sense strand
cauugaagucuccuuuaaa

SEQ ID NO: 1542860 - RNA, 19 nt, Homo sapiens
  misc_RNA (1)...(19): siRNA sense strand
gagaaaucagaauggauga

SEQ ID NO: 1542861 - RNA, 19 nt, Homo sapiens
  misc_RNA (1)...(19): siRNA sense strand
ugagggagacuuaaggaau

SEQ ID NO: 1542862 - RNA, 19 nt, Homo sapiens
  misc_RNA (1)...(19): siRNA sense strand
cuaaucaagacaccaacua

SEQ ID NO: 1542863 - RNA, 19 nt, Homo sapiens
  misc_RNA (1)...(19): siRNA sense strand
ccacugcuacggagaaauc

SEQ ID NO: 1542864 - RNA, 19 nt, Homo sapiens
  misc_RNA (1)...(19): siRNA sense strand
aaucaagacaccaacuaaa

SEQ ID NO: 1542865 - RNA, 19 nt, Homo sapiens
  misc_RNA (1)...(19): siRNA sense strand
uuacugauuuacucuccaa

SEQ ID NO: 1542866 - RNA, 19 nt, Homo sapiens
  misc_RNA (1)...(19): siRNA sense strand
ggauuugugacuucugcua

SEQ ID NO: 1542867 - RNA, 19 nt, Homo sapiens
  misc_RNA (1)...(19): siRNA sense strand
uauuggagaaggaguauug

SEQ ID NO: 1542868 - RNA, 19 nt, Homo sapiens
  misc_RNA (1)...(19): siRNA sense strand
guuaaucgucgccaccauu

SEQ ID NO: 1542869 - RNA, 19 nt, Homo sapiens
  misc_RNA (1)...(19): siRNA sense strand
ggaauggauggcuaaucaa

SEQ ID NO: 1542870 - RNA, 19 nt, Homo sapiens
  misc_RNA (1)...(19): siRNA sense strand
gauuuacucuccaaaagug

SEQ ID NO: 1542871 - RNA, 19 nt, Homo sapiens
  misc_RNA (1)...(19): siRNA sense strand
cuacggagaaaucagaaug

SEQ ID NO: 1542872 - RNA, 19 nt, Homo sapiens
  misc_RNA (1)...(19): siRNA sense strand
aaucagaauggaugaauca

SEQ ID NO: 1542873 - RNA, 19 nt, Homo sapiens
  misc_RNA (1)...(19): siRNA sense strand
gaguauugacuaaguugug

SEQ ID NO: 1542874 - RNA, 19 nt, Homo sapiens
  misc_RNA (1)...(19): siRNA sense strand
gucauugaagucuccuuua

SEQ ID NO: 1542875 - RNA, 19 nt, Homo sapiens
  misc_RNA (1)...(19): siRNA sense strand
uggacgaguucuuauugga

SEQ ID NO: 1542876 - RNA, 19 nt, Homo sapiens
  misc_RNA (1)...(19): siRNA sense strand
aaggaguauugacuaaguu

SEQ ID NO: 1542877 - RNA, 19 nt, Homo sapiens
  misc_RNA (1)...(19): siRNA sense strand
gacaccaacuaaaucuuuu

SEQ ID NO: 1542878 - RNA, 19 nt, Homo sapiens
  misc_RNA (1)...(19): siRNA sense strand
aauauugucauccagaaga

SEQ ID NO: 1542879 - RNA, 19 nt, Homo sapiens
  misc_RNA (1)...(19): siRNA sense strand
uggcaaacagugaagcaaa

SEQ ID NO: 1542880 - RNA, 19 nt, Homo sapiens
  misc_RNA (1)...(19): siRNA sense strand
uuaaggaauggauggcuaa

SEQ ID NO: 1542881 - RNA, 19 nt, Homo sapiens
  misc_RNA (1)...(19): siRNA sense strand
auaccuggacgaguucuua

SEQ ID NO: 1542882 - RNA, 19 nt, Homo sapiens
  misc_RNA (1)...(19): siRNA sense strand
aaaucagaauggaugaauc

SEQ ID NO: 1542883 - RNA, 19 nt, Homo sapiens
  misc_RNA (1)...(19): siRNA sense strand
ccuggacgaguucuuauug

SEQ ID NO: 1542884 - RNA, 19 nt, Homo sapiens
  misc_RNA (1)...(19): siRNA sense strand
uguaugcguugucagaaag

SEQ ID NO: 1542885 - RNA, 19 nt, Homo sapiens
  misc_RNA (1)...(19): siRNA sense strand
gauuugugacuucugcuau

SEQ ID NO: 1542886 - RNA, 19 nt, Homo sapiens
  misc_RNA (1)...(19): siRNA sense strand
cuaagccugugcggauuug

SEQ ID NO: 1542887 - RNA, 19 nt, Homo sapiens
  misc_RNA (1)...(19): siRNA sense strand
aaagaugagggagacuuaa

SEQ ID NO: 1542888 - RNA, 19 nt, Homo sapiens
  misc_RNA (1)...(19): siRNA sense strand
ugaugaugaugacgaugau

SEQ ID NO: 1542889 - RNA, 19 nt, Homo sapiens
  misc_RNA (1)...(19): siRNA sense strand
ucuuacagccagucauuga

SEQ ID NO: 1542890 - RNA, 19 nt, Homo sapiens
  misc_RNA (1)...(19): siRNA sense strand
ucaaagaugagggagacuu

SEQ ID NO: 1542891 - RNA, 19 nt, Homo sapiens
  misc_RNA (1)...(19): siRNA sense strand
cuggucaaccuuuaacuau

SEQ ID NO: 1542892 - RNA, 19 nt, Homo sapiens
  misc_RNA (1)...(19): siRNA sense strand
cugaugaugaugacgauga

SEQ ID NO: 1542893 - RNA, 19 nt, Homo sapiens
  misc_RNA (1)...(19): siRNA sense strand
cagugaagcaaauacuaga

SEQ ID NO: 1542894 - RNA, 19 nt, Homo sapiens
  misc_RNA (1)...(19): siRNA sense strand
cuucugcuaugaccugcuu

SEQ ID NO: 1542895 - RNA, 19 nt, Homo sapiens
  misc_RNA (1)...(19): siRNA sense strand
gaaacgacauuaugaagaa

SEQ ID NO: 1542896 - RNA, 19 nt, Homo sapiens
  misc_RNA (1)...(19): siRNA sense strand
gcagauaucucaauaacau

SEQ ID NO: 1542897 - RNA, 19 nt, Homo sapiens
  misc_RNA (1)...(19): siRNA sense strand
gaaggaagauuauucauac

SEQ ID NO: 1542898 - RNA, 19 nt, Homo sapiens
  misc_RNA (1)...(19): siRNA sense strand
gcaaauagccuaauugaca

SEQ ID NO: 1542899 - RNA, 19 nt, Homo sapiens
  misc_RNA (1)...(19): siRNA sense strand
gaagacgaauguaaaggua

SEQ ID NO: 1542900 - RNA, 19 nt, Homo sapiens
  misc_RNA (1)...(19): siRNA sense strand
ggaaugagauauaugaugu

SEQ ID NO: 1542901 - RNA, 19 nt, Homo sapiens
  misc_RNA (1)...(19): siRNA sense strand
gcagauacaucaaggagaa

SEQ ID NO: 1542902 - RNA, 19 nt, Homo sapiens
  misc_RNA (1)...(19): siRNA sense strand
gaacagcaggucagacuua

SEQ ID NO: 1542903 - RNA, 19 nt, Homo sapiens
  misc_RNA (1)...(19): siRNA sense strand
ucugacagcuuuagaaaua

SEQ ID NO: 1542904 - RNA, 19 nt, Homo sapiens
  misc_RNA (1)...(19): siRNA sense strand
gaacaccagucuguagaua

SEQ ID NO: 1542905 - RNA, 19 nt, Homo sapiens
  misc_RNA (1)...(19): siRNA sense strand
caacaguucugacagcuuu

SEQ ID NO: 1542906 - RNA, 19 nt, Homo sapiens
  misc_RNA (1)...(19): siRNA sense strand
gagaagagcggcuuacuga

SEQ ID NO: 1542907 - RNA, 19 nt, Homo sapiens
  misc_RNA (1)...(19): siRNA sense strand
gaacaaaaguacaaggaua

SEQ ID NO: 1542908 - RNA, 19 nt, Homo sapiens
  misc_RNA (1)...(19): siRNA sense strand
ggaagucgaucuuauaaac

SEQ ID NO: 1542909 - RNA, 19 nt, Homo sapiens
  misc_RNA (1)...(19): siRNA sense strand
gaacauauggagcaacaaa

SEQ ID NO: 1542910 - RNA, 19 nt, Homo sapiens
  misc_RNA (1)...(19): siRNA sense strand
cagaggagaugaugccuuu

SEQ ID NO: 1542911 - RNA, 19 nt, Homo sapiens
  misc_RNA (1)...(19): siRNA sense strand
gaacuugcuuuggcuauug

SEQ ID NO: 1542912 - RNA, 19 nt, Homo sapiens
  misc_RNA (1)...(19): siRNA sense strand
gaacaaaggagcagauaca

SEQ ID NO: 1542913 - RNA, 19 nt, Homo sapiens
  misc_RNA (1)...(19): siRNA sense strand
gcuauugaaucuugcuuaa

SEQ ID NO: 1542914 - RNA, 19 nt, Homo sapiens
  misc_RNA (1)...(19): siRNA sense strand
ucagaugccuggaugaauu

SEQ ID NO: 1542915 - RNA, 19 nt, Homo sapiens
  misc_RNA (1)...(19): siRNA sense strand
agaaagaacuagaggagaa

SEQ ID NO: 1542916 - RNA, 19 nt, Homo sapiens
  misc_RNA (1)...(19): siRNA sense strand
gcaacaggcuccgugguuu

SEQ ID NO: 1542917 - RNA, 19 nt, Homo sapiens
  misc_RNA (1)...(19): siRNA sense strand
caaacuacauugccuuuca

SEQ ID NO: 1542918 - RNA, 19 nt, Homo sapiens
  misc_RNA (1)...(19): siRNA sense strand
caaaggagcagauacauca

SEQ ID NO: 1542919 - RNA, 19 nt, Homo sapiens
  misc_RNA (1)...(19): siRNA sense strand
caacgcaacuugaacagau

SEQ ID NO: 1542920 - RNA, 19 nt, Homo sapiens
  misc_RNA (1)...(19): siRNA sense strand
aagaagagcugauugcaau

SEQ ID NO: 1542921 - RNA, 19 nt, Homo sapiens
  misc_RNA (1)...(19): siRNA sense strand
ccacaagaaugaaacucua

SEQ ID NO: 1542922 - RNA, 19 nt, Homo sapiens
  misc_RNA (1)...(19): siRNA sense strand
uaagacggcccagauauua

SEQ ID NO: 1542923 - RNA, 19 nt, Homo sapiens
  misc_RNA (1)...(19): siRNA sense strand
gauggaagucgaucuuaua

SEQ ID NO: 1542924 - RNA, 19 nt, Homo sapiens
  misc_RNA (1)...(19): siRNA sense strand
caucaauucuggacaaaga

SEQ ID NO: 1542925 - RNA, 19 nt, Homo sapiens
  misc_RNA (1)...(19): siRNA sense strand
agauguggauucugaaaua

SEQ ID NO: 1542926 - RNA, 19 nt, Homo sapiens
  misc_RNA (1)...(19): siRNA sense strand
acacagagcugcuuaucau

SEQ ID NO: 1542927 - RNA, 19 nt, Homo sapiens
  misc_RNA (1)...(19): siRNA sense strand
gaaagcaacgcaacuugaa

SEQ ID NO: 1542928 - RNA, 19 nt, Homo sapiens
  misc_RNA (1)...(19): siRNA sense strand
ugauaaagauggugacgaa

SEQ ID NO: 1542929 - RNA, 19 nt, Homo sapiens
  misc_RNA (1)...(19): siRNA sense strand
gauaauccaguuucuguuu

SEQ ID NO: 1542930 - RNA, 19 nt, Homo sapiens
  misc_RNA (1)...(19): siRNA sense strand
gagcacagauucaagacau

SEQ ID NO: 1542931 - RNA, 19 nt, Homo sapiens
  misc_RNA (1)...(19): siRNA sense strand
aagaagaauuggaggauuu

SEQ ID NO: 1542932 - RNA, 19 nt, Homo sapiens
  misc_RNA (1)...(19): siRNA sense strand
gaauuaaaccuugcugauu

SEQ ID NO: 1542933 - RNA, 19 nt, Homo sapiens
  misc_RNA (1)...(19): siRNA sense strand
gagcagcuuuguaaacgaa

SEQ ID NO: 1542934 - RNA, 19 nt, Homo sapiens
  misc_RNA (1)...(19): siRNA sense strand
gaaaagggccuauaaugaa

SEQ ID NO: 1542935 - RNA, 19 nt, Homo sapiens
  misc_RNA (1)...(19): siRNA sense strand
gagaagaauuagaugugaa

SEQ ID NO: 1542936 - RNA, 19 nt, Homo sapiens
  misc_RNA (1)...(19): siRNA sense strand
gaaaauauggagcaucuua

SEQ ID NO: 1542937 - RNA, 19 nt, Homo sapiens
  misc_RNA (1)...(19): siRNA sense strand
gaaguuggaauaauugaga

SEQ ID NO: 1542938 - RNA, 19 nt, Homo sapiens
  misc_RNA (1)...(19): siRNA sense strand
agaagaagaugaugaccaa

SEQ ID NO: 1542939 - RNA, 19 nt, Homo sapiens
  misc_RNA (1)...(19): siRNA sense strand
gccauggacuugauacuga

SEQ ID NO: 1542940 - RNA, 19 nt, Homo sapiens
  misc_RNA (1)...(19): siRNA sense strand
ggugccaacuacauuauaa

SEQ ID NO: 1542941 - RNA, 19 nt, Homo sapiens
  misc_RNA (1)...(19): siRNA sense strand
caaagaagaacauggcaaa

SEQ ID NO: 1542942 - RNA, 19 nt, Homo sapiens
  misc_RNA (1)...(19): siRNA sense strand
ucaaaguauugcugguuua

SEQ ID NO: 1542943 - RNA, 19 nt, Homo sapiens
  misc_RNA (1)...(19): siRNA sense strand
gaggagaugaugccuuuaa

SEQ ID NO: 1542944 - RNA, 19 nt, Homo sapiens
  misc_RNA (1)...(19): siRNA sense strand
uagaagguguuugacuuua

SEQ ID NO: 1542945 - RNA, 19 nt, Homo sapiens
  misc_RNA (1)...(19): siRNA sense strand
ggaaacgacauuaugaaga

SEQ ID NO: 1542946 - RNA, 19 nt, Homo sapiens
  misc_RNA (1)...(19): siRNA sense strand
gauguggauucugaaauaa

SEQ ID NO: 1542947 - RNA, 19 nt, Homo sapiens
  misc_RNA (1)...(19): siRNA sense strand
gaaagaugaugagcagcuu

SEQ ID NO: 1542948 - RNA, 19 nt, Homo sapiens
  misc_RNA (1)...(19): siRNA sense strand
gaagaacaccagucuguag

SEQ ID NO: 1542949 - RNA, 19 nt, Homo sapiens
  misc_RNA (1)...(19): siRNA sense strand
agaggcaacugaaagaauu

SEQ ID NO: 1542950 - RNA, 19 nt, Homo sapiens
  misc_RNA (1)...(19): siRNA sense strand
guucuaaugucaacuuugu

SEQ ID NO: 1542951 - RNA, 19 nt, Homo sapiens
  misc_RNA (1)...(19): siRNA sense strand
caaauagccuaauugacau

SEQ ID NO: 1542952 - RNA, 19 nt, Homo sapiens
  misc_RNA (1)...(19): siRNA sense strand
uaaugaagcugagguuuua

SEQ ID NO: 1542953 - RNA, 19 nt, Homo sapiens
  misc_RNA (1)...(19): siRNA sense strand
gaacagaugaaggaagauu

SEQ ID NO: 1542954 - RNA, 19 nt, Homo sapiens
  misc_RNA (1)...(19): siRNA sense strand
ggagacaaauacaaauucu

SEQ ID NO: 1542955 - RNA, 19 nt, Homo sapiens
  misc_RNA (1)...(19): siRNA sense strand
guacaaggauauucaagac

SEQ ID NO: 1542956 - RNA, 19 nt, Homo sapiens
  misc_RNA (1)...(19): siRNA sense strand
caagaagaauuggaggauu

SEQ ID NO: 1542957 - RNA, 19 nt, Homo sapiens
  misc_RNA (1)...(19): siRNA sense strand
ggacaaagaaauuaaucga

SEQ ID NO: 1542958 - RNA, 19 nt, Homo sapiens
  misc_RNA (1)...(19): siRNA sense strand
gaagaugaagcucaggaaa

SEQ ID NO: 1542959 - RNA, 19 nt, Homo sapiens
  misc_RNA (1)...(19): siRNA sense strand
uaaccgauccuuaaacgaa

SEQ ID NO: 1542960 - RNA, 19 nt, Homo sapiens
  misc_RNA (1)...(19): siRNA sense strand
acaaggauauucaagacaa

SEQ ID NO: 1542961 - RNA, 19 nt, Homo sapiens
  misc_RNA (1)...(19): siRNA sense strand
ugacgaagacgaauguaaa

SEQ ID NO: 1542962 - RNA, 19 nt, Homo sapiens
  misc_RNA (1)...(19): siRNA sense strand
acaccagucuguagauauu

SEQ ID NO: 1542963 - RNA, 19 nt, Homo sapiens
  misc_RNA (1)...(19): siRNA sense strand
gaaauucgggaacuugaga

SEQ ID NO: 1542964 - RNA, 19 nt, Homo sapiens
  misc_RNA (1)...(19): siRNA sense strand
gaacauggcaaaauuaaga

SEQ ID NO: 1542965 - RNA, 19 nt, Homo sapiens
  misc_RNA (1)...(19): siRNA sense strand
ugaaugccaucagagauaa

SEQ ID NO: 1542966 - RNA, 19 nt, Homo sapiens
  misc_RNA (1)...(19): siRNA sense strand
ugaaggagacaaauacaaa

SEQ ID NO: 1542967 - RNA, 19 nt, Homo sapiens
  misc_RNA (1)...(19): siRNA sense strand
gaaaugagcaagcaguucu

SEQ ID NO: 1542968 - RNA, 19 nt, Homo sapiens
  misc_RNA (1)...(19): siRNA sense strand
gaggaacguuuucaaagua

SEQ ID NO: 1542969 - RNA, 19 nt, Homo sapiens
  misc_RNA (1)...(19): siRNA sense strand
gaaagaggacaaacuacau

SEQ ID NO: 1542970 - RNA, 19 nt, Homo sapiens
  misc_RNA (1)...(19): siRNA sense strand
gacuuuacgaugcaaauua

SEQ ID NO: 1542971 - RNA, 19 nt, Homo sapiens
  misc_RNA (1)...(19): siRNA sense strand
gaagauacaggcagaacau

SEQ ID NO: 1542972 - RNA, 19 nt, Homo sapiens
  misc_RNA (1)...(19): siRNA sense strand
gagggaaacgacauuauga

SEQ ID NO: 1542973 - RNA, 19 nt, Homo sapiens
  misc_RNA (1)...(19): siRNA sense strand
gcagaaguuggaauaauug

SEQ ID NO: 1542974 - RNA, 19 nt, Homo sapiens
  misc_RNA (1)...(19): siRNA sense strand
gggcaguggucaaugaaau

SEQ ID NO: 1542975 - RNA, 19 nt, Homo sapiens
  misc_RNA (1)...(19): siRNA sense strand
aauuaaaccuugcugauuc

SEQ ID NO: 1542976 - RNA, 19 nt, Homo sapiens
  misc_RNA (1)...(19): siRNA sense strand
gaauugccauggacuugau

SEQ ID NO: 1542977 - RNA, 19 nt, Homo sapiens
  misc_RNA (1)...(19): siRNA sense strand
caauuuagaagguguuuga

SEQ ID NO: 1542978 - RNA, 19 nt, Homo sapiens
  misc_RNA (1)...(19): siRNA sense strand
acacuuggauaccuuaaau

SEQ ID NO: 1542979 - RNA, 19 nt, Homo sapiens
  misc_RNA (1)...(19): siRNA sense strand
gaagaacauggcaaaauua

SEQ ID NO: 1542980 - RNA, 19 nt, Homo sapiens
  misc_RNA (1)...(19): siRNA sense strand
gaauguaaagguacuacuu

SEQ ID NO: 1542981 - RNA, 19 nt, Homo sapiens
  misc_RNA (1)...(19): siRNA sense strand
ggagaucgagaggaaauaa

SEQ ID NO: 1542982 - RNA, 19 nt, Homo sapiens
  misc_RNA (1)...(19): siRNA sense strand
cauagaugaugcuuauaga

SEQ ID NO: 1542983 - RNA, 19 nt, Homo sapiens
  misc_RNA (1)...(19): siRNA sense strand
gaacucugcagauaucuca

SEQ ID NO: 1542984 - RNA, 19 nt, Homo sapiens
  misc_RNA (1)...(19): siRNA sense strand
ccgaaugucugauccugaa

SEQ ID NO: 1542985 - RNA, 19 nt, Homo sapiens
  misc_RNA (1)...(19): siRNA sense strand
ucauggagaucgagaggaa

SEQ ID NO: 1542986 - RNA, 19 nt, Homo sapiens
  misc_RNA (1)...(19): siRNA sense strand
gaaagaacuagaggagaaa

SEQ ID NO: 1542987 - RNA, 19 nt, Homo sapiens
  misc_RNA (1)...(19): siRNA sense strand
gagagaagaauuagaugug

SEQ ID NO: 1542988 - RNA, 19 nt, Homo sapiens
  misc_RNA (1)...(19): siRNA sense strand
caaggauauucaagacaaa

SEQ ID NO: 1542989 - RNA, 19 nt, Homo sapiens
  misc_RNA (1)...(19): siRNA sense strand
gaaacgaaagaaagaacaa

SEQ ID NO: 1542990 - RNA, 19 nt, Homo sapiens
  misc_RNA (1)...(19): siRNA sense strand
cagcagaaguuggaauaau

SEQ ID NO: 1542991 - RNA, 19 nt, Homo sapiens
  misc_RNA (1)...(19): siRNA sense strand
aacgagaacuggauaugaa

SEQ ID NO: 1542992 - RNA, 19 nt, Homo sapiens
  misc_RNA (1)...(19): siRNA sense strand
ggaugaauuugaugucuac

SEQ ID NO: 1542993 - RNA, 19 nt, Homo sapiens
  misc_RNA (1)...(19): siRNA sense strand
cgcagaaucuccuuucaga

SEQ ID NO: 1542994 - RNA, 19 nt, Homo sapiens
  misc_RNA (1)...(19): siRNA sense strand
agagagaccuaucuugauc

SEQ ID NO: 1542995 - RNA, 19 nt, Homo sapiens
  misc_RNA (1)...(19): siRNA sense strand
ggaguggacuuauuugaga

SEQ ID NO: 1542996 - RNA, 19 nt, Homo sapiens
  misc_RNA (1)...(19): siRNA sense strand
agaaguaucuuguaaggaa

SEQ ID NO: 1542997 - RNA, 19 nt, Homo sapiens
  misc_RNA (1)...(19): siRNA sense strand
gcucauaucugguguuagu

SEQ ID NO: 1542998 - RNA, 19 nt, Homo sapiens
  misc_RNA (1)...(19): siRNA sense strand
agaaggaguuggaaaguuu

SEQ ID NO: 1542999 - RNA, 19 nt, Homo sapiens
  misc_RNA (1)...(19): siRNA sense strand
ggagaaguaucuuguaagg

SEQ ID NO: 1543000 - RNA, 19 nt, Homo sapiens
  misc_RNA (1)...(19): siRNA sense strand
gcacaacuuugaacacuac

SEQ ID NO: 1543001 - RNA, 19 nt, Homo sapiens
  misc_RNA (1)...(19): siRNA sense strand
aaagaggaguggacuuauu

SEQ ID NO: 1543002 - RNA, 19 nt, Homo sapiens
  misc_RNA (1)...(19): siRNA sense strand
caucacacgcugcauaaua

SEQ ID NO: 1543003 - RNA, 19 nt, Homo sapiens
  misc_RNA (1)...(19): siRNA sense strand
ugaaagaggaguggacuua

SEQ ID NO: 1543004 - RNA, 19 nt, Homo sapiens
  misc_RNA (1)...(19): siRNA sense strand
cagaaucacucuuguacug

SEQ ID NO: 1543005 - RNA, 19 nt, Homo sapiens
  misc_RNA (1)...(19): siRNA sense strand
gacagaauauaaagaagga

SEQ ID NO: 1543006 - RNA, 19 nt, Homo sapiens
  misc_RNA (1)...(19): siRNA sense strand
caugaagucuugacagaau

SEQ ID NO: 1543007 - RNA, 19 nt, Homo sapiens
  misc_RNA (1)...(19): siRNA sense strand
gaaggaguuggaaaguuua

SEQ ID NO: 1543008 - RNA, 19 nt, Homo sapiens
  misc_RNA (1)...(19): siRNA sense strand
guugaccgaucacuucuuu

SEQ ID NO: 1543009 - RNA, 19 nt, Homo sapiens
  misc_RNA (1)...(19): siRNA sense strand
gaagagacacuacuacaac

SEQ ID NO: 1543010 - RNA, 19 nt, Homo sapiens
  misc_RNA (1)...(19): siRNA sense strand
gggcauacauccaccaucu

SEQ ID NO: 1543011 - RNA, 19 nt, Homo sapiens
  misc_RNA (1)...(19): siRNA sense strand
gauugaagguggagaugug

SEQ ID NO: 1543012 - RNA, 19 nt, Homo sapiens
  misc_RNA (1)...(19): siRNA sense strand
caacuuugaacacuacuuu

SEQ ID NO: 1543013 - RNA, 19 nt, Homo sapiens
  misc_RNA (1)...(19): siRNA sense strand
guggagaugugauggaaga

SEQ ID NO: 1543014 - RNA, 19 nt, Homo sapiens
  misc_RNA (1)...(19): siRNA sense strand
gcucgaguguauugaaaga

SEQ ID NO: 1543015 - RNA, 19 nt, Homo sapiens
  misc_RNA (1)...(19): siRNA sense strand
gcaggaagagucagagguu

SEQ ID NO: 1543016 - RNA, 19 nt, Homo sapiens
  misc_RNA (1)...(19): siRNA sense strand
aaaugacuguuuccaaguu

SEQ ID NO: 1543017 - RNA, 19 nt, Homo sapiens
  misc_RNA (1)...(19): siRNA sense strand
ucagaagagugugaucauu

SEQ ID NO: 1543018 - RNA, 19 nt, Homo sapiens
  misc_RNA (1)...(19): siRNA sense strand
cagaagagugugaucauug

SEQ ID NO: 1543019 - RNA, 19 nt, Homo sapiens
  misc_RNA (1)...(19): siRNA sense strand
gaaagaggaguggacuuau

SEQ ID NO: 1543020 - RNA, 19 nt, Homo sapiens
  misc_RNA (1)...(19): siRNA sense strand
caaacaagucugugucugu

SEQ ID NO: 1543021 - RNA, 19 nt, Homo sapiens
  misc_RNA (1)...(19): siRNA sense strand
gagacacuacuacaacaaa

SEQ ID NO: 1543022 - RNA, 19 nt, Homo sapiens
  misc_RNA (1)...(19): siRNA sense strand
ccaaguucauggcaauuca

SEQ ID NO: 1543023 - RNA, 19 nt, Homo sapiens
  misc_RNA (1)...(19): siRNA sense strand
gaauauaaagaaggaguug

SEQ ID NO: 1543024 - RNA, 19 nt, Homo sapiens
  misc_RNA (1)...(19): siRNA sense strand
gaacacuacuuuggguuuu

SEQ ID NO: 1543025 - RNA, 19 nt, Homo sapiens
  misc_RNA (1)...(19): siRNA sense strand
uaaagaaggaguuggaaag

SEQ ID NO: 1543026 - RNA, 19 nt, Homo sapiens
  misc_RNA (1)...(19): siRNA sense strand
ggaguuggaaaguuuauag

SEQ ID NO: 1543027 - RNA, 19 nt, Homo sapiens
  misc_RNA (1)...(19): siRNA sense strand
caaccaagaaauaacauca

SEQ ID NO: 1543028 - RNA, 19 nt, Homo sapiens
  misc_RNA (1)...(19): siRNA sense strand
uggaacacaagaagaaaua

SEQ ID NO: 1543029 - RNA, 19 nt, Homo sapiens
  misc_RNA (1)...(19): siRNA sense strand
ggacuuauuugagaguuuu

SEQ ID NO: 1543030 - RNA, 19 nt, Homo sapiens
  misc_RNA (1)...(19): siRNA sense strand
gcaggacgaguggaaauga

SEQ ID NO: 1543031 - RNA, 19 nt, Homo sapiens
  misc_RNA (1)...(19): siRNA sense strand
aaauggaacacaagaagaa

SEQ ID NO: 1543032 - RNA, 19 nt, Homo sapiens
  misc_RNA (1)...(19): siRNA sense strand
gugcucgaguguauugaaa

SEQ ID NO: 1543033 - RNA, 19 nt, Homo sapiens
  misc_RNA (1)...(19): siRNA sense strand
gauggagaaguaucuugua

SEQ ID NO: 1543034 - RNA, 19 nt, Homo sapiens
  misc_RNA (1)...(19): siRNA sense strand
aagaggaguggacuuauuu

SEQ ID NO: 1543035 - RNA, 19 nt, Homo sapiens
  misc_RNA (1)...(19): siRNA sense strand
gaggaguggacuuauuuga

SEQ ID NO: 1543036 - RNA, 19 nt, Homo sapiens
  misc_RNA (1)...(19): siRNA sense strand
ggaugugcccugacuuuca

SEQ ID NO: 1543037 - RNA, 19 nt, Homo sapiens
  misc_RNA (1)...(19): siRNA sense strand
aagaaggaguuggaaaguu

SEQ ID NO: 1543038 - RNA, 19 nt, Homo sapiens
  misc_RNA (1)...(19): siRNA sense strand
ggaacacaagaagaaauaa

SEQ ID NO: 1543039 - RNA, 19 nt, Homo sapiens
  misc_RNA (1)...(19): siRNA sense strand
agacuacgcuugcugucau

SEQ ID NO: 1543040 - RNA, 19 nt, Homo sapiens
  misc_RNA (1)...(19): siRNA sense strand
aggcucauaucugguguua

SEQ ID NO: 1543041 - RNA, 19 nt, Homo sapiens
  misc_RNA (1)...(19): siRNA sense strand
ugaagagacacuacuacaa

SEQ ID NO: 1543042 - RNA, 19 nt, Homo sapiens
  misc_RNA (1)...(19): siRNA sense strand
auggagaaguaucuuguaa

SEQ ID NO: 1543043 - RNA, 19 nt, Homo sapiens
  misc_RNA (1)...(19): siRNA sense strand
gaggugcucgaguguauug

SEQ ID NO: 1543044 - RNA, 19 nt, Homo sapiens
  misc_RNA (1)...(19): siRNA sense strand
uaauggcugucgccuagga

SEQ ID NO: 1543045 - RNA, 19 nt, Homo sapiens
  misc_RNA (1)...(19): siRNA sense strand
guaacaaacaagucugugu

SEQ ID NO: 1543046 - RNA, 19 nt, Homo sapiens
  misc_RNA (1)...(19): siRNA sense strand
uagcagaacaucaugaagu

SEQ ID NO: 1543047 - RNA, 19 nt, Homo sapiens
  misc_RNA (1)...(19): siRNA sense strand
agaagagugugaucauugg

SEQ ID NO: 1543048 - RNA, 19 nt, Homo sapiens
  misc_RNA (1)...(19): siRNA sense strand
cgaguggaaaugacuguuu

SEQ ID NO: 1543049 - RNA, 19 nt, Homo sapiens
  misc_RNA (1)...(19): siRNA sense strand
gcugucaucccuagcagaa

SEQ ID NO: 1543050 - RNA, 19 nt, Homo sapiens
  misc_RNA (1)...(19): siRNA sense strand
gccggaguccugcuuauga

SEQ ID NO: 1543051 - RNA, 19 nt, Homo sapiens
  misc_RNA (1)...(19): siRNA sense strand
gaaucacacucgggcauac

SEQ ID NO: 1543052 - RNA, 19 nt, Homo sapiens
  misc_RNA (1)...(19): siRNA sense strand
gaacaucaugaagucuuga

SEQ ID NO: 1543053 - RNA, 19 nt, Homo sapiens
  misc_RNA (1)...(19): siRNA sense strand
ggaccacaccauggauauu

SEQ ID NO: 1543054 - RNA, 19 nt, Homo sapiens
  misc_RNA (1)...(19): siRNA sense strand
gaccacaccauggauauuc

SEQ ID NO: 1543055 - RNA, 19 nt, Homo sapiens
  misc_RNA (1)...(19): siRNA sense strand
agaacaucaugaagucuug

SEQ ID NO: 1543056 - RNA, 19 nt, Homo sapiens
  misc_RNA (1)...(19): siRNA sense strand
ugaacacuacuuuggguuu

SEQ ID NO: 1543057 - RNA, 19 nt, Homo sapiens
  misc_RNA (1)...(19): siRNA sense strand
ugucaucccuagcagaaca

SEQ ID NO: 1543058 - RNA, 19 nt, Homo sapiens
  misc_RNA (1)...(19): siRNA sense strand
aagagacacuacuacaaca

SEQ ID NO: 1543059 - RNA, 19 nt, Homo sapiens
  misc_RNA (1)...(19): siRNA sense strand
gaagucuugacagaauaua

SEQ ID NO: 1543060 - RNA, 19 nt, Homo sapiens
  misc_RNA (1)...(19): siRNA sense strand
gaggucagcacgagagaca

SEQ ID NO: 1543061 - RNA, 19 nt, Homo sapiens
  misc_RNA (1)...(19): siRNA sense strand
gccgaauccugaagagaca

SEQ ID NO: 1543062 - RNA, 19 nt, Homo sapiens
  misc_RNA (1)...(19): siRNA sense strand
ucacuucuuuucuuggaua

SEQ ID NO: 1543063 - RNA, 19 nt, Homo sapiens
  misc_RNA (1)...(19): siRNA sense strand
gguguuagucggccagaug

SEQ ID NO: 1543064 - RNA, 19 nt, Homo sapiens
  misc_RNA (1)...(19): siRNA sense strand
ggagaugugauggaagaga

SEQ ID NO: 1543065 - RNA, 19 nt, Homo sapiens
  misc_RNA (1)...(19): siRNA sense strand
aucacacgcugcauaauau

SEQ ID NO: 1543066 - RNA, 19 nt, Homo sapiens
  misc_RNA (1)...(19): siRNA sense strand
cagaacaucaugaagucuu

SEQ ID NO: 1543067 - RNA, 19 nt, Homo sapiens
  misc_RNA (1)...(19): siRNA sense strand
gaugaggugcucgagugua

SEQ ID NO: 1543068 - RNA, 19 nt, Homo sapiens
  misc_RNA (1)...(19): siRNA sense strand
gaucacuucuuuucuugga

SEQ ID NO: 1543069 - RNA, 19 nt, Homo sapiens
  misc_RNA (1)...(19): siRNA sense strand
gaagagugugaucauugga

SEQ ID NO: 1543070 - RNA, 19 nt, Homo sapiens
  misc_RNA (1)...(19): siRNA sense strand
augaagucuugacagaaua

SEQ ID NO: 1543071 - RNA, 19 nt, Homo sapiens
  misc_RNA (1)...(19): siRNA sense strand
gccagaaucacucuuguac

SEQ ID NO: 1543072 - RNA, 19 nt, Homo sapiens
  misc_RNA (1)...(19): siRNA sense strand
gcuuaugaugcacaacuuu

SEQ ID NO: 1543073 - RNA, 19 nt, Homo sapiens
  misc_RNA (1)...(19): siRNA sense strand
guucauggcaauucagaag

SEQ ID NO: 1543074 - RNA, 19 nt, Homo sapiens
  misc_RNA (1)...(19): siRNA sense strand
augaggugcucgaguguau

SEQ ID NO: 1543075 - RNA, 19 nt, Homo sapiens
  misc_RNA (1)...(19): siRNA sense strand
uuauaggcaugccagaauc

SEQ ID NO: 1543076 - RNA, 19 nt, Homo sapiens
  misc_RNA (1)...(19): siRNA sense strand
gggaccacaccauggauau

SEQ ID NO: 1543077 - RNA, 19 nt, Homo sapiens
  misc_RNA (1)...(19): siRNA sense strand
aaagucuguugaccgauca

SEQ ID NO: 1543078 - RNA, 19 nt, Homo sapiens
  misc_RNA (1)...(19): siRNA sense strand
uuacauccgggaagcacua

SEQ ID NO: 1543079 - RNA, 19 nt, Homo sapiens
  misc_RNA (1)...(19): siRNA sense strand
ccggaguccugcuuaugau

SEQ ID NO: 1543080 - RNA, 19 nt, Homo sapiens
  misc_RNA (1)...(19): siRNA sense strand
auaaagaaggaguuggaaa

SEQ ID NO: 1543081 - RNA, 19 nt, Homo sapiens
  misc_RNA (1)...(19): siRNA sense strand
ccacaccucacccaucaca

SEQ ID NO: 1543082 - RNA, 19 nt, Homo sapiens
  misc_RNA (1)...(19): siRNA sense strand
cgauggagaaguaucuugu

SEQ ID NO: 1543083 - RNA, 19 nt, Homo sapiens
  misc_RNA (1)...(19): siRNA sense strand
ugcacaacuuugaacacua

SEQ ID NO: 1543084 - RNA, 19 nt, Homo sapiens
  misc_RNA (1)...(19): siRNA sense strand
gcaaccaagaaauaacauc

SEQ ID NO: 1543085 - RNA, 19 nt, Homo sapiens
  misc_RNA (1)...(19): siRNA sense strand
ccuagcagaacaucaugaa

SEQ ID NO: 1543086 - RNA, 19 nt, Homo sapiens
  misc_RNA (1)...(19): siRNA sense strand
uggacuuauuugagaguuu

SEQ ID NO: 1543087 - RNA, 19 nt, Homo sapiens
  misc_RNA (1)...(19): siRNA sense strand
guacugcucccugcacgau

SEQ ID NO: 1543088 - RNA, 19 nt, Homo sapiens
  misc_RNA (1)...(19): siRNA sense strand
gagaaguaucuuguaagga

SEQ ID NO: 1543089 - RNA, 19 nt, Homo sapiens
  misc_RNA (1)...(19): siRNA sense strand
ugaagucuugacagaauau

SEQ ID NO: 1543090 - RNA, 19 nt, Homo sapiens
  misc_RNA (1)...(19): siRNA sense strand
aucaugaagucuugacaga

SEQ ID NO: 1543091 - RNA, 19 nt, Homo sapiens
  misc_RNA (1)...(19): siRNA sense strand
agaaucacacucgggcaua

SEQ ID NO: 1543092 - RNA, 19 nt, Homo sapiens
  misc_RNA (1)...(19): siRNA sense strand
agcagaacaucaugaaguc

SEQ ID NO: 1543093 - RNA, 19 nt, Homo sapiens
  misc_RNA (1)...(19): siRNA sense strand
gcuuccuucuggaugguuu

SEQ ID NO: 1543094 - RNA, 19 nt, Homo sapiens
  misc_RNA (1)...(19): siRNA sense strand
aaagaaggaguuggaaagu

SEQ ID NO: 1543095 - RNA, 19 nt, Homo sapiens
  misc_RNA (1)...(19): siRNA sense strand
ggaccaaacugcacaaagu

SEQ ID NO: 1543096 - RNA, 19 nt, Homo sapiens
  misc_RNA (1)...(19): siRNA sense strand
gaaccuugaugacagauug

SEQ ID NO: 1543097 - RNA, 19 nt, Homo sapiens
  misc_RNA (1)...(19): siRNA sense strand
gcugugaacuccaucauga

SEQ ID NO: 1543098 - RNA, 19 nt, Homo sapiens
  misc_RNA (1)...(19): siRNA sense strand
gcucacaacucaucucaau

SEQ ID NO: 1543099 - RNA, 19 nt, Homo sapiens
  misc_RNA (1)...(19): siRNA sense strand
guaacacccuuccagauga

SEQ ID NO: 1543100 - RNA, 19 nt, Homo sapiens
  misc_RNA (1)...(19): siRNA sense strand
gcuaggacauccaguaaug

SEQ ID NO: 1543101 - RNA, 19 nt, Homo sapiens
  misc_RNA (1)...(19): siRNA sense strand
ggacaaacucugcugcuuu

SEQ ID NO: 1543102 - RNA, 19 nt, Homo sapiens
  misc_RNA (1)...(19): siRNA sense strand
gaugacuacuuucuucaaa

SEQ ID NO: 1543103 - RNA, 19 nt, Homo sapiens
  misc_RNA (1)...(19): siRNA sense strand
uaacaggauuucuucaguu

SEQ ID NO: 1543104 - RNA, 19 nt, Homo sapiens
  misc_RNA (1)...(19): siRNA sense strand
gcccaaagguuucuuccaa

SEQ ID NO: 1543105 - RNA, 19 nt, Homo sapiens
  misc_RNA (1)...(19): siRNA sense strand
caaaguauuucgugagauc

SEQ ID NO: 1543106 - RNA, 19 nt, Homo sapiens
  misc_RNA (1)...(19): siRNA sense strand
ucaagcagcugacacacaa

SEQ ID NO: 1543107 - RNA, 19 nt, Homo sapiens
  misc_RNA (1)...(19): siRNA sense strand
ggacauccaguaaugcuuu

SEQ ID NO: 1543108 - RNA, 19 nt, Homo sapiens
  misc_RNA (1)...(19): siRNA sense strand
ggauagagauuuggugcuu

SEQ ID NO: 1543109 - RNA, 19 nt, Homo sapiens
  misc_RNA (1)...(19): siRNA sense strand
gagaaugaacccacuuuga

SEQ ID NO: 1543110 - RNA, 19 nt, Homo sapiens
  misc_RNA (1)...(19): siRNA sense strand
caauuuggauagagauuug

SEQ ID NO: 1543111 - RNA, 19 nt, Homo sapiens
  misc_RNA (1)...(19): siRNA sense strand
ggucagauuucauuucagu

SEQ ID NO: 1543112 - RNA, 19 nt, Homo sapiens
  misc_RNA (1)...(19): siRNA sense strand
gcaugguccucaagaaguu

SEQ ID NO: 1543113 - RNA, 19 nt, Homo sapiens
  misc_RNA (1)...(19): siRNA sense strand
ccaaccagcuuaacaggau

SEQ ID NO: 1543114 - RNA, 19 nt, Homo sapiens
  misc_RNA (1)...(19): siRNA sense strand
ggaauggaauugcucuuuu

SEQ ID NO: 1543115 - RNA, 19 nt, Homo sapiens
  misc_RNA (1)...(19): siRNA sense strand
gaucacccaacaccaauuu

SEQ ID NO: 1543116 - RNA, 19 nt, Homo sapiens
  misc_RNA (1)...(19): siRNA sense strand
caaacugcacaaaguauuu

SEQ ID NO: 1543117 - RNA, 19 nt, Homo sapiens
  misc_RNA (1)...(19): siRNA sense strand
gaccaaacugcacaaagua

SEQ ID NO: 1543118 - RNA, 19 nt, Homo sapiens
  misc_RNA (1)...(19): siRNA sense strand
ccucugauauugucaacuu

SEQ ID NO: 1543119 - RNA, 19 nt, Homo sapiens
  misc_RNA (1)...(19): siRNA sense strand
ucauuucaguguaaaggua

SEQ ID NO: 1543120 - RNA, 19 nt, Homo sapiens
  misc_RNA (1)...(19): siRNA sense strand
cacaaaguauuucgugaga

SEQ ID NO: 1543121 - RNA, 19 nt, Homo sapiens
  misc_RNA (1)...(19): siRNA sense strand
agaaugaacccacuuugaa

SEQ ID NO: 1543122 - RNA, 19 nt, Homo sapiens
  misc_RNA (1)...(19): siRNA sense strand
gguaacacccuuccagaug

SEQ ID NO: 1543123 - RNA, 19 nt, Homo sapiens
  misc_RNA (1)...(19): siRNA sense strand
agauaccucuucuuuaguu

SEQ ID NO: 1543124 - RNA, 19 nt, Homo sapiens
  misc_RNA (1)...(19): siRNA sense strand
aggagcagcuuccgaaaga

SEQ ID NO: 1543125 - RNA, 19 nt, Homo sapiens
  misc_RNA (1)...(19): siRNA sense strand
gacaaacucugcugcuuuu

SEQ ID NO: 1543126 - RNA, 19 nt, Homo sapiens
  misc_RNA (1)...(19): siRNA sense strand
ccagaaccuugaugacaga

SEQ ID NO: 1543127 - RNA, 19 nt, Homo sapiens
  misc_RNA (1)...(19): siRNA sense strand
cagauuucauuucagugua

SEQ ID NO: 1543128 - RNA, 19 nt, Homo sapiens
  misc_RNA (1)...(19): siRNA sense strand
gcaagguuccauccaauuc

SEQ ID NO: 1543129 - RNA, 19 nt, Homo sapiens
  misc_RNA (1)...(19): siRNA sense strand
aacaggauuucuucaguuu

SEQ ID NO: 1543130 - RNA, 19 nt, Homo sapiens
  misc_RNA (1)...(19): siRNA sense strand
gacuuggacuucagaggaa

SEQ ID NO: 1543131 - RNA, 19 nt, Homo sapiens
  misc_RNA (1)...(19): siRNA sense strand
auacuuugcucacaacuca

SEQ ID NO: 1543132 - RNA, 19 nt, Homo sapiens
  misc_RNA (1)...(19): siRNA sense strand
ucaagaaguuccuaaaaga

SEQ ID NO: 1543133 - RNA, 19 nt, Homo sapiens
  misc_RNA (1)...(19): siRNA sense strand
gcaaagcugacuuggacuu

SEQ ID NO: 1543134 - RNA, 19 nt, Homo sapiens
  misc_RNA (1)...(19): siRNA sense strand
gccgaugacuacuuucuuc

SEQ ID NO: 1543135 - RNA, 19 nt, Homo sapiens
  misc_RNA (1)...(19): siRNA sense strand
gaauggaauugcucuuuug

SEQ ID NO: 1543136 - RNA, 19 nt, Homo sapiens
  misc_RNA (1)...(19): siRNA sense strand
gggaauggaauugcucuuu

SEQ ID NO: 1543137 - RNA, 19 nt, Homo sapiens
  misc_RNA (1)...(19): siRNA sense strand
ccaauucacuguggacaag

SEQ ID NO: 1543138 - RNA, 19 nt, Homo sapiens
  misc_RNA (1)...(19): siRNA sense strand
gagccacaguguagugcaa

SEQ ID NO: 1543139 - RNA, 19 nt, Homo sapiens
  misc_RNA (1)...(19): siRNA sense strand
gaaaagcccagaaccuuga

SEQ ID NO: 1543140 - RNA, 19 nt, Homo sapiens
  misc_RNA (1)...(19): siRNA sense strand
aaggucagauuucauuuca

SEQ ID NO: 1543141 - RNA, 19 nt, Homo sapiens
  misc_RNA (1)...(19): siRNA sense strand
ccuaaggucagauuucauu

SEQ ID NO: 1543142 - RNA, 19 nt, Homo sapiens
  misc_RNA (1)...(19): siRNA sense strand
gcagcuauucucaggauau

SEQ ID NO: 1543143 - RNA, 19 nt, Homo sapiens
  misc_RNA (1)...(19): siRNA sense strand
guguaaagguaaauggaau

SEQ ID NO: 1543144 - RNA, 19 nt, Homo sapiens
  misc_RNA (1)...(19): siRNA sense strand
gugcaagguuccauccaau

SEQ ID NO: 1543145 - RNA, 19 nt, Homo sapiens
  misc_RNA (1)...(19): siRNA sense strand
ggauuuccacagugcauuu

SEQ ID NO: 1543146 - RNA, 19 nt, Homo sapiens
  misc_RNA (1)...(19): siRNA sense strand
ggagaaugaacccacuuug

SEQ ID NO: 1543147 - RNA, 19 nt, Homo sapiens
  misc_RNA (1)...(19): siRNA sense strand
gaaugaacccacuuugaac

SEQ ID NO: 1543148 - RNA, 19 nt, Homo sapiens
  misc_RNA (1)...(19): siRNA sense strand
gaggugaagcagcagcuaa

SEQ ID NO: 1543149 - RNA, 19 nt, Homo sapiens
  misc_RNA (1)...(19): siRNA sense strand
ccaaacugcacaaaguauu

SEQ ID NO: 1543150 - RNA, 19 nt, Homo sapiens
  misc_RNA (1)...(19): siRNA sense strand
ugccaaggcucagcagaaa

SEQ ID NO: 1543151 - RNA, 19 nt, Homo sapiens
  misc_RNA (1)...(19): siRNA sense strand
gaaccuugggaauggaauu

SEQ ID NO: 1543152 - RNA, 19 nt, Homo sapiens
  misc_RNA (1)...(19): siRNA sense strand
gagcagcuuccgaaagaug

SEQ ID NO: 1543153 - RNA, 19 nt, Homo sapiens
  misc_RNA (1)...(19): siRNA sense strand
uaacacccuuccagaugau

SEQ ID NO: 1543154 - RNA, 19 nt, Homo sapiens
  misc_RNA (1)...(19): siRNA sense strand
caaccagcuuaacaggauu

SEQ ID NO: 1543155 - RNA, 19 nt, Homo sapiens
  misc_RNA (1)...(19): siRNA sense strand
cagcuuaacaggauuucuu

SEQ ID NO: 1543156 - RNA, 19 nt, Homo sapiens
  misc_RNA (1)...(19): siRNA sense strand
gagcagccgaugacuacuu

SEQ ID NO: 1543157 - RNA, 19 nt, Homo sapiens
  misc_RNA (1)...(19): siRNA sense strand
gugcuaggacauccaguaa

SEQ ID NO: 1543158 - RNA, 19 nt, Homo sapiens
  misc_RNA (1)...(19): siRNA sense strand
ggagagccacaguguagug

SEQ ID NO: 1543159 - RNA, 19 nt, Homo sapiens
  misc_RNA (1)...(19): siRNA sense strand
uuaacaggauuucuucagu

SEQ ID NO: 1543160 - RNA, 19 nt, Homo sapiens
  misc_RNA (1)...(19): siRNA sense strand
gggagcagccgaugacuac

SEQ ID NO: 1543161 - RNA, 19 nt, Homo sapiens
  misc_RNA (1)...(19): siRNA sense strand
ugagaucacccaacaccaa

SEQ ID NO: 1543162 - RNA, 19 nt, Homo sapiens
  misc_RNA (1)...(19): siRNA sense strand
ggaucucaauuuggauaga

SEQ ID NO: 1543163 - RNA, 19 nt, Homo sapiens
  misc_RNA (1)...(19): siRNA sense strand
gaucucaauuuggauagag

SEQ ID NO: 1543164 - RNA, 19 nt, Homo sapiens
  misc_RNA (1)...(19): siRNA sense strand
cacaagaguucaggaccaa

SEQ ID NO: 1543165 - RNA, 19 nt, Homo sapiens
  misc_RNA (1)...(19): siRNA sense strand
cagcuauucucaggauaug

SEQ ID NO: 1543166 - RNA, 19 nt, Homo sapiens
  misc_RNA (1)...(19): siRNA sense strand
gaaaacaagaggcucaaga

SEQ ID NO: 1543167 - RNA, 19 nt, Homo sapiens
  misc_RNA (1)...(19): siRNA sense strand
cagcagcuaacccuagaaa

SEQ ID NO: 1543168 - RNA, 19 nt, Homo sapiens
  misc_RNA (1)...(19): siRNA sense strand
gagaucacccaacaccaau

SEQ ID NO: 1543169 - RNA, 19 nt, Homo sapiens
  misc_RNA (1)...(19): siRNA sense strand
ucacaacucaucucaaugc

SEQ ID NO: 1543170 - RNA, 19 nt, Homo sapiens
  misc_RNA (1)...(19): siRNA sense strand
gauaccucuucuuuaguug

SEQ ID NO: 1543171 - RNA, 19 nt, Homo sapiens
  misc_RNA (1)...(19): siRNA sense strand
gggucugccucugauauug

SEQ ID NO: 1543172 - RNA, 19 nt, Homo sapiens
  misc_RNA (1)...(19): siRNA sense strand
aaagaaauacaguccauac

SEQ ID NO: 1543173 - RNA, 19 nt, Homo sapiens
  misc_RNA (1)...(19): siRNA sense strand
caucaugaguauucugacu

SEQ ID NO: 1543174 - RNA, 19 nt, Homo sapiens
  misc_RNA (1)...(19): siRNA sense strand
ggucgacucccagcauuau

SEQ ID NO: 1543175 - RNA, 19 nt, Homo sapiens
  misc_RNA (1)...(19): siRNA sense strand
ugaguuaucagguggaauc

SEQ ID NO: 1543176 - RNA, 19 nt, Homo sapiens
  misc_RNA (1)...(19): siRNA sense strand
uaaggucagauuucauuuc

SEQ ID NO: 1543177 - RNA, 19 nt, Homo sapiens
  misc_RNA (1)...(19): siRNA sense strand
cauuaugugagaccaaauu

SEQ ID NO: 1543178 - RNA, 19 nt, Homo sapiens
  misc_RNA (1)...(19): siRNA sense strand
gaggaaggcagcuauucuc

SEQ ID NO: 1543179 - RNA, 19 nt, Homo sapiens
  misc_RNA (1)...(19): siRNA sense strand
caagguuccauccaauuca

SEQ ID NO: 1543180 - RNA, 19 nt, Homo sapiens
  misc_RNA (1)...(19): siRNA sense strand
gcccagaaccuugaugaca

SEQ ID NO: 1543181 - RNA, 19 nt, Homo sapiens
  misc_RNA (1)...(19): siRNA sense strand
cagaauucacccugugcua

SEQ ID NO: 1543182 - RNA, 19 nt, Homo sapiens
  misc_RNA (1)...(19): siRNA sense strand
cagcugacacacaagaguu

SEQ ID NO: 1543183 - RNA, 19 nt, Homo sapiens
  misc_RNA (1)...(19): siRNA sense strand
gcauuuccaguccagcaaa

SEQ ID NO: 1543184 - RNA, 19 nt, Homo sapiens
  misc_RNA (1)...(19): siRNA sense strand
agcagccgaugacuacuuu

SEQ ID NO: 1543185 - RNA, 19 nt, Homo sapiens
  misc_RNA (1)...(19): siRNA sense strand
uggcuggcauggacuuguu

SEQ ID NO: 1543186 - RNA, 19 nt, Homo sapiens
  misc_RNA (1)...(19): siRNA sense strand
ucaucauggugcacccuaa

SEQ ID NO: 1543187 - RNA, 19 nt, Homo sapiens
  misc_RNA (1)...(19): siRNA sense strand
cuucaccacugcucaugug

SEQ ID NO: 1543188 - RNA, 19 nt, Homo sapiens
  misc_RNA (1)...(19): siRNA sense strand
ucagauuucauuucagugu

SEQ ID NO: 1543189 - RNA, 19 nt, Homo sapiens
  misc_RNA (1)...(19): siRNA sense strand
gcacccuaaggucagauuu

SEQ ID NO: 1543190 - RNA, 19 nt, Homo sapiens
  misc_RNA (1)...(19): siRNA sense strand
guggcaugguccucaagaa

SEQ ID NO: 1543191 - RNA, 19 nt, Homo sapiens
  misc_RNA (1)...(19): siRNA sense strand
aaagcugacuuggacuuca

SEQ ID NO: 1543192 - RNA, 19 nt, Homo sapiens
  misc_RNA (1)...(19): siRNA sense strand
ggaaaucuggggagucuau

SEQ ID NO: 1543193 - RNA, 19 nt, Homo sapiens
  misc_RNA (1)...(19): siRNA sense strand
uuccagaugugaguuauca

SEQ ID NO: 1543194 - RNA, 19 nt, Homo sapiens
  misc_RNA (1)...(19): siRNA sense strand
ggacuuguugggagaacug

SEQ ID NO: 1543195 - RNA, 19 nt, Homo sapiens
  misc_RNA (1)...(19): siRNA sense strand
gcaguggaguucaccuuua

SEQ ID NO: 1543196 - RNA, 19 nt, Homo sapiens
  misc_RNA (1)...(19): siRNA sense strand
gguggaguauucuguauug

SEQ ID NO: 1543197 - RNA, 19 nt, Homo sapiens
  misc_RNA (1)...(19): siRNA sense strand
gagcaucagccauauggua

SEQ ID NO: 1543198 - RNA, 19 nt, Homo sapiens
  misc_RNA (1)...(19): siRNA sense strand
agaguaagcugcacaugga

SEQ ID NO: 1543199 - RNA, 19 nt, Homo sapiens
  misc_RNA (1)...(19): siRNA sense strand
ggagacaggugcuacaacu

SEQ ID NO: 1543200 - RNA, 19 nt, Homo sapiens
  misc_RNA (1)...(19): siRNA sense strand
caguggaguucaccuuuaa

SEQ ID NO: 1543201 - RNA, 19 nt, Homo sapiens
  misc_RNA (1)...(19): siRNA sense strand
gaguucaccuuuaagaagu

SEQ ID NO: 1543202 - RNA, 19 nt, Homo sapiens
  misc_RNA (1)...(19): siRNA sense strand
cuacaacuguggaggucua

SEQ ID NO: 1543203 - RNA, 19 nt, Homo sapiens
  misc_RNA (1)...(19): siRNA sense strand
ggaguucaccuuuaagaag

SEQ ID NO: 1543204 - RNA, 19 nt, Homo sapiens
  misc_RNA (1)...(19): siRNA sense strand
gaaggguuccggagcuuga

SEQ ID NO: 1543205 - RNA, 19 nt, Homo sapiens
  misc_RNA (1)...(19): siRNA sense strand
guggaggucuagaucauca

SEQ ID NO: 1543206 - RNA, 19 nt, Homo sapiens
  misc_RNA (1)...(19): siRNA sense strand
ugccagagcaucagccaua

SEQ ID NO: 1543207 - RNA, 19 nt, Homo sapiens
  misc_RNA (1)...(19): siRNA sense strand
gagaggaagaagaagaaau

SEQ ID NO: 1543208 - RNA, 19 nt, Homo sapiens
  misc_RNA (1)...(19): siRNA sense strand
agaggaagaagaagaaauc

SEQ ID NO: 1543209 - RNA, 19 nt, Homo sapiens
  misc_RNA (1)...(19): siRNA sense strand
ggcaguggaguucaccuuu

SEQ ID NO: 1543210 - RNA, 19 nt, Homo sapiens
  misc_RNA (1)...(19): siRNA sense strand
gccagagcaucagccauau

SEQ ID NO: 1543211 - RNA, 19 nt, Homo sapiens
  misc_RNA (1)...(19): siRNA sense strand
caacuguggaggucuagau

SEQ ID NO: 1543212 - RNA, 19 nt, Homo sapiens
  misc_RNA (1)...(19): siRNA sense strand
aaggaaagagcaugcagaa

SEQ ID NO: 1543213 - RNA, 19 nt, Homo sapiens
  misc_RNA (1)...(19): siRNA sense strand
cccaguggaugucuuugug

SEQ ID NO: 1543214 - RNA, 19 nt, Homo sapiens
  misc_RNA (1)...(19): siRNA sense strand
gccauaugguagccucaug

SEQ ID NO: 1543215 - RNA, 19 nt, Homo sapiens
  misc_RNA (1)...(19): siRNA sense strand
ggaggucuagaucaucaug

SEQ ID NO: 1543216 - RNA, 19 nt, Homo sapiens
  misc_RNA (1)...(19): siRNA sense strand
gaucaucaugccaaggaau

SEQ ID NO: 1543217 - RNA, 19 nt, Homo sapiens
  misc_RNA (1)...(19): siRNA sense strand
uagaucaucaugccaagga

SEQ ID NO: 1543218 - RNA, 19 nt, Homo sapiens
  misc_RNA (1)...(19): siRNA sense strand
agggaaagccaaccuacuu

SEQ ID NO: 1543219 - RNA, 19 nt, Homo sapiens
  misc_RNA (1)...(19): siRNA sense strand
guggaguucaccuuuaaga

SEQ ID NO: 1543220 - RNA, 19 nt, Homo sapiens
  misc_RNA (1)...(19): siRNA sense strand
cagagcaucagccauaugg

SEQ ID NO: 1543221 - RNA, 19 nt, Homo sapiens
  misc_RNA (1)...(19): siRNA sense strand
gugcgggcaucuguaagug

SEQ ID NO: 1543222 - RNA, 19 nt, Homo sapiens
  misc_RNA (1)...(19): siRNA sense strand
ucgagaggaagaagaagaa

SEQ ID NO: 1543223 - RNA, 19 nt, Homo sapiens
  misc_RNA (1)...(19): siRNA sense strand
ugaaaucucuccaaaguga

SEQ ID NO: 1543224 - RNA, 19 nt, Homo sapiens
  misc_RNA (1)...(19): siRNA sense strand
gcugaaaucucuccaaagu

SEQ ID NO: 1543225 - RNA, 19 nt, Homo sapiens
  misc_RNA (1)...(19): siRNA sense strand
caagagcagugccuagaaa

SEQ ID NO: 1543226 - RNA, 19 nt, Homo sapiens
  misc_RNA (1)...(19): siRNA sense strand
aaagugacauucuucauga

SEQ ID NO: 1543227 - RNA, 19 nt, Homo sapiens
  misc_RNA (1)...(19): siRNA sense strand
gcaacgaucugaaagucau

SEQ ID NO: 1543228 - RNA, 19 nt, Homo sapiens
  misc_RNA (1)...(19): siRNA sense strand
gcaaagccaccuucuacaa

SEQ ID NO: 1543229 - RNA, 19 nt, Homo sapiens
  misc_RNA (1)...(19): siRNA sense strand
gaucugaaagucauuauca

SEQ ID NO: 1543230 - RNA, 19 nt, Homo sapiens
  misc_RNA (1)...(19): siRNA sense strand
caaagugacauucuucaug

SEQ ID NO: 1543231 - RNA, 19 nt, Homo sapiens
  misc_RNA (1)...(19): siRNA sense strand
gaacgucgggcucuucugu

SEQ ID NO: 1543232 - RNA, 19 nt, Homo sapiens
  misc_RNA (1)...(19): siRNA sense strand
gcaaggccgugauuaccau

SEQ ID NO: 1543233 - RNA, 19 nt, Homo sapiens
  misc_RNA (1)...(19): siRNA sense strand
ugauuaccaugccgaagua

SEQ ID NO: 1543234 - RNA, 19 nt, Homo sapiens
  misc_RNA (1)...(19): siRNA sense strand
ccaagaagaggaacacguu

SEQ ID NO: 1543235 - RNA, 19 nt, Homo sapiens
  misc_RNA (1)...(19): siRNA sense strand
gcaagagcagugccuagaa

SEQ ID NO: 1543236 - RNA, 19 nt, Homo sapiens
  misc_RNA (1)...(19): siRNA sense strand
ugacagcaacgaucugaaa

SEQ ID NO: 1543237 - RNA, 19 nt, Homo sapiens
  misc_RNA (1)...(19): siRNA sense strand
gaacaucgucuugagcaau

SEQ ID NO: 1543238 - RNA, 19 nt, Homo sapiens
  misc_RNA (1)...(19): siRNA sense strand
gggcaaagccaccuucuac

SEQ ID NO: 1543239 - RNA, 19 nt, Homo sapiens
  misc_RNA (1)...(19): siRNA sense strand
uaaggaacaucgucuugag

SEQ ID NO: 1543240 - RNA, 19 nt, Homo sapiens
  misc_RNA (1)...(19): siRNA sense strand
ggaacaucgucuugagcaa

SEQ ID NO: 1543241 - RNA, 19 nt, Homo sapiens
  misc_RNA (1)...(19): siRNA sense strand
cagcaacgaucugaaaguc

SEQ ID NO: 1543242 - RNA, 19 nt, Homo sapiens
  misc_RNA (1)...(19): siRNA sense strand
uuaccaugccgaaguauuu

SEQ ID NO: 1543243 - RNA, 19 nt, Homo sapiens
  misc_RNA (1)...(19): siRNA sense strand
aggaacacguugucacuug

SEQ ID NO: 1543244 - RNA, 19 nt, Homo sapiens
  misc_RNA (1)...(19): siRNA sense strand
caagugggcccaugugucu

SEQ ID NO: 1543245 - RNA, 19 nt, Homo sapiens
  misc_RNA (1)...(19): siRNA sense strand
ggagcaaggccgugauuac

SEQ ID NO: 1543246 - RNA, 19 nt, Homo sapiens
  misc_RNA (1)...(19): siRNA sense strand
caaagccaccuucuacaag

SEQ ID NO: 1543247 - RNA, 19 nt, Homo sapiens
  misc_RNA (1)...(19): siRNA sense strand
guuccaaggucaugaugca

SEQ ID NO: 1543248 - RNA, 19 nt, Homo sapiens
  misc_RNA (1)...(19): siRNA sense strand
gaagaggaacacguuguca

SEQ ID NO: 1543249 - RNA, 19 nt, Homo sapiens
  misc_RNA (1)...(19): siRNA sense strand
ucacggccuuccuccagaa

SEQ ID NO: 1543250 - RNA, 19 nt, Homo sapiens
  misc_RNA (1)...(19): siRNA sense strand
gucgggcucuucuguucua

SEQ ID NO: 1543251 - RNA, 19 nt, Homo sapiens
  misc_RNA (1)...(19): siRNA sense strand
cauaaggaacaucgucuug

SEQ ID NO: 1543252 - RNA, 19 nt, Homo sapiens
  misc_RNA (1)...(19): siRNA sense strand
gcaaucccaagaagaggaa

SEQ ID NO: 1543253 - RNA, 19 nt, Homo sapiens
  misc_RNA (1)...(19): siRNA sense strand
gaggagcaaggccgugauu

SEQ ID NO: 1543254 - RNA, 19 nt, Homo sapiens
  misc_RNA (1)...(19): siRNA sense strand
ugaaagucauuaucaucuc

SEQ ID NO: 1543255 - RNA, 19 nt, Homo sapiens
  misc_RNA (1)...(19): siRNA sense strand
ccaugcggaucgcuaggaa

SEQ ID NO: 1543256 - RNA, 19 nt, Homo sapiens
  misc_RNA (1)...(19): siRNA sense strand
augcugaaaucucuccaaa

SEQ ID NO: 1543257 - RNA, 19 nt, Homo sapiens
  misc_RNA (1)...(19): siRNA sense strand
gagcagugccuagaaaggu

SEQ ID NO: 1543258 - RNA, 19 nt, Homo sapiens
  misc_RNA (1)...(19): siRNA sense strand
gcauaaggaacaucgucuu

SEQ ID NO: 1543259 - RNA, 19 nt, Homo sapiens
  misc_RNA (1)...(19): siRNA sense strand
guugccagcugcgacauug

SEQ ID NO: 1543260 - RNA, 19 nt, Homo sapiens
  misc_RNA (1)...(19): siRNA sense strand
uugcaaugcugaaaucucu

SEQ ID NO: 1543261 - RNA, 19 nt, Homo sapiens
  misc_RNA (1)...(19): siRNA sense strand
cgagcgacaaguccucuuu

SEQ ID NO: 1543262 - RNA, 19 nt, Homo sapiens
  misc_RNA (1)...(19): siRNA sense strand
ucuccaaagugacauucuu

SEQ ID NO: 1543263 - RNA, 19 nt, Homo sapiens
  misc_RNA (1)...(19): siRNA sense strand
cuucugggcaugacuuaaa

SEQ ID NO: 1543264 - RNA, 19 nt, Homo sapiens
  misc_RNA (1)...(19): siRNA sense strand
ggugguaucccugggcaaa

SEQ ID NO: 1543265 - RNA, 19 nt, Homo sapiens
  misc_RNA (1)...(19): siRNA sense strand
ccuuggagaugcucuuuac

SEQ ID NO: 1543266 - RNA, 19 nt, Homo sapiens
  misc_RNA (1)...(19): siRNA sense strand
ccaaggucaugaugcacau

SEQ ID NO: 1543267 - RNA, 19 nt, Homo sapiens
  misc_RNA (1)...(19): siRNA sense strand
gaacacguugucacuugca

SEQ ID NO: 1543268 - RNA, 19 nt, Homo sapiens
  misc_RNA (1)...(19): siRNA sense strand
gugauuaccaugccgaagu

SEQ ID NO: 1543269 - RNA, 19 nt, Homo sapiens
  misc_RNA (1)...(19): siRNA sense strand
gaaaaccugucuggucaca

SEQ ID NO: 1543270 - RNA, 19 nt, Homo sapiens
  misc_RNA (1)...(19): siRNA sense strand
cagcuggacggcauaagga

SEQ ID NO: 1543271 - RNA, 19 nt, Homo sapiens
  misc_RNA (1)...(19): siRNA sense strand
gcagcuggacggcauaagg

SEQ ID NO: 1543272 - RNA, 19 nt, Homo sapiens
  misc_RNA (1)...(19): siRNA sense strand
gaggaacacguugucacuu

SEQ ID NO: 1543273 - RNA, 19 nt, Homo sapiens
  misc_RNA (1)...(19): siRNA sense strand
ucacuugcaaugcugaaau

SEQ ID NO: 1543274 - RNA, 19 nt, Homo sapiens
  misc_RNA (1)...(19): siRNA sense strand
ugagcaaucccaagaagag

SEQ ID NO: 1543275 - RNA, 19 nt, Homo sapiens
  misc_RNA (1)...(19): siRNA sense strand
ccaaagugacauucuucau

SEQ ID NO: 1543276 - RNA, 19 nt, Homo sapiens
  misc_RNA (1)...(19): siRNA sense strand
aacaucgucuugagcaauc

SEQ ID NO: 1543277 - RNA, 19 nt, Homo sapiens
  misc_RNA (1)...(19): siRNA sense strand
cacuugcaaugcugaaauc

SEQ ID NO: 1543278 - RNA, 19 nt, Homo sapiens
  misc_RNA (1)...(19): siRNA sense strand
gaaguauuucagaccuguu

SEQ ID NO: 1543279 - RNA, 19 nt, Homo sapiens
  misc_RNA (1)...(19): siRNA sense strand
ccacccacgugucucauug

SEQ ID NO: 1543280 - RNA, 19 nt, Homo sapiens
  misc_RNA (1)...(19): siRNA sense strand
gcacagggagagcaguuga

SEQ ID NO: 1543281 - RNA, 19 nt, Homo sapiens
  misc_RNA (1)...(19): siRNA sense strand
ggucgccucugccuaguca

SEQ ID NO: 1543282 - RNA, 19 nt, Homo sapiens
  misc_RNA (1)...(19): siRNA sense strand
cauuguggcugccuaugga

SEQ ID NO: 1543283 - RNA, 19 nt, Homo sapiens
  misc_RNA (1)...(19): siRNA sense strand
gcccaaagcuccuguugua

SEQ ID NO: 1543284 - RNA, 19 nt, Homo sapiens
  misc_RNA (1)...(19): siRNA sense strand
caucaaagaucaucacaca

SEQ ID NO: 1543285 - RNA, 19 nt, Homo sapiens
  misc_RNA (1)...(19): siRNA sense strand
gaucauggaaucugcauaa

SEQ ID NO: 1543286 - RNA, 19 nt, Homo sapiens
  misc_RNA (1)...(19): siRNA sense strand
gaaauuccuuugguaauca

SEQ ID NO: 1543287 - RNA, 19 nt, Homo sapiens
  misc_RNA (1)...(19): siRNA sense strand
gaaagaggccuaccugaag

SEQ ID NO: 1543288 - RNA, 19 nt, Homo sapiens
  misc_RNA (1)...(19): siRNA sense strand
gaggguggcuucugucuca

SEQ ID NO: 1543289 - RNA, 19 nt, Homo sapiens
  misc_RNA (1)...(19): siRNA sense strand
uguacaagcuccugggaua

SEQ ID NO: 1543290 - RNA, 19 nt, Homo sapiens
  misc_RNA (1)...(19): siRNA sense strand
gaugaaauuccuuugguaa

SEQ ID NO: 1543291 - RNA, 19 nt, Homo sapiens
  misc_RNA (1)...(19): siRNA sense strand
ucuccaagaucccauuuaa

SEQ ID NO: 1543292 - RNA, 19 nt, Homo sapiens
  misc_RNA (1)...(19): siRNA sense strand
gagaacaucaccaccguuu

SEQ ID NO: 1543293 - RNA, 19 nt, Homo sapiens
  misc_RNA (1)...(19): siRNA sense strand
cauggaaucugcauaaugg

SEQ ID NO: 1543294 - RNA, 19 nt, Homo sapiens
  misc_RNA (1)...(19): siRNA sense strand
cgacguggaucauggaauc

SEQ ID NO: 1543295 - RNA, 19 nt, Homo sapiens
  misc_RNA (1)...(19): siRNA sense strand
caucgucuccuguaaguuu

SEQ ID NO: 1543296 - RNA, 19 nt, Homo sapiens
  misc_RNA (1)...(19): siRNA sense strand
caggcaagcugcuguggaa

SEQ ID NO: 1543297 - RNA, 19 nt, Homo sapiens
  misc_RNA (1)...(19): siRNA sense strand
gccgugggcuuaaaguuga

SEQ ID NO: 1543298 - RNA, 19 nt, Homo sapiens
  misc_RNA (1)...(19): siRNA sense strand
caagguccaucacgucaug

SEQ ID NO: 1543299 - RNA, 19 nt, Homo sapiens
  misc_RNA (1)...(19): siRNA sense strand
ccaaugcaaucucaaacug

SEQ ID NO: 1543300 - RNA, 19 nt, Homo sapiens
  misc_RNA (1)...(19): siRNA sense strand
ugaugaaauuccuuuggua

SEQ ID NO: 1543301 - RNA, 19 nt, Homo sapiens
  misc_RNA (1)...(19): siRNA sense strand
gauaggaccaugagacugu

SEQ ID NO: 1543302 - RNA, 19 nt, Homo sapiens
  misc_RNA (1)...(19): siRNA sense strand
ccaaagcuccuguuguaga

SEQ ID NO: 1543303 - RNA, 19 nt, Homo sapiens
  misc_RNA (1)...(19): siRNA sense strand
ugaaauuccuuugguaauc

SEQ ID NO: 1543304 - RNA, 19 nt, Homo sapiens
  misc_RNA (1)...(19): siRNA sense strand
aucaagaucugggauguua

SEQ ID NO: 1543305 - RNA, 19 nt, Homo sapiens
  misc_RNA (1)...(19): siRNA sense strand
gguggacgguucugugguu

SEQ ID NO: 1543306 - RNA, 19 nt, Homo sapiens
  misc_RNA (1)...(19): siRNA sense strand
ucucauuucuggaggguuu

SEQ ID NO: 1543307 - RNA, 19 nt, Homo sapiens
  misc_RNA (1)...(19): siRNA sense strand
ccaugaagguucugucagu

SEQ ID NO: 1543308 - RNA, 19 nt, Homo sapiens
  misc_RNA (1)...(19): siRNA sense strand
ccaugagacuguggaauau

SEQ ID NO: 1543309 - RNA, 19 nt, Homo sapiens
  misc_RNA (1)...(19): siRNA sense strand
ucaaagaucaucacacaag

SEQ ID NO: 1543310 - RNA, 19 nt, Homo sapiens
  misc_RNA (1)...(19): siRNA sense strand
ugacagggaaugcaaguug

SEQ ID NO: 1543311 - RNA, 19 nt, Homo sapiens
  misc_RNA (1)...(19): siRNA sense strand
agaaagaggccuaccugaa

SEQ ID NO: 1543312 - RNA, 19 nt, Homo sapiens
  misc_RNA (1)...(19): siRNA sense strand
agacagcucuuuucucauu

SEQ ID NO: 1543313 - RNA, 19 nt, Homo sapiens
  misc_RNA (1)...(19): siRNA sense strand
caaagcuccuguuguagag

SEQ ID NO: 1543314 - RNA, 19 nt, Homo sapiens
  misc_RNA (1)...(19): siRNA sense strand
uguggaaggucagguauga

SEQ ID NO: 1543315 - RNA, 19 nt, Homo sapiens
  misc_RNA (1)...(19): siRNA sense strand
gaagcugaagcaaggauga

SEQ ID NO: 1543316 - RNA, 19 nt, Homo sapiens
  misc_RNA (1)...(19): siRNA sense strand
uggaaggucagguaugaua

SEQ ID NO: 1543317 - RNA, 19 nt, Homo sapiens
  misc_RNA (1)...(19): siRNA sense strand
gaaccaccaccgcaucugu

SEQ ID NO: 1543318 - RNA, 19 nt, Homo sapiens
  misc_RNA (1)...(19): siRNA sense strand
ccgcaucuguugccugaga

SEQ ID NO: 1543319 - RNA, 19 nt, Homo sapiens
  misc_RNA (1)...(19): siRNA sense strand
gaacaucaccaccguuucc

SEQ ID NO: 1543320 - RNA, 19 nt, Homo sapiens
  misc_RNA (1)...(19): siRNA sense strand
guacaagcuccugggauaa

SEQ ID NO: 1543321 - RNA, 19 nt, Homo sapiens
  misc_RNA (1)...(19): siRNA sense strand
ggacaggugcaucaagauc

SEQ ID NO: 1543322 - RNA, 19 nt, Homo sapiens
  misc_RNA (1)...(19): siRNA sense strand
gcaagcugcuguggaaggu

SEQ ID NO: 1543323 - RNA, 19 nt, Homo sapiens
  misc_RNA (1)...(19): siRNA sense strand
gcaacaacaagaaauggau

SEQ ID NO: 1543324 - RNA, 19 nt, Homo sapiens
  misc_RNA (1)...(19): siRNA sense strand
gccauuagcaacaacaaga

SEQ ID NO: 1543325 - RNA, 19 nt, Homo sapiens
  misc_RNA (1)...(19): siRNA sense strand
guucugugguucgcgauuu

SEQ ID NO: 1543326 - RNA, 19 nt, Homo sapiens
  misc_RNA (1)...(19): siRNA sense strand
gcagggccaugaagguucu

SEQ ID NO: 1543327 - RNA, 19 nt, Homo sapiens
  misc_RNA (1)...(19): siRNA sense strand
gguggcuucugucucauug

SEQ ID NO: 1543328 - RNA, 19 nt, Homo sapiens
  misc_RNA (1)...(19): siRNA sense strand
cgacagcagcagagucauu

SEQ ID NO: 1543329 - RNA, 19 nt, Homo sapiens
  misc_RNA (1)...(19): siRNA sense strand
gaccauggcgagggccuua

SEQ ID NO: 1543330 - RNA, 19 nt, Homo sapiens
  misc_RNA (1)...(19): siRNA sense strand
accggaagcucucuuugaa

SEQ ID NO: 1543331 - RNA, 19 nt, Homo sapiens
  misc_RNA (1)...(19): siRNA sense strand
uauuugggauguagcagaa

SEQ ID NO: 1543332 - RNA, 19 nt, Homo sapiens
  misc_RNA (1)...(19): siRNA sense strand
ucacuaaggcacauuccaa

SEQ ID NO: 1543333 - RNA, 19 nt, Homo sapiens
  misc_RNA (1)...(19): siRNA sense strand
gcaccugccacuucugugu

SEQ ID NO: 1543334 - RNA, 19 nt, Homo sapiens
  misc_RNA (1)...(19): siRNA sense strand
accaugagacuguggaaua

SEQ ID NO: 1543335 - RNA, 19 nt, Homo sapiens
  misc_RNA (1)...(19): siRNA sense strand
ugucaguuccugucacuuu

SEQ ID NO: 1543336 - RNA, 19 nt, Homo sapiens
  misc_RNA (1)...(19): siRNA sense strand
caugaagguucugucaguu

SEQ ID NO: 1543337 - RNA, 19 nt, Homo sapiens
  misc_RNA (1)...(19): siRNA sense strand
caucacgucaugcugcuuu

SEQ ID NO: 1543338 - RNA, 19 nt, Homo sapiens
  misc_RNA (1)...(19): siRNA sense strand
ggccgugggcuuaaaguug

SEQ ID NO: 1543339 - RNA, 19 nt, Homo sapiens
  misc_RNA (1)...(19): siRNA sense strand
gcuccucaguggcuccuau

SEQ ID NO: 1543340 - RNA, 19 nt, Homo sapiens
  misc_RNA (1)...(19): siRNA sense strand
guuguagagugcagcauca

SEQ ID NO: 1543341 - RNA, 19 nt, Homo sapiens
  misc_RNA (1)...(19): siRNA sense strand
augagacuguggaauauug

SEQ ID NO: 1543342 - RNA, 19 nt, Homo sapiens
  misc_RNA (1)...(19): siRNA sense strand
gacagcagcagagucauug

SEQ ID NO: 1543343 - RNA, 19 nt, Homo sapiens
  misc_RNA (1)...(19): siRNA sense strand
gagcaccugccacuucugu

SEQ ID NO: 1543344 - RNA, 19 nt, Homo sapiens
  misc_RNA (1)...(19): siRNA sense strand
aaauggauccugucugcuu

SEQ ID NO: 1543345 - RNA, 19 nt, Homo sapiens
  misc_RNA (1)...(19): siRNA sense strand
gucaguuccugucacuuug

SEQ ID NO: 1543346 - RNA, 19 nt, Homo sapiens
  misc_RNA (1)...(19): siRNA sense strand
gagccugugugacucugau

SEQ ID NO: 1543347 - RNA, 19 nt, Homo sapiens
  misc_RNA (1)...(19): siRNA sense strand
ggccauuuccuguguacaa

SEQ ID NO: 1543348 - RNA, 19 nt, Homo sapiens
  misc_RNA (1)...(19): siRNA sense strand
caagaucugggauguuaca

SEQ ID NO: 1543349 - RNA, 19 nt, Homo sapiens
  misc_RNA (1)...(19): siRNA sense strand
uuggacaggugcaucaaga

SEQ ID NO: 1543350 - RNA, 19 nt, Homo sapiens
  misc_RNA (1)...(19): siRNA sense strand
uccuaugacugcacuguga

SEQ ID NO: 1543351 - RNA, 19 nt, Homo sapiens
  misc_RNA (1)...(19): siRNA sense strand
gcauaauggacgccgagaa

SEQ ID NO: 1543352 - RNA, 19 nt, Homo sapiens
  misc_RNA (1)...(19): siRNA sense strand
caagaaauggauccugucu

SEQ ID NO: 1543353 - RNA, 19 nt, Homo sapiens
  misc_RNA (1)...(19): siRNA sense strand
gugagcaccugccacuucu

SEQ ID NO: 1543354 - RNA, 19 nt, Homo sapiens
  misc_RNA (1)...(19): siRNA sense strand
uaccuucaguggccauuuc

SEQ ID NO: 1543355 - RNA, 19 nt, Homo sapiens
  misc_RNA (1)...(19): siRNA sense strand
ccguuuccgucaucaaaga

SEQ ID NO: 1543356 - RNA, 19 nt, Homo sapiens
  misc_RNA (1)...(19): siRNA sense strand
aggccuaccugaagcugaa

SEQ ID NO: 1543357 - RNA, 19 nt, Homo sapiens
  misc_RNA (1)...(19): siRNA sense strand
uaccggaagcucucuuuga

SEQ ID NO: 1543358 - RNA, 19 nt, Homo sapiens
  misc_RNA (1)...(19): siRNA sense strand
gaaacuguggagccugugu

SEQ ID NO: 1543359 - RNA, 19 nt, Homo sapiens
  misc_RNA (1)...(19): siRNA sense strand
ggcgacagcagcagaguca

SEQ ID NO: 1543360 - RNA, 19 nt, Homo sapiens
  misc_RNA (1)...(19): siRNA sense strand
ccaggugccggagaaauug

SEQ ID NO: 1543361 - RNA, 19 nt, Homo sapiens
  misc_RNA (1)...(19): siRNA sense strand
uggcuucugucucauugga

SEQ ID NO: 1543362 - RNA, 19 nt, Homo sapiens
  misc_RNA (1)...(19): siRNA sense strand
caucacacaagguccauca

SEQ ID NO: 1543363 - RNA, 19 nt, Homo sapiens
  misc_RNA (1)...(19): siRNA sense strand
ucauggaaucugcauaaug

SEQ ID NO: 1543364 - RNA, 19 nt, Homo sapiens
  misc_RNA (1)...(19): siRNA sense strand
cauaauggacgccgagaac

SEQ ID NO: 1543365 - RNA, 19 nt, Homo sapiens
  misc_RNA (1)...(19): siRNA sense strand
gcuaccggaagcucucuuu

SEQ ID NO: 1543366 - RNA, 19 nt, Homo sapiens
  misc_RNA (1)...(19): siRNA sense strand
uacaagcuccugggauaaa

SEQ ID NO: 1543367 - RNA, 19 nt, Homo sapiens
  misc_RNA (1)...(19): siRNA sense strand
caccguuuccgucaucaaa

SEQ ID NO: 1543368 - RNA, 19 nt, Homo sapiens
  misc_RNA (1)...(19): siRNA sense strand
uuccuuugguaaucaagua

SEQ ID NO: 1543369 - RNA, 19 nt, Homo sapiens
  misc_RNA (1)...(19): siRNA sense strand
acuguggaauauugaagaa

SEQ ID NO: 1543370 - RNA, 19 nt, Homo sapiens
  misc_RNA (1)...(19): siRNA sense strand
uccaagaucccauuuaaaa

SEQ ID NO: 1543371 - RNA, 19 nt, Homo sapiens
  misc_RNA (1)...(19): siRNA sense strand
cauuagcaacaacaagaaa

SEQ ID NO: 1543372 - RNA, 19 nt, Homo sapiens
  misc_RNA (1)...(19): siRNA sense strand
ccauuagcaacaacaagaa

SEQ ID NO: 1543373 - RNA, 19 nt, Homo sapiens
  misc_RNA (1)...(19): siRNA sense strand
caguggccauuuccugugu

SEQ ID NO: 1543374 - RNA, 19 nt, Homo sapiens
  misc_RNA (1)...(19): siRNA sense strand
uugaugaaauuccuuuggu

SEQ ID NO: 1543375 - RNA, 19 nt, Homo sapiens
  misc_RNA (1)...(19): siRNA sense strand
caccaccguuuccgucauc

SEQ ID NO: 1543376 - RNA, 19 nt, Homo sapiens
  misc_RNA (1)...(19): siRNA sense strand
gacuguggaauauugaaga

SEQ ID NO: 1543377 - RNA, 19 nt, Homo sapiens
  misc_RNA (1)...(19): siRNA sense strand
acaggugcaucaagaucug

SEQ ID NO: 1543378 - RNA, 19 nt, Homo sapiens
  misc_RNA (1)...(19): siRNA sense strand
ggccaugaagguucuguca

SEQ ID NO: 1543379 - RNA, 19 nt, Homo sapiens
  misc_RNA (1)...(19): siRNA sense strand
gagacuguggaauauugaa

SEQ ID NO: 1543380 - RNA, 19 nt, Homo sapiens
  misc_RNA (1)...(19): siRNA sense strand
ugacacaaagcuccucagu

SEQ ID NO: 1543381 - RNA, 19 nt, Homo sapiens
  misc_RNA (1)...(19): siRNA sense strand
ggagauauuugccacaaug

SEQ ID NO: 1543382 - RNA, 19 nt, Homo sapiens
  misc_RNA (1)...(19): siRNA sense strand
cuucauugcuuaccuauuu

SEQ ID NO: 1543383 - RNA, 19 nt, Homo sapiens
  misc_RNA (1)...(19): siRNA sense strand
gaucucgacuacauauauu

SEQ ID NO: 1543384 - RNA, 19 nt, Homo sapiens
  misc_RNA (1)...(19): siRNA sense strand
caacaaaccaguucgcuau

SEQ ID NO: 1543385 - RNA, 19 nt, Homo sapiens
  misc_RNA (1)...(19): siRNA sense strand
cauguacucucacuuuaaa

SEQ ID NO: 1543386 - RNA, 19 nt, Homo sapiens
  misc_RNA (1)...(19): siRNA sense strand
caacuacgauucaacaaac

SEQ ID NO: 1543387 - RNA, 19 nt, Homo sapiens
  misc_RNA (1)...(19): siRNA sense strand
ucagaugguugucaugauu

SEQ ID NO: 1543388 - RNA, 19 nt, Homo sapiens
  misc_RNA (1)...(19): siRNA sense strand
gggauuccacaauguauua

SEQ ID NO: 1543389 - RNA, 19 nt, Homo sapiens
  misc_RNA (1)...(19): siRNA sense strand
gcagugguguggacagaug

SEQ ID NO: 1543390 - RNA, 19 nt, Homo sapiens
  misc_RNA (1)...(19): siRNA sense strand
augcuaagcuugccuugua

SEQ ID NO: 1543391 - RNA, 19 nt, Homo sapiens
  misc_RNA (1)...(19): siRNA sense strand
gucaaucaaucaacuauuc

SEQ ID NO: 1543392 - RNA, 19 nt, Homo sapiens
  misc_RNA (1)...(19): siRNA sense strand
ggacagaugcauuucagau

SEQ ID NO: 1543393 - RNA, 19 nt, Homo sapiens
  misc_RNA (1)...(19): siRNA sense strand
acaaauggaucucgacuac

SEQ ID NO: 1543394 - RNA, 19 nt, Homo sapiens
  misc_RNA (1)...(19): siRNA sense strand
uuagagcaaucaacaaaug

SEQ ID NO: 1543395 - RNA, 19 nt, Homo sapiens
  misc_RNA (1)...(19): siRNA sense strand
gggauuauguuguauuugc

SEQ ID NO: 1543396 - RNA, 19 nt, Homo sapiens
  misc_RNA (1)...(19): siRNA sense strand
guaaaggcuuauguaggua

SEQ ID NO: 1543397 - RNA, 19 nt, Homo sapiens
  misc_RNA (1)...(19): siRNA sense strand
ccacagucaucuacauugu

SEQ ID NO: 1543398 - RNA, 19 nt, Homo sapiens
  misc_RNA (1)...(19): siRNA sense strand
gcacuuaugaguacuuaca

SEQ ID NO: 1543399 - RNA, 19 nt, Homo sapiens
  misc_RNA (1)...(19): siRNA sense strand
uuacuuggcucggaaucua

SEQ ID NO: 1543400 - RNA, 19 nt, Homo sapiens
  misc_RNA (1)...(19): siRNA sense strand
aaauggaucucgacuacau

SEQ ID NO: 1543401 - RNA, 19 nt, Homo sapiens
  misc_RNA (1)...(19): siRNA sense strand
aguaaaggcuuauguaggu

SEQ ID NO: 1543402 - RNA, 19 nt, Homo sapiens
  misc_RNA (1)...(19): siRNA sense strand
cagcacuuaugaguacuua

SEQ ID NO: 1543403 - RNA, 19 nt, Homo sapiens
  misc_RNA (1)...(19): siRNA sense strand
ggaucucgacuacauauau

SEQ ID NO: 1543404 - RNA, 19 nt, Homo sapiens
  misc_RNA (1)...(19): siRNA sense strand
guacuuacaacuacgauuc

SEQ ID NO: 1543405 - RNA, 19 nt, Homo sapiens
  misc_RNA (1)...(19): siRNA sense strand
gacuuucuauuccauauca

SEQ ID NO: 1543406 - RNA, 19 nt, Homo sapiens
  misc_RNA (1)...(19): siRNA sense strand
aagcuugccuuguauuuua

SEQ ID NO: 1543407 - RNA, 19 nt, Homo sapiens
  misc_RNA (1)...(19): siRNA sense strand
uggcaacagugaccuuuga

SEQ ID NO: 1543408 - RNA, 19 nt, Homo sapiens
  misc_RNA (1)...(19): siRNA sense strand
caccagcacuuaugaguac

SEQ ID NO: 1543409 - RNA, 19 nt, Homo sapiens
  misc_RNA (1)...(19): siRNA sense strand
acagugaccuuugaggauu

SEQ ID NO: 1543410 - RNA, 19 nt, Homo sapiens
  misc_RNA (1)...(19): siRNA sense strand
ugucuucucuggcuuaauc

SEQ ID NO: 1543411 - RNA, 19 nt, Homo sapiens
  misc_RNA (1)...(19): siRNA sense strand
gcuugugccuucaguggaa

SEQ ID NO: 1543412 - RNA, 19 nt, Homo sapiens
  misc_RNA (1)...(19): siRNA sense strand
aaucauguacucucacuuu

SEQ ID NO: 1543413 - RNA, 19 nt, Homo sapiens
  misc_RNA (1)...(19): siRNA sense strand
gcaccuggaucaguaaagg

SEQ ID NO: 1543414 - RNA, 19 nt, Homo sapiens
  misc_RNA (1)...(19): siRNA sense strand
ccugucggcuugucucuga

SEQ ID NO: 1543415 - RNA, 19 nt, Homo sapiens
  misc_RNA (1)...(19): siRNA sense strand
gguguggacagaugcauuu

SEQ ID NO: 1543416 - RNA, 19 nt, Homo sapiens
  misc_RNA (1)...(19): siRNA sense strand
gcugguggacuuucuauuc

SEQ ID NO: 1543417 - RNA, 19 nt, Homo sapiens
  misc_RNA (1)...(19): siRNA sense strand
guacagacgauucucuaca

SEQ ID NO: 1543418 - RNA, 19 nt, Homo sapiens
  misc_RNA (1)...(19): siRNA sense strand
gaucaguaaaggcuuaugu

SEQ ID NO: 1543419 - RNA, 19 nt, Homo sapiens
  misc_RNA (1)...(19): siRNA sense strand
cuggaucaguaaaggcuua

SEQ ID NO: 1543420 - RNA, 19 nt, Homo sapiens
  misc_RNA (1)...(19): siRNA sense strand
ggugugugcugucuucucu

SEQ ID NO: 1543421 - RNA, 19 nt, Homo sapiens
  misc_RNA (1)...(19): siRNA sense strand
gcaaucaacaaauggaucu

SEQ ID NO: 1543422 - RNA, 19 nt, Homo sapiens
  misc_RNA (1)...(19): siRNA sense strand
uaugaguacuuacaacuac

SEQ ID NO: 1543423 - RNA, 19 nt, Homo sapiens
  misc_RNA (1)...(19): siRNA sense strand
auucaaggaucaacucaug

SEQ ID NO: 1543424 - RNA, 19 nt, Homo sapiens
  misc_RNA (1)...(19): siRNA sense strand
gcuuaaucauguacucuca

SEQ ID NO: 1543425 - RNA, 19 nt, Homo sapiens
  misc_RNA (1)...(19): siRNA sense strand
gggcauccuuccuagucuu

SEQ ID NO: 1543426 - RNA, 19 nt, Homo sapiens
  misc_RNA (1)...(19): siRNA sense strand
cagugaccuuugaggauuu

SEQ ID NO: 1543427 - RNA, 19 nt, Homo sapiens
  misc_RNA (1)...(19): siRNA sense strand
ucauguacucucacuuuaa

SEQ ID NO: 1543428 - RNA, 19 nt, Homo sapiens
  misc_RNA (1)...(19): siRNA sense strand
aguuugggauuauguugua

SEQ ID NO: 1543429 - RNA, 19 nt, Homo sapiens
  misc_RNA (1)...(19): siRNA sense strand
ggauuauguuguauuugca

SEQ ID NO: 1543430 - RNA, 19 nt, Homo sapiens
  misc_RNA (1)...(19): siRNA sense strand
gguaucaccagcacuuaug

SEQ ID NO: 1543431 - RNA, 19 nt, Homo sapiens
  misc_RNA (1)...(19): siRNA sense strand
uuccuagucuucuucauug

SEQ ID NO: 1543432 - RNA, 19 nt, Homo sapiens
  misc_RNA (1)...(19): siRNA sense strand
cagcugaugccguacuuug

SEQ ID NO: 1543433 - RNA, 19 nt, Homo sapiens
  misc_RNA (1)...(19): siRNA sense strand
ucuuaacgguucucauuca

SEQ ID NO: 1543434 - RNA, 19 nt, Homo sapiens
  misc_RNA (1)...(19): siRNA sense strand
caugauugugggcuucuua

SEQ ID NO: 1543435 - RNA, 19 nt, Homo sapiens
  misc_RNA (1)...(19): siRNA sense strand
gacagaugcauuucagaug

SEQ ID NO: 1543436 - RNA, 19 nt, Homo sapiens
  misc_RNA (1)...(19): siRNA sense strand
guuugcacauucuacugua

SEQ ID NO: 1543437 - RNA, 19 nt, Homo sapiens
  misc_RNA (1)...(19): siRNA sense strand
ucaccagcacuuaugagua

SEQ ID NO: 1543438 - RNA, 19 nt, Homo sapiens
  misc_RNA (1)...(19): siRNA sense strand
gcaguuugggauuauguug

SEQ ID NO: 1543439 - RNA, 19 nt, Homo sapiens
  misc_RNA (1)...(19): siRNA sense strand
cuucuuaacgguucucauu

SEQ ID NO: 1543440 - RNA, 19 nt, Homo sapiens
  misc_RNA (1)...(19): siRNA sense strand
caggaauuguuugcacauu

SEQ ID NO: 1543441 - RNA, 19 nt, Homo sapiens
  misc_RNA (1)...(19): siRNA sense strand
ucugaagucuaccgcuuug

SEQ ID NO: 1543442 - RNA, 19 nt, Homo sapiens
  misc_RNA (1)...(19): siRNA sense strand
acaacuacgauucaacaaa

SEQ ID NO: 1543443 - RNA, 19 nt, Homo sapiens
  misc_RNA (1)...(19): siRNA sense strand
aagcugagcaccuggauca

SEQ ID NO: 1543444 - RNA, 19 nt, Homo sapiens
  misc_RNA (1)...(19): siRNA sense strand
uaacaucagagcucuuucu

SEQ ID NO: 1543445 - RNA, 19 nt, Homo sapiens
  misc_RNA (1)...(19): siRNA sense strand
ggguguucuuugccauuaa

SEQ ID NO: 1543446 - RNA, 19 nt, Homo sapiens
  misc_RNA (1)...(19): siRNA sense strand
cacaauguauuagagcaau

SEQ ID NO: 1543447 - RNA, 19 nt, Homo sapiens
  misc_RNA (1)...(19): siRNA sense strand
aucauguacucucacuuua

SEQ ID NO: 1543448 - RNA, 19 nt, Homo sapiens
  misc_RNA (1)...(19): siRNA sense strand
cuaagcuugccuuguauuu

SEQ ID NO: 1543449 - RNA, 19 nt, Homo sapiens
  misc_RNA (1)...(19): siRNA sense strand
ggucaaucaaucaacuauu

SEQ ID NO: 1543450 - RNA, 19 nt, Homo sapiens
  misc_RNA (1)...(19): siRNA sense strand
uuacaacuacgauucaaca

SEQ ID NO: 1543451 - RNA, 19 nt, Homo sapiens
  misc_RNA (1)...(19): siRNA sense strand
guacuuugucauggagaua

SEQ ID NO: 1543452 - RNA, 19 nt, Homo sapiens
  misc_RNA (1)...(19): siRNA sense strand
ucucuggcuuaaucaugua

SEQ ID NO: 1543453 - RNA, 19 nt, Homo sapiens
  misc_RNA (1)...(19): siRNA sense strand
gguguucuuugccauuaag

SEQ ID NO: 1543454 - RNA, 19 nt, Homo sapiens
  misc_RNA (1)...(19): siRNA sense strand
aaacagaaaagcaugcuaa

SEQ ID NO: 1543455 - RNA, 19 nt, Homo sapiens
  misc_RNA (1)...(19): siRNA sense strand
cuucuucauugcuuaccua

SEQ ID NO: 1543456 - RNA, 19 nt, Homo sapiens
  misc_RNA (1)...(19): siRNA sense strand
caaaccaguucgcuaugcu

SEQ ID NO: 1543457 - RNA, 19 nt, Homo sapiens
  misc_RNA (1)...(19): siRNA sense strand
ccuauuugucauccucuua

SEQ ID NO: 1543458 - RNA, 19 nt, Homo sapiens
  misc_RNA (1)...(19): siRNA sense strand
uguauuugcagcccucuuu

SEQ ID NO: 1543459 - RNA, 19 nt, Homo sapiens
  misc_RNA (1)...(19): siRNA sense strand
ucaguaaaggcuuauguag

SEQ ID NO: 1543460 - RNA, 19 nt, Homo sapiens
  misc_RNA (1)...(19): siRNA sense strand
gcugucuucucuggcuuaa

SEQ ID NO: 1543461 - RNA, 19 nt, Homo sapiens
  misc_RNA (1)...(19): siRNA sense strand
cugggucucuggaucauuc

SEQ ID NO: 1543462 - RNA, 19 nt, Homo sapiens
  misc_RNA (1)...(19): siRNA sense strand
gcuaagcuugccuuguauu

SEQ ID NO: 1543463 - RNA, 19 nt, Homo sapiens
  misc_RNA (1)...(19): siRNA sense strand
guggacagaugcauuucag

SEQ ID NO: 1543464 - RNA, 19 nt, Homo sapiens
  misc_RNA (1)...(19): siRNA sense strand
caggaguggugguguaugc

SEQ ID NO: 1543465 - RNA, 19 nt, Homo sapiens
  misc_RNA (1)...(19): siRNA sense strand
cuauuugucauccucuuaa

SEQ ID NO: 1543466 - RNA, 19 nt, Homo sapiens
  misc_RNA (1)...(19): siRNA sense strand
gagcaaucaacaaauggau

SEQ ID NO: 1543467 - RNA, 19 nt, Homo sapiens
  misc_RNA (1)...(19): siRNA sense strand
agguacagcugguggacuu

SEQ ID NO: 1543468 - RNA, 19 nt, Homo sapiens
  misc_RNA (1)...(19): siRNA sense strand
cuagucuucuucauugcuu

SEQ ID NO: 1543469 - RNA, 19 nt, Homo sapiens
  misc_RNA (1)...(19): siRNA sense strand
cuuaacgguucucauucaa

SEQ ID NO: 1543470 - RNA, 19 nt, Homo sapiens
  misc_RNA (1)...(19): siRNA sense strand
gggguguucuuugccauua

SEQ ID NO: 1543471 - RNA, 19 nt, Homo sapiens
  misc_RNA (1)...(19): siRNA sense strand
uguauuagagcaaucaaca

SEQ ID NO: 1543472 - RNA, 19 nt, Homo sapiens
  misc_RNA (1)...(19): siRNA sense strand
ccacaauguauuagagcaa

SEQ ID NO: 1543473 - RNA, 19 nt, Homo sapiens
  misc_RNA (1)...(19): siRNA sense strand
gaauugggguguucuuugc

SEQ ID NO: 1543474 - RNA, 19 nt, Homo sapiens
  misc_RNA (1)...(19): siRNA sense strand
ggaauugggguguucuuug

SEQ ID NO: 1543475 - RNA, 19 nt, Homo sapiens
  misc_RNA (1)...(19): siRNA sense strand
cagaugcauuucagauggu

SEQ ID NO: 1543476 - RNA, 19 nt, Homo sapiens
  misc_RNA (1)...(19): siRNA sense strand
caagugacuggguuugauc

SEQ ID NO: 1543477 - RNA, 19 nt, Homo sapiens
  misc_RNA (1)...(19): siRNA sense strand
cuuaacaucagagcucuuu

SEQ ID NO: 1543478 - RNA, 19 nt, Homo sapiens
  misc_RNA (1)...(19): siRNA sense strand
gccacagucaucuacauug

SEQ ID NO: 1543479 - RNA, 19 nt, Homo sapiens
  misc_RNA (1)...(19): siRNA sense strand
acuuugcaguuugggauua

SEQ ID NO: 1543480 - RNA, 19 nt, Homo sapiens
  misc_RNA (1)...(19): siRNA sense strand
gagcaccuggaucaguaaa

SEQ ID NO: 1543481 - RNA, 19 nt, Homo sapiens
  misc_RNA (1)...(19): siRNA sense strand
gaagaaggaguuuaguuua

SEQ ID NO: 1543482 - RNA, 19 nt, Homo sapiens
  misc_RNA (1)...(19): siRNA sense strand
gaagagauauauaccaaca

SEQ ID NO: 1543483 - RNA, 19 nt, Homo sapiens
  misc_RNA (1)...(19): siRNA sense strand
gcauggaagcuacauauaa

SEQ ID NO: 1543484 - RNA, 19 nt, Homo sapiens
  misc_RNA (1)...(19): siRNA sense strand
caaagaaagucucacagau

SEQ ID NO: 1543485 - RNA, 19 nt, Homo sapiens
  misc_RNA (1)...(19): siRNA sense strand
gaaggaguuuaguuuagaa

SEQ ID NO: 1543486 - RNA, 19 nt, Homo sapiens
  misc_RNA (1)...(19): siRNA sense strand
gcagaguccuauccauuug

SEQ ID NO: 1543487 - RNA, 19 nt, Homo sapiens
  misc_RNA (1)...(19): siRNA sense strand
ccgagaagcuauccauauu

SEQ ID NO: 1543488 - RNA, 19 nt, Homo sapiens
  misc_RNA (1)...(19): siRNA sense strand
cgaaaucucuucucuucau

SEQ ID NO: 1543489 - RNA, 19 nt, Homo sapiens
  misc_RNA (1)...(19): siRNA sense strand
gaaaucucuucucuucauu

SEQ ID NO: 1543490 - RNA, 19 nt, Homo sapiens
  misc_RNA (1)...(19): siRNA sense strand
gagaagcuauccauauugg

SEQ ID NO: 1543491 - RNA, 19 nt, Homo sapiens
  misc_RNA (1)...(19): siRNA sense strand
gagaagaggccaaagaaag

SEQ ID NO: 1543492 - RNA, 19 nt, Homo sapiens
  misc_RNA (1)...(19): siRNA sense strand
aagaaagucucacagauuc

SEQ ID NO: 1543493 - RNA, 19 nt, Homo sapiens
  misc_RNA (1)...(19): siRNA sense strand
aaagaaagucucacagauu

SEQ ID NO: 1543494 - RNA, 19 nt, Homo sapiens
  misc_RNA (1)...(19): siRNA sense strand
agaagaaggaguuuaguuu

SEQ ID NO: 1543495 - RNA, 19 nt, Homo sapiens
  misc_RNA (1)...(19): siRNA sense strand
ccaaagaaagucucacaga

SEQ ID NO: 1543496 - RNA, 19 nt, Homo sapiens
  misc_RNA (1)...(19): siRNA sense strand
gacaaggucuucuguucuc

SEQ ID NO: 1543497 - RNA, 19 nt, Homo sapiens
  misc_RNA (1)...(19): siRNA sense strand
gaguuuaguuuagaagaga

SEQ ID NO: 1543498 - RNA, 19 nt, Homo sapiens
  misc_RNA (1)...(19): siRNA sense strand
gggcagaguccuauccauu

SEQ ID NO: 1543499 - RNA, 19 nt, Homo sapiens
  misc_RNA (1)...(19): siRNA sense strand
ggcagaguccuauccauuu

SEQ ID NO: 1543500 - RNA, 19 nt, Homo sapiens
  misc_RNA (1)...(19): siRNA sense strand
agaaggaguuuaguuuaga

SEQ ID NO: 1543501 - RNA, 19 nt, Homo sapiens
  misc_RNA (1)...(19): siRNA sense strand
ugagcuggauggugugaaa

SEQ ID NO: 1543502 - RNA, 19 nt, Homo sapiens
  misc_RNA (1)...(19): siRNA sense strand
ggaguuuaguuuagaagag

SEQ ID NO: 1543503 - RNA, 19 nt, Homo sapiens
  misc_RNA (1)...(19): siRNA sense strand
cauggaagcuacauauaac

SEQ ID NO: 1543504 - RNA, 19 nt, Homo sapiens
  misc_RNA (1)...(19): siRNA sense strand
aagaaggaguuuaguuuag

SEQ ID NO: 1543505 - RNA, 19 nt, Homo sapiens
  misc_RNA (1)...(19): siRNA sense strand
cagagaagaggccaaagaa

SEQ ID NO: 1543506 - RNA, 19 nt, Homo sapiens
  misc_RNA (1)...(19): siRNA sense strand
ggaggcugcuaguccuuug

SEQ ID NO: 1543507 - RNA, 19 nt, Homo sapiens
  misc_RNA (1)...(19): siRNA sense strand
gccacaccauguuaccaua

SEQ ID NO: 1543508 - RNA, 19 nt, Homo sapiens
  misc_RNA (1)...(19): siRNA sense strand
ccagagaagaggccaaaga

SEQ ID NO: 1543509 - RNA, 19 nt, Homo sapiens
  misc_RNA (1)...(19): siRNA sense strand
agagauauauaccaacaag

SEQ ID NO: 1543510 - RNA, 19 nt, Homo sapiens
  misc_RNA (1)...(19): siRNA sense strand
uccauucccugccuuggua

SEQ ID NO: 1543511 - RNA, 19 nt, Homo sapiens
  misc_RNA (1)...(19): siRNA sense strand
gguuaaagaagaaggaguu

SEQ ID NO: 1543512 - RNA, 19 nt, Homo sapiens
  misc_RNA (1)...(19): siRNA sense strand
ccaaaagguuaaagaagaa

SEQ ID NO: 1543513 - RNA, 19 nt, Homo sapiens
  misc_RNA (1)...(19): siRNA sense strand
auaaaucuccuccugcaaa

SEQ ID NO: 1543514 - RNA, 19 nt, Homo sapiens
  misc_RNA (1)...(19): siRNA sense strand
uucgaaaucucuucucuuc

SEQ ID NO: 1543515 - RNA, 19 nt, Homo sapiens
  misc_RNA (1)...(19): siRNA sense strand
gggagggucacgugguuaa

SEQ ID NO: 1543516 - RNA, 19 nt, Homo sapiens
  misc_RNA (1)...(19): siRNA sense strand
aagcagccacaccauguua

SEQ ID NO: 1543517 - RNA, 19 nt, Homo sapiens
  misc_RNA (1)...(19): siRNA sense strand
ggcauggaagcuacauaua

SEQ ID NO: 1543518 - RNA, 19 nt, Homo sapiens
  misc_RNA (1)...(19): siRNA sense strand
cgagaagcuauccauauug

SEQ ID NO: 1543519 - RNA, 19 nt, Homo sapiens
  misc_RNA (1)...(19): siRNA sense strand
gggccuuccucgacccaaa

SEQ ID NO: 1543520 - RNA, 19 nt, Homo sapiens
  misc_RNA (1)...(19): siRNA sense strand
agaagaggccaaagaaagu

SEQ ID NO: 1543521 - RNA, 19 nt, Homo sapiens
  misc_RNA (1)...(19): siRNA sense strand
cccaaaagguuaaagaaga

SEQ ID NO: 1543522 - RNA, 19 nt, Homo sapiens
  misc_RNA (1)...(19): siRNA sense strand
uaaaucuccuccugcaaac

SEQ ID NO: 1543523 - RNA, 19 nt, Homo sapiens
  misc_RNA (1)...(19): siRNA sense strand
gaagaggccaaagaaaguc

SEQ ID NO: 1543524 - RNA, 19 nt, Homo sapiens
  misc_RNA (1)...(19): siRNA sense strand
aagaagaaggaguuuaguu

SEQ ID NO: 1543525 - RNA, 19 nt, Homo sapiens
  misc_RNA (1)...(19): siRNA sense strand
acaagcagccacaccaugu

SEQ ID NO: 1543526 - RNA, 19 nt, Homo sapiens
  misc_RNA (1)...(19): siRNA sense strand
cacaccauguuaccauaug

SEQ ID NO: 1543527 - RNA, 19 nt, Homo sapiens
  misc_RNA (1)...(19): siRNA sense strand
guagcagaaucagcuguca

SEQ ID NO: 1543528 - RNA, 19 nt, Homo sapiens
  misc_RNA (1)...(19): siRNA sense strand
gagggucacgugguuaaga

SEQ ID NO: 1543529 - RNA, 19 nt, Homo sapiens
  misc_RNA (1)...(19): siRNA sense strand
agagaagaggccaaagaaa

SEQ ID NO: 1543530 - RNA, 19 nt, Homo sapiens
  misc_RNA (1)...(19): siRNA sense strand
gagccagcaugguccuucu

SEQ ID NO: 1543531 - RNA, 19 nt, Homo sapiens
  misc_RNA (1)...(19): siRNA sense strand
gcaagcggcaaccaagucu

SEQ ID NO: 1543532 - RNA, 19 nt, Homo sapiens
  misc_RNA (1)...(19): siRNA sense strand
cagcgaaaccgggcacuuc

SEQ ID NO: 1543533 - RNA, 19 nt, Homo sapiens
  misc_RNA (1)...(19): siRNA sense strand
caagcagccacaccauguu

SEQ ID NO: 1543534 - RNA, 19 nt, Homo sapiens
  misc_RNA (1)...(19): siRNA sense strand
ccacaccauguuaccauau

SEQ ID NO: 1543535 - RNA, 19 nt, Homo sapiens
  misc_RNA (1)...(19): siRNA sense strand
ggccaaagaaagucucaca

SEQ ID NO: 1543536 - RNA, 19 nt, Homo sapiens
  misc_RNA (1)...(19): siRNA sense strand
ccagguucguggauuggau

SEQ ID NO: 1543537 - RNA, 19 nt, Homo sapiens
  misc_RNA (1)...(19): siRNA sense strand
ugucugcuccuucgaaauc

SEQ ID NO: 1543538 - RNA, 19 nt, Homo sapiens
  misc_RNA (1)...(19): siRNA sense strand
ucugucugcuccuucgaaa

SEQ ID NO: 1543539 - RNA, 19 nt, Homo sapiens
  misc_RNA (1)...(19): siRNA sense strand
gagauauauaccaacaaga

SEQ ID NO: 1543540 - RNA, 19 nt, Homo sapiens
  misc_RNA (1)...(19): siRNA sense strand
guuaaagaagaaggaguuu

SEQ ID NO: 1543541 - RNA, 19 nt, Homo sapiens
  misc_RNA (1)...(19): siRNA sense strand
ggccucacgccgucugauu

SEQ ID NO: 1543542 - RNA, 19 nt, Homo sapiens
  misc_RNA (1)...(19): siRNA sense strand
acaccauguuaccauaugu

SEQ ID NO: 1543543 - RNA, 19 nt, Homo sapiens
  misc_RNA (1)...(19): siRNA sense strand
cagcaugguccuucugucu

SEQ ID NO: 1543544 - RNA, 19 nt, Homo sapiens
  misc_RNA (1)...(19): siRNA sense strand
gcucuucaugacccaguuu

SEQ ID NO: 1543545 - RNA, 19 nt, Homo sapiens
  misc_RNA (1)...(19): siRNA sense strand
aggcauggaagcuacauau

SEQ ID NO: 1543546 - RNA, 19 nt, Homo sapiens
  misc_RNA (1)...(19): siRNA sense strand
gagagaagcccuauaaaug

SEQ ID NO: 1543547 - RNA, 19 nt, Homo sapiens
  misc_RNA (1)...(19): siRNA sense strand
ggacagaaaucccacgaau

SEQ ID NO: 1543548 - RNA, 19 nt, Homo sapiens
  misc_RNA (1)...(19): siRNA sense strand
gggacaaacucuauaaaug

SEQ ID NO: 1543549 - RNA, 19 nt, Homo sapiens
  misc_RNA (1)...(19): siRNA sense strand
ggacaaacucuauaaaugu

SEQ ID NO: 1543550 - RNA, 19 nt, Homo sapiens
  misc_RNA (1)...(19): siRNA sense strand
agagaaaccucacaaaugu

SEQ ID NO: 1543551 - RNA, 19 nt, Homo sapiens
  misc_RNA (1)...(19): siRNA sense strand
gagagaagcccuaugaaug

SEQ ID NO: 1543552 - RNA, 19 nt, Homo sapiens
  misc_RNA (1)...(19): siRNA sense strand
gagagaaaccucacaaaug

SEQ ID NO: 1543553 - RNA, 19 nt, Homo sapiens
  misc_RNA (1)...(19): siRNA sense strand
gaugaugggacucaauuua

SEQ ID NO: 1543554 - RNA, 19 nt, Homo sapiens
  misc_RNA (1)...(19): siRNA sense strand
gagaagccauccaucaaau

SEQ ID NO: 1543555 - RNA, 19 nt, Homo sapiens
  misc_RNA (1)...(19): siRNA sense strand
ggagagaagcccuauaaau

SEQ ID NO: 1543556 - RNA, 19 nt, Homo sapiens
  misc_RNA (1)...(19): siRNA sense strand
agagaaaccuuaugagugu

SEQ ID NO: 1543557 - RNA, 19 nt, Homo sapiens
  misc_RNA (1)...(19): siRNA sense strand
gaaccuggccucaguagau

SEQ ID NO: 1543558 - RNA, 19 nt, Homo sapiens
  misc_RNA (1)...(19): siRNA sense strand
gaacagacaauaccaaacu

SEQ ID NO: 1543559 - RNA, 19 nt, Homo sapiens
  misc_RNA (1)...(19): siRNA sense strand
gacaaacucuauaaaugug

SEQ ID NO: 1543560 - RNA, 19 nt, Homo sapiens
  misc_RNA (1)...(19): siRNA sense strand
ggagaagccauccaucaaa

SEQ ID NO: 1543561 - RNA, 19 nt, Homo sapiens
  misc_RNA (1)...(19): siRNA sense strand
ggagagaaaccucacaaau

SEQ ID NO: 1543562 - RNA, 19 nt, Homo sapiens
  misc_RNA (1)...(19): siRNA sense strand
gaugcacacuggagagaaa

SEQ ID NO: 1543563 - RNA, 19 nt, Homo sapiens
  misc_RNA (1)...(19): siRNA sense strand
caucaaaugccagaucuua

SEQ ID NO: 1543564 - RNA, 19 nt, Homo sapiens
  misc_RNA (1)...(19): siRNA sense strand
gagaagcccuauaaauguc

SEQ ID NO: 1543565 - RNA, 19 nt, Homo sapiens
  misc_RNA (1)...(19): siRNA sense strand
gccaagucauucuuucuaa

SEQ ID NO: 1543566 - RNA, 19 nt, Homo sapiens
  misc_RNA (1)...(19): siRNA sense strand
ccauaaaugugaacacugu

SEQ ID NO: 1543567 - RNA, 19 nt, Homo sapiens
  misc_RNA (1)...(19): siRNA sense strand
gagaacaugugagaauuca

SEQ ID NO: 1543568 - RNA, 19 nt, Homo sapiens
  misc_RNA (1)...(19): siRNA sense strand
gagaacaugugagaauuca

SEQ ID NO: 1543569 - RNA, 19 nt, Homo sapiens
  misc_RNA (1)...(19): siRNA sense strand
gaaccgacacugaggagaa

SEQ ID NO: 1543570 - RNA, 19 nt, Homo sapiens
  misc_RNA (1)...(19): siRNA sense strand
ggagagaagcccuaugaau

SEQ ID NO: 1543571 - RNA, 19 nt, Homo sapiens
  misc_RNA (1)...(19): siRNA sense strand
ugaugggacucaauuuaaa

SEQ ID NO: 1543572 - RNA, 19 nt, Homo sapiens
  misc_RNA (1)...(19): siRNA sense strand
gcaucuuucuucucuuaaa

SEQ ID NO: 1543573 - RNA, 19 nt, Homo sapiens
  misc_RNA (1)...(19): siRNA sense strand
guacacauaaugaagguaa

SEQ ID NO: 1543574 - RNA, 19 nt, Homo sapiens
  misc_RNA (1)...(19): siRNA sense strand
gggagagccuucauuuauc

SEQ ID NO: 1543575 - RNA, 19 nt, Homo sapiens
  misc_RNA (1)...(19): siRNA sense strand
ccaagucauucuuucuaaa

SEQ ID NO: 1543576 - RNA, 19 nt, Homo sapiens
  misc_RNA (1)...(19): siRNA sense strand
gggcaaacuuuccaacauc

SEQ ID NO: 1543577 - RNA, 19 nt, Homo sapiens
  misc_RNA (1)...(19): siRNA sense strand
gggaaggccuuuaccucuu

SEQ ID NO: 1543578 - RNA, 19 nt, Homo sapiens
  misc_RNA (1)...(19): siRNA sense strand
ggagagaaaccuuaugagu

SEQ ID NO: 1543579 - RNA, 19 nt, Homo sapiens
  misc_RNA (1)...(19): siRNA sense strand
ccauauaaaugucaggaau

SEQ ID NO: 1543580 - RNA, 19 nt, Homo sapiens
  misc_RNA (1)...(19): siRNA sense strand
acgcaucuuucuucucuua

SEQ ID NO: 1543581 - RNA, 19 nt, Homo sapiens
  misc_RNA (1)...(19): siRNA sense strand
gaaugucagucauacucaa

SEQ ID NO: 1543582 - RNA, 19 nt, Homo sapiens
  misc_RNA (1)...(19): siRNA sense strand
agagaagccuuaugagugu

SEQ ID NO: 1543583 - RNA, 19 nt, Homo sapiens
  misc_RNA (1)...(19): siRNA sense strand
agagaagccuuaugagugu

SEQ ID NO: 1543584 - RNA, 19 nt, Homo sapiens
  misc_RNA (1)...(19): siRNA sense strand
guauaagugucaagcaugu

SEQ ID NO: 1543585 - RNA, 19 nt, Homo sapiens
  misc_RNA (1)...(19): siRNA sense strand
ggauguggcuguggacuuc

SEQ ID NO: 1543586 - RNA, 19 nt, Homo sapiens
  misc_RNA (1)...(19): siRNA sense strand
ggagugggcuuugcuggau

SEQ ID NO: 1543587 - RNA, 19 nt, Homo sapiens
  misc_RNA (1)...(19): siRNA sense strand
ggagaagccguauaagugu

SEQ ID NO: 1543588 - RNA, 19 nt, Homo sapiens
  misc_RNA (1)...(19): siRNA sense strand
ggagagaagccuuaugagu

SEQ ID NO: 1543589 - RNA, 19 nt, Homo sapiens
  misc_RNA (1)...(19): siRNA sense strand
ggagagaagccuuaugagu

SEQ ID NO: 1543590 - RNA, 19 nt, Homo sapiens
  misc_RNA (1)...(19): siRNA sense strand
gggaaagccuucacuuggu

SEQ ID NO: 1543591 - RNA, 19 nt, Homo sapiens
  misc_RNA (1)...(19): siRNA sense strand
aaagacaggccauauaaau

SEQ ID NO: 1543592 - RNA, 19 nt, Homo sapiens
  misc_RNA (1)...(19): siRNA sense strand
ucacgcaucuuucuucucu

SEQ ID NO: 1543593 - RNA, 19 nt, Homo sapiens
  misc_RNA (1)...(19): siRNA sense strand
acagaaaucccacgaaugu

SEQ ID NO: 1543594 - RNA, 19 nt, Homo sapiens
  misc_RNA (1)...(19): siRNA sense strand
ccucacaaauguaaacaau

SEQ ID NO: 1543595 - RNA, 19 nt, Homo sapiens
  misc_RNA (1)...(19): siRNA sense strand
cuauaaaugugaacacugu

SEQ ID NO: 1543596 - RNA, 19 nt, Homo sapiens
  misc_RNA (1)...(19): siRNA sense strand
caaaagacaggccauauaa

SEQ ID NO: 1543597 - RNA, 19 nt, Homo sapiens
  misc_RNA (1)...(19): siRNA sense strand
auaccaaacuucacaggaa

SEQ ID NO: 1543598 - RNA, 19 nt, Homo sapiens
  misc_RNA (1)...(19): siRNA sense strand
uagagaacaugugagaauu

SEQ ID NO: 1543599 - RNA, 19 nt, Homo sapiens
  misc_RNA (1)...(19): siRNA sense strand
uagagaacaugugagaauu

SEQ ID NO: 1543600 - RNA, 19 nt, Homo sapiens
  misc_RNA (1)...(19): siRNA sense strand
aaagacacaugacaacaca

SEQ ID NO: 1543601 - RNA, 19 nt, Homo sapiens
  misc_RNA (1)...(19): siRNA sense strand
gugggaaagccuucacuua

SEQ ID NO: 1543602 - RNA, 19 nt, Homo sapiens
  misc_RNA (1)...(19): siRNA sense strand
gaggagaagccguauaagu

SEQ ID NO: 1543603 - RNA, 19 nt, Homo sapiens
  misc_RNA (1)...(19): siRNA sense strand
gacgcacacuggagagaaa

SEQ ID NO: 1543604 - RNA, 19 nt, Homo sapiens
  misc_RNA (1)...(19): siRNA sense strand
ugggagagccuucauuuau

SEQ ID NO: 1543605 - RNA, 19 nt, Homo sapiens
  misc_RNA (1)...(19): siRNA sense strand
agaaaccucacaaauguaa

SEQ ID NO: 1543606 - RNA, 19 nt, Homo sapiens
  misc_RNA (1)...(19): siRNA sense strand
gagaaaccucacaaaugua

SEQ ID NO: 1543607 - RNA, 19 nt, Homo sapiens
  misc_RNA (1)...(19): siRNA sense strand
ucaguuagucugcaggaua

SEQ ID NO: 1543608 - RNA, 19 nt, Homo sapiens
  misc_RNA (1)...(19): siRNA sense strand
gagaaaccuuaugagugua

SEQ ID NO: 1543609 - RNA, 19 nt, Homo sapiens
  misc_RNA (1)...(19): siRNA sense strand
uaccaaacuucacaggaaa

SEQ ID NO: 1543610 - RNA, 19 nt, Homo sapiens
  misc_RNA (1)...(19): siRNA sense strand
ucauuuaucccucgacauu

SEQ ID NO: 1543611 - RNA, 19 nt, Homo sapiens
  misc_RNA (1)...(19): siRNA sense strand
caguuagucugcaggauau

SEQ ID NO: 1543612 - RNA, 19 nt, Homo sapiens
  misc_RNA (1)...(19): siRNA sense strand
gcacugaagaccaccacaa

SEQ ID NO: 1543613 - RNA, 19 nt, Homo sapiens
  misc_RNA (1)...(19): siRNA sense strand
agagaagcccuauaaaugu

SEQ ID NO: 1543614 - RNA, 19 nt, Homo sapiens
  misc_RNA (1)...(19): siRNA sense strand
ugaaggcuauggcacugaa

SEQ ID NO: 1543615 - RNA, 19 nt, Homo sapiens
  misc_RNA (1)...(19): siRNA sense strand
gagaagccuuaugagugua

SEQ ID NO: 1543616 - RNA, 19 nt, Homo sapiens
  misc_RNA (1)...(19): siRNA sense strand
gagaagccuuaugagugua

SEQ ID NO: 1543617 - RNA, 19 nt, Homo sapiens
  misc_RNA (1)...(19): siRNA sense strand
gcagcucuauaaaugugaa

SEQ ID NO: 1543618 - RNA, 19 nt, Homo sapiens
  misc_RNA (1)...(19): siRNA sense strand
gauauguacgggcaagaaa

SEQ ID NO: 1543619 - RNA, 19 nt, Homo sapiens
  misc_RNA (1)...(19): siRNA sense strand
ggagagccuucauuuaucc

SEQ ID NO: 1543620 - RNA, 19 nt, Homo sapiens
  misc_RNA (1)...(19): siRNA sense strand
agacaggccauauaaaugu

SEQ ID NO: 1543621 - RNA, 19 nt, Homo sapiens
  misc_RNA (1)...(19): siRNA sense strand
ccucacaccuacacaguca

SEQ ID NO: 1543622 - RNA, 19 nt, Homo sapiens
  misc_RNA (1)...(19): siRNA sense strand
ggacagucuucacgcaucu

SEQ ID NO: 1543623 - RNA, 19 nt, Homo sapiens
  misc_RNA (1)...(19): siRNA sense strand
aaaggcacgucaagucuca

SEQ ID NO: 1543624 - RNA, 19 nt, Homo sapiens
  misc_RNA (1)...(19): siRNA sense strand
ccacgaaugucagucauac

SEQ ID NO: 1543625 - RNA, 19 nt, Homo sapiens
  misc_RNA (1)...(19): siRNA sense strand
gaaaccuuaugaguguaaa

SEQ ID NO: 1543626 - RNA, 19 nt, Homo sapiens
  misc_RNA (1)...(19): siRNA sense strand
gagaagcccuaugaaugca

SEQ ID NO: 1543627 - RNA, 19 nt, Homo sapiens
  misc_RNA (1)...(19): siRNA sense strand
gguccucaaccuuacauaa

SEQ ID NO: 1543628 - RNA, 19 nt, Homo sapiens
  misc_RNA (1)...(19): siRNA sense strand
gaugcacacuggagagaag

SEQ ID NO: 1543629 - RNA, 19 nt, Homo sapiens
  misc_RNA (1)...(19): siRNA sense strand
ugaagguaaucaauaugga

SEQ ID NO: 1543630 - RNA, 19 nt, Homo sapiens
  misc_RNA (1)...(19): siRNA sense strand
ccaaacuucacaggaaaua

SEQ ID NO: 1543631 - RNA, 19 nt, Homo sapiens
  misc_RNA (1)...(19): siRNA sense strand
gcagcuccauaaaugugaa

SEQ ID NO: 1543632 - RNA, 19 nt, Homo sapiens
  misc_RNA (1)...(19): siRNA sense strand
caacacacacuggagagaa

SEQ ID NO: 1543633 - RNA, 19 nt, Homo sapiens
  misc_RNA (1)...(19): siRNA sense strand
gacaauaccaaacuucaca

SEQ ID NO: 1543634 - RNA, 19 nt, Homo sapiens
  misc_RNA (1)...(19): siRNA sense strand
ccauaugaaugcaccaagu

SEQ ID NO: 1543635 - RNA, 19 nt, Homo sapiens
  misc_RNA (1)...(19): siRNA sense strand
gcacgucaagucucacugu

SEQ ID NO: 1543636 - RNA, 19 nt, Homo sapiens
  misc_RNA (1)...(19): siRNA sense strand
ccucaaccuuacauaauca

SEQ ID NO: 1543637 - RNA, 19 nt, Homo sapiens
  misc_RNA (1)...(19): siRNA sense strand
cuggagagaagcccuauaa

SEQ ID NO: 1543638 - RNA, 19 nt, Homo sapiens
  misc_RNA (1)...(19): siRNA sense strand
gugggagagccuucauuua

SEQ ID NO: 1543639 - RNA, 19 nt, Homo sapiens
  misc_RNA (1)...(19): siRNA sense strand
cugaggagaagccguauaa

SEQ ID NO: 1543640 - RNA, 19 nt, Homo sapiens
  misc_RNA (1)...(19): siRNA sense strand
cgggagagaagcccuauga

SEQ ID NO: 1543641 - RNA, 19 nt, Homo sapiens
  misc_RNA (1)...(19): siRNA sense strand
acacuggagagaaaccuua

SEQ ID NO: 1543642 - RNA, 19 nt, Homo sapiens
  misc_RNA (1)...(19): siRNA sense strand
agaaaucccacgaauguca

SEQ ID NO: 1543643 - RNA, 19 nt, Homo sapiens
  misc_RNA (1)...(19): siRNA sense strand
uaaagccaaugggucaguu

SEQ ID NO: 1543644 - RNA, 19 nt, Homo sapiens
  misc_RNA (1)...(19): siRNA sense strand
uuagagaacaugugagaau

SEQ ID NO: 1543645 - RNA, 19 nt, Homo sapiens
  misc_RNA (1)...(19): siRNA sense strand
uuagagaacaugugagaau

SEQ ID NO: 1543646 - RNA, 19 nt, Homo sapiens
  misc_RNA (1)...(19): siRNA sense strand
ggaagagacugcaaagaaa

SEQ ID NO: 1543647 - RNA, 19 nt, Homo sapiens
  misc_RNA (1)...(19): siRNA sense strand
ccaagaagcuucagaguuc

SEQ ID NO: 1543648 - RNA, 19 nt, Homo sapiens
  misc_RNA (1)...(19): siRNA sense strand
gaagauaggccguggauau

SEQ ID NO: 1543649 - RNA, 19 nt, Homo sapiens
  misc_RNA (1)...(19): siRNA sense strand
gagaacacaucauccauau

SEQ ID NO: 1543650 - RNA, 19 nt, Homo sapiens
  misc_RNA (1)...(19): siRNA sense strand
gcagaccacucucaaauca

SEQ ID NO: 1543651 - RNA, 19 nt, Homo sapiens
  misc_RNA (1)...(19): siRNA sense strand
gcaaggacauugaggacaa

SEQ ID NO: 1543652 - RNA, 19 nt, Homo sapiens
  misc_RNA (1)...(19): siRNA sense strand
gaagaaccucuguauauga

SEQ ID NO: 1543653 - RNA, 19 nt, Homo sapiens
  misc_RNA (1)...(19): siRNA sense strand
gaagcaagagcaccauuaa

SEQ ID NO: 1543654 - RNA, 19 nt, Homo sapiens
  misc_RNA (1)...(19): siRNA sense strand
gauccagucugugaagaua

SEQ ID NO: 1543655 - RNA, 19 nt, Homo sapiens
  misc_RNA (1)...(19): siRNA sense strand
gcacauaugaugaugagaa

SEQ ID NO: 1543656 - RNA, 19 nt, Homo sapiens
  misc_RNA (1)...(19): siRNA sense strand
gggaagagacugcaaagaa

SEQ ID NO: 1543657 - RNA, 19 nt, Homo sapiens
  misc_RNA (1)...(19): siRNA sense strand
ugaagagcaucaaguauau

SEQ ID NO: 1543658 - RNA, 19 nt, Homo sapiens
  misc_RNA (1)...(19): siRNA sense strand
ggaagcaagagcaccauua

SEQ ID NO: 1543659 - RNA, 19 nt, Homo sapiens
  misc_RNA (1)...(19): siRNA sense strand
ucaaguauauggacaagga

SEQ ID NO: 1543660 - RNA, 19 nt, Homo sapiens
  misc_RNA (1)...(19): siRNA sense strand
gaaagaggaggaaagaaau

SEQ ID NO: 1543661 - RNA, 19 nt, Homo sapiens
  misc_RNA (1)...(19): siRNA sense strand
gaacacaucauccauaugc

SEQ ID NO: 1543662 - RNA, 19 nt, Homo sapiens
  misc_RNA (1)...(19): siRNA sense strand
caucacauaucuguaguaa

SEQ ID NO: 1543663 - RNA, 19 nt, Homo sapiens
  misc_RNA (1)...(19): siRNA sense strand
ggaggacagucacaauaga

SEQ ID NO: 1543664 - RNA, 19 nt, Homo sapiens
  misc_RNA (1)...(19): siRNA sense strand
cggcgaggcuccacacuaa

SEQ ID NO: 1543665 - RNA, 19 nt, Homo sapiens
  misc_RNA (1)...(19): siRNA sense strand
cagaggaucuaaagaacuu

SEQ ID NO: 1543666 - RNA, 19 nt, Homo sapiens
  misc_RNA (1)...(19): siRNA sense strand
ugacaucgcuguggcuauu

SEQ ID NO: 1543667 - RNA, 19 nt, Homo sapiens
  misc_RNA (1)...(19): siRNA sense strand
caaugaagagcaucaagua

SEQ ID NO: 1543668 - RNA, 19 nt, Homo sapiens
  misc_RNA (1)...(19): siRNA sense strand
ugaagaaccucuguauaug

SEQ ID NO: 1543669 - RNA, 19 nt, Homo sapiens
  misc_RNA (1)...(19): siRNA sense strand
ugaaagaggaggaaagaaa

SEQ ID NO: 1543670 - RNA, 19 nt, Homo sapiens
  misc_RNA (1)...(19): siRNA sense strand
gaugaagaaccucuguaua

SEQ ID NO: 1543671 - RNA, 19 nt, Homo sapiens
  misc_RNA (1)...(19): siRNA sense strand
gaaccucuguauaugaauc

SEQ ID NO: 1543672 - RNA, 19 nt, Homo sapiens
  misc_RNA (1)...(19): siRNA sense strand
caagaguaauucugcuuau

SEQ ID NO: 1543673 - RNA, 19 nt, Homo sapiens
  misc_RNA (1)...(19): siRNA sense strand
gcaacaacaacuucagaaa

SEQ ID NO: 1543674 - RNA, 19 nt, Homo sapiens
  misc_RNA (1)...(19): siRNA sense strand
caaccaagccagaugaaga

SEQ ID NO: 1543675 - RNA, 19 nt, Homo sapiens
  misc_RNA (1)...(19): siRNA sense strand
gagcacauaugaugaugag

SEQ ID NO: 1543676 - RNA, 19 nt, Homo sapiens
  misc_RNA (1)...(19): siRNA sense strand
agugagagauccagcagua

SEQ ID NO: 1543677 - RNA, 19 nt, Homo sapiens
  misc_RNA (1)...(19): siRNA sense strand
aaaaggagaugcagaagaa

SEQ ID NO: 1543678 - RNA, 19 nt, Homo sapiens
  misc_RNA (1)...(19): siRNA sense strand
cgagaacacaucauccaua

SEQ ID NO: 1543679 - RNA, 19 nt, Homo sapiens
  misc_RNA (1)...(19): siRNA sense strand
agagagguauccagaaguu

SEQ ID NO: 1543680 - RNA, 19 nt, Homo sapiens
  misc_RNA (1)...(19): siRNA sense strand
gaaaagaucucagaaaucc

SEQ ID NO: 1543681 - RNA, 19 nt, Homo sapiens
  misc_RNA (1)...(19): siRNA sense strand
guaauucugcuuauaagga

SEQ ID NO: 1543682 - RNA, 19 nt, Homo sapiens
  misc_RNA (1)...(19): siRNA sense strand
gaaaaugggaugcaaagaa

SEQ ID NO: 1543683 - RNA, 19 nt, Homo sapiens
  misc_RNA (1)...(19): siRNA sense strand
aagaaccucuguauaugaa

SEQ ID NO: 1543684 - RNA, 19 nt, Homo sapiens
  misc_RNA (1)...(19): siRNA sense strand
ggaggaaagaaauaaauuc

SEQ ID NO: 1543685 - RNA, 19 nt, Homo sapiens
  misc_RNA (1)...(19): siRNA sense strand
gaaaugcagaccacucuca

SEQ ID NO: 1543686 - RNA, 19 nt, Homo sapiens
  misc_RNA (1)...(19): siRNA sense strand
ggagaugguucgggaagau

SEQ ID NO: 1543687 - RNA, 19 nt, Homo sapiens
  misc_RNA (1)...(19): siRNA sense strand
ucucagaaauccacuaugg

SEQ ID NO: 1543688 - RNA, 19 nt, Homo sapiens
  misc_RNA (1)...(19): siRNA sense strand
uaaggcaggucccagacaa

SEQ ID NO: 1543689 - RNA, 19 nt, Homo sapiens
  misc_RNA (1)...(19): siRNA sense strand
guauauggacaaggaaaua

SEQ ID NO: 1543690 - RNA, 19 nt, Homo sapiens
  misc_RNA (1)...(19): siRNA sense strand
gcagagccggaucaacaua

SEQ ID NO: 1543691 - RNA, 19 nt, Homo sapiens
  misc_RNA (1)...(19): siRNA sense strand
gaguaauucugcuuauaag

SEQ ID NO: 1543692 - RNA, 19 nt, Homo sapiens
  misc_RNA (1)...(19): siRNA sense strand
auccacagcugcaucauuu

SEQ ID NO: 1543693 - RNA, 19 nt, Homo sapiens
  misc_RNA (1)...(19): siRNA sense strand
ggacaaggaaauaauaaac

SEQ ID NO: 1543694 - RNA, 19 nt, Homo sapiens
  misc_RNA (1)...(19): siRNA sense strand
gauaggccguggauauuuu

SEQ ID NO: 1543695 - RNA, 19 nt, Homo sapiens
  misc_RNA (1)...(19): siRNA sense strand
aaugagacaucacauaucu

SEQ ID NO: 1543696 - RNA, 19 nt, Homo sapiens
  misc_RNA (1)...(19): siRNA sense strand
caacauccacuacaagagu

SEQ ID NO: 1543697 - RNA, 19 nt, Homo sapiens
  misc_RNA (1)...(19): siRNA sense strand
aaaaugggaugcaaagaaa

SEQ ID NO: 1543698 - RNA, 19 nt, Homo sapiens
  misc_RNA (1)...(19): siRNA sense strand
uggaggcccugacuauuga

SEQ ID NO: 1543699 - RNA, 19 nt, Homo sapiens
  misc_RNA (1)...(19): siRNA sense strand
aaagaggaggaaagaaaua

SEQ ID NO: 1543700 - RNA, 19 nt, Homo sapiens
  misc_RNA (1)...(19): siRNA sense strand
gaggaggaaagaaauaaau

SEQ ID NO: 1543701 - RNA, 19 nt, Homo sapiens
  misc_RNA (1)...(19): siRNA sense strand
gcacuaauugugacaucaa

SEQ ID NO: 1543702 - RNA, 19 nt, Homo sapiens
  misc_RNA (1)...(19): siRNA sense strand
gcagcaugaucucugugaa

SEQ ID NO: 1543703 - RNA, 19 nt, Homo sapiens
  misc_RNA (1)...(19): siRNA sense strand
cauaugaugaugagaaguu

SEQ ID NO: 1543704 - RNA, 19 nt, Homo sapiens
  misc_RNA (1)...(19): siRNA sense strand
gaacugugcuccccugaca

SEQ ID NO: 1543705 - RNA, 19 nt, Homo sapiens
  misc_RNA (1)...(19): siRNA sense strand
augaagagcaucaaguaua

SEQ ID NO: 1543706 - RNA, 19 nt, Homo sapiens
  misc_RNA (1)...(19): siRNA sense strand
caacaacaacuucagaaac

SEQ ID NO: 1543707 - RNA, 19 nt, Homo sapiens
  misc_RNA (1)...(19): siRNA sense strand
ugaaggugcugcaggaucu

SEQ ID NO: 1543708 - RNA, 19 nt, Homo sapiens
  misc_RNA (1)...(19): siRNA sense strand
agagagagguauccagaag

SEQ ID NO: 1543709 - RNA, 19 nt, Homo sapiens
  misc_RNA (1)...(19): siRNA sense strand
acaagaguaauucugcuua

SEQ ID NO: 1543710 - RNA, 19 nt, Homo sapiens
  misc_RNA (1)...(19): siRNA sense strand
gaggacagucacaauagaa

SEQ ID NO: 1543711 - RNA, 19 nt, Homo sapiens
  misc_RNA (1)...(19): siRNA sense strand
augaagaaccucuguauau

SEQ ID NO: 1543712 - RNA, 19 nt, Homo sapiens
  misc_RNA (1)...(19): siRNA sense strand
cgccaaagaccaaggaauu

SEQ ID NO: 1543713 - RNA, 19 nt, Homo sapiens
  misc_RNA (1)...(19): siRNA sense strand
gaucucagaaauccacuau

SEQ ID NO: 1543714 - RNA, 19 nt, Homo sapiens
  misc_RNA (1)...(19): siRNA sense strand
cugcagaaguuuggagaaa

SEQ ID NO: 1543715 - RNA, 19 nt, Homo sapiens
  misc_RNA (1)...(19): siRNA sense strand
agauggaaauccucaugaa

SEQ ID NO: 1543716 - RNA, 19 nt, Homo sapiens
  misc_RNA (1)...(19): siRNA sense strand
ucacagcgccaaagaccaa

SEQ ID NO: 1543717 - RNA, 19 nt, Homo sapiens
  misc_RNA (1)...(19): siRNA sense strand
aacaacaacuucagaaacu

SEQ ID NO: 1543718 - RNA, 19 nt, Homo sapiens
  misc_RNA (1)...(19): siRNA sense strand
caagauggaaauccucaug

SEQ ID NO: 1543719 - RNA, 19 nt, Homo sapiens
  misc_RNA (1)...(19): siRNA sense strand
ccagacaagccaaugaaga

SEQ ID NO: 1543720 - RNA, 19 nt, Homo sapiens
  misc_RNA (1)...(19): siRNA sense strand
ccgaaaagaucucagaaau

SEQ ID NO: 1543721 - RNA, 19 nt, Homo sapiens
  misc_RNA (1)...(19): siRNA sense strand
agacaucacauaucuguag

SEQ ID NO: 1543722 - RNA, 19 nt, Homo sapiens
  misc_RNA (1)...(19): siRNA sense strand
agaccacucucaaaucaag

SEQ ID NO: 1543723 - RNA, 19 nt, Homo sapiens
  misc_RNA (1)...(19): siRNA sense strand
gaagagacugcaaagaaaa

SEQ ID NO: 1543724 - RNA, 19 nt, Homo sapiens
  misc_RNA (1)...(19): siRNA sense strand
ggagaugcagaagaaauug

SEQ ID NO: 1543725 - RNA, 19 nt, Homo sapiens
  misc_RNA (1)...(19): siRNA sense strand
caaagaccaaggaauucaa

SEQ ID NO: 1543726 - RNA, 19 nt, Homo sapiens
  misc_RNA (1)...(19): siRNA sense strand
gccagaggaucuaaagaac

SEQ ID NO: 1543727 - RNA, 19 nt, Homo sapiens
  misc_RNA (1)...(19): siRNA sense strand
ugagacaucacauaucugu

SEQ ID NO: 1543728 - RNA, 19 nt, Homo sapiens
  misc_RNA (1)...(19): siRNA sense strand
ucaugaagcgccaagaaga

SEQ ID NO: 1543729 - RNA, 19 nt, Homo sapiens
  misc_RNA (1)...(19): siRNA sense strand
ccggaggacagucacaaua

SEQ ID NO: 1543730 - RNA, 19 nt, Homo sapiens
  misc_RNA (1)...(19): siRNA sense strand
gaagacacugggagcuaga

SEQ ID NO: 1543731 - RNA, 19 nt, Homo sapiens
  misc_RNA (1)...(19): siRNA sense strand
ugcaggaucugaggauuug

SEQ ID NO: 1543732 - RNA, 19 nt, Homo sapiens
  misc_RNA (1)...(19): siRNA sense strand
ccaaagaccaaggaauuca

SEQ ID NO: 1543733 - RNA, 19 nt, Homo sapiens
  misc_RNA (1)...(19): siRNA sense strand
ccaaaggacccggguggaa

SEQ ID NO: 1543734 - RNA, 19 nt, Homo sapiens
  misc_RNA (1)...(19): siRNA sense strand
cgcuguggcuauugaguuu

SEQ ID NO: 1543735 - RNA, 19 nt, Homo sapiens
  misc_RNA (1)...(19): siRNA sense strand
ggaucaacauacccauugg

SEQ ID NO: 1543736 - RNA, 19 nt, Homo sapiens
  misc_RNA (1)...(19): siRNA sense strand
guauaugaaucugcagaag

SEQ ID NO: 1543737 - RNA, 19 nt, Homo sapiens
  misc_RNA (1)...(19): siRNA sense strand
cugcagagccggaucaaca

SEQ ID NO: 1543738 - RNA, 19 nt, Homo sapiens
  misc_RNA (1)...(19): siRNA sense strand
gagagauccagcaguacaa

SEQ ID NO: 1543739 - RNA, 19 nt, Homo sapiens
  misc_RNA (1)...(19): siRNA sense strand
gaagagcaucaaguauaug

SEQ ID NO: 1543740 - RNA, 19 nt, Homo sapiens
  misc_RNA (1)...(19): siRNA sense strand
aaagaagcaacaacaacuu

SEQ ID NO: 1543741 - RNA, 19 nt, Homo sapiens
  misc_RNA (1)...(19): siRNA sense strand
aaccuggacuugcggauuc

SEQ ID NO: 1543742 - RNA, 19 nt, Homo sapiens
  misc_RNA (1)...(19): siRNA sense strand
ccaaugaagagcaucaagu

SEQ ID NO: 1543743 - RNA, 19 nt, Homo sapiens
  misc_RNA (1)...(19): siRNA sense strand
gaagcgccaagaagagaga

SEQ ID NO: 1543744 - RNA, 19 nt, Homo sapiens
  misc_RNA (1)...(19): siRNA sense strand
acaucaacauccacuacaa

SEQ ID NO: 1543745 - RNA, 19 nt, Homo sapiens
  misc_RNA (1)...(19): siRNA sense strand
gaaacugaaagaggaggaa

SEQ ID NO: 1543746 - RNA, 19 nt, Homo sapiens
  misc_RNA (1)...(19): siRNA sense strand
gaacaugaccuacuucuca

SEQ ID NO: 1543747 - RNA, 19 nt, Homo sapiens
  misc_RNA (1)...(19): siRNA sense strand
ggaggaacaugaccuacuu

SEQ ID NO: 1543748 - RNA, 19 nt, Homo sapiens
  misc_RNA (1)...(19): siRNA sense strand
ucaccuaccugcugcucua

SEQ ID NO: 1543749 - RNA, 19 nt, Homo sapiens
  misc_RNA (1)...(19): siRNA sense strand
ccaccaggcucaucgugaa

SEQ ID NO: 1543750 - RNA, 19 nt, Homo sapiens
  misc_RNA (1)...(19): siRNA sense strand
ccaugagcuucuuggauaa

SEQ ID NO: 1543751 - RNA, 19 nt, Homo sapiens
  misc_RNA (1)...(19): siRNA sense strand
ccaaugggcuggcagucau

SEQ ID NO: 1543752 - RNA, 19 nt, Homo sapiens
  misc_RNA (1)...(19): siRNA sense strand
gcacucagguaugcguuca

SEQ ID NO: 1543753 - RNA, 19 nt, Homo sapiens
  misc_RNA (1)...(19): siRNA sense strand
ucaugaagcccaucaacaa

SEQ ID NO: 1543754 - RNA, 19 nt, Homo sapiens
  misc_RNA (1)...(19): siRNA sense strand
uggauaagguggccaaugg

SEQ ID NO: 1543755 - RNA, 19 nt, Homo sapiens
  misc_RNA (1)...(19): siRNA sense strand
ccauguaccucaccuacuc

SEQ ID NO: 1543756 - RNA, 19 nt, Homo sapiens
  misc_RNA (1)...(19): siRNA sense strand
ugaagcccaucaacaagug

SEQ ID NO: 1543757 - RNA, 19 nt, Homo sapiens
  misc_RNA (1)...(19): siRNA sense strand
ucccggagcucgucaccaa

SEQ ID NO: 1543758 - RNA, 19 nt, Homo sapiens
  misc_RNA (1)...(19): siRNA sense strand
caucgugaucuuccaguuu

SEQ ID NO: 1543759 - RNA, 19 nt, Homo sapiens
  misc_RNA (1)...(19): siRNA sense strand
gcucacggcacucagguau

SEQ ID NO: 1543760 - RNA, 19 nt, Homo sapiens
  misc_RNA (1)...(19): siRNA sense strand
guaccucagcggcuucuug

SEQ ID NO: 1543761 - RNA, 19 nt, Homo sapiens
  misc_RNA (1)...(19): siRNA sense strand
ucacggcacucagguaugc

SEQ ID NO: 1543762 - RNA, 19 nt, Homo sapiens
  misc_RNA (1)...(19): siRNA sense strand
cagcggagcguucguguac

SEQ ID NO: 1543763 - RNA, 19 nt, Homo sapiens
  misc_RNA (1)...(19): siRNA sense strand
acaagugcauugggaggaa

SEQ ID NO: 1543764 - RNA, 19 nt, Homo sapiens
  misc_RNA (1)...(19): siRNA sense strand
gaaguucaucgcgaccauu

SEQ ID NO: 1543765 - RNA, 19 nt, Homo sapiens
  misc_RNA (1)...(19): siRNA sense strand
gccguguucucacugcuau

SEQ ID NO: 1543766 - RNA, 19 nt, Homo sapiens
  misc_RNA (1)...(19): siRNA sense strand
gacuggguguggccgugua

SEQ ID NO: 1543767 - RNA, 19 nt, Homo sapiens
  misc_RNA (1)...(19): siRNA sense strand
ccaacgaccaugagaaggu

SEQ ID NO: 1543768 - RNA, 19 nt, Homo sapiens
  misc_RNA (1)...(19): siRNA sense strand
ucaccucgcuggccaugac

SEQ ID NO: 1543769 - RNA, 19 nt, Homo sapiens
  misc_RNA (1)...(19): siRNA sense strand
uggccaacaucaccgucua

SEQ ID NO: 1543770 - RNA, 19 nt, Homo sapiens
  misc_RNA (1)...(19): siRNA sense strand
gugggcauacuguacauga

SEQ ID NO: 1543771 - RNA, 19 nt, Homo sapiens
  misc_RNA (1)...(19): siRNA sense strand
gcugcccugugucucugua

SEQ ID NO: 1543772 - RNA, 19 nt, Homo sapiens
  misc_RNA (1)...(19): siRNA sense strand
ucaccaacgaccaugagaa

SEQ ID NO: 1543773 - RNA, 19 nt, Homo sapiens
  misc_RNA (1)...(19): siRNA sense strand
ucaucgugaucuuccaguu

SEQ ID NO: 1543774 - RNA, 19 nt, Homo sapiens
  misc_RNA (1)...(19): siRNA sense strand
caccaacgaccaugagaag

SEQ ID NO: 1543775 - RNA, 19 nt, Homo sapiens
  misc_RNA (1)...(19): siRNA sense strand
aucgugaucuuccaguuug

SEQ ID NO: 1543776 - RNA, 19 nt, Homo sapiens
  misc_RNA (1)...(19): siRNA sense strand
gaccugugcgcguccaugu

SEQ ID NO: 1543777 - RNA, 19 nt, Homo sapiens
  misc_RNA (1)...(19): siRNA sense strand
gcccguucaucgugaucuu

SEQ ID NO: 1543778 - RNA, 19 nt, Homo sapiens
  misc_RNA (1)...(19): siRNA sense strand
gauaauaccuuucugauga

SEQ ID NO: 1543779 - RNA, 19 nt, Homo sapiens
  misc_RNA (1)...(19): siRNA sense strand
gagaauggguuuccaauaa

SEQ ID NO: 1543780 - RNA, 19 nt, Homo sapiens
  misc_RNA (1)...(19): siRNA sense strand
ugaauuaccuccugcauuu

SEQ ID NO: 1543781 - RNA, 19 nt, Homo sapiens
  misc_RNA (1)...(19): siRNA sense strand
ccaaaugccugccagauaa

SEQ ID NO: 1543782 - RNA, 19 nt, Homo sapiens
  misc_RNA (1)...(19): siRNA sense strand
gggaagggcuccauuuauu

SEQ ID NO: 1543783 - RNA, 19 nt, Homo sapiens
  misc_RNA (1)...(19): siRNA sense strand
gcauugagcuggaucuaaa

SEQ ID NO: 1543784 - RNA, 19 nt, Homo sapiens
  misc_RNA (1)...(19): siRNA sense strand
gaaagagucuccaaaauga

SEQ ID NO: 1543785 - RNA, 19 nt, Homo sapiens
  misc_RNA (1)...(19): siRNA sense strand
gguggaauaugccgucuua

SEQ ID NO: 1543786 - RNA, 19 nt, Homo sapiens
  misc_RNA (1)...(19): siRNA sense strand
ggaagggcuccauuuauua

SEQ ID NO: 1543787 - RNA, 19 nt, Homo sapiens
  misc_RNA (1)...(19): siRNA sense strand
gaugaugugucuggaaaua

SEQ ID NO: 1543788 - RNA, 19 nt, Homo sapiens
  misc_RNA (1)...(19): siRNA sense strand
ugacaaagcuucacuucug

SEQ ID NO: 1543789 - RNA, 19 nt, Homo sapiens
  misc_RNA (1)...(19): siRNA sense strand
acacacacaugguuucuaa

SEQ ID NO: 1543790 - RNA, 19 nt, Homo sapiens
  misc_RNA (1)...(19): siRNA sense strand
gaaugcagcucaacgaagu

SEQ ID NO: 1543791 - RNA, 19 nt, Homo sapiens
  misc_RNA (1)...(19): siRNA sense strand
ccaaaugacuaaauccuau

SEQ ID NO: 1543792 - RNA, 19 nt, Homo sapiens
  misc_RNA (1)...(19): siRNA sense strand
ggaauaugccgucuuaaga

SEQ ID NO: 1543793 - RNA, 19 nt, Homo sapiens
  misc_RNA (1)...(19): siRNA sense strand
gcagacagguuacguagca

SEQ ID NO: 1543794 - RNA, 19 nt, Homo sapiens
  misc_RNA (1)...(19): siRNA sense strand
gcgccgaacugaucagaaa

SEQ ID NO: 1543795 - RNA, 19 nt, Homo sapiens
  misc_RNA (1)...(19): siRNA sense strand
ccacauuuaucaugaagaa

SEQ ID NO: 1543796 - RNA, 19 nt, Homo sapiens
  misc_RNA (1)...(19): siRNA sense strand
caaauuucaucaccacaaa

SEQ ID NO: 1543797 - RNA, 19 nt, Homo sapiens
  misc_RNA (1)...(19): siRNA sense strand
caucugagagcaagaaaua

SEQ ID NO: 1543798 - RNA, 19 nt, Homo sapiens
  misc_RNA (1)...(19): siRNA sense strand
acacgugggucaauaauau

SEQ ID NO: 1543799 - RNA, 19 nt, Homo sapiens
  misc_RNA (1)...(19): siRNA sense strand
gaauaugccgucuuaagaa

SEQ ID NO: 1543800 - RNA, 19 nt, Homo sapiens
  misc_RNA (1)...(19): siRNA sense strand
gaauggguuuccaauaaga

SEQ ID NO: 1543801 - RNA, 19 nt, Homo sapiens
  misc_RNA (1)...(19): siRNA sense strand
gauggaagaugacgaacug

SEQ ID NO: 1543802 - RNA, 19 nt, Homo sapiens
  misc_RNA (1)...(19): siRNA sense strand
caaacuaacucuugcugau

SEQ ID NO: 1543803 - RNA, 19 nt, Homo sapiens
  misc_RNA (1)...(19): siRNA sense strand
gaagauggaagaugacgaa

SEQ ID NO: 1543804 - RNA, 19 nt, Homo sapiens
  misc_RNA (1)...(19): siRNA sense strand
ugacauaccaguugaagaa

SEQ ID NO: 1543805 - RNA, 19 nt, Homo sapiens
  misc_RNA (1)...(19): siRNA sense strand
ugaagaaugucccgaugaa

SEQ ID NO: 1543806 - RNA, 19 nt, Homo sapiens
  misc_RNA (1)...(19): siRNA sense strand
gcaagaccaucaccagcaa

SEQ ID NO: 1543807 - RNA, 19 nt, Homo sapiens
  misc_RNA (1)...(19): siRNA sense strand
ggagaauggguuuccaaua

SEQ ID NO: 1543808 - RNA, 19 nt, Homo sapiens
  misc_RNA (1)...(19): siRNA sense strand
gaacgggcguguguacgaa

SEQ ID NO: 1543809 - RNA, 19 nt, Homo sapiens
  misc_RNA (1)...(19): siRNA sense strand
caagagacaugacuaugag

SEQ ID NO: 1543810 - RNA, 19 nt, Homo sapiens
  misc_RNA (1)...(19): siRNA sense strand
uaagaagaaucuacagcuu

SEQ ID NO: 1543811 - RNA, 19 nt, Homo sapiens
  misc_RNA (1)...(19): siRNA sense strand
ugaaagucauucuguguug

SEQ ID NO: 1543812 - RNA, 19 nt, Homo sapiens
  misc_RNA (1)...(19): siRNA sense strand
gcacccagccuguguccua

SEQ ID NO: 1543813 - RNA, 19 nt, Homo sapiens
  misc_RNA (1)...(19): siRNA sense strand
caagaagucuguaagucau

SEQ ID NO: 1543814 - RNA, 19 nt, Homo sapiens
  misc_RNA (1)...(19): siRNA sense strand
ugaugugucuggaaauaaa

SEQ ID NO: 1543815 - RNA, 19 nt, Homo sapiens
  misc_RNA (1)...(19): siRNA sense strand
gaauugacagcaacuuuga

SEQ ID NO: 1543816 - RNA, 19 nt, Homo sapiens
  misc_RNA (1)...(19): siRNA sense strand
ggaauugacagcaacuuug

SEQ ID NO: 1543817 - RNA, 19 nt, Homo sapiens
  misc_RNA (1)...(19): siRNA sense strand
uaacagcagcuacauuuau

SEQ ID NO: 1543818 - RNA, 19 nt, Homo sapiens
  misc_RNA (1)...(19): siRNA sense strand
aagcaaggcugaacaucuu

SEQ ID NO: 1543819 - RNA, 19 nt, Homo sapiens
  misc_RNA (1)...(19): siRNA sense strand
ccaagagacaugacuauga

SEQ ID NO: 1543820 - RNA, 19 nt, Homo sapiens
  misc_RNA (1)...(19): siRNA sense strand
gaacaucuucaucuugaga

SEQ ID NO: 1543821 - RNA, 19 nt, Homo sapiens
  misc_RNA (1)...(19): siRNA sense strand
ucaaggcgguuguaccuau

SEQ ID NO: 1543822 - RNA, 19 nt, Homo sapiens
  misc_RNA (1)...(19): siRNA sense strand
gaggauaaucguuucauau

SEQ ID NO: 1543823 - RNA, 19 nt, Homo sapiens
  misc_RNA (1)...(19): siRNA sense strand
gagggagacuggguacaaa

SEQ ID NO: 1543824 - RNA, 19 nt, Homo sapiens
  misc_RNA (1)...(19): siRNA sense strand
aauaagggcagacagguua

SEQ ID NO: 1543825 - RNA, 19 nt, Homo sapiens
  misc_RNA (1)...(19): siRNA sense strand
caaggaugaucgagaggaa

SEQ ID NO: 1543826 - RNA, 19 nt, Homo sapiens
  misc_RNA (1)...(19): siRNA sense strand
gaaaucagagcccaagauc

SEQ ID NO: 1543827 - RNA, 19 nt, Homo sapiens
  misc_RNA (1)...(19): siRNA sense strand
aauaagugcugggagauuu

SEQ ID NO: 1543828 - RNA, 19 nt, Homo sapiens
  misc_RNA (1)...(19): siRNA sense strand
uaugccgucuuaagaaaua

SEQ ID NO: 1543829 - RNA, 19 nt, Homo sapiens
  misc_RNA (1)...(19): siRNA sense strand
uaaauuugcuccuggacau

SEQ ID NO: 1543830 - RNA, 19 nt, Homo sapiens
  misc_RNA (1)...(19): siRNA sense strand
gcaguucccaguauccuuu

SEQ ID NO: 1543831 - RNA, 19 nt, Homo sapiens
  misc_RNA (1)...(19): siRNA sense strand
ggacaggggacuuauauuu

SEQ ID NO: 1543832 - RNA, 19 nt, Homo sapiens
  misc_RNA (1)...(19): siRNA sense strand
gcauuuggcguaccacauu

SEQ ID NO: 1543833 - RNA, 19 nt, Homo sapiens
  misc_RNA (1)...(19): siRNA sense strand
ugagcuggaucuaaauuug

SEQ ID NO: 1543834 - RNA, 19 nt, Homo sapiens
  misc_RNA (1)...(19): siRNA sense strand
uagcagaggauaaucguuu

SEQ ID NO: 1543835 - RNA, 19 nt, Homo sapiens
  misc_RNA (1)...(19): siRNA sense strand
gcaaauuucaucaccacaa

SEQ ID NO: 1543836 - RNA, 19 nt, Homo sapiens
  misc_RNA (1)...(19): siRNA sense strand
gucauccucucaccucaua

SEQ ID NO: 1543837 - RNA, 19 nt, Homo sapiens
  misc_RNA (1)...(19): siRNA sense strand
ggaagaugacgaacuggaa

SEQ ID NO: 1543838 - RNA, 19 nt, Homo sapiens
  misc_RNA (1)...(19): siRNA sense strand
guaccacauuuaucaugaa

SEQ ID NO: 1543839 - RNA, 19 nt, Homo sapiens
  misc_RNA (1)...(19): siRNA sense strand
uauuugggccgauggauua

SEQ ID NO: 1543840 - RNA, 19 nt, Homo sapiens
  misc_RNA (1)...(19): siRNA sense strand
gaagaggccaagagacaug

SEQ ID NO: 1543841 - RNA, 19 nt, Homo sapiens
  misc_RNA (1)...(19): siRNA sense strand
gaagcaaggcugaacaucu

SEQ ID NO: 1543842 - RNA, 19 nt, Homo sapiens
  misc_RNA (1)...(19): siRNA sense strand
uuagaacucucgccugaug

SEQ ID NO: 1543843 - RNA, 19 nt, Homo sapiens
  misc_RNA (1)...(19): siRNA sense strand
agaggauaaucguuucaua

SEQ ID NO: 1543844 - RNA, 19 nt, Homo sapiens
  misc_RNA (1)...(19): siRNA sense strand
cggacgcucuacucuauaa

SEQ ID NO: 1543845 - RNA, 19 nt, Homo sapiens
  misc_RNA (1)...(19): siRNA sense strand
gcccaucccucuucuugug

SEQ ID NO: 1543846 - RNA, 19 nt, Homo sapiens
  misc_RNA (1)...(19): siRNA sense strand
aauaugccgucuuaagaaa

SEQ ID NO: 1543847 - RNA, 19 nt, Homo sapiens
  misc_RNA (1)...(19): siRNA sense strand
ggacauguacccugagaca

SEQ ID NO: 1543848 - RNA, 19 nt, Homo sapiens
  misc_RNA (1)...(19): siRNA sense strand
gggaguuuguaaauggaua

SEQ ID NO: 1543849 - RNA, 19 nt, Homo sapiens
  misc_RNA (1)...(19): siRNA sense strand
aagaagcuaucaaggagaa

SEQ ID NO: 1543850 - RNA, 19 nt, Homo sapiens
  misc_RNA (1)...(19): siRNA sense strand
gagcaagaaauaugagaga

SEQ ID NO: 1543851 - RNA, 19 nt, Homo sapiens
  misc_RNA (1)...(19): siRNA sense strand
aaucagagcccaagaucaa

SEQ ID NO: 1543852 - RNA, 19 nt, Homo sapiens
  misc_RNA (1)...(19): siRNA sense strand
gaacucucgccugauguua

SEQ ID NO: 1543853 - RNA, 19 nt, Homo sapiens
  misc_RNA (1)...(19): siRNA sense strand
ccgauuaacuuucaagaac

SEQ ID NO: 1543854 - RNA, 19 nt, Homo sapiens
  misc_RNA (1)...(19): siRNA sense strand
acacaugguuucuaaagag

SEQ ID NO: 1543855 - RNA, 19 nt, Homo sapiens
  misc_RNA (1)...(19): siRNA sense strand
guauaaacgugaagaagcu

SEQ ID NO: 1543856 - RNA, 19 nt, Homo sapiens
  misc_RNA (1)...(19): siRNA sense strand
ggaaaucagagcccaagau

SEQ ID NO: 1543857 - RNA, 19 nt, Homo sapiens
  misc_RNA (1)...(19): siRNA sense strand
ggucauagcagaggauaau

SEQ ID NO: 1543858 - RNA, 19 nt, Homo sapiens
  misc_RNA (1)...(19): siRNA sense strand
ggauaauaccuuucugaug

SEQ ID NO: 1543859 - RNA, 19 nt, Homo sapiens
  misc_RNA (1)...(19): siRNA sense strand
cuaaagagaauccgcaguu

SEQ ID NO: 1543860 - RNA, 19 nt, Homo sapiens
  misc_RNA (1)...(19): siRNA sense strand
uaaagagaauccgcaguuc

SEQ ID NO: 1543861 - RNA, 19 nt, Homo sapiens
  misc_RNA (1)...(19): siRNA sense strand
gcauucaucuguguuacug

SEQ ID NO: 1543862 - RNA, 19 nt, Homo sapiens
  misc_RNA (1)...(19): siRNA sense strand
cgagaacauucguccaaau

SEQ ID NO: 1543863 - RNA, 19 nt, Homo sapiens
  misc_RNA (1)...(19): siRNA sense strand
ggagauuucuaaaagauug

SEQ ID NO: 1543864 - RNA, 19 nt, Homo sapiens
  misc_RNA (1)...(19): siRNA sense strand
aaaagaagcagguggaaua

SEQ ID NO: 1543865 - RNA, 19 nt, Homo sapiens
  misc_RNA (1)...(19): siRNA sense strand
gcagugaaagucauucugu

SEQ ID NO: 1543866 - RNA, 19 nt, Homo sapiens
  misc_RNA (1)...(19): siRNA sense strand
gaagggcuccauuuauuac

SEQ ID NO: 1543867 - RNA, 19 nt, Homo sapiens
  misc_RNA (1)...(19): siRNA sense strand
gugaagaagcuaucaagga

SEQ ID NO: 1543868 - RNA, 19 nt, Homo sapiens
  misc_RNA (1)...(19): siRNA sense strand
ucaagaagucuguaaguca

SEQ ID NO: 1543869 - RNA, 19 nt, Homo sapiens
  misc_RNA (1)...(19): siRNA sense strand
caaauguuccagcugauga

SEQ ID NO: 1543870 - RNA, 19 nt, Homo sapiens
  misc_RNA (1)...(19): siRNA sense strand
gaauaagugcugggagauu

SEQ ID NO: 1543871 - RNA, 19 nt, Homo sapiens
  misc_RNA (1)...(19): siRNA sense strand
aaacuaacucuugcugaua

SEQ ID NO: 1543872 - RNA, 19 nt, Homo sapiens
  misc_RNA (1)...(19): siRNA sense strand
uuacugaccaaaugacuaa

SEQ ID NO: 1543873 - RNA, 19 nt, Homo sapiens
  misc_RNA (1)...(19): siRNA sense strand
gaucaagaagucuguaagu

SEQ ID NO: 1543874 - RNA, 19 nt, Homo sapiens
  misc_RNA (1)...(19): siRNA sense strand
gcucuacucuauaaguuac

SEQ ID NO: 1543875 - RNA, 19 nt, Homo sapiens
  misc_RNA (1)...(19): siRNA sense strand
agaagcagguggaauaugc

SEQ ID NO: 1543876 - RNA, 19 nt, Homo sapiens
  misc_RNA (1)...(19): siRNA sense strand
cguaccacauuuaucauga

SEQ ID NO: 1543877 - RNA, 19 nt, Homo sapiens
  misc_RNA (1)...(19): siRNA sense strand
auaaugacauaccaguuga

SEQ ID NO: 1543878 - RNA, 19 nt, Homo sapiens
  misc_RNA (1)...(19): siRNA sense strand
uaacauaccuaaccaaaga

SEQ ID NO: 1543879 - RNA, 19 nt, Homo sapiens
  misc_RNA (1)...(19): siRNA sense strand
caacaacgcccacgcaaua

SEQ ID NO: 1543880 - RNA, 19 nt, Homo sapiens
  misc_RNA (1)...(19): siRNA sense strand
aaacacagcuaaucaaaga

SEQ ID NO: 1543881 - RNA, 19 nt, Homo sapiens
  misc_RNA (1)...(19): siRNA sense strand
gaucaagucugacauggaa

SEQ ID NO: 1543882 - RNA, 19 nt, Homo sapiens
  misc_RNA (1)...(19): siRNA sense strand
gagaagcucuauacgaaau

SEQ ID NO: 1543883 - RNA, 19 nt, Homo sapiens
  misc_RNA (1)...(19): siRNA sense strand
aaagaaggaucucgaaguu

SEQ ID NO: 1543884 - RNA, 19 nt, Homo sapiens
  misc_RNA (1)...(19): siRNA sense strand
agaaggaucucgaaguuau

SEQ ID NO: 1543885 - RNA, 19 nt, Homo sapiens
  misc_RNA (1)...(19): siRNA sense strand
gaaauucuuggucugcaua

SEQ ID NO: 1543886 - RNA, 19 nt, Homo sapiens
  misc_RNA (1)...(19): siRNA sense strand
aggagaagcucuauacgaa

SEQ ID NO: 1543887 - RNA, 19 nt, Homo sapiens
  misc_RNA (1)...(19): siRNA sense strand
gaaacaccauccagacaag

SEQ ID NO: 1543888 - RNA, 19 nt, Homo sapiens
  misc_RNA (1)...(19): siRNA sense strand
uaagggagcaucaaaugaa

SEQ ID NO: 1543889 - RNA, 19 nt, Homo sapiens
  misc_RNA (1)...(19): siRNA sense strand
cuacugagaaguuuaaaga

SEQ ID NO: 1543890 - RNA, 19 nt, Homo sapiens
  misc_RNA (1)...(19): siRNA sense strand
gaagcucuauacgaaauuc

SEQ ID NO: 1543891 - RNA, 19 nt, Homo sapiens
  misc_RNA (1)...(19): siRNA sense strand
caaagaaggaucucgaagu

SEQ ID NO: 1543892 - RNA, 19 nt, Homo sapiens
  misc_RNA (1)...(19): siRNA sense strand
ggagaagcucuauacgaaa

SEQ ID NO: 1543893 - RNA, 19 nt, Homo sapiens
  misc_RNA (1)...(19): siRNA sense strand
caacaggagaagcucuaua

SEQ ID NO: 1543894 - RNA, 19 nt, Homo sapiens
  misc_RNA (1)...(19): siRNA sense strand
gagcaucaaaugaagaaau

SEQ ID NO: 1543895 - RNA, 19 nt, Homo sapiens
  misc_RNA (1)...(19): siRNA sense strand
gaaaacacagcuaaucaaa

SEQ ID NO: 1543896 - RNA, 19 nt, Homo sapiens
  misc_RNA (1)...(19): siRNA sense strand
agacaagaauccagaugau

SEQ ID NO: 1543897 - RNA, 19 nt, Homo sapiens
  misc_RNA (1)...(19): siRNA sense strand
cauaagggagcaucaaaug

SEQ ID NO: 1543898 - RNA, 19 nt, Homo sapiens
  misc_RNA (1)...(19): siRNA sense strand
cuacaaaugcaaaugagaa

SEQ ID NO: 1543899 - RNA, 19 nt, Homo sapiens
  misc_RNA (1)...(19): siRNA sense strand
ugucaucguuggccucuug

SEQ ID NO: 1543900 - RNA, 19 nt, Homo sapiens
  misc_RNA (1)...(19): siRNA sense strand
gaaggaucucgaaguuauu

SEQ ID NO: 1543901 - RNA, 19 nt, Homo sapiens
  misc_RNA (1)...(19): siRNA sense strand
gcauaagggagcaucaaau

SEQ ID NO: 1543902 - RNA, 19 nt, Homo sapiens
  misc_RNA (1)...(19): siRNA sense strand
gaaaaccuacagaaaauug

SEQ ID NO: 1543903 - RNA, 19 nt, Homo sapiens
  misc_RNA (1)...(19): siRNA sense strand
gcaauacuuaccgacauuu

SEQ ID NO: 1543904 - RNA, 19 nt, Homo sapiens
  misc_RNA (1)...(19): siRNA sense strand
cuacguggccgagcaguuu

SEQ ID NO: 1543905 - RNA, 19 nt, Homo sapiens
  misc_RNA (1)...(19): siRNA sense strand
cagacaagaauccagauga

SEQ ID NO: 1543906 - RNA, 19 nt, Homo sapiens
  misc_RNA (1)...(19): siRNA sense strand
ugaaacaccauccagacaa

SEQ ID NO: 1543907 - RNA, 19 nt, Homo sapiens
  misc_RNA (1)...(19): siRNA sense strand
caaagagaagcauauacga

SEQ ID NO: 1543908 - RNA, 19 nt, Homo sapiens
  misc_RNA (1)...(19): siRNA sense strand
gggagcaucaaaugaagaa

SEQ ID NO: 1543909 - RNA, 19 nt, Homo sapiens
  misc_RNA (1)...(19): siRNA sense strand
cgcaauacuuaccgacauu

SEQ ID NO: 1543910 - RNA, 19 nt, Homo sapiens
  misc_RNA (1)...(19): siRNA sense strand
gaaaauuggcccugaaaca

SEQ ID NO: 1543911 - RNA, 19 nt, Homo sapiens
  misc_RNA (1)...(19): siRNA sense strand
gaagcauauacgacaagua

SEQ ID NO: 1543912 - RNA, 19 nt, Homo sapiens
  misc_RNA (1)...(19): siRNA sense strand
uuaccgacauuucaaagag

SEQ ID NO: 1543913 - RNA, 19 nt, Homo sapiens
  misc_RNA (1)...(19): siRNA sense strand
agucaucagugccagaaga

SEQ ID NO: 1543914 - RNA, 19 nt, Homo sapiens
  misc_RNA (1)...(19): siRNA sense strand
cagcugcuacugagaaguu

SEQ ID NO: 1543915 - RNA, 19 nt, Homo sapiens
  misc_RNA (1)...(19): siRNA sense strand
agagaagcauauacgacaa

SEQ ID NO: 1543916 - RNA, 19 nt, Homo sapiens
  misc_RNA (1)...(19): siRNA sense strand
caggagaagcucuauacga

SEQ ID NO: 1543917 - RNA, 19 nt, Homo sapiens
  misc_RNA (1)...(19): siRNA sense strand
gagaaaacacagcuaauca

SEQ ID NO: 1543918 - RNA, 19 nt, Homo sapiens
  misc_RNA (1)...(19): siRNA sense strand
caacgcccacgcaauacuu

SEQ ID NO: 1543919 - RNA, 19 nt, Homo sapiens
  misc_RNA (1)...(19): siRNA sense strand
uguaacauaccuaaccaaa

SEQ ID NO: 1543920 - RNA, 19 nt, Homo sapiens
  misc_RNA (1)...(19): siRNA sense strand
cgaaauucuuggucugcau

SEQ ID NO: 1543921 - RNA, 19 nt, Homo sapiens
  misc_RNA (1)...(19): siRNA sense strand
aagaaggaucucgaaguua

SEQ ID NO: 1543922 - RNA, 19 nt, Homo sapiens
  misc_RNA (1)...(19): siRNA sense strand
ucaaagagaagcauauacg

SEQ ID NO: 1543923 - RNA, 19 nt, Homo sapiens
  misc_RNA (1)...(19): siRNA sense strand
gcucuauacgaaauucuug

SEQ ID NO: 1543924 - RNA, 19 nt, Homo sapiens
  misc_RNA (1)...(19): siRNA sense strand
aagcauauacgacaaguac

SEQ ID NO: 1543925 - RNA, 19 nt, Homo sapiens
  misc_RNA (1)...(19): siRNA sense strand
uaccgacauuucaaagaga

SEQ ID NO: 1543926 - RNA, 19 nt, Homo sapiens
  misc_RNA (1)...(19): siRNA sense strand
gcuaaucaaagaaggaucu

SEQ ID NO: 1543927 - RNA, 19 nt, Homo sapiens
  misc_RNA (1)...(19): siRNA sense strand
cgagcaguuuggagacgaa

SEQ ID NO: 1543928 - RNA, 19 nt, Homo sapiens
  misc_RNA (1)...(19): siRNA sense strand
guaacauaccuaaccaaag

SEQ ID NO: 1543929 - RNA, 19 nt, Homo sapiens
  misc_RNA (1)...(19): siRNA sense strand
gagaagcauauacgacaag

SEQ ID NO: 1543930 - RNA, 19 nt, Homo sapiens
  misc_RNA (1)...(19): siRNA sense strand
cagcggacucugucaacaa

SEQ ID NO: 1543931 - RNA, 19 nt, Homo sapiens
  misc_RNA (1)...(19): siRNA sense strand
gacaagaauccagaugauc

SEQ ID NO: 1543932 - RNA, 19 nt, Homo sapiens
  misc_RNA (1)...(19): siRNA sense strand
guuauugcacagacucuug

SEQ ID NO: 1543933 - RNA, 19 nt, Homo sapiens
  misc_RNA (1)...(19): siRNA sense strand
uggaggagcagaucaaguc

SEQ ID NO: 1543934 - RNA, 19 nt, Homo sapiens
  misc_RNA (1)...(19): siRNA sense strand
cguuaacaccuacuucaug

SEQ ID NO: 1543935 - RNA, 19 nt, Homo sapiens
  misc_RNA (1)...(19): siRNA sense strand
acgaaaacguuaacaccua

SEQ ID NO: 1543936 - RNA, 19 nt, Homo sapiens
  misc_RNA (1)...(19): siRNA sense strand
auaagggagcaucaaauga

SEQ ID NO: 1543937 - RNA, 19 nt, Homo sapiens
  misc_RNA (1)...(19): siRNA sense strand
acggaucgcugggacucua

SEQ ID NO: 1543938 - RNA, 19 nt, Homo sapiens
  misc_RNA (1)...(19): siRNA sense strand
ggcccuguuugucaucguu

SEQ ID NO: 1543939 - RNA, 19 nt, Homo sapiens
  misc_RNA (1)...(19): siRNA sense strand
gaaagaaggagcaauggua

SEQ ID NO: 1543940 - RNA, 19 nt, Homo sapiens
  misc_RNA (1)...(19): siRNA sense strand
acaaggagaugaagaccua

SEQ ID NO: 1543941 - RNA, 19 nt, Homo sapiens
  misc_RNA (1)...(19): siRNA sense strand
gaugaggguuggcagguuu

SEQ ID NO: 1543942 - RNA, 19 nt, Homo sapiens
  misc_RNA (1)...(19): siRNA sense strand
cgacccagcuccagaagug

SEQ ID NO: 1543943 - RNA, 19 nt, Homo sapiens
  misc_RNA (1)...(19): siRNA sense strand
caucugaucugcuggaaag

SEQ ID NO: 1543944 - RNA, 19 nt, Homo sapiens
  misc_RNA (1)...(19): siRNA sense strand
gcacgugguucccaucaag

SEQ ID NO: 1543945 - RNA, 19 nt, Homo sapiens
  misc_RNA (1)...(19): siRNA sense strand
gcacugaggcugcagaagu

SEQ ID NO: 1543946 - RNA, 19 nt, Homo sapiens
  misc_RNA (1)...(19): siRNA sense strand
gcagaggagcggagaaaug

SEQ ID NO: 1543947 - RNA, 19 nt, Homo sapiens
  misc_RNA (1)...(19): siRNA sense strand
gaaaaccccugagcacaaa

SEQ ID NO: 1543948 - RNA, 19 nt, Homo sapiens
  misc_RNA (1)...(19): siRNA sense strand
gcaguuacucggugucuga

SEQ ID NO: 1543949 - RNA, 19 nt, Homo sapiens
  misc_RNA (1)...(19): siRNA sense strand
cgaggcaucucucagaauc

SEQ ID NO: 1543950 - RNA, 19 nt, Homo sapiens
  misc_RNA (1)...(19): siRNA sense strand
caacucagagguccuggaa

SEQ ID NO: 1543951 - RNA, 19 nt, Homo sapiens
  misc_RNA (1)...(19): siRNA sense strand
ggaugaggguuggcagguu

SEQ ID NO: 1543952 - RNA, 19 nt, Homo sapiens
  misc_RNA (1)...(19): siRNA sense strand
agacacagcgugaggaaga

SEQ ID NO: 1543953 - RNA, 19 nt, Homo sapiens
  misc_RNA (1)...(19): siRNA sense strand
gagacaccagcuacacaua

SEQ ID NO: 1543954 - RNA, 19 nt, Homo sapiens
  misc_RNA (1)...(19): siRNA sense strand
ggccaaggcugcgacuuca

SEQ ID NO: 1543955 - RNA, 19 nt, Homo sapiens
  misc_RNA (1)...(19): siRNA sense strand
ggacauaguacaggagaca

SEQ ID NO: 1543956 - RNA, 19 nt, Homo sapiens
  misc_RNA (1)...(19): siRNA sense strand
ggagacacagcgugaggaa

SEQ ID NO: 1543957 - RNA, 19 nt, Homo sapiens
  misc_RNA (1)...(19): siRNA sense strand
caaagcaagaggcaucgaa

SEQ ID NO: 1543958 - RNA, 19 nt, Homo sapiens
  misc_RNA (1)...(19): siRNA sense strand
agagaaagaaggagcaaug

SEQ ID NO: 1543959 - RNA, 19 nt, Homo sapiens
  misc_RNA (1)...(19): siRNA sense strand
gacagcaguuccugagucu

SEQ ID NO: 1543960 - RNA, 19 nt, Homo sapiens
  misc_RNA (1)...(19): siRNA sense strand
ccauccaccuacacucaaa

SEQ ID NO: 1543961 - RNA, 19 nt, Homo sapiens
  misc_RNA (1)...(19): siRNA sense strand
ugaccaagcugagccugau

SEQ ID NO: 1543962 - RNA, 19 nt, Homo sapiens
  misc_RNA (1)...(19): siRNA sense strand
gaagaccuaccgccuggau

SEQ ID NO: 1543963 - RNA, 19 nt, Homo sapiens
  misc_RNA (1)...(19): siRNA sense strand
agaagucccagucaucuga

SEQ ID NO: 1543964 - RNA, 19 nt, Homo sapiens
  misc_RNA (1)...(19): siRNA sense strand
gcagaagucccagucaucu

SEQ ID NO: 1543965 - RNA, 19 nt, Homo sapiens
  misc_RNA (1)...(19): siRNA sense strand
ggagacaccagcuacacau

SEQ ID NO: 1543966 - RNA, 19 nt, Homo sapiens
  misc_RNA (1)...(19): siRNA sense strand
ccaaggagacgcccaucga

SEQ ID NO: 1543967 - RNA, 19 nt, Homo sapiens
  misc_RNA (1)...(19): siRNA sense strand
gggaggacaaggagaugaa

SEQ ID NO: 1543968 - RNA, 19 nt, Homo sapiens
  misc_RNA (1)...(19): siRNA sense strand
ggaaaaccccugagcacaa

SEQ ID NO: 1543969 - RNA, 19 nt, Homo sapiens
  misc_RNA (1)...(19): siRNA sense strand
gaggagaacgugguugaca

SEQ ID NO: 1543970 - RNA, 19 nt, Homo sapiens
  misc_RNA (1)...(19): siRNA sense strand
aggaugagccgcagacaug

SEQ ID NO: 1543971 - RNA, 19 nt, Homo sapiens
  misc_RNA (1)...(19): siRNA sense strand
acagggagcagauugacuu

SEQ ID NO: 1543972 - RNA, 19 nt, Homo sapiens
  misc_RNA (1)...(19): siRNA sense strand
aaagggagagggagagugu

SEQ ID NO: 1543973 - RNA, 19 nt, Homo sapiens
  misc_RNA (1)...(19): siRNA sense strand
gggccaguguccaaguugu

SEQ ID NO: 1543974 - RNA, 19 nt, Homo sapiens
  misc_RNA (1)...(19): siRNA sense strand
gggagcagauugacuuccu

SEQ ID NO: 1543975 - RNA, 19 nt, Homo sapiens
  misc_RNA (1)...(19): siRNA sense strand
cggacgguaucaacucaga

SEQ ID NO: 1543976 - RNA, 19 nt, Homo sapiens
  misc_RNA (1)...(19): siRNA sense strand
gaggacaaggagaugaaga

SEQ ID NO: 1543977 - RNA, 19 nt, Homo sapiens
  misc_RNA (1)...(19): siRNA sense strand
gagaaagaaggagcaaugg

SEQ ID NO: 1543978 - RNA, 19 nt, Homo sapiens
  misc_RNA (1)...(19): siRNA sense strand
cacugaggcugcagaaguc

SEQ ID NO: 1543979 - RNA, 19 nt, Homo sapiens
  misc_RNA (1)...(19): siRNA sense strand
caccaaaggccacgauguc

SEQ ID NO: 1543980 - RNA, 19 nt, Homo sapiens
  misc_RNA (1)...(19): siRNA sense strand
gcagagaaagaaggagcaa

SEQ ID NO: 1543981 - RNA, 19 nt, Homo sapiens
  misc_RNA (1)...(19): siRNA sense strand
cccgaggcaucucucagaa

SEQ ID NO: 1543982 - RNA, 19 nt, Homo sapiens
  misc_RNA (1)...(19): siRNA sense strand
cggagaacagggaggauga

SEQ ID NO: 1543983 - RNA, 19 nt, Homo sapiens
  misc_RNA (1)...(19): siRNA sense strand
gucugagucucccuucuuc

SEQ ID NO: 1543984 - RNA, 19 nt, Homo sapiens
  misc_RNA (1)...(19): siRNA sense strand
gcccucagcucagauucca

SEQ ID NO: 1543985 - RNA, 19 nt, Homo sapiens
  misc_RNA (1)...(19): siRNA sense strand
ggaaagggagagggagagu

SEQ ID NO: 1543986 - RNA, 19 nt, Homo sapiens
  misc_RNA (1)...(19): siRNA sense strand
cagcgugcaugccuacacu

SEQ ID NO: 1543987 - RNA, 19 nt, Homo sapiens
  misc_RNA (1)...(19): siRNA sense strand
uggaggagaacgugguuga

SEQ ID NO: 1543988 - RNA, 19 nt, Homo sapiens
  misc_RNA (1)...(19): siRNA sense strand
gcugcgacuucaccaaagg

SEQ ID NO: 1543989 - RNA, 19 nt, Homo sapiens
  misc_RNA (1)...(19): siRNA sense strand
ggaaacggcugcagaugug

SEQ ID NO: 1543990 - RNA, 19 nt, Homo sapiens
  misc_RNA (1)...(19): siRNA sense strand
ggccuccgcugccuaucua

SEQ ID NO: 1543991 - RNA, 19 nt, Homo sapiens
  misc_RNA (1)...(19): siRNA sense strand
gcacuucgagcgccucuuc

SEQ ID NO: 1543992 - RNA, 19 nt, Homo sapiens
  misc_RNA (1)...(19): siRNA sense strand
cuacgaagccaucccuuug

SEQ ID NO: 1543993 - RNA, 19 nt, Homo sapiens
  misc_RNA (1)...(19): siRNA sense strand
gggaaacggcugcagaugu

SEQ ID NO: 1543994 - RNA, 19 nt, Homo sapiens
  misc_RNA (1)...(19): siRNA sense strand
acaaggugcucagcgacua

SEQ ID NO: 1543995 - RNA, 19 nt, Homo sapiens
  misc_RNA (1)...(19): siRNA sense strand
guacaugcagcgcgucuuc

SEQ ID NO: 1543996 - RNA, 19 nt, Homo sapiens
  misc_RNA (1)...(19): siRNA sense strand
gcgagggcuucuacaacga

SEQ ID NO: 1543997 - RNA, 19 nt, Homo sapiens
  misc_RNA (1)...(19): siRNA sense strand
ugcaacaggugcugaaguc

SEQ ID NO: 1543998 - RNA, 19 nt, Homo sapiens
  misc_RNA (1)...(19): siRNA sense strand
ugcagcgcgucuucaagua

SEQ ID NO: 1543999 - RNA, 19 nt, Homo sapiens
  misc_RNA (1)...(19): siRNA sense strand
ccugagcgccaucuacgaa

SEQ ID NO: 1544000 - RNA, 19 nt, Homo sapiens
  misc_RNA (1)...(19): siRNA sense strand
ggaccugagcgccaucuac

SEQ ID NO: 1544001 - RNA, 19 nt, Homo sapiens
  misc_RNA (1)...(19): siRNA sense strand
gcuucgaggugauucucau

SEQ ID NO: 1544002 - RNA, 19 nt, Homo sapiens
  misc_RNA (1)...(19): siRNA sense strand
cgacauccauucucuggua

SEQ ID NO: 1544003 - RNA, 19 nt, Homo sapiens
  misc_RNA (1)...(19): siRNA sense strand
acucagagcugucagauga

SEQ ID NO: 1544004 - RNA, 19 nt, Homo sapiens
  misc_RNA (1)...(19): siRNA sense strand
ugaggaggcuucuaucuug

SEQ ID NO: 1544005 - RNA, 19 nt, Homo sapiens
  misc_RNA (1)...(19): siRNA sense strand
uacauugucuuguugagua

SEQ ID NO: 1544006 - RNA, 19 nt, Homo sapiens
  misc_RNA (1)...(19): siRNA sense strand
ggucugagccuaggcauga

SEQ ID NO: 1544007 - RNA, 19 nt, Homo sapiens
  misc_RNA (1)...(19): siRNA sense strand
cuacucagcgucucacuuu

SEQ ID NO: 1544008 - RNA, 19 nt, Homo sapiens
  misc_RNA (1)...(19): siRNA sense strand
aagaggauguggcagcuaa

SEQ ID NO: 1544009 - RNA, 19 nt, Homo sapiens
  misc_RNA (1)...(19): siRNA sense strand
gcagagacagagagugaaa

SEQ ID NO: 1544010 - RNA, 19 nt, Homo sapiens
  misc_RNA (1)...(19): siRNA sense strand
aagaggcacucaccacuga

SEQ ID NO: 1544011 - RNA, 19 nt, Homo sapiens
  misc_RNA (1)...(19): siRNA sense strand
ggauuaugauuuccuacau

SEQ ID NO: 1544012 - RNA, 19 nt, Homo sapiens
  misc_RNA (1)...(19): siRNA sense strand
caacuccgcagcugacuga

SEQ ID NO: 1544013 - RNA, 19 nt, Homo sapiens
  misc_RNA (1)...(19): siRNA sense strand
ucaacggccucuucugguu

SEQ ID NO: 1544014 - RNA, 19 nt, Homo sapiens
  misc_RNA (1)...(19): siRNA sense strand
ccacugaggacuuugaguu

SEQ ID NO: 1544015 - RNA, 19 nt, Homo sapiens
  misc_RNA (1)...(19): siRNA sense strand
ggauguggcagcuaaggaa

SEQ ID NO: 1544016 - RNA, 19 nt, Homo sapiens
  misc_RNA (1)...(19): siRNA sense strand
ugagugaggccaccaguga

SEQ ID NO: 1544017 - RNA, 19 nt, Homo sapiens
  misc_RNA (1)...(19): siRNA sense strand
ggaggaagaggaagaggau

SEQ ID NO: 1544018 - RNA, 19 nt, Homo sapiens
  misc_RNA (1)...(19): siRNA sense strand
cagaugaggaggcuucuau

SEQ ID NO: 1544019 - RNA, 19 nt, Homo sapiens
  misc_RNA (1)...(19): siRNA sense strand
ccuccacucugccuuguug

SEQ ID NO: 1544020 - RNA, 19 nt, Homo sapiens
  misc_RNA (1)...(19): siRNA sense strand
uggcucaccuuccagauuc

SEQ ID NO: 1544021 - RNA, 19 nt, Homo sapiens
  misc_RNA (1)...(19): siRNA sense strand
gcagaauccagcucaguuc

SEQ ID NO: 1544022 - RNA, 19 nt, Homo sapiens
  misc_RNA (1)...(19): siRNA sense strand
ggacucggaggaagaggaa

SEQ ID NO: 1544023 - RNA, 19 nt, Homo sapiens
  misc_RNA (1)...(19): siRNA sense strand
gaaccagaggagacccuaa

SEQ ID NO: 1544024 - RNA, 19 nt, Homo sapiens
  misc_RNA (1)...(19): siRNA sense strand
cagggauuaugauuuccua

SEQ ID NO: 1544025 - RNA, 19 nt, Homo sapiens
  misc_RNA (1)...(19): siRNA sense strand
acacuauguuccagggauu

SEQ ID NO: 1544026 - RNA, 19 nt, Homo sapiens
  misc_RNA (1)...(19): siRNA sense strand
uggcagagacagagaguga

SEQ ID NO: 1544027 - RNA, 19 nt, Homo sapiens
  misc_RNA (1)...(19): siRNA sense strand
gguacagucagaccaagaa

SEQ ID NO: 1544028 - RNA, 19 nt, Homo sapiens
  misc_RNA (1)...(19): siRNA sense strand
ggcagaauccagcucaguu

SEQ ID NO: 1544029 - RNA, 19 nt, Homo sapiens
  misc_RNA (1)...(19): siRNA sense strand
uuccagggauuaugauuuc

SEQ ID NO: 1544030 - RNA, 19 nt, Homo sapiens
  misc_RNA (1)...(19): siRNA sense strand
guuccagggauuaugauuu

SEQ ID NO: 1544031 - RNA, 19 nt, Homo sapiens
  misc_RNA (1)...(19): siRNA sense strand
ucaugcagcuggacuacag

SEQ ID NO: 1544032 - RNA, 19 nt, Homo sapiens
  misc_RNA (1)...(19): siRNA sense strand
agugguggcuucuccguau

SEQ ID NO: 1544033 - RNA, 19 nt, Homo sapiens
  misc_RNA (1)...(19): siRNA sense strand
gaagaggauguggcagcua

SEQ ID NO: 1544034 - RNA, 19 nt, Homo sapiens
  misc_RNA (1)...(19): siRNA sense strand
uuuccuacauugucuuguu

SEQ ID NO: 1544035 - RNA, 19 nt, Homo sapiens
  misc_RNA (1)...(19): siRNA sense strand
ggaagaggaagaggaugug

SEQ ID NO: 1544036 - RNA, 19 nt, Homo sapiens
  misc_RNA (1)...(19): siRNA sense strand
cuccgcagcugacugaugu

SEQ ID NO: 1544037 - RNA, 19 nt, Homo sapiens
  misc_RNA (1)...(19): siRNA sense strand
gaugaggaggcuucuaucu

SEQ ID NO: 1544038 - RNA, 19 nt, Homo sapiens
  misc_RNA (1)...(19): siRNA sense strand
caugaaggcagaagccaau

SEQ ID NO: 1544039 - RNA, 19 nt, Homo sapiens
  misc_RNA (1)...(19): siRNA sense strand
acaaacacgacaagaggaa

SEQ ID NO: 1544040 - RNA, 19 nt, Homo sapiens
  misc_RNA (1)...(19): siRNA sense strand
gauguggcagcuaaggaaa

SEQ ID NO: 1544041 - RNA, 19 nt, Homo sapiens
  misc_RNA (1)...(19): siRNA sense strand
gggauuaugauuuccuaca

SEQ ID NO: 1544042 - RNA, 19 nt, Homo sapiens
  misc_RNA (1)...(19): siRNA sense strand
augcagagcugggcuugga

SEQ ID NO: 1544043 - RNA, 19 nt, Homo sapiens
  misc_RNA (1)...(19): siRNA sense strand
ggcccgacauccauucucu

SEQ ID NO: 1544044 - RNA, 19 nt, Homo sapiens
  misc_RNA (1)...(19): siRNA sense strand
uauguuccagggauuauga

SEQ ID NO: 1544045 - RNA, 19 nt, Homo sapiens
  misc_RNA (1)...(19): siRNA sense strand
agugguggaugugaagaaa

SEQ ID NO: 1544046 - RNA, 19 nt, Homo sapiens
  misc_RNA (1)...(19): siRNA sense strand
ugcccgaguugugcagaua

SEQ ID NO: 1544047 - RNA, 19 nt, Homo sapiens
  misc_RNA (1)...(19): siRNA sense strand
gugcuguguuggcuguguu

SEQ ID NO: 1544048 - RNA, 19 nt, Homo sapiens
  misc_RNA (1)...(19): siRNA sense strand
gccaagaaccgcuggauga

SEQ ID NO: 1544049 - RNA, 19 nt, Homo sapiens
  misc_RNA (1)...(19): siRNA sense strand
aagaaccgcuggaugauca

SEQ ID NO: 1544050 - RNA, 19 nt, Homo sapiens
  misc_RNA (1)...(19): siRNA sense strand
gcgcaucuucuuccucuuu

SEQ ID NO: 1544051 - RNA, 19 nt, Homo sapiens
  misc_RNA (1)...(19): siRNA sense strand
uuaacgacauccuggugua

SEQ ID NO: 1544052 - RNA, 19 nt, Homo sapiens
  misc_RNA (1)...(19): siRNA sense strand
ggaauggauuagccacauc

SEQ ID NO: 1544053 - RNA, 19 nt, Homo sapiens
  misc_RNA (1)...(19): siRNA sense strand
gcaucuucuuccucuuuaa

SEQ ID NO: 1544054 - RNA, 19 nt, Homo sapiens
  misc_RNA (1)...(19): siRNA sense strand
gaucaagacggccaagaag

SEQ ID NO: 1544055 - RNA, 19 nt, Homo sapiens
  misc_RNA (1)...(19): siRNA sense strand
cuacggagcgccaggaaug

SEQ ID NO: 1544056 - RNA, 19 nt, Homo sapiens
  misc_RNA (1)...(19): siRNA sense strand
ccaaagagugccgcaagaa

SEQ ID NO: 1544057 - RNA, 19 nt, Homo sapiens
  misc_RNA (1)...(19): siRNA sense strand
cgcaucuucuuccucuuua

SEQ ID NO: 1544058 - RNA, 19 nt, Homo sapiens
  misc_RNA (1)...(19): siRNA sense strand
gagcgccaggaauggauua

SEQ ID NO: 1544059 - RNA, 19 nt, Homo sapiens
  misc_RNA (1)...(19): siRNA sense strand
ccagcagcguggaguucua

SEQ ID NO: 1544060 - RNA, 19 nt, Homo sapiens
  misc_RNA (1)...(19): siRNA sense strand
caaagagugccgcaagaag

SEQ ID NO: 1544061 - RNA, 19 nt, Homo sapiens
  misc_RNA (1)...(19): siRNA sense strand
ucaagacggccaagaaguc

SEQ ID NO: 1544062 - RNA, 19 nt, Homo sapiens
  misc_RNA (1)...(19): siRNA sense strand
ugaucaagacggccaagaa

SEQ ID NO: 1544063 - RNA, 19 nt, Homo sapiens
  misc_RNA (1)...(19): siRNA sense strand
cgacaaggccacggacauc

SEQ ID NO: 1544064 - RNA, 19 nt, Homo sapiens
  misc_RNA (1)...(19): siRNA sense strand
ccaguggagaugacgauga

SEQ ID NO: 1544065 - RNA, 19 nt, Homo sapiens
  misc_RNA (1)...(19): siRNA sense strand
ccaagaaccgcuggaugau

SEQ ID NO: 1544066 - RNA, 19 nt, Homo sapiens
  misc_RNA (1)...(19): siRNA sense strand
uaacgacauccugguguau

SEQ ID NO: 1544067 - RNA, 19 nt, Homo sapiens
  misc_RNA (1)...(19): siRNA sense strand
accaaagagugccgcaaga

SEQ ID NO: 1544068 - RNA, 19 nt, Homo sapiens
  misc_RNA (1)...(19): siRNA sense strand
caagaaccgcuggaugauc

SEQ ID NO: 1544069 - RNA, 19 nt, Homo sapiens
  misc_RNA (1)...(19): siRNA sense strand
gcucaacaagcgcaaguac

SEQ ID NO: 1544070 - RNA, 19 nt, Homo sapiens
  misc_RNA (1)...(19): siRNA sense strand
ggagcgccaggaauggauu

SEQ ID NO: 1544071 - RNA, 19 nt, Homo sapiens
  misc_RNA (1)...(19): siRNA sense strand
caguggagaugacgaugac

SEQ ID NO: 1544072 - RNA, 19 nt, Homo sapiens
  misc_RNA (1)...(19): siRNA sense strand
gagcgaauauccugacuua

SEQ ID NO: 1544073 - RNA, 19 nt, Homo sapiens
  misc_RNA (1)...(19): siRNA sense strand
gaacacggcuugggaggaa

SEQ ID NO: 1544074 - RNA, 19 nt, Homo sapiens
  misc_RNA (1)...(19): siRNA sense strand
ccaggaaacuguaaagagu

SEQ ID NO: 1544075 - RNA, 19 nt, Homo sapiens
  misc_RNA (1)...(19): siRNA sense strand
aaaagacgcuguccaagua

SEQ ID NO: 1544076 - RNA, 19 nt, Homo sapiens
  misc_RNA (1)...(19): siRNA sense strand
gaacggaagaugccugugu

SEQ ID NO: 1544077 - RNA, 19 nt, Homo sapiens
  misc_RNA (1)...(19): siRNA sense strand
guacgaguccagcgagauu

SEQ ID NO: 1544078 - RNA, 19 nt, Homo sapiens
  misc_RNA (1)...(19): siRNA sense strand
ggaaggcccaggaaacugu

SEQ ID NO: 1544079 - RNA, 19 nt, Homo sapiens
  misc_RNA (1)...(19): siRNA sense strand
gcagcgacuucgaaugcaa

SEQ ID NO: 1544080 - RNA, 19 nt, Homo sapiens
  misc_RNA (1)...(19): siRNA sense strand
gagcagcgacuucgaaugc

SEQ ID NO: 1544081 - RNA, 19 nt, Homo sapiens
  misc_RNA (1)...(19): siRNA sense strand
gaaacuguaaagaguguau

SEQ ID NO: 1544082 - RNA, 19 nt, Homo sapiens
  misc_RNA (1)...(19): siRNA sense strand
aacgaaaacugcuacaaua

SEQ ID NO: 1544083 - RNA, 19 nt, Homo sapiens
  misc_RNA (1)...(19): siRNA sense strand
gcugcgcaguucuguaaga

SEQ ID NO: 1544084 - RNA, 19 nt, Homo sapiens
  misc_RNA (1)...(19): siRNA sense strand
gaaaagacgcuguccaagu

SEQ ID NO: 1544085 - RNA, 19 nt, Homo sapiens
  misc_RNA (1)...(19): siRNA sense strand
ggaacgagacccacagcau

SEQ ID NO: 1544086 - RNA, 19 nt, Homo sapiens
  misc_RNA (1)...(19): siRNA sense strand
gaaaacugcuacaauacuc

SEQ ID NO: 1544087 - RNA, 19 nt, Homo sapiens
  misc_RNA (1)...(19): siRNA sense strand
gagcuacgucugugugugu

SEQ ID NO: 1544088 - RNA, 19 nt, Homo sapiens
  misc_RNA (1)...(19): siRNA sense strand
ccugguggcugcagcugaa

SEQ ID NO: 1544089 - RNA, 19 nt, Homo sapiens
  misc_RNA (1)...(19): siRNA sense strand
gaaggcccaggaaacugua

SEQ ID NO: 1544090 - RNA, 19 nt, Homo sapiens
  misc_RNA (1)...(19): siRNA sense strand
cgagagcagcgacuucgaa

SEQ ID NO: 1544091 - RNA, 19 nt, Homo sapiens
  misc_RNA (1)...(19): siRNA sense strand
gagagcagcgacuucgaau

SEQ ID NO: 1544092 - RNA, 19 nt, Homo sapiens
  misc_RNA (1)...(19): siRNA sense strand
ugacuuauucgagugguuu

SEQ ID NO: 1544093 - RNA, 19 nt, Homo sapiens
  misc_RNA (1)...(19): siRNA sense strand
gggcugguggacaaguuua

SEQ ID NO: 1544094 - RNA, 19 nt, Homo sapiens
  misc_RNA (1)...(19): siRNA sense strand
ccugacggcuucgaaggaa

SEQ ID NO: 1544095 - RNA, 19 nt, Homo sapiens
  misc_RNA (1)...(19): siRNA sense strand
cgaaugcaaccagaugcua

SEQ ID NO: 1544096 - RNA, 19 nt, Homo sapiens
  misc_RNA (1)...(19): siRNA sense strand
aggaaacuguaaagagugu

SEQ ID NO: 1544097 - RNA, 19 nt, Homo sapiens
  misc_RNA (1)...(19): siRNA sense strand
gcagcugaagagcgaauau

SEQ ID NO: 1544098 - RNA, 19 nt, Homo sapiens
  misc_RNA (1)...(19): siRNA sense strand
guggacaccgcaaagaaga

SEQ ID NO: 1544099 - RNA, 19 nt, Homo sapiens
  misc_RNA (1)...(19): siRNA sense strand
aaccuacggucccgacugu

SEQ ID NO: 1544100 - RNA, 19 nt, Homo sapiens
  misc_RNA (1)...(19): siRNA sense strand
gagacugcggcgaguguga

SEQ ID NO: 1544101 - RNA, 19 nt, Homo sapiens
  misc_RNA (1)...(19): siRNA sense strand
ucagcucgcuccggaacga

SEQ ID NO: 1544102 - RNA, 19 nt, Homo sapiens
  misc_RNA (1)...(19): siRNA sense strand
gagggagcacggacagugu

SEQ ID NO: 1544103 - RNA, 19 nt, Homo sapiens
  misc_RNA (1)...(19): siRNA sense strand
gggcggagaugcucaagaa

SEQ ID NO: 1544104 - RNA, 19 nt, Homo sapiens
  misc_RNA (1)...(19): siRNA sense strand
ggauggagcuguucgacuu

SEQ ID NO: 1544105 - RNA, 19 nt, Homo sapiens
  misc_RNA (1)...(19): siRNA sense strand
ccaaggagguccagacgau

SEQ ID NO: 1544106 - RNA, 19 nt, Homo sapiens
  misc_RNA (1)...(19): siRNA sense strand
agaagccgguggugacuuu

SEQ ID NO: 1544107 - RNA, 19 nt, Homo sapiens
  misc_RNA (1)...(19): siRNA sense strand
caaggagaauucccucauc

SEQ ID NO: 1544108 - RNA, 19 nt, Homo sapiens
  misc_RNA (1)...(19): siRNA sense strand
ggaagugccugagaucaac

SEQ ID NO: 1544109 - RNA, 19 nt, Homo sapiens
  misc_RNA (1)...(19): siRNA sense strand
ugccugagaucaacgcuuu

SEQ ID NO: 1544110 - RNA, 19 nt, Homo sapiens
  misc_RNA (1)...(19): siRNA sense strand
ccaaagaggaaaguaagaa

SEQ ID NO: 1544111 - RNA, 19 nt, Homo sapiens
  misc_RNA (1)...(19): siRNA sense strand
gcgcuggauuggauguuug

SEQ ID NO: 1544112 - RNA, 19 nt, Homo sapiens
  misc_RNA (1)...(19): siRNA sense strand
cgaucgaggucuauaagca

SEQ ID NO: 1544113 - RNA, 19 nt, Homo sapiens
  misc_RNA (1)...(19): siRNA sense strand
gaggugaaggccuggcuuu

SEQ ID NO: 1544114 - RNA, 19 nt, Homo sapiens
  misc_RNA (1)...(19): siRNA sense strand
caacaauuacgggcagauu

SEQ ID NO: 1544115 - RNA, 19 nt, Homo sapiens
  misc_RNA (1)...(19): siRNA sense strand
caacugauuccgacuggau

SEQ ID NO: 1544116 - RNA, 19 nt, Homo sapiens
  misc_RNA (1)...(19): siRNA sense strand
cagcuuguccucugcuuug

SEQ ID NO: 1544117 - RNA, 19 nt, Homo sapiens
  misc_RNA (1)...(19): siRNA sense strand
gcugucagguggcgaggau

SEQ ID NO: 1544118 - RNA, 19 nt, Homo sapiens
  misc_RNA (1)...(19): siRNA sense strand
cagagcgucucaccaugug

SEQ ID NO: 1544119 - RNA, 19 nt, Homo sapiens
  misc_RNA (1)...(19): siRNA sense strand
gaucgacaucugcuuagug

SEQ ID NO: 1544120 - RNA, 19 nt, Homo sapiens
  misc_RNA (1)...(19): siRNA sense strand
aaugggcgcuggauuggau

SEQ ID NO: 1544121 - RNA, 19 nt, Homo sapiens
  misc_RNA (1)...(19): siRNA sense strand
uggcggcuggcaacaauua

SEQ ID NO: 1544122 - RNA, 19 nt, Homo sapiens
  misc_RNA (1)...(19): siRNA sense strand
caaagaggaaaguaagaag

SEQ ID NO: 1544123 - RNA, 19 nt, Homo sapiens
  misc_RNA (1)...(19): siRNA sense strand
gaagccaaagaggaaagua

SEQ ID NO: 1544124 - RNA, 19 nt, Homo sapiens
  misc_RNA (1)...(19): siRNA sense strand
ggcgcuggauuggauguuu

SEQ ID NO: 1544125 - RNA, 19 nt, Homo sapiens
  misc_RNA (1)...(19): siRNA sense strand
gauggagcuguucgacuuu

SEQ ID NO: 1544126 - RNA, 19 nt, Homo sapiens
  misc_RNA (1)...(19): siRNA sense strand
gcccgucuauagcaugguu

SEQ ID NO: 1544127 - RNA, 19 nt, Homo sapiens
  misc_RNA (1)...(19): siRNA sense strand
gagcucagaagccaaagag

SEQ ID NO: 1544128 - RNA, 19 nt, Homo sapiens
  misc_RNA (1)...(19): siRNA sense strand
uugcagcggcuccauauga

SEQ ID NO: 1544129 - RNA, 19 nt, Homo sapiens
  misc_RNA (1)...(19): siRNA sense strand
ucaagaagggcuguaagga

SEQ ID NO: 1544130 - RNA, 19 nt, Homo sapiens
  misc_RNA (1)...(19): siRNA sense strand
cacagaagcacgucaccuu

SEQ ID NO: 1544131 - RNA, 19 nt, Homo sapiens
  misc_RNA (1)...(19): siRNA sense strand
ccagagcgucucaccaugu

SEQ ID NO: 1544132 - RNA, 19 nt, Homo sapiens
  misc_RNA (1)...(19): siRNA sense strand
ccacaaugggcgcuggauu

SEQ ID NO: 1544133 - RNA, 19 nt, Homo sapiens
  misc_RNA (1)...(19): siRNA sense strand
uggcgaggauggagcuguu

SEQ ID NO: 1544134 - RNA, 19 nt, Homo sapiens
  misc_RNA (1)...(19): siRNA sense strand
aagccaaagaggaaaguaa

SEQ ID NO: 1544135 - RNA, 19 nt, Homo sapiens
  misc_RNA (1)...(19): siRNA sense strand
gccaaagaggaaaguaaga

SEQ ID NO: 1544136 - RNA, 19 nt, Homo sapiens
  misc_RNA (1)...(19): siRNA sense strand
gauguuuggcaacugauuc

SEQ ID NO: 1544137 - RNA, 19 nt, Homo sapiens
  misc_RNA (1)...(19): siRNA sense strand
ccaaggagaauucccucau

SEQ ID NO: 1544138 - RNA, 19 nt, Homo sapiens
  misc_RNA (1)...(19): siRNA sense strand
ggauguuuggcaacugauu

SEQ ID NO: 1544139 - RNA, 19 nt, Homo sapiens
  misc_RNA (1)...(19): siRNA sense strand
gauuggauguuuggcaacu

SEQ ID NO: 1544140 - RNA, 19 nt, Homo sapiens
  misc_RNA (1)...(19): siRNA sense strand
ucuggcggcuggcaacaau

SEQ ID NO: 1544141 - RNA, 19 nt, Homo sapiens
  misc_RNA (1)...(19): siRNA sense strand
gacgaucgaggucuauaag

SEQ ID NO: 1544142 - RNA, 19 nt, Homo sapiens
  misc_RNA (1)...(19): siRNA sense strand
uuggauguuuggcaacuga

SEQ ID NO: 1544143 - RNA, 19 nt, Homo sapiens
  misc_RNA (1)...(19): siRNA sense strand
ggugaaggccuggcuuugg

SEQ ID NO: 1544144 - RNA, 19 nt, Homo sapiens
  misc_RNA (1)...(19): siRNA sense strand
ccacacccaccaccaucuu

SEQ ID NO: 1544145 - RNA, 19 nt, Homo sapiens
  misc_RNA (1)...(19): siRNA sense strand
gcacacuauggaccuugaa

SEQ ID NO: 1544146 - RNA, 19 nt, Homo sapiens
  misc_RNA (1)...(19): siRNA sense strand
uggaagugccugagaucaa

SEQ ID NO: 1544147 - RNA, 19 nt, Homo sapiens
  misc_RNA (1)...(19): siRNA sense strand
caacagcugccggguggau

SEQ ID NO: 1544148 - RNA, 19 nt, Homo sapiens
  misc_RNA (1)...(19): siRNA sense strand
gaagaaccaucaacuuguc

SEQ ID NO: 1544149 - RNA, 19 nt, Homo sapiens
  misc_RNA (1)...(19): siRNA sense strand
aaacaucacauuucucuga

SEQ ID NO: 1544150 - RNA, 19 nt, Homo sapiens
  misc_RNA (1)...(19): siRNA sense strand
cuacagacccuacuauaau

SEQ ID NO: 1544151 - RNA, 19 nt, Homo sapiens
  misc_RNA (1)...(19): siRNA sense strand
caacuugucuuuucuugaa

SEQ ID NO: 1544152 - RNA, 19 nt, Homo sapiens
  misc_RNA (1)...(19): siRNA sense strand
caucacauuucucugaaga

SEQ ID NO: 1544153 - RNA, 19 nt, Homo sapiens
  misc_RNA (1)...(19): siRNA sense strand
uuucagaacccauguuuaa

SEQ ID NO: 1544154 - RNA, 19 nt, Homo sapiens
  misc_RNA (1)...(19): siRNA sense strand
uacagacccuacuauaauu

SEQ ID NO: 1544155 - RNA, 19 nt, Homo sapiens
  misc_RNA (1)...(19): siRNA sense strand
ccacaggaaugguucuaca

SEQ ID NO: 1544156 - RNA, 19 nt, Homo sapiens
  misc_RNA (1)...(19): siRNA sense strand
gaugaaggccauugcauag

SEQ ID NO: 1544157 - RNA, 19 nt, Homo sapiens
  misc_RNA (1)...(19): siRNA sense strand
gaaccaucaacuugucuuu

SEQ ID NO: 1544158 - RNA, 19 nt, Homo sapiens
  misc_RNA (1)...(19): siRNA sense strand
gaaggucccugaaaacauc

SEQ ID NO: 1544159 - RNA, 19 nt, Homo sapiens
  misc_RNA (1)...(19): siRNA sense strand
ucagaacccauguuuaaug

SEQ ID NO: 1544160 - RNA, 19 nt, Homo sapiens
  misc_RNA (1)...(19): siRNA sense strand
ucuacagacccuacuauaa

SEQ ID NO: 1544161 - RNA, 19 nt, Homo sapiens
  misc_RNA (1)...(19): siRNA sense strand
agaugaaggccauugcaua

SEQ ID NO: 1544162 - RNA, 19 nt, Homo sapiens
  misc_RNA (1)...(19): siRNA sense strand
gagagaaaugcaugggaaa

SEQ ID NO: 1544163 - RNA, 19 nt, Homo sapiens
  misc_RNA (1)...(19): siRNA sense strand
ugaagaaccaucaacuugu

SEQ ID NO: 1544164 - RNA, 19 nt, Homo sapiens
  misc_RNA (1)...(19): siRNA sense strand
ccuauucacaggcuucuaa

SEQ ID NO: 1544165 - RNA, 19 nt, Homo sapiens
  misc_RNA (1)...(19): siRNA sense strand
cugaagaaccaucaacuug

SEQ ID NO: 1544166 - RNA, 19 nt, Homo sapiens
  misc_RNA (1)...(19): siRNA sense strand
ucacuucucccuauucaca

SEQ ID NO: 1544167 - RNA, 19 nt, Homo sapiens
  misc_RNA (1)...(19): siRNA sense strand
ucuccuuucucuuaaauuc

SEQ ID NO: 1544168 - RNA, 19 nt, Homo sapiens
  misc_RNA (1)...(19): siRNA sense strand
uguaagacaugcagucaac

SEQ ID NO: 1544169 - RNA, 19 nt, Homo sapiens
  misc_RNA (1)...(19): siRNA sense strand
augcaucacuuuccuuuua

SEQ ID NO: 1544170 - RNA, 19 nt, Homo sapiens
  misc_RNA (1)...(19): siRNA sense strand
ccaaaugcaucacuuuccu

SEQ ID NO: 1544171 - RNA, 19 nt, Homo sapiens
  misc_RNA (1)...(19): siRNA sense strand
uaagacaugcagucaacaa

SEQ ID NO: 1544172 - RNA, 19 nt, Homo sapiens
  misc_RNA (1)...(19): siRNA sense strand
ccucacuucucccuauuca

SEQ ID NO: 1544173 - RNA, 19 nt, Homo sapiens
  misc_RNA (1)...(19): siRNA sense strand
aaaugcaucacuuuccuuu

SEQ ID NO: 1544174 - RNA, 19 nt, Homo sapiens
  misc_RNA (1)...(19): siRNA sense strand
gcccucacuucucccuauu

SEQ ID NO: 1544175 - RNA, 19 nt, Homo sapiens
  misc_RNA (1)...(19): siRNA sense strand
ucacaggcuucuaaaauca

SEQ ID NO: 1544176 - RNA, 19 nt, Homo sapiens
  misc_RNA (1)...(19): siRNA sense strand
cauuucagaacccauguuu

SEQ ID NO: 1544177 - RNA, 19 nt, Homo sapiens
  misc_RNA (1)...(19): siRNA sense strand
gacguuugcuuuggaaugc

SEQ ID NO: 1544178 - RNA, 19 nt, Homo sapiens
  misc_RNA (1)...(19): siRNA sense strand
gagaugaaggccauugcau

SEQ ID NO: 1544179 - RNA, 19 nt, Homo sapiens
  misc_RNA (1)...(19): siRNA sense strand
aacaucacauuucucugaa

SEQ ID NO: 1544180 - RNA, 19 nt, Homo sapiens
  misc_RNA (1)...(19): siRNA sense strand
gaaaugcaugggaaaagaa

SEQ ID NO: 1544181 - RNA, 19 nt, Homo sapiens
  misc_RNA (1)...(19): siRNA sense strand
caaaugcaucacuuuccuu

SEQ ID NO: 1544182 - RNA, 19 nt, Homo sapiens
  misc_RNA (1)...(19): siRNA sense strand
acaggaaugguucuacaga

SEQ ID NO: 1544183 - RNA, 19 nt, Homo sapiens
  misc_RNA (1)...(19): siRNA sense strand
guucuacagacccuacuau

SEQ ID NO: 1544184 - RNA, 19 nt, Homo sapiens
  misc_RNA (1)...(19): siRNA sense strand
agaaaugcaugggaaaaga

SEQ ID NO: 1544185 - RNA, 19 nt, Homo sapiens
  misc_RNA (1)...(19): siRNA sense strand
gagggaagagagaaaugca

SEQ ID NO: 1544186 - RNA, 19 nt, Homo sapiens
  misc_RNA (1)...(19): siRNA sense strand
gacccuacuauaauucuuc

SEQ ID NO: 1544187 - RNA, 19 nt, Homo sapiens
  misc_RNA (1)...(19): siRNA sense strand
gaaagaagaucaaagcaaa

SEQ ID NO: 1544188 - RNA, 19 nt, Homo sapiens
  misc_RNA (1)...(19): siRNA sense strand
gaagggaacuggaauaucu

SEQ ID NO: 1544189 - RNA, 19 nt, Homo sapiens
  misc_RNA (1)...(19): siRNA sense strand
uaagauugaucgcuugaua

SEQ ID NO: 1544190 - RNA, 19 nt, Homo sapiens
  misc_RNA (1)...(19): siRNA sense strand
cauaacaacucccaauaaa

SEQ ID NO: 1544191 - RNA, 19 nt, Homo sapiens
  misc_RNA (1)...(19): siRNA sense strand
gaaugaaacuguuaaacca

SEQ ID NO: 1544192 - RNA, 19 nt, Homo sapiens
  misc_RNA (1)...(19): siRNA sense strand
ugacaaagcuucaaaagaa

SEQ ID NO: 1544193 - RNA, 19 nt, Homo sapiens
  misc_RNA (1)...(19): siRNA sense strand
aaagaaagguuugcaaaga

SEQ ID NO: 1544194 - RNA, 19 nt, Homo sapiens
  misc_RNA (1)...(19): siRNA sense strand
cauggucaaugaagaaaua

SEQ ID NO: 1544195 - RNA, 19 nt, Homo sapiens
  misc_RNA (1)...(19): siRNA sense strand
gaaauaggcaaacagcaaa

SEQ ID NO: 1544196 - RNA, 19 nt, Homo sapiens
  misc_RNA (1)...(19): siRNA sense strand
uaggaggccuucaagauuu

SEQ ID NO: 1544197 - RNA, 19 nt, Homo sapiens
  misc_RNA (1)...(19): siRNA sense strand
gaacaaggagagcaaguau

SEQ ID NO: 1544198 - RNA, 19 nt, Homo sapiens
  misc_RNA (1)...(19): siRNA sense strand
ugaaaugccucagcucgua

SEQ ID NO: 1544199 - RNA, 19 nt, Homo sapiens
  misc_RNA (1)...(19): siRNA sense strand
gccagaaucuacagucaaa

SEQ ID NO: 1544200 - RNA, 19 nt, Homo sapiens
  misc_RNA (1)...(19): siRNA sense strand
ccaacauacuagucaauaa

SEQ ID NO: 1544201 - RNA, 19 nt, Homo sapiens
  misc_RNA (1)...(19): siRNA sense strand
gagcagagagggagacuga

SEQ ID NO: 1544202 - RNA, 19 nt, Homo sapiens
  misc_RNA (1)...(19): siRNA sense strand
ggagugccauugaaacaug

SEQ ID NO: 1544203 - RNA, 19 nt, Homo sapiens
  misc_RNA (1)...(19): siRNA sense strand
gaauccaaguugacucuga

SEQ ID NO: 1544204 - RNA, 19 nt, Homo sapiens
  misc_RNA (1)...(19): siRNA sense strand
gaagaagucacccagauuc

SEQ ID NO: 1544205 - RNA, 19 nt, Homo sapiens
  misc_RNA (1)...(19): siRNA sense strand
cagagaagaugaacagauc

SEQ ID NO: 1544206 - RNA, 19 nt, Homo sapiens
  misc_RNA (1)...(19): siRNA sense strand
gggagaagauggaggaaca

SEQ ID NO: 1544207 - RNA, 19 nt, Homo sapiens
  misc_RNA (1)...(19): siRNA sense strand
gaagauggaggaacauugu

SEQ ID NO: 1544208 - RNA, 19 nt, Homo sapiens
  misc_RNA (1)...(19): siRNA sense strand
gccaacaucaggaauauuu

SEQ ID NO: 1544209 - RNA, 19 nt, Homo sapiens
  misc_RNA (1)...(19): siRNA sense strand
gagacugaaucccaaguga

SEQ ID NO: 1544210 - RNA, 19 nt, Homo sapiens
  misc_RNA (1)...(19): siRNA sense strand
caacagguaaugaggagua

SEQ ID NO: 1544211 - RNA, 19 nt, Homo sapiens
  misc_RNA (1)...(19): siRNA sense strand
gccaguagauaccgagauu

SEQ ID NO: 1544212 - RNA, 19 nt, Homo sapiens
  misc_RNA (1)...(19): siRNA sense strand
auacaguccucuugaguuu

SEQ ID NO: 1544213 - RNA, 19 nt, Homo sapiens
  misc_RNA (1)...(19): siRNA sense strand
gccaagaggugacgagcaa

SEQ ID NO: 1544214 - RNA, 19 nt, Homo sapiens
  misc_RNA (1)...(19): siRNA sense strand
gcacaggaucacaaacuuu

SEQ ID NO: 1544215 - RNA, 19 nt, Homo sapiens
  misc_RNA (1)...(19): siRNA sense strand
agaaagguuugcaaagauu

SEQ ID NO: 1544216 - RNA, 19 nt, Homo sapiens
  misc_RNA (1)...(19): siRNA sense strand
caaggccucucacucaaga

SEQ ID NO: 1544217 - RNA, 19 nt, Homo sapiens
  misc_RNA (1)...(19): siRNA sense strand
aauagugacuucuuuagga

SEQ ID NO: 1544218 - RNA, 19 nt, Homo sapiens
  misc_RNA (1)...(19): siRNA sense strand
cagaagaagucacccagau

SEQ ID NO: 1544219 - RNA, 19 nt, Homo sapiens
  misc_RNA (1)...(19): siRNA sense strand
caguguaucugaaccuauu

SEQ ID NO: 1544220 - RNA, 19 nt, Homo sapiens
  misc_RNA (1)...(19): siRNA sense strand
gagaguugcuguugaacca

SEQ ID NO: 1544221 - RNA, 19 nt, Homo sapiens
  misc_RNA (1)...(19): siRNA sense strand
ccauaacaacucccaauaa

SEQ ID NO: 1544222 - RNA, 19 nt, Homo sapiens
  misc_RNA (1)...(19): siRNA sense strand
uaacaacucccaauaaacu

SEQ ID NO: 1544223 - RNA, 19 nt, Homo sapiens
  misc_RNA (1)...(19): siRNA sense strand
gaagggugaucaggccaaa

SEQ ID NO: 1544224 - RNA, 19 nt, Homo sapiens
  misc_RNA (1)...(19): siRNA sense strand
ggaaaugugcuaggaauag

SEQ ID NO: 1544225 - RNA, 19 nt, Homo sapiens
  misc_RNA (1)...(19): siRNA sense strand
caacagguggaaaguauga

SEQ ID NO: 1544226 - RNA, 19 nt, Homo sapiens
  misc_RNA (1)...(19): siRNA sense strand
gacaaaggcaugcagagaa

SEQ ID NO: 1544227 - RNA, 19 nt, Homo sapiens
  misc_RNA (1)...(19): siRNA sense strand
ggacagcagagaagaugaa

SEQ ID NO: 1544228 - RNA, 19 nt, Homo sapiens
  misc_RNA (1)...(19): siRNA sense strand
ucagaagacccaagagaaa

SEQ ID NO: 1544229 - RNA, 19 nt, Homo sapiens
  misc_RNA (1)...(19): siRNA sense strand
gaaaaccuguaucuucuga

SEQ ID NO: 1544230 - RNA, 19 nt, Homo sapiens
  misc_RNA (1)...(19): siRNA sense strand
ccaaauacaguccucuuga

SEQ ID NO: 1544231 - RNA, 19 nt, Homo sapiens
  misc_RNA (1)...(19): siRNA sense strand
agaagaaauugcucagaga

SEQ ID NO: 1544232 - RNA, 19 nt, Homo sapiens
  misc_RNA (1)...(19): siRNA sense strand
cagaugauucucaccuuua

SEQ ID NO: 1544233 - RNA, 19 nt, Homo sapiens
  misc_RNA (1)...(19): siRNA sense strand
ugucuuauaucuagcaaug

SEQ ID NO: 1544234 - RNA, 19 nt, Homo sapiens
  misc_RNA (1)...(19): siRNA sense strand
caaauacaguccucuugag

SEQ ID NO: 1544235 - RNA, 19 nt, Homo sapiens
  misc_RNA (1)...(19): siRNA sense strand
acaaggagagcaaguauau

SEQ ID NO: 1544236 - RNA, 19 nt, Homo sapiens
  misc_RNA (1)...(19): siRNA sense strand
guacauggacagcagagaa

SEQ ID NO: 1544237 - RNA, 19 nt, Homo sapiens
  misc_RNA (1)...(19): siRNA sense strand
ugacauccucuuugaauga

SEQ ID NO: 1544238 - RNA, 19 nt, Homo sapiens
  misc_RNA (1)...(19): siRNA sense strand
gggcuaaucaccauaacaa

SEQ ID NO: 1544239 - RNA, 19 nt, Homo sapiens
  misc_RNA (1)...(19): siRNA sense strand
caaaaucccugaaggaauc

SEQ ID NO: 1544240 - RNA, 19 nt, Homo sapiens
  misc_RNA (1)...(19): siRNA sense strand
gaaccuauuauuccauuca

SEQ ID NO: 1544241 - RNA, 19 nt, Homo sapiens
  misc_RNA (1)...(19): siRNA sense strand
gaaaugccucagcucguaa

SEQ ID NO: 1544242 - RNA, 19 nt, Homo sapiens
  misc_RNA (1)...(19): siRNA sense strand
gaaaugugcuaggaauagg

SEQ ID NO: 1544243 - RNA, 19 nt, Homo sapiens
  misc_RNA (1)...(19): siRNA sense strand
caggaaaugugcuaggaau

SEQ ID NO: 1544244 - RNA, 19 nt, Homo sapiens
  misc_RNA (1)...(19): siRNA sense strand
gcacuucgccagaaucuac

SEQ ID NO: 1544245 - RNA, 19 nt, Homo sapiens
  misc_RNA (1)...(19): siRNA sense strand
gcaggcaaguuaagguaca

SEQ ID NO: 1544246 - RNA, 19 nt, Homo sapiens
  misc_RNA (1)...(19): siRNA sense strand
cgaaaauacucacaugauu

SEQ ID NO: 1544247 - RNA, 19 nt, Homo sapiens
  misc_RNA (1)...(19): siRNA sense strand
caguugacauccucuuuga

SEQ ID NO: 1544248 - RNA, 19 nt, Homo sapiens
  misc_RNA (1)...(19): siRNA sense strand
acagaugauucucaccuuu

SEQ ID NO: 1544249 - RNA, 19 nt, Homo sapiens
  misc_RNA (1)...(19): siRNA sense strand
gaguugcuguugaaccaaa

SEQ ID NO: 1544250 - RNA, 19 nt, Homo sapiens
  misc_RNA (1)...(19): siRNA sense strand
cgaagccacuccuauugug

SEQ ID NO: 1544251 - RNA, 19 nt, Homo sapiens
  misc_RNA (1)...(19): siRNA sense strand
aaaccuguaucuucugaug

SEQ ID NO: 1544252 - RNA, 19 nt, Homo sapiens
  misc_RNA (1)...(19): siRNA sense strand
agugacuucuuuaggauua

SEQ ID NO: 1544253 - RNA, 19 nt, Homo sapiens
  misc_RNA (1)...(19): siRNA sense strand
acagggaaaugugguguuu

SEQ ID NO: 1544254 - RNA, 19 nt, Homo sapiens
  misc_RNA (1)...(19): siRNA sense strand
gcagagaagaugaacagau

SEQ ID NO: 1544255 - RNA, 19 nt, Homo sapiens
  misc_RNA (1)...(19): siRNA sense strand
gcaguugacauccucuuug

SEQ ID NO: 1544256 - RNA, 19 nt, Homo sapiens
  misc_RNA (1)...(19): siRNA sense strand
ucagagaaacaaucacaaa

SEQ ID NO: 1544257 - RNA, 19 nt, Homo sapiens
  misc_RNA (1)...(19): siRNA sense strand
aagaaagguuugcaaagau

SEQ ID NO: 1544258 - RNA, 19 nt, Homo sapiens
  misc_RNA (1)...(19): siRNA sense strand
caucaggaauauuuguguu

SEQ ID NO: 1544259 - RNA, 19 nt, Homo sapiens
  misc_RNA (1)...(19): siRNA sense strand
gcagagagggagacugaau

SEQ ID NO: 1544260 - RNA, 19 nt, Homo sapiens
  misc_RNA (1)...(19): siRNA sense strand
gguagaugcuguggaagga

SEQ ID NO: 1544261 - RNA, 19 nt, Homo sapiens
  misc_RNA (1)...(19): siRNA sense strand
gagcaacagguggaaagua

SEQ ID NO: 1544262 - RNA, 19 nt, Homo sapiens
  misc_RNA (1)...(19): siRNA sense strand
guggggagauuacuauaua

SEQ ID NO: 1544263 - RNA, 19 nt, Homo sapiens
  misc_RNA (1)...(19): siRNA sense strand
aaggagagcaaguauauga

SEQ ID NO: 1544264 - RNA, 19 nt, Homo sapiens
  misc_RNA (1)...(19): siRNA sense strand
ugugagaguugcuguugaa

SEQ ID NO: 1544265 - RNA, 19 nt, Homo sapiens
  misc_RNA (1)...(19): siRNA sense strand
aggaguaccugaucaaucu

SEQ ID NO: 1544266 - RNA, 19 nt, Homo sapiens
  misc_RNA (1)...(19): siRNA sense strand
gaauaggaggccuucaaga

SEQ ID NO: 1544267 - RNA, 19 nt, Homo sapiens
  misc_RNA (1)...(19): siRNA sense strand
gccaaggccucucacucaa

SEQ ID NO: 1544268 - RNA, 19 nt, Homo sapiens
  misc_RNA (1)...(19): siRNA sense strand
agacugaugugcacaggau

SEQ ID NO: 1544269 - RNA, 19 nt, Homo sapiens
  misc_RNA (1)...(19): siRNA sense strand
cacaagaggccuauucuca

SEQ ID NO: 1544270 - RNA, 19 nt, Homo sapiens
  misc_RNA (1)...(19): siRNA sense strand
ugugguagaugcuguggaa

SEQ ID NO: 1544271 - RNA, 19 nt, Homo sapiens
  misc_RNA (1)...(19): siRNA sense strand
caaccgcuguucgcauuug

SEQ ID NO: 1544272 - RNA, 19 nt, Homo sapiens
  misc_RNA (1)...(19): siRNA sense strand
gaguuuguaugaugcuguu

SEQ ID NO: 1544273 - RNA, 19 nt, Homo sapiens
  misc_RNA (1)...(19): siRNA sense strand
caaaagaagccaguagaua

SEQ ID NO: 1544274 - RNA, 19 nt, Homo sapiens
  misc_RNA (1)...(19): siRNA sense strand
ugaaagaagaucaaagcaa

SEQ ID NO: 1544275 - RNA, 19 nt, Homo sapiens
  misc_RNA (1)...(19): siRNA sense strand
ggaaugaaacuguuaaacc

SEQ ID NO: 1544276 - RNA, 19 nt, Homo sapiens
  misc_RNA (1)...(19): siRNA sense strand
acaaaggcaugcagagaag

SEQ ID NO: 1544277 - RNA, 19 nt, Homo sapiens
  misc_RNA (1)...(19): siRNA sense strand
agaaauaggcaaacagcaa

SEQ ID NO: 1544278 - RNA, 19 nt, Homo sapiens
  misc_RNA (1)...(19): siRNA sense strand
caaagauucauaucagugu

SEQ ID NO: 1544279 - RNA, 19 nt, Homo sapiens
  misc_RNA (1)...(19): siRNA sense strand
gaagccacuccuauuguga

SEQ ID NO: 1544280 - RNA, 19 nt, Homo sapiens
  misc_RNA (1)...(19): siRNA sense strand
ggcauacugugcucuggaa

SEQ ID NO: 1544281 - RNA, 19 nt, Homo sapiens
  misc_RNA (1)...(19): siRNA sense strand
caacaucaggaauauuugu

SEQ ID NO: 1544282 - RNA, 19 nt, Homo sapiens
  misc_RNA (1)...(19): siRNA sense strand
cgagggaucacuaugaaau

SEQ ID NO: 1544283 - RNA, 19 nt, Homo sapiens
  misc_RNA (1)...(19): siRNA sense strand
ggaauaggaggccuucaag

SEQ ID NO: 1544284 - RNA, 19 nt, Homo sapiens
  misc_RNA (1)...(19): siRNA sense strand
uggauaagaugauucaacu

SEQ ID NO: 1544285 - RNA, 19 nt, Homo sapiens
  misc_RNA (1)...(19): siRNA sense strand
gauaguggaacugaaauuc

SEQ ID NO: 1544286 - RNA, 19 nt, Homo sapiens
  misc_RNA (1)...(19): siRNA sense strand
cugaaggaauccaaguuga

SEQ ID NO: 1544287 - RNA, 19 nt, Homo sapiens
  misc_RNA (1)...(19): siRNA sense strand
ggaaaugagugucugaaca

SEQ ID NO: 1544288 - RNA, 19 nt, Homo sapiens
  misc_RNA (1)...(19): siRNA sense strand
gaaaugagugucugaacaa

SEQ ID NO: 1544289 - RNA, 19 nt, Homo sapiens
  misc_RNA (1)...(19): siRNA sense strand
gggacaagcugaggcagua

SEQ ID NO: 1544290 - RNA, 19 nt, Homo sapiens
  misc_RNA (1)...(19): siRNA sense strand
ggacaaggccauccugcaa

SEQ ID NO: 1544291 - RNA, 19 nt, Homo sapiens
  misc_RNA (1)...(19): siRNA sense strand
ccaagcugcugcucaagaa

SEQ ID NO: 1544292 - RNA, 19 nt, Homo sapiens
  misc_RNA (1)...(19): siRNA sense strand
gggccaagcugcugcucaa

SEQ ID NO: 1544293 - RNA, 19 nt, Homo sapiens
  misc_RNA (1)...(19): siRNA sense strand
ucacccagaucgaaaugaa

SEQ ID NO: 1544294 - RNA, 19 nt, Homo sapiens
  misc_RNA (1)...(19): siRNA sense strand
guauugaguucacccagau

SEQ ID NO: 1544295 - RNA, 19 nt, Homo sapiens
  misc_RNA (1)...(19): siRNA sense strand
gggcugcaguuuggaaaug

SEQ ID NO: 1544296 - RNA, 19 nt, Homo sapiens
  misc_RNA (1)...(19): siRNA sense strand
ggaguaccagcggcaaaua

SEQ ID NO: 1544297 - RNA, 19 nt, Homo sapiens
  misc_RNA (1)...(19): siRNA sense strand
caggugauguccauugaag

SEQ ID NO: 1544298 - RNA, 19 nt, Homo sapiens
  misc_RNA (1)...(19): siRNA sense strand
ggaaggaacgggccaagcu

SEQ ID NO: 1544299 - RNA, 19 nt, Homo sapiens
  misc_RNA (1)...(19): siRNA sense strand
uugaagagguggagaggau

SEQ ID NO: 1544300 - RNA, 19 nt, Homo sapiens
  misc_RNA (1)...(19): siRNA sense strand
ggccaugguucagaguauu

SEQ ID NO: 1544301 - RNA, 19 nt, Homo sapiens
  misc_RNA (1)...(19): siRNA sense strand
cgcaaucacucaggaacaa

SEQ ID NO: 1544302 - RNA, 19 nt, Homo sapiens
  misc_RNA (1)...(19): siRNA sense strand
ggacggagaaccagaucag

SEQ ID NO: 1544303 - RNA, 19 nt, Homo sapiens
  misc_RNA (1)...(19): siRNA sense strand
gaucgaaaugaaagugaug

SEQ ID NO: 1544304 - RNA, 19 nt, Homo sapiens
  misc_RNA (1)...(19): siRNA sense strand
uggaggagcugagcgcaau

SEQ ID NO: 1544305 - RNA, 19 nt, Homo sapiens
  misc_RNA (1)...(19): siRNA sense strand
ucacucaggaggaugaaga

SEQ ID NO: 1544306 - RNA, 19 nt, Homo sapiens
  misc_RNA (1)...(19): siRNA sense strand
gcaaucacucaggaacaaa

SEQ ID NO: 1544307 - RNA, 19 nt, Homo sapiens
  misc_RNA (1)...(19): siRNA sense strand
gccaagcugcugcucaaga

SEQ ID NO: 1544308 - RNA, 19 nt, Homo sapiens
  misc_RNA (1)...(19): siRNA sense strand
ccugagaagaucccagaaa

SEQ ID NO: 1544309 - RNA, 19 nt, Homo sapiens
  misc_RNA (1)...(19): siRNA sense strand
augagugucugaacaagau

SEQ ID NO: 1544310 - RNA, 19 nt, Homo sapiens
  misc_RNA (1)...(19): siRNA sense strand
gaguucacccagaucgaaa

SEQ ID NO: 1544311 - RNA, 19 nt, Homo sapiens
  misc_RNA (1)...(19): siRNA sense strand
cugagaagaucccagaaaa

SEQ ID NO: 1544312 - RNA, 19 nt, Homo sapiens
  misc_RNA (1)...(19): siRNA sense strand
ucacucaggaacaaauaga

SEQ ID NO: 1544313 - RNA, 19 nt, Homo sapiens
  misc_RNA (1)...(19): siRNA sense strand
ggcugcaguuuggaaauga

SEQ ID NO: 1544314 - RNA, 19 nt, Homo sapiens
  misc_RNA (1)...(19): siRNA sense strand
ggugauguccauugaagag

SEQ ID NO: 1544315 - RNA, 19 nt, Homo sapiens
  misc_RNA (1)...(19): siRNA sense strand
gaggccaugguucagagua

SEQ ID NO: 1544316 - RNA, 19 nt, Homo sapiens
  misc_RNA (1)...(19): siRNA sense strand
aaucacucaggaacaaaua

SEQ ID NO: 1544317 - RNA, 19 nt, Homo sapiens
  misc_RNA (1)...(19): siRNA sense strand
ggcaguaccagaagaggau

SEQ ID NO: 1544318 - RNA, 19 nt, Homo sapiens
  misc_RNA (1)...(19): siRNA sense strand
cagaucgaaaugaaaguga

SEQ ID NO: 1544319 - RNA, 19 nt, Homo sapiens
  misc_RNA (1)...(19): siRNA sense strand
gaguaccagcggcaaauag

SEQ ID NO: 1544320 - RNA, 19 nt, Homo sapiens
  misc_RNA (1)...(19): siRNA sense strand
gcaguuuggaaaugagugu

SEQ ID NO: 1544321 - RNA, 19 nt, Homo sapiens
  misc_RNA (1)...(19): siRNA sense strand
gagcgcaaucacucaggaa

SEQ ID NO: 1544322 - RNA, 19 nt, Homo sapiens
  misc_RNA (1)...(19): siRNA sense strand
cagaaaacgucccugucaa

SEQ ID NO: 1544323 - RNA, 19 nt, Homo sapiens
  misc_RNA (1)...(19): siRNA sense strand
acaaggccauccugcaacu

SEQ ID NO: 1544324 - RNA, 19 nt, Homo sapiens
  misc_RNA (1)...(19): siRNA sense strand
caaucacucaggaacaaau

SEQ ID NO: 1544325 - RNA, 19 nt, Homo sapiens
  misc_RNA (1)...(19): siRNA sense strand
ugaguucacccagaucgaa

SEQ ID NO: 1544326 - RNA, 19 nt, Homo sapiens
  misc_RNA (1)...(19): siRNA sense strand
aagcuucacucaggaggau

SEQ ID NO: 1544327 - RNA, 19 nt, Homo sapiens
  misc_RNA (1)...(19): siRNA sense strand
gcaagggucugcuuauuaa

SEQ ID NO: 1544328 - RNA, 19 nt, Homo sapiens
  misc_RNA (1)...(19): siRNA sense strand
ugacaaagcugacaguaug

SEQ ID NO: 1544329 - RNA, 19 nt, Homo sapiens
  misc_RNA (1)...(19): siRNA sense strand
gcaagaacaucgggcauga

SEQ ID NO: 1544330 - RNA, 19 nt, Homo sapiens
  misc_RNA (1)...(19): siRNA sense strand
gagcaacagcugcagauaa

SEQ ID NO: 1544331 - RNA, 19 nt, Homo sapiens
  misc_RNA (1)...(19): siRNA sense strand
gaaauauaaccaagaguug

SEQ ID NO: 1544332 - RNA, 19 nt, Homo sapiens
  misc_RNA (1)...(19): siRNA sense strand
ggaacuauccuccggugua

SEQ ID NO: 1544333 - RNA, 19 nt, Homo sapiens
  misc_RNA (1)...(19): siRNA sense strand
gaaggucccugacaaagcu

SEQ ID NO: 1544334 - RNA, 19 nt, Homo sapiens
  misc_RNA (1)...(19): siRNA sense strand
gcgcaagggucugcuuauu

SEQ ID NO: 1544335 - RNA, 19 nt, Homo sapiens
  misc_RNA (1)...(19): siRNA sense strand
ggagaaagaggagcugaaa

SEQ ID NO: 1544336 - RNA, 19 nt, Homo sapiens
  misc_RNA (1)...(19): siRNA sense strand
cgaaauauaaccaagaguu

SEQ ID NO: 1544337 - RNA, 19 nt, Homo sapiens
  misc_RNA (1)...(19): siRNA sense strand
gauaagcgaccgugugugu

SEQ ID NO: 1544338 - RNA, 19 nt, Homo sapiens
  misc_RNA (1)...(19): siRNA sense strand
gauuaaauaugacguuagg

SEQ ID NO: 1544339 - RNA, 19 nt, Homo sapiens
  misc_RNA (1)...(19): siRNA sense strand
gagcugaaggaaagauuaa

SEQ ID NO: 1544340 - RNA, 19 nt, Homo sapiens
  misc_RNA (1)...(19): siRNA sense strand
ggagcugaaggaaagauua

SEQ ID NO: 1544341 - RNA, 19 nt, Homo sapiens
  misc_RNA (1)...(19): siRNA sense strand
gcgcgcagcaccagauuaa

SEQ ID NO: 1544342 - RNA, 19 nt, Homo sapiens
  misc_RNA (1)...(19): siRNA sense strand
gaacuauccuccgguguac

SEQ ID NO: 1544343 - RNA, 19 nt, Homo sapiens
  misc_RNA (1)...(19): siRNA sense strand
aaucagagguccuacucaa

SEQ ID NO: 1544344 - RNA, 19 nt, Homo sapiens
  misc_RNA (1)...(19): siRNA sense strand
ucacguaccuggaaaagaa

SEQ ID NO: 1544345 - RNA, 19 nt, Homo sapiens
  misc_RNA (1)...(19): siRNA sense strand
gagacacucugaacuucug

SEQ ID NO: 1544346 - RNA, 19 nt, Homo sapiens
  misc_RNA (1)...(19): siRNA sense strand
cgcaagggucugcuuauua

SEQ ID NO: 1544347 - RNA, 19 nt, Homo sapiens
  misc_RNA (1)...(19): siRNA sense strand
gcuacaggcccaagucuga

SEQ ID NO: 1544348 - RNA, 19 nt, Homo sapiens
  misc_RNA (1)...(19): siRNA sense strand
ccacaucacguaccuggaa

SEQ ID NO: 1544349 - RNA, 19 nt, Homo sapiens
  misc_RNA (1)...(19): siRNA sense strand
ugguagaaauggcaaagaa

SEQ ID NO: 1544350 - RNA, 19 nt, Homo sapiens
  misc_RNA (1)...(19): siRNA sense strand
aauaugacguuaggacuga

SEQ ID NO: 1544351 - RNA, 19 nt, Homo sapiens
  misc_RNA (1)...(19): siRNA sense strand
ggccucaacugcaagaaca

SEQ ID NO: 1544352 - RNA, 19 nt, Homo sapiens
  misc_RNA (1)...(19): siRNA sense strand
guacgaaauauaaccaaga

SEQ ID NO: 1544353 - RNA, 19 nt, Homo sapiens
  misc_RNA (1)...(19): siRNA sense strand
ucagagguccuacucaaga

SEQ ID NO: 1544354 - RNA, 19 nt, Homo sapiens
  misc_RNA (1)...(19): siRNA sense strand
gcguggagaugaucaaagg

SEQ ID NO: 1544355 - RNA, 19 nt, Homo sapiens
  misc_RNA (1)...(19): siRNA sense strand
gguccucugucgaaaguuc

SEQ ID NO: 1544356 - RNA, 19 nt, Homo sapiens
  misc_RNA (1)...(19): siRNA sense strand
ggacaccuugguagaaaug

SEQ ID NO: 1544357 - RNA, 19 nt, Homo sapiens
  misc_RNA (1)...(19): siRNA sense strand
caaggguccucugucgaaa

SEQ ID NO: 1544358 - RNA, 19 nt, Homo sapiens
  misc_RNA (1)...(19): siRNA sense strand
ucaaggguccucugucgaa

SEQ ID NO: 1544359 - RNA, 19 nt, Homo sapiens
  misc_RNA (1)...(19): siRNA sense strand
cugagaaggucccugacaa

SEQ ID NO: 1544360 - RNA, 19 nt, Homo sapiens
  misc_RNA (1)...(19): siRNA sense strand
ugagaaggucccugacaaa

SEQ ID NO: 1544361 - RNA, 19 nt, Homo sapiens
  misc_RNA (1)...(19): siRNA sense strand
ggagcaacagcugcagaua

SEQ ID NO: 1544362 - RNA, 19 nt, Homo sapiens
  misc_RNA (1)...(19): siRNA sense strand
gcugaaggaaagauuaaau

SEQ ID NO: 1544363 - RNA, 19 nt, Homo sapiens
  misc_RNA (1)...(19): siRNA sense strand
gagaaggucccugacaaag

SEQ ID NO: 1544364 - RNA, 19 nt, Homo sapiens
  misc_RNA (1)...(19): siRNA sense strand
gaaaauggagagagauaug

SEQ ID NO: 1544365 - RNA, 19 nt, Homo sapiens
  misc_RNA (1)...(19): siRNA sense strand
ugaaaagcaugaagaggaa

SEQ ID NO: 1544366 - RNA, 19 nt, Homo sapiens
  misc_RNA (1)...(19): siRNA sense strand
cagauaagcgaccgugugu

SEQ ID NO: 1544367 - RNA, 19 nt, Homo sapiens
  misc_RNA (1)...(19): siRNA sense strand
ccgagacacucugaacuuc

SEQ ID NO: 1544368 - RNA, 19 nt, Homo sapiens
  misc_RNA (1)...(19): siRNA sense strand
gcgagaccuuggagcugaa

SEQ ID NO: 1544369 - RNA, 19 nt, Homo sapiens
  misc_RNA (1)...(19): siRNA sense strand
agcaacagcugcagauaag

SEQ ID NO: 1544370 - RNA, 19 nt, Homo sapiens
  misc_RNA (1)...(19): siRNA sense strand
gccgagacacucugaacuu

SEQ ID NO: 1544371 - RNA, 19 nt, Homo sapiens
  misc_RNA (1)...(19): siRNA sense strand
aagcugcagugccacauca

SEQ ID NO: 1544372 - RNA, 19 nt, Homo sapiens
  misc_RNA (1)...(19): siRNA sense strand
uacgaaauauaaccaagag

SEQ ID NO: 1544373 - RNA, 19 nt, Homo sapiens
  misc_RNA (1)...(19): siRNA sense strand
gugcgcaagggucugcuua

SEQ ID NO: 1544374 - RNA, 19 nt, Homo sapiens
  misc_RNA (1)...(19): siRNA sense strand
cacaucacguaccuggaaa

SEQ ID NO: 1544375 - RNA, 19 nt, Homo sapiens
  misc_RNA (1)...(19): siRNA sense strand
gggagaaagaggagcugaa

SEQ ID NO: 1544376 - RNA, 19 nt, Homo sapiens
  misc_RNA (1)...(19): siRNA sense strand
ccauguggcagcccaagga

SEQ ID NO: 1544377 - RNA, 19 nt, Homo sapiens
  misc_RNA (1)...(19): siRNA sense strand
gaggaccgcgcacauucug

SEQ ID NO: 1544378 - RNA, 19 nt, Homo sapiens
  misc_RNA (1)...(19): siRNA sense strand
cgcagcgccugguuaagga

SEQ ID NO: 1544379 - RNA, 19 nt, Homo sapiens
  misc_RNA (1)...(19): siRNA sense strand
cugacaguaugcuuacaug

SEQ ID NO: 1544380 - RNA, 19 nt, Homo sapiens
  misc_RNA (1)...(19): siRNA sense strand
uccgguguacgaaauauaa

SEQ ID NO: 1544381 - RNA, 19 nt, Homo sapiens
  misc_RNA (1)...(19): siRNA sense strand
gggagcaacagcugcagau

SEQ ID NO: 1544382 - RNA, 19 nt, Homo sapiens
  misc_RNA (1)...(19): siRNA sense strand
ccguggaccucaugaacca

SEQ ID NO: 1544383 - RNA, 19 nt, Homo sapiens
  misc_RNA (1)...(19): siRNA sense strand
ucacggcccugcagugguu

SEQ ID NO: 1544384 - RNA, 19 nt, Homo sapiens
  misc_RNA (1)...(19): siRNA sense strand
cugcagggcuucuucaagu

SEQ ID NO: 1544385 - RNA, 19 nt, Homo sapiens
  misc_RNA (1)...(19): siRNA sense strand
ugcagugguuuaucuauga

SEQ ID NO: 1544386 - RNA, 19 nt, Homo sapiens
  misc_RNA (1)...(19): siRNA sense strand
ugucugugcugaacaagga

SEQ ID NO: 1544387 - RNA, 19 nt, Homo sapiens
  misc_RNA (1)...(19): siRNA sense strand
ccuacaccaugaugaaguu

SEQ ID NO: 1544388 - RNA, 19 nt, Homo sapiens
  misc_RNA (1)...(19): siRNA sense strand
ggucaaggucuauuucaag

SEQ ID NO: 1544389 - RNA, 19 nt, Homo sapiens
  misc_RNA (1)...(19): siRNA sense strand
gagcugcggcugacacaca

SEQ ID NO: 1544390 - RNA, 19 nt, Homo sapiens
  misc_RNA (1)...(19): siRNA sense strand
gcccugcagugguuuaucu

SEQ ID NO: 1544391 - RNA, 19 nt, Homo sapiens
  misc_RNA (1)...(19): siRNA sense strand
ugaugaaguucgccugcuu

SEQ ID NO: 1544392 - RNA, 19 nt, Homo sapiens
  misc_RNA (1)...(19): siRNA sense strand
gcagggcuucuucaaguuc

SEQ ID NO: 1544393 - RNA, 19 nt, Homo sapiens
  misc_RNA (1)...(19): siRNA sense strand
cugcagugguuuaucuaug

SEQ ID NO: 1544394 - RNA, 19 nt, Homo sapiens
  misc_RNA (1)...(19): siRNA sense strand
ccacggcguccaggaugua

SEQ ID NO: 1544395 - RNA, 19 nt, Homo sapiens
  misc_RNA (1)...(19): siRNA sense strand
gcagugguuuaucuaugac

SEQ ID NO: 1544396 - RNA, 19 nt, Homo sapiens
  misc_RNA (1)...(19): siRNA sense strand
ccaagcagcugggcaucac

SEQ ID NO: 1544397 - RNA, 19 nt, Homo sapiens
  misc_RNA (1)...(19): siRNA sense strand
ucaccuucguggcgucuuc

SEQ ID NO: 1544398 - RNA, 19 nt, Homo sapiens
  misc_RNA (1)...(19): siRNA sense strand
ccgaaccccugaagaagaa

SEQ ID NO: 1544399 - RNA, 19 nt, Homo sapiens
  misc_RNA (1)...(19): siRNA sense strand
uggucaaggucuauuucaa

SEQ ID NO: 1544400 - RNA, 19 nt, Homo sapiens
  misc_RNA (1)...(19): siRNA sense strand
gcauguaccuuccaaauga

SEQ ID NO: 1544401 - RNA, 19 nt, Homo sapiens
  misc_RNA (1)...(19): siRNA sense strand
gggaagaccuuggacuuua

SEQ ID NO: 1544402 - RNA, 19 nt, Homo sapiens
  misc_RNA (1)...(19): siRNA sense strand
gcagacaccuucauguuug

SEQ ID NO: 1544403 - RNA, 19 nt, Homo sapiens
  misc_RNA (1)...(19): siRNA sense strand
gagaagagauucaggaagu

SEQ ID NO: 1544404 - RNA, 19 nt, Homo sapiens
  misc_RNA (1)...(19): siRNA sense strand
gaagaugagugauuauauc

SEQ ID NO: 1544405 - RNA, 19 nt, Homo sapiens
  misc_RNA (1)...(19): siRNA sense strand
ggaugaagauggaaaggaa

SEQ ID NO: 1544406 - RNA, 19 nt, Homo sapiens
  misc_RNA (1)...(19): siRNA sense strand
ccagagcgcugacauuaug

SEQ ID NO: 1544407 - RNA, 19 nt, Homo sapiens
  misc_RNA (1)...(19): siRNA sense strand
aagagaagaugagugauua

SEQ ID NO: 1544408 - RNA, 19 nt, Homo sapiens
  misc_RNA (1)...(19): siRNA sense strand
gagcauaucagccucauga

SEQ ID NO: 1544409 - RNA, 19 nt, Homo sapiens
  misc_RNA (1)...(19): siRNA sense strand
gauuauaucuccgcuauca

SEQ ID NO: 1544410 - RNA, 19 nt, Homo sapiens
  misc_RNA (1)...(19): siRNA sense strand
gaagacggcguuccgcaua

SEQ ID NO: 1544411 - RNA, 19 nt, Homo sapiens
  misc_RNA (1)...(19): siRNA sense strand
cagcugcccuuuacaacua

SEQ ID NO: 1544412 - RNA, 19 nt, Homo sapiens
  misc_RNA (1)...(19): siRNA sense strand
ggaagaccuuggacuuuau

SEQ ID NO: 1544413 - RNA, 19 nt, Homo sapiens
  misc_RNA (1)...(19): siRNA sense strand
gcucagcggucucccuuga

SEQ ID NO: 1544414 - RNA, 19 nt, Homo sapiens
  misc_RNA (1)...(19): siRNA sense strand
gcacuaacacugcuacguu

SEQ ID NO: 1544415 - RNA, 19 nt, Homo sapiens
  misc_RNA (1)...(19): siRNA sense strand
gagaagaugagugauuaua

SEQ ID NO: 1544416 - RNA, 19 nt, Homo sapiens
  misc_RNA (1)...(19): siRNA sense strand
agaaaugugucuucagcua

SEQ ID NO: 1544417 - RNA, 19 nt, Homo sapiens
  misc_RNA (1)...(19): siRNA sense strand
gaaaugccgagaagagauu

SEQ ID NO: 1544418 - RNA, 19 nt, Homo sapiens
  misc_RNA (1)...(19): siRNA sense strand
ccaaaggaaucaucugcuu

SEQ ID NO: 1544419 - RNA, 19 nt, Homo sapiens
  misc_RNA (1)...(19): siRNA sense strand
caagagaagaugagugauu

SEQ ID NO: 1544420 - RNA, 19 nt, Homo sapiens
  misc_RNA (1)...(19): siRNA sense strand
ucagcggucucccuugaua

SEQ ID NO: 1544421 - RNA, 19 nt, Homo sapiens
  misc_RNA (1)...(19): siRNA sense strand
gugauuauaucuccgcuau

SEQ ID NO: 1544422 - RNA, 19 nt, Homo sapiens
  misc_RNA (1)...(19): siRNA sense strand
ugacucagcugcccuuuac

SEQ ID NO: 1544423 - RNA, 19 nt, Homo sapiens
  misc_RNA (1)...(19): siRNA sense strand
cuuggaugcuguucaauuu

SEQ ID NO: 1544424 - RNA, 19 nt, Homo sapiens
  misc_RNA (1)...(19): siRNA sense strand
gcucuccacuggccuaugu

SEQ ID NO: 1544425 - RNA, 19 nt, Homo sapiens
  misc_RNA (1)...(19): siRNA sense strand
ugcaggagcuucuacauca

SEQ ID NO: 1544426 - RNA, 19 nt, Homo sapiens
  misc_RNA (1)...(19): siRNA sense strand
gccaagagaagaugaguga

SEQ ID NO: 1544427 - RNA, 19 nt, Homo sapiens
  misc_RNA (1)...(19): siRNA sense strand
ggacagucuucagaaaugu

SEQ ID NO: 1544428 - RNA, 19 nt, Homo sapiens
  misc_RNA (1)...(19): siRNA sense strand
ggucucccuugauauguuu

SEQ ID NO: 1544429 - RNA, 19 nt, Homo sapiens
  misc_RNA (1)...(19): siRNA sense strand
agaagaagguacuggacaa

SEQ ID NO: 1544430 - RNA, 19 nt, Homo sapiens
  misc_RNA (1)...(19): siRNA sense strand
ggagaaaugccgagaagag

SEQ ID NO: 1544431 - RNA, 19 nt, Homo sapiens
  misc_RNA (1)...(19): siRNA sense strand
ggccagggaugaagaugga

SEQ ID NO: 1544432 - RNA, 19 nt, Homo sapiens
  misc_RNA (1)...(19): siRNA sense strand
cacuaacacugcuacguuu

SEQ ID NO: 1544433 - RNA, 19 nt, Homo sapiens
  misc_RNA (1)...(19): siRNA sense strand
gaagguacuggacaacaug

SEQ ID NO: 1544434 - RNA, 19 nt, Homo sapiens
  misc_RNA (1)...(19): siRNA sense strand
gagaaaugccgagaagaga

SEQ ID NO: 1544435 - RNA, 19 nt, Homo sapiens
  misc_RNA (1)...(19): siRNA sense strand
cggaauaccaggagaaaug

SEQ ID NO: 1544436 - RNA, 19 nt, Homo sapiens
  misc_RNA (1)...(19): siRNA sense strand
uaucuccgcuaucauugaa

SEQ ID NO: 1544437 - RNA, 19 nt, Homo sapiens
  misc_RNA (1)...(19): siRNA sense strand
aaccagagcgcugacauua

SEQ ID NO: 1544438 - RNA, 19 nt, Homo sapiens
  misc_RNA (1)...(19): siRNA sense strand
guacccaccugucacucuu

SEQ ID NO: 1544439 - RNA, 19 nt, Homo sapiens
  misc_RNA (1)...(19): siRNA sense strand
ccagugggaucucuuggau

SEQ ID NO: 1544440 - RNA, 19 nt, Homo sapiens
  misc_RNA (1)...(19): siRNA sense strand
gaagaccuuggacuuuauu

SEQ ID NO: 1544441 - RNA, 19 nt, Homo sapiens
  misc_RNA (1)...(19): siRNA sense strand
aggaugaccucuucuaugg

SEQ ID NO: 1544442 - RNA, 19 nt, Homo sapiens
  misc_RNA (1)...(19): siRNA sense strand
caggagaaaugccgagaag

SEQ ID NO: 1544443 - RNA, 19 nt, Homo sapiens
  misc_RNA (1)...(19): siRNA sense strand
ccucuucuauggcuuccua

SEQ ID NO: 1544444 - RNA, 19 nt, Homo sapiens
  misc_RNA (1)...(19): siRNA sense strand
agacggcguuccgcauaua

SEQ ID NO: 1544445 - RNA, 19 nt, Homo sapiens
  misc_RNA (1)...(19): siRNA sense strand
ccaaggaugaccucuucua

SEQ ID NO: 1544446 - RNA, 19 nt, Homo sapiens
  misc_RNA (1)...(19): siRNA sense strand
uggcaaaguauccggaaua

SEQ ID NO: 1544447 - RNA, 19 nt, Homo sapiens
  misc_RNA (1)...(19): siRNA sense strand
uggacagucuucagaaaug

SEQ ID NO: 1544448 - RNA, 19 nt, Homo sapiens
  misc_RNA (1)...(19): siRNA sense strand
caaggaugaccucuucuau

SEQ ID NO: 1544449 - RNA, 19 nt, Homo sapiens
  misc_RNA (1)...(19): siRNA sense strand
caacagcaacugccaagag

SEQ ID NO: 1544450 - RNA, 19 nt, Homo sapiens
  misc_RNA (1)...(19): siRNA sense strand
gacacccgccuuccacuuu

SEQ ID NO: 1544451 - RNA, 19 nt, Homo sapiens
  misc_RNA (1)...(19): siRNA sense strand
ggacaucaagcucccagau

SEQ ID NO: 1544452 - RNA, 19 nt, Homo sapiens
  misc_RNA (1)...(19): siRNA sense strand
acaacuaugugcauuaagg

SEQ ID NO: 1544453 - RNA, 19 nt, Homo sapiens
  misc_RNA (1)...(19): siRNA sense strand
gaagagauucaggaaguca

SEQ ID NO: 1544454 - RNA, 19 nt, Homo sapiens
  misc_RNA (1)...(19): siRNA sense strand
ccugaagccuuacaugaag

SEQ ID NO: 1544455 - RNA, 19 nt, Homo sapiens
  misc_RNA (1)...(19): siRNA sense strand
caaccagagcgcugacauu

SEQ ID NO: 1544456 - RNA, 19 nt, Homo sapiens
  misc_RNA (1)...(19): siRNA sense strand
gggcauguaccuuccaaau

SEQ ID NO: 1544457 - RNA, 19 nt, Homo sapiens
  misc_RNA (1)...(19): siRNA sense strand
ccuggacagucuucagaaa

SEQ ID NO: 1544458 - RNA, 19 nt, Homo sapiens
  misc_RNA (1)...(19): siRNA sense strand
gcacggaggacaucaagcu

SEQ ID NO: 1544459 - RNA, 19 nt, Homo sapiens
  misc_RNA (1)...(19): siRNA sense strand
cagacaccuucauguuuga

SEQ ID NO: 1544460 - RNA, 19 nt, Homo sapiens
  misc_RNA (1)...(19): siRNA sense strand
gcaccacuaccucgacuuc

SEQ ID NO: 1544461 - RNA, 19 nt, Homo sapiens
  misc_RNA (1)...(19): siRNA sense strand
ucucuuggaugcuguucaa

SEQ ID NO: 1544462 - RNA, 19 nt, Homo sapiens
  misc_RNA (1)...(19): siRNA sense strand
ggugcacccugauuacauc

SEQ ID NO: 1544463 - RNA, 19 nt, Homo sapiens
  misc_RNA (1)...(19): siRNA sense strand
gaagauggaaaggaacugu

SEQ ID NO: 1544464 - RNA, 19 nt, Homo sapiens
  misc_RNA (1)...(19): siRNA sense strand
gaccuuggacuuuauugau

SEQ ID NO: 1544465 - RNA, 19 nt, Homo sapiens
  misc_RNA (1)...(19): siRNA sense strand
aaaugugucuucagcuaca

SEQ ID NO: 1544466 - RNA, 19 nt, Homo sapiens
  misc_RNA (1)...(19): siRNA sense strand
uuauaucuccgcuaucauu

SEQ ID NO: 1544467 - RNA, 19 nt, Homo sapiens
  misc_RNA (1)...(19): siRNA sense strand
aacagcaacugccaagaga

SEQ ID NO: 1544468 - RNA, 19 nt, Homo sapiens
  misc_RNA (1)...(19): siRNA sense strand
agaagguacuggacaacau

SEQ ID NO: 1544469 - RNA, 19 nt, Homo sapiens
  misc_RNA (1)...(19): siRNA sense strand
gcgcgugguuguggcacua

SEQ ID NO: 1544470 - RNA, 19 nt, Homo sapiens
  misc_RNA (1)...(19): siRNA sense strand
guacaaccccuaccgcuuu

SEQ ID NO: 1544471 - RNA, 19 nt, Homo sapiens
  misc_RNA (1)...(19): siRNA sense strand
aagcagacaccuucauguu

SEQ ID NO: 1544472 - RNA, 19 nt, Homo sapiens
  misc_RNA (1)...(19): siRNA sense strand
ccacuaccucgacuucauu

SEQ ID NO: 1544473 - RNA, 19 nt, Homo sapiens
  misc_RNA (1)...(19): siRNA sense strand
gaccuguccugccgcuguu

SEQ ID NO: 1544474 - RNA, 19 nt, Homo sapiens
  misc_RNA (1)...(19): siRNA sense strand
caacuaugugcauuaagga

SEQ ID NO: 1544475 - RNA, 19 nt, Homo sapiens
  misc_RNA (1)...(19): siRNA sense strand
cauguacucuugguaugga

SEQ ID NO: 1544476 - RNA, 19 nt, Homo sapiens
  misc_RNA (1)...(19): siRNA sense strand
ggaacugucagacgaggau

SEQ ID NO: 1544477 - RNA, 19 nt, Homo sapiens
  misc_RNA (1)...(19): siRNA sense strand
gcggaagccggagcucaua

SEQ ID NO: 1544478 - RNA, 19 nt, Homo sapiens
  misc_RNA (1)...(19): siRNA sense strand
uugacauccugaagccuua

SEQ ID NO: 1544479 - RNA, 19 nt, Homo sapiens
  misc_RNA (1)...(19): siRNA sense strand
gcaacugccaagagaagau

SEQ ID NO: 1544480 - RNA, 19 nt, Homo sapiens
  misc_RNA (1)...(19): siRNA sense strand
gacauuaugcaugcuaaau

SEQ ID NO: 1544481 - RNA, 19 nt, Homo sapiens
  misc_RNA (1)...(19): siRNA sense strand
ggcauguaccuuccaaaug

SEQ ID NO: 1544482 - RNA, 19 nt, Homo sapiens
  misc_RNA (1)...(19): siRNA sense strand
cuucagaaaugugucuuca

SEQ ID NO: 1544483 - RNA, 19 nt, Homo sapiens
  misc_RNA (1)...(19): siRNA sense strand
acacccgccuuccacuuug

SEQ ID NO: 1544484 - RNA, 19 nt, Homo sapiens
  misc_RNA (1)...(19): siRNA sense strand
ggagugggacgaucugacu

SEQ ID NO: 1544485 - RNA, 19 nt, Homo sapiens
  misc_RNA (1)...(19): siRNA sense strand
ucaugacccuggacagucu

SEQ ID NO: 1544486 - RNA, 19 nt, Homo sapiens
  misc_RNA (1)...(19): siRNA sense strand
gaacugucagacgaggaua

SEQ ID NO: 1544487 - RNA, 19 nt, Homo sapiens
  misc_RNA (1)...(19): siRNA sense strand
acucuugucucucgccaau

SEQ ID NO: 1544488 - RNA, 19 nt, Homo sapiens
  misc_RNA (1)...(19): siRNA sense strand
gcaggacccaggaauugca

SEQ ID NO: 1544489 - RNA, 19 nt, Homo sapiens
  misc_RNA (1)...(19): siRNA sense strand
ccuuggacuuuauugaugu

SEQ ID NO: 1544490 - RNA, 19 nt, Homo sapiens
  misc_RNA (1)...(19): siRNA sense strand
aggagagccugcgccagua

SEQ ID NO: 1544491 - RNA, 19 nt, Homo sapiens
  misc_RNA (1)...(19): siRNA sense strand
uggaugcuguucaauuugg

SEQ ID NO: 1544492 - RNA, 19 nt, Homo sapiens
  misc_RNA (1)...(19): siRNA sense strand
agccuuacaugaagaucuu

SEQ ID NO: 1544493 - RNA, 19 nt, Homo sapiens
  misc_RNA (1)...(19): siRNA sense strand
ggccugacuccaaggugua

SEQ ID NO: 1544494 - RNA, 19 nt, Homo sapiens
  misc_RNA (1)...(19): siRNA sense strand
aagacggcguuccgcauau

SEQ ID NO: 1544495 - RNA, 19 nt, Homo sapiens
  misc_RNA (1)...(19): siRNA sense strand
agcagacaccuucauguuu

SEQ ID NO: 1544496 - RNA, 19 nt, Homo sapiens
  misc_RNA (1)...(19): siRNA sense strand
gcugacauuaugcaugcua

SEQ ID NO: 1544497 - RNA, 19 nt, Homo sapiens
  misc_RNA (1)...(19): siRNA sense strand
caacugccaagagaagaug

SEQ ID NO: 1544498 - RNA, 19 nt, Homo sapiens
  misc_RNA (1)...(19): siRNA sense strand
guuugagggucacgacaca

SEQ ID NO: 1544499 - RNA, 19 nt, Homo sapiens
  misc_RNA (1)...(19): siRNA sense strand
gggaugaagauggaaagga

SEQ ID NO: 1544500 - RNA, 19 nt, Homo sapiens
  misc_RNA (1)...(19): siRNA sense strand
ggaagaauguggguagauu

SEQ ID NO: 1544501 - RNA, 19 nt, Homo sapiens
  misc_RNA (1)...(19): siRNA sense strand
ucaacaagguggccgugua

SEQ ID NO: 1544502 - RNA, 19 nt, Homo sapiens
  misc_RNA (1)...(19): siRNA sense strand
gaggugggcuggugcuguu

SEQ ID NO: 1544503 - RNA, 19 nt, Homo sapiens
  misc_RNA (1)...(19): siRNA sense strand
ccagggagguguggaagaa

SEQ ID NO: 1544504 - RNA, 19 nt, Homo sapiens
  misc_RNA (1)...(19): siRNA sense strand
cagcacaccuuccagaaca

SEQ ID NO: 1544505 - RNA, 19 nt, Homo sapiens
  misc_RNA (1)...(19): siRNA sense strand
ggaugaaucugugcaccaa

SEQ ID NO: 1544506 - RNA, 19 nt, Homo sapiens
  misc_RNA (1)...(19): siRNA sense strand
ggucucauguucacacuca

SEQ ID NO: 1544507 - RNA, 19 nt, Homo sapiens
  misc_RNA (1)...(19): siRNA sense strand
uacuacagcuucaacauug

SEQ ID NO: 1544508 - RNA, 19 nt, Homo sapiens
  misc_RNA (1)...(19): siRNA sense strand
caguggagguggauuucua

SEQ ID NO: 1544509 - RNA, 19 nt, Homo sapiens
  misc_RNA (1)...(19): siRNA sense strand
gucaguacgccaucucuua

SEQ ID NO: 1544510 - RNA, 19 nt, Homo sapiens
  misc_RNA (1)...(19): siRNA sense strand
cuacuacuccaguuucuuu

SEQ ID NO: 1544511 - RNA, 19 nt, Homo sapiens
  misc_RNA (1)...(19): siRNA sense strand
ccaaggagcccugccaaga

SEQ ID NO: 1544512 - RNA, 19 nt, Homo sapiens
  misc_RNA (1)...(19): siRNA sense strand
ccaccaaccuggccaucug

SEQ ID NO: 1544513 - RNA, 19 nt, Homo sapiens
  misc_RNA (1)...(19): siRNA sense strand
aaagacauuucucuguuuc

SEQ ID NO: 1544514 - RNA, 19 nt, Homo sapiens
  misc_RNA (1)...(19): siRNA sense strand
caacaucugccucccuuuc

SEQ ID NO: 1544515 - RNA, 19 nt, Homo sapiens
  misc_RNA (1)...(19): siRNA sense strand
cuacuacagcuucaacauu

SEQ ID NO: 1544516 - RNA, 19 nt, Homo sapiens
  misc_RNA (1)...(19): siRNA sense strand
gcuccaucaucuaccguuu

SEQ ID NO: 1544517 - RNA, 19 nt, Homo sapiens
  misc_RNA (1)...(19): siRNA sense strand
ggaaucugcacccucauca

SEQ ID NO: 1544518 - RNA, 19 nt, Homo sapiens
  misc_RNA (1)...(19): siRNA sense strand
uaugucauguggaagaaug

SEQ ID NO: 1544519 - RNA, 19 nt, Homo sapiens
  misc_RNA (1)...(19): siRNA sense strand
gccaagaccucaccuucac

SEQ ID NO: 1544520 - RNA, 19 nt, Homo sapiens
  misc_RNA (1)...(19): siRNA sense strand
caucauccagaccuacuuu

SEQ ID NO: 1544521 - RNA, 19 nt, Homo sapiens
  misc_RNA (1)...(19): siRNA sense strand
acacaguggagguggauuu

SEQ ID NO: 1544522 - RNA, 19 nt, Homo sapiens
  misc_RNA (1)...(19): siRNA sense strand
gcuugggacucaccaccuu

SEQ ID NO: 1544523 - RNA, 19 nt, Homo sapiens
  misc_RNA (1)...(19): siRNA sense strand
ucucaucucugaccagcau

SEQ ID NO: 1544524 - RNA, 19 nt, Homo sapiens
  misc_RNA (1)...(19): siRNA sense strand
cuaccuauaucccuucaac

SEQ ID NO: 1544525 - RNA, 19 nt, Homo sapiens
  misc_RNA (1)...(19): siRNA sense strand
gcuucaacauugucugcuu

SEQ ID NO: 1544526 - RNA, 19 nt, Homo sapiens
  misc_RNA (1)...(19): siRNA sense strand
cggcggagccuucaacaag

SEQ ID NO: 1544527 - RNA, 19 nt, Homo sapiens
  misc_RNA (1)...(19): siRNA sense strand
ccaccaugcuguaugucau

SEQ ID NO: 1544528 - RNA, 19 nt, Homo sapiens
  misc_RNA (1)...(19): siRNA sense strand
ccagucagccaucaagauc

SEQ ID NO: 1544529 - RNA, 19 nt, Homo sapiens
  misc_RNA (1)...(19): siRNA sense strand
caacaagguggccguguac

SEQ ID NO: 1544530 - RNA, 19 nt, Homo sapiens
  misc_RNA (1)...(19): siRNA sense strand
ccucauccaggcuguguuu

SEQ ID NO: 1544531 - RNA, 19 nt, Homo sapiens
  misc_RNA (1)...(19): siRNA sense strand
gggcuggugcuguuuggaa

SEQ ID NO: 1544532 - RNA, 19 nt, Homo sapiens
  misc_RNA (1)...(19): siRNA sense strand
ccuccaccaugcuguaugu

SEQ ID NO: 1544533 - RNA, 19 nt, Homo sapiens
  misc_RNA (1)...(19): siRNA sense strand
gggaagcaguggccaucgu

SEQ ID NO: 1544534 - RNA, 19 nt, Homo sapiens
  misc_RNA (1)...(19): siRNA sense strand
caucuacgagguucaagug

SEQ ID NO: 1544535 - RNA, 19 nt, Homo sapiens
  misc_RNA (1)...(19): siRNA sense strand
cuccuacucugcaauguca

SEQ ID NO: 1544536 - RNA, 19 nt, Homo sapiens
  misc_RNA (1)...(19): siRNA sense strand
gcugcucacugcgaugaug

SEQ ID NO: 1544537 - RNA, 19 nt, Homo sapiens
  misc_RNA (1)...(19): siRNA sense strand
cauccaggcuguguuuguc

SEQ ID NO: 1544538 - RNA, 19 nt, Homo sapiens
  misc_RNA (1)...(19): siRNA sense strand
uuccagaacauguuuauca

SEQ ID NO: 1544539 - RNA, 19 nt, Homo sapiens
  misc_RNA (1)...(19): siRNA sense strand
ccacgcccgucucaucucu

SEQ ID NO: 1544540 - RNA, 19 nt, Homo sapiens
  misc_RNA (1)...(19): siRNA sense strand
aaucugcacccucaucaug

SEQ ID NO: 1544541 - RNA, 19 nt, Homo sapiens
  misc_RNA (1)...(19): siRNA sense strand
gcacaccuuccagaacaug

SEQ ID NO: 1544542 - RNA, 19 nt, Homo sapiens
  misc_RNA (1)...(19): siRNA sense strand
gggcggucaucgucaacau

SEQ ID NO: 1544543 - RNA, 19 nt, Homo sapiens
  misc_RNA (1)...(19): siRNA sense strand
ggagacgccagugccuaaa

SEQ ID NO: 1544544 - RNA, 19 nt, Homo sapiens
  misc_RNA (1)...(19): siRNA sense strand
uggagacgccagugccuaa

SEQ ID NO: 1544545 - RNA, 19 nt, Homo sapiens
  misc_RNA (1)...(19): siRNA sense strand
gguguggucucauguucac

SEQ ID NO: 1544546 - RNA, 19 nt, Homo sapiens
  misc_RNA (1)...(19): siRNA sense strand
caaggagcccugccaagac

SEQ ID NO: 1544547 - RNA, 19 nt, Homo sapiens
  misc_RNA (1)...(19): siRNA sense strand
uccagaacauguuuaucau

SEQ ID NO: 1544548 - RNA, 19 nt, Homo sapiens
  misc_RNA (1)...(19): siRNA sense strand
guggaagaauguggguaga

SEQ ID NO: 1544549 - RNA, 19 nt, Homo sapiens
  misc_RNA (1)...(19): siRNA sense strand
cuacuccaguuucuuugag

SEQ ID NO: 1544550 - RNA, 19 nt, Homo sapiens
  misc_RNA (1)...(19): siRNA sense strand
agacauuucucuguuucuc

SEQ ID NO: 1544551 - RNA, 19 nt, Homo sapiens
  misc_RNA (1)...(19): siRNA sense strand
gcgcugcucacugcgauga

SEQ ID NO: 1544552 - RNA, 19 nt, Homo sapiens
  misc_RNA (1)...(19): siRNA sense strand
ggcuggugcuguuuggaau

SEQ ID NO: 1544553 - RNA, 19 nt, Homo sapiens
  misc_RNA (1)...(19): siRNA sense strand
gaaacuggcuuuaauguaa

SEQ ID NO: 1544554 - RNA, 19 nt, Homo sapiens
  misc_RNA (1)...(19): siRNA sense strand
gaacuuaucucacuggaau

SEQ ID NO: 1544555 - RNA, 19 nt, Homo sapiens
  misc_RNA (1)...(19): siRNA sense strand
caagggaucuuucaauuau

SEQ ID NO: 1544556 - RNA, 19 nt, Homo sapiens
  misc_RNA (1)...(19): siRNA sense strand
ggaauuguccucuuaauga

SEQ ID NO: 1544557 - RNA, 19 nt, Homo sapiens
  misc_RNA (1)...(19): siRNA sense strand
cuagaacgauuacaacaua

SEQ ID NO: 1544558 - RNA, 19 nt, Homo sapiens
  misc_RNA (1)...(19): siRNA sense strand
gcucuagacuugcacaauu

SEQ ID NO: 1544559 - RNA, 19 nt, Homo sapiens
  misc_RNA (1)...(19): siRNA sense strand
ucagauaccuuguguagau

SEQ ID NO: 1544560 - RNA, 19 nt, Homo sapiens
  misc_RNA (1)...(19): siRNA sense strand
gaaaugagaacugugcuaa

SEQ ID NO: 1544561 - RNA, 19 nt, Homo sapiens
  misc_RNA (1)...(19): siRNA sense strand
gaauuguccucuuaaugaa

SEQ ID NO: 1544562 - RNA, 19 nt, Homo sapiens
  misc_RNA (1)...(19): siRNA sense strand
gagaagaaaugagaacugu

SEQ ID NO: 1544563 - RNA, 19 nt, Homo sapiens
  misc_RNA (1)...(19): siRNA sense strand
gccaagaacucucauucaa

SEQ ID NO: 1544564 - RNA, 19 nt, Homo sapiens
  misc_RNA (1)...(19): siRNA sense strand
gaacucucauucaaaccua

SEQ ID NO: 1544565 - RNA, 19 nt, Homo sapiens
  misc_RNA (1)...(19): siRNA sense strand
gaaauuaaggcaccgaaga

SEQ ID NO: 1544566 - RNA, 19 nt, Homo sapiens
  misc_RNA (1)...(19): siRNA sense strand
caagaacucucauucaaac

SEQ ID NO: 1544567 - RNA, 19 nt, Homo sapiens
  misc_RNA (1)...(19): siRNA sense strand
ggaaacuggcuuuaaugua

SEQ ID NO: 1544568 - RNA, 19 nt, Homo sapiens
  misc_RNA (1)...(19): siRNA sense strand
aaacaaugauggugaaaca

SEQ ID NO: 1544569 - RNA, 19 nt, Homo sapiens
  misc_RNA (1)...(19): siRNA sense strand
caauuuagcccucuccaaa

SEQ ID NO: 1544570 - RNA, 19 nt, Homo sapiens
  misc_RNA (1)...(19): siRNA sense strand
gaacgauuacaacauauga

SEQ ID NO: 1544571 - RNA, 19 nt, Homo sapiens
  misc_RNA (1)...(19): siRNA sense strand
ggaacuagaacgauuacaa

SEQ ID NO: 1544572 - RNA, 19 nt, Homo sapiens
  misc_RNA (1)...(19): siRNA sense strand
gaaggaaguaccauagaga

SEQ ID NO: 1544573 - RNA, 19 nt, Homo sapiens
  misc_RNA (1)...(19): siRNA sense strand
gcuaacagccuacgugugu

SEQ ID NO: 1544574 - RNA, 19 nt, Homo sapiens
  misc_RNA (1)...(19): siRNA sense strand
aacaagggaucuuucaauu

SEQ ID NO: 1544575 - RNA, 19 nt, Homo sapiens
  misc_RNA (1)...(19): siRNA sense strand
ccauacaaaucaaucaaug

SEQ ID NO: 1544576 - RNA, 19 nt, Homo sapiens
  misc_RNA (1)...(19): siRNA sense strand
aaacagcaguguggaagaa

SEQ ID NO: 1544577 - RNA, 19 nt, Homo sapiens
  misc_RNA (1)...(19): siRNA sense strand
gaaccauccauuaacaauu

SEQ ID NO: 1544578 - RNA, 19 nt, Homo sapiens
  misc_RNA (1)...(19): siRNA sense strand
acaagggaucuuucaauua

SEQ ID NO: 1544579 - RNA, 19 nt, Homo sapiens
  misc_RNA (1)...(19): siRNA sense strand
gauaacucguuuacuggaa

SEQ ID NO: 1544580 - RNA, 19 nt, Homo sapiens
  misc_RNA (1)...(19): siRNA sense strand
auaagggucuucacucuga

SEQ ID NO: 1544581 - RNA, 19 nt, Homo sapiens
  misc_RNA (1)...(19): siRNA sense strand
gaaguaccauagagaagag

SEQ ID NO: 1544582 - RNA, 19 nt, Homo sapiens
  misc_RNA (1)...(19): siRNA sense strand
ggaaguaccauagagaaga

SEQ ID NO: 1544583 - RNA, 19 nt, Homo sapiens
  misc_RNA (1)...(19): siRNA sense strand
uuauggaauuguccucuua

SEQ ID NO: 1544584 - RNA, 19 nt, Homo sapiens
  misc_RNA (1)...(19): siRNA sense strand
aaccauccauuaacaauug

SEQ ID NO: 1544585 - RNA, 19 nt, Homo sapiens
  misc_RNA (1)...(19): siRNA sense strand
gcaaauauagauggaauuc

SEQ ID NO: 1544586 - RNA, 19 nt, Homo sapiens
  misc_RNA (1)...(19): siRNA sense strand
gaacuugaagccagaaaca

SEQ ID NO: 1544587 - RNA, 19 nt, Homo sapiens
  misc_RNA (1)...(19): siRNA sense strand
ccaagaacucucauucaaa

SEQ ID NO: 1544588 - RNA, 19 nt, Homo sapiens
  misc_RNA (1)...(19): siRNA sense strand
gcaaugcuggcaaauauag

SEQ ID NO: 1544589 - RNA, 19 nt, Homo sapiens
  misc_RNA (1)...(19): siRNA sense strand
gaacuagaacgauuacaac

SEQ ID NO: 1544590 - RNA, 19 nt, Homo sapiens
  misc_RNA (1)...(19): siRNA sense strand
caacugaugcuagaaccua

SEQ ID NO: 1544591 - RNA, 19 nt, Homo sapiens
  misc_RNA (1)...(19): siRNA sense strand
guauuuccauauccugauu

SEQ ID NO: 1544592 - RNA, 19 nt, Homo sapiens
  misc_RNA (1)...(19): siRNA sense strand
cgccuucccuuauugcuaa

SEQ ID NO: 1544593 - RNA, 19 nt, Homo sapiens
  misc_RNA (1)...(19): siRNA sense strand
cuugauaacucguuuacug

SEQ ID NO: 1544594 - RNA, 19 nt, Homo sapiens
  misc_RNA (1)...(19): siRNA sense strand
gaugcuagaaccuaauuug

SEQ ID NO: 1544595 - RNA, 19 nt, Homo sapiens
  misc_RNA (1)...(19): siRNA sense strand
cagauaccuuguguagaua

SEQ ID NO: 1544596 - RNA, 19 nt, Homo sapiens
  misc_RNA (1)...(19): siRNA sense strand
uuucagugcucuagacuug

SEQ ID NO: 1544597 - RNA, 19 nt, Homo sapiens
  misc_RNA (1)...(19): siRNA sense strand
aacauuaccugcuccaaau

SEQ ID NO: 1544598 - RNA, 19 nt, Homo sapiens
  misc_RNA (1)...(19): siRNA sense strand
aaacauuaccugcuccaaa

SEQ ID NO: 1544599 - RNA, 19 nt, Homo sapiens
  misc_RNA (1)...(19): siRNA sense strand
acaauugcuucaguugaua

SEQ ID NO: 1544600 - RNA, 19 nt, Homo sapiens
  misc_RNA (1)...(19): siRNA sense strand
guaaacaagggaucuuuca

SEQ ID NO: 1544601 - RNA, 19 nt, Homo sapiens
  misc_RNA (1)...(19): siRNA sense strand
guugaacacuugauaacuc

SEQ ID NO: 1544602 - RNA, 19 nt, Homo sapiens
  misc_RNA (1)...(19): siRNA sense strand
aaacaagggaucuuucaau

SEQ ID NO: 1544603 - RNA, 19 nt, Homo sapiens
  misc_RNA (1)...(19): siRNA sense strand
uaacaauugcuucaguuga

SEQ ID NO: 1544604 - RNA, 19 nt, Homo sapiens
  misc_RNA (1)...(19): siRNA sense strand
gauaccuuguguagauaaa

SEQ ID NO: 1544605 - RNA, 19 nt, Homo sapiens
  misc_RNA (1)...(19): siRNA sense strand
caaacgacuuucuguacuc

SEQ ID NO: 1544606 - RNA, 19 nt, Homo sapiens
  misc_RNA (1)...(19): siRNA sense strand
aaugagaacugugcuaaca

SEQ ID NO: 1544607 - RNA, 19 nt, Homo sapiens
  misc_RNA (1)...(19): siRNA sense strand
gaaacagcaguguggaaga

SEQ ID NO: 1544608 - RNA, 19 nt, Homo sapiens
  misc_RNA (1)...(19): siRNA sense strand
gcaccgaagagaaacuuug

SEQ ID NO: 1544609 - RNA, 19 nt, Homo sapiens
  misc_RNA (1)...(19): siRNA sense strand
gaacacuugauaacucguu

SEQ ID NO: 1544610 - RNA, 19 nt, Homo sapiens
  misc_RNA (1)...(19): siRNA sense strand
guacacagaauaguaaaca

SEQ ID NO: 1544611 - RNA, 19 nt, Homo sapiens
  misc_RNA (1)...(19): siRNA sense strand
ugaaggaaguaccauagag

SEQ ID NO: 1544612 - RNA, 19 nt, Homo sapiens
  misc_RNA (1)...(19): siRNA sense strand
gacaaaugauacuuuacuc

SEQ ID NO: 1544613 - RNA, 19 nt, Homo sapiens
  misc_RNA (1)...(19): siRNA sense strand
aaagagaggccaagacuac

SEQ ID NO: 1544614 - RNA, 19 nt, Homo sapiens
  misc_RNA (1)...(19): siRNA sense strand
ucaccgaggagccaaauga

SEQ ID NO: 1544615 - RNA, 19 nt, Homo sapiens
  misc_RNA (1)...(19): siRNA sense strand
uaaugaaggaaguaccaua

SEQ ID NO: 1544616 - RNA, 19 nt, Homo sapiens
  misc_RNA (1)...(19): siRNA sense strand
uuaaggcaccgaagagaaa

SEQ ID NO: 1544617 - RNA, 19 nt, Homo sapiens
  misc_RNA (1)...(19): siRNA sense strand
gagaggccaagacuacaaa

SEQ ID NO: 1544618 - RNA, 19 nt, Homo sapiens
  misc_RNA (1)...(19): siRNA sense strand
ggaauuugaaacauggaaa

SEQ ID NO: 1544619 - RNA, 19 nt, Homo sapiens
  misc_RNA (1)...(19): siRNA sense strand
ggagaagaaaugagaacug

SEQ ID NO: 1544620 - RNA, 19 nt, Homo sapiens
  misc_RNA (1)...(19): siRNA sense strand
agaccauucucuauucaga

SEQ ID NO: 1544621 - RNA, 19 nt, Homo sapiens
  misc_RNA (1)...(19): siRNA sense strand
aguggaaacuggcuuuaau

SEQ ID NO: 1544622 - RNA, 19 nt, Homo sapiens
  misc_RNA (1)...(19): siRNA sense strand
ugagauucauguuaguuca

SEQ ID NO: 1544623 - RNA, 19 nt, Homo sapiens
  misc_RNA (1)...(19): siRNA sense strand
aagaaacuuuaccgacaaa

SEQ ID NO: 1544624 - RNA, 19 nt, Homo sapiens
  misc_RNA (1)...(19): siRNA sense strand
uggcaaauauagauggaau

SEQ ID NO: 1544625 - RNA, 19 nt, Homo sapiens
  misc_RNA (1)...(19): siRNA sense strand
cgaggagccaaaugaagua

SEQ ID NO: 1544626 - RNA, 19 nt, Homo sapiens
  misc_RNA (1)...(19): siRNA sense strand
aacaauugcuucaguugau

SEQ ID NO: 1544627 - RNA, 19 nt, Homo sapiens
  misc_RNA (1)...(19): siRNA sense strand
caacucugguucuuguaag

SEQ ID NO: 1544628 - RNA, 19 nt, Homo sapiens
  misc_RNA (1)...(19): siRNA sense strand
acucugaaccauccauuaa

SEQ ID NO: 1544629 - RNA, 19 nt, Homo sapiens
  misc_RNA (1)...(19): siRNA sense strand
caaugccaguuucaccuau

SEQ ID NO: 1544630 - RNA, 19 nt, Homo sapiens
  misc_RNA (1)...(19): siRNA sense strand
gauaagaaucccaaaaguu

SEQ ID NO: 1544631 - RNA, 19 nt, Homo sapiens
  misc_RNA (1)...(19): siRNA sense strand
cuacgugugucaaacaucu

SEQ ID NO: 1544632 - RNA, 19 nt, Homo sapiens
  misc_RNA (1)...(19): siRNA sense strand
gacaguggacccugcagaa

SEQ ID NO: 1544633 - RNA, 19 nt, Homo sapiens
  misc_RNA (1)...(19): siRNA sense strand
ucugacaauuggaaaguga

SEQ ID NO: 1544634 - RNA, 19 nt, Homo sapiens
  misc_RNA (1)...(19): siRNA sense strand
cuauaagggucuucacucu

SEQ ID NO: 1544635 - RNA, 19 nt, Homo sapiens
  misc_RNA (1)...(19): siRNA sense strand
aaacuuugcgacucuuuga

SEQ ID NO: 1544636 - RNA, 19 nt, Homo sapiens
  misc_RNA (1)...(19): siRNA sense strand
gagaagacaaaugauacuu

SEQ ID NO: 1544637 - RNA, 19 nt, Homo sapiens
  misc_RNA (1)...(19): siRNA sense strand
ggucucugcuggcccuaug

SEQ ID NO: 1544638 - RNA, 19 nt, Homo sapiens
  misc_RNA (1)...(19): siRNA sense strand
cauuaacaauugcuucagu

SEQ ID NO: 1544639 - RNA, 19 nt, Homo sapiens
  misc_RNA (1)...(19): siRNA sense strand
ucugaaccauccauuaaca

SEQ ID NO: 1544640 - RNA, 19 nt, Homo sapiens
  misc_RNA (1)...(19): siRNA sense strand
gagaagagggaauucaaaa

SEQ ID NO: 1544641 - RNA, 19 nt, Homo sapiens
  misc_RNA (1)...(19): siRNA sense strand
ucauucaaaccuacuauug

SEQ ID NO: 1544642 - RNA, 19 nt, Homo sapiens
  misc_RNA (1)...(19): siRNA sense strand
caagacuacaaacgacuuu

SEQ ID NO: 1544643 - RNA, 19 nt, Homo sapiens
  misc_RNA (1)...(19): siRNA sense strand
ccuaauuugucggugcaua

SEQ ID NO: 1544644 - RNA, 19 nt, Homo sapiens
  misc_RNA (1)...(19): siRNA sense strand
gaaaaugagaagacaaaug

SEQ ID NO: 1544645 - RNA, 19 nt, Homo sapiens
  misc_RNA (1)...(19): siRNA sense strand
cuugaagccagaaacaaua

SEQ ID NO: 1544646 - RNA, 19 nt, Homo sapiens
  misc_RNA (1)...(19): siRNA sense strand
ccaaugccaguuucaccua

SEQ ID NO: 1544647 - RNA, 19 nt, Homo sapiens
  misc_RNA (1)...(19): siRNA sense strand
ggucuccaaugccaguuuc

SEQ ID NO: 1544648 - RNA, 19 nt, Homo sapiens
  misc_RNA (1)...(19): siRNA sense strand
cucuagacuugcacaauuu

SEQ ID NO: 1544649 - RNA, 19 nt, Homo sapiens
  misc_RNA (1)...(19): siRNA sense strand
caaaucugacaauuggaaa

SEQ ID NO: 1544650 - RNA, 19 nt, Homo sapiens
  misc_RNA (1)...(19): siRNA sense strand
caccuauaccucugacuuu

SEQ ID NO: 1544651 - RNA, 19 nt, Homo sapiens
  misc_RNA (1)...(19): siRNA sense strand
gcuggcaaauauagaugga

SEQ ID NO: 1544652 - RNA, 19 nt, Homo sapiens
  misc_RNA (1)...(19): siRNA sense strand
acaaacgacuuucuguacu

SEQ ID NO: 1544653 - RNA, 19 nt, Homo sapiens
  misc_RNA (1)...(19): siRNA sense strand
gaacacgccuuuccugaag

SEQ ID NO: 1544654 - RNA, 19 nt, Homo sapiens
  misc_RNA (1)...(19): siRNA sense strand
gcaccucucuggagcuaug

SEQ ID NO: 1544655 - RNA, 19 nt, Homo sapiens
  misc_RNA (1)...(19): siRNA sense strand
gauacuggcuaaacuacga

SEQ ID NO: 1544656 - RNA, 19 nt, Homo sapiens
  misc_RNA (1)...(19): siRNA sense strand
cgaggcaggugaugaagga

SEQ ID NO: 1544657 - RNA, 19 nt, Homo sapiens
  misc_RNA (1)...(19): siRNA sense strand
ggaagaaccggaagaaggu

SEQ ID NO: 1544658 - RNA, 19 nt, Homo sapiens
  misc_RNA (1)...(19): siRNA sense strand
gggagagguucaagucaga

SEQ ID NO: 1544659 - RNA, 19 nt, Homo sapiens
  misc_RNA (1)...(19): siRNA sense strand
ccucaucaccuuccucuuu

SEQ ID NO: 1544660 - RNA, 19 nt, Homo sapiens
  misc_RNA (1)...(19): siRNA sense strand
gcaccaacacugcagaaga

SEQ ID NO: 1544661 - RNA, 19 nt, Homo sapiens
  misc_RNA (1)...(19): siRNA sense strand
uugcagagauacuggcuaa

SEQ ID NO: 1544662 - RNA, 19 nt, Homo sapiens
  misc_RNA (1)...(19): siRNA sense strand
acaaucgccugguggguuu

SEQ ID NO: 1544663 - RNA, 19 nt, Homo sapiens
  misc_RNA (1)...(19): siRNA sense strand
uuccuggccuucaccauua

SEQ ID NO: 1544664 - RNA, 19 nt, Homo sapiens
  misc_RNA (1)...(19): siRNA sense strand
guacgacaucuucaacuug

SEQ ID NO: 1544665 - RNA, 19 nt, Homo sapiens
  misc_RNA (1)...(19): siRNA sense strand
ccacuccgcaucucaagaa

SEQ ID NO: 1544666 - RNA, 19 nt, Homo sapiens
  misc_RNA (1)...(19): siRNA sense strand
ugaaggcuuugguccagaa

SEQ ID NO: 1544667 - RNA, 19 nt, Homo sapiens
  misc_RNA (1)...(19): siRNA sense strand
gugaagggacaaccaugua

SEQ ID NO: 1544668 - RNA, 19 nt, Homo sapiens
  misc_RNA (1)...(19): siRNA sense strand
gucuacaucuuugcacuuu

SEQ ID NO: 1544669 - RNA, 19 nt, Homo sapiens
  misc_RNA (1)...(19): siRNA sense strand
gcagagauacuggcuaaac

SEQ ID NO: 1544670 - RNA, 19 nt, Homo sapiens
  misc_RNA (1)...(19): siRNA sense strand
caacagcuacggccucuac

SEQ ID NO: 1544671 - RNA, 19 nt, Homo sapiens
  misc_RNA (1)...(19): siRNA sense strand
gacccucaccuguguauuc

SEQ ID NO: 1544672 - RNA, 19 nt, Homo sapiens
  misc_RNA (1)...(19): siRNA sense strand
uguacgacaucuucaacuu

SEQ ID NO: 1544673 - RNA, 19 nt, Homo sapiens
  misc_RNA (1)...(19): siRNA sense strand
ccuucaccauuauucuuua

SEQ ID NO: 1544674 - RNA, 19 nt, Homo sapiens
  misc_RNA (1)...(19): siRNA sense strand
cagagauacuggcuaaacu

SEQ ID NO: 1544675 - RNA, 19 nt, Homo sapiens
  misc_RNA (1)...(19): siRNA sense strand
gcuacuuccucaucaccuu

SEQ ID NO: 1544676 - RNA, 19 nt, Homo sapiens
  misc_RNA (1)...(19): siRNA sense strand
caccaacacugcagaagac

SEQ ID NO: 1544677 - RNA, 19 nt, Homo sapiens
  misc_RNA (1)...(19): siRNA sense strand
ugaacacgccuuuccugaa

SEQ ID NO: 1544678 - RNA, 19 nt, Homo sapiens
  misc_RNA (1)...(19): siRNA sense strand
uggaaaacuugcagagaua

SEQ ID NO: 1544679 - RNA, 19 nt, Homo sapiens
  misc_RNA (1)...(19): siRNA sense strand
gcuuugugcuucaccaagu

SEQ ID NO: 1544680 - RNA, 19 nt, Homo sapiens
  misc_RNA (1)...(19): siRNA sense strand
cgacuucccaagagccuuu

SEQ ID NO: 1544681 - RNA, 19 nt, Homo sapiens
  misc_RNA (1)...(19): siRNA sense strand
agagauacuggcuaaacua

SEQ ID NO: 1544682 - RNA, 19 nt, Homo sapiens
  misc_RNA (1)...(19): siRNA sense strand
gcuacggccucuacaccau

SEQ ID NO: 1544683 - RNA, 19 nt, Homo sapiens
  misc_RNA (1)...(19): siRNA sense strand
cuccgcaucucaagaauag

SEQ ID NO: 1544684 - RNA, 19 nt, Homo sapiens
  misc_RNA (1)...(19): siRNA sense strand
ccgcuuggccgucaccauu

SEQ ID NO: 1544685 - RNA, 19 nt, Homo sapiens
  misc_RNA (1)...(19): siRNA sense strand
ccaccgaagggccaagaaa

SEQ ID NO: 1544686 - RNA, 19 nt, Homo sapiens
  misc_RNA (1)...(19): siRNA sense strand
acaugacccucaccugugu

SEQ ID NO: 1544687 - RNA, 19 nt, Homo sapiens
  misc_RNA (1)...(19): siRNA sense strand
ucaccuggaugggccuuga

SEQ ID NO: 1544688 - RNA, 19 nt, Homo sapiens
  misc_RNA (1)...(19): siRNA sense strand
ggagcaacaacauguacga

SEQ ID NO: 1544689 - RNA, 19 nt, Homo sapiens
  misc_RNA (1)...(19): siRNA sense strand
gagugcgacuucccaagag

SEQ ID NO: 1544690 - RNA, 19 nt, Homo sapiens
  misc_RNA (1)...(19): siRNA sense strand
cucaucaccuuccucuuug

SEQ ID NO: 1544691 - RNA, 19 nt, Homo sapiens
  misc_RNA (1)...(19): siRNA sense strand
ccgcaccucucuggagcua

SEQ ID NO: 1544692 - RNA, 19 nt, Homo sapiens
  misc_RNA (1)...(19): siRNA sense strand
gggcugucuuccacuacuu

SEQ ID NO: 1544693 - RNA, 19 nt, Homo sapiens
  misc_RNA (1)...(19): siRNA sense strand
ucaccauucuggacauugg

SEQ ID NO: 1544694 - RNA, 19 nt, Homo sapiens
  misc_RNA (1)...(19): siRNA sense strand
gagauacuggcuaaacuac

SEQ ID NO: 1544695 - RNA, 19 nt, Homo sapiens
  misc_RNA (1)...(19): siRNA sense strand
gccuucaccauuauucuuu

SEQ ID NO: 1544696 - RNA, 19 nt, Homo sapiens
  misc_RNA (1)...(19): siRNA sense strand
ucaccauuauucuuuaugc

SEQ ID NO: 1544697 - RNA, 19 nt, Homo sapiens
  misc_RNA (1)...(19): siRNA sense strand
guggaaaacuugcagagau

SEQ ID NO: 1544698 - RNA, 19 nt, Homo sapiens
  misc_RNA (1)...(19): siRNA sense strand
aggaagguuugacgcagaa

SEQ ID NO: 1544699 - RNA, 19 nt, Homo sapiens
  misc_RNA (1)...(19): siRNA sense strand
caagucagagcaccacagu

SEQ ID NO: 1544700 - RNA, 19 nt, Homo sapiens
  misc_RNA (1)...(19): siRNA sense strand
cagcgacuccugcaaugug

SEQ ID NO: 1544701 - RNA, 19 nt, Homo sapiens
  misc_RNA (1)...(19): siRNA sense strand
gagguucaagucagaagau

SEQ ID NO: 1544702 - RNA, 19 nt, Homo sapiens
  misc_RNA (1)...(19): siRNA sense strand
gcugugaccaccugaccuu

SEQ ID NO: 1544703 - RNA, 19 nt, Homo sapiens
  misc_RNA (1)...(19): siRNA sense strand
gaugaaggacgaggacaag

SEQ ID NO: 1544704 - RNA, 19 nt, Homo sapiens
  misc_RNA (1)...(19): siRNA sense strand
ccacggcuacuuccucauc

SEQ ID NO: 1544705 - RNA, 19 nt, Homo sapiens
  misc_RNA (1)...(19): siRNA sense strand
cuacuucgggcacuacuuc

SEQ ID NO: 1544706 - RNA, 19 nt, Homo sapiens
  misc_RNA (1)...(19): siRNA sense strand
ggucuucaacaccuacuuc

SEQ ID NO: 1544707 - RNA, 19 nt, Homo sapiens
  misc_RNA (1)...(19): siRNA sense strand
ucagggucuucaacaccua

SEQ ID NO: 1544708 - RNA, 19 nt, Homo sapiens
  misc_RNA (1)...(19): siRNA sense strand
gauggcagcggcguguuga

SEQ ID NO: 1544709 - RNA, 19 nt, Homo sapiens
  misc_RNA (1)...(19): siRNA sense strand
agagugcgacuucccaaga

SEQ ID NO: 1544710 - RNA, 19 nt, Homo sapiens
  misc_RNA (1)...(19): siRNA sense strand
uccuuuaccucccaaguca

SEQ ID NO: 1544711 - RNA, 19 nt, Homo sapiens
  misc_RNA (1)...(19): siRNA sense strand
ucugggaugugacuaaagg

SEQ ID NO: 1544712 - RNA, 19 nt, Homo sapiens
  misc_RNA (1)...(19): siRNA sense strand
gaccaguccacggugcaua

SEQ ID NO: 1544713 - RNA, 19 nt, Homo sapiens
  misc_RNA (1)...(19): siRNA sense strand
cuugcaaggugucuucauc

SEQ ID NO: 1544714 - RNA, 19 nt, Homo sapiens
  misc_RNA (1)...(19): siRNA sense strand
acaccuacuucgggcacua

SEQ ID NO: 1544715 - RNA, 19 nt, Homo sapiens
  misc_RNA (1)...(19): siRNA sense strand
ggccuucaccauuauucuu

SEQ ID NO: 1544716 - RNA, 19 nt, Homo sapiens
  misc_RNA (1)...(19): siRNA sense strand
agucagagcaccacagucu

SEQ ID NO: 1544717 - RNA, 19 nt, Homo sapiens
  misc_RNA (1)...(19): siRNA sense strand
ggagagguucaagucagaa

SEQ ID NO: 1544718 - RNA, 19 nt, Homo sapiens
  misc_RNA (1)...(19): siRNA sense strand
gcagagcccuugcugaaga

SEQ ID NO: 1544719 - RNA, 19 nt, Homo sapiens
  misc_RNA (1)...(19): siRNA sense strand
gcaccuucaucgagaaaua

SEQ ID NO: 1544720 - RNA, 19 nt, Homo sapiens
  misc_RNA (1)...(19): siRNA sense strand
gaacaaaguggaccuggaa

SEQ ID NO: 1544721 - RNA, 19 nt, Homo sapiens
  misc_RNA (1)...(19): siRNA sense strand
gaaagugccagucaucuug

SEQ ID NO: 1544722 - RNA, 19 nt, Homo sapiens
  misc_RNA (1)...(19): siRNA sense strand
gaaauugugaggcagauga

SEQ ID NO: 1544723 - RNA, 19 nt, Homo sapiens
  misc_RNA (1)...(19): siRNA sense strand
ggaaagugagagagaagua

SEQ ID NO: 1544724 - RNA, 19 nt, Homo sapiens
  misc_RNA (1)...(19): siRNA sense strand
gacgaacucuuugcagaaa

SEQ ID NO: 1544725 - RNA, 19 nt, Homo sapiens
  misc_RNA (1)...(19): siRNA sense strand
gaaacuuccgcuaagagua

SEQ ID NO: 1544726 - RNA, 19 nt, Homo sapiens
  misc_RNA (1)...(19): siRNA sense strand
cgaacucuuugcagaaauu

SEQ ID NO: 1544727 - RNA, 19 nt, Homo sapiens
  misc_RNA (1)...(19): siRNA sense strand
ggacgaacucuuugcagaa

SEQ ID NO: 1544728 - RNA, 19 nt, Homo sapiens
  misc_RNA (1)...(19): siRNA sense strand
aaacuuccgcuaagaguaa

SEQ ID NO: 1544729 - RNA, 19 nt, Homo sapiens
  misc_RNA (1)...(19): siRNA sense strand
gaagcgguaugagaaagug

SEQ ID NO: 1544730 - RNA, 19 nt, Homo sapiens
  misc_RNA (1)...(19): siRNA sense strand
gaaagugagagagaaguau

SEQ ID NO: 1544731 - RNA, 19 nt, Homo sapiens
  misc_RNA (1)...(19): siRNA sense strand
aaguggaccuggaaaguga

SEQ ID NO: 1544732 - RNA, 19 nt, Homo sapiens
  misc_RNA (1)...(19): siRNA sense strand
caucuugguugggaacaaa

SEQ ID NO: 1544733 - RNA, 19 nt, Homo sapiens
  misc_RNA (1)...(19): siRNA sense strand
aaacaaugguggacgaacu

SEQ ID NO: 1544734 - RNA, 19 nt, Homo sapiens
  misc_RNA (1)...(19): siRNA sense strand
ugaggcagaugaacuaugc

SEQ ID NO: 1544735 - RNA, 19 nt, Homo sapiens
  misc_RNA (1)...(19): siRNA sense strand
aaagaugacccaugcuguu

SEQ ID NO: 1544736 - RNA, 19 nt, Homo sapiens
  misc_RNA (1)...(19): siRNA sense strand
gaacggccagggcuucauc

SEQ ID NO: 1544737 - RNA, 19 nt, Homo sapiens
  misc_RNA (1)...(19): siRNA sense strand
caaaguggaccuggaaagu

SEQ ID NO: 1544738 - RNA, 19 nt, Homo sapiens
  misc_RNA (1)...(19): siRNA sense strand
gcgugaagcgguaugagaa

SEQ ID NO: 1544739 - RNA, 19 nt, Homo sapiens
  misc_RNA (1)...(19): siRNA sense strand
gaugacccaugcuguucug

SEQ ID NO: 1544740 - RNA, 19 nt, Homo sapiens
  misc_RNA (1)...(19): siRNA sense strand
aggcagagcccuugcugaa

SEQ ID NO: 1544741 - RNA, 19 nt, Homo sapiens
  misc_RNA (1)...(19): siRNA sense strand
aaugguggacgaacucuuu

SEQ ID NO: 1544742 - RNA, 19 nt, Homo sapiens
  misc_RNA (1)...(19): siRNA sense strand
ggaccuggaaagugagaga

SEQ ID NO: 1544743 - RNA, 19 nt, Homo sapiens
  misc_RNA (1)...(19): siRNA sense strand
ccuggaaagugagagagaa

SEQ ID NO: 1544744 - RNA, 19 nt, Homo sapiens
  misc_RNA (1)...(19): siRNA sense strand
gaacucuuugcagaaauug

SEQ ID NO: 1544745 - RNA, 19 nt, Homo sapiens
  misc_RNA (1)...(19): siRNA sense strand
gugaagcgguaugagaaag

SEQ ID NO: 1544746 - RNA, 19 nt, Homo sapiens
  misc_RNA (1)...(19): siRNA sense strand
agaaagugccagucaucuu

SEQ ID NO: 1544747 - RNA, 19 nt, Homo sapiens
  misc_RNA (1)...(19): siRNA sense strand
ugagaaagugccagucauc

SEQ ID NO: 1544748 - RNA, 19 nt, Homo sapiens
  misc_RNA (1)...(19): siRNA sense strand
ugcgggaccuguacaucaa

SEQ ID NO: 1544749 - RNA, 19 nt, Homo sapiens
  misc_RNA (1)...(19): siRNA sense strand
gagaaagugccagucaucu

SEQ ID NO: 1544750 - RNA, 19 nt, Homo sapiens
  misc_RNA (1)...(19): siRNA sense strand
uaugagaaagugccaguca

SEQ ID NO: 1544751 - RNA, 19 nt, Homo sapiens
  misc_RNA (1)...(19): siRNA sense strand
gagcuuccaggacaucaag

SEQ ID NO: 1544752 - RNA, 19 nt, Homo sapiens
  misc_RNA (1)...(19): siRNA sense strand
cagaaauugugaggcagau

SEQ ID NO: 1544753 - RNA, 19 nt, Homo sapiens
  misc_RNA (1)...(19): siRNA sense strand
aaaguggaccuggaaagug

SEQ ID NO: 1544754 - RNA, 19 nt, Homo sapiens
  misc_RNA (1)...(19): siRNA sense strand
gaacaugucuucaucuucu

SEQ ID NO: 1544755 - RNA, 19 nt, Homo sapiens
  misc_RNA (1)...(19): siRNA sense strand
gaacucagcgcccaucuug

SEQ ID NO: 1544756 - RNA, 19 nt, Homo sapiens
  misc_RNA (1)...(19): siRNA sense strand
gacaguaccuucugacgaa

SEQ ID NO: 1544757 - RNA, 19 nt, Homo sapiens
  misc_RNA (1)...(19): siRNA sense strand
gaaaguuguucauggucuu

SEQ ID NO: 1544758 - RNA, 19 nt, Homo sapiens
  misc_RNA (1)...(19): siRNA sense strand
ccacuggaaucccaauaau

SEQ ID NO: 1544759 - RNA, 19 nt, Homo sapiens
  misc_RNA (1)...(19): siRNA sense strand
cggaaaagcuuauaccaaa

SEQ ID NO: 1544760 - RNA, 19 nt, Homo sapiens
  misc_RNA (1)...(19): siRNA sense strand
gagcuuagacgacauaugc

SEQ ID NO: 1544761 - RNA, 19 nt, Homo sapiens
  misc_RNA (1)...(19): siRNA sense strand
gcaagaugcccaugaccuu

SEQ ID NO: 1544762 - RNA, 19 nt, Homo sapiens
  misc_RNA (1)...(19): siRNA sense strand
ucucaggacucucuuguca

SEQ ID NO: 1544763 - RNA, 19 nt, Homo sapiens
  misc_RNA (1)...(19): siRNA sense strand
gcgcccaucuugaacaugu

SEQ ID NO: 1544764 - RNA, 19 nt, Homo sapiens
  misc_RNA (1)...(19): siRNA sense strand
cgacugugccuuccacuga

SEQ ID NO: 1544765 - RNA, 19 nt, Homo sapiens
  misc_RNA (1)...(19): siRNA sense strand
ggaacccuccagugccuua

SEQ ID NO: 1544766 - RNA, 19 nt, Homo sapiens
  misc_RNA (1)...(19): siRNA sense strand
ggugagaggccauauucuu

SEQ ID NO: 1544767 - RNA, 19 nt, Homo sapiens
  misc_RNA (1)...(19): siRNA sense strand
gaugagcuuagacgacaua

SEQ ID NO: 1544768 - RNA, 19 nt, Homo sapiens
  misc_RNA (1)...(19): siRNA sense strand
cagcaagagaugacgauuu

SEQ ID NO: 1544769 - RNA, 19 nt, Homo sapiens
  misc_RNA (1)...(19): siRNA sense strand
ucaggacucucuugucagu

SEQ ID NO: 1544770 - RNA, 19 nt, Homo sapiens
  misc_RNA (1)...(19): siRNA sense strand
ccauauaaaugugaucagu

SEQ ID NO: 1544771 - RNA, 19 nt, Homo sapiens
  misc_RNA (1)...(19): siRNA sense strand
cagcugagucccagucauu

SEQ ID NO: 1544772 - RNA, 19 nt, Homo sapiens
  misc_RNA (1)...(19): siRNA sense strand
gugagaggccauauucuug

SEQ ID NO: 1544773 - RNA, 19 nt, Homo sapiens
  misc_RNA (1)...(19): siRNA sense strand
guaggagagcccaauauuc

SEQ ID NO: 1544774 - RNA, 19 nt, Homo sapiens
  misc_RNA (1)...(19): siRNA sense strand
ggagagcccaauauuccaa

SEQ ID NO: 1544775 - RNA, 19 nt, Homo sapiens
  misc_RNA (1)...(19): siRNA sense strand
gaugauuuacugucagaga

SEQ ID NO: 1544776 - RNA, 19 nt, Homo sapiens
  misc_RNA (1)...(19): siRNA sense strand
gaacuccaggccucaggaa

SEQ ID NO: 1544777 - RNA, 19 nt, Homo sapiens
  misc_RNA (1)...(19): siRNA sense strand
cacagacaguagagaagaa

SEQ ID NO: 1544778 - RNA, 19 nt, Homo sapiens
  misc_RNA (1)...(19): siRNA sense strand
gagaggccauauucuugca

SEQ ID NO: 1544779 - RNA, 19 nt, Homo sapiens
  misc_RNA (1)...(19): siRNA sense strand
gauuuacugucagagaaug

SEQ ID NO: 1544780 - RNA, 19 nt, Homo sapiens
  misc_RNA (1)...(19): siRNA sense strand
cuccauggcucagauguug

SEQ ID NO: 1544781 - RNA, 19 nt, Homo sapiens
  misc_RNA (1)...(19): siRNA sense strand
gcccuucggugggaaucua

SEQ ID NO: 1544782 - RNA, 19 nt, Homo sapiens
  misc_RNA (1)...(19): siRNA sense strand
cguaggagagcccaauauu

SEQ ID NO: 1544783 - RNA, 19 nt, Homo sapiens
  misc_RNA (1)...(19): siRNA sense strand
ggagugcacaccucuugga

SEQ ID NO: 1544784 - RNA, 19 nt, Homo sapiens
  misc_RNA (1)...(19): siRNA sense strand
ccacagacaguagagaaga

SEQ ID NO: 1544785 - RNA, 19 nt, Homo sapiens
  misc_RNA (1)...(19): siRNA sense strand
cagccagacucucaagaag

SEQ ID NO: 1544786 - RNA, 19 nt, Homo sapiens
  misc_RNA (1)...(19): siRNA sense strand
uaccaaccauucagcacuu

SEQ ID NO: 1544787 - RNA, 19 nt, Homo sapiens
  misc_RNA (1)...(19): siRNA sense strand
caggugagaggccauauuc

SEQ ID NO: 1544788 - RNA, 19 nt, Homo sapiens
  misc_RNA (1)...(19): siRNA sense strand
cggaugauuuacugucaga

SEQ ID NO: 1544789 - RNA, 19 nt, Homo sapiens
  misc_RNA (1)...(19): siRNA sense strand
gaucucaggacucucuugu

SEQ ID NO: 1544790 - RNA, 19 nt, Homo sapiens
  misc_RNA (1)...(19): siRNA sense strand
gggaguucaugaggucuga

SEQ ID NO: 1544791 - RNA, 19 nt, Homo sapiens
  misc_RNA (1)...(19): siRNA sense strand
acucagcgcccaucuugaa

SEQ ID NO: 1544792 - RNA, 19 nt, Homo sapiens
  misc_RNA (1)...(19): siRNA sense strand
uaucgaccauauaaaugug

SEQ ID NO: 1544793 - RNA, 19 nt, Homo sapiens
  misc_RNA (1)...(19): siRNA sense strand
agcaagagaugacgauuuu

SEQ ID NO: 1544794 - RNA, 19 nt, Homo sapiens
  misc_RNA (1)...(19): siRNA sense strand
cgacauaugcggguacaca

SEQ ID NO: 1544795 - RNA, 19 nt, Homo sapiens
  misc_RNA (1)...(19): siRNA sense strand
ucucgacaguaccuucuga

SEQ ID NO: 1544796 - RNA, 19 nt, Homo sapiens
  misc_RNA (1)...(19): siRNA sense strand
auucagcacuuuccucaca

SEQ ID NO: 1544797 - RNA, 19 nt, Homo sapiens
  misc_RNA (1)...(19): siRNA sense strand
ucagccagacucucaagaa

SEQ ID NO: 1544798 - RNA, 19 nt, Homo sapiens
  misc_RNA (1)...(19): siRNA sense strand
acuggaaucccaauaaugu

SEQ ID NO: 1544799 - RNA, 19 nt, Homo sapiens
  misc_RNA (1)...(19): siRNA sense strand
gggccacaguucaguaugc

SEQ ID NO: 1544800 - RNA, 19 nt, Homo sapiens
  misc_RNA (1)...(19): siRNA sense strand
ugggaaaguuguucauggu

SEQ ID NO: 1544801 - RNA, 19 nt, Homo sapiens
  misc_RNA (1)...(19): siRNA sense strand
gaccgcaggcugagaugga

SEQ ID NO: 1544802 - RNA, 19 nt, Homo sapiens
  misc_RNA (1)...(19): siRNA sense strand
ccacaggccaacaacaaca

SEQ ID NO: 1544803 - RNA, 19 nt, Homo sapiens
  misc_RNA (1)...(19): siRNA sense strand
gcggguacacaccagauau

SEQ ID NO: 1544804 - RNA, 19 nt, Homo sapiens
  misc_RNA (1)...(19): siRNA sense strand
ggucuuucuuccguucuga

SEQ ID NO: 1544805 - RNA, 19 nt, Homo sapiens
  misc_RNA (1)...(19): siRNA sense strand
gaccauauaaaugugauca

SEQ ID NO: 1544806 - RNA, 19 nt, Homo sapiens
  misc_RNA (1)...(19): siRNA sense strand
cuccuucccggaugauuua

SEQ ID NO: 1544807 - RNA, 19 nt, Homo sapiens
  misc_RNA (1)...(19): siRNA sense strand
ccucaggaagggacuggua

SEQ ID NO: 1544808 - RNA, 19 nt, Homo sapiens
  misc_RNA (1)...(19): siRNA sense strand
uaggagagcccaauauucc

SEQ ID NO: 1544809 - RNA, 19 nt, Homo sapiens
  misc_RNA (1)...(19): siRNA sense strand
caaggccuaccaaccauuc

SEQ ID NO: 1544810 - RNA, 19 nt, Homo sapiens
  misc_RNA (1)...(19): siRNA sense strand
augauuuacugucagagaa

SEQ ID NO: 1544811 - RNA, 19 nt, Homo sapiens
  misc_RNA (1)...(19): siRNA sense strand
gagugcacaccucuuggaa

SEQ ID NO: 1544812 - RNA, 19 nt, Homo sapiens
  misc_RNA (1)...(19): siRNA sense strand
cagcgcccaucuugaacau

SEQ ID NO: 1544813 - RNA, 19 nt, Homo sapiens
  misc_RNA (1)...(19): siRNA sense strand
caagagaugacgauuuuca

SEQ ID NO: 1544814 - RNA, 19 nt, Homo sapiens
  misc_RNA (1)...(19): siRNA sense strand
cugaccaucucaagcaaca

SEQ ID NO: 1544815 - RNA, 19 nt, Homo sapiens
  misc_RNA (1)...(19): siRNA sense strand
gaagaaacauuaccagguu

SEQ ID NO: 1544816 - RNA, 19 nt, Homo sapiens
  misc_RNA (1)...(19): siRNA sense strand
gaacagaaccaaagauaaa

SEQ ID NO: 1544817 - RNA, 19 nt, Homo sapiens
  misc_RNA (1)...(19): siRNA sense strand
ggaaugaguuggcagcuuu

SEQ ID NO: 1544818 - RNA, 19 nt, Homo sapiens
  misc_RNA (1)...(19): siRNA sense strand
ggaaugggaugaacaagga

SEQ ID NO: 1544819 - RNA, 19 nt, Homo sapiens
  misc_RNA (1)...(19): siRNA sense strand
ccaaagauguuccugugua

SEQ ID NO: 1544820 - RNA, 19 nt, Homo sapiens
  misc_RNA (1)...(19): siRNA sense strand
acaaauaccuugagagaug

SEQ ID NO: 1544821 - RNA, 19 nt, Homo sapiens
  misc_RNA (1)...(19): siRNA sense strand
cagcagaacuucaggagaa

SEQ ID NO: 1544822 - RNA, 19 nt, Homo sapiens
  misc_RNA (1)...(19): siRNA sense strand
gacaguagccagccuaaua

SEQ ID NO: 1544823 - RNA, 19 nt, Homo sapiens
  misc_RNA (1)...(19): siRNA sense strand
gaaggcaauugcacuuaaa

SEQ ID NO: 1544824 - RNA, 19 nt, Homo sapiens
  misc_RNA (1)...(19): siRNA sense strand
gauaauagaccuccuggaa

SEQ ID NO: 1544825 - RNA, 19 nt, Homo sapiens
  misc_RNA (1)...(19): siRNA sense strand
gaagaccaccuugaaauuu

SEQ ID NO: 1544826 - RNA, 19 nt, Homo sapiens
  misc_RNA (1)...(19): siRNA sense strand
ggacugaucuggcguucug

SEQ ID NO: 1544827 - RNA, 19 nt, Homo sapiens
  misc_RNA (1)...(19): siRNA sense strand
gaugguggauguuugauug

SEQ ID NO: 1544828 - RNA, 19 nt, Homo sapiens
  misc_RNA (1)...(19): siRNA sense strand
ggagaaugguuguuggaaa

SEQ ID NO: 1544829 - RNA, 19 nt, Homo sapiens
  misc_RNA (1)...(19): siRNA sense strand
gacaauggauacaagguuu

SEQ ID NO: 1544830 - RNA, 19 nt, Homo sapiens
  misc_RNA (1)...(19): siRNA sense strand
ucacaucuccucaugauaa

SEQ ID NO: 1544831 - RNA, 19 nt, Homo sapiens
  misc_RNA (1)...(19): siRNA sense strand
gcagagaggcuuugugguu

SEQ ID NO: 1544832 - RNA, 19 nt, Homo sapiens
  misc_RNA (1)...(19): siRNA sense strand
gcaaggaagacaauggaua

SEQ ID NO: 1544833 - RNA, 19 nt, Homo sapiens
  misc_RNA (1)...(19): siRNA sense strand
guacaaauaccuugagaga

SEQ ID NO: 1544834 - RNA, 19 nt, Homo sapiens
  misc_RNA (1)...(19): siRNA sense strand
ggaagacaauggauacaag

SEQ ID NO: 1544835 - RNA, 19 nt, Homo sapiens
  misc_RNA (1)...(19): siRNA sense strand
gaacugaagaaacucauug

SEQ ID NO: 1544836 - RNA, 19 nt, Homo sapiens
  misc_RNA (1)...(19): siRNA sense strand
gaaaugcugaugugaagaa

SEQ ID NO: 1544837 - RNA, 19 nt, Homo sapiens
  misc_RNA (1)...(19): siRNA sense strand
gagaaugguuguuggaaag

SEQ ID NO: 1544838 - RNA, 19 nt, Homo sapiens
  misc_RNA (1)...(19): siRNA sense strand
ggaacagaaccaaagauaa

SEQ ID NO: 1544839 - RNA, 19 nt, Homo sapiens
  misc_RNA (1)...(19): siRNA sense strand
uugaaaggcuucguaauuu

SEQ ID NO: 1544840 - RNA, 19 nt, Homo sapiens
  misc_RNA (1)...(19): siRNA sense strand
ugaaggcaauugcacuuaa

SEQ ID NO: 1544841 - RNA, 19 nt, Homo sapiens
  misc_RNA (1)...(19): siRNA sense strand
gauuggaaguaggauaaua

SEQ ID NO: 1544842 - RNA, 19 nt, Homo sapiens
  misc_RNA (1)...(19): siRNA sense strand
caaaagagcagauugaaaa

SEQ ID NO: 1544843 - RNA, 19 nt, Homo sapiens
  misc_RNA (1)...(19): siRNA sense strand
gagugcagcuguugugguu

SEQ ID NO: 1544844 - RNA, 19 nt, Homo sapiens
  misc_RNA (1)...(19): siRNA sense strand
ccaccacagucucuucuaa

SEQ ID NO: 1544845 - RNA, 19 nt, Homo sapiens
  misc_RNA (1)...(19): siRNA sense strand
gaucuggcguucuguuuag

SEQ ID NO: 1544846 - RNA, 19 nt, Homo sapiens
  misc_RNA (1)...(19): siRNA sense strand
ggaaacuggugcucagauc

SEQ ID NO: 1544847 - RNA, 19 nt, Homo sapiens
  misc_RNA (1)...(19): siRNA sense strand
gugaagaacguuuauaugu

SEQ ID NO: 1544848 - RNA, 19 nt, Homo sapiens
  misc_RNA (1)...(19): siRNA sense strand
caagaaaugcugaugugaa

SEQ ID NO: 1544849 - RNA, 19 nt, Homo sapiens
  misc_RNA (1)...(19): siRNA sense strand
caaaauggcuguguugcua

SEQ ID NO: 1544850 - RNA, 19 nt, Homo sapiens
  misc_RNA (1)...(19): siRNA sense strand
gauauguuccuacaccuuu

SEQ ID NO: 1544851 - RNA, 19 nt, Homo sapiens
  misc_RNA (1)...(19): siRNA sense strand
caucuuaccuggaaaccau

SEQ ID NO: 1544852 - RNA, 19 nt, Homo sapiens
  misc_RNA (1)...(19): siRNA sense strand
acucauugaugcucugaua

SEQ ID NO: 1544853 - RNA, 19 nt, Homo sapiens
  misc_RNA (1)...(19): siRNA sense strand
guagccagccuaauaagaa

SEQ ID NO: 1544854 - RNA, 19 nt, Homo sapiens
  misc_RNA (1)...(19): siRNA sense strand
cgaagaccaccuugaaauu

SEQ ID NO: 1544855 - RNA, 19 nt, Homo sapiens
  misc_RNA (1)...(19): siRNA sense strand
uggaacauuugcuauauug

SEQ ID NO: 1544856 - RNA, 19 nt, Homo sapiens
  misc_RNA (1)...(19): siRNA sense strand
ugaaacagcaacugguuaa

SEQ ID NO: 1544857 - RNA, 19 nt, Homo sapiens
  misc_RNA (1)...(19): siRNA sense strand
uaauagaccuccuggaaaa

SEQ ID NO: 1544858 - RNA, 19 nt, Homo sapiens
  misc_RNA (1)...(19): siRNA sense strand
cuuccuauuucuuguguua

SEQ ID NO: 1544859 - RNA, 19 nt, Homo sapiens
  misc_RNA (1)...(19): siRNA sense strand
gagaaucugugcuggaacu

SEQ ID NO: 1544860 - RNA, 19 nt, Homo sapiens
  misc_RNA (1)...(19): siRNA sense strand
ggaggaagaacugaagaaa

SEQ ID NO: 1544861 - RNA, 19 nt, Homo sapiens
  misc_RNA (1)...(19): siRNA sense strand
gaacauuugcuauauugca

SEQ ID NO: 1544862 - RNA, 19 nt, Homo sapiens
  misc_RNA (1)...(19): siRNA sense strand
ugaaccaccuaccaucaaa

SEQ ID NO: 1544863 - RNA, 19 nt, Homo sapiens
  misc_RNA (1)...(19): siRNA sense strand
gaaaaccuguuacggaaug

SEQ ID NO: 1544864 - RNA, 19 nt, Homo sapiens
  misc_RNA (1)...(19): siRNA sense strand
ugaguuggcagcuuuguuu

SEQ ID NO: 1544865 - RNA, 19 nt, Homo sapiens
  misc_RNA (1)...(19): siRNA sense strand
cuggaaaccaugaauauaa

SEQ ID NO: 1544866 - RNA, 19 nt, Homo sapiens
  misc_RNA (1)...(19): siRNA sense strand
gcaggguuuugcuauauua

SEQ ID NO: 1544867 - RNA, 19 nt, Homo sapiens
  misc_RNA (1)...(19): siRNA sense strand
gcaauugcacuuaaagaag

SEQ ID NO: 1544868 - RNA, 19 nt, Homo sapiens
  misc_RNA (1)...(19): siRNA sense strand
gccagaggcuugcuaaacu

SEQ ID NO: 1544869 - RNA, 19 nt, Homo sapiens
  misc_RNA (1)...(19): siRNA sense strand
aggaagaacugaagaaacu

SEQ ID NO: 1544870 - RNA, 19 nt, Homo sapiens
  misc_RNA (1)...(19): siRNA sense strand
guggaacauuugcuauauu

SEQ ID NO: 1544871 - RNA, 19 nt, Homo sapiens
  misc_RNA (1)...(19): siRNA sense strand
gcugcgagaucgucuuugu

SEQ ID NO: 1544872 - RNA, 19 nt, Homo sapiens
  misc_RNA (1)...(19): siRNA sense strand
uuaaauggauuggaaguag

SEQ ID NO: 1544873 - RNA, 19 nt, Homo sapiens
  misc_RNA (1)...(19): siRNA sense strand
gaaugguuguuggaaaguu

SEQ ID NO: 1544874 - RNA, 19 nt, Homo sapiens
  misc_RNA (1)...(19): siRNA sense strand
aagaccaccuugaaauuug

SEQ ID NO: 1544875 - RNA, 19 nt, Homo sapiens
  misc_RNA (1)...(19): siRNA sense strand
gaagaacugaagaaacuca

SEQ ID NO: 1544876 - RNA, 19 nt, Homo sapiens
  misc_RNA (1)...(19): siRNA sense strand
caaagauguuccuguguac

SEQ ID NO: 1544877 - RNA, 19 nt, Homo sapiens
  misc_RNA (1)...(19): siRNA sense strand
gcaacugguuaagguuuau

SEQ ID NO: 1544878 - RNA, 19 nt, Homo sapiens
  misc_RNA (1)...(19): siRNA sense strand
aagaaaugcugaugugaag

SEQ ID NO: 1544879 - RNA, 19 nt, Homo sapiens
  misc_RNA (1)...(19): siRNA sense strand
gaacuucaggagaaugguu

SEQ ID NO: 1544880 - RNA, 19 nt, Homo sapiens
  misc_RNA (1)...(19): siRNA sense strand
caaauaccuugagagaugu

SEQ ID NO: 1544881 - RNA, 19 nt, Homo sapiens
  misc_RNA (1)...(19): siRNA sense strand
ggacguuaccacuggauau

SEQ ID NO: 1544882 - RNA, 19 nt, Homo sapiens
  misc_RNA (1)...(19): siRNA sense strand
ggcaauugcacuuaaagaa

SEQ ID NO: 1544883 - RNA, 19 nt, Homo sapiens
  misc_RNA (1)...(19): siRNA sense strand
gagcugcgagaucgucuuu

SEQ ID NO: 1544884 - RNA, 19 nt, Homo sapiens
  misc_RNA (1)...(19): siRNA sense strand
uggaacagaaccaaagaua

SEQ ID NO: 1544885 - RNA, 19 nt, Homo sapiens
  misc_RNA (1)...(19): siRNA sense strand
uagccagccuaauaagaaa

SEQ ID NO: 1544886 - RNA, 19 nt, Homo sapiens
  misc_RNA (1)...(19): siRNA sense strand
cagaaccaaagauaaagua

SEQ ID NO: 1544887 - RNA, 19 nt, Homo sapiens
  misc_RNA (1)...(19): siRNA sense strand
gaacaaggagcugcgagau

SEQ ID NO: 1544888 - RNA, 19 nt, Homo sapiens
  misc_RNA (1)...(19): siRNA sense strand
cacaggggauguacaaaua

SEQ ID NO: 1544889 - RNA, 19 nt, Homo sapiens
  misc_RNA (1)...(19): siRNA sense strand
acaguagccagccuaauaa

SEQ ID NO: 1544890 - RNA, 19 nt, Homo sapiens
  misc_RNA (1)...(19): siRNA sense strand
uuugaaaggcuucguaauu

SEQ ID NO: 1544891 - RNA, 19 nt, Homo sapiens
  misc_RNA (1)...(19): siRNA sense strand
gaaacuggugcucagauca

SEQ ID NO: 1544892 - RNA, 19 nt, Homo sapiens
  misc_RNA (1)...(19): siRNA sense strand
uauagaagaauguguggaa

SEQ ID NO: 1544893 - RNA, 19 nt, Homo sapiens
  misc_RNA (1)...(19): siRNA sense strand
aaaguauuaugcagagaug

SEQ ID NO: 1544894 - RNA, 19 nt, Homo sapiens
  misc_RNA (1)...(19): siRNA sense strand
cgucuuuguugccgaauga

SEQ ID NO: 1544895 - RNA, 19 nt, Homo sapiens
  misc_RNA (1)...(19): siRNA sense strand
caaggaagacaauggauac

SEQ ID NO: 1544896 - RNA, 19 nt, Homo sapiens
  misc_RNA (1)...(19): siRNA sense strand
ugaaaggcuucguaauuuu

SEQ ID NO: 1544897 - RNA, 19 nt, Homo sapiens
  misc_RNA (1)...(19): siRNA sense strand
cacagucucuucuaaaauu

SEQ ID NO: 1544898 - RNA, 19 nt, Homo sapiens
  misc_RNA (1)...(19): siRNA sense strand
cacaucuccucaugauaaa

SEQ ID NO: 1544899 - RNA, 19 nt, Homo sapiens
  misc_RNA (1)...(19): siRNA sense strand
uguggaacauuugcuauau

SEQ ID NO: 1544900 - RNA, 19 nt, Homo sapiens
  misc_RNA (1)...(19): siRNA sense strand
cagcaacugguuaagguuu

SEQ ID NO: 1544901 - RNA, 19 nt, Homo sapiens
  misc_RNA (1)...(19): siRNA sense strand
gggaaugaguuggcagcuu

SEQ ID NO: 1544902 - RNA, 19 nt, Homo sapiens
  misc_RNA (1)...(19): siRNA sense strand
aaucugugcuggaacuuuc

SEQ ID NO: 1544903 - RNA, 19 nt, Homo sapiens
  misc_RNA (1)...(19): siRNA sense strand
auacauggaagaucugaaa

SEQ ID NO: 1544904 - RNA, 19 nt, Homo sapiens
  misc_RNA (1)...(19): siRNA sense strand
gagacuggcagagaaagaa

SEQ ID NO: 1544905 - RNA, 19 nt, Homo sapiens
  misc_RNA (1)...(19): siRNA sense strand
gaugugaagaacguuuaua

SEQ ID NO: 1544906 - RNA, 19 nt, Homo sapiens
  misc_RNA (1)...(19): siRNA sense strand
ggguagugcuagccacaga

SEQ ID NO: 1544907 - RNA, 19 nt, Homo sapiens
  misc_RNA (1)...(19): siRNA sense strand
aaugguuguuggaaaguuu

SEQ ID NO: 1544908 - RNA, 19 nt, Homo sapiens
  misc_RNA (1)...(19): siRNA sense strand
ugaagagucuauugguuuu

SEQ ID NO: 1544909 - RNA, 19 nt, Homo sapiens
  misc_RNA (1)...(19): siRNA sense strand
uugaagagucuauugguuu

SEQ ID NO: 1544910 - RNA, 19 nt, Homo sapiens
  misc_RNA (1)...(19): siRNA sense strand
gcauuugaagagucuauug

SEQ ID NO: 1544911 - RNA, 19 nt, Homo sapiens
  misc_RNA (1)...(19): siRNA sense strand
gcacuuaaagaaggauuuc

SEQ ID NO: 1544912 - RNA, 19 nt, Homo sapiens
  misc_RNA (1)...(19): siRNA sense strand
gaaucugugcuggaacuuu

SEQ ID NO: 1544913 - RNA, 19 nt, Homo sapiens
  misc_RNA (1)...(19): siRNA sense strand
ugaucuggcguucuguuua

SEQ ID NO: 1544914 - RNA, 19 nt, Homo sapiens
  misc_RNA (1)...(19): siRNA sense strand
guuggcagcuuuguuugga

SEQ ID NO: 1544915 - RNA, 19 nt, Homo sapiens
  misc_RNA (1)...(19): siRNA sense strand
gugaaacaauggaagaaua

SEQ ID NO: 1544916 - RNA, 19 nt, Homo sapiens
  misc_RNA (1)...(19): siRNA sense strand
ggaagaagaagaagaagaa

SEQ ID NO: 1544917 - RNA, 19 nt, Homo sapiens
  misc_RNA (1)...(19): siRNA sense strand
gcagaugaguaacgaaaga

SEQ ID NO: 1544918 - RNA, 19 nt, Homo sapiens
  misc_RNA (1)...(19): siRNA sense strand
gaagaaggaggaagaagaa

SEQ ID NO: 1544919 - RNA, 19 nt, Homo sapiens
  misc_RNA (1)...(19): siRNA sense strand
gggagacagugaaguaauu

SEQ ID NO: 1544920 - RNA, 19 nt, Homo sapiens
  misc_RNA (1)...(19): siRNA sense strand
ggaagaauauagcacagau

SEQ ID NO: 1544921 - RNA, 19 nt, Homo sapiens
  misc_RNA (1)...(19): siRNA sense strand
ggagggagacagugaagua

SEQ ID NO: 1544922 - RNA, 19 nt, Homo sapiens
  misc_RNA (1)...(19): siRNA sense strand
ggaggaagaagaagaagaa

SEQ ID NO: 1544923 - RNA, 19 nt, Homo sapiens
  misc_RNA (1)...(19): siRNA sense strand
gaacugggagucauaggaa

SEQ ID NO: 1544924 - RNA, 19 nt, Homo sapiens
  misc_RNA (1)...(19): siRNA sense strand
gaaggaggaagaagaagaa

SEQ ID NO: 1544925 - RNA, 19 nt, Homo sapiens
  misc_RNA (1)...(19): siRNA sense strand
agaauaaauugcagacuga

SEQ ID NO: 1544926 - RNA, 19 nt, Homo sapiens
  misc_RNA (1)...(19): siRNA sense strand
uagcacagaugaagacgaa

SEQ ID NO: 1544927 - RNA, 19 nt, Homo sapiens
  misc_RNA (1)...(19): siRNA sense strand
gcagacugauuccauuguu

SEQ ID NO: 1544928 - RNA, 19 nt, Homo sapiens
  misc_RNA (1)...(19): siRNA sense strand
ggagacagugaaguaauua

SEQ ID NO: 1544929 - RNA, 19 nt, Homo sapiens
  misc_RNA (1)...(19): siRNA sense strand
ggagagucauccacuuugu

SEQ ID NO: 1544930 - RNA, 19 nt, Homo sapiens
  misc_RNA (1)...(19): siRNA sense strand
gaauauagcacagaugaag

SEQ ID NO: 1544931 - RNA, 19 nt, Homo sapiens
  misc_RNA (1)...(19): siRNA sense strand
agaagaagaagaagaagaa

SEQ ID NO: 1544932 - RNA, 19 nt, Homo sapiens
  misc_RNA (1)...(19): siRNA sense strand
caaggagagucauccacuu

SEQ ID NO: 1544933 - RNA, 19 nt, Homo sapiens
  misc_RNA (1)...(19): siRNA sense strand
caggaugucugaagaagca

SEQ ID NO: 1544934 - RNA, 19 nt, Homo sapiens
  misc_RNA (1)...(19): siRNA sense strand
agagucauccacuuuguua

SEQ ID NO: 1544935 - RNA, 19 nt, Homo sapiens
  misc_RNA (1)...(19): siRNA sense strand
gaugaauauuaucggauga

SEQ ID NO: 1544936 - RNA, 19 nt, Homo sapiens
  misc_RNA (1)...(19): siRNA sense strand
ggaugaagaaggaggaaga

SEQ ID NO: 1544937 - RNA, 19 nt, Homo sapiens
  misc_RNA (1)...(19): siRNA sense strand
ugaagaaggaggaagaaga

SEQ ID NO: 1544938 - RNA, 19 nt, Homo sapiens
  misc_RNA (1)...(19): siRNA sense strand
gaagaagaagaagaagaaa

SEQ ID NO: 1544939 - RNA, 19 nt, Homo sapiens
  misc_RNA (1)...(19): siRNA sense strand
gggcagaugaguaacgaaa

SEQ ID NO: 1544940 - RNA, 19 nt, Homo sapiens
  misc_RNA (1)...(19): siRNA sense strand
aagaauauagcacagauga

SEQ ID NO: 1544941 - RNA, 19 nt, Homo sapiens
  misc_RNA (1)...(19): siRNA sense strand
gcacagaugaagacgaagu

SEQ ID NO: 1544942 - RNA, 19 nt, Homo sapiens
  misc_RNA (1)...(19): siRNA sense strand
gaucaaccagagacaguga

SEQ ID NO: 1544943 - RNA, 19 nt, Homo sapiens
  misc_RNA (1)...(19): siRNA sense strand
gaauauuaucggaugaaga

SEQ ID NO: 1544944 - RNA, 19 nt, Homo sapiens
  misc_RNA (1)...(19): siRNA sense strand
uugauggccuggagaagaa

SEQ ID NO: 1544945 - RNA, 19 nt, Homo sapiens
  misc_RNA (1)...(19): siRNA sense strand
acagugaaguaauuaugga

SEQ ID NO: 1544946 - RNA, 19 nt, Homo sapiens
  misc_RNA (1)...(19): siRNA sense strand
auauccagcucauuuguga

SEQ ID NO: 1544947 - RNA, 19 nt, Homo sapiens
  misc_RNA (1)...(19): siRNA sense strand
gcuucgggcugcuacauca

SEQ ID NO: 1544948 - RNA, 19 nt, Homo sapiens
  misc_RNA (1)...(19): siRNA sense strand
gugaaguaauuauggaaag

SEQ ID NO: 1544949 - RNA, 19 nt, Homo sapiens
  misc_RNA (1)...(19): siRNA sense strand
gaagaauauagcacagaug

SEQ ID NO: 1544950 - RNA, 19 nt, Homo sapiens
  misc_RNA (1)...(19): siRNA sense strand
gagggagacagugaaguaa

SEQ ID NO: 1544951 - RNA, 19 nt, Homo sapiens
  misc_RNA (1)...(19): siRNA sense strand
agugauauccagcucauuu

SEQ ID NO: 1544952 - RNA, 19 nt, Homo sapiens
  misc_RNA (1)...(19): siRNA sense strand
aaacaggaugucugaagaa

SEQ ID NO: 1544953 - RNA, 19 nt, Homo sapiens
  misc_RNA (1)...(19): siRNA sense strand
gagagucauccacuuuguu

SEQ ID NO: 1544954 - RNA, 19 nt, Homo sapiens
  misc_RNA (1)...(19): siRNA sense strand
gcugcuacaucaacucucu

SEQ ID NO: 1544955 - RNA, 19 nt, Homo sapiens
  misc_RNA (1)...(19): siRNA sense strand
cagaugaagacgaaguuga

SEQ ID NO: 1544956 - RNA, 19 nt, Homo sapiens
  misc_RNA (1)...(19): siRNA sense strand
gaaaacaggaugucugaag

SEQ ID NO: 1544957 - RNA, 19 nt, Homo sapiens
  misc_RNA (1)...(19): siRNA sense strand
gaaguaauuauggaaagca

SEQ ID NO: 1544958 - RNA, 19 nt, Homo sapiens
  misc_RNA (1)...(19): siRNA sense strand
ucaaccagagacagugaua

SEQ ID NO: 1544959 - RNA, 19 nt, Homo sapiens
  misc_RNA (1)...(19): siRNA sense strand
gaugaagaaggaggaagaa

SEQ ID NO: 1544960 - RNA, 19 nt, Homo sapiens
  misc_RNA (1)...(19): siRNA sense strand
aaggagagucauccacuuu

SEQ ID NO: 1544961 - RNA, 19 nt, Homo sapiens
  misc_RNA (1)...(19): siRNA sense strand
cagacugauuccauuguuc

SEQ ID NO: 1544962 - RNA, 19 nt, Homo sapiens
  misc_RNA (1)...(19): siRNA sense strand
uaccuggggucccuacuua

SEQ ID NO: 1544963 - RNA, 19 nt, Homo sapiens
  misc_RNA (1)...(19): siRNA sense strand
ugaaauggagggagacagu

SEQ ID NO: 1544964 - RNA, 19 nt, Homo sapiens
  misc_RNA (1)...(19): siRNA sense strand
auaaauugcagacugauuc

SEQ ID NO: 1544965 - RNA, 19 nt, Homo sapiens
  misc_RNA (1)...(19): siRNA sense strand
agaaggaggaagaagaaga

SEQ ID NO: 1544966 - RNA, 19 nt, Homo sapiens
  misc_RNA (1)...(19): siRNA sense strand
agacagugaaguaauuaug

SEQ ID NO: 1544967 - RNA, 19 nt, Homo sapiens
  misc_RNA (1)...(19): siRNA sense strand
gauauccagcucauuugug

SEQ ID NO: 1544968 - RNA, 19 nt, Homo sapiens
  misc_RNA (1)...(19): siRNA sense strand
aagaagaaagucccaagga

SEQ ID NO: 1544969 - RNA, 19 nt, Homo sapiens
  misc_RNA (1)...(19): siRNA sense strand
guugauggccuggagaaga

SEQ ID NO: 1544970 - RNA, 19 nt, Homo sapiens
  misc_RNA (1)...(19): siRNA sense strand
gacagugaaguaauuaugg

SEQ ID NO: 1544971 - RNA, 19 nt, Homo sapiens
  misc_RNA (1)...(19): siRNA sense strand
aaaacaggaugucugaaga

SEQ ID NO: 1544972 - RNA, 19 nt, Homo sapiens
  misc_RNA (1)...(19): siRNA sense strand
cuacaucaacucucucagu

SEQ ID NO: 1544973 - RNA, 19 nt, Homo sapiens
  misc_RNA (1)...(19): siRNA sense strand
cagucucugucccaccaua

SEQ ID NO: 1544974 - RNA, 19 nt, Homo sapiens
  misc_RNA (1)...(19): siRNA sense strand
ggagaagaaagauguuuug

SEQ ID NO: 1544975 - RNA, 19 nt, Homo sapiens
  misc_RNA (1)...(19): siRNA sense strand
uguagaacugggagucaua

SEQ ID NO: 1544976 - RNA, 19 nt, Homo sapiens
  misc_RNA (1)...(19): siRNA sense strand
gaugaagacgaaguugaug

SEQ ID NO: 1544977 - RNA, 19 nt, Homo sapiens
  misc_RNA (1)...(19): siRNA sense strand
gagacagugaaguaauuau

SEQ ID NO: 1544978 - RNA, 19 nt, Homo sapiens
  misc_RNA (1)...(19): siRNA sense strand
cagggcagaugaguaacga

SEQ ID NO: 1544979 - RNA, 19 nt, Homo sapiens
  misc_RNA (1)...(19): siRNA sense strand
acagugauauccagcucau

SEQ ID NO: 1544980 - RNA, 19 nt, Homo sapiens
  misc_RNA (1)...(19): siRNA sense strand
gaagaagaagaagaagaag

SEQ ID NO: 1544981 - RNA, 19 nt, Homo sapiens
  misc_RNA (1)...(19): siRNA sense strand
aaaguaccaauaugccauu

SEQ ID NO: 1544982 - RNA, 19 nt, Homo sapiens
  misc_RNA (1)...(19): siRNA sense strand
aagaagaagaagaagaaga

SEQ ID NO: 1544983 - RNA, 19 nt, Homo sapiens
  misc_RNA (1)...(19): siRNA sense strand
aaauggagggagacaguga

SEQ ID NO: 1544984 - RNA, 19 nt, Homo sapiens
  misc_RNA (1)...(19): siRNA sense strand
ggugaaacaauggaagaau

SEQ ID NO: 1544985 - RNA, 19 nt, Homo sapiens
  misc_RNA (1)...(19): siRNA sense strand
agacugauuccauuguuca

SEQ ID NO: 1544986 - RNA, 19 nt, Homo sapiens
  misc_RNA (1)...(19): siRNA sense strand
ugaauauuaucggaugaag

SEQ ID NO: 1544987 - RNA, 19 nt, Homo sapiens
  misc_RNA (1)...(19): siRNA sense strand
gugauauccagcucauuug

SEQ ID NO: 1544988 - RNA, 19 nt, Homo sapiens
  misc_RNA (1)...(19): siRNA sense strand
gaauaaauugcagacugau

SEQ ID NO: 1544989 - RNA, 19 nt, Homo sapiens
  misc_RNA (1)...(19): siRNA sense strand
auuaucggaugaagaagga

SEQ ID NO: 1544990 - RNA, 19 nt, Homo sapiens
  misc_RNA (1)...(19): siRNA sense strand
agaugaagacgaaguugau

SEQ ID NO: 1544991 - RNA, 19 nt, Homo sapiens
  misc_RNA (1)...(19): siRNA sense strand
ccuggaagcugguggcuau

SEQ ID NO: 1544992 - RNA, 19 nt, Homo sapiens
  misc_RNA (1)...(19): siRNA sense strand
ggcuaugucuccuccuuug

SEQ ID NO: 1544993 - RNA, 19 nt, Homo sapiens
  misc_RNA (1)...(19): siRNA sense strand
ggaagcugguggcuauguc

SEQ ID NO: 1544994 - RNA, 19 nt, Homo sapiens
  misc_RNA (1)...(19): siRNA sense strand
ggauguggcagcccugaau

SEQ ID NO: 1544995 - RNA, 19 nt, Homo sapiens
  misc_RNA (1)...(19): siRNA sense strand
caaauacuggcacaucauc

SEQ ID NO: 1544996 - RNA, 19 nt, Homo sapiens
  misc_RNA (1)...(19): siRNA sense strand
gcucacugcucuggaacca

SEQ ID NO: 1544997 - RNA, 19 nt, Homo sapiens
  misc_RNA (1)...(19): siRNA sense strand
guggcuaugucuccuccuu

SEQ ID NO: 1544998 - RNA, 19 nt, Homo sapiens
  misc_RNA (1)...(19): siRNA sense strand
ccaaauacuggcacaucau

SEQ ID NO: 1544999 - RNA, 19 nt, Homo sapiens
  misc_RNA (1)...(19): siRNA sense strand
ucauugagcgccuggagau

SEQ ID NO: 1545000 - RNA, 19 nt, Homo sapiens
  misc_RNA (1)...(19): siRNA sense strand
gauguggcagcccugaaug

SEQ ID NO: 1545001 - RNA, 19 nt, Homo sapiens
  misc_RNA (1)...(19): siRNA sense strand
aguccuucuucgccaaaua

SEQ ID NO: 1545002 - RNA, 19 nt, Homo sapiens
  misc_RNA (1)...(19): siRNA sense strand
gauggaacaggcccagaag

SEQ ID NO: 1545003 - RNA, 19 nt, Homo sapiens
  misc_RNA (1)...(19): siRNA sense strand
gaacuaaaccaguauuuga

SEQ ID NO: 1545004 - RNA, 19 nt, Homo sapiens
  misc_RNA (1)...(19): siRNA sense strand
ggagagaaauccuacaaau

SEQ ID NO: 1545005 - RNA, 19 nt, Homo sapiens
  misc_RNA (1)...(19): siRNA sense strand
gcacaucuuucuaccaauu

SEQ ID NO: 1545006 - RNA, 19 nt, Homo sapiens
  misc_RNA (1)...(19): siRNA sense strand
gaagagaaaucccacagau

SEQ ID NO: 1545007 - RNA, 19 nt, Homo sapiens
  misc_RNA (1)...(19): siRNA sense strand
gaagagaaaucccacagau

SEQ ID NO: 1545008 - RNA, 19 nt, Homo sapiens
  misc_RNA (1)...(19): siRNA sense strand
gagagaaauccuacaaaua

SEQ ID NO: 1545009 - RNA, 19 nt, Homo sapiens
  misc_RNA (1)...(19): siRNA sense strand
cuacaaaugugaagaaugu

SEQ ID NO: 1545010 - RNA, 19 nt, Homo sapiens
  misc_RNA (1)...(19): siRNA sense strand
cuacaaaugugaagaaugu

SEQ ID NO: 1545011 - RNA, 19 nt, Homo sapiens
  misc_RNA (1)...(19): siRNA sense strand
cuacaaaugugaagaaugu

SEQ ID NO: 1545012 - RNA, 19 nt, Homo sapiens
  misc_RNA (1)...(19): siRNA sense strand
cuacaaaugugaagaaugu

SEQ ID NO: 1545013 - RNA, 19 nt, Homo sapiens
  misc_RNA (1)...(19): siRNA sense strand
cuacaaaugugaagaaugu

SEQ ID NO: 1545014 - RNA, 19 nt, Homo sapiens
  misc_RNA (1)...(19): siRNA sense strand
cuacaaaugugaagaaugu

SEQ ID NO: 1545015 - RNA, 19 nt, Homo sapiens
  misc_RNA (1)...(19): siRNA sense strand
cuacaaaugugaagaaugu

SEQ ID NO: 1545016 - RNA, 19 nt, Homo sapiens
  misc_RNA (1)...(19): siRNA sense strand
cuacaaaugugaagaaugu

SEQ ID NO: 1545017 - RNA, 19 nt, Homo sapiens
  misc_RNA (1)...(19): siRNA sense strand
cuacaaaugugaagaaugu

SEQ ID NO: 1545018 - RNA, 19 nt, Homo sapiens
  misc_RNA (1)...(19): siRNA sense strand
gagagaaacccuauaaaug

SEQ ID NO: 1545019 - RNA, 19 nt, Homo sapiens
  misc_RNA (1)...(19): siRNA sense strand
cuacaaaugugaagaaugu

SEQ ID NO: 1545020 - RNA, 19 nt, Homo sapiens
  misc_RNA (1)...(19): siRNA sense strand
gcacaaagaagguuauaau

SEQ ID NO: 1545021 - RNA, 19 nt, Homo sapiens
  misc_RNA (1)...(19): siRNA sense strand
ccucaaaccuuauuaaaca

SEQ ID NO: 1545022 - RNA, 19 nt, Homo sapiens
  misc_RNA (1)...(19): siRNA sense strand
gaucuucaauccuuaguau

SEQ ID NO: 1545023 - RNA, 19 nt, Homo sapiens
  misc_RNA (1)...(19): siRNA sense strand
agagaaaccuugcaaaugu

SEQ ID NO: 1545024 - RNA, 19 nt, Homo sapiens
  misc_RNA (1)...(19): siRNA sense strand
gagagaaacccuacaaaug

SEQ ID NO: 1545025 - RNA, 19 nt, Homo sapiens
  misc_RNA (1)...(19): siRNA sense strand
gaagagaaacccuacaaau

SEQ ID NO: 1545026 - RNA, 19 nt, Homo sapiens
  misc_RNA (1)...(19): siRNA sense strand
gaagagaaacccuacaaau

SEQ ID NO: 1545027 - RNA, 19 nt, Homo sapiens
  misc_RNA (1)...(19): siRNA sense strand
gaagagaaacccuacaaau

SEQ ID NO: 1545028 - RNA, 19 nt, Homo sapiens
  misc_RNA (1)...(19): siRNA sense strand
gagagaaacccuacaaaug

SEQ ID NO: 1545029 - RNA, 19 nt, Homo sapiens
  misc_RNA (1)...(19): siRNA sense strand
uaagaaacccuacaaaugu

SEQ ID NO: 1545030 - RNA, 19 nt, Homo sapiens
  misc_RNA (1)...(19): siRNA sense strand
ggacagaaacccuacaaau

SEQ ID NO: 1545031 - RNA, 19 nt, Homo sapiens
  misc_RNA (1)...(19): siRNA sense strand
gagaaacccuauaaaugug

SEQ ID NO: 1545032 - RNA, 19 nt, Homo sapiens
  misc_RNA (1)...(19): siRNA sense strand
uaaccgaucuucaauccuu

SEQ ID NO: 1545033 - RNA, 19 nt, Homo sapiens
  misc_RNA (1)...(19): siRNA sense strand
gagaaauccuacaaauaug

SEQ ID NO: 1545034 - RNA, 19 nt, Homo sapiens
  misc_RNA (1)...(19): siRNA sense strand
cuacaaaugugaagcaugu

SEQ ID NO: 1545035 - RNA, 19 nt, Homo sapiens
  misc_RNA (1)...(19): siRNA sense strand
gagaaacccuacaaaugug

SEQ ID NO: 1545036 - RNA, 19 nt, Homo sapiens
  misc_RNA (1)...(19): siRNA sense strand
gcaaauucauaguguacaa

SEQ ID NO: 1545037 - RNA, 19 nt, Homo sapiens
  misc_RNA (1)...(19): siRNA sense strand
gaauguggcaaauccuuua

SEQ ID NO: 1545038 - RNA, 19 nt, Homo sapiens
  misc_RNA (1)...(19): siRNA sense strand
gagaaacccuacaaaugug

SEQ ID NO: 1545039 - RNA, 19 nt, Homo sapiens
  misc_RNA (1)...(19): siRNA sense strand
gagaaacccuacaaaugug

SEQ ID NO: 1545040 - RNA, 19 nt, Homo sapiens
  misc_RNA (1)...(19): siRNA sense strand
gagaaacccuacaaaugug

SEQ ID NO: 1545041 - RNA, 19 nt, Homo sapiens
  misc_RNA (1)...(19): siRNA sense strand
gagaaacccuacaaaugug

SEQ ID NO: 1545042 - RNA, 19 nt, Homo sapiens
  misc_RNA (1)...(19): siRNA sense strand
ggcaaagcccuuaguauuu

SEQ ID NO: 1545043 - RNA, 19 nt, Homo sapiens
  misc_RNA (1)...(19): siRNA sense strand
gauaagaaacccuacaaau

SEQ ID NO: 1545044 - RNA, 19 nt, Homo sapiens
  misc_RNA (1)...(19): siRNA sense strand
gcaaagcccuuaguauuuu

SEQ ID NO: 1545045 - RNA, 19 nt, Homo sapiens
  misc_RNA (1)...(19): siRNA sense strand
gcaaauccuuuaguguauu

SEQ ID NO: 1545046 - RNA, 19 nt, Homo sapiens
  misc_RNA (1)...(19): siRNA sense strand
aaccaggacucaaaccuua

SEQ ID NO: 1545047 - RNA, 19 nt, Homo sapiens
  misc_RNA (1)...(19): siRNA sense strand
uaaggagucuucacacguu

SEQ ID NO: 1545048 - RNA, 19 nt, Homo sapiens
  misc_RNA (1)...(19): siRNA sense strand
uaccaauucucauaccuua

SEQ ID NO: 1545049 - RNA, 19 nt, Homo sapiens
  misc_RNA (1)...(19): siRNA sense strand
gacagaaacccuacaaaug

SEQ ID NO: 1545050 - RNA, 19 nt, Homo sapiens
  misc_RNA (1)...(19): siRNA sense strand
agacaaacccuacaaaugu

SEQ ID NO: 1545051 - RNA, 19 nt, Homo sapiens
  misc_RNA (1)...(19): siRNA sense strand
gagacaaacccuacaaaug

SEQ ID NO: 1545052 - RNA, 19 nt, Homo sapiens
  misc_RNA (1)...(19): siRNA sense strand
acacaaacccuacaaaugu

SEQ ID NO: 1545053 - RNA, 19 nt, Homo sapiens
  misc_RNA (1)...(19): siRNA sense strand
gaucuucaacccuuacuaa

SEQ ID NO: 1545054 - RNA, 19 nt, Homo sapiens
  misc_RNA (1)...(19): siRNA sense strand
ggagagaaacccuacaaau

SEQ ID NO: 1545055 - RNA, 19 nt, Homo sapiens
  misc_RNA (1)...(19): siRNA sense strand
ggagagaaaccuugcaaau

SEQ ID NO: 1545056 - RNA, 19 nt, Homo sapiens
  misc_RNA (1)...(19): siRNA sense strand
ggagagaaacccuacaaau

SEQ ID NO: 1545057 - RNA, 19 nt, Homo sapiens
  misc_RNA (1)...(19): siRNA sense strand
caagcaaauucauagugua

SEQ ID NO: 1545058 - RNA, 19 nt, Homo sapiens
  misc_RNA (1)...(19): siRNA sense strand
ggcauaagcuaauucauac

SEQ ID NO: 1545059 - RNA, 19 nt, Homo sapiens
  misc_RNA (1)...(19): siRNA sense strand
ggcaaauccuuuaguguau

SEQ ID NO: 1545060 - RNA, 19 nt, Homo sapiens
  misc_RNA (1)...(19): siRNA sense strand
ggacacaaacccuacaaau

SEQ ID NO: 1545061 - RNA, 19 nt, Homo sapiens
  misc_RNA (1)...(19): siRNA sense strand
gagagaaaccuugcaaaug

SEQ ID NO: 1545062 - RNA, 19 nt, Homo sapiens
  misc_RNA (1)...(19): siRNA sense strand
agagaaacccuauaaaugu

SEQ ID NO: 1545063 - RNA, 19 nt, Homo sapiens
  misc_RNA (1)...(19): siRNA sense strand
gagaaaccuugcaaaugug

SEQ ID NO: 1545064 - RNA, 19 nt, Homo sapiens
  misc_RNA (1)...(19): siRNA sense strand
gacaaacccuacaaaugug

SEQ ID NO: 1545065 - RNA, 19 nt, Homo sapiens
  misc_RNA (1)...(19): siRNA sense strand
acagaaacccuacaaaugu

SEQ ID NO: 1545066 - RNA, 19 nt, Homo sapiens
  misc_RNA (1)...(19): siRNA sense strand
aaccauuccucaaaccuua

SEQ ID NO: 1545067 - RNA, 19 nt, Homo sapiens
  misc_RNA (1)...(19): siRNA sense strand
agagaaacccuacaaaugu

SEQ ID NO: 1545068 - RNA, 19 nt, Homo sapiens
  misc_RNA (1)...(19): siRNA sense strand
ucucaacccuuacuaaaca

SEQ ID NO: 1545069 - RNA, 19 nt, Homo sapiens
  misc_RNA (1)...(19): siRNA sense strand
ucucaacccuuacuaaaca

SEQ ID NO: 1545070 - RNA, 19 nt, Homo sapiens
  misc_RNA (1)...(19): siRNA sense strand
uaaagaauguggcaaaucc

SEQ ID NO: 1545071 - RNA, 19 nt, Homo sapiens
  misc_RNA (1)...(19): siRNA sense strand
aaacgaucuucaacccuua

SEQ ID NO: 1545072 - RNA, 19 nt, Homo sapiens
  misc_RNA (1)...(19): siRNA sense strand
agagaaacccuacaaaugu

SEQ ID NO: 1545073 - RNA, 19 nt, Homo sapiens
  misc_RNA (1)...(19): siRNA sense strand
aaacgaucuucaacccuua

SEQ ID NO: 1545074 - RNA, 19 nt, Homo sapiens
  misc_RNA (1)...(19): siRNA sense strand
agagaaacccuacaaaugu

SEQ ID NO: 1545075 - RNA, 19 nt, Homo sapiens
  misc_RNA (1)...(19): siRNA sense strand
agagaaacccuacaaaugu

SEQ ID NO: 1545076 - RNA, 19 nt, Homo sapiens
  misc_RNA (1)...(19): siRNA sense strand
ucucaacccuuacuaaaca

SEQ ID NO: 1545077 - RNA, 19 nt, Homo sapiens
  misc_RNA (1)...(19): siRNA sense strand
agagaaacccuacaaaugu

SEQ ID NO: 1545078 - RNA, 19 nt, Homo sapiens
  misc_RNA (1)...(19): siRNA sense strand
acucaaaccuuacuacaca

SEQ ID NO: 1545079 - RNA, 19 nt, Homo sapiens
  misc_RNA (1)...(19): siRNA sense strand
uaccgauucucaaaccuua

SEQ ID NO: 1545080 - RNA, 19 nt, Homo sapiens
  misc_RNA (1)...(19): siRNA sense strand
gggcacaagcaaauucaua

SEQ ID NO: 1545081 - RNA, 19 nt, Homo sapiens
  misc_RNA (1)...(19): siRNA sense strand
gacacaaacccuacaaaug

SEQ ID NO: 1545082 - RNA, 19 nt, Homo sapiens
  misc_RNA (1)...(19): siRNA sense strand
uggcaaagcccuuaguauu

SEQ ID NO: 1545083 - RNA, 19 nt, Homo sapiens
  misc_RNA (1)...(19): siRNA sense strand
gaaacccuauaaaugugaa

SEQ ID NO: 1545084 - RNA, 19 nt, Homo sapiens
  misc_RNA (1)...(19): siRNA sense strand
cuagagagaaacccuauaa

SEQ ID NO: 1545085 - RNA, 19 nt, Homo sapiens
  misc_RNA (1)...(19): siRNA sense strand
cagaaacccuacaaaugug

SEQ ID NO: 1545086 - RNA, 19 nt, Homo sapiens
  misc_RNA (1)...(19): siRNA sense strand
ggagacaaacccuacaaau

SEQ ID NO: 1545087 - RNA, 19 nt, Homo sapiens
  misc_RNA (1)...(19): siRNA sense strand
aguauauucucaacccuua

SEQ ID NO: 1545088 - RNA, 19 nt, Homo sapiens
  misc_RNA (1)...(19): siRNA sense strand
uggcaaauccuuuagugua

SEQ ID NO: 1545089 - RNA, 19 nt, Homo sapiens
  misc_RNA (1)...(19): siRNA sense strand
gaucuucaacccuuacuau

SEQ ID NO: 1545090 - RNA, 19 nt, Homo sapiens
  misc_RNA (1)...(19): siRNA sense strand
ggcaaaaccuuuaguguau

SEQ ID NO: 1545091 - RNA, 19 nt, Homo sapiens
  misc_RNA (1)...(19): siRNA sense strand
gaauguggcaaagcuuaua

SEQ ID NO: 1545092 - RNA, 19 nt, Homo sapiens
  misc_RNA (1)...(19): siRNA sense strand
aggcauaagcuaauucaua

SEQ ID NO: 1545093 - RNA, 19 nt, Homo sapiens
  misc_RNA (1)...(19): siRNA sense strand
uugcaaaugugaagaaugu

SEQ ID NO: 1545094 - RNA, 19 nt, Homo sapiens
  misc_RNA (1)...(19): siRNA sense strand
caaauccuuuaguguauuc

SEQ ID NO: 1545095 - RNA, 19 nt, Homo sapiens
  misc_RNA (1)...(19): siRNA sense strand
aaucgguccucacaccuua

SEQ ID NO: 1545096 - RNA, 19 nt, Homo sapiens
  misc_RNA (1)...(19): siRNA sense strand
cuucaacccuuacuaaaca

SEQ ID NO: 1545097 - RNA, 19 nt, Homo sapiens
  misc_RNA (1)...(19): siRNA sense strand
ccucacaccuuacuacaca

SEQ ID NO: 1545098 - RNA, 19 nt, Homo sapiens
  misc_RNA (1)...(19): siRNA sense strand
acaagcaaauucauagugu

SEQ ID NO: 1545099 - RNA, 19 nt, Homo sapiens
  misc_RNA (1)...(19): siRNA sense strand
auaagaaacccuacaaaug

SEQ ID NO: 1545100 - RNA, 19 nt, Homo sapiens
  misc_RNA (1)...(19): siRNA sense strand
ccucacaccuuacuacaca

SEQ ID NO: 1545101 - RNA, 19 nt, Homo sapiens
  misc_RNA (1)...(19): siRNA sense strand
uuaccgaugugaagaaugu

SEQ ID NO: 1545102 - RNA, 19 nt, Homo sapiens
  misc_RNA (1)...(19): siRNA sense strand
aagagaaacccuacaaaug

SEQ ID NO: 1545103 - RNA, 19 nt, Homo sapiens
  misc_RNA (1)...(19): siRNA sense strand
ggucugaagucaucuauaa

SEQ ID NO: 1545104 - RNA, 19 nt, Homo sapiens
  misc_RNA (1)...(19): siRNA sense strand
gcaaaucccucacgaaucu

SEQ ID NO: 1545105 - RNA, 19 nt, Homo sapiens
  misc_RNA (1)...(19): siRNA sense strand
gaacgagagugccacauug

SEQ ID NO: 1545106 - RNA, 19 nt, Homo sapiens
  misc_RNA (1)...(19): siRNA sense strand
gcuccaagcucuacagauu

SEQ ID NO: 1545107 - RNA, 19 nt, Homo sapiens
  misc_RNA (1)...(19): siRNA sense strand
gcauuggaauugaagguua

SEQ ID NO: 1545108 - RNA, 19 nt, Homo sapiens
  misc_RNA (1)...(19): siRNA sense strand
gaacuugaccggcuaaaug

SEQ ID NO: 1545109 - RNA, 19 nt, Homo sapiens
  misc_RNA (1)...(19): siRNA sense strand
ggaauaaacggaaccauga

SEQ ID NO: 1545110 - RNA, 19 nt, Homo sapiens
  misc_RNA (1)...(19): siRNA sense strand
gaaagugacgcuucuugua

SEQ ID NO: 1545111 - RNA, 19 nt, Homo sapiens
  misc_RNA (1)...(19): siRNA sense strand
gaagggagaguaugagauu

SEQ ID NO: 1545112 - RNA, 19 nt, Homo sapiens
  misc_RNA (1)...(19): siRNA sense strand
gugauuaucucugcauuaa

SEQ ID NO: 1545113 - RNA, 19 nt, Homo sapiens
  misc_RNA (1)...(19): siRNA sense strand
gagcucaucuugcccauca

SEQ ID NO: 1545114 - RNA, 19 nt, Homo sapiens
  misc_RNA (1)...(19): siRNA sense strand
cuaacgacuuucaggauua

SEQ ID NO: 1545115 - RNA, 19 nt, Homo sapiens
  misc_RNA (1)...(19): siRNA sense strand
ccagaaagauuuggaaaca

SEQ ID NO: 1545116 - RNA, 19 nt, Homo sapiens
  misc_RNA (1)...(19): siRNA sense strand
cuuaguggaugauacuuua

SEQ ID NO: 1545117 - RNA, 19 nt, Homo sapiens
  misc_RNA (1)...(19): siRNA sense strand
uccaugaacugucuaauga

SEQ ID NO: 1545118 - RNA, 19 nt, Homo sapiens
  misc_RNA (1)...(19): siRNA sense strand
ggaugauacuuuagcugua

SEQ ID NO: 1545119 - RNA, 19 nt, Homo sapiens
  misc_RNA (1)...(19): siRNA sense strand
gaagaccucucacuugacu

SEQ ID NO: 1545120 - RNA, 19 nt, Homo sapiens
  misc_RNA (1)...(19): siRNA sense strand
gaauagggauguugcaaaa

SEQ ID NO: 1545121 - RNA, 19 nt, Homo sapiens
  misc_RNA (1)...(19): siRNA sense strand
ucaguucccucacauaaug

SEQ ID NO: 1545122 - RNA, 19 nt, Homo sapiens
  misc_RNA (1)...(19): siRNA sense strand
caaagguucuugcuuccaa

SEQ ID NO: 1545123 - RNA, 19 nt, Homo sapiens
  misc_RNA (1)...(19): siRNA sense strand
aaaccgguaucaucaauug

SEQ ID NO: 1545124 - RNA, 19 nt, Homo sapiens
  misc_RNA (1)...(19): siRNA sense strand
gaaugaagaccucucacuu

SEQ ID NO: 1545125 - RNA, 19 nt, Homo sapiens
  misc_RNA (1)...(19): siRNA sense strand
gucaagaucugagugcuuu

SEQ ID NO: 1545126 - RNA, 19 nt, Homo sapiens
  misc_RNA (1)...(19): siRNA sense strand
uacccuaccuguaaagaaa

SEQ ID NO: 1545127 - RNA, 19 nt, Homo sapiens
  misc_RNA (1)...(19): siRNA sense strand
ggaggaccaggagauauua

SEQ ID NO: 1545128 - RNA, 19 nt, Homo sapiens
  misc_RNA (1)...(19): siRNA sense strand
agaaagauuuggaaacagu

SEQ ID NO: 1545129 - RNA, 19 nt, Homo sapiens
  misc_RNA (1)...(19): siRNA sense strand
gaugauacuuuagcuguag

SEQ ID NO: 1545130 - RNA, 19 nt, Homo sapiens
  misc_RNA (1)...(19): siRNA sense strand
gaaagauuuggaaacagua

SEQ ID NO: 1545131 - RNA, 19 nt, Homo sapiens
  misc_RNA (1)...(19): siRNA sense strand
gaagaccacccuccaccaa

SEQ ID NO: 1545132 - RNA, 19 nt, Homo sapiens
  misc_RNA (1)...(19): siRNA sense strand
uuucucagauggcuucuaa

SEQ ID NO: 1545133 - RNA, 19 nt, Homo sapiens
  misc_RNA (1)...(19): siRNA sense strand
gaauaaacggaaccaugaa

SEQ ID NO: 1545134 - RNA, 19 nt, Homo sapiens
  misc_RNA (1)...(19): siRNA sense strand
gauggcuucuaacgacuuu

SEQ ID NO: 1545135 - RNA, 19 nt, Homo sapiens
  misc_RNA (1)...(19): siRNA sense strand
caacuucacucggcccaau

SEQ ID NO: 1545136 - RNA, 19 nt, Homo sapiens
  misc_RNA (1)...(19): siRNA sense strand
augaagaccucucacuuga

SEQ ID NO: 1545137 - RNA, 19 nt, Homo sapiens
  misc_RNA (1)...(19): siRNA sense strand
ggugggcugugccaagaaa

SEQ ID NO: 1545138 - RNA, 19 nt, Homo sapiens
  misc_RNA (1)...(19): siRNA sense strand
ucuaacgacuuucaggauu

SEQ ID NO: 1545139 - RNA, 19 nt, Homo sapiens
  misc_RNA (1)...(19): siRNA sense strand
cagugacagugacagguua

SEQ ID NO: 1545140 - RNA, 19 nt, Homo sapiens
  misc_RNA (1)...(19): siRNA sense strand
auaagcaguuugaucacua

SEQ ID NO: 1545141 - RNA, 19 nt, Homo sapiens
  misc_RNA (1)...(19): siRNA sense strand
ccaaugagaagggagagua

SEQ ID NO: 1545142 - RNA, 19 nt, Homo sapiens
  misc_RNA (1)...(19): siRNA sense strand
gaagcaaaucccucacgaa

SEQ ID NO: 1545143 - RNA, 19 nt, Homo sapiens
  misc_RNA (1)...(19): siRNA sense strand
gccagcaaaucuucaguuc

SEQ ID NO: 1545144 - RNA, 19 nt, Homo sapiens
  misc_RNA (1)...(19): siRNA sense strand
gcagugacagugacagguu

SEQ ID NO: 1545145 - RNA, 19 nt, Homo sapiens
  misc_RNA (1)...(19): siRNA sense strand
aaacaguagugugggcuuu

SEQ ID NO: 1545146 - RNA, 19 nt, Homo sapiens
  misc_RNA (1)...(19): siRNA sense strand
gagaagggagaguaugaga

SEQ ID NO: 1545147 - RNA, 19 nt, Homo sapiens
  misc_RNA (1)...(19): siRNA sense strand
ggaccaggagauauuaaug

SEQ ID NO: 1545148 - RNA, 19 nt, Homo sapiens
  misc_RNA (1)...(19): siRNA sense strand
ucugguagcugcuggagau

SEQ ID NO: 1545149 - RNA, 19 nt, Homo sapiens
  misc_RNA (1)...(19): siRNA sense strand
gcugaagacaucaaagguu

SEQ ID NO: 1545150 - RNA, 19 nt, Homo sapiens
  misc_RNA (1)...(19): siRNA sense strand
cgagagugccacauuguug

SEQ ID NO: 1545151 - RNA, 19 nt, Homo sapiens
  misc_RNA (1)...(19): siRNA sense strand
ucacucggcccaaugagaa

SEQ ID NO: 1545152 - RNA, 19 nt, Homo sapiens
  misc_RNA (1)...(19): siRNA sense strand
gcucuacagauucuucaaa

SEQ ID NO: 1545153 - RNA, 19 nt, Homo sapiens
  misc_RNA (1)...(19): siRNA sense strand
agaccacccuccaccaaug

SEQ ID NO: 1545154 - RNA, 19 nt, Homo sapiens
  misc_RNA (1)...(19): siRNA sense strand
gcucauaagcaguuugauc

SEQ ID NO: 1545155 - RNA, 19 nt, Homo sapiens
  misc_RNA (1)...(19): siRNA sense strand
guccucauaaucuuacuua

SEQ ID NO: 1545156 - RNA, 19 nt, Homo sapiens
  misc_RNA (1)...(19): siRNA sense strand
gguagcugcuggagaugau

SEQ ID NO: 1545157 - RNA, 19 nt, Homo sapiens
  misc_RNA (1)...(19): siRNA sense strand
ccaguguguucgaagcaaa

SEQ ID NO: 1545158 - RNA, 19 nt, Homo sapiens
  misc_RNA (1)...(19): siRNA sense strand
cuucaacacuauccgaugu

SEQ ID NO: 1545159 - RNA, 19 nt, Homo sapiens
  misc_RNA (1)...(19): siRNA sense strand
uaacgacuuucaggauuag

SEQ ID NO: 1545160 - RNA, 19 nt, Homo sapiens
  misc_RNA (1)...(19): siRNA sense strand
aagcaaaucccucacgaau

SEQ ID NO: 1545161 - RNA, 19 nt, Homo sapiens
  misc_RNA (1)...(19): siRNA sense strand
gaagagucgccauguggau

SEQ ID NO: 1545162 - RNA, 19 nt, Homo sapiens
  misc_RNA (1)...(19): siRNA sense strand
caucugguccucauaaucu

SEQ ID NO: 1545163 - RNA, 19 nt, Homo sapiens
  misc_RNA (1)...(19): siRNA sense strand
aaugaagaccucucacuug

SEQ ID NO: 1545164 - RNA, 19 nt, Homo sapiens
  misc_RNA (1)...(19): siRNA sense strand
aaagugacgcuucuuguag

SEQ ID NO: 1545165 - RNA, 19 nt, Homo sapiens
  misc_RNA (1)...(19): siRNA sense strand
gagaauagggauguugcaa

SEQ ID NO: 1545166 - RNA, 19 nt, Homo sapiens
  misc_RNA (1)...(19): siRNA sense strand
gagagugccacauuguugu

SEQ ID NO: 1545167 - RNA, 19 nt, Homo sapiens
  misc_RNA (1)...(19): siRNA sense strand
ggaaugaagaccucucacu

SEQ ID NO: 1545168 - RNA, 19 nt, Homo sapiens
  misc_RNA (1)...(19): siRNA sense strand
gguucuugcuuccaaagug

SEQ ID NO: 1545169 - RNA, 19 nt, Homo sapiens
  misc_RNA (1)...(19): siRNA sense strand
caaaaccgguaucaucaau

SEQ ID NO: 1545170 - RNA, 19 nt, Homo sapiens
  misc_RNA (1)...(19): siRNA sense strand
cuucaguucccucacauaa

SEQ ID NO: 1545171 - RNA, 19 nt, Homo sapiens
  misc_RNA (1)...(19): siRNA sense strand
agugcuggauuauuacaaa

SEQ ID NO: 1545172 - RNA, 19 nt, Homo sapiens
  misc_RNA (1)...(19): siRNA sense strand
aagugacgcuucuuguaga

SEQ ID NO: 1545173 - RNA, 19 nt, Homo sapiens
  misc_RNA (1)...(19): siRNA sense strand
agugugggcuuuggcagua

SEQ ID NO: 1545174 - RNA, 19 nt, Homo sapiens
  misc_RNA (1)...(19): siRNA sense strand
gcuuaguggaugauacuuu

SEQ ID NO: 1545175 - RNA, 19 nt, Homo sapiens
  misc_RNA (1)...(19): siRNA sense strand
agaauagggauguugcaaa

SEQ ID NO: 1545176 - RNA, 19 nt, Homo sapiens
  misc_RNA (1)...(19): siRNA sense strand
agaacgagagugccacauu

SEQ ID NO: 1545177 - RNA, 19 nt, Homo sapiens
  misc_RNA (1)...(19): siRNA sense strand
aaucuuacuuauccucuag

SEQ ID NO: 1545178 - RNA, 19 nt, Homo sapiens
  misc_RNA (1)...(19): siRNA sense strand
gaggaccaggagauauuaa

SEQ ID NO: 1545179 - RNA, 19 nt, Homo sapiens
  misc_RNA (1)...(19): siRNA sense strand
aaagguucuugcuuccaaa

SEQ ID NO: 1545180 - RNA, 19 nt, Homo sapiens
  misc_RNA (1)...(19): siRNA sense strand
uggaggaccaggagauauu

SEQ ID NO: 1545181 - RNA, 19 nt, Homo sapiens
  misc_RNA (1)...(19): siRNA sense strand
ugcuggagaugaugucuug

SEQ ID NO: 1545182 - RNA, 19 nt, Homo sapiens
  misc_RNA (1)...(19): siRNA sense strand
aaucuucaguucccucaca

SEQ ID NO: 1545183 - RNA, 19 nt, Homo sapiens
  misc_RNA (1)...(19): siRNA sense strand
ugacggaugaggauucugu

SEQ ID NO: 1545184 - RNA, 19 nt, Homo sapiens
  misc_RNA (1)...(19): siRNA sense strand
uauccgaugucaagaucug

SEQ ID NO: 1545185 - RNA, 19 nt, Homo sapiens
  misc_RNA (1)...(19): siRNA sense strand
guagauggcacacguuuug

SEQ ID NO: 1545186 - RNA, 19 nt, Homo sapiens
  misc_RNA (1)...(19): siRNA sense strand
ugacagugacagguuauug

SEQ ID NO: 1545187 - RNA, 19 nt, Homo sapiens
  misc_RNA (1)...(19): siRNA sense strand
cauaagcaguuugaucacu

SEQ ID NO: 1545188 - RNA, 19 nt, Homo sapiens
  misc_RNA (1)...(19): siRNA sense strand
ucaacacuauccgauguca

SEQ ID NO: 1545189 - RNA, 19 nt, Homo sapiens
  misc_RNA (1)...(19): siRNA sense strand
uaagcaguuugaucacuac

SEQ ID NO: 1545190 - RNA, 19 nt, Homo sapiens
  misc_RNA (1)...(19): siRNA sense strand
auccagaugucaugggaaa

SEQ ID NO: 1545191 - RNA, 19 nt, Homo sapiens
  misc_RNA (1)...(19): siRNA sense strand
aaacggaaccaugaaccuu

SEQ ID NO: 1545192 - RNA, 19 nt, Homo sapiens
  misc_RNA (1)...(19): siRNA sense strand
ggaggccagcugcuuagug

SEQ ID NO: 1545193 - RNA, 19 nt, Homo sapiens
  misc_RNA (1)...(19): siRNA sense strand
gugcuuuacuccaugaacu

SEQ ID NO: 1545194 - RNA, 19 nt, Homo sapiens
  misc_RNA (1)...(19): siRNA sense strand
caaugagaagggagaguau

SEQ ID NO: 1545195 - RNA, 19 nt, Homo sapiens
  misc_RNA (1)...(19): siRNA sense strand
cuucaucugguccucauaa

SEQ ID NO: 1545196 - RNA, 19 nt, Homo sapiens
  misc_RNA (1)...(19): siRNA sense strand
ccagcugcuuaguggauga

SEQ ID NO: 1545197 - RNA, 19 nt, Homo sapiens
  misc_RNA (1)...(19): siRNA sense strand
gaccaggagauauuaaugc

SEQ ID NO: 1545198 - RNA, 19 nt, Homo sapiens
  misc_RNA (1)...(19): siRNA sense strand
cucauaagcaguuugauca

SEQ ID NO: 1545199 - RNA, 19 nt, Homo sapiens
  misc_RNA (1)...(19): siRNA sense strand
ugugauuaucucugcauua

SEQ ID NO: 1545200 - RNA, 19 nt, Homo sapiens
  misc_RNA (1)...(19): siRNA sense strand
uaauucccauucccaagca

SEQ ID NO: 1545201 - RNA, 19 nt, Homo sapiens
  misc_RNA (1)...(19): siRNA sense strand
gauuuccaguguguucgaa

SEQ ID NO: 1545202 - RNA, 19 nt, Homo sapiens
  misc_RNA (1)...(19): siRNA sense strand
gaugaacuugaccggcuaa

SEQ ID NO: 1545203 - RNA, 19 nt, Homo sapiens
  misc_RNA (1)...(19): siRNA sense strand
ggaaauaguggagaaguuu

SEQ ID NO: 1545204 - RNA, 19 nt, Homo sapiens
  misc_RNA (1)...(19): siRNA sense strand
gguaucaucucuccuguca

SEQ ID NO: 1545205 - RNA, 19 nt, Homo sapiens
  misc_RNA (1)...(19): siRNA sense strand
ccaaggagccugugcagaa

SEQ ID NO: 1545206 - RNA, 19 nt, Homo sapiens
  misc_RNA (1)...(19): siRNA sense strand
gagcguaaaguaccugauu

SEQ ID NO: 1545207 - RNA, 19 nt, Homo sapiens
  misc_RNA (1)...(19): siRNA sense strand
gcacauccaggaaauagug

SEQ ID NO: 1545208 - RNA, 19 nt, Homo sapiens
  misc_RNA (1)...(19): siRNA sense strand
cgcagaaucucccauccua

SEQ ID NO: 1545209 - RNA, 19 nt, Homo sapiens
  misc_RNA (1)...(19): siRNA sense strand
gaaauaguggagaaguuug

SEQ ID NO: 1545210 - RNA, 19 nt, Homo sapiens
  misc_RNA (1)...(19): siRNA sense strand
cgacaccuaugggaagaaa

SEQ ID NO: 1545211 - RNA, 19 nt, Homo sapiens
  misc_RNA (1)...(19): siRNA sense strand
gcacugagggcaagacaag

SEQ ID NO: 1545212 - RNA, 19 nt, Homo sapiens
  misc_RNA (1)...(19): siRNA sense strand
caaggagccugugcagaau

SEQ ID NO: 1545213 - RNA, 19 nt, Homo sapiens
  misc_RNA (1)...(19): siRNA sense strand
uaucaucucuccugucaac

SEQ ID NO: 1545214 - RNA, 19 nt, Homo sapiens
  misc_RNA (1)...(19): siRNA sense strand
caagggcaguaccuggaaa

SEQ ID NO: 1545215 - RNA, 19 nt, Homo sapiens
  misc_RNA (1)...(19): siRNA sense strand
gaucagugccacauacauc

SEQ ID NO: 1545216 - RNA, 19 nt, Homo sapiens
  misc_RNA (1)...(19): siRNA sense strand
caaggaccauggccucuac

SEQ ID NO: 1545217 - RNA, 19 nt, Homo sapiens
  misc_RNA (1)...(19): siRNA sense strand
ugaaggugcugaggcauca

SEQ ID NO: 1545218 - RNA, 19 nt, Homo sapiens
  misc_RNA (1)...(19): siRNA sense strand
ugagaucagugccacauac

SEQ ID NO: 1545219 - RNA, 19 nt, Homo sapiens
  misc_RNA (1)...(19): siRNA sense strand
acauucaccuggccaagga

SEQ ID NO: 1545220 - RNA, 19 nt, Homo sapiens
  misc_RNA (1)...(19): siRNA sense strand
aggaaauaguggagaaguu

SEQ ID NO: 1545221 - RNA, 19 nt, Homo sapiens
  misc_RNA (1)...(19): siRNA sense strand
cacaguggauggagacagu

SEQ ID NO: 1545222 - RNA, 19 nt, Homo sapiens
  misc_RNA (1)...(19): siRNA sense strand
gaggcaucaucacagcaaa

SEQ ID NO: 1545223 - RNA, 19 nt, Homo sapiens
  misc_RNA (1)...(19): siRNA sense strand
aagguuacaucgcagaauc

SEQ ID NO: 1545224 - RNA, 19 nt, Homo sapiens
  misc_RNA (1)...(19): siRNA sense strand
ggauggagacagugaaggu

SEQ ID NO: 1545225 - RNA, 19 nt, Homo sapiens
  misc_RNA (1)...(19): siRNA sense strand
ggccaagggcagagcguaa

SEQ ID NO: 1545226 - RNA, 19 nt, Homo sapiens
  misc_RNA (1)...(19): siRNA sense strand
gaaagaccucgcagcuucu

SEQ ID NO: 1545227 - RNA, 19 nt, Homo sapiens
  misc_RNA (1)...(19): siRNA sense strand
gcgcacauccaggaaauag

SEQ ID NO: 1545228 - RNA, 19 nt, Homo sapiens
  misc_RNA (1)...(19): siRNA sense strand
gcugucaucacguacauca

SEQ ID NO: 1545229 - RNA, 19 nt, Homo sapiens
  misc_RNA (1)...(19): siRNA sense strand
acaccuaugggaagaaaga

SEQ ID NO: 1545230 - RNA, 19 nt, Homo sapiens
  misc_RNA (1)...(19): siRNA sense strand
aggagccugugcagaauga

SEQ ID NO: 1545231 - RNA, 19 nt, Homo sapiens
  misc_RNA (1)...(19): siRNA sense strand
gagaucagugccacauaca

SEQ ID NO: 1545232 - RNA, 19 nt, Homo sapiens
  misc_RNA (1)...(19): siRNA sense strand
ggucauccaggguaucauc

SEQ ID NO: 1545233 - RNA, 19 nt, Homo sapiens
  misc_RNA (1)...(19): siRNA sense strand
ccaagggcaguaccuggaa

SEQ ID NO: 1545234 - RNA, 19 nt, Homo sapiens
  misc_RNA (1)...(19): siRNA sense strand
aagggcagagcguaaagua

SEQ ID NO: 1545235 - RNA, 19 nt, Homo sapiens
  misc_RNA (1)...(19): siRNA sense strand
gguggacccuugggagagu

SEQ ID NO: 1545236 - RNA, 19 nt, Homo sapiens
  misc_RNA (1)...(19): siRNA sense strand
cauccaggguaucaucucu

SEQ ID NO: 1545237 - RNA, 19 nt, Homo sapiens
  misc_RNA (1)...(19): siRNA sense strand
gccaagggcagagcguaaa

SEQ ID NO: 1545238 - RNA, 19 nt, Homo sapiens
  misc_RNA (1)...(19): siRNA sense strand
ggaugcaccagcacaacau

SEQ ID NO: 1545239 - RNA, 19 nt, Homo sapiens
  misc_RNA (1)...(19): siRNA sense strand
ucaaggaccauggccucua

SEQ ID NO: 1545240 - RNA, 19 nt, Homo sapiens
  misc_RNA (1)...(19): siRNA sense strand
gaugcaccagcacaacauu

SEQ ID NO: 1545241 - RNA, 19 nt, Homo sapiens
  misc_RNA (1)...(19): siRNA sense strand
gugcugaggcaucaucaca

SEQ ID NO: 1545242 - RNA, 19 nt, Homo sapiens
  misc_RNA (1)...(19): siRNA sense strand
ccucgcagcuucucaucac

SEQ ID NO: 1545243 - RNA, 19 nt, Homo sapiens
  misc_RNA (1)...(19): siRNA sense strand
gagccugugcagaaugaga

SEQ ID NO: 1545244 - RNA, 19 nt, Homo sapiens
  misc_RNA (1)...(19): siRNA sense strand
guucagcacuaaccaauga

SEQ ID NO: 1545245 - RNA, 19 nt, Homo sapiens
  misc_RNA (1)...(19): siRNA sense strand
gagcugcacuaccucauga

SEQ ID NO: 1545246 - RNA, 19 nt, Homo sapiens
  misc_RNA (1)...(19): siRNA sense strand
gcaacugcguaucuacuuc

SEQ ID NO: 1545247 - RNA, 19 nt, Homo sapiens
  misc_RNA (1)...(19): siRNA sense strand
gccaggagcgggugucuuu

SEQ ID NO: 1545248 - RNA, 19 nt, Homo sapiens
  misc_RNA (1)...(19): siRNA sense strand
gagaccaaguauauggaaa

SEQ ID NO: 1545249 - RNA, 19 nt, Homo sapiens
  misc_RNA (1)...(19): siRNA sense strand
gccuggagcuggacgagaa

SEQ ID NO: 1545250 - RNA, 19 nt, Homo sapiens
  misc_RNA (1)...(19): siRNA sense strand
cagagaugguugccuucua

SEQ ID NO: 1545251 - RNA, 19 nt, Homo sapiens
  misc_RNA (1)...(19): siRNA sense strand
ugaggacuguucagcacua

SEQ ID NO: 1545252 - RNA, 19 nt, Homo sapiens
  misc_RNA (1)...(19): siRNA sense strand
gaagcucacguacaucuca

SEQ ID NO: 1545253 - RNA, 19 nt, Homo sapiens
  misc_RNA (1)...(19): siRNA sense strand
gagcagcugcggauguuau

SEQ ID NO: 1545254 - RNA, 19 nt, Homo sapiens
  misc_RNA (1)...(19): siRNA sense strand
ccaggagaguucauuccaa

SEQ ID NO: 1545255 - RNA, 19 nt, Homo sapiens
  misc_RNA (1)...(19): siRNA sense strand
gcacuaaccaaugagauca

SEQ ID NO: 1545256 - RNA, 19 nt, Homo sapiens
  misc_RNA (1)...(19): siRNA sense strand
gcauccaccucucccacuu

SEQ ID NO: 1545257 - RNA, 19 nt, Homo sapiens
  misc_RNA (1)...(19): siRNA sense strand
gccugaagcucacguacau

SEQ ID NO: 1545258 - RNA, 19 nt, Homo sapiens
  misc_RNA (1)...(19): siRNA sense strand
gaccaaguauauggaaauc

SEQ ID NO: 1545259 - RNA, 19 nt, Homo sapiens
  misc_RNA (1)...(19): siRNA sense strand
guaucuacuuccucaacaa

SEQ ID NO: 1545260 - RNA, 19 nt, Homo sapiens
  misc_RNA (1)...(19): siRNA sense strand
ccaaguauauggaaauccu

SEQ ID NO: 1545261 - RNA, 19 nt, Homo sapiens
  misc_RNA (1)...(19): siRNA sense strand
gaggacuguucagcacuaa

SEQ ID NO: 1545262 - RNA, 19 nt, Homo sapiens
  misc_RNA (1)...(19): siRNA sense strand
gaaaagcagccgaugagaa

SEQ ID NO: 1545263 - RNA, 19 nt, Homo sapiens
  misc_RNA (1)...(19): siRNA sense strand
ggagaccaaguauauggaa

SEQ ID NO: 1545264 - RNA, 19 nt, Homo sapiens
  misc_RNA (1)...(19): siRNA sense strand
gcagcgccaccaccuguuu

SEQ ID NO: 1545265 - RNA, 19 nt, Homo sapiens
  misc_RNA (1)...(19): siRNA sense strand
cagcggccauccuggaguu

SEQ ID NO: 1545266 - RNA, 19 nt, Homo sapiens
  misc_RNA (1)...(19): siRNA sense strand
ggcugcagcuggccguauu

SEQ ID NO: 1545267 - RNA, 19 nt, Homo sapiens
  misc_RNA (1)...(19): siRNA sense strand
ccugcuggaugccaaggua

SEQ ID NO: 1545268 - RNA, 19 nt, Homo sapiens
  misc_RNA (1)...(19): siRNA sense strand
agagaugguugccuucuac

SEQ ID NO: 1545269 - RNA, 19 nt, Homo sapiens
  misc_RNA (1)...(19): siRNA sense strand
guugggagaauguggauga

SEQ ID NO: 1545270 - RNA, 19 nt, Homo sapiens
  misc_RNA (1)...(19): siRNA sense strand
ucagaggguugggagaaug

SEQ ID NO: 1545271 - RNA, 19 nt, Homo sapiens
  misc_RNA (1)...(19): siRNA sense strand
ccuccgccauccagaacua

SEQ ID NO: 1545272 - RNA, 19 nt, Homo sapiens
  misc_RNA (1)...(19): siRNA sense strand
cagccacacugccagagau

SEQ ID NO: 1545273 - RNA, 19 nt, Homo sapiens
  misc_RNA (1)...(19): siRNA sense strand
gacacugaauggucaagag

SEQ ID NO: 1545274 - RNA, 19 nt, Homo sapiens
  misc_RNA (1)...(19): siRNA sense strand
caggagcgggugucuuuga

SEQ ID NO: 1545275 - RNA, 19 nt, Homo sapiens
  misc_RNA (1)...(19): siRNA sense strand
gggcuuugcggcaugaaga

SEQ ID NO: 1545276 - RNA, 19 nt, Homo sapiens
  misc_RNA (1)...(19): siRNA sense strand
ugcacaaacuguugguguu

SEQ ID NO: 1545277 - RNA, 19 nt, Homo sapiens
  misc_RNA (1)...(19): siRNA sense strand
ggagcugcacuaccucaug

SEQ ID NO: 1545278 - RNA, 19 nt, Homo sapiens
  misc_RNA (1)...(19): siRNA sense strand
guauauggaaauccucaga

SEQ ID NO: 1545279 - RNA, 19 nt, Homo sapiens
  misc_RNA (1)...(19): siRNA sense strand
gcacucucacguucaaaca

SEQ ID NO: 1545280 - RNA, 19 nt, Homo sapiens
  misc_RNA (1)...(19): siRNA sense strand
ccugccagcucuucgacuu

SEQ ID NO: 1545281 - RNA, 19 nt, Homo sapiens
  misc_RNA (1)...(19): siRNA sense strand
aagcagccgaugagaauga

SEQ ID NO: 1545282 - RNA, 19 nt, Homo sapiens
  misc_RNA (1)...(19): siRNA sense strand
ggagaaaagcagccgauga

SEQ ID NO: 1545283 - RNA, 19 nt, Homo sapiens
  misc_RNA (1)...(19): siRNA sense strand
acugaauggucaagaggaa

SEQ ID NO: 1545284 - RNA, 19 nt, Homo sapiens
  misc_RNA (1)...(19): siRNA sense strand
ggacacugaauggucaaga

SEQ ID NO: 1545285 - RNA, 19 nt, Homo sapiens
  misc_RNA (1)...(19): siRNA sense strand
ccacaucuggcauggaaag

SEQ ID NO: 1545286 - RNA, 19 nt, Homo sapiens
  misc_RNA (1)...(19): siRNA sense strand
guugaugcacaaacuguug

SEQ ID NO: 1545287 - RNA, 19 nt, Homo sapiens
  misc_RNA (1)...(19): siRNA sense strand
cugaagccuugcacucuca

SEQ ID NO: 1545288 - RNA, 19 nt, Homo sapiens
  misc_RNA (1)...(19): siRNA sense strand
gcaugaagauccgguuccu

SEQ ID NO: 1545289 - RNA, 19 nt, Homo sapiens
  misc_RNA (1)...(19): siRNA sense strand
uugagcagcugcggauguu

SEQ ID NO: 1545290 - RNA, 19 nt, Homo sapiens
  misc_RNA (1)...(19): siRNA sense strand
cguaucuacuuccucaaca

SEQ ID NO: 1545291 - RNA, 19 nt, Homo sapiens
  misc_RNA (1)...(19): siRNA sense strand
caucugcaacugcguaucu

SEQ ID NO: 1545292 - RNA, 19 nt, Homo sapiens
  misc_RNA (1)...(19): siRNA sense strand
cuacacacacccacucaag

SEQ ID NO: 1545293 - RNA, 19 nt, Homo sapiens
  misc_RNA (1)...(19): siRNA sense strand
ucagauuccaggcaucaga

SEQ ID NO: 1545294 - RNA, 19 nt, Homo sapiens
  misc_RNA (1)...(19): siRNA sense strand
cgaugagaaugaggacugu

SEQ ID NO: 1545295 - RNA, 19 nt, Homo sapiens
  misc_RNA (1)...(19): siRNA sense strand
aaaagcagccgaugagaau

SEQ ID NO: 1545296 - RNA, 19 nt, Homo sapiens
  misc_RNA (1)...(19): siRNA sense strand
gagaaaagcagccgaugag

SEQ ID NO: 1545297 - RNA, 19 nt, Homo sapiens
  misc_RNA (1)...(19): siRNA sense strand
agaccaaguauauggaaau

SEQ ID NO: 1545298 - RNA, 19 nt, Homo sapiens
  misc_RNA (1)...(19): siRNA sense strand
cggccauccuggaguuguu

SEQ ID NO: 1545299 - RNA, 19 nt, Homo sapiens
  misc_RNA (1)...(19): siRNA sense strand
gauaucaccugucaaaguu

SEQ ID NO: 1545300 - RNA, 19 nt, Homo sapiens
  misc_RNA (1)...(19): siRNA sense strand
gcaaacgccuguccuguga

SEQ ID NO: 1545301 - RNA, 19 nt, Homo sapiens
  misc_RNA (1)...(19): siRNA sense strand
gaacuaacaagguuuacuu

SEQ ID NO: 1545302 - RNA, 19 nt, Homo sapiens
  misc_RNA (1)...(19): siRNA sense strand
gaggauaucaccugucaaa

SEQ ID NO: 1545303 - RNA, 19 nt, Homo sapiens
  misc_RNA (1)...(19): siRNA sense strand
gcacuuucagcuucaaaua

SEQ ID NO: 1545304 - RNA, 19 nt, Homo sapiens
  misc_RNA (1)...(19): siRNA sense strand
cuaacaagguuuacuucaa

SEQ ID NO: 1545305 - RNA, 19 nt, Homo sapiens
  misc_RNA (1)...(19): siRNA sense strand
ggauaucaccugucaaagu

SEQ ID NO: 1545306 - RNA, 19 nt, Homo sapiens
  misc_RNA (1)...(19): siRNA sense strand
acagggaacuaacaagguu

SEQ ID NO: 1545307 - RNA, 19 nt, Homo sapiens
  misc_RNA (1)...(19): siRNA sense strand
gagauguuccugcccagua

SEQ ID NO: 1545308 - RNA, 19 nt, Homo sapiens
  misc_RNA (1)...(19): siRNA sense strand
gcuggacgguuacguguuc

SEQ ID NO: 1545309 - RNA, 19 nt, Homo sapiens
  misc_RNA (1)...(19): siRNA sense strand
acgaggugcuggacgguua

SEQ ID NO: 1545310 - RNA, 19 nt, Homo sapiens
  misc_RNA (1)...(19): siRNA sense strand
uugcagaacuugucagaag

SEQ ID NO: 1545311 - RNA, 19 nt, Homo sapiens
  misc_RNA (1)...(19): siRNA sense strand
uggaggauaucaccuguca

SEQ ID NO: 1545312 - RNA, 19 nt, Homo sapiens
  misc_RNA (1)...(19): siRNA sense strand
ccgaguacuucgacagcua

SEQ ID NO: 1545313 - RNA, 19 nt, Homo sapiens
  misc_RNA (1)...(19): siRNA sense strand
agauguuccugcccaguaa

SEQ ID NO: 1545314 - RNA, 19 nt, Homo sapiens
  misc_RNA (1)...(19): siRNA sense strand
gcugggagagugcuuaugu

SEQ ID NO: 1545315 - RNA, 19 nt, Homo sapiens
  misc_RNA (1)...(19): siRNA sense strand
caagauuugugcgguagau

SEQ ID NO: 1545316 - RNA, 19 nt, Homo sapiens
  misc_RNA (1)...(19): siRNA sense strand
gugcuuauguguggugugu

SEQ ID NO: 1545317 - RNA, 19 nt, Homo sapiens
  misc_RNA (1)...(19): siRNA sense strand
gacagcacuuucagcuuca

SEQ ID NO: 1545318 - RNA, 19 nt, Homo sapiens
  misc_RNA (1)...(19): siRNA sense strand
gcuuaugugugguguguac

SEQ ID NO: 1545319 - RNA, 19 nt, Homo sapiens
  misc_RNA (1)...(19): siRNA sense strand
cagcuucaaauacaucauu

SEQ ID NO: 1545320 - RNA, 19 nt, Homo sapiens
  misc_RNA (1)...(19): siRNA sense strand
uaucaccugucaaaguugu

SEQ ID NO: 1545321 - RNA, 19 nt, Homo sapiens
  misc_RNA (1)...(19): siRNA sense strand
agaagucuuauaacccuua

SEQ ID NO: 1545322 - RNA, 19 nt, Homo sapiens
  misc_RNA (1)...(19): siRNA sense strand
gcuauuaccacugcaagga

SEQ ID NO: 1545323 - RNA, 19 nt, Homo sapiens
  misc_RNA (1)...(19): siRNA sense strand
cggcugcgcuuccaguucu

SEQ ID NO: 1545324 - RNA, 19 nt, Homo sapiens
  misc_RNA (1)...(19): siRNA sense strand
cuugucagaagucuuauaa

SEQ ID NO: 1545325 - RNA, 19 nt, Homo sapiens
  misc_RNA (1)...(19): siRNA sense strand
ugucagaagucuuauaacc

SEQ ID NO: 1545326 - RNA, 19 nt, Homo sapiens
  misc_RNA (1)...(19): siRNA sense strand
gaagucuuauaacccuuac

SEQ ID NO: 1545327 - RNA, 19 nt, Homo sapiens
  misc_RNA (1)...(19): siRNA sense strand
acuuucagcuucaaauaca

SEQ ID NO: 1545328 - RNA, 19 nt, Homo sapiens
  misc_RNA (1)...(19): siRNA sense strand
ucuuagagcagaaauaugg

SEQ ID NO: 1545329 - RNA, 19 nt, Homo sapiens
  misc_RNA (1)...(19): siRNA sense strand
caacauccgcugggagagu

SEQ ID NO: 1545330 - RNA, 19 nt, Homo sapiens
  misc_RNA (1)...(19): siRNA sense strand
agggaacuaacaagguuua

SEQ ID NO: 1545331 - RNA, 19 nt, Homo sapiens
  misc_RNA (1)...(19): siRNA sense strand
gaagagagcucaagacuuu

SEQ ID NO: 1545332 - RNA, 19 nt, Homo sapiens
  misc_RNA (1)...(19): siRNA sense strand
gaagcaagcuaaagaauga

SEQ ID NO: 1545333 - RNA, 19 nt, Homo sapiens
  misc_RNA (1)...(19): siRNA sense strand
gaaaugcacuuaaacaaug

SEQ ID NO: 1545334 - RNA, 19 nt, Homo sapiens
  misc_RNA (1)...(19): siRNA sense strand
gaacagagaguuauuaaga

SEQ ID NO: 1545335 - RNA, 19 nt, Homo sapiens
  misc_RNA (1)...(19): siRNA sense strand
agaaaugccugaaagcuua

SEQ ID NO: 1545336 - RNA, 19 nt, Homo sapiens
  misc_RNA (1)...(19): siRNA sense strand
gcucaagacuuucuguuaa

SEQ ID NO: 1545337 - RNA, 19 nt, Homo sapiens
  misc_RNA (1)...(19): siRNA sense strand
gagcaacacugccuccuaa

SEQ ID NO: 1545338 - RNA, 19 nt, Homo sapiens
  misc_RNA (1)...(19): siRNA sense strand
gagaaaugguguccucuuu

SEQ ID NO: 1545339 - RNA, 19 nt, Homo sapiens
  misc_RNA (1)...(19): siRNA sense strand
gaggguggcuucacucgua

SEQ ID NO: 1545340 - RNA, 19 nt, Homo sapiens
  misc_RNA (1)...(19): siRNA sense strand
gagcaggaguuacagaauu

SEQ ID NO: 1545341 - RNA, 19 nt, Homo sapiens
  misc_RNA (1)...(19): siRNA sense strand
gaaugcuucucgaugaaua

SEQ ID NO: 1545342 - RNA, 19 nt, Homo sapiens
  misc_RNA (1)...(19): siRNA sense strand
ggaacaagcaguagagaaa

SEQ ID NO: 1545343 - RNA, 19 nt, Homo sapiens
  misc_RNA (1)...(19): siRNA sense strand
gaaaugguguccucuuuac

SEQ ID NO: 1545344 - RNA, 19 nt, Homo sapiens
  misc_RNA (1)...(19): siRNA sense strand
gaacaagaggccauucaaa

SEQ ID NO: 1545345 - RNA, 19 nt, Homo sapiens
  misc_RNA (1)...(19): siRNA sense strand
ccaaauggauacuauggaa

SEQ ID NO: 1545346 - RNA, 19 nt, Homo sapiens
  misc_RNA (1)...(19): siRNA sense strand
gaaaucagaaaugcacuua

SEQ ID NO: 1545347 - RNA, 19 nt, Homo sapiens
  misc_RNA (1)...(19): siRNA sense strand
gaaagacaauucgccagaa

SEQ ID NO: 1545348 - RNA, 19 nt, Homo sapiens
  misc_RNA (1)...(19): siRNA sense strand
caagaggccauucaaagua

SEQ ID NO: 1545349 - RNA, 19 nt, Homo sapiens
  misc_RNA (1)...(19): siRNA sense strand
uugaagagauccagcauuu

SEQ ID NO: 1545350 - RNA, 19 nt, Homo sapiens
  misc_RNA (1)...(19): siRNA sense strand
ggaaggucauuaaagaaga

SEQ ID NO: 1545351 - RNA, 19 nt, Homo sapiens
  misc_RNA (1)...(19): siRNA sense strand
gaacagcauuggcucucaa

SEQ ID NO: 1545352 - RNA, 19 nt, Homo sapiens
  misc_RNA (1)...(19): siRNA sense strand
cgacaaacaucuuucuuac

SEQ ID NO: 1545353 - RNA, 19 nt, Homo sapiens
  misc_RNA (1)...(19): siRNA sense strand
ccaaagcagcggaucaaua

SEQ ID NO: 1545354 - RNA, 19 nt, Homo sapiens
  misc_RNA (1)...(19): siRNA sense strand
gaauucagaugcgaguaaa

SEQ ID NO: 1545355 - RNA, 19 nt, Homo sapiens
  misc_RNA (1)...(19): siRNA sense strand
ugacaaagagcaggaguua

SEQ ID NO: 1545356 - RNA, 19 nt, Homo sapiens
  misc_RNA (1)...(19): siRNA sense strand
cauauuaccacuccguuua

SEQ ID NO: 1545357 - RNA, 19 nt, Homo sapiens
  misc_RNA (1)...(19): siRNA sense strand
ggacaaguauaugaagaau

SEQ ID NO: 1545358 - RNA, 19 nt, Homo sapiens
  misc_RNA (1)...(19): siRNA sense strand
aaauggagcuuucacagau

SEQ ID NO: 1545359 - RNA, 19 nt, Homo sapiens
  misc_RNA (1)...(19): siRNA sense strand
gcccaggauucacacaaua

SEQ ID NO: 1545360 - RNA, 19 nt, Homo sapiens
  misc_RNA (1)...(19): siRNA sense strand
ggaguuacagaauuuauug

SEQ ID NO: 1545361 - RNA, 19 nt, Homo sapiens
  misc_RNA (1)...(19): siRNA sense strand
acaggaagcuucaauuucu

SEQ ID NO: 1545362 - RNA, 19 nt, Homo sapiens
  misc_RNA (1)...(19): siRNA sense strand
gaacagcagcuuucaagag

SEQ ID NO: 1545363 - RNA, 19 nt, Homo sapiens
  misc_RNA (1)...(19): siRNA sense strand
ucaagccaaucaugacuuu

SEQ ID NO: 1545364 - RNA, 19 nt, Homo sapiens
  misc_RNA (1)...(19): siRNA sense strand
uggcuucacucguaaauau

SEQ ID NO: 1545365 - RNA, 19 nt, Homo sapiens
  misc_RNA (1)...(19): siRNA sense strand
caacacugccuccuaauuc

SEQ ID NO: 1545366 - RNA, 19 nt, Homo sapiens
  misc_RNA (1)...(19): siRNA sense strand
guagaacagagaguuauua

SEQ ID NO: 1545367 - RNA, 19 nt, Homo sapiens
  misc_RNA (1)...(19): siRNA sense strand
guuugugacucaauucuuu

SEQ ID NO: 1545368 - RNA, 19 nt, Homo sapiens
  misc_RNA (1)...(19): siRNA sense strand
agacccaguuuaauaauga

SEQ ID NO: 1545369 - RNA, 19 nt, Homo sapiens
  misc_RNA (1)...(19): siRNA sense strand
ggaagcaagcuaaagaaug

SEQ ID NO: 1545370 - RNA, 19 nt, Homo sapiens
  misc_RNA (1)...(19): siRNA sense strand
uuaauucuauggugucuga

SEQ ID NO: 1545371 - RNA, 19 nt, Homo sapiens
  misc_RNA (1)...(19): siRNA sense strand
uaccaaggaugcauuucua

SEQ ID NO: 1545372 - RNA, 19 nt, Homo sapiens
  misc_RNA (1)...(19): siRNA sense strand
aauauucgcuuagcucaaa

SEQ ID NO: 1545373 - RNA, 19 nt, Homo sapiens
  misc_RNA (1)...(19): siRNA sense strand
gcaauuaauggaaacuuug

SEQ ID NO: 1545374 - RNA, 19 nt, Homo sapiens
  misc_RNA (1)...(19): siRNA sense strand
gcaacacugccuccuaauu

SEQ ID NO: 1545375 - RNA, 19 nt, Homo sapiens
  misc_RNA (1)...(19): siRNA sense strand
ggacugaacagcagcuuuc

SEQ ID NO: 1545376 - RNA, 19 nt, Homo sapiens
  misc_RNA (1)...(19): siRNA sense strand
gcgacgcugugaagaauga

SEQ ID NO: 1545377 - RNA, 19 nt, Homo sapiens
  misc_RNA (1)...(19): siRNA sense strand
caaagcagcggaucaauac

SEQ ID NO: 1545378 - RNA, 19 nt, Homo sapiens
  misc_RNA (1)...(19): siRNA sense strand
gagacccaguuuaauaaug

SEQ ID NO: 1545379 - RNA, 19 nt, Homo sapiens
  misc_RNA (1)...(19): siRNA sense strand
uuaccacggugcauucuuu

SEQ ID NO: 1545380 - RNA, 19 nt, Homo sapiens
  misc_RNA (1)...(19): siRNA sense strand
gaucaauaccugucucaga

SEQ ID NO: 1545381 - RNA, 19 nt, Homo sapiens
  misc_RNA (1)...(19): siRNA sense strand
gcagugaaaucagaaaugc

SEQ ID NO: 1545382 - RNA, 19 nt, Homo sapiens
  misc_RNA (1)...(19): siRNA sense strand
cagaagcucuaacugacaa

SEQ ID NO: 1545383 - RNA, 19 nt, Homo sapiens
  misc_RNA (1)...(19): siRNA sense strand
acucguaaauauucgcuua

SEQ ID NO: 1545384 - RNA, 19 nt, Homo sapiens
  misc_RNA (1)...(19): siRNA sense strand
uauggugucugauauugaa

SEQ ID NO: 1545385 - RNA, 19 nt, Homo sapiens
  misc_RNA (1)...(19): siRNA sense strand
ccauggagacccaguuuaa

SEQ ID NO: 1545386 - RNA, 19 nt, Homo sapiens
  misc_RNA (1)...(19): siRNA sense strand
gcaguggcuugaagagaau

SEQ ID NO: 1545387 - RNA, 19 nt, Homo sapiens
  misc_RNA (1)...(19): siRNA sense strand
aaucucaccuugaacaaug

SEQ ID NO: 1545388 - RNA, 19 nt, Homo sapiens
  misc_RNA (1)...(19): siRNA sense strand
aaagagagcagugcauauu

SEQ ID NO: 1545389 - RNA, 19 nt, Homo sapiens
  misc_RNA (1)...(19): siRNA sense strand
ucaaagagagcagugcaua

SEQ ID NO: 1545390 - RNA, 19 nt, Homo sapiens
  misc_RNA (1)...(19): siRNA sense strand
gaggaagugucauuaacca

SEQ ID NO: 1545391 - RNA, 19 nt, Homo sapiens
  misc_RNA (1)...(19): siRNA sense strand
caaauggagcuuucacaga

SEQ ID NO: 1545392 - RNA, 19 nt, Homo sapiens
  misc_RNA (1)...(19): siRNA sense strand
gaacaaugcauccaguuuu

SEQ ID NO: 1545393 - RNA, 19 nt, Homo sapiens
  misc_RNA (1)...(19): siRNA sense strand
ggacaaugcaauuaaugga

SEQ ID NO: 1545394 - RNA, 19 nt, Homo sapiens
  misc_RNA (1)...(19): siRNA sense strand
caagguugauacgcucaua

SEQ ID NO: 1545395 - RNA, 19 nt, Homo sapiens
  misc_RNA (1)...(19): siRNA sense strand
caauaccugucucagaaga

SEQ ID NO: 1545396 - RNA, 19 nt, Homo sapiens
  misc_RNA (1)...(19): siRNA sense strand
gaacaagcaguagagaaau

SEQ ID NO: 1545397 - RNA, 19 nt, Homo sapiens
  misc_RNA (1)...(19): siRNA sense strand
ugcauaaucucaccuugaa

SEQ ID NO: 1545398 - RNA, 19 nt, Homo sapiens
  misc_RNA (1)...(19): siRNA sense strand
gaaggucauuaaagaagag

SEQ ID NO: 1545399 - RNA, 19 nt, Homo sapiens
  misc_RNA (1)...(19): siRNA sense strand
cgaaaauccuguuaucauu

SEQ ID NO: 1545400 - RNA, 19 nt, Homo sapiens
  misc_RNA (1)...(19): siRNA sense strand
gaaugaggguggcuucacu

SEQ ID NO: 1545401 - RNA, 19 nt, Homo sapiens
  misc_RNA (1)...(19): siRNA sense strand
gccauucaaaguaucauua

SEQ ID NO: 1545402 - RNA, 19 nt, Homo sapiens
  misc_RNA (1)...(19): siRNA sense strand
ugaaggaguuugcuuacca

SEQ ID NO: 1545403 - RNA, 19 nt, Homo sapiens
  misc_RNA (1)...(19): siRNA sense strand
agaaaugguguccucuuua

SEQ ID NO: 1545404 - RNA, 19 nt, Homo sapiens
  misc_RNA (1)...(19): siRNA sense strand
cuaauucaccaaauggaua

SEQ ID NO: 1545405 - RNA, 19 nt, Homo sapiens
  misc_RNA (1)...(19): siRNA sense strand
aacagcagcuuucaagaga

SEQ ID NO: 1545406 - RNA, 19 nt, Homo sapiens
  misc_RNA (1)...(19): siRNA sense strand
acaaagagcaggaguuaca

SEQ ID NO: 1545407 - RNA, 19 nt, Homo sapiens
  misc_RNA (1)...(19): siRNA sense strand
aaucugguaucuacacuga

SEQ ID NO: 1545408 - RNA, 19 nt, Homo sapiens
  misc_RNA (1)...(19): siRNA sense strand
cagcaugucguuaauucua

SEQ ID NO: 1545409 - RNA, 19 nt, Homo sapiens
  misc_RNA (1)...(19): siRNA sense strand
gcacacuacuuagauuucu

SEQ ID NO: 1545410 - RNA, 19 nt, Homo sapiens
  misc_RNA (1)...(19): siRNA sense strand
ggaacaagaggccauucaa

SEQ ID NO: 1545411 - RNA, 19 nt, Homo sapiens
  misc_RNA (1)...(19): siRNA sense strand
gcuagucuauccggaagaa

SEQ ID NO: 1545412 - RNA, 19 nt, Homo sapiens
  misc_RNA (1)...(19): siRNA sense strand
gcuucucgaugaauacauu

SEQ ID NO: 1545413 - RNA, 19 nt, Homo sapiens
  misc_RNA (1)...(19): siRNA sense strand
uaaagaagagagcucaaga

SEQ ID NO: 1545414 - RNA, 19 nt, Homo sapiens
  misc_RNA (1)...(19): siRNA sense strand
ugaaaggguugauuugaac

SEQ ID NO: 1545415 - RNA, 19 nt, Homo sapiens
  misc_RNA (1)...(19): siRNA sense strand
uugaaaggguugauuugaa

SEQ ID NO: 1545416 - RNA, 19 nt, Homo sapiens
  misc_RNA (1)...(19): siRNA sense strand
gcgcucaacaccuuguaua

SEQ ID NO: 1545417 - RNA, 19 nt, Homo sapiens
  misc_RNA (1)...(19): siRNA sense strand
gggauuggcaucaaagaga

SEQ ID NO: 1545418 - RNA, 19 nt, Homo sapiens
  misc_RNA (1)...(19): siRNA sense strand
acacugaacaugacucuau

SEQ ID NO: 1545419 - RNA, 19 nt, Homo sapiens
  misc_RNA (1)...(19): siRNA sense strand
aguccuagcuuccaguuug

SEQ ID NO: 1545420 - RNA, 19 nt, Homo sapiens
  misc_RNA (1)...(19): siRNA sense strand
gcccugcucugcaccaguu

SEQ ID NO: 1545421 - RNA, 19 nt, Homo sapiens
  misc_RNA (1)...(19): siRNA sense strand
cauuguaugugaaggaguu

SEQ ID NO: 1545422 - RNA, 19 nt, Homo sapiens
  misc_RNA (1)...(19): siRNA sense strand
guaggaaagagaaauuaga

SEQ ID NO: 1545423 - RNA, 19 nt, Homo sapiens
  misc_RNA (1)...(19): siRNA sense strand
cagaaaugcacuuaaacaa

SEQ ID NO: 1545424 - RNA, 19 nt, Homo sapiens
  misc_RNA (1)...(19): siRNA sense strand
cgacaaccacgacagcaaa

SEQ ID NO: 1545425 - RNA, 19 nt, Homo sapiens
  misc_RNA (1)...(19): siRNA sense strand
ugcaguggcuugaagagaa

SEQ ID NO: 1545426 - RNA, 19 nt, Homo sapiens
  misc_RNA (1)...(19): siRNA sense strand
gcaugucguuaauucuaug

SEQ ID NO: 1545427 - RNA, 19 nt, Homo sapiens
  misc_RNA (1)...(19): siRNA sense strand
ugaaacgacaaacaucuuu

SEQ ID NO: 1545428 - RNA, 19 nt, Homo sapiens
  misc_RNA (1)...(19): siRNA sense strand
aauggaaacuuugaagaga

SEQ ID NO: 1545429 - RNA, 19 nt, Homo sapiens
  misc_RNA (1)...(19): siRNA sense strand
aagagagcagugcauauua

SEQ ID NO: 1545430 - RNA, 19 nt, Homo sapiens
  misc_RNA (1)...(19): siRNA sense strand
aagaggccauucaaaguau

SEQ ID NO: 1545431 - RNA, 19 nt, Homo sapiens
  misc_RNA (1)...(19): siRNA sense strand
ccucauugcccgugucauu

SEQ ID NO: 1545432 - RNA, 19 nt, Homo sapiens
  misc_RNA (1)...(19): siRNA sense strand
ggaacugggcuuucuuugc

SEQ ID NO: 1545433 - RNA, 19 nt, Homo sapiens
  misc_RNA (1)...(19): siRNA sense strand
caggcuuucugcccuaaau

SEQ ID NO: 1545434 - RNA, 19 nt, Homo sapiens
  misc_RNA (1)...(19): siRNA sense strand
ggacacaaaccccaacugu

SEQ ID NO: 1545435 - RNA, 19 nt, Homo sapiens
  misc_RNA (1)...(19): siRNA sense strand
cauucccucuccaggcuuu

SEQ ID NO: 1545436 - RNA, 19 nt, Homo sapiens
  misc_RNA (1)...(19): siRNA sense strand
ggcuuucuuugcccucauu

SEQ ID NO: 1545437 - RNA, 19 nt, Homo sapiens
  misc_RNA (1)...(19): siRNA sense strand
caacaugucuugcauuucu

SEQ ID NO: 1545438 - RNA, 19 nt, Homo sapiens
  misc_RNA (1)...(19): siRNA sense strand
ugucagaucuguuucaauu

SEQ ID NO: 1545439 - RNA, 19 nt, Homo sapiens
  misc_RNA (1)...(19): siRNA sense strand
cacaacaugucuugcauuu

SEQ ID NO: 1545440 - RNA, 19 nt, Homo sapiens
  misc_RNA (1)...(19): siRNA sense strand
ggugugcacugucaucuug

SEQ ID NO: 1545441 - RNA, 19 nt, Homo sapiens
  misc_RNA (1)...(19): siRNA sense strand
caucaaacuucccagcaau

SEQ ID NO: 1545442 - RNA, 19 nt, Homo sapiens
  misc_RNA (1)...(19): siRNA sense strand
ucagaucuguuucaauuac

SEQ ID NO: 1545443 - RNA, 19 nt, Homo sapiens
  misc_RNA (1)...(19): siRNA sense strand
gaccaucccugcugaacag

SEQ ID NO: 1545444 - RNA, 19 nt, Homo sapiens
  misc_RNA (1)...(19): siRNA sense strand
uggaaugucagaucuguuu

SEQ ID NO: 1545445 - RNA, 19 nt, Homo sapiens
  misc_RNA (1)...(19): siRNA sense strand
cuugguggcuugcgucuug

SEQ ID NO: 1545446 - RNA, 19 nt, Homo sapiens
  misc_RNA (1)...(19): siRNA sense strand
gcaucgugcuucacaacau

SEQ ID NO: 1545447 - RNA, 19 nt, Homo sapiens
  misc_RNA (1)...(19): siRNA sense strand
ucaucaaacuucccagcaa

SEQ ID NO: 1545448 - RNA, 19 nt, Homo sapiens
  misc_RNA (1)...(19): siRNA sense strand
gcuggaaugucagaucugu

SEQ ID NO: 1545449 - RNA, 19 nt, Homo sapiens
  misc_RNA (1)...(19): siRNA sense strand
gaaugucagaucuguuuca

SEQ ID NO: 1545450 - RNA, 19 nt, Homo sapiens
  misc_RNA (1)...(19): siRNA sense strand
caucgugcuucacaacaug

SEQ ID NO: 1545451 - RNA, 19 nt, Homo sapiens
  misc_RNA (1)...(19): siRNA sense strand
ggaccagccagaaggaugu

SEQ ID NO: 1545452 - RNA, 19 nt, Homo sapiens
  misc_RNA (1)...(19): siRNA sense strand
ccacacacuuccgaacaca

SEQ ID NO: 1545453 - RNA, 19 nt, Homo sapiens
  misc_RNA (1)...(19): siRNA sense strand
gaugaggaccagccagaag

SEQ ID NO: 1545454 - RNA, 19 nt, Homo sapiens
  misc_RNA (1)...(19): siRNA sense strand
ucacaacaugucuugcauu

SEQ ID NO: 1545455 - RNA, 19 nt, Homo sapiens
  misc_RNA (1)...(19): siRNA sense strand
aggacucucugcuggaaug

SEQ ID NO: 1545456 - RNA, 19 nt, Homo sapiens
  misc_RNA (1)...(19): siRNA sense strand
uuucuaagcgcuucacugu

SEQ ID NO: 1545457 - RNA, 19 nt, Homo sapiens
  misc_RNA (1)...(19): siRNA sense strand
gucagaucuguuucaauua

SEQ ID NO: 1545458 - RNA, 19 nt, Homo sapiens
  misc_RNA (1)...(19): siRNA sense strand
acucucugcuggaauguca

SEQ ID NO: 1545459 - RNA, 19 nt, Homo sapiens
  misc_RNA (1)...(19): siRNA sense strand
aaugucagaucuguuucaa

SEQ ID NO: 1545460 - RNA, 19 nt, Homo sapiens
  misc_RNA (1)...(19): siRNA sense strand
gaacacaccccggucuuca

SEQ ID NO: 1545461 - RNA, 19 nt, Homo sapiens
  misc_RNA (1)...(19): siRNA sense strand
ggugaagucuaucaaagaa

SEQ ID NO: 1545462 - RNA, 19 nt, Homo sapiens
  misc_RNA (1)...(19): siRNA sense strand
gaacaacuucuccagguau

SEQ ID NO: 1545463 - RNA, 19 nt, Homo sapiens
  misc_RNA (1)...(19): siRNA sense strand
gaacaggacgacugggaaa

SEQ ID NO: 1545464 - RNA, 19 nt, Homo sapiens
  misc_RNA (1)...(19): siRNA sense strand
gggaugacguggccuugaa

SEQ ID NO: 1545465 - RNA, 19 nt, Homo sapiens
  misc_RNA (1)...(19): siRNA sense strand
ugaacaacuucuccaggua

SEQ ID NO: 1545466 - RNA, 19 nt, Homo sapiens
  misc_RNA (1)...(19): siRNA sense strand
gaaaccuacuaccugaaug

SEQ ID NO: 1545467 - RNA, 19 nt, Homo sapiens
  misc_RNA (1)...(19): siRNA sense strand
gugcacaacuuagugaaga

SEQ ID NO: 1545468 - RNA, 19 nt, Homo sapiens
  misc_RNA (1)...(19): siRNA sense strand
cacauacccuuggaaauga

SEQ ID NO: 1545469 - RNA, 19 nt, Homo sapiens
  misc_RNA (1)...(19): siRNA sense strand
ggaaaccuacuaccugaau

SEQ ID NO: 1545470 - RNA, 19 nt, Homo sapiens
  misc_RNA (1)...(19): siRNA sense strand
acacauacccuuggaaaug

SEQ ID NO: 1545471 - RNA, 19 nt, Homo sapiens
  misc_RNA (1)...(19): siRNA sense strand
gcucuagccucagauaaag

SEQ ID NO: 1545472 - RNA, 19 nt, Homo sapiens
  misc_RNA (1)...(19): siRNA sense strand
gcaggugaagucuaucaaa

SEQ ID NO: 1545473 - RNA, 19 nt, Homo sapiens
  misc_RNA (1)...(19): siRNA sense strand
ugaaugagcaggugaaguc

SEQ ID NO: 1545474 - RNA, 19 nt, Homo sapiens
  misc_RNA (1)...(19): siRNA sense strand
guccauggccuauuacuuc

SEQ ID NO: 1545475 - RNA, 19 nt, Homo sapiens
  misc_RNA (1)...(19): siRNA sense strand
gaaaugaaaacaagcagaa

SEQ ID NO: 1545476 - RNA, 19 nt, Homo sapiens
  misc_RNA (1)...(19): siRNA sense strand
ugacacacauacccuugga

SEQ ID NO: 1545477 - RNA, 19 nt, Homo sapiens
  misc_RNA (1)...(19): siRNA sense strand
caggugaagucuaucaaag

SEQ ID NO: 1545478 - RNA, 19 nt, Homo sapiens
  misc_RNA (1)...(19): siRNA sense strand
acuuguccauggccuauua

SEQ ID NO: 1545479 - RNA, 19 nt, Homo sapiens
  misc_RNA (1)...(19): siRNA sense strand
ugaagucuaucaaagaacu

SEQ ID NO: 1545480 - RNA, 19 nt, Homo sapiens
  misc_RNA (1)...(19): siRNA sense strand
gagcaggugaagucuauca

SEQ ID NO: 1545481 - RNA, 19 nt, Homo sapiens
  misc_RNA (1)...(19): siRNA sense strand
acacacauacccuuggaaa

SEQ ID NO: 1545482 - RNA, 19 nt, Homo sapiens
  misc_RNA (1)...(19): siRNA sense strand
ugaccacgugcacaacuua

SEQ ID NO: 1545483 - RNA, 19 nt, Homo sapiens
  misc_RNA (1)...(19): siRNA sense strand
caacuucuccagguauuuc

SEQ ID NO: 1545484 - RNA, 19 nt, Homo sapiens
  misc_RNA (1)...(19): siRNA sense strand
aaaccuacuaccugaauga

SEQ ID NO: 1545485 - RNA, 19 nt, Homo sapiens
  misc_RNA (1)...(19): siRNA sense strand
ugaugaggcugcagaacca

SEQ ID NO: 1545486 - RNA, 19 nt, Homo sapiens
  misc_RNA (1)...(19): siRNA sense strand
agaucaaccucgagcucua

SEQ ID NO: 1545487 - RNA, 19 nt, Homo sapiens
  misc_RNA (1)...(19): siRNA sense strand
gacguggccuugaacaacu

SEQ ID NO: 1545488 - RNA, 19 nt, Homo sapiens
  misc_RNA (1)...(19): siRNA sense strand
gcacaacuuagugaagaug

SEQ ID NO: 1545489 - RNA, 19 nt, Homo sapiens
  misc_RNA (1)...(19): siRNA sense strand
gaagucuaucaaagaacua

SEQ ID NO: 1545490 - RNA, 19 nt, Homo sapiens
  misc_RNA (1)...(19): siRNA sense strand
gaucaaccucgagcucuau

SEQ ID NO: 1545491 - RNA, 19 nt, Homo sapiens
  misc_RNA (1)...(19): siRNA sense strand
augagcaggugaagucuau

SEQ ID NO: 1545492 - RNA, 19 nt, Homo sapiens
  misc_RNA (1)...(19): siRNA sense strand
gccaucaaccgccagauca

SEQ ID NO: 1545493 - RNA, 19 nt, Homo sapiens
  misc_RNA (1)...(19): siRNA sense strand
gugaccacgugcacaacuu

SEQ ID NO: 1545494 - RNA, 19 nt, Homo sapiens
  misc_RNA (1)...(19): siRNA sense strand
agaccgagcacgcggagaa

SEQ ID NO: 1545495 - RNA, 19 nt, Homo sapiens
  misc_RNA (1)...(19): siRNA sense strand
augcuggccuggcggagua

SEQ ID NO: 1545496 - RNA, 19 nt, Homo sapiens
  misc_RNA (1)...(19): siRNA sense strand
aacaacuucuccagguauu

SEQ ID NO: 1545497 - RNA, 19 nt, Homo sapiens
  misc_RNA (1)...(19): siRNA sense strand
guacuuguccauggccuau

SEQ ID NO: 1545498 - RNA, 19 nt, Homo sapiens
  misc_RNA (1)...(19): siRNA sense strand
ccacgugcacaacuuagug

SEQ ID NO: 1545499 - RNA, 19 nt, Homo sapiens
  misc_RNA (1)...(19): siRNA sense strand
cguccuacguguacuuguc

SEQ ID NO: 1545500 - RNA, 19 nt, Homo sapiens
  misc_RNA (1)...(19): siRNA sense strand
acauacccuuggaaaugaa

SEQ ID NO: 1545501 - RNA, 19 nt, Homo sapiens
  misc_RNA (1)...(19): siRNA sense strand
ggagacaacuaagggauua

SEQ ID NO: 1545502 - RNA, 19 nt, Homo sapiens
  misc_RNA (1)...(19): siRNA sense strand
gcaauuuggagacaacuaa

SEQ ID NO: 1545503 - RNA, 19 nt, Homo sapiens
  misc_RNA (1)...(19): siRNA sense strand
gaagcagcaucuagaagca

SEQ ID NO: 1545504 - RNA, 19 nt, Homo sapiens
  misc_RNA (1)...(19): siRNA sense strand
accaauaugugcucacuuu

SEQ ID NO: 1545505 - RNA, 19 nt, Homo sapiens
  misc_RNA (1)...(19): siRNA sense strand
gcagaagcagcaucuagaa

SEQ ID NO: 1545506 - RNA, 19 nt, Homo sapiens
  misc_RNA (1)...(19): siRNA sense strand
gcacgaggcccuguauuca

SEQ ID NO: 1545507 - RNA, 19 nt, Homo sapiens
  misc_RNA (1)...(19): siRNA sense strand
ggaggaagucaaucacuau

SEQ ID NO: 1545508 - RNA, 19 nt, Homo sapiens
  misc_RNA (1)...(19): siRNA sense strand
uaaggaaccgggcaauuug

SEQ ID NO: 1545509 - RNA, 19 nt, Homo sapiens
  misc_RNA (1)...(19): siRNA sense strand
gacaacuaagggauuauua

SEQ ID NO: 1545510 - RNA, 19 nt, Homo sapiens
  misc_RNA (1)...(19): siRNA sense strand
caacuaagggauuauuauc

SEQ ID NO: 1545511 - RNA, 19 nt, Homo sapiens
  misc_RNA (1)...(19): siRNA sense strand
ggacacacccaaccaaggu

SEQ ID NO: 1545512 - RNA, 19 nt, Homo sapiens
  misc_RNA (1)...(19): siRNA sense strand
ggagaaugacaucuuuaga

SEQ ID NO: 1545513 - RNA, 19 nt, Homo sapiens
  misc_RNA (1)...(19): siRNA sense strand
agaaugacaucuuuagacu

SEQ ID NO: 1545514 - RNA, 19 nt, Homo sapiens
  misc_RNA (1)...(19): siRNA sense strand
ggaagucaaucacuaucac

SEQ ID NO: 1545515 - RNA, 19 nt, Homo sapiens
  misc_RNA (1)...(19): siRNA sense strand
gauaaggaaccgggcaauu

SEQ ID NO: 1545516 - RNA, 19 nt, Homo sapiens
  misc_RNA (1)...(19): siRNA sense strand
aggaggaagucaaucacua

SEQ ID NO: 1545517 - RNA, 19 nt, Homo sapiens
  misc_RNA (1)...(19): siRNA sense strand
auaaggaaccgggcaauuu

SEQ ID NO: 1545518 - RNA, 19 nt, Homo sapiens
  misc_RNA (1)...(19): siRNA sense strand
gagaaugacaucuuuagac

SEQ ID NO: 1545519 - RNA, 19 nt, Homo sapiens
  misc_RNA (1)...(19): siRNA sense strand
ucuuuagacuuaaggcuuu

SEQ ID NO: 1545520 - RNA, 19 nt, Homo sapiens
  misc_RNA (1)...(19): siRNA sense strand
uaucacgcccucuacauga

SEQ ID NO: 1545521 - RNA, 19 nt, Homo sapiens
  misc_RNA (1)...(19): siRNA sense strand
ugacaucuuuagacuuaag

SEQ ID NO: 1545522 - RNA, 19 nt, Homo sapiens
  misc_RNA (1)...(19): siRNA sense strand
caggcuuccucuguaauuu

SEQ ID NO: 1545523 - RNA, 19 nt, Homo sapiens
  misc_RNA (1)...(19): siRNA sense strand
gaaugacaucuuuagacuu

SEQ ID NO: 1545524 - RNA, 19 nt, Homo sapiens
  misc_RNA (1)...(19): siRNA sense strand
gggagaaugacaucuuuag

SEQ ID NO: 1545525 - RNA, 19 nt, Homo sapiens
  misc_RNA (1)...(19): siRNA sense strand
ccaccugccucaccuucau

SEQ ID NO: 1545526 - RNA, 19 nt, Homo sapiens
  misc_RNA (1)...(19): siRNA sense strand
cucaugggcuucucuccuu

SEQ ID NO: 1545527 - RNA, 19 nt, Homo sapiens
  misc_RNA (1)...(19): siRNA sense strand
guucggaguggauaaggaa

SEQ ID NO: 1545528 - RNA, 19 nt, Homo sapiens
  misc_RNA (1)...(19): siRNA sense strand
gugcucacuuuccucuuca

SEQ ID NO: 1545529 - RNA, 19 nt, Homo sapiens
  misc_RNA (1)...(19): siRNA sense strand
cuucucccuucuugucuuu

SEQ ID NO: 1545530 - RNA, 19 nt, Homo sapiens
  misc_RNA (1)...(19): siRNA sense strand
gggucgcggucucuucuca

SEQ ID NO: 1545531 - RNA, 19 nt, Homo sapiens
  misc_RNA (1)...(19): siRNA sense strand
ugugcucacuuuccucuuc

SEQ ID NO: 1545532 - RNA, 19 nt, Homo sapiens
  misc_RNA (1)...(19): siRNA sense strand
agacaacuaagggauuauu

SEQ ID NO: 1545533 - RNA, 19 nt, Homo sapiens
  misc_RNA (1)...(19): siRNA sense strand
gaggaagucaaucacuauc

SEQ ID NO: 1545534 - RNA, 19 nt, Homo sapiens
  misc_RNA (1)...(19): siRNA sense strand
acgaggcccuguauucagu

SEQ ID NO: 1545535 - RNA, 19 nt, Homo sapiens
  misc_RNA (1)...(19): siRNA sense strand
cuucaugggcccuuucuuc

SEQ ID NO: 1545536 - RNA, 19 nt, Homo sapiens
  misc_RNA (1)...(19): siRNA sense strand
ccgaggaggaagucaauca

SEQ ID NO: 1545537 - RNA, 19 nt, Homo sapiens
  misc_RNA (1)...(19): siRNA sense strand
cucuggcccuucucuguuu

SEQ ID NO: 1545538 - RNA, 19 nt, Homo sapiens
  misc_RNA (1)...(19): siRNA sense strand
ucgaggagcacaaggaaag

SEQ ID NO: 1545539 - RNA, 19 nt, Homo sapiens
  misc_RNA (1)...(19): siRNA sense strand
gaucugcacugcuauauau

SEQ ID NO: 1545540 - RNA, 19 nt, Homo sapiens
  misc_RNA (1)...(19): siRNA sense strand
guugugaacucauaacaua

SEQ ID NO: 1545541 - RNA, 19 nt, Homo sapiens
  misc_RNA (1)...(19): siRNA sense strand
ccaaagauaugaagcucua

SEQ ID NO: 1545542 - RNA, 19 nt, Homo sapiens
  misc_RNA (1)...(19): siRNA sense strand
gaaccgauacuucuuacua

SEQ ID NO: 1545543 - RNA, 19 nt, Homo sapiens
  misc_RNA (1)...(19): siRNA sense strand
agacauaccuggaaagaau

SEQ ID NO: 1545544 - RNA, 19 nt, Homo sapiens
  misc_RNA (1)...(19): siRNA sense strand
gaacagaagcuuccacaca

SEQ ID NO: 1545545 - RNA, 19 nt, Homo sapiens
  misc_RNA (1)...(19): siRNA sense strand
gaaugcagcgggaugcuua

SEQ ID NO: 1545546 - RNA, 19 nt, Homo sapiens
  misc_RNA (1)...(19): siRNA sense strand
guucagagccauugacuuu

SEQ ID NO: 1545547 - RNA, 19 nt, Homo sapiens
  misc_RNA (1)...(19): siRNA sense strand
agaagaagauggagcaguu

SEQ ID NO: 1545548 - RNA, 19 nt, Homo sapiens
  misc_RNA (1)...(19): siRNA sense strand
gccauugacuuugaucaua

SEQ ID NO: 1545549 - RNA, 19 nt, Homo sapiens
  misc_RNA (1)...(19): siRNA sense strand
gcaacugacuccuuggaau

SEQ ID NO: 1545550 - RNA, 19 nt, Homo sapiens
  misc_RNA (1)...(19): siRNA sense strand
ccauugacuuugaucauaa

SEQ ID NO: 1545551 - RNA, 19 nt, Homo sapiens
  misc_RNA (1)...(19): siRNA sense strand
ggcagaaucccaggaauua

SEQ ID NO: 1545552 - RNA, 19 nt, Homo sapiens
  misc_RNA (1)...(19): siRNA sense strand
ucagagccauugacuuuga

SEQ ID NO: 1545553 - RNA, 19 nt, Homo sapiens
  misc_RNA (1)...(19): siRNA sense strand
aaggagaucugcacugcua

SEQ ID NO: 1545554 - RNA, 19 nt, Homo sapiens
  misc_RNA (1)...(19): siRNA sense strand
gugccaagaugaccagaaa

SEQ ID NO: 1545555 - RNA, 19 nt, Homo sapiens
  misc_RNA (1)...(19): siRNA sense strand
guacgugccucccuuagca

SEQ ID NO: 1545556 - RNA, 19 nt, Homo sapiens
  misc_RNA (1)...(19): siRNA sense strand
caacuucucuaauuaaagc

SEQ ID NO: 1545557 - RNA, 19 nt, Homo sapiens
  misc_RNA (1)...(19): siRNA sense strand
caacugacuccuuggaauu

SEQ ID NO: 1545558 - RNA, 19 nt, Homo sapiens
  misc_RNA (1)...(19): siRNA sense strand
caaagcauuuaaucccaaa

SEQ ID NO: 1545559 - RNA, 19 nt, Homo sapiens
  misc_RNA (1)...(19): siRNA sense strand
ugaggucgccacugaaaua

SEQ ID NO: 1545560 - RNA, 19 nt, Homo sapiens
  misc_RNA (1)...(19): siRNA sense strand
ggauggaaaccaaagauau

SEQ ID NO: 1545561 - RNA, 19 nt, Homo sapiens
  misc_RNA (1)...(19): siRNA sense strand
ggagaucugcacugcuaua

SEQ ID NO: 1545562 - RNA, 19 nt, Homo sapiens
  misc_RNA (1)...(19): siRNA sense strand
ggaauuugcagcagaguuc

SEQ ID NO: 1545563 - RNA, 19 nt, Homo sapiens
  misc_RNA (1)...(19): siRNA sense strand
gauggaaaccaaagauaug

SEQ ID NO: 1545564 - RNA, 19 nt, Homo sapiens
  misc_RNA (1)...(19): siRNA sense strand
aacagaagcuuccacacaa

SEQ ID NO: 1545565 - RNA, 19 nt, Homo sapiens
  misc_RNA (1)...(19): siRNA sense strand
gaagauggagcaguuuaug

SEQ ID NO: 1545566 - RNA, 19 nt, Homo sapiens
  misc_RNA (1)...(19): siRNA sense strand
cagaaucccaggaauuauu

SEQ ID NO: 1545567 - RNA, 19 nt, Homo sapiens
  misc_RNA (1)...(19): siRNA sense strand
ucagaaauauagacccaau

SEQ ID NO: 1545568 - RNA, 19 nt, Homo sapiens
  misc_RNA (1)...(19): siRNA sense strand
gcauugacaaguuauguau

SEQ ID NO: 1545569 - RNA, 19 nt, Homo sapiens
  misc_RNA (1)...(19): siRNA sense strand
gaacaggguauugcaacuu

SEQ ID NO: 1545570 - RNA, 19 nt, Homo sapiens
  misc_RNA (1)...(19): siRNA sense strand
uauagcacuucaucucaaa

SEQ ID NO: 1545571 - RNA, 19 nt, Homo sapiens
  misc_RNA (1)...(19): siRNA sense strand
gaaauacugggaacagaag

SEQ ID NO: 1545572 - RNA, 19 nt, Homo sapiens
  misc_RNA (1)...(19): siRNA sense strand
gcagacauaccuggaaaga

SEQ ID NO: 1545573 - RNA, 19 nt, Homo sapiens
  misc_RNA (1)...(19): siRNA sense strand
gaagaagauggagcaguuu

SEQ ID NO: 1545574 - RNA, 19 nt, Homo sapiens
  misc_RNA (1)...(19): siRNA sense strand
gguauugcaacuucucuaa

SEQ ID NO: 1545575 - RNA, 19 nt, Homo sapiens
  misc_RNA (1)...(19): siRNA sense strand
ucccaggaauuauuugauu

SEQ ID NO: 1545576 - RNA, 19 nt, Homo sapiens
  misc_RNA (1)...(19): siRNA sense strand
ucccaaagguuccgaauac

SEQ ID NO: 1545577 - RNA, 19 nt, Homo sapiens
  misc_RNA (1)...(19): siRNA sense strand
ggucgccacugaaauacug

SEQ ID NO: 1545578 - RNA, 19 nt, Homo sapiens
  misc_RNA (1)...(19): siRNA sense strand
cuauaaggauggaaaccaa

SEQ ID NO: 1545579 - RNA, 19 nt, Homo sapiens
  misc_RNA (1)...(19): siRNA sense strand
ggagaacccagaauuguac

SEQ ID NO: 1545580 - RNA, 19 nt, Homo sapiens
  misc_RNA (1)...(19): siRNA sense strand
ggagucgauucccuaagug

SEQ ID NO: 1545581 - RNA, 19 nt, Homo sapiens
  misc_RNA (1)...(19): siRNA sense strand
gcauuuaaucccaaagguu

SEQ ID NO: 1545582 - RNA, 19 nt, Homo sapiens
  misc_RNA (1)...(19): siRNA sense strand
ggaacaggguauugcaacu

SEQ ID NO: 1545583 - RNA, 19 nt, Homo sapiens
  misc_RNA (1)...(19): siRNA sense strand
ugccugcauugacaaguua

SEQ ID NO: 1545584 - RNA, 19 nt, Homo sapiens
  misc_RNA (1)...(19): siRNA sense strand
caaagguuccgaauacaca

SEQ ID NO: 1545585 - RNA, 19 nt, Homo sapiens
  misc_RNA (1)...(19): siRNA sense strand
ugggagaauuugaacaguu

SEQ ID NO: 1545586 - RNA, 19 nt, Homo sapiens
  misc_RNA (1)...(19): siRNA sense strand
gacauaccuggaaagaaua

SEQ ID NO: 1545587 - RNA, 19 nt, Homo sapiens
  misc_RNA (1)...(19): siRNA sense strand
ugaaauacugggaacagaa

SEQ ID NO: 1545588 - RNA, 19 nt, Homo sapiens
  misc_RNA (1)...(19): siRNA sense strand
ggaaaccaaagauaugaag

SEQ ID NO: 1545589 - RNA, 19 nt, Homo sapiens
  misc_RNA (1)...(19): siRNA sense strand
aagaagauggagcaguuua

SEQ ID NO: 1545590 - RNA, 19 nt, Homo sapiens
  misc_RNA (1)...(19): siRNA sense strand
gaauaaauacaugcagaca

SEQ ID NO: 1545591 - RNA, 19 nt, Homo sapiens
  misc_RNA (1)...(19): siRNA sense strand
uggagaacccagaauugua

SEQ ID NO: 1545592 - RNA, 19 nt, Homo sapiens
  misc_RNA (1)...(19): siRNA sense strand
aaagcugccugcauugaca

SEQ ID NO: 1545593 - RNA, 19 nt, Homo sapiens
  misc_RNA (1)...(19): siRNA sense strand
uaagggaaccgauacuucu

SEQ ID NO: 1545594 - RNA, 19 nt, Homo sapiens
  misc_RNA (1)...(19): siRNA sense strand
cacuucaucucaaagcauu

SEQ ID NO: 1545595 - RNA, 19 nt, Homo sapiens
  misc_RNA (1)...(19): siRNA sense strand
agaaucccaggaauuauuu

SEQ ID NO: 1545596 - RNA, 19 nt, Homo sapiens
  misc_RNA (1)...(19): siRNA sense strand
aggaaaagcugccugcauu

SEQ ID NO: 1545597 - RNA, 19 nt, Homo sapiens
  misc_RNA (1)...(19): siRNA sense strand
gggaaccgauacuucuuac

SEQ ID NO: 1545598 - RNA, 19 nt, Homo sapiens
  misc_RNA (1)...(19): siRNA sense strand
gcagaaucccaggaauuau

SEQ ID NO: 1545599 - RNA, 19 nt, Homo sapiens
  misc_RNA (1)...(19): siRNA sense strand
cccaggaauuauuugauug

SEQ ID NO: 1545600 - RNA, 19 nt, Homo sapiens
  misc_RNA (1)...(19): siRNA sense strand
gaaaagcugccugcauuga

SEQ ID NO: 1545601 - RNA, 19 nt, Homo sapiens
  misc_RNA (1)...(19): siRNA sense strand
gggcacuacuauaaaauga

SEQ ID NO: 1545602 - RNA, 19 nt, Homo sapiens
  misc_RNA (1)...(19): siRNA sense strand
aggagucgauucccuaagu

SEQ ID NO: 1545603 - RNA, 19 nt, Homo sapiens
  misc_RNA (1)...(19): siRNA sense strand
gcacuacuauaaaaugagu

SEQ ID NO: 1545604 - RNA, 19 nt, Homo sapiens
  misc_RNA (1)...(19): siRNA sense strand
cgauacuucuuacuagucu

SEQ ID NO: 1545605 - RNA, 19 nt, Homo sapiens
  misc_RNA (1)...(19): siRNA sense strand
gcacuucaucucaaagcau

SEQ ID NO: 1545606 - RNA, 19 nt, Homo sapiens
  misc_RNA (1)...(19): siRNA sense strand
auauagcacuucaucucaa

SEQ ID NO: 1545607 - RNA, 19 nt, Homo sapiens
  misc_RNA (1)...(19): siRNA sense strand
gagaucugcacugcuauau

SEQ ID NO: 1545608 - RNA, 19 nt, Homo sapiens
  misc_RNA (1)...(19): siRNA sense strand
ugaccuauaaggauggaaa

SEQ ID NO: 1545609 - RNA, 19 nt, Homo sapiens
  misc_RNA (1)...(19): siRNA sense strand
uauauagcacuucaucuca

SEQ ID NO: 1545610 - RNA, 19 nt, Homo sapiens
  misc_RNA (1)...(19): siRNA sense strand
ccugguagcauuaacuaug

SEQ ID NO: 1545611 - RNA, 19 nt, Homo sapiens
  misc_RNA (1)...(19): siRNA sense strand
aagauaugaagcucuagua

SEQ ID NO: 1545612 - RNA, 19 nt, Homo sapiens
  misc_RNA (1)...(19): siRNA sense strand
uggcagaaucccaggaauu

SEQ ID NO: 1545613 - RNA, 19 nt, Homo sapiens
  misc_RNA (1)...(19): siRNA sense strand
caucucaaagcauuuaauc

SEQ ID NO: 1545614 - RNA, 19 nt, Homo sapiens
  misc_RNA (1)...(19): siRNA sense strand
augcagacauaccuggaaa

SEQ ID NO: 1545615 - RNA, 19 nt, Homo sapiens
  misc_RNA (1)...(19): siRNA sense strand
gugaacucauaacauacuu

SEQ ID NO: 1545616 - RNA, 19 nt, Homo sapiens
  misc_RNA (1)...(19): siRNA sense strand
cuucaucucaaagcauuua

SEQ ID NO: 1545617 - RNA, 19 nt, Homo sapiens
  misc_RNA (1)...(19): siRNA sense strand
gcaacuucucuaauuaaag

SEQ ID NO: 1545618 - RNA, 19 nt, Homo sapiens
  misc_RNA (1)...(19): siRNA sense strand
aacaggguauugcaacuuc

SEQ ID NO: 1545619 - RNA, 19 nt, Homo sapiens
  misc_RNA (1)...(19): siRNA sense strand
aaccgauacuucuuacuag

SEQ ID NO: 1545620 - RNA, 19 nt, Homo sapiens
  misc_RNA (1)...(19): siRNA sense strand
auaugaagcucuaguaccu

SEQ ID NO: 1545621 - RNA, 19 nt, Homo sapiens
  misc_RNA (1)...(19): siRNA sense strand
agauggagcaguuuaugga

SEQ ID NO: 1545622 - RNA, 19 nt, Homo sapiens
  misc_RNA (1)...(19): siRNA sense strand
agggaaccgauacuucuua

SEQ ID NO: 1545623 - RNA, 19 nt, Homo sapiens
  misc_RNA (1)...(19): siRNA sense strand
acagaagcuuccacacaag

SEQ ID NO: 1545624 - RNA, 19 nt, Homo sapiens
  misc_RNA (1)...(19): siRNA sense strand
cugaaauacugggaacaga

SEQ ID NO: 1545625 - RNA, 19 nt, Homo sapiens
  misc_RNA (1)...(19): siRNA sense strand
gcucugcaacugacuccuu

SEQ ID NO: 1545626 - RNA, 19 nt, Homo sapiens
  misc_RNA (1)...(19): siRNA sense strand
acucccaucugcugacaug

SEQ ID NO: 1545627 - RNA, 19 nt, Homo sapiens
  misc_RNA (1)...(19): siRNA sense strand
cugccugcauugacaaguu

SEQ ID NO: 1545628 - RNA, 19 nt, Homo sapiens
  misc_RNA (1)...(19): siRNA sense strand
ugaggagucgauucccuaa

SEQ ID NO: 1545629 - RNA, 19 nt, Homo sapiens
  misc_RNA (1)...(19): siRNA sense strand
cccauuaagggaaccgaua

SEQ ID NO: 1545630 - RNA, 19 nt, Homo sapiens
  misc_RNA (1)...(19): siRNA sense strand
uuaagggaaccgauacuuc

SEQ ID NO: 1545631 - RNA, 19 nt, Homo sapiens
  misc_RNA (1)...(19): siRNA sense strand
uauaaggauggaaaccaaa

SEQ ID NO: 1545632 - RNA, 19 nt, Homo sapiens
  misc_RNA (1)...(19): siRNA sense strand
guauugcaacuucucuaau

SEQ ID NO: 1545633 - RNA, 19 nt, Homo sapiens
  misc_RNA (1)...(19): siRNA sense strand
ugacaaguuauguaucaca

SEQ ID NO: 1545634 - RNA, 19 nt, Homo sapiens
  misc_RNA (1)...(19): siRNA sense strand
uaaggauggaaaccaaaga

SEQ ID NO: 1545635 - RNA, 19 nt, Homo sapiens
  misc_RNA (1)...(19): siRNA sense strand
aggauggaaaccaaagaua

SEQ ID NO: 1545636 - RNA, 19 nt, Homo sapiens
  misc_RNA (1)...(19): siRNA sense strand
auauagacccaauuaaugg

SEQ ID NO: 1545637 - RNA, 19 nt, Homo sapiens
  misc_RNA (1)...(19): siRNA sense strand
cagaaauauagacccaauu

SEQ ID NO: 1545638 - RNA, 19 nt, Homo sapiens
  misc_RNA (1)...(19): siRNA sense strand
agaagauggagcaguuuau

SEQ ID NO: 1545639 - RNA, 19 nt, Homo sapiens
  misc_RNA (1)...(19): siRNA sense strand
ugaaugggcuccugauuaa

SEQ ID NO: 1545640 - RNA, 19 nt, Homo sapiens
  misc_RNA (1)...(19): siRNA sense strand
ggagugagacccuggauaa

SEQ ID NO: 1545641 - RNA, 19 nt, Homo sapiens
  misc_RNA (1)...(19): siRNA sense strand
gcccagauguuccaaguau

SEQ ID NO: 1545642 - RNA, 19 nt, Homo sapiens
  misc_RNA (1)...(19): siRNA sense strand
gaacauacagauccuggaa

SEQ ID NO: 1545643 - RNA, 19 nt, Homo sapiens
  misc_RNA (1)...(19): siRNA sense strand
ccauuucccugagaucuua

SEQ ID NO: 1545644 - RNA, 19 nt, Homo sapiens
  misc_RNA (1)...(19): siRNA sense strand
gaaauccacacaccucauu

SEQ ID NO: 1545645 - RNA, 19 nt, Homo sapiens
  misc_RNA (1)...(19): siRNA sense strand
uggcuucucuguuccguua

SEQ ID NO: 1545646 - RNA, 19 nt, Homo sapiens
  misc_RNA (1)...(19): siRNA sense strand
uaccagagcugcuuuaugc

SEQ ID NO: 1545647 - RNA, 19 nt, Homo sapiens
  misc_RNA (1)...(19): siRNA sense strand
ggaggugggucagcuguug

SEQ ID NO: 1545648 - RNA, 19 nt, Homo sapiens
  misc_RNA (1)...(19): siRNA sense strand
gcaccaaggaggaguuuga

SEQ ID NO: 1545649 - RNA, 19 nt, Homo sapiens
  misc_RNA (1)...(19): siRNA sense strand
ucuaucagcugucccuuga

SEQ ID NO: 1545650 - RNA, 19 nt, Homo sapiens
  misc_RNA (1)...(19): siRNA sense strand
gauaagcaccuggcaguga

SEQ ID NO: 1545651 - RNA, 19 nt, Homo sapiens
  misc_RNA (1)...(19): siRNA sense strand
ucccugagaucuuauuuau

SEQ ID NO: 1545652 - RNA, 19 nt, Homo sapiens
  misc_RNA (1)...(19): siRNA sense strand
auacagauccuggaagaua

SEQ ID NO: 1545653 - RNA, 19 nt, Homo sapiens
  misc_RNA (1)...(19): siRNA sense strand
ugagaaaguuguauacacu

SEQ ID NO: 1545654 - RNA, 19 nt, Homo sapiens
  misc_RNA (1)...(19): siRNA sense strand
cugaaugggcuccugauua

SEQ ID NO: 1545655 - RNA, 19 nt, Homo sapiens
  misc_RNA (1)...(19): siRNA sense strand
cagagcugcuuuaugcaaa

SEQ ID NO: 1545656 - RNA, 19 nt, Homo sapiens
  misc_RNA (1)...(19): siRNA sense strand
gaaacaagguauggcuucu

SEQ ID NO: 1545657 - RNA, 19 nt, Homo sapiens
  misc_RNA (1)...(19): siRNA sense strand
ccugagaucuuauuuaucc

SEQ ID NO: 1545658 - RNA, 19 nt, Homo sapiens
  misc_RNA (1)...(19): siRNA sense strand
acauacagauccuggaaga

SEQ ID NO: 1545659 - RNA, 19 nt, Homo sapiens
  misc_RNA (1)...(19): siRNA sense strand
ccaguuagauaccuucaac

SEQ ID NO: 1545660 - RNA, 19 nt, Homo sapiens
  misc_RNA (1)...(19): siRNA sense strand
cagaaaagaugaacauaca

SEQ ID NO: 1545661 - RNA, 19 nt, Homo sapiens
  misc_RNA (1)...(19): siRNA sense strand
gugagacccuggauaagca

SEQ ID NO: 1545662 - RNA, 19 nt, Homo sapiens
  misc_RNA (1)...(19): siRNA sense strand
uggagcagcugguagaauc

SEQ ID NO: 1545663 - RNA, 19 nt, Homo sapiens
  misc_RNA (1)...(19): siRNA sense strand
ggacucaagcccaccuaug

SEQ ID NO: 1545664 - RNA, 19 nt, Homo sapiens
  misc_RNA (1)...(19): siRNA sense strand
gaaaagaugaacauacaga

SEQ ID NO: 1545665 - RNA, 19 nt, Homo sapiens
  misc_RNA (1)...(19): siRNA sense strand
uguauacacuccugagcaa

SEQ ID NO: 1545666 - RNA, 19 nt, Homo sapiens
  misc_RNA (1)...(19): siRNA sense strand
uauccuagcuauggaguuc

SEQ ID NO: 1545667 - RNA, 19 nt, Homo sapiens
  misc_RNA (1)...(19): siRNA sense strand
ggcagcaaguggagugaga

SEQ ID NO: 1545668 - RNA, 19 nt, Homo sapiens
  misc_RNA (1)...(19): siRNA sense strand
ucucucagccuuccacauu

SEQ ID NO: 1545669 - RNA, 19 nt, Homo sapiens
  misc_RNA (1)...(19): siRNA sense strand
ccagauguuccaaguauuc

SEQ ID NO: 1545670 - RNA, 19 nt, Homo sapiens
  misc_RNA (1)...(19): siRNA sense strand
gguggauccucauuuccuu

SEQ ID NO: 1545671 - RNA, 19 nt, Homo sapiens
  misc_RNA (1)...(19): siRNA sense strand
ccaaguauucaagaaguuu

SEQ ID NO: 1545672 - RNA, 19 nt, Homo sapiens
  misc_RNA (1)...(19): siRNA sense strand
gcagacaaggcaaacuuca

SEQ ID NO: 1545673 - RNA, 19 nt, Homo sapiens
  misc_RNA (1)...(19): siRNA sense strand
caagguauggcuucucugu

SEQ ID NO: 1545674 - RNA, 19 nt, Homo sapiens
  misc_RNA (1)...(19): siRNA sense strand
ucucagccuuccacauuug

SEQ ID NO: 1545675 - RNA, 19 nt, Homo sapiens
  misc_RNA (1)...(19): siRNA sense strand
ccugguggauccucauuuc

SEQ ID NO: 1545676 - RNA, 19 nt, Homo sapiens
  misc_RNA (1)...(19): siRNA sense strand
acagcuggauugggccuua

SEQ ID NO: 1545677 - RNA, 19 nt, Homo sapiens
  misc_RNA (1)...(19): siRNA sense strand
agguauggcuucucuguuc

SEQ ID NO: 1545678 - RNA, 19 nt, Homo sapiens
  misc_RNA (1)...(19): siRNA sense strand
caacuaccagagcugcuuu

SEQ ID NO: 1545679 - RNA, 19 nt, Homo sapiens
  misc_RNA (1)...(19): siRNA sense strand
gaguuugagcggagguaua

SEQ ID NO: 1545680 - RNA, 19 nt, Homo sapiens
  misc_RNA (1)...(19): siRNA sense strand
cacacuggcugcucaacga

SEQ ID NO: 1545681 - RNA, 19 nt, Homo sapiens
  misc_RNA (1)...(19): siRNA sense strand
gcaccagguuaacaagacu

SEQ ID NO: 1545682 - RNA, 19 nt, Homo sapiens
  misc_RNA (1)...(19): siRNA sense strand
ccagagcugcuuuaugcaa

SEQ ID NO: 1545683 - RNA, 19 nt, Homo sapiens
  misc_RNA (1)...(19): siRNA sense strand
uaucagcugucccuugaac

SEQ ID NO: 1545684 - RNA, 19 nt, Homo sapiens
  misc_RNA (1)...(19): siRNA sense strand
caaacuggagcagcuggua

SEQ ID NO: 1545685 - RNA, 19 nt, Homo sapiens
  misc_RNA (1)...(19): siRNA sense strand
caucugagaaacaagguau

SEQ ID NO: 1545686 - RNA, 19 nt, Homo sapiens
  misc_RNA (1)...(19): siRNA sense strand
ccuggaagauacccauaag

SEQ ID NO: 1545687 - RNA, 19 nt, Homo sapiens
  misc_RNA (1)...(19): siRNA sense strand
ugcccgagcuucacucaca

SEQ ID NO: 1545688 - RNA, 19 nt, Homo sapiens
  misc_RNA (1)...(19): siRNA sense strand
ugagagcagccacuacuuc

SEQ ID NO: 1545689 - RNA, 19 nt, Homo sapiens
  misc_RNA (1)...(19): siRNA sense strand
gcugaaugggcuccugauu

SEQ ID NO: 1545690 - RNA, 19 nt, Homo sapiens
  misc_RNA (1)...(19): siRNA sense strand
gcugguagaaucccacauc

SEQ ID NO: 1545691 - RNA, 19 nt, Homo sapiens
  misc_RNA (1)...(19): siRNA sense strand
acaaucaugcucccucaga

SEQ ID NO: 1545692 - RNA, 19 nt, Homo sapiens
  misc_RNA (1)...(19): siRNA sense strand
cagccuuccacauuuguaa

SEQ ID NO: 1545693 - RNA, 19 nt, Homo sapiens
  misc_RNA (1)...(19): siRNA sense strand
aaagaugaacauacagauc

SEQ ID NO: 1545694 - RNA, 19 nt, Homo sapiens
  misc_RNA (1)...(19): siRNA sense strand
uccguuacaugcagcagaa

SEQ ID NO: 1545695 - RNA, 19 nt, Homo sapiens
  misc_RNA (1)...(19): siRNA sense strand
ugcccgagcagucuacuuu

SEQ ID NO: 1545696 - RNA, 19 nt, Homo sapiens
  misc_RNA (1)...(19): siRNA sense strand
uggaagauacccauaaggu

SEQ ID NO: 1545697 - RNA, 19 nt, Homo sapiens
  misc_RNA (1)...(19): siRNA sense strand
uggagaagccgagcugaga

SEQ ID NO: 1545698 - RNA, 19 nt, Homo sapiens
  misc_RNA (1)...(19): siRNA sense strand
aaccugagaaaguuguaua

SEQ ID NO: 1545699 - RNA, 19 nt, Homo sapiens
  misc_RNA (1)...(19): siRNA sense strand
uccaaguauucaagaaguu

SEQ ID NO: 1545700 - RNA, 19 nt, Homo sapiens
  misc_RNA (1)...(19): siRNA sense strand
aacaagguauggcuucucu

SEQ ID NO: 1545701 - RNA, 19 nt, Homo sapiens
  misc_RNA (1)...(19): siRNA sense strand
gcccugacaaugcugaaug

SEQ ID NO: 1545702 - RNA, 19 nt, Homo sapiens
  misc_RNA (1)...(19): siRNA sense strand
cagacaaggcaaacuucaa

SEQ ID NO: 1545703 - RNA, 19 nt, Homo sapiens
  misc_RNA (1)...(19): siRNA sense strand
gauguuccaaguauucaag

SEQ ID NO: 1545704 - RNA, 19 nt, Homo sapiens
  misc_RNA (1)...(19): siRNA sense strand
uacagauccuggaagauac

SEQ ID NO: 1545705 - RNA, 19 nt, Homo sapiens
  misc_RNA (1)...(19): siRNA sense strand
uagauaccuucaacuacca

SEQ ID NO: 1545706 - RNA, 19 nt, Homo sapiens
  misc_RNA (1)...(19): siRNA sense strand
gcagcuggagggucaucuu

SEQ ID NO: 1545707 - RNA, 19 nt, Homo sapiens
  misc_RNA (1)...(19): siRNA sense strand
ccacugccuauccuagcua

SEQ ID NO: 1545708 - RNA, 19 nt, Homo sapiens
  misc_RNA (1)...(19): siRNA sense strand
auccagcacucccucaaug

SEQ ID NO: 1545709 - RNA, 19 nt, Homo sapiens
  misc_RNA (1)...(19): siRNA sense strand
ccacauccucagccaguuc

SEQ ID NO: 1545710 - RNA, 19 nt, Homo sapiens
  misc_RNA (1)...(19): siRNA sense strand
cagcuggagggucaucuug

SEQ ID NO: 1545711 - RNA, 19 nt, Homo sapiens
  misc_RNA (1)...(19): siRNA sense strand
gcucagaaccucuucauca

SEQ ID NO: 1545712 - RNA, 19 nt, Homo sapiens
  misc_RNA (1)...(19): siRNA sense strand
gaccuugucuucucuguca

SEQ ID NO: 1545713 - RNA, 19 nt, Homo sapiens
  misc_RNA (1)...(19): siRNA sense strand
guacuucacccucuacuau

SEQ ID NO: 1545714 - RNA, 19 nt, Homo sapiens
  misc_RNA (1)...(19): siRNA sense strand
ggagggcacucaaggagau

SEQ ID NO: 1545715 - RNA, 19 nt, Homo sapiens
  misc_RNA (1)...(19): siRNA sense strand
ucaaggagaucucacucuu

SEQ ID NO: 1545716 - RNA, 19 nt, Homo sapiens
  misc_RNA (1)...(19): siRNA sense strand
gcauacacccggaguuuga

SEQ ID NO: 1545717 - RNA, 19 nt, Homo sapiens
  misc_RNA (1)...(19): siRNA sense strand
gcagcaugaucuucaacaa

SEQ ID NO: 1545718 - RNA, 19 nt, Homo sapiens
  misc_RNA (1)...(19): siRNA sense strand
cgagugggcuacgauguga

SEQ ID NO: 1545719 - RNA, 19 nt, Homo sapiens
  misc_RNA (1)...(19): siRNA sense strand
ccucuacuaugccuucuau

SEQ ID NO: 1545720 - RNA, 19 nt, Homo sapiens
  misc_RNA (1)...(19): siRNA sense strand
gcaggugugugcgucuuug

SEQ ID NO: 1545721 - RNA, 19 nt, Homo sapiens
  misc_RNA (1)...(19): siRNA sense strand
agucacagcuggaccuugu

SEQ ID NO: 1545722 - RNA, 19 nt, Homo sapiens
  misc_RNA (1)...(19): siRNA sense strand
gaaacacugcaaagacugu

SEQ ID NO: 1545723 - RNA, 19 nt, Homo sapiens
  misc_RNA (1)...(19): siRNA sense strand
gaaggagaaccgaguggau

SEQ ID NO: 1545724 - RNA, 19 nt, Homo sapiens
  misc_RNA (1)...(19): siRNA sense strand
ccacauccgcugcaaguca

SEQ ID NO: 1545725 - RNA, 19 nt, Homo sapiens
  misc_RNA (1)...(19): siRNA sense strand
gugaagcacaggagacuga

SEQ ID NO: 1545726 - RNA, 19 nt, Homo sapiens
  misc_RNA (1)...(19): siRNA sense strand
gccaguacuucacccucua

SEQ ID NO: 1545727 - RNA, 19 nt, Homo sapiens
  misc_RNA (1)...(19): siRNA sense strand
gcugugcugugcuguuugu

SEQ ID NO: 1545728 - RNA, 19 nt, Homo sapiens
  misc_RNA (1)...(19): siRNA sense strand
agaccugggugcucuggaa

SEQ ID NO: 1545729 - RNA, 19 nt, Homo sapiens
  misc_RNA (1)...(19): siRNA sense strand
cagaccaacuucacuaggu

SEQ ID NO: 1545730 - RNA, 19 nt, Homo sapiens
  misc_RNA (1)...(19): siRNA sense strand
ugcuuuggcuucucuacua

SEQ ID NO: 1545731 - RNA, 19 nt, Homo sapiens
  misc_RNA (1)...(19): siRNA sense strand
gaggcuuccugaugcucua

SEQ ID NO: 1545732 - RNA, 19 nt, Homo sapiens
  misc_RNA (1)...(19): siRNA sense strand
uggaaacacugcaaagacu

SEQ ID NO: 1545733 - RNA, 19 nt, Homo sapiens
  misc_RNA (1)...(19): siRNA sense strand
acagccaccucaacuggaa

SEQ ID NO: 1545734 - RNA, 19 nt, Homo sapiens
  misc_RNA (1)...(19): siRNA sense strand
gcuuuggcuucucuacuau

SEQ ID NO: 1545735 - RNA, 19 nt, Homo sapiens
  misc_RNA (1)...(19): siRNA sense strand
uggccuacauccacuccua

SEQ ID NO: 1545736 - RNA, 19 nt, Homo sapiens
  misc_RNA (1)...(19): siRNA sense strand
ucaaugccaccgcguguga

SEQ ID NO: 1545737 - RNA, 19 nt, Homo sapiens
  misc_RNA (1)...(19): siRNA sense strand
cugcugugcugugcuguuu

SEQ ID NO: 1545738 - RNA, 19 nt, Homo sapiens
  misc_RNA (1)...(19): siRNA sense strand
gaagguccucucccugcuu

SEQ ID NO: 1545739 - RNA, 19 nt, Homo sapiens
  misc_RNA (1)...(19): siRNA sense strand
uuucuacggcuaccagaua

SEQ ID NO: 1545740 - RNA, 19 nt, Homo sapiens
  misc_RNA (1)...(19): siRNA sense strand
cuacuaugccuucuaugug

SEQ ID NO: 1545741 - RNA, 19 nt, Homo sapiens
  misc_RNA (1)...(19): siRNA sense strand
ggagaggcuuccugaugcu

SEQ ID NO: 1545742 - RNA, 19 nt, Homo sapiens
  misc_RNA (1)...(19): siRNA sense strand
aagguccucucccugcuuu

SEQ ID NO: 1545743 - RNA, 19 nt, Homo sapiens
  misc_RNA (1)...(19): siRNA sense strand
ccggagaggcuuccugaug

SEQ ID NO: 1545744 - RNA, 19 nt, Homo sapiens
  misc_RNA (1)...(19): siRNA sense strand
gcugugcuguuugucaugu

SEQ ID NO: 1545745 - RNA, 19 nt, Homo sapiens
  misc_RNA (1)...(19): siRNA sense strand
caaggagaucucacucuuc

SEQ ID NO: 1545746 - RNA, 19 nt, Homo sapiens
  misc_RNA (1)...(19): siRNA sense strand
gauguggugcugcuaaugg

SEQ ID NO: 1545747 - RNA, 19 nt, Homo sapiens
  misc_RNA (1)...(19): siRNA sense strand
guccagaccaacuucacua

SEQ ID NO: 1545748 - RNA, 19 nt, Homo sapiens
  misc_RNA (1)...(19): siRNA sense strand
ccacaggcaaugagaccaa

SEQ ID NO: 1545749 - RNA, 19 nt, Homo sapiens
  misc_RNA (1)...(19): siRNA sense strand
gcucuggaaacacugcaaa

SEQ ID NO: 1545750 - RNA, 19 nt, Homo sapiens
  misc_RNA (1)...(19): siRNA sense strand
uggcauacacccggaguuu

SEQ ID NO: 1545751 - RNA, 19 nt, Homo sapiens
  misc_RNA (1)...(19): siRNA sense strand
cucauccucugcaauauca

SEQ ID NO: 1545752 - RNA, 19 nt, Homo sapiens
  misc_RNA (1)...(19): siRNA sense strand
gaucucacucuuccucauc

SEQ ID NO: 1545753 - RNA, 19 nt, Homo sapiens
  misc_RNA (1)...(19): siRNA sense strand
gugcugugcuguuugucau

SEQ ID NO: 1545754 - RNA, 19 nt, Homo sapiens
  misc_RNA (1)...(19): siRNA sense strand
gcaugaucuucaacaaggu

SEQ ID NO: 1545755 - RNA, 19 nt, Homo sapiens
  misc_RNA (1)...(19): siRNA sense strand
gagcuggacacggucaaga

SEQ ID NO: 1545756 - RNA, 19 nt, Homo sapiens
  misc_RNA (1)...(19): siRNA sense strand
gcugugcugcccaccauga

SEQ ID NO: 1545757 - RNA, 19 nt, Homo sapiens
  misc_RNA (1)...(19): siRNA sense strand
ugccauugcuugccaguac

SEQ ID NO: 1545758 - RNA, 19 nt, Homo sapiens
  misc_RNA (1)...(19): siRNA sense strand
uuugagaacgggcuagaaa

SEQ ID NO: 1545759 - RNA, 19 nt, Homo sapiens
  misc_RNA (1)...(19): siRNA sense strand
gccgugcucuaccaagauc

SEQ ID NO: 1545760 - RNA, 19 nt, Homo sapiens
  misc_RNA (1)...(19): siRNA sense strand
cucagaaccucuucaucau

SEQ ID NO: 1545761 - RNA, 19 nt, Homo sapiens
  misc_RNA (1)...(19): siRNA sense strand
guucuggccguuaccaaug

SEQ ID NO: 1545762 - RNA, 19 nt, Homo sapiens
  misc_RNA (1)...(19): siRNA sense strand
uuccucauccucugcaaua

SEQ ID NO: 1545763 - RNA, 19 nt, Homo sapiens
  misc_RNA (1)...(19): siRNA sense strand
gcuggaccuugucuucucu

SEQ ID NO: 1545764 - RNA, 19 nt, Homo sapiens
  misc_RNA (1)...(19): siRNA sense strand
gguucgccaucgucaacuu

SEQ ID NO: 1545765 - RNA, 19 nt, Homo sapiens
  misc_RNA (1)...(19): siRNA sense strand
ggaagcggagggcacucaa

SEQ ID NO: 1545766 - RNA, 19 nt, Homo sapiens
  misc_RNA (1)...(19): siRNA sense strand
ucuacuaugccuucuaugu

SEQ ID NO: 1545767 - RNA, 19 nt, Homo sapiens
  misc_RNA (1)...(19): siRNA sense strand
cacuagguguggccugaug

SEQ ID NO: 1545768 - RNA, 19 nt, Homo sapiens
  misc_RNA (1)...(19): siRNA sense strand
caacaagguggccgucacu

SEQ ID NO: 1545769 - RNA, 19 nt, Homo sapiens
  misc_RNA (1)...(19): siRNA sense strand
ccaccgcgugugaagcuuu

SEQ ID NO: 1545770 - RNA, 19 nt, Homo sapiens
  misc_RNA (1)...(19): siRNA sense strand
gcugauggaugcugaguuu

SEQ ID NO: 1545771 - RNA, 19 nt, Homo sapiens
  misc_RNA (1)...(19): siRNA sense strand
cgacaagucuccacucuuc

SEQ ID NO: 1545772 - RNA, 19 nt, Homo sapiens
  misc_RNA (1)...(19): siRNA sense strand
caacaucuccuccaucuau

SEQ ID NO: 1545773 - RNA, 19 nt, Homo sapiens
  misc_RNA (1)...(19): siRNA sense strand
gaagauguacagugaguau

SEQ ID NO: 1545774 - RNA, 19 nt, Homo sapiens
  misc_RNA (1)...(19): siRNA sense strand
gugaguaugucaagaacuu

SEQ ID NO: 1545775 - RNA, 19 nt, Homo sapiens
  misc_RNA (1)...(19): siRNA sense strand
gcagagaauuccacguuac

SEQ ID NO: 1545776 - RNA, 19 nt, Homo sapiens
  misc_RNA (1)...(19): siRNA sense strand
gggccgaacugaaauacga

SEQ ID NO: 1545777 - RNA, 19 nt, Homo sapiens
  misc_RNA (1)...(19): siRNA sense strand
ugaacucccugaagaacaa

SEQ ID NO: 1545778 - RNA, 19 nt, Homo sapiens
  misc_RNA (1)...(19): siRNA sense strand
agacagagcaggccuaugu

SEQ ID NO: 1545779 - RNA, 19 nt, Homo sapiens
  misc_RNA (1)...(19): siRNA sense strand
uaccugaacucccugaaga

SEQ ID NO: 1545780 - RNA, 19 nt, Homo sapiens
  misc_RNA (1)...(19): siRNA sense strand
agaaagcccuggacaugau

SEQ ID NO: 1545781 - RNA, 19 nt, Homo sapiens
  misc_RNA (1)...(19): siRNA sense strand
aggagaagcuggcaucugu

SEQ ID NO: 1545782 - RNA, 19 nt, Homo sapiens
  misc_RNA (1)...(19): siRNA sense strand
ucaacaacaugcugcucua

SEQ ID NO: 1545783 - RNA, 19 nt, Homo sapiens
  misc_RNA (1)...(19): siRNA sense strand
ucacuguguuugagaauag

SEQ ID NO: 1545784 - RNA, 19 nt, Homo sapiens
  misc_RNA (1)...(19): siRNA sense strand
gaaccagugcagagaauuc

SEQ ID NO: 1545785 - RNA, 19 nt, Homo sapiens
  misc_RNA (1)...(19): siRNA sense strand
ccaggccgaugcccagaaa

SEQ ID NO: 1545786 - RNA, 19 nt, Homo sapiens
  misc_RNA (1)...(19): siRNA sense strand
ggacgcaggagccagagaa

SEQ ID NO: 1545787 - RNA, 19 nt, Homo sapiens
  misc_RNA (1)...(19): siRNA sense strand
ucaguuccauucucaguuc

SEQ ID NO: 1545788 - RNA, 19 nt, Homo sapiens
  misc_RNA (1)...(19): siRNA sense strand
ugcagagaauuccacguua

SEQ ID NO: 1545789 - RNA, 19 nt, Homo sapiens
  misc_RNA (1)...(19): siRNA sense strand
gagucugccuccacugcua

SEQ ID NO: 1545790 - RNA, 19 nt, Homo sapiens
  misc_RNA (1)...(19): siRNA sense strand
ccucgaggacgacauagua

SEQ ID NO: 1545791 - RNA, 19 nt, Homo sapiens
  misc_RNA (1)...(19): siRNA sense strand
ccaaugcagccaucacuga

SEQ ID NO: 1545792 - RNA, 19 nt, Homo sapiens
  misc_RNA (1)...(19): siRNA sense strand
gugcagagaauuccacguu

SEQ ID NO: 1545793 - RNA, 19 nt, Homo sapiens
  misc_RNA (1)...(19): siRNA sense strand
aagcagccauugaccaaau

SEQ ID NO: 1545794 - RNA, 19 nt, Homo sapiens
  misc_RNA (1)...(19): siRNA sense strand
ccgcaucggugacgugauc

SEQ ID NO: 1545795 - RNA, 19 nt, Homo sapiens
  misc_RNA (1)...(19): siRNA sense strand
cagcgaagccuggaggaaa

SEQ ID NO: 1545796 - RNA, 19 nt, Homo sapiens
  misc_RNA (1)...(19): siRNA sense strand
ggccagcucuacaccuuca

SEQ ID NO: 1545797 - RNA, 19 nt, Homo sapiens
  misc_RNA (1)...(19): siRNA sense strand
ccaagcagccauugaccaa

SEQ ID NO: 1545798 - RNA, 19 nt, Homo sapiens
  misc_RNA (1)...(19): siRNA sense strand
caaccuggucacuguguuu

SEQ ID NO: 1545799 - RNA, 19 nt, Homo sapiens
  misc_RNA (1)...(19): siRNA sense strand
cagaaagcccuggacauga

SEQ ID NO: 1545800 - RNA, 19 nt, Homo sapiens
  misc_RNA (1)...(19): siRNA sense strand
uguccaaccuggucacugu

SEQ ID NO: 1545801 - RNA, 19 nt, Homo sapiens
  misc_RNA (1)...(19): siRNA sense strand
gagaagcuggcaucugugu

SEQ ID NO: 1545802 - RNA, 19 nt, Homo sapiens
  misc_RNA (1)...(19): siRNA sense strand
ucuaucaguuccauucuca

SEQ ID NO: 1545803 - RNA, 19 nt, Homo sapiens
  misc_RNA (1)...(19): siRNA sense strand
ucaaggaguacauccagaa

SEQ ID NO: 1545804 - RNA, 19 nt, Homo sapiens
  misc_RNA (1)...(19): siRNA sense strand
caggccagcucuacaccuu

SEQ ID NO: 1545805 - RNA, 19 nt, Homo sapiens
  misc_RNA (1)...(19): siRNA sense strand
acaacaugcugcucuacug

SEQ ID NO: 1545806 - RNA, 19 nt, Homo sapiens
  misc_RNA (1)...(19): siRNA sense strand
uccugaagauguacaguga

SEQ ID NO: 1545807 - RNA, 19 nt, Homo sapiens
  misc_RNA (1)...(19): siRNA sense strand
caacaugcugcucuacugu

SEQ ID NO: 1545808 - RNA, 19 nt, Homo sapiens
  misc_RNA (1)...(19): siRNA sense strand
gggccucgaggacgacaua

SEQ ID NO: 1545809 - RNA, 19 nt, Homo sapiens
  misc_RNA (1)...(19): siRNA sense strand
ucggugacgugauccagaa

SEQ ID NO: 1545810 - RNA, 19 nt, Homo sapiens
  misc_RNA (1)...(19): siRNA sense strand
gucacuguguuugagaaua

SEQ ID NO: 1545811 - RNA, 19 nt, Homo sapiens
  misc_RNA (1)...(19): siRNA sense strand
guacagugaguaugucaag

SEQ ID NO: 1545812 - RNA, 19 nt, Homo sapiens
  misc_RNA (1)...(19): siRNA sense strand
ggacagucagcaggaggua

SEQ ID NO: 1545813 - RNA, 19 nt, Homo sapiens
  misc_RNA (1)...(19): siRNA sense strand
ggucugagcccaggacagu

SEQ ID NO: 1545814 - RNA, 19 nt, Homo sapiens
  misc_RNA (1)...(19): siRNA sense strand
cgcaggagccagagaagaa

SEQ ID NO: 1545815 - RNA, 19 nt, Homo sapiens
  misc_RNA (1)...(19): siRNA sense strand
gaugcaggccuuccaagca

SEQ ID NO: 1545816 - RNA, 19 nt, Homo sapiens
  misc_RNA (1)...(19): siRNA sense strand
gaguaugucaagaacuuug

SEQ ID NO: 1545817 - RNA, 19 nt, Homo sapiens
  misc_RNA (1)...(19): siRNA sense strand
acagugaguaugucaagaa

SEQ ID NO: 1545818 - RNA, 19 nt, Homo sapiens
  misc_RNA (1)...(19): siRNA sense strand
ggagacagagcaggccuau

SEQ ID NO: 1545819 - RNA, 19 nt, Homo sapiens
  misc_RNA (1)...(19): siRNA sense strand
uccaggagcugcugaagac

SEQ ID NO: 1545820 - RNA, 19 nt, Homo sapiens
  misc_RNA (1)...(19): siRNA sense strand
gauguacagugaguauguc

SEQ ID NO: 1545821 - RNA, 19 nt, Homo sapiens
  misc_RNA (1)...(19): siRNA sense strand
cugaagauguacagugagu

SEQ ID NO: 1545822 - RNA, 19 nt, Homo sapiens
  misc_RNA (1)...(19): siRNA sense strand
uccaacaucuccuccaucu

SEQ ID NO: 1545823 - RNA, 19 nt, Homo sapiens
  misc_RNA (1)...(19): siRNA sense strand
ggucaucuucuccaacauc

SEQ ID NO: 1545824 - RNA, 19 nt, Homo sapiens
  misc_RNA (1)...(19): siRNA sense strand
ggugaggacccgcaucgau

SEQ ID NO: 1545825 - RNA, 19 nt, Homo sapiens
  misc_RNA (1)...(19): siRNA sense strand
ggaaccagugcagagaauu

SEQ ID NO: 1545826 - RNA, 19 nt, Homo sapiens
  misc_RNA (1)...(19): siRNA sense strand
cuggacgacuggacagcua

SEQ ID NO: 1545827 - RNA, 19 nt, Homo sapiens
  misc_RNA (1)...(19): siRNA sense strand
uggaaccagugcagagaau

SEQ ID NO: 1545828 - RNA, 19 nt, Homo sapiens
  misc_RNA (1)...(19): siRNA sense strand
gaccacgggagaagacgaa

SEQ ID NO: 1545829 - RNA, 19 nt, Homo sapiens
  misc_RNA (1)...(19): siRNA sense strand
ugaaauacgacgacaacag

SEQ ID NO: 1545830 - RNA, 19 nt, Homo sapiens
  misc_RNA (1)...(19): siRNA sense strand
ccauugaccaaaucgagaa

SEQ ID NO: 1545831 - RNA, 19 nt, Homo sapiens
  misc_RNA (1)...(19): siRNA sense strand
ucuccuccaucuaucaguu

SEQ ID NO: 1545832 - RNA, 19 nt, Homo sapiens
  misc_RNA (1)...(19): siRNA sense strand
ccaucuaucaguuccauuc

SEQ ID NO: 1545833 - RNA, 19 nt, Homo sapiens
  misc_RNA (1)...(19): siRNA sense strand
ucagggucaucuucuccaa

SEQ ID NO: 1545834 - RNA, 19 nt, Homo sapiens
  misc_RNA (1)...(19): siRNA sense strand
ccaaccuggucacuguguu

SEQ ID NO: 1545835 - RNA, 19 nt, Homo sapiens
  misc_RNA (1)...(19): siRNA sense strand
gaaagcccuggacaugauc

SEQ ID NO: 1545836 - RNA, 19 nt, Homo sapiens
  misc_RNA (1)...(19): siRNA sense strand
gugcaucaccgcccugagu

SEQ ID NO: 1545837 - RNA, 19 nt, Homo sapiens
  misc_RNA (1)...(19): siRNA sense strand
gaaggugcgggagcugaug

SEQ ID NO: 1545838 - RNA, 19 nt, Homo sapiens
  misc_RNA (1)...(19): siRNA sense strand
agggucaucuucuccaaca

SEQ ID NO: 1545839 - RNA, 19 nt, Homo sapiens
  misc_RNA (1)...(19): siRNA sense strand
gcagucaggccagcucuac

SEQ ID NO: 1545840 - RNA, 19 nt, Homo sapiens
  misc_RNA (1)...(19): siRNA sense strand
acaugcugcucuacugugu

SEQ ID NO: 1545841 - RNA, 19 nt, Homo sapiens
  misc_RNA (1)...(19): siRNA sense strand
ccaccuggaccgacaaguc

SEQ ID NO: 1545842 - RNA, 19 nt, Homo sapiens
  misc_RNA (1)...(19): siRNA sense strand
guuccauucucaguucuuc

SEQ ID NO: 1545843 - RNA, 19 nt, Homo sapiens
  misc_RNA (1)...(19): siRNA sense strand
gaauaucccuuugccauuu

SEQ ID NO: 1545844 - RNA, 19 nt, Homo sapiens
  misc_RNA (1)...(19): siRNA sense strand
gcaagcagaauaucccuuu

SEQ ID NO: 1545845 - RNA, 19 nt, Homo sapiens
  misc_RNA (1)...(19): siRNA sense strand
cacccugucuggaaaguuu

SEQ ID NO: 1545846 - RNA, 19 nt, Homo sapiens
  misc_RNA (1)...(19): siRNA sense strand
gccguugucugaaagcaaa

SEQ ID NO: 1545847 - RNA, 19 nt, Homo sapiens
  misc_RNA (1)...(19): siRNA sense strand
ccagggaggucgguugaug

SEQ ID NO: 1545848 - RNA, 19 nt, Homo sapiens
  misc_RNA (1)...(19): siRNA sense strand
gaugagcagucgggaagug

SEQ ID NO: 1545849 - RNA, 19 nt, Homo sapiens
  misc_RNA (1)...(19): siRNA sense strand
caagcagaauaucccuuug

SEQ ID NO: 1545850 - RNA, 19 nt, Homo sapiens
  misc_RNA (1)...(19): siRNA sense strand
gacuggccguugucugaaa

SEQ ID NO: 1545851 - RNA, 19 nt, Homo sapiens
  misc_RNA (1)...(19): siRNA sense strand
ggacuccgcagccacuuca

SEQ ID NO: 1545852 - RNA, 19 nt, Homo sapiens
  misc_RNA (1)...(19): siRNA sense strand
ugaaagcaaaccucaagga

SEQ ID NO: 1545853 - RNA, 19 nt, Homo sapiens
  misc_RNA (1)...(19): siRNA sense strand
ggacuggccguugucugaa

SEQ ID NO: 1545854 - RNA, 19 nt, Homo sapiens
  misc_RNA (1)...(19): siRNA sense strand
agaauaucccuuugccauu

SEQ ID NO: 1545855 - RNA, 19 nt, Homo sapiens
  misc_RNA (1)...(19): siRNA sense strand
gcugcuccaucgcaugaau

SEQ ID NO: 1545856 - RNA, 19 nt, Homo sapiens
  misc_RNA (1)...(19): siRNA sense strand
uggcaaacgcaaacgauga

SEQ ID NO: 1545857 - RNA, 19 nt, Homo sapiens
  misc_RNA (1)...(19): siRNA sense strand
ccuuugccauuucucauuc

SEQ ID NO: 1545858 - RNA, 19 nt, Homo sapiens
  misc_RNA (1)...(19): siRNA sense strand
cagggaggucgguugauga

SEQ ID NO: 1545859 - RNA, 19 nt, Homo sapiens
  misc_RNA (1)...(19): siRNA sense strand
auucaggacuggccguugu

SEQ ID NO: 1545860 - RNA, 19 nt, Homo sapiens
  misc_RNA (1)...(19): siRNA sense strand
gcaaauaccugcugucuga

SEQ ID NO: 1545861 - RNA, 19 nt, Homo sapiens
  misc_RNA (1)...(19): siRNA sense strand
ggaagcagcugguauuaga

SEQ ID NO: 1545862 - RNA, 19 nt, Homo sapiens
  misc_RNA (1)...(19): siRNA sense strand
gaaagaagaggaggaaaua

SEQ ID NO: 1545863 - RNA, 19 nt, Homo sapiens
  misc_RNA (1)...(19): siRNA sense strand
gcacacaauugcauggaua

SEQ ID NO: 1545864 - RNA, 19 nt, Homo sapiens
  misc_RNA (1)...(19): siRNA sense strand
gcucagaggucuccagaaa

SEQ ID NO: 1545865 - RNA, 19 nt, Homo sapiens
  misc_RNA (1)...(19): siRNA sense strand
gcaccaaaguggaaaguga

SEQ ID NO: 1545866 - RNA, 19 nt, Homo sapiens
  misc_RNA (1)...(19): siRNA sense strand
uaacagacguggaugaaga

SEQ ID NO: 1545867 - RNA, 19 nt, Homo sapiens
  misc_RNA (1)...(19): siRNA sense strand
caagagaucucccggguau

SEQ ID NO: 1545868 - RNA, 19 nt, Homo sapiens
  misc_RNA (1)...(19): siRNA sense strand
gaacagcgaucagcccauu

SEQ ID NO: 1545869 - RNA, 19 nt, Homo sapiens
  misc_RNA (1)...(19): siRNA sense strand
ggacacagacucuaaauuc

SEQ ID NO: 1545870 - RNA, 19 nt, Homo sapiens
  misc_RNA (1)...(19): siRNA sense strand
gaaagagucagaagacaaa

SEQ ID NO: 1545871 - RNA, 19 nt, Homo sapiens
  misc_RNA (1)...(19): siRNA sense strand
gaagucauuuguccaauca

SEQ ID NO: 1545872 - RNA, 19 nt, Homo sapiens
  misc_RNA (1)...(19): siRNA sense strand
gaacaccauucacaguuug

SEQ ID NO: 1545873 - RNA, 19 nt, Homo sapiens
  misc_RNA (1)...(19): siRNA sense strand
cuacaucagucacuuagaa

SEQ ID NO: 1545874 - RNA, 19 nt, Homo sapiens
  misc_RNA (1)...(19): siRNA sense strand
aggagaagcugaugaaaga

SEQ ID NO: 1545875 - RNA, 19 nt, Homo sapiens
  misc_RNA (1)...(19): siRNA sense strand
ggccuaaucucaccaacaa

SEQ ID NO: 1545876 - RNA, 19 nt, Homo sapiens
  misc_RNA (1)...(19): siRNA sense strand
gaaggagugugggaaagaa

SEQ ID NO: 1545877 - RNA, 19 nt, Homo sapiens
  misc_RNA (1)...(19): siRNA sense strand
ggacagcgguucaguagcu

SEQ ID NO: 1545878 - RNA, 19 nt, Homo sapiens
  misc_RNA (1)...(19): siRNA sense strand
gcaagucccagaucuuaaa

SEQ ID NO: 1545879 - RNA, 19 nt, Homo sapiens
  misc_RNA (1)...(19): siRNA sense strand
gaacgagucucugcugagu

SEQ ID NO: 1545880 - RNA, 19 nt, Homo sapiens
  misc_RNA (1)...(19): siRNA sense strand
cgaacaccauucacaguuu

SEQ ID NO: 1545881 - RNA, 19 nt, Homo sapiens
  misc_RNA (1)...(19): siRNA sense strand
ccaagacgcucuguccaaa

SEQ ID NO: 1545882 - RNA, 19 nt, Homo sapiens
  misc_RNA (1)...(19): siRNA sense strand
gaaagaaaguccccacgaa

SEQ ID NO: 1545883 - RNA, 19 nt, Homo sapiens
  misc_RNA (1)...(19): siRNA sense strand
cgacagagcagcaagaugu

SEQ ID NO: 1545884 - RNA, 19 nt, Homo sapiens
  misc_RNA (1)...(19): siRNA sense strand
uaccagaacucuccaggaa

SEQ ID NO: 1545885 - RNA, 19 nt, Homo sapiens
  misc_RNA (1)...(19): siRNA sense strand
gaggaugucuccagugaag

SEQ ID NO: 1545886 - RNA, 19 nt, Homo sapiens
  misc_RNA (1)...(19): siRNA sense strand
ggaagucauuuguccaauc

SEQ ID NO: 1545887 - RNA, 19 nt, Homo sapiens
  misc_RNA (1)...(19): siRNA sense strand
agacguggaugaagaauag

SEQ ID NO: 1545888 - RNA, 19 nt, Homo sapiens
  misc_RNA (1)...(19): siRNA sense strand
ucagaggucuccagaaaca

SEQ ID NO: 1545889 - RNA, 19 nt, Homo sapiens
  misc_RNA (1)...(19): siRNA sense strand
gaggaagacuuggaagaug

SEQ ID NO: 1545890 - RNA, 19 nt, Homo sapiens
  misc_RNA (1)...(19): siRNA sense strand
ucgauucccuccaagauuu

SEQ ID NO: 1545891 - RNA, 19 nt, Homo sapiens
  misc_RNA (1)...(19): siRNA sense strand
ggacaaagaggaugcucaa

SEQ ID NO: 1545892 - RNA, 19 nt, Homo sapiens
  misc_RNA (1)...(19): siRNA sense strand
gaaugaaacgggccacuau

SEQ ID NO: 1545893 - RNA, 19 nt, Homo sapiens
  misc_RNA (1)...(19): siRNA sense strand
guaugcaaaucucuaaguu

SEQ ID NO: 1545894 - RNA, 19 nt, Homo sapiens
  misc_RNA (1)...(19): siRNA sense strand
acacucaagucaagaaaga

SEQ ID NO: 1545895 - RNA, 19 nt, Homo sapiens
  misc_RNA (1)...(19): siRNA sense strand
gacacagacucuaaauuca

SEQ ID NO: 1545896 - RNA, 19 nt, Homo sapiens
  misc_RNA (1)...(19): siRNA sense strand
ccagaacucuccaggaagu

SEQ ID NO: 1545897 - RNA, 19 nt, Homo sapiens
  misc_RNA (1)...(19): siRNA sense strand
ucaccuggguuuccaaaug

SEQ ID NO: 1545898 - RNA, 19 nt, Homo sapiens
  misc_RNA (1)...(19): siRNA sense strand
ccacacaccuggccccuua

SEQ ID NO: 1545899 - RNA, 19 nt, Homo sapiens
  misc_RNA (1)...(19): siRNA sense strand
gauuugagcguccacauga

SEQ ID NO: 1545900 - RNA, 19 nt, Homo sapiens
  misc_RNA (1)...(19): siRNA sense strand
gcagagaugccucagacaa

SEQ ID NO: 1545901 - RNA, 19 nt, Homo sapiens
  misc_RNA (1)...(19): siRNA sense strand
aaagcaagguggagcaaga

SEQ ID NO: 1545902 - RNA, 19 nt, Homo sapiens
  misc_RNA (1)...(19): siRNA sense strand
gagccagucccaaccauuu

SEQ ID NO: 1545903 - RNA, 19 nt, Homo sapiens
  misc_RNA (1)...(19): siRNA sense strand
cuaugaagauccucuacaa

SEQ ID NO: 1545904 - RNA, 19 nt, Homo sapiens
  misc_RNA (1)...(19): siRNA sense strand
caaacgaagcacacaauug

SEQ ID NO: 1545905 - RNA, 19 nt, Homo sapiens
  misc_RNA (1)...(19): siRNA sense strand
gagcaaacaugcgguaaaa

SEQ ID NO: 1545906 - RNA, 19 nt, Homo sapiens
  misc_RNA (1)...(19): siRNA sense strand
aacaauagcugccgaagag

SEQ ID NO: 1545907 - RNA, 19 nt, Homo sapiens
  misc_RNA (1)...(19): siRNA sense strand
aggaacaacugaaagaaga

SEQ ID NO: 1545908 - RNA, 19 nt, Homo sapiens
  misc_RNA (1)...(19): siRNA sense strand
caagcacaauuuccauguu

SEQ ID NO: 1545909 - RNA, 19 nt, Homo sapiens
  misc_RNA (1)...(19): siRNA sense strand
uaacucagcaucagauugu

SEQ ID NO: 1545910 - RNA, 19 nt, Homo sapiens
  misc_RNA (1)...(19): siRNA sense strand
gggcgauucuuuccgcaaa

SEQ ID NO: 1545911 - RNA, 19 nt, Homo sapiens
  misc_RNA (1)...(19): siRNA sense strand
caccuggguuuccaaauga

SEQ ID NO: 1545912 - RNA, 19 nt, Homo sapiens
  misc_RNA (1)...(19): siRNA sense strand
ggaggacagcgguucagua

SEQ ID NO: 1545913 - RNA, 19 nt, Homo sapiens
  misc_RNA (1)...(19): siRNA sense strand
ccauugaccugaccaaguc

SEQ ID NO: 1545914 - RNA, 19 nt, Homo sapiens
  misc_RNA (1)...(19): siRNA sense strand
guacagccucuacaacuga

SEQ ID NO: 1545915 - RNA, 19 nt, Homo sapiens
  misc_RNA (1)...(19): siRNA sense strand
gaaacgggccacuaucaag

SEQ ID NO: 1545916 - RNA, 19 nt, Homo sapiens
  misc_RNA (1)...(19): siRNA sense strand
aagaagaggaggaaauaaa

SEQ ID NO: 1545917 - RNA, 19 nt, Homo sapiens
  misc_RNA (1)...(19): siRNA sense strand
caacuggaauccucagcau

SEQ ID NO: 1545918 - RNA, 19 nt, Homo sapiens
  misc_RNA (1)...(19): siRNA sense strand
ugacugugcacaugaauga

SEQ ID NO: 1545919 - RNA, 19 nt, Homo sapiens
  misc_RNA (1)...(19): siRNA sense strand
gacucuaaauucaagugua

SEQ ID NO: 1545920 - RNA, 19 nt, Homo sapiens
  misc_RNA (1)...(19): siRNA sense strand
ucaaguaccagcuuaggaa

SEQ ID NO: 1545921 - RNA, 19 nt, Homo sapiens
  misc_RNA (1)...(19): siRNA sense strand
gcaaaucucuaaguuuacg

SEQ ID NO: 1545922 - RNA, 19 nt, Homo sapiens
  misc_RNA (1)...(19): siRNA sense strand
cacaagagcguaugcaaau

SEQ ID NO: 1545923 - RNA, 19 nt, Homo sapiens
  misc_RNA (1)...(19): siRNA sense strand
ccacaagagcguaugcaaa

SEQ ID NO: 1545924 - RNA, 19 nt, Homo sapiens
  misc_RNA (1)...(19): siRNA sense strand
caauuuccauguuccacaa

SEQ ID NO: 1545925 - RNA, 19 nt, Homo sapiens
  misc_RNA (1)...(19): siRNA sense strand
gaacaaucacuugggcaaa

SEQ ID NO: 1545926 - RNA, 19 nt, Homo sapiens
  misc_RNA (1)...(19): siRNA sense strand
gaaagggaagcagcuggua

SEQ ID NO: 1545927 - RNA, 19 nt, Homo sapiens
  misc_RNA (1)...(19): siRNA sense strand
gauggucacaggccacuuu

SEQ ID NO: 1545928 - RNA, 19 nt, Homo sapiens
  misc_RNA (1)...(19): siRNA sense strand
caaccgcuauggcuaccaa

SEQ ID NO: 1545929 - RNA, 19 nt, Homo sapiens
  misc_RNA (1)...(19): siRNA sense strand
ggaggaagacuuggaagau

SEQ ID NO: 1545930 - RNA, 19 nt, Homo sapiens
  misc_RNA (1)...(19): siRNA sense strand
gaggacagcgguucaguag

SEQ ID NO: 1545931 - RNA, 19 nt, Homo sapiens
  misc_RNA (1)...(19): siRNA sense strand
cgaaacggcagcaacaaga

SEQ ID NO: 1545932 - RNA, 19 nt, Homo sapiens
  misc_RNA (1)...(19): siRNA sense strand
ggcgcuaccuguuugagaa

SEQ ID NO: 1545933 - RNA, 19 nt, Homo sapiens
  misc_RNA (1)...(19): siRNA sense strand
ccacagccaucaacaaagc

SEQ ID NO: 1545934 - RNA, 19 nt, Homo sapiens
  misc_RNA (1)...(19): siRNA sense strand
gaaagagggcagcgagaag

SEQ ID NO: 1545935 - RNA, 19 nt, Homo sapiens
  misc_RNA (1)...(19): siRNA sense strand
caaagaggaugcucaaaag

SEQ ID NO: 1545936 - RNA, 19 nt, Homo sapiens
  misc_RNA (1)...(19): siRNA sense strand
gagcguaugcaaaucucua

SEQ ID NO: 1545937 - RNA, 19 nt, Homo sapiens
  misc_RNA (1)...(19): siRNA sense strand
gaggagaagcugaugaaag

SEQ ID NO: 1545938 - RNA, 19 nt, Homo sapiens
  misc_RNA (1)...(19): siRNA sense strand
caagaaagagucagaagac

SEQ ID NO: 1545939 - RNA, 19 nt, Homo sapiens
  misc_RNA (1)...(19): siRNA sense strand
caccacagccaucaacaaa

SEQ ID NO: 1545940 - RNA, 19 nt, Homo sapiens
  misc_RNA (1)...(19): siRNA sense strand
gaaaagcgaggacuaugaa

SEQ ID NO: 1545941 - RNA, 19 nt, Homo sapiens
  misc_RNA (1)...(19): siRNA sense strand
cagcaaggaugagaaaguc

SEQ ID NO: 1545942 - RNA, 19 nt, Homo sapiens
  misc_RNA (1)...(19): siRNA sense strand
ugaaagaagaggaggaaau

SEQ ID NO: 1545943 - RNA, 19 nt, Homo sapiens
  misc_RNA (1)...(19): siRNA sense strand
ccaaguucaagcacaauuu

SEQ ID NO: 1545944 - RNA, 19 nt, Homo sapiens
  misc_RNA (1)...(19): siRNA sense strand
agagaugccucagacaaga

SEQ ID NO: 1545945 - RNA, 19 nt, Homo sapiens
  misc_RNA (1)...(19): siRNA sense strand
acgagucucugcugaguga

SEQ ID NO: 1545946 - RNA, 19 nt, Homo sapiens
  misc_RNA (1)...(19): siRNA sense strand
aaagaaaggccagaggaaa

SEQ ID NO: 1545947 - RNA, 19 nt, Homo sapiens
  misc_RNA (1)...(19): siRNA sense strand
ggaggaacaacugaaagaa

SEQ ID NO: 1545948 - RNA, 19 nt, Homo sapiens
  misc_RNA (1)...(19): siRNA sense strand
caacaagagugauuuugau

SEQ ID NO: 1545949 - RNA, 19 nt, Homo sapiens
  misc_RNA (1)...(19): siRNA sense strand
uagaaucucaccuggguuu

SEQ ID NO: 1545950 - RNA, 19 nt, Homo sapiens
  misc_RNA (1)...(19): siRNA sense strand
acagugagggcgauucuuu

SEQ ID NO: 1545951 - RNA, 19 nt, Homo sapiens
  misc_RNA (1)...(19): siRNA sense strand
ggacuaugaagauccucua

SEQ ID NO: 1545952 - RNA, 19 nt, Homo sapiens
  misc_RNA (1)...(19): siRNA sense strand
gagcugacugugcacauga

SEQ ID NO: 1545953 - RNA, 19 nt, Homo sapiens
  misc_RNA (1)...(19): siRNA sense strand
aaacgaagcacacaauugc

SEQ ID NO: 1545954 - RNA, 19 nt, Homo sapiens
  misc_RNA (1)...(19): siRNA sense strand
ccaagccgccuuugccuau

SEQ ID NO: 1545955 - RNA, 19 nt, Homo sapiens
  misc_RNA (1)...(19): siRNA sense strand
ggacggacgaggagcuaga

SEQ ID NO: 1545956 - RNA, 19 nt, Homo sapiens
  misc_RNA (1)...(19): siRNA sense strand
uugaggaugucuccaguga

SEQ ID NO: 1545957 - RNA, 19 nt, Homo sapiens
  misc_RNA (1)...(19): siRNA sense strand
aagcacaauuuccauguuc

SEQ ID NO: 1545958 - RNA, 19 nt, Homo sapiens
  misc_RNA (1)...(19): siRNA sense strand
ucaagaaagagucagaaga

SEQ ID NO: 1545959 - RNA, 19 nt, Homo sapiens
  misc_RNA (1)...(19): siRNA sense strand
ugaugccacugguuucuau

SEQ ID NO: 1545960 - RNA, 19 nt, Homo sapiens
  misc_RNA (1)...(19): siRNA sense strand
gagaagaugucaguaauuu

SEQ ID NO: 1545961 - RNA, 19 nt, Homo sapiens
  misc_RNA (1)...(19): siRNA sense strand
caaaguggauucaaagauu

SEQ ID NO: 1545962 - RNA, 19 nt, Homo sapiens
  misc_RNA (1)...(19): siRNA sense strand
gacaaggacuucaguguaa

SEQ ID NO: 1545963 - RNA, 19 nt, Homo sapiens
  misc_RNA (1)...(19): siRNA sense strand
gaaguucaauggcuauuug

SEQ ID NO: 1545964 - RNA, 19 nt, Homo sapiens
  misc_RNA (1)...(19): siRNA sense strand
gaccggaucuucaaacauu

SEQ ID NO: 1545965 - RNA, 19 nt, Homo sapiens
  misc_RNA (1)...(19): siRNA sense strand
ggacaucuuccaaugauua

SEQ ID NO: 1545966 - RNA, 19 nt, Homo sapiens
  misc_RNA (1)...(19): siRNA sense strand
gcugaaccaucgccaaaua

SEQ ID NO: 1545967 - RNA, 19 nt, Homo sapiens
  misc_RNA (1)...(19): siRNA sense strand
gcaccugugucguccauaa

SEQ ID NO: 1545968 - RNA, 19 nt, Homo sapiens
  misc_RNA (1)...(19): siRNA sense strand
cauaaacgcugccaucauc

SEQ ID NO: 1545969 - RNA, 19 nt, Homo sapiens
  misc_RNA (1)...(19): siRNA sense strand
gaaaggagagcagcaaaga

SEQ ID NO: 1545970 - RNA, 19 nt, Homo sapiens
  misc_RNA (1)...(19): siRNA sense strand
ccacgagggucacuguaaa

SEQ ID NO: 1545971 - RNA, 19 nt, Homo sapiens
  misc_RNA (1)...(19): siRNA sense strand
gcaggaugaugauguggaa

SEQ ID NO: 1545972 - RNA, 19 nt, Homo sapiens
  misc_RNA (1)...(19): siRNA sense strand
gauguggaaugcaccauga

SEQ ID NO: 1545973 - RNA, 19 nt, Homo sapiens
  misc_RNA (1)...(19): siRNA sense strand
ggacuucaguguaaaauau

SEQ ID NO: 1545974 - RNA, 19 nt, Homo sapiens
  misc_RNA (1)...(19): siRNA sense strand
cgacaaggacuucagugua

SEQ ID NO: 1545975 - RNA, 19 nt, Homo sapiens
  misc_RNA (1)...(19): siRNA sense strand
ugaaggugcugaagaagga

SEQ ID NO: 1545976 - RNA, 19 nt, Homo sapiens
  misc_RNA (1)...(19): siRNA sense strand
caacaucccacacaaguuc

SEQ ID NO: 1545977 - RNA, 19 nt, Homo sapiens
  misc_RNA (1)...(19): siRNA sense strand
gaaaugggauugggguuaa

SEQ ID NO: 1545978 - RNA, 19 nt, Homo sapiens
  misc_RNA (1)...(19): siRNA sense strand
cuaugugucuccagaauug

SEQ ID NO: 1545979 - RNA, 19 nt, Homo sapiens
  misc_RNA (1)...(19): siRNA sense strand
gcaccaagcagaagaccaa

SEQ ID NO: 1545980 - RNA, 19 nt, Homo sapiens
  misc_RNA (1)...(19): siRNA sense strand
ggagaccucuaugcuguga

SEQ ID NO: 1545981 - RNA, 19 nt, Homo sapiens
  misc_RNA (1)...(19): siRNA sense strand
cuaccuggcuccaugaaga

SEQ ID NO: 1545982 - RNA, 19 nt, Homo sapiens
  misc_RNA (1)...(19): siRNA sense strand
caaagaaggaaaugggauu

SEQ ID NO: 1545983 - RNA, 19 nt, Homo sapiens
  misc_RNA (1)...(19): siRNA sense strand
ugagggacaucuuccaaug

SEQ ID NO: 1545984 - RNA, 19 nt, Homo sapiens
  misc_RNA (1)...(19): siRNA sense strand
aaaguggauucaaagauug

SEQ ID NO: 1545985 - RNA, 19 nt, Homo sapiens
  misc_RNA (1)...(19): siRNA sense strand
ccgagaagaugucaguaau

SEQ ID NO: 1545986 - RNA, 19 nt, Homo sapiens
  misc_RNA (1)...(19): siRNA sense strand
gagaccggaucuucaaaca

SEQ ID NO: 1545987 - RNA, 19 nt, Homo sapiens
  misc_RNA (1)...(19): siRNA sense strand
uaaccaggaugaguuuaga

SEQ ID NO: 1545988 - RNA, 19 nt, Homo sapiens
  misc_RNA (1)...(19): siRNA sense strand
ccaacaaacccacguacaa

SEQ ID NO: 1545989 - RNA, 19 nt, Homo sapiens
  misc_RNA (1)...(19): siRNA sense strand
gaaccaucgccaaauagaa

SEQ ID NO: 1545990 - RNA, 19 nt, Homo sapiens
  misc_RNA (1)...(19): siRNA sense strand
cuauaucgcuccagagauc

SEQ ID NO: 1545991 - RNA, 19 nt, Homo sapiens
  misc_RNA (1)...(19): siRNA sense strand
uaacaaaguggauucaaag

SEQ ID NO: 1545992 - RNA, 19 nt, Homo sapiens
  misc_RNA (1)...(19): siRNA sense strand
gaagaugucaguaauuuug

SEQ ID NO: 1545993 - RNA, 19 nt, Homo sapiens
  misc_RNA (1)...(19): siRNA sense strand
caaauagaaccgccuuuca

SEQ ID NO: 1545994 - RNA, 19 nt, Homo sapiens
  misc_RNA (1)...(19): siRNA sense strand
gaaggcgaguccaccagau

SEQ ID NO: 1545995 - RNA, 19 nt, Homo sapiens
  misc_RNA (1)...(19): siRNA sense strand
aaucaaaucccgagaagau

SEQ ID NO: 1545996 - RNA, 19 nt, Homo sapiens
  misc_RNA (1)...(19): siRNA sense strand
guacgggccugcaguagac

SEQ ID NO: 1545997 - RNA, 19 nt, Homo sapiens
  misc_RNA (1)...(19): siRNA sense strand
gauuaaccaggaugaguuu

SEQ ID NO: 1545998 - RNA, 19 nt, Homo sapiens
  misc_RNA (1)...(19): siRNA sense strand
auucaaagauugcagaaca

SEQ ID NO: 1545999 - RNA, 19 nt, Homo sapiens
  misc_RNA (1)...(19): siRNA sense strand
gacccugacuucauaaagg

SEQ ID NO: 1546000 - RNA, 19 nt, Homo sapiens
  misc_RNA (1)...(19): siRNA sense strand
ccacagggauccuaaaauc

SEQ ID NO: 1546001 - RNA, 19 nt, Homo sapiens
  misc_RNA (1)...(19): siRNA sense strand
gaacguggccccuaacugu

SEQ ID NO: 1546002 - RNA, 19 nt, Homo sapiens
  misc_RNA (1)...(19): siRNA sense strand
gaucugaaacuggacaaug

SEQ ID NO: 1546003 - RNA, 19 nt, Homo sapiens
  misc_RNA (1)...(19): siRNA sense strand
ugauggaguuugugaaugg

SEQ ID NO: 1546004 - RNA, 19 nt, Homo sapiens
  misc_RNA (1)...(19): siRNA sense strand
gguuaucagugccaagugu

SEQ ID NO: 1546005 - RNA, 19 nt, Homo sapiens
  misc_RNA (1)...(19): siRNA sense strand
cuccagaauugcaaccaua

SEQ ID NO: 1546006 - RNA, 19 nt, Homo sapiens
  misc_RNA (1)...(19): siRNA sense strand
caaugggcguguugcucua

SEQ ID NO: 1546007 - RNA, 19 nt, Homo sapiens
  misc_RNA (1)...(19): siRNA sense strand
gagcagcaaagaaggaaau

SEQ ID NO: 1546008 - RNA, 19 nt, Homo sapiens
  misc_RNA (1)...(19): siRNA sense strand
ggagagcagcaaagaagga

SEQ ID NO: 1546009 - RNA, 19 nt, Homo sapiens
  misc_RNA (1)...(19): siRNA sense strand
acgcugccaucaucuaauu

SEQ ID NO: 1546010 - RNA, 19 nt, Homo sapiens
  misc_RNA (1)...(19): siRNA sense strand
cuacaaagugccaacauuc

SEQ ID NO: 1546011 - RNA, 19 nt, Homo sapiens
  misc_RNA (1)...(19): siRNA sense strand
gagggacaucuuccaauga

SEQ ID NO: 1546012 - RNA, 19 nt, Homo sapiens
  misc_RNA (1)...(19): siRNA sense strand
cuauagagaucugaaacug

SEQ ID NO: 1546013 - RNA, 19 nt, Homo sapiens
  misc_RNA (1)...(19): siRNA sense strand
ggaaaggagagcagcaaag

SEQ ID NO: 1546014 - RNA, 19 nt, Homo sapiens
  misc_RNA (1)...(19): siRNA sense strand
cgagaagaugucaguaauu

SEQ ID NO: 1546015 - RNA, 19 nt, Homo sapiens
  misc_RNA (1)...(19): siRNA sense strand
cauuucggcucucauguuc

SEQ ID NO: 1546016 - RNA, 19 nt, Homo sapiens
  misc_RNA (1)...(19): siRNA sense strand
agaaacaggagaccucuau

SEQ ID NO: 1546017 - RNA, 19 nt, Homo sapiens
  misc_RNA (1)...(19): siRNA sense strand
aaacgcugccaucaucuaa

SEQ ID NO: 1546018 - RNA, 19 nt, Homo sapiens
  misc_RNA (1)...(19): siRNA sense strand
ccaagcagaagaccaacaa

SEQ ID NO: 1546019 - RNA, 19 nt, Homo sapiens
  misc_RNA (1)...(19): siRNA sense strand
acuacaaagugccaacauu

SEQ ID NO: 1546020 - RNA, 19 nt, Homo sapiens
  misc_RNA (1)...(19): siRNA sense strand
ccagagagaccggaucuuc

SEQ ID NO: 1546021 - RNA, 19 nt, Homo sapiens
  misc_RNA (1)...(19): siRNA sense strand
agaaucaaaucccgagaag

SEQ ID NO: 1546022 - RNA, 19 nt, Homo sapiens
  misc_RNA (1)...(19): siRNA sense strand
cagcugaaccaucgccaaa

SEQ ID NO: 1546023 - RNA, 19 nt, Homo sapiens
  misc_RNA (1)...(19): siRNA sense strand
gacuauaucgcuccagaga

SEQ ID NO: 1546024 - RNA, 19 nt, Homo sapiens
  misc_RNA (1)...(19): siRNA sense strand
gaaggugaugcuugcaaga

SEQ ID NO: 1546025 - RNA, 19 nt, Homo sapiens
  misc_RNA (1)...(19): siRNA sense strand
acaaggacuucaguguaaa

SEQ ID NO: 1546026 - RNA, 19 nt, Homo sapiens
  misc_RNA (1)...(19): siRNA sense strand
gggaauaaugcgacaagga

SEQ ID NO: 1546027 - RNA, 19 nt, Homo sapiens
  misc_RNA (1)...(19): siRNA sense strand
ucacugcucuggggaauaa

SEQ ID NO: 1546028 - RNA, 19 nt, Homo sapiens
  misc_RNA (1)...(19): siRNA sense strand
cagcauccacaacuacaaa

SEQ ID NO: 1546029 - RNA, 19 nt, Homo sapiens
  misc_RNA (1)...(19): siRNA sense strand
ccacguacaacgaggaguu

SEQ ID NO: 1546030 - RNA, 19 nt, Homo sapiens
  misc_RNA (1)...(19): siRNA sense strand
aggcagagaaugaagauga

SEQ ID NO: 1546031 - RNA, 19 nt, Homo sapiens
  misc_RNA (1)...(19): siRNA sense strand
aaaggaaucaucuauagag

SEQ ID NO: 1546032 - RNA, 19 nt, Homo sapiens
  misc_RNA (1)...(19): siRNA sense strand
agcacgagcucgcuucuau

SEQ ID NO: 1546033 - RNA, 19 nt, Homo sapiens
  misc_RNA (1)...(19): siRNA sense strand
ggacgugauucugcaggau

SEQ ID NO: 1546034 - RNA, 19 nt, Homo sapiens
  misc_RNA (1)...(19): siRNA sense strand
cugugaaggugcugaagaa

SEQ ID NO: 1546035 - RNA, 19 nt, Homo sapiens
  misc_RNA (1)...(19): siRNA sense strand
gacuugguaucgacaacuu

SEQ ID NO: 1546036 - RNA, 19 nt, Homo sapiens
  misc_RNA (1)...(19): siRNA sense strand
ggauugggguuaauucuuc

SEQ ID NO: 1546037 - RNA, 19 nt, Homo sapiens
  misc_RNA (1)...(19): siRNA sense strand
uaaacgcugccaucaucua

SEQ ID NO: 1546038 - RNA, 19 nt, Homo sapiens
  misc_RNA (1)...(19): siRNA sense strand
aaaggaagagccaguuuua

SEQ ID NO: 1546039 - RNA, 19 nt, Homo sapiens
  misc_RNA (1)...(19): siRNA sense strand
ccaaauagaaccgccuuuc

SEQ ID NO: 1546040 - RNA, 19 nt, Homo sapiens
  misc_RNA (1)...(19): siRNA sense strand
acuguaaacuggcagacuu

SEQ ID NO: 1546041 - RNA, 19 nt, Homo sapiens
  misc_RNA (1)...(19): siRNA sense strand
gaaacaggagaccucuaug

SEQ ID NO: 1546042 - RNA, 19 nt, Homo sapiens
  misc_RNA (1)...(19): siRNA sense strand
ggaaaugggauugggguua

SEQ ID NO: 1546043 - RNA, 19 nt, Homo sapiens
  misc_RNA (1)...(19): siRNA sense strand
guaaaugcgguggaacuug

SEQ ID NO: 1546044 - RNA, 19 nt, Homo sapiens
  misc_RNA (1)...(19): siRNA sense strand
ugccaucaucuaauuguua

SEQ ID NO: 1546045 - RNA, 19 nt, Homo sapiens
  misc_RNA (1)...(19): siRNA sense strand
gccaucaucuaauuguuac

SEQ ID NO: 1546046 - RNA, 19 nt, Homo sapiens
  misc_RNA (1)...(19): siRNA sense strand
caacaaacccacguacaac

SEQ ID NO: 1546047 - RNA, 19 nt, Homo sapiens
  misc_RNA (1)...(19): siRNA sense strand
gacaucuuccaaugauuaa

SEQ ID NO: 1546048 - RNA, 19 nt, Homo sapiens
  misc_RNA (1)...(19): siRNA sense strand
uuucagacccagaaucaaa

SEQ ID NO: 1546049 - RNA, 19 nt, Homo sapiens
  misc_RNA (1)...(19): siRNA sense strand
gcguguugcucuaugagau

SEQ ID NO: 1546050 - RNA, 19 nt, Homo sapiens
  misc_RNA (1)...(19): siRNA sense strand
gcugaagaaggacgugauu

SEQ ID NO: 1546051 - RNA, 19 nt, Homo sapiens
  misc_RNA (1)...(19): siRNA sense strand
guuuccagaucgacccuaa

SEQ ID NO: 1546052 - RNA, 19 nt, Homo sapiens
  misc_RNA (1)...(19): siRNA sense strand
gggacaucuuccaaugauu

SEQ ID NO: 1546053 - RNA, 19 nt, Homo sapiens
  misc_RNA (1)...(19): siRNA sense strand
ucaaaucccgagaagaugu

SEQ ID NO: 1546054 - RNA, 19 nt, Homo sapiens
  misc_RNA (1)...(19): siRNA sense strand
aauagaaccgccuuucaga

SEQ ID NO: 1546055 - RNA, 19 nt, Homo sapiens
  misc_RNA (1)...(19): siRNA sense strand
gagagaccggaucuucaaa

SEQ ID NO: 1546056 - RNA, 19 nt, Homo sapiens
  misc_RNA (1)...(19): siRNA sense strand
ugaaugaugagguggucua

SEQ ID NO: 1546057 - RNA, 19 nt, Homo sapiens
  misc_RNA (1)...(19): siRNA sense strand
aaggaaucaucuauagaga

SEQ ID NO: 1546058 - RNA, 19 nt, Homo sapiens
  misc_RNA (1)...(19): siRNA sense strand
gugauggaguuugugaaug

SEQ ID NO: 1546059 - RNA, 19 nt, Homo sapiens
  misc_RNA (1)...(19): siRNA sense strand
gggaaaggagagcagcaaa

SEQ ID NO: 1546060 - RNA, 19 nt, Homo sapiens
  misc_RNA (1)...(19): siRNA sense strand
gaagagaaauauggagaaa

SEQ ID NO: 1546061 - RNA, 19 nt, Homo sapiens
  misc_RNA (1)...(19): siRNA sense strand
ggaaaucuccuccgucuuc

SEQ ID NO: 1546062 - RNA, 19 nt, Homo sapiens
  misc_RNA (1)...(19): siRNA sense strand
agaaagcacuggaagagaa

SEQ ID NO: 1546063 - RNA, 19 nt, Homo sapiens
  misc_RNA (1)...(19): siRNA sense strand
caccagaggucauugagaa

SEQ ID NO: 1546064 - RNA, 19 nt, Homo sapiens
  misc_RNA (1)...(19): siRNA sense strand
caucauuccuaacaacauu

SEQ ID NO: 1546065 - RNA, 19 nt, Homo sapiens
  misc_RNA (1)...(19): siRNA sense strand
caacauucgccacaaguuu

SEQ ID NO: 1546066 - RNA, 19 nt, Homo sapiens
  misc_RNA (1)...(19): siRNA sense strand
gaaaucagugagggacuua

SEQ ID NO: 1546067 - RNA, 19 nt, Homo sapiens
  misc_RNA (1)...(19): siRNA sense strand
gaaagcacuggaagagaaa

SEQ ID NO: 1546068 - RNA, 19 nt, Homo sapiens
  misc_RNA (1)...(19): siRNA sense strand
caacaugcggucaaacuug

SEQ ID NO: 1546069 - RNA, 19 nt, Homo sapiens
  misc_RNA (1)...(19): siRNA sense strand
ggaagagaaauauggagaa

SEQ ID NO: 1546070 - RNA, 19 nt, Homo sapiens
  misc_RNA (1)...(19): siRNA sense strand
uaacaacauucgccacaag

SEQ ID NO: 1546071 - RNA, 19 nt, Homo sapiens
  misc_RNA (1)...(19): siRNA sense strand
gcaggaagacggaugaucu

SEQ ID NO: 1546072 - RNA, 19 nt, Homo sapiens
  misc_RNA (1)...(19): siRNA sense strand
gcuacaacaugcggucaaa

SEQ ID NO: 1546073 - RNA, 19 nt, Homo sapiens
  misc_RNA (1)...(19): siRNA sense strand
gaaaacagcaaauccaaga

SEQ ID NO: 1546074 - RNA, 19 nt, Homo sapiens
  misc_RNA (1)...(19): siRNA sense strand
gcagaaagcacuggaagag

SEQ ID NO: 1546075 - RNA, 19 nt, Homo sapiens
  misc_RNA (1)...(19): siRNA sense strand
gaaccugaacuugcagaaa

SEQ ID NO: 1546076 - RNA, 19 nt, Homo sapiens
  misc_RNA (1)...(19): siRNA sense strand
agacaaagagccucaugaa

SEQ ID NO: 1546077 - RNA, 19 nt, Homo sapiens
  misc_RNA (1)...(19): siRNA sense strand
gcagcaucauuccuaacaa

SEQ ID NO: 1546078 - RNA, 19 nt, Homo sapiens
  misc_RNA (1)...(19): siRNA sense strand
cagaagggcagcaucauuc

SEQ ID NO: 1546079 - RNA, 19 nt, Homo sapiens
  misc_RNA (1)...(19): siRNA sense strand
gagacaaagagccucauga

SEQ ID NO: 1546080 - RNA, 19 nt, Homo sapiens
  misc_RNA (1)...(19): siRNA sense strand
ccagaauccuguggaaauc

SEQ ID NO: 1546081 - RNA, 19 nt, Homo sapiens
  misc_RNA (1)...(19): siRNA sense strand
gacccagaauccuguggaa

SEQ ID NO: 1546082 - RNA, 19 nt, Homo sapiens
  misc_RNA (1)...(19): siRNA sense strand
ccagaagggcagcaucauu

SEQ ID NO: 1546083 - RNA, 19 nt, Homo sapiens
  misc_RNA (1)...(19): siRNA sense strand
ccaagagcuccaaguacua

SEQ ID NO: 1546084 - RNA, 19 nt, Homo sapiens
  misc_RNA (1)...(19): siRNA sense strand
aaccugaacuugcagaaag

SEQ ID NO: 1546085 - RNA, 19 nt, Homo sapiens
  misc_RNA (1)...(19): siRNA sense strand
cagaggucauugagaaauc

SEQ ID NO: 1546086 - RNA, 19 nt, Homo sapiens
  misc_RNA (1)...(19): siRNA sense strand
gcacuggaagagaaauaug

SEQ ID NO: 1546087 - RNA, 19 nt, Homo sapiens
  misc_RNA (1)...(19): siRNA sense strand
cuaugaaccugaacuugca

SEQ ID NO: 1546088 - RNA, 19 nt, Homo sapiens
  misc_RNA (1)...(19): siRNA sense strand
gaaaucuccuccgucuucu

SEQ ID NO: 1546089 - RNA, 19 nt, Homo sapiens
  misc_RNA (1)...(19): siRNA sense strand
aauccaagagcuccaagua

SEQ ID NO: 1546090 - RNA, 19 nt, Homo sapiens
  misc_RNA (1)...(19): siRNA sense strand
gcacgcccacgaaccagaa

SEQ ID NO: 1546091 - RNA, 19 nt, Homo sapiens
  misc_RNA (1)...(19): siRNA sense strand
agaaaucagugagggacuu

SEQ ID NO: 1546092 - RNA, 19 nt, Homo sapiens
  misc_RNA (1)...(19): siRNA sense strand
uccaagagcuccaaguacu

SEQ ID NO: 1546093 - RNA, 19 nt, Homo sapiens
  misc_RNA (1)...(19): siRNA sense strand
acuaugaccucggcuacaa

SEQ ID NO: 1546094 - RNA, 19 nt, Homo sapiens
  misc_RNA (1)...(19): siRNA sense strand
ccacaaguuugggagcaau

SEQ ID NO: 1546095 - RNA, 19 nt, Homo sapiens
  misc_RNA (1)...(19): siRNA sense strand
gcaaauccaagagcuccaa

SEQ ID NO: 1546096 - RNA, 19 nt, Homo sapiens
  misc_RNA (1)...(19): siRNA sense strand
cagcaucauuccuaacaac

SEQ ID NO: 1546097 - RNA, 19 nt, Homo sapiens
  misc_RNA (1)...(19): siRNA sense strand
ggagacaaagagccucaug

SEQ ID NO: 1546098 - RNA, 19 nt, Homo sapiens
  misc_RNA (1)...(19): siRNA sense strand
gacaaagagccucaugaag

SEQ ID NO: 1546099 - RNA, 19 nt, Homo sapiens
  misc_RNA (1)...(19): siRNA sense strand
caagagcuccaaguacuag

SEQ ID NO: 1546100 - RNA, 19 nt, Homo sapiens
  misc_RNA (1)...(19): siRNA sense strand
cuaacaacauucgccacaa

SEQ ID NO: 1546101 - RNA, 19 nt, Homo sapiens
  misc_RNA (1)...(19): siRNA sense strand
cccagaauccuguggaaau

SEQ ID NO: 1546102 - RNA, 19 nt, Homo sapiens
  misc_RNA (1)...(19): siRNA sense strand
gggcugcugaggagacaaa

SEQ ID NO: 1546103 - RNA, 19 nt, Homo sapiens
  misc_RNA (1)...(19): siRNA sense strand
ugaccucggcuacaacaug

SEQ ID NO: 1546104 - RNA, 19 nt, Homo sapiens
  misc_RNA (1)...(19): siRNA sense strand
aacaugcggucaaacuugu

SEQ ID NO: 1546105 - RNA, 19 nt, Homo sapiens
  misc_RNA (1)...(19): siRNA sense strand
uuacacaccagaggucauu

SEQ ID NO: 1546106 - RNA, 19 nt, Homo sapiens
  misc_RNA (1)...(19): siRNA sense strand
ggcagcaucauuccuaaca

SEQ ID NO: 1546107 - RNA, 19 nt, Homo sapiens
  misc_RNA (1)...(19): siRNA sense strand
aaaaugcuaugaaccugaa

SEQ ID NO: 1546108 - RNA, 19 nt, Homo sapiens
  misc_RNA (1)...(19): siRNA sense strand
ccagaggucauugagaaau

SEQ ID NO: 1546109 - RNA, 19 nt, Homo sapiens
  misc_RNA (1)...(19): siRNA sense strand
agaggucauugagaaauca

SEQ ID NO: 1546110 - RNA, 19 nt, Homo sapiens
  misc_RNA (1)...(19): siRNA sense strand
cagaaagcacuggaagaga

SEQ ID NO: 1546111 - RNA, 19 nt, Homo sapiens
  misc_RNA (1)...(19): siRNA sense strand
gagaaaacagcaaauccaa

SEQ ID NO: 1546112 - RNA, 19 nt, Homo sapiens
  misc_RNA (1)...(19): siRNA sense strand
aagggcagcaucauuccua

SEQ ID NO: 1546113 - RNA, 19 nt, Homo sapiens
  misc_RNA (1)...(19): siRNA sense strand
agagaaauauggagaaaac

SEQ ID NO: 1546114 - RNA, 19 nt, Homo sapiens
  misc_RNA (1)...(19): siRNA sense strand
gccacaaguuugggagcaa

SEQ ID NO: 1546115 - RNA, 19 nt, Homo sapiens
  misc_RNA (1)...(19): siRNA sense strand
gugagggacuuagaacacu

SEQ ID NO: 1546116 - RNA, 19 nt, Homo sapiens
  misc_RNA (1)...(19): siRNA sense strand
aaaaggcuauugaugaagu

SEQ ID NO: 1546117 - RNA, 19 nt, Homo sapiens
  misc_RNA (1)...(19): siRNA sense strand
acacaccagaggucauuga

SEQ ID NO: 1546118 - RNA, 19 nt, Homo sapiens
  misc_RNA (1)...(19): siRNA sense strand
gcucacaccuguaaucuca

SEQ ID NO: 1546119 - RNA, 19 nt, Homo sapiens
  misc_RNA (1)...(19): siRNA sense strand
ccuguaaucucagcuacuu

SEQ ID NO: 1546120 - RNA, 19 nt, Homo sapiens
  misc_RNA (1)...(19): siRNA sense strand
ggcacuuccuacaccacua

SEQ ID NO: 1546121 - RNA, 19 nt, Homo sapiens
  misc_RNA (1)...(19): siRNA sense strand
gcacuuccuacaccacuac

SEQ ID NO: 1546122 - RNA, 19 nt, Homo sapiens
  misc_RNA (1)...(19): siRNA sense strand
ucaaugaacugugggauua

SEQ ID NO: 1546123 - RNA, 19 nt, Homo sapiens
  misc_RNA (1)...(19): siRNA sense strand
gaaacaagaacuuccuuua

SEQ ID NO: 1546124 - RNA, 19 nt, Homo sapiens
  misc_RNA (1)...(19): siRNA sense strand
ggacauuagugcuccauuu

SEQ ID NO: 1546125 - RNA, 19 nt, Homo sapiens
  misc_RNA (1)...(19): siRNA sense strand
gaagaaauguguggaaaca

SEQ ID NO: 1546126 - RNA, 19 nt, Homo sapiens
  misc_RNA (1)...(19): siRNA sense strand
ggaaacaaccggaaucaga

SEQ ID NO: 1546127 - RNA, 19 nt, Homo sapiens
  misc_RNA (1)...(19): siRNA sense strand
gaaguuaugaagcucuuua

SEQ ID NO: 1546128 - RNA, 19 nt, Homo sapiens
  misc_RNA (1)...(19): siRNA sense strand
gaacacacuugggaugguu

SEQ ID NO: 1546129 - RNA, 19 nt, Homo sapiens
  misc_RNA (1)...(19): siRNA sense strand
ggagugaugauggacauua

SEQ ID NO: 1546130 - RNA, 19 nt, Homo sapiens
  misc_RNA (1)...(19): siRNA sense strand
gaagaagaaauguguggaa

SEQ ID NO: 1546131 - RNA, 19 nt, Homo sapiens
  misc_RNA (1)...(19): siRNA sense strand
ggagaagaguggaaacaac

SEQ ID NO: 1546132 - RNA, 19 nt, Homo sapiens
  misc_RNA (1)...(19): siRNA sense strand
aacaagaacuuccuuuauc

SEQ ID NO: 1546133 - RNA, 19 nt, Homo sapiens
  misc_RNA (1)...(19): siRNA sense strand
gaaucagaccuguggcuaa

SEQ ID NO: 1546134 - RNA, 19 nt, Homo sapiens
  misc_RNA (1)...(19): siRNA sense strand
gaagcaugagcccguauuu

SEQ ID NO: 1546135 - RNA, 19 nt, Homo sapiens
  misc_RNA (1)...(19): siRNA sense strand
gagcaauauuuagaaguug

SEQ ID NO: 1546136 - RNA, 19 nt, Homo sapiens
  misc_RNA (1)...(19): siRNA sense strand
aagaagaaauguguggaaa

SEQ ID NO: 1546137 - RNA, 19 nt, Homo sapiens
  misc_RNA (1)...(19): siRNA sense strand
uaaacgaaguuaugaagcu

SEQ ID NO: 1546138 - RNA, 19 nt, Homo sapiens
  misc_RNA (1)...(19): siRNA sense strand
gaaauguguggaaacaaga

SEQ ID NO: 1546139 - RNA, 19 nt, Homo sapiens
  misc_RNA (1)...(19): siRNA sense strand
agaaauguguggaaacaag

SEQ ID NO: 1546140 - RNA, 19 nt, Homo sapiens
  misc_RNA (1)...(19): siRNA sense strand
caccaaaugugacaaaauu

SEQ ID NO: 1546141 - RNA, 19 nt, Homo sapiens
  misc_RNA (1)...(19): siRNA sense strand
ugauuuccauugccuagaa

SEQ ID NO: 1546142 - RNA, 19 nt, Homo sapiens
  misc_RNA (1)...(19): siRNA sense strand
gaacugcagcaaggacaaa

SEQ ID NO: 1546143 - RNA, 19 nt, Homo sapiens
  misc_RNA (1)...(19): siRNA sense strand
ucagaccuguggcuaauag

SEQ ID NO: 1546144 - RNA, 19 nt, Homo sapiens
  misc_RNA (1)...(19): siRNA sense strand
gaggagugaugauggacau

SEQ ID NO: 1546145 - RNA, 19 nt, Homo sapiens
  misc_RNA (1)...(19): siRNA sense strand
ggaguuauuuuccaccaaa

SEQ ID NO: 1546146 - RNA, 19 nt, Homo sapiens
  misc_RNA (1)...(19): siRNA sense strand
aaucagaccuguggcuaau

SEQ ID NO: 1546147 - RNA, 19 nt, Homo sapiens
  misc_RNA (1)...(19): siRNA sense strand
gagugaugauggacauuag

SEQ ID NO: 1546148 - RNA, 19 nt, Homo sapiens
  misc_RNA (1)...(19): siRNA sense strand
acugugggauuaugaaguu

SEQ ID NO: 1546149 - RNA, 19 nt, Homo sapiens
  misc_RNA (1)...(19): siRNA sense strand
caugagcccguauuuauca

SEQ ID NO: 1546150 - RNA, 19 nt, Homo sapiens
  misc_RNA (1)...(19): siRNA sense strand
acaagaacuuccuuuaucg

SEQ ID NO: 1546151 - RNA, 19 nt, Homo sapiens
  misc_RNA (1)...(19): siRNA sense strand
acagaggagugaugaugga

SEQ ID NO: 1546152 - RNA, 19 nt, Homo sapiens
  misc_RNA (1)...(19): siRNA sense strand
gcaugagcccguauuuauc

SEQ ID NO: 1546153 - RNA, 19 nt, Homo sapiens
  misc_RNA (1)...(19): siRNA sense strand
ccacggacagcauuuagug

SEQ ID NO: 1546154 - RNA, 19 nt, Homo sapiens
  misc_RNA (1)...(19): siRNA sense strand
acacacugcuuggagaaga

SEQ ID NO: 1546155 - RNA, 19 nt, Homo sapiens
  misc_RNA (1)...(19): siRNA sense strand
gcuaauagagaaaugugau

SEQ ID NO: 1546156 - RNA, 19 nt, Homo sapiens
  misc_RNA (1)...(19): siRNA sense strand
aagcaugagcccguauuua

SEQ ID NO: 1546157 - RNA, 19 nt, Homo sapiens
  misc_RNA (1)...(19): siRNA sense strand
ugacagaggagugaugaug

SEQ ID NO: 1546158 - RNA, 19 nt, Homo sapiens
  misc_RNA (1)...(19): siRNA sense strand
uaacacacugcuuggagaa

SEQ ID NO: 1546159 - RNA, 19 nt, Homo sapiens
  misc_RNA (1)...(19): siRNA sense strand
gaacugugggauuaugaag

SEQ ID NO: 1546160 - RNA, 19 nt, Homo sapiens
  misc_RNA (1)...(19): siRNA sense strand
gaagcucuuuacccuguac

SEQ ID NO: 1546161 - RNA, 19 nt, Homo sapiens
  misc_RNA (1)...(19): siRNA sense strand
agcaugagcccguauuuau

SEQ ID NO: 1546162 - RNA, 19 nt, Homo sapiens
  misc_RNA (1)...(19): siRNA sense strand
gaccuguggcuaauagaga

SEQ ID NO: 1546163 - RNA, 19 nt, Homo sapiens
  misc_RNA (1)...(19): siRNA sense strand
ggauuaugaaguuguggaa

SEQ ID NO: 1546164 - RNA, 19 nt, Homo sapiens
  misc_RNA (1)...(19): siRNA sense strand
aaugggaaggcaaagcuua

SEQ ID NO: 1546165 - RNA, 19 nt, Homo sapiens
  misc_RNA (1)...(19): siRNA sense strand
ugaaguuguggaagcauuu

SEQ ID NO: 1546166 - RNA, 19 nt, Homo sapiens
  misc_RNA (1)...(19): siRNA sense strand
uccauugccuagaauacuu

SEQ ID NO: 1546167 - RNA, 19 nt, Homo sapiens
  misc_RNA (1)...(19): siRNA sense strand
ccacuuggagaaccaggaa

SEQ ID NO: 1546168 - RNA, 19 nt, Homo sapiens
  misc_RNA (1)...(19): siRNA sense strand
gauuuccauugccuagaau

SEQ ID NO: 1546169 - RNA, 19 nt, Homo sapiens
  misc_RNA (1)...(19): siRNA sense strand
ggugacagaggagugauga

SEQ ID NO: 1546170 - RNA, 19 nt, Homo sapiens
  misc_RNA (1)...(19): siRNA sense strand
ugaagcucuuuacccugua

SEQ ID NO: 1546171 - RNA, 19 nt, Homo sapiens
  misc_RNA (1)...(19): siRNA sense strand
aaugaacugugggauuaug

SEQ ID NO: 1546172 - RNA, 19 nt, Homo sapiens
  misc_RNA (1)...(19): siRNA sense strand
gacauuagugcuccauuuu

SEQ ID NO: 1546173 - RNA, 19 nt, Homo sapiens
  misc_RNA (1)...(19): siRNA sense strand
gcugaauccaggugacaga

SEQ ID NO: 1546174 - RNA, 19 nt, Homo sapiens
  misc_RNA (1)...(19): siRNA sense strand
ggaaggcaaagcuuaucuc

SEQ ID NO: 1546175 - RNA, 19 nt, Homo sapiens
  misc_RNA (1)...(19): siRNA sense strand
ugaagcaugagcccguauu

SEQ ID NO: 1546176 - RNA, 19 nt, Homo sapiens
  misc_RNA (1)...(19): siRNA sense strand
aagaacuuccuuuaucguu

SEQ ID NO: 1546177 - RNA, 19 nt, Homo sapiens
  misc_RNA (1)...(19): siRNA sense strand
gcuccaagcucauccguuu

SEQ ID NO: 1546178 - RNA, 19 nt, Homo sapiens
  misc_RNA (1)...(19): siRNA sense strand
guacauuucuguucauuuc

SEQ ID NO: 1546179 - RNA, 19 nt, Homo sapiens
  misc_RNA (1)...(19): siRNA sense strand
caacugugcuauucaugaa

SEQ ID NO: 1546180 - RNA, 19 nt, Homo sapiens
  misc_RNA (1)...(19): siRNA sense strand
uagcagaccucacuucaca

SEQ ID NO: 1546181 - RNA, 19 nt, Homo sapiens
  misc_RNA (1)...(19): siRNA sense strand
gguaagagccgaccacaag

SEQ ID NO: 1546182 - RNA, 19 nt, Homo sapiens
  misc_RNA (1)...(19): siRNA sense strand
gaugguuuguguugggaua

SEQ ID NO: 1546183 - RNA, 19 nt, Homo sapiens
  misc_RNA (1)...(19): siRNA sense strand
gaagucaggaguacauuuc

SEQ ID NO: 1546184 - RNA, 19 nt, Homo sapiens
  misc_RNA (1)...(19): siRNA sense strand
cagaugcuccuggguauua

SEQ ID NO: 1546185 - RNA, 19 nt, Homo sapiens
  misc_RNA (1)...(19): siRNA sense strand
gcacuguccucuguguuug

SEQ ID NO: 1546186 - RNA, 19 nt, Homo sapiens
  misc_RNA (1)...(19): siRNA sense strand
gaaggcacaugaggacaau

SEQ ID NO: 1546187 - RNA, 19 nt, Homo sapiens
  misc_RNA (1)...(19): siRNA sense strand
aggcucaacuggcagaaua

SEQ ID NO: 1546188 - RNA, 19 nt, Homo sapiens
  misc_RNA (1)...(19): siRNA sense strand
cagagcagccugaagguaa

SEQ ID NO: 1546189 - RNA, 19 nt, Homo sapiens
  misc_RNA (1)...(19): siRNA sense strand
caucugcacuguccucugu

SEQ ID NO: 1546190 - RNA, 19 nt, Homo sapiens
  misc_RNA (1)...(19): siRNA sense strand
ggagagcugugaugaccau

SEQ ID NO: 1546191 - RNA, 19 nt, Homo sapiens
  misc_RNA (1)...(19): siRNA sense strand
uuaaagcccucaagucucu

SEQ ID NO: 1546192 - RNA, 19 nt, Homo sapiens
  misc_RNA (1)...(19): siRNA sense strand
ggacaaugaaggucuauac

SEQ ID NO: 1546193 - RNA, 19 nt, Homo sapiens
  misc_RNA (1)...(19): siRNA sense strand
gaaggucuauaccagaaac

SEQ ID NO: 1546194 - RNA, 19 nt, Homo sapiens
  misc_RNA (1)...(19): siRNA sense strand
ggaaggcacaugaggacaa

SEQ ID NO: 1546195 - RNA, 19 nt, Homo sapiens
  misc_RNA (1)...(19): siRNA sense strand
gagcugugaugaccauucu

SEQ ID NO: 1546196 - RNA, 19 nt, Homo sapiens
  misc_RNA (1)...(19): siRNA sense strand
ucaacuggcagaauaaaga

SEQ ID NO: 1546197 - RNA, 19 nt, Homo sapiens
  misc_RNA (1)...(19): siRNA sense strand
gaguacauuucuguucauu

SEQ ID NO: 1546198 - RNA, 19 nt, Homo sapiens
  misc_RNA (1)...(19): siRNA sense strand
agaccucacuucacaguca

SEQ ID NO: 1546199 - RNA, 19 nt, Homo sapiens
  misc_RNA (1)...(19): siRNA sense strand
ggaguacauuucuguucau

SEQ ID NO: 1546200 - RNA, 19 nt, Homo sapiens
  misc_RNA (1)...(19): siRNA sense strand
gcagauucccggacacugu

SEQ ID NO: 1546201 - RNA, 19 nt, Homo sapiens
  misc_RNA (1)...(19): siRNA sense strand
ugaggacaaugaaggucua

SEQ ID NO: 1546202 - RNA, 19 nt, Homo sapiens
  misc_RNA (1)...(19): siRNA sense strand
ucucacaccuuccugaucu

SEQ ID NO: 1546203 - RNA, 19 nt, Homo sapiens
  misc_RNA (1)...(19): siRNA sense strand
cauuaaagcccucaagucu

SEQ ID NO: 1546204 - RNA, 19 nt, Homo sapiens
  misc_RNA (1)...(19): siRNA sense strand
gcuccuggguauuauucuu

SEQ ID NO: 1546205 - RNA, 19 nt, Homo sapiens
  misc_RNA (1)...(19): siRNA sense strand
cuaccaagccaucaucaug

SEQ ID NO: 1546206 - RNA, 19 nt, Homo sapiens
  misc_RNA (1)...(19): siRNA sense strand
gcagaauaaagaucucaau

SEQ ID NO: 1546207 - RNA, 19 nt, Homo sapiens
  misc_RNA (1)...(19): siRNA sense strand
ucauuucaguccuggaguu

SEQ ID NO: 1546208 - RNA, 19 nt, Homo sapiens
  misc_RNA (1)...(19): siRNA sense strand
ccuggaggcccacauuaaa

SEQ ID NO: 1546209 - RNA, 19 nt, Homo sapiens
  misc_RNA (1)...(19): siRNA sense strand
aggaguacauuucuguuca

SEQ ID NO: 1546210 - RNA, 19 nt, Homo sapiens
  misc_RNA (1)...(19): siRNA sense strand
gcacaugaggacaaugaag

SEQ ID NO: 1546211 - RNA, 19 nt, Homo sapiens
  misc_RNA (1)...(19): siRNA sense strand
gcagaccucacuucacagu

SEQ ID NO: 1546212 - RNA, 19 nt, Homo sapiens
  misc_RNA (1)...(19): siRNA sense strand
gcaugcagccauccugauc

SEQ ID NO: 1546213 - RNA, 19 nt, Homo sapiens
  misc_RNA (1)...(19): siRNA sense strand
ugaagucaggaguacauuu

SEQ ID NO: 1546214 - RNA, 19 nt, Homo sapiens
  misc_RNA (1)...(19): siRNA sense strand
cuauccagcuuacccacuu

SEQ ID NO: 1546215 - RNA, 19 nt, Homo sapiens
  misc_RNA (1)...(19): siRNA sense strand
augaaggucuauaccagaa

SEQ ID NO: 1546216 - RNA, 19 nt, Homo sapiens
  misc_RNA (1)...(19): siRNA sense strand
gcacuguguccuaugaagu

SEQ ID NO: 1546217 - RNA, 19 nt, Homo sapiens
  misc_RNA (1)...(19): siRNA sense strand
cuucugggaugcugacugu

SEQ ID NO: 1546218 - RNA, 19 nt, Homo sapiens
  misc_RNA (1)...(19): siRNA sense strand
caagccaucaucaugcuau

SEQ ID NO: 1546219 - RNA, 19 nt, Homo sapiens
  misc_RNA (1)...(19): siRNA sense strand
uauuguuucugguuucuuc

SEQ ID NO: 1546220 - RNA, 19 nt, Homo sapiens
  misc_RNA (1)...(19): siRNA sense strand
caacuggcagaauaaagau

SEQ ID NO: 1546221 - RNA, 19 nt, Homo sapiens
  misc_RNA (1)...(19): siRNA sense strand
gcucaacuggcagaauaaa

SEQ ID NO: 1546222 - RNA, 19 nt, Homo sapiens
  misc_RNA (1)...(19): siRNA sense strand
gugaagaggcaggcacuga

SEQ ID NO: 1546223 - RNA, 19 nt, Homo sapiens
  misc_RNA (1)...(19): siRNA sense strand
acaacugugcuauucauga

SEQ ID NO: 1546224 - RNA, 19 nt, Homo sapiens
  misc_RNA (1)...(19): siRNA sense strand
ugcuauggaugauugcaaa

SEQ ID NO: 1546225 - RNA, 19 nt, Homo sapiens
  misc_RNA (1)...(19): siRNA sense strand
uguggucugugccuccuuu

SEQ ID NO: 1546226 - RNA, 19 nt, Homo sapiens
  misc_RNA (1)...(19): siRNA sense strand
cauccgcacuguguccuau

SEQ ID NO: 1546227 - RNA, 19 nt, Homo sapiens
  misc_RNA (1)...(19): siRNA sense strand
uaacucgcauccgcacugu

SEQ ID NO: 1546228 - RNA, 19 nt, Homo sapiens
  misc_RNA (1)...(19): siRNA sense strand
ccugagugcuauccagcuu

SEQ ID NO: 1546229 - RNA, 19 nt, Homo sapiens
  misc_RNA (1)...(19): siRNA sense strand
gucugugccuccuuuccua

SEQ ID NO: 1546230 - RNA, 19 nt, Homo sapiens
  misc_RNA (1)...(19): siRNA sense strand
acaccuuccugaucugcuu

SEQ ID NO: 1546231 - RNA, 19 nt, Homo sapiens
  misc_RNA (1)...(19): siRNA sense strand
ugagugcuauccagcuuac

SEQ ID NO: 1546232 - RNA, 19 nt, Homo sapiens
  misc_RNA (1)...(19): siRNA sense strand
ccuaugaagucaggaguac

SEQ ID NO: 1546233 - RNA, 19 nt, Homo sapiens
  misc_RNA (1)...(19): siRNA sense strand
caaaauaggggugaugguu

SEQ ID NO: 1546234 - RNA, 19 nt, Homo sapiens
  misc_RNA (1)...(19): siRNA sense strand
aaauaggggugaugguuug

SEQ ID NO: 1546235 - RNA, 19 nt, Homo sapiens
  misc_RNA (1)...(19): siRNA sense strand
ucugaccaaugccuucguu

SEQ ID NO: 1546236 - RNA, 19 nt, Homo sapiens
  misc_RNA (1)...(19): siRNA sense strand
caggaguacauuucuguuc

SEQ ID NO: 1546237 - RNA, 19 nt, Homo sapiens
  misc_RNA (1)...(19): siRNA sense strand
ggaagaagguggaagauuu

SEQ ID NO: 1546238 - RNA, 19 nt, Homo sapiens
  misc_RNA (1)...(19): siRNA sense strand
caacuucucuccagacuua

SEQ ID NO: 1546239 - RNA, 19 nt, Homo sapiens
  misc_RNA (1)...(19): siRNA sense strand
gaagaaacauaagcaguua

SEQ ID NO: 1546240 - RNA, 19 nt, Homo sapiens
  misc_RNA (1)...(19): siRNA sense strand
caaaugaguuucacaagaa

SEQ ID NO: 1546241 - RNA, 19 nt, Homo sapiens
  misc_RNA (1)...(19): siRNA sense strand
gcagaggacugucaagaaa

SEQ ID NO: 1546242 - RNA, 19 nt, Homo sapiens
  misc_RNA (1)...(19): siRNA sense strand
cgaaagugcugacaaauga

SEQ ID NO: 1546243 - RNA, 19 nt, Homo sapiens
  misc_RNA (1)...(19): siRNA sense strand
gaaagagccuuccagauca

SEQ ID NO: 1546244 - RNA, 19 nt, Homo sapiens
  misc_RNA (1)...(19): siRNA sense strand
gcaaaugaguuucacaaga

SEQ ID NO: 1546245 - RNA, 19 nt, Homo sapiens
  misc_RNA (1)...(19): siRNA sense strand
gcacugaagucgucuguga

SEQ ID NO: 1546246 - RNA, 19 nt, Homo sapiens
  misc_RNA (1)...(19): siRNA sense strand
gaacaggaaucuggagaaa

SEQ ID NO: 1546247 - RNA, 19 nt, Homo sapiens
  misc_RNA (1)...(19): siRNA sense strand
gaaaugugcugaucuugau

SEQ ID NO: 1546248 - RNA, 19 nt, Homo sapiens
  misc_RNA (1)...(19): siRNA sense strand
uagcuaagauugucaguaa

SEQ ID NO: 1546249 - RNA, 19 nt, Homo sapiens
  misc_RNA (1)...(19): siRNA sense strand
cagcugcucucaucucuua

SEQ ID NO: 1546250 - RNA, 19 nt, Homo sapiens
  misc_RNA (1)...(19): siRNA sense strand
ggacauggaucugcaaaug

SEQ ID NO: 1546251 - RNA, 19 nt, Homo sapiens
  misc_RNA (1)...(19): siRNA sense strand
gagaagaaauuccuuugga

SEQ ID NO: 1546252 - RNA, 19 nt, Homo sapiens
  misc_RNA (1)...(19): siRNA sense strand
gcugcuagcucaacuauug

SEQ ID NO: 1546253 - RNA, 19 nt, Homo sapiens
  misc_RNA (1)...(19): siRNA sense strand
gauauuaaccucacucuug

SEQ ID NO: 1546254 - RNA, 19 nt, Homo sapiens
  misc_RNA (1)...(19): siRNA sense strand
gaaccaguauaaagacaaa

SEQ ID NO: 1546255 - RNA, 19 nt, Homo sapiens
  misc_RNA (1)...(19): siRNA sense strand
gaagauacugccugagaua

SEQ ID NO: 1546256 - RNA, 19 nt, Homo sapiens
  misc_RNA (1)...(19): siRNA sense strand
guauugcccuugagaaauu

SEQ ID NO: 1546257 - RNA, 19 nt, Homo sapiens
  misc_RNA (1)...(19): siRNA sense strand
gaucaaagacagggaauaa

SEQ ID NO: 1546258 - RNA, 19 nt, Homo sapiens
  misc_RNA (1)...(19): siRNA sense strand
ggccaaggauccugacuuu

SEQ ID NO: 1546259 - RNA, 19 nt, Homo sapiens
  misc_RNA (1)...(19): siRNA sense strand
caagauccauguauuagug

SEQ ID NO: 1546260 - RNA, 19 nt, Homo sapiens
  misc_RNA (1)...(19): siRNA sense strand
gcauauggaugaucacugu

SEQ ID NO: 1546261 - RNA, 19 nt, Homo sapiens
  misc_RNA (1)...(19): siRNA sense strand
gauaugagagacaacaaua

SEQ ID NO: 1546262 - RNA, 19 nt, Homo sapiens
  misc_RNA (1)...(19): siRNA sense strand
gcuuucaacugcuacuuua

SEQ ID NO: 1546263 - RNA, 19 nt, Homo sapiens
  misc_RNA (1)...(19): siRNA sense strand
ccagagaacuuuaaaauug

SEQ ID NO: 1546264 - RNA, 19 nt, Homo sapiens
  misc_RNA (1)...(19): siRNA sense strand
cagcaaagccauuuacaaa

SEQ ID NO: 1546265 - RNA, 19 nt, Homo sapiens
  misc_RNA (1)...(19): siRNA sense strand
gacaagcauuccucuguaa

SEQ ID NO: 1546266 - RNA, 19 nt, Homo sapiens
  misc_RNA (1)...(19): siRNA sense strand
gauacugccugagauaauu

SEQ ID NO: 1546267 - RNA, 19 nt, Homo sapiens
  misc_RNA (1)...(19): siRNA sense strand
gaaauagugcugcaaacaa

SEQ ID NO: 1546268 - RNA, 19 nt, Homo sapiens
  misc_RNA (1)...(19): siRNA sense strand
gccauuagguaucucagua

SEQ ID NO: 1546269 - RNA, 19 nt, Homo sapiens
  misc_RNA (1)...(19): siRNA sense strand
gacgugagcuucuacuuca

SEQ ID NO: 1546270 - RNA, 19 nt, Homo sapiens
  misc_RNA (1)...(19): siRNA sense strand
gaucacaucauuucaauag

SEQ ID NO: 1546271 - RNA, 19 nt, Homo sapiens
  misc_RNA (1)...(19): siRNA sense strand
gauggccauugauugauua

SEQ ID NO: 1546272 - RNA, 19 nt, Homo sapiens
  misc_RNA (1)...(19): siRNA sense strand
guccaacgauugauuuauu

SEQ ID NO: 1546273 - RNA, 19 nt, Homo sapiens
  misc_RNA (1)...(19): siRNA sense strand
gccagaagaugcccacuug

SEQ ID NO: 1546274 - RNA, 19 nt, Homo sapiens
  misc_RNA (1)...(19): siRNA sense strand
cuggagagcugauggaauu

SEQ ID NO: 1546275 - RNA, 19 nt, Homo sapiens
  misc_RNA (1)...(19): siRNA sense strand
ggauggccauugauugauu

SEQ ID NO: 1546276 - RNA, 19 nt, Homo sapiens
  misc_RNA (1)...(19): siRNA sense strand
ucucugagcucaugaagga

SEQ ID NO: 1546277 - RNA, 19 nt, Homo sapiens
  misc_RNA (1)...(19): siRNA sense strand
ggaaggcgcuggcugaaaa

SEQ ID NO: 1546278 - RNA, 19 nt, Homo sapiens
  misc_RNA (1)...(19): siRNA sense strand
gaugaucacuguccugaag

SEQ ID NO: 1546279 - RNA, 19 nt, Homo sapiens
  misc_RNA (1)...(19): siRNA sense strand
ucacauggauacaguuguu

SEQ ID NO: 1546280 - RNA, 19 nt, Homo sapiens
  misc_RNA (1)...(19): siRNA sense strand
uagacaaacuggagacuga

SEQ ID NO: 1546281 - RNA, 19 nt, Homo sapiens
  misc_RNA (1)...(19): siRNA sense strand
gaugaacaaguaagaagua

SEQ ID NO: 1546282 - RNA, 19 nt, Homo sapiens
  misc_RNA (1)...(19): siRNA sense strand
ugacugccaucuucuuauu

SEQ ID NO: 1546283 - RNA, 19 nt, Homo sapiens
  misc_RNA (1)...(19): siRNA sense strand
ucaccuagcucgcacugaa

SEQ ID NO: 1546284 - RNA, 19 nt, Homo sapiens
  misc_RNA (1)...(19): siRNA sense strand
aaagaauccuuauggaaga

SEQ ID NO: 1546285 - RNA, 19 nt, Homo sapiens
  misc_RNA (1)...(19): siRNA sense strand
gaaggaaagaacaucagua

SEQ ID NO: 1546286 - RNA, 19 nt, Homo sapiens
  misc_RNA (1)...(19): siRNA sense strand
ggaaggauggccauugauu

SEQ ID NO: 1546287 - RNA, 19 nt, Homo sapiens
  misc_RNA (1)...(19): siRNA sense strand
guugagggaucacaucauu

SEQ ID NO: 1546288 - RNA, 19 nt, Homo sapiens
  misc_RNA (1)...(19): siRNA sense strand
ucaacucugugauguauga

SEQ ID NO: 1546289 - RNA, 19 nt, Homo sapiens
  misc_RNA (1)...(19): siRNA sense strand
cagccaauauguggaguua

SEQ ID NO: 1546290 - RNA, 19 nt, Homo sapiens
  misc_RNA (1)...(19): siRNA sense strand
gaagacauuuacagucauc

SEQ ID NO: 1546291 - RNA, 19 nt, Homo sapiens
  misc_RNA (1)...(19): siRNA sense strand
gagugggaaucuugacuuu

SEQ ID NO: 1546292 - RNA, 19 nt, Homo sapiens
  misc_RNA (1)...(19): siRNA sense strand
gauguggccuggaccauuc

SEQ ID NO: 1546293 - RNA, 19 nt, Homo sapiens
  misc_RNA (1)...(19): siRNA sense strand
agacaagcauuccucugua

SEQ ID NO: 1546294 - RNA, 19 nt, Homo sapiens
  misc_RNA (1)...(19): siRNA sense strand
ucaguaaguucaucccaaa

SEQ ID NO: 1546295 - RNA, 19 nt, Homo sapiens
  misc_RNA (1)...(19): siRNA sense strand
aggaagggcuggaaaguga

SEQ ID NO: 1546296 - RNA, 19 nt, Homo sapiens
  misc_RNA (1)...(19): siRNA sense strand
acaaagagauugauuucca

SEQ ID NO: 1546297 - RNA, 19 nt, Homo sapiens
  misc_RNA (1)...(19): siRNA sense strand
gcgcagcuuucuucucuga

SEQ ID NO: 1546298 - RNA, 19 nt, Homo sapiens
  misc_RNA (1)...(19): siRNA sense strand
agacugaguuagaagauga

SEQ ID NO: 1546299 - RNA, 19 nt, Homo sapiens
  misc_RNA (1)...(19): siRNA sense strand
caucccaaaugaagaaauu

SEQ ID NO: 1546300 - RNA, 19 nt, Homo sapiens
  misc_RNA (1)...(19): siRNA sense strand
uggaaagacugcaggguuu

SEQ ID NO: 1546301 - RNA, 19 nt, Homo sapiens
  misc_RNA (1)...(19): siRNA sense strand
acaaggagcacauucaauu

SEQ ID NO: 1546302 - RNA, 19 nt, Homo sapiens
  misc_RNA (1)...(19): siRNA sense strand
caagaagcaucacugagau

SEQ ID NO: 1546303 - RNA, 19 nt, Homo sapiens
  misc_RNA (1)...(19): siRNA sense strand
uaacuccacugagaagaaa

SEQ ID NO: 1546304 - RNA, 19 nt, Homo sapiens
  misc_RNA (1)...(19): siRNA sense strand
gcaauaacuccacugagaa

SEQ ID NO: 1546305 - RNA, 19 nt, Homo sapiens
  misc_RNA (1)...(19): siRNA sense strand
agaggaaucuguccgagaa

SEQ ID NO: 1546306 - RNA, 19 nt, Homo sapiens
  misc_RNA (1)...(19): siRNA sense strand
ggccauugauugauuaugu

SEQ ID NO: 1546307 - RNA, 19 nt, Homo sapiens
  misc_RNA (1)...(19): siRNA sense strand
gagauugauuuccauguca

SEQ ID NO: 1546308 - RNA, 19 nt, Homo sapiens
  misc_RNA (1)...(19): siRNA sense strand
gaguauuccuuucaugaug

SEQ ID NO: 1546309 - RNA, 19 nt, Homo sapiens
  misc_RNA (1)...(19): siRNA sense strand
ucggagaacuaccggauaa

SEQ ID NO: 1546310 - RNA, 19 nt, Homo sapiens
  misc_RNA (1)...(19): siRNA sense strand
cuauuggucuguucuauau

SEQ ID NO: 1546311 - RNA, 19 nt, Homo sapiens
  misc_RNA (1)...(19): siRNA sense strand
gcaugucugugaugaacaa

SEQ ID NO: 1546312 - RNA, 19 nt, Homo sapiens
  misc_RNA (1)...(19): siRNA sense strand
gaaggauggccauugauug

SEQ ID NO: 1546313 - RNA, 19 nt, Homo sapiens
  misc_RNA (1)...(19): siRNA sense strand
caaggaagauauuguuaac

SEQ ID NO: 1546314 - RNA, 19 nt, Homo sapiens
  misc_RNA (1)...(19): siRNA sense strand
gaaauucagcaaagccauu

SEQ ID NO: 1546315 - RNA, 19 nt, Homo sapiens
  misc_RNA (1)...(19): siRNA sense strand
gcuaccagaugaauucguu

SEQ ID NO: 1546316 - RNA, 19 nt, Homo sapiens
  misc_RNA (1)...(19): siRNA sense strand
agaaagagccuuccagauc

SEQ ID NO: 1546317 - RNA, 19 nt, Homo sapiens
  misc_RNA (1)...(19): siRNA sense strand
gagaaccauuuggauauug

SEQ ID NO: 1546318 - RNA, 19 nt, Homo sapiens
  misc_RNA (1)...(19): siRNA sense strand
gggaucacaucauuucaau

SEQ ID NO: 1546319 - RNA, 19 nt, Homo sapiens
  misc_RNA (1)...(19): siRNA sense strand
gaaggggacuuucuguauu

SEQ ID NO: 1546320 - RNA, 19 nt, Homo sapiens
  misc_RNA (1)...(19): siRNA sense strand
gagaagguguaaagagaca

SEQ ID NO: 1546321 - RNA, 19 nt, Homo sapiens
  misc_RNA (1)...(19): siRNA sense strand
cgucaagauccauguauua

SEQ ID NO: 1546322 - RNA, 19 nt, Homo sapiens
  misc_RNA (1)...(19): siRNA sense strand
gaaacucuugcaagccuua

SEQ ID NO: 1546323 - RNA, 19 nt, Homo sapiens
  misc_RNA (1)...(19): siRNA sense strand
gaugugggauaaugugaau

SEQ ID NO: 1546324 - RNA, 19 nt, Homo sapiens
  misc_RNA (1)...(19): siRNA sense strand
ggacaaggagcacauucaa

SEQ ID NO: 1546325 - RNA, 19 nt, Homo sapiens
  misc_RNA (1)...(19): siRNA sense strand
aggagaugcugauugguua

SEQ ID NO: 1546326 - RNA, 19 nt, Homo sapiens
  misc_RNA (1)...(19): siRNA sense strand
gaucagggguuccaguuuu

SEQ ID NO: 1546327 - RNA, 19 nt, Homo sapiens
  misc_RNA (1)...(19): siRNA sense strand
gugggaaucuugacuuugu

SEQ ID NO: 1546328 - RNA, 19 nt, Homo sapiens
  misc_RNA (1)...(19): siRNA sense strand
cgagaaccauuuggauauu

SEQ ID NO: 1546329 - RNA, 19 nt, Homo sapiens
  misc_RNA (1)...(19): siRNA sense strand
gcaauucugugugaaacug

SEQ ID NO: 1546330 - RNA, 19 nt, Homo sapiens
  misc_RNA (1)...(19): siRNA sense strand
uauaggcaauucuguguga

SEQ ID NO: 1546331 - RNA, 19 nt, Homo sapiens
  misc_RNA (1)...(19): siRNA sense strand
gcaggaugaugugagauug

SEQ ID NO: 1546332 - RNA, 19 nt, Homo sapiens
  misc_RNA (1)...(19): siRNA sense strand
cugccaagauucagacuuu

SEQ ID NO: 1546333 - RNA, 19 nt, Homo sapiens
  misc_RNA (1)...(19): siRNA sense strand
gugugaaacuggccaagaa

SEQ ID NO: 1546334 - RNA, 19 nt, Homo sapiens
  misc_RNA (1)...(19): siRNA sense strand
caaggagcacauucaauuu

SEQ ID NO: 1546335 - RNA, 19 nt, Homo sapiens
  misc_RNA (1)...(19): siRNA sense strand
acaaggagaugcugauugg

SEQ ID NO: 1546336 - RNA, 19 nt, Homo sapiens
  misc_RNA (1)...(19): siRNA sense strand
guacagaggaauccauaga

SEQ ID NO: 1546337 - RNA, 19 nt, Homo sapiens
  misc_RNA (1)...(19): siRNA sense strand
ggacccgaaucgucaauga

SEQ ID NO: 1546338 - RNA, 19 nt, Homo sapiens
  misc_RNA (1)...(19): siRNA sense strand
gcaacucgcugcccauggu

SEQ ID NO: 1546339 - RNA, 19 nt, Homo sapiens
  misc_RNA (1)...(19): siRNA sense strand
gcaaugaggaccaccacaa

SEQ ID NO: 1546340 - RNA, 19 nt, Homo sapiens
  misc_RNA (1)...(19): siRNA sense strand
ucgcagcccucaucucuga

SEQ ID NO: 1546341 - RNA, 19 nt, Homo sapiens
  misc_RNA (1)...(19): siRNA sense strand
ugcaagggcugccugguuu

SEQ ID NO: 1546342 - RNA, 19 nt, Homo sapiens
  misc_RNA (1)...(19): siRNA sense strand
ccaccaggcugacaucaag

SEQ ID NO: 1546343 - RNA, 19 nt, Homo sapiens
  misc_RNA (1)...(19): siRNA sense strand
ggcucuaccugcacuauga

SEQ ID NO: 1546344 - RNA, 19 nt, Homo sapiens
  misc_RNA (1)...(19): siRNA sense strand
ucgccaaacuggugaacaa

SEQ ID NO: 1546345 - RNA, 19 nt, Homo sapiens
  misc_RNA (1)...(19): siRNA sense strand
gccuggaggucuucaagga

SEQ ID NO: 1546346 - RNA, 19 nt, Homo sapiens
  misc_RNA (1)...(19): siRNA sense strand
gaacaaccggacccgaauc

SEQ ID NO: 1546347 - RNA, 19 nt, Homo sapiens
  misc_RNA (1)...(19): siRNA sense strand
ggaccaggagcucaucugu

SEQ ID NO: 1546348 - RNA, 19 nt, Homo sapiens
  misc_RNA (1)...(19): siRNA sense strand
gcucgcagcccucaucucu

SEQ ID NO: 1546349 - RNA, 19 nt, Homo sapiens
  misc_RNA (1)...(19): siRNA sense strand
caaugagucggaugucuuc

SEQ ID NO: 1546350 - RNA, 19 nt, Homo sapiens
  misc_RNA (1)...(19): siRNA sense strand
gaaaaggcucuuccggaaa

SEQ ID NO: 1546351 - RNA, 19 nt, Homo sapiens
  misc_RNA (1)...(19): siRNA sense strand
ucaaugagucggaugucuu

SEQ ID NO: 1546352 - RNA, 19 nt, Homo sapiens
  misc_RNA (1)...(19): siRNA sense strand
cccggagccucucaaguug

SEQ ID NO: 1546353 - RNA, 19 nt, Homo sapiens
  misc_RNA (1)...(19): siRNA sense strand
ggaacccgcucagccuuuu

SEQ ID NO: 1546354 - RNA, 19 nt, Homo sapiens
  misc_RNA (1)...(19): siRNA sense strand
cggagccucucaaguugga

SEQ ID NO: 1546355 - RNA, 19 nt, Homo sapiens
  misc_RNA (1)...(19): siRNA sense strand
acaaguucauccggaaguu

SEQ ID NO: 1546356 - RNA, 19 nt, Homo sapiens
  misc_RNA (1)...(19): siRNA sense strand
agugugugcuggaacaguu

SEQ ID NO: 1546357 - RNA, 19 nt, Homo sapiens
  misc_RNA (1)...(19): siRNA sense strand
ccgagugugugcuggaaca

SEQ ID NO: 1546358 - RNA, 19 nt, Homo sapiens
  misc_RNA (1)...(19): siRNA sense strand
caaugaggaccaccacaag

SEQ ID NO: 1546359 - RNA, 19 nt, Homo sapiens
  misc_RNA (1)...(19): siRNA sense strand
ccugagcgcuucgacuaca

SEQ ID NO: 1546360 - RNA, 19 nt, Homo sapiens
  misc_RNA (1)...(19): siRNA sense strand
gaggaccaccacaaguuca

SEQ ID NO: 1546361 - RNA, 19 nt, Homo sapiens
  misc_RNA (1)...(19): siRNA sense strand
aaaaggcucuuccggaaag

SEQ ID NO: 1546362 - RNA, 19 nt, Homo sapiens
  misc_RNA (1)...(19): siRNA sense strand
caagcugaccguguggaaa

SEQ ID NO: 1546363 - RNA, 19 nt, Homo sapiens
  misc_RNA (1)...(19): siRNA sense strand
ugaacaaccggacccgaau

SEQ ID NO: 1546364 - RNA, 19 nt, Homo sapiens
  misc_RNA (1)...(19): siRNA sense strand
ggaagaaacauccuuauua

SEQ ID NO: 1546365 - RNA, 19 nt, Homo sapiens
  misc_RNA (1)...(19): siRNA sense strand
gaagacacauuuagacaau

SEQ ID NO: 1546366 - RNA, 19 nt, Homo sapiens
  misc_RNA (1)...(19): siRNA sense strand
ggagaacacugguauggaa

SEQ ID NO: 1546367 - RNA, 19 nt, Homo sapiens
  misc_RNA (1)...(19): siRNA sense strand
gaaauucaaugaccagcuu

SEQ ID NO: 1546368 - RNA, 19 nt, Homo sapiens
  misc_RNA (1)...(19): siRNA sense strand
gcggaaagcuacaaggaaa

SEQ ID NO: 1546369 - RNA, 19 nt, Homo sapiens
  misc_RNA (1)...(19): siRNA sense strand
gcaaagagcacaaucauac

SEQ ID NO: 1546370 - RNA, 19 nt, Homo sapiens
  misc_RNA (1)...(19): siRNA sense strand
ggaccaugaugacgucuaa

SEQ ID NO: 1546371 - RNA, 19 nt, Homo sapiens
  misc_RNA (1)...(19): siRNA sense strand
aaacacagauggugaagau

SEQ ID NO: 1546372 - RNA, 19 nt, Homo sapiens
  misc_RNA (1)...(19): siRNA sense strand
ggacucccaugucucgaua

SEQ ID NO: 1546373 - RNA, 19 nt, Homo sapiens
  misc_RNA (1)...(19): siRNA sense strand
cagcaaagaugauucagau

SEQ ID NO: 1546374 - RNA, 19 nt, Homo sapiens
  misc_RNA (1)...(19): siRNA sense strand
cacaaucccuggaauuauu

SEQ ID NO: 1546375 - RNA, 19 nt, Homo sapiens
  misc_RNA (1)...(19): siRNA sense strand
gaaggucagugaaagaagu

SEQ ID NO: 1546376 - RNA, 19 nt, Homo sapiens
  misc_RNA (1)...(19): siRNA sense strand
acacagauggugaagauua

SEQ ID NO: 1546377 - RNA, 19 nt, Homo sapiens
  misc_RNA (1)...(19): siRNA sense strand
caaagcagccucugaacuu

SEQ ID NO: 1546378 - RNA, 19 nt, Homo sapiens
  misc_RNA (1)...(19): siRNA sense strand
gaaagaggagccuaaggaa

SEQ ID NO: 1546379 - RNA, 19 nt, Homo sapiens
  misc_RNA (1)...(19): siRNA sense strand
ccucugaacuucucaugaa

SEQ ID NO: 1546380 - RNA, 19 nt, Homo sapiens
  misc_RNA (1)...(19): siRNA sense strand
gggagugucuucuuugugu

SEQ ID NO: 1546381 - RNA, 19 nt, Homo sapiens
  misc_RNA (1)...(19): siRNA sense strand
ggacagaagccaaggugaa

SEQ ID NO: 1546382 - RNA, 19 nt, Homo sapiens
  misc_RNA (1)...(19): siRNA sense strand
ggaacagaaugaccaauac

SEQ ID NO: 1546383 - RNA, 19 nt, Homo sapiens
  misc_RNA (1)...(19): siRNA sense strand
cgccuucccucacauguua

SEQ ID NO: 1546384 - RNA, 19 nt, Homo sapiens
  misc_RNA (1)...(19): siRNA sense strand
gccaggacaucucuguuaa

SEQ ID NO: 1546385 - RNA, 19 nt, Homo sapiens
  misc_RNA (1)...(19): siRNA sense strand
gagcuccucuuucaacugu

SEQ ID NO: 1546386 - RNA, 19 nt, Homo sapiens
  misc_RNA (1)...(19): siRNA sense strand
ggaacaaucugcuggucau

SEQ ID NO: 1546387 - RNA, 19 nt, Homo sapiens
  misc_RNA (1)...(19): siRNA sense strand
gaggagaccaugcgauuug

SEQ ID NO: 1546388 - RNA, 19 nt, Homo sapiens
  misc_RNA (1)...(19): siRNA sense strand
gagaaaggguucgaaugug

SEQ ID NO: 1546389 - RNA, 19 nt, Homo sapiens
  misc_RNA (1)...(19): siRNA sense strand
aauaucagcuccagaaaca

SEQ ID NO: 1546390 - RNA, 19 nt, Homo sapiens
  misc_RNA (1)...(19): siRNA sense strand
caacagugcgucagcauug

SEQ ID NO: 1546391 - RNA, 19 nt, Homo sapiens
  misc_RNA (1)...(19): siRNA sense strand
gaacuucucaugaaacucu

SEQ ID NO: 1546392 - RNA, 19 nt, Homo sapiens
  misc_RNA (1)...(19): siRNA sense strand
gagauaaagacucacauug

SEQ ID NO: 1546393 - RNA, 19 nt, Homo sapiens
  misc_RNA (1)...(19): siRNA sense strand
gcaaggacaaucucaaauc

SEQ ID NO: 1546394 - RNA, 19 nt, Homo sapiens
  misc_RNA (1)...(19): siRNA sense strand
aagcagagauaaagacuca

SEQ ID NO: 1546395 - RNA, 19 nt, Homo sapiens
  misc_RNA (1)...(19): siRNA sense strand
gaagggaagugugcuaagg

SEQ ID NO: 1546396 - RNA, 19 nt, Homo sapiens
  misc_RNA (1)...(19): siRNA sense strand
gcaagacgaagaacauguu

SEQ ID NO: 1546397 - RNA, 19 nt, Homo sapiens
  misc_RNA (1)...(19): siRNA sense strand
ccaggaaguuggccgagaa

SEQ ID NO: 1546398 - RNA, 19 nt, Homo sapiens
  misc_RNA (1)...(19): siRNA sense strand
gggaagaaacauccuuauu

SEQ ID NO: 1546399 - RNA, 19 nt, Homo sapiens
  misc_RNA (1)...(19): siRNA sense strand
caggacaucucuguuaaga

SEQ ID NO: 1546400 - RNA, 19 nt, Homo sapiens
  misc_RNA (1)...(19): siRNA sense strand
cacagauggugaagauuaa

SEQ ID NO: 1546401 - RNA, 19 nt, Homo sapiens
  misc_RNA (1)...(19): siRNA sense strand
ccaagaaggucagugaaag

SEQ ID NO: 1546402 - RNA, 19 nt, Homo sapiens
  misc_RNA (1)...(19): siRNA sense strand
agaaaggguucgaaugugu

SEQ ID NO: 1546403 - RNA, 19 nt, Homo sapiens
  misc_RNA (1)...(19): siRNA sense strand
cgagcucaauguccaguuu

SEQ ID NO: 1546404 - RNA, 19 nt, Homo sapiens
  misc_RNA (1)...(19): siRNA sense strand
ggagcucagugaaggagaa

SEQ ID NO: 1546405 - RNA, 19 nt, Homo sapiens
  misc_RNA (1)...(19): siRNA sense strand
gaccaauacacuccaagua

SEQ ID NO: 1546406 - RNA, 19 nt, Homo sapiens
  misc_RNA (1)...(19): siRNA sense strand
gaaggaggaacccaaggaa

SEQ ID NO: 1546407 - RNA, 19 nt, Homo sapiens
  misc_RNA (1)...(19): siRNA sense strand
ugaaagaggagccuaagga

SEQ ID NO: 1546408 - RNA, 19 nt, Homo sapiens
  misc_RNA (1)...(19): siRNA sense strand
gaacagaaugaccaauaca

SEQ ID NO: 1546409 - RNA, 19 nt, Homo sapiens
  misc_RNA (1)...(19): siRNA sense strand
caacagcaaagaugauuca

SEQ ID NO: 1546410 - RNA, 19 nt, Homo sapiens
  misc_RNA (1)...(19): siRNA sense strand
agaaggagcccaugaaucu

SEQ ID NO: 1546411 - RNA, 19 nt, Homo sapiens
  misc_RNA (1)...(19): siRNA sense strand
ggaaucaagguaagugguu

SEQ ID NO: 1546412 - RNA, 19 nt, Homo sapiens
  misc_RNA (1)...(19): siRNA sense strand
agacgaagaacauguuuga

SEQ ID NO: 1546413 - RNA, 19 nt, Homo sapiens
  misc_RNA (1)...(19): siRNA sense strand
gaaaggguucgaauguguu

SEQ ID NO: 1546414 - RNA, 19 nt, Homo sapiens
  misc_RNA (1)...(19): siRNA sense strand
ggaggaagcagagauaaag

SEQ ID NO: 1546415 - RNA, 19 nt, Homo sapiens
  misc_RNA (1)...(19): siRNA sense strand
aaaccgaacccuuacagaa

SEQ ID NO: 1546416 - RNA, 19 nt, Homo sapiens
  misc_RNA (1)...(19): siRNA sense strand
aaucucaaaucccacauga

SEQ ID NO: 1546417 - RNA, 19 nt, Homo sapiens
  misc_RNA (1)...(19): siRNA sense strand
ccaauacacuccaaguaac

SEQ ID NO: 1546418 - RNA, 19 nt, Homo sapiens
  misc_RNA (1)...(19): siRNA sense strand
ucagauggcucccagaaaa

SEQ ID NO: 1546419 - RNA, 19 nt, Homo sapiens
  misc_RNA (1)...(19): siRNA sense strand
agacacauuuagacaauca

SEQ ID NO: 1546420 - RNA, 19 nt, Homo sapiens
  misc_RNA (1)...(19): siRNA sense strand
gagcaaagagcacaaucau

SEQ ID NO: 1546421 - RNA, 19 nt, Homo sapiens
  misc_RNA (1)...(19): siRNA sense strand
guaagugguugccaaacuc

SEQ ID NO: 1546422 - RNA, 19 nt, Homo sapiens
  misc_RNA (1)...(19): siRNA sense strand
ccaaguaaccguuuuauau

SEQ ID NO: 1546423 - RNA, 19 nt, Homo sapiens
  misc_RNA (1)...(19): siRNA sense strand
gguaagugguugccaaacu

SEQ ID NO: 1546424 - RNA, 19 nt, Homo sapiens
  misc_RNA (1)...(19): siRNA sense strand
ccauucaccuccaauucaa

SEQ ID NO: 1546425 - RNA, 19 nt, Homo sapiens
  misc_RNA (1)...(19): siRNA sense strand
caagaaggucagugaaaga

SEQ ID NO: 1546426 - RNA, 19 nt, Homo sapiens
  misc_RNA (1)...(19): siRNA sense strand
acugaaagcugcagccaau

SEQ ID NO: 1546427 - RNA, 19 nt, Homo sapiens
  misc_RNA (1)...(19): siRNA sense strand
gcagugaugggaagaaaca

SEQ ID NO: 1546428 - RNA, 19 nt, Homo sapiens
  misc_RNA (1)...(19): siRNA sense strand
aaggagcccaugaaucuua

SEQ ID NO: 1546429 - RNA, 19 nt, Homo sapiens
  misc_RNA (1)...(19): siRNA sense strand
gaacauguuugagcgucau

SEQ ID NO: 1546430 - RNA, 19 nt, Homo sapiens
  misc_RNA (1)...(19): siRNA sense strand
gcacaaucauacaaaagaa

SEQ ID NO: 1546431 - RNA, 19 nt, Homo sapiens
  misc_RNA (1)...(19): siRNA sense strand
aaaggaagaguuacuggaa

SEQ ID NO: 1546432 - RNA, 19 nt, Homo sapiens
  misc_RNA (1)...(19): siRNA sense strand
cuuccgagcuccucuuuca

SEQ ID NO: 1546433 - RNA, 19 nt, Homo sapiens
  misc_RNA (1)...(19): siRNA sense strand
gcccaugaaucuuaauuuu

SEQ ID NO: 1546434 - RNA, 19 nt, Homo sapiens
  misc_RNA (1)...(19): siRNA sense strand
guuaagauggcgucugauu

SEQ ID NO: 1546435 - RNA, 19 nt, Homo sapiens
  misc_RNA (1)...(19): siRNA sense strand
gaaagaccccuccgaguau

SEQ ID NO: 1546436 - RNA, 19 nt, Homo sapiens
  misc_RNA (1)...(19): siRNA sense strand
agagaaaggguucgaaugu

SEQ ID NO: 1546437 - RNA, 19 nt, Homo sapiens
  misc_RNA (1)...(19): siRNA sense strand
gcacacagaggaaagaaaa

SEQ ID NO: 1546438 - RNA, 19 nt, Homo sapiens
  misc_RNA (1)...(19): siRNA sense strand
aagaauaucagcuccagaa

SEQ ID NO: 1546439 - RNA, 19 nt, Homo sapiens
  misc_RNA (1)...(19): siRNA sense strand
ucacccagccggaauguug

SEQ ID NO: 1546440 - RNA, 19 nt, Homo sapiens
  misc_RNA (1)...(19): siRNA sense strand
ggugaagauuaaagaggaa

SEQ ID NO: 1546441 - RNA, 19 nt, Homo sapiens
  misc_RNA (1)...(19): siRNA sense strand
gcucgaaccucuccuuuuc

SEQ ID NO: 1546442 - RNA, 19 nt, Homo sapiens
  misc_RNA (1)...(19): siRNA sense strand
ccaagcgccuucccucaca

SEQ ID NO: 1546443 - RNA, 19 nt, Homo sapiens
  misc_RNA (1)...(19): siRNA sense strand
ggauaucucugugaaaaug

SEQ ID NO: 1546444 - RNA, 19 nt, Homo sapiens
  misc_RNA (1)...(19): siRNA sense strand
ugaaggagaacacugguau

SEQ ID NO: 1546445 - RNA, 19 nt, Homo sapiens
  misc_RNA (1)...(19): siRNA sense strand
gaacacugguauggaaacu

SEQ ID NO: 1546446 - RNA, 19 nt, Homo sapiens
  misc_RNA (1)...(19): siRNA sense strand
ccaccuccuuuacuuugaa

SEQ ID NO: 1546447 - RNA, 19 nt, Homo sapiens
  misc_RNA (1)...(19): siRNA sense strand
caaggacaaucucaaaucc

SEQ ID NO: 1546448 - RNA, 19 nt, Homo sapiens
  misc_RNA (1)...(19): siRNA sense strand
uaagggaagaguuucuaaa

SEQ ID NO: 1546449 - RNA, 19 nt, Homo sapiens
  misc_RNA (1)...(19): siRNA sense strand
gucaggauaucucugugaa

SEQ ID NO: 1546450 - RNA, 19 nt, Homo sapiens
  misc_RNA (1)...(19): siRNA sense strand
gggaaguccaggagaacua

SEQ ID NO: 1546451 - RNA, 19 nt, Homo sapiens
  misc_RNA (1)...(19): siRNA sense strand
ggagccagcccucacugaa

SEQ ID NO: 1546452 - RNA, 19 nt, Homo sapiens
  misc_RNA (1)...(19): siRNA sense strand
guacagacaccgaggacau

SEQ ID NO: 1546453 - RNA, 19 nt, Homo sapiens
  misc_RNA (1)...(19): siRNA sense strand
ucaguguucuggccaggaa

SEQ ID NO: 1546454 - RNA, 19 nt, Homo sapiens
  misc_RNA (1)...(19): siRNA sense strand
gcagagauaaagacucaca

SEQ ID NO: 1546455 - RNA, 19 nt, Homo sapiens
  misc_RNA (1)...(19): siRNA sense strand
ggcaggaaauggauuacca

SEQ ID NO: 1546456 - RNA, 19 nt, Homo sapiens
  misc_RNA (1)...(19): siRNA sense strand
gaccagcccuuucuuuuca

SEQ ID NO: 1546457 - RNA, 19 nt, Homo sapiens
  misc_RNA (1)...(19): siRNA sense strand
uaagauggcgucugauuuu

SEQ ID NO: 1546458 - RNA, 19 nt, Homo sapiens
  misc_RNA (1)...(19): siRNA sense strand
ggagaucccagacccagau

SEQ ID NO: 1546459 - RNA, 19 nt, Homo sapiens
  misc_RNA (1)...(19): siRNA sense strand
ccaauucagccucagaaga

SEQ ID NO: 1546460 - RNA, 19 nt, Homo sapiens
  misc_RNA (1)...(19): siRNA sense strand
ccggccagcuccuuccuuu

SEQ ID NO: 1546461 - RNA, 19 nt, Homo sapiens
  misc_RNA (1)...(19): siRNA sense strand
cagcuugucuccggauuca

SEQ ID NO: 1546462 - RNA, 19 nt, Homo sapiens
  misc_RNA (1)...(19): siRNA sense strand
ccgagaagcaggaacagaa

SEQ ID NO: 1546463 - RNA, 19 nt, Homo sapiens
  misc_RNA (1)...(19): siRNA sense strand
gagaacacugguauggaaa

SEQ ID NO: 1546464 - RNA, 19 nt, Homo sapiens
  misc_RNA (1)...(19): siRNA sense strand
gguauucacucgacacaua

SEQ ID NO: 1546465 - RNA, 19 nt, Homo sapiens
  misc_RNA (1)...(19): siRNA sense strand
gaacgggauucuucacuga

SEQ ID NO: 1546466 - RNA, 19 nt, Homo sapiens
  misc_RNA (1)...(19): siRNA sense strand
ggaagcagauucuaagucu

SEQ ID NO: 1546467 - RNA, 19 nt, Homo sapiens
  misc_RNA (1)...(19): siRNA sense strand
gaaggaagcagauucuaag

SEQ ID NO: 1546468 - RNA, 19 nt, Homo sapiens
  misc_RNA (1)...(19): siRNA sense strand
gacaaguucuggaauaugg

SEQ ID NO: 1546469 - RNA, 19 nt, Homo sapiens
  misc_RNA (1)...(19): siRNA sense strand
gaaagcccaaaguggauua

SEQ ID NO: 1546470 - RNA, 19 nt, Homo sapiens
  misc_RNA (1)...(19): siRNA sense strand
ucaacaacguggcggagua

SEQ ID NO: 1546471 - RNA, 19 nt, Homo sapiens
  misc_RNA (1)...(19): siRNA sense strand
ggaauauggcacuuacuga

SEQ ID NO: 1546472 - RNA, 19 nt, Homo sapiens
  misc_RNA (1)...(19): siRNA sense strand
ggacagacggcuccagugu

SEQ ID NO: 1546473 - RNA, 19 nt, Homo sapiens
  misc_RNA (1)...(19): siRNA sense strand
gaagauuccacucugucua

SEQ ID NO: 1546474 - RNA, 19 nt, Homo sapiens
  misc_RNA (1)...(19): siRNA sense strand
gaauauggcacuuacugau

SEQ ID NO: 1546475 - RNA, 19 nt, Homo sapiens
  misc_RNA (1)...(19): siRNA sense strand
uguacaggcuuccuuguug

SEQ ID NO: 1546476 - RNA, 19 nt, Homo sapiens
  misc_RNA (1)...(19): siRNA sense strand
gcuauuugaucggcugaaa

SEQ ID NO: 1546477 - RNA, 19 nt, Homo sapiens
  misc_RNA (1)...(19): siRNA sense strand
cauaugaacgggauucuuc

SEQ ID NO: 1546478 - RNA, 19 nt, Homo sapiens
  misc_RNA (1)...(19): siRNA sense strand
guucacauccgcacuuuca

SEQ ID NO: 1546479 - RNA, 19 nt, Homo sapiens
  misc_RNA (1)...(19): siRNA sense strand
gauucuaagucugcaguug

SEQ ID NO: 1546480 - RNA, 19 nt, Homo sapiens
  misc_RNA (1)...(19): siRNA sense strand
auuccacucugucuagaua

SEQ ID NO: 1546481 - RNA, 19 nt, Homo sapiens
  misc_RNA (1)...(19): siRNA sense strand
ccagaggccagucccguaa

SEQ ID NO: 1546482 - RNA, 19 nt, Homo sapiens
  misc_RNA (1)...(19): siRNA sense strand
ggacgagaccuaccgaaaa

SEQ ID NO: 1546483 - RNA, 19 nt, Homo sapiens
  misc_RNA (1)...(19): siRNA sense strand
ccaagaaggaagcagauuc

SEQ ID NO: 1546484 - RNA, 19 nt, Homo sapiens
  misc_RNA (1)...(19): siRNA sense strand
ggugaacuccaucgcugua

SEQ ID NO: 1546485 - RNA, 19 nt, Homo sapiens
  misc_RNA (1)...(19): siRNA sense strand
gcgaaugcccuugcacgaa

SEQ ID NO: 1546486 - RNA, 19 nt, Homo sapiens
  misc_RNA (1)...(19): siRNA sense strand
agaauguccugcugguuca

SEQ ID NO: 1546487 - RNA, 19 nt, Homo sapiens
  misc_RNA (1)...(19): siRNA sense strand
guauucacucgacacauaa

SEQ ID NO: 1546488 - RNA, 19 nt, Homo sapiens
  misc_RNA (1)...(19): siRNA sense strand
uucgacaaguucuggaaua

SEQ ID NO: 1546489 - RNA, 19 nt, Homo sapiens
  misc_RNA (1)...(19): siRNA sense strand
ucacucgacacauaaauca

SEQ ID NO: 1546490 - RNA, 19 nt, Homo sapiens
  misc_RNA (1)...(19): siRNA sense strand
guugaagauuccacucugu

SEQ ID NO: 1546491 - RNA, 19 nt, Homo sapiens
  misc_RNA (1)...(19): siRNA sense strand
ucgacaaguucuggaauau

SEQ ID NO: 1546492 - RNA, 19 nt, Homo sapiens
  misc_RNA (1)...(19): siRNA sense strand
gacucucacuaggcuauuu

SEQ ID NO: 1546493 - RNA, 19 nt, Homo sapiens
  misc_RNA (1)...(19): siRNA sense strand
cuucaagauuccuccaaga

SEQ ID NO: 1546494 - RNA, 19 nt, Homo sapiens
  misc_RNA (1)...(19): siRNA sense strand
gcgaaagcccaaaguggau

SEQ ID NO: 1546495 - RNA, 19 nt, Homo sapiens
  misc_RNA (1)...(19): siRNA sense strand
auauggcacuuacugaugu

SEQ ID NO: 1546496 - RNA, 19 nt, Homo sapiens
  misc_RNA (1)...(19): siRNA sense strand
agucugcaguugaagauuc

SEQ ID NO: 1546497 - RNA, 19 nt, Homo sapiens
  misc_RNA (1)...(19): siRNA sense strand
caggcuuccuuguugcauu

SEQ ID NO: 1546498 - RNA, 19 nt, Homo sapiens
  misc_RNA (1)...(19): siRNA sense strand
caugguggccaaagaggaa

SEQ ID NO: 1546499 - RNA, 19 nt, Homo sapiens
  misc_RNA (1)...(19): siRNA sense strand
agaggccagucccguaaga

SEQ ID NO: 1546500 - RNA, 19 nt, Homo sapiens
  misc_RNA (1)...(19): siRNA sense strand
ugaacuccaucgcuguauc

SEQ ID NO: 1546501 - RNA, 19 nt, Homo sapiens
  misc_RNA (1)...(19): siRNA sense strand
cgacaaguucuggaauaug

SEQ ID NO: 1546502 - RNA, 19 nt, Homo sapiens
  misc_RNA (1)...(19): siRNA sense strand
gcauaugaacgggauucuu

SEQ ID NO: 1546503 - RNA, 19 nt, Homo sapiens
  misc_RNA (1)...(19): siRNA sense strand
cgaaagcccaaaguggauu

SEQ ID NO: 1546504 - RNA, 19 nt, Homo sapiens
  misc_RNA (1)...(19): siRNA sense strand
ucaagauuccuccaagaag

SEQ ID NO: 1546505 - RNA, 19 nt, Homo sapiens
  misc_RNA (1)...(19): siRNA sense strand
gggaggaguccaggucaga

SEQ ID NO: 1546506 - RNA, 19 nt, Homo sapiens
  misc_RNA (1)...(19): siRNA sense strand
uaagucugcaguugaagau

SEQ ID NO: 1546507 - RNA, 19 nt, Homo sapiens
  misc_RNA (1)...(19): siRNA sense strand
aauauggcacuuacugaug

SEQ ID NO: 1546508 - RNA, 19 nt, Homo sapiens
  misc_RNA (1)...(19): siRNA sense strand
gagcugucagggaggacua

SEQ ID NO: 1546509 - RNA, 19 nt, Homo sapiens
  misc_RNA (1)...(19): siRNA sense strand
acucacagacauccacuug

SEQ ID NO: 1546510 - RNA, 19 nt, Homo sapiens
  misc_RNA (1)...(19): siRNA sense strand
cuaagucugcaguugaaga

SEQ ID NO: 1546511 - RNA, 19 nt, Homo sapiens
  misc_RNA (1)...(19): siRNA sense strand
gaacgcggcuuucugguuu

SEQ ID NO: 1546512 - RNA, 19 nt, Homo sapiens
  misc_RNA (1)...(19): siRNA sense strand
gcagagagagagacaauua

SEQ ID NO: 1546513 - RNA, 19 nt, Homo sapiens
  misc_RNA (1)...(19): siRNA sense strand
ggaaggcucugaagaccua

SEQ ID NO: 1546514 - RNA, 19 nt, Homo sapiens
  misc_RNA (1)...(19): siRNA sense strand
gccaagacccgacgcauua

SEQ ID NO: 1546515 - RNA, 19 nt, Homo sapiens
  misc_RNA (1)...(19): siRNA sense strand
ccagagaccuuccagacuu

SEQ ID NO: 1546516 - RNA, 19 nt, Homo sapiens
  misc_RNA (1)...(19): siRNA sense strand
gauccaaccucaccagcaa

SEQ ID NO: 1546517 - RNA, 19 nt, Homo sapiens
  misc_RNA (1)...(19): siRNA sense strand
gagcauaugugcggcugaa

SEQ ID NO: 1546518 - RNA, 19 nt, Homo sapiens
  misc_RNA (1)...(19): siRNA sense strand
agacuucccuuccauuaau

SEQ ID NO: 1546519 - RNA, 19 nt, Homo sapiens
  misc_RNA (1)...(19): siRNA sense strand
ggagcuugcugccuucugu

SEQ ID NO: 1546520 - RNA, 19 nt, Homo sapiens
  misc_RNA (1)...(19): siRNA sense strand
ccagacuucccuuccauua

SEQ ID NO: 1546521 - RNA, 19 nt, Homo sapiens
  misc_RNA (1)...(19): siRNA sense strand
ugacaucucuucgucuugu

SEQ ID NO: 1546522 - RNA, 19 nt, Homo sapiens
  misc_RNA (1)...(19): siRNA sense strand
gcuggacgauucuacuguu

SEQ ID NO: 1546523 - RNA, 19 nt, Homo sapiens
  misc_RNA (1)...(19): siRNA sense strand
gcugaagucuggguuagug

SEQ ID NO: 1546524 - RNA, 19 nt, Homo sapiens
  misc_RNA (1)...(19): siRNA sense strand
gaugaucauuguguguauu

SEQ ID NO: 1546525 - RNA, 19 nt, Homo sapiens
  misc_RNA (1)...(19): siRNA sense strand
gcuugucacugucaugaug

SEQ ID NO: 1546526 - RNA, 19 nt, Homo sapiens
  misc_RNA (1)...(19): siRNA sense strand
caaaaucuggccugaaaua

SEQ ID NO: 1546527 - RNA, 19 nt, Homo sapiens
  misc_RNA (1)...(19): siRNA sense strand
gcuuggugcucuuccugua

SEQ ID NO: 1546528 - RNA, 19 nt, Homo sapiens
  misc_RNA (1)...(19): siRNA sense strand
gcugaagucuccuguacag

SEQ ID NO: 1546529 - RNA, 19 nt, Homo sapiens
  misc_RNA (1)...(19): siRNA sense strand
gacuucccuuccauuaaua

SEQ ID NO: 1546530 - RNA, 19 nt, Homo sapiens
  misc_RNA (1)...(19): siRNA sense strand
uaacggaaggcucugaaga

SEQ ID NO: 1546531 - RNA, 19 nt, Homo sapiens
  misc_RNA (1)...(19): siRNA sense strand
cugcuggccuggaugauga

SEQ ID NO: 1546532 - RNA, 19 nt, Homo sapiens
  misc_RNA (1)...(19): siRNA sense strand
aaaucuggccugaaauaaa

SEQ ID NO: 1546533 - RNA, 19 nt, Homo sapiens
  misc_RNA (1)...(19): siRNA sense strand
gaggacgacacuagcauug

SEQ ID NO: 1546534 - RNA, 19 nt, Homo sapiens
  misc_RNA (1)...(19): siRNA sense strand
gggaugacuuugaacuucu

SEQ ID NO: 1546535 - RNA, 19 nt, Homo sapiens
  misc_RNA (1)...(19): siRNA sense strand
gggaauuggccaucacaga

SEQ ID NO: 1546536 - RNA, 19 nt, Homo sapiens
  misc_RNA (1)...(19): siRNA sense strand
aaucuggccugaaauaaaa

SEQ ID NO: 1546537 - RNA, 19 nt, Homo sapiens
  misc_RNA (1)...(19): siRNA sense strand
aacaaaaucuggccugaaa

SEQ ID NO: 1546538 - RNA, 19 nt, Homo sapiens
  misc_RNA (1)...(19): siRNA sense strand
ccugacaucucuucgucuu

SEQ ID NO: 1546539 - RNA, 19 nt, Homo sapiens
  misc_RNA (1)...(19): siRNA sense strand
gcacauucaaucuuucaag

SEQ ID NO: 1546540 - RNA, 19 nt, Homo sapiens
  misc_RNA (1)...(19): siRNA sense strand
gcugugggauacugaccuu

SEQ ID NO: 1546541 - RNA, 19 nt, Homo sapiens
  misc_RNA (1)...(19): siRNA sense strand
uggagcaccugcccagaga

SEQ ID NO: 1546542 - RNA, 19 nt, Homo sapiens
  misc_RNA (1)...(19): siRNA sense strand
ugauucagcuggccuuguc

SEQ ID NO: 1546543 - RNA, 19 nt, Homo sapiens
  misc_RNA (1)...(19): siRNA sense strand
cagagaccuuccagacuuc

SEQ ID NO: 1546544 - RNA, 19 nt, Homo sapiens
  misc_RNA (1)...(19): siRNA sense strand
guagcugaagucuggguua

SEQ ID NO: 1546545 - RNA, 19 nt, Homo sapiens
  misc_RNA (1)...(19): siRNA sense strand
ggaugacuuugaacuucug

SEQ ID NO: 1546546 - RNA, 19 nt, Homo sapiens
  misc_RNA (1)...(19): siRNA sense strand
cagacuucccuuccauuaa

SEQ ID NO: 1546547 - RNA, 19 nt, Homo sapiens
  misc_RNA (1)...(19): siRNA sense strand
uuacuugcauuuggcuuga

SEQ ID NO: 1546548 - RNA, 19 nt, Homo sapiens
  misc_RNA (1)...(19): siRNA sense strand
gcaaaacccaggcaaguuc

SEQ ID NO: 1546549 - RNA, 19 nt, Homo sapiens
  misc_RNA (1)...(19): siRNA sense strand
acugugggaucgagcauau

SEQ ID NO: 1546550 - RNA, 19 nt, Homo sapiens
  misc_RNA (1)...(19): siRNA sense strand
cuucugcuguccuacuuga

SEQ ID NO: 1546551 - RNA, 19 nt, Homo sapiens
  misc_RNA (1)...(19): siRNA sense strand
gcaccugcccagagagcaa

SEQ ID NO: 1546552 - RNA, 19 nt, Homo sapiens
  misc_RNA (1)...(19): siRNA sense strand
cauaaggaauguuuugcuu

SEQ ID NO: 1546553 - RNA, 19 nt, Homo sapiens
  misc_RNA (1)...(19): siRNA sense strand
caaccucaccagcaaccuu

SEQ ID NO: 1546554 - RNA, 19 nt, Homo sapiens
  misc_RNA (1)...(19): siRNA sense strand
ugaacgcggcuuucugguu

SEQ ID NO: 1546555 - RNA, 19 nt, Homo sapiens
  misc_RNA (1)...(19): siRNA sense strand
gcugagcugugggauacug

SEQ ID NO: 1546556 - RNA, 19 nt, Homo sapiens
  misc_RNA (1)...(19): siRNA sense strand
uagcugaagucuggguuag

SEQ ID NO: 1546557 - RNA, 19 nt, Homo sapiens
  misc_RNA (1)...(19): siRNA sense strand
gaauuggccaucacagacu

SEQ ID NO: 1546558 - RNA, 19 nt, Homo sapiens
  misc_RNA (1)...(19): siRNA sense strand
ccauggacaaccacaguga

SEQ ID NO: 1546559 - RNA, 19 nt, Homo sapiens
  misc_RNA (1)...(19): siRNA sense strand
gaugaggacgacacuagca

SEQ ID NO: 1546560 - RNA, 19 nt, Homo sapiens
  misc_RNA (1)...(19): siRNA sense strand
caagacccgacgcauuaga

SEQ ID NO: 1546561 - RNA, 19 nt, Homo sapiens
  misc_RNA (1)...(19): siRNA sense strand
gcaugcccagcuugaugua

SEQ ID NO: 1546562 - RNA, 19 nt, Homo sapiens
  misc_RNA (1)...(19): siRNA sense strand
uugcugagcugugggauac

SEQ ID NO: 1546563 - RNA, 19 nt, Homo sapiens
  misc_RNA (1)...(19): siRNA sense strand
cgagcucugccaccaugua

SEQ ID NO: 1546564 - RNA, 19 nt, Homo sapiens
  misc_RNA (1)...(19): siRNA sense strand
gaacaaaaucuggccugaa

SEQ ID NO: 1546565 - RNA, 19 nt, Homo sapiens
  misc_RNA (1)...(19): siRNA sense strand
uuacgagccucugcugagu

SEQ ID NO: 1546566 - RNA, 19 nt, Homo sapiens
  misc_RNA (1)...(19): siRNA sense strand
acgcugaagucuccuguac

SEQ ID NO: 1546567 - RNA, 19 nt, Homo sapiens
  misc_RNA (1)...(19): siRNA sense strand
aagcagagagagagacaau

SEQ ID NO: 1546568 - RNA, 19 nt, Homo sapiens
  misc_RNA (1)...(19): siRNA sense strand
caguguccguggcuacaug

SEQ ID NO: 1546569 - RNA, 19 nt, Homo sapiens
  misc_RNA (1)...(19): siRNA sense strand
ggaauguuuugcuuuucaa

SEQ ID NO: 1546570 - RNA, 19 nt, Homo sapiens
  misc_RNA (1)...(19): siRNA sense strand
gagcucugccaccauguag

SEQ ID NO: 1546571 - RNA, 19 nt, Homo sapiens
  misc_RNA (1)...(19): siRNA sense strand
ugaggacgacacuagcauu

SEQ ID NO: 1546572 - RNA, 19 nt, Homo sapiens
  misc_RNA (1)...(19): siRNA sense strand
gaaauaaaagugccaagac

SEQ ID NO: 1546573 - RNA, 19 nt, Homo sapiens
  misc_RNA (1)...(19): siRNA sense strand
cauuguguguauugaucaa

SEQ ID NO: 1546574 - RNA, 19 nt, Homo sapiens
  misc_RNA (1)...(19): siRNA sense strand
ggggaugacuuugaacuuc

SEQ ID NO: 1546575 - RNA, 19 nt, Homo sapiens
  misc_RNA (1)...(19): siRNA sense strand
acagugauccagaggaauc

SEQ ID NO: 1546576 - RNA, 19 nt, Homo sapiens
  misc_RNA (1)...(19): siRNA sense strand
gaaggaaucucauuugaua

SEQ ID NO: 1546577 - RNA, 19 nt, Homo sapiens
  misc_RNA (1)...(19): siRNA sense strand
gaaauaggaccaacacauu

SEQ ID NO: 1546578 - RNA, 19 nt, Homo sapiens
  misc_RNA (1)...(19): siRNA sense strand
gaacugagcaagugauaga

SEQ ID NO: 1546579 - RNA, 19 nt, Homo sapiens
  misc_RNA (1)...(19): siRNA sense strand
gaagaaggaaucucauuug

SEQ ID NO: 1546580 - RNA, 19 nt, Homo sapiens
  misc_RNA (1)...(19): siRNA sense strand
agacauggauccuuuaguu

SEQ ID NO: 1546581 - RNA, 19 nt, Homo sapiens
  misc_RNA (1)...(19): siRNA sense strand
ggaagaaggaaucucauuu

SEQ ID NO: 1546582 - RNA, 19 nt, Homo sapiens
  misc_RNA (1)...(19): siRNA sense strand
gauaggaacugagcaagug

SEQ ID NO: 1546583 - RNA, 19 nt, Homo sapiens
  misc_RNA (1)...(19): siRNA sense strand
ggaagaaauugugauagga

SEQ ID NO: 1546584 - RNA, 19 nt, Homo sapiens
  misc_RNA (1)...(19): siRNA sense strand
gagguuggaucaagaacaa

SEQ ID NO: 1546585 - RNA, 19 nt, Homo sapiens
  misc_RNA (1)...(19): siRNA sense strand
gaagaaauugugauaggaa

SEQ ID NO: 1546586 - RNA, 19 nt, Homo sapiens
  misc_RNA (1)...(19): siRNA sense strand
ccucagacauggauccuuu

SEQ ID NO: 1546587 - RNA, 19 nt, Homo sapiens
  misc_RNA (1)...(19): siRNA sense strand
gagaaguuauggcugaaau

SEQ ID NO: 1546588 - RNA, 19 nt, Homo sapiens
  misc_RNA (1)...(19): siRNA sense strand
gggaagaaauugugauagg

SEQ ID NO: 1546589 - RNA, 19 nt, Homo sapiens
  misc_RNA (1)...(19): siRNA sense strand
ggaagaggccuuuaaugca

SEQ ID NO: 1546590 - RNA, 19 nt, Homo sapiens
  misc_RNA (1)...(19): siRNA sense strand
aagaaggaaucucauuuga

SEQ ID NO: 1546591 - RNA, 19 nt, Homo sapiens
  misc_RNA (1)...(19): siRNA sense strand
ggacuggaauaucuuugau

SEQ ID NO: 1546592 - RNA, 19 nt, Homo sapiens
  misc_RNA (1)...(19): siRNA sense strand
ugauagagguugucaaguc

SEQ ID NO: 1546593 - RNA, 19 nt, Homo sapiens
  misc_RNA (1)...(19): siRNA sense strand
ugaagagguuggaucaaga

SEQ ID NO: 1546594 - RNA, 19 nt, Homo sapiens
  misc_RNA (1)...(19): siRNA sense strand
gaagagguuggaucaagaa

SEQ ID NO: 1546595 - RNA, 19 nt, Homo sapiens
  misc_RNA (1)...(19): siRNA sense strand
gauagagguugucaagucu

SEQ ID NO: 1546596 - RNA, 19 nt, Homo sapiens
  misc_RNA (1)...(19): siRNA sense strand
gcauucagaccgagauaaa

SEQ ID NO: 1546597 - RNA, 19 nt, Homo sapiens
  misc_RNA (1)...(19): siRNA sense strand
ggccuuuaaugcacgaaua

SEQ ID NO: 1546598 - RNA, 19 nt, Homo sapiens
  misc_RNA (1)...(19): siRNA sense strand
cuagcuaugucacuucaaa

SEQ ID NO: 1546599 - RNA, 19 nt, Homo sapiens
  misc_RNA (1)...(19): siRNA sense strand
gaaguuauggcugaaauag

SEQ ID NO: 1546600 - RNA, 19 nt, Homo sapiens
  misc_RNA (1)...(19): siRNA sense strand
auacggaaaugaagagguu

SEQ ID NO: 1546601 - RNA, 19 nt, Homo sapiens
  misc_RNA (1)...(19): siRNA sense strand
ggaccaacacauucgcaaa

SEQ ID NO: 1546602 - RNA, 19 nt, Homo sapiens
  misc_RNA (1)...(19): siRNA sense strand
cagcuuauuucaacacuac

SEQ ID NO: 1546603 - RNA, 19 nt, Homo sapiens
  misc_RNA (1)...(19): siRNA sense strand
aguuauggcugaaauagga

SEQ ID NO: 1546604 - RNA, 19 nt, Homo sapiens
  misc_RNA (1)...(19): siRNA sense strand
uggaucaagucacagauga

SEQ ID NO: 1546605 - RNA, 19 nt, Homo sapiens
  misc_RNA (1)...(19): siRNA sense strand
aaucagugcuggaucaagu

SEQ ID NO: 1546606 - RNA, 19 nt, Homo sapiens
  misc_RNA (1)...(19): siRNA sense strand
cagggaagaaauugugaua

SEQ ID NO: 1546607 - RNA, 19 nt, Homo sapiens
  misc_RNA (1)...(19): siRNA sense strand
acuacaagcuauacgaguu

SEQ ID NO: 1546608 - RNA, 19 nt, Homo sapiens
  misc_RNA (1)...(19): siRNA sense strand
gcuauacgaguuuauguuc

SEQ ID NO: 1546609 - RNA, 19 nt, Homo sapiens
  misc_RNA (1)...(19): siRNA sense strand
uaaaaucagugcuggauca

SEQ ID NO: 1546610 - RNA, 19 nt, Homo sapiens
  misc_RNA (1)...(19): siRNA sense strand
uacaagcuauacgaguuua

SEQ ID NO: 1546611 - RNA, 19 nt, Homo sapiens
  misc_RNA (1)...(19): siRNA sense strand
ggauuucucuauuauucag

SEQ ID NO: 1546612 - RNA, 19 nt, Homo sapiens
  misc_RNA (1)...(19): siRNA sense strand
ugaaauaggaccaacacau

SEQ ID NO: 1546613 - RNA, 19 nt, Homo sapiens
  misc_RNA (1)...(19): siRNA sense strand
uaaaauggcuuggagaagu

SEQ ID NO: 1546614 - RNA, 19 nt, Homo sapiens
  misc_RNA (1)...(19): siRNA sense strand
gaaauugugauaggaacug

SEQ ID NO: 1546615 - RNA, 19 nt, Homo sapiens
  misc_RNA (1)...(19): siRNA sense strand
uuucaacacuacaagcuau

SEQ ID NO: 1546616 - RNA, 19 nt, Homo sapiens
  misc_RNA (1)...(19): siRNA sense strand
cuacaagcuauacgaguuu

SEQ ID NO: 1546617 - RNA, 19 nt, Homo sapiens
  misc_RNA (1)...(19): siRNA sense strand
agugaggacuggaauaucu

SEQ ID NO: 1546618 - RNA, 19 nt, Homo sapiens
  misc_RNA (1)...(19): siRNA sense strand
gacauggauccuuuaguug

SEQ ID NO: 1546619 - RNA, 19 nt, Homo sapiens
  misc_RNA (1)...(19): siRNA sense strand
aauauuggauacggaaaug

SEQ ID NO: 1546620 - RNA, 19 nt, Homo sapiens
  misc_RNA (1)...(19): siRNA sense strand
acuggaauaucuuugaugu

SEQ ID NO: 1546621 - RNA, 19 nt, Homo sapiens
  misc_RNA (1)...(19): siRNA sense strand
ucccaaauccucuggaaga

SEQ ID NO: 1546622 - RNA, 19 nt, Homo sapiens
  misc_RNA (1)...(19): siRNA sense strand
cacuacauauguccuuaga

SEQ ID NO: 1546623 - RNA, 19 nt, Homo sapiens
  misc_RNA (1)...(19): siRNA sense strand
aaaugaagagguuggauca

SEQ ID NO: 1546624 - RNA, 19 nt, Homo sapiens
  misc_RNA (1)...(19): siRNA sense strand
ggagaaguuauggcugaaa

SEQ ID NO: 1546625 - RNA, 19 nt, Homo sapiens
  misc_RNA (1)...(19): siRNA sense strand
ugacuuuacuagcuauguc

SEQ ID NO: 1546626 - RNA, 19 nt, Homo sapiens
  misc_RNA (1)...(19): siRNA sense strand
aaacaagccaaugcuauca

SEQ ID NO: 1546627 - RNA, 19 nt, Homo sapiens
  misc_RNA (1)...(19): siRNA sense strand
aaauaggaccaacacauuc

SEQ ID NO: 1546628 - RNA, 19 nt, Homo sapiens
  misc_RNA (1)...(19): siRNA sense strand
caagcuauacgaguuuaug

SEQ ID NO: 1546629 - RNA, 19 nt, Homo sapiens
  misc_RNA (1)...(19): siRNA sense strand
caauauuggauacggaaau

SEQ ID NO: 1546630 - RNA, 19 nt, Homo sapiens
  misc_RNA (1)...(19): siRNA sense strand
cccaaauccucuggaagaa

SEQ ID NO: 1546631 - RNA, 19 nt, Homo sapiens
  misc_RNA (1)...(19): siRNA sense strand
cauguggcccuuucccaaa

SEQ ID NO: 1546632 - RNA, 19 nt, Homo sapiens
  misc_RNA (1)...(19): siRNA sense strand
agaaguuauggcugaaaua

SEQ ID NO: 1546633 - RNA, 19 nt, Homo sapiens
  misc_RNA (1)...(19): siRNA sense strand
uacaggaagaggccuuuaa

SEQ ID NO: 1546634 - RNA, 19 nt, Homo sapiens
  misc_RNA (1)...(19): siRNA sense strand
aacacuacauauguccuua

SEQ ID NO: 1546635 - RNA, 19 nt, Homo sapiens
  misc_RNA (1)...(19): siRNA sense strand
agaccgagauaaacgaaaa

SEQ ID NO: 1546636 - RNA, 19 nt, Homo sapiens
  misc_RNA (1)...(19): siRNA sense strand
caggaagaggccuuuaaug

SEQ ID NO: 1546637 - RNA, 19 nt, Homo sapiens
  misc_RNA (1)...(19): siRNA sense strand
acaggaagaggccuuuaau

SEQ ID NO: 1546638 - RNA, 19 nt, Homo sapiens
  misc_RNA (1)...(19): siRNA sense strand
agagugaggacuggaauau

SEQ ID NO: 1546639 - RNA, 19 nt, Homo sapiens
  misc_RNA (1)...(19): siRNA sense strand
aaaauggcuuggagaaguu

SEQ ID NO: 1546640 - RNA, 19 nt, Homo sapiens
  misc_RNA (1)...(19): siRNA sense strand
uggaagaaggaaucucauu

SEQ ID NO: 1546641 - RNA, 19 nt, Homo sapiens
  misc_RNA (1)...(19): siRNA sense strand
ucagcuuauuucaacacua

SEQ ID NO: 1546642 - RNA, 19 nt, Homo sapiens
  misc_RNA (1)...(19): siRNA sense strand
aggaagaggccuuuaaugc

SEQ ID NO: 1546643 - RNA, 19 nt, Homo sapiens
  misc_RNA (1)...(19): siRNA sense strand
ugaggacuggaauaucuuu

SEQ ID NO: 1546644 - RNA, 19 nt, Homo sapiens
  misc_RNA (1)...(19): siRNA sense strand
cauggauccuuuaguuggu

SEQ ID NO: 1546645 - RNA, 19 nt, Homo sapiens
  misc_RNA (1)...(19): siRNA sense strand
agaaggaaucucauuugau

SEQ ID NO: 1546646 - RNA, 19 nt, Homo sapiens
  misc_RNA (1)...(19): siRNA sense strand
aaauugugauaggaacuga

SEQ ID NO: 1546647 - RNA, 19 nt, Homo sapiens
  misc_RNA (1)...(19): siRNA sense strand
uaaaacaagccaaugcuau

SEQ ID NO: 1546648 - RNA, 19 nt, Homo sapiens
  misc_RNA (1)...(19): siRNA sense strand
gaccaacacauucgcaaaa

SEQ ID NO: 1546649 - RNA, 19 nt, Homo sapiens
  misc_RNA (1)...(19): siRNA sense strand
acaaggcccugaggagucu

SEQ ID NO: 1546650 - RNA, 19 nt, Homo sapiens
  misc_RNA (1)...(19): siRNA sense strand
aaacacuacauauguccuu

SEQ ID NO: 1546651 - RNA, 19 nt, Homo sapiens
  misc_RNA (1)...(19): siRNA sense strand
uauuggauacggaaaugaa

SEQ ID NO: 1546652 - RNA, 19 nt, Homo sapiens
  misc_RNA (1)...(19): siRNA sense strand
guaaaacaagccaaugcua

SEQ ID NO: 1546653 - RNA, 19 nt, Homo sapiens
  misc_RNA (1)...(19): siRNA sense strand
ggaaaugaagagguuggau

SEQ ID NO: 1546654 - RNA, 19 nt, Homo sapiens
  misc_RNA (1)...(19): siRNA sense strand
augaagagguuggaucaag

SEQ ID NO: 1546655 - RNA, 19 nt, Homo sapiens
  misc_RNA (1)...(19): siRNA sense strand
ugacaccucagacauggau

SEQ ID NO: 1546656 - RNA, 19 nt, Homo sapiens
  misc_RNA (1)...(19): siRNA sense strand
agacacagcaggaggaaga

SEQ ID NO: 1546657 - RNA, 19 nt, Homo sapiens
  misc_RNA (1)...(19): siRNA sense strand
ggaagaugaggaugagguu

SEQ ID NO: 1546658 - RNA, 19 nt, Homo sapiens
  misc_RNA (1)...(19): siRNA sense strand
ggacccaggugaccaugac

SEQ ID NO: 1546659 - RNA, 19 nt, Homo sapiens
  misc_RNA (1)...(19): siRNA sense strand
cgaggaagaugaggaugag

SEQ ID NO: 1546660 - RNA, 19 nt, Homo sapiens
  misc_RNA (1)...(19): siRNA sense strand
gaagaggaggagaccaaca

SEQ ID NO: 1546661 - RNA, 19 nt, Homo sapiens
  misc_RNA (1)...(19): siRNA sense strand
aagaugaggaugagguuga

SEQ ID NO: 1546662 - RNA, 19 nt, Homo sapiens
  misc_RNA (1)...(19): siRNA sense strand
gaccugcacaacccucauu

SEQ ID NO: 1546663 - RNA, 19 nt, Homo sapiens
  misc_RNA (1)...(19): siRNA sense strand
gcagacacagcaggaggaa

SEQ ID NO: 1546664 - RNA, 19 nt, Homo sapiens
  misc_RNA (1)...(19): siRNA sense strand
cgacgaggaagaugaggau

SEQ ID NO: 1546665 - RNA, 19 nt, Homo sapiens
  misc_RNA (1)...(19): siRNA sense strand
agaugaggaugagguugaa

SEQ ID NO: 1546666 - RNA, 19 nt, Homo sapiens
  misc_RNA (1)...(19): siRNA sense strand
gagugcugcugcggugcua

SEQ ID NO: 1546667 - RNA, 19 nt, Homo sapiens
  misc_RNA (1)...(19): siRNA sense strand
ugacuacgacgaggaagau

SEQ ID NO: 1546668 - RNA, 19 nt, Homo sapiens
  misc_RNA (1)...(19): siRNA sense strand
ccacgggccagaugacuac

SEQ ID NO: 1546669 - RNA, 19 nt, Homo sapiens
  misc_RNA (1)...(19): siRNA sense strand
gaaggaaguugaagaauua

SEQ ID NO: 1546670 - RNA, 19 nt, Homo sapiens
  misc_RNA (1)...(19): siRNA sense strand
gaagauagauaaagaggaa

SEQ ID NO: 1546671 - RNA, 19 nt, Homo sapiens
  misc_RNA (1)...(19): siRNA sense strand
ggaaggaaguugaagaauu

SEQ ID NO: 1546672 - RNA, 19 nt, Homo sapiens
  misc_RNA (1)...(19): siRNA sense strand
ugaaagaaauagccgcuua

SEQ ID NO: 1546673 - RNA, 19 nt, Homo sapiens
  misc_RNA (1)...(19): siRNA sense strand
gcagagggauugccaguug

SEQ ID NO: 1546674 - RNA, 19 nt, Homo sapiens
  misc_RNA (1)...(19): siRNA sense strand
gaacagauuuggcacauac

SEQ ID NO: 1546675 - RNA, 19 nt, Homo sapiens
  misc_RNA (1)...(19): siRNA sense strand
gauaugcgcaugcaaauaa

SEQ ID NO: 1546676 - RNA, 19 nt, Homo sapiens
  misc_RNA (1)...(19): siRNA sense strand
gaucaacuauccaacugua

SEQ ID NO: 1546677 - RNA, 19 nt, Homo sapiens
  misc_RNA (1)...(19): siRNA sense strand
agaaggauuucaaggauua

SEQ ID NO: 1546678 - RNA, 19 nt, Homo sapiens
  misc_RNA (1)...(19): siRNA sense strand
ggaagauacuagaaagaaa

SEQ ID NO: 1546679 - RNA, 19 nt, Homo sapiens
  misc_RNA (1)...(19): siRNA sense strand
gaaagccacaucacauaua

SEQ ID NO: 1546680 - RNA, 19 nt, Homo sapiens
  misc_RNA (1)...(19): siRNA sense strand
uaaagagaaugcagagaaa

SEQ ID NO: 1546681 - RNA, 19 nt, Homo sapiens
  misc_RNA (1)...(19): siRNA sense strand
gagugaagcuuaugagugu

SEQ ID NO: 1546682 - RNA, 19 nt, Homo sapiens
  misc_RNA (1)...(19): siRNA sense strand
gcacauacggcaucuacua

SEQ ID NO: 1546683 - RNA, 19 nt, Homo sapiens
  misc_RNA (1)...(19): siRNA sense strand
gaagaucuccaguauguga

SEQ ID NO: 1546684 - RNA, 19 nt, Homo sapiens
  misc_RNA (1)...(19): siRNA sense strand
uaaaggaacugagugaaga

SEQ ID NO: 1546685 - RNA, 19 nt, Homo sapiens
  misc_RNA (1)...(19): siRNA sense strand
caucgaagaucuccaguau

SEQ ID NO: 1546686 - RNA, 19 nt, Homo sapiens
  misc_RNA (1)...(19): siRNA sense strand
agaaaugucuuuggaauug

SEQ ID NO: 1546687 - RNA, 19 nt, Homo sapiens
  misc_RNA (1)...(19): siRNA sense strand
caacacaguuaaagagaau

SEQ ID NO: 1546688 - RNA, 19 nt, Homo sapiens
  misc_RNA (1)...(19): siRNA sense strand
cauauaagaugaugaaguc

SEQ ID NO: 1546689 - RNA, 19 nt, Homo sapiens
  misc_RNA (1)...(19): siRNA sense strand
ucgaagaucuccaguaugu

SEQ ID NO: 1546690 - RNA, 19 nt, Homo sapiens
  misc_RNA (1)...(19): siRNA sense strand
gagaaggauuucaaggauu

SEQ ID NO: 1546691 - RNA, 19 nt, Homo sapiens
  misc_RNA (1)...(19): siRNA sense strand
gaaagaaauagccgcuuaa

SEQ ID NO: 1546692 - RNA, 19 nt, Homo sapiens
  misc_RNA (1)...(19): siRNA sense strand
gaugaagucuuuucucuaa

SEQ ID NO: 1546693 - RNA, 19 nt, Homo sapiens
  misc_RNA (1)...(19): siRNA sense strand
ggaaucaugucuaaucucu

SEQ ID NO: 1546694 - RNA, 19 nt, Homo sapiens
  misc_RNA (1)...(19): siRNA sense strand
ccacagaaguagaaaguag

SEQ ID NO: 1546695 - RNA, 19 nt, Homo sapiens
  misc_RNA (1)...(19): siRNA sense strand
caaggaaacuuuguugcaa

SEQ ID NO: 1546696 - RNA, 19 nt, Homo sapiens
  misc_RNA (1)...(19): siRNA sense strand
aaagccacaucacauauaa

SEQ ID NO: 1546697 - RNA, 19 nt, Homo sapiens
  misc_RNA (1)...(19): siRNA sense strand
gaagagaagucagaauugc

SEQ ID NO: 1546698 - RNA, 19 nt, Homo sapiens
  misc_RNA (1)...(19): siRNA sense strand
acacugauaugaaguacuu

SEQ ID NO: 1546699 - RNA, 19 nt, Homo sapiens
  misc_RNA (1)...(19): siRNA sense strand
gaaauuaaacugccuacca

SEQ ID NO: 1546700 - RNA, 19 nt, Homo sapiens
  misc_RNA (1)...(19): siRNA sense strand
gagaaugacuggcucaaaa

SEQ ID NO: 1546701 - RNA, 19 nt, Homo sapiens
  misc_RNA (1)...(19): siRNA sense strand
caagagaggauguugaaga

SEQ ID NO: 1546702 - RNA, 19 nt, Homo sapiens
  misc_RNA (1)...(19): siRNA sense strand
agcacuaucuuacaucuua

SEQ ID NO: 1546703 - RNA, 19 nt, Homo sapiens
  misc_RNA (1)...(19): siRNA sense strand
ccaagcugcuggacuagaa

SEQ ID NO: 1546704 - RNA, 19 nt, Homo sapiens
  misc_RNA (1)...(19): siRNA sense strand
cagaaagccacaucacaua

SEQ ID NO: 1546705 - RNA, 19 nt, Homo sapiens
  misc_RNA (1)...(19): siRNA sense strand
gagcaauucauguuucaaa

SEQ ID NO: 1546706 - RNA, 19 nt, Homo sapiens
  misc_RNA (1)...(19): siRNA sense strand
caaauaaagacacuuagga

SEQ ID NO: 1546707 - RNA, 19 nt, Homo sapiens
  misc_RNA (1)...(19): siRNA sense strand
aagagaggauguugaagaa

SEQ ID NO: 1546708 - RNA, 19 nt, Homo sapiens
  misc_RNA (1)...(19): siRNA sense strand
cagucaaacucuauaaaga

SEQ ID NO: 1546709 - RNA, 19 nt, Homo sapiens
  misc_RNA (1)...(19): siRNA sense strand
ggaaugggccacacagaau

SEQ ID NO: 1546710 - RNA, 19 nt, Homo sapiens
  misc_RNA (1)...(19): siRNA sense strand
uaaacucauuaccuccuua

SEQ ID NO: 1546711 - RNA, 19 nt, Homo sapiens
  misc_RNA (1)...(19): siRNA sense strand
ggagugaacgacaugcuaa

SEQ ID NO: 1546712 - RNA, 19 nt, Homo sapiens
  misc_RNA (1)...(19): siRNA sense strand
gaagaagcgaugaaggaaa

SEQ ID NO: 1546713 - RNA, 19 nt, Homo sapiens
  misc_RNA (1)...(19): siRNA sense strand
ugagaaggauuucaaggau

SEQ ID NO: 1546714 - RNA, 19 nt, Homo sapiens
  misc_RNA (1)...(19): siRNA sense strand
uagaagagaagucagaauu

SEQ ID NO: 1546715 - RNA, 19 nt, Homo sapiens
  misc_RNA (1)...(19): siRNA sense strand
gaaaaugucagaacacuau

SEQ ID NO: 1546716 - RNA, 19 nt, Homo sapiens
  misc_RNA (1)...(19): siRNA sense strand
gcagaaaauuuggugcuua

SEQ ID NO: 1546717 - RNA, 19 nt, Homo sapiens
  misc_RNA (1)...(19): siRNA sense strand
cuagagaucugggagaaug

SEQ ID NO: 1546718 - RNA, 19 nt, Homo sapiens
  misc_RNA (1)...(19): siRNA sense strand
ggaacugagugaagagaag

SEQ ID NO: 1546719 - RNA, 19 nt, Homo sapiens
  misc_RNA (1)...(19): siRNA sense strand
cucauuaccuccuuacaaa

SEQ ID NO: 1546720 - RNA, 19 nt, Homo sapiens
  misc_RNA (1)...(19): siRNA sense strand
uacccaagcugcuggacua

SEQ ID NO: 1546721 - RNA, 19 nt, Homo sapiens
  misc_RNA (1)...(19): siRNA sense strand
gucaaacucuauaaagaug

SEQ ID NO: 1546722 - RNA, 19 nt, Homo sapiens
  misc_RNA (1)...(19): siRNA sense strand
ucaacacaguuaaagagaa

SEQ ID NO: 1546723 - RNA, 19 nt, Homo sapiens
  misc_RNA (1)...(19): siRNA sense strand
gaugagagcacuaucuuac

SEQ ID NO: 1546724 - RNA, 19 nt, Homo sapiens
  misc_RNA (1)...(19): siRNA sense strand
gccagaaacacauauagaa

SEQ ID NO: 1546725 - RNA, 19 nt, Homo sapiens
  misc_RNA (1)...(19): siRNA sense strand
gacaagggcaguuaucuag

SEQ ID NO: 1546726 - RNA, 19 nt, Homo sapiens
  misc_RNA (1)...(19): siRNA sense strand
cgacaugcuaaacucauua

SEQ ID NO: 1546727 - RNA, 19 nt, Homo sapiens
  misc_RNA (1)...(19): siRNA sense strand
cagaaacacauauagaaga

SEQ ID NO: 1546728 - RNA, 19 nt, Homo sapiens
  misc_RNA (1)...(19): siRNA sense strand
gaauugccagaaacacaua

SEQ ID NO: 1546729 - RNA, 19 nt, Homo sapiens
  misc_RNA (1)...(19): siRNA sense strand
cuguaaagcucauugacaa

SEQ ID NO: 1546730 - RNA, 19 nt, Homo sapiens
  misc_RNA (1)...(19): siRNA sense strand
uuaaagagaaugcagagaa

SEQ ID NO: 1546731 - RNA, 19 nt, Homo sapiens
  misc_RNA (1)...(19): siRNA sense strand
gaaacucagugaaaaggaa

SEQ ID NO: 1546732 - RNA, 19 nt, Homo sapiens
  misc_RNA (1)...(19): siRNA sense strand
gaaauuccagucaaacucu

SEQ ID NO: 1546733 - RNA, 19 nt, Homo sapiens
  misc_RNA (1)...(19): siRNA sense strand
gaaauagccgcuuaaaaga

SEQ ID NO: 1546734 - RNA, 19 nt, Homo sapiens
  misc_RNA (1)...(19): siRNA sense strand
caagggcaguuaucuagag

SEQ ID NO: 1546735 - RNA, 19 nt, Homo sapiens
  misc_RNA (1)...(19): siRNA sense strand
aauggaaguuugaaagaga

SEQ ID NO: 1546736 - RNA, 19 nt, Homo sapiens
  misc_RNA (1)...(19): siRNA sense strand
ggauuucaaggauuaugua

SEQ ID NO: 1546737 - RNA, 19 nt, Homo sapiens
  misc_RNA (1)...(19): siRNA sense strand
ugagagcacuaucuuacau

SEQ ID NO: 1546738 - RNA, 19 nt, Homo sapiens
  misc_RNA (1)...(19): siRNA sense strand
gaagugccaccugaagaaa

SEQ ID NO: 1546739 - RNA, 19 nt, Homo sapiens
  misc_RNA (1)...(19): siRNA sense strand
gaacgacaugcuaaacuca

SEQ ID NO: 1546740 - RNA, 19 nt, Homo sapiens
  misc_RNA (1)...(19): siRNA sense strand
gaaaauagcaucgaagauc

SEQ ID NO: 1546741 - RNA, 19 nt, Homo sapiens
  misc_RNA (1)...(19): siRNA sense strand
ugacaucaacacaguuaaa

SEQ ID NO: 1546742 - RNA, 19 nt, Homo sapiens
  misc_RNA (1)...(19): siRNA sense strand
gguauccagugcuacauuc

SEQ ID NO: 1546743 - RNA, 19 nt, Homo sapiens
  misc_RNA (1)...(19): siRNA sense strand
ugacaagggcaguuaucua

SEQ ID NO: 1546744 - RNA, 19 nt, Homo sapiens
  misc_RNA (1)...(19): siRNA sense strand
ggagaaugacuggcucaaa

SEQ ID NO: 1546745 - RNA, 19 nt, Homo sapiens
  misc_RNA (1)...(19): siRNA sense strand
gagauaugcgcaugcaaau

SEQ ID NO: 1546746 - RNA, 19 nt, Homo sapiens
  misc_RNA (1)...(19): siRNA sense strand
gcaacccacagaaguagaa

SEQ ID NO: 1546747 - RNA, 19 nt, Homo sapiens
  misc_RNA (1)...(19): siRNA sense strand
gaaugggccacacagaaug

SEQ ID NO: 1546748 - RNA, 19 nt, Homo sapiens
  misc_RNA (1)...(19): siRNA sense strand
guaaugcugagaaacuauu

SEQ ID NO: 1546749 - RNA, 19 nt, Homo sapiens
  misc_RNA (1)...(19): siRNA sense strand
ccagaaagccacaucacau

SEQ ID NO: 1546750 - RNA, 19 nt, Homo sapiens
  misc_RNA (1)...(19): siRNA sense strand
agaaacacauauagaagag

SEQ ID NO: 1546751 - RNA, 19 nt, Homo sapiens
  misc_RNA (1)...(19): siRNA sense strand
ggaauugccagaaacacau

SEQ ID NO: 1546752 - RNA, 19 nt, Homo sapiens
  misc_RNA (1)...(19): siRNA sense strand
ccuuuggaaucaugucuaa

SEQ ID NO: 1546753 - RNA, 19 nt, Homo sapiens
  misc_RNA (1)...(19): siRNA sense strand
gaaaauuuggugcuuauug

SEQ ID NO: 1546754 - RNA, 19 nt, Homo sapiens
  misc_RNA (1)...(19): siRNA sense strand
acaagaauguagggaguga

SEQ ID NO: 1546755 - RNA, 19 nt, Homo sapiens
  misc_RNA (1)...(19): siRNA sense strand
aaugacaucaacacaguua

SEQ ID NO: 1546756 - RNA, 19 nt, Homo sapiens
  misc_RNA (1)...(19): siRNA sense strand
caaacucuauaaagauguc

SEQ ID NO: 1546757 - RNA, 19 nt, Homo sapiens
  misc_RNA (1)...(19): siRNA sense strand
aagaugccguggagcaauu

SEQ ID NO: 1546758 - RNA, 19 nt, Homo sapiens
  misc_RNA (1)...(19): siRNA sense strand
guggagcaauucauguuuc

SEQ ID NO: 1546759 - RNA, 19 nt, Homo sapiens
  misc_RNA (1)...(19): siRNA sense strand
gaugucaggagcccagaaa

SEQ ID NO: 1546760 - RNA, 19 nt, Homo sapiens
  misc_RNA (1)...(19): siRNA sense strand
cuauccaacuguagacuug

SEQ ID NO: 1546761 - RNA, 19 nt, Homo sapiens
  misc_RNA (1)...(19): siRNA sense strand
ugaacgacaugcuaaacuc

SEQ ID NO: 1546762 - RNA, 19 nt, Homo sapiens
  misc_RNA (1)...(19): siRNA sense strand
gggaggaguacaagaaugu

SEQ ID NO: 1546763 - RNA, 19 nt, Homo sapiens
  misc_RNA (1)...(19): siRNA sense strand
agagauaugcgcaugcaaa

SEQ ID NO: 1546764 - RNA, 19 nt, Homo sapiens
  misc_RNA (1)...(19): siRNA sense strand
gaauguagggagugaacga

SEQ ID NO: 1546765 - RNA, 19 nt, Homo sapiens
  misc_RNA (1)...(19): siRNA sense strand
uauaugaggaugagaagga

SEQ ID NO: 1546766 - RNA, 19 nt, Homo sapiens
  misc_RNA (1)...(19): siRNA sense strand
uccaguaugugaagauaga

SEQ ID NO: 1546767 - RNA, 19 nt, Homo sapiens
  misc_RNA (1)...(19): siRNA sense strand
caggaaggaaguugaagaa

SEQ ID NO: 1546768 - RNA, 19 nt, Homo sapiens
  misc_RNA (1)...(19): siRNA sense strand
uaaaaucacucuggaagau

SEQ ID NO: 1546769 - RNA, 19 nt, Homo sapiens
  misc_RNA (1)...(19): siRNA sense strand
caaagacuauuaccaguua

SEQ ID NO: 1546770 - RNA, 19 nt, Homo sapiens
  misc_RNA (1)...(19): siRNA sense strand
gaacggcucucagacgauu

SEQ ID NO: 1546771 - RNA, 19 nt, Homo sapiens
  misc_RNA (1)...(19): siRNA sense strand
gcaagaauauuagacuaug

SEQ ID NO: 1546772 - RNA, 19 nt, Homo sapiens
  misc_RNA (1)...(19): siRNA sense strand
uggaagaucucucuaagga

SEQ ID NO: 1546773 - RNA, 19 nt, Homo sapiens
  misc_RNA (1)...(19): siRNA sense strand
gaagauauugccaggcuuu

SEQ ID NO: 1546774 - RNA, 19 nt, Homo sapiens
  misc_RNA (1)...(19): siRNA sense strand
ucaaacaucacacagauuu

SEQ ID NO: 1546775 - RNA, 19 nt, Homo sapiens
  misc_RNA (1)...(19): siRNA sense strand
gcaaagacuauuaccaguu

SEQ ID NO: 1546776 - RNA, 19 nt, Homo sapiens
  misc_RNA (1)...(19): siRNA sense strand
gaauucacaucuucaaggu

SEQ ID NO: 1546777 - RNA, 19 nt, Homo sapiens
  misc_RNA (1)...(19): siRNA sense strand
ggagacagcuguucuucac

SEQ ID NO: 1546778 - RNA, 19 nt, Homo sapiens
  misc_RNA (1)...(19): siRNA sense strand
gugcaugucugauaaacug

SEQ ID NO: 1546779 - RNA, 19 nt, Homo sapiens
  misc_RNA (1)...(19): siRNA sense strand
gugcaagaauauuagacua

SEQ ID NO: 1546780 - RNA, 19 nt, Homo sapiens
  misc_RNA (1)...(19): siRNA sense strand
cuagagaauucacaucuuc

SEQ ID NO: 1546781 - RNA, 19 nt, Homo sapiens
  misc_RNA (1)...(19): siRNA sense strand
ggucucagguaaucuuuag

SEQ ID NO: 1546782 - RNA, 19 nt, Homo sapiens
  misc_RNA (1)...(19): siRNA sense strand
uuucuuaucuggaucuuga

SEQ ID NO: 1546783 - RNA, 19 nt, Homo sapiens
  misc_RNA (1)...(19): siRNA sense strand
ggucaaacugccuuaauau

SEQ ID NO: 1546784 - RNA, 19 nt, Homo sapiens
  misc_RNA (1)...(19): siRNA sense strand
gguggaagaucucucuaag

SEQ ID NO: 1546785 - RNA, 19 nt, Homo sapiens
  misc_RNA (1)...(19): siRNA sense strand
aggucaaacugccuuaaua

SEQ ID NO: 1546786 - RNA, 19 nt, Homo sapiens
  misc_RNA (1)...(19): siRNA sense strand
cuuaauauuuggugcaaga

SEQ ID NO: 1546787 - RNA, 19 nt, Homo sapiens
  misc_RNA (1)...(19): siRNA sense strand
uauggaaaccugagagaaa

SEQ ID NO: 1546788 - RNA, 19 nt, Homo sapiens
  misc_RNA (1)...(19): siRNA sense strand
ugucaaacaucacacagau

SEQ ID NO: 1546789 - RNA, 19 nt, Homo sapiens
  misc_RNA (1)...(19): siRNA sense strand
gauuugcuccugacuauca

SEQ ID NO: 1546790 - RNA, 19 nt, Homo sapiens
  misc_RNA (1)...(19): siRNA sense strand
caaaagaaacccaugaaga

SEQ ID NO: 1546791 - RNA, 19 nt, Homo sapiens
  misc_RNA (1)...(19): siRNA sense strand
gugaguaucgaucaacaaa

SEQ ID NO: 1546792 - RNA, 19 nt, Homo sapiens
  misc_RNA (1)...(19): siRNA sense strand
acgauuugcuccugacuau

SEQ ID NO: 1546793 - RNA, 19 nt, Homo sapiens
  misc_RNA (1)...(19): siRNA sense strand
gagugaguaucgaucaaca

SEQ ID NO: 1546794 - RNA, 19 nt, Homo sapiens
  misc_RNA (1)...(19): siRNA sense strand
ucacacagauuugcaaagc

SEQ ID NO: 1546795 - RNA, 19 nt, Homo sapiens
  misc_RNA (1)...(19): siRNA sense strand
guaaauuugacuuccuuga

SEQ ID NO: 1546796 - RNA, 19 nt, Homo sapiens
  misc_RNA (1)...(19): siRNA sense strand
ccuagagaauucacaucuu

SEQ ID NO: 1546797 - RNA, 19 nt, Homo sapiens
  misc_RNA (1)...(19): siRNA sense strand
uccugacuaucauuucuua

SEQ ID NO: 1546798 - RNA, 19 nt, Homo sapiens
  misc_RNA (1)...(19): siRNA sense strand
aaauuugacuuccuugaac

SEQ ID NO: 1546799 - RNA, 19 nt, Homo sapiens
  misc_RNA (1)...(19): siRNA sense strand
gucaaacugccuuaauauu

SEQ ID NO: 1546800 - RNA, 19 nt, Homo sapiens
  misc_RNA (1)...(19): siRNA sense strand
gcuccugacuaucauuucu

SEQ ID NO: 1546801 - RNA, 19 nt, Homo sapiens
  misc_RNA (1)...(19): siRNA sense strand
aagcugugcaugucugaua

SEQ ID NO: 1546802 - RNA, 19 nt, Homo sapiens
  misc_RNA (1)...(19): siRNA sense strand
aaacugccuuaauauuugg

SEQ ID NO: 1546803 - RNA, 19 nt, Homo sapiens
  misc_RNA (1)...(19): siRNA sense strand
cuuugaaacuguaggacaa

SEQ ID NO: 1546804 - RNA, 19 nt, Homo sapiens
  misc_RNA (1)...(19): siRNA sense strand
gauauugccaggcuuuguc

SEQ ID NO: 1546805 - RNA, 19 nt, Homo sapiens
  misc_RNA (1)...(19): siRNA sense strand
cugauaaacugugggaaca

SEQ ID NO: 1546806 - RNA, 19 nt, Homo sapiens
  misc_RNA (1)...(19): siRNA sense strand
gacuaucauuucuuaucug

SEQ ID NO: 1546807 - RNA, 19 nt, Homo sapiens
  misc_RNA (1)...(19): siRNA sense strand
ggucacccggucucaggua

SEQ ID NO: 1546808 - RNA, 19 nt, Homo sapiens
  misc_RNA (1)...(19): siRNA sense strand
gaguaucgaucaacaaaac

SEQ ID NO: 1546809 - RNA, 19 nt, Homo sapiens
  misc_RNA (1)...(19): siRNA sense strand
ugagagaaaagcaaccuua

SEQ ID NO: 1546810 - RNA, 19 nt, Homo sapiens
  misc_RNA (1)...(19): siRNA sense strand
aagacuuccuagagaauuc

SEQ ID NO: 1546811 - RNA, 19 nt, Homo sapiens
  misc_RNA (1)...(19): siRNA sense strand
caucacacagauuugcaaa

SEQ ID NO: 1546812 - RNA, 19 nt, Homo sapiens
  misc_RNA (1)...(19): siRNA sense strand
gacgauuugcuccugacua

SEQ ID NO: 1546813 - RNA, 19 nt, Homo sapiens
  misc_RNA (1)...(19): siRNA sense strand
gacucucuuugaaacugua

SEQ ID NO: 1546814 - RNA, 19 nt, Homo sapiens
  misc_RNA (1)...(19): siRNA sense strand
gagaauucacaucuucaag

SEQ ID NO: 1546815 - RNA, 19 nt, Homo sapiens
  misc_RNA (1)...(19): siRNA sense strand
aagaaacccaugaagacuu

SEQ ID NO: 1546816 - RNA, 19 nt, Homo sapiens
  misc_RNA (1)...(19): siRNA sense strand
gacagcuguucuucaccaa

SEQ ID NO: 1546817 - RNA, 19 nt, Homo sapiens
  misc_RNA (1)...(19): siRNA sense strand
cgccuagcaaagacuauua

SEQ ID NO: 1546818 - RNA, 19 nt, Homo sapiens
  misc_RNA (1)...(19): siRNA sense strand
caaagcugugcaugucuga

SEQ ID NO: 1546819 - RNA, 19 nt, Homo sapiens
  misc_RNA (1)...(19): siRNA sense strand
gucacccggucucagguaa

SEQ ID NO: 1546820 - RNA, 19 nt, Homo sapiens
  misc_RNA (1)...(19): siRNA sense strand
gaugguggaagaucucucu

SEQ ID NO: 1546821 - RNA, 19 nt, Homo sapiens
  misc_RNA (1)...(19): siRNA sense strand
gccuuaauauuuggugcaa

SEQ ID NO: 1546822 - RNA, 19 nt, Homo sapiens
  misc_RNA (1)...(19): siRNA sense strand
ggacaaggguaguuucuga

SEQ ID NO: 1546823 - RNA, 19 nt, Homo sapiens
  misc_RNA (1)...(19): siRNA sense strand
caaaucggauacauacaua

SEQ ID NO: 1546824 - RNA, 19 nt, Homo sapiens
  misc_RNA (1)...(19): siRNA sense strand
gacaacagcagaagaguua

SEQ ID NO: 1546825 - RNA, 19 nt, Homo sapiens
  misc_RNA (1)...(19): siRNA sense strand
caaggaauauagaucauga

SEQ ID NO: 1546826 - RNA, 19 nt, Homo sapiens
  misc_RNA (1)...(19): siRNA sense strand
gcuccucgcugucuugauu

SEQ ID NO: 1546827 - RNA, 19 nt, Homo sapiens
  misc_RNA (1)...(19): siRNA sense strand
gcagaagaguuaggauuau

SEQ ID NO: 1546828 - RNA, 19 nt, Homo sapiens
  misc_RNA (1)...(19): siRNA sense strand
aaaccgagcuguacuuuac

SEQ ID NO: 1546829 - RNA, 19 nt, Homo sapiens
  misc_RNA (1)...(19): siRNA sense strand
gaucaugacccucaggaaa

SEQ ID NO: 1546830 - RNA, 19 nt, Homo sapiens
  misc_RNA (1)...(19): siRNA sense strand
gcugagaaccuccauguga

SEQ ID NO: 1546831 - RNA, 19 nt, Homo sapiens
  misc_RNA (1)...(19): siRNA sense strand
gcaaaucggauacauacau

SEQ ID NO: 1546832 - RNA, 19 nt, Homo sapiens
  misc_RNA (1)...(19): siRNA sense strand
gaaccuccaugugaaaaua

SEQ ID NO: 1546833 - RNA, 19 nt, Homo sapiens
  misc_RNA (1)...(19): siRNA sense strand
cagaagaguuaggauuauu

SEQ ID NO: 1546834 - RNA, 19 nt, Homo sapiens
  misc_RNA (1)...(19): siRNA sense strand
ugaauuacaucugggaaug

SEQ ID NO: 1546835 - RNA, 19 nt, Homo sapiens
  misc_RNA (1)...(19): siRNA sense strand
ggaaaucaguguggcuuac

SEQ ID NO: 1546836 - RNA, 19 nt, Homo sapiens
  misc_RNA (1)...(19): siRNA sense strand
guauauauuugcggaugaa

SEQ ID NO: 1546837 - RNA, 19 nt, Homo sapiens
  misc_RNA (1)...(19): siRNA sense strand
caaaccgagcuguacuuua

SEQ ID NO: 1546838 - RNA, 19 nt, Homo sapiens
  misc_RNA (1)...(19): siRNA sense strand
ggauuauuaucuucuaguc

SEQ ID NO: 1546839 - RNA, 19 nt, Homo sapiens
  misc_RNA (1)...(19): siRNA sense strand
cugagaaccuccaugugaa

SEQ ID NO: 1546840 - RNA, 19 nt, Homo sapiens
  misc_RNA (1)...(19): siRNA sense strand
aaggguaguuucugaggaa

SEQ ID NO: 1546841 - RNA, 19 nt, Homo sapiens
  misc_RNA (1)...(19): siRNA sense strand
cagcagaagaguuaggauu

SEQ ID NO: 1546842 - RNA, 19 nt, Homo sapiens
  misc_RNA (1)...(19): siRNA sense strand
agcagaagaguuaggauua

SEQ ID NO: 1546843 - RNA, 19 nt, Homo sapiens
  misc_RNA (1)...(19): siRNA sense strand
guugauggccucaguuauc

SEQ ID NO: 1546844 - RNA, 19 nt, Homo sapiens
  misc_RNA (1)...(19): siRNA sense strand
guugcucucuggacugguu

SEQ ID NO: 1546845 - RNA, 19 nt, Homo sapiens
  misc_RNA (1)...(19): siRNA sense strand
gaaaucaguguggcuuaca

SEQ ID NO: 1546846 - RNA, 19 nt, Homo sapiens
  misc_RNA (1)...(19): siRNA sense strand
ugagaaccuccaugugaaa

SEQ ID NO: 1546847 - RNA, 19 nt, Homo sapiens
  misc_RNA (1)...(19): siRNA sense strand
gauccuaguccuuuuauug

SEQ ID NO: 1546848 - RNA, 19 nt, Homo sapiens
  misc_RNA (1)...(19): siRNA sense strand
ucaaaccgagcuguacuuu

SEQ ID NO: 1546849 - RNA, 19 nt, Homo sapiens
  misc_RNA (1)...(19): siRNA sense strand
ggccucaguuaucccaguu

SEQ ID NO: 1546850 - RNA, 19 nt, Homo sapiens
  misc_RNA (1)...(19): siRNA sense strand
uguauauauuugcggauga

SEQ ID NO: 1546851 - RNA, 19 nt, Homo sapiens
  misc_RNA (1)...(19): siRNA sense strand
gugcugagaaccuccaugu

SEQ ID NO: 1546852 - RNA, 19 nt, Homo sapiens
  misc_RNA (1)...(19): siRNA sense strand
ucaugacccucaggaaauc

SEQ ID NO: 1546853 - RNA, 19 nt, Homo sapiens
  misc_RNA (1)...(19): siRNA sense strand
ggcguuagaagucuugaug

SEQ ID NO: 1546854 - RNA, 19 nt, Homo sapiens
  misc_RNA (1)...(19): siRNA sense strand
agacaacagcagaagaguu

SEQ ID NO: 1546855 - RNA, 19 nt, Homo sapiens
  misc_RNA (1)...(19): siRNA sense strand
ccugcaaaucggauacaua

SEQ ID NO: 1546856 - RNA, 19 nt, Homo sapiens
  misc_RNA (1)...(19): siRNA sense strand
ucagacaacagcagaagag

SEQ ID NO: 1546857 - RNA, 19 nt, Homo sapiens
  misc_RNA (1)...(19): siRNA sense strand
cugcaaaucggauacauac

SEQ ID NO: 1546858 - RNA, 19 nt, Homo sapiens
  misc_RNA (1)...(19): siRNA sense strand
ccaaggaauauagaucaug

SEQ ID NO: 1546859 - RNA, 19 nt, Homo sapiens
  misc_RNA (1)...(19): siRNA sense strand
ugguugauggccucaguua

SEQ ID NO: 1546860 - RNA, 19 nt, Homo sapiens
  misc_RNA (1)...(19): siRNA sense strand
uaucuucuaguccaaacuu

SEQ ID NO: 1546861 - RNA, 19 nt, Homo sapiens
  misc_RNA (1)...(19): siRNA sense strand
gaagagacccauaagauug

SEQ ID NO: 1546862 - RNA, 19 nt, Homo sapiens
  misc_RNA (1)...(19): siRNA sense strand
gcuccaagccugugacaua

SEQ ID NO: 1546863 - RNA, 19 nt, Homo sapiens
  misc_RNA (1)...(19): siRNA sense strand
ugaauugccuuuggaugua

SEQ ID NO: 1546864 - RNA, 19 nt, Homo sapiens
  misc_RNA (1)...(19): siRNA sense strand
gaagaagagacccauaaga

SEQ ID NO: 1546865 - RNA, 19 nt, Homo sapiens
  misc_RNA (1)...(19): siRNA sense strand
gaagaagaagagacccaua

SEQ ID NO: 1546866 - RNA, 19 nt, Homo sapiens
  misc_RNA (1)...(19): siRNA sense strand
gaaggucagggcauaguug

SEQ ID NO: 1546867 - RNA, 19 nt, Homo sapiens
  misc_RNA (1)...(19): siRNA sense strand
ugacucaccaccuucauuu

SEQ ID NO: 1546868 - RNA, 19 nt, Homo sapiens
  misc_RNA (1)...(19): siRNA sense strand
agaagagacccauaagauu

SEQ ID NO: 1546869 - RNA, 19 nt, Homo sapiens
  misc_RNA (1)...(19): siRNA sense strand
agaggaugcuggcgaguau

SEQ ID NO: 1546870 - RNA, 19 nt, Homo sapiens
  misc_RNA (1)...(19): siRNA sense strand
ugacauaugccacaguaau

SEQ ID NO: 1546871 - RNA, 19 nt, Homo sapiens
  misc_RNA (1)...(19): siRNA sense strand
ccaccuucauuugacaaua

SEQ ID NO: 1546872 - RNA, 19 nt, Homo sapiens
  misc_RNA (1)...(19): siRNA sense strand
aagaagagacccauaagau

SEQ ID NO: 1546873 - RNA, 19 nt, Homo sapiens
  misc_RNA (1)...(19): siRNA sense strand
aagaagaagagacccauaa

SEQ ID NO: 1546874 - RNA, 19 nt, Homo sapiens
  misc_RNA (1)...(19): siRNA sense strand
gcaugaaucccuccucagu

SEQ ID NO: 1546875 - RNA, 19 nt, Homo sapiens
  misc_RNA (1)...(19): siRNA sense strand
acuagaaggucagggcaua

SEQ ID NO: 1546876 - RNA, 19 nt, Homo sapiens
  misc_RNA (1)...(19): siRNA sense strand
gaacccagccaggaugaga

SEQ ID NO: 1546877 - RNA, 19 nt, Homo sapiens
  misc_RNA (1)...(19): siRNA sense strand
gagaagagcauccccuuga

SEQ ID NO: 1546878 - RNA, 19 nt, Homo sapiens
  misc_RNA (1)...(19): siRNA sense strand
uggaccggcugcugaauug

SEQ ID NO: 1546879 - RNA, 19 nt, Homo sapiens
  misc_RNA (1)...(19): siRNA sense strand
agaauccaccuaacaauca

SEQ ID NO: 1546880 - RNA, 19 nt, Homo sapiens
  misc_RNA (1)...(19): siRNA sense strand
ggcguacguuucucacaga

SEQ ID NO: 1546881 - RNA, 19 nt, Homo sapiens
  misc_RNA (1)...(19): siRNA sense strand
ccaagccugugacauaugc

SEQ ID NO: 1546882 - RNA, 19 nt, Homo sapiens
  misc_RNA (1)...(19): siRNA sense strand
acaccagccuaccucuuga

SEQ ID NO: 1546883 - RNA, 19 nt, Homo sapiens
  misc_RNA (1)...(19): siRNA sense strand
gacauaugccacaguaauc

SEQ ID NO: 1546884 - RNA, 19 nt, Homo sapiens
  misc_RNA (1)...(19): siRNA sense strand
gaauugccuuuggauguac

SEQ ID NO: 1546885 - RNA, 19 nt, Homo sapiens
  misc_RNA (1)...(19): siRNA sense strand
gaauccaccuaacaaucag

SEQ ID NO: 1546886 - RNA, 19 nt, Homo sapiens
  misc_RNA (1)...(19): siRNA sense strand
cagaauccaccuaacaauc

SEQ ID NO: 1546887 - RNA, 19 nt, Homo sapiens
  misc_RNA (1)...(19): siRNA sense strand
gcuccaggaugucaaagcu

SEQ ID NO: 1546888 - RNA, 19 nt, Homo sapiens
  misc_RNA (1)...(19): siRNA sense strand
caccuucauuugacaauac

SEQ ID NO: 1546889 - RNA, 19 nt, Homo sapiens
  misc_RNA (1)...(19): siRNA sense strand
acuacaggcuccaggaugu

SEQ ID NO: 1546890 - RNA, 19 nt, Homo sapiens
  misc_RNA (1)...(19): siRNA sense strand
cagccuaccucuugauucc

SEQ ID NO: 1546891 - RNA, 19 nt, Homo sapiens
  misc_RNA (1)...(19): siRNA sense strand
gcccagaauccaccuaaca

SEQ ID NO: 1546892 - RNA, 19 nt, Homo sapiens
  misc_RNA (1)...(19): siRNA sense strand
gagucucucugaacauacu

SEQ ID NO: 1546893 - RNA, 19 nt, Homo sapiens
  misc_RNA (1)...(19): siRNA sense strand
uaccacacauuaggcuuga

SEQ ID NO: 1546894 - RNA, 19 nt, Homo sapiens
  misc_RNA (1)...(19): siRNA sense strand
aggcuugacucaccaccuu

SEQ ID NO: 1546895 - RNA, 19 nt, Homo sapiens
  misc_RNA (1)...(19): siRNA sense strand
ccagaauccaccuaacaau

SEQ ID NO: 1546896 - RNA, 19 nt, Homo sapiens
  misc_RNA (1)...(19): siRNA sense strand
guggugcuguuugcuguga

SEQ ID NO: 1546897 - RNA, 19 nt, Homo sapiens
  misc_RNA (1)...(19): siRNA sense strand
cuccaagccugugacauau

SEQ ID NO: 1546898 - RNA, 19 nt, Homo sapiens
  misc_RNA (1)...(19): siRNA sense strand
ucaccaccuucauuugaca

SEQ ID NO: 1546899 - RNA, 19 nt, Homo sapiens
  misc_RNA (1)...(19): siRNA sense strand
acucaccaccuucauuuga

SEQ ID NO: 1546900 - RNA, 19 nt, Homo sapiens
  misc_RNA (1)...(19): siRNA sense strand
uuccugagcagcagaguuu

SEQ ID NO: 1546901 - RNA, 19 nt, Homo sapiens
  misc_RNA (1)...(19): siRNA sense strand
cugaauugccuuuggaugu

SEQ ID NO: 1546902 - RNA, 19 nt, Homo sapiens
  misc_RNA (1)...(19): siRNA sense strand
uacaccagccuaccucuug

SEQ ID NO: 1546903 - RNA, 19 nt, Homo sapiens
  misc_RNA (1)...(19): siRNA sense strand
ggugcuguuugcugugaug

SEQ ID NO: 1546904 - RNA, 19 nt, Homo sapiens
  misc_RNA (1)...(19): siRNA sense strand
ugguuacccugcaggaaga

SEQ ID NO: 1546905 - RNA, 19 nt, Homo sapiens
  misc_RNA (1)...(19): siRNA sense strand
cagcccagaauccaccuaa

SEQ ID NO: 1546906 - RNA, 19 nt, Homo sapiens
  misc_RNA (1)...(19): siRNA sense strand
cugcugaauugccuuugga

SEQ ID NO: 1546907 - RNA, 19 nt, Homo sapiens
  misc_RNA (1)...(19): siRNA sense strand
gcugcugaauugccuuugg

SEQ ID NO: 1546908 - RNA, 19 nt, Homo sapiens
  misc_RNA (1)...(19): siRNA sense strand
cccauaagauuggcagucu

SEQ ID NO: 1546909 - RNA, 19 nt, Homo sapiens
  misc_RNA (1)...(19): siRNA sense strand
cauuugacaauaccaccua

SEQ ID NO: 1546910 - RNA, 19 nt, Homo sapiens
  misc_RNA (1)...(19): siRNA sense strand
cccagaauccaccuaacaa

SEQ ID NO: 1546911 - RNA, 19 nt, Homo sapiens
  misc_RNA (1)...(19): siRNA sense strand
ggaggcggaucaacugaga

SEQ ID NO: 1546912 - RNA, 19 nt, Homo sapiens
  misc_RNA (1)...(19): siRNA sense strand
ugagagcgcugggcugguu

SEQ ID NO: 1546913 - RNA, 19 nt, Homo sapiens
  misc_RNA (1)...(19): siRNA sense strand
caggagacaugucccuaug

SEQ ID NO: 1546914 - RNA, 19 nt, Homo sapiens
  misc_RNA (1)...(19): siRNA sense strand
ccaagaguguggccaucug

SEQ ID NO: 1546915 - RNA, 19 nt, Homo sapiens
  misc_RNA (1)...(19): siRNA sense strand
cccgacaucuuucucaaca

SEQ ID NO: 1546916 - RNA, 19 nt, Homo sapiens
  misc_RNA (1)...(19): siRNA sense strand
gaggaggcggaucaacuga

SEQ ID NO: 1546917 - RNA, 19 nt, Homo sapiens
  misc_RNA (1)...(19): siRNA sense strand
gcggaacaguggcgcuucu

SEQ ID NO: 1546918 - RNA, 19 nt, Homo sapiens
  misc_RNA (1)...(19): siRNA sense strand
cgaggaggcggaucaacug

SEQ ID NO: 1546919 - RNA, 19 nt, Homo sapiens
  misc_RNA (1)...(19): siRNA sense strand
ggacgaggaggcggaucaa

SEQ ID NO: 1546920 - RNA, 19 nt, Homo sapiens
  misc_RNA (1)...(19): siRNA sense strand
ucaggagacaugucccuau

SEQ ID NO: 1546921 - RNA, 19 nt, Homo sapiens
  misc_RNA (1)...(19): siRNA sense strand
gaaagaauuugcucuauga

SEQ ID NO: 1546922 - RNA, 19 nt, Homo sapiens
  misc_RNA (1)...(19): siRNA sense strand
gaacugggcuguuacuaaa

SEQ ID NO: 1546923 - RNA, 19 nt, Homo sapiens
  misc_RNA (1)...(19): siRNA sense strand
gaacagucaugcccaauaa

SEQ ID NO: 1546924 - RNA, 19 nt, Homo sapiens
  misc_RNA (1)...(19): siRNA sense strand
caagacaacuggcuacuuu

SEQ ID NO: 1546925 - RNA, 19 nt, Homo sapiens
  misc_RNA (1)...(19): siRNA sense strand
uagcagagcugaagagauu

SEQ ID NO: 1546926 - RNA, 19 nt, Homo sapiens
  misc_RNA (1)...(19): siRNA sense strand
ggaaagaauuugcucuaug

SEQ ID NO: 1546927 - RNA, 19 nt, Homo sapiens
  misc_RNA (1)...(19): siRNA sense strand
ucaagaagccaaucuauuu

SEQ ID NO: 1546928 - RNA, 19 nt, Homo sapiens
  misc_RNA (1)...(19): siRNA sense strand
gaaauaggcauguaaagga

SEQ ID NO: 1546929 - RNA, 19 nt, Homo sapiens
  misc_RNA (1)...(19): siRNA sense strand
gaaagaaauaggcauguaa

SEQ ID NO: 1546930 - RNA, 19 nt, Homo sapiens
  misc_RNA (1)...(19): siRNA sense strand
agaaugaccugguguuuga

SEQ ID NO: 1546931 - RNA, 19 nt, Homo sapiens
  misc_RNA (1)...(19): siRNA sense strand
caaggagaguuuauagaaa

SEQ ID NO: 1546932 - RNA, 19 nt, Homo sapiens
  misc_RNA (1)...(19): siRNA sense strand
ccucacagcucacaucauu

SEQ ID NO: 1546933 - RNA, 19 nt, Homo sapiens
  misc_RNA (1)...(19): siRNA sense strand
gaaugaugaucuccaagaa

SEQ ID NO: 1546934 - RNA, 19 nt, Homo sapiens
  misc_RNA (1)...(19): siRNA sense strand
gccauaagauucccaguga

SEQ ID NO: 1546935 - RNA, 19 nt, Homo sapiens
  misc_RNA (1)...(19): siRNA sense strand
ggacuuuggugcccacuug

SEQ ID NO: 1546936 - RNA, 19 nt, Homo sapiens
  misc_RNA (1)...(19): siRNA sense strand
gccaagacauuacaagaga

SEQ ID NO: 1546937 - RNA, 19 nt, Homo sapiens
  misc_RNA (1)...(19): siRNA sense strand
ucacaucauuggagauaaa

SEQ ID NO: 1546938 - RNA, 19 nt, Homo sapiens
  misc_RNA (1)...(19): siRNA sense strand
gugaacauuuggugauuaa

SEQ ID NO: 1546939 - RNA, 19 nt, Homo sapiens
  misc_RNA (1)...(19): siRNA sense strand
ugaaagaaauaggcaugua

SEQ ID NO: 1546940 - RNA, 19 nt, Homo sapiens
  misc_RNA (1)...(19): siRNA sense strand
gaaaagauuugaagcuaga

SEQ ID NO: 1546941 - RNA, 19 nt, Homo sapiens
  misc_RNA (1)...(19): siRNA sense strand
ggaacagucaugcccaaua

SEQ ID NO: 1546942 - RNA, 19 nt, Homo sapiens
  misc_RNA (1)...(19): siRNA sense strand
ugcaagaacugggcuguua

SEQ ID NO: 1546943 - RNA, 19 nt, Homo sapiens
  misc_RNA (1)...(19): siRNA sense strand
ccuacagccuggagaauuu

SEQ ID NO: 1546944 - RNA, 19 nt, Homo sapiens
  misc_RNA (1)...(19): siRNA sense strand
aaaccagucugcccuauuc

SEQ ID NO: 1546945 - RNA, 19 nt, Homo sapiens
  misc_RNA (1)...(19): siRNA sense strand
ggaccugguuucccaagga

SEQ ID NO: 1546946 - RNA, 19 nt, Homo sapiens
  misc_RNA (1)...(19): siRNA sense strand
gcccagagccucaaucuca

SEQ ID NO: 1546947 - RNA, 19 nt, Homo sapiens
  misc_RNA (1)...(19): siRNA sense strand
gagcaaagaaugaugaucu

SEQ ID NO: 1546948 - RNA, 19 nt, Homo sapiens
  misc_RNA (1)...(19): siRNA sense strand
acaagguggugcagacuaa

SEQ ID NO: 1546949 - RNA, 19 nt, Homo sapiens
  misc_RNA (1)...(19): siRNA sense strand
gcucauagccagcaagcaa

SEQ ID NO: 1546950 - RNA, 19 nt, Homo sapiens
  misc_RNA (1)...(19): siRNA sense strand
ucacaaaguaccagacaaa

SEQ ID NO: 1546951 - RNA, 19 nt, Homo sapiens
  misc_RNA (1)...(19): siRNA sense strand
gaccaucucaguucaagaa

SEQ ID NO: 1546952 - RNA, 19 nt, Homo sapiens
  misc_RNA (1)...(19): siRNA sense strand
gaaaagggcaaaagacaaa

SEQ ID NO: 1546953 - RNA, 19 nt, Homo sapiens
  misc_RNA (1)...(19): siRNA sense strand
acaaggagaguuuauagaa

SEQ ID NO: 1546954 - RNA, 19 nt, Homo sapiens
  misc_RNA (1)...(19): siRNA sense strand
gcaaggaggcaggaaagaa

SEQ ID NO: 1546955 - RNA, 19 nt, Homo sapiens
  misc_RNA (1)...(19): siRNA sense strand
ccacagaggcaggcucaua

SEQ ID NO: 1546956 - RNA, 19 nt, Homo sapiens
  misc_RNA (1)...(19): siRNA sense strand
aaagaaugaugaucuccaa

SEQ ID NO: 1546957 - RNA, 19 nt, Homo sapiens
  misc_RNA (1)...(19): siRNA sense strand
gaagcaccuugaaguuuua

SEQ ID NO: 1546958 - RNA, 19 nt, Homo sapiens
  misc_RNA (1)...(19): siRNA sense strand
gcucacaucauuggagaua

SEQ ID NO: 1546959 - RNA, 19 nt, Homo sapiens
  misc_RNA (1)...(19): siRNA sense strand
ggaacaagaagucauccaa

SEQ ID NO: 1546960 - RNA, 19 nt, Homo sapiens
  misc_RNA (1)...(19): siRNA sense strand
gaaagaugggacuguagaa

SEQ ID NO: 1546961 - RNA, 19 nt, Homo sapiens
  misc_RNA (1)...(19): siRNA sense strand
ggaacaguuugaggagaaa

SEQ ID NO: 1546962 - RNA, 19 nt, Homo sapiens
  misc_RNA (1)...(19): siRNA sense strand
gugagacucuauacaacuu

SEQ ID NO: 1546963 - RNA, 19 nt, Homo sapiens
  misc_RNA (1)...(19): siRNA sense strand
gagggugaaccuagcauuu

SEQ ID NO: 1546964 - RNA, 19 nt, Homo sapiens
  misc_RNA (1)...(19): siRNA sense strand
gagcaggccauccuugaga

SEQ ID NO: 1546965 - RNA, 19 nt, Homo sapiens
  misc_RNA (1)...(19): siRNA sense strand
gagacucuauacaacuuug

SEQ ID NO: 1546966 - RNA, 19 nt, Homo sapiens
  misc_RNA (1)...(19): siRNA sense strand
gagauaaacuuuucaacca

SEQ ID NO: 1546967 - RNA, 19 nt, Homo sapiens
  misc_RNA (1)...(19): siRNA sense strand
gaacauuuggugauuaaac

SEQ ID NO: 1546968 - RNA, 19 nt, Homo sapiens
  misc_RNA (1)...(19): siRNA sense strand
caaaaggccucuuggaaca

SEQ ID NO: 1546969 - RNA, 19 nt, Homo sapiens
  misc_RNA (1)...(19): siRNA sense strand
agaugggacuguagaaaug

SEQ ID NO: 1546970 - RNA, 19 nt, Homo sapiens
  misc_RNA (1)...(19): siRNA sense strand
cgugaacauuuggugauua

SEQ ID NO: 1546971 - RNA, 19 nt, Homo sapiens
  misc_RNA (1)...(19): siRNA sense strand
ugacccacgugaacauuug

SEQ ID NO: 1546972 - RNA, 19 nt, Homo sapiens
  misc_RNA (1)...(19): siRNA sense strand
gaaugugcccaguguccua

SEQ ID NO: 1546973 - RNA, 19 nt, Homo sapiens
  misc_RNA (1)...(19): siRNA sense strand
caaggaggcaggaaagaau

SEQ ID NO: 1546974 - RNA, 19 nt, Homo sapiens
  misc_RNA (1)...(19): siRNA sense strand
uggaacaguuugaggagaa

SEQ ID NO: 1546975 - RNA, 19 nt, Homo sapiens
  misc_RNA (1)...(19): siRNA sense strand
gcuguucggaggagauaua

SEQ ID NO: 1546976 - RNA, 19 nt, Homo sapiens
  misc_RNA (1)...(19): siRNA sense strand
augaugaucuccaagaaga

SEQ ID NO: 1546977 - RNA, 19 nt, Homo sapiens
  misc_RNA (1)...(19): siRNA sense strand
ugaaagacagugcuucuca

SEQ ID NO: 1546978 - RNA, 19 nt, Homo sapiens
  misc_RNA (1)...(19): siRNA sense strand
ugaagcaccuugaaguuuu

SEQ ID NO: 1546979 - RNA, 19 nt, Homo sapiens
  misc_RNA (1)...(19): siRNA sense strand
gaaccuagcauuuucacaa

SEQ ID NO: 1546980 - RNA, 19 nt, Homo sapiens
  misc_RNA (1)...(19): siRNA sense strand
cagacuaacugcaagaacu

SEQ ID NO: 1546981 - RNA, 19 nt, Homo sapiens
  misc_RNA (1)...(19): siRNA sense strand
ccaacuggaauaauaauca

SEQ ID NO: 1546982 - RNA, 19 nt, Homo sapiens
  misc_RNA (1)...(19): siRNA sense strand
acagugagacucuauacaa

SEQ ID NO: 1546983 - RNA, 19 nt, Homo sapiens
  misc_RNA (1)...(19): siRNA sense strand
aaagauggagguuuauuuc

SEQ ID NO: 1546984 - RNA, 19 nt, Homo sapiens
  misc_RNA (1)...(19): siRNA sense strand
gcagagcugaagagauuga

SEQ ID NO: 1546985 - RNA, 19 nt, Homo sapiens
  misc_RNA (1)...(19): siRNA sense strand
caggaaagaauuugcucua

SEQ ID NO: 1546986 - RNA, 19 nt, Homo sapiens
  misc_RNA (1)...(19): siRNA sense strand
aaauaucaagcccaaagua

SEQ ID NO: 1546987 - RNA, 19 nt, Homo sapiens
  misc_RNA (1)...(19): siRNA sense strand
agaacugggcuguuacuaa

SEQ ID NO: 1546988 - RNA, 19 nt, Homo sapiens
  misc_RNA (1)...(19): siRNA sense strand
ggugcccacuugagacauu

SEQ ID NO: 1546989 - RNA, 19 nt, Homo sapiens
  misc_RNA (1)...(19): siRNA sense strand
ugaugaugauggcuucuga

SEQ ID NO: 1546990 - RNA, 19 nt, Homo sapiens
  misc_RNA (1)...(19): siRNA sense strand
caauuucugucccucaaag

SEQ ID NO: 1546991 - RNA, 19 nt, Homo sapiens
  misc_RNA (1)...(19): siRNA sense strand
cuauacaggcccagaauga

SEQ ID NO: 1546992 - RNA, 19 nt, Homo sapiens
  misc_RNA (1)...(19): siRNA sense strand
gacauuacaagagacuaua

SEQ ID NO: 1546993 - RNA, 19 nt, Homo sapiens
  misc_RNA (1)...(19): siRNA sense strand
ccagaccuguaaauucaau

SEQ ID NO: 1546994 - RNA, 19 nt, Homo sapiens
  misc_RNA (1)...(19): siRNA sense strand
uaucaagcccaaaguaugu

SEQ ID NO: 1546995 - RNA, 19 nt, Homo sapiens
  misc_RNA (1)...(19): siRNA sense strand
gugaaggagcaaagaauga

SEQ ID NO: 1546996 - RNA, 19 nt, Homo sapiens
  misc_RNA (1)...(19): siRNA sense strand
gacaaggagaguuuauaga

SEQ ID NO: 1546997 - RNA, 19 nt, Homo sapiens
  misc_RNA (1)...(19): siRNA sense strand
auccagaccuguaaauuca

SEQ ID NO: 1546998 - RNA, 19 nt, Homo sapiens
  misc_RNA (1)...(19): siRNA sense strand
ucucagacgucgccaccuu

SEQ ID NO: 1546999 - RNA, 19 nt, Homo sapiens
  misc_RNA (1)...(19): siRNA sense strand
ugaccucaaucucggaugu

SEQ ID NO: 1547000 - RNA, 19 nt, Homo sapiens
  misc_RNA (1)...(19): siRNA sense strand
ucucagugauucccaguuc

SEQ ID NO: 1547001 - RNA, 19 nt, Homo sapiens
  misc_RNA (1)...(19): siRNA sense strand
gaaggagcaaagaaugaug

SEQ ID NO: 1547002 - RNA, 19 nt, Homo sapiens
  misc_RNA (1)...(19): siRNA sense strand
ggugaaggagcaaagaaug

SEQ ID NO: 1547003 - RNA, 19 nt, Homo sapiens
  misc_RNA (1)...(19): siRNA sense strand
gacuguggccaagacauua

SEQ ID NO: 1547004 - RNA, 19 nt, Homo sapiens
  misc_RNA (1)...(19): siRNA sense strand
ugauagcagugaugaugau

SEQ ID NO: 1547005 - RNA, 19 nt, Homo sapiens
  misc_RNA (1)...(19): siRNA sense strand
ucaaaacagucacaacaga

SEQ ID NO: 1547006 - RNA, 19 nt, Homo sapiens
  misc_RNA (1)...(19): siRNA sense strand
gacaagguggugcagacua

SEQ ID NO: 1547007 - RNA, 19 nt, Homo sapiens
  misc_RNA (1)...(19): siRNA sense strand
gcaauuucugucccucaaa

SEQ ID NO: 1547008 - RNA, 19 nt, Homo sapiens
  misc_RNA (1)...(19): siRNA sense strand
uaucagcacccuuggacuu

SEQ ID NO: 1547009 - RNA, 19 nt, Homo sapiens
  misc_RNA (1)...(19): siRNA sense strand
gugauuaaacagaaagaug

SEQ ID NO: 1547010 - RNA, 19 nt, Homo sapiens
  misc_RNA (1)...(19): siRNA sense strand
agaaugaugaucuccaaga

SEQ ID NO: 1547011 - RNA, 19 nt, Homo sapiens
  misc_RNA (1)...(19): siRNA sense strand
cucagugccuccagugaaa

SEQ ID NO: 1547012 - RNA, 19 nt, Homo sapiens
  misc_RNA (1)...(19): siRNA sense strand
agacaaggagaguuuauag

SEQ ID NO: 1547013 - RNA, 19 nt, Homo sapiens
  misc_RNA (1)...(19): siRNA sense strand
gcuagacaaggagaguuua

SEQ ID NO: 1547014 - RNA, 19 nt, Homo sapiens
  misc_RNA (1)...(19): siRNA sense strand
cagaaugaccugguguuug

SEQ ID NO: 1547015 - RNA, 19 nt, Homo sapiens
  misc_RNA (1)...(19): siRNA sense strand
guucaagaagccaaucuau

SEQ ID NO: 1547016 - RNA, 19 nt, Homo sapiens
  misc_RNA (1)...(19): siRNA sense strand
cauaagauucccagugaca

SEQ ID NO: 1547017 - RNA, 19 nt, Homo sapiens
  misc_RNA (1)...(19): siRNA sense strand
aggaaagaauuugcucuau

SEQ ID NO: 1547018 - RNA, 19 nt, Homo sapiens
  misc_RNA (1)...(19): siRNA sense strand
aaagaugggacuguagaaa

SEQ ID NO: 1547019 - RNA, 19 nt, Homo sapiens
  misc_RNA (1)...(19): siRNA sense strand
agaaagaugggacuguaga

SEQ ID NO: 1547020 - RNA, 19 nt, Homo sapiens
  misc_RNA (1)...(19): siRNA sense strand
caucauuggagauaaacuu

SEQ ID NO: 1547021 - RNA, 19 nt, Homo sapiens
  misc_RNA (1)...(19): siRNA sense strand
ucaacaccgucuacauuua

SEQ ID NO: 1547022 - RNA, 19 nt, Homo sapiens
  misc_RNA (1)...(19): siRNA sense strand
uuacagaucugggucauau

SEQ ID NO: 1547023 - RNA, 19 nt, Homo sapiens
  misc_RNA (1)...(19): siRNA sense strand
caucguggccuucaaguuu

SEQ ID NO: 1547024 - RNA, 19 nt, Homo sapiens
  misc_RNA (1)...(19): siRNA sense strand
gaaauaccgaggcuauaug

SEQ ID NO: 1547025 - RNA, 19 nt, Homo sapiens
  misc_RNA (1)...(19): siRNA sense strand
ucugguagcugcaaacuuc

SEQ ID NO: 1547026 - RNA, 19 nt, Homo sapiens
  misc_RNA (1)...(19): siRNA sense strand
auaccgaggcuauauguua

SEQ ID NO: 1547027 - RNA, 19 nt, Homo sapiens
  misc_RNA (1)...(19): siRNA sense strand
gcagaccuauuggaugcua

SEQ ID NO: 1547028 - RNA, 19 nt, Homo sapiens
  misc_RNA (1)...(19): siRNA sense strand
ggucugugguucaaaguca

SEQ ID NO: 1547029 - RNA, 19 nt, Homo sapiens
  misc_RNA (1)...(19): siRNA sense strand
cgaaauaccgaggcuauau

SEQ ID NO: 1547030 - RNA, 19 nt, Homo sapiens
  misc_RNA (1)...(19): siRNA sense strand
ggagcgcguugccaagaug

SEQ ID NO: 1547031 - RNA, 19 nt, Homo sapiens
  misc_RNA (1)...(19): siRNA sense strand
gaagauuugcagaccuauu

SEQ ID NO: 1547032 - RNA, 19 nt, Homo sapiens
  misc_RNA (1)...(19): siRNA sense strand
uuacacagcugaggucuac

SEQ ID NO: 1547033 - RNA, 19 nt, Homo sapiens
  misc_RNA (1)...(19): siRNA sense strand
aggaagauuugcagaccua

SEQ ID NO: 1547034 - RNA, 19 nt, Homo sapiens
  misc_RNA (1)...(19): siRNA sense strand
ggacuuggucugugguuca

SEQ ID NO: 1547035 - RNA, 19 nt, Homo sapiens
  misc_RNA (1)...(19): siRNA sense strand
gaaucugcccgguucaaug

SEQ ID NO: 1547036 - RNA, 19 nt, Homo sapiens
  misc_RNA (1)...(19): siRNA sense strand
cugauuggcuuccucuuca

SEQ ID NO: 1547037 - RNA, 19 nt, Homo sapiens
  misc_RNA (1)...(19): siRNA sense strand
ccaccacgaugcgcgcuuu

SEQ ID NO: 1547038 - RNA, 19 nt, Homo sapiens
  misc_RNA (1)...(19): siRNA sense strand
gguuaaucauaaagacuga

SEQ ID NO: 1547039 - RNA, 19 nt, Homo sapiens
  misc_RNA (1)...(19): siRNA sense strand
ggucauauggcuuggaauc

SEQ ID NO: 1547040 - RNA, 19 nt, Homo sapiens
  misc_RNA (1)...(19): siRNA sense strand
ggcuauauguuacccuugu

SEQ ID NO: 1547041 - RNA, 19 nt, Homo sapiens
  misc_RNA (1)...(19): siRNA sense strand
cuucaacaccgucuacauu

SEQ ID NO: 1547042 - RNA, 19 nt, Homo sapiens
  misc_RNA (1)...(19): siRNA sense strand
uuacggaccacauuacaga

SEQ ID NO: 1547043 - RNA, 19 nt, Homo sapiens
  misc_RNA (1)...(19): siRNA sense strand
caacaccgucuacauuuac

SEQ ID NO: 1547044 - RNA, 19 nt, Homo sapiens
  misc_RNA (1)...(19): siRNA sense strand
aagauuugcagaccuauug

SEQ ID NO: 1547045 - RNA, 19 nt, Homo sapiens
  misc_RNA (1)...(19): siRNA sense strand
gcugagggcucugguagcu

SEQ ID NO: 1547046 - RNA, 19 nt, Homo sapiens
  misc_RNA (1)...(19): siRNA sense strand
ggaccacauuacagaucug

SEQ ID NO: 1547047 - RNA, 19 nt, Homo sapiens
  misc_RNA (1)...(19): siRNA sense strand
gaaucucuuuugccuacua

SEQ ID NO: 1547048 - RNA, 19 nt, Homo sapiens
  misc_RNA (1)...(19): siRNA sense strand
cauauggcuuggaaucucu

SEQ ID NO: 1547049 - RNA, 19 nt, Homo sapiens
  misc_RNA (1)...(19): siRNA sense strand
aucguggccuucaaguuua

SEQ ID NO: 1547050 - RNA, 19 nt, Homo sapiens
  misc_RNA (1)...(19): siRNA sense strand
ucauauggcuuggaaucuc

SEQ ID NO: 1547051 - RNA, 19 nt, Homo sapiens
  misc_RNA (1)...(19): siRNA sense strand
gcucccugcucaucauugg

SEQ ID NO: 1547052 - RNA, 19 nt, Homo sapiens
  misc_RNA (1)...(19): siRNA sense strand
uaccgaggcuauauguuac

SEQ ID NO: 1547053 - RNA, 19 nt, Homo sapiens
  misc_RNA (1)...(19): siRNA sense strand
gggcucugguagcugcaaa

SEQ ID NO: 1547054 - RNA, 19 nt, Homo sapiens
  misc_RNA (1)...(19): siRNA sense strand
cacgaaauaccgaggcuau

SEQ ID NO: 1547055 - RNA, 19 nt, Homo sapiens
  misc_RNA (1)...(19): siRNA sense strand
ugggucauauggcuuggaa

SEQ ID NO: 1547056 - RNA, 19 nt, Homo sapiens
  misc_RNA (1)...(19): siRNA sense strand
gacuuggucugugguucaa

SEQ ID NO: 1547057 - RNA, 19 nt, Homo sapiens
  misc_RNA (1)...(19): siRNA sense strand
aaauaccgaggcuauaugu

SEQ ID NO: 1547058 - RNA, 19 nt, Homo sapiens
  misc_RNA (1)...(19): siRNA sense strand
cugcuacugccacauguuu

SEQ ID NO: 1547059 - RNA, 19 nt, Homo sapiens
  misc_RNA (1)...(19): siRNA sense strand
uucaacaccgucuacauuu

SEQ ID NO: 1547060 - RNA, 19 nt, Homo sapiens
  misc_RNA (1)...(19): siRNA sense strand
gacuaucggaccaugauca

SEQ ID NO: 1547061 - RNA, 19 nt, Homo sapiens
  misc_RNA (1)...(19): siRNA sense strand
aaucugcccgguucaaugu

SEQ ID NO: 1547062 - RNA, 19 nt, Homo sapiens
  misc_RNA (1)...(19): siRNA sense strand
gcuauauguuacccuuguc

SEQ ID NO: 1547063 - RNA, 19 nt, Homo sapiens
  misc_RNA (1)...(19): siRNA sense strand
auauuuacggaccacauua

SEQ ID NO: 1547064 - RNA, 19 nt, Homo sapiens
  misc_RNA (1)...(19): siRNA sense strand
aauauuuacggaccacauu

SEQ ID NO: 1547065 - RNA, 19 nt, Homo sapiens
  misc_RNA (1)...(19): siRNA sense strand
ucaacaccgucuacauuua

SEQ ID NO: 1547066 - RNA, 19 nt, Homo sapiens
  misc_RNA (1)...(19): siRNA sense strand
uuacagaucugggucauau

SEQ ID NO: 1547067 - RNA, 19 nt, Homo sapiens
  misc_RNA (1)...(19): siRNA sense strand
caucguggccuucaaguuu

SEQ ID NO: 1547068 - RNA, 19 nt, Homo sapiens
  misc_RNA (1)...(19): siRNA sense strand
gaaauaccgaggcuauaug

SEQ ID NO: 1547069 - RNA, 19 nt, Homo sapiens
  misc_RNA (1)...(19): siRNA sense strand
ucugguagcugcaaacuuc

SEQ ID NO: 1547070 - RNA, 19 nt, Homo sapiens
  misc_RNA (1)...(19): siRNA sense strand
auaccgaggcuauauguua

SEQ ID NO: 1547071 - RNA, 19 nt, Homo sapiens
  misc_RNA (1)...(19): siRNA sense strand
gcagaccuauuggaugcua

SEQ ID NO: 1547072 - RNA, 19 nt, Homo sapiens
  misc_RNA (1)...(19): siRNA sense strand
ggucugugguucaaaguca

SEQ ID NO: 1547073 - RNA, 19 nt, Homo sapiens
  misc_RNA (1)...(19): siRNA sense strand
ccuccuggcugacagauau

SEQ ID NO: 1547074 - RNA, 19 nt, Homo sapiens
  misc_RNA (1)...(19): siRNA sense strand
cgaaauaccgaggcuauau

SEQ ID NO: 1547075 - RNA, 19 nt, Homo sapiens
  misc_RNA (1)...(19): siRNA sense strand
ggagcgcguugccaagaug

SEQ ID NO: 1547076 - RNA, 19 nt, Homo sapiens
  misc_RNA (1)...(19): siRNA sense strand
gaagauuugcagaccuauu

SEQ ID NO: 1547077 - RNA, 19 nt, Homo sapiens
  misc_RNA (1)...(19): siRNA sense strand
uuacacagcugaggucuac

SEQ ID NO: 1547078 - RNA, 19 nt, Homo sapiens
  misc_RNA (1)...(19): siRNA sense strand
aggaagauuugcagaccua

SEQ ID NO: 1547079 - RNA, 19 nt, Homo sapiens
  misc_RNA (1)...(19): siRNA sense strand
ggacuuggucugugguuca

SEQ ID NO: 1547080 - RNA, 19 nt, Homo sapiens
  misc_RNA (1)...(19): siRNA sense strand
gaaucugcccgguucaaug

SEQ ID NO: 1547081 - RNA, 19 nt, Homo sapiens
  misc_RNA (1)...(19): siRNA sense strand
cugauuggcuuccucuuca

SEQ ID NO: 1547082 - RNA, 19 nt, Homo sapiens
  misc_RNA (1)...(19): siRNA sense strand
ccaccacgaugcgcgcuuu

SEQ ID NO: 1547083 - RNA, 19 nt, Homo sapiens
  misc_RNA (1)...(19): siRNA sense strand
gguuaaucauaaagacuga

SEQ ID NO: 1547084 - RNA, 19 nt, Homo sapiens
  misc_RNA (1)...(19): siRNA sense strand
ggucauauggcuuggaauc

SEQ ID NO: 1547085 - RNA, 19 nt, Homo sapiens
  misc_RNA (1)...(19): siRNA sense strand
ggcuauauguuacccuugu

SEQ ID NO: 1547086 - RNA, 19 nt, Homo sapiens
  misc_RNA (1)...(19): siRNA sense strand
cuucaacaccgucuacauu

SEQ ID NO: 1547087 - RNA, 19 nt, Homo sapiens
  misc_RNA (1)...(19): siRNA sense strand
uuacggaccacauuacaga

SEQ ID NO: 1547088 - RNA, 19 nt, Homo sapiens
  misc_RNA (1)...(19): siRNA sense strand
caacaccgucuacauuuac

SEQ ID NO: 1547089 - RNA, 19 nt, Homo sapiens
  misc_RNA (1)...(19): siRNA sense strand
aagauuugcagaccuauug

SEQ ID NO: 1547090 - RNA, 19 nt, Homo sapiens
  misc_RNA (1)...(19): siRNA sense strand
gcugagggcucugguagcu

SEQ ID NO: 1547091 - RNA, 19 nt, Homo sapiens
  misc_RNA (1)...(19): siRNA sense strand
ggaccacauuacagaucug

SEQ ID NO: 1547092 - RNA, 19 nt, Homo sapiens
  misc_RNA (1)...(19): siRNA sense strand
gaaucucuuuugccuacua

SEQ ID NO: 1547093 - RNA, 19 nt, Homo sapiens
  misc_RNA (1)...(19): siRNA sense strand
cauauggcuuggaaucucu

SEQ ID NO: 1547094 - RNA, 19 nt, Homo sapiens
  misc_RNA (1)...(19): siRNA sense strand
aucguggccuucaaguuua

SEQ ID NO: 1547095 - RNA, 19 nt, Homo sapiens
  misc_RNA (1)...(19): siRNA sense strand
ucauauggcuuggaaucuc

SEQ ID NO: 1547096 - RNA, 19 nt, Homo sapiens
  misc_RNA (1)...(19): siRNA sense strand
uaccgaggcuauauguuac

SEQ ID NO: 1547097 - RNA, 19 nt, Homo sapiens
  misc_RNA (1)...(19): siRNA sense strand
gggcucugguagcugcaaa

SEQ ID NO: 1547098 - RNA, 19 nt, Homo sapiens
  misc_RNA (1)...(19): siRNA sense strand
gcucccugcucaucauugg

SEQ ID NO: 1547099 - RNA, 19 nt, Homo sapiens
  misc_RNA (1)...(19): siRNA sense strand
cacgaaauaccgaggcuau

SEQ ID NO: 1547100 - RNA, 19 nt, Homo sapiens
  misc_RNA (1)...(19): siRNA sense strand
ugggucauauggcuuggaa

SEQ ID NO: 1547101 - RNA, 19 nt, Homo sapiens
  misc_RNA (1)...(19): siRNA sense strand
gacuuggucugugguucaa

SEQ ID NO: 1547102 - RNA, 19 nt, Homo sapiens
  misc_RNA (1)...(19): siRNA sense strand
aaauaccgaggcuauaugu

SEQ ID NO: 1547103 - RNA, 19 nt, Homo sapiens
  misc_RNA (1)...(19): siRNA sense strand
cugcuacugccacauguuu

SEQ ID NO: 1547104 - RNA, 19 nt, Homo sapiens
  misc_RNA (1)...(19): siRNA sense strand
uucaacaccgucuacauuu

SEQ ID NO: 1547105 - RNA, 19 nt, Homo sapiens
  misc_RNA (1)...(19): siRNA sense strand
gacuaucggaccaugauca

SEQ ID NO: 1547106 - RNA, 19 nt, Homo sapiens
  misc_RNA (1)...(19): siRNA sense strand
aaucugcccgguucaaugu

SEQ ID NO: 1547107 - RNA, 19 nt, Homo sapiens
  misc_RNA (1)...(19): siRNA sense strand
gcuauauguuacccuuguc

SEQ ID NO: 1547108 - RNA, 19 nt, Homo sapiens
  misc_RNA (1)...(19): siRNA sense strand
auauuuacggaccacauua

SEQ ID NO: 1547109 - RNA, 19 nt, Homo sapiens
  misc_RNA (1)...(19): siRNA sense strand
aauauuuacggaccacauu

SEQ ID NO: 1547110 - RNA, 19 nt, Homo sapiens
  misc_RNA (1)...(19): siRNA sense strand
ucaacaccgucuacauuua

SEQ ID NO: 1547111 - RNA, 19 nt, Homo sapiens
  misc_RNA (1)...(19): siRNA sense strand
uuacagaucugggucauau

SEQ ID NO: 1547112 - RNA, 19 nt, Homo sapiens
  misc_RNA (1)...(19): siRNA sense strand
caucguggccuucaaguuu

SEQ ID NO: 1547113 - RNA, 19 nt, Homo sapiens
  misc_RNA (1)...(19): siRNA sense strand
gaaauaccgaggcuauaug

SEQ ID NO: 1547114 - RNA, 19 nt, Homo sapiens
  misc_RNA (1)...(19): siRNA sense strand
ucugguagcugcaaacuuc

SEQ ID NO: 1547115 - RNA, 19 nt, Homo sapiens
  misc_RNA (1)...(19): siRNA sense strand
auaccgaggcuauauguua

SEQ ID NO: 1547116 - RNA, 19 nt, Homo sapiens
  misc_RNA (1)...(19): siRNA sense strand
gcagaccuauuggaugcua

SEQ ID NO: 1547117 - RNA, 19 nt, Homo sapiens
  misc_RNA (1)...(19): siRNA sense strand
ggucugugguucaaaguca

SEQ ID NO: 1547118 - RNA, 19 nt, Homo sapiens
  misc_RNA (1)...(19): siRNA sense strand
ccuccuggcugacagauau

SEQ ID NO: 1547119 - RNA, 19 nt, Homo sapiens
  misc_RNA (1)...(19): siRNA sense strand
cgaaauaccgaggcuauau

SEQ ID NO: 1547120 - RNA, 19 nt, Homo sapiens
  misc_RNA (1)...(19): siRNA sense strand
ggagcgcguugccaagaug

SEQ ID NO: 1547121 - RNA, 19 nt, Homo sapiens
  misc_RNA (1)...(19): siRNA sense strand
gaagauuugcagaccuauu

SEQ ID NO: 1547122 - RNA, 19 nt, Homo sapiens
  misc_RNA (1)...(19): siRNA sense strand
uuacacagcugaggucuac

SEQ ID NO: 1547123 - RNA, 19 nt, Homo sapiens
  misc_RNA (1)...(19): siRNA sense strand
aggaagauuugcagaccua

SEQ ID NO: 1547124 - RNA, 19 nt, Homo sapiens
  misc_RNA (1)...(19): siRNA sense strand
ggacuuggucugugguuca

SEQ ID NO: 1547125 - RNA, 19 nt, Homo sapiens
  misc_RNA (1)...(19): siRNA sense strand
gaaucugcccgguucaaug

SEQ ID NO: 1547126 - RNA, 19 nt, Homo sapiens
  misc_RNA (1)...(19): siRNA sense strand
cugauuggcuuccucuuca

SEQ ID NO: 1547127 - RNA, 19 nt, Homo sapiens
  misc_RNA (1)...(19): siRNA sense strand
ccaccacgaugcgcgcuuu

SEQ ID NO: 1547128 - RNA, 19 nt, Homo sapiens
  misc_RNA (1)...(19): siRNA sense strand
gguuaaucauaaagacuga

SEQ ID NO: 1547129 - RNA, 19 nt, Homo sapiens
  misc_RNA (1)...(19): siRNA sense strand
ggucauauggcuuggaauc

SEQ ID NO: 1547130 - RNA, 19 nt, Homo sapiens
  misc_RNA (1)...(19): siRNA sense strand
ggcuauauguuacccuugu

SEQ ID NO: 1547131 - RNA, 19 nt, Homo sapiens
  misc_RNA (1)...(19): siRNA sense strand
cuucaacaccgucuacauu

SEQ ID NO: 1547132 - RNA, 19 nt, Homo sapiens
  misc_RNA (1)...(19): siRNA sense strand
uuacggaccacauuacaga

SEQ ID NO: 1547133 - RNA, 19 nt, Homo sapiens
  misc_RNA (1)...(19): siRNA sense strand
caacaccgucuacauuuac

SEQ ID NO: 1547134 - RNA, 19 nt, Homo sapiens
  misc_RNA (1)...(19): siRNA sense strand
aagauuugcagaccuauug

SEQ ID NO: 1547135 - RNA, 19 nt, Homo sapiens
  misc_RNA (1)...(19): siRNA sense strand
gcugagggcucugguagcu

SEQ ID NO: 1547136 - RNA, 19 nt, Homo sapiens
  misc_RNA (1)...(19): siRNA sense strand
ggaccacauuacagaucug

SEQ ID NO: 1547137 - RNA, 19 nt, Homo sapiens
  misc_RNA (1)...(19): siRNA sense strand
gaaucucuuuugccuacua

SEQ ID NO: 1547138 - RNA, 19 nt, Homo sapiens
  misc_RNA (1)...(19): siRNA sense strand
cauauggcuuggaaucucu

SEQ ID NO: 1547139 - RNA, 19 nt, Homo sapiens
  misc_RNA (1)...(19): siRNA sense strand
aucguggccuucaaguuua

SEQ ID NO: 1547140 - RNA, 19 nt, Homo sapiens
  misc_RNA (1)...(19): siRNA sense strand
ucauauggcuuggaaucuc

SEQ ID NO: 1547141 - RNA, 19 nt, Homo sapiens
  misc_RNA (1)...(19): siRNA sense strand
uaccgaggcuauauguuac

SEQ ID NO: 1547142 - RNA, 19 nt, Homo sapiens
  misc_RNA (1)...(19): siRNA sense strand
gggcucugguagcugcaaa

SEQ ID NO: 1547143 - RNA, 19 nt, Homo sapiens
  misc_RNA (1)...(19): siRNA sense strand
gcucccugcucaucauugg

SEQ ID NO: 1547144 - RNA, 19 nt, Homo sapiens
  misc_RNA (1)...(19): siRNA sense strand
cacgaaauaccgaggcuau

SEQ ID NO: 1547145 - RNA, 19 nt, Homo sapiens
  misc_RNA (1)...(19): siRNA sense strand
ugggucauauggcuuggaa

SEQ ID NO: 1547146 - RNA, 19 nt, Homo sapiens
  misc_RNA (1)...(19): siRNA sense strand
gacuuggucugugguucaa

SEQ ID NO: 1547147 - RNA, 19 nt, Homo sapiens
  misc_RNA (1)...(19): siRNA sense strand
aaauaccgaggcuauaugu

SEQ ID NO: 1547148 - RNA, 19 nt, Homo sapiens
  misc_RNA (1)...(19): siRNA sense strand
cugcuacugccacauguuu

SEQ ID NO: 1547149 - RNA, 19 nt, Homo sapiens
  misc_RNA (1)...(19): siRNA sense strand
uucaacaccgucuacauuu

SEQ ID NO: 1547150 - RNA, 19 nt, Homo sapiens
  misc_RNA (1)...(19): siRNA sense strand
gacuaucggaccaugauca

SEQ ID NO: 1547151 - RNA, 19 nt, Homo sapiens
  misc_RNA (1)...(19): siRNA sense strand
aaucugcccgguucaaugu

SEQ ID NO: 1547152 - RNA, 19 nt, Homo sapiens
  misc_RNA (1)...(19): siRNA sense strand
gcuauauguuacccuuguc

SEQ ID NO: 1547153 - RNA, 19 nt, Homo sapiens
  misc_RNA (1)...(19): siRNA sense strand
auauuuacggaccacauua

SEQ ID NO: 1547154 - RNA, 19 nt, Homo sapiens
  misc_RNA (1)...(19): siRNA sense strand
aauauuuacggaccacauu

SEQ ID NO: 1547155 - RNA, 19 nt, Homo sapiens
  misc_RNA (1)...(19): siRNA sense strand
gaaaacagcuggauccuuu

SEQ ID NO: 1547156 - RNA, 19 nt, Homo sapiens
  misc_RNA (1)...(19): siRNA sense strand
caacucaccugucaagauu

SEQ ID NO: 1547157 - RNA, 19 nt, Homo sapiens
  misc_RNA (1)...(19): siRNA sense strand
gaaaagaauugaugggaua

SEQ ID NO: 1547158 - RNA, 19 nt, Homo sapiens
  misc_RNA (1)...(19): siRNA sense strand
gcacugauauuaaggauac

SEQ ID NO: 1547159 - RNA, 19 nt, Homo sapiens
  misc_RNA (1)...(19): siRNA sense strand
uaaggaauaugauggauga

SEQ ID NO: 1547160 - RNA, 19 nt, Homo sapiens
  misc_RNA (1)...(19): siRNA sense strand
gcagucaccuccauaacaa

SEQ ID NO: 1547161 - RNA, 19 nt, Homo sapiens
  misc_RNA (1)...(19): siRNA sense strand
gagaagcuguacaagguaa

SEQ ID NO: 1547162 - RNA, 19 nt, Homo sapiens
  misc_RNA (1)...(19): siRNA sense strand
ggaucuagcuacccauuug

SEQ ID NO: 1547163 - RNA, 19 nt, Homo sapiens
  misc_RNA (1)...(19): siRNA sense strand
gugauuaucuggauggauu

SEQ ID NO: 1547164 - RNA, 19 nt, Homo sapiens
  misc_RNA (1)...(19): siRNA sense strand
uuaacgagcucaugaauag

SEQ ID NO: 1547165 - RNA, 19 nt, Homo sapiens
  misc_RNA (1)...(19): siRNA sense strand
ggaagacugugaggaauca

SEQ ID NO: 1547166 - RNA, 19 nt, Homo sapiens
  misc_RNA (1)...(19): siRNA sense strand
gaauagaguucuccuuuug

SEQ ID NO: 1547167 - RNA, 19 nt, Homo sapiens
  misc_RNA (1)...(19): siRNA sense strand
caagguaacuguguacauc

SEQ ID NO: 1547168 - RNA, 19 nt, Homo sapiens
  misc_RNA (1)...(19): siRNA sense strand
gaagaauguacaauccaua

SEQ ID NO: 1547169 - RNA, 19 nt, Homo sapiens
  misc_RNA (1)...(19): siRNA sense strand
gauggaccgugauacagaa

SEQ ID NO: 1547170 - RNA, 19 nt, Homo sapiens
  misc_RNA (1)...(19): siRNA sense strand
uaaggaagacugugaggaa

SEQ ID NO: 1547171 - RNA, 19 nt, Homo sapiens
  misc_RNA (1)...(19): siRNA sense strand
aagcuuccuuggauuauuu

SEQ ID NO: 1547172 - RNA, 19 nt, Homo sapiens
  misc_RNA (1)...(19): siRNA sense strand
uggagaagcuguacaaggu

SEQ ID NO: 1547173 - RNA, 19 nt, Homo sapiens
  misc_RNA (1)...(19): siRNA sense strand
auacauaauucacccagaa

SEQ ID NO: 1547174 - RNA, 19 nt, Homo sapiens
  misc_RNA (1)...(19): siRNA sense strand
gauauuaaggauaccauug

SEQ ID NO: 1547175 - RNA, 19 nt, Homo sapiens
  misc_RNA (1)...(19): siRNA sense strand
gguuuagauugcacugaua

SEQ ID NO: 1547176 - RNA, 19 nt, Homo sapiens
  misc_RNA (1)...(19): siRNA sense strand
ucacuucucuggaaaauug

SEQ ID NO: 1547177 - RNA, 19 nt, Homo sapiens
  misc_RNA (1)...(19): siRNA sense strand
uaacgaguguggucuagca

SEQ ID NO: 1547178 - RNA, 19 nt, Homo sapiens
  misc_RNA (1)...(19): siRNA sense strand
ggauggauuuggagaucuu

SEQ ID NO: 1547179 - RNA, 19 nt, Homo sapiens
  misc_RNA (1)...(19): siRNA sense strand
uaauugauuuccagagguu

SEQ ID NO: 1547180 - RNA, 19 nt, Homo sapiens
  misc_RNA (1)...(19): siRNA sense strand
aagaccggcuggugguuua

SEQ ID NO: 1547181 - RNA, 19 nt, Homo sapiens
  misc_RNA (1)...(19): siRNA sense strand
guaacuguguacaucauuc

SEQ ID NO: 1547182 - RNA, 19 nt, Homo sapiens
  misc_RNA (1)...(19): siRNA sense strand
gcacuuaggacgguauuca

SEQ ID NO: 1547183 - RNA, 19 nt, Homo sapiens
  misc_RNA (1)...(19): siRNA sense strand
ggagaagcuguacaaggua

SEQ ID NO: 1547184 - RNA, 19 nt, Homo sapiens
  misc_RNA (1)...(19): siRNA sense strand
ggauggaccgugauacaga

SEQ ID NO: 1547185 - RNA, 19 nt, Homo sapiens
  misc_RNA (1)...(19): siRNA sense strand
guauguggcuuuggaaucu

SEQ ID NO: 1547186 - RNA, 19 nt, Homo sapiens
  misc_RNA (1)...(19): siRNA sense strand
guuaacgagcucaugaaua

SEQ ID NO: 1547187 - RNA, 19 nt, Homo sapiens
  misc_RNA (1)...(19): siRNA sense strand
ucagucacaugguuuagau

SEQ ID NO: 1547188 - RNA, 19 nt, Homo sapiens
  misc_RNA (1)...(19): siRNA sense strand
ggacgguauucaggaaaug

SEQ ID NO: 1547189 - RNA, 19 nt, Homo sapiens
  misc_RNA (1)...(19): siRNA sense strand
acucaccugucaagauuaa

SEQ ID NO: 1547190 - RNA, 19 nt, Homo sapiens
  misc_RNA (1)...(19): siRNA sense strand
gcuugcaacuggaauucaa

SEQ ID NO: 1547191 - RNA, 19 nt, Homo sapiens
  misc_RNA (1)...(19): siRNA sense strand
uacggacucuucaguaguu

SEQ ID NO: 1547192 - RNA, 19 nt, Homo sapiens
  misc_RNA (1)...(19): siRNA sense strand
cgaguguggucuagcaaau

SEQ ID NO: 1547193 - RNA, 19 nt, Homo sapiens
  misc_RNA (1)...(19): siRNA sense strand
uaugauggaugagcaacaa

SEQ ID NO: 1547194 - RNA, 19 nt, Homo sapiens
  misc_RNA (1)...(19): siRNA sense strand
auucaucacuucucuggaa

SEQ ID NO: 1547195 - RNA, 19 nt, Homo sapiens
  misc_RNA (1)...(19): siRNA sense strand
cagagguuguggugugauu

SEQ ID NO: 1547196 - RNA, 19 nt, Homo sapiens
  misc_RNA (1)...(19): siRNA sense strand
gccucacucuuauucuuaa

SEQ ID NO: 1547197 - RNA, 19 nt, Homo sapiens
  misc_RNA (1)...(19): siRNA sense strand
agaugacacucuugcuuau

SEQ ID NO: 1547198 - RNA, 19 nt, Homo sapiens
  misc_RNA (1)...(19): siRNA sense strand
gagcugcagucaccuccau

SEQ ID NO: 1547199 - RNA, 19 nt, Homo sapiens
  misc_RNA (1)...(19): siRNA sense strand
cugcaugccuggucaaugg

SEQ ID NO: 1547200 - RNA, 19 nt, Homo sapiens
  misc_RNA (1)...(19): siRNA sense strand
ucccaagccucacucuuau

SEQ ID NO: 1547201 - RNA, 19 nt, Homo sapiens
  misc_RNA (1)...(19): siRNA sense strand
uaucuaaucagguuaacga

SEQ ID NO: 1547202 - RNA, 19 nt, Homo sapiens
  misc_RNA (1)...(19): siRNA sense strand
agaagaauguacaauccau

SEQ ID NO: 1547203 - RNA, 19 nt, Homo sapiens
  misc_RNA (1)...(19): siRNA sense strand
aaacaacucaccugucaag

SEQ ID NO: 1547204 - RNA, 19 nt, Homo sapiens
  misc_RNA (1)...(19): siRNA sense strand
accgagugguuuauacaua

SEQ ID NO: 1547205 - RNA, 19 nt, Homo sapiens
  misc_RNA (1)...(19): siRNA sense strand
ccaagccucacucuuauuc

SEQ ID NO: 1547206 - RNA, 19 nt, Homo sapiens
  misc_RNA (1)...(19): siRNA sense strand
ugaauagaguucuccuuuu

SEQ ID NO: 1547207 - RNA, 19 nt, Homo sapiens
  misc_RNA (1)...(19): siRNA sense strand
gaucuagcuacccauuuga

SEQ ID NO: 1547208 - RNA, 19 nt, Homo sapiens
  misc_RNA (1)...(19): siRNA sense strand
agauugcacugauauuaag

SEQ ID NO: 1547209 - RNA, 19 nt, Homo sapiens
  misc_RNA (1)...(19): siRNA sense strand
ucacaugguuuagauugca

SEQ ID NO: 1547210 - RNA, 19 nt, Homo sapiens
  misc_RNA (1)...(19): siRNA sense strand
gaauaugauggaugagcaa

SEQ ID NO: 1547211 - RNA, 19 nt, Homo sapiens
  misc_RNA (1)...(19): siRNA sense strand
uuaggacgguauucaggaa

SEQ ID NO: 1547212 - RNA, 19 nt, Homo sapiens
  misc_RNA (1)...(19): siRNA sense strand
gcucaugaauagaguucuc

SEQ ID NO: 1547213 - RNA, 19 nt, Homo sapiens
  misc_RNA (1)...(19): siRNA sense strand
aagccucacucuuauucuu

SEQ ID NO: 1547214 - RNA, 19 nt, Homo sapiens
  misc_RNA (1)...(19): siRNA sense strand
gagguuguggugugauuau

SEQ ID NO: 1547215 - RNA, 19 nt, Homo sapiens
  misc_RNA (1)...(19): siRNA sense strand
caagaccggcuggugguuu

SEQ ID NO: 1547216 - RNA, 19 nt, Homo sapiens
  misc_RNA (1)...(19): siRNA sense strand
cagguuaacgagcucauga

SEQ ID NO: 1547217 - RNA, 19 nt, Homo sapiens
  misc_RNA (1)...(19): siRNA sense strand
guaguuaacauuguagaag

SEQ ID NO: 1547218 - RNA, 19 nt, Homo sapiens
  misc_RNA (1)...(19): siRNA sense strand
ccuguucagucacaugguu

SEQ ID NO: 1547219 - RNA, 19 nt, Homo sapiens
  misc_RNA (1)...(19): siRNA sense strand
augaauagaguucuccuuu

SEQ ID NO: 1547220 - RNA, 19 nt, Homo sapiens
  misc_RNA (1)...(19): siRNA sense strand
aucccaagccucacucuua

SEQ ID NO: 1547221 - RNA, 19 nt, Homo sapiens
  misc_RNA (1)...(19): siRNA sense strand
gcugcagucaccuccauaa

SEQ ID NO: 1547222 - RNA, 19 nt, Homo sapiens
  misc_RNA (1)...(19): siRNA sense strand
ucaauggucagucugugaa

SEQ ID NO: 1547223 - RNA, 19 nt, Homo sapiens
  misc_RNA (1)...(19): siRNA sense strand
uaacauuguagaagaugga

SEQ ID NO: 1547224 - RNA, 19 nt, Homo sapiens
  misc_RNA (1)...(19): siRNA sense strand
uuagaagaauguacaaucc

SEQ ID NO: 1547225 - RNA, 19 nt, Homo sapiens
  misc_RNA (1)...(19): siRNA sense strand
cuucaguaguuaacauugu

SEQ ID NO: 1547226 - RNA, 19 nt, Homo sapiens
  misc_RNA (1)...(19): siRNA sense strand
ugauacuguuuguaaggaa

SEQ ID NO: 1547227 - RNA, 19 nt, Homo sapiens
  misc_RNA (1)...(19): siRNA sense strand
ggucuagcaaaucuaaaug

SEQ ID NO: 1547228 - RNA, 19 nt, Homo sapiens
  misc_RNA (1)...(19): siRNA sense strand
cauaauucacccagaagga

SEQ ID NO: 1547229 - RNA, 19 nt, Homo sapiens
  misc_RNA (1)...(19): siRNA sense strand
gagcucaugaauagaguuc

SEQ ID NO: 1547230 - RNA, 19 nt, Homo sapiens
  misc_RNA (1)...(19): siRNA sense strand
aggaaaugcuggugaugca

SEQ ID NO: 1547231 - RNA, 19 nt, Homo sapiens
  misc_RNA (1)...(19): siRNA sense strand
ggauuuggagaucuucuag

SEQ ID NO: 1547232 - RNA, 19 nt, Homo sapiens
  misc_RNA (1)...(19): siRNA sense strand
gguuaacgagcucaugaau

SEQ ID NO: 1547233 - RNA, 19 nt, Homo sapiens
  misc_RNA (1)...(19): siRNA sense strand
acaacucaccugucaagau

SEQ ID NO: 1547234 - RNA, 19 nt, Homo sapiens
  misc_RNA (1)...(19): siRNA sense strand
gguaacuguguacaucauu

SEQ ID NO: 1547235 - RNA, 19 nt, Homo sapiens
  misc_RNA (1)...(19): siRNA sense strand
guggugugauuaucuggau

SEQ ID NO: 1547236 - RNA, 19 nt, Homo sapiens
  misc_RNA (1)...(19): siRNA sense strand
guuguggugugauuaucug

SEQ ID NO: 1547237 - RNA, 19 nt, Homo sapiens
  misc_RNA (1)...(19): siRNA sense strand
aaggaagacugugaggaau

SEQ ID NO: 1547238 - RNA, 19 nt, Homo sapiens
  misc_RNA (1)...(19): siRNA sense strand
ucaccugucaagauuaaau

SEQ ID NO: 1547239 - RNA, 19 nt, Homo sapiens
  misc_RNA (1)...(19): siRNA sense strand
uagaggaugaaacgagauu

SEQ ID NO: 1547240 - RNA, 19 nt, Homo sapiens
  misc_RNA (1)...(19): siRNA sense strand
cuacacaagaaguaccaaa

SEQ ID NO: 1547241 - RNA, 19 nt, Homo sapiens
  misc_RNA (1)...(19): siRNA sense strand
auuuggagaucuucuagga

SEQ ID NO: 1547242 - RNA, 19 nt, Homo sapiens
  misc_RNA (1)...(19): siRNA sense strand
ugguuuagauugcacugau

SEQ ID NO: 1547243 - RNA, 19 nt, Homo sapiens
  misc_RNA (1)...(19): siRNA sense strand
gcaaaauucuauuguuucc

SEQ ID NO: 1547244 - RNA, 19 nt, Homo sapiens
  misc_RNA (1)...(19): siRNA sense strand
gaggaugaaacgagauuuu

SEQ ID NO: 1547245 - RNA, 19 nt, Homo sapiens
  misc_RNA (1)...(19): siRNA sense strand
gaugacacucuugcuuaug

SEQ ID NO: 1547246 - RNA, 19 nt, Homo sapiens
  misc_RNA (1)...(19): siRNA sense strand
ccucacucuuauucuuaaa

SEQ ID NO: 1547247 - RNA, 19 nt, Homo sapiens
  misc_RNA (1)...(19): siRNA sense strand
guggauggaccgugauaca

SEQ ID NO: 1547248 - RNA, 19 nt, Homo sapiens
  misc_RNA (1)...(19): siRNA sense strand
ggaguuggaucgauuauua

SEQ ID NO: 1547249 - RNA, 19 nt, Homo sapiens
  misc_RNA (1)...(19): siRNA sense strand
gcaaagcacuggcauauug

SEQ ID NO: 1547250 - RNA, 19 nt, Homo sapiens
  misc_RNA (1)...(19): siRNA sense strand
ucacaaauccucauucuua

SEQ ID NO: 1547251 - RNA, 19 nt, Homo sapiens
  misc_RNA (1)...(19): siRNA sense strand
gaauaaaccugcuuuccuu

SEQ ID NO: 1547252 - RNA, 19 nt, Homo sapiens
  misc_RNA (1)...(19): siRNA sense strand
gaggauagcuuguucuuuc

SEQ ID NO: 1547253 - RNA, 19 nt, Homo sapiens
  misc_RNA (1)...(19): siRNA sense strand
gagcuaaccugguaucaug

SEQ ID NO: 1547254 - RNA, 19 nt, Homo sapiens
  misc_RNA (1)...(19): siRNA sense strand
aaacaaagaugacucaaca

SEQ ID NO: 1547255 - RNA, 19 nt, Homo sapiens
  misc_RNA (1)...(19): siRNA sense strand
gaaagaaguaccugcauga

SEQ ID NO: 1547256 - RNA, 19 nt, Homo sapiens
  misc_RNA (1)...(19): siRNA sense strand
ggaaagaaccagaggaaga

SEQ ID NO: 1547257 - RNA, 19 nt, Homo sapiens
  misc_RNA (1)...(19): siRNA sense strand
ggaggaaucuuguuuagac

SEQ ID NO: 1547258 - RNA, 19 nt, Homo sapiens
  misc_RNA (1)...(19): siRNA sense strand
ccaaggaaauucugcauca

SEQ ID NO: 1547259 - RNA, 19 nt, Homo sapiens
  misc_RNA (1)...(19): siRNA sense strand
cugauaagaugaaucgaua

SEQ ID NO: 1547260 - RNA, 19 nt, Homo sapiens
  misc_RNA (1)...(19): siRNA sense strand
gauagacacugggcagaaa

SEQ ID NO: 1547261 - RNA, 19 nt, Homo sapiens
  misc_RNA (1)...(19): siRNA sense strand
ugaaagcuguauuugauga

SEQ ID NO: 1547262 - RNA, 19 nt, Homo sapiens
  misc_RNA (1)...(19): siRNA sense strand
guaaagauaugggacuuca

SEQ ID NO: 1547263 - RNA, 19 nt, Homo sapiens
  misc_RNA (1)...(19): siRNA sense strand
aaagaugacucaacauaca

SEQ ID NO: 1547264 - RNA, 19 nt, Homo sapiens
  misc_RNA (1)...(19): siRNA sense strand
gcagaaaucagcacuaugg

SEQ ID NO: 1547265 - RNA, 19 nt, Homo sapiens
  misc_RNA (1)...(19): siRNA sense strand
ugagccagguggucaguua

SEQ ID NO: 1547266 - RNA, 19 nt, Homo sapiens
  misc_RNA (1)...(19): siRNA sense strand
gaguuaugauggagaaauu

SEQ ID NO: 1547267 - RNA, 19 nt, Homo sapiens
  misc_RNA (1)...(19): siRNA sense strand
uguaauagccguccaauuc

SEQ ID NO: 1547268 - RNA, 19 nt, Homo sapiens
  misc_RNA (1)...(19): siRNA sense strand
acaaagaugacucaacaua

SEQ ID NO: 1547269 - RNA, 19 nt, Homo sapiens
  misc_RNA (1)...(19): siRNA sense strand
uaagaugaaucgauaccuu

SEQ ID NO: 1547270 - RNA, 19 nt, Homo sapiens
  misc_RNA (1)...(19): siRNA sense strand
cacaaauccucauucuuaa

SEQ ID NO: 1547271 - RNA, 19 nt, Homo sapiens
  misc_RNA (1)...(19): siRNA sense strand
agaugggacuguaaagaua

SEQ ID NO: 1547272 - RNA, 19 nt, Homo sapiens
  misc_RNA (1)...(19): siRNA sense strand
gcaaaugagacucggcuuu

SEQ ID NO: 1547273 - RNA, 19 nt, Homo sapiens
  misc_RNA (1)...(19): siRNA sense strand
agaaguaccugcaugaaag

SEQ ID NO: 1547274 - RNA, 19 nt, Homo sapiens
  misc_RNA (1)...(19): siRNA sense strand
ucagaugucucuuccacuu

SEQ ID NO: 1547275 - RNA, 19 nt, Homo sapiens
  misc_RNA (1)...(19): siRNA sense strand
uggaagagcugccugaagu

SEQ ID NO: 1547276 - RNA, 19 nt, Homo sapiens
  misc_RNA (1)...(19): siRNA sense strand
uaaggaggaaucuuguuua

SEQ ID NO: 1547277 - RNA, 19 nt, Homo sapiens
  misc_RNA (1)...(19): siRNA sense strand
gcagucacuuguguucuuu

SEQ ID NO: 1547278 - RNA, 19 nt, Homo sapiens
  misc_RNA (1)...(19): siRNA sense strand
uaccagagguugcuaaagu

SEQ ID NO: 1547279 - RNA, 19 nt, Homo sapiens
  misc_RNA (1)...(19): siRNA sense strand
uaaaccugcuuuccuucua

SEQ ID NO: 1547280 - RNA, 19 nt, Homo sapiens
  misc_RNA (1)...(19): siRNA sense strand
caaauccucauucuuaaga

SEQ ID NO: 1547281 - RNA, 19 nt, Homo sapiens
  misc_RNA (1)...(19): siRNA sense strand
gcaaugcuccuguuuggau

SEQ ID NO: 1547282 - RNA, 19 nt, Homo sapiens
  misc_RNA (1)...(19): siRNA sense strand
cugcuggcauuaacaauaa

SEQ ID NO: 1547283 - RNA, 19 nt, Homo sapiens
  misc_RNA (1)...(19): siRNA sense strand
aggaggagcuaaccuggua

SEQ ID NO: 1547284 - RNA, 19 nt, Homo sapiens
  misc_RNA (1)...(19): siRNA sense strand
agagaaugcucaccauguu

SEQ ID NO: 1547285 - RNA, 19 nt, Homo sapiens
  misc_RNA (1)...(19): siRNA sense strand
caucuugugugcugcguuu

SEQ ID NO: 1547286 - RNA, 19 nt, Homo sapiens
  misc_RNA (1)...(19): siRNA sense strand
guauacagcaccaugauga

SEQ ID NO: 1547287 - RNA, 19 nt, Homo sapiens
  misc_RNA (1)...(19): siRNA sense strand
auagaggaguacugucuua

SEQ ID NO: 1547288 - RNA, 19 nt, Homo sapiens
  misc_RNA (1)...(19): siRNA sense strand
agaaagcagucacuugugu

SEQ ID NO: 1547289 - RNA, 19 nt, Homo sapiens
  misc_RNA (1)...(19): siRNA sense strand
gaagagcugccugaaguga

SEQ ID NO: 1547290 - RNA, 19 nt, Homo sapiens
  misc_RNA (1)...(19): siRNA sense strand
gaauauagaggaguacugu

SEQ ID NO: 1547291 - RNA, 19 nt, Homo sapiens
  misc_RNA (1)...(19): siRNA sense strand
ggaagagcguccccaaauu

SEQ ID NO: 1547292 - RNA, 19 nt, Homo sapiens
  misc_RNA (1)...(19): siRNA sense strand
gaggaguacugucuuaacu

SEQ ID NO: 1547293 - RNA, 19 nt, Homo sapiens
  misc_RNA (1)...(19): siRNA sense strand
uaugggacuucaauggaua

SEQ ID NO: 1547294 - RNA, 19 nt, Homo sapiens
  misc_RNA (1)...(19): siRNA sense strand
cacaggagaucuugaugga

SEQ ID NO: 1547295 - RNA, 19 nt, Homo sapiens
  misc_RNA (1)...(19): siRNA sense strand
agauggagcuguggauauu

SEQ ID NO: 1547296 - RNA, 19 nt, Homo sapiens
  misc_RNA (1)...(19): siRNA sense strand
gauaugggacuucaaugga

SEQ ID NO: 1547297 - RNA, 19 nt, Homo sapiens
  misc_RNA (1)...(19): siRNA sense strand
gaaagaaccagaggaagag

SEQ ID NO: 1547298 - RNA, 19 nt, Homo sapiens
  misc_RNA (1)...(19): siRNA sense strand
gaucgauuauuaugucuac

SEQ ID NO: 1547299 - RNA, 19 nt, Homo sapiens
  misc_RNA (1)...(19): siRNA sense strand
gaacaauagcacagagaau

SEQ ID NO: 1547300 - RNA, 19 nt, Homo sapiens
  misc_RNA (1)...(19): siRNA sense strand
ggaacaauagcacagagaa

SEQ ID NO: 1547301 - RNA, 19 nt, Homo sapiens
  misc_RNA (1)...(19): siRNA sense strand
caccauacacuaaauguug

SEQ ID NO: 1547302 - RNA, 19 nt, Homo sapiens
  misc_RNA (1)...(19): siRNA sense strand
caugaggaccgaauaaguu

SEQ ID NO: 1547303 - RNA, 19 nt, Homo sapiens
  misc_RNA (1)...(19): siRNA sense strand
gaaagcagucacuuguguu

SEQ ID NO: 1547304 - RNA, 19 nt, Homo sapiens
  misc_RNA (1)...(19): siRNA sense strand
aggaaauucugcaucauga

SEQ ID NO: 1547305 - RNA, 19 nt, Homo sapiens
  misc_RNA (1)...(19): siRNA sense strand
uaugacauccuucaacauu

SEQ ID NO: 1547306 - RNA, 19 nt, Homo sapiens
  misc_RNA (1)...(19): siRNA sense strand
agagguugcuaaagucaaa

SEQ ID NO: 1547307 - RNA, 19 nt, Homo sapiens
  misc_RNA (1)...(19): siRNA sense strand
uaauagccguccaauucuu

SEQ ID NO: 1547308 - RNA, 19 nt, Homo sapiens
  misc_RNA (1)...(19): siRNA sense strand
aagcaauuaugccaagaaa

SEQ ID NO: 1547309 - RNA, 19 nt, Homo sapiens
  misc_RNA (1)...(19): siRNA sense strand
ccugagaaauacuuuagga

SEQ ID NO: 1547310 - RNA, 19 nt, Homo sapiens
  misc_RNA (1)...(19): siRNA sense strand
gaaguaccugcaugaaaga

SEQ ID NO: 1547311 - RNA, 19 nt, Homo sapiens
  misc_RNA (1)...(19): siRNA sense strand
cuaaggaggaaucuuguuu

SEQ ID NO: 1547312 - RNA, 19 nt, Homo sapiens
  misc_RNA (1)...(19): siRNA sense strand
ugagaaagcagucacuugu

SEQ ID NO: 1547313 - RNA, 19 nt, Homo sapiens
  misc_RNA (1)...(19): siRNA sense strand
aauaugacauccuucaaca

SEQ ID NO: 1547314 - RNA, 19 nt, Homo sapiens
  misc_RNA (1)...(19): siRNA sense strand
acaauucuaucuugaagca

SEQ ID NO: 1547315 - RNA, 19 nt, Homo sapiens
  misc_RNA (1)...(19): siRNA sense strand
ggacuucagaugucucuuc

SEQ ID NO: 1547316 - RNA, 19 nt, Homo sapiens
  misc_RNA (1)...(19): siRNA sense strand
cgauuauuaugucuacuga

SEQ ID NO: 1547317 - RNA, 19 nt, Homo sapiens
  misc_RNA (1)...(19): siRNA sense strand
caagauggagcuguggaua

SEQ ID NO: 1547318 - RNA, 19 nt, Homo sapiens
  misc_RNA (1)...(19): siRNA sense strand
aagaugaaucgauaccuua

SEQ ID NO: 1547319 - RNA, 19 nt, Homo sapiens
  misc_RNA (1)...(19): siRNA sense strand
aaagugagauucaaaagga

SEQ ID NO: 1547320 - RNA, 19 nt, Homo sapiens
  misc_RNA (1)...(19): siRNA sense strand
gauaagaucauuccaaccu

SEQ ID NO: 1547321 - RNA, 19 nt, Homo sapiens
  misc_RNA (1)...(19): siRNA sense strand
cauccagccugaagaaugg

SEQ ID NO: 1547322 - RNA, 19 nt, Homo sapiens
  misc_RNA (1)...(19): siRNA sense strand
cagaccaucagaagauaua

SEQ ID NO: 1547323 - RNA, 19 nt, Homo sapiens
  misc_RNA (1)...(19): siRNA sense strand
gguaucauguggaggaucu

SEQ ID NO: 1547324 - RNA, 19 nt, Homo sapiens
  misc_RNA (1)...(19): siRNA sense strand
uaugagacuuugcuuucuu

SEQ ID NO: 1547325 - RNA, 19 nt, Homo sapiens
  misc_RNA (1)...(19): siRNA sense strand
guuaugagacuuugcuuuc

SEQ ID NO: 1547326 - RNA, 19 nt, Homo sapiens
  misc_RNA (1)...(19): siRNA sense strand
gauugacacugagggcaaa

SEQ ID NO: 1547327 - RNA, 19 nt, Homo sapiens
  misc_RNA (1)...(19): siRNA sense strand
caacugcuggcauuaacaa

SEQ ID NO: 1547328 - RNA, 19 nt, Homo sapiens
  misc_RNA (1)...(19): siRNA sense strand
ucuggaauauagaggagua

SEQ ID NO: 1547329 - RNA, 19 nt, Homo sapiens
  misc_RNA (1)...(19): siRNA sense strand
acuuugagauugacacuga

SEQ ID NO: 1547330 - RNA, 19 nt, Homo sapiens
  misc_RNA (1)...(19): siRNA sense strand
uuaauaaccagcuagcauu

SEQ ID NO: 1547331 - RNA, 19 nt, Homo sapiens
  misc_RNA (1)...(19): siRNA sense strand
agaugucucuuccacuuug

SEQ ID NO: 1547332 - RNA, 19 nt, Homo sapiens
  misc_RNA (1)...(19): siRNA sense strand
gaaauucugcaucaugaac

SEQ ID NO: 1547333 - RNA, 19 nt, Homo sapiens
  misc_RNA (1)...(19): siRNA sense strand
uaacuccaguaagaacaaa

SEQ ID NO: 1547334 - RNA, 19 nt, Homo sapiens
  misc_RNA (1)...(19): siRNA sense strand
aaagauaugggacuucaau

SEQ ID NO: 1547335 - RNA, 19 nt, Homo sapiens
  misc_RNA (1)...(19): siRNA sense strand
cuauggcccuugaugcaaa

SEQ ID NO: 1547336 - RNA, 19 nt, Homo sapiens
  misc_RNA (1)...(19): siRNA sense strand
ggucuacuguuuccuucug

SEQ ID NO: 1547337 - RNA, 19 nt, Homo sapiens
  misc_RNA (1)...(19): siRNA sense strand
gaaaagccaugagaaagca

SEQ ID NO: 1547338 - RNA, 19 nt, Homo sapiens
  misc_RNA (1)...(19): siRNA sense strand
gucagaccaucagaagaua

SEQ ID NO: 1547339 - RNA, 19 nt, Homo sapiens
  misc_RNA (1)...(19): siRNA sense strand
caaagaugacucaacauac

SEQ ID NO: 1547340 - RNA, 19 nt, Homo sapiens
  misc_RNA (1)...(19): siRNA sense strand
caaagcacuggcauauuga

SEQ ID NO: 1547341 - RNA, 19 nt, Homo sapiens
  misc_RNA (1)...(19): siRNA sense strand
uggaggaucugguuauguc

SEQ ID NO: 1547342 - RNA, 19 nt, Homo sapiens
  misc_RNA (1)...(19): siRNA sense strand
augagacuuugcuuucuua

SEQ ID NO: 1547343 - RNA, 19 nt, Homo sapiens
  misc_RNA (1)...(19): siRNA sense strand
gaagaauggaaaggaggua

SEQ ID NO: 1547344 - RNA, 19 nt, Homo sapiens
  misc_RNA (1)...(19): siRNA sense strand
auaaccagcuagcauuguu

SEQ ID NO: 1547345 - RNA, 19 nt, Homo sapiens
  misc_RNA (1)...(19): siRNA sense strand
ggaaauucugcaucaugaa

SEQ ID NO: 1547346 - RNA, 19 nt, Homo sapiens
  misc_RNA (1)...(19): siRNA sense strand
gggagagggcuauuacugu

SEQ ID NO: 1547347 - RNA, 19 nt, Homo sapiens
  misc_RNA (1)...(19): siRNA sense strand
caguacauuuaggucauua

SEQ ID NO: 1547348 - RNA, 19 nt, Homo sapiens
  misc_RNA (1)...(19): siRNA sense strand
ccagagacauuuaacauug

SEQ ID NO: 1547349 - RNA, 19 nt, Homo sapiens
  misc_RNA (1)...(19): siRNA sense strand
gcagauaucauucuacaau

SEQ ID NO: 1547350 - RNA, 19 nt, Homo sapiens
  misc_RNA (1)...(19): siRNA sense strand
ucacagaccugaguuuaug

SEQ ID NO: 1547351 - RNA, 19 nt, Homo sapiens
  misc_RNA (1)...(19): siRNA sense strand
gcaaaauacuccuuagaaa

SEQ ID NO: 1547352 - RNA, 19 nt, Homo sapiens
  misc_RNA (1)...(19): siRNA sense strand
ggagagagaacauggagaa

SEQ ID NO: 1547353 - RNA, 19 nt, Homo sapiens
  misc_RNA (1)...(19): siRNA sense strand
gagagaacauggagaaacu

SEQ ID NO: 1547354 - RNA, 19 nt, Homo sapiens
  misc_RNA (1)...(19): siRNA sense strand
acaagaggcugcugagaau

SEQ ID NO: 1547355 - RNA, 19 nt, Homo sapiens
  misc_RNA (1)...(19): siRNA sense strand
gggcagauaucauucuaca

SEQ ID NO: 1547356 - RNA, 19 nt, Homo sapiens
  misc_RNA (1)...(19): siRNA sense strand
cauauugacugaugagcaa

SEQ ID NO: 1547357 - RNA, 19 nt, Homo sapiens
  misc_RNA (1)...(19): siRNA sense strand
gaacacaucgagggagaaa

SEQ ID NO: 1547358 - RNA, 19 nt, Homo sapiens
  misc_RNA (1)...(19): siRNA sense strand
gaaugcauaucugacuuga

SEQ ID NO: 1547359 - RNA, 19 nt, Homo sapiens
  misc_RNA (1)...(19): siRNA sense strand
caagaaagaauggcgauga

SEQ ID NO: 1547360 - RNA, 19 nt, Homo sapiens
  misc_RNA (1)...(19): siRNA sense strand
ggacucagcagcauguuca

SEQ ID NO: 1547361 - RNA, 19 nt, Homo sapiens
  misc_RNA (1)...(19): siRNA sense strand
gaacauggagaaacugaag

SEQ ID NO: 1547362 - RNA, 19 nt, Homo sapiens
  misc_RNA (1)...(19): siRNA sense strand
ccaccgagcuagaggagau

SEQ ID NO: 1547363 - RNA, 19 nt, Homo sapiens
  misc_RNA (1)...(19): siRNA sense strand
acuaugagauugagacaug

SEQ ID NO: 1547364 - RNA, 19 nt, Homo sapiens
  misc_RNA (1)...(19): siRNA sense strand
caggaaauauugaacacau

SEQ ID NO: 1547365 - RNA, 19 nt, Homo sapiens
  misc_RNA (1)...(19): siRNA sense strand
aagaggcugcugagaauua

SEQ ID NO: 1547366 - RNA, 19 nt, Homo sapiens
  misc_RNA (1)...(19): siRNA sense strand
ugaagcagcuaaaagcaua

SEQ ID NO: 1547367 - RNA, 19 nt, Homo sapiens
  misc_RNA (1)...(19): siRNA sense strand
caacaugguccuucuugug

SEQ ID NO: 1547368 - RNA, 19 nt, Homo sapiens
  misc_RNA (1)...(19): siRNA sense strand
uaucacagaccugaguuua

SEQ ID NO: 1547369 - RNA, 19 nt, Homo sapiens
  misc_RNA (1)...(19): siRNA sense strand
gagaauuacaggaaguuau

SEQ ID NO: 1547370 - RNA, 19 nt, Homo sapiens
  misc_RNA (1)...(19): siRNA sense strand
ccugagaacuaugagauug

SEQ ID NO: 1547371 - RNA, 19 nt, Homo sapiens
  misc_RNA (1)...(19): siRNA sense strand
gacuugaaccugagagaaa

SEQ ID NO: 1547372 - RNA, 19 nt, Homo sapiens
  misc_RNA (1)...(19): siRNA sense strand
gaaacuugaagcagcuaaa

SEQ ID NO: 1547373 - RNA, 19 nt, Homo sapiens
  misc_RNA (1)...(19): siRNA sense strand
gguggcaagugggcauaua

SEQ ID NO: 1547374 - RNA, 19 nt, Homo sapiens
  misc_RNA (1)...(19): siRNA sense strand
ggaaugcauaucugacuug

SEQ ID NO: 1547375 - RNA, 19 nt, Homo sapiens
  misc_RNA (1)...(19): siRNA sense strand
ggaagaggaacaaaauuuu

SEQ ID NO: 1547376 - RNA, 19 nt, Homo sapiens
  misc_RNA (1)...(19): siRNA sense strand
gagaacauggagaaacuga

SEQ ID NO: 1547377 - RNA, 19 nt, Homo sapiens
  misc_RNA (1)...(19): siRNA sense strand
gagucugaguauaguauga

SEQ ID NO: 1547378 - RNA, 19 nt, Homo sapiens
  misc_RNA (1)...(19): siRNA sense strand
agacuccgguuguugaaug

SEQ ID NO: 1547379 - RNA, 19 nt, Homo sapiens
  misc_RNA (1)...(19): siRNA sense strand
agaugucccucauuuacaa

SEQ ID NO: 1547380 - RNA, 19 nt, Homo sapiens
  misc_RNA (1)...(19): siRNA sense strand
guacuccagagacauuuaa

SEQ ID NO: 1547381 - RNA, 19 nt, Homo sapiens
  misc_RNA (1)...(19): siRNA sense strand
gaugauugagucugaguau

SEQ ID NO: 1547382 - RNA, 19 nt, Homo sapiens
  misc_RNA (1)...(19): siRNA sense strand
ucagaguacuccagagaca

SEQ ID NO: 1547383 - RNA, 19 nt, Homo sapiens
  misc_RNA (1)...(19): siRNA sense strand
cagcaggaaugcauaucug

SEQ ID NO: 1547384 - RNA, 19 nt, Homo sapiens
  misc_RNA (1)...(19): siRNA sense strand
gaacacgggcagauaucau

SEQ ID NO: 1547385 - RNA, 19 nt, Homo sapiens
  misc_RNA (1)...(19): siRNA sense strand
guaugagacuccgguuguu

SEQ ID NO: 1547386 - RNA, 19 nt, Homo sapiens
  misc_RNA (1)...(19): siRNA sense strand
accgagaugucccucauuu

SEQ ID NO: 1547387 - RNA, 19 nt, Homo sapiens
  misc_RNA (1)...(19): siRNA sense strand
uacaagaggcugcugagaa

SEQ ID NO: 1547388 - RNA, 19 nt, Homo sapiens
  misc_RNA (1)...(19): siRNA sense strand
guuguugaaugaagagugu

SEQ ID NO: 1547389 - RNA, 19 nt, Homo sapiens
  misc_RNA (1)...(19): siRNA sense strand
cgagaugucccucauuuac

SEQ ID NO: 1547390 - RNA, 19 nt, Homo sapiens
  misc_RNA (1)...(19): siRNA sense strand
gcugagaauuacaggaagu

SEQ ID NO: 1547391 - RNA, 19 nt, Homo sapiens
  misc_RNA (1)...(19): siRNA sense strand
gaacuaugagauugagaca

SEQ ID NO: 1547392 - RNA, 19 nt, Homo sapiens
  misc_RNA (1)...(19): siRNA sense strand
gaggaccugagaacuauga

SEQ ID NO: 1547393 - RNA, 19 nt, Homo sapiens
  misc_RNA (1)...(19): siRNA sense strand
cugaggaccugagaacuau

SEQ ID NO: 1547394 - RNA, 19 nt, Homo sapiens
  misc_RNA (1)...(19): siRNA sense strand
uaagaggacucagcagcau

SEQ ID NO: 1547395 - RNA, 19 nt, Homo sapiens
  misc_RNA (1)...(19): siRNA sense strand
aagaaagaauggcgaugau

SEQ ID NO: 1547396 - RNA, 19 nt, Homo sapiens
  misc_RNA (1)...(19): siRNA sense strand
cagacucccucaccaucuu

SEQ ID NO: 1547397 - RNA, 19 nt, Homo sapiens
  misc_RNA (1)...(19): siRNA sense strand
aacauuggauccugaaaca

SEQ ID NO: 1547398 - RNA, 19 nt, Homo sapiens
  misc_RNA (1)...(19): siRNA sense strand
aaaagaugauugagucuga

SEQ ID NO: 1547399 - RNA, 19 nt, Homo sapiens
  misc_RNA (1)...(19): siRNA sense strand
gagaugucccucauuuaca

SEQ ID NO: 1547400 - RNA, 19 nt, Homo sapiens
  misc_RNA (1)...(19): siRNA sense strand
gaccugagaacuaugagau

SEQ ID NO: 1547401 - RNA, 19 nt, Homo sapiens
  misc_RNA (1)...(19): siRNA sense strand
caucguggagcuugagaaa

SEQ ID NO: 1547402 - RNA, 19 nt, Homo sapiens
  misc_RNA (1)...(19): siRNA sense strand
gagacagcaggaaugcaua

SEQ ID NO: 1547403 - RNA, 19 nt, Homo sapiens
  misc_RNA (1)...(19): siRNA sense strand
gauugagucugaguauagu

SEQ ID NO: 1547404 - RNA, 19 nt, Homo sapiens
  misc_RNA (1)...(19): siRNA sense strand
ugaagagugugagcagaau

SEQ ID NO: 1547405 - RNA, 19 nt, Homo sapiens
  misc_RNA (1)...(19): siRNA sense strand
gcucaagaaugcaaaauac

SEQ ID NO: 1547406 - RNA, 19 nt, Homo sapiens
  misc_RNA (1)...(19): siRNA sense strand
ucugaggaccugagaacua

SEQ ID NO: 1547407 - RNA, 19 nt, Homo sapiens
  misc_RNA (1)...(19): siRNA sense strand
cagagacauuuaacauugg

SEQ ID NO: 1547408 - RNA, 19 nt, Homo sapiens
  misc_RNA (1)...(19): siRNA sense strand
guucagaguacuccagaga

SEQ ID NO: 1547409 - RNA, 19 nt, Homo sapiens
  misc_RNA (1)...(19): siRNA sense strand
augcauaucugacuugaac

SEQ ID NO: 1547410 - RNA, 19 nt, Homo sapiens
  misc_RNA (1)...(19): siRNA sense strand
ugauugagucugaguauag

SEQ ID NO: 1547411 - RNA, 19 nt, Homo sapiens
  misc_RNA (1)...(19): siRNA sense strand
ugaccgagaugucccucau

SEQ ID NO: 1547412 - RNA, 19 nt, Homo sapiens
  misc_RNA (1)...(19): siRNA sense strand
ggacacaguugggguuuuc

SEQ ID NO: 1547413 - RNA, 19 nt, Homo sapiens
  misc_RNA (1)...(19): siRNA sense strand
gaaugcaaaauacuccuua

SEQ ID NO: 1547414 - RNA, 19 nt, Homo sapiens
  misc_RNA (1)...(19): siRNA sense strand
ccgagaugucccucauuua

SEQ ID NO: 1547415 - RNA, 19 nt, Homo sapiens
  misc_RNA (1)...(19): siRNA sense strand
cuaaaagcauauugacuga

SEQ ID NO: 1547416 - RNA, 19 nt, Homo sapiens
  misc_RNA (1)...(19): siRNA sense strand
aaaagcauauugacugaug

SEQ ID NO: 1547417 - RNA, 19 nt, Homo sapiens
  misc_RNA (1)...(19): siRNA sense strand
aaagcauauugacugauga

SEQ ID NO: 1547418 - RNA, 19 nt, Homo sapiens
  misc_RNA (1)...(19): siRNA sense strand
caugguccuucuugugaug

SEQ ID NO: 1547419 - RNA, 19 nt, Homo sapiens
  misc_RNA (1)...(19): siRNA sense strand
ccaaauggagacacaaguc

SEQ ID NO: 1547420 - RNA, 19 nt, Homo sapiens
  misc_RNA (1)...(19): siRNA sense strand
uggcgaugauucaggaaga

SEQ ID NO: 1547421 - RNA, 19 nt, Homo sapiens
  misc_RNA (1)...(19): siRNA sense strand
uggcaacccagaaagauug

SEQ ID NO: 1547422 - RNA, 19 nt, Homo sapiens
  misc_RNA (1)...(19): siRNA sense strand
cagcagcauguucagagua

SEQ ID NO: 1547423 - RNA, 19 nt, Homo sapiens
  misc_RNA (1)...(19): siRNA sense strand
caucgagggagaaacuuga

SEQ ID NO: 1547424 - RNA, 19 nt, Homo sapiens
  misc_RNA (1)...(19): siRNA sense strand
gagagagaacauggagaaa

SEQ ID NO: 1547425 - RNA, 19 nt, Homo sapiens
  misc_RNA (1)...(19): siRNA sense strand
gacuccgguuguugaauga

SEQ ID NO: 1547426 - RNA, 19 nt, Homo sapiens
  misc_RNA (1)...(19): siRNA sense strand
ugucccucauuuacaauuu

SEQ ID NO: 1547427 - RNA, 19 nt, Homo sapiens
  misc_RNA (1)...(19): siRNA sense strand
aaaagaaguuggacacagu

SEQ ID NO: 1547428 - RNA, 19 nt, Homo sapiens
  misc_RNA (1)...(19): siRNA sense strand
agagacauuuaacauugga

SEQ ID NO: 1547429 - RNA, 19 nt, Homo sapiens
  misc_RNA (1)...(19): siRNA sense strand
ugagaauuacaggaaguua

SEQ ID NO: 1547430 - RNA, 19 nt, Homo sapiens
  misc_RNA (1)...(19): siRNA sense strand
agaguacuccagagacauu

SEQ ID NO: 1547431 - RNA, 19 nt, Homo sapiens
  misc_RNA (1)...(19): siRNA sense strand
aacaugguccuucuuguga

SEQ ID NO: 1547432 - RNA, 19 nt, Homo sapiens
  misc_RNA (1)...(19): siRNA sense strand
gaugauucaggaagaggaa

SEQ ID NO: 1547433 - RNA, 19 nt, Homo sapiens
  misc_RNA (1)...(19): siRNA sense strand
gaaacugaaggagagugaa

SEQ ID NO: 1547434 - RNA, 19 nt, Homo sapiens
  misc_RNA (1)...(19): siRNA sense strand
gaaauauugaacacaucga

SEQ ID NO: 1547435 - RNA, 19 nt, Homo sapiens
  misc_RNA (1)...(19): siRNA sense strand
gaaacccuucugaaucaag

SEQ ID NO: 1547436 - RNA, 19 nt, Homo sapiens
  misc_RNA (1)...(19): siRNA sense strand
uaucccaaauggagacaca

SEQ ID NO: 1547437 - RNA, 19 nt, Homo sapiens
  misc_RNA (1)...(19): siRNA sense strand
ggagcucucaggccugugu

SEQ ID NO: 1547438 - RNA, 19 nt, Homo sapiens
  misc_RNA (1)...(19): siRNA sense strand
ucuacaaugugaccgagau

SEQ ID NO: 1547439 - RNA, 19 nt, Homo sapiens
  misc_RNA (1)...(19): siRNA sense strand
ugagaacuaugagauugag

SEQ ID NO: 1547440 - RNA, 19 nt, Homo sapiens
  misc_RNA (1)...(19): siRNA sense strand
ggaccugagaacuaugaga

SEQ ID NO: 1547441 - RNA, 19 nt, Homo sapiens
  misc_RNA (1)...(19): siRNA sense strand
gaugagcaagaaagaaugg

SEQ ID NO: 1547442 - RNA, 19 nt, Homo sapiens
  misc_RNA (1)...(19): siRNA sense strand
ugacugaugagcaagaaag

SEQ ID NO: 1547443 - RNA, 19 nt, Homo sapiens
  misc_RNA (1)...(19): siRNA sense strand
gaagagugugagcagaauc

SEQ ID NO: 1547444 - RNA, 19 nt, Homo sapiens
  misc_RNA (1)...(19): siRNA sense strand
uaacauuggauccugaaac

SEQ ID NO: 1547445 - RNA, 19 nt, Homo sapiens
  misc_RNA (1)...(19): siRNA sense strand
caaaauacuccuuagaaag

SEQ ID NO: 1547446 - RNA, 19 nt, Homo sapiens
  misc_RNA (1)...(19): siRNA sense strand
agaaagaauggcgaugauu

SEQ ID NO: 1547447 - RNA, 19 nt, Homo sapiens
  misc_RNA (1)...(19): siRNA sense strand
ccaggaaaugcuacagaga

SEQ ID NO: 1547448 - RNA, 19 nt, Homo sapiens
  misc_RNA (1)...(19): siRNA sense strand
ggagggagauguggaugua

SEQ ID NO: 1547449 - RNA, 19 nt, Homo sapiens
  misc_RNA (1)...(19): siRNA sense strand
caacagacacugggaauuu

SEQ ID NO: 1547450 - RNA, 19 nt, Homo sapiens
  misc_RNA (1)...(19): siRNA sense strand
ugaaggagaugcaagauca

SEQ ID NO: 1547451 - RNA, 19 nt, Homo sapiens
  misc_RNA (1)...(19): siRNA sense strand
caaagacggugaaggugaa

SEQ ID NO: 1547452 - RNA, 19 nt, Homo sapiens
  misc_RNA (1)...(19): siRNA sense strand
cuacagggauccauaaauc

SEQ ID NO: 1547453 - RNA, 19 nt, Homo sapiens
  misc_RNA (1)...(19): siRNA sense strand
aagaagaaguucagagaga

SEQ ID NO: 1547454 - RNA, 19 nt, Homo sapiens
  misc_RNA (1)...(19): siRNA sense strand
gcagggcucucgcagaaca

SEQ ID NO: 1547455 - RNA, 19 nt, Homo sapiens
  misc_RNA (1)...(19): siRNA sense strand
ugagacagcugauggucaa

SEQ ID NO: 1547456 - RNA, 19 nt, Homo sapiens
  misc_RNA (1)...(19): siRNA sense strand
gaaccuguauguggugaug

SEQ ID NO: 1547457 - RNA, 19 nt, Homo sapiens
  misc_RNA (1)...(19): siRNA sense strand
gcaaagaugagugggauau

SEQ ID NO: 1547458 - RNA, 19 nt, Homo sapiens
  misc_RNA (1)...(19): siRNA sense strand
gagagagacccaacaagug

SEQ ID NO: 1547459 - RNA, 19 nt, Homo sapiens
  misc_RNA (1)...(19): siRNA sense strand
aaagaugagugggauauuc

SEQ ID NO: 1547460 - RNA, 19 nt, Homo sapiens
  misc_RNA (1)...(19): siRNA sense strand
agaacuuccugcuggauaa

SEQ ID NO: 1547461 - RNA, 19 nt, Homo sapiens
  misc_RNA (1)...(19): siRNA sense strand
gcucagcucccucagcaaa

SEQ ID NO: 1547462 - RNA, 19 nt, Homo sapiens
  misc_RNA (1)...(19): siRNA sense strand
aacagaagcugcuggugaa

SEQ ID NO: 1547463 - RNA, 19 nt, Homo sapiens
  misc_RNA (1)...(19): siRNA sense strand
guccuggccuuucgaguga

SEQ ID NO: 1547464 - RNA, 19 nt, Homo sapiens
  misc_RNA (1)...(19): siRNA sense strand
aagauguccugcuaucaaa

SEQ ID NO: 1547465 - RNA, 19 nt, Homo sapiens
  misc_RNA (1)...(19): siRNA sense strand
gaagaaguucagagagaga

SEQ ID NO: 1547466 - RNA, 19 nt, Homo sapiens
  misc_RNA (1)...(19): siRNA sense strand
uaagugaagcccaacagaa

SEQ ID NO: 1547467 - RNA, 19 nt, Homo sapiens
  misc_RNA (1)...(19): siRNA sense strand
gcaaugauaacaugcaaac

SEQ ID NO: 1547468 - RNA, 19 nt, Homo sapiens
  misc_RNA (1)...(19): siRNA sense strand
aaagauguccugcuaucaa

SEQ ID NO: 1547469 - RNA, 19 nt, Homo sapiens
  misc_RNA (1)...(19): siRNA sense strand
caaaagauguccugcuauc

SEQ ID NO: 1547470 - RNA, 19 nt, Homo sapiens
  misc_RNA (1)...(19): siRNA sense strand
ggugaaauccauggagaaa

SEQ ID NO: 1547471 - RNA, 19 nt, Homo sapiens
  misc_RNA (1)...(19): siRNA sense strand
agaagcugcuggugaaauc

SEQ ID NO: 1547472 - RNA, 19 nt, Homo sapiens
  misc_RNA (1)...(19): siRNA sense strand
gaacuuccugcuggauaaa

SEQ ID NO: 1547473 - RNA, 19 nt, Homo sapiens
  misc_RNA (1)...(19): siRNA sense strand
gggcuacagggauccauaa

SEQ ID NO: 1547474 - RNA, 19 nt, Homo sapiens
  misc_RNA (1)...(19): siRNA sense strand
gauccuacccgugcagcua

SEQ ID NO: 1547475 - RNA, 19 nt, Homo sapiens
  misc_RNA (1)...(19): siRNA sense strand
agagcacgauggaacagaa

SEQ ID NO: 1547476 - RNA, 19 nt, Homo sapiens
  misc_RNA (1)...(19): siRNA sense strand
cagaacuuccugcuggaua

SEQ ID NO: 1547477 - RNA, 19 nt, Homo sapiens
  misc_RNA (1)...(19): siRNA sense strand
gagauguggauguaccaaa

SEQ ID NO: 1547478 - RNA, 19 nt, Homo sapiens
  misc_RNA (1)...(19): siRNA sense strand
ggucaaaggcaaagaugag

SEQ ID NO: 1547479 - RNA, 19 nt, Homo sapiens
  misc_RNA (1)...(19): siRNA sense strand
agagagagacccaacaagu

SEQ ID NO: 1547480 - RNA, 19 nt, Homo sapiens
  misc_RNA (1)...(19): siRNA sense strand
cauccucuauuucguugga

SEQ ID NO: 1547481 - RNA, 19 nt, Homo sapiens
  misc_RNA (1)...(19): siRNA sense strand
gacaagggacaugaaguga

SEQ ID NO: 1547482 - RNA, 19 nt, Homo sapiens
  misc_RNA (1)...(19): siRNA sense strand
gagaagcugagccgaguag

SEQ ID NO: 1547483 - RNA, 19 nt, Homo sapiens
  misc_RNA (1)...(19): siRNA sense strand
ccucgccucugugcucuuu

SEQ ID NO: 1547484 - RNA, 19 nt, Homo sapiens
  misc_RNA (1)...(19): siRNA sense strand
agacaagggacaugaagug

SEQ ID NO: 1547485 - RNA, 19 nt, Homo sapiens
  misc_RNA (1)...(19): siRNA sense strand
gaaggagaugcaagaucaa

SEQ ID NO: 1547486 - RNA, 19 nt, Homo sapiens
  misc_RNA (1)...(19): siRNA sense strand
ccucugugcucuuuaugca

SEQ ID NO: 1547487 - RNA, 19 nt, Homo sapiens
  misc_RNA (1)...(19): siRNA sense strand
gaccugacaccacuugaca

SEQ ID NO: 1547488 - RNA, 19 nt, Homo sapiens
  misc_RNA (1)...(19): siRNA sense strand
ucagagagagacccaacaa

SEQ ID NO: 1547489 - RNA, 19 nt, Homo sapiens
  misc_RNA (1)...(19): siRNA sense strand
caaagaugagugggauauu

SEQ ID NO: 1547490 - RNA, 19 nt, Homo sapiens
  misc_RNA (1)...(19): siRNA sense strand
ggagaagcugagccgagua

SEQ ID NO: 1547491 - RNA, 19 nt, Homo sapiens
  misc_RNA (1)...(19): siRNA sense strand
gcuacagggauccauaaau

SEQ ID NO: 1547492 - RNA, 19 nt, Homo sapiens
  misc_RNA (1)...(19): siRNA sense strand
acuacacgcugcuggaugu

SEQ ID NO: 1547493 - RNA, 19 nt, Homo sapiens
  misc_RNA (1)...(19): siRNA sense strand
gcacgauggaacagaacuu

SEQ ID NO: 1547494 - RNA, 19 nt, Homo sapiens
  misc_RNA (1)...(19): siRNA sense strand
cccaaaagauguccugcua

SEQ ID NO: 1547495 - RNA, 19 nt, Homo sapiens
  misc_RNA (1)...(19): siRNA sense strand
agauguggauguaccaaag

SEQ ID NO: 1547496 - RNA, 19 nt, Homo sapiens
  misc_RNA (1)...(19): siRNA sense strand
uaccaaagacggugaaggu

SEQ ID NO: 1547497 - RNA, 19 nt, Homo sapiens
  misc_RNA (1)...(19): siRNA sense strand
gauguggauguaccaaaga

SEQ ID NO: 1547498 - RNA, 19 nt, Homo sapiens
  misc_RNA (1)...(19): siRNA sense strand
acaaggaggcuguaaccau

SEQ ID NO: 1547499 - RNA, 19 nt, Homo sapiens
  misc_RNA (1)...(19): siRNA sense strand
ugaaggggcucuagacaag

SEQ ID NO: 1547500 - RNA, 19 nt, Homo sapiens
  misc_RNA (1)...(19): siRNA sense strand
augauaacaugcaaaccuu

SEQ ID NO: 1547501 - RNA, 19 nt, Homo sapiens
  misc_RNA (1)...(19): siRNA sense strand
gcccuggccagacagcuaa

SEQ ID NO: 1547502 - RNA, 19 nt, Homo sapiens
  misc_RNA (1)...(19): siRNA sense strand
ggauaaagaggguguuuuc

SEQ ID NO: 1547503 - RNA, 19 nt, Homo sapiens
  misc_RNA (1)...(19): siRNA sense strand
ccuaacagagcuaagugaa

SEQ ID NO: 1547504 - RNA, 19 nt, Homo sapiens
  misc_RNA (1)...(19): siRNA sense strand
accuugagcucgcacuuga

SEQ ID NO: 1547505 - RNA, 19 nt, Homo sapiens
  misc_RNA (1)...(19): siRNA sense strand
gcugauggucaaaggcaaa

SEQ ID NO: 1547506 - RNA, 19 nt, Homo sapiens
  misc_RNA (1)...(19): siRNA sense strand
gacagcugauggucaaagg

SEQ ID NO: 1547507 - RNA, 19 nt, Homo sapiens
  misc_RNA (1)...(19): siRNA sense strand
ggcagcagaccacccauuc

SEQ ID NO: 1547508 - RNA, 19 nt, Homo sapiens
  misc_RNA (1)...(19): siRNA sense strand
uuccacauaucugcaauga

SEQ ID NO: 1547509 - RNA, 19 nt, Homo sapiens
  misc_RNA (1)...(19): siRNA sense strand
gauggucaaaggcaaagau

SEQ ID NO: 1547510 - RNA, 19 nt, Homo sapiens
  misc_RNA (1)...(19): siRNA sense strand
ucgccucugugcucuuuau

SEQ ID NO: 1547511 - RNA, 19 nt, Homo sapiens
  misc_RNA (1)...(19): siRNA sense strand
aaaagaagaaguucagaga

SEQ ID NO: 1547512 - RNA, 19 nt, Homo sapiens
  misc_RNA (1)...(19): siRNA sense strand
gccuggaagugcagagauc

SEQ ID NO: 1547513 - RNA, 19 nt, Homo sapiens
  misc_RNA (1)...(19): siRNA sense strand
ccaacagacacugggaauu

SEQ ID NO: 1547514 - RNA, 19 nt, Homo sapiens
  misc_RNA (1)...(19): siRNA sense strand
gugcugaggaagaggaaga

SEQ ID NO: 1547515 - RNA, 19 nt, Homo sapiens
  misc_RNA (1)...(19): siRNA sense strand
gcaaugagcugcagcaaag

SEQ ID NO: 1547516 - RNA, 19 nt, Homo sapiens
  misc_RNA (1)...(19): siRNA sense strand
ggaagaaacuaaaucaaca

SEQ ID NO: 1547517 - RNA, 19 nt, Homo sapiens
  misc_RNA (1)...(19): siRNA sense strand
gaagcuaagugccaggaua

SEQ ID NO: 1547518 - RNA, 19 nt, Homo sapiens
  misc_RNA (1)...(19): siRNA sense strand
ggaacucuuugacauauuu

SEQ ID NO: 1547519 - RNA, 19 nt, Homo sapiens
  misc_RNA (1)...(19): siRNA sense strand
gaucaaagcagcaaaguau

SEQ ID NO: 1547520 - RNA, 19 nt, Homo sapiens
  misc_RNA (1)...(19): siRNA sense strand
ugaaacagcacuugaguua

SEQ ID NO: 1547521 - RNA, 19 nt, Homo sapiens
  misc_RNA (1)...(19): siRNA sense strand
ccagggaucuuguuucuga

SEQ ID NO: 1547522 - RNA, 19 nt, Homo sapiens
  misc_RNA (1)...(19): siRNA sense strand
ugggacaucuuguuaaaua

SEQ ID NO: 1547523 - RNA, 19 nt, Homo sapiens
  misc_RNA (1)...(19): siRNA sense strand
ucagugcacucaagucaua

SEQ ID NO: 1547524 - RNA, 19 nt, Homo sapiens
  misc_RNA (1)...(19): siRNA sense strand
aaagacccauggauacuua

SEQ ID NO: 1547525 - RNA, 19 nt, Homo sapiens
  misc_RNA (1)...(19): siRNA sense strand
gcucuaauaucacuggaaa

SEQ ID NO: 1547526 - RNA, 19 nt, Homo sapiens
  misc_RNA (1)...(19): siRNA sense strand
gaccaugacugggugauuu

SEQ ID NO: 1547527 - RNA, 19 nt, Homo sapiens
  misc_RNA (1)...(19): siRNA sense strand
gaggugaacaucuaugaua

SEQ ID NO: 1547528 - RNA, 19 nt, Homo sapiens
  misc_RNA (1)...(19): siRNA sense strand
aaccguaacuacagauuua

SEQ ID NO: 1547529 - RNA, 19 nt, Homo sapiens
  misc_RNA (1)...(19): siRNA sense strand
cagcaaagacccauggaua

SEQ ID NO: 1547530 - RNA, 19 nt, Homo sapiens
  misc_RNA (1)...(19): siRNA sense strand
gaugaucuauggaggcauu

SEQ ID NO: 1547531 - RNA, 19 nt, Homo sapiens
  misc_RNA (1)...(19): siRNA sense strand
cauggauacuuaacagaua

SEQ ID NO: 1547532 - RNA, 19 nt, Homo sapiens
  misc_RNA (1)...(19): siRNA sense strand
ugaaauacaggaacucuuu

SEQ ID NO: 1547533 - RNA, 19 nt, Homo sapiens
  misc_RNA (1)...(19): siRNA sense strand
ggagaaccguaacuacaga

SEQ ID NO: 1547534 - RNA, 19 nt, Homo sapiens
  misc_RNA (1)...(19): siRNA sense strand
gcacaucuccauucacuuc

SEQ ID NO: 1547535 - RNA, 19 nt, Homo sapiens
  misc_RNA (1)...(19): siRNA sense strand
acacauggauugucccuau

SEQ ID NO: 1547536 - RNA, 19 nt, Homo sapiens
  misc_RNA (1)...(19): siRNA sense strand
gcaaaguauucccagaaau

SEQ ID NO: 1547537 - RNA, 19 nt, Homo sapiens
  misc_RNA (1)...(19): siRNA sense strand
caaaguauucccagaaaug

SEQ ID NO: 1547538 - RNA, 19 nt, Homo sapiens
  misc_RNA (1)...(19): siRNA sense strand
aaacagcacuugaguuaac

SEQ ID NO: 1547539 - RNA, 19 nt, Homo sapiens
  misc_RNA (1)...(19): siRNA sense strand
ggccauagaugaccagagu

SEQ ID NO: 1547540 - RNA, 19 nt, Homo sapiens
  misc_RNA (1)...(19): siRNA sense strand
gaaccguaacuacagauuu

SEQ ID NO: 1547541 - RNA, 19 nt, Homo sapiens
  misc_RNA (1)...(19): siRNA sense strand
guaccuugcugaagaagau

SEQ ID NO: 1547542 - RNA, 19 nt, Homo sapiens
  misc_RNA (1)...(19): siRNA sense strand
gaugcuuucuuguuucuug

SEQ ID NO: 1547543 - RNA, 19 nt, Homo sapiens
  misc_RNA (1)...(19): siRNA sense strand
gaccagaguacaguuauuu

SEQ ID NO: 1547544 - RNA, 19 nt, Homo sapiens
  misc_RNA (1)...(19): siRNA sense strand
caggaacucuuugacauau

SEQ ID NO: 1547545 - RNA, 19 nt, Homo sapiens
  misc_RNA (1)...(19): siRNA sense strand
gacuggauauuauagaguu

SEQ ID NO: 1547546 - RNA, 19 nt, Homo sapiens
  misc_RNA (1)...(19): siRNA sense strand
gaugaccagaguacaguua

SEQ ID NO: 1547547 - RNA, 19 nt, Homo sapiens
  misc_RNA (1)...(19): siRNA sense strand
ggugaacaucuaugauaua

SEQ ID NO: 1547548 - RNA, 19 nt, Homo sapiens
  misc_RNA (1)...(19): siRNA sense strand
gaaacagcacuugaguuaa

SEQ ID NO: 1547549 - RNA, 19 nt, Homo sapiens
  misc_RNA (1)...(19): siRNA sense strand
cuacagauuuacagauugu

SEQ ID NO: 1547550 - RNA, 19 nt, Homo sapiens
  misc_RNA (1)...(19): siRNA sense strand
acagauauauggaguaugc

SEQ ID NO: 1547551 - RNA, 19 nt, Homo sapiens
  misc_RNA (1)...(19): siRNA sense strand
uuucugaggugaacaucua

SEQ ID NO: 1547552 - RNA, 19 nt, Homo sapiens
  misc_RNA (1)...(19): siRNA sense strand
gaaauacaggaacucuuug

SEQ ID NO: 1547553 - RNA, 19 nt, Homo sapiens
  misc_RNA (1)...(19): siRNA sense strand
cuaaggcuauuccuguuau

SEQ ID NO: 1547554 - RNA, 19 nt, Homo sapiens
  misc_RNA (1)...(19): siRNA sense strand
caucuccauucacuucuaa

SEQ ID NO: 1547555 - RNA, 19 nt, Homo sapiens
  misc_RNA (1)...(19): siRNA sense strand
gaagaaaagauucaacuug

SEQ ID NO: 1547556 - RNA, 19 nt, Homo sapiens
  misc_RNA (1)...(19): siRNA sense strand
agacugcaguucauugaug

SEQ ID NO: 1547557 - RNA, 19 nt, Homo sapiens
  misc_RNA (1)...(19): siRNA sense strand
cagcacaucuccauucacu

SEQ ID NO: 1547558 - RNA, 19 nt, Homo sapiens
  misc_RNA (1)...(19): siRNA sense strand
gauaaagagugggacaucu

SEQ ID NO: 1547559 - RNA, 19 nt, Homo sapiens
  misc_RNA (1)...(19): siRNA sense strand
ggcauacagucuugguaaa

SEQ ID NO: 1547560 - RNA, 19 nt, Homo sapiens
  misc_RNA (1)...(19): siRNA sense strand
gaagacauuuuccuacuca

SEQ ID NO: 1547561 - RNA, 19 nt, Homo sapiens
  misc_RNA (1)...(19): siRNA sense strand
ggacucuucuaaccagcaa

SEQ ID NO: 1547562 - RNA, 19 nt, Homo sapiens
  misc_RNA (1)...(19): siRNA sense strand
caagucauauuugaagaca

SEQ ID NO: 1547563 - RNA, 19 nt, Homo sapiens
  misc_RNA (1)...(19): siRNA sense strand
caagugaaauacaggaacu

SEQ ID NO: 1547564 - RNA, 19 nt, Homo sapiens
  misc_RNA (1)...(19): siRNA sense strand
cuacuggcgucaugaaaca

SEQ ID NO: 1547565 - RNA, 19 nt, Homo sapiens
  misc_RNA (1)...(19): siRNA sense strand
uggauugucccuauucuuu

SEQ ID NO: 1547566 - RNA, 19 nt, Homo sapiens
  misc_RNA (1)...(19): siRNA sense strand
caacuuacagacaauaaag

SEQ ID NO: 1547567 - RNA, 19 nt, Homo sapiens
  misc_RNA (1)...(19): siRNA sense strand
agagugggacaucuuguua

SEQ ID NO: 1547568 - RNA, 19 nt, Homo sapiens
  misc_RNA (1)...(19): siRNA sense strand
agagguaccuauuaaagag

SEQ ID NO: 1547569 - RNA, 19 nt, Homo sapiens
  misc_RNA (1)...(19): siRNA sense strand
aaaugcaaguuucagauuc

SEQ ID NO: 1547570 - RNA, 19 nt, Homo sapiens
  misc_RNA (1)...(19): siRNA sense strand
cccggaugcuuucuuguuu

SEQ ID NO: 1547571 - RNA, 19 nt, Homo sapiens
  misc_RNA (1)...(19): siRNA sense strand
gcugaagaagaugaaauua

SEQ ID NO: 1547572 - RNA, 19 nt, Homo sapiens
  misc_RNA (1)...(19): siRNA sense strand
ggaacuacacaaccuuuag

SEQ ID NO: 1547573 - RNA, 19 nt, Homo sapiens
  misc_RNA (1)...(19): siRNA sense strand
ugaccagaguacaguuauu

SEQ ID NO: 1547574 - RNA, 19 nt, Homo sapiens
  misc_RNA (1)...(19): siRNA sense strand
gauaaauuagguuggaaga

SEQ ID NO: 1547575 - RNA, 19 nt, Homo sapiens
  misc_RNA (1)...(19): siRNA sense strand
acaggaacucuuugacaua

SEQ ID NO: 1547576 - RNA, 19 nt, Homo sapiens
  misc_RNA (1)...(19): siRNA sense strand
cagcaaaguauucccagaa

SEQ ID NO: 1547577 - RNA, 19 nt, Homo sapiens
  misc_RNA (1)...(19): siRNA sense strand
ucaaagcagcaaaguauuc

SEQ ID NO: 1547578 - RNA, 19 nt, Homo sapiens
  misc_RNA (1)...(19): siRNA sense strand
gugaucacuuuaaaugugu

SEQ ID NO: 1547579 - RNA, 19 nt, Homo sapiens
  misc_RNA (1)...(19): siRNA sense strand
gaggaacaccagaggauca

SEQ ID NO: 1547580 - RNA, 19 nt, Homo sapiens
  misc_RNA (1)...(19): siRNA sense strand
agugggacaucuuguuaaa

SEQ ID NO: 1547581 - RNA, 19 nt, Homo sapiens
  misc_RNA (1)...(19): siRNA sense strand
uacaggaacucuuugacau

SEQ ID NO: 1547582 - RNA, 19 nt, Homo sapiens
  misc_RNA (1)...(19): siRNA sense strand
guaaccagggaucuuguuu

SEQ ID NO: 1547583 - RNA, 19 nt, Homo sapiens
  misc_RNA (1)...(19): siRNA sense strand
uaaaagguauggaacacaa

SEQ ID NO: 1547584 - RNA, 19 nt, Homo sapiens
  misc_RNA (1)...(19): siRNA sense strand
ugaaacaggagccauuuua

SEQ ID NO: 1547585 - RNA, 19 nt, Homo sapiens
  misc_RNA (1)...(19): siRNA sense strand
caucagcacaucuccauuc

SEQ ID NO: 1547586 - RNA, 19 nt, Homo sapiens
  misc_RNA (1)...(19): siRNA sense strand
gcaaagacccauggauacu

SEQ ID NO: 1547587 - RNA, 19 nt, Homo sapiens
  misc_RNA (1)...(19): siRNA sense strand
aaagagguaccuauuaaag

SEQ ID NO: 1547588 - RNA, 19 nt, Homo sapiens
  misc_RNA (1)...(19): siRNA sense strand
gauugucccuauucuuugg

SEQ ID NO: 1547589 - RNA, 19 nt, Homo sapiens
  misc_RNA (1)...(19): siRNA sense strand
ggauugucccuauucuuug

SEQ ID NO: 1547590 - RNA, 19 nt, Homo sapiens
  misc_RNA (1)...(19): siRNA sense strand
caugccaacuuacagacaa

SEQ ID NO: 1547591 - RNA, 19 nt, Homo sapiens
  misc_RNA (1)...(19): siRNA sense strand
gguauggaacacaaucauu

SEQ ID NO: 1547592 - RNA, 19 nt, Homo sapiens
  misc_RNA (1)...(19): siRNA sense strand
gagugggacaucuuguuaa

SEQ ID NO: 1547593 - RNA, 19 nt, Homo sapiens
  misc_RNA (1)...(19): siRNA sense strand
ccuaaggcuauuccuguua

SEQ ID NO: 1547594 - RNA, 19 nt, Homo sapiens
  misc_RNA (1)...(19): siRNA sense strand
agcaaaguauucccagaaa

SEQ ID NO: 1547595 - RNA, 19 nt, Homo sapiens
  misc_RNA (1)...(19): siRNA sense strand
gaugaugccuuuuccuugu

SEQ ID NO: 1547596 - RNA, 19 nt, Homo sapiens
  misc_RNA (1)...(19): siRNA sense strand
acaauagggagaaccguaa

SEQ ID NO: 1547597 - RNA, 19 nt, Homo sapiens
  misc_RNA (1)...(19): siRNA sense strand
caaagacccauggauacuu

SEQ ID NO: 1547598 - RNA, 19 nt, Homo sapiens
  misc_RNA (1)...(19): siRNA sense strand
gcauugccuugggaaguga

SEQ ID NO: 1547599 - RNA, 19 nt, Homo sapiens
  misc_RNA (1)...(19): siRNA sense strand
caaacgcugagcaagauga

SEQ ID NO: 1547600 - RNA, 19 nt, Homo sapiens
  misc_RNA (1)...(19): siRNA sense strand
caaaacaagugaaauacag

SEQ ID NO: 1547601 - RNA, 19 nt, Homo sapiens
  misc_RNA (1)...(19): siRNA sense strand
uggcauacagucuugguaa

SEQ ID NO: 1547602 - RNA, 19 nt, Homo sapiens
  misc_RNA (1)...(19): siRNA sense strand
uaaggcuauuccuguuauu

SEQ ID NO: 1547603 - RNA, 19 nt, Homo sapiens
  misc_RNA (1)...(19): siRNA sense strand
ccaacuuacagacaauaaa

SEQ ID NO: 1547604 - RNA, 19 nt, Homo sapiens
  misc_RNA (1)...(19): siRNA sense strand
caccagaggaucagaguuc

SEQ ID NO: 1547605 - RNA, 19 nt, Homo sapiens
  misc_RNA (1)...(19): siRNA sense strand
agauucaacuugcuuaugc

SEQ ID NO: 1547606 - RNA, 19 nt, Homo sapiens
  misc_RNA (1)...(19): siRNA sense strand
ggacaucuuguuaaauacu

SEQ ID NO: 1547607 - RNA, 19 nt, Homo sapiens
  misc_RNA (1)...(19): siRNA sense strand
caugaaacaggagccauuu

SEQ ID NO: 1547608 - RNA, 19 nt, Homo sapiens
  misc_RNA (1)...(19): siRNA sense strand
gaaaagauucaacuugcuu

SEQ ID NO: 1547609 - RNA, 19 nt, Homo sapiens
  misc_RNA (1)...(19): siRNA sense strand
ccaauuaaagaugugguuu

SEQ ID NO: 1547610 - RNA, 19 nt, Homo sapiens
  misc_RNA (1)...(19): siRNA sense strand
gcccggaugcuuucuuguu

SEQ ID NO: 1547611 - RNA, 19 nt, Homo sapiens
  misc_RNA (1)...(19): siRNA sense strand
aaccagggaucuuguuucu

SEQ ID NO: 1547612 - RNA, 19 nt, Homo sapiens
  misc_RNA (1)...(19): siRNA sense strand
gagauugaaacagcacuug

SEQ ID NO: 1547613 - RNA, 19 nt, Homo sapiens
  misc_RNA (1)...(19): siRNA sense strand
aagagguaccuauuaaaga

SEQ ID NO: 1547614 - RNA, 19 nt, Homo sapiens
  misc_RNA (1)...(19): siRNA sense strand
aggugaacaucuaugauau

SEQ ID NO: 1547615 - RNA, 19 nt, Homo sapiens
  misc_RNA (1)...(19): siRNA sense strand
ggacgaaagugugaacuau

SEQ ID NO: 1547616 - RNA, 19 nt, Homo sapiens
  misc_RNA (1)...(19): siRNA sense strand
ugagguaggugcccauaaa

SEQ ID NO: 1547617 - RNA, 19 nt, Homo sapiens
  misc_RNA (1)...(19): siRNA sense strand
gaagaacaagggaaauuga

SEQ ID NO: 1547618 - RNA, 19 nt, Homo sapiens
  misc_RNA (1)...(19): siRNA sense strand
ccacaaguacccaaauuaa

SEQ ID NO: 1547619 - RNA, 19 nt, Homo sapiens
  misc_RNA (1)...(19): siRNA sense strand
auaaaccucuugacucuuu

SEQ ID NO: 1547620 - RNA, 19 nt, Homo sapiens
  misc_RNA (1)...(19): siRNA sense strand
acgaaagugugaacuauaa

SEQ ID NO: 1547621 - RNA, 19 nt, Homo sapiens
  misc_RNA (1)...(19): siRNA sense strand
ccucuugacucuuuaauuc

SEQ ID NO: 1547622 - RNA, 19 nt, Homo sapiens
  misc_RNA (1)...(19): siRNA sense strand
gaccaaaaccuuucuguua

SEQ ID NO: 1547623 - RNA, 19 nt, Homo sapiens
  misc_RNA (1)...(19): siRNA sense strand
ccauaaaccucuugacucu

SEQ ID NO: 1547624 - RNA, 19 nt, Homo sapiens
  misc_RNA (1)...(19): siRNA sense strand
gaaagugugaacuauaaga

SEQ ID NO: 1547625 - RNA, 19 nt, Homo sapiens
  misc_RNA (1)...(19): siRNA sense strand
ggaagaacaagggaaauug

SEQ ID NO: 1547626 - RNA, 19 nt, Homo sapiens
  misc_RNA (1)...(19): siRNA sense strand
ggacugagaacgggaagaa

SEQ ID NO: 1547627 - RNA, 19 nt, Homo sapiens
  misc_RNA (1)...(19): siRNA sense strand
gcucagcgcucugcaccuu

SEQ ID NO: 1547628 - RNA, 19 nt, Homo sapiens
  misc_RNA (1)...(19): siRNA sense strand
gacgaaagugugaacuaua

SEQ ID NO: 1547629 - RNA, 19 nt, Homo sapiens
  misc_RNA (1)...(19): siRNA sense strand
guacccaaauuaaagucaa

SEQ ID NO: 1547630 - RNA, 19 nt, Homo sapiens
  misc_RNA (1)...(19): siRNA sense strand
caaugaagcggacgaaagu

SEQ ID NO: 1547631 - RNA, 19 nt, Homo sapiens
  misc_RNA (1)...(19): siRNA sense strand
gggaagaacaagggaaauu

SEQ ID NO: 1547632 - RNA, 19 nt, Homo sapiens
  misc_RNA (1)...(19): siRNA sense strand
gagauguuuucaugaguua

SEQ ID NO: 1547633 - RNA, 19 nt, Homo sapiens
  misc_RNA (1)...(19): siRNA sense strand
gaagguaaacuugggagau

SEQ ID NO: 1547634 - RNA, 19 nt, Homo sapiens
  misc_RNA (1)...(19): siRNA sense strand
cgacugauaacguucaaug

SEQ ID NO: 1547635 - RNA, 19 nt, Homo sapiens
  misc_RNA (1)...(19): siRNA sense strand
acacgcuucuguauuucua

SEQ ID NO: 1547636 - RNA, 19 nt, Homo sapiens
  misc_RNA (1)...(19): siRNA sense strand
gaagcggacgaaaguguga

SEQ ID NO: 1547637 - RNA, 19 nt, Homo sapiens
  misc_RNA (1)...(19): siRNA sense strand
acaaguacccaaauuaaag

SEQ ID NO: 1547638 - RNA, 19 nt, Homo sapiens
  misc_RNA (1)...(19): siRNA sense strand
cacaaguacccaaauuaaa

SEQ ID NO: 1547639 - RNA, 19 nt, Homo sapiens
  misc_RNA (1)...(19): siRNA sense strand
uguuaaugcugaagguaaa

SEQ ID NO: 1547640 - RNA, 19 nt, Homo sapiens
  misc_RNA (1)...(19): siRNA sense strand
cuaggcgacugauaacguu

SEQ ID NO: 1547641 - RNA, 19 nt, Homo sapiens
  misc_RNA (1)...(19): siRNA sense strand
ggagauguuuucaugaguu

SEQ ID NO: 1547642 - RNA, 19 nt, Homo sapiens
  misc_RNA (1)...(19): siRNA sense strand
gugcuacucuccgacaaga

SEQ ID NO: 1547643 - RNA, 19 nt, Homo sapiens
  misc_RNA (1)...(19): siRNA sense strand
aagguaaacuugggagaug

SEQ ID NO: 1547644 - RNA, 19 nt, Homo sapiens
  misc_RNA (1)...(19): siRNA sense strand
caaguacccaaauuaaagu

SEQ ID NO: 1547645 - RNA, 19 nt, Homo sapiens
  misc_RNA (1)...(19): siRNA sense strand
caaagugguagccgcagaa

SEQ ID NO: 1547646 - RNA, 19 nt, Homo sapiens
  misc_RNA (1)...(19): siRNA sense strand
aaauggaggcacgcacuua

SEQ ID NO: 1547647 - RNA, 19 nt, Homo sapiens
  misc_RNA (1)...(19): siRNA sense strand
cuauaagacugguccuaag

SEQ ID NO: 1547648 - RNA, 19 nt, Homo sapiens
  misc_RNA (1)...(19): siRNA sense strand
gaaaauuacacgcuucugu

SEQ ID NO: 1547649 - RNA, 19 nt, Homo sapiens
  misc_RNA (1)...(19): siRNA sense strand
ucaaugaagcggacgaaag

SEQ ID NO: 1547650 - RNA, 19 nt, Homo sapiens
  misc_RNA (1)...(19): siRNA sense strand
accaaaaccuuucuguuaa

SEQ ID NO: 1547651 - RNA, 19 nt, Homo sapiens
  misc_RNA (1)...(19): siRNA sense strand
uccacaaguacccaaauua

SEQ ID NO: 1547652 - RNA, 19 nt, Homo sapiens
  misc_RNA (1)...(19): siRNA sense strand
ccaaaaccuuucuguuaau

SEQ ID NO: 1547653 - RNA, 19 nt, Homo sapiens
  misc_RNA (1)...(19): siRNA sense strand
gaugagguaggugcccaua

SEQ ID NO: 1547654 - RNA, 19 nt, Homo sapiens
  misc_RNA (1)...(19): siRNA sense strand
gguaaacuugggagauguu

SEQ ID NO: 1547655 - RNA, 19 nt, Homo sapiens
  misc_RNA (1)...(19): siRNA sense strand
uuccacaaguacccaaauu

SEQ ID NO: 1547656 - RNA, 19 nt, Homo sapiens
  misc_RNA (1)...(19): siRNA sense strand
acuauaagacugguccuaa

SEQ ID NO: 1547657 - RNA, 19 nt, Homo sapiens
  misc_RNA (1)...(19): siRNA sense strand
caaaaccuuucuguuaaug

SEQ ID NO: 1547658 - RNA, 19 nt, Homo sapiens
  misc_RNA (1)...(19): siRNA sense strand
gcccauaaaccucuugacu

SEQ ID NO: 1547659 - RNA, 19 nt, Homo sapiens
  misc_RNA (1)...(19): siRNA sense strand
aaaccuuucuguuaaugcu

SEQ ID NO: 1547660 - RNA, 19 nt, Homo sapiens
  misc_RNA (1)...(19): siRNA sense strand
gacugauaacguucaauga

SEQ ID NO: 1547661 - RNA, 19 nt, Homo sapiens
  misc_RNA (1)...(19): siRNA sense strand
gcuacucuccgacaagaag

SEQ ID NO: 1547662 - RNA, 19 nt, Homo sapiens
  misc_RNA (1)...(19): siRNA sense strand
cggacgaaagugugaacua

SEQ ID NO: 1547663 - RNA, 19 nt, Homo sapiens
  misc_RNA (1)...(19): siRNA sense strand
cgagagguaugacaucaaa

SEQ ID NO: 1547664 - RNA, 19 nt, Homo sapiens
  misc_RNA (1)...(19): siRNA sense strand
gcacagagcccggaagagu

SEQ ID NO: 1547665 - RNA, 19 nt, Homo sapiens
  misc_RNA (1)...(19): siRNA sense strand
gcugaaggaccucaacuuu

SEQ ID NO: 1547666 - RNA, 19 nt, Homo sapiens
  misc_RNA (1)...(19): siRNA sense strand
ggauuacagccuccugaua

SEQ ID NO: 1547667 - RNA, 19 nt, Homo sapiens
  misc_RNA (1)...(19): siRNA sense strand
gauuacagccuccugauag

SEQ ID NO: 1547668 - RNA, 19 nt, Homo sapiens
  misc_RNA (1)...(19): siRNA sense strand
gagcucaacgugcuggauu

SEQ ID NO: 1547669 - RNA, 19 nt, Homo sapiens
  misc_RNA (1)...(19): siRNA sense strand
gggcagcagccucaucuuc

SEQ ID NO: 1547670 - RNA, 19 nt, Homo sapiens
  misc_RNA (1)...(19): siRNA sense strand
ggcccgagcagcgcuauuu

SEQ ID NO: 1547671 - RNA, 19 nt, Homo sapiens
  misc_RNA (1)...(19): siRNA sense strand
ucaacgugcuggauuacag

SEQ ID NO: 1547672 - RNA, 19 nt, Homo sapiens
  misc_RNA (1)...(19): siRNA sense strand
ccugauagccuuccaacgu

SEQ ID NO: 1547673 - RNA, 19 nt, Homo sapiens
  misc_RNA (1)...(19): siRNA sense strand
gaagagucgagagcccaaa

SEQ ID NO: 1547674 - RNA, 19 nt, Homo sapiens
  misc_RNA (1)...(19): siRNA sense strand
agcucaacgugcuggauua

SEQ ID NO: 1547675 - RNA, 19 nt, Homo sapiens
  misc_RNA (1)...(19): siRNA sense strand
cugaaggaccucaacuuuc

SEQ ID NO: 1547676 - RNA, 19 nt, Homo sapiens
  misc_RNA (1)...(19): siRNA sense strand
gaacaaagacgacuaaaga

SEQ ID NO: 1547677 - RNA, 19 nt, Homo sapiens
  misc_RNA (1)...(19): siRNA sense strand
gggaacaacuuaauucuuu

SEQ ID NO: 1547678 - RNA, 19 nt, Homo sapiens
  misc_RNA (1)...(19): siRNA sense strand
ggauaaagaugcagaagaa

SEQ ID NO: 1547679 - RNA, 19 nt, Homo sapiens
  misc_RNA (1)...(19): siRNA sense strand
caugagaacugaagaagua

SEQ ID NO: 1547680 - RNA, 19 nt, Homo sapiens
  misc_RNA (1)...(19): siRNA sense strand
gcagugauguggcucagua

SEQ ID NO: 1547681 - RNA, 19 nt, Homo sapiens
  misc_RNA (1)...(19): siRNA sense strand
gaagauggcaaacuaauug

SEQ ID NO: 1547682 - RNA, 19 nt, Homo sapiens
  misc_RNA (1)...(19): siRNA sense strand
gaaacuaaggucagaguaa

SEQ ID NO: 1547683 - RNA, 19 nt, Homo sapiens
  misc_RNA (1)...(19): siRNA sense strand
gagaagacauucauaacca

SEQ ID NO: 1547684 - RNA, 19 nt, Homo sapiens
  misc_RNA (1)...(19): siRNA sense strand
ccucuuggaucuucauuaa

SEQ ID NO: 1547685 - RNA, 19 nt, Homo sapiens
  misc_RNA (1)...(19): siRNA sense strand
gacugaagauggcaaacua

SEQ ID NO: 1547686 - RNA, 19 nt, Homo sapiens
  misc_RNA (1)...(19): siRNA sense strand
aaacuaaggucagaguaaa

SEQ ID NO: 1547687 - RNA, 19 nt, Homo sapiens
  misc_RNA (1)...(19): siRNA sense strand
caaacuaauuguugaagga

SEQ ID NO: 1547688 - RNA, 19 nt, Homo sapiens
  misc_RNA (1)...(19): siRNA sense strand
cagaagaaauuagcaguga

SEQ ID NO: 1547689 - RNA, 19 nt, Homo sapiens
  misc_RNA (1)...(19): siRNA sense strand
caaagacgacuaaagaaga

SEQ ID NO: 1547690 - RNA, 19 nt, Homo sapiens
  misc_RNA (1)...(19): siRNA sense strand
gagaacugaagaaguaaua

SEQ ID NO: 1547691 - RNA, 19 nt, Homo sapiens
  misc_RNA (1)...(19): siRNA sense strand
ggagaacaaagacgacuaa

SEQ ID NO: 1547692 - RNA, 19 nt, Homo sapiens
  misc_RNA (1)...(19): siRNA sense strand
aagcagcucuggugagaaa

SEQ ID NO: 1547693 - RNA, 19 nt, Homo sapiens
  misc_RNA (1)...(19): siRNA sense strand
ggaauuugacgaucucuau

SEQ ID NO: 1547694 - RNA, 19 nt, Homo sapiens
  misc_RNA (1)...(19): siRNA sense strand
gaagaaauuagcagugaug

SEQ ID NO: 1547695 - RNA, 19 nt, Homo sapiens
  misc_RNA (1)...(19): siRNA sense strand
gaugaagccucugaugaug

SEQ ID NO: 1547696 - RNA, 19 nt, Homo sapiens
  misc_RNA (1)...(19): siRNA sense strand
gaaaagagagauucaaaga

SEQ ID NO: 1547697 - RNA, 19 nt, Homo sapiens
  misc_RNA (1)...(19): siRNA sense strand
uaaagcaacuucuccaaaa

SEQ ID NO: 1547698 - RNA, 19 nt, Homo sapiens
  misc_RNA (1)...(19): siRNA sense strand
ggacccagauuccuauguc

SEQ ID NO: 1547699 - RNA, 19 nt, Homo sapiens
  misc_RNA (1)...(19): siRNA sense strand
ggaugaagccucugaugau

SEQ ID NO: 1547700 - RNA, 19 nt, Homo sapiens
  misc_RNA (1)...(19): siRNA sense strand
ugaagcagcucuggugaga

SEQ ID NO: 1547701 - RNA, 19 nt, Homo sapiens
  misc_RNA (1)...(19): siRNA sense strand
gaagccacaugcaaaggau

SEQ ID NO: 1547702 - RNA, 19 nt, Homo sapiens
  misc_RNA (1)...(19): siRNA sense strand
gaaaauaguccccaggauu

SEQ ID NO: 1547703 - RNA, 19 nt, Homo sapiens
  misc_RNA (1)...(19): siRNA sense strand
cuacagggaccuucugaaa

SEQ ID NO: 1547704 - RNA, 19 nt, Homo sapiens
  misc_RNA (1)...(19): siRNA sense strand
uaugauggcucaccaguac

SEQ ID NO: 1547705 - RNA, 19 nt, Homo sapiens
  misc_RNA (1)...(19): siRNA sense strand
ucuuggaucuucauuaaug

SEQ ID NO: 1547706 - RNA, 19 nt, Homo sapiens
  misc_RNA (1)...(19): siRNA sense strand
ccaggaagacuauuuaucu

SEQ ID NO: 1547707 - RNA, 19 nt, Homo sapiens
  misc_RNA (1)...(19): siRNA sense strand
gauggcaaacuaauuguug

SEQ ID NO: 1547708 - RNA, 19 nt, Homo sapiens
  misc_RNA (1)...(19): siRNA sense strand
agaguaaacaguaacauga

SEQ ID NO: 1547709 - RNA, 19 nt, Homo sapiens
  misc_RNA (1)...(19): siRNA sense strand
ugaagccucugaugaugga

SEQ ID NO: 1547710 - RNA, 19 nt, Homo sapiens
  misc_RNA (1)...(19): siRNA sense strand
cuauaaccaugaaacauca

SEQ ID NO: 1547711 - RNA, 19 nt, Homo sapiens
  misc_RNA (1)...(19): siRNA sense strand
gaaaaggcgauuauacuga

SEQ ID NO: 1547712 - RNA, 19 nt, Homo sapiens
  misc_RNA (1)...(19): siRNA sense strand
ggauuuugcucuucacauu

SEQ ID NO: 1547713 - RNA, 19 nt, Homo sapiens
  misc_RNA (1)...(19): siRNA sense strand
uaacaugagaacugaagaa

SEQ ID NO: 1547714 - RNA, 19 nt, Homo sapiens
  misc_RNA (1)...(19): siRNA sense strand
acacuucuauaaccaugaa

SEQ ID NO: 1547715 - RNA, 19 nt, Homo sapiens
  misc_RNA (1)...(19): siRNA sense strand
gcauuuuccucauggauaa

SEQ ID NO: 1547716 - RNA, 19 nt, Homo sapiens
  misc_RNA (1)...(19): siRNA sense strand
guaaacaguaacaugagaa

SEQ ID NO: 1547717 - RNA, 19 nt, Homo sapiens
  misc_RNA (1)...(19): siRNA sense strand
ccagggaacaacuuaauuc

SEQ ID NO: 1547718 - RNA, 19 nt, Homo sapiens
  misc_RNA (1)...(19): siRNA sense strand
ugaagauggcaaacuaauu

SEQ ID NO: 1547719 - RNA, 19 nt, Homo sapiens
  misc_RNA (1)...(19): siRNA sense strand
gagaaaagagagauucaaa

SEQ ID NO: 1547720 - RNA, 19 nt, Homo sapiens
  misc_RNA (1)...(19): siRNA sense strand
cugaagaaguaauaaagca

SEQ ID NO: 1547721 - RNA, 19 nt, Homo sapiens
  misc_RNA (1)...(19): siRNA sense strand
gcgauuauacugaaauguc

SEQ ID NO: 1547722 - RNA, 19 nt, Homo sapiens
  misc_RNA (1)...(19): siRNA sense strand
agacagacauuccgcuacu

SEQ ID NO: 1547723 - RNA, 19 nt, Homo sapiens
  misc_RNA (1)...(19): siRNA sense strand
gauaaagaugcagaagaaa

SEQ ID NO: 1547724 - RNA, 19 nt, Homo sapiens
  misc_RNA (1)...(19): siRNA sense strand
ccagugcucuauagaacca

SEQ ID NO: 1547725 - RNA, 19 nt, Homo sapiens
  misc_RNA (1)...(19): siRNA sense strand
cgauuauacugaaaugucu

SEQ ID NO: 1547726 - RNA, 19 nt, Homo sapiens
  misc_RNA (1)...(19): siRNA sense strand
cucaguacauuaacuuuca

SEQ ID NO: 1547727 - RNA, 19 nt, Homo sapiens
  misc_RNA (1)...(19): siRNA sense strand
cagaguaaacaguaacaug

SEQ ID NO: 1547728 - RNA, 19 nt, Homo sapiens
  misc_RNA (1)...(19): siRNA sense strand
aaaaggcgauuauacugaa

SEQ ID NO: 1547729 - RNA, 19 nt, Homo sapiens
  misc_RNA (1)...(19): siRNA sense strand
ccucauggauaaagaugca

SEQ ID NO: 1547730 - RNA, 19 nt, Homo sapiens
  misc_RNA (1)...(19): siRNA sense strand
aguaaacaguaacaugaga

SEQ ID NO: 1547731 - RNA, 19 nt, Homo sapiens
  misc_RNA (1)...(19): siRNA sense strand
aaaacgaccuauacagcua

SEQ ID NO: 1547732 - RNA, 19 nt, Homo sapiens
  misc_RNA (1)...(19): siRNA sense strand
uaaccagggaacaacuuaa

SEQ ID NO: 1547733 - RNA, 19 nt, Homo sapiens
  misc_RNA (1)...(19): siRNA sense strand
gcucaguacauuaacuuuc

SEQ ID NO: 1547734 - RNA, 19 nt, Homo sapiens
  misc_RNA (1)...(19): siRNA sense strand
aaagacgacuaaagaagac

SEQ ID NO: 1547735 - RNA, 19 nt, Homo sapiens
  misc_RNA (1)...(19): siRNA sense strand
auaaagcaacuucuccaaa

SEQ ID NO: 1547736 - RNA, 19 nt, Homo sapiens
  misc_RNA (1)...(19): siRNA sense strand
acuaauuguugaaggaaug

SEQ ID NO: 1547737 - RNA, 19 nt, Homo sapiens
  misc_RNA (1)...(19): siRNA sense strand
aaaggcgauuauacugaaa

SEQ ID NO: 1547738 - RNA, 19 nt, Homo sapiens
  misc_RNA (1)...(19): siRNA sense strand
acaaagacgacuaaagaag

SEQ ID NO: 1547739 - RNA, 19 nt, Homo sapiens
  misc_RNA (1)...(19): siRNA sense strand
aaacgaccuauacagcuaa

SEQ ID NO: 1547740 - RNA, 19 nt, Homo sapiens
  misc_RNA (1)...(19): siRNA sense strand
uauagaaccaugagugaag

SEQ ID NO: 1547741 - RNA, 19 nt, Homo sapiens
  misc_RNA (1)...(19): siRNA sense strand
gaauuugacgaucucuauc

SEQ ID NO: 1547742 - RNA, 19 nt, Homo sapiens
  misc_RNA (1)...(19): siRNA sense strand
uaaagaagacagacauucc

SEQ ID NO: 1547743 - RNA, 19 nt, Homo sapiens
  misc_RNA (1)...(19): siRNA sense strand
cuaaagaagacagacauuc

SEQ ID NO: 1547744 - RNA, 19 nt, Homo sapiens
  misc_RNA (1)...(19): siRNA sense strand
gccuuugaaucagaaacua

SEQ ID NO: 1547745 - RNA, 19 nt, Homo sapiens
  misc_RNA (1)...(19): siRNA sense strand
ucuauagaaccaugaguga

SEQ ID NO: 1547746 - RNA, 19 nt, Homo sapiens
  misc_RNA (1)...(19): siRNA sense strand
agaagaaauuagcagugau

SEQ ID NO: 1547747 - RNA, 19 nt, Homo sapiens
  misc_RNA (1)...(19): siRNA sense strand
ucuauaaccaugaaacauc

SEQ ID NO: 1547748 - RNA, 19 nt, Homo sapiens
  misc_RNA (1)...(19): siRNA sense strand
uacaagaugagaagccauu

SEQ ID NO: 1547749 - RNA, 19 nt, Homo sapiens
  misc_RNA (1)...(19): siRNA sense strand
ucacuuuucucucuuggaa

SEQ ID NO: 1547750 - RNA, 19 nt, Homo sapiens
  misc_RNA (1)...(19): siRNA sense strand
auaaccagggaacaacuua

SEQ ID NO: 1547751 - RNA, 19 nt, Homo sapiens
  misc_RNA (1)...(19): siRNA sense strand
aagccauucucuucuuuua

SEQ ID NO: 1547752 - RNA, 19 nt, Homo sapiens
  misc_RNA (1)...(19): siRNA sense strand
gagaacaaagacgacuaaa

SEQ ID NO: 1547753 - RNA, 19 nt, Homo sapiens
  misc_RNA (1)...(19): siRNA sense strand
aaggucagaguaaacagua

SEQ ID NO: 1547754 - RNA, 19 nt, Homo sapiens
  misc_RNA (1)...(19): siRNA sense strand
gaugauggacagaaaagaa

SEQ ID NO: 1547755 - RNA, 19 nt, Homo sapiens
  misc_RNA (1)...(19): siRNA sense strand
aggaugaagccucugauga

SEQ ID NO: 1547756 - RNA, 19 nt, Homo sapiens
  misc_RNA (1)...(19): siRNA sense strand
ugaagccacaugcaaagga

SEQ ID NO: 1547757 - RNA, 19 nt, Homo sapiens
  misc_RNA (1)...(19): siRNA sense strand
gaagagaaaagagagauuc

SEQ ID NO: 1547758 - RNA, 19 nt, Homo sapiens
  misc_RNA (1)...(19): siRNA sense strand
cgacuaaagaagacagaca

SEQ ID NO: 1547759 - RNA, 19 nt, Homo sapiens
  misc_RNA (1)...(19): siRNA sense strand
gacauuuucuggggaguaa

SEQ ID NO: 1547760 - RNA, 19 nt, Homo sapiens
  misc_RNA (1)...(19): siRNA sense strand
gaguaaacaguaacaugag

SEQ ID NO: 1547761 - RNA, 19 nt, Homo sapiens
  misc_RNA (1)...(19): siRNA sense strand
ggaguaaaacgaccuauac

SEQ ID NO: 1547762 - RNA, 19 nt, Homo sapiens
  misc_RNA (1)...(19): siRNA sense strand
acagggaccuucugaaaag

SEQ ID NO: 1547763 - RNA, 19 nt, Homo sapiens
  misc_RNA (1)...(19): siRNA sense strand
gggaauuugacgaucucua

SEQ ID NO: 1547764 - RNA, 19 nt, Homo sapiens
  misc_RNA (1)...(19): siRNA sense strand
gacuaaagaagacagacau

SEQ ID NO: 1547765 - RNA, 19 nt, Homo sapiens
  misc_RNA (1)...(19): siRNA sense strand
aacaaagacgacuaaagaa

SEQ ID NO: 1547766 - RNA, 19 nt, Homo sapiens
  misc_RNA (1)...(19): siRNA sense strand
uaauggacacuucuauaac

SEQ ID NO: 1547767 - RNA, 19 nt, Homo sapiens
  misc_RNA (1)...(19): siRNA sense strand
cagaaaagaaagacagaaa

SEQ ID NO: 1547768 - RNA, 19 nt, Homo sapiens
  misc_RNA (1)...(19): siRNA sense strand
gacccagauuccuaugucu

SEQ ID NO: 1547769 - RNA, 19 nt, Homo sapiens
  misc_RNA (1)...(19): siRNA sense strand
uggauaaagaugcagaaga

SEQ ID NO: 1547770 - RNA, 19 nt, Homo sapiens
  misc_RNA (1)...(19): siRNA sense strand
ugcaacaggagaacaaaga

SEQ ID NO: 1547771 - RNA, 19 nt, Homo sapiens
  misc_RNA (1)...(19): siRNA sense strand
cagcaaaucuuccuucaac

SEQ ID NO: 1547772 - RNA, 19 nt, Homo sapiens
  misc_RNA (1)...(19): siRNA sense strand
gaaccaccauuugaguuug

SEQ ID NO: 1547773 - RNA, 19 nt, Homo sapiens
  misc_RNA (1)...(19): siRNA sense strand
gcaaaucuuccuucaacaa

SEQ ID NO: 1547774 - RNA, 19 nt, Homo sapiens
  misc_RNA (1)...(19): siRNA sense strand
gccaccagcuccacgagua

SEQ ID NO: 1547775 - RNA, 19 nt, Homo sapiens
  misc_RNA (1)...(19): siRNA sense strand
gcaggacacucucucucau

SEQ ID NO: 1547776 - RNA, 19 nt, Homo sapiens
  misc_RNA (1)...(19): siRNA sense strand
cgaaccaccauuugaguuu

SEQ ID NO: 1547777 - RNA, 19 nt, Homo sapiens
  misc_RNA (1)...(19): siRNA sense strand
ccagaaaacucaacagcaa

SEQ ID NO: 1547778 - RNA, 19 nt, Homo sapiens
  misc_RNA (1)...(19): siRNA sense strand
cgacgaggacgacuucuuc

SEQ ID NO: 1547779 - RNA, 19 nt, Homo sapiens
  misc_RNA (1)...(19): siRNA sense strand
cuagacgccuuuccuucuu

SEQ ID NO: 1547780 - RNA, 19 nt, Homo sapiens
  misc_RNA (1)...(19): siRNA sense strand
gaaaacgaaccaccauuug

SEQ ID NO: 1547781 - RNA, 19 nt, Homo sapiens
  misc_RNA (1)...(19): siRNA sense strand
aaacucaacagcaaaucuu

SEQ ID NO: 1547782 - RNA, 19 nt, Homo sapiens
  misc_RNA (1)...(19): siRNA sense strand
aaacaacucaaggaacaaa

SEQ ID NO: 1547783 - RNA, 19 nt, Homo sapiens
  misc_RNA (1)...(19): siRNA sense strand
ccagcgacccugauuaugg

SEQ ID NO: 1547784 - RNA, 19 nt, Homo sapiens
  misc_RNA (1)...(19): siRNA sense strand
aaacgaaccaccauuugag

SEQ ID NO: 1547785 - RNA, 19 nt, Homo sapiens
  misc_RNA (1)...(19): siRNA sense strand
caacucaaggaacaaaaua

SEQ ID NO: 1547786 - RNA, 19 nt, Homo sapiens
  misc_RNA (1)...(19): siRNA sense strand
agaagcgccucuccaaggu

SEQ ID NO: 1547787 - RNA, 19 nt, Homo sapiens
  misc_RNA (1)...(19): siRNA sense strand
ccacgcugcccuacgagaa

SEQ ID NO: 1547788 - RNA, 19 nt, Homo sapiens
  misc_RNA (1)...(19): siRNA sense strand
gcaugcaguccaucaacga

SEQ ID NO: 1547789 - RNA, 19 nt, Homo sapiens
  misc_RNA (1)...(19): siRNA sense strand
caaaucuuccuucaacaac

SEQ ID NO: 1547790 - RNA, 19 nt, Homo sapiens
  misc_RNA (1)...(19): siRNA sense strand
aaaucuuccuucaacaaca

SEQ ID NO: 1547791 - RNA, 19 nt, Homo sapiens
  misc_RNA (1)...(19): siRNA sense strand
aaucuuccuucaacaacau

SEQ ID NO: 1547792 - RNA, 19 nt, Homo sapiens
  misc_RNA (1)...(19): siRNA sense strand
gccaucggcuacaucaacu

SEQ ID NO: 1547793 - RNA, 19 nt, Homo sapiens
  misc_RNA (1)...(19): siRNA sense strand
agaaaacgaaccaccauuu

SEQ ID NO: 1547794 - RNA, 19 nt, Homo sapiens
  misc_RNA (1)...(19): siRNA sense strand
aacagcaaaucuuccuuca

SEQ ID NO: 1547795 - RNA, 19 nt, Homo sapiens
  misc_RNA (1)...(19): siRNA sense strand
uagacgccuuuccuucuuc

SEQ ID NO: 1547796 - RNA, 19 nt, Homo sapiens
  misc_RNA (1)...(19): siRNA sense strand
ggacacucucucucaugga

SEQ ID NO: 1547797 - RNA, 19 nt, Homo sapiens
  misc_RNA (1)...(19): siRNA sense strand
gaacagaaacugauagaaa

SEQ ID NO: 1547798 - RNA, 19 nt, Homo sapiens
  misc_RNA (1)...(19): siRNA sense strand
ggacacagaggccuuguua

SEQ ID NO: 1547799 - RNA, 19 nt, Homo sapiens
  misc_RNA (1)...(19): siRNA sense strand
ggccagaccugaagaauau

SEQ ID NO: 1547800 - RNA, 19 nt, Homo sapiens
  misc_RNA (1)...(19): siRNA sense strand
ugacaugucuugugacuau

SEQ ID NO: 1547801 - RNA, 19 nt, Homo sapiens
  misc_RNA (1)...(19): siRNA sense strand
ggcagcauaucacaauuua

SEQ ID NO: 1547802 - RNA, 19 nt, Homo sapiens
  misc_RNA (1)...(19): siRNA sense strand
gauggugacuucuggauug

SEQ ID NO: 1547803 - RNA, 19 nt, Homo sapiens
  misc_RNA (1)...(19): siRNA sense strand
gaagaacaauuucauuugc

SEQ ID NO: 1547804 - RNA, 19 nt, Homo sapiens
  misc_RNA (1)...(19): siRNA sense strand
acacagaggccuuguuaua

SEQ ID NO: 1547805 - RNA, 19 nt, Homo sapiens
  misc_RNA (1)...(19): siRNA sense strand
uagagaagcugccuugaau

SEQ ID NO: 1547806 - RNA, 19 nt, Homo sapiens
  misc_RNA (1)...(19): siRNA sense strand
acagaggccuuguuauaaa

SEQ ID NO: 1547807 - RNA, 19 nt, Homo sapiens
  misc_RNA (1)...(19): siRNA sense strand
ggucuacaaugucauaaga

SEQ ID NO: 1547808 - RNA, 19 nt, Homo sapiens
  misc_RNA (1)...(19): siRNA sense strand
gaggagaaacaaagcaaua

SEQ ID NO: 1547809 - RNA, 19 nt, Homo sapiens
  misc_RNA (1)...(19): siRNA sense strand
gaugaccggugcaacauga

SEQ ID NO: 1547810 - RNA, 19 nt, Homo sapiens
  misc_RNA (1)...(19): siRNA sense strand
gaagaugaacagaaacuga

SEQ ID NO: 1547811 - RNA, 19 nt, Homo sapiens
  misc_RNA (1)...(19): siRNA sense strand
acaaagcgaagcugacuua

SEQ ID NO: 1547812 - RNA, 19 nt, Homo sapiens
  misc_RNA (1)...(19): siRNA sense strand
gcaacaugaagaacaauuu

SEQ ID NO: 1547813 - RNA, 19 nt, Homo sapiens
  misc_RNA (1)...(19): siRNA sense strand
gaaucuggccuacauccua

SEQ ID NO: 1547814 - RNA, 19 nt, Homo sapiens
  misc_RNA (1)...(19): siRNA sense strand
ccgaugacaugucuuguga

SEQ ID NO: 1547815 - RNA, 19 nt, Homo sapiens
  misc_RNA (1)...(19): siRNA sense strand
gcugugaacccaucagaaa

SEQ ID NO: 1547816 - RNA, 19 nt, Homo sapiens
  misc_RNA (1)...(19): siRNA sense strand
gagaagccacucccgauga

SEQ ID NO: 1547817 - RNA, 19 nt, Homo sapiens
  misc_RNA (1)...(19): siRNA sense strand
guagagaagcugccuugaa

SEQ ID NO: 1547818 - RNA, 19 nt, Homo sapiens
  misc_RNA (1)...(19): siRNA sense strand
ucaccacaguuguauguug

SEQ ID NO: 1547819 - RNA, 19 nt, Homo sapiens
  misc_RNA (1)...(19): siRNA sense strand
gaaacagcccggaccuaga

SEQ ID NO: 1547820 - RNA, 19 nt, Homo sapiens
  misc_RNA (1)...(19): siRNA sense strand
gaacugguauguggaugag

SEQ ID NO: 1547821 - RNA, 19 nt, Homo sapiens
  misc_RNA (1)...(19): siRNA sense strand
acaguuguauguuggguuu

SEQ ID NO: 1547822 - RNA, 19 nt, Homo sapiens
  misc_RNA (1)...(19): siRNA sense strand
gacaacaccuguacuucca

SEQ ID NO: 1547823 - RNA, 19 nt, Homo sapiens
  misc_RNA (1)...(19): siRNA sense strand
ggugcaacaugaagaacaa

SEQ ID NO: 1547824 - RNA, 19 nt, Homo sapiens
  misc_RNA (1)...(19): siRNA sense strand
uaaagaaaguagagaagcu

SEQ ID NO: 1547825 - RNA, 19 nt, Homo sapiens
  misc_RNA (1)...(19): siRNA sense strand
guggauuugugaccaauga

SEQ ID NO: 1547826 - RNA, 19 nt, Homo sapiens
  misc_RNA (1)...(19): siRNA sense strand
cacagaggccuuguuauaa

SEQ ID NO: 1547827 - RNA, 19 nt, Homo sapiens
  misc_RNA (1)...(19): siRNA sense strand
aaucuggccuacauccuaa

SEQ ID NO: 1547828 - RNA, 19 nt, Homo sapiens
  misc_RNA (1)...(19): siRNA sense strand
gaugacaugucuugugacu

SEQ ID NO: 1547829 - RNA, 19 nt, Homo sapiens
  misc_RNA (1)...(19): siRNA sense strand
gaaaaccucuugccaucug

SEQ ID NO: 1547830 - RNA, 19 nt, Homo sapiens
  misc_RNA (1)...(19): siRNA sense strand
gagaagcugccuugaaucu

SEQ ID NO: 1547831 - RNA, 19 nt, Homo sapiens
  misc_RNA (1)...(19): siRNA sense strand
gcauaucacaauuuaggaa

SEQ ID NO: 1547832 - RNA, 19 nt, Homo sapiens
  misc_RNA (1)...(19): siRNA sense strand
gauggcagcauaucacaau

SEQ ID NO: 1547833 - RNA, 19 nt, Homo sapiens
  misc_RNA (1)...(19): siRNA sense strand
caacaugaagaacaauuuc

SEQ ID NO: 1547834 - RNA, 19 nt, Homo sapiens
  misc_RNA (1)...(19): siRNA sense strand
gagcguggagaguggauuu

SEQ ID NO: 1547835 - RNA, 19 nt, Homo sapiens
  misc_RNA (1)...(19): siRNA sense strand
ucagaaaguggguuuguga

SEQ ID NO: 1547836 - RNA, 19 nt, Homo sapiens
  misc_RNA (1)...(19): siRNA sense strand
gaaaccagcaguuccuucu

SEQ ID NO: 1547837 - RNA, 19 nt, Homo sapiens
  misc_RNA (1)...(19): siRNA sense strand
caaagaagcaacacaccau

SEQ ID NO: 1547838 - RNA, 19 nt, Homo sapiens
  misc_RNA (1)...(19): siRNA sense strand
ggaacugguauguggauga

SEQ ID NO: 1547839 - RNA, 19 nt, Homo sapiens
  misc_RNA (1)...(19): siRNA sense strand
ggguuuggaucuguagaaa

SEQ ID NO: 1547840 - RNA, 19 nt, Homo sapiens
  misc_RNA (1)...(19): siRNA sense strand
gagaaacaaagcaauagca

SEQ ID NO: 1547841 - RNA, 19 nt, Homo sapiens
  misc_RNA (1)...(19): siRNA sense strand
gaagaaacacaggaagaag

SEQ ID NO: 1547842 - RNA, 19 nt, Homo sapiens
  misc_RNA (1)...(19): siRNA sense strand
cagaagaaacacaggaaga

SEQ ID NO: 1547843 - RNA, 19 nt, Homo sapiens
  misc_RNA (1)...(19): siRNA sense strand
ggaaacagagcugacaaca

SEQ ID NO: 1547844 - RNA, 19 nt, Homo sapiens
  misc_RNA (1)...(19): siRNA sense strand
gaugagaaaccagcaguuc

SEQ ID NO: 1547845 - RNA, 19 nt, Homo sapiens
  misc_RNA (1)...(19): siRNA sense strand
cucgaagacugaacuuuga

SEQ ID NO: 1547846 - RNA, 19 nt, Homo sapiens
  misc_RNA (1)...(19): siRNA sense strand
gauggaggccagcuaguca

SEQ ID NO: 1547847 - RNA, 19 nt, Homo sapiens
  misc_RNA (1)...(19): siRNA sense strand
ggucaccacaguuguaugu

SEQ ID NO: 1547848 - RNA, 19 nt, Homo sapiens
  misc_RNA (1)...(19): siRNA sense strand
cagcauaucacaauuuagg

SEQ ID NO: 1547849 - RNA, 19 nt, Homo sapiens
  misc_RNA (1)...(19): siRNA sense strand
cagaggccuuguuauaaag

SEQ ID NO: 1547850 - RNA, 19 nt, Homo sapiens
  misc_RNA (1)...(19): siRNA sense strand
cagcaguuccuucuagaga

SEQ ID NO: 1547851 - RNA, 19 nt, Homo sapiens
  misc_RNA (1)...(19): siRNA sense strand
agaagaaacacaggaagaa

SEQ ID NO: 1547852 - RNA, 19 nt, Homo sapiens
  misc_RNA (1)...(19): siRNA sense strand
gcugacaacaccuguacuu

SEQ ID NO: 1547853 - RNA, 19 nt, Homo sapiens
  misc_RNA (1)...(19): siRNA sense strand
ucucgaagacugaacuuug

SEQ ID NO: 1547854 - RNA, 19 nt, Homo sapiens
  misc_RNA (1)...(19): siRNA sense strand
aaaguggguuugugacucu

SEQ ID NO: 1547855 - RNA, 19 nt, Homo sapiens
  misc_RNA (1)...(19): siRNA sense strand
cggccagaccugaagaaua

SEQ ID NO: 1547856 - RNA, 19 nt, Homo sapiens
  misc_RNA (1)...(19): siRNA sense strand
caggaggcgugaggagaaa

SEQ ID NO: 1547857 - RNA, 19 nt, Homo sapiens
  misc_RNA (1)...(19): siRNA sense strand
guggagaguggauuuguga

SEQ ID NO: 1547858 - RNA, 19 nt, Homo sapiens
  misc_RNA (1)...(19): siRNA sense strand
ccagaccugaagaauauuu

SEQ ID NO: 1547859 - RNA, 19 nt, Homo sapiens
  misc_RNA (1)...(19): siRNA sense strand
cagcaucgagucugaagau

SEQ ID NO: 1547860 - RNA, 19 nt, Homo sapiens
  misc_RNA (1)...(19): siRNA sense strand
aagaaacacaggaagaaga

SEQ ID NO: 1547861 - RNA, 19 nt, Homo sapiens
  misc_RNA (1)...(19): siRNA sense strand
ggaaugaugaccggugcaa

SEQ ID NO: 1547862 - RNA, 19 nt, Homo sapiens
  misc_RNA (1)...(19): siRNA sense strand
ccuugaaucuggccuacau

SEQ ID NO: 1547863 - RNA, 19 nt, Homo sapiens
  misc_RNA (1)...(19): siRNA sense strand
acaggaagaagaugccaaa

SEQ ID NO: 1547864 - RNA, 19 nt, Homo sapiens
  misc_RNA (1)...(19): siRNA sense strand
gaggccagcuagucagcau

SEQ ID NO: 1547865 - RNA, 19 nt, Homo sapiens
  misc_RNA (1)...(19): siRNA sense strand
gagcugacaacaccuguac

SEQ ID NO: 1547866 - RNA, 19 nt, Homo sapiens
  misc_RNA (1)...(19): siRNA sense strand
uugcaaauauucugaugag

SEQ ID NO: 1547867 - RNA, 19 nt, Homo sapiens
  misc_RNA (1)...(19): siRNA sense strand
ggacugauggcagcauauc

SEQ ID NO: 1547868 - RNA, 19 nt, Homo sapiens
  misc_RNA (1)...(19): siRNA sense strand
ucaggaggcgugaggagaa

SEQ ID NO: 1547869 - RNA, 19 nt, Homo sapiens
  misc_RNA (1)...(19): siRNA sense strand
agaggucuacaaugucaua

SEQ ID NO: 1547870 - RNA, 19 nt, Homo sapiens
  misc_RNA (1)...(19): siRNA sense strand
aaccagcaguuccuucuag

SEQ ID NO: 1547871 - RNA, 19 nt, Homo sapiens
  misc_RNA (1)...(19): siRNA sense strand
uuacuuccaugauacuucu

SEQ ID NO: 1547872 - RNA, 19 nt, Homo sapiens
  misc_RNA (1)...(19): siRNA sense strand
gccagacccuagcacaaag

SEQ ID NO: 1547873 - RNA, 19 nt, Homo sapiens
  misc_RNA (1)...(19): siRNA sense strand
gaggaaacagagcugacaa

SEQ ID NO: 1547874 - RNA, 19 nt, Homo sapiens
  misc_RNA (1)...(19): siRNA sense strand
uggcagcauaucacaauuu

SEQ ID NO: 1547875 - RNA, 19 nt, Homo sapiens
  misc_RNA (1)...(19): siRNA sense strand
aauauuucauuccgagugu

SEQ ID NO: 1547876 - RNA, 19 nt, Homo sapiens
  misc_RNA (1)...(19): siRNA sense strand
aaacagcccggaccuagag

SEQ ID NO: 1547877 - RNA, 19 nt, Homo sapiens
  misc_RNA (1)...(19): siRNA sense strand
uaucacaauuuaggaacug

SEQ ID NO: 1547878 - RNA, 19 nt, Homo sapiens
  misc_RNA (1)...(19): siRNA sense strand
gagucuggauggguggaaa

SEQ ID NO: 1547879 - RNA, 19 nt, Homo sapiens
  misc_RNA (1)...(19): siRNA sense strand
gugaacccaucagaaagug

SEQ ID NO: 1547880 - RNA, 19 nt, Homo sapiens
  misc_RNA (1)...(19): siRNA sense strand
agaaacacaggaagaagau

SEQ ID NO: 1547881 - RNA, 19 nt, Homo sapiens
  misc_RNA (1)...(19): siRNA sense strand
gaaacagagcugacaacac

SEQ ID NO: 1547882 - RNA, 19 nt, Homo sapiens
  misc_RNA (1)...(19): siRNA sense strand
gaugaacagaaacugauag

SEQ ID NO: 1547883 - RNA, 19 nt, Homo sapiens
  misc_RNA (1)...(19): siRNA sense strand
caauuuaggaacugguaug

SEQ ID NO: 1547884 - RNA, 19 nt, Homo sapiens
  misc_RNA (1)...(19): siRNA sense strand
agaugaacagaaacugaua

SEQ ID NO: 1547885 - RNA, 19 nt, Homo sapiens
  misc_RNA (1)...(19): siRNA sense strand
gggaaacagcccggaccua

SEQ ID NO: 1547886 - RNA, 19 nt, Homo sapiens
  misc_RNA (1)...(19): siRNA sense strand
ggauggaggccagcuaguc

SEQ ID NO: 1547887 - RNA, 19 nt, Homo sapiens
  misc_RNA (1)...(19): siRNA sense strand
gaguggauuugugaccaau

SEQ ID NO: 1547888 - RNA, 19 nt, Homo sapiens
  misc_RNA (1)...(19): siRNA sense strand
agaguggauuugugaccaa

SEQ ID NO: 1547889 - RNA, 19 nt, Homo sapiens
  misc_RNA (1)...(19): siRNA sense strand
ggagaaacaaagcaauagc

SEQ ID NO: 1547890 - RNA, 19 nt, Homo sapiens
  misc_RNA (1)...(19): siRNA sense strand
cacaauuuaggaacuggua

SEQ ID NO: 1547891 - RNA, 19 nt, Homo sapiens
  misc_RNA (1)...(19): siRNA sense strand
caucagaaaguggguuugu

SEQ ID NO: 1547892 - RNA, 19 nt, Homo sapiens
  misc_RNA (1)...(19): siRNA sense strand
aaacaaagcgaagcugacu

SEQ ID NO: 1547893 - RNA, 19 nt, Homo sapiens
  misc_RNA (1)...(19): siRNA sense strand
gagaaaccagcaguuccuu

SEQ ID NO: 1547894 - RNA, 19 nt, Homo sapiens
  misc_RNA (1)...(19): siRNA sense strand
gaaacacaggaagaagaug

SEQ ID NO: 1547895 - RNA, 19 nt, Homo sapiens
  misc_RNA (1)...(19): siRNA sense strand
gaagcugaaggugaggaaa

SEQ ID NO: 1547896 - RNA, 19 nt, Homo sapiens
  misc_RNA (1)...(19): siRNA sense strand
cuggauggguggaaaauga

SEQ ID NO: 1547897 - RNA, 19 nt, Homo sapiens
  misc_RNA (1)...(19): siRNA sense strand
cagaacagcuuacaaacaa

SEQ ID NO: 1547898 - RNA, 19 nt, Homo sapiens
  misc_RNA (1)...(19): siRNA sense strand
gaagaaugguggcuguaaa

SEQ ID NO: 1547899 - RNA, 19 nt, Homo sapiens
  misc_RNA (1)...(19): siRNA sense strand
caagugaaauugccaaaga

SEQ ID NO: 1547900 - RNA, 19 nt, Homo sapiens
  misc_RNA (1)...(19): siRNA sense strand
ggaaauagcagaacagcuu

SEQ ID NO: 1547901 - RNA, 19 nt, Homo sapiens
  misc_RNA (1)...(19): siRNA sense strand
gaaugguggcuguaaauua

SEQ ID NO: 1547902 - RNA, 19 nt, Homo sapiens
  misc_RNA (1)...(19): siRNA sense strand
ugaccucgcuuggcaauua

SEQ ID NO: 1547903 - RNA, 19 nt, Homo sapiens
  misc_RNA (1)...(19): siRNA sense strand
gugaauaccuagcacaauu

SEQ ID NO: 1547904 - RNA, 19 nt, Homo sapiens
  misc_RNA (1)...(19): siRNA sense strand
caaaagaacugcgugaaua

SEQ ID NO: 1547905 - RNA, 19 nt, Homo sapiens
  misc_RNA (1)...(19): siRNA sense strand
gaugaagguuggccauuug

SEQ ID NO: 1547906 - RNA, 19 nt, Homo sapiens
  misc_RNA (1)...(19): siRNA sense strand
gaaauagcagaacagcuua

SEQ ID NO: 1547907 - RNA, 19 nt, Homo sapiens
  misc_RNA (1)...(19): siRNA sense strand
gaagcgcuauggcagauuc

SEQ ID NO: 1547908 - RNA, 19 nt, Homo sapiens
  misc_RNA (1)...(19): siRNA sense strand
aaugguggcuguaaauuau

SEQ ID NO: 1547909 - RNA, 19 nt, Homo sapiens
  misc_RNA (1)...(19): siRNA sense strand
gaacagcuuacaaacaaug

SEQ ID NO: 1547910 - RNA, 19 nt, Homo sapiens
  misc_RNA (1)...(19): siRNA sense strand
ggaagaaugguggcuguaa

SEQ ID NO: 1547911 - RNA, 19 nt, Homo sapiens
  misc_RNA (1)...(19): siRNA sense strand
gaauaccuagcacaauuaa

SEQ ID NO: 1547912 - RNA, 19 nt, Homo sapiens
  misc_RNA (1)...(19): siRNA sense strand
uagcagaacagcuuacaaa

SEQ ID NO: 1547913 - RNA, 19 nt, Homo sapiens
  misc_RNA (1)...(19): siRNA sense strand
gcagaacagcuuacaaaca

SEQ ID NO: 1547914 - RNA, 19 nt, Homo sapiens
  misc_RNA (1)...(19): siRNA sense strand
ugaugaagguuggccauuu

SEQ ID NO: 1547915 - RNA, 19 nt, Homo sapiens
  misc_RNA (1)...(19): siRNA sense strand
gaaagcaaguuugaugacu

SEQ ID NO: 1547916 - RNA, 19 nt, Homo sapiens
  misc_RNA (1)...(19): siRNA sense strand
caauuacuaugcuguuugu

SEQ ID NO: 1547917 - RNA, 19 nt, Homo sapiens
  misc_RNA (1)...(19): siRNA sense strand
ugaauaccuagcacaauua

SEQ ID NO: 1547918 - RNA, 19 nt, Homo sapiens
  misc_RNA (1)...(19): siRNA sense strand
gguaugaaagcaaguuuga

SEQ ID NO: 1547919 - RNA, 19 nt, Homo sapiens
  misc_RNA (1)...(19): siRNA sense strand
aaauugggauguaugguau

SEQ ID NO: 1547920 - RNA, 19 nt, Homo sapiens
  misc_RNA (1)...(19): siRNA sense strand
uaaguaacaacgugaggua

SEQ ID NO: 1547921 - RNA, 19 nt, Homo sapiens
  misc_RNA (1)...(19): siRNA sense strand
gcaauuaauggaaauagca

SEQ ID NO: 1547922 - RNA, 19 nt, Homo sapiens
  misc_RNA (1)...(19): siRNA sense strand
gaugggaagguaaucauug

SEQ ID NO: 1547923 - RNA, 19 nt, Homo sapiens
  misc_RNA (1)...(19): siRNA sense strand
gaccucgcuuggcaauuaa

SEQ ID NO: 1547924 - RNA, 19 nt, Homo sapiens
  misc_RNA (1)...(19): siRNA sense strand
ugggauguaugguaugaaa

SEQ ID NO: 1547925 - RNA, 19 nt, Homo sapiens
  misc_RNA (1)...(19): siRNA sense strand
gaagguuggccauuugcaa

SEQ ID NO: 1547926 - RNA, 19 nt, Homo sapiens
  misc_RNA (1)...(19): siRNA sense strand
gcuuggcaauuaauggaaa

SEQ ID NO: 1547927 - RNA, 19 nt, Homo sapiens
  misc_RNA (1)...(19): siRNA sense strand
caaguuugaugacugugau

SEQ ID NO: 1547928 - RNA, 19 nt, Homo sapiens
  misc_RNA (1)...(19): siRNA sense strand
gcaaguuugaugacuguga

SEQ ID NO: 1547929 - RNA, 19 nt, Homo sapiens
  misc_RNA (1)...(19): siRNA sense strand
gcaguugguccuagagaug

SEQ ID NO: 1547930 - RNA, 19 nt, Homo sapiens
  misc_RNA (1)...(19): siRNA sense strand
cacaauuacuaugcuguuu

SEQ ID NO: 1547931 - RNA, 19 nt, Homo sapiens
  misc_RNA (1)...(19): siRNA sense strand
uaauggaaauagcagaaca

SEQ ID NO: 1547932 - RNA, 19 nt, Homo sapiens
  misc_RNA (1)...(19): siRNA sense strand
agaacugcgugaauaccua

SEQ ID NO: 1547933 - RNA, 19 nt, Homo sapiens
  misc_RNA (1)...(19): siRNA sense strand
uaugaaagcaaguuugaug

SEQ ID NO: 1547934 - RNA, 19 nt, Homo sapiens
  misc_RNA (1)...(19): siRNA sense strand
gaagguaaucauuguggau

SEQ ID NO: 1547935 - RNA, 19 nt, Homo sapiens
  misc_RNA (1)...(19): siRNA sense strand
gaggcuugcuuaucauuuu

SEQ ID NO: 1547936 - RNA, 19 nt, Homo sapiens
  misc_RNA (1)...(19): siRNA sense strand
ggaggcuugcuuaucauuu

SEQ ID NO: 1547937 - RNA, 19 nt, Homo sapiens
  misc_RNA (1)...(19): siRNA sense strand
ggaccacaauuacuaugcu

SEQ ID NO: 1547938 - RNA, 19 nt, Homo sapiens
  misc_RNA (1)...(19): siRNA sense strand
caugauccaccaagugaaa

SEQ ID NO: 1547939 - RNA, 19 nt, Homo sapiens
  misc_RNA (1)...(19): siRNA sense strand
gcuuacaaacaaugacuuu

SEQ ID NO: 1547940 - RNA, 19 nt, Homo sapiens
  misc_RNA (1)...(19): siRNA sense strand
acaaugacuuugaauuugc

SEQ ID NO: 1547941 - RNA, 19 nt, Homo sapiens
  misc_RNA (1)...(19): siRNA sense strand
guuggccauuugcaaagua

SEQ ID NO: 1547942 - RNA, 19 nt, Homo sapiens
  misc_RNA (1)...(19): siRNA sense strand
aagcaaguuugaugacugu

SEQ ID NO: 1547943 - RNA, 19 nt, Homo sapiens
  misc_RNA (1)...(19): siRNA sense strand
ggcuguaaauuauguugga

SEQ ID NO: 1547944 - RNA, 19 nt, Homo sapiens
  misc_RNA (1)...(19): siRNA sense strand
cuagcacaauuaaguaaca

SEQ ID NO: 1547945 - RNA, 19 nt, Homo sapiens
  misc_RNA (1)...(19): siRNA sense strand
ccacaauuacuaugcuguu

SEQ ID NO: 1547946 - RNA, 19 nt, Homo sapiens
  misc_RNA (1)...(19): siRNA sense strand
caaugacuuugaauuugca

SEQ ID NO: 1547947 - RNA, 19 nt, Homo sapiens
  misc_RNA (1)...(19): siRNA sense strand
gcaaaagaacugcgugaau

SEQ ID NO: 1547948 - RNA, 19 nt, Homo sapiens
  misc_RNA (1)...(19): siRNA sense strand
auaccuagcacaauuaagu

SEQ ID NO: 1547949 - RNA, 19 nt, Homo sapiens
  misc_RNA (1)...(19): siRNA sense strand
ucaacgggcaggugguauu

SEQ ID NO: 1547950 - RNA, 19 nt, Homo sapiens
  misc_RNA (1)...(19): siRNA sense strand
aagaagcgcuauggcagau

SEQ ID NO: 1547951 - RNA, 19 nt, Homo sapiens
  misc_RNA (1)...(19): siRNA sense strand
gagaugggaagguaaucau

SEQ ID NO: 1547952 - RNA, 19 nt, Homo sapiens
  misc_RNA (1)...(19): siRNA sense strand
uccuagagaugggaaggua

SEQ ID NO: 1547953 - RNA, 19 nt, Homo sapiens
  misc_RNA (1)...(19): siRNA sense strand
gugauaaggaggcuugcuu

SEQ ID NO: 1547954 - RNA, 19 nt, Homo sapiens
  misc_RNA (1)...(19): siRNA sense strand
uaccuagcacaauuaagua

SEQ ID NO: 1547955 - RNA, 19 nt, Homo sapiens
  misc_RNA (1)...(19): siRNA sense strand
uaucuuggagcuuguggaa

SEQ ID NO: 1547956 - RNA, 19 nt, Homo sapiens
  misc_RNA (1)...(19): siRNA sense strand
gauccaccaagugaaauug

SEQ ID NO: 1547957 - RNA, 19 nt, Homo sapiens
  misc_RNA (1)...(19): siRNA sense strand
acaauuacuaugcuguuug

SEQ ID NO: 1547958 - RNA, 19 nt, Homo sapiens
  misc_RNA (1)...(19): siRNA sense strand
gauguaugguaugaaagca

SEQ ID NO: 1547959 - RNA, 19 nt, Homo sapiens
  misc_RNA (1)...(19): siRNA sense strand
ucgaggccuugcuggauga

SEQ ID NO: 1547960 - RNA, 19 nt, Homo sapiens
  misc_RNA (1)...(19): siRNA sense strand
caacgggcaggugguauuc

SEQ ID NO: 1547961 - RNA, 19 nt, Homo sapiens
  misc_RNA (1)...(19): siRNA sense strand
uccugcagcucaauaagug

SEQ ID NO: 1547962 - RNA, 19 nt, Homo sapiens
  misc_RNA (1)...(19): siRNA sense strand
aagaaugguggcuguaaau

SEQ ID NO: 1547963 - RNA, 19 nt, Homo sapiens
  misc_RNA (1)...(19): siRNA sense strand
ugucagaaccucuuaucca

SEQ ID NO: 1547964 - RNA, 19 nt, Homo sapiens
  misc_RNA (1)...(19): siRNA sense strand
ggauguaugguaugaaagc

SEQ ID NO: 1547965 - RNA, 19 nt, Homo sapiens
  misc_RNA (1)...(19): siRNA sense strand
aaaauugggauguauggua

SEQ ID NO: 1547966 - RNA, 19 nt, Homo sapiens
  misc_RNA (1)...(19): siRNA sense strand
acuguggaguuacuuuaau

SEQ ID NO: 1547967 - RNA, 19 nt, Homo sapiens
  misc_RNA (1)...(19): siRNA sense strand
gcucgaggccuugcuggau

SEQ ID NO: 1547968 - RNA, 19 nt, Homo sapiens
  misc_RNA (1)...(19): siRNA sense strand
aagugaaauugccaaagau

SEQ ID NO: 1547969 - RNA, 19 nt, Homo sapiens
  misc_RNA (1)...(19): siRNA sense strand
gcaaaguaucuuggagcuu

SEQ ID NO: 1547970 - RNA, 19 nt, Homo sapiens
  misc_RNA (1)...(19): siRNA sense strand
ggcaauuaauggaaauagc

SEQ ID NO: 1547971 - RNA, 19 nt, Homo sapiens
  misc_RNA (1)...(19): siRNA sense strand
cuguggaguuacuuuaaug

SEQ ID NO: 1547972 - RNA, 19 nt, Homo sapiens
  misc_RNA (1)...(19): siRNA sense strand
aagguuggccauuugcaaa

SEQ ID NO: 1547973 - RNA, 19 nt, Homo sapiens
  misc_RNA (1)...(19): siRNA sense strand
gcgugaauaccuagcacaa

SEQ ID NO: 1547974 - RNA, 19 nt, Homo sapiens
  misc_RNA (1)...(19): siRNA sense strand
gagugugccaacccaaaga

SEQ ID NO: 1547975 - RNA, 19 nt, Homo sapiens
  misc_RNA (1)...(19): siRNA sense strand
gcuugcgccugcuggacuu

SEQ ID NO: 1547976 - RNA, 19 nt, Homo sapiens
  misc_RNA (1)...(19): siRNA sense strand
cuagagaugggaagguaau

SEQ ID NO: 1547977 - RNA, 19 nt, Homo sapiens
  misc_RNA (1)...(19): siRNA sense strand
agaaugguggcuguaaauu

SEQ ID NO: 1547978 - RNA, 19 nt, Homo sapiens
  misc_RNA (1)...(19): siRNA sense strand
gaacagacacacuuaguuu

SEQ ID NO: 1547979 - RNA, 19 nt, Homo sapiens
  misc_RNA (1)...(19): siRNA sense strand
gcaaagaggagaucaaaga

SEQ ID NO: 1547980 - RNA, 19 nt, Homo sapiens
  misc_RNA (1)...(19): siRNA sense strand
ccacagacuucuccaaauu

SEQ ID NO: 1547981 - RNA, 19 nt, Homo sapiens
  misc_RNA (1)...(19): siRNA sense strand
ggaaaacucucucccagua

SEQ ID NO: 1547982 - RNA, 19 nt, Homo sapiens
  misc_RNA (1)...(19): siRNA sense strand
ugagagcccugccaaguuu

SEQ ID NO: 1547983 - RNA, 19 nt, Homo sapiens
  misc_RNA (1)...(19): siRNA sense strand
gauuuacacuggcuucauu

SEQ ID NO: 1547984 - RNA, 19 nt, Homo sapiens
  misc_RNA (1)...(19): siRNA sense strand
agcaauggcuguaugaaua

SEQ ID NO: 1547985 - RNA, 19 nt, Homo sapiens
  misc_RNA (1)...(19): siRNA sense strand
ggacaaggaagaagaugaa

SEQ ID NO: 1547986 - RNA, 19 nt, Homo sapiens
  misc_RNA (1)...(19): siRNA sense strand
agaaggaaacccacaguua

SEQ ID NO: 1547987 - RNA, 19 nt, Homo sapiens
  misc_RNA (1)...(19): siRNA sense strand
gaagaugaccuugaauuca

SEQ ID NO: 1547988 - RNA, 19 nt, Homo sapiens
  misc_RNA (1)...(19): siRNA sense strand
aagaggagaucaaagagaa

SEQ ID NO: 1547989 - RNA, 19 nt, Homo sapiens
  misc_RNA (1)...(19): siRNA sense strand
acagacaaguugaagauga

SEQ ID NO: 1547990 - RNA, 19 nt, Homo sapiens
  misc_RNA (1)...(19): siRNA sense strand
uuccagaacuacagaauuu

SEQ ID NO: 1547991 - RNA, 19 nt, Homo sapiens
  misc_RNA (1)...(19): siRNA sense strand
gaaggaaacccacaguuac

SEQ ID NO: 1547992 - RNA, 19 nt, Homo sapiens
  misc_RNA (1)...(19): siRNA sense strand
acaguuaccucagcaaaga

SEQ ID NO: 1547993 - RNA, 19 nt, Homo sapiens
  misc_RNA (1)...(19): siRNA sense strand
gaucgaggcccugcucaaa

SEQ ID NO: 1547994 - RNA, 19 nt, Homo sapiens
  misc_RNA (1)...(19): siRNA sense strand
gcaaaccuccacagacuuc

SEQ ID NO: 1547995 - RNA, 19 nt, Homo sapiens
  misc_RNA (1)...(19): siRNA sense strand
aaauacaacuuagcaguca

SEQ ID NO: 1547996 - RNA, 19 nt, Homo sapiens
  misc_RNA (1)...(19): siRNA sense strand
gccgaggacuucuucuuca

SEQ ID NO: 1547997 - RNA, 19 nt, Homo sapiens
  misc_RNA (1)...(19): siRNA sense strand
cagcaaagaggagaucaaa

SEQ ID NO: 1547998 - RNA, 19 nt, Homo sapiens
  misc_RNA (1)...(19): siRNA sense strand
gaucaaagagaaaguucau

SEQ ID NO: 1547999 - RNA, 19 nt, Homo sapiens
  misc_RNA (1)...(19): siRNA sense strand
ggagaucaaagagaaaguu

SEQ ID NO: 1548000 - RNA, 19 nt, Homo sapiens
  misc_RNA (1)...(19): siRNA sense strand
gaacaugaaauuggagagu

SEQ ID NO: 1548001 - RNA, 19 nt, Homo sapiens
  misc_RNA (1)...(19): siRNA sense strand
uacacuggcuucauuaaag

SEQ ID NO: 1548002 - RNA, 19 nt, Homo sapiens
  misc_RNA (1)...(19): siRNA sense strand
gagaaggaaacccacaguu

SEQ ID NO: 1548003 - RNA, 19 nt, Homo sapiens
  misc_RNA (1)...(19): siRNA sense strand
ucacagacaaguugaagau

SEQ ID NO: 1548004 - RNA, 19 nt, Homo sapiens
  misc_RNA (1)...(19): siRNA sense strand
ugaagaugaccuugaauuc

SEQ ID NO: 1548005 - RNA, 19 nt, Homo sapiens
  misc_RNA (1)...(19): siRNA sense strand
cauaucagcagcacaaaca

SEQ ID NO: 1548006 - RNA, 19 nt, Homo sapiens
  misc_RNA (1)...(19): siRNA sense strand
acacuggcuucauuaaagu

SEQ ID NO: 1548007 - RNA, 19 nt, Homo sapiens
  misc_RNA (1)...(19): siRNA sense strand
cuucagccuuccagaacua

SEQ ID NO: 1548008 - RNA, 19 nt, Homo sapiens
  misc_RNA (1)...(19): siRNA sense strand
gaauuucuugcgcaucuug

SEQ ID NO: 1548009 - RNA, 19 nt, Homo sapiens
  misc_RNA (1)...(19): siRNA sense strand
ucauuaaaguacagaugga

SEQ ID NO: 1548010 - RNA, 19 nt, Homo sapiens
  misc_RNA (1)...(19): siRNA sense strand
ccacaguuaccucagcaaa

SEQ ID NO: 1548011 - RNA, 19 nt, Homo sapiens
  misc_RNA (1)...(19): siRNA sense strand
gcccagaacagacacacuu

SEQ ID NO: 1548012 - RNA, 19 nt, Homo sapiens
  misc_RNA (1)...(19): siRNA sense strand
aaaaguuucucgugacuga

SEQ ID NO: 1548013 - RNA, 19 nt, Homo sapiens
  misc_RNA (1)...(19): siRNA sense strand
ggacgccgaggacuucuuc

SEQ ID NO: 1548014 - RNA, 19 nt, Homo sapiens
  misc_RNA (1)...(19): siRNA sense strand
cugcaaaccuccacagacu

SEQ ID NO: 1548015 - RNA, 19 nt, Homo sapiens
  misc_RNA (1)...(19): siRNA sense strand
caaggaagaagaugaacag

SEQ ID NO: 1548016 - RNA, 19 nt, Homo sapiens
  misc_RNA (1)...(19): siRNA sense strand
aguugaagaugaccuugaa

SEQ ID NO: 1548017 - RNA, 19 nt, Homo sapiens
  misc_RNA (1)...(19): siRNA sense strand
gguguggaagccugauuaa

SEQ ID NO: 1548018 - RNA, 19 nt, Homo sapiens
  misc_RNA (1)...(19): siRNA sense strand
gagaucaaagagaaaguuc

SEQ ID NO: 1548019 - RNA, 19 nt, Homo sapiens
  misc_RNA (1)...(19): siRNA sense strand
aagaugaacagcugcagaa

SEQ ID NO: 1548020 - RNA, 19 nt, Homo sapiens
  misc_RNA (1)...(19): siRNA sense strand
aaagaggagaucaaagaga

SEQ ID NO: 1548021 - RNA, 19 nt, Homo sapiens
  misc_RNA (1)...(19): siRNA sense strand
uuacacuggcuucauuaaa

SEQ ID NO: 1548022 - RNA, 19 nt, Homo sapiens
  misc_RNA (1)...(19): siRNA sense strand
caaagaggagaucaaagag

SEQ ID NO: 1548023 - RNA, 19 nt, Homo sapiens
  misc_RNA (1)...(19): siRNA sense strand
gcagggcccagaacagaca

SEQ ID NO: 1548024 - RNA, 19 nt, Homo sapiens
  misc_RNA (1)...(19): siRNA sense strand
uagcagggcccagaacaga

SEQ ID NO: 1548025 - RNA, 19 nt, Homo sapiens
  misc_RNA (1)...(19): siRNA sense strand
caguagcaauggcuguaug

SEQ ID NO: 1548026 - RNA, 19 nt, Homo sapiens
  misc_RNA (1)...(19): siRNA sense strand
ucacagggaagaccaaguc

SEQ ID NO: 1548027 - RNA, 19 nt, Homo sapiens
  misc_RNA (1)...(19): siRNA sense strand
agaacagacacacuuaguu

SEQ ID NO: 1548028 - RNA, 19 nt, Homo sapiens
  misc_RNA (1)...(19): siRNA sense strand
gcagucacagacaaguuga

SEQ ID NO: 1548029 - RNA, 19 nt, Homo sapiens
  misc_RNA (1)...(19): siRNA sense strand
uagcaauggcuguaugaau

SEQ ID NO: 1548030 - RNA, 19 nt, Homo sapiens
  misc_RNA (1)...(19): siRNA sense strand
cagaacagacacacuuagu

SEQ ID NO: 1548031 - RNA, 19 nt, Homo sapiens
  misc_RNA (1)...(19): siRNA sense strand
caagauguugagaaagaga

SEQ ID NO: 1548032 - RNA, 19 nt, Homo sapiens
  misc_RNA (1)...(19): siRNA sense strand
cccagaacagacacacuua

SEQ ID NO: 1548033 - RNA, 19 nt, Homo sapiens
  misc_RNA (1)...(19): siRNA sense strand
cuucauaucagcagcacaa

SEQ ID NO: 1548034 - RNA, 19 nt, Homo sapiens
  misc_RNA (1)...(19): siRNA sense strand
acagacuucuccaaauucu

SEQ ID NO: 1548035 - RNA, 19 nt, Homo sapiens
  misc_RNA (1)...(19): siRNA sense strand
uugaagaugaccuugaauu

SEQ ID NO: 1548036 - RNA, 19 nt, Homo sapiens
  misc_RNA (1)...(19): siRNA sense strand
cagacaaguugaagaugac

SEQ ID NO: 1548037 - RNA, 19 nt, Homo sapiens
  misc_RNA (1)...(19): siRNA sense strand
ccgggaacauccacucuac

SEQ ID NO: 1548038 - RNA, 19 nt, Homo sapiens
  misc_RNA (1)...(19): siRNA sense strand
gaggagaucaaagagaaag

SEQ ID NO: 1548039 - RNA, 19 nt, Homo sapiens
  misc_RNA (1)...(19): siRNA sense strand
ucgugaacaugaaauugga

SEQ ID NO: 1548040 - RNA, 19 nt, Homo sapiens
  misc_RNA (1)...(19): siRNA sense strand
guugagaaagagaaggaaa

SEQ ID NO: 1548041 - RNA, 19 nt, Homo sapiens
  misc_RNA (1)...(19): siRNA sense strand
uccacagacuucuccaaau

SEQ ID NO: 1548042 - RNA, 19 nt, Homo sapiens
  misc_RNA (1)...(19): siRNA sense strand
ccaaggacgucaaguguuu

SEQ ID NO: 1548043 - RNA, 19 nt, Homo sapiens
  misc_RNA (1)...(19): siRNA sense strand
ggacuugguugcugcauga

SEQ ID NO: 1548044 - RNA, 19 nt, Homo sapiens
  misc_RNA (1)...(19): siRNA sense strand
gaaaacaucucuucucuuc

SEQ ID NO: 1548045 - RNA, 19 nt, Homo sapiens
  misc_RNA (1)...(19): siRNA sense strand
aaacaucucuucucuucuu

SEQ ID NO: 1548046 - RNA, 19 nt, Homo sapiens
  misc_RNA (1)...(19): siRNA sense strand
guuauuagauggcuuuaug

SEQ ID NO: 1548047 - RNA, 19 nt, Homo sapiens
  misc_RNA (1)...(19): siRNA sense strand
gagacaaagucaauccaaa

SEQ ID NO: 1548048 - RNA, 19 nt, Homo sapiens
  misc_RNA (1)...(19): siRNA sense strand
gagcacagauggagugauc

SEQ ID NO: 1548049 - RNA, 19 nt, Homo sapiens
  misc_RNA (1)...(19): siRNA sense strand
gcaguaugguccacaagaa

SEQ ID NO: 1548050 - RNA, 19 nt, Homo sapiens
  misc_RNA (1)...(19): siRNA sense strand
agaagaagaugcaggagaa

SEQ ID NO: 1548051 - RNA, 19 nt, Homo sapiens
  misc_RNA (1)...(19): siRNA sense strand
cagcugccauugauagaua

SEQ ID NO: 1548052 - RNA, 19 nt, Homo sapiens
  misc_RNA (1)...(19): siRNA sense strand
ccaagugacgcuacaguua

SEQ ID NO: 1548053 - RNA, 19 nt, Homo sapiens
  misc_RNA (1)...(19): siRNA sense strand
gaacuggaacugaugaaga

SEQ ID NO: 1548054 - RNA, 19 nt, Homo sapiens
  misc_RNA (1)...(19): siRNA sense strand
gaagaugagagucaaaguu

SEQ ID NO: 1548055 - RNA, 19 nt, Homo sapiens
  misc_RNA (1)...(19): siRNA sense strand
gccugaaucuccagccuua

SEQ ID NO: 1548056 - RNA, 19 nt, Homo sapiens
  misc_RNA (1)...(19): siRNA sense strand
caacgugacucaaauaagc

SEQ ID NO: 1548057 - RNA, 19 nt, Homo sapiens
  misc_RNA (1)...(19): siRNA sense strand
ggcaagaguugucugauuc

SEQ ID NO: 1548058 - RNA, 19 nt, Homo sapiens
  misc_RNA (1)...(19): siRNA sense strand
gagagcagcugaacaacag

SEQ ID NO: 1548059 - RNA, 19 nt, Homo sapiens
  misc_RNA (1)...(19): siRNA sense strand
gaagcagccaaacacauua

SEQ ID NO: 1548060 - RNA, 19 nt, Homo sapiens
  misc_RNA (1)...(19): siRNA sense strand
caucaccaguugcauauga

SEQ ID NO: 1548061 - RNA, 19 nt, Homo sapiens
  misc_RNA (1)...(19): siRNA sense strand
gagaagagacaaagucaau

SEQ ID NO: 1548062 - RNA, 19 nt, Homo sapiens
  misc_RNA (1)...(19): siRNA sense strand
agagaaagaugaagucuac

SEQ ID NO: 1548063 - RNA, 19 nt, Homo sapiens
  misc_RNA (1)...(19): siRNA sense strand
gagcaacgugacucaaaua

SEQ ID NO: 1548064 - RNA, 19 nt, Homo sapiens
  misc_RNA (1)...(19): siRNA sense strand
gagcagccacugaagcaua

SEQ ID NO: 1548065 - RNA, 19 nt, Homo sapiens
  misc_RNA (1)...(19): siRNA sense strand
uugcagagguugagcagua

SEQ ID NO: 1548066 - RNA, 19 nt, Homo sapiens
  misc_RNA (1)...(19): siRNA sense strand
ugaaagccguguacguuga

SEQ ID NO: 1548067 - RNA, 19 nt, Homo sapiens
  misc_RNA (1)...(19): siRNA sense strand
caaaggcagucagugauga

SEQ ID NO: 1548068 - RNA, 19 nt, Homo sapiens
  misc_RNA (1)...(19): siRNA sense strand
gaggaucggcuuuaucuug

SEQ ID NO: 1548069 - RNA, 19 nt, Homo sapiens
  misc_RNA (1)...(19): siRNA sense strand
ggucuuuaguggcuuguuu

SEQ ID NO: 1548070 - RNA, 19 nt, Homo sapiens
  misc_RNA (1)...(19): siRNA sense strand
gcaaguuucugagguagga

SEQ ID NO: 1548071 - RNA, 19 nt, Homo sapiens
  misc_RNA (1)...(19): siRNA sense strand
ggucaaagaggacacacua

SEQ ID NO: 1548072 - RNA, 19 nt, Homo sapiens
  misc_RNA (1)...(19): siRNA sense strand
ccaccucugugcugacuuu

SEQ ID NO: 1548073 - RNA, 19 nt, Homo sapiens
  misc_RNA (1)...(19): siRNA sense strand
ggugcaaguuucugaggua

SEQ ID NO: 1548074 - RNA, 19 nt, Homo sapiens
  misc_RNA (1)...(19): siRNA sense strand
cagauggagugaucauuug

SEQ ID NO: 1548075 - RNA, 19 nt, Homo sapiens
  misc_RNA (1)...(19): siRNA sense strand
ccagagagcagcugaacaa

SEQ ID NO: 1548076 - RNA, 19 nt, Homo sapiens
  misc_RNA (1)...(19): siRNA sense strand
aaaggaaggugcagaagca

SEQ ID NO: 1548077 - RNA, 19 nt, Homo sapiens
  misc_RNA (1)...(19): siRNA sense strand
ugacuuugcugcauguguu

SEQ ID NO: 1548078 - RNA, 19 nt, Homo sapiens
  misc_RNA (1)...(19): siRNA sense strand
cagaaugcauuggaauuga

SEQ ID NO: 1548079 - RNA, 19 nt, Homo sapiens
  misc_RNA (1)...(19): siRNA sense strand
gcagaaugcauuggaauug

SEQ ID NO: 1548080 - RNA, 19 nt, Homo sapiens
  misc_RNA (1)...(19): siRNA sense strand
gaggugagccugaggugaa

SEQ ID NO: 1548081 - RNA, 19 nt, Homo sapiens
  misc_RNA (1)...(19): siRNA sense strand
ucccauaacuucagacuca

SEQ ID NO: 1548082 - RNA, 19 nt, Homo sapiens
  misc_RNA (1)...(19): siRNA sense strand
ugaaggagcagcuagaaga

SEQ ID NO: 1548083 - RNA, 19 nt, Homo sapiens
  misc_RNA (1)...(19): siRNA sense strand
guucacauguuuguagauu

SEQ ID NO: 1548084 - RNA, 19 nt, Homo sapiens
  misc_RNA (1)...(19): siRNA sense strand
cgcaagugcucagccauua

SEQ ID NO: 1548085 - RNA, 19 nt, Homo sapiens
  misc_RNA (1)...(19): siRNA sense strand
guuuguagauucugauuca

SEQ ID NO: 1548086 - RNA, 19 nt, Homo sapiens
  misc_RNA (1)...(19): siRNA sense strand
gaaccagcugccauugaua

SEQ ID NO: 1548087 - RNA, 19 nt, Homo sapiens
  misc_RNA (1)...(19): siRNA sense strand
ggaaugagagggugcagau

SEQ ID NO: 1548088 - RNA, 19 nt, Homo sapiens
  misc_RNA (1)...(19): siRNA sense strand
caucaucaccaguugcaua

SEQ ID NO: 1548089 - RNA, 19 nt, Homo sapiens
  misc_RNA (1)...(19): siRNA sense strand
gcagcaacuuuacacuuca

SEQ ID NO: 1548090 - RNA, 19 nt, Homo sapiens
  misc_RNA (1)...(19): siRNA sense strand
ggaaggugcagaagcagaa

SEQ ID NO: 1548091 - RNA, 19 nt, Homo sapiens
  misc_RNA (1)...(19): siRNA sense strand
gaaagaugaagucuaccaa

SEQ ID NO: 1548092 - RNA, 19 nt, Homo sapiens
  misc_RNA (1)...(19): siRNA sense strand
ccaaggcccugcugcauac

SEQ ID NO: 1548093 - RNA, 19 nt, Homo sapiens
  misc_RNA (1)...(19): siRNA sense strand
uggcaagaguugucugauu

SEQ ID NO: 1548094 - RNA, 19 nt, Homo sapiens
  misc_RNA (1)...(19): siRNA sense strand
ugaaccagcugccauugau

SEQ ID NO: 1548095 - RNA, 19 nt, Homo sapiens
  misc_RNA (1)...(19): siRNA sense strand
ggcagaugcuacagaaaga

SEQ ID NO: 1548096 - RNA, 19 nt, Homo sapiens
  misc_RNA (1)...(19): siRNA sense strand
uaucucagacgaccaaauu

SEQ ID NO: 1548097 - RNA, 19 nt, Homo sapiens
  misc_RNA (1)...(19): siRNA sense strand
aagaugagagucaaaguuu

SEQ ID NO: 1548098 - RNA, 19 nt, Homo sapiens
  misc_RNA (1)...(19): siRNA sense strand
gaagcggccucucccacau

SEQ ID NO: 1548099 - RNA, 19 nt, Homo sapiens
  misc_RNA (1)...(19): siRNA sense strand
caagugacgcuacaguuau

SEQ ID NO: 1548100 - RNA, 19 nt, Homo sapiens
  misc_RNA (1)...(19): siRNA sense strand
gaugaagucuaccaaaaga

SEQ ID NO: 1548101 - RNA, 19 nt, Homo sapiens
  misc_RNA (1)...(19): siRNA sense strand
ugauaguucugcuuacgaa

SEQ ID NO: 1548102 - RNA, 19 nt, Homo sapiens
  misc_RNA (1)...(19): siRNA sense strand
acagauggagugaucauuu

SEQ ID NO: 1548103 - RNA, 19 nt, Homo sapiens
  misc_RNA (1)...(19): siRNA sense strand
ucacauguuuguagauucu

SEQ ID NO: 1548104 - RNA, 19 nt, Homo sapiens
  misc_RNA (1)...(19): siRNA sense strand
ucagacgaccaaauugaua

SEQ ID NO: 1548105 - RNA, 19 nt, Homo sapiens
  misc_RNA (1)...(19): siRNA sense strand
caugaaagccguguacguu

SEQ ID NO: 1548106 - RNA, 19 nt, Homo sapiens
  misc_RNA (1)...(19): siRNA sense strand
gcaagaacaacaccugaag

SEQ ID NO: 1548107 - RNA, 19 nt, Homo sapiens
  misc_RNA (1)...(19): siRNA sense strand
ccaagaaacaacagaaaca

SEQ ID NO: 1548108 - RNA, 19 nt, Homo sapiens
  misc_RNA (1)...(19): siRNA sense strand
agaagcagccaaacacauu

SEQ ID NO: 1548109 - RNA, 19 nt, Homo sapiens
  misc_RNA (1)...(19): siRNA sense strand
ugaguuuccuguggucuuu

SEQ ID NO: 1548110 - RNA, 19 nt, Homo sapiens
  misc_RNA (1)...(19): siRNA sense strand
uagaagagaggacuugguu

SEQ ID NO: 1548111 - RNA, 19 nt, Homo sapiens
  misc_RNA (1)...(19): siRNA sense strand
ugacaucauuagccaggaa

SEQ ID NO: 1548112 - RNA, 19 nt, Homo sapiens
  misc_RNA (1)...(19): siRNA sense strand
gaaagccguguacguugaa

SEQ ID NO: 1548113 - RNA, 19 nt, Homo sapiens
  misc_RNA (1)...(19): siRNA sense strand
gcucucaaaggaaauuaaa

SEQ ID NO: 1548114 - RNA, 19 nt, Homo sapiens
  misc_RNA (1)...(19): siRNA sense strand
ggacgucaaguguuucugu

SEQ ID NO: 1548115 - RNA, 19 nt, Homo sapiens
  misc_RNA (1)...(19): siRNA sense strand
caagaaacaacagaaacaa

SEQ ID NO: 1548116 - RNA, 19 nt, Homo sapiens
  misc_RNA (1)...(19): siRNA sense strand
gaucauuuguguggcugaa

SEQ ID NO: 1548117 - RNA, 19 nt, Homo sapiens
  misc_RNA (1)...(19): siRNA sense strand
gagcagaggcggcaaaaga

SEQ ID NO: 1548118 - RNA, 19 nt, Homo sapiens
  misc_RNA (1)...(19): siRNA sense strand
aacuggaacugaugaagaa

SEQ ID NO: 1548119 - RNA, 19 nt, Homo sapiens
  misc_RNA (1)...(19): siRNA sense strand
ccacugaagcauaauguca

SEQ ID NO: 1548120 - RNA, 19 nt, Homo sapiens
  misc_RNA (1)...(19): siRNA sense strand
gggcagaugcuacagaaag

SEQ ID NO: 1548121 - RNA, 19 nt, Homo sapiens
  misc_RNA (1)...(19): siRNA sense strand
caaguguuucugugguuua

SEQ ID NO: 1548122 - RNA, 19 nt, Homo sapiens
  misc_RNA (1)...(19): siRNA sense strand
ucaaguguuucugugguuu

SEQ ID NO: 1548123 - RNA, 19 nt, Homo sapiens
  misc_RNA (1)...(19): siRNA sense strand
ccagcagaaugcauuggaa

SEQ ID NO: 1548124 - RNA, 19 nt, Homo sapiens
  misc_RNA (1)...(19): siRNA sense strand
ucaggaggaucggcuuuau

SEQ ID NO: 1548125 - RNA, 19 nt, Homo sapiens
  misc_RNA (1)...(19): siRNA sense strand
cgaccaaauugauauugca

SEQ ID NO: 1548126 - RNA, 19 nt, Homo sapiens
  misc_RNA (1)...(19): siRNA sense strand
agucagugaugaagcugua

SEQ ID NO: 1548127 - RNA, 19 nt, Homo sapiens
  misc_RNA (1)...(19): siRNA sense strand
cagagcaacgugacucaaa

SEQ ID NO: 1548128 - RNA, 19 nt, Homo sapiens
  misc_RNA (1)...(19): siRNA sense strand
uggcuucuaucaagaugaa

SEQ ID NO: 1548129 - RNA, 19 nt, Homo sapiens
  misc_RNA (1)...(19): siRNA sense strand
gaaugagagggugcagaua

SEQ ID NO: 1548130 - RNA, 19 nt, Homo sapiens
  misc_RNA (1)...(19): siRNA sense strand
uaagccuucugccugauga

SEQ ID NO: 1548131 - RNA, 19 nt, Homo sapiens
  misc_RNA (1)...(19): siRNA sense strand
gcaagaguugucugauuca

SEQ ID NO: 1548132 - RNA, 19 nt, Homo sapiens
  misc_RNA (1)...(19): siRNA sense strand
agaagcagcaguugcaaga

SEQ ID NO: 1548133 - RNA, 19 nt, Homo sapiens
  misc_RNA (1)...(19): siRNA sense strand
aagugacgcuacaguuauu

SEQ ID NO: 1548134 - RNA, 19 nt, Homo sapiens
  misc_RNA (1)...(19): siRNA sense strand
gcgcaagugcucagccauu

SEQ ID NO: 1548135 - RNA, 19 nt, Homo sapiens
  misc_RNA (1)...(19): siRNA sense strand
caaagaggacacacuagca

SEQ ID NO: 1548136 - RNA, 19 nt, Homo sapiens
  misc_RNA (1)...(19): siRNA sense strand
uuacacaagauucagauga

SEQ ID NO: 1548137 - RNA, 19 nt, Homo sapiens
  misc_RNA (1)...(19): siRNA sense strand
gauagauaccucaaacucu

SEQ ID NO: 1548138 - RNA, 19 nt, Homo sapiens
  misc_RNA (1)...(19): siRNA sense strand
agaaacaacagaaacaaca

SEQ ID NO: 1548139 - RNA, 19 nt, Homo sapiens
  misc_RNA (1)...(19): siRNA sense strand
ugucauuccugaucuccaa

SEQ ID NO: 1548140 - RNA, 19 nt, Homo sapiens
  misc_RNA (1)...(19): siRNA sense strand
gaagagacaaagucaaucc

SEQ ID NO: 1548141 - RNA, 19 nt, Homo sapiens
  misc_RNA (1)...(19): siRNA sense strand
ucaacuuauugcuccagua

SEQ ID NO: 1548142 - RNA, 19 nt, Homo sapiens
  misc_RNA (1)...(19): siRNA sense strand
ugaaggagcugggaauuaa

SEQ ID NO: 1548143 - RNA, 19 nt, Homo sapiens
  misc_RNA (1)...(19): siRNA sense strand
cgucaggccuguuaaauuu

SEQ ID NO: 1548144 - RNA, 19 nt, Homo sapiens
  misc_RNA (1)...(19): siRNA sense strand
ggaaaccauucacaacuuu

SEQ ID NO: 1548145 - RNA, 19 nt, Homo sapiens
  misc_RNA (1)...(19): siRNA sense strand
gaacugacuggaauccuua

SEQ ID NO: 1548146 - RNA, 19 nt, Homo sapiens
  misc_RNA (1)...(19): siRNA sense strand
ugacuggaauccuuaagaa

SEQ ID NO: 1548147 - RNA, 19 nt, Homo sapiens
  misc_RNA (1)...(19): siRNA sense strand
gaaauuggagaccagcaaa

SEQ ID NO: 1548148 - RNA, 19 nt, Homo sapiens
  misc_RNA (1)...(19): siRNA sense strand
gaacuuccacuaccuccaa

SEQ ID NO: 1548149 - RNA, 19 nt, Homo sapiens
  misc_RNA (1)...(19): siRNA sense strand
ggacgcgagagacaaauuu

SEQ ID NO: 1548150 - RNA, 19 nt, Homo sapiens
  misc_RNA (1)...(19): siRNA sense strand
ugagaaauaucagcccauu

SEQ ID NO: 1548151 - RNA, 19 nt, Homo sapiens
  misc_RNA (1)...(19): siRNA sense strand
ccgcucagguggcagcaua

SEQ ID NO: 1548152 - RNA, 19 nt, Homo sapiens
  misc_RNA (1)...(19): siRNA sense strand
gcagcgauuucugaacuga

SEQ ID NO: 1548153 - RNA, 19 nt, Homo sapiens
  misc_RNA (1)...(19): siRNA sense strand
cuggaauccuuaagaaauu

SEQ ID NO: 1548154 - RNA, 19 nt, Homo sapiens
  misc_RNA (1)...(19): siRNA sense strand
ugaacugacuggaauccuu

SEQ ID NO: 1548155 - RNA, 19 nt, Homo sapiens
  misc_RNA (1)...(19): siRNA sense strand
caacuuucacucuuccuuu

SEQ ID NO: 1548156 - RNA, 19 nt, Homo sapiens
  misc_RNA (1)...(19): siRNA sense strand
gaagcguuccucacacuga

SEQ ID NO: 1548157 - RNA, 19 nt, Homo sapiens
  misc_RNA (1)...(19): siRNA sense strand
aacaagagguggacaugga

SEQ ID NO: 1548158 - RNA, 19 nt, Homo sapiens
  misc_RNA (1)...(19): siRNA sense strand
gaggaugaacugacuggaa

SEQ ID NO: 1548159 - RNA, 19 nt, Homo sapiens
  misc_RNA (1)...(19): siRNA sense strand
gcagaguccucagugucuu

SEQ ID NO: 1548160 - RNA, 19 nt, Homo sapiens
  misc_RNA (1)...(19): siRNA sense strand
aggaugaacugacuggaau

SEQ ID NO: 1548161 - RNA, 19 nt, Homo sapiens
  misc_RNA (1)...(19): siRNA sense strand
gcaguggcaccaucacaga

SEQ ID NO: 1548162 - RNA, 19 nt, Homo sapiens
  misc_RNA (1)...(19): siRNA sense strand
aaaagcagccggauuauug

SEQ ID NO: 1548163 - RNA, 19 nt, Homo sapiens
  misc_RNA (1)...(19): siRNA sense strand
aggaaaccauucacaacuu

SEQ ID NO: 1548164 - RNA, 19 nt, Homo sapiens
  misc_RNA (1)...(19): siRNA sense strand
gcaagggacgcgagagaca

SEQ ID NO: 1548165 - RNA, 19 nt, Homo sapiens
  misc_RNA (1)...(19): siRNA sense strand
ggaacaagagguggacaug

SEQ ID NO: 1548166 - RNA, 19 nt, Homo sapiens
  misc_RNA (1)...(19): siRNA sense strand
caaccacucgccucauuca

SEQ ID NO: 1548167 - RNA, 19 nt, Homo sapiens
  misc_RNA (1)...(19): siRNA sense strand
ugacugacggugacuugaa

SEQ ID NO: 1548168 - RNA, 19 nt, Homo sapiens
  misc_RNA (1)...(19): siRNA sense strand
gagacaaauuuuacaggaa

SEQ ID NO: 1548169 - RNA, 19 nt, Homo sapiens
  misc_RNA (1)...(19): siRNA sense strand
ugccaauucuggaaacuuc

SEQ ID NO: 1548170 - RNA, 19 nt, Homo sapiens
  misc_RNA (1)...(19): siRNA sense strand
gacugacggugacuugaag

SEQ ID NO: 1548171 - RNA, 19 nt, Homo sapiens
  misc_RNA (1)...(19): siRNA sense strand
uggcagcgauuucugaacu

SEQ ID NO: 1548172 - RNA, 19 nt, Homo sapiens
  misc_RNA (1)...(19): siRNA sense strand
gacuggaauccuuaagaaa

SEQ ID NO: 1548173 - RNA, 19 nt, Homo sapiens
  misc_RNA (1)...(19): siRNA sense strand
auucacaacuuucacucuu

SEQ ID NO: 1548174 - RNA, 19 nt, Homo sapiens
  misc_RNA (1)...(19): siRNA sense strand
uugaaggagcugggaauua

SEQ ID NO: 1548175 - RNA, 19 nt, Homo sapiens
  misc_RNA (1)...(19): siRNA sense strand
uucaaccacucgccucauu

SEQ ID NO: 1548176 - RNA, 19 nt, Homo sapiens
  misc_RNA (1)...(19): siRNA sense strand
acacccgucaggccuguua

SEQ ID NO: 1548177 - RNA, 19 nt, Homo sapiens
  misc_RNA (1)...(19): siRNA sense strand
gggacgcgagagacaaauu

SEQ ID NO: 1548178 - RNA, 19 nt, Homo sapiens
  misc_RNA (1)...(19): siRNA sense strand
gaaggagcugggaauuaag

SEQ ID NO: 1548179 - RNA, 19 nt, Homo sapiens
  misc_RNA (1)...(19): siRNA sense strand
acuggaauccuuaagaaau

SEQ ID NO: 1548180 - RNA, 19 nt, Homo sapiens
  misc_RNA (1)...(19): siRNA sense strand
ucacagaugaggaugaacu

SEQ ID NO: 1548181 - RNA, 19 nt, Homo sapiens
  misc_RNA (1)...(19): siRNA sense strand
ccgucaggccuguuaaauu

SEQ ID NO: 1548182 - RNA, 19 nt, Homo sapiens
  misc_RNA (1)...(19): siRNA sense strand
caggaaaccauucacaacu

SEQ ID NO: 1548183 - RNA, 19 nt, Homo sapiens
  misc_RNA (1)...(19): siRNA sense strand
ucagguggcagcauagaca

SEQ ID NO: 1548184 - RNA, 19 nt, Homo sapiens
  misc_RNA (1)...(19): siRNA sense strand
aacuuucacucuuccuuug

SEQ ID NO: 1548185 - RNA, 19 nt, Homo sapiens
  misc_RNA (1)...(19): siRNA sense strand
caagggacgcgagagacaa

SEQ ID NO: 1548186 - RNA, 19 nt, Homo sapiens
  misc_RNA (1)...(19): siRNA sense strand
gguggcagcauagacaaug

SEQ ID NO: 1548187 - RNA, 19 nt, Homo sapiens
  misc_RNA (1)...(19): siRNA sense strand
gagagcagugccagcaaca

SEQ ID NO: 1548188 - RNA, 19 nt, Homo sapiens
  misc_RNA (1)...(19): siRNA sense strand
uacaggaaaccauucacaa

SEQ ID NO: 1548189 - RNA, 19 nt, Homo sapiens
  misc_RNA (1)...(19): siRNA sense strand
gcgagauccuguucaauga

SEQ ID NO: 1548190 - RNA, 19 nt, Homo sapiens
  misc_RNA (1)...(19): siRNA sense strand
ucacgacaguggagagaaa

SEQ ID NO: 1548191 - RNA, 19 nt, Homo sapiens
  misc_RNA (1)...(19): siRNA sense strand
gagauccuguucaaugaug

SEQ ID NO: 1548192 - RNA, 19 nt, Homo sapiens
  misc_RNA (1)...(19): siRNA sense strand
ccacucacccgaucuccua

SEQ ID NO: 1548193 - RNA, 19 nt, Homo sapiens
  misc_RNA (1)...(19): siRNA sense strand
gcacugcucaccugucugu

SEQ ID NO: 1548194 - RNA, 19 nt, Homo sapiens
  misc_RNA (1)...(19): siRNA sense strand
cagccgcucucgucaaugu

SEQ ID NO: 1548195 - RNA, 19 nt, Homo sapiens
  misc_RNA (1)...(19): siRNA sense strand
ucagcgagauccuguucaa

SEQ ID NO: 1548196 - RNA, 19 nt, Homo sapiens
  misc_RNA (1)...(19): siRNA sense strand
ccacugcacuggccaucau

SEQ ID NO: 1548197 - RNA, 19 nt, Homo sapiens
  misc_RNA (1)...(19): siRNA sense strand
gacuucagcucucccaaca

SEQ ID NO: 1548198 - RNA, 19 nt, Homo sapiens
  misc_RNA (1)...(19): siRNA sense strand
caccaucaaccucuacuuu

SEQ ID NO: 1548199 - RNA, 19 nt, Homo sapiens
  misc_RNA (1)...(19): siRNA sense strand
ccaucaaccucuacuuugg

SEQ ID NO: 1548200 - RNA, 19 nt, Homo sapiens
  misc_RNA (1)...(19): siRNA sense strand
gggcacugcucaccugucu

SEQ ID NO: 1548201 - RNA, 19 nt, Homo sapiens
  misc_RNA (1)...(19): siRNA sense strand
ucaaugaugaaauggauga

SEQ ID NO: 1548202 - RNA, 19 nt, Homo sapiens
  misc_RNA (1)...(19): siRNA sense strand
cuucagcucucccaacauc

SEQ ID NO: 1548203 - RNA, 19 nt, Homo sapiens
  misc_RNA (1)...(19): siRNA sense strand
gcacuggccaucaucuaca

SEQ ID NO: 1548204 - RNA, 19 nt, Homo sapiens
  misc_RNA (1)...(19): siRNA sense strand
ucaaugugcccgacgauca

SEQ ID NO: 1548205 - RNA, 19 nt, Homo sapiens
  misc_RNA (1)...(19): siRNA sense strand
ccagcaccaucaaccucua

SEQ ID NO: 1548206 - RNA, 19 nt, Homo sapiens
  misc_RNA (1)...(19): siRNA sense strand
gacaguggagagaaacauu

SEQ ID NO: 1548207 - RNA, 19 nt, Homo sapiens
  misc_RNA (1)...(19): siRNA sense strand
acuacaagcccgaguucua

SEQ ID NO: 1548208 - RNA, 19 nt, Homo sapiens
  misc_RNA (1)...(19): siRNA sense strand
guucggcuaugacgugaag

SEQ ID NO: 1548209 - RNA, 19 nt, Homo sapiens
  misc_RNA (1)...(19): siRNA sense strand
cacccgaucuccuacuaca

SEQ ID NO: 1548210 - RNA, 19 nt, Homo sapiens
  misc_RNA (1)...(19): siRNA sense strand
ggucagcgagauccuguuc

SEQ ID NO: 1548211 - RNA, 19 nt, Homo sapiens
  misc_RNA (1)...(19): siRNA sense strand
augaugaaauggaugacuu

SEQ ID NO: 1548212 - RNA, 19 nt, Homo sapiens
  misc_RNA (1)...(19): siRNA sense strand
gcaccaucaaccucuacuu

SEQ ID NO: 1548213 - RNA, 19 nt, Homo sapiens
  misc_RNA (1)...(19): siRNA sense strand
caguggagagaaacauuga

SEQ ID NO: 1548214 - RNA, 19 nt, Homo sapiens
  misc_RNA (1)...(19): siRNA sense strand
ccacauggcucuucaguuu

SEQ ID NO: 1548215 - RNA, 19 nt, Homo sapiens
  misc_RNA (1)...(19): siRNA sense strand
gcaagaaguuguuaucauu

SEQ ID NO: 1548216 - RNA, 19 nt, Homo sapiens
  misc_RNA (1)...(19): siRNA sense strand
ggacagaaauaagugaauu

SEQ ID NO: 1548217 - RNA, 19 nt, Homo sapiens
  misc_RNA (1)...(19): siRNA sense strand
ggaaacagccucaucauuc

SEQ ID NO: 1548218 - RNA, 19 nt, Homo sapiens
  misc_RNA (1)...(19): siRNA sense strand
gaaacagccucaucauucu

SEQ ID NO: 1548219 - RNA, 19 nt, Homo sapiens
  misc_RNA (1)...(19): siRNA sense strand
ccacucagauguauuucuu

SEQ ID NO: 1548220 - RNA, 19 nt, Homo sapiens
  misc_RNA (1)...(19): siRNA sense strand
gaaauagcgaggugaagaa

SEQ ID NO: 1548221 - RNA, 19 nt, Homo sapiens
  misc_RNA (1)...(19): siRNA sense strand
auaggaaacuggacagaaa

SEQ ID NO: 1548222 - RNA, 19 nt, Homo sapiens
  misc_RNA (1)...(19): siRNA sense strand
ccaacaaggugaaccacuu

SEQ ID NO: 1548223 - RNA, 19 nt, Homo sapiens
  misc_RNA (1)...(19): siRNA sense strand
ucagauguauuucuucuuc

SEQ ID NO: 1548224 - RNA, 19 nt, Homo sapiens
  misc_RNA (1)...(19): siRNA sense strand
ggagauuggcuucaaccua

SEQ ID NO: 1548225 - RNA, 19 nt, Homo sapiens
  misc_RNA (1)...(19): siRNA sense strand
gcacuacccagucaucaug

SEQ ID NO: 1548226 - RNA, 19 nt, Homo sapiens
  misc_RNA (1)...(19): siRNA sense strand
cauaaagccuucucuacgu

SEQ ID NO: 1548227 - RNA, 19 nt, Homo sapiens
  misc_RNA (1)...(19): siRNA sense strand
ggaaacuggacagaaauaa

SEQ ID NO: 1548228 - RNA, 19 nt, Homo sapiens
  misc_RNA (1)...(19): siRNA sense strand
caagaucccaucagcuaaa

SEQ ID NO: 1548229 - RNA, 19 nt, Homo sapiens
  misc_RNA (1)...(19): siRNA sense strand
gggaaacagccucaucauu

SEQ ID NO: 1548230 - RNA, 19 nt, Homo sapiens
  misc_RNA (1)...(19): siRNA sense strand
gaucuuguguuccuauacu

SEQ ID NO: 1548231 - RNA, 19 nt, Homo sapiens
  misc_RNA (1)...(19): siRNA sense strand
cagcuaaagggaagcauaa

SEQ ID NO: 1548232 - RNA, 19 nt, Homo sapiens
  misc_RNA (1)...(19): siRNA sense strand
aucuacagcuugagaaaua

SEQ ID NO: 1548233 - RNA, 19 nt, Homo sapiens
  misc_RNA (1)...(19): siRNA sense strand
uggcuaccauggcauauga

SEQ ID NO: 1548234 - RNA, 19 nt, Homo sapiens
  misc_RNA (1)...(19): siRNA sense strand
ccucacaccuccuuguugu

SEQ ID NO: 1548235 - RNA, 19 nt, Homo sapiens
  misc_RNA (1)...(19): siRNA sense strand
cagaaacuguaucccauag

SEQ ID NO: 1548236 - RNA, 19 nt, Homo sapiens
  misc_RNA (1)...(19): siRNA sense strand
gaaacuggacagaaauaag

SEQ ID NO: 1548237 - RNA, 19 nt, Homo sapiens
  misc_RNA (1)...(19): siRNA sense strand
gagcuucucuucccuaccu

SEQ ID NO: 1548238 - RNA, 19 nt, Homo sapiens
  misc_RNA (1)...(19): siRNA sense strand
cccauuaucuacagcuuga

SEQ ID NO: 1548239 - RNA, 19 nt, Homo sapiens
  misc_RNA (1)...(19): siRNA sense strand
ugaaccacuucuucuguga

SEQ ID NO: 1548240 - RNA, 19 nt, Homo sapiens
  misc_RNA (1)...(19): siRNA sense strand
uucccuaccuacugaaaua

SEQ ID NO: 1548241 - RNA, 19 nt, Homo sapiens
  misc_RNA (1)...(19): siRNA sense strand
ucagaaacuguaucccaua

SEQ ID NO: 1548242 - RNA, 19 nt, Homo sapiens
  misc_RNA (1)...(19): siRNA sense strand
ucucuucccuaccuacuga

SEQ ID NO: 1548243 - RNA, 19 nt, Homo sapiens
  misc_RNA (1)...(19): siRNA sense strand
aaacuggacagaaauaagu

SEQ ID NO: 1548244 - RNA, 19 nt, Homo sapiens
  misc_RNA (1)...(19): siRNA sense strand
gagcaagaaguuguuauca

SEQ ID NO: 1548245 - RNA, 19 nt, Homo sapiens
  misc_RNA (1)...(19): siRNA sense strand
cagcacuguuugagaucua

SEQ ID NO: 1548246 - RNA, 19 nt, Homo sapiens
  misc_RNA (1)...(19): siRNA sense strand
gugccacucagauguauuu

SEQ ID NO: 1548247 - RNA, 19 nt, Homo sapiens
  misc_RNA (1)...(19): siRNA sense strand
cuucuagccucaccuacuu

SEQ ID NO: 1548248 - RNA, 19 nt, Homo sapiens
  misc_RNA (1)...(19): siRNA sense strand
caaggugaaccacuucuuc

SEQ ID NO: 1548249 - RNA, 19 nt, Homo sapiens
  misc_RNA (1)...(19): siRNA sense strand
gcuucaaccuagucauugu

SEQ ID NO: 1548250 - RNA, 19 nt, Homo sapiens
  misc_RNA (1)...(19): siRNA sense strand
caacaaggugaaccacuuc

SEQ ID NO: 1548251 - RNA, 19 nt, Homo sapiens
  misc_RNA (1)...(19): siRNA sense strand
cauggcauaugaccgcuau

SEQ ID NO: 1548252 - RNA, 19 nt, Homo sapiens
  misc_RNA (1)...(19): siRNA sense strand
ucaccuacuucuggccuaa

SEQ ID NO: 1548253 - RNA, 19 nt, Homo sapiens
  misc_RNA (1)...(19): siRNA sense strand
agaaauagcgaggugaaga

SEQ ID NO: 1548254 - RNA, 19 nt, Homo sapiens
  misc_RNA (1)...(19): siRNA sense strand
gcugugccacucagaugua

SEQ ID NO: 1548255 - RNA, 19 nt, Homo sapiens
  misc_RNA (1)...(19): siRNA sense strand
ucauuauccuacacuguug

SEQ ID NO: 1548256 - RNA, 19 nt, Homo sapiens
  misc_RNA (1)...(19): siRNA sense strand
ggugaaccacuucuucugu

SEQ ID NO: 1548257 - RNA, 19 nt, Homo sapiens
  misc_RNA (1)...(19): siRNA sense strand
gguccuagcccucagaaac

SEQ ID NO: 1548258 - RNA, 19 nt, Homo sapiens
  misc_RNA (1)...(19): siRNA sense strand
uguugugacucccauguug

SEQ ID NO: 1548259 - RNA, 19 nt, Homo sapiens
  misc_RNA (1)...(19): siRNA sense strand
gcuaaagggaagcauaaag

SEQ ID NO: 1548260 - RNA, 19 nt, Homo sapiens
  misc_RNA (1)...(19): siRNA sense strand
cucaagaucccaucagcua

SEQ ID NO: 1548261 - RNA, 19 nt, Homo sapiens
  misc_RNA (1)...(19): siRNA sense strand
ucgcauugcugcugcuauc

SEQ ID NO: 1548262 - RNA, 19 nt, Homo sapiens
  misc_RNA (1)...(19): siRNA sense strand
cagcaggaccuuccacaag

SEQ ID NO: 1548263 - RNA, 19 nt, Homo sapiens
  misc_RNA (1)...(19): siRNA sense strand
ggccuaaaucaaauaauuc

SEQ ID NO: 1548264 - RNA, 19 nt, Homo sapiens
  misc_RNA (1)...(19): siRNA sense strand
cuucuggccuaaaucaaau

SEQ ID NO: 1548265 - RNA, 19 nt, Homo sapiens
  misc_RNA (1)...(19): siRNA sense strand
ucaagaucccaucagcuaa

SEQ ID NO: 1548266 - RNA, 19 nt, Homo sapiens
  misc_RNA (1)...(19): siRNA sense strand
ugagaaauagcgaggugaa

SEQ ID NO: 1548267 - RNA, 19 nt, Homo sapiens
  misc_RNA (1)...(19): siRNA sense strand
ccaaaggacacgggccaaa

SEQ ID NO: 1548268 - RNA, 19 nt, Homo sapiens
  misc_RNA (1)...(19): siRNA sense strand
ucauugcucuuccugacau

SEQ ID NO: 1548269 - RNA, 19 nt, Homo sapiens
  misc_RNA (1)...(19): siRNA sense strand
ugagagcaagaaguuguua

SEQ ID NO: 1548270 - RNA, 19 nt, Homo sapiens
  misc_RNA (1)...(19): siRNA sense strand
ucagcuaaagggaagcaua

SEQ ID NO: 1548271 - RNA, 19 nt, Homo sapiens
  misc_RNA (1)...(19): siRNA sense strand
aagcauaaagccuucucua

SEQ ID NO: 1548272 - RNA, 19 nt, Homo sapiens
  misc_RNA (1)...(19): siRNA sense strand
gugaauuuauccucaugag

SEQ ID NO: 1548273 - RNA, 19 nt, Homo sapiens
  misc_RNA (1)...(19): siRNA sense strand
gcucuucaguuuuccauuc

SEQ ID NO: 1548274 - RNA, 19 nt, Homo sapiens
  misc_RNA (1)...(19): siRNA sense strand
cuacuucuggccuaaauca

SEQ ID NO: 1548275 - RNA, 19 nt, Homo sapiens
  misc_RNA (1)...(19): siRNA sense strand
cagaccacauggcucuuca

SEQ ID NO: 1548276 - RNA, 19 nt, Homo sapiens
  misc_RNA (1)...(19): siRNA sense strand
gagagcaagaaguuguuau

SEQ ID NO: 1548277 - RNA, 19 nt, Homo sapiens
  misc_RNA (1)...(19): siRNA sense strand
aggaaacuggacagaaaua

SEQ ID NO: 1548278 - RNA, 19 nt, Homo sapiens
  misc_RNA (1)...(19): siRNA sense strand
gcagaccacauggcucuuc

SEQ ID NO: 1548279 - RNA, 19 nt, Homo sapiens
  misc_RNA (1)...(19): siRNA sense strand
gaaguuguuaucauuaucc

SEQ ID NO: 1548280 - RNA, 19 nt, Homo sapiens
  misc_RNA (1)...(19): siRNA sense strand
agcaagaaguuguuaucau

SEQ ID NO: 1548281 - RNA, 19 nt, Homo sapiens
  misc_RNA (1)...(19): siRNA sense strand
acucagauguauuucuucu

SEQ ID NO: 1548282 - RNA, 19 nt, Homo sapiens
  misc_RNA (1)...(19): siRNA sense strand
auagcgaggugaagaaugc

SEQ ID NO: 1548283 - RNA, 19 nt, Homo sapiens
  misc_RNA (1)...(19): siRNA sense strand
uauaggaaacuggacagaa

SEQ ID NO: 1548284 - RNA, 19 nt, Homo sapiens
  misc_RNA (1)...(19): siRNA sense strand
cugcugcuauccucaagau

SEQ ID NO: 1548285 - RNA, 19 nt, Homo sapiens
  misc_RNA (1)...(19): siRNA sense strand
gauguauuucuucuucuuc

SEQ ID NO: 1548286 - RNA, 19 nt, Homo sapiens
  misc_RNA (1)...(19): siRNA sense strand
gcuugcugaucuuguguuc

SEQ ID NO: 1548287 - RNA, 19 nt, Homo sapiens
  misc_RNA (1)...(19): siRNA sense strand
uggcuucaaccuagucauu

SEQ ID NO: 1548288 - RNA, 19 nt, Homo sapiens
  misc_RNA (1)...(19): siRNA sense strand
cugaucuuguguuccuaua

SEQ ID NO: 1548289 - RNA, 19 nt, Homo sapiens
  misc_RNA (1)...(19): siRNA sense strand
cuaaagggaagcauaaagc

SEQ ID NO: 1548290 - RNA, 19 nt, Homo sapiens
  misc_RNA (1)...(19): siRNA sense strand
ccugagagcaagaaguugu

SEQ ID NO: 1548291 - RNA, 19 nt, Homo sapiens
  misc_RNA (1)...(19): siRNA sense strand
gaugauaugugggauguua

SEQ ID NO: 1548292 - RNA, 19 nt, Homo sapiens
  misc_RNA (1)...(19): siRNA sense strand
ggugggaacugaagauaua

SEQ ID NO: 1548293 - RNA, 19 nt, Homo sapiens
  misc_RNA (1)...(19): siRNA sense strand
gagaguguuucuucaguua

SEQ ID NO: 1548294 - RNA, 19 nt, Homo sapiens
  misc_RNA (1)...(19): siRNA sense strand
gcagugaacuaguggcuaa

SEQ ID NO: 1548295 - RNA, 19 nt, Homo sapiens
  misc_RNA (1)...(19): siRNA sense strand
uuagagaaaucccagagua

SEQ ID NO: 1548296 - RNA, 19 nt, Homo sapiens
  misc_RNA (1)...(19): siRNA sense strand
cagaagaagcuguugauaa

SEQ ID NO: 1548297 - RNA, 19 nt, Homo sapiens
  misc_RNA (1)...(19): siRNA sense strand
uacaaacccuucugauauu

SEQ ID NO: 1548298 - RNA, 19 nt, Homo sapiens
  misc_RNA (1)...(19): siRNA sense strand
gaacuaguggcuaaaauua

SEQ ID NO: 1548299 - RNA, 19 nt, Homo sapiens
  misc_RNA (1)...(19): siRNA sense strand
agaagaagcuguugauaac

SEQ ID NO: 1548300 - RNA, 19 nt, Homo sapiens
  misc_RNA (1)...(19): siRNA sense strand
uagaagagcucaaagucau

SEQ ID NO: 1548301 - RNA, 19 nt, Homo sapiens
  misc_RNA (1)...(19): siRNA sense strand
gacugaaacucuugaaauc

SEQ ID NO: 1548302 - RNA, 19 nt, Homo sapiens
  misc_RNA (1)...(19): siRNA sense strand
gagaaaucccagaguauga

SEQ ID NO: 1548303 - RNA, 19 nt, Homo sapiens
  misc_RNA (1)...(19): siRNA sense strand
ccaaauagaagagcucaaa

SEQ ID NO: 1548304 - RNA, 19 nt, Homo sapiens
  misc_RNA (1)...(19): siRNA sense strand
auacaaacccuucugauau

SEQ ID NO: 1548305 - RNA, 19 nt, Homo sapiens
  misc_RNA (1)...(19): siRNA sense strand
ggagcagaauaugaugaua

SEQ ID NO: 1548306 - RNA, 19 nt, Homo sapiens
  misc_RNA (1)...(19): siRNA sense strand
aauacaaacccuucugaua

SEQ ID NO: 1548307 - RNA, 19 nt, Homo sapiens
  misc_RNA (1)...(19): siRNA sense strand
caaauacaaacccuucuga

SEQ ID NO: 1548308 - RNA, 19 nt, Homo sapiens
  misc_RNA (1)...(19): siRNA sense strand
ggaugauucugacuaugga

SEQ ID NO: 1548309 - RNA, 19 nt, Homo sapiens
  misc_RNA (1)...(19): siRNA sense strand
gaggacaucuggaauucag

SEQ ID NO: 1548310 - RNA, 19 nt, Homo sapiens
  misc_RNA (1)...(19): siRNA sense strand
gggaacugaagauauauuu

SEQ ID NO: 1548311 - RNA, 19 nt, Homo sapiens
  misc_RNA (1)...(19): siRNA sense strand
gacagcaggugggaacuga

SEQ ID NO: 1548312 - RNA, 19 nt, Homo sapiens
  misc_RNA (1)...(19): siRNA sense strand
uaugugggauguuagagaa

SEQ ID NO: 1548313 - RNA, 19 nt, Homo sapiens
  misc_RNA (1)...(19): siRNA sense strand
ggaaacaauccuugaccuu

SEQ ID NO: 1548314 - RNA, 19 nt, Homo sapiens
  misc_RNA (1)...(19): siRNA sense strand
acagacaaaugguuuaucu

SEQ ID NO: 1548315 - RNA, 19 nt, Homo sapiens
  misc_RNA (1)...(19): siRNA sense strand
ggacagacaaaugguuuau

SEQ ID NO: 1548316 - RNA, 19 nt, Homo sapiens
  misc_RNA (1)...(19): siRNA sense strand
gcuacuuaauccugaagaa

SEQ ID NO: 1548317 - RNA, 19 nt, Homo sapiens
  misc_RNA (1)...(19): siRNA sense strand
ugagaguguuucuucaguu

SEQ ID NO: 1548318 - RNA, 19 nt, Homo sapiens
  misc_RNA (1)...(19): siRNA sense strand
aaagagaguuagauauugc

SEQ ID NO: 1548319 - RNA, 19 nt, Homo sapiens
  misc_RNA (1)...(19): siRNA sense strand
cagaaggagcagaauauga

SEQ ID NO: 1548320 - RNA, 19 nt, Homo sapiens
  misc_RNA (1)...(19): siRNA sense strand
ggaauguaccagugccaaa

SEQ ID NO: 1548321 - RNA, 19 nt, Homo sapiens
  misc_RNA (1)...(19): siRNA sense strand
cagaaaauauggaaucuca

SEQ ID NO: 1548322 - RNA, 19 nt, Homo sapiens
  misc_RNA (1)...(19): siRNA sense strand
agaggaugauucugacuau

SEQ ID NO: 1548323 - RNA, 19 nt, Homo sapiens
  misc_RNA (1)...(19): siRNA sense strand
agaaggagcagaauaugau

SEQ ID NO: 1548324 - RNA, 19 nt, Homo sapiens
  misc_RNA (1)...(19): siRNA sense strand
gacaaaugguuuaucuacu

SEQ ID NO: 1548325 - RNA, 19 nt, Homo sapiens
  misc_RNA (1)...(19): siRNA sense strand
agacugaaacucuugaaau

SEQ ID NO: 1548326 - RNA, 19 nt, Homo sapiens
  misc_RNA (1)...(19): siRNA sense strand
gaguguuucuucaguuaca

SEQ ID NO: 1548327 - RNA, 19 nt, Homo sapiens
  misc_RNA (1)...(19): siRNA sense strand
agaagagauuccagaagga

SEQ ID NO: 1548328 - RNA, 19 nt, Homo sapiens
  misc_RNA (1)...(19): siRNA sense strand
gaaggagcagaauaugaug

SEQ ID NO: 1548329 - RNA, 19 nt, Homo sapiens
  misc_RNA (1)...(19): siRNA sense strand
caaauugauauccaggaaa

SEQ ID NO: 1548330 - RNA, 19 nt, Homo sapiens
  misc_RNA (1)...(19): siRNA sense strand
gcucaaagucaucccugaa

SEQ ID NO: 1548331 - RNA, 19 nt, Homo sapiens
  misc_RNA (1)...(19): siRNA sense strand
gagacugaaacucuugaaa

SEQ ID NO: 1548332 - RNA, 19 nt, Homo sapiens
  misc_RNA (1)...(19): siRNA sense strand
cccagaguaugagauuaua

SEQ ID NO: 1548333 - RNA, 19 nt, Homo sapiens
  misc_RNA (1)...(19): siRNA sense strand
gaaaucccagaguaugaga

SEQ ID NO: 1548334 - RNA, 19 nt, Homo sapiens
  misc_RNA (1)...(19): siRNA sense strand
aaauugauauccaggaaac

SEQ ID NO: 1548335 - RNA, 19 nt, Homo sapiens
  misc_RNA (1)...(19): siRNA sense strand
gccaaagcauucuauaucc

SEQ ID NO: 1548336 - RNA, 19 nt, Homo sapiens
  misc_RNA (1)...(19): siRNA sense strand
gaggaugauucugacuaug

SEQ ID NO: 1548337 - RNA, 19 nt, Homo sapiens
  misc_RNA (1)...(19): siRNA sense strand
ggaagcccucucuaagcua

SEQ ID NO: 1548338 - RNA, 19 nt, Homo sapiens
  misc_RNA (1)...(19): siRNA sense strand
gaaaccagcgaggaaaaua

SEQ ID NO: 1548339 - RNA, 19 nt, Homo sapiens
  misc_RNA (1)...(19): siRNA sense strand
agacaaaugguuuaucuac

SEQ ID NO: 1548340 - RNA, 19 nt, Homo sapiens
  misc_RNA (1)...(19): siRNA sense strand
aagaagcuguugauaacuc

SEQ ID NO: 1548341 - RNA, 19 nt, Homo sapiens
  misc_RNA (1)...(19): siRNA sense strand
cugaaaauauggauucuga

SEQ ID NO: 1548342 - RNA, 19 nt, Homo sapiens
  misc_RNA (1)...(19): siRNA sense strand
aaacccuucugauauucaa

SEQ ID NO: 1548343 - RNA, 19 nt, Homo sapiens
  misc_RNA (1)...(19): siRNA sense strand
aaauguagacuuugagagu

SEQ ID NO: 1548344 - RNA, 19 nt, Homo sapiens
  misc_RNA (1)...(19): siRNA sense strand
ucaaagucaucccugaaac

SEQ ID NO: 1548345 - RNA, 19 nt, Homo sapiens
  misc_RNA (1)...(19): siRNA sense strand
guaccagugccaaagcauu

SEQ ID NO: 1548346 - RNA, 19 nt, Homo sapiens
  misc_RNA (1)...(19): siRNA sense strand
ucagaagaagcuguugaua

SEQ ID NO: 1548347 - RNA, 19 nt, Homo sapiens
  misc_RNA (1)...(19): siRNA sense strand
auaaugaggacaucuggaa

SEQ ID NO: 1548348 - RNA, 19 nt, Homo sapiens
  misc_RNA (1)...(19): siRNA sense strand
gaauguaccagugccaaag

SEQ ID NO: 1548349 - RNA, 19 nt, Homo sapiens
  misc_RNA (1)...(19): siRNA sense strand
gaagacagaaaauauggaa

SEQ ID NO: 1548350 - RNA, 19 nt, Homo sapiens
  misc_RNA (1)...(19): siRNA sense strand
acaaacccuucugauauuc

SEQ ID NO: 1548351 - RNA, 19 nt, Homo sapiens
  misc_RNA (1)...(19): siRNA sense strand
gacuauggacagacaaaug

SEQ ID NO: 1548352 - RNA, 19 nt, Homo sapiens
  misc_RNA (1)...(19): siRNA sense strand
uagagaaaucccagaguau

SEQ ID NO: 1548353 - RNA, 19 nt, Homo sapiens
  misc_RNA (1)...(19): siRNA sense strand
ugccaaagcauucuauauc

SEQ ID NO: 1548354 - RNA, 19 nt, Homo sapiens
  misc_RNA (1)...(19): siRNA sense strand
cauggguccugggaauauu

SEQ ID NO: 1548355 - RNA, 19 nt, Homo sapiens
  misc_RNA (1)...(19): siRNA sense strand
gugccaaagcauucuauau

SEQ ID NO: 1548356 - RNA, 19 nt, Homo sapiens
  misc_RNA (1)...(19): siRNA sense strand
uggaagcccucucuaagcu

SEQ ID NO: 1548357 - RNA, 19 nt, Homo sapiens
  misc_RNA (1)...(19): siRNA sense strand
aaugaggacaucuggaauu

SEQ ID NO: 1548358 - RNA, 19 nt, Homo sapiens
  misc_RNA (1)...(19): siRNA sense strand
aaauagaagagcucaaagu

SEQ ID NO: 1548359 - RNA, 19 nt, Homo sapiens
  misc_RNA (1)...(19): siRNA sense strand
ugguuuaucuacuauugga

SEQ ID NO: 1548360 - RNA, 19 nt, Homo sapiens
  misc_RNA (1)...(19): siRNA sense strand
gcaggugggaacugaagau

SEQ ID NO: 1548361 - RNA, 19 nt, Homo sapiens
  misc_RNA (1)...(19): siRNA sense strand
agagaaaucccagaguaug

SEQ ID NO: 1548362 - RNA, 19 nt, Homo sapiens
  misc_RNA (1)...(19): siRNA sense strand
ccaaauacaaacccuucug

SEQ ID NO: 1548363 - RNA, 19 nt, Homo sapiens
  misc_RNA (1)...(19): siRNA sense strand
cugaaaauaugaagacaga

SEQ ID NO: 1548364 - RNA, 19 nt, Homo sapiens
  misc_RNA (1)...(19): siRNA sense strand
aagaggaugauucugacua

SEQ ID NO: 1548365 - RNA, 19 nt, Homo sapiens
  misc_RNA (1)...(19): siRNA sense strand
aauagaagagcucaaaguc

SEQ ID NO: 1548366 - RNA, 19 nt, Homo sapiens
  misc_RNA (1)...(19): siRNA sense strand
uccagaaggagcagaauau

SEQ ID NO: 1548367 - RNA, 19 nt, Homo sapiens
  misc_RNA (1)...(19): siRNA sense strand
caaauagaagagcucaaag

SEQ ID NO: 1548368 - RNA, 19 nt, Homo sapiens
  misc_RNA (1)...(19): siRNA sense strand
ccagaaggagcagaauaug

SEQ ID NO: 1548369 - RNA, 19 nt, Homo sapiens
  misc_RNA (1)...(19): siRNA sense strand
uacuuaauccugaagaaga

SEQ ID NO: 1548370 - RNA, 19 nt, Homo sapiens
  misc_RNA (1)...(19): siRNA sense strand
cagacaaaugguuuaucua

SEQ ID NO: 1548371 - RNA, 19 nt, Homo sapiens
  misc_RNA (1)...(19): siRNA sense strand
gaagaagcuguugauaacu

SEQ ID NO: 1548372 - RNA, 19 nt, Homo sapiens
  misc_RNA (1)...(19): siRNA sense strand
caggugggaacugaagaua

SEQ ID NO: 1548373 - RNA, 19 nt, Homo sapiens
  misc_RNA (1)...(19): siRNA sense strand
ccauggguccugggaauau

SEQ ID NO: 1548374 - RNA, 19 nt, Homo sapiens
  misc_RNA (1)...(19): siRNA sense strand
ggaaaauaaugaggacauc

SEQ ID NO: 1548375 - RNA, 19 nt, Homo sapiens
  misc_RNA (1)...(19): siRNA sense strand
ugugggauguuagagaaau

SEQ ID NO: 1548376 - RNA, 19 nt, Homo sapiens
  misc_RNA (1)...(19): siRNA sense strand
gaccuucguacuccucaga

SEQ ID NO: 1548377 - RNA, 19 nt, Homo sapiens
  misc_RNA (1)...(19): siRNA sense strand
gccauggguccugggaaua

SEQ ID NO: 1548378 - RNA, 19 nt, Homo sapiens
  misc_RNA (1)...(19): siRNA sense strand
cugaagaagaggaugauuc

SEQ ID NO: 1548379 - RNA, 19 nt, Homo sapiens
  misc_RNA (1)...(19): siRNA sense strand
caaacccuucugauauuca

SEQ ID NO: 1548380 - RNA, 19 nt, Homo sapiens
  misc_RNA (1)...(19): siRNA sense strand
gcacuacaauugacacaaa

SEQ ID NO: 1548381 - RNA, 19 nt, Homo sapiens
  misc_RNA (1)...(19): siRNA sense strand
gaaaacaugugcugugaua

SEQ ID NO: 1548382 - RNA, 19 nt, Homo sapiens
  misc_RNA (1)...(19): siRNA sense strand
gagcaacaauuaaugagaa

SEQ ID NO: 1548383 - RNA, 19 nt, Homo sapiens
  misc_RNA (1)...(19): siRNA sense strand
gcagaugcuuucagaauug

SEQ ID NO: 1548384 - RNA, 19 nt, Homo sapiens
  misc_RNA (1)...(19): siRNA sense strand
agaagaagcuuacgugaug

SEQ ID NO: 1548385 - RNA, 19 nt, Homo sapiens
  misc_RNA (1)...(19): siRNA sense strand
cauaagagccagcaagaua

SEQ ID NO: 1548386 - RNA, 19 nt, Homo sapiens
  misc_RNA (1)...(19): siRNA sense strand
gcagaagaguaaagaagaa

SEQ ID NO: 1548387 - RNA, 19 nt, Homo sapiens
  misc_RNA (1)...(19): siRNA sense strand
gcucauagauuugcuuaau

SEQ ID NO: 1548388 - RNA, 19 nt, Homo sapiens
  misc_RNA (1)...(19): siRNA sense strand
ccucaaguguccagaauuu

SEQ ID NO: 1548389 - RNA, 19 nt, Homo sapiens
  misc_RNA (1)...(19): siRNA sense strand
caagauacauucccucaag

SEQ ID NO: 1548390 - RNA, 19 nt, Homo sapiens
  misc_RNA (1)...(19): siRNA sense strand
caaaguagcacuguagauu

SEQ ID NO: 1548391 - RNA, 19 nt, Homo sapiens
  misc_RNA (1)...(19): siRNA sense strand
gauggcagaugcuuucaga

SEQ ID NO: 1548392 - RNA, 19 nt, Homo sapiens
  misc_RNA (1)...(19): siRNA sense strand
gcguaagacuucagaauuc

SEQ ID NO: 1548393 - RNA, 19 nt, Homo sapiens
  misc_RNA (1)...(19): siRNA sense strand
aaagacaacucagagguaa

SEQ ID NO: 1548394 - RNA, 19 nt, Homo sapiens
  misc_RNA (1)...(19): siRNA sense strand
caaaauggaugaauuggaa

SEQ ID NO: 1548395 - RNA, 19 nt, Homo sapiens
  misc_RNA (1)...(19): siRNA sense strand
gccaucaaguaucauauuu

SEQ ID NO: 1548396 - RNA, 19 nt, Homo sapiens
  misc_RNA (1)...(19): siRNA sense strand
gaauuucccuuucaacaac

SEQ ID NO: 1548397 - RNA, 19 nt, Homo sapiens
  misc_RNA (1)...(19): siRNA sense strand
caaagacacugcuucaaac

SEQ ID NO: 1548398 - RNA, 19 nt, Homo sapiens
  misc_RNA (1)...(19): siRNA sense strand
gagaaagggagaagaaaga

SEQ ID NO: 1548399 - RNA, 19 nt, Homo sapiens
  misc_RNA (1)...(19): siRNA sense strand
ggcagaugcuuucagaauu

SEQ ID NO: 1548400 - RNA, 19 nt, Homo sapiens
  misc_RNA (1)...(19): siRNA sense strand
caaagacaacucagaggua

SEQ ID NO: 1548401 - RNA, 19 nt, Homo sapiens
  misc_RNA (1)...(19): siRNA sense strand
caugacagaaggugauuua

SEQ ID NO: 1548402 - RNA, 19 nt, Homo sapiens
  misc_RNA (1)...(19): siRNA sense strand
gcaacaaaauggaugaauu

SEQ ID NO: 1548403 - RNA, 19 nt, Homo sapiens
  misc_RNA (1)...(19): siRNA sense strand
guaaagaggaagcauugaa

SEQ ID NO: 1548404 - RNA, 19 nt, Homo sapiens
  misc_RNA (1)...(19): siRNA sense strand
acaaagacacugcuucaaa

SEQ ID NO: 1548405 - RNA, 19 nt, Homo sapiens
  misc_RNA (1)...(19): siRNA sense strand
aaacaugugcugugauaaa

SEQ ID NO: 1548406 - RNA, 19 nt, Homo sapiens
  misc_RNA (1)...(19): siRNA sense strand
aaggaaaccuggugggauu

SEQ ID NO: 1548407 - RNA, 19 nt, Homo sapiens
  misc_RNA (1)...(19): siRNA sense strand
gauccaaacuauagaacuc

SEQ ID NO: 1548408 - RNA, 19 nt, Homo sapiens
  misc_RNA (1)...(19): siRNA sense strand
ggauuuccaucaccaagga

SEQ ID NO: 1548409 - RNA, 19 nt, Homo sapiens
  misc_RNA (1)...(19): siRNA sense strand
uaaagaggaagcauugaaa

SEQ ID NO: 1548410 - RNA, 19 nt, Homo sapiens
  misc_RNA (1)...(19): siRNA sense strand
gaaagggagaagaaagaaa

SEQ ID NO: 1548411 - RNA, 19 nt, Homo sapiens
  misc_RNA (1)...(19): siRNA sense strand
uagaggagguagaaauguu

SEQ ID NO: 1548412 - RNA, 19 nt, Homo sapiens
  misc_RNA (1)...(19): siRNA sense strand
caaacaagaguuggaaauu

SEQ ID NO: 1548413 - RNA, 19 nt, Homo sapiens
  misc_RNA (1)...(19): siRNA sense strand
gcaagaucaucaagugagu

SEQ ID NO: 1548414 - RNA, 19 nt, Homo sapiens
  misc_RNA (1)...(19): siRNA sense strand
ucaagugucugcauuuuaa

SEQ ID NO: 1548415 - RNA, 19 nt, Homo sapiens
  misc_RNA (1)...(19): siRNA sense strand
gguaugcucccuucagaaa

SEQ ID NO: 1548416 - RNA, 19 nt, Homo sapiens
  misc_RNA (1)...(19): siRNA sense strand
ggaaaccuggugggauuua

SEQ ID NO: 1548417 - RNA, 19 nt, Homo sapiens
  misc_RNA (1)...(19): siRNA sense strand
ggcaaagccacaagucaua

SEQ ID NO: 1548418 - RNA, 19 nt, Homo sapiens
  misc_RNA (1)...(19): siRNA sense strand
ggcaaugucuuaaugaaac

SEQ ID NO: 1548419 - RNA, 19 nt, Homo sapiens
  misc_RNA (1)...(19): siRNA sense strand
gcugaagucugacaaugca

SEQ ID NO: 1548420 - RNA, 19 nt, Homo sapiens
  misc_RNA (1)...(19): siRNA sense strand
gaagaagcuuuggcucauc

SEQ ID NO: 1548421 - RNA, 19 nt, Homo sapiens
  misc_RNA (1)...(19): siRNA sense strand
gcagaggcuucaggucuug

SEQ ID NO: 1548422 - RNA, 19 nt, Homo sapiens
  misc_RNA (1)...(19): siRNA sense strand
ggcagagacuguuggguau

SEQ ID NO: 1548423 - RNA, 19 nt, Homo sapiens
  misc_RNA (1)...(19): siRNA sense strand
ccagcacucucaaauagau

SEQ ID NO: 1548424 - RNA, 19 nt, Homo sapiens
  misc_RNA (1)...(19): siRNA sense strand
gaaaccuggugggauuuau

SEQ ID NO: 1548425 - RNA, 19 nt, Homo sapiens
  misc_RNA (1)...(19): siRNA sense strand
gagaauuucccuuucaaca

SEQ ID NO: 1548426 - RNA, 19 nt, Homo sapiens
  misc_RNA (1)...(19): siRNA sense strand
caauugacacaaauggaua

SEQ ID NO: 1548427 - RNA, 19 nt, Homo sapiens
  misc_RNA (1)...(19): siRNA sense strand
gaccaggcacuacaauuga

SEQ ID NO: 1548428 - RNA, 19 nt, Homo sapiens
  misc_RNA (1)...(19): siRNA sense strand
agaagaggaugacaugaca

SEQ ID NO: 1548429 - RNA, 19 nt, Homo sapiens
  misc_RNA (1)...(19): siRNA sense strand
gaucagauggaaagaacuu

SEQ ID NO: 1548430 - RNA, 19 nt, Homo sapiens
  misc_RNA (1)...(19): siRNA sense strand
gaagcgaguuuucaguauu

SEQ ID NO: 1548431 - RNA, 19 nt, Homo sapiens
  misc_RNA (1)...(19): siRNA sense strand
gaucaucaagugagucaga

SEQ ID NO: 1548432 - RNA, 19 nt, Homo sapiens
  misc_RNA (1)...(19): siRNA sense strand
gaauuggaagcaccuuaaa

SEQ ID NO: 1548433 - RNA, 19 nt, Homo sapiens
  misc_RNA (1)...(19): siRNA sense strand
gcauuugagcaacaauuaa

SEQ ID NO: 1548434 - RNA, 19 nt, Homo sapiens
  misc_RNA (1)...(19): siRNA sense strand
acucagagguaaagaggaa

SEQ ID NO: 1548435 - RNA, 19 nt, Homo sapiens
  misc_RNA (1)...(19): siRNA sense strand
aaagaaaugaagcgaguuu

SEQ ID NO: 1548436 - RNA, 19 nt, Homo sapiens
  misc_RNA (1)...(19): siRNA sense strand
gguauggccucggaaggaa

SEQ ID NO: 1548437 - RNA, 19 nt, Homo sapiens
  misc_RNA (1)...(19): siRNA sense strand
gaagauggcucaggaaaac

SEQ ID NO: 1548438 - RNA, 19 nt, Homo sapiens
  misc_RNA (1)...(19): siRNA sense strand
ggcguaagacuucagaauu

SEQ ID NO: 1548439 - RNA, 19 nt, Homo sapiens
  misc_RNA (1)...(19): siRNA sense strand
ugaccaggcacuacaauug

SEQ ID NO: 1548440 - RNA, 19 nt, Homo sapiens
  misc_RNA (1)...(19): siRNA sense strand
gaaggugauuuaggguaug

SEQ ID NO: 1548441 - RNA, 19 nt, Homo sapiens
  misc_RNA (1)...(19): siRNA sense strand
cgacaaaguagcacuguag

SEQ ID NO: 1548442 - RNA, 19 nt, Homo sapiens
  misc_RNA (1)...(19): siRNA sense strand
agaaggugauuuaggguau

SEQ ID NO: 1548443 - RNA, 19 nt, Homo sapiens
  misc_RNA (1)...(19): siRNA sense strand
guggcaagaucaucaagug

SEQ ID NO: 1548444 - RNA, 19 nt, Homo sapiens
  misc_RNA (1)...(19): siRNA sense strand
cucaagagguccuuaagau

SEQ ID NO: 1548445 - RNA, 19 nt, Homo sapiens
  misc_RNA (1)...(19): siRNA sense strand
ugaauuggaagcaccuuaa

SEQ ID NO: 1548446 - RNA, 19 nt, Homo sapiens
  misc_RNA (1)...(19): siRNA sense strand
gaggaagcauugaaaauuc

SEQ ID NO: 1548447 - RNA, 19 nt, Homo sapiens
  misc_RNA (1)...(19): siRNA sense strand
ucugugggcugcauuuguu

SEQ ID NO: 1548448 - RNA, 19 nt, Homo sapiens
  misc_RNA (1)...(19): siRNA sense strand
uuaaaaugcugaagucuga

SEQ ID NO: 1548449 - RNA, 19 nt, Homo sapiens
  misc_RNA (1)...(19): siRNA sense strand
cuuaagaugcucauagauu

SEQ ID NO: 1548450 - RNA, 19 nt, Homo sapiens
  misc_RNA (1)...(19): siRNA sense strand
cuuuagcccuccuccauuu

SEQ ID NO: 1548451 - RNA, 19 nt, Homo sapiens
  misc_RNA (1)...(19): siRNA sense strand
gggagaagaaagaaaugaa

SEQ ID NO: 1548452 - RNA, 19 nt, Homo sapiens
  misc_RNA (1)...(19): siRNA sense strand
aaacagauccuuggagaag

SEQ ID NO: 1548453 - RNA, 19 nt, Homo sapiens
  misc_RNA (1)...(19): siRNA sense strand
gcacuguagauucgaauuc

SEQ ID NO: 1548454 - RNA, 19 nt, Homo sapiens
  misc_RNA (1)...(19): siRNA sense strand
aaagggagaagaaagaaau

SEQ ID NO: 1548455 - RNA, 19 nt, Homo sapiens
  misc_RNA (1)...(19): siRNA sense strand
ccuuaaagaggauggauuu

SEQ ID NO: 1548456 - RNA, 19 nt, Homo sapiens
  misc_RNA (1)...(19): siRNA sense strand
gauaucaaacagcagaaga

SEQ ID NO: 1548457 - RNA, 19 nt, Homo sapiens
  misc_RNA (1)...(19): siRNA sense strand
aauuacagacgacaaagua

SEQ ID NO: 1548458 - RNA, 19 nt, Homo sapiens
  misc_RNA (1)...(19): siRNA sense strand
ggagaagaaagaaaugaag

SEQ ID NO: 1548459 - RNA, 19 nt, Homo sapiens
  misc_RNA (1)...(19): siRNA sense strand
gagguaaagaggaagcauu

SEQ ID NO: 1548460 - RNA, 19 nt, Homo sapiens
  misc_RNA (1)...(19): siRNA sense strand
ccaaacuauagaacucuua

SEQ ID NO: 1548461 - RNA, 19 nt, Homo sapiens
  misc_RNA (1)...(19): siRNA sense strand
gauccuauacauucaagug

SEQ ID NO: 1548462 - RNA, 19 nt, Homo sapiens
  misc_RNA (1)...(19): siRNA sense strand
gaagacaaagacacugcuu

SEQ ID NO: 1548463 - RNA, 19 nt, Homo sapiens
  misc_RNA (1)...(19): siRNA sense strand
agaagaagcuuuggcucau

SEQ ID NO: 1548464 - RNA, 19 nt, Homo sapiens
  misc_RNA (1)...(19): siRNA sense strand
guucuaagaggauggaaga

SEQ ID NO: 1548465 - RNA, 19 nt, Homo sapiens
  misc_RNA (1)...(19): siRNA sense strand
caacaaaauggaugaauug

SEQ ID NO: 1548466 - RNA, 19 nt, Homo sapiens
  misc_RNA (1)...(19): siRNA sense strand
gagcaagguggcaagauca

SEQ ID NO: 1548467 - RNA, 19 nt, Homo sapiens
  misc_RNA (1)...(19): siRNA sense strand
cagaagauggcucaggaaa

SEQ ID NO: 1548468 - RNA, 19 nt, Homo sapiens
  misc_RNA (1)...(19): siRNA sense strand
agaggagguagaaauguua

SEQ ID NO: 1548469 - RNA, 19 nt, Homo sapiens
  misc_RNA (1)...(19): siRNA sense strand
gggcugcauuuguucaauc

SEQ ID NO: 1548470 - RNA, 19 nt, Homo sapiens
  misc_RNA (1)...(19): siRNA sense strand
caagguggcaagaucauca

SEQ ID NO: 1548471 - RNA, 19 nt, Homo sapiens
  misc_RNA (1)...(19): siRNA sense strand
gaggagguagaaauguuaa

SEQ ID NO: 1548472 - RNA, 19 nt, Homo sapiens
  misc_RNA (1)...(19): siRNA sense strand
guagcacuguagauucgaa

SEQ ID NO: 1548473 - RNA, 19 nt, Homo sapiens
  misc_RNA (1)...(19): siRNA sense strand
aagagaauuucccuuucaa

SEQ ID NO: 1548474 - RNA, 19 nt, Homo sapiens
  misc_RNA (1)...(19): siRNA sense strand
agacaaagacacugcuuca

SEQ ID NO: 1548475 - RNA, 19 nt, Homo sapiens
  misc_RNA (1)...(19): siRNA sense strand
gcucaucaaagaaaaguua

SEQ ID NO: 1548476 - RNA, 19 nt, Homo sapiens
  misc_RNA (1)...(19): siRNA sense strand
ccucggagccugccuuugu

SEQ ID NO: 1548477 - RNA, 19 nt, Homo sapiens
  misc_RNA (1)...(19): siRNA sense strand
gcaaugucuuaaugaaacu

SEQ ID NO: 1548478 - RNA, 19 nt, Homo sapiens
  misc_RNA (1)...(19): siRNA sense strand
ucagaauugucaaaugaag

SEQ ID NO: 1548479 - RNA, 19 nt, Homo sapiens
  misc_RNA (1)...(19): siRNA sense strand
gaagcaccuuaaagaggau

SEQ ID NO: 1548480 - RNA, 19 nt, Homo sapiens
  misc_RNA (1)...(19): siRNA sense strand
caaagagacuccaguauaa

SEQ ID NO: 1548481 - RNA, 19 nt, Homo sapiens
  misc_RNA (1)...(19): siRNA sense strand
uaaaggaacuucaggauaa

SEQ ID NO: 1548482 - RNA, 19 nt, Homo sapiens
  misc_RNA (1)...(19): siRNA sense strand
gaaacagaguuggauauua

SEQ ID NO: 1548483 - RNA, 19 nt, Homo sapiens
  misc_RNA (1)...(19): siRNA sense strand
gacaaagucuggaauauga

SEQ ID NO: 1548484 - RNA, 19 nt, Homo sapiens
  misc_RNA (1)...(19): siRNA sense strand
gcaaacagacucaagauuu

SEQ ID NO: 1548485 - RNA, 19 nt, Homo sapiens
  misc_RNA (1)...(19): siRNA sense strand
ugaaggagcuuugcaagua

SEQ ID NO: 1548486 - RNA, 19 nt, Homo sapiens
  misc_RNA (1)...(19): siRNA sense strand
gcacuagaaucaugacauu

SEQ ID NO: 1548487 - RNA, 19 nt, Homo sapiens
  misc_RNA (1)...(19): siRNA sense strand
gaaacuaaaugaagacauc

SEQ ID NO: 1548488 - RNA, 19 nt, Homo sapiens
  misc_RNA (1)...(19): siRNA sense strand
gaagucacaugaacaguug

SEQ ID NO: 1548489 - RNA, 19 nt, Homo sapiens
  misc_RNA (1)...(19): siRNA sense strand
gcacauaggauccaagaaa

SEQ ID NO: 1548490 - RNA, 19 nt, Homo sapiens
  misc_RNA (1)...(19): siRNA sense strand
guaaugaacuugauucuac

SEQ ID NO: 1548491 - RNA, 19 nt, Homo sapiens
  misc_RNA (1)...(19): siRNA sense strand
gaagagggcacagaaauuu

SEQ ID NO: 1548492 - RNA, 19 nt, Homo sapiens
  misc_RNA (1)...(19): siRNA sense strand
ggagaagcauugcgacaaa

SEQ ID NO: 1548493 - RNA, 19 nt, Homo sapiens
  misc_RNA (1)...(19): siRNA sense strand
gauaaggcaucuagaguau

SEQ ID NO: 1548494 - RNA, 19 nt, Homo sapiens
  misc_RNA (1)...(19): siRNA sense strand
gauagacucucacacuaaa

SEQ ID NO: 1548495 - RNA, 19 nt, Homo sapiens
  misc_RNA (1)...(19): siRNA sense strand
gaaagaagaaugcagaaga

SEQ ID NO: 1548496 - RNA, 19 nt, Homo sapiens
  misc_RNA (1)...(19): siRNA sense strand
gcagaagauuugaacauga

SEQ ID NO: 1548497 - RNA, 19 nt, Homo sapiens
  misc_RNA (1)...(19): siRNA sense strand
gcacaaaugcuauugaaug

SEQ ID NO: 1548498 - RNA, 19 nt, Homo sapiens
  misc_RNA (1)...(19): siRNA sense strand
ggacugcucugaccuuuua

SEQ ID NO: 1548499 - RNA, 19 nt, Homo sapiens
  misc_RNA (1)...(19): siRNA sense strand
cagaauuuguggacauuua

SEQ ID NO: 1548500 - RNA, 19 nt, Homo sapiens
  misc_RNA (1)...(19): siRNA sense strand
ucaaagagacuccaguaua

SEQ ID NO: 1548501 - RNA, 19 nt, Homo sapiens
  misc_RNA (1)...(19): siRNA sense strand
gcaccaggccuuccuagua

SEQ ID NO: 1548502 - RNA, 19 nt, Homo sapiens
  misc_RNA (1)...(19): siRNA sense strand
caacagggcuaaugagaag

SEQ ID NO: 1548503 - RNA, 19 nt, Homo sapiens
  misc_RNA (1)...(19): siRNA sense strand
caaagaauguguugcuaau

SEQ ID NO: 1548504 - RNA, 19 nt, Homo sapiens
  misc_RNA (1)...(19): siRNA sense strand
gcaggaguauuacauaugu

SEQ ID NO: 1548505 - RNA, 19 nt, Homo sapiens
  misc_RNA (1)...(19): siRNA sense strand
gaagaaugcagaagauuug

SEQ ID NO: 1548506 - RNA, 19 nt, Homo sapiens
  misc_RNA (1)...(19): siRNA sense strand
gcuuagaggucacagaauu

SEQ ID NO: 1548507 - RNA, 19 nt, Homo sapiens
  misc_RNA (1)...(19): siRNA sense strand
cacaguagcaggaguauua

SEQ ID NO: 1548508 - RNA, 19 nt, Homo sapiens
  misc_RNA (1)...(19): siRNA sense strand
uaaacuggcugauguuaau

SEQ ID NO: 1548509 - RNA, 19 nt, Homo sapiens
  misc_RNA (1)...(19): siRNA sense strand
gaacaugauuuggaggaaa

SEQ ID NO: 1548510 - RNA, 19 nt, Homo sapiens
  misc_RNA (1)...(19): siRNA sense strand
cagaagcuguugcugauuu

SEQ ID NO: 1548511 - RNA, 19 nt, Homo sapiens
  misc_RNA (1)...(19): siRNA sense strand
gcacagaauucagaacuuc

SEQ ID NO: 1548512 - RNA, 19 nt, Homo sapiens
  misc_RNA (1)...(19): siRNA sense strand
ggaaagagacaauaugauc

SEQ ID NO: 1548513 - RNA, 19 nt, Homo sapiens
  misc_RNA (1)...(19): siRNA sense strand
uaaggcaucuagaguauau

SEQ ID NO: 1548514 - RNA, 19 nt, Homo sapiens
  misc_RNA (1)...(19): siRNA sense strand
cagaaggcaugcuggauaa

SEQ ID NO: 1548515 - RNA, 19 nt, Homo sapiens
  misc_RNA (1)...(19): siRNA sense strand
aaaggaagcuggucuugga

SEQ ID NO: 1548516 - RNA, 19 nt, Homo sapiens
  misc_RNA (1)...(19): siRNA sense strand
ucaaaucucuccauuccuu

SEQ ID NO: 1548517 - RNA, 19 nt, Homo sapiens
  misc_RNA (1)...(19): siRNA sense strand
gcaauaaucaguucuaugg

SEQ ID NO: 1548518 - RNA, 19 nt, Homo sapiens
  misc_RNA (1)...(19): siRNA sense strand
ggaagacaccuuuaccaaa

SEQ ID NO: 1548519 - RNA, 19 nt, Homo sapiens
  misc_RNA (1)...(19): siRNA sense strand
gaauguugaugcccugauu

SEQ ID NO: 1548520 - RNA, 19 nt, Homo sapiens
  misc_RNA (1)...(19): siRNA sense strand
aaacagaguuggauauuac

SEQ ID NO: 1548521 - RNA, 19 nt, Homo sapiens
  misc_RNA (1)...(19): siRNA sense strand
gauggagaguuucaaagaa

SEQ ID NO: 1548522 - RNA, 19 nt, Homo sapiens
  misc_RNA (1)...(19): siRNA sense strand
gcaguauucugaacucuuc

SEQ ID NO: 1548523 - RNA, 19 nt, Homo sapiens
  misc_RNA (1)...(19): siRNA sense strand
cacaaaugcuauugaauga

SEQ ID NO: 1548524 - RNA, 19 nt, Homo sapiens
  misc_RNA (1)...(19): siRNA sense strand
gcaagauacugcugugcaa

SEQ ID NO: 1548525 - RNA, 19 nt, Homo sapiens
  misc_RNA (1)...(19): siRNA sense strand
caacucagauuggauuaug

SEQ ID NO: 1548526 - RNA, 19 nt, Homo sapiens
  misc_RNA (1)...(19): siRNA sense strand
caacagaccaacucagauu

SEQ ID NO: 1548527 - RNA, 19 nt, Homo sapiens
  misc_RNA (1)...(19): siRNA sense strand
cuaaauugaucacccauga

SEQ ID NO: 1548528 - RNA, 19 nt, Homo sapiens
  misc_RNA (1)...(19): siRNA sense strand
gguugaagauugccucauu

SEQ ID NO: 1548529 - RNA, 19 nt, Homo sapiens
  misc_RNA (1)...(19): siRNA sense strand
ucacacagcuuguuuacgu

SEQ ID NO: 1548530 - RNA, 19 nt, Homo sapiens
  misc_RNA (1)...(19): siRNA sense strand
auuaauggcuggugccuua

SEQ ID NO: 1548531 - RNA, 19 nt, Homo sapiens
  misc_RNA (1)...(19): siRNA sense strand
gaagauagacucucacacu

SEQ ID NO: 1548532 - RNA, 19 nt, Homo sapiens
  misc_RNA (1)...(19): siRNA sense strand
gaggaaagagacaauauga

SEQ ID NO: 1548533 - RNA, 19 nt, Homo sapiens
  misc_RNA (1)...(19): siRNA sense strand
gaaauaacaaccaaacaca

SEQ ID NO: 1548534 - RNA, 19 nt, Homo sapiens
  misc_RNA (1)...(19): siRNA sense strand
gaacuagagcugcaguauu

SEQ ID NO: 1548535 - RNA, 19 nt, Homo sapiens
  misc_RNA (1)...(19): siRNA sense strand
gagaggaacgccuuagaaa

SEQ ID NO: 1548536 - RNA, 19 nt, Homo sapiens
  misc_RNA (1)...(19): siRNA sense strand
gaguuuagauuacaagaag

SEQ ID NO: 1548537 - RNA, 19 nt, Homo sapiens
  misc_RNA (1)...(19): siRNA sense strand
gaucacccaugagaaguuu

SEQ ID NO: 1548538 - RNA, 19 nt, Homo sapiens
  misc_RNA (1)...(19): siRNA sense strand
uacaagacgucauugguaa

SEQ ID NO: 1548539 - RNA, 19 nt, Homo sapiens
  misc_RNA (1)...(19): siRNA sense strand
gaagauugccucauuggau

SEQ ID NO: 1548540 - RNA, 19 nt, Homo sapiens
  misc_RNA (1)...(19): siRNA sense strand
gugaagaacuaaauaaugc

SEQ ID NO: 1548541 - RNA, 19 nt, Homo sapiens
  misc_RNA (1)...(19): siRNA sense strand
gagaagcuguuaagagucu

SEQ ID NO: 1548542 - RNA, 19 nt, Homo sapiens
  misc_RNA (1)...(19): siRNA sense strand
gaaggagcuuugcaaguag

SEQ ID NO: 1548543 - RNA, 19 nt, Homo sapiens
  misc_RNA (1)...(19): siRNA sense strand
gaacuugauucuacgaaac

SEQ ID NO: 1548544 - RNA, 19 nt, Homo sapiens
  misc_RNA (1)...(19): siRNA sense strand
gaaggccagucaagcagaa

SEQ ID NO: 1548545 - RNA, 19 nt, Homo sapiens
  misc_RNA (1)...(19): siRNA sense strand
gcagugaauuacaggaaga

SEQ ID NO: 1548546 - RNA, 19 nt, Homo sapiens
  misc_RNA (1)...(19): siRNA sense strand
gaaacuccauugggcuaaa

SEQ ID NO: 1548547 - RNA, 19 nt, Homo sapiens
  misc_RNA (1)...(19): siRNA sense strand
gaaaucagaacuucacaca

SEQ ID NO: 1548548 - RNA, 19 nt, Homo sapiens
  misc_RNA (1)...(19): siRNA sense strand
agaaggaaaugacaucuca

SEQ ID NO: 1548549 - RNA, 19 nt, Homo sapiens
  misc_RNA (1)...(19): siRNA sense strand
ucaguuggcucaccaguuc

SEQ ID NO: 1548550 - RNA, 19 nt, Homo sapiens
  misc_RNA (1)...(19): siRNA sense strand
gauaaacuggcugauguua

SEQ ID NO: 1548551 - RNA, 19 nt, Homo sapiens
  misc_RNA (1)...(19): siRNA sense strand
guagagacaugugaaaaua

SEQ ID NO: 1548552 - RNA, 19 nt, Homo sapiens
  misc_RNA (1)...(19): siRNA sense strand
gaauaugaccuagcuguug

SEQ ID NO: 1548553 - RNA, 19 nt, Homo sapiens
  misc_RNA (1)...(19): siRNA sense strand
ggaaugacuucacccuaca

SEQ ID NO: 1548554 - RNA, 19 nt, Homo sapiens
  misc_RNA (1)...(19): siRNA sense strand
cacaacaacuacaggaauu

SEQ ID NO: 1548555 - RNA, 19 nt, Homo sapiens
  misc_RNA (1)...(19): siRNA sense strand
ccaagacaagcauaaauuu

SEQ ID NO: 1548556 - RNA, 19 nt, Homo sapiens
  misc_RNA (1)...(19): siRNA sense strand
uggcugauguuaauaaaga

SEQ ID NO: 1548557 - RNA, 19 nt, Homo sapiens
  misc_RNA (1)...(19): siRNA sense strand
ugaaagaauuggaaucgau

SEQ ID NO: 1548558 - RNA, 19 nt, Homo sapiens
  misc_RNA (1)...(19): siRNA sense strand
aaagaagaaugcagaagau

SEQ ID NO: 1548559 - RNA, 19 nt, Homo sapiens
  misc_RNA (1)...(19): siRNA sense strand
caaaugcuauugaaugaac

SEQ ID NO: 1548560 - RNA, 19 nt, Homo sapiens
  misc_RNA (1)...(19): siRNA sense strand
gggaagagcaggcacaaau

SEQ ID NO: 1548561 - RNA, 19 nt, Homo sapiens
  misc_RNA (1)...(19): siRNA sense strand
caaacgaagugugaaugaa

SEQ ID NO: 1548562 - RNA, 19 nt, Homo sapiens
  misc_RNA (1)...(19): siRNA sense strand
gaauucaaacgaaguguga

SEQ ID NO: 1548563 - RNA, 19 nt, Homo sapiens
  misc_RNA (1)...(19): siRNA sense strand
caaacagacucaagauuuu

SEQ ID NO: 1548564 - RNA, 19 nt, Homo sapiens
  misc_RNA (1)...(19): siRNA sense strand
gaaagguguuauugcuguu

SEQ ID NO: 1548565 - RNA, 19 nt, Homo sapiens
  misc_RNA (1)...(19): siRNA sense strand
ccacaaggacaaagauaaa

SEQ ID NO: 1548566 - RNA, 19 nt, Homo sapiens
  misc_RNA (1)...(19): siRNA sense strand
ggauggagaguuucaaaga

SEQ ID NO: 1548567 - RNA, 19 nt, Homo sapiens
  misc_RNA (1)...(19): siRNA sense strand
aagaauguguugcuaauca

SEQ ID NO: 1548568 - RNA, 19 nt, Homo sapiens
  misc_RNA (1)...(19): siRNA sense strand
gacaaagaauguguugcua

SEQ ID NO: 1548569 - RNA, 19 nt, Homo sapiens
  misc_RNA (1)...(19): siRNA sense strand
gaagacgggcugcugaaga

SEQ ID NO: 1548570 - RNA, 19 nt, Homo sapiens
  misc_RNA (1)...(19): siRNA sense strand
uggagaagcuguuaagagu

SEQ ID NO: 1548571 - RNA, 19 nt, Homo sapiens
  misc_RNA (1)...(19): siRNA sense strand
aagauagacucucacacua

SEQ ID NO: 1548572 - RNA, 19 nt, Homo sapiens
  misc_RNA (1)...(19): siRNA sense strand
gugaggaaauuagaagaaa

SEQ ID NO: 1548573 - RNA, 19 nt, Homo sapiens
  misc_RNA (1)...(19): siRNA sense strand
auucagaacuucaagcaaa

SEQ ID NO: 1548574 - RNA, 19 nt, Homo sapiens
  misc_RNA (1)...(19): siRNA sense strand
gcaaagauggagcugagaa

SEQ ID NO: 1548575 - RNA, 19 nt, Homo sapiens
  misc_RNA (1)...(19): siRNA sense strand
gcacaacaacuacaggaau

SEQ ID NO: 1548576 - RNA, 19 nt, Homo sapiens
  misc_RNA (1)...(19): siRNA sense strand
uuaccuggauggagaguuu

SEQ ID NO: 1548577 - RNA, 19 nt, Homo sapiens
  misc_RNA (1)...(19): siRNA sense strand
cagaagauuugaacaugau

SEQ ID NO: 1548578 - RNA, 19 nt, Homo sapiens
  misc_RNA (1)...(19): siRNA sense strand
guaaagcagauccaaauuc

SEQ ID NO: 1548579 - RNA, 19 nt, Homo sapiens
  misc_RNA (1)...(19): siRNA sense strand
uaaacacacuggcccugaa

SEQ ID NO: 1548580 - RNA, 19 nt, Homo sapiens
  misc_RNA (1)...(19): siRNA sense strand
ggacagagacggcgaaguu

SEQ ID NO: 1548581 - RNA, 19 nt, Homo sapiens
  misc_RNA (1)...(19): siRNA sense strand
gaagagaaccgcgaucugu

SEQ ID NO: 1548582 - RNA, 19 nt, Homo sapiens
  misc_RNA (1)...(19): siRNA sense strand
caacugacccugccuucuu

SEQ ID NO: 1548583 - RNA, 19 nt, Homo sapiens
  misc_RNA (1)...(19): siRNA sense strand
ugaagucuguauugacauu

SEQ ID NO: 1548584 - RNA, 19 nt, Homo sapiens
  misc_RNA (1)...(19): siRNA sense strand
gggaaacgauccuuauugc

SEQ ID NO: 1548585 - RNA, 19 nt, Homo sapiens
  misc_RNA (1)...(19): siRNA sense strand
gaaguuugacggucuggaa

SEQ ID NO: 1548586 - RNA, 19 nt, Homo sapiens
  misc_RNA (1)...(19): siRNA sense strand
cgugaagucuguauugaca

SEQ ID NO: 1548587 - RNA, 19 nt, Homo sapiens
  misc_RNA (1)...(19): siRNA sense strand
ccacgugaagucuguauug

SEQ ID NO: 1548588 - RNA, 19 nt, Homo sapiens
  misc_RNA (1)...(19): siRNA sense strand
cagagacggcgaaguuuga

SEQ ID NO: 1548589 - RNA, 19 nt, Homo sapiens
  misc_RNA (1)...(19): siRNA sense strand
cuuauugccucaccauuuc

SEQ ID NO: 1548590 - RNA, 19 nt, Homo sapiens
  misc_RNA (1)...(19): siRNA sense strand
caagcuccauuucaucaag

SEQ ID NO: 1548591 - RNA, 19 nt, Homo sapiens
  misc_RNA (1)...(19): siRNA sense strand
ggaaugaggcugguuugca

SEQ ID NO: 1548592 - RNA, 19 nt, Homo sapiens
  misc_RNA (1)...(19): siRNA sense strand
agagaaccgcgaucuguuu

SEQ ID NO: 1548593 - RNA, 19 nt, Homo sapiens
  misc_RNA (1)...(19): siRNA sense strand
gaaccgcgaucuguuucag

SEQ ID NO: 1548594 - RNA, 19 nt, Homo sapiens
  misc_RNA (1)...(19): siRNA sense strand
cacgugaagucuguauuga

SEQ ID NO: 1548595 - RNA, 19 nt, Homo sapiens
  misc_RNA (1)...(19): siRNA sense strand
ccuuauugccucaccauuu

SEQ ID NO: 1548596 - RNA, 19 nt, Homo sapiens
  misc_RNA (1)...(19): siRNA sense strand
gagaaccgcgaucuguuuc

SEQ ID NO: 1548597 - RNA, 19 nt, Homo sapiens
  misc_RNA (1)...(19): siRNA sense strand
gagaagagaaccgcgaucu

SEQ ID NO: 1548598 - RNA, 19 nt, Homo sapiens
  misc_RNA (1)...(19): siRNA sense strand
gacagagacggcgaaguuu

SEQ ID NO: 1548599 - RNA, 19 nt, Homo sapiens
  misc_RNA (1)...(19): siRNA sense strand
ucugcaagcuccauuucau

SEQ ID NO: 1548600 - RNA, 19 nt, Homo sapiens
  misc_RNA (1)...(19): siRNA sense strand
gcaagcuccauuucaucaa

SEQ ID NO: 1548601 - RNA, 19 nt, Homo sapiens
  misc_RNA (1)...(19): siRNA sense strand
gguuggcgcauggacauuu

SEQ ID NO: 1548602 - RNA, 19 nt, Homo sapiens
  misc_RNA (1)...(19): siRNA sense strand
agggaaacgauccuuauug

SEQ ID NO: 1548603 - RNA, 19 nt, Homo sapiens
  misc_RNA (1)...(19): siRNA sense strand
acagagacggcgaaguuug

SEQ ID NO: 1548604 - RNA, 19 nt, Homo sapiens
  misc_RNA (1)...(19): siRNA sense strand
aagagaaccgcgaucuguu

SEQ ID NO: 1548605 - RNA, 19 nt, Homo sapiens
  misc_RNA (1)...(19): siRNA sense strand
uguauugacauucucauag

SEQ ID NO: 1548606 - RNA, 19 nt, Homo sapiens
  misc_RNA (1)...(19): siRNA sense strand
aaggaaaccucgacaaaug

SEQ ID NO: 1548607 - RNA, 19 nt, Homo sapiens
  misc_RNA (1)...(19): siRNA sense strand
gcaccgagaucgaccucaa

SEQ ID NO: 1548608 - RNA, 19 nt, Homo sapiens
  misc_RNA (1)...(19): siRNA sense strand
ggaagaagaggaccgagaa

SEQ ID NO: 1548609 - RNA, 19 nt, Homo sapiens
  misc_RNA (1)...(19): siRNA sense strand
cauaugagcgcaaguggua

SEQ ID NO: 1548610 - RNA, 19 nt, Homo sapiens
  misc_RNA (1)...(19): siRNA sense strand
uccagaaggucuuuaauga

SEQ ID NO: 1548611 - RNA, 19 nt, Homo sapiens
  misc_RNA (1)...(19): siRNA sense strand
gcaccaaguccaagaagaa

SEQ ID NO: 1548612 - RNA, 19 nt, Homo sapiens
  misc_RNA (1)...(19): siRNA sense strand
cgaggaagcuggagguaca

SEQ ID NO: 1548613 - RNA, 19 nt, Homo sapiens
  misc_RNA (1)...(19): siRNA sense strand
ggacaaugaugagcugcuu

SEQ ID NO: 1548614 - RNA, 19 nt, Homo sapiens
  misc_RNA (1)...(19): siRNA sense strand
ccaaggaaaccucgacaaa

SEQ ID NO: 1548615 - RNA, 19 nt, Homo sapiens
  misc_RNA (1)...(19): siRNA sense strand
gaaagguguacgcauugua

SEQ ID NO: 1548616 - RNA, 19 nt, Homo sapiens
  misc_RNA (1)...(19): siRNA sense strand
ggaaagguguacgcauugu

SEQ ID NO: 1548617 - RNA, 19 nt, Homo sapiens
  misc_RNA (1)...(19): siRNA sense strand
gaagaggaccgagaaguag

SEQ ID NO: 1548618 - RNA, 19 nt, Homo sapiens
  misc_RNA (1)...(19): siRNA sense strand
agaagaggaccgagaagua

SEQ ID NO: 1548619 - RNA, 19 nt, Homo sapiens
  misc_RNA (1)...(19): siRNA sense strand
acgaggagguggacaggua

SEQ ID NO: 1548620 - RNA, 19 nt, Homo sapiens
  misc_RNA (1)...(19): siRNA sense strand
cuccagaucuucacauaug

SEQ ID NO: 1548621 - RNA, 19 nt, Homo sapiens
  misc_RNA (1)...(19): siRNA sense strand
cauccaacccucuaaaguu

SEQ ID NO: 1548622 - RNA, 19 nt, Homo sapiens
  misc_RNA (1)...(19): siRNA sense strand
ggacuacuacagcgacuau

SEQ ID NO: 1548623 - RNA, 19 nt, Homo sapiens
  misc_RNA (1)...(19): siRNA sense strand
ccucuaaaguugggaagaa

SEQ ID NO: 1548624 - RNA, 19 nt, Homo sapiens
  misc_RNA (1)...(19): siRNA sense strand
gggagaauuuccagaaggu

SEQ ID NO: 1548625 - RNA, 19 nt, Homo sapiens
  misc_RNA (1)...(19): siRNA sense strand
caaggaaaccucgacaaau

SEQ ID NO: 1548626 - RNA, 19 nt, Homo sapiens
  misc_RNA (1)...(19): siRNA sense strand
gaagccaggcaccacauug

SEQ ID NO: 1548627 - RNA, 19 nt, Homo sapiens
  misc_RNA (1)...(19): siRNA sense strand
gaucuccgcagcccaguau

SEQ ID NO: 1548628 - RNA, 19 nt, Homo sapiens
  misc_RNA (1)...(19): siRNA sense strand
ccaagaagaacaagaagag

SEQ ID NO: 1548629 - RNA, 19 nt, Homo sapiens
  misc_RNA (1)...(19): siRNA sense strand
gacaaaugguccuguaagc

SEQ ID NO: 1548630 - RNA, 19 nt, Homo sapiens
  misc_RNA (1)...(19): siRNA sense strand
gaaagugggcucggagaag

SEQ ID NO: 1548631 - RNA, 19 nt, Homo sapiens
  misc_RNA (1)...(19): siRNA sense strand
acaaugaugagcugcuuaa

SEQ ID NO: 1548632 - RNA, 19 nt, Homo sapiens
  misc_RNA (1)...(19): siRNA sense strand
ucgccaggaucaucacgua

SEQ ID NO: 1548633 - RNA, 19 nt, Homo sapiens
  misc_RNA (1)...(19): siRNA sense strand
gcgguaggcccaagaagga

SEQ ID NO: 1548634 - RNA, 19 nt, Homo sapiens
  misc_RNA (1)...(19): siRNA sense strand
auggaaagguguacgcauu

SEQ ID NO: 1548635 - RNA, 19 nt, Homo sapiens
  misc_RNA (1)...(19): siRNA sense strand
gagugaggaucaggaggaa

SEQ ID NO: 1548636 - RNA, 19 nt, Homo sapiens
  misc_RNA (1)...(19): siRNA sense strand
ggaggcagcaugagcucuu

SEQ ID NO: 1548637 - RNA, 19 nt, Homo sapiens
  misc_RNA (1)...(19): siRNA sense strand
gcgcuguggugcuccugaa

SEQ ID NO: 1548638 - RNA, 19 nt, Homo sapiens
  misc_RNA (1)...(19): siRNA sense strand
gacaaugaugagcugcuua

SEQ ID NO: 1548639 - RNA, 19 nt, Homo sapiens
  misc_RNA (1)...(19): siRNA sense strand
gcagcccaguauuacaaga

SEQ ID NO: 1548640 - RNA, 19 nt, Homo sapiens
  misc_RNA (1)...(19): siRNA sense strand
ccacaucgaccugcaguuc

SEQ ID NO: 1548641 - RNA, 19 nt, Homo sapiens
  misc_RNA (1)...(19): siRNA sense strand
uccaccagcugcagcauga

SEQ ID NO: 1548642 - RNA, 19 nt, Homo sapiens
  misc_RNA (1)...(19): siRNA sense strand
ccgcugcucuaccaagaug

SEQ ID NO: 1548643 - RNA, 19 nt, Homo sapiens
  misc_RNA (1)...(19): siRNA sense strand
caguugccgucgucguuaa

SEQ ID NO: 1548644 - RNA, 19 nt, Homo sapiens
  misc_RNA (1)...(19): siRNA sense strand
ccaaguccaagaagaacaa

SEQ ID NO: 1548645 - RNA, 19 nt, Homo sapiens
  misc_RNA (1)...(19): siRNA sense strand
cgacaaaugguccuguaag

SEQ ID NO: 1548646 - RNA, 19 nt, Homo sapiens
  misc_RNA (1)...(19): siRNA sense strand
ccaguugccgucgucguua

SEQ ID NO: 1548647 - RNA, 19 nt, Homo sapiens
  misc_RNA (1)...(19): siRNA sense strand
agcgcuaccuggacaauga

SEQ ID NO: 1548648 - RNA, 19 nt, Homo sapiens
  misc_RNA (1)...(19): siRNA sense strand
gaauuuccagaaggucuuu

SEQ ID NO: 1548649 - RNA, 19 nt, Homo sapiens
  misc_RNA (1)...(19): siRNA sense strand
ucuccgcagcccaguauua

SEQ ID NO: 1548650 - RNA, 19 nt, Homo sapiens
  misc_RNA (1)...(19): siRNA sense strand
agcaugagaagaaauauga

SEQ ID NO: 1548651 - RNA, 19 nt, Homo sapiens
  misc_RNA (1)...(19): siRNA sense strand
gaagaagaggaccgagaag

SEQ ID NO: 1548652 - RNA, 19 nt, Homo sapiens
  misc_RNA (1)...(19): siRNA sense strand
gcugcagcaugagaagaaa

SEQ ID NO: 1548653 - RNA, 19 nt, Homo sapiens
  misc_RNA (1)...(19): siRNA sense strand
ccaccaccaccaccacaaa

SEQ ID NO: 1548654 - RNA, 19 nt, Homo sapiens
  misc_RNA (1)...(19): siRNA sense strand
cuaaaguugggaagaagaa

SEQ ID NO: 1548655 - RNA, 19 nt, Homo sapiens
  misc_RNA (1)...(19): siRNA sense strand
ggcacccgcucugcaaguu

SEQ ID NO: 1548656 - RNA, 19 nt, Homo sapiens
  misc_RNA (1)...(19): siRNA sense strand
ccgcagcccaguauuacaa

SEQ ID NO: 1548657 - RNA, 19 nt, Homo sapiens
  misc_RNA (1)...(19): siRNA sense strand
ggaaaccucgacaaauggu

SEQ ID NO: 1548658 - RNA, 19 nt, Homo sapiens
  misc_RNA (1)...(19): siRNA sense strand
ucacauaugagcgcaagug

SEQ ID NO: 1548659 - RNA, 19 nt, Homo sapiens
  misc_RNA (1)...(19): siRNA sense strand
gaaggcgguaggcccaaga

SEQ ID NO: 1548660 - RNA, 19 nt, Homo sapiens
  misc_RNA (1)...(19): siRNA sense strand
ccacuacuucugccacuuc

SEQ ID NO: 1548661 - RNA, 19 nt, Homo sapiens
  misc_RNA (1)...(19): siRNA sense strand
uaccgcugcucuaccaaga

SEQ ID NO: 1548662 - RNA, 19 nt, Homo sapiens
  misc_RNA (1)...(19): siRNA sense strand
gcacuuucugugugaggaa

SEQ ID NO: 1548663 - RNA, 19 nt, Homo sapiens
  misc_RNA (1)...(19): siRNA sense strand
cagcucauccaguccauca

SEQ ID NO: 1548664 - RNA, 19 nt, Homo sapiens
  misc_RNA (1)...(19): siRNA sense strand
ggucguugguggcgaagac

SEQ ID NO: 1548665 - RNA, 19 nt, Homo sapiens
  misc_RNA (1)...(19): siRNA sense strand
gaggcagcaugagcucuuc

SEQ ID NO: 1548666 - RNA, 19 nt, Homo sapiens
  misc_RNA (1)...(19): siRNA sense strand
caagccaucgccaggauca

SEQ ID NO: 1548667 - RNA, 19 nt, Homo sapiens
  misc_RNA (1)...(19): siRNA sense strand
gagcuccugucugcacaca

SEQ ID NO: 1548668 - RNA, 19 nt, Homo sapiens
  misc_RNA (1)...(19): siRNA sense strand
ccagaaggucuuuaaugag

SEQ ID NO: 1548669 - RNA, 19 nt, Homo sapiens
  misc_RNA (1)...(19): siRNA sense strand
gcccaguauuacaagaguu

SEQ ID NO: 1548670 - RNA, 19 nt, Homo sapiens
  misc_RNA (1)...(19): siRNA sense strand
gccaguugccgucgucguu

SEQ ID NO: 1548671 - RNA, 19 nt, Homo sapiens
  misc_RNA (1)...(19): siRNA sense strand
gcaguagcagcaagaaggu

SEQ ID NO: 1548672 - RNA, 19 nt, Homo sapiens
  misc_RNA (1)...(19): siRNA sense strand
gccuggaacagcagcagua

SEQ ID NO: 1548673 - RNA, 19 nt, Homo sapiens
  misc_RNA (1)...(19): siRNA sense strand
uggcuucucuggccuucug

SEQ ID NO: 1548674 - RNA, 19 nt, Homo sapiens
  misc_RNA (1)...(19): siRNA sense strand
ugcagcaugagaagaaaua

SEQ ID NO: 1548675 - RNA, 19 nt, Homo sapiens
  misc_RNA (1)...(19): siRNA sense strand
cagcaugagaagaaauaug

SEQ ID NO: 1548676 - RNA, 19 nt, Homo sapiens
  misc_RNA (1)...(19): siRNA sense strand
agaagccucugagcaccaa

SEQ ID NO: 1548677 - RNA, 19 nt, Homo sapiens
  misc_RNA (1)...(19): siRNA sense strand
uccagcaccuccagaucuu

SEQ ID NO: 1548678 - RNA, 19 nt, Homo sapiens
  misc_RNA (1)...(19): siRNA sense strand
aaaguugggaagaagaaga

SEQ ID NO: 1548679 - RNA, 19 nt, Homo sapiens
  misc_RNA (1)...(19): siRNA sense strand
cucgacaaaugguccugua

SEQ ID NO: 1548680 - RNA, 19 nt, Homo sapiens
  misc_RNA (1)...(19): siRNA sense strand
uggaacagcagcaguagca

SEQ ID NO: 1548681 - RNA, 19 nt, Homo sapiens
  misc_RNA (1)...(19): siRNA sense strand
uccagaucuucacauauga

SEQ ID NO: 1548682 - RNA, 19 nt, Homo sapiens
  misc_RNA (1)...(19): siRNA sense strand
ggaccuggagcagcacaug

SEQ ID NO: 1548683 - RNA, 19 nt, Homo sapiens
  misc_RNA (1)...(19): siRNA sense strand
gaacaaagcagcaccugaa

SEQ ID NO: 1548684 - RNA, 19 nt, Homo sapiens
  misc_RNA (1)...(19): siRNA sense strand
caacagaauuuaucaagca

SEQ ID NO: 1548685 - RNA, 19 nt, Homo sapiens
  misc_RNA (1)...(19): siRNA sense strand
ugaagaagcaacagaauuu

SEQ ID NO: 1548686 - RNA, 19 nt, Homo sapiens
  misc_RNA (1)...(19): siRNA sense strand
gaagaagcaacagaauuua

SEQ ID NO: 1548687 - RNA, 19 nt, Homo sapiens
  misc_RNA (1)...(19): siRNA sense strand
ugacgacucuuaugaagug

SEQ ID NO: 1548688 - RNA, 19 nt, Homo sapiens
  misc_RNA (1)...(19): siRNA sense strand
ggugguggcuuucuucuuc

SEQ ID NO: 1548689 - RNA, 19 nt, Homo sapiens
  misc_RNA (1)...(19): siRNA sense strand
gcucggacuugcaucuuaa

SEQ ID NO: 1548690 - RNA, 19 nt, Homo sapiens
  misc_RNA (1)...(19): siRNA sense strand
cuuaugaaguguuggauuu

SEQ ID NO: 1548691 - RNA, 19 nt, Homo sapiens
  misc_RNA (1)...(19): siRNA sense strand
aaagugaugacgacucuua

SEQ ID NO: 1548692 - RNA, 19 nt, Homo sapiens
  misc_RNA (1)...(19): siRNA sense strand
caaagcagcaccugaaauc

SEQ ID NO: 1548693 - RNA, 19 nt, Homo sapiens
  misc_RNA (1)...(19): siRNA sense strand
gaugacgacucuuaugaag

SEQ ID NO: 1548694 - RNA, 19 nt, Homo sapiens
  misc_RNA (1)...(19): siRNA sense strand
gaaacgagcgaacaaagca

SEQ ID NO: 1548695 - RNA, 19 nt, Homo sapiens
  misc_RNA (1)...(19): siRNA sense strand
cagaauuuaucaagcagaa

SEQ ID NO: 1548696 - RNA, 19 nt, Homo sapiens
  misc_RNA (1)...(19): siRNA sense strand
ggauuuaacugaguaugca

SEQ ID NO: 1548697 - RNA, 19 nt, Homo sapiens
  misc_RNA (1)...(19): siRNA sense strand
aaagacagauuaagaaacg

SEQ ID NO: 1548698 - RNA, 19 nt, Homo sapiens
  misc_RNA (1)...(19): siRNA sense strand
gaagcaacagaauuuauca

SEQ ID NO: 1548699 - RNA, 19 nt, Homo sapiens
  misc_RNA (1)...(19): siRNA sense strand
gugguggaaucgaguguuu

SEQ ID NO: 1548700 - RNA, 19 nt, Homo sapiens
  misc_RNA (1)...(19): siRNA sense strand
cucaguagcuacacagauu

SEQ ID NO: 1548701 - RNA, 19 nt, Homo sapiens
  misc_RNA (1)...(19): siRNA sense strand
ccaagacuaugaaagugau

SEQ ID NO: 1548702 - RNA, 19 nt, Homo sapiens
  misc_RNA (1)...(19): siRNA sense strand
gaauuuaucaagcagaaca

SEQ ID NO: 1548703 - RNA, 19 nt, Homo sapiens
  misc_RNA (1)...(19): siRNA sense strand
gcaccugaaaucaacaauu

SEQ ID NO: 1548704 - RNA, 19 nt, Homo sapiens
  misc_RNA (1)...(19): siRNA sense strand
ugaaagugaugacgacucu

SEQ ID NO: 1548705 - RNA, 19 nt, Homo sapiens
  misc_RNA (1)...(19): siRNA sense strand
cgacucuuaugaaguguug

SEQ ID NO: 1548706 - RNA, 19 nt, Homo sapiens
  misc_RNA (1)...(19): siRNA sense strand
ugcaguaggugguggcuuu

SEQ ID NO: 1548707 - RNA, 19 nt, Homo sapiens
  misc_RNA (1)...(19): siRNA sense strand
ucagauugcuagucauagu

SEQ ID NO: 1548708 - RNA, 19 nt, Homo sapiens
  misc_RNA (1)...(19): siRNA sense strand
gugaugacgacucuuauga

SEQ ID NO: 1548709 - RNA, 19 nt, Homo sapiens
  misc_RNA (1)...(19): siRNA sense strand
guggcuaugugcagauuga

SEQ ID NO: 1548710 - RNA, 19 nt, Homo sapiens
  misc_RNA (1)...(19): siRNA sense strand
uggcuggugugcaggauuu

SEQ ID NO: 1548711 - RNA, 19 nt, Homo sapiens
  misc_RNA (1)...(19): siRNA sense strand
caagcagaacauugugaua

SEQ ID NO: 1548712 - RNA, 19 nt, Homo sapiens
  misc_RNA (1)...(19): siRNA sense strand
uaagaaacgagcgaacaaa

SEQ ID NO: 1548713 - RNA, 19 nt, Homo sapiens
  misc_RNA (1)...(19): siRNA sense strand
gcagauugacuggaagaga

SEQ ID NO: 1548714 - RNA, 19 nt, Homo sapiens
  misc_RNA (1)...(19): siRNA sense strand
uaacugaguaugcaagaag

SEQ ID NO: 1548715 - RNA, 19 nt, Homo sapiens
  misc_RNA (1)...(19): siRNA sense strand
ggccacaguucgggaccua

SEQ ID NO: 1548716 - RNA, 19 nt, Homo sapiens
  misc_RNA (1)...(19): siRNA sense strand
gcagaacauugugauaucc

SEQ ID NO: 1548717 - RNA, 19 nt, Homo sapiens
  misc_RNA (1)...(19): siRNA sense strand
aagcagaacauugugauau

SEQ ID NO: 1548718 - RNA, 19 nt, Homo sapiens
  misc_RNA (1)...(19): siRNA sense strand
cuucagauugcuagucaua

SEQ ID NO: 1548719 - RNA, 19 nt, Homo sapiens
  misc_RNA (1)...(19): siRNA sense strand
aagcagcaccugaaaucaa

SEQ ID NO: 1548720 - RNA, 19 nt, Homo sapiens
  misc_RNA (1)...(19): siRNA sense strand
uuaagaaacgagcgaacaa

SEQ ID NO: 1548721 - RNA, 19 nt, Homo sapiens
  misc_RNA (1)...(19): siRNA sense strand
ugcucggacuugcaucuua

SEQ ID NO: 1548722 - RNA, 19 nt, Homo sapiens
  misc_RNA (1)...(19): siRNA sense strand
ugaugacgacucuuaugaa

SEQ ID NO: 1548723 - RNA, 19 nt, Homo sapiens
  misc_RNA (1)...(19): siRNA sense strand
agaagcaacagaauuuauc

SEQ ID NO: 1548724 - RNA, 19 nt, Homo sapiens
  misc_RNA (1)...(19): siRNA sense strand
guucgggaccuaugguaga

SEQ ID NO: 1548725 - RNA, 19 nt, Homo sapiens
  misc_RNA (1)...(19): siRNA sense strand
uugaagaagcaacagaauu

SEQ ID NO: 1548726 - RNA, 19 nt, Homo sapiens
  misc_RNA (1)...(19): siRNA sense strand
uguuggauuuaacugagua

SEQ ID NO: 1548727 - RNA, 19 nt, Homo sapiens
  misc_RNA (1)...(19): siRNA sense strand
ccacaguucgggaccuaug

SEQ ID NO: 1548728 - RNA, 19 nt, Homo sapiens
  misc_RNA (1)...(19): siRNA sense strand
agcagaacauugugauauc

SEQ ID NO: 1548729 - RNA, 19 nt, Homo sapiens
  misc_RNA (1)...(19): siRNA sense strand
guaggugguggcuuucuuc

SEQ ID NO: 1548730 - RNA, 19 nt, Homo sapiens
  misc_RNA (1)...(19): siRNA sense strand
gaaguguuggauuuaacug

SEQ ID NO: 1548731 - RNA, 19 nt, Homo sapiens
  misc_RNA (1)...(19): siRNA sense strand
uaauugaagaagcaacaga

SEQ ID NO: 1548732 - RNA, 19 nt, Homo sapiens
  misc_RNA (1)...(19): siRNA sense strand
acaaagcagcaccugaaau

SEQ ID NO: 1548733 - RNA, 19 nt, Homo sapiens
  misc_RNA (1)...(19): siRNA sense strand
uuaacugaguaugcaagaa

SEQ ID NO: 1548734 - RNA, 19 nt, Homo sapiens
  misc_RNA (1)...(19): siRNA sense strand
cccaagacuaugaaaguga

SEQ ID NO: 1548735 - RNA, 19 nt, Homo sapiens
  misc_RNA (1)...(19): siRNA sense strand
gcuuucuucuucuucagau

SEQ ID NO: 1548736 - RNA, 19 nt, Homo sapiens
  misc_RNA (1)...(19): siRNA sense strand
ggaaacagcacaucaagga

SEQ ID NO: 1548737 - RNA, 19 nt, Homo sapiens
  misc_RNA (1)...(19): siRNA sense strand
gguaugaccucaccaguuc

SEQ ID NO: 1548738 - RNA, 19 nt, Homo sapiens
  misc_RNA (1)...(19): siRNA sense strand
ggacaagaccaggagcuua

SEQ ID NO: 1548739 - RNA, 19 nt, Homo sapiens
  misc_RNA (1)...(19): siRNA sense strand
gaagccaucuggagcaaca

SEQ ID NO: 1548740 - RNA, 19 nt, Homo sapiens
  misc_RNA (1)...(19): siRNA sense strand
gacaagaccaggagcuuag

SEQ ID NO: 1548741 - RNA, 19 nt, Homo sapiens
  misc_RNA (1)...(19): siRNA sense strand
gggcagacuaccagcuuga

SEQ ID NO: 1548742 - RNA, 19 nt, Homo sapiens
  misc_RNA (1)...(19): siRNA sense strand
gaccaggagcuuagagaag

SEQ ID NO: 1548743 - RNA, 19 nt, Homo sapiens
  misc_RNA (1)...(19): siRNA sense strand
ccaggagcuuagagaagga

SEQ ID NO: 1548744 - RNA, 19 nt, Homo sapiens
  misc_RNA (1)...(19): siRNA sense strand
ccagcucucccuccauguu

SEQ ID NO: 1548745 - RNA, 19 nt, Homo sapiens
  misc_RNA (1)...(19): siRNA sense strand
ccugcuggaugccugguau

SEQ ID NO: 1548746 - RNA, 19 nt, Homo sapiens
  misc_RNA (1)...(19): siRNA sense strand
aacagcacaucaaggacaa

SEQ ID NO: 1548747 - RNA, 19 nt, Homo sapiens
  misc_RNA (1)...(19): siRNA sense strand
gaacaucucuguagcaauc

SEQ ID NO: 1548748 - RNA, 19 nt, Homo sapiens
  misc_RNA (1)...(19): siRNA sense strand
gaagaaacauucacagauc

SEQ ID NO: 1548749 - RNA, 19 nt, Homo sapiens
  misc_RNA (1)...(19): siRNA sense strand
gauaacaacuucuuagcaa

SEQ ID NO: 1548750 - RNA, 19 nt, Homo sapiens
  misc_RNA (1)...(19): siRNA sense strand
caacuuaccuccucauauc

SEQ ID NO: 1548751 - RNA, 19 nt, Homo sapiens
  misc_RNA (1)...(19): siRNA sense strand
gaauuugaccugauacuug

SEQ ID NO: 1548752 - RNA, 19 nt, Homo sapiens
  misc_RNA (1)...(19): siRNA sense strand
ugagaaagguucacuacga

SEQ ID NO: 1548753 - RNA, 19 nt, Homo sapiens
  misc_RNA (1)...(19): siRNA sense strand
gagaaagguucacuacgau

SEQ ID NO: 1548754 - RNA, 19 nt, Homo sapiens
  misc_RNA (1)...(19): siRNA sense strand
ccagaaggaggacuuauaa

SEQ ID NO: 1548755 - RNA, 19 nt, Homo sapiens
  misc_RNA (1)...(19): siRNA sense strand
uggagaauuugaccugaua

SEQ ID NO: 1548756 - RNA, 19 nt, Homo sapiens
  misc_RNA (1)...(19): siRNA sense strand
gcuaugaacgggauaacaa

SEQ ID NO: 1548757 - RNA, 19 nt, Homo sapiens
  misc_RNA (1)...(19): siRNA sense strand
ccaucguucuuuccacaua

SEQ ID NO: 1548758 - RNA, 19 nt, Homo sapiens
  misc_RNA (1)...(19): siRNA sense strand
uaacaacuucuuagcaaug

SEQ ID NO: 1548759 - RNA, 19 nt, Homo sapiens
  misc_RNA (1)...(19): siRNA sense strand
gaggagaccacggaauuug

SEQ ID NO: 1548760 - RNA, 19 nt, Homo sapiens
  misc_RNA (1)...(19): siRNA sense strand
gaaaccagaaggaggacuu

SEQ ID NO: 1548761 - RNA, 19 nt, Homo sapiens
  misc_RNA (1)...(19): siRNA sense strand
aaacguucaagccaacuua

SEQ ID NO: 1548762 - RNA, 19 nt, Homo sapiens
  misc_RNA (1)...(19): siRNA sense strand
ugaacgggauaacaacuuc

SEQ ID NO: 1548763 - RNA, 19 nt, Homo sapiens
  misc_RNA (1)...(19): siRNA sense strand
ggauaacaacuucuuagca

SEQ ID NO: 1548764 - RNA, 19 nt, Homo sapiens
  misc_RNA (1)...(19): siRNA sense strand
uaucacggaucgaaaagua

SEQ ID NO: 1548765 - RNA, 19 nt, Homo sapiens
  misc_RNA (1)...(19): siRNA sense strand
acuuggugcugauaucaua

SEQ ID NO: 1548766 - RNA, 19 nt, Homo sapiens
  misc_RNA (1)...(19): siRNA sense strand
uagaagaaacauucacaga

SEQ ID NO: 1548767 - RNA, 19 nt, Homo sapiens
  misc_RNA (1)...(19): siRNA sense strand
cuccucauauccaaacuaa

SEQ ID NO: 1548768 - RNA, 19 nt, Homo sapiens
  misc_RNA (1)...(19): siRNA sense strand
ggaauuuggguugcagaaa

SEQ ID NO: 1548769 - RNA, 19 nt, Homo sapiens
  misc_RNA (1)...(19): siRNA sense strand
agaagaaacauucacagau

SEQ ID NO: 1548770 - RNA, 19 nt, Homo sapiens
  misc_RNA (1)...(19): siRNA sense strand
cuaaaacuguuguuaagga

SEQ ID NO: 1548771 - RNA, 19 nt, Homo sapiens
  misc_RNA (1)...(19): siRNA sense strand
uggaacaucucuguagcaa

SEQ ID NO: 1548772 - RNA, 19 nt, Homo sapiens
  misc_RNA (1)...(19): siRNA sense strand
ccaacuuaccuccucauau

SEQ ID NO: 1548773 - RNA, 19 nt, Homo sapiens
  misc_RNA (1)...(19): siRNA sense strand
gaaacauucacagaucuuc

SEQ ID NO: 1548774 - RNA, 19 nt, Homo sapiens
  misc_RNA (1)...(19): siRNA sense strand
ccucauauccaaacuaaaa

SEQ ID NO: 1548775 - RNA, 19 nt, Homo sapiens
  misc_RNA (1)...(19): siRNA sense strand
uuacgaagcacagaagaga

SEQ ID NO: 1548776 - RNA, 19 nt, Homo sapiens
  misc_RNA (1)...(19): siRNA sense strand
aagaaacauucacagaucu

SEQ ID NO: 1548777 - RNA, 19 nt, Homo sapiens
  misc_RNA (1)...(19): siRNA sense strand
gcugggugcucaugugacu

SEQ ID NO: 1548778 - RNA, 19 nt, Homo sapiens
  misc_RNA (1)...(19): siRNA sense strand
ugaggagaccacggaauuu

SEQ ID NO: 1548779 - RNA, 19 nt, Homo sapiens
  misc_RNA (1)...(19): siRNA sense strand
gccaacuuaccuccucaua

SEQ ID NO: 1548780 - RNA, 19 nt, Homo sapiens
  misc_RNA (1)...(19): siRNA sense strand
aaaccagaaggaggacuua

SEQ ID NO: 1548781 - RNA, 19 nt, Homo sapiens
  misc_RNA (1)...(19): siRNA sense strand
acgaagcacagaagagaaa

SEQ ID NO: 1548782 - RNA, 19 nt, Homo sapiens
  misc_RNA (1)...(19): siRNA sense strand
ggaucgaaaaguagcauua

SEQ ID NO: 1548783 - RNA, 19 nt, Homo sapiens
  misc_RNA (1)...(19): siRNA sense strand
accagaaggaggacuuaua

SEQ ID NO: 1548784 - RNA, 19 nt, Homo sapiens
  misc_RNA (1)...(19): siRNA sense strand
gaaauuccacaagccucuu

SEQ ID NO: 1548785 - RNA, 19 nt, Homo sapiens
  misc_RNA (1)...(19): siRNA sense strand
ccacggaauuuggguugca

SEQ ID NO: 1548786 - RNA, 19 nt, Homo sapiens
  misc_RNA (1)...(19): siRNA sense strand
caaaccacacgauccagau

SEQ ID NO: 1548787 - RNA, 19 nt, Homo sapiens
  misc_RNA (1)...(19): siRNA sense strand
gagcugacuuggggacaaa

SEQ ID NO: 1548788 - RNA, 19 nt, Homo sapiens
  misc_RNA (1)...(19): siRNA sense strand
cacagaagagaaaccagaa

SEQ ID NO: 1548789 - RNA, 19 nt, Homo sapiens
  misc_RNA (1)...(19): siRNA sense strand
ugacuaucacggaucgaaa

SEQ ID NO: 1548790 - RNA, 19 nt, Homo sapiens
  misc_RNA (1)...(19): siRNA sense strand
ccugauacuuggugcugau

SEQ ID NO: 1548791 - RNA, 19 nt, Homo sapiens
  misc_RNA (1)...(19): siRNA sense strand
acacuggaacaucucugua

SEQ ID NO: 1548792 - RNA, 19 nt, Homo sapiens
  misc_RNA (1)...(19): siRNA sense strand
gcaaugcuggagaggcaau

SEQ ID NO: 1548793 - RNA, 19 nt, Homo sapiens
  misc_RNA (1)...(19): siRNA sense strand
augaggagaccacggaauu

SEQ ID NO: 1548794 - RNA, 19 nt, Homo sapiens
  misc_RNA (1)...(19): siRNA sense strand
ccacagcccuggaggagaa

SEQ ID NO: 1548795 - RNA, 19 nt, Homo sapiens
  misc_RNA (1)...(19): siRNA sense strand
caaaggcagucucagcauu

SEQ ID NO: 1548796 - RNA, 19 nt, Homo sapiens
  misc_RNA (1)...(19): siRNA sense strand
gagcagaucgugggcauuu

SEQ ID NO: 1548797 - RNA, 19 nt, Homo sapiens
  misc_RNA (1)...(19): siRNA sense strand
acagguaccuucagcagaa

SEQ ID NO: 1548798 - RNA, 19 nt, Homo sapiens
  misc_RNA (1)...(19): siRNA sense strand
gagagugccugccuggaau

SEQ ID NO: 1548799 - RNA, 19 nt, Homo sapiens
  misc_RNA (1)...(19): siRNA sense strand
gagaagagccugcgguuuu

SEQ ID NO: 1548800 - RNA, 19 nt, Homo sapiens
  misc_RNA (1)...(19): siRNA sense strand
ccaauuacgacuacaggua

SEQ ID NO: 1548801 - RNA, 19 nt, Homo sapiens
  misc_RNA (1)...(19): siRNA sense strand
gcauugaggacaccuuuga

SEQ ID NO: 1548802 - RNA, 19 nt, Homo sapiens
  misc_RNA (1)...(19): siRNA sense strand
caucugagcgucaucaaga

SEQ ID NO: 1548803 - RNA, 19 nt, Homo sapiens
  misc_RNA (1)...(19): siRNA sense strand
agaaaugccuacuccaucu

SEQ ID NO: 1548804 - RNA, 19 nt, Homo sapiens
  misc_RNA (1)...(19): siRNA sense strand
caacgugggccaugucauc

SEQ ID NO: 1548805 - RNA, 19 nt, Homo sapiens
  misc_RNA (1)...(19): siRNA sense strand
ggaggugggugucuaugcu

SEQ ID NO: 1548806 - RNA, 19 nt, Homo sapiens
  misc_RNA (1)...(19): siRNA sense strand
ucaccguggucgugguuaa

SEQ ID NO: 1548807 - RNA, 19 nt, Homo sapiens
  misc_RNA (1)...(19): siRNA sense strand
ggagaagagccugcgguuu

SEQ ID NO: 1548808 - RNA, 19 nt, Homo sapiens
  misc_RNA (1)...(19): siRNA sense strand
gcugggaggugggugucua

SEQ ID NO: 1548809 - RNA, 19 nt, Homo sapiens
  misc_RNA (1)...(19): siRNA sense strand
gcaugggaaccacacauug

SEQ ID NO: 1548810 - RNA, 19 nt, Homo sapiens
  misc_RNA (1)...(19): siRNA sense strand
ccuacuccaucuucuuuga

SEQ ID NO: 1548811 - RNA, 19 nt, Homo sapiens
  misc_RNA (1)...(19): siRNA sense strand
gaaaugccuacuccaucuu

SEQ ID NO: 1548812 - RNA, 19 nt, Homo sapiens
  misc_RNA (1)...(19): siRNA sense strand
cuguggauguggcagaaua

SEQ ID NO: 1548813 - RNA, 19 nt, Homo sapiens
  misc_RNA (1)...(19): siRNA sense strand
guggcuggcucuauuuaca

SEQ ID NO: 1548814 - RNA, 19 nt, Homo sapiens
  misc_RNA (1)...(19): siRNA sense strand
ccaacccgguguucaacga

SEQ ID NO: 1548815 - RNA, 19 nt, Homo sapiens
  misc_RNA (1)...(19): siRNA sense strand
cgugggccaugucaucauu

SEQ ID NO: 1548816 - RNA, 19 nt, Homo sapiens
  misc_RNA (1)...(19): siRNA sense strand
gcagaggccagggagaaga

SEQ ID NO: 1548817 - RNA, 19 nt, Homo sapiens
  misc_RNA (1)...(19): siRNA sense strand
caggaugggaggaagauga

SEQ ID NO: 1548818 - RNA, 19 nt, Homo sapiens
  misc_RNA (1)...(19): siRNA sense strand
gcaaaggcagucucagcau

SEQ ID NO: 1548819 - RNA, 19 nt, Homo sapiens
  misc_RNA (1)...(19): siRNA sense strand
aaaggcagucucagcauug

SEQ ID NO: 1548820 - RNA, 19 nt, Homo sapiens
  misc_RNA (1)...(19): siRNA sense strand
cagcauugaggacaccuuu

SEQ ID NO: 1548821 - RNA, 19 nt, Homo sapiens
  misc_RNA (1)...(19): siRNA sense strand
gagcauggaguacgacacu

SEQ ID NO: 1548822 - RNA, 19 nt, Homo sapiens
  misc_RNA (1)...(19): siRNA sense strand
uucaguggcuggcucuauu

SEQ ID NO: 1548823 - RNA, 19 nt, Homo sapiens
  misc_RNA (1)...(19): siRNA sense strand
ggauguggcagaauaccau

SEQ ID NO: 1548824 - RNA, 19 nt, Homo sapiens
  misc_RNA (1)...(19): siRNA sense strand
gcagaucgugggcauuucu

SEQ ID NO: 1548825 - RNA, 19 nt, Homo sapiens
  misc_RNA (1)...(19): siRNA sense strand
agagagugccugccuggaa

SEQ ID NO: 1548826 - RNA, 19 nt, Homo sapiens
  misc_RNA (1)...(19): siRNA sense strand
ggcaugggaaccacacauu

SEQ ID NO: 1548827 - RNA, 19 nt, Homo sapiens
  misc_RNA (1)...(19): siRNA sense strand
gggacaacgugggccaugu

SEQ ID NO: 1548828 - RNA, 19 nt, Homo sapiens
  misc_RNA (1)...(19): siRNA sense strand
ccucuccguuccccaauua

SEQ ID NO: 1548829 - RNA, 19 nt, Homo sapiens
  misc_RNA (1)...(19): siRNA sense strand
ucaacgaagccaugaucuu

SEQ ID NO: 1548830 - RNA, 19 nt, Homo sapiens
  misc_RNA (1)...(19): siRNA sense strand
ucaguggcuggcucuauuu

SEQ ID NO: 1548831 - RNA, 19 nt, Homo sapiens
  misc_RNA (1)...(19): siRNA sense strand
guucaacgaagccaugauc

SEQ ID NO: 1548832 - RNA, 19 nt, Homo sapiens
  misc_RNA (1)...(19): siRNA sense strand
aaagaagacagccgugaag

SEQ ID NO: 1548833 - RNA, 19 nt, Homo sapiens
  misc_RNA (1)...(19): siRNA sense strand
caguggcuggcucuauuua

SEQ ID NO: 1548834 - RNA, 19 nt, Homo sapiens
  misc_RNA (1)...(19): siRNA sense strand
gaaccacacauuggaacca

SEQ ID NO: 1548835 - RNA, 19 nt, Homo sapiens
  misc_RNA (1)...(19): siRNA sense strand
ccuuugagagcaucaguga

SEQ ID NO: 1548836 - RNA, 19 nt, Homo sapiens
  misc_RNA (1)...(19): siRNA sense strand
agagaaaugccuacuccau

SEQ ID NO: 1548837 - RNA, 19 nt, Homo sapiens
  misc_RNA (1)...(19): siRNA sense strand
gaaaggaggcaaggaugua

SEQ ID NO: 1548838 - RNA, 19 nt, Homo sapiens
  misc_RNA (1)...(19): siRNA sense strand
uaaauggaaucaagacugu

SEQ ID NO: 1548839 - RNA, 19 nt, Homo sapiens
  misc_RNA (1)...(19): siRNA sense strand
ugaccaaccugaagcagaa

SEQ ID NO: 1548840 - RNA, 19 nt, Homo sapiens
  misc_RNA (1)...(19): siRNA sense strand
cagagcaccugaucccuuu

SEQ ID NO: 1548841 - RNA, 19 nt, Homo sapiens
  misc_RNA (1)...(19): siRNA sense strand
gaugacuccugcucagauu

SEQ ID NO: 1548842 - RNA, 19 nt, Homo sapiens
  misc_RNA (1)...(19): siRNA sense strand
gcaaugccccgaagacuua

SEQ ID NO: 1548843 - RNA, 19 nt, Homo sapiens
  misc_RNA (1)...(19): siRNA sense strand
agaaguaccugacugugau

SEQ ID NO: 1548844 - RNA, 19 nt, Homo sapiens
  misc_RNA (1)...(19): siRNA sense strand
guaccugacugugauuuca

SEQ ID NO: 1548845 - RNA, 19 nt, Homo sapiens
  misc_RNA (1)...(19): siRNA sense strand
agacuuaacucccgaugag

SEQ ID NO: 1548846 - RNA, 19 nt, Homo sapiens
  misc_RNA (1)...(19): siRNA sense strand
gcccauaccuaggaaagga

SEQ ID NO: 1548847 - RNA, 19 nt, Homo sapiens
  misc_RNA (1)...(19): siRNA sense strand
ggaaaggaggcaaggaugu

SEQ ID NO: 1548848 - RNA, 19 nt, Homo sapiens
  misc_RNA (1)...(19): siRNA sense strand
ggcuuugucuuaaauggaa

SEQ ID NO: 1548849 - RNA, 19 nt, Homo sapiens
  misc_RNA (1)...(19): siRNA sense strand
cagaaguaccugacuguga

SEQ ID NO: 1548850 - RNA, 19 nt, Homo sapiens
  misc_RNA (1)...(19): siRNA sense strand
uaccaucgccguccacauu

SEQ ID NO: 1548851 - RNA, 19 nt, Homo sapiens
  misc_RNA (1)...(19): siRNA sense strand
ugucuuaaauggaaucaag

SEQ ID NO: 1548852 - RNA, 19 nt, Homo sapiens
  misc_RNA (1)...(19): siRNA sense strand
uaugcuggcuuugucuuaa

SEQ ID NO: 1548853 - RNA, 19 nt, Homo sapiens
  misc_RNA (1)...(19): siRNA sense strand
ccgaugagguuguggaacu

SEQ ID NO: 1548854 - RNA, 19 nt, Homo sapiens
  misc_RNA (1)...(19): siRNA sense strand
cgaugagguuguggaacua

SEQ ID NO: 1548855 - RNA, 19 nt, Homo sapiens
  misc_RNA (1)...(19): siRNA sense strand
gaaguaccugacugugauu

SEQ ID NO: 1548856 - RNA, 19 nt, Homo sapiens
  misc_RNA (1)...(19): siRNA sense strand
ggaugacuccugcucagau

SEQ ID NO: 1548857 - RNA, 19 nt, Homo sapiens
  misc_RNA (1)...(19): siRNA sense strand
guggagagacucgggauga

SEQ ID NO: 1548858 - RNA, 19 nt, Homo sapiens
  misc_RNA (1)...(19): siRNA sense strand
caaggauguauuccaggua

SEQ ID NO: 1548859 - RNA, 19 nt, Homo sapiens
  misc_RNA (1)...(19): siRNA sense strand
uagcgggacucguugacau

SEQ ID NO: 1548860 - RNA, 19 nt, Homo sapiens
  misc_RNA (1)...(19): siRNA sense strand
gcagccagcggaacuguac

SEQ ID NO: 1548861 - RNA, 19 nt, Homo sapiens
  misc_RNA (1)...(19): siRNA sense strand
gagguuguggaacuagaaa

SEQ ID NO: 1548862 - RNA, 19 nt, Homo sapiens
  misc_RNA (1)...(19): siRNA sense strand
agugauagcgggacucguu

SEQ ID NO: 1548863 - RNA, 19 nt, Homo sapiens
  misc_RNA (1)...(19): siRNA sense strand
caggaaaggggaaaaguuu

SEQ ID NO: 1548864 - RNA, 19 nt, Homo sapiens
  misc_RNA (1)...(19): siRNA sense strand
uuacuggagcccauaccua

SEQ ID NO: 1548865 - RNA, 19 nt, Homo sapiens
  misc_RNA (1)...(19): siRNA sense strand
ccaaccugaagcagaagua

SEQ ID NO: 1548866 - RNA, 19 nt, Homo sapiens
  misc_RNA (1)...(19): siRNA sense strand
uaggaaaggaggcaaggau

SEQ ID NO: 1548867 - RNA, 19 nt, Homo sapiens
  misc_RNA (1)...(19): siRNA sense strand
gagaagaacucuaugaucu

SEQ ID NO: 1548868 - RNA, 19 nt, Homo sapiens
  misc_RNA (1)...(19): siRNA sense strand
gaaauugaguguguagaaa

SEQ ID NO: 1548869 - RNA, 19 nt, Homo sapiens
  misc_RNA (1)...(19): siRNA sense strand
gaacuggacugcauuucug

SEQ ID NO: 1548870 - RNA, 19 nt, Homo sapiens
  misc_RNA (1)...(19): siRNA sense strand
ucacagacauguugaggaa

SEQ ID NO: 1548871 - RNA, 19 nt, Homo sapiens
  misc_RNA (1)...(19): siRNA sense strand
gggcaaggauuucacaaga

SEQ ID NO: 1548872 - RNA, 19 nt, Homo sapiens
  misc_RNA (1)...(19): siRNA sense strand
gcaaagaccgggugaaauc

SEQ ID NO: 1548873 - RNA, 19 nt, Homo sapiens
  misc_RNA (1)...(19): siRNA sense strand
ccaagaccauggaaacaaa

SEQ ID NO: 1548874 - RNA, 19 nt, Homo sapiens
  misc_RNA (1)...(19): siRNA sense strand
ggacugcauuucugugcua

SEQ ID NO: 1548875 - RNA, 19 nt, Homo sapiens
  misc_RNA (1)...(19): siRNA sense strand
gagaagaccaacauguuaa

SEQ ID NO: 1548876 - RNA, 19 nt, Homo sapiens
  misc_RNA (1)...(19): siRNA sense strand
gcgaggaagcgaacacuua

SEQ ID NO: 1548877 - RNA, 19 nt, Homo sapiens
  misc_RNA (1)...(19): siRNA sense strand
guaguggccuccagaaugu

SEQ ID NO: 1548878 - RNA, 19 nt, Homo sapiens
  misc_RNA (1)...(19): siRNA sense strand
acaccgaccugaucuuaaa

SEQ ID NO: 1548879 - RNA, 19 nt, Homo sapiens
  misc_RNA (1)...(19): siRNA sense strand
ggaaacaaacagagaagaa

SEQ ID NO: 1548880 - RNA, 19 nt, Homo sapiens
  misc_RNA (1)...(19): siRNA sense strand
ggaaauugaguguguagaa

SEQ ID NO: 1548881 - RNA, 19 nt, Homo sapiens
  misc_RNA (1)...(19): siRNA sense strand
gaaaugguagauaucgaua

SEQ ID NO: 1548882 - RNA, 19 nt, Homo sapiens
  misc_RNA (1)...(19): siRNA sense strand
guaguucucuuuuaccuua

SEQ ID NO: 1548883 - RNA, 19 nt, Homo sapiens
  misc_RNA (1)...(19): siRNA sense strand
gggaggaaauugagugugu

SEQ ID NO: 1548884 - RNA, 19 nt, Homo sapiens
  misc_RNA (1)...(19): siRNA sense strand
gguggcagauucacugauu

SEQ ID NO: 1548885 - RNA, 19 nt, Homo sapiens
  misc_RNA (1)...(19): siRNA sense strand
gaagaacucuaugaucucu

SEQ ID NO: 1548886 - RNA, 19 nt, Homo sapiens
  misc_RNA (1)...(19): siRNA sense strand
uaaauuaccuucggaaacu

SEQ ID NO: 1548887 - RNA, 19 nt, Homo sapiens
  misc_RNA (1)...(19): siRNA sense strand
ccaccaaucggaccaauuu

SEQ ID NO: 1548888 - RNA, 19 nt, Homo sapiens
  misc_RNA (1)...(19): siRNA sense strand
gaaaacaauuaccagcaua

SEQ ID NO: 1548889 - RNA, 19 nt, Homo sapiens
  misc_RNA (1)...(19): siRNA sense strand
gcaaggauuucacaagaac

SEQ ID NO: 1548890 - RNA, 19 nt, Homo sapiens
  misc_RNA (1)...(19): siRNA sense strand
gugcuaugcuuaauuuaug

SEQ ID NO: 1548891 - RNA, 19 nt, Homo sapiens
  misc_RNA (1)...(19): siRNA sense strand
gcacaacuccugcaucagu

SEQ ID NO: 1548892 - RNA, 19 nt, Homo sapiens
  misc_RNA (1)...(19): siRNA sense strand
ggacaucaucuucucuaaa

SEQ ID NO: 1548893 - RNA, 19 nt, Homo sapiens
  misc_RNA (1)...(19): siRNA sense strand
ggaggaaauugagugugua

SEQ ID NO: 1548894 - RNA, 19 nt, Homo sapiens
  misc_RNA (1)...(19): siRNA sense strand
ggagugauagguuucauga

SEQ ID NO: 1548895 - RNA, 19 nt, Homo sapiens
  misc_RNA (1)...(19): siRNA sense strand
gcuaggucauggauuauau

SEQ ID NO: 1548896 - RNA, 19 nt, Homo sapiens
  misc_RNA (1)...(19): siRNA sense strand
ccauccagcucaccuacua

SEQ ID NO: 1548897 - RNA, 19 nt, Homo sapiens
  misc_RNA (1)...(19): siRNA sense strand
acagacauguugaggaauu

SEQ ID NO: 1548898 - RNA, 19 nt, Homo sapiens
  misc_RNA (1)...(19): siRNA sense strand
agagaagaccaacauguua

SEQ ID NO: 1548899 - RNA, 19 nt, Homo sapiens
  misc_RNA (1)...(19): siRNA sense strand
ggagggcuguguacaaugg

SEQ ID NO: 1548900 - RNA, 19 nt, Homo sapiens
  misc_RNA (1)...(19): siRNA sense strand
guguagaaaugguagauau

SEQ ID NO: 1548901 - RNA, 19 nt, Homo sapiens
  misc_RNA (1)...(19): siRNA sense strand
aaucugaccuguacacugu

SEQ ID NO: 1548902 - RNA, 19 nt, Homo sapiens
  misc_RNA (1)...(19): siRNA sense strand
gacaucaucuucucuaaaa

SEQ ID NO: 1548903 - RNA, 19 nt, Homo sapiens
  misc_RNA (1)...(19): siRNA sense strand
uuacgagagucaccuauug

SEQ ID NO: 1548904 - RNA, 19 nt, Homo sapiens
  misc_RNA (1)...(19): siRNA sense strand
gagagucaccuauugguau

SEQ ID NO: 1548905 - RNA, 19 nt, Homo sapiens
  misc_RNA (1)...(19): siRNA sense strand
acaccuaugucaagccuuu

SEQ ID NO: 1548906 - RNA, 19 nt, Homo sapiens
  misc_RNA (1)...(19): siRNA sense strand
uggaagagcuaaagaaugc

SEQ ID NO: 1548907 - RNA, 19 nt, Homo sapiens
  misc_RNA (1)...(19): siRNA sense strand
ggcaaggauuucacaagaa

SEQ ID NO: 1548908 - RNA, 19 nt, Homo sapiens
  misc_RNA (1)...(19): siRNA sense strand
gccgggaucaucaaucuua

SEQ ID NO: 1548909 - RNA, 19 nt, Homo sapiens
  misc_RNA (1)...(19): siRNA sense strand
ccauauauguauccugaau

SEQ ID NO: 1548910 - RNA, 19 nt, Homo sapiens
  misc_RNA (1)...(19): siRNA sense strand
ucugugcuaugcuuaauuu

SEQ ID NO: 1548911 - RNA, 19 nt, Homo sapiens
  misc_RNA (1)...(19): siRNA sense strand
ccacuggcuugccuaagaa

SEQ ID NO: 1548912 - RNA, 19 nt, Homo sapiens
  misc_RNA (1)...(19): siRNA sense strand
gcuaucacauacccaauca

SEQ ID NO: 1548913 - RNA, 19 nt, Homo sapiens
  misc_RNA (1)...(19): siRNA sense strand
gaagaccagccgcguauca

SEQ ID NO: 1548914 - RNA, 19 nt, Homo sapiens
  misc_RNA (1)...(19): siRNA sense strand
cuucaaaucugaccuguac

SEQ ID NO: 1548915 - RNA, 19 nt, Homo sapiens
  misc_RNA (1)...(19): siRNA sense strand
uuacacguuugcccauaua

SEQ ID NO: 1548916 - RNA, 19 nt, Homo sapiens
  misc_RNA (1)...(19): siRNA sense strand
ccauguaccuggucaccuu

SEQ ID NO: 1548917 - RNA, 19 nt, Homo sapiens
  misc_RNA (1)...(19): siRNA sense strand
ucagaaauccaacagcaaa

SEQ ID NO: 1548918 - RNA, 19 nt, Homo sapiens
  misc_RNA (1)...(19): siRNA sense strand
guacacuacugcccagcaa

SEQ ID NO: 1548919 - RNA, 19 nt, Homo sapiens
  misc_RNA (1)...(19): siRNA sense strand
acaauuaccagcauaguau

SEQ ID NO: 1548920 - RNA, 19 nt, Homo sapiens
  misc_RNA (1)...(19): siRNA sense strand
ucacaccgaccugaucuua

SEQ ID NO: 1548921 - RNA, 19 nt, Homo sapiens
  misc_RNA (1)...(19): siRNA sense strand
cagcauaguaucuucugua

SEQ ID NO: 1548922 - RNA, 19 nt, Homo sapiens
  misc_RNA (1)...(19): siRNA sense strand
cagauucacugauuaacgu

SEQ ID NO: 1548923 - RNA, 19 nt, Homo sapiens
  misc_RNA (1)...(19): siRNA sense strand
agaacucuaugaucucuug

SEQ ID NO: 1548924 - RNA, 19 nt, Homo sapiens
  misc_RNA (1)...(19): siRNA sense strand
gugcggauaucccgguuug

SEQ ID NO: 1548925 - RNA, 19 nt, Homo sapiens
  misc_RNA (1)...(19): siRNA sense strand
ccuacuaccugcagucaau

SEQ ID NO: 1548926 - RNA, 19 nt, Homo sapiens
  misc_RNA (1)...(19): siRNA sense strand
ugauagguuucaugacauu

SEQ ID NO: 1548927 - RNA, 19 nt, Homo sapiens
  misc_RNA (1)...(19): siRNA sense strand
cagcaaagaccgggugaaa

SEQ ID NO: 1548928 - RNA, 19 nt, Homo sapiens
  misc_RNA (1)...(19): siRNA sense strand
gcugugccuucaaaucuga

SEQ ID NO: 1548929 - RNA, 19 nt, Homo sapiens
  misc_RNA (1)...(19): siRNA sense strand
ggaucacucucacaguugu

SEQ ID NO: 1548930 - RNA, 19 nt, Homo sapiens
  misc_RNA (1)...(19): siRNA sense strand
gaaacccugaggagacuuu

SEQ ID NO: 1548931 - RNA, 19 nt, Homo sapiens
  misc_RNA (1)...(19): siRNA sense strand
gaggacaucaucuucucua

SEQ ID NO: 1548932 - RNA, 19 nt, Homo sapiens
  misc_RNA (1)...(19): siRNA sense strand
auagaauacuggaacacua

SEQ ID NO: 1548933 - RNA, 19 nt, Homo sapiens
  misc_RNA (1)...(19): siRNA sense strand
cuauuacugugacuggaua

SEQ ID NO: 1548934 - RNA, 19 nt, Homo sapiens
  misc_RNA (1)...(19): siRNA sense strand
guauugcaaucuucuucaa

SEQ ID NO: 1548935 - RNA, 19 nt, Homo sapiens
  misc_RNA (1)...(19): siRNA sense strand
uagagaagaccaacauguu

SEQ ID NO: 1548936 - RNA, 19 nt, Homo sapiens
  misc_RNA (1)...(19): siRNA sense strand
gguuugagagcuauuuaaa

SEQ ID NO: 1548937 - RNA, 19 nt, Homo sapiens
  misc_RNA (1)...(19): siRNA sense strand
agugauagguuucaugaca

SEQ ID NO: 1548938 - RNA, 19 nt, Homo sapiens
  misc_RNA (1)...(19): siRNA sense strand
guggcagauucacugauua

SEQ ID NO: 1548939 - RNA, 19 nt, Homo sapiens
  misc_RNA (1)...(19): siRNA sense strand
aggagaagccggcauggua

SEQ ID NO: 1548940 - RNA, 19 nt, Homo sapiens
  misc_RNA (1)...(19): siRNA sense strand
ucuaugaucucuuggaaac

SEQ ID NO: 1548941 - RNA, 19 nt, Homo sapiens
  misc_RNA (1)...(19): siRNA sense strand
uuacuggugggaaauauaa

SEQ ID NO: 1548942 - RNA, 19 nt, Homo sapiens
  misc_RNA (1)...(19): siRNA sense strand
uaauagcauuugucaccuu

SEQ ID NO: 1548943 - RNA, 19 nt, Homo sapiens
  misc_RNA (1)...(19): siRNA sense strand
gacauuauggaaaguagaa

SEQ ID NO: 1548944 - RNA, 19 nt, Homo sapiens
  misc_RNA (1)...(19): siRNA sense strand
uuguauacauggaucgaua

SEQ ID NO: 1548945 - RNA, 19 nt, Homo sapiens
  misc_RNA (1)...(19): siRNA sense strand
guagcaaccgcgacacaaa

SEQ ID NO: 1548946 - RNA, 19 nt, Homo sapiens
  misc_RNA (1)...(19): siRNA sense strand
ucaacuaccucuauguacu

SEQ ID NO: 1548947 - RNA, 19 nt, Homo sapiens
  misc_RNA (1)...(19): siRNA sense strand
caaucaacagucucaauga

SEQ ID NO: 1548948 - RNA, 19 nt, Homo sapiens
  misc_RNA (1)...(19): siRNA sense strand
ccaaauuacaacaguguga

SEQ ID NO: 1548949 - RNA, 19 nt, Homo sapiens
  misc_RNA (1)...(19): siRNA sense strand
ucacugcuuugccauuuua

SEQ ID NO: 1548950 - RNA, 19 nt, Homo sapiens
  misc_RNA (1)...(19): siRNA sense strand
guagaacuggacugcauuu

SEQ ID NO: 1548951 - RNA, 19 nt, Homo sapiens
  misc_RNA (1)...(19): siRNA sense strand
ggauaaccaacaccuaugu

SEQ ID NO: 1548952 - RNA, 19 nt, Homo sapiens
  misc_RNA (1)...(19): siRNA sense strand
agaccaacauguuaaagag

SEQ ID NO: 1548953 - RNA, 19 nt, Homo sapiens
  misc_RNA (1)...(19): siRNA sense strand
caaucuuacuggugggaaa

SEQ ID NO: 1548954 - RNA, 19 nt, Homo sapiens
  misc_RNA (1)...(19): siRNA sense strand
ccauaagccuggccacucu

SEQ ID NO: 1548955 - RNA, 19 nt, Homo sapiens
  misc_RNA (1)...(19): siRNA sense strand
ucaacagucucaaugacau

SEQ ID NO: 1548956 - RNA, 19 nt, Homo sapiens
  misc_RNA (1)...(19): siRNA sense strand
ucaaucaacagucucaaug

SEQ ID NO: 1548957 - RNA, 19 nt, Homo sapiens
  misc_RNA (1)...(19): siRNA sense strand
cuauauuguuggucugauu

SEQ ID NO: 1548958 - RNA, 19 nt, Homo sapiens
  misc_RNA (1)...(19): siRNA sense strand
cguggaguuuggagugaua

SEQ ID NO: 1548959 - RNA, 19 nt, Homo sapiens
  misc_RNA (1)...(19): siRNA sense strand
cuggaucacucucacaguu

SEQ ID NO: 1548960 - RNA, 19 nt, Homo sapiens
  misc_RNA (1)...(19): siRNA sense strand
cagaagaccagccgcguau

SEQ ID NO: 1548961 - RNA, 19 nt, Homo sapiens
  misc_RNA (1)...(19): siRNA sense strand
ccucaaacgcuauuacugu

SEQ ID NO: 1548962 - RNA, 19 nt, Homo sapiens
  misc_RNA (1)...(19): siRNA sense strand
caccuucuuucacugcuuu

SEQ ID NO: 1548963 - RNA, 19 nt, Homo sapiens
  misc_RNA (1)...(19): siRNA sense strand
gaaacaaacagagaagaac

SEQ ID NO: 1548964 - RNA, 19 nt, Homo sapiens
  misc_RNA (1)...(19): siRNA sense strand
gaagauguucuagaauaca

SEQ ID NO: 1548965 - RNA, 19 nt, Homo sapiens
  misc_RNA (1)...(19): siRNA sense strand
cgagagucaccuauuggua

SEQ ID NO: 1548966 - RNA, 19 nt, Homo sapiens
  misc_RNA (1)...(19): siRNA sense strand
ucaauccguccuuuguaua

SEQ ID NO: 1548967 - RNA, 19 nt, Homo sapiens
  misc_RNA (1)...(19): siRNA sense strand
ggucagagcuccaucauuu

SEQ ID NO: 1548968 - RNA, 19 nt, Homo sapiens
  misc_RNA (1)...(19): siRNA sense strand
ggagcuaucucgaagguua

SEQ ID NO: 1548969 - RNA, 19 nt, Homo sapiens
  misc_RNA (1)...(19): siRNA sense strand
ugacucagcuucaugguuu

SEQ ID NO: 1548970 - RNA, 19 nt, Homo sapiens
  misc_RNA (1)...(19): siRNA sense strand
gaacugcguacacaacuua

SEQ ID NO: 1548971 - RNA, 19 nt, Homo sapiens
  misc_RNA (1)...(19): siRNA sense strand
gaacaggaauuggagcuau

SEQ ID NO: 1548972 - RNA, 19 nt, Homo sapiens
  misc_RNA (1)...(19): siRNA sense strand
aaagaaagcuuggaacaau

SEQ ID NO: 1548973 - RNA, 19 nt, Homo sapiens
  misc_RNA (1)...(19): siRNA sense strand
cgaaugagaucaagaacug

SEQ ID NO: 1548974 - RNA, 19 nt, Homo sapiens
  misc_RNA (1)...(19): siRNA sense strand
ucaagagacugaugauaug

SEQ ID NO: 1548975 - RNA, 19 nt, Homo sapiens
  misc_RNA (1)...(19): siRNA sense strand
guacacaacuuacgaaagc

SEQ ID NO: 1548976 - RNA, 19 nt, Homo sapiens
  misc_RNA (1)...(19): siRNA sense strand
acaaagcccucuacauguu

SEQ ID NO: 1548977 - RNA, 19 nt, Homo sapiens
  misc_RNA (1)...(19): siRNA sense strand
gaaaggguuuacagcauca

SEQ ID NO: 1548978 - RNA, 19 nt, Homo sapiens
  misc_RNA (1)...(19): siRNA sense strand
ccucagcagugaacaaauu

SEQ ID NO: 1548979 - RNA, 19 nt, Homo sapiens
  misc_RNA (1)...(19): siRNA sense strand
ccaccuaccucaccucuca

SEQ ID NO: 1548980 - RNA, 19 nt, Homo sapiens
  misc_RNA (1)...(19): siRNA sense strand
uuacaaagcccucuacaug

SEQ ID NO: 1548981 - RNA, 19 nt, Homo sapiens
  misc_RNA (1)...(19): siRNA sense strand
aaagggagcugguggaaag

SEQ ID NO: 1548982 - RNA, 19 nt, Homo sapiens
  misc_RNA (1)...(19): siRNA sense strand
ggucagaugccgaaacaaa

SEQ ID NO: 1548983 - RNA, 19 nt, Homo sapiens
  misc_RNA (1)...(19): siRNA sense strand
acaagaagcuaaagcagau

SEQ ID NO: 1548984 - RNA, 19 nt, Homo sapiens
  misc_RNA (1)...(19): siRNA sense strand
gaacugguguccgguuugu

SEQ ID NO: 1548985 - RNA, 19 nt, Homo sapiens
  misc_RNA (1)...(19): siRNA sense strand
aaacugaaacugagaagaa

SEQ ID NO: 1548986 - RNA, 19 nt, Homo sapiens
  misc_RNA (1)...(19): siRNA sense strand
gaaacaagaagcuaaagca

SEQ ID NO: 1548987 - RNA, 19 nt, Homo sapiens
  misc_RNA (1)...(19): siRNA sense strand
guagagcacaucaauagaa

SEQ ID NO: 1548988 - RNA, 19 nt, Homo sapiens
  misc_RNA (1)...(19): siRNA sense strand
uaagacaaacugaaacuga

SEQ ID NO: 1548989 - RNA, 19 nt, Homo sapiens
  misc_RNA (1)...(19): siRNA sense strand
uagagcacaucaauagaaa

SEQ ID NO: 1548990 - RNA, 19 nt, Homo sapiens
  misc_RNA (1)...(19): siRNA sense strand
gagaaacacuuuugcauca

SEQ ID NO: 1548991 - RNA, 19 nt, Homo sapiens
  misc_RNA (1)...(19): siRNA sense strand
ggggaggacuggagauuua

SEQ ID NO: 1548992 - RNA, 19 nt, Homo sapiens
  misc_RNA (1)...(19): siRNA sense strand
gagaagcaaaugucagauu

SEQ ID NO: 1548993 - RNA, 19 nt, Homo sapiens
  misc_RNA (1)...(19): siRNA sense strand
acagggagcuuuccagaag

SEQ ID NO: 1548994 - RNA, 19 nt, Homo sapiens
  misc_RNA (1)...(19): siRNA sense strand
gagcacauuuggcaucaca

SEQ ID NO: 1548995 - RNA, 19 nt, Homo sapiens
  misc_RNA (1)...(19): siRNA sense strand
cgcaauggcaucugaguua

SEQ ID NO: 1548996 - RNA, 19 nt, Homo sapiens
  misc_RNA (1)...(19): siRNA sense strand
ccaagcaacagucaaacua

SEQ ID NO: 1548997 - RNA, 19 nt, Homo sapiens
  misc_RNA (1)...(19): siRNA sense strand
caaauucgccuuggagaug

SEQ ID NO: 1548998 - RNA, 19 nt, Homo sapiens
  misc_RNA (1)...(19): siRNA sense strand
caaguagagcacaucaaua

SEQ ID NO: 1548999 - RNA, 19 nt, Homo sapiens
  misc_RNA (1)...(19): siRNA sense strand
aaacgaaugagaucaagaa

SEQ ID NO: 1549000 - RNA, 19 nt, Homo sapiens
  misc_RNA (1)...(19): siRNA sense strand
uagaagaacugcguacaca

SEQ ID NO: 1549001 - RNA, 19 nt, Homo sapiens
  misc_RNA (1)...(19): siRNA sense strand
ucucgaagguuauugaauc

SEQ ID NO: 1549002 - RNA, 19 nt, Homo sapiens
  misc_RNA (1)...(19): siRNA sense strand
ccucaccucucaaggacua

SEQ ID NO: 1549003 - RNA, 19 nt, Homo sapiens
  misc_RNA (1)...(19): siRNA sense strand
aacaagaagugguuucaga

SEQ ID NO: 1549004 - RNA, 19 nt, Homo sapiens
  misc_RNA (1)...(19): siRNA sense strand
agaaggagccggucagaug

SEQ ID NO: 1549005 - RNA, 19 nt, Homo sapiens
  misc_RNA (1)...(19): siRNA sense strand
gaaagcagaaggugaucga

SEQ ID NO: 1549006 - RNA, 19 nt, Homo sapiens
  misc_RNA (1)...(19): siRNA sense strand
aaagcccucuacauguuua

SEQ ID NO: 1549007 - RNA, 19 nt, Homo sapiens
  misc_RNA (1)...(19): siRNA sense strand
gcaauggcaucugaguuag

SEQ ID NO: 1549008 - RNA, 19 nt, Homo sapiens
  misc_RNA (1)...(19): siRNA sense strand
agagagagaugcgcacaga

SEQ ID NO: 1549009 - RNA, 19 nt, Homo sapiens
  misc_RNA (1)...(19): siRNA sense strand
guucaagauuuggauugua

SEQ ID NO: 1549010 - RNA, 19 nt, Homo sapiens
  misc_RNA (1)...(19): siRNA sense strand
gagagcacauuuggcauca

SEQ ID NO: 1549011 - RNA, 19 nt, Homo sapiens
  misc_RNA (1)...(19): siRNA sense strand
ugaguuagaggaagugaaa

SEQ ID NO: 1549012 - RNA, 19 nt, Homo sapiens
  misc_RNA (1)...(19): siRNA sense strand
gaauuggagcuaucucgaa

SEQ ID NO: 1549013 - RNA, 19 nt, Homo sapiens
  misc_RNA (1)...(19): siRNA sense strand
ggaaagacgccaggaucaa

SEQ ID NO: 1549014 - RNA, 19 nt, Homo sapiens
  misc_RNA (1)...(19): siRNA sense strand
ucagaaggcagccgagaaa

SEQ ID NO: 1549015 - RNA, 19 nt, Homo sapiens
  misc_RNA (1)...(19): siRNA sense strand
caaacuaucaggaugaaca

SEQ ID NO: 1549016 - RNA, 19 nt, Homo sapiens
  misc_RNA (1)...(19): siRNA sense strand
gaaagggagcugguggaaa

SEQ ID NO: 1549017 - RNA, 19 nt, Homo sapiens
  misc_RNA (1)...(19): siRNA sense strand
ucaggagggagaaguauuu

SEQ ID NO: 1549018 - RNA, 19 nt, Homo sapiens
  misc_RNA (1)...(19): siRNA sense strand
gguauuaaacgaaugagau

SEQ ID NO: 1549019 - RNA, 19 nt, Homo sapiens
  misc_RNA (1)...(19): siRNA sense strand
gaagaacugcguacacaac

SEQ ID NO: 1549020 - RNA, 19 nt, Homo sapiens
  misc_RNA (1)...(19): siRNA sense strand
guuacaaguuugagugcaa

SEQ ID NO: 1549021 - RNA, 19 nt, Homo sapiens
  misc_RNA (1)...(19): siRNA sense strand
caaagcccucuacauguuu

SEQ ID NO: 1549022 - RNA, 19 nt, Homo sapiens
  misc_RNA (1)...(19): siRNA sense strand
cgggugcgauagaacauuu

SEQ ID NO: 1549023 - RNA, 19 nt, Homo sapiens
  misc_RNA (1)...(19): siRNA sense strand
uaaugaagcccagaaacaa

SEQ ID NO: 1549024 - RNA, 19 nt, Homo sapiens
  misc_RNA (1)...(19): siRNA sense strand
ccagaaacaagaagugguu

SEQ ID NO: 1549025 - RNA, 19 nt, Homo sapiens
  misc_RNA (1)...(19): siRNA sense strand
acaaggagagagcacauuu

SEQ ID NO: 1549026 - RNA, 19 nt, Homo sapiens
  misc_RNA (1)...(19): siRNA sense strand
agagagaugcgcacagaaa

SEQ ID NO: 1549027 - RNA, 19 nt, Homo sapiens
  misc_RNA (1)...(19): siRNA sense strand
ggaacaaucaaucgaccaa

SEQ ID NO: 1549028 - RNA, 19 nt, Homo sapiens
  misc_RNA (1)...(19): siRNA sense strand
ccacaggguauuaaacgaa

SEQ ID NO: 1549029 - RNA, 19 nt, Homo sapiens
  misc_RNA (1)...(19): siRNA sense strand
acauuuggcaucacaagua

SEQ ID NO: 1549030 - RNA, 19 nt, Homo sapiens
  misc_RNA (1)...(19): siRNA sense strand
gaucaacugggacucaugu

SEQ ID NO: 1549031 - RNA, 19 nt, Homo sapiens
  misc_RNA (1)...(19): siRNA sense strand
caucugaguuagaggaagu

SEQ ID NO: 1549032 - RNA, 19 nt, Homo sapiens
  misc_RNA (1)...(19): siRNA sense strand
aagcuaagacaaacugaaa

SEQ ID NO: 1549033 - RNA, 19 nt, Homo sapiens
  misc_RNA (1)...(19): siRNA sense strand
gcacuaaagaaacaagaag

SEQ ID NO: 1549034 - RNA, 19 nt, Homo sapiens
  misc_RNA (1)...(19): siRNA sense strand
uaaagcagaugagcaugag

SEQ ID NO: 1549035 - RNA, 19 nt, Homo sapiens
  misc_RNA (1)...(19): siRNA sense strand
caagcaacagucaaacuau

SEQ ID NO: 1549036 - RNA, 19 nt, Homo sapiens
  misc_RNA (1)...(19): siRNA sense strand
ggguuuacagcaucaagua

SEQ ID NO: 1549037 - RNA, 19 nt, Homo sapiens
  misc_RNA (1)...(19): siRNA sense strand
ugaacaaauucgccuugga

SEQ ID NO: 1549038 - RNA, 19 nt, Homo sapiens
  misc_RNA (1)...(19): siRNA sense strand
acaaguagagcacaucaau

SEQ ID NO: 1549039 - RNA, 19 nt, Homo sapiens
  misc_RNA (1)...(19): siRNA sense strand
acaggaggcacuaaagaaa

SEQ ID NO: 1549040 - RNA, 19 nt, Homo sapiens
  misc_RNA (1)...(19): siRNA sense strand
caaguuugagugcaaguga

SEQ ID NO: 1549041 - RNA, 19 nt, Homo sapiens
  misc_RNA (1)...(19): siRNA sense strand
gaccucagcagugaacaaa

SEQ ID NO: 1549042 - RNA, 19 nt, Homo sapiens
  misc_RNA (1)...(19): siRNA sense strand
cuaaagcagaugagcauga

SEQ ID NO: 1549043 - RNA, 19 nt, Homo sapiens
  misc_RNA (1)...(19): siRNA sense strand
gaaagacgccaggaucaac

SEQ ID NO: 1549044 - RNA, 19 nt, Homo sapiens
  misc_RNA (1)...(19): siRNA sense strand
uuggaagaauugacugaaa

SEQ ID NO: 1549045 - RNA, 19 nt, Homo sapiens
  misc_RNA (1)...(19): siRNA sense strand
aagaacugguguccgguuu

SEQ ID NO: 1549046 - RNA, 19 nt, Homo sapiens
  misc_RNA (1)...(19): siRNA sense strand
caagagacugaugauauga

SEQ ID NO: 1549047 - RNA, 19 nt, Homo sapiens
  misc_RNA (1)...(19): siRNA sense strand
aaguagagcacaucaauag

SEQ ID NO: 1549048 - RNA, 19 nt, Homo sapiens
  misc_RNA (1)...(19): siRNA sense strand
caaggagagagcacauuug

SEQ ID NO: 1549049 - RNA, 19 nt, Homo sapiens
  misc_RNA (1)...(19): siRNA sense strand
ucgaaaggguuuacagcau

SEQ ID NO: 1549050 - RNA, 19 nt, Homo sapiens
  misc_RNA (1)...(19): siRNA sense strand
uuaaugaagcccagaaaca

SEQ ID NO: 1549051 - RNA, 19 nt, Homo sapiens
  misc_RNA (1)...(19): siRNA sense strand
aagcaacagucaaacuauc

SEQ ID NO: 1549052 - RNA, 19 nt, Homo sapiens
  misc_RNA (1)...(19): siRNA sense strand
cuaaagaaacaagaagcua

SEQ ID NO: 1549053 - RNA, 19 nt, Homo sapiens
  misc_RNA (1)...(19): siRNA sense strand
cuacaggaggcacuaaaga

SEQ ID NO: 1549054 - RNA, 19 nt, Homo sapiens
  misc_RNA (1)...(19): siRNA sense strand
caagaagugguuucagauc

SEQ ID NO: 1549055 - RNA, 19 nt, Homo sapiens
  misc_RNA (1)...(19): siRNA sense strand
cacaggguauuaaacgaau

SEQ ID NO: 1549056 - RNA, 19 nt, Homo sapiens
  misc_RNA (1)...(19): siRNA sense strand
gguucaagauuuggauugu

SEQ ID NO: 1549057 - RNA, 19 nt, Homo sapiens
  misc_RNA (1)...(19): siRNA sense strand
gucaaacuaucaggaugaa

SEQ ID NO: 1549058 - RNA, 19 nt, Homo sapiens
  misc_RNA (1)...(19): siRNA sense strand
aaacugagaagaaucaacu

SEQ ID NO: 1549059 - RNA, 19 nt, Homo sapiens
  misc_RNA (1)...(19): siRNA sense strand
uucaggaacuggagagaga

SEQ ID NO: 1549060 - RNA, 19 nt, Homo sapiens
  misc_RNA (1)...(19): siRNA sense strand
guucaagagacugaugaua

SEQ ID NO: 1549061 - RNA, 19 nt, Homo sapiens
  misc_RNA (1)...(19): siRNA sense strand
aagaaagcuuggaacaauc

SEQ ID NO: 1549062 - RNA, 19 nt, Homo sapiens
  misc_RNA (1)...(19): siRNA sense strand
cagcaucaaguaucucaga

SEQ ID NO: 1549063 - RNA, 19 nt, Homo sapiens
  misc_RNA (1)...(19): siRNA sense strand
uaccgagaauacaguaaug

SEQ ID NO: 1549064 - RNA, 19 nt, Homo sapiens
  misc_RNA (1)...(19): siRNA sense strand
ccggucagaugccgaaaca

SEQ ID NO: 1549065 - RNA, 19 nt, Homo sapiens
  misc_RNA (1)...(19): siRNA sense strand
aaauucgccuuggagauga

SEQ ID NO: 1549066 - RNA, 19 nt, Homo sapiens
  misc_RNA (1)...(19): siRNA sense strand
caucacaaguagagcacau

SEQ ID NO: 1549067 - RNA, 19 nt, Homo sapiens
  misc_RNA (1)...(19): siRNA sense strand
ggagaaugcccuggucuuu

SEQ ID NO: 1549068 - RNA, 19 nt, Homo sapiens
  misc_RNA (1)...(19): siRNA sense strand
agaagcagcuaccguacaa

SEQ ID NO: 1549069 - RNA, 19 nt, Homo sapiens
  misc_RNA (1)...(19): siRNA sense strand
gaacgugucaggcuucaag

SEQ ID NO: 1549070 - RNA, 19 nt, Homo sapiens
  misc_RNA (1)...(19): siRNA sense strand
ugauuucucugggccuuua

SEQ ID NO: 1549071 - RNA, 19 nt, Homo sapiens
  misc_RNA (1)...(19): siRNA sense strand
gagaaugcccuggucuuug

SEQ ID NO: 1549072 - RNA, 19 nt, Homo sapiens
  misc_RNA (1)...(19): siRNA sense strand
gcauguuccucaccagauc

SEQ ID NO: 1549073 - RNA, 19 nt, Homo sapiens
  misc_RNA (1)...(19): siRNA sense strand
gaucaucagcugccaugug

SEQ ID NO: 1549074 - RNA, 19 nt, Homo sapiens
  misc_RNA (1)...(19): siRNA sense strand
guacaacgaggacucauac

SEQ ID NO: 1549075 - RNA, 19 nt, Homo sapiens
  misc_RNA (1)...(19): siRNA sense strand
caggcucucugauaacaug

SEQ ID NO: 1549076 - RNA, 19 nt, Homo sapiens
  misc_RNA (1)...(19): siRNA sense strand
agaaugcccuggucuuugc

SEQ ID NO: 1549077 - RNA, 19 nt, Homo sapiens
  misc_RNA (1)...(19): siRNA sense strand
acauguuccuugcuccuuu

SEQ ID NO: 1549078 - RNA, 19 nt, Homo sapiens
  misc_RNA (1)...(19): siRNA sense strand
caucagcugccauguggaa

SEQ ID NO: 1549079 - RNA, 19 nt, Homo sapiens
  misc_RNA (1)...(19): siRNA sense strand
gagaagcagcuaccguaca

SEQ ID NO: 1549080 - RNA, 19 nt, Homo sapiens
  misc_RNA (1)...(19): siRNA sense strand
ggacgcuggcccugauuuc

SEQ ID NO: 1549081 - RNA, 19 nt, Homo sapiens
  misc_RNA (1)...(19): siRNA sense strand
gcaugggcacgucaagaug

SEQ ID NO: 1549082 - RNA, 19 nt, Homo sapiens
  misc_RNA (1)...(19): siRNA sense strand
caacaagccccgucggauu

SEQ ID NO: 1549083 - RNA, 19 nt, Homo sapiens
  misc_RNA (1)...(19): siRNA sense strand
cguacaacgaggacucaua

SEQ ID NO: 1549084 - RNA, 19 nt, Homo sapiens
  misc_RNA (1)...(19): siRNA sense strand
acuacuggcugcuccugaa

SEQ ID NO: 1549085 - RNA, 19 nt, Homo sapiens
  misc_RNA (1)...(19): siRNA sense strand
cauccggcaucaccaucuu

SEQ ID NO: 1549086 - RNA, 19 nt, Homo sapiens
  misc_RNA (1)...(19): siRNA sense strand
gggagaaugcccuggucuu

SEQ ID NO: 1549087 - RNA, 19 nt, Homo sapiens
  misc_RNA (1)...(19): siRNA sense strand
caacaucuuccagcacauc

SEQ ID NO: 1549088 - RNA, 19 nt, Homo sapiens
  misc_RNA (1)...(19): siRNA sense strand
uguggaacaccaucuauuc

SEQ ID NO: 1549089 - RNA, 19 nt, Homo sapiens
  misc_RNA (1)...(19): siRNA sense strand
cauguuccuugcuccuuuc

SEQ ID NO: 1549090 - RNA, 19 nt, Homo sapiens
  misc_RNA (1)...(19): siRNA sense strand
ccauguggaacaccaucua

SEQ ID NO: 1549091 - RNA, 19 nt, Homo sapiens
  misc_RNA (1)...(19): siRNA sense strand
gggccuuuauucucacuac

SEQ ID NO: 1549092 - RNA, 19 nt, Homo sapiens
  misc_RNA (1)...(19): siRNA sense strand
cccaggcucucugauaaca

SEQ ID NO: 1549093 - RNA, 19 nt, Homo sapiens
  misc_RNA (1)...(19): siRNA sense strand
cugauaacaugugccugaa

SEQ ID NO: 1549094 - RNA, 19 nt, Homo sapiens
  misc_RNA (1)...(19): siRNA sense strand
uaaaggagcuugcuggauu

SEQ ID NO: 1549095 - RNA, 19 nt, Homo sapiens
  misc_RNA (1)...(19): siRNA sense strand
gaacagccuuucuugauga

SEQ ID NO: 1549096 - RNA, 19 nt, Homo sapiens
  misc_RNA (1)...(19): siRNA sense strand
caacacaccuggaggcuuu

SEQ ID NO: 1549097 - RNA, 19 nt, Homo sapiens
  misc_RNA (1)...(19): siRNA sense strand
gaacuuccauccucaaugu

SEQ ID NO: 1549098 - RNA, 19 nt, Homo sapiens
  misc_RNA (1)...(19): siRNA sense strand
ucagaagccuuaauuacua

SEQ ID NO: 1549099 - RNA, 19 nt, Homo sapiens
  misc_RNA (1)...(19): siRNA sense strand
gaucuuugcuuggucuuua

SEQ ID NO: 1549100 - RNA, 19 nt, Homo sapiens
  misc_RNA (1)...(19): siRNA sense strand
gaacuccucuuuauacucu

SEQ ID NO: 1549101 - RNA, 19 nt, Homo sapiens
  misc_RNA (1)...(19): siRNA sense strand
ggaacagccuuucuugaug

SEQ ID NO: 1549102 - RNA, 19 nt, Homo sapiens
  misc_RNA (1)...(19): siRNA sense strand
cagcugcucuaaagaauuu

SEQ ID NO: 1549103 - RNA, 19 nt, Homo sapiens
  misc_RNA (1)...(19): siRNA sense strand
acacaagucuucucucuau

SEQ ID NO: 1549104 - RNA, 19 nt, Homo sapiens
  misc_RNA (1)...(19): siRNA sense strand
caagucuucucucuauaua

SEQ ID NO: 1549105 - RNA, 19 nt, Homo sapiens
  misc_RNA (1)...(19): siRNA sense strand
gacagcacauguauucuuu

SEQ ID NO: 1549106 - RNA, 19 nt, Homo sapiens
  misc_RNA (1)...(19): siRNA sense strand
guuaauggccuaguaaaua

SEQ ID NO: 1549107 - RNA, 19 nt, Homo sapiens
  misc_RNA (1)...(19): siRNA sense strand
acagaugugucauuucaua

SEQ ID NO: 1549108 - RNA, 19 nt, Homo sapiens
  misc_RNA (1)...(19): siRNA sense strand
gaagagcgccaaagguauu

SEQ ID NO: 1549109 - RNA, 19 nt, Homo sapiens
  misc_RNA (1)...(19): siRNA sense strand
ggaagccaaagguauauua

SEQ ID NO: 1549110 - RNA, 19 nt, Homo sapiens
  misc_RNA (1)...(19): siRNA sense strand
gacaacugcuaaccauaua

SEQ ID NO: 1549111 - RNA, 19 nt, Homo sapiens
  misc_RNA (1)...(19): siRNA sense strand
ccaaagguauugagaacuu

SEQ ID NO: 1549112 - RNA, 19 nt, Homo sapiens
  misc_RNA (1)...(19): siRNA sense strand
gugcgaaacugcccauauu

SEQ ID NO: 1549113 - RNA, 19 nt, Homo sapiens
  misc_RNA (1)...(19): siRNA sense strand
ggacaacugcuaaccauau

SEQ ID NO: 1549114 - RNA, 19 nt, Homo sapiens
  misc_RNA (1)...(19): siRNA sense strand
uaaugggacuggagaauug

SEQ ID NO: 1549115 - RNA, 19 nt, Homo sapiens
  misc_RNA (1)...(19): siRNA sense strand
uuagguggcuuccuuguuu

SEQ ID NO: 1549116 - RNA, 19 nt, Homo sapiens
  misc_RNA (1)...(19): siRNA sense strand
gagaagcguuaugaaauga

SEQ ID NO: 1549117 - RNA, 19 nt, Homo sapiens
  misc_RNA (1)...(19): siRNA sense strand
guaaaguuaucaccauguu

SEQ ID NO: 1549118 - RNA, 19 nt, Homo sapiens
  misc_RNA (1)...(19): siRNA sense strand
agaaugcaguugugacuaa

SEQ ID NO: 1549119 - RNA, 19 nt, Homo sapiens
  misc_RNA (1)...(19): siRNA sense strand
ugagaagcguuaugaaaug

SEQ ID NO: 1549120 - RNA, 19 nt, Homo sapiens
  misc_RNA (1)...(19): siRNA sense strand
uaugguccuucgauuauua

SEQ ID NO: 1549121 - RNA, 19 nt, Homo sapiens
  misc_RNA (1)...(19): siRNA sense strand
guuaugaaaugaagaguuc

SEQ ID NO: 1549122 - RNA, 19 nt, Homo sapiens
  misc_RNA (1)...(19): siRNA sense strand
ggagcuugcuggauuuaug

SEQ ID NO: 1549123 - RNA, 19 nt, Homo sapiens
  misc_RNA (1)...(19): siRNA sense strand
ggagaaagcacugauguca

SEQ ID NO: 1549124 - RNA, 19 nt, Homo sapiens
  misc_RNA (1)...(19): siRNA sense strand
gcacuuguauucucauugc

SEQ ID NO: 1549125 - RNA, 19 nt, Homo sapiens
  misc_RNA (1)...(19): siRNA sense strand
cuucuucacuuucuaacua

SEQ ID NO: 1549126 - RNA, 19 nt, Homo sapiens
  misc_RNA (1)...(19): siRNA sense strand
cgagauggcuugcauuugc

SEQ ID NO: 1549127 - RNA, 19 nt, Homo sapiens
  misc_RNA (1)...(19): siRNA sense strand
uaaagagaaugcaguugug

SEQ ID NO: 1549128 - RNA, 19 nt, Homo sapiens
  misc_RNA (1)...(19): siRNA sense strand
gcucaucagaguaauagua

SEQ ID NO: 1549129 - RNA, 19 nt, Homo sapiens
  misc_RNA (1)...(19): siRNA sense strand
ucaucaagcuacgauauuu

SEQ ID NO: 1549130 - RNA, 19 nt, Homo sapiens
  misc_RNA (1)...(19): siRNA sense strand
agaacaggaucucaacaaa

SEQ ID NO: 1549131 - RNA, 19 nt, Homo sapiens
  misc_RNA (1)...(19): siRNA sense strand
caaugaaguuugcacuguu

SEQ ID NO: 1549132 - RNA, 19 nt, Homo sapiens
  misc_RNA (1)...(19): siRNA sense strand
gaggacaacugcuaaccau

SEQ ID NO: 1549133 - RNA, 19 nt, Homo sapiens
  misc_RNA (1)...(19): siRNA sense strand
gcaagguauuguaguuaau

SEQ ID NO: 1549134 - RNA, 19 nt, Homo sapiens
  misc_RNA (1)...(19): siRNA sense strand
gcaguugugacuaauguuu

SEQ ID NO: 1549135 - RNA, 19 nt, Homo sapiens
  misc_RNA (1)...(19): siRNA sense strand
ugacuggccugauuucauc

SEQ ID NO: 1549136 - RNA, 19 nt, Homo sapiens
  misc_RNA (1)...(19): siRNA sense strand
guaaugcagaugugaaauu

SEQ ID NO: 1549137 - RNA, 19 nt, Homo sapiens
  misc_RNA (1)...(19): siRNA sense strand
ggacugggagcacuuguau

SEQ ID NO: 1549138 - RNA, 19 nt, Homo sapiens
  misc_RNA (1)...(19): siRNA sense strand
gagaagcuccggucacugu

SEQ ID NO: 1549139 - RNA, 19 nt, Homo sapiens
  misc_RNA (1)...(19): siRNA sense strand
gggaacagccuuucuugau

SEQ ID NO: 1549140 - RNA, 19 nt, Homo sapiens
  misc_RNA (1)...(19): siRNA sense strand
caacuguuccuguauugaa

SEQ ID NO: 1549141 - RNA, 19 nt, Homo sapiens
  misc_RNA (1)...(19): siRNA sense strand
cuaguagccauaaguguua

SEQ ID NO: 1549142 - RNA, 19 nt, Homo sapiens
  misc_RNA (1)...(19): siRNA sense strand
aaaggagcuugcuggauuu

SEQ ID NO: 1549143 - RNA, 19 nt, Homo sapiens
  misc_RNA (1)...(19): siRNA sense strand
cgcaagguauuguaguuaa

SEQ ID NO: 1549144 - RNA, 19 nt, Homo sapiens
  misc_RNA (1)...(19): siRNA sense strand
acaggaagccaaagguaua

SEQ ID NO: 1549145 - RNA, 19 nt, Homo sapiens
  misc_RNA (1)...(19): siRNA sense strand
uggauuggguuucuucuau

SEQ ID NO: 1549146 - RNA, 19 nt, Homo sapiens
  misc_RNA (1)...(19): siRNA sense strand
caacuucuucacuuucuaa

SEQ ID NO: 1549147 - RNA, 19 nt, Homo sapiens
  misc_RNA (1)...(19): siRNA sense strand
gagcacuuguauucucauu

SEQ ID NO: 1549148 - RNA, 19 nt, Homo sapiens
  misc_RNA (1)...(19): siRNA sense strand
aggaauagcaccaguugua

SEQ ID NO: 1549149 - RNA, 19 nt, Homo sapiens
  misc_RNA (1)...(19): siRNA sense strand
cuacuggauuugcuacauu

SEQ ID NO: 1549150 - RNA, 19 nt, Homo sapiens
  misc_RNA (1)...(19): siRNA sense strand
guugggagcuugguggauu

SEQ ID NO: 1549151 - RNA, 19 nt, Homo sapiens
  misc_RNA (1)...(19): siRNA sense strand
aaacugcccauauuccuuu

SEQ ID NO: 1549152 - RNA, 19 nt, Homo sapiens
  misc_RNA (1)...(19): siRNA sense strand
gaaacugcccauauuccuu

SEQ ID NO: 1549153 - RNA, 19 nt, Homo sapiens
  misc_RNA (1)...(19): siRNA sense strand
gaggcuuucugcuucacua

SEQ ID NO: 1549154 - RNA, 19 nt, Homo sapiens
  misc_RNA (1)...(19): siRNA sense strand
gaugugucauuucauaaag

SEQ ID NO: 1549155 - RNA, 19 nt, Homo sapiens
  misc_RNA (1)...(19): siRNA sense strand
guauugagaacuuggcuuu

SEQ ID NO: 1549156 - RNA, 19 nt, Homo sapiens
  misc_RNA (1)...(19): siRNA sense strand
caauagacagcacauguau

SEQ ID NO: 1549157 - RNA, 19 nt, Homo sapiens
  misc_RNA (1)...(19): siRNA sense strand
ugguguaucugaaucauau

SEQ ID NO: 1549158 - RNA, 19 nt, Homo sapiens
  misc_RNA (1)...(19): siRNA sense strand
guucacaucuggaguugca

SEQ ID NO: 1549159 - RNA, 19 nt, Homo sapiens
  misc_RNA (1)...(19): siRNA sense strand
agaaagcacugaugucacu

SEQ ID NO: 1549160 - RNA, 19 nt, Homo sapiens
  misc_RNA (1)...(19): siRNA sense strand
caaggaauagcaccaguug

SEQ ID NO: 1549161 - RNA, 19 nt, Homo sapiens
  misc_RNA (1)...(19): siRNA sense strand
guugagaagcguuaugaaa

SEQ ID NO: 1549162 - RNA, 19 nt, Homo sapiens
  misc_RNA (1)...(19): siRNA sense strand
guaguuaauggccuaguaa

SEQ ID NO: 1549163 - RNA, 19 nt, Homo sapiens
  misc_RNA (1)...(19): siRNA sense strand
gaagcguuaugaaaugaag

SEQ ID NO: 1549164 - RNA, 19 nt, Homo sapiens
  misc_RNA (1)...(19): siRNA sense strand
guauaaaccaccuccauca

SEQ ID NO: 1549165 - RNA, 19 nt, Homo sapiens
  misc_RNA (1)...(19): siRNA sense strand
gccauuugcugguguaucu

SEQ ID NO: 1549166 - RNA, 19 nt, Homo sapiens
  misc_RNA (1)...(19): siRNA sense strand
gauuggguuucuucuauca

SEQ ID NO: 1549167 - RNA, 19 nt, Homo sapiens
  misc_RNA (1)...(19): siRNA sense strand
gcuacgauauuucauucug

SEQ ID NO: 1549168 - RNA, 19 nt, Homo sapiens
  misc_RNA (1)...(19): siRNA sense strand
cuacuuguaugucuucauc

SEQ ID NO: 1549169 - RNA, 19 nt, Homo sapiens
  misc_RNA (1)...(19): siRNA sense strand
ccaaagguauauuacaacu

SEQ ID NO: 1549170 - RNA, 19 nt, Homo sapiens
  misc_RNA (1)...(19): siRNA sense strand
caagcuacgauauuucauu

SEQ ID NO: 1549171 - RNA, 19 nt, Homo sapiens
  misc_RNA (1)...(19): siRNA sense strand
guuaugcuaugucaaucuu

SEQ ID NO: 1549172 - RNA, 19 nt, Homo sapiens
  misc_RNA (1)...(19): siRNA sense strand
caucuugggacaacuauug

SEQ ID NO: 1549173 - RNA, 19 nt, Homo sapiens
  misc_RNA (1)...(19): siRNA sense strand
gggagcacuuguauucuca

SEQ ID NO: 1549174 - RNA, 19 nt, Homo sapiens
  misc_RNA (1)...(19): siRNA sense strand
gcauuugcagccuuuauga

SEQ ID NO: 1549175 - RNA, 19 nt, Homo sapiens
  misc_RNA (1)...(19): siRNA sense strand
uguaguuaauggccuagua

SEQ ID NO: 1549176 - RNA, 19 nt, Homo sapiens
  misc_RNA (1)...(19): siRNA sense strand
gaacaggaucucaacaaaa

SEQ ID NO: 1549177 - RNA, 19 nt, Homo sapiens
  misc_RNA (1)...(19): siRNA sense strand
gaaugcaguugugacuaau

SEQ ID NO: 1549178 - RNA, 19 nt, Homo sapiens
  misc_RNA (1)...(19): siRNA sense strand
gagcuugcuggauuuauga

SEQ ID NO: 1549179 - RNA, 19 nt, Homo sapiens
  misc_RNA (1)...(19): siRNA sense strand
acaauagacagcacaugua

SEQ ID NO: 1549180 - RNA, 19 nt, Homo sapiens
  misc_RNA (1)...(19): siRNA sense strand
ugaaacucauugugcgaaa

SEQ ID NO: 1549181 - RNA, 19 nt, Homo sapiens
  misc_RNA (1)...(19): siRNA sense strand
acaaugaaguuugcacugu

SEQ ID NO: 1549182 - RNA, 19 nt, Homo sapiens
  misc_RNA (1)...(19): siRNA sense strand
agaaugcugucuuuaugug

SEQ ID NO: 1549183 - RNA, 19 nt, Homo sapiens
  misc_RNA (1)...(19): siRNA sense strand
gcucuaaagaauuugauga

SEQ ID NO: 1549184 - RNA, 19 nt, Homo sapiens
  misc_RNA (1)...(19): siRNA sense strand
ggauuggguuucuucuauc

SEQ ID NO: 1549185 - RNA, 19 nt, Homo sapiens
  misc_RNA (1)...(19): siRNA sense strand
gcuauuggcuauguauugg

SEQ ID NO: 1549186 - RNA, 19 nt, Homo sapiens
  misc_RNA (1)...(19): siRNA sense strand
caaagguauugagaacuug

SEQ ID NO: 1549187 - RNA, 19 nt, Homo sapiens
  misc_RNA (1)...(19): siRNA sense strand
acacacaagucuucucucu

SEQ ID NO: 1549188 - RNA, 19 nt, Homo sapiens
  misc_RNA (1)...(19): siRNA sense strand
aagcuacgauauuucauuc

SEQ ID NO: 1549189 - RNA, 19 nt, Homo sapiens
  misc_RNA (1)...(19): siRNA sense strand
agccaaagguauauuacaa

SEQ ID NO: 1549190 - RNA, 19 nt, Homo sapiens
  misc_RNA (1)...(19): siRNA sense strand
caucagaguaauaguaaug

SEQ ID NO: 1549191 - RNA, 19 nt, Homo sapiens
  misc_RNA (1)...(19): siRNA sense strand
caguggagaauauaaauug

SEQ ID NO: 1549192 - RNA, 19 nt, Homo sapiens
  misc_RNA (1)...(19): siRNA sense strand
gcagaugugaaauuuggaa

SEQ ID NO: 1549193 - RNA, 19 nt, Homo sapiens
  misc_RNA (1)...(19): siRNA sense strand
agaauugggaaacuugaua

SEQ ID NO: 1549194 - RNA, 19 nt, Homo sapiens
  misc_RNA (1)...(19): siRNA sense strand
ggagauauucuucagauua

SEQ ID NO: 1549195 - RNA, 19 nt, Homo sapiens
  misc_RNA (1)...(19): siRNA sense strand
gaaguggucuuauucaugu

SEQ ID NO: 1549196 - RNA, 19 nt, Homo sapiens
  misc_RNA (1)...(19): siRNA sense strand
gaaagcugcugaucaguga

SEQ ID NO: 1549197 - RNA, 19 nt, Homo sapiens
  misc_RNA (1)...(19): siRNA sense strand
uauaaagccuccaucaaua

SEQ ID NO: 1549198 - RNA, 19 nt, Homo sapiens
  misc_RNA (1)...(19): siRNA sense strand
ugaaugaacugaaacgaaa

SEQ ID NO: 1549199 - RNA, 19 nt, Homo sapiens
  misc_RNA (1)...(19): siRNA sense strand
gcaagaagagugaucagua

SEQ ID NO: 1549200 - RNA, 19 nt, Homo sapiens
  misc_RNA (1)...(19): siRNA sense strand
gcagauagaaguggucuua

SEQ ID NO: 1549201 - RNA, 19 nt, Homo sapiens
  misc_RNA (1)...(19): siRNA sense strand
ucagagagcuguugaaacu

SEQ ID NO: 1549202 - RNA, 19 nt, Homo sapiens
  misc_RNA (1)...(19): siRNA sense strand
gaaaucaucugguuuuaga

SEQ ID NO: 1549203 - RNA, 19 nt, Homo sapiens
  misc_RNA (1)...(19): siRNA sense strand
ggagagugaugguguugaa

SEQ ID NO: 1549204 - RNA, 19 nt, Homo sapiens
  misc_RNA (1)...(19): siRNA sense strand
gaagaagccaggagaguga

SEQ ID NO: 1549205 - RNA, 19 nt, Homo sapiens
  misc_RNA (1)...(19): siRNA sense strand
gaacaagccauuaaacagu

SEQ ID NO: 1549206 - RNA, 19 nt, Homo sapiens
  misc_RNA (1)...(19): siRNA sense strand
gaauuuaagcccuauguga

SEQ ID NO: 1549207 - RNA, 19 nt, Homo sapiens
  misc_RNA (1)...(19): siRNA sense strand
gagcuaccauuaagaagga

SEQ ID NO: 1549208 - RNA, 19 nt, Homo sapiens
  misc_RNA (1)...(19): siRNA sense strand
ggauaccaguggaggauaa

SEQ ID NO: 1549209 - RNA, 19 nt, Homo sapiens
  misc_RNA (1)...(19): siRNA sense strand
aaacuacacuacuaugaga

SEQ ID NO: 1549210 - RNA, 19 nt, Homo sapiens
  misc_RNA (1)...(19): siRNA sense strand
gcacaaguauagacucagu

SEQ ID NO: 1549211 - RNA, 19 nt, Homo sapiens
  misc_RNA (1)...(19): siRNA sense strand
uaaaaggccugaggaaaua

SEQ ID NO: 1549212 - RNA, 19 nt, Homo sapiens
  misc_RNA (1)...(19): siRNA sense strand
caauagagcguuugagaga

SEQ ID NO: 1549213 - RNA, 19 nt, Homo sapiens
  misc_RNA (1)...(19): siRNA sense strand
gagacgaccagaaauauug

SEQ ID NO: 1549214 - RNA, 19 nt, Homo sapiens
  misc_RNA (1)...(19): siRNA sense strand
cagcugacguacccacaua

SEQ ID NO: 1549215 - RNA, 19 nt, Homo sapiens
  misc_RNA (1)...(19): siRNA sense strand
cugaagauauugacgauga

SEQ ID NO: 1549216 - RNA, 19 nt, Homo sapiens
  misc_RNA (1)...(19): siRNA sense strand
aaagaaggcaagauguuua

SEQ ID NO: 1549217 - RNA, 19 nt, Homo sapiens
  misc_RNA (1)...(19): siRNA sense strand
ccacugggagcuaccauua

SEQ ID NO: 1549218 - RNA, 19 nt, Homo sapiens
  misc_RNA (1)...(19): siRNA sense strand
gaauuacgacccaguguug

SEQ ID NO: 1549219 - RNA, 19 nt, Homo sapiens
  misc_RNA (1)...(19): siRNA sense strand
gaucagagagcuguugaaa

SEQ ID NO: 1549220 - RNA, 19 nt, Homo sapiens
  misc_RNA (1)...(19): siRNA sense strand
caagaagagugaucaguac

SEQ ID NO: 1549221 - RNA, 19 nt, Homo sapiens
  misc_RNA (1)...(19): siRNA sense strand
gauaaggcaauuccaugua

SEQ ID NO: 1549222 - RNA, 19 nt, Homo sapiens
  misc_RNA (1)...(19): siRNA sense strand
ggcaagauguuuaucaaag

SEQ ID NO: 1549223 - RNA, 19 nt, Homo sapiens
  misc_RNA (1)...(19): siRNA sense strand
agauagaaguggucuuauu

SEQ ID NO: 1549224 - RNA, 19 nt, Homo sapiens
  misc_RNA (1)...(19): siRNA sense strand
gauagaaguggucuuauuc

SEQ ID NO: 1549225 - RNA, 19 nt, Homo sapiens
  misc_RNA (1)...(19): siRNA sense strand
auaaggcaauuccauguaa

SEQ ID NO: 1549226 - RNA, 19 nt, Homo sapiens
  misc_RNA (1)...(19): siRNA sense strand
ccgaugaucuggccgaaga

SEQ ID NO: 1549227 - RNA, 19 nt, Homo sapiens
  misc_RNA (1)...(19): siRNA sense strand
gaaagucaauauggucauc

SEQ ID NO: 1549228 - RNA, 19 nt, Homo sapiens
  misc_RNA (1)...(19): siRNA sense strand
gaaggcaagauguuuauca

SEQ ID NO: 1549229 - RNA, 19 nt, Homo sapiens
  misc_RNA (1)...(19): siRNA sense strand
gauuauacccggcagcaaa

SEQ ID NO: 1549230 - RNA, 19 nt, Homo sapiens
  misc_RNA (1)...(19): siRNA sense strand
gcaaagauuauuucaagca

SEQ ID NO: 1549231 - RNA, 19 nt, Homo sapiens
  misc_RNA (1)...(19): siRNA sense strand
aggaggagcugcagauaga

SEQ ID NO: 1549232 - RNA, 19 nt, Homo sapiens
  misc_RNA (1)...(19): siRNA sense strand
gaguagggcugaaugaacu

SEQ ID NO: 1549233 - RNA, 19 nt, Homo sapiens
  misc_RNA (1)...(19): siRNA sense strand
ucagggagcaauuacauuu

SEQ ID NO: 1549234 - RNA, 19 nt, Homo sapiens
  misc_RNA (1)...(19): siRNA sense strand
gagccaagaugaugcaacu

SEQ ID NO: 1549235 - RNA, 19 nt, Homo sapiens
  misc_RNA (1)...(19): siRNA sense strand
aagcagagaugaccaaggu

SEQ ID NO: 1549236 - RNA, 19 nt, Homo sapiens
  misc_RNA (1)...(19): siRNA sense strand
ugaccucacuguggcauuu

SEQ ID NO: 1549237 - RNA, 19 nt, Homo sapiens
  misc_RNA (1)...(19): siRNA sense strand
gcaagauguuuaucaaagc

SEQ ID NO: 1549238 - RNA, 19 nt, Homo sapiens
  misc_RNA (1)...(19): siRNA sense strand
agggagcaauuacauuuaa

SEQ ID NO: 1549239 - RNA, 19 nt, Homo sapiens
  misc_RNA (1)...(19): siRNA sense strand
auagagcguuugagagaaa

SEQ ID NO: 1549240 - RNA, 19 nt, Homo sapiens
  misc_RNA (1)...(19): siRNA sense strand
gggagauauucuucagauu

SEQ ID NO: 1549241 - RNA, 19 nt, Homo sapiens
  misc_RNA (1)...(19): siRNA sense strand
gagcugguuacauucauaa

SEQ ID NO: 1549242 - RNA, 19 nt, Homo sapiens
  misc_RNA (1)...(19): siRNA sense strand
ugagcugguuacauucaua

SEQ ID NO: 1549243 - RNA, 19 nt, Homo sapiens
  misc_RNA (1)...(19): siRNA sense strand
uuauaaagccuccaucaau

SEQ ID NO: 1549244 - RNA, 19 nt, Homo sapiens
  misc_RNA (1)...(19): siRNA sense strand
aaacgaaagcugcugauca

SEQ ID NO: 1549245 - RNA, 19 nt, Homo sapiens
  misc_RNA (1)...(19): siRNA sense strand
ggauaaggcaauuccaugu

SEQ ID NO: 1549246 - RNA, 19 nt, Homo sapiens
  misc_RNA (1)...(19): siRNA sense strand
gcacagauaauggaaaguc

SEQ ID NO: 1549247 - RNA, 19 nt, Homo sapiens
  misc_RNA (1)...(19): siRNA sense strand
uaagcccuaugugauauuu

SEQ ID NO: 1549248 - RNA, 19 nt, Homo sapiens
  misc_RNA (1)...(19): siRNA sense strand
ggagcaauuacauuuaaga

SEQ ID NO: 1549249 - RNA, 19 nt, Homo sapiens
  misc_RNA (1)...(19): siRNA sense strand
uaaaugaugaccucacugu

SEQ ID NO: 1549250 - RNA, 19 nt, Homo sapiens
  misc_RNA (1)...(19): siRNA sense strand
gcuuugagacgaccagaaa

SEQ ID NO: 1549251 - RNA, 19 nt, Homo sapiens
  misc_RNA (1)...(19): siRNA sense strand
agagugaugguguugaaua

SEQ ID NO: 1549252 - RNA, 19 nt, Homo sapiens
  misc_RNA (1)...(19): siRNA sense strand
ugggauauguuuggugaaa

SEQ ID NO: 1549253 - RNA, 19 nt, Homo sapiens
  misc_RNA (1)...(19): siRNA sense strand
aauaauccgucuggucaaa

SEQ ID NO: 1549254 - RNA, 19 nt, Homo sapiens
  misc_RNA (1)...(19): siRNA sense strand
gacccaguguugccuccua

SEQ ID NO: 1549255 - RNA, 19 nt, Homo sapiens
  misc_RNA (1)...(19): siRNA sense strand
gcauuuaaggacacuagaa

SEQ ID NO: 1549256 - RNA, 19 nt, Homo sapiens
  misc_RNA (1)...(19): siRNA sense strand
ugagacagauguacaaaau

SEQ ID NO: 1549257 - RNA, 19 nt, Homo sapiens
  misc_RNA (1)...(19): siRNA sense strand
gagugaugguguugaauac

SEQ ID NO: 1549258 - RNA, 19 nt, Homo sapiens
  misc_RNA (1)...(19): siRNA sense strand
aacaggaaaucaucugguu

SEQ ID NO: 1549259 - RNA, 19 nt, Homo sapiens
  misc_RNA (1)...(19): siRNA sense strand
cagaacaagccauuaaaca

SEQ ID NO: 1549260 - RNA, 19 nt, Homo sapiens
  misc_RNA (1)...(19): siRNA sense strand
uaaugaggauaaggcaauu

SEQ ID NO: 1549261 - RNA, 19 nt, Homo sapiens
  misc_RNA (1)...(19): siRNA sense strand
cagggagcaauuacauuua

SEQ ID NO: 1549262 - RNA, 19 nt, Homo sapiens
  misc_RNA (1)...(19): siRNA sense strand
ccaggagagugaugguguu

SEQ ID NO: 1549263 - RNA, 19 nt, Homo sapiens
  misc_RNA (1)...(19): siRNA sense strand
ugaaggcuuugcucucugu

SEQ ID NO: 1549264 - RNA, 19 nt, Homo sapiens
  misc_RNA (1)...(19): siRNA sense strand
cuucagaacaagccauuaa

SEQ ID NO: 1549265 - RNA, 19 nt, Homo sapiens
  misc_RNA (1)...(19): siRNA sense strand
gugaugguguugaauacau

SEQ ID NO: 1549266 - RNA, 19 nt, Homo sapiens
  misc_RNA (1)...(19): siRNA sense strand
gaagaagugacaccguauc

SEQ ID NO: 1549267 - RNA, 19 nt, Homo sapiens
  misc_RNA (1)...(19): siRNA sense strand
aagccugcauucauuggua

SEQ ID NO: 1549268 - RNA, 19 nt, Homo sapiens
  misc_RNA (1)...(19): siRNA sense strand
gagaggaggagcugcagau

SEQ ID NO: 1549269 - RNA, 19 nt, Homo sapiens
  misc_RNA (1)...(19): siRNA sense strand
cucauacagugaagcauuu

SEQ ID NO: 1549270 - RNA, 19 nt, Homo sapiens
  misc_RNA (1)...(19): siRNA sense strand
agagagcuguugaaacuac

SEQ ID NO: 1549271 - RNA, 19 nt, Homo sapiens
  misc_RNA (1)...(19): siRNA sense strand
aaggcaagauguuuaucaa

SEQ ID NO: 1549272 - RNA, 19 nt, Homo sapiens
  misc_RNA (1)...(19): siRNA sense strand
uagaaguggucuuauucau

SEQ ID NO: 1549273 - RNA, 19 nt, Homo sapiens
  misc_RNA (1)...(19): siRNA sense strand
ugaccaaggugcugcaaaa

SEQ ID NO: 1549274 - RNA, 19 nt, Homo sapiens
  misc_RNA (1)...(19): siRNA sense strand
uaaagccuccaucaauaga

SEQ ID NO: 1549275 - RNA, 19 nt, Homo sapiens
  misc_RNA (1)...(19): siRNA sense strand
cggcacaaguauagacuca

SEQ ID NO: 1549276 - RNA, 19 nt, Homo sapiens
  misc_RNA (1)...(19): siRNA sense strand
caacuacuacggcacaagu

SEQ ID NO: 1549277 - RNA, 19 nt, Homo sapiens
  misc_RNA (1)...(19): siRNA sense strand
caaagaggagacaccauca

SEQ ID NO: 1549278 - RNA, 19 nt, Homo sapiens
  misc_RNA (1)...(19): siRNA sense strand
ggagacaccaucaaaagaa

SEQ ID NO: 1549279 - RNA, 19 nt, Homo sapiens
  misc_RNA (1)...(19): siRNA sense strand
ugaugguguugaauacauu

SEQ ID NO: 1549280 - RNA, 19 nt, Homo sapiens
  misc_RNA (1)...(19): siRNA sense strand
gagaucagagagcuguuga

SEQ ID NO: 1549281 - RNA, 19 nt, Homo sapiens
  misc_RNA (1)...(19): siRNA sense strand
aaagggagauauucuucag

SEQ ID NO: 1549282 - RNA, 19 nt, Homo sapiens
  misc_RNA (1)...(19): siRNA sense strand
uccuaugccugaagauauu

SEQ ID NO: 1549283 - RNA, 19 nt, Homo sapiens
  misc_RNA (1)...(19): siRNA sense strand
ggaguagggcugaaugaac

SEQ ID NO: 1549284 - RNA, 19 nt, Homo sapiens
  misc_RNA (1)...(19): siRNA sense strand
aacccaaugugaaggcuuu

SEQ ID NO: 1549285 - RNA, 19 nt, Homo sapiens
  misc_RNA (1)...(19): siRNA sense strand
aagaggagacaccaucaaa

SEQ ID NO: 1549286 - RNA, 19 nt, Homo sapiens
  misc_RNA (1)...(19): siRNA sense strand
gaggaggagcugcagauag

SEQ ID NO: 1549287 - RNA, 19 nt, Homo sapiens
  misc_RNA (1)...(19): siRNA sense strand
gcuuugcucucuguacaug

SEQ ID NO: 1549288 - RNA, 19 nt, Homo sapiens
  misc_RNA (1)...(19): siRNA sense strand
ccucauacagugaagcauu

SEQ ID NO: 1549289 - RNA, 19 nt, Homo sapiens
  misc_RNA (1)...(19): siRNA sense strand
ugagacgaccagaaauauu

SEQ ID NO: 1549290 - RNA, 19 nt, Homo sapiens
  misc_RNA (1)...(19): siRNA sense strand
cuaaugaggauaaggcaau

SEQ ID NO: 1549291 - RNA, 19 nt, Homo sapiens
  misc_RNA (1)...(19): siRNA sense strand
gcauucauugguaaagauu

SEQ ID NO: 1549292 - RNA, 19 nt, Homo sapiens
  misc_RNA (1)...(19): siRNA sense strand
uuugagacgaccagaaaua

SEQ ID NO: 1549293 - RNA, 19 nt, Homo sapiens
  misc_RNA (1)...(19): siRNA sense strand
gaaacgaaagcugcugauc

SEQ ID NO: 1549294 - RNA, 19 nt, Homo sapiens
  misc_RNA (1)...(19): siRNA sense strand
gagcagaucucgugauaaa

SEQ ID NO: 1549295 - RNA, 19 nt, Homo sapiens
  misc_RNA (1)...(19): siRNA sense strand
gaaggaguguggucauuua

SEQ ID NO: 1549296 - RNA, 19 nt, Homo sapiens
  misc_RNA (1)...(19): siRNA sense strand
gcaaggacccuaucuuuga

SEQ ID NO: 1549297 - RNA, 19 nt, Homo sapiens
  misc_RNA (1)...(19): siRNA sense strand
ggagaagccaccaccauua

SEQ ID NO: 1549298 - RNA, 19 nt, Homo sapiens
  misc_RNA (1)...(19): siRNA sense strand
aaagacagcucucauagug

SEQ ID NO: 1549299 - RNA, 19 nt, Homo sapiens
  misc_RNA (1)...(19): siRNA sense strand
gcagaucucgugauaaaug

SEQ ID NO: 1549300 - RNA, 19 nt, Homo sapiens
  misc_RNA (1)...(19): siRNA sense strand
ccaaugguguccuggagua

SEQ ID NO: 1549301 - RNA, 19 nt, Homo sapiens
  misc_RNA (1)...(19): siRNA sense strand
caguauugcugcugcuaua

SEQ ID NO: 1549302 - RNA, 19 nt, Homo sapiens
  misc_RNA (1)...(19): siRNA sense strand
cgugauaaaugaagugaug

SEQ ID NO: 1549303 - RNA, 19 nt, Homo sapiens
  misc_RNA (1)...(19): siRNA sense strand
ggaaggcaccguagcucua

SEQ ID NO: 1549304 - RNA, 19 nt, Homo sapiens
  misc_RNA (1)...(19): siRNA sense strand
ggaaggaguguggucauuu

SEQ ID NO: 1549305 - RNA, 19 nt, Homo sapiens
  misc_RNA (1)...(19): siRNA sense strand
gaaagacagcucucauagu

SEQ ID NO: 1549306 - RNA, 19 nt, Homo sapiens
  misc_RNA (1)...(19): siRNA sense strand
gcgggaaguucgcauagug

SEQ ID NO: 1549307 - RNA, 19 nt, Homo sapiens
  misc_RNA (1)...(19): siRNA sense strand
ccagugcuguccucaguau

SEQ ID NO: 1549308 - RNA, 19 nt, Homo sapiens
  misc_RNA (1)...(19): siRNA sense strand
gagaggcgcucggagaaag

SEQ ID NO: 1549309 - RNA, 19 nt, Homo sapiens
  misc_RNA (1)...(19): siRNA sense strand
gggagaagccaccaccauu

SEQ ID NO: 1549310 - RNA, 19 nt, Homo sapiens
  misc_RNA (1)...(19): siRNA sense strand
uggaguauuuggagaaaga

SEQ ID NO: 1549311 - RNA, 19 nt, Homo sapiens
  misc_RNA (1)...(19): siRNA sense strand
cagaucucgugauaaauga

SEQ ID NO: 1549312 - RNA, 19 nt, Homo sapiens
  misc_RNA (1)...(19): siRNA sense strand
cgucauaccaggcagcuuu

SEQ ID NO: 1549313 - RNA, 19 nt, Homo sapiens
  misc_RNA (1)...(19): siRNA sense strand
gcacacagaacgcuauguc

SEQ ID NO: 1549314 - RNA, 19 nt, Homo sapiens
  misc_RNA (1)...(19): siRNA sense strand
gccaggacccauccaauga

SEQ ID NO: 1549315 - RNA, 19 nt, Homo sapiens
  misc_RNA (1)...(19): siRNA sense strand
gcaagaucaccauccagaa

SEQ ID NO: 1549316 - RNA, 19 nt, Homo sapiens
  misc_RNA (1)...(19): siRNA sense strand
guguauuacugcaccauug

SEQ ID NO: 1549317 - RNA, 19 nt, Homo sapiens
  misc_RNA (1)...(19): siRNA sense strand
ugacauggcgcuucaaguc

SEQ ID NO: 1549318 - RNA, 19 nt, Homo sapiens
  misc_RNA (1)...(19): siRNA sense strand
cugcaaggacccuaucuuu

SEQ ID NO: 1549319 - RNA, 19 nt, Homo sapiens
  misc_RNA (1)...(19): siRNA sense strand
gggaccauggaguguauua

SEQ ID NO: 1549320 - RNA, 19 nt, Homo sapiens
  misc_RNA (1)...(19): siRNA sense strand
ggagaggcgcucggagaaa

SEQ ID NO: 1549321 - RNA, 19 nt, Homo sapiens
  misc_RNA (1)...(19): siRNA sense strand
gagaagccaccaccauuac

SEQ ID NO: 1549322 - RNA, 19 nt, Homo sapiens
  misc_RNA (1)...(19): siRNA sense strand
ccucuaucauccucaaaug

SEQ ID NO: 1549323 - RNA, 19 nt, Homo sapiens
  misc_RNA (1)...(19): siRNA sense strand
ggccaggacccauccaaug

SEQ ID NO: 1549324 - RNA, 19 nt, Homo sapiens
  misc_RNA (1)...(19): siRNA sense strand
agaaagacagcucucauag

SEQ ID NO: 1549325 - RNA, 19 nt, Homo sapiens
  misc_RNA (1)...(19): siRNA sense strand
aggagaagccgccuagcua

SEQ ID NO: 1549326 - RNA, 19 nt, Homo sapiens
  misc_RNA (1)...(19): siRNA sense strand
gugggaccauggaguguau

SEQ ID NO: 1549327 - RNA, 19 nt, Homo sapiens
  misc_RNA (1)...(19): siRNA sense strand
caaggacccuaucuuugac

SEQ ID NO: 1549328 - RNA, 19 nt, Homo sapiens
  misc_RNA (1)...(19): siRNA sense strand
agaaagaacugcggaaccu

SEQ ID NO: 1549329 - RNA, 19 nt, Homo sapiens
  misc_RNA (1)...(19): siRNA sense strand
gaaggcaccguagcucuag

SEQ ID NO: 1549330 - RNA, 19 nt, Homo sapiens
  misc_RNA (1)...(19): siRNA sense strand
ugacccagaccaccaauca

SEQ ID NO: 1549331 - RNA, 19 nt, Homo sapiens
  misc_RNA (1)...(19): siRNA sense strand
uggaaggaguguggucauu

SEQ ID NO: 1549332 - RNA, 19 nt, Homo sapiens
  misc_RNA (1)...(19): siRNA sense strand
guggugacauggcgcuuca

SEQ ID NO: 1549333 - RNA, 19 nt, Homo sapiens
  misc_RNA (1)...(19): siRNA sense strand
cuaucauccucaaauguga

SEQ ID NO: 1549334 - RNA, 19 nt, Homo sapiens
  misc_RNA (1)...(19): siRNA sense strand
caagaucaccauccagaac

SEQ ID NO: 1549335 - RNA, 19 nt, Homo sapiens
  misc_RNA (1)...(19): siRNA sense strand
cccauacacuggucagaca

SEQ ID NO: 1549336 - RNA, 19 nt, Homo sapiens
  misc_RNA (1)...(19): siRNA sense strand
augguguccuggaguauuu

SEQ ID NO: 1549337 - RNA, 19 nt, Homo sapiens
  misc_RNA (1)...(19): siRNA sense strand
aggcaagaauagcaggaaa

SEQ ID NO: 1549338 - RNA, 19 nt, Homo sapiens
  misc_RNA (1)...(19): siRNA sense strand
ugaccucaaaggcagauuu

SEQ ID NO: 1549339 - RNA, 19 nt, Homo sapiens
  misc_RNA (1)...(19): siRNA sense strand
ccuggaguauuuggagaaa

SEQ ID NO: 1549340 - RNA, 19 nt, Homo sapiens
  misc_RNA (1)...(19): siRNA sense strand
ucagacagggacagccuaa

SEQ ID NO: 1549341 - RNA, 19 nt, Homo sapiens
  misc_RNA (1)...(19): siRNA sense strand
ccaccaccauuacccugau

SEQ ID NO: 1549342 - RNA, 19 nt, Homo sapiens
  misc_RNA (1)...(19): siRNA sense strand
gacccuaucuuugacuacu

SEQ ID NO: 1549343 - RNA, 19 nt, Homo sapiens
  misc_RNA (1)...(19): siRNA sense strand
ugccuguccuugcuuguga

SEQ ID NO: 1549344 - RNA, 19 nt, Homo sapiens
  misc_RNA (1)...(19): siRNA sense strand
uaucuuugacuacuacuca

SEQ ID NO: 1549345 - RNA, 19 nt, Homo sapiens
  misc_RNA (1)...(19): siRNA sense strand
ccaaugacugcaacgacaa

SEQ ID NO: 1549346 - RNA, 19 nt, Homo sapiens
  misc_RNA (1)...(19): siRNA sense strand
gaggagaagccgccuagcu

SEQ ID NO: 1549347 - RNA, 19 nt, Homo sapiens
  misc_RNA (1)...(19): siRNA sense strand
gacccaucguggaguggaa

SEQ ID NO: 1549348 - RNA, 19 nt, Homo sapiens
  misc_RNA (1)...(19): siRNA sense strand
gaccauggaguguauuacu

SEQ ID NO: 1549349 - RNA, 19 nt, Homo sapiens
  misc_RNA (1)...(19): siRNA sense strand
ccagcgggaaguucgcaua

SEQ ID NO: 1549350 - RNA, 19 nt, Homo sapiens
  misc_RNA (1)...(19): siRNA sense strand
cgacaaccagcgggaaguu

SEQ ID NO: 1549351 - RNA, 19 nt, Homo sapiens
  misc_RNA (1)...(19): siRNA sense strand
agcuaccgcucacuggaua

SEQ ID NO: 1549352 - RNA, 19 nt, Homo sapiens
  misc_RNA (1)...(19): siRNA sense strand
uaaagcucaucguccuaca

SEQ ID NO: 1549353 - RNA, 19 nt, Homo sapiens
  misc_RNA (1)...(19): siRNA sense strand
gucauaccaggcagcuuua

SEQ ID NO: 1549354 - RNA, 19 nt, Homo sapiens
  misc_RNA (1)...(19): siRNA sense strand
ucuaucauccucaaaugug

SEQ ID NO: 1549355 - RNA, 19 nt, Homo sapiens
  misc_RNA (1)...(19): siRNA sense strand
caaagucuugggcauugga

SEQ ID NO: 1549356 - RNA, 19 nt, Homo sapiens
  misc_RNA (1)...(19): siRNA sense strand
ggugggaccauggagugua

SEQ ID NO: 1549357 - RNA, 19 nt, Homo sapiens
  misc_RNA (1)...(19): siRNA sense strand
ugccagugcuguccucagu

SEQ ID NO: 1549358 - RNA, 19 nt, Homo sapiens
  misc_RNA (1)...(19): siRNA sense strand
gggacagccuaagcgaugu

SEQ ID NO: 1549359 - RNA, 19 nt, Homo sapiens
  misc_RNA (1)...(19): siRNA sense strand
ugcaaggacccuaucuuug

SEQ ID NO: 1549360 - RNA, 19 nt, Homo sapiens
  misc_RNA (1)...(19): siRNA sense strand
caccaccauuacccugauu

SEQ ID NO: 1549361 - RNA, 19 nt, Homo sapiens
  misc_RNA (1)...(19): siRNA sense strand
ggucguggaacgcagaauc

SEQ ID NO: 1549362 - RNA, 19 nt, Homo sapiens
  misc_RNA (1)...(19): siRNA sense strand
caaugacccagaccaccaa

SEQ ID NO: 1549363 - RNA, 19 nt, Homo sapiens
  misc_RNA (1)...(19): siRNA sense strand
ucacccuguuugccucuau

SEQ ID NO: 1549364 - RNA, 19 nt, Homo sapiens
  misc_RNA (1)...(19): siRNA sense strand
gauaucacuccaggcaaga

SEQ ID NO: 1549365 - RNA, 19 nt, Homo sapiens
  misc_RNA (1)...(19): siRNA sense strand
agagaccugucauccucaa

SEQ ID NO: 1549366 - RNA, 19 nt, Homo sapiens
  misc_RNA (1)...(19): siRNA sense strand
gaaugaaucuccagaaaua

SEQ ID NO: 1549367 - RNA, 19 nt, Homo sapiens
  misc_RNA (1)...(19): siRNA sense strand
aaacagacauggagaauga

SEQ ID NO: 1549368 - RNA, 19 nt, Homo sapiens
  misc_RNA (1)...(19): siRNA sense strand
ggaagagaaucuacuguug

SEQ ID NO: 1549369 - RNA, 19 nt, Homo sapiens
  misc_RNA (1)...(19): siRNA sense strand
gaauguaacaccagaagua

SEQ ID NO: 1549370 - RNA, 19 nt, Homo sapiens
  misc_RNA (1)...(19): siRNA sense strand
gagcauauguggaaaugau

SEQ ID NO: 1549371 - RNA, 19 nt, Homo sapiens
  misc_RNA (1)...(19): siRNA sense strand
gaagucagcuuguggaaaa

SEQ ID NO: 1549372 - RNA, 19 nt, Homo sapiens
  misc_RNA (1)...(19): siRNA sense strand
cagcagagccuacagcuaa

SEQ ID NO: 1549373 - RNA, 19 nt, Homo sapiens
  misc_RNA (1)...(19): siRNA sense strand
gaagagaaucuacuguuga

SEQ ID NO: 1549374 - RNA, 19 nt, Homo sapiens
  misc_RNA (1)...(19): siRNA sense strand
gaaagaauucccaaagaga

SEQ ID NO: 1549375 - RNA, 19 nt, Homo sapiens
  misc_RNA (1)...(19): siRNA sense strand
ggacagaagucagcuugug

SEQ ID NO: 1549376 - RNA, 19 nt, Homo sapiens
  misc_RNA (1)...(19): siRNA sense strand
gaagaggaccaacgcauug

SEQ ID NO: 1549377 - RNA, 19 nt, Homo sapiens
  misc_RNA (1)...(19): siRNA sense strand
gagcauccauacuaaugaa

SEQ ID NO: 1549378 - RNA, 19 nt, Homo sapiens
  misc_RNA (1)...(19): siRNA sense strand
gaugaagccucuaggaaca

SEQ ID NO: 1549379 - RNA, 19 nt, Homo sapiens
  misc_RNA (1)...(19): siRNA sense strand
uagaaagaauucccaaaga

SEQ ID NO: 1549380 - RNA, 19 nt, Homo sapiens
  misc_RNA (1)...(19): siRNA sense strand
ggaaaagccuguuaugaau

SEQ ID NO: 1549381 - RNA, 19 nt, Homo sapiens
  misc_RNA (1)...(19): siRNA sense strand
ggaagucaguuuguggaaa

SEQ ID NO: 1549382 - RNA, 19 nt, Homo sapiens
  misc_RNA (1)...(19): siRNA sense strand
ggaaggaagucaguuugug

SEQ ID NO: 1549383 - RNA, 19 nt, Homo sapiens
  misc_RNA (1)...(19): siRNA sense strand
gagagggacuggaggaauc

SEQ ID NO: 1549384 - RNA, 19 nt, Homo sapiens
  misc_RNA (1)...(19): siRNA sense strand
ccagaaauauuggaaggaa

SEQ ID NO: 1549385 - RNA, 19 nt, Homo sapiens
  misc_RNA (1)...(19): siRNA sense strand
ucaggagcauccauacuaa

SEQ ID NO: 1549386 - RNA, 19 nt, Homo sapiens
  misc_RNA (1)...(19): siRNA sense strand
gagaagugguggaccuuuc

SEQ ID NO: 1549387 - RNA, 19 nt, Homo sapiens
  misc_RNA (1)...(19): siRNA sense strand
gagaugaagccucuaggaa

SEQ ID NO: 1549388 - RNA, 19 nt, Homo sapiens
  misc_RNA (1)...(19): siRNA sense strand
cagcguaacuucaaaugag

SEQ ID NO: 1549389 - RNA, 19 nt, Homo sapiens
  misc_RNA (1)...(19): siRNA sense strand
caaucaggguccacagaaa

SEQ ID NO: 1549390 - RNA, 19 nt, Homo sapiens
  misc_RNA (1)...(19): siRNA sense strand
gggaaaagguggaaacaga

SEQ ID NO: 1549391 - RNA, 19 nt, Homo sapiens
  misc_RNA (1)...(19): siRNA sense strand
gaaggaaagaagaaagaug

SEQ ID NO: 1549392 - RNA, 19 nt, Homo sapiens
  misc_RNA (1)...(19): siRNA sense strand
gggaagagaaucuacuguu

SEQ ID NO: 1549393 - RNA, 19 nt, Homo sapiens
  misc_RNA (1)...(19): siRNA sense strand
agaaagaauucccaaagag

SEQ ID NO: 1549394 - RNA, 19 nt, Homo sapiens
  misc_RNA (1)...(19): siRNA sense strand
ccagaaguauuggacagaa

SEQ ID NO: 1549395 - RNA, 19 nt, Homo sapiens
  misc_RNA (1)...(19): siRNA sense strand
caggaaacauggagcagau

SEQ ID NO: 1549396 - RNA, 19 nt, Homo sapiens
  misc_RNA (1)...(19): siRNA sense strand
gagcauccagcacgaaaug

SEQ ID NO: 1549397 - RNA, 19 nt, Homo sapiens
  misc_RNA (1)...(19): siRNA sense strand
gggcugaaaccaaagaaga

SEQ ID NO: 1549398 - RNA, 19 nt, Homo sapiens
  misc_RNA (1)...(19): siRNA sense strand
gcauccagcacgaaaugua

SEQ ID NO: 1549399 - RNA, 19 nt, Homo sapiens
  misc_RNA (1)...(19): siRNA sense strand
gcacagugggaaaggauga

SEQ ID NO: 1549400 - RNA, 19 nt, Homo sapiens
  misc_RNA (1)...(19): siRNA sense strand
ggaaacagacauggagaau

SEQ ID NO: 1549401 - RNA, 19 nt, Homo sapiens
  misc_RNA (1)...(19): siRNA sense strand
ggcaggagcauauguggaa

SEQ ID NO: 1549402 - RNA, 19 nt, Homo sapiens
  misc_RNA (1)...(19): siRNA sense strand
aagagaaucuacuguugau

SEQ ID NO: 1549403 - RNA, 19 nt, Homo sapiens
  misc_RNA (1)...(19): siRNA sense strand
ggaaacauggagcagauuc

SEQ ID NO: 1549404 - RNA, 19 nt, Homo sapiens
  misc_RNA (1)...(19): siRNA sense strand
aaagaauucccaaagagaa

SEQ ID NO: 1549405 - RNA, 19 nt, Homo sapiens
  misc_RNA (1)...(19): siRNA sense strand
gaaacagacauggagaaug

SEQ ID NO: 1549406 - RNA, 19 nt, Homo sapiens
  misc_RNA (1)...(19): siRNA sense strand
gcacugggaagagaaucua

SEQ ID NO: 1549407 - RNA, 19 nt, Homo sapiens
  misc_RNA (1)...(19): siRNA sense strand
ggagcauccauacuaauga

SEQ ID NO: 1549408 - RNA, 19 nt, Homo sapiens
  misc_RNA (1)...(19): siRNA sense strand
uguaacaccagaaguauug

SEQ ID NO: 1549409 - RNA, 19 nt, Homo sapiens
  misc_RNA (1)...(19): siRNA sense strand
gcaggagcauauguggaaa

SEQ ID NO: 1549410 - RNA, 19 nt, Homo sapiens
  misc_RNA (1)...(19): siRNA sense strand
ugaaggggcugaaaccaaa

SEQ ID NO: 1549411 - RNA, 19 nt, Homo sapiens
  misc_RNA (1)...(19): siRNA sense strand
cagaaggaaagaagaaaga

SEQ ID NO: 1549412 - RNA, 19 nt, Homo sapiens
  misc_RNA (1)...(19): siRNA sense strand
agaagaaacaggagaagug

SEQ ID NO: 1549413 - RNA, 19 nt, Homo sapiens
  misc_RNA (1)...(19): siRNA sense strand
ugaagaggaccaacgcauu

SEQ ID NO: 1549414 - RNA, 19 nt, Homo sapiens
  misc_RNA (1)...(19): siRNA sense strand
gaaacauggagcagauuca

SEQ ID NO: 1549415 - RNA, 19 nt, Homo sapiens
  misc_RNA (1)...(19): siRNA sense strand
gcaggcagcaguagagaag

SEQ ID NO: 1549416 - RNA, 19 nt, Homo sapiens
  misc_RNA (1)...(19): siRNA sense strand
agaaugagaaagugaguga

SEQ ID NO: 1549417 - RNA, 19 nt, Homo sapiens
  misc_RNA (1)...(19): siRNA sense strand
caacugcagaagaaaguga

SEQ ID NO: 1549418 - RNA, 19 nt, Homo sapiens
  misc_RNA (1)...(19): siRNA sense strand
cagcagaaggaaagaagaa

SEQ ID NO: 1549419 - RNA, 19 nt, Homo sapiens
  misc_RNA (1)...(19): siRNA sense strand
uacaaaagcucaagguuuc

SEQ ID NO: 1549420 - RNA, 19 nt, Homo sapiens
  misc_RNA (1)...(19): siRNA sense strand
agacauggagaaugagaaa

SEQ ID NO: 1549421 - RNA, 19 nt, Homo sapiens
  misc_RNA (1)...(19): siRNA sense strand
cagcagcgcccucaacaag

SEQ ID NO: 1549422 - RNA, 19 nt, Homo sapiens
  misc_RNA (1)...(19): siRNA sense strand
ccaaucaggguccacagaa

SEQ ID NO: 1549423 - RNA, 19 nt, Homo sapiens
  misc_RNA (1)...(19): siRNA sense strand
gccuacagcuaaugguguu

SEQ ID NO: 1549424 - RNA, 19 nt, Homo sapiens
  misc_RNA (1)...(19): siRNA sense strand
ucaaccagguggcaaagag

SEQ ID NO: 1549425 - RNA, 19 nt, Homo sapiens
  misc_RNA (1)...(19): siRNA sense strand
ugaaaccaaagaagaagaa

SEQ ID NO: 1549426 - RNA, 19 nt, Homo sapiens
  misc_RNA (1)...(19): siRNA sense strand
gaaggaauaguuggaagca

SEQ ID NO: 1549427 - RNA, 19 nt, Homo sapiens
  misc_RNA (1)...(19): siRNA sense strand
ggaggucacugagaaucca

SEQ ID NO: 1549428 - RNA, 19 nt, Homo sapiens
  misc_RNA (1)...(19): siRNA sense strand
gcagaaggaaagaagaaag

SEQ ID NO: 1549429 - RNA, 19 nt, Homo sapiens
  misc_RNA (1)...(19): siRNA sense strand
gagaauguaacaccagaag

SEQ ID NO: 1549430 - RNA, 19 nt, Homo sapiens
  misc_RNA (1)...(19): siRNA sense strand
ggagaagugguggaccuuu

SEQ ID NO: 1549431 - RNA, 19 nt, Homo sapiens
  misc_RNA (1)...(19): siRNA sense strand
gaaaccaaagaagaagaaa

SEQ ID NO: 1549432 - RNA, 19 nt, Homo sapiens
  misc_RNA (1)...(19): siRNA sense strand
aaaagccuguuaugaauga

SEQ ID NO: 1549433 - RNA, 19 nt, Homo sapiens
  misc_RNA (1)...(19): siRNA sense strand
aggaacaacugagaacguu

SEQ ID NO: 1549434 - RNA, 19 nt, Homo sapiens
  misc_RNA (1)...(19): siRNA sense strand
cguucugacucugcaaaua

SEQ ID NO: 1549435 - RNA, 19 nt, Homo sapiens
  misc_RNA (1)...(19): siRNA sense strand
ugaaucuccagaaauauug

SEQ ID NO: 1549436 - RNA, 19 nt, Homo sapiens
  misc_RNA (1)...(19): siRNA sense strand
cuagaaagaauucccaaag

SEQ ID NO: 1549437 - RNA, 19 nt, Homo sapiens
  misc_RNA (1)...(19): siRNA sense strand
ggagagggacuggaggaau

SEQ ID NO: 1549438 - RNA, 19 nt, Homo sapiens
  misc_RNA (1)...(19): siRNA sense strand
agaagaagaaacaggagaa

SEQ ID NO: 1549439 - RNA, 19 nt, Homo sapiens
  misc_RNA (1)...(19): siRNA sense strand
gcauccauacuaaugaaga

SEQ ID NO: 1549440 - RNA, 19 nt, Homo sapiens
  misc_RNA (1)...(19): siRNA sense strand
cacaugcacugggaagaga

SEQ ID NO: 1549441 - RNA, 19 nt, Homo sapiens
  misc_RNA (1)...(19): siRNA sense strand
caauuuccaaagagaauga

SEQ ID NO: 1549442 - RNA, 19 nt, Homo sapiens
  misc_RNA (1)...(19): siRNA sense strand
guucugacucugcaaauag

SEQ ID NO: 1549443 - RNA, 19 nt, Homo sapiens
  misc_RNA (1)...(19): siRNA sense strand
gaagaagaaacaggagaag

SEQ ID NO: 1549444 - RNA, 19 nt, Homo sapiens
  misc_RNA (1)...(19): siRNA sense strand
ccauaaaacuccugaaggu

SEQ ID NO: 1549445 - RNA, 19 nt, Homo sapiens
  misc_RNA (1)...(19): siRNA sense strand
agaaugaaucuccagaaau

SEQ ID NO: 1549446 - RNA, 19 nt, Homo sapiens
  misc_RNA (1)...(19): siRNA sense strand
gcagcaacuucaggcaaca

SEQ ID NO: 1549447 - RNA, 19 nt, Homo sapiens
  misc_RNA (1)...(19): siRNA sense strand
aaccaaagaagaagaaaca

SEQ ID NO: 1549448 - RNA, 19 nt, Homo sapiens
  misc_RNA (1)...(19): siRNA sense strand
ggaccaacgcauugaaggu

SEQ ID NO: 1549449 - RNA, 19 nt, Homo sapiens
  misc_RNA (1)...(19): siRNA sense strand
gcauauguggaaaugauca

SEQ ID NO: 1549450 - RNA, 19 nt, Homo sapiens
  misc_RNA (1)...(19): siRNA sense strand
gcaacuucaggcaacauug

SEQ ID NO: 1549451 - RNA, 19 nt, Homo sapiens
  misc_RNA (1)...(19): siRNA sense strand
ggaugccacagaccaauca

SEQ ID NO: 1549452 - RNA, 19 nt, Homo sapiens
  misc_RNA (1)...(19): siRNA sense strand
gcagcagaaggaaagaaga

SEQ ID NO: 1549453 - RNA, 19 nt, Homo sapiens
  misc_RNA (1)...(19): siRNA sense strand
ggcugaaaccaaagaagaa

SEQ ID NO: 1549454 - RNA, 19 nt, Homo sapiens
  misc_RNA (1)...(19): siRNA sense strand
cauggagaaugagaaagug

SEQ ID NO: 1549455 - RNA, 19 nt, Homo sapiens
  misc_RNA (1)...(19): siRNA sense strand
gaaaagccuguuaugaaug

SEQ ID NO: 1549456 - RNA, 19 nt, Homo sapiens
  misc_RNA (1)...(19): siRNA sense strand
caacuucaggcaacauugg

SEQ ID NO: 1549457 - RNA, 19 nt, Homo sapiens
  misc_RNA (1)...(19): siRNA sense strand
ucacugagaauccacaaac

SEQ ID NO: 1549458 - RNA, 19 nt, Homo sapiens
  misc_RNA (1)...(19): siRNA sense strand
ggcaauguacaaagggaaa

SEQ ID NO: 1549459 - RNA, 19 nt, Homo sapiens
  misc_RNA (1)...(19): siRNA sense strand
uguagaggcaggagcauau

SEQ ID NO: 1549460 - RNA, 19 nt, Homo sapiens
  misc_RNA (1)...(19): siRNA sense strand
aaacauggagcagauucaa

SEQ ID NO: 1549461 - RNA, 19 nt, Homo sapiens
  misc_RNA (1)...(19): siRNA sense strand
uggaaaagccuguuaugaa

SEQ ID NO: 1549462 - RNA, 19 nt, Homo sapiens
  misc_RNA (1)...(19): siRNA sense strand
cagaaguauuggacagaag

SEQ ID NO: 1549463 - RNA, 19 nt, Homo sapiens
  misc_RNA (1)...(19): siRNA sense strand
ccgcuucuagaaacaauuu

SEQ ID NO: 1549464 - RNA, 19 nt, Homo sapiens
  misc_RNA (1)...(19): siRNA sense strand
uacuguugauggcaaugua

SEQ ID NO: 1549465 - RNA, 19 nt, Homo sapiens
  misc_RNA (1)...(19): siRNA sense strand
ggagaaugagaaagugagu

SEQ ID NO: 1549466 - RNA, 19 nt, Homo sapiens
  misc_RNA (1)...(19): siRNA sense strand
ggaaagcaguacaugauuu

SEQ ID NO: 1549467 - RNA, 19 nt, Homo sapiens
  misc_RNA (1)...(19): siRNA sense strand
gaaagaagcugcugaaaac

SEQ ID NO: 1549468 - RNA, 19 nt, Homo sapiens
  misc_RNA (1)...(19): siRNA sense strand
gaagaaagaagcugcugaa

SEQ ID NO: 1549469 - RNA, 19 nt, Homo sapiens
  misc_RNA (1)...(19): siRNA sense strand
ccaauuugccuugauguua

SEQ ID NO: 1549470 - RNA, 19 nt, Homo sapiens
  misc_RNA (1)...(19): siRNA sense strand
gagagaaccaccaccaauu

SEQ ID NO: 1549471 - RNA, 19 nt, Homo sapiens
  misc_RNA (1)...(19): siRNA sense strand
ggaaagggaaggagucaga

SEQ ID NO: 1549472 - RNA, 19 nt, Homo sapiens
  misc_RNA (1)...(19): siRNA sense strand
ggccaaauuuccacuuuca

SEQ ID NO: 1549473 - RNA, 19 nt, Homo sapiens
  misc_RNA (1)...(19): siRNA sense strand
caauuugccuugauguuag

SEQ ID NO: 1549474 - RNA, 19 nt, Homo sapiens
  misc_RNA (1)...(19): siRNA sense strand
gaaguucaccugcacaucu

SEQ ID NO: 1549475 - RNA, 19 nt, Homo sapiens
  misc_RNA (1)...(19): siRNA sense strand
acucugggauuaaugcuaa

SEQ ID NO: 1549476 - RNA, 19 nt, Homo sapiens
  misc_RNA (1)...(19): siRNA sense strand
caucaagaaugugagagaa

SEQ ID NO: 1549477 - RNA, 19 nt, Homo sapiens
  misc_RNA (1)...(19): siRNA sense strand
ugaagacucugggauuaau

SEQ ID NO: 1549478 - RNA, 19 nt, Homo sapiens
  misc_RNA (1)...(19): siRNA sense strand
ccaccaauuugccuugaug

SEQ ID NO: 1549479 - RNA, 19 nt, Homo sapiens
  misc_RNA (1)...(19): siRNA sense strand
gagaaccaccaccaauuug

SEQ ID NO: 1549480 - RNA, 19 nt, Homo sapiens
  misc_RNA (1)...(19): siRNA sense strand
agagaaccaccaccaauuu

SEQ ID NO: 1549481 - RNA, 19 nt, Homo sapiens
  misc_RNA (1)...(19): siRNA sense strand
ggagccaaaggccaaauuu

SEQ ID NO: 1549482 - RNA, 19 nt, Homo sapiens
  misc_RNA (1)...(19): siRNA sense strand
gcuguuagcccgaagaaag

SEQ ID NO: 1549483 - RNA, 19 nt, Homo sapiens
  misc_RNA (1)...(19): siRNA sense strand
gaaagcaguacaugauuuu

SEQ ID NO: 1549484 - RNA, 19 nt, Homo sapiens
  misc_RNA (1)...(19): siRNA sense strand
gggauuaaugcuaaauuug

SEQ ID NO: 1549485 - RNA, 19 nt, Homo sapiens
  misc_RNA (1)...(19): siRNA sense strand
gccacugccucauuuaaca

SEQ ID NO: 1549486 - RNA, 19 nt, Homo sapiens
  misc_RNA (1)...(19): siRNA sense strand
auugaagacucugggauua

SEQ ID NO: 1549487 - RNA, 19 nt, Homo sapiens
  misc_RNA (1)...(19): siRNA sense strand
uaacaccauugaagacucu

SEQ ID NO: 1549488 - RNA, 19 nt, Homo sapiens
  misc_RNA (1)...(19): siRNA sense strand
agaugccacugccucauuu

SEQ ID NO: 1549489 - RNA, 19 nt, Homo sapiens
  misc_RNA (1)...(19): siRNA sense strand
gugaaugcuguguaugaua

SEQ ID NO: 1549490 - RNA, 19 nt, Homo sapiens
  misc_RNA (1)...(19): siRNA sense strand
guuaagucaucaggagauu

SEQ ID NO: 1549491 - RNA, 19 nt, Homo sapiens
  misc_RNA (1)...(19): siRNA sense strand
gaaccuauucuuccuaucc

SEQ ID NO: 1549492 - RNA, 19 nt, Homo sapiens
  misc_RNA (1)...(19): siRNA sense strand
aaggccaaauuuccacuuu

SEQ ID NO: 1549493 - RNA, 19 nt, Homo sapiens
  misc_RNA (1)...(19): siRNA sense strand
gagccaaaggccaaauuuc

SEQ ID NO: 1549494 - RNA, 19 nt, Homo sapiens
  misc_RNA (1)...(19): siRNA sense strand
ccaaaacugugaaagacuu

SEQ ID NO: 1549495 - RNA, 19 nt, Homo sapiens
  misc_RNA (1)...(19): siRNA sense strand
cuaacaacguuugauucuu

SEQ ID NO: 1549496 - RNA, 19 nt, Homo sapiens
  misc_RNA (1)...(19): siRNA sense strand
ugagagaaccaccaccaau

SEQ ID NO: 1549497 - RNA, 19 nt, Homo sapiens
  misc_RNA (1)...(19): siRNA sense strand
cauugaagacucugggauu

SEQ ID NO: 1549498 - RNA, 19 nt, Homo sapiens
  misc_RNA (1)...(19): siRNA sense strand
aaacagcguacaucuaugg

SEQ ID NO: 1549499 - RNA, 19 nt, Homo sapiens
  misc_RNA (1)...(19): siRNA sense strand
gaugccacugccucauuua

SEQ ID NO: 1549500 - RNA, 19 nt, Homo sapiens
  misc_RNA (1)...(19): siRNA sense strand
gaagacucugggauuaaug

SEQ ID NO: 1549501 - RNA, 19 nt, Homo sapiens
  misc_RNA (1)...(19): siRNA sense strand
cauuuaacaccauugaaga

SEQ ID NO: 1549502 - RNA, 19 nt, Homo sapiens
  misc_RNA (1)...(19): siRNA sense strand
ucaccugcacaucuuguuu

SEQ ID NO: 1549503 - RNA, 19 nt, Homo sapiens
  misc_RNA (1)...(19): siRNA sense strand
ggagucagagcgcgagaag

SEQ ID NO: 1549504 - RNA, 19 nt, Homo sapiens
  misc_RNA (1)...(19): siRNA sense strand
agaaagaagcugcugaaaa

SEQ ID NO: 1549505 - RNA, 19 nt, Homo sapiens
  misc_RNA (1)...(19): siRNA sense strand
uaagucaucaggagauugg

SEQ ID NO: 1549506 - RNA, 19 nt, Homo sapiens
  misc_RNA (1)...(19): siRNA sense strand
gaggaaagggaaggaguca

SEQ ID NO: 1549507 - RNA, 19 nt, Homo sapiens
  misc_RNA (1)...(19): siRNA sense strand
uggaaagcaguacaugauu

SEQ ID NO: 1549508 - RNA, 19 nt, Homo sapiens
  misc_RNA (1)...(19): siRNA sense strand
ucauuuaacaccauugaag

SEQ ID NO: 1549509 - RNA, 19 nt, Homo sapiens
  misc_RNA (1)...(19): siRNA sense strand
aaguucaccugcacaucuu

SEQ ID NO: 1549510 - RNA, 19 nt, Homo sapiens
  misc_RNA (1)...(19): siRNA sense strand
caccaccaauuugccuuga

SEQ ID NO: 1549511 - RNA, 19 nt, Homo sapiens
  misc_RNA (1)...(19): siRNA sense strand
agacuuucaggaagaugua

SEQ ID NO: 1549512 - RNA, 19 nt, Homo sapiens
  misc_RNA (1)...(19): siRNA sense strand
ugugaaugcuguguaugau

SEQ ID NO: 1549513 - RNA, 19 nt, Homo sapiens
  misc_RNA (1)...(19): siRNA sense strand
gccaaaggccaaauuucca

SEQ ID NO: 1549514 - RNA, 19 nt, Homo sapiens
  misc_RNA (1)...(19): siRNA sense strand
aagaugccacugccucauu

SEQ ID NO: 1549515 - RNA, 19 nt, Homo sapiens
  misc_RNA (1)...(19): siRNA sense strand
gagauuggaaagcaguaca

SEQ ID NO: 1549516 - RNA, 19 nt, Homo sapiens
  misc_RNA (1)...(19): siRNA sense strand
ggaaagcaguacaugauuu

SEQ ID NO: 1549517 - RNA, 19 nt, Homo sapiens
  misc_RNA (1)...(19): siRNA sense strand
gaaagaagcugcugaaaac

SEQ ID NO: 1549518 - RNA, 19 nt, Homo sapiens
  misc_RNA (1)...(19): siRNA sense strand
gaagaaagaagcugcugaa

SEQ ID NO: 1549519 - RNA, 19 nt, Homo sapiens
  misc_RNA (1)...(19): siRNA sense strand
ccaauuugccuugauguua

SEQ ID NO: 1549520 - RNA, 19 nt, Homo sapiens
  misc_RNA (1)...(19): siRNA sense strand
gagagaaccaccaccaauu

SEQ ID NO: 1549521 - RNA, 19 nt, Homo sapiens
  misc_RNA (1)...(19): siRNA sense strand
ggaaagggaaggagucaga

SEQ ID NO: 1549522 - RNA, 19 nt, Homo sapiens
  misc_RNA (1)...(19): siRNA sense strand
ggccaaauuuccacuuuca

SEQ ID NO: 1549523 - RNA, 19 nt, Homo sapiens
  misc_RNA (1)...(19): siRNA sense strand
caauuugccuugauguuag

SEQ ID NO: 1549524 - RNA, 19 nt, Homo sapiens
  misc_RNA (1)...(19): siRNA sense strand
gaaguucaccugcacaucu

SEQ ID NO: 1549525 - RNA, 19 nt, Homo sapiens
  misc_RNA (1)...(19): siRNA sense strand
acucugggauuaaugcuaa

SEQ ID NO: 1549526 - RNA, 19 nt, Homo sapiens
  misc_RNA (1)...(19): siRNA sense strand
caucaagaaugugagagaa

SEQ ID NO: 1549527 - RNA, 19 nt, Homo sapiens
  misc_RNA (1)...(19): siRNA sense strand
ugaagacucugggauuaau

SEQ ID NO: 1549528 - RNA, 19 nt, Homo sapiens
  misc_RNA (1)...(19): siRNA sense strand
ccaccaauuugccuugaug

SEQ ID NO: 1549529 - RNA, 19 nt, Homo sapiens
  misc_RNA (1)...(19): siRNA sense strand
gagaaccaccaccaauuug

SEQ ID NO: 1549530 - RNA, 19 nt, Homo sapiens
  misc_RNA (1)...(19): siRNA sense strand
agagaaccaccaccaauuu

SEQ ID NO: 1549531 - RNA, 19 nt, Homo sapiens
  misc_RNA (1)...(19): siRNA sense strand
ggagccaaaggccaaauuu

SEQ ID NO: 1549532 - RNA, 19 nt, Homo sapiens
  misc_RNA (1)...(19): siRNA sense strand
gcuguuagcccgaagaaag

SEQ ID NO: 1549533 - RNA, 19 nt, Homo sapiens
  misc_RNA (1)...(19): siRNA sense strand
gaaagcaguacaugauuuu

SEQ ID NO: 1549534 - RNA, 19 nt, Homo sapiens
  misc_RNA (1)...(19): siRNA sense strand
gggauuaaugcuaaauuug

SEQ ID NO: 1549535 - RNA, 19 nt, Homo sapiens
  misc_RNA (1)...(19): siRNA sense strand
gccacugccucauuuaaca

SEQ ID NO: 1549536 - RNA, 19 nt, Homo sapiens
  misc_RNA (1)...(19): siRNA sense strand
auugaagacucugggauua

SEQ ID NO: 1549537 - RNA, 19 nt, Homo sapiens
  misc_RNA (1)...(19): siRNA sense strand
uaacaccauugaagacucu

SEQ ID NO: 1549538 - RNA, 19 nt, Homo sapiens
  misc_RNA (1)...(19): siRNA sense strand
agaugccacugccucauuu

SEQ ID NO: 1549539 - RNA, 19 nt, Homo sapiens
  misc_RNA (1)...(19): siRNA sense strand
gugaaugcuguguaugaua

SEQ ID NO: 1549540 - RNA, 19 nt, Homo sapiens
  misc_RNA (1)...(19): siRNA sense strand
guuaagucaucaggagauu

SEQ ID NO: 1549541 - RNA, 19 nt, Homo sapiens
  misc_RNA (1)...(19): siRNA sense strand
gaaccuauucuuccuaucc

SEQ ID NO: 1549542 - RNA, 19 nt, Homo sapiens
  misc_RNA (1)...(19): siRNA sense strand
aaggccaaauuuccacuuu

SEQ ID NO: 1549543 - RNA, 19 nt, Homo sapiens
  misc_RNA (1)...(19): siRNA sense strand
gagccaaaggccaaauuuc

SEQ ID NO: 1549544 - RNA, 19 nt, Homo sapiens
  misc_RNA (1)...(19): siRNA sense strand
ccaaaacugugaaagacuu

SEQ ID NO: 1549545 - RNA, 19 nt, Homo sapiens
  misc_RNA (1)...(19): siRNA sense strand
cuaacaacguuugauucuu

SEQ ID NO: 1549546 - RNA, 19 nt, Homo sapiens
  misc_RNA (1)...(19): siRNA sense strand
ugagagaaccaccaccaau

SEQ ID NO: 1549547 - RNA, 19 nt, Homo sapiens
  misc_RNA (1)...(19): siRNA sense strand
cauugaagacucugggauu

SEQ ID NO: 1549548 - RNA, 19 nt, Homo sapiens
  misc_RNA (1)...(19): siRNA sense strand
aaacagcguacaucuaugg

SEQ ID NO: 1549549 - RNA, 19 nt, Homo sapiens
  misc_RNA (1)...(19): siRNA sense strand
gaugccacugccucauuua

SEQ ID NO: 1549550 - RNA, 19 nt, Homo sapiens
  misc_RNA (1)...(19): siRNA sense strand
gaagacucugggauuaaug

SEQ ID NO: 1549551 - RNA, 19 nt, Homo sapiens
  misc_RNA (1)...(19): siRNA sense strand
cauuuaacaccauugaaga

SEQ ID NO: 1549552 - RNA, 19 nt, Homo sapiens
  misc_RNA (1)...(19): siRNA sense strand
ucaccugcacaucuuguuu

SEQ ID NO: 1549553 - RNA, 19 nt, Homo sapiens
  misc_RNA (1)...(19): siRNA sense strand
ggagucagagcgcgagaag

SEQ ID NO: 1549554 - RNA, 19 nt, Homo sapiens
  misc_RNA (1)...(19): siRNA sense strand
agaaagaagcugcugaaaa

SEQ ID NO: 1549555 - RNA, 19 nt, Homo sapiens
  misc_RNA (1)...(19): siRNA sense strand
uaagucaucaggagauugg

SEQ ID NO: 1549556 - RNA, 19 nt, Homo sapiens
  misc_RNA (1)...(19): siRNA sense strand
gaggaaagggaaggaguca

SEQ ID NO: 1549557 - RNA, 19 nt, Homo sapiens
  misc_RNA (1)...(19): siRNA sense strand
uggaaagcaguacaugauu

SEQ ID NO: 1549558 - RNA, 19 nt, Homo sapiens
  misc_RNA (1)...(19): siRNA sense strand
ucauuuaacaccauugaag

SEQ ID NO: 1549559 - RNA, 19 nt, Homo sapiens
  misc_RNA (1)...(19): siRNA sense strand
aaguucaccugcacaucuu

SEQ ID NO: 1549560 - RNA, 19 nt, Homo sapiens
  misc_RNA (1)...(19): siRNA sense strand
caccaccaauuugccuuga

SEQ ID NO: 1549561 - RNA, 19 nt, Homo sapiens
  misc_RNA (1)...(19): siRNA sense strand
agacuuucaggaagaugua

SEQ ID NO: 1549562 - RNA, 19 nt, Homo sapiens
  misc_RNA (1)...(19): siRNA sense strand
ugugaaugcuguguaugau

SEQ ID NO: 1549563 - RNA, 19 nt, Homo sapiens
  misc_RNA (1)...(19): siRNA sense strand
gccaaaggccaaauuucca

SEQ ID NO: 1549564 - RNA, 19 nt, Homo sapiens
  misc_RNA (1)...(19): siRNA sense strand
aagaugccacugccucauu

SEQ ID NO: 1549565 - RNA, 19 nt, Homo sapiens
  misc_RNA (1)...(19): siRNA sense strand
gagauuggaaagcaguaca

SEQ ID NO: 1549566 - RNA, 19 nt, Homo sapiens
  misc_RNA (1)...(19): siRNA sense strand
gaagaaagcccucagaauc

SEQ ID NO: 1549567 - RNA, 19 nt, Homo sapiens
  misc_RNA (1)...(19): siRNA sense strand
gugccgagcugcaugacua

SEQ ID NO: 1549568 - RNA, 19 nt, Homo sapiens
  misc_RNA (1)...(19): siRNA sense strand
aaagguggcucuaucaucu

SEQ ID NO: 1549569 - RNA, 19 nt, Homo sapiens
  misc_RNA (1)...(19): siRNA sense strand
gaugacaggcacaauagaa

SEQ ID NO: 1549570 - RNA, 19 nt, Homo sapiens
  misc_RNA (1)...(19): siRNA sense strand
gaaagguggcucuaucauc

SEQ ID NO: 1549571 - RNA, 19 nt, Homo sapiens
  misc_RNA (1)...(19): siRNA sense strand
gagaaagguggcucuauca

SEQ ID NO: 1549572 - RNA, 19 nt, Homo sapiens
  misc_RNA (1)...(19): siRNA sense strand
gcucuaucaucuuacaaug

SEQ ID NO: 1549573 - RNA, 19 nt, Homo sapiens
  misc_RNA (1)...(19): siRNA sense strand
gggaguacuucugcaucua

SEQ ID NO: 1549574 - RNA, 19 nt, Homo sapiens
  misc_RNA (1)...(19): siRNA sense strand
ggaguacuucugcaucuau

SEQ ID NO: 1549575 - RNA, 19 nt, Homo sapiens
  misc_RNA (1)...(19): siRNA sense strand
aaugaugacaggcacaaua

SEQ ID NO: 1549576 - RNA, 19 nt, Homo sapiens
  misc_RNA (1)...(19): siRNA sense strand
cugcaugacuacuucaaug

SEQ ID NO: 1549577 - RNA, 19 nt, Homo sapiens
  misc_RNA (1)...(19): siRNA sense strand
gggaacauuucugcagaga

SEQ ID NO: 1549578 - RNA, 19 nt, Homo sapiens
  misc_RNA (1)...(19): siRNA sense strand
gaaacaacggggaacauuu

SEQ ID NO: 1549579 - RNA, 19 nt, Homo sapiens
  misc_RNA (1)...(19): siRNA sense strand
cuacuucaauguccugagu

SEQ ID NO: 1549580 - RNA, 19 nt, Homo sapiens
  misc_RNA (1)...(19): siRNA sense strand
ggugccagguuccagauuc

SEQ ID NO: 1549581 - RNA, 19 nt, Homo sapiens
  misc_RNA (1)...(19): siRNA sense strand
ucuaucaucuuacaauguc

SEQ ID NO: 1549582 - RNA, 19 nt, Homo sapiens
  misc_RNA (1)...(19): siRNA sense strand
acuucaauguccugaguua

SEQ ID NO: 1549583 - RNA, 19 nt, Homo sapiens
  misc_RNA (1)...(19): siRNA sense strand
agguggcucuaucaucuua

SEQ ID NO: 1549584 - RNA, 19 nt, Homo sapiens
  misc_RNA (1)...(19): siRNA sense strand
cgagcugcaugacuacuuc

SEQ ID NO: 1549585 - RNA, 19 nt, Homo sapiens
  misc_RNA (1)...(19): siRNA sense strand
ucgcugaccgugaacgaua

SEQ ID NO: 1549586 - RNA, 19 nt, Homo sapiens
  misc_RNA (1)...(19): siRNA sense strand
uaacugcagcuucuucaca

SEQ ID NO: 1549587 - RNA, 19 nt, Homo sapiens
  misc_RNA (1)...(19): siRNA sense strand
ggaaugaugacaggcacaa

SEQ ID NO: 1549588 - RNA, 19 nt, Homo sapiens
  misc_RNA (1)...(19): siRNA sense strand
gcuggugucuccuccugau

SEQ ID NO: 1549589 - RNA, 19 nt, Homo sapiens
  misc_RNA (1)...(19): siRNA sense strand
agaagaaagcccucagaau

SEQ ID NO: 1549590 - RNA, 19 nt, Homo sapiens
  misc_RNA (1)...(19): siRNA sense strand
acagaagccuggguaacug

SEQ ID NO: 1549591 - RNA, 19 nt, Homo sapiens
  misc_RNA (1)...(19): siRNA sense strand
cagcuucuggccauuugua

SEQ ID NO: 1549592 - RNA, 19 nt, Homo sapiens
  misc_RNA (1)...(19): siRNA sense strand
gaguacuucugcaucuauc

SEQ ID NO: 1549593 - RNA, 19 nt, Homo sapiens
  misc_RNA (1)...(19): siRNA sense strand
uccagucgcugaccgugaa

SEQ ID NO: 1549594 - RNA, 19 nt, Homo sapiens
  misc_RNA (1)...(19): siRNA sense strand
guggucgcguugacuagaa

SEQ ID NO: 1549595 - RNA, 19 nt, Homo sapiens
  misc_RNA (1)...(19): siRNA sense strand
aagaagaaagcccucagaa

SEQ ID NO: 1549596 - RNA, 19 nt, Homo sapiens
  misc_RNA (1)...(19): siRNA sense strand
aaagaagaaagcccucaga

SEQ ID NO: 1549597 - RNA, 19 nt, Homo sapiens
  misc_RNA (1)...(19): siRNA sense strand
agaaagcccucagaaucca

SEQ ID NO: 1549598 - RNA, 19 nt, Homo sapiens
  misc_RNA (1)...(19): siRNA sense strand
gacaggcacaauagaaaca

SEQ ID NO: 1549599 - RNA, 19 nt, Homo sapiens
  misc_RNA (1)...(19): siRNA sense strand
cagcuggacaggaggaaug

SEQ ID NO: 1549600 - RNA, 19 nt, Homo sapiens
  misc_RNA (1)...(19): siRNA sense strand
gguaacugcagcuucuuca

SEQ ID NO: 1549601 - RNA, 19 nt, Homo sapiens
  misc_RNA (1)...(19): siRNA sense strand
gcaugacuacuucaauguc

SEQ ID NO: 1549602 - RNA, 19 nt, Homo sapiens
  misc_RNA (1)...(19): siRNA sense strand
gggcguacacugggagaau

SEQ ID NO: 1549603 - RNA, 19 nt, Homo sapiens
  misc_RNA (1)...(19): siRNA sense strand
ucaauguccugaguuacag

SEQ ID NO: 1549604 - RNA, 19 nt, Homo sapiens
  misc_RNA (1)...(19): siRNA sense strand
ggacugugccgagcugcau

SEQ ID NO: 1549605 - RNA, 19 nt, Homo sapiens
  misc_RNA (1)...(19): siRNA sense strand
cgacgcugguggucaucug

SEQ ID NO: 1549606 - RNA, 19 nt, Homo sapiens
  misc_RNA (1)...(19): siRNA sense strand
cagagaagcuguucaaaug

SEQ ID NO: 1549607 - RNA, 19 nt, Homo sapiens
  misc_RNA (1)...(19): siRNA sense strand
gaagucagcucauauuaac

SEQ ID NO: 1549608 - RNA, 19 nt, Homo sapiens
  misc_RNA (1)...(19): siRNA sense strand
gugggaaguucuuuaaaua

SEQ ID NO: 1549609 - RNA, 19 nt, Homo sapiens
  misc_RNA (1)...(19): siRNA sense strand
gaacggcccuaugaaugua

SEQ ID NO: 1549610 - RNA, 19 nt, Homo sapiens
  misc_RNA (1)...(19): siRNA sense strand
cuaaagagcuacagaguca

SEQ ID NO: 1549611 - RNA, 19 nt, Homo sapiens
  misc_RNA (1)...(19): siRNA sense strand
gaaaguccauacuccagaa

SEQ ID NO: 1549612 - RNA, 19 nt, Homo sapiens
  misc_RNA (1)...(19): siRNA sense strand
agagaggucuuaugaaugu

SEQ ID NO: 1549613 - RNA, 19 nt, Homo sapiens
  misc_RNA (1)...(19): siRNA sense strand
ggagaacuuugcacucguu

SEQ ID NO: 1549614 - RNA, 19 nt, Homo sapiens
  misc_RNA (1)...(19): siRNA sense strand
caaagacgcacuuguucua

SEQ ID NO: 1549615 - RNA, 19 nt, Homo sapiens
  misc_RNA (1)...(19): siRNA sense strand
gcagaagugcuuucaagaa

SEQ ID NO: 1549616 - RNA, 19 nt, Homo sapiens
  misc_RNA (1)...(19): siRNA sense strand
gugggaagguguucuuaaa

SEQ ID NO: 1549617 - RNA, 19 nt, Homo sapiens
  misc_RNA (1)...(19): siRNA sense strand
gcagagaagcuguucaaau

SEQ ID NO: 1549618 - RNA, 19 nt, Homo sapiens
  misc_RNA (1)...(19): siRNA sense strand
gggaaguucuuuaaauaca

SEQ ID NO: 1549619 - RNA, 19 nt, Homo sapiens
  misc_RNA (1)...(19): siRNA sense strand
aaacagcccauguguguaa

SEQ ID NO: 1549620 - RNA, 19 nt, Homo sapiens
  misc_RNA (1)...(19): siRNA sense strand
gaagugcuuucaagaaguc

SEQ ID NO: 1549621 - RNA, 19 nt, Homo sapiens
  misc_RNA (1)...(19): siRNA sense strand
ggagaaaggcccuaugagu

SEQ ID NO: 1549622 - RNA, 19 nt, Homo sapiens
  misc_RNA (1)...(19): siRNA sense strand
caagaagucagcucauauu

SEQ ID NO: 1549623 - RNA, 19 nt, Homo sapiens
  misc_RNA (1)...(19): siRNA sense strand
gagaagcuguucaaaugca

SEQ ID NO: 1549624 - RNA, 19 nt, Homo sapiens
  misc_RNA (1)...(19): siRNA sense strand
cagaagugcuuucaagaag

SEQ ID NO: 1549625 - RNA, 19 nt, Homo sapiens
  misc_RNA (1)...(19): siRNA sense strand
gaaugugggaaguucuuua

SEQ ID NO: 1549626 - RNA, 19 nt, Homo sapiens
  misc_RNA (1)...(19): siRNA sense strand
gguaaaaccuucaguguuc

SEQ ID NO: 1549627 - RNA, 19 nt, Homo sapiens
  misc_RNA (1)...(19): siRNA sense strand
ggaaacaccagaagguuca

SEQ ID NO: 1549628 - RNA, 19 nt, Homo sapiens
  misc_RNA (1)...(19): siRNA sense strand
gaaagugcacauuggagaa

SEQ ID NO: 1549629 - RNA, 19 nt, Homo sapiens
  misc_RNA (1)...(19): siRNA sense strand
uuacccagcuggaggauga

SEQ ID NO: 1549630 - RNA, 19 nt, Homo sapiens
  misc_RNA (1)...(19): siRNA sense strand
ggaacggcccuaugaaugu

SEQ ID NO: 1549631 - RNA, 19 nt, Homo sapiens
  misc_RNA (1)...(19): siRNA sense strand
gauaacgcauucugaagag

SEQ ID NO: 1549632 - RNA, 19 nt, Homo sapiens
  misc_RNA (1)...(19): siRNA sense strand
cgucuaagcugaggaaaca

SEQ ID NO: 1549633 - RNA, 19 nt, Homo sapiens
  misc_RNA (1)...(19): siRNA sense strand
gggaagguguucuuaaagg

SEQ ID NO: 1549634 - RNA, 19 nt, Homo sapiens
  misc_RNA (1)...(19): siRNA sense strand
gcacaugggaaggucguua

SEQ ID NO: 1549635 - RNA, 19 nt, Homo sapiens
  misc_RNA (1)...(19): siRNA sense strand
gcccauguguguaaugaau

SEQ ID NO: 1549636 - RNA, 19 nt, Homo sapiens
  misc_RNA (1)...(19): siRNA sense strand
agaaacagcccaugugugu

SEQ ID NO: 1549637 - RNA, 19 nt, Homo sapiens
  misc_RNA (1)...(19): siRNA sense strand
gggaugugaugcuggagaa

SEQ ID NO: 1549638 - RNA, 19 nt, Homo sapiens
  misc_RNA (1)...(19): siRNA sense strand
ggagaaacagcccaugugu

SEQ ID NO: 1549639 - RNA, 19 nt, Homo sapiens
  misc_RNA (1)...(19): siRNA sense strand
gcagaagccaggagagguu

SEQ ID NO: 1549640 - RNA, 19 nt, Homo sapiens
  misc_RNA (1)...(19): siRNA sense strand
gcaaucggcaccagcaguu

SEQ ID NO: 1549641 - RNA, 19 nt, Homo sapiens
  misc_RNA (1)...(19): siRNA sense strand
agaagucagcucauauuaa

SEQ ID NO: 1549642 - RNA, 19 nt, Homo sapiens
  misc_RNA (1)...(19): siRNA sense strand
gggaacggcccuaugaaug

SEQ ID NO: 1549643 - RNA, 19 nt, Homo sapiens
  misc_RNA (1)...(19): siRNA sense strand
ugugggaaguucuuuaaau

SEQ ID NO: 1549644 - RNA, 19 nt, Homo sapiens
  misc_RNA (1)...(19): siRNA sense strand
uugaggaugugacgguaua

SEQ ID NO: 1549645 - RNA, 19 nt, Homo sapiens
  misc_RNA (1)...(19): siRNA sense strand
ccgcaaagacgcacuuguu

SEQ ID NO: 1549646 - RNA, 19 nt, Homo sapiens
  misc_RNA (1)...(19): siRNA sense strand
aagaagucagcucauauua

SEQ ID NO: 1549647 - RNA, 19 nt, Homo sapiens
  misc_RNA (1)...(19): siRNA sense strand
gcaaagacgcacuuguucu

SEQ ID NO: 1549648 - RNA, 19 nt, Homo sapiens
  misc_RNA (1)...(19): siRNA sense strand
gaagguucacacaggcaua

SEQ ID NO: 1549649 - RNA, 19 nt, Homo sapiens
  misc_RNA (1)...(19): siRNA sense strand
gaaacagcccaugugugua

SEQ ID NO: 1549650 - RNA, 19 nt, Homo sapiens
  misc_RNA (1)...(19): siRNA sense strand
agaaaggcccuaugagugu

SEQ ID NO: 1549651 - RNA, 19 nt, Homo sapiens
  misc_RNA (1)...(19): siRNA sense strand
ggacuugcaccuucgagau

SEQ ID NO: 1549652 - RNA, 19 nt, Homo sapiens
  misc_RNA (1)...(19): siRNA sense strand
ggaugugacgguauauuuc

SEQ ID NO: 1549653 - RNA, 19 nt, Homo sapiens
  misc_RNA (1)...(19): siRNA sense strand
ucaagaagucagcucauau

SEQ ID NO: 1549654 - RNA, 19 nt, Homo sapiens
  misc_RNA (1)...(19): siRNA sense strand
ucaguuggacccaucauug

SEQ ID NO: 1549655 - RNA, 19 nt, Homo sapiens
  misc_RNA (1)...(19): siRNA sense strand
gaggaaacaccagaagguu

SEQ ID NO: 1549656 - RNA, 19 nt, Homo sapiens
  misc_RNA (1)...(19): siRNA sense strand
ugauaacgcauucugaaga

SEQ ID NO: 1549657 - RNA, 19 nt, Homo sapiens
  misc_RNA (1)...(19): siRNA sense strand
uucaagaagucagcucaua

SEQ ID NO: 1549658 - RNA, 19 nt, Homo sapiens
  misc_RNA (1)...(19): siRNA sense strand
gggaaaaccuucacuacca

SEQ ID NO: 1549659 - RNA, 19 nt, Homo sapiens
  misc_RNA (1)...(19): siRNA sense strand
ccauguguguaaugaaugu

SEQ ID NO: 1549660 - RNA, 19 nt, Homo sapiens
  misc_RNA (1)...(19): siRNA sense strand
cagcccauguguguaauga

SEQ ID NO: 1549661 - RNA, 19 nt, Homo sapiens
  misc_RNA (1)...(19): siRNA sense strand
gagugcagcaaauguggua

SEQ ID NO: 1549662 - RNA, 19 nt, Homo sapiens
  misc_RNA (1)...(19): siRNA sense strand
cugagcaucuaaagagcua

SEQ ID NO: 1549663 - RNA, 19 nt, Homo sapiens
  misc_RNA (1)...(19): siRNA sense strand
gaacuuugcacucguuagc

SEQ ID NO: 1549664 - RNA, 19 nt, Homo sapiens
  misc_RNA (1)...(19): siRNA sense strand
gcuggaggaugaugaacag

SEQ ID NO: 1549665 - RNA, 19 nt, Homo sapiens
  misc_RNA (1)...(19): siRNA sense strand
gcacaagaaaguccauacu

SEQ ID NO: 1549666 - RNA, 19 nt, Homo sapiens
  misc_RNA (1)...(19): siRNA sense strand
gauucacacuggagaaagg

SEQ ID NO: 1549667 - RNA, 19 nt, Homo sapiens
  misc_RNA (1)...(19): siRNA sense strand
gaccaucugauaacgcauu

SEQ ID NO: 1549668 - RNA, 19 nt, Homo sapiens
  misc_RNA (1)...(19): siRNA sense strand
aggcagaagugcuuucaag

SEQ ID NO: 1549669 - RNA, 19 nt, Homo sapiens
  misc_RNA (1)...(19): siRNA sense strand
gagaacuuugcacucguua

SEQ ID NO: 1549670 - RNA, 19 nt, Homo sapiens
  misc_RNA (1)...(19): siRNA sense strand
gagaggucuuaugaaugua

SEQ ID NO: 1549671 - RNA, 19 nt, Homo sapiens
  misc_RNA (1)...(19): siRNA sense strand
uguguagaguggaggauga

SEQ ID NO: 1549672 - RNA, 19 nt, Homo sapiens
  misc_RNA (1)...(19): siRNA sense strand
agaagugcuuucaagaagu

SEQ ID NO: 1549673 - RNA, 19 nt, Homo sapiens
  misc_RNA (1)...(19): siRNA sense strand
gaugugacgguauauuucu

SEQ ID NO: 1549674 - RNA, 19 nt, Homo sapiens
  misc_RNA (1)...(19): siRNA sense strand
uaccagauccuaccgcaau

SEQ ID NO: 1549675 - RNA, 19 nt, Homo sapiens
  misc_RNA (1)...(19): siRNA sense strand
gagagcccauccugagcau

SEQ ID NO: 1549676 - RNA, 19 nt, Homo sapiens
  misc_RNA (1)...(19): siRNA sense strand
aaugugggaaguucuuuaa

SEQ ID NO: 1549677 - RNA, 19 nt, Homo sapiens
  misc_RNA (1)...(19): siRNA sense strand
uugcagggcuuggugaugu

SEQ ID NO: 1549678 - RNA, 19 nt, Homo sapiens
  misc_RNA (1)...(19): siRNA sense strand
caacaggcagaagugcuuu

SEQ ID NO: 1549679 - RNA, 19 nt, Homo sapiens
  misc_RNA (1)...(19): siRNA sense strand
ccaacaggcagaagugcuu

SEQ ID NO: 1549680 - RNA, 19 nt, Homo sapiens
  misc_RNA (1)...(19): siRNA sense strand
aggaugugacgguauauuu

SEQ ID NO: 1549681 - RNA, 19 nt, Homo sapiens
  misc_RNA (1)...(19): siRNA sense strand
gcaccaggacacucauagu

SEQ ID NO: 1549682 - RNA, 19 nt, Homo sapiens
  misc_RNA (1)...(19): siRNA sense strand
cuaugaauguagccugugu

SEQ ID NO: 1549683 - RNA, 19 nt, Homo sapiens
  misc_RNA (1)...(19): siRNA sense strand
gaggaugugacgguauauu

SEQ ID NO: 1549684 - RNA, 19 nt, Homo sapiens
  misc_RNA (1)...(19): siRNA sense strand
ggcagaagugcuuucaaga

SEQ ID NO: 1549685 - RNA, 19 nt, Homo sapiens
  misc_RNA (1)...(19): siRNA sense strand
gcagcuuucccaccugguu

SEQ ID NO: 1549686 - RNA, 19 nt, Homo sapiens
  misc_RNA (1)...(19): siRNA sense strand
uuaugaauguacagagugu

SEQ ID NO: 1549687 - RNA, 19 nt, Homo sapiens
  misc_RNA (1)...(19): siRNA sense strand
gagcccauccugagcaucu

SEQ ID NO: 1549688 - RNA, 19 nt, Homo sapiens
  misc_RNA (1)...(19): siRNA sense strand
aaagugcacauuggagaaa

SEQ ID NO: 1549689 - RNA, 19 nt, Homo sapiens
  misc_RNA (1)...(19): siRNA sense strand
gugcagcaaaugugguaaa

SEQ ID NO: 1549690 - RNA, 19 nt, Homo sapiens
  misc_RNA (1)...(19): siRNA sense strand
aagagagacccuucagaug

SEQ ID NO: 1549691 - RNA, 19 nt, Homo sapiens
  misc_RNA (1)...(19): siRNA sense strand
ucugauaacgcauucugaa

SEQ ID NO: 1549692 - RNA, 19 nt, Homo sapiens
  misc_RNA (1)...(19): siRNA sense strand
ggucuugaugguuugugua

SEQ ID NO: 1549693 - RNA, 19 nt, Homo sapiens
  misc_RNA (1)...(19): siRNA sense strand
guucuacaccagaggauuc

SEQ ID NO: 1549694 - RNA, 19 nt, Homo sapiens
  misc_RNA (1)...(19): siRNA sense strand
acacaggcauaaaaccuuu

SEQ ID NO: 1549695 - RNA, 19 nt, Homo sapiens
  misc_RNA (1)...(19): siRNA sense strand
ugaggaaacaccagaaggu

SEQ ID NO: 1549696 - RNA, 19 nt, Homo sapiens
  misc_RNA (1)...(19): siRNA sense strand
ucaguuacccgucuaagcu

SEQ ID NO: 1549697 - RNA, 19 nt, Homo sapiens
  misc_RNA (1)...(19): siRNA sense strand
uggcagagaagcuguucaa

SEQ ID NO: 1549698 - RNA, 19 nt, Homo sapiens
  misc_RNA (1)...(19): siRNA sense strand
ccacccuccuucagcacaa

SEQ ID NO: 1549699 - RNA, 19 nt, Homo sapiens
  misc_RNA (1)...(19): siRNA sense strand
gcagggcuuggugauguuu

SEQ ID NO: 1549700 - RNA, 19 nt, Homo sapiens
  misc_RNA (1)...(19): siRNA sense strand
ggugauguuugaggaugug

SEQ ID NO: 1549701 - RNA, 19 nt, Homo sapiens
  misc_RNA (1)...(19): siRNA sense strand
caccggaaagugcacauug

SEQ ID NO: 1549702 - RNA, 19 nt, Homo sapiens
  misc_RNA (1)...(19): siRNA sense strand
ccuccuugaccaucugaua

SEQ ID NO: 1549703 - RNA, 19 nt, Homo sapiens
  misc_RNA (1)...(19): siRNA sense strand
uagaguggaggaugagaga

SEQ ID NO: 1549704 - RNA, 19 nt, Homo sapiens
  misc_RNA (1)...(19): siRNA sense strand
gaggucuuaugaauguaca

SEQ ID NO: 1549705 - RNA, 19 nt, Homo sapiens
  misc_RNA (1)...(19): siRNA sense strand
aagacgcacuuguucuaca

SEQ ID NO: 1549706 - RNA, 19 nt, Homo sapiens
  misc_RNA (1)...(19): siRNA sense strand
gaacucggccugcaucuug

SEQ ID NO: 1549707 - RNA, 19 nt, Homo sapiens
  misc_RNA (1)...(19): siRNA sense strand
gcagugggaugaagaccaa

SEQ ID NO: 1549708 - RNA, 19 nt, Homo sapiens
  misc_RNA (1)...(19): siRNA sense strand
gcagccagauccagaacuc

SEQ ID NO: 1549709 - RNA, 19 nt, Homo sapiens
  misc_RNA (1)...(19): siRNA sense strand
ugggugaccugaagcaguu

SEQ ID NO: 1549710 - RNA, 19 nt, Homo sapiens
  misc_RNA (1)...(19): siRNA sense strand
agccaagccuguggacuua

SEQ ID NO: 1549711 - RNA, 19 nt, Homo sapiens
  misc_RNA (1)...(19): siRNA sense strand
cgacagcacugaggagcau

SEQ ID NO: 1549712 - RNA, 19 nt, Homo sapiens
  misc_RNA (1)...(19): siRNA sense strand
gcaucgagguggccaagac

SEQ ID NO: 1549713 - RNA, 19 nt, Homo sapiens
  misc_RNA (1)...(19): siRNA sense strand
cgccaaccgucacuucuau

SEQ ID NO: 1549714 - RNA, 19 nt, Homo sapiens
  misc_RNA (1)...(19): siRNA sense strand
cagccaagccuguggacuu

SEQ ID NO: 1549715 - RNA, 19 nt, Homo sapiens
  misc_RNA (1)...(19): siRNA sense strand
aaccgucacuucuaucugu

SEQ ID NO: 1549716 - RNA, 19 nt, Homo sapiens
  misc_RNA (1)...(19): siRNA sense strand
gcgccaaccgucacuucua

SEQ ID NO: 1549717 - RNA, 19 nt, Homo sapiens
  misc_RNA (1)...(19): siRNA sense strand
ccacugaggaggaaacucu

SEQ ID NO: 1549718 - RNA, 19 nt, Homo sapiens
  misc_RNA (1)...(19): siRNA sense strand
caccuuccaugcccucuuc

SEQ ID NO: 1549719 - RNA, 19 nt, Homo sapiens
  misc_RNA (1)...(19): siRNA sense strand
gagcugcgcaagcaaagca

SEQ ID NO: 1549720 - RNA, 19 nt, Homo sapiens
  misc_RNA (1)...(19): siRNA sense strand
uggcagaauuaucgcaauc

SEQ ID NO: 1549721 - RNA, 19 nt, Homo sapiens
  misc_RNA (1)...(19): siRNA sense strand
cuagagcugcgcaagcaaa

SEQ ID NO: 1549722 - RNA, 19 nt, Homo sapiens
  misc_RNA (1)...(19): siRNA sense strand
uacuagagcugcgcaagca

SEQ ID NO: 1549723 - RNA, 19 nt, Homo sapiens
  misc_RNA (1)...(19): siRNA sense strand
aagcugaccugcgccaucu

SEQ ID NO: 1549724 - RNA, 19 nt, Homo sapiens
  misc_RNA (1)...(19): siRNA sense strand
gccgaaggccagcuacuag

SEQ ID NO: 1549725 - RNA, 19 nt, Homo sapiens
  misc_RNA (1)...(19): siRNA sense strand
uguguggccuccucuugga

SEQ ID NO: 1549726 - RNA, 19 nt, Homo sapiens
  misc_RNA (1)...(19): siRNA sense strand
gcuguguggccuccucuug

SEQ ID NO: 1549727 - RNA, 19 nt, Homo sapiens
  misc_RNA (1)...(19): siRNA sense strand
gccaggaccagcaggugaa

SEQ ID NO: 1549728 - RNA, 19 nt, Homo sapiens
  misc_RNA (1)...(19): siRNA sense strand
uccgguagauuguaaauga

SEQ ID NO: 1549729 - RNA, 19 nt, Homo sapiens
  misc_RNA (1)...(19): siRNA sense strand
uggcuccgguagauuguaa

SEQ ID NO: 1549730 - RNA, 19 nt, Homo sapiens
  misc_RNA (1)...(19): siRNA sense strand
gaaaaggggcuggcucuca

SEQ ID NO: 1549731 - RNA, 19 nt, Homo sapiens
  misc_RNA (1)...(19): siRNA sense strand
gaaaccagccauguccuuu

SEQ ID NO: 1549732 - RNA, 19 nt, Homo sapiens
  misc_RNA (1)...(19): siRNA sense strand
gagaugguaugguguaugc

SEQ ID NO: 1549733 - RNA, 19 nt, Homo sapiens
  misc_RNA (1)...(19): siRNA sense strand
ggacauggccucgcacaca

SEQ ID NO: 1549734 - RNA, 19 nt, Homo sapiens
  misc_RNA (1)...(19): siRNA sense strand
cgucgggacugcuggcuuu

SEQ ID NO: 1549735 - RNA, 19 nt, Homo sapiens
  misc_RNA (1)...(19): siRNA sense strand
gauaagagggcagacuuug

SEQ ID NO: 1549736 - RNA, 19 nt, Homo sapiens
  misc_RNA (1)...(19): siRNA sense strand
ggauaagagggcagacuuu

SEQ ID NO: 1549737 - RNA, 19 nt, Homo sapiens
  misc_RNA (1)...(19): siRNA sense strand
gcacaguggcacaccaaga

SEQ ID NO: 1549738 - RNA, 19 nt, Homo sapiens
  misc_RNA (1)...(19): siRNA sense strand
uaagagggcagacuuugug

SEQ ID NO: 1549739 - RNA, 19 nt, Homo sapiens
  misc_RNA (1)...(19): siRNA sense strand
gagagaugguaugguguau

SEQ ID NO: 1549740 - RNA, 19 nt, Homo sapiens
  misc_RNA (1)...(19): siRNA sense strand
ggaaaccagccauguccuu

SEQ ID NO: 1549741 - RNA, 19 nt, Homo sapiens
  misc_RNA (1)...(19): siRNA sense strand
gagggcagacuuugugguu

SEQ ID NO: 1549742 - RNA, 19 nt, Homo sapiens
  misc_RNA (1)...(19): siRNA sense strand
gacauggccucgcacacau

SEQ ID NO: 1549743 - RNA, 19 nt, Homo sapiens
  misc_RNA (1)...(19): siRNA sense strand
ugucaacacuguggagaug

SEQ ID NO: 1549744 - RNA, 19 nt, Homo sapiens
  misc_RNA (1)...(19): siRNA sense strand
gggauaagagggcagacuu

SEQ ID NO: 1549745 - RNA, 19 nt, Homo sapiens
  misc_RNA (1)...(19): siRNA sense strand
ggagagcuuuagccuugca

SEQ ID NO: 1549746 - RNA, 19 nt, Homo sapiens
  misc_RNA (1)...(19): siRNA sense strand
gcacugugucugcgugaug

SEQ ID NO: 1549747 - RNA, 19 nt, Homo sapiens
  misc_RNA (1)...(19): siRNA sense strand
agagagaugguauggugua

SEQ ID NO: 1549748 - RNA, 19 nt, Homo sapiens
  misc_RNA (1)...(19): siRNA sense strand
cccgguagcugcuguagag

SEQ ID NO: 1549749 - RNA, 19 nt, Homo sapiens
  misc_RNA (1)...(19): siRNA sense strand
gcacgggaacaagaucuau

SEQ ID NO: 1549750 - RNA, 19 nt, Homo sapiens
  misc_RNA (1)...(19): siRNA sense strand
gguugcaacuguggagaga

SEQ ID NO: 1549751 - RNA, 19 nt, Homo sapiens
  misc_RNA (1)...(19): siRNA sense strand
uguagaggccuuccugaug

SEQ ID NO: 1549752 - RNA, 19 nt, Homo sapiens
  misc_RNA (1)...(19): siRNA sense strand
uugcaacuguggagagaga

SEQ ID NO: 1549753 - RNA, 19 nt, Homo sapiens
  misc_RNA (1)...(19): siRNA sense strand
ccacuugccgggucuaugg

SEQ ID NO: 1549754 - RNA, 19 nt, Homo sapiens
  misc_RNA (1)...(19): siRNA sense strand
ccuggacacugcugagaca

SEQ ID NO: 1549755 - RNA, 19 nt, Homo sapiens
  misc_RNA (1)...(19): siRNA sense strand
ccagguacguguguaugag

SEQ ID NO: 1549756 - RNA, 19 nt, Homo sapiens
  misc_RNA (1)...(19): siRNA sense strand
aaaccagccauguccuuug

SEQ ID NO: 1549757 - RNA, 19 nt, Homo sapiens
  misc_RNA (1)...(19): siRNA sense strand
acacuguggagauguuuga

SEQ ID NO: 1549758 - RNA, 19 nt, Homo sapiens
  misc_RNA (1)...(19): siRNA sense strand
uagaggccuuccugaugga

SEQ ID NO: 1549759 - RNA, 19 nt, Homo sapiens
  misc_RNA (1)...(19): siRNA sense strand
cacaguggcacaccaagau

SEQ ID NO: 1549760 - RNA, 19 nt, Homo sapiens
  misc_RNA (1)...(19): siRNA sense strand
gcaacuguggagagagaug

SEQ ID NO: 1549761 - RNA, 19 nt, Homo sapiens
  misc_RNA (1)...(19): siRNA sense strand
gcaaugagcuguucugaaa

SEQ ID NO: 1549762 - RNA, 19 nt, Homo sapiens
  misc_RNA (1)...(19): siRNA sense strand
gaaacaaacuuccaauaga

SEQ ID NO: 1549763 - RNA, 19 nt, Homo sapiens
  misc_RNA (1)...(19): siRNA sense strand
gaaaugcaauguaccuuaa

SEQ ID NO: 1549764 - RNA, 19 nt, Homo sapiens
  misc_RNA (1)...(19): siRNA sense strand
ggaagaauccuguucauuu

SEQ ID NO: 1549765 - RNA, 19 nt, Homo sapiens
  misc_RNA (1)...(19): siRNA sense strand
ggaagaaggcaauuaauuu

SEQ ID NO: 1549766 - RNA, 19 nt, Homo sapiens
  misc_RNA (1)...(19): siRNA sense strand
ggaaggaagcacagaaaua

SEQ ID NO: 1549767 - RNA, 19 nt, Homo sapiens
  misc_RNA (1)...(19): siRNA sense strand
gcaaucacauuaaguaaca

SEQ ID NO: 1549768 - RNA, 19 nt, Homo sapiens
  misc_RNA (1)...(19): siRNA sense strand
aaagauaaaucccagcuaa

SEQ ID NO: 1549769 - RNA, 19 nt, Homo sapiens
  misc_RNA (1)...(19): siRNA sense strand
ggaaaugcaauguaccuua

SEQ ID NO: 1549770 - RNA, 19 nt, Homo sapiens
  misc_RNA (1)...(19): siRNA sense strand
caauguaccuuaagaaaca

SEQ ID NO: 1549771 - RNA, 19 nt, Homo sapiens
  misc_RNA (1)...(19): siRNA sense strand
ggaagagucuaccauuuca

SEQ ID NO: 1549772 - RNA, 19 nt, Homo sapiens
  misc_RNA (1)...(19): siRNA sense strand
gcaaacugcuauaggaaga

SEQ ID NO: 1549773 - RNA, 19 nt, Homo sapiens
  misc_RNA (1)...(19): siRNA sense strand
ccaaaucuauggugcuauu

SEQ ID NO: 1549774 - RNA, 19 nt, Homo sapiens
  misc_RNA (1)...(19): siRNA sense strand
gaagaauccuguucauuuu

SEQ ID NO: 1549775 - RNA, 19 nt, Homo sapiens
  misc_RNA (1)...(19): siRNA sense strand
gaagaaggcaauuaauuuc

SEQ ID NO: 1549776 - RNA, 19 nt, Homo sapiens
  misc_RNA (1)...(19): siRNA sense strand
uaaagaagaugaggcaaug

SEQ ID NO: 1549777 - RNA, 19 nt, Homo sapiens
  misc_RNA (1)...(19): siRNA sense strand
gaaaggaagaugaagagaa

SEQ ID NO: 1549778 - RNA, 19 nt, Homo sapiens
  misc_RNA (1)...(19): siRNA sense strand
gagaaacaaacuuccaaua

SEQ ID NO: 1549779 - RNA, 19 nt, Homo sapiens
  misc_RNA (1)...(19): siRNA sense strand
gaacaccacauaaagaaga

SEQ ID NO: 1549780 - RNA, 19 nt, Homo sapiens
  misc_RNA (1)...(19): siRNA sense strand
caaggaagaaggcaauuaa

SEQ ID NO: 1549781 - RNA, 19 nt, Homo sapiens
  misc_RNA (1)...(19): siRNA sense strand
gaaggaagauguggaagag

SEQ ID NO: 1549782 - RNA, 19 nt, Homo sapiens
  misc_RNA (1)...(19): siRNA sense strand
gaaggaagcacagaaauag

SEQ ID NO: 1549783 - RNA, 19 nt, Homo sapiens
  misc_RNA (1)...(19): siRNA sense strand
gaaaauagagacugcaaua

SEQ ID NO: 1549784 - RNA, 19 nt, Homo sapiens
  misc_RNA (1)...(19): siRNA sense strand
ccagaugacucccacaaau

SEQ ID NO: 1549785 - RNA, 19 nt, Homo sapiens
  misc_RNA (1)...(19): siRNA sense strand
gcacagagaaacaaacuuc

SEQ ID NO: 1549786 - RNA, 19 nt, Homo sapiens
  misc_RNA (1)...(19): siRNA sense strand
aaagaauccuuccaacuug

SEQ ID NO: 1549787 - RNA, 19 nt, Homo sapiens
  misc_RNA (1)...(19): siRNA sense strand
gcaauaagcagcagccaau

SEQ ID NO: 1549788 - RNA, 19 nt, Homo sapiens
  misc_RNA (1)...(19): siRNA sense strand
gcacagaaauagccaagac

SEQ ID NO: 1549789 - RNA, 19 nt, Homo sapiens
  misc_RNA (1)...(19): siRNA sense strand
caggaagagucuaccauuu

SEQ ID NO: 1549790 - RNA, 19 nt, Homo sapiens
  misc_RNA (1)...(19): siRNA sense strand
gcaaggaagaaggcaauua

SEQ ID NO: 1549791 - RNA, 19 nt, Homo sapiens
  misc_RNA (1)...(19): siRNA sense strand
gcagaacauuuaagugauc

SEQ ID NO: 1549792 - RNA, 19 nt, Homo sapiens
  misc_RNA (1)...(19): siRNA sense strand
ggagacagcuuuucuuugu

SEQ ID NO: 1549793 - RNA, 19 nt, Homo sapiens
  misc_RNA (1)...(19): siRNA sense strand
ucaaaccgauacacacaaa

SEQ ID NO: 1549794 - RNA, 19 nt, Homo sapiens
  misc_RNA (1)...(19): siRNA sense strand
gaacgacagcuuucuagau

SEQ ID NO: 1549795 - RNA, 19 nt, Homo sapiens
  misc_RNA (1)...(19): siRNA sense strand
gcgacucacuucaggauga

SEQ ID NO: 1549796 - RNA, 19 nt, Homo sapiens
  misc_RNA (1)...(19): siRNA sense strand
aaacaaacuuccaauagag

SEQ ID NO: 1549797 - RNA, 19 nt, Homo sapiens
  misc_RNA (1)...(19): siRNA sense strand
ccaaggaaaugccacaauc

SEQ ID NO: 1549798 - RNA, 19 nt, Homo sapiens
  misc_RNA (1)...(19): siRNA sense strand
gaaguggaaaugcaaugua

SEQ ID NO: 1549799 - RNA, 19 nt, Homo sapiens
  misc_RNA (1)...(19): siRNA sense strand
gggaauaacagacaagaga

SEQ ID NO: 1549800 - RNA, 19 nt, Homo sapiens
  misc_RNA (1)...(19): siRNA sense strand
aaaggaagaugaagagaag

SEQ ID NO: 1549801 - RNA, 19 nt, Homo sapiens
  misc_RNA (1)...(19): siRNA sense strand
uagcagaacauuuaaguga

SEQ ID NO: 1549802 - RNA, 19 nt, Homo sapiens
  misc_RNA (1)...(19): siRNA sense strand
cauaauacgcuuccaguga

SEQ ID NO: 1549803 - RNA, 19 nt, Homo sapiens
  misc_RNA (1)...(19): siRNA sense strand
gacaagagaguauccagaa

SEQ ID NO: 1549804 - RNA, 19 nt, Homo sapiens
  misc_RNA (1)...(19): siRNA sense strand
agucagcucuuaccauuga

SEQ ID NO: 1549805 - RNA, 19 nt, Homo sapiens
  misc_RNA (1)...(19): siRNA sense strand
gaaggcaauuaauuucauc

SEQ ID NO: 1549806 - RNA, 19 nt, Homo sapiens
  misc_RNA (1)...(19): siRNA sense strand
cagaugacucccacaaaua

SEQ ID NO: 1549807 - RNA, 19 nt, Homo sapiens
  misc_RNA (1)...(19): siRNA sense strand
aagaagaaaucugcaaaga

SEQ ID NO: 1549808 - RNA, 19 nt, Homo sapiens
  misc_RNA (1)...(19): siRNA sense strand
gugauuaauuuaccucaug

SEQ ID NO: 1549809 - RNA, 19 nt, Homo sapiens
  misc_RNA (1)...(19): siRNA sense strand
guaacacagagaugaauaa

SEQ ID NO: 1549810 - RNA, 19 nt, Homo sapiens
  misc_RNA (1)...(19): siRNA sense strand
gcacaagauagaauauaga

SEQ ID NO: 1549811 - RNA, 19 nt, Homo sapiens
  misc_RNA (1)...(19): siRNA sense strand
uaauuuaccucaugagacu

SEQ ID NO: 1549812 - RNA, 19 nt, Homo sapiens
  misc_RNA (1)...(19): siRNA sense strand
gccaacagaugaagauucu

SEQ ID NO: 1549813 - RNA, 19 nt, Homo sapiens
  misc_RNA (1)...(19): siRNA sense strand
caagagaguauccagaaga

SEQ ID NO: 1549814 - RNA, 19 nt, Homo sapiens
  misc_RNA (1)...(19): siRNA sense strand
caauagaggaacuugguaa

SEQ ID NO: 1549815 - RNA, 19 nt, Homo sapiens
  misc_RNA (1)...(19): siRNA sense strand
aaagaacaccacauaaaga

SEQ ID NO: 1549816 - RNA, 19 nt, Homo sapiens
  misc_RNA (1)...(19): siRNA sense strand
cgacagcuuucuagaugau

SEQ ID NO: 1549817 - RNA, 19 nt, Homo sapiens
  misc_RNA (1)...(19): siRNA sense strand
aaucuauggugcuauuuga

SEQ ID NO: 1549818 - RNA, 19 nt, Homo sapiens
  misc_RNA (1)...(19): siRNA sense strand
aacgacagcuuucuagaug

SEQ ID NO: 1549819 - RNA, 19 nt, Homo sapiens
  misc_RNA (1)...(19): siRNA sense strand
ccuccaauccugaaacuuu

SEQ ID NO: 1549820 - RNA, 19 nt, Homo sapiens
  misc_RNA (1)...(19): siRNA sense strand
gaacaagacacaggagaag

SEQ ID NO: 1549821 - RNA, 19 nt, Homo sapiens
  misc_RNA (1)...(19): siRNA sense strand
agacagcuuuucuuuguua

SEQ ID NO: 1549822 - RNA, 19 nt, Homo sapiens
  misc_RNA (1)...(19): siRNA sense strand
agaaacaaacuuccaauag

SEQ ID NO: 1549823 - RNA, 19 nt, Homo sapiens
  misc_RNA (1)...(19): siRNA sense strand
uuauggagguguacaaauc

SEQ ID NO: 1549824 - RNA, 19 nt, Homo sapiens
  misc_RNA (1)...(19): siRNA sense strand
gaaggaaacaaggucaaga

SEQ ID NO: 1549825 - RNA, 19 nt, Homo sapiens
  misc_RNA (1)...(19): siRNA sense strand
ucuacaagguucugaagga

SEQ ID NO: 1549826 - RNA, 19 nt, Homo sapiens
  misc_RNA (1)...(19): siRNA sense strand
gauaaaucccagcuaaaca

SEQ ID NO: 1549827 - RNA, 19 nt, Homo sapiens
  misc_RNA (1)...(19): siRNA sense strand
cuacaagguucugaaggaa

SEQ ID NO: 1549828 - RNA, 19 nt, Homo sapiens
  misc_RNA (1)...(19): siRNA sense strand
gaaaauacaucagcagaac

SEQ ID NO: 1549829 - RNA, 19 nt, Homo sapiens
  misc_RNA (1)...(19): siRNA sense strand
uaagacuaaugcacagaga

SEQ ID NO: 1549830 - RNA, 19 nt, Homo sapiens
  misc_RNA (1)...(19): siRNA sense strand
gccaagaugagacugauga

SEQ ID NO: 1549831 - RNA, 19 nt, Homo sapiens
  misc_RNA (1)...(19): siRNA sense strand
gcaauguaccuuaagaaac

SEQ ID NO: 1549832 - RNA, 19 nt, Homo sapiens
  misc_RNA (1)...(19): siRNA sense strand
aagaacaccacauaaagaa

SEQ ID NO: 1549833 - RNA, 19 nt, Homo sapiens
  misc_RNA (1)...(19): siRNA sense strand
aagaaacagucaagugcuu

SEQ ID NO: 1549834 - RNA, 19 nt, Homo sapiens
  misc_RNA (1)...(19): siRNA sense strand
gagaguauccagaagacau

SEQ ID NO: 1549835 - RNA, 19 nt, Homo sapiens
  misc_RNA (1)...(19): siRNA sense strand
uaaguaacacagagaugaa

SEQ ID NO: 1549836 - RNA, 19 nt, Homo sapiens
  misc_RNA (1)...(19): siRNA sense strand
ucaggaaguucagaaaaua

SEQ ID NO: 1549837 - RNA, 19 nt, Homo sapiens
  misc_RNA (1)...(19): siRNA sense strand
caguggagguaauguaauc

SEQ ID NO: 1549838 - RNA, 19 nt, Homo sapiens
  misc_RNA (1)...(19): siRNA sense strand
aaauagagacugcaauaag

SEQ ID NO: 1549839 - RNA, 19 nt, Homo sapiens
  misc_RNA (1)...(19): siRNA sense strand
ccauugaagccaaaucuau

SEQ ID NO: 1549840 - RNA, 19 nt, Homo sapiens
  misc_RNA (1)...(19): siRNA sense strand
gaagauguggaagagcuuu

SEQ ID NO: 1549841 - RNA, 19 nt, Homo sapiens
  misc_RNA (1)...(19): siRNA sense strand
caaggaaaugccacaauca

SEQ ID NO: 1549842 - RNA, 19 nt, Homo sapiens
  misc_RNA (1)...(19): siRNA sense strand
aaacacaacccagcaagga

SEQ ID NO: 1549843 - RNA, 19 nt, Homo sapiens
  misc_RNA (1)...(19): siRNA sense strand
caaauagugugucuuuccu

SEQ ID NO: 1549844 - RNA, 19 nt, Homo sapiens
  misc_RNA (1)...(19): siRNA sense strand
acuaugagccaacagauga

SEQ ID NO: 1549845 - RNA, 19 nt, Homo sapiens
  misc_RNA (1)...(19): siRNA sense strand
cagcacaagauagaauaua

SEQ ID NO: 1549846 - RNA, 19 nt, Homo sapiens
  misc_RNA (1)...(19): siRNA sense strand
agacuaaugcacagagaaa

SEQ ID NO: 1549847 - RNA, 19 nt, Homo sapiens
  misc_RNA (1)...(19): siRNA sense strand
gaauaacagacaagagagu

SEQ ID NO: 1549848 - RNA, 19 nt, Homo sapiens
  misc_RNA (1)...(19): siRNA sense strand
aggaagaaggcaauuaauu

SEQ ID NO: 1549849 - RNA, 19 nt, Homo sapiens
  misc_RNA (1)...(19): siRNA sense strand
gaucaaaaccuuucaguac

SEQ ID NO: 1549850 - RNA, 19 nt, Homo sapiens
  misc_RNA (1)...(19): siRNA sense strand
gcaaucaguggagguaaug

SEQ ID NO: 1549851 - RNA, 19 nt, Homo sapiens
  misc_RNA (1)...(19): siRNA sense strand
acacacaaauccauguuuu

SEQ ID NO: 1549852 - RNA, 19 nt, Homo sapiens
  misc_RNA (1)...(19): siRNA sense strand
gggcaaacugcuauaggaa

SEQ ID NO: 1549853 - RNA, 19 nt, Homo sapiens
  misc_RNA (1)...(19): siRNA sense strand
ucaggaagagucuaccauu

SEQ ID NO: 1549854 - RNA, 19 nt, Homo sapiens
  misc_RNA (1)...(19): siRNA sense strand
ccagggaaguggaaaagaa

SEQ ID NO: 1549855 - RNA, 19 nt, Homo sapiens
  misc_RNA (1)...(19): siRNA sense strand
ccaaugaguaugaccugaa

SEQ ID NO: 1549856 - RNA, 19 nt, Homo sapiens
  misc_RNA (1)...(19): siRNA sense strand
uauacccucugaaguggaa

SEQ ID NO: 1549857 - RNA, 19 nt, Homo sapiens
  misc_RNA (1)...(19): siRNA sense strand
ggaagaauccccagcacaa

SEQ ID NO: 1549858 - RNA, 19 nt, Homo sapiens
  misc_RNA (1)...(19): siRNA sense strand
ucucaagggucucauucug

SEQ ID NO: 1549859 - RNA, 19 nt, Homo sapiens
  misc_RNA (1)...(19): siRNA sense strand
uuaaguaacacagagauga

SEQ ID NO: 1549860 - RNA, 19 nt, Homo sapiens
  misc_RNA (1)...(19): siRNA sense strand
caaagauaaaucccagcua

SEQ ID NO: 1549861 - RNA, 19 nt, Homo sapiens
  misc_RNA (1)...(19): siRNA sense strand
ggagaaagcauuuguuugu

SEQ ID NO: 1549862 - RNA, 19 nt, Homo sapiens
  misc_RNA (1)...(19): siRNA sense strand
gagaaagcauuuguuugua

SEQ ID NO: 1549863 - RNA, 19 nt, Homo sapiens
  misc_RNA (1)...(19): siRNA sense strand
cgaggcagcuugaguuaaa

SEQ ID NO: 1549864 - RNA, 19 nt, Homo sapiens
  misc_RNA (1)...(19): siRNA sense strand
gaacguacuugcagaugug

SEQ ID NO: 1549865 - RNA, 19 nt, Homo sapiens
  misc_RNA (1)...(19): siRNA sense strand
aaagaaagauagagcaaga

SEQ ID NO: 1549866 - RNA, 19 nt, Homo sapiens
  misc_RNA (1)...(19): siRNA sense strand
ggaguacccugaugagauc

SEQ ID NO: 1549867 - RNA, 19 nt, Homo sapiens
  misc_RNA (1)...(19): siRNA sense strand
gaaagcauuuguuuguaca

SEQ ID NO: 1549868 - RNA, 19 nt, Homo sapiens
  misc_RNA (1)...(19): siRNA sense strand
gcaagaaaucccgguauaa

SEQ ID NO: 1549869 - RNA, 19 nt, Homo sapiens
  misc_RNA (1)...(19): siRNA sense strand
gcagaaucaucacgaagug

SEQ ID NO: 1549870 - RNA, 19 nt, Homo sapiens
  misc_RNA (1)...(19): siRNA sense strand
cgcaagaaaucccgguaua

SEQ ID NO: 1549871 - RNA, 19 nt, Homo sapiens
  misc_RNA (1)...(19): siRNA sense strand
ccgcagacguguaaauguu

SEQ ID NO: 1549872 - RNA, 19 nt, Homo sapiens
  misc_RNA (1)...(19): siRNA sense strand
gcggagaaagcauuuguuu

SEQ ID NO: 1549873 - RNA, 19 nt, Homo sapiens
  misc_RNA (1)...(19): siRNA sense strand
gaggagggcagaaucauca

SEQ ID NO: 1549874 - RNA, 19 nt, Homo sapiens
  misc_RNA (1)...(19): siRNA sense strand
guguaaauguuccugcaaa

SEQ ID NO: 1549875 - RNA, 19 nt, Homo sapiens
  misc_RNA (1)...(19): siRNA sense strand
caacaucaccaugcagauu

SEQ ID NO: 1549876 - RNA, 19 nt, Homo sapiens
  misc_RNA (1)...(19): siRNA sense strand
gauagagcaagacaagaaa

SEQ ID NO: 1549877 - RNA, 19 nt, Homo sapiens
  misc_RNA (1)...(19): siRNA sense strand
gaaguucauggaugucuau

SEQ ID NO: 1549878 - RNA, 19 nt, Homo sapiens
  misc_RNA (1)...(19): siRNA sense strand
caagaaaucccgguauaag

SEQ ID NO: 1549879 - RNA, 19 nt, Homo sapiens
  misc_RNA (1)...(19): siRNA sense strand
aaacgaaagcgcaagaaau

SEQ ID NO: 1549880 - RNA, 19 nt, Homo sapiens
  misc_RNA (1)...(19): siRNA sense strand
gaaugcagaccaaagaaag

SEQ ID NO: 1549881 - RNA, 19 nt, Homo sapiens
  misc_RNA (1)...(19): siRNA sense strand
cgaacguacuugcagaugu

SEQ ID NO: 1549882 - RNA, 19 nt, Homo sapiens
  misc_RNA (1)...(19): siRNA sense strand
agaaagcauuuguuuguac

SEQ ID NO: 1549883 - RNA, 19 nt, Homo sapiens
  misc_RNA (1)...(19): siRNA sense strand
gaaggaggagggcagaauc

SEQ ID NO: 1549884 - RNA, 19 nt, Homo sapiens
  misc_RNA (1)...(19): siRNA sense strand
ucaccaaggccagcacaua

SEQ ID NO: 1549885 - RNA, 19 nt, Homo sapiens
  misc_RNA (1)...(19): siRNA sense strand
aaagauagagcaagacaag

SEQ ID NO: 1549886 - RNA, 19 nt, Homo sapiens
  misc_RNA (1)...(19): siRNA sense strand
gaaagauagagcaagacaa

SEQ ID NO: 1549887 - RNA, 19 nt, Homo sapiens
  misc_RNA (1)...(19): siRNA sense strand
cugaugagaucgaguacau

SEQ ID NO: 1549888 - RNA, 19 nt, Homo sapiens
  misc_RNA (1)...(19): siRNA sense strand
gagcggagaaagcauuugu

SEQ ID NO: 1549889 - RNA, 19 nt, Homo sapiens
  misc_RNA (1)...(19): siRNA sense strand
agauagagcaagacaagaa

SEQ ID NO: 1549890 - RNA, 19 nt, Homo sapiens
  misc_RNA (1)...(19): siRNA sense strand
guucauggaugucuaucag

SEQ ID NO: 1549891 - RNA, 19 nt, Homo sapiens
  misc_RNA (1)...(19): siRNA sense strand
ccaaagaaagauagagcaa

SEQ ID NO: 1549892 - RNA, 19 nt, Homo sapiens
  misc_RNA (1)...(19): siRNA sense strand
aacaucaccaugcagauua

SEQ ID NO: 1549893 - RNA, 19 nt, Homo sapiens
  misc_RNA (1)...(19): siRNA sense strand
caagauccgcagacgugua

SEQ ID NO: 1549894 - RNA, 19 nt, Homo sapiens
  misc_RNA (1)...(19): siRNA sense strand
ugaaugcagaccaaagaaa

SEQ ID NO: 1549895 - RNA, 19 nt, Homo sapiens
  misc_RNA (1)...(19): siRNA sense strand
ggcgaggcagcuugaguua

SEQ ID NO: 1549896 - RNA, 19 nt, Homo sapiens
  misc_RNA (1)...(19): siRNA sense strand
ccacugaggaguccaacau

SEQ ID NO: 1549897 - RNA, 19 nt, Homo sapiens
  misc_RNA (1)...(19): siRNA sense strand
gcagaccaaagaaagauag

SEQ ID NO: 1549898 - RNA, 19 nt, Homo sapiens
  misc_RNA (1)...(19): siRNA sense strand
aaaugugaaugcagaccaa

SEQ ID NO: 1549899 - RNA, 19 nt, Homo sapiens
  misc_RNA (1)...(19): siRNA sense strand
gaguuaaacgaacguacuu

SEQ ID NO: 1549900 - RNA, 19 nt, Homo sapiens
  misc_RNA (1)...(19): siRNA sense strand
agaaaucccgguauaaguc

SEQ ID NO: 1549901 - RNA, 19 nt, Homo sapiens
  misc_RNA (1)...(19): siRNA sense strand
ggaggagggcagaaucauc

SEQ ID NO: 1549902 - RNA, 19 nt, Homo sapiens
  misc_RNA (1)...(19): siRNA sense strand
ucagagcggagaaagcauu

SEQ ID NO: 1549903 - RNA, 19 nt, Homo sapiens
  misc_RNA (1)...(19): siRNA sense strand
aagauccgcagacguguaa

SEQ ID NO: 1549904 - RNA, 19 nt, Homo sapiens
  misc_RNA (1)...(19): siRNA sense strand
aacgaaagcgcaagaaauc

SEQ ID NO: 1549905 - RNA, 19 nt, Homo sapiens
  misc_RNA (1)...(19): siRNA sense strand
gcgcaagaaaucccgguau

SEQ ID NO: 1549906 - RNA, 19 nt, Homo sapiens
  misc_RNA (1)...(19): siRNA sense strand
gcagcuugaguuaaacgaa

SEQ ID NO: 1549907 - RNA, 19 nt, Homo sapiens
  misc_RNA (1)...(19): siRNA sense strand
caccaaggccagcacauag

SEQ ID NO: 1549908 - RNA, 19 nt, Homo sapiens
  misc_RNA (1)...(19): siRNA sense strand
ggcagaaucaucacgaagu

SEQ ID NO: 1549909 - RNA, 19 nt, Homo sapiens
  misc_RNA (1)...(19): siRNA sense strand
gaucgaguacaucuucaag

SEQ ID NO: 1549910 - RNA, 19 nt, Homo sapiens
  misc_RNA (1)...(19): siRNA sense strand
gauccgcagacguguaaau

SEQ ID NO: 1549911 - RNA, 19 nt, Homo sapiens
  misc_RNA (1)...(19): siRNA sense strand
acgagggccuggagugugu

SEQ ID NO: 1549912 - RNA, 19 nt, Homo sapiens
  misc_RNA (1)...(19): siRNA sense strand
gcgaggcagcuugaguuaa

SEQ ID NO: 1549913 - RNA, 19 nt, Homo sapiens
  misc_RNA (1)...(19): siRNA sense strand
ggacaucuuccaggaguac

SEQ ID NO: 1549914 - RNA, 19 nt, Homo sapiens
  misc_RNA (1)...(19): siRNA sense strand
ccaaggccagcacauagga

SEQ ID NO: 1549915 - RNA, 19 nt, Homo sapiens
  misc_RNA (1)...(19): siRNA sense strand
acugaggaguccaacauca

SEQ ID NO: 1549916 - RNA, 19 nt, Homo sapiens
  misc_RNA (1)...(19): siRNA sense strand
acaucaccaugcagauuau

SEQ ID NO: 1549917 - RNA, 19 nt, Homo sapiens
  misc_RNA (1)...(19): siRNA sense strand
aagaaaucccgguauaagu

SEQ ID NO: 1549918 - RNA, 19 nt, Homo sapiens
  misc_RNA (1)...(19): siRNA sense strand
gugaaugcagaccaaagaa

SEQ ID NO: 1549919 - RNA, 19 nt, Homo sapiens
  misc_RNA (1)...(19): siRNA sense strand
cagauuaugcggaucaaac

SEQ ID NO: 1549920 - RNA, 19 nt, Homo sapiens
  misc_RNA (1)...(19): siRNA sense strand
agaaagauagagcaagaca

SEQ ID NO: 1549921 - RNA, 19 nt, Homo sapiens
  misc_RNA (1)...(19): siRNA sense strand
cggagaaagcauuuguuug

SEQ ID NO: 1549922 - RNA, 19 nt, Homo sapiens
  misc_RNA (1)...(19): siRNA sense strand
cagcacauaggagagauga

SEQ ID NO: 1549923 - RNA, 19 nt, Homo sapiens
  misc_RNA (1)...(19): siRNA sense strand
cagagcggagaaagcauuu

SEQ ID NO: 1549924 - RNA, 19 nt, Homo sapiens
  misc_RNA (1)...(19): siRNA sense strand
ugugaaugcagaccaaaga

SEQ ID NO: 1549925 - RNA, 19 nt, Homo sapiens
  misc_RNA (1)...(19): siRNA sense strand
gcacauggcugagaagaaa

SEQ ID NO: 1549926 - RNA, 19 nt, Homo sapiens
  misc_RNA (1)...(19): siRNA sense strand
gcucaaagcucccagagaa

SEQ ID NO: 1549927 - RNA, 19 nt, Homo sapiens
  misc_RNA (1)...(19): siRNA sense strand
ggaaauagaagcuaagaaa

SEQ ID NO: 1549928 - RNA, 19 nt, Homo sapiens
  misc_RNA (1)...(19): siRNA sense strand
ggaacaagcuaggaucauu

SEQ ID NO: 1549929 - RNA, 19 nt, Homo sapiens
  misc_RNA (1)...(19): siRNA sense strand
ugaaggaacugcaugaaga

SEQ ID NO: 1549930 - RNA, 19 nt, Homo sapiens
  misc_RNA (1)...(19): siRNA sense strand
aagcagagcucauucauca

SEQ ID NO: 1549931 - RNA, 19 nt, Homo sapiens
  misc_RNA (1)...(19): siRNA sense strand
gcuagaagcuccagcaaag

SEQ ID NO: 1549932 - RNA, 19 nt, Homo sapiens
  misc_RNA (1)...(19): siRNA sense strand
gaagacagaaauucagaaa

SEQ ID NO: 1549933 - RNA, 19 nt, Homo sapiens
  misc_RNA (1)...(19): siRNA sense strand
uggaagagguguuagaaga

SEQ ID NO: 1549934 - RNA, 19 nt, Homo sapiens
  misc_RNA (1)...(19): siRNA sense strand
aagcagaacucuacacuag

SEQ ID NO: 1549935 - RNA, 19 nt, Homo sapiens
  misc_RNA (1)...(19): siRNA sense strand
gaacaagcuaggaucauug

SEQ ID NO: 1549936 - RNA, 19 nt, Homo sapiens
  misc_RNA (1)...(19): siRNA sense strand
uggcgcagcucaucauuga

SEQ ID NO: 1549937 - RNA, 19 nt, Homo sapiens
  misc_RNA (1)...(19): siRNA sense strand
gagagaagacagaaauuca

SEQ ID NO: 1549938 - RNA, 19 nt, Homo sapiens
  misc_RNA (1)...(19): siRNA sense strand
gcagagcucauucaucaga

SEQ ID NO: 1549939 - RNA, 19 nt, Homo sapiens
  misc_RNA (1)...(19): siRNA sense strand
gaaauagaagcuaagaaag

SEQ ID NO: 1549940 - RNA, 19 nt, Homo sapiens
  misc_RNA (1)...(19): siRNA sense strand
agagggaaauagaagcuaa

SEQ ID NO: 1549941 - RNA, 19 nt, Homo sapiens
  misc_RNA (1)...(19): siRNA sense strand
aagagaagcucgaaagcau

SEQ ID NO: 1549942 - RNA, 19 nt, Homo sapiens
  misc_RNA (1)...(19): siRNA sense strand
gagaagacagaaauucaga

SEQ ID NO: 1549943 - RNA, 19 nt, Homo sapiens
  misc_RNA (1)...(19): siRNA sense strand
caagaguggaccaaacuuu

SEQ ID NO: 1549944 - RNA, 19 nt, Homo sapiens
  misc_RNA (1)...(19): siRNA sense strand
gagcaagaguggaccaaac

SEQ ID NO: 1549945 - RNA, 19 nt, Homo sapiens
  misc_RNA (1)...(19): siRNA sense strand
gaagagaagcucgaaagca

SEQ ID NO: 1549946 - RNA, 19 nt, Homo sapiens
  misc_RNA (1)...(19): siRNA sense strand
ccagagaggcccagccaaa

SEQ ID NO: 1549947 - RNA, 19 nt, Homo sapiens
  misc_RNA (1)...(19): siRNA sense strand
aagaguggaccaaacuuua

SEQ ID NO: 1549948 - RNA, 19 nt, Homo sapiens
  misc_RNA (1)...(19): siRNA sense strand
gagagugacuuggagaucu

SEQ ID NO: 1549949 - RNA, 19 nt, Homo sapiens
  misc_RNA (1)...(19): siRNA sense strand
ggauaaggaaggaugcaaa

SEQ ID NO: 1549950 - RNA, 19 nt, Homo sapiens
  misc_RNA (1)...(19): siRNA sense strand
gaagagcacauggcugaga

SEQ ID NO: 1549951 - RNA, 19 nt, Homo sapiens
  misc_RNA (1)...(19): siRNA sense strand
gagaugauccaguccuugu

SEQ ID NO: 1549952 - RNA, 19 nt, Homo sapiens
  misc_RNA (1)...(19): siRNA sense strand
ugagagagaagacagaaau

SEQ ID NO: 1549953 - RNA, 19 nt, Homo sapiens
  misc_RNA (1)...(19): siRNA sense strand
ggaaggaugcaaagggaau

SEQ ID NO: 1549954 - RNA, 19 nt, Homo sapiens
  misc_RNA (1)...(19): siRNA sense strand
gagagagaagacagaaauu

SEQ ID NO: 1549955 - RNA, 19 nt, Homo sapiens
  misc_RNA (1)...(19): siRNA sense strand
ccaggaagcagagcucauu

SEQ ID NO: 1549956 - RNA, 19 nt, Homo sapiens
  misc_RNA (1)...(19): siRNA sense strand
uagaagcuccagcaaagaa

SEQ ID NO: 1549957 - RNA, 19 nt, Homo sapiens
  misc_RNA (1)...(19): siRNA sense strand
uggcagcucugaggcguaa

SEQ ID NO: 1549958 - RNA, 19 nt, Homo sapiens
  misc_RNA (1)...(19): siRNA sense strand
gcccuugucucgcucaaag

SEQ ID NO: 1549959 - RNA, 19 nt, Homo sapiens
  misc_RNA (1)...(19): siRNA sense strand
gcagagcgaaggagagaca

SEQ ID NO: 1549960 - RNA, 19 nt, Homo sapiens
  misc_RNA (1)...(19): siRNA sense strand
uggaaucccugcugagagu

SEQ ID NO: 1549961 - RNA, 19 nt, Homo sapiens
  misc_RNA (1)...(19): siRNA sense strand
cgaaggagagacaggagaa

SEQ ID NO: 1549962 - RNA, 19 nt, Homo sapiens
  misc_RNA (1)...(19): siRNA sense strand
ccaccugugugacaagaca

SEQ ID NO: 1549963 - RNA, 19 nt, Homo sapiens
  misc_RNA (1)...(19): siRNA sense strand
gaaguuuucugaauuucug

SEQ ID NO: 1549964 - RNA, 19 nt, Homo sapiens
  misc_RNA (1)...(19): siRNA sense strand
gauaaggaaggaugcaaag

SEQ ID NO: 1549965 - RNA, 19 nt, Homo sapiens
  misc_RNA (1)...(19): siRNA sense strand
ccacucugcaggagaauau

SEQ ID NO: 1549966 - RNA, 19 nt, Homo sapiens
  misc_RNA (1)...(19): siRNA sense strand
gugcccagcugcaggaaca

SEQ ID NO: 1549967 - RNA, 19 nt, Homo sapiens
  misc_RNA (1)...(19): siRNA sense strand
gaaggaacugcaugaagag

SEQ ID NO: 1549968 - RNA, 19 nt, Homo sapiens
  misc_RNA (1)...(19): siRNA sense strand
gaaaagaaaagugaaggaa

SEQ ID NO: 1549969 - RNA, 19 nt, Homo sapiens
  misc_RNA (1)...(19): siRNA sense strand
gaagcagagcucauucauc

SEQ ID NO: 1549970 - RNA, 19 nt, Homo sapiens
  misc_RNA (1)...(19): siRNA sense strand
ggaagcagagcucauucau

SEQ ID NO: 1549971 - RNA, 19 nt, Homo sapiens
  misc_RNA (1)...(19): siRNA sense strand
ggaagagguguuagaagag

SEQ ID NO: 1549972 - RNA, 19 nt, Homo sapiens
  misc_RNA (1)...(19): siRNA sense strand
gaggacacccuggaagaga

SEQ ID NO: 1549973 - RNA, 19 nt, Homo sapiens
  misc_RNA (1)...(19): siRNA sense strand
aagagcacauggcugagaa

SEQ ID NO: 1549974 - RNA, 19 nt, Homo sapiens
  misc_RNA (1)...(19): siRNA sense strand
caagcagaacucuacacua

SEQ ID NO: 1549975 - RNA, 19 nt, Homo sapiens
  misc_RNA (1)...(19): siRNA sense strand
gaagcuaagaaagaauuug

SEQ ID NO: 1549976 - RNA, 19 nt, Homo sapiens
  misc_RNA (1)...(19): siRNA sense strand
gcaagaguggaccaaacuu

SEQ ID NO: 1549977 - RNA, 19 nt, Homo sapiens
  misc_RNA (1)...(19): siRNA sense strand
ugggaucacugcgagauga

SEQ ID NO: 1549978 - RNA, 19 nt, Homo sapiens
  misc_RNA (1)...(19): siRNA sense strand
cugcugcacugccaggauu

SEQ ID NO: 1549979 - RNA, 19 nt, Homo sapiens
  misc_RNA (1)...(19): siRNA sense strand
cgggcagccuucagucaaa

SEQ ID NO: 1549980 - RNA, 19 nt, Homo sapiens
  misc_RNA (1)...(19): siRNA sense strand
ggcaucaccuucugcaacu

SEQ ID NO: 1549981 - RNA, 19 nt, Homo sapiens
  misc_RNA (1)...(19): siRNA sense strand
gccaguggaagagguguua

SEQ ID NO: 1549982 - RNA, 19 nt, Homo sapiens
  misc_RNA (1)...(19): siRNA sense strand
gagaauauugcuggcauca

SEQ ID NO: 1549983 - RNA, 19 nt, Homo sapiens
  misc_RNA (1)...(19): siRNA sense strand
agacaggcacccacagcua

SEQ ID NO: 1549984 - RNA, 19 nt, Homo sapiens
  misc_RNA (1)...(19): siRNA sense strand
caaagcucccagagaaguu

SEQ ID NO: 1549985 - RNA, 19 nt, Homo sapiens
  misc_RNA (1)...(19): siRNA sense strand
gacugggacuggucugaca

SEQ ID NO: 1549986 - RNA, 19 nt, Homo sapiens
  misc_RNA (1)...(19): siRNA sense strand
caaacuuuauggggaaaua

SEQ ID NO: 1549987 - RNA, 19 nt, Homo sapiens
  misc_RNA (1)...(19): siRNA sense strand
caucagagggaaauagaag

SEQ ID NO: 1549988 - RNA, 19 nt, Homo sapiens
  misc_RNA (1)...(19): siRNA sense strand
agacagaaauucagaaaac

SEQ ID NO: 1549989 - RNA, 19 nt, Homo sapiens
  misc_RNA (1)...(19): siRNA sense strand
gugacaagacauucaugaa

SEQ ID NO: 1549990 - RNA, 19 nt, Homo sapiens
  misc_RNA (1)...(19): siRNA sense strand
cagcagagcgaaggagaga

SEQ ID NO: 1549991 - RNA, 19 nt, Homo sapiens
  misc_RNA (1)...(19): siRNA sense strand
gaguggaccaaacuuuaug

SEQ ID NO: 1549992 - RNA, 19 nt, Homo sapiens
  misc_RNA (1)...(19): siRNA sense strand
gcauuagcacccuggaugu

SEQ ID NO: 1549993 - RNA, 19 nt, Homo sapiens
  misc_RNA (1)...(19): siRNA sense strand
uggccacucugcaggagaa

SEQ ID NO: 1549994 - RNA, 19 nt, Homo sapiens
  misc_RNA (1)...(19): siRNA sense strand
gagcacauggcugagaaga

SEQ ID NO: 1549995 - RNA, 19 nt, Homo sapiens
  misc_RNA (1)...(19): siRNA sense strand
agagaggcccagccaaaga

SEQ ID NO: 1549996 - RNA, 19 nt, Homo sapiens
  misc_RNA (1)...(19): siRNA sense strand
agaguggaccaaacuuuau

SEQ ID NO: 1549997 - RNA, 19 nt, Homo sapiens
  misc_RNA (1)...(19): siRNA sense strand
ucaaagcucccagagaagu

SEQ ID NO: 1549998 - RNA, 19 nt, Homo sapiens
  misc_RNA (1)...(19): siRNA sense strand
gaaggagagacaggagaau

SEQ ID NO: 1549999 - RNA, 19 nt, Homo sapiens
  misc_RNA (1)...(19): siRNA sense strand
gaaaacggaguggaaaaga

SEQ ID NO: 1550000 - RNA, 19 nt, Homo sapiens
  misc_RNA (1)...(19): siRNA sense strand
uuagcacccuggauguaga

SEQ ID NO: 1550001 - RNA, 19 nt, Homo sapiens
  misc_RNA (1)...(19): siRNA sense strand
gggaaauagaagcuaagaa

SEQ ID NO: 1550002 - RNA, 19 nt, Homo sapiens
  misc_RNA (1)...(19): siRNA sense strand
ccggaaguuuucugaauuu

SEQ ID NO: 1550003 - RNA, 19 nt, Homo sapiens
  misc_RNA (1)...(19): siRNA sense strand
ggaagagaagcucgaaagc

SEQ ID NO: 1550004 - RNA, 19 nt, Homo sapiens
  misc_RNA (1)...(19): siRNA sense strand
aggacacccuggaagagaa

SEQ ID NO: 1550005 - RNA, 19 nt, Homo sapiens
  misc_RNA (1)...(19): siRNA sense strand
cauuagcacccuggaugua

SEQ ID NO: 1550006 - RNA, 19 nt, Homo sapiens
  misc_RNA (1)...(19): siRNA sense strand
aaaacggaguggaaaagaa

SEQ ID NO: 1550007 - RNA, 19 nt, Homo sapiens
  misc_RNA (1)...(19): siRNA sense strand
agagagaagacagaaauuc

SEQ ID NO: 1550008 - RNA, 19 nt, Homo sapiens
  misc_RNA (1)...(19): siRNA sense strand
gaaagcauggggauaagga

SEQ ID NO: 1550009 - RNA, 19 nt, Homo sapiens
  misc_RNA (1)...(19): siRNA sense strand
caucaccuucugcaacuug

SEQ ID NO: 1550010 - RNA, 19 nt, Homo sapiens
  misc_RNA (1)...(19): siRNA sense strand
aggaacagccaguggaaga

SEQ ID NO: 1550011 - RNA, 19 nt, Homo sapiens
  misc_RNA (1)...(19): siRNA sense strand
aagaugagagugacuugga

SEQ ID NO: 1550012 - RNA, 19 nt, Homo sapiens
  misc_RNA (1)...(19): siRNA sense strand
gacuggagacgcauuagca

SEQ ID NO: 1550013 - RNA, 19 nt, Homo sapiens
  misc_RNA (1)...(19): siRNA sense strand
ggaggacacccuggaagag

SEQ ID NO: 1550014 - RNA, 19 nt, Homo sapiens
  misc_RNA (1)...(19): siRNA sense strand
gaugauccaguccuugucu

SEQ ID NO: 1550015 - RNA, 19 nt, Homo sapiens
  misc_RNA (1)...(19): siRNA sense strand
ugucucaggaucagaagaa

SEQ ID NO: 1550016 - RNA, 19 nt, Homo sapiens
  misc_RNA (1)...(19): siRNA sense strand
auaaauggaaagagcaaga

SEQ ID NO: 1550017 - RNA, 19 nt, Homo sapiens
  misc_RNA (1)...(19): siRNA sense strand
gcaugcaggcguggcagaa

SEQ ID NO: 1550018 - RNA, 19 nt, Homo sapiens
  misc_RNA (1)...(19): siRNA sense strand
gugaaggaacugcaugaag

SEQ ID NO: 1550019 - RNA, 19 nt, Homo sapiens
  misc_RNA (1)...(19): siRNA sense strand
aaagaaaagugaaggaacu

SEQ ID NO: 1550020 - RNA, 19 nt, Homo sapiens
  misc_RNA (1)...(19): siRNA sense strand
uggaagagaagcucgaaag

SEQ ID NO: 1550021 - RNA, 19 nt, Homo sapiens
  misc_RNA (1)...(19): siRNA sense strand
cgauucagacucucagaca

SEQ ID NO: 1550022 - RNA, 19 nt, Homo sapiens
  misc_RNA (1)...(19): siRNA sense strand
gaaggaugcaaagggaauc

SEQ ID NO: 1550023 - RNA, 19 nt, Homo sapiens
  misc_RNA (1)...(19): siRNA sense strand
ugaacacgguggugaauua

SEQ ID NO: 1550024 - RNA, 19 nt, Homo sapiens
  misc_RNA (1)...(19): siRNA sense strand
gaacaagaccaagaucaaa

SEQ ID NO: 1550025 - RNA, 19 nt, Homo sapiens
  misc_RNA (1)...(19): siRNA sense strand
gcaacaagcuggucuucuc

SEQ ID NO: 1550026 - RNA, 19 nt, Homo sapiens
  misc_RNA (1)...(19): siRNA sense strand
ccucggagcucuaccagaa

SEQ ID NO: 1550027 - RNA, 19 nt, Homo sapiens
  misc_RNA (1)...(19): siRNA sense strand
aggaagagauggagucaaa

SEQ ID NO: 1550028 - RNA, 19 nt, Homo sapiens
  misc_RNA (1)...(19): siRNA sense strand
gcgagaggcugaagagcuu

SEQ ID NO: 1550029 - RNA, 19 nt, Homo sapiens
  misc_RNA (1)...(19): siRNA sense strand
acaaugacuuccuccauga

SEQ ID NO: 1550030 - RNA, 19 nt, Homo sapiens
  misc_RNA (1)...(19): siRNA sense strand
cggaggagcucaucuacau

SEQ ID NO: 1550031 - RNA, 19 nt, Homo sapiens
  misc_RNA (1)...(19): siRNA sense strand
gaacaacuaccagcacaug

SEQ ID NO: 1550032 - RNA, 19 nt, Homo sapiens
  misc_RNA (1)...(19): siRNA sense strand
gcacaaguggccaauacaa

SEQ ID NO: 1550033 - RNA, 19 nt, Homo sapiens
  misc_RNA (1)...(19): siRNA sense strand
gggcacaaguggccaauac

SEQ ID NO: 1550034 - RNA, 19 nt, Homo sapiens
  misc_RNA (1)...(19): siRNA sense strand
gcugggaaguucaccauca

SEQ ID NO: 1550035 - RNA, 19 nt, Homo sapiens
  misc_RNA (1)...(19): siRNA sense strand
uagaguggaugcaggaaga

SEQ ID NO: 1550036 - RNA, 19 nt, Homo sapiens
  misc_RNA (1)...(19): siRNA sense strand
gagcuggcccugaacaaga

SEQ ID NO: 1550037 - RNA, 19 nt, Homo sapiens
  misc_RNA (1)...(19): siRNA sense strand
gaaguucgcgccugucaag

SEQ ID NO: 1550038 - RNA, 19 nt, Homo sapiens
  misc_RNA (1)...(19): siRNA sense strand
gcaugucacuggccaggau

SEQ ID NO: 1550039 - RNA, 19 nt, Homo sapiens
  misc_RNA (1)...(19): siRNA sense strand
caaguggccaauacaauga

SEQ ID NO: 1550040 - RNA, 19 nt, Homo sapiens
  misc_RNA (1)...(19): siRNA sense strand
uauaacaaccaguggauga

SEQ ID NO: 1550041 - RNA, 19 nt, Homo sapiens
  misc_RNA (1)...(19): siRNA sense strand
ggaugaucguggacuacaa

SEQ ID NO: 1550042 - RNA, 19 nt, Homo sapiens
  misc_RNA (1)...(19): siRNA sense strand
ugaacaagaccaagaucaa

SEQ ID NO: 1550043 - RNA, 19 nt, Homo sapiens
  misc_RNA (1)...(19): siRNA sense strand
acaaguggccaauacaaug

SEQ ID NO: 1550044 - RNA, 19 nt, Homo sapiens
  misc_RNA (1)...(19): siRNA sense strand
guucgcgccugucaagguu

SEQ ID NO: 1550045 - RNA, 19 nt, Homo sapiens
  misc_RNA (1)...(19): siRNA sense strand
cacaacaccuggaacaacu

SEQ ID NO: 1550046 - RNA, 19 nt, Homo sapiens
  misc_RNA (1)...(19): siRNA sense strand
gcuacaacauaccguccuu

SEQ ID NO: 1550047 - RNA, 19 nt, Homo sapiens
  misc_RNA (1)...(19): siRNA sense strand
uacaugcacuggaugaaca

SEQ ID NO: 1550048 - RNA, 19 nt, Homo sapiens
  misc_RNA (1)...(19): siRNA sense strand
gaugagguacaaugacuuc

SEQ ID NO: 1550049 - RNA, 19 nt, Homo sapiens
  misc_RNA (1)...(19): siRNA sense strand
ggaugaacacgguggugaa

SEQ ID NO: 1550050 - RNA, 19 nt, Homo sapiens
  misc_RNA (1)...(19): siRNA sense strand
caaacccagacucaccuua

SEQ ID NO: 1550051 - RNA, 19 nt, Homo sapiens
  misc_RNA (1)...(19): siRNA sense strand
acacgguggugaauuacug

SEQ ID NO: 1550052 - RNA, 19 nt, Homo sapiens
  misc_RNA (1)...(19): siRNA sense strand
ucaacagcggcacguauaa

SEQ ID NO: 1550053 - RNA, 19 nt, Homo sapiens
  misc_RNA (1)...(19): siRNA sense strand
guacaaugacuuccuccau

SEQ ID NO: 1550054 - RNA, 19 nt, Homo sapiens
  misc_RNA (1)...(19): siRNA sense strand
guucugcccucaucaagcu

SEQ ID NO: 1550055 - RNA, 19 nt, Homo sapiens
  misc_RNA (1)...(19): siRNA sense strand
acccagcccuguggaagua

SEQ ID NO: 1550056 - RNA, 19 nt, Homo sapiens
  misc_RNA (1)...(19): siRNA sense strand
gcacaugcugcgugucauc

SEQ ID NO: 1550057 - RNA, 19 nt, Homo sapiens
  misc_RNA (1)...(19): siRNA sense strand
gggacugguuuucuuauga

SEQ ID NO: 1550058 - RNA, 19 nt, Homo sapiens
  misc_RNA (1)...(19): siRNA sense strand
ucggagcucuaccagaaga

SEQ ID NO: 1550059 - RNA, 19 nt, Homo sapiens
  misc_RNA (1)...(19): siRNA sense strand
gccaauacaaugacagcuu

SEQ ID NO: 1550060 - RNA, 19 nt, Homo sapiens
  misc_RNA (1)...(19): siRNA sense strand
gaugaacacgguggugaau

SEQ ID NO: 1550061 - RNA, 19 nt, Homo sapiens
  misc_RNA (1)...(19): siRNA sense strand
gaccaccauuggcaacaag

SEQ ID NO: 1550062 - RNA, 19 nt, Homo sapiens
  misc_RNA (1)...(19): siRNA sense strand
gcaggaagagauggaguca

SEQ ID NO: 1550063 - RNA, 19 nt, Homo sapiens
  misc_RNA (1)...(19): siRNA sense strand
gaagagauggagucaaacc

SEQ ID NO: 1550064 - RNA, 19 nt, Homo sapiens
  misc_RNA (1)...(19): siRNA sense strand
ggagccgggugcuuaccau

SEQ ID NO: 1550065 - RNA, 19 nt, Homo sapiens
  misc_RNA (1)...(19): siRNA sense strand
gaacacgguggugaauuac

SEQ ID NO: 1550066 - RNA, 19 nt, Homo sapiens
  misc_RNA (1)...(19): siRNA sense strand
uggagcaccucgcccuuca

SEQ ID NO: 1550067 - RNA, 19 nt, Homo sapiens
  misc_RNA (1)...(19): siRNA sense strand
guucaacagcggcacguau

SEQ ID NO: 1550068 - RNA, 19 nt, Homo sapiens
  misc_RNA (1)...(19): siRNA sense strand
gcccugaacaagaccaaga

SEQ ID NO: 1550069 - RNA, 19 nt, Homo sapiens
  misc_RNA (1)...(19): siRNA sense strand
ucaucuacaugcacuggau

SEQ ID NO: 1550070 - RNA, 19 nt, Homo sapiens
  misc_RNA (1)...(19): siRNA sense strand
gaugaucguggacuacaag

SEQ ID NO: 1550071 - RNA, 19 nt, Homo sapiens
  misc_RNA (1)...(19): siRNA sense strand
ugggccagauguacugcua

SEQ ID NO: 1550072 - RNA, 19 nt, Homo sapiens
  misc_RNA (1)...(19): siRNA sense strand
cuucgagacuguguucaau

SEQ ID NO: 1550073 - RNA, 19 nt, Homo sapiens
  misc_RNA (1)...(19): siRNA sense strand
cugggaaguucaccaucaa

SEQ ID NO: 1550074 - RNA, 19 nt, Homo sapiens
  misc_RNA (1)...(19): siRNA sense strand
ugucggaggagcucaucua

SEQ ID NO: 1550075 - RNA, 19 nt, Homo sapiens
  misc_RNA (1)...(19): siRNA sense strand
caccugggcagacaucuuc

SEQ ID NO: 1550076 - RNA, 19 nt, Homo sapiens
  misc_RNA (1)...(19): siRNA sense strand
ggaguggguacgcaacauc

SEQ ID NO: 1550077 - RNA, 19 nt, Homo sapiens
  misc_RNA (1)...(19): siRNA sense strand
ccacaacaccuggaacaac

SEQ ID NO: 1550078 - RNA, 19 nt, Homo sapiens
  misc_RNA (1)...(19): siRNA sense strand
ggaggagcucaucuacaug

SEQ ID NO: 1550079 - RNA, 19 nt, Homo sapiens
  misc_RNA (1)...(19): siRNA sense strand
ggagcuggcccugaacaag

SEQ ID NO: 1550080 - RNA, 19 nt, Homo sapiens
  misc_RNA (1)...(19): siRNA sense strand
caagguuucaugggacuga

SEQ ID NO: 1550081 - RNA, 19 nt, Homo sapiens
  misc_RNA (1)...(19): siRNA sense strand
ggaaguucgcgccugucaa

SEQ ID NO: 1550082 - RNA, 19 nt, Homo sapiens
  misc_RNA (1)...(19): siRNA sense strand
cacaaguggccaauacaau

SEQ ID NO: 1550083 - RNA, 19 nt, Homo sapiens
  misc_RNA (1)...(19): siRNA sense strand
ucgagacuguguucaaugc

SEQ ID NO: 1550084 - RNA, 19 nt, Homo sapiens
  misc_RNA (1)...(19): siRNA sense strand
uucaacagcggcacguaua

SEQ ID NO: 1550085 - RNA, 19 nt, Homo sapiens
  misc_RNA (1)...(19): siRNA sense strand
ugcgugucaucaagaagua

SEQ ID NO: 1550086 - RNA, 19 nt, Homo sapiens
  misc_RNA (1)...(19): siRNA sense strand
gcccacaacaccuggaaca

SEQ ID NO: 1550087 - RNA, 19 nt, Homo sapiens
  misc_RNA (1)...(19): siRNA sense strand
cugaugagguacaaugacu

SEQ ID NO: 1550088 - RNA, 19 nt, Homo sapiens
  misc_RNA (1)...(19): siRNA sense strand
ggacuacaaggcguucauc

SEQ ID NO: 1550089 - RNA, 19 nt, Homo sapiens
  misc_RNA (1)...(19): siRNA sense strand
uaacaaccaguggaugauc

SEQ ID NO: 1550090 - RNA, 19 nt, Homo sapiens
  misc_RNA (1)...(19): siRNA sense strand
gaagauguuucuauccaaa

SEQ ID NO: 1550091 - RNA, 19 nt, Homo sapiens
  misc_RNA (1)...(19): siRNA sense strand
gcaaagaccucuggagauc

SEQ ID NO: 1550092 - RNA, 19 nt, Homo sapiens
  misc_RNA (1)...(19): siRNA sense strand
ggaaacacauccagaaguc

SEQ ID NO: 1550093 - RNA, 19 nt, Homo sapiens
  misc_RNA (1)...(19): siRNA sense strand
gaacaagacgugucaagga

SEQ ID NO: 1550094 - RNA, 19 nt, Homo sapiens
  misc_RNA (1)...(19): siRNA sense strand
caaggaagauguuucuauc

SEQ ID NO: 1550095 - RNA, 19 nt, Homo sapiens
  misc_RNA (1)...(19): siRNA sense strand
ucaccaaggaguuuacuua

SEQ ID NO: 1550096 - RNA, 19 nt, Homo sapiens
  misc_RNA (1)...(19): siRNA sense strand
ggaagauguuucuauccaa

SEQ ID NO: 1550097 - RNA, 19 nt, Homo sapiens
  misc_RNA (1)...(19): siRNA sense strand
ggaaagagaggagagcaaa

SEQ ID NO: 1550098 - RNA, 19 nt, Homo sapiens
  misc_RNA (1)...(19): siRNA sense strand
ggacccacgugucugcaaa

SEQ ID NO: 1550099 - RNA, 19 nt, Homo sapiens
  misc_RNA (1)...(19): siRNA sense strand
caagacgugucaaggaaga

SEQ ID NO: 1550100 - RNA, 19 nt, Homo sapiens
  misc_RNA (1)...(19): siRNA sense strand
gcagaaacagcaucccaaa

SEQ ID NO: 1550101 - RNA, 19 nt, Homo sapiens
  misc_RNA (1)...(19): siRNA sense strand
gagaggagagcaaaggaaa

SEQ ID NO: 1550102 - RNA, 19 nt, Homo sapiens
  misc_RNA (1)...(19): siRNA sense strand
gaaauucaacagugagcaa

SEQ ID NO: 1550103 - RNA, 19 nt, Homo sapiens
  misc_RNA (1)...(19): siRNA sense strand
gaaccagaaagcugaaguu

SEQ ID NO: 1550104 - RNA, 19 nt, Homo sapiens
  misc_RNA (1)...(19): siRNA sense strand
aacaagacgugucaaggaa

SEQ ID NO: 1550105 - RNA, 19 nt, Homo sapiens
  misc_RNA (1)...(19): siRNA sense strand
gagaggcaccagcagguaa

SEQ ID NO: 1550106 - RNA, 19 nt, Homo sapiens
  misc_RNA (1)...(19): siRNA sense strand
ccacgaaagaguauuugaa

SEQ ID NO: 1550107 - RNA, 19 nt, Homo sapiens
  misc_RNA (1)...(19): siRNA sense strand
cacgaaagaguauuugaaa

SEQ ID NO: 1550108 - RNA, 19 nt, Homo sapiens
  misc_RNA (1)...(19): siRNA sense strand
ucaaggaagauguuucuau

SEQ ID NO: 1550109 - RNA, 19 nt, Homo sapiens
  misc_RNA (1)...(19): siRNA sense strand
gaaguuucaccaaggaguu

SEQ ID NO: 1550110 - RNA, 19 nt, Homo sapiens
  misc_RNA (1)...(19): siRNA sense strand
aaaggaaacacauccagaa

SEQ ID NO: 1550111 - RNA, 19 nt, Homo sapiens
  misc_RNA (1)...(19): siRNA sense strand
gugagcaagugcagaaaca

SEQ ID NO: 1550112 - RNA, 19 nt, Homo sapiens
  misc_RNA (1)...(19): siRNA sense strand
gaggagagcaaaggaaaca

SEQ ID NO: 1550113 - RNA, 19 nt, Homo sapiens
  misc_RNA (1)...(19): siRNA sense strand
ggagagcaaaggaaacaca

SEQ ID NO: 1550114 - RNA, 19 nt, Homo sapiens
  misc_RNA (1)...(19): siRNA sense strand
gaaagagaggagagcaaag

SEQ ID NO: 1550115 - RNA, 19 nt, Homo sapiens
  misc_RNA (1)...(19): siRNA sense strand
cuggagauccuaagagaga

SEQ ID NO: 1550116 - RNA, 19 nt, Homo sapiens
  misc_RNA (1)...(19): siRNA sense strand
acagugagcaagugcagaa

SEQ ID NO: 1550117 - RNA, 19 nt, Homo sapiens
  misc_RNA (1)...(19): siRNA sense strand
aggaagauguuucuaucca

SEQ ID NO: 1550118 - RNA, 19 nt, Homo sapiens
  misc_RNA (1)...(19): siRNA sense strand
ggagauccuaagagagaga

SEQ ID NO: 1550119 - RNA, 19 nt, Homo sapiens
  misc_RNA (1)...(19): siRNA sense strand
gggaaagagaggagagcaa

SEQ ID NO: 1550120 - RNA, 19 nt, Homo sapiens
  misc_RNA (1)...(19): siRNA sense strand
ccacacgcaggaaccagaa

SEQ ID NO: 1550121 - RNA, 19 nt, Homo sapiens
  misc_RNA (1)...(19): siRNA sense strand
ggaaccagaaagcugaagu

SEQ ID NO: 1550122 - RNA, 19 nt, Homo sapiens
  misc_RNA (1)...(19): siRNA sense strand
gagagcaaaggaaacacau

SEQ ID NO: 1550123 - RNA, 19 nt, Homo sapiens
  misc_RNA (1)...(19): siRNA sense strand
gcacgucgcccauuucuca

SEQ ID NO: 1550124 - RNA, 19 nt, Homo sapiens
  misc_RNA (1)...(19): siRNA sense strand
ugaggcagcucccguggua

SEQ ID NO: 1550125 - RNA, 19 nt, Homo sapiens
  misc_RNA (1)...(19): siRNA sense strand
guucucagcuuccuguuca

SEQ ID NO: 1550126 - RNA, 19 nt, Homo sapiens
  misc_RNA (1)...(19): siRNA sense strand
agagaaaccucagacaaga

SEQ ID NO: 1550127 - RNA, 19 nt, Homo sapiens
  misc_RNA (1)...(19): siRNA sense strand
ccacaggcacccaggauaa

SEQ ID NO: 1550128 - RNA, 19 nt, Homo sapiens
  misc_RNA (1)...(19): siRNA sense strand
agaagcacgucgcccauuu

SEQ ID NO: 1550129 - RNA, 19 nt, Homo sapiens
  misc_RNA (1)...(19): siRNA sense strand
acacauggguucucagcuu

SEQ ID NO: 1550130 - RNA, 19 nt, Homo sapiens
  misc_RNA (1)...(19): siRNA sense strand
caggauaacucaguacaca

SEQ ID NO: 1550131 - RNA, 19 nt, Homo sapiens
  misc_RNA (1)...(19): siRNA sense strand
ggauaacucaguacacaug

SEQ ID NO: 1550132 - RNA, 19 nt, Homo sapiens
  misc_RNA (1)...(19): siRNA sense strand
gagaaaccucagacaagaa

SEQ ID NO: 1550133 - RNA, 19 nt, Homo sapiens
  misc_RNA (1)...(19): siRNA sense strand
cagagaaaccucagacaag

SEQ ID NO: 1550134 - RNA, 19 nt, Homo sapiens
  misc_RNA (1)...(19): siRNA sense strand
ggacgcaugaccaggauuc

SEQ ID NO: 1550135 - RNA, 19 nt, Homo sapiens
  misc_RNA (1)...(19): siRNA sense strand
cacccaggauaacucagua

SEQ ID NO: 1550136 - RNA, 19 nt, Homo sapiens
  misc_RNA (1)...(19): siRNA sense strand
gaagcacgucgcccauuuc

SEQ ID NO: 1550137 - RNA, 19 nt, Homo sapiens
  misc_RNA (1)...(19): siRNA sense strand
agucaggguuucaggaaug

SEQ ID NO: 1550138 - RNA, 19 nt, Homo sapiens
  misc_RNA (1)...(19): siRNA sense strand
acagagaaaccucagacaa

SEQ ID NO: 1550139 - RNA, 19 nt, Homo sapiens
  misc_RNA (1)...(19): siRNA sense strand
gagcugagagcguguccau

SEQ ID NO: 1550140 - RNA, 19 nt, Homo sapiens
  misc_RNA (1)...(19): siRNA sense strand
gcacccaggauaacucagu

SEQ ID NO: 1550141 - RNA, 19 nt, Homo sapiens
  misc_RNA (1)...(19): siRNA sense strand
cagcucccgugguagauca

SEQ ID NO: 1550142 - RNA, 19 nt, Homo sapiens
  misc_RNA (1)...(19): siRNA sense strand
gagcuugcuggacgcauga

SEQ ID NO: 1550143 - RNA, 19 nt, Homo sapiens
  misc_RNA (1)...(19): siRNA sense strand
cgucgcccauuucucauca

SEQ ID NO: 1550144 - RNA, 19 nt, Homo sapiens
  misc_RNA (1)...(19): siRNA sense strand
caggaaugcggccuucgaa

SEQ ID NO: 1550145 - RNA, 19 nt, Homo sapiens
  misc_RNA (1)...(19): siRNA sense strand
caguacacauggguucuca

SEQ ID NO: 1550146 - RNA, 19 nt, Homo sapiens
  misc_RNA (1)...(19): siRNA sense strand
gaccacaggcacccaggau

SEQ ID NO: 1550147 - RNA, 19 nt, Homo sapiens
  misc_RNA (1)...(19): siRNA sense strand
gaauaugucugaggaggaa

SEQ ID NO: 1550148 - RNA, 19 nt, Homo sapiens
  misc_RNA (1)...(19): siRNA sense strand
gcaaugugauagagauaga

SEQ ID NO: 1550149 - RNA, 19 nt, Homo sapiens
  misc_RNA (1)...(19): siRNA sense strand
cauuauagcugagaaagau

SEQ ID NO: 1550150 - RNA, 19 nt, Homo sapiens
  misc_RNA (1)...(19): siRNA sense strand
gaccaacccuaaccuaagu

SEQ ID NO: 1550151 - RNA, 19 nt, Homo sapiens
  misc_RNA (1)...(19): siRNA sense strand
gaagaggauugggaugaug

SEQ ID NO: 1550152 - RNA, 19 nt, Homo sapiens
  misc_RNA (1)...(19): siRNA sense strand
ggaagaggauugggaugau

SEQ ID NO: 1550153 - RNA, 19 nt, Homo sapiens
  misc_RNA (1)...(19): siRNA sense strand
acaauccgcuguucguauu

SEQ ID NO: 1550154 - RNA, 19 nt, Homo sapiens
  misc_RNA (1)...(19): siRNA sense strand
gacucagacuuaaggauuu

SEQ ID NO: 1550155 - RNA, 19 nt, Homo sapiens
  misc_RNA (1)...(19): siRNA sense strand
gaagugcuggucauugauu

SEQ ID NO: 1550156 - RNA, 19 nt, Homo sapiens
  misc_RNA (1)...(19): siRNA sense strand
gaguuaaucagaaugguaa

SEQ ID NO: 1550157 - RNA, 19 nt, Homo sapiens
  misc_RNA (1)...(19): siRNA sense strand
gaagaaaccuuugaaaacu

SEQ ID NO: 1550158 - RNA, 19 nt, Homo sapiens
  misc_RNA (1)...(19): siRNA sense strand
gaaggccacucaaaagaaa

SEQ ID NO: 1550159 - RNA, 19 nt, Homo sapiens
  misc_RNA (1)...(19): siRNA sense strand
ggccagaccucaggaugaa

SEQ ID NO: 1550160 - RNA, 19 nt, Homo sapiens
  misc_RNA (1)...(19): siRNA sense strand
ggaguuaaucagaauggua

SEQ ID NO: 1550161 - RNA, 19 nt, Homo sapiens
  misc_RNA (1)...(19): siRNA sense strand
gaccuccgacucagacuua

SEQ ID NO: 1550162 - RNA, 19 nt, Homo sapiens
  misc_RNA (1)...(19): siRNA sense strand
ggagcggcuucccaacuuu

SEQ ID NO: 1550163 - RNA, 19 nt, Homo sapiens
  misc_RNA (1)...(19): siRNA sense strand
gagcugacccauacugaga

SEQ ID NO: 1550164 - RNA, 19 nt, Homo sapiens
  misc_RNA (1)...(19): siRNA sense strand
agaagucucgguccuauaa

SEQ ID NO: 1550165 - RNA, 19 nt, Homo sapiens
  misc_RNA (1)...(19): siRNA sense strand
cgaauacaaugacuucucu

SEQ ID NO: 1550166 - RNA, 19 nt, Homo sapiens
  misc_RNA (1)...(19): siRNA sense strand
cgacucagacuuaaggauu

SEQ ID NO: 1550167 - RNA, 19 nt, Homo sapiens
  misc_RNA (1)...(19): siRNA sense strand
ugauagagauagaugauac

SEQ ID NO: 1550168 - RNA, 19 nt, Homo sapiens
  misc_RNA (1)...(19): siRNA sense strand
gacugcccaugguaaauuu

SEQ ID NO: 1550169 - RNA, 19 nt, Homo sapiens
  misc_RNA (1)...(19): siRNA sense strand
gccaugaaauugguguuug

SEQ ID NO: 1550170 - RNA, 19 nt, Homo sapiens
  misc_RNA (1)...(19): siRNA sense strand
ggauugggaugaugcuuuu

SEQ ID NO: 1550171 - RNA, 19 nt, Homo sapiens
  misc_RNA (1)...(19): siRNA sense strand
gcgaccaacccuaaccuaa

SEQ ID NO: 1550172 - RNA, 19 nt, Homo sapiens
  misc_RNA (1)...(19): siRNA sense strand
agucagcccuguggcauuu

SEQ ID NO: 1550173 - RNA, 19 nt, Homo sapiens
  misc_RNA (1)...(19): siRNA sense strand
gacagaaacaugaaguugu

SEQ ID NO: 1550174 - RNA, 19 nt, Homo sapiens
  misc_RNA (1)...(19): siRNA sense strand
ggaagaaaccuuugaaaac

SEQ ID NO: 1550175 - RNA, 19 nt, Homo sapiens
  misc_RNA (1)...(19): siRNA sense strand
uaagggaggaagaggauug

SEQ ID NO: 1550176 - RNA, 19 nt, Homo sapiens
  misc_RNA (1)...(19): siRNA sense strand
uaaccuaaguguggcagau

SEQ ID NO: 1550177 - RNA, 19 nt, Homo sapiens
  misc_RNA (1)...(19): siRNA sense strand
gggaugaugcuuuuauuaa

SEQ ID NO: 1550178 - RNA, 19 nt, Homo sapiens
  misc_RNA (1)...(19): siRNA sense strand
gcuauucaggcaggcauua

SEQ ID NO: 1550179 - RNA, 19 nt, Homo sapiens
  misc_RNA (1)...(19): siRNA sense strand
gggaagaaaccuuugaaaa

SEQ ID NO: 1550180 - RNA, 19 nt, Homo sapiens
  misc_RNA (1)...(19): siRNA sense strand
uccaggagcugacccauac

SEQ ID NO: 1550181 - RNA, 19 nt, Homo sapiens
  misc_RNA (1)...(19): siRNA sense strand
gcagacagaaacaugaagu

SEQ ID NO: 1550182 - RNA, 19 nt, Homo sapiens
  misc_RNA (1)...(19): siRNA sense strand
gcauuauagcugagaaaga

SEQ ID NO: 1550183 - RNA, 19 nt, Homo sapiens
  misc_RNA (1)...(19): siRNA sense strand
gggccagaccucaggauga

SEQ ID NO: 1550184 - RNA, 19 nt, Homo sapiens
  misc_RNA (1)...(19): siRNA sense strand
ugacugcccaugguaaauu

SEQ ID NO: 1550185 - RNA, 19 nt, Homo sapiens
  misc_RNA (1)...(19): siRNA sense strand
ccaugaaauugguguuugg

SEQ ID NO: 1550186 - RNA, 19 nt, Homo sapiens
  misc_RNA (1)...(19): siRNA sense strand
cgacgacuccgaugaggau

SEQ ID NO: 1550187 - RNA, 19 nt, Homo sapiens
  misc_RNA (1)...(19): siRNA sense strand
caggauguaugcaaaugag

SEQ ID NO: 1550188 - RNA, 19 nt, Homo sapiens
  misc_RNA (1)...(19): siRNA sense strand
agacagaaacaugaaguug

SEQ ID NO: 1550189 - RNA, 19 nt, Homo sapiens
  misc_RNA (1)...(19): siRNA sense strand
guagagccaggaagcgaaa

SEQ ID NO: 1550190 - RNA, 19 nt, Homo sapiens
  misc_RNA (1)...(19): siRNA sense strand
cccuuuaugugauccguuu

SEQ ID NO: 1550191 - RNA, 19 nt, Homo sapiens
  misc_RNA (1)...(19): siRNA sense strand
gcugacccauacugagaug

SEQ ID NO: 1550192 - RNA, 19 nt, Homo sapiens
  misc_RNA (1)...(19): siRNA sense strand
gguaagggaggaagaggau

SEQ ID NO: 1550193 - RNA, 19 nt, Homo sapiens
  misc_RNA (1)...(19): siRNA sense strand
ggaaggccacucaaaagaa

SEQ ID NO: 1550194 - RNA, 19 nt, Homo sapiens
  misc_RNA (1)...(19): siRNA sense strand
cgaccaacccuaaccuaag

SEQ ID NO: 1550195 - RNA, 19 nt, Homo sapiens
  misc_RNA (1)...(19): siRNA sense strand
cgacuccgaugaggaugug

SEQ ID NO: 1550196 - RNA, 19 nt, Homo sapiens
  misc_RNA (1)...(19): siRNA sense strand
ugacugcaaugugauagag

SEQ ID NO: 1550197 - RNA, 19 nt, Homo sapiens
  misc_RNA (1)...(19): siRNA sense strand
aggagcggcuucccaacuu

SEQ ID NO: 1550198 - RNA, 19 nt, Homo sapiens
  misc_RNA (1)...(19): siRNA sense strand
uagcugagaaagaugcaaa

SEQ ID NO: 1550199 - RNA, 19 nt, Homo sapiens
  misc_RNA (1)...(19): siRNA sense strand
cagcauggcagacagaaac

SEQ ID NO: 1550200 - RNA, 19 nt, Homo sapiens
  misc_RNA (1)...(19): siRNA sense strand
gugauagagauagaugaua

SEQ ID NO: 1550201 - RNA, 19 nt, Homo sapiens
  misc_RNA (1)...(19): siRNA sense strand
agugcugacugcaauguga

SEQ ID NO: 1550202 - RNA, 19 nt, Homo sapiens
  misc_RNA (1)...(19): siRNA sense strand
uauucaggcaggcauuaua

SEQ ID NO: 1550203 - RNA, 19 nt, Homo sapiens
  misc_RNA (1)...(19): siRNA sense strand
gcgaauacaaugacuucuc

SEQ ID NO: 1550204 - RNA, 19 nt, Homo sapiens
  misc_RNA (1)...(19): siRNA sense strand
ucucaggacccuccacuuc

SEQ ID NO: 1550205 - RNA, 19 nt, Homo sapiens
  misc_RNA (1)...(19): siRNA sense strand
ucaggacccuccacuucca

SEQ ID NO: 1550206 - RNA, 19 nt, Homo sapiens
  misc_RNA (1)...(19): siRNA sense strand
aagucucgguccuauaaug

SEQ ID NO: 1550207 - RNA, 19 nt, Homo sapiens
  misc_RNA (1)...(19): siRNA sense strand
ucauugcacgugucgguaa

SEQ ID NO: 1550208 - RNA, 19 nt, Homo sapiens
  misc_RNA (1)...(19): siRNA sense strand
gaaugguaagggaggaaga

SEQ ID NO: 1550209 - RNA, 19 nt, Homo sapiens
  misc_RNA (1)...(19): siRNA sense strand
caauuccagggcucaguuu

SEQ ID NO: 1550210 - RNA, 19 nt, Homo sapiens
  misc_RNA (1)...(19): siRNA sense strand
aauacaaugacuucucuga

SEQ ID NO: 1550211 - RNA, 19 nt, Homo sapiens
  misc_RNA (1)...(19): siRNA sense strand
cacaauccgcuguucguau

SEQ ID NO: 1550212 - RNA, 19 nt, Homo sapiens
  misc_RNA (1)...(19): siRNA sense strand
aaaacuggcugacccaagu

SEQ ID NO: 1550213 - RNA, 19 nt, Homo sapiens
  misc_RNA (1)...(19): siRNA sense strand
ucaggauguaugcaaauga

SEQ ID NO: 1550214 - RNA, 19 nt, Homo sapiens
  misc_RNA (1)...(19): siRNA sense strand
accuaaguguggcagauuu

SEQ ID NO: 1550215 - RNA, 19 nt, Homo sapiens
  misc_RNA (1)...(19): siRNA sense strand
aagccucccuuuaugugau

SEQ ID NO: 1550216 - RNA, 19 nt, Homo sapiens
  misc_RNA (1)...(19): siRNA sense strand
gagauggagaggucaagag

SEQ ID NO: 1550217 - RNA, 19 nt, Homo sapiens
  misc_RNA (1)...(19): siRNA sense strand
acacaauccgcuguucgua

SEQ ID NO: 1550218 - RNA, 19 nt, Homo sapiens
  misc_RNA (1)...(19): siRNA sense strand
cagacagaaacaugaaguu

SEQ ID NO: 1550219 - RNA, 19 nt, Homo sapiens
  misc_RNA (1)...(19): siRNA sense strand
gaagucucgguccuauaau

SEQ ID NO: 1550220 - RNA, 19 nt, Homo sapiens
  misc_RNA (1)...(19): siRNA sense strand
gagcggcuucccaacuuuc

SEQ ID NO: 1550221 - RNA, 19 nt, Homo sapiens
  misc_RNA (1)...(19): siRNA sense strand
ggaccuccgacucagacuu

SEQ ID NO: 1550222 - RNA, 19 nt, Homo sapiens
  misc_RNA (1)...(19): siRNA sense strand
ggagaaguguccuguuuca

SEQ ID NO: 1550223 - RNA, 19 nt, Homo sapiens
  misc_RNA (1)...(19): siRNA sense strand
gguguggccugcaaaggaa

SEQ ID NO: 1550224 - RNA, 19 nt, Homo sapiens
  misc_RNA (1)...(19): siRNA sense strand
gaaccucgucgcgacauuu

SEQ ID NO: 1550225 - RNA, 19 nt, Homo sapiens
  misc_RNA (1)...(19): siRNA sense strand
gaagauaaacaggagaagu

SEQ ID NO: 1550226 - RNA, 19 nt, Homo sapiens
  misc_RNA (1)...(19): siRNA sense strand
cagaagauaaacaggagaa

SEQ ID NO: 1550227 - RNA, 19 nt, Homo sapiens
  misc_RNA (1)...(19): siRNA sense strand
aagauaaacaggagaagug

SEQ ID NO: 1550228 - RNA, 19 nt, Homo sapiens
  misc_RNA (1)...(19): siRNA sense strand
gauccaaaggguucaaagg

SEQ ID NO: 1550229 - RNA, 19 nt, Homo sapiens
  misc_RNA (1)...(19): siRNA sense strand
cgaagggugccaucugcuu

SEQ ID NO: 1550230 - RNA, 19 nt, Homo sapiens
  misc_RNA (1)...(19): siRNA sense strand
gaaaugugcugcugaucug

SEQ ID NO: 1550231 - RNA, 19 nt, Homo sapiens
  misc_RNA (1)...(19): siRNA sense strand
gcauuggccuccugguuaa

SEQ ID NO: 1550232 - RNA, 19 nt, Homo sapiens
  misc_RNA (1)...(19): siRNA sense strand
ggcagaagaugaugaugaa

SEQ ID NO: 1550233 - RNA, 19 nt, Homo sapiens
  misc_RNA (1)...(19): siRNA sense strand
caagaaaugugcugcugau

SEQ ID NO: 1550234 - RNA, 19 nt, Homo sapiens
  misc_RNA (1)...(19): siRNA sense strand
gaucauccgcaaggaaaua

SEQ ID NO: 1550235 - RNA, 19 nt, Homo sapiens
  misc_RNA (1)...(19): siRNA sense strand
gaagaucauccgcaaggaa

SEQ ID NO: 1550236 - RNA, 19 nt, Homo sapiens
  misc_RNA (1)...(19): siRNA sense strand
gaucugggccugaauaagg

SEQ ID NO: 1550237 - RNA, 19 nt, Homo sapiens
  misc_RNA (1)...(19): siRNA sense strand
gaugaccggugccuugcuu

SEQ ID NO: 1550238 - RNA, 19 nt, Homo sapiens
  misc_RNA (1)...(19): siRNA sense strand
gaugaugaaagucuucuug

SEQ ID NO: 1550239 - RNA, 19 nt, Homo sapiens
  misc_RNA (1)...(19): siRNA sense strand
agaagaugaugaugaaagu

SEQ ID NO: 1550240 - RNA, 19 nt, Homo sapiens
  misc_RNA (1)...(19): siRNA sense strand
ggaaauaccagccaaaauc

SEQ ID NO: 1550241 - RNA, 19 nt, Homo sapiens
  misc_RNA (1)...(19): siRNA sense strand
ggaagaucauccgcaagga

SEQ ID NO: 1550242 - RNA, 19 nt, Homo sapiens
  misc_RNA (1)...(19): siRNA sense strand
cuuggacacuuaaugauug

SEQ ID NO: 1550243 - RNA, 19 nt, Homo sapiens
  misc_RNA (1)...(19): siRNA sense strand
ggacacuuaaugauuguug

SEQ ID NO: 1550244 - RNA, 19 nt, Homo sapiens
  misc_RNA (1)...(19): siRNA sense strand
ugaugaaagucuucuugga

SEQ ID NO: 1550245 - RNA, 19 nt, Homo sapiens
  misc_RNA (1)...(19): siRNA sense strand
agaaacauauaucccagau

SEQ ID NO: 1550246 - RNA, 19 nt, Homo sapiens
  misc_RNA (1)...(19): siRNA sense strand
ggaggucggcaaaugcauu

SEQ ID NO: 1550247 - RNA, 19 nt, Homo sapiens
  misc_RNA (1)...(19): siRNA sense strand
gcugaucugggccugaaua

SEQ ID NO: 1550248 - RNA, 19 nt, Homo sapiens
  misc_RNA (1)...(19): siRNA sense strand
ucacguucaucuccauguu

SEQ ID NO: 1550249 - RNA, 19 nt, Homo sapiens
  misc_RNA (1)...(19): siRNA sense strand
gugauacccaagaaacaua

SEQ ID NO: 1550250 - RNA, 19 nt, Homo sapiens
  misc_RNA (1)...(19): siRNA sense strand
aaugauuguuggcaagaaa

SEQ ID NO: 1550251 - RNA, 19 nt, Homo sapiens
  misc_RNA (1)...(19): siRNA sense strand
ugcauuggccuccugguua

SEQ ID NO: 1550252 - RNA, 19 nt, Homo sapiens
  misc_RNA (1)...(19): siRNA sense strand
gaaacauauaucccagauu

SEQ ID NO: 1550253 - RNA, 19 nt, Homo sapiens
  misc_RNA (1)...(19): siRNA sense strand
ccucaagcaccaacacauu

SEQ ID NO: 1550254 - RNA, 19 nt, Homo sapiens
  misc_RNA (1)...(19): siRNA sense strand
caaggaaauaccagccaaa

SEQ ID NO: 1550255 - RNA, 19 nt, Homo sapiens
  misc_RNA (1)...(19): siRNA sense strand
gaaauaccagccaaaauca

SEQ ID NO: 1550256 - RNA, 19 nt, Homo sapiens
  misc_RNA (1)...(19): siRNA sense strand
uggcagaagaugaugauga

SEQ ID NO: 1550257 - RNA, 19 nt, Homo sapiens
  misc_RNA (1)...(19): siRNA sense strand
cagaagaugaugaugaaag

SEQ ID NO: 1550258 - RNA, 19 nt, Homo sapiens
  misc_RNA (1)...(19): siRNA sense strand
gauacccaagaaacauaua

SEQ ID NO: 1550259 - RNA, 19 nt, Homo sapiens
  misc_RNA (1)...(19): siRNA sense strand
gaggucggcaaaugcauug

SEQ ID NO: 1550260 - RNA, 19 nt, Homo sapiens
  misc_RNA (1)...(19): siRNA sense strand
guuaucgaaugguggugaa

SEQ ID NO: 1550261 - RNA, 19 nt, Homo sapiens
  misc_RNA (1)...(19): siRNA sense strand
aagaucauccgcaaggaaa

SEQ ID NO: 1550262 - RNA, 19 nt, Homo sapiens
  misc_RNA (1)...(19): siRNA sense strand
uaaugauuguuggcaagaa

SEQ ID NO: 1550263 - RNA, 19 nt, Homo sapiens
  misc_RNA (1)...(19): siRNA sense strand
guucaucuccauguucuug

SEQ ID NO: 1550264 - RNA, 19 nt, Homo sapiens
  misc_RNA (1)...(19): siRNA sense strand
cuucuuggacacuuaauga

SEQ ID NO: 1550265 - RNA, 19 nt, Homo sapiens
  misc_RNA (1)...(19): siRNA sense strand
gcagaagaugaugaugaaa

SEQ ID NO: 1550266 - RNA, 19 nt, Homo sapiens
  misc_RNA (1)...(19): siRNA sense strand
ggugauacccaagaaacau

SEQ ID NO: 1550267 - RNA, 19 nt, Homo sapiens
  misc_RNA (1)...(19): siRNA sense strand
agaaaugugcugcugaucu

SEQ ID NO: 1550268 - RNA, 19 nt, Homo sapiens
  misc_RNA (1)...(19): siRNA sense strand
cucaagcaccaacacauuu

SEQ ID NO: 1550269 - RNA, 19 nt, Homo sapiens
  misc_RNA (1)...(19): siRNA sense strand
caacacauuuucuggugau

SEQ ID NO: 1550270 - RNA, 19 nt, Homo sapiens
  misc_RNA (1)...(19): siRNA sense strand
guucuuggaggucggcaaa

SEQ ID NO: 1550271 - RNA, 19 nt, Homo sapiens
  misc_RNA (1)...(19): siRNA sense strand
cugcugaucugggccugaa

SEQ ID NO: 1550272 - RNA, 19 nt, Homo sapiens
  misc_RNA (1)...(19): siRNA sense strand
gaugaugaugaaagucuuc

SEQ ID NO: 1550273 - RNA, 19 nt, Homo sapiens
  misc_RNA (1)...(19): siRNA sense strand
ucuuggaggucggcaaaug

SEQ ID NO: 1550274 - RNA, 19 nt, Homo sapiens
  misc_RNA (1)...(19): siRNA sense strand
gaaagucuucuuggacacu

SEQ ID NO: 1550275 - RNA, 19 nt, Homo sapiens
  misc_RNA (1)...(19): siRNA sense strand
gcaggagaguguguucuga

SEQ ID NO: 1550276 - RNA, 19 nt, Homo sapiens
  misc_RNA (1)...(19): siRNA sense strand
uggacccguuuguuuauua

SEQ ID NO: 1550277 - RNA, 19 nt, Homo sapiens
  misc_RNA (1)...(19): siRNA sense strand
ggcaaccucuucucucugu

SEQ ID NO: 1550278 - RNA, 19 nt, Homo sapiens
  misc_RNA (1)...(19): siRNA sense strand
ugaucaccguggcuuguua

SEQ ID NO: 1550279 - RNA, 19 nt, Homo sapiens
  misc_RNA (1)...(19): siRNA sense strand
cguguugccuuuccaaauc

SEQ ID NO: 1550280 - RNA, 19 nt, Homo sapiens
  misc_RNA (1)...(19): siRNA sense strand
ugucucagcugccucaaca

SEQ ID NO: 1550281 - RNA, 19 nt, Homo sapiens
  misc_RNA (1)...(19): siRNA sense strand
uuccaaaucuacuaccauu

SEQ ID NO: 1550282 - RNA, 19 nt, Homo sapiens
  misc_RNA (1)...(19): siRNA sense strand
gagcgucacggaccugaug

SEQ ID NO: 1550283 - RNA, 19 nt, Homo sapiens
  misc_RNA (1)...(19): siRNA sense strand
ugucuggacccguuuguuu

SEQ ID NO: 1550284 - RNA, 19 nt, Homo sapiens
  misc_RNA (1)...(19): siRNA sense strand
gcuacuaccacguguacaa

SEQ ID NO: 1550285 - RNA, 19 nt, Homo sapiens
  misc_RNA (1)...(19): siRNA sense strand
ccaccauccucaagcuguu

SEQ ID NO: 1550286 - RNA, 19 nt, Homo sapiens
  misc_RNA (1)...(19): siRNA sense strand
caaaucuacuaccauugca

SEQ ID NO: 1550287 - RNA, 19 nt, Homo sapiens
  misc_RNA (1)...(19): siRNA sense strand
ggacccguuuguuuauuac

SEQ ID NO: 1550288 - RNA, 19 nt, Homo sapiens
  misc_RNA (1)...(19): siRNA sense strand
gucuggacccguuuguuua

SEQ ID NO: 1550289 - RNA, 19 nt, Homo sapiens
  misc_RNA (1)...(19): siRNA sense strand
ucagcugccucaacaacug

SEQ ID NO: 1550290 - RNA, 19 nt, Homo sapiens
  misc_RNA (1)...(19): siRNA sense strand
ccaaaucuacuaccauugc

SEQ ID NO: 1550291 - RNA, 19 nt, Homo sapiens
  misc_RNA (1)...(19): siRNA sense strand
cccguuuguuuauuacuuu

SEQ ID NO: 1550292 - RNA, 19 nt, Homo sapiens
  misc_RNA (1)...(19): siRNA sense strand
gcuucgacguccucaagug

SEQ ID NO: 1550293 - RNA, 19 nt, Homo sapiens
  misc_RNA (1)...(19): siRNA sense strand
gagcuacuaccacguguac

SEQ ID NO: 1550294 - RNA, 19 nt, Homo sapiens
  misc_RNA (1)...(19): siRNA sense strand
cgggcaaccucuucucucu

SEQ ID NO: 1550295 - RNA, 19 nt, Homo sapiens
  misc_RNA (1)...(19): siRNA sense strand
uggccagcguguugccuuu

SEQ ID NO: 1550296 - RNA, 19 nt, Homo sapiens
  misc_RNA (1)...(19): siRNA sense strand
gcguguugccuuuccaaau

SEQ ID NO: 1550297 - RNA, 19 nt, Homo sapiens
  misc_RNA (1)...(19): siRNA sense strand
caacugucuggacccguuu

SEQ ID NO: 1550298 - RNA, 19 nt, Homo sapiens
  misc_RNA (1)...(19): siRNA sense strand
gaaauaccauucagguguu

SEQ ID NO: 1550299 - RNA, 19 nt, Homo sapiens
  misc_RNA (1)...(19): siRNA sense strand
caaggagacuggcuucugu

SEQ ID NO: 1550300 - RNA, 19 nt, Homo sapiens
  misc_RNA (1)...(19): siRNA sense strand
gaagagggucgcuacugua

SEQ ID NO: 1550301 - RNA, 19 nt, Homo sapiens
  misc_RNA (1)...(19): siRNA sense strand
ccauucagguguuucauau

SEQ ID NO: 1550302 - RNA, 19 nt, Homo sapiens
  misc_RNA (1)...(19): siRNA sense strand
gaagaggaaauaccauuca

SEQ ID NO: 1550303 - RNA, 19 nt, Homo sapiens
  misc_RNA (1)...(19): siRNA sense strand
gagggucgcuacuguaucu

SEQ ID NO: 1550304 - RNA, 19 nt, Homo sapiens
  misc_RNA (1)...(19): siRNA sense strand
cgaccaagcagaccaggua

SEQ ID NO: 1550305 - RNA, 19 nt, Homo sapiens
  misc_RNA (1)...(19): siRNA sense strand
ugaagagggucgcuacugu

SEQ ID NO: 1550306 - RNA, 19 nt, Homo sapiens
  misc_RNA (1)...(19): siRNA sense strand
ccaagugcaggcauuauuu

SEQ ID NO: 1550307 - RNA, 19 nt, Homo sapiens
  misc_RNA (1)...(19): siRNA sense strand
guaugcaccuuccucuuca

SEQ ID NO: 1550308 - RNA, 19 nt, Homo sapiens
  misc_RNA (1)...(19): siRNA sense strand
ggaagaggaaauaccauuc

SEQ ID NO: 1550309 - RNA, 19 nt, Homo sapiens
  misc_RNA (1)...(19): siRNA sense strand
gguaugcaccuuccucuuc

SEQ ID NO: 1550310 - RNA, 19 nt, Homo sapiens
  misc_RNA (1)...(19): siRNA sense strand
ccacugugcgcugggauua

SEQ ID NO: 1550311 - RNA, 19 nt, Homo sapiens
  misc_RNA (1)...(19): siRNA sense strand
ccacgaccguuccgauuac

SEQ ID NO: 1550312 - RNA, 19 nt, Homo sapiens
  misc_RNA (1)...(19): siRNA sense strand
gggaagcgaggaagaggaa

SEQ ID NO: 1550313 - RNA, 19 nt, Homo sapiens
  misc_RNA (1)...(19): siRNA sense strand
gaagcgaggaagaggaaau

SEQ ID NO: 1550314 - RNA, 19 nt, Homo sapiens
  misc_RNA (1)...(19): siRNA sense strand
auucagguguuucauaugu

SEQ ID NO: 1550315 - RNA, 19 nt, Homo sapiens
  misc_RNA (1)...(19): siRNA sense strand
ggacgaaaaccaugaagug

SEQ ID NO: 1550316 - RNA, 19 nt, Homo sapiens
  misc_RNA (1)...(19): siRNA sense strand
ucaccaagugcaggcauua

SEQ ID NO: 1550317 - RNA, 19 nt, Homo sapiens
  misc_RNA (1)...(19): siRNA sense strand
caagugcaggcauuauuuc

SEQ ID NO: 1550318 - RNA, 19 nt, Homo sapiens
  misc_RNA (1)...(19): siRNA sense strand
aaauaccauucagguguuu

SEQ ID NO: 1550319 - RNA, 19 nt, Homo sapiens
  misc_RNA (1)...(19): siRNA sense strand
ggagcacgaccacaucuac

SEQ ID NO: 1550320 - RNA, 19 nt, Homo sapiens
  misc_RNA (1)...(19): siRNA sense strand
gggauuaccagccugacau

SEQ ID NO: 1550321 - RNA, 19 nt, Homo sapiens
  misc_RNA (1)...(19): siRNA sense strand
gcgccaccuucuccaggaa

SEQ ID NO: 1550322 - RNA, 19 nt, Homo sapiens
  misc_RNA (1)...(19): siRNA sense strand
aagcgaggaagaggaaaua

SEQ ID NO: 1550323 - RNA, 19 nt, Homo sapiens
  misc_RNA (1)...(19): siRNA sense strand
uccacgaccguuccgauua

SEQ ID NO: 1550324 - RNA, 19 nt, Homo sapiens
  misc_RNA (1)...(19): siRNA sense strand
cgaggaagaggaaauacca

SEQ ID NO: 1550325 - RNA, 19 nt, Homo sapiens
  misc_RNA (1)...(19): siRNA sense strand
gggcugcaggccucagaaa

SEQ ID NO: 1550326 - RNA, 19 nt, Homo sapiens
  misc_RNA (1)...(19): siRNA sense strand
gggagcacgaccacaucua

SEQ ID NO: 1550327 - RNA, 19 nt, Homo sapiens
  misc_RNA (1)...(19): siRNA sense strand
agauugaacgggagcuuga

SEQ ID NO: 1550328 - RNA, 19 nt, Homo sapiens
  misc_RNA (1)...(19): siRNA sense strand
aggaagaggaaauaccauu

SEQ ID NO: 1550329 - RNA, 19 nt, Homo sapiens
  misc_RNA (1)...(19): siRNA sense strand
aagagggucgcuacuguau

SEQ ID NO: 1550330 - RNA, 19 nt, Homo sapiens
  misc_RNA (1)...(19): siRNA sense strand
gguaaagccuucaauagaa

SEQ ID NO: 1550331 - RNA, 19 nt, Homo sapiens
  misc_RNA (1)...(19): siRNA sense strand
gcaaacagcucugcaaauc

SEQ ID NO: 1550332 - RNA, 19 nt, Homo sapiens
  misc_RNA (1)...(19): siRNA sense strand
gaaauucacaccaaaugua

SEQ ID NO: 1550333 - RNA, 19 nt, Homo sapiens
  misc_RNA (1)...(19): siRNA sense strand
gggaaagccuucacucauu

SEQ ID NO: 1550334 - RNA, 19 nt, Homo sapiens
  misc_RNA (1)...(19): siRNA sense strand
ugaaagaacucacaaugga

SEQ ID NO: 1550335 - RNA, 19 nt, Homo sapiens
  misc_RNA (1)...(19): siRNA sense strand
ggaaagccuucacucauug

SEQ ID NO: 1550336 - RNA, 19 nt, Homo sapiens
  misc_RNA (1)...(19): siRNA sense strand
gaagauuucacucaacaua

SEQ ID NO: 1550337 - RNA, 19 nt, Homo sapiens
  misc_RNA (1)...(19): siRNA sense strand
gcaaaucaguugugcuuuc

SEQ ID NO: 1550338 - RNA, 19 nt, Homo sapiens
  misc_RNA (1)...(19): siRNA sense strand
guagagaaguuggcauuaa

SEQ ID NO: 1550339 - RNA, 19 nt, Homo sapiens
  misc_RNA (1)...(19): siRNA sense strand
gauuaugccuuuauccaaa

SEQ ID NO: 1550340 - RNA, 19 nt, Homo sapiens
  misc_RNA (1)...(19): siRNA sense strand
ggaaaagccuucucucauu

SEQ ID NO: 1550341 - RNA, 19 nt, Homo sapiens
  misc_RNA (1)...(19): siRNA sense strand
gagaagauuucacucaaca

SEQ ID NO: 1550342 - RNA, 19 nt, Homo sapiens
  misc_RNA (1)...(19): siRNA sense strand
gaaaccauaugaaugcaau

SEQ ID NO: 1550343 - RNA, 19 nt, Homo sapiens
  misc_RNA (1)...(19): siRNA sense strand
gaacucacuuaggagauaa

SEQ ID NO: 1550344 - RNA, 19 nt, Homo sapiens
  misc_RNA (1)...(19): siRNA sense strand
gggaaaaccuuuagcaaaa

SEQ ID NO: 1550345 - RNA, 19 nt, Homo sapiens
  misc_RNA (1)...(19): siRNA sense strand
uagagaaguuggcauuaaa

SEQ ID NO: 1550346 - RNA, 19 nt, Homo sapiens
  misc_RNA (1)...(19): siRNA sense strand
ggagagaaaccauaugaau

SEQ ID NO: 1550347 - RNA, 19 nt, Homo sapiens
  misc_RNA (1)...(19): siRNA sense strand
ggagagaaaccauaugaau

SEQ ID NO: 1550348 - RNA, 19 nt, Homo sapiens
  misc_RNA (1)...(19): siRNA sense strand
caaggaaauucacaccaaa

SEQ ID NO: 1550349 - RNA, 19 nt, Homo sapiens
  misc_RNA (1)...(19): siRNA sense strand
gaaguuggcauuaaacauc

SEQ ID NO: 1550350 - RNA, 19 nt, Homo sapiens
  misc_RNA (1)...(19): siRNA sense strand
caagagauaccauucauuc

SEQ ID NO: 1550351 - RNA, 19 nt, Homo sapiens
  misc_RNA (1)...(19): siRNA sense strand
gagauaccauucauucauc

SEQ ID NO: 1550352 - RNA, 19 nt, Homo sapiens
  misc_RNA (1)...(19): siRNA sense strand
gugauuaccuacaugagaa

SEQ ID NO: 1550353 - RNA, 19 nt, Homo sapiens
  misc_RNA (1)...(19): siRNA sense strand
gagagaaaccauaugaaug

SEQ ID NO: 1550354 - RNA, 19 nt, Homo sapiens
  misc_RNA (1)...(19): siRNA sense strand
gagagaaaccauaugaaug

SEQ ID NO: 1550355 - RNA, 19 nt, Homo sapiens
  misc_RNA (1)...(19): siRNA sense strand
ucagucaucuggucucuau

SEQ ID NO: 1550356 - RNA, 19 nt, Homo sapiens
  misc_RNA (1)...(19): siRNA sense strand
uaaacgacaugagagaauu

SEQ ID NO: 1550357 - RNA, 19 nt, Homo sapiens
  misc_RNA (1)...(19): siRNA sense strand
gaaaagccuucucucauug

SEQ ID NO: 1550358 - RNA, 19 nt, Homo sapiens
  misc_RNA (1)...(19): siRNA sense strand
ggagauaaaccauauggau

SEQ ID NO: 1550359 - RNA, 19 nt, Homo sapiens
  misc_RNA (1)...(19): siRNA sense strand
gggaaagccuucaguaaaa

SEQ ID NO: 1550360 - RNA, 19 nt, Homo sapiens
  misc_RNA (1)...(19): siRNA sense strand
ggauaucauuguagacuuc

SEQ ID NO: 1550361 - RNA, 19 nt, Homo sapiens
  misc_RNA (1)...(19): siRNA sense strand
ggaagucaucuauuugauu

SEQ ID NO: 1550362 - RNA, 19 nt, Homo sapiens
  misc_RNA (1)...(19): siRNA sense strand
gggaaggcuuucaguaaau

SEQ ID NO: 1550363 - RNA, 19 nt, Homo sapiens
  misc_RNA (1)...(19): siRNA sense strand
ggaaggcuuucaguaaaug

SEQ ID NO: 1550364 - RNA, 19 nt, Homo sapiens
  misc_RNA (1)...(19): siRNA sense strand
ccauauggaugucuccuau

SEQ ID NO: 1550365 - RNA, 19 nt, Homo sapiens
  misc_RNA (1)...(19): siRNA sense strand
ccauaugaaugccaucuau

SEQ ID NO: 1550366 - RNA, 19 nt, Homo sapiens
  misc_RNA (1)...(19): siRNA sense strand
ggagagaaaccauaugagu

SEQ ID NO: 1550367 - RNA, 19 nt, Homo sapiens
  misc_RNA (1)...(19): siRNA sense strand
cuagagagauaacauugga

SEQ ID NO: 1550368 - RNA, 19 nt, Homo sapiens
  misc_RNA (1)...(19): siRNA sense strand
ugggaaggcuuucaguaaa

SEQ ID NO: 1550369 - RNA, 19 nt, Homo sapiens
  misc_RNA (1)...(19): siRNA sense strand
gauucacacuggagagaaa

SEQ ID NO: 1550370 - RNA, 19 nt, Homo sapiens
  misc_RNA (1)...(19): siRNA sense strand
acaaggaaauucacaccaa

SEQ ID NO: 1550371 - RNA, 19 nt, Homo sapiens
  misc_RNA (1)...(19): siRNA sense strand
agaacucacuuaggagaua

SEQ ID NO: 1550372 - RNA, 19 nt, Homo sapiens
  misc_RNA (1)...(19): siRNA sense strand
gcaaugacuuaggagaaga

SEQ ID NO: 1550373 - RNA, 19 nt, Homo sapiens
  misc_RNA (1)...(19): siRNA sense strand
ccauaugagugccauguau

SEQ ID NO: 1550374 - RNA, 19 nt, Homo sapiens
  misc_RNA (1)...(19): siRNA sense strand
ggagagaaaccacauggau

SEQ ID NO: 1550375 - RNA, 19 nt, Homo sapiens
  misc_RNA (1)...(19): siRNA sense strand
ggagagaagccauauggau

SEQ ID NO: 1550376 - RNA, 19 nt, Homo sapiens
  misc_RNA (1)...(19): siRNA sense strand
ucucauuguucucaccuua

SEQ ID NO: 1550377 - RNA, 19 nt, Homo sapiens
  misc_RNA (1)...(19): siRNA sense strand
aaacagcucugcaaaucag

SEQ ID NO: 1550378 - RNA, 19 nt, Homo sapiens
  misc_RNA (1)...(19): siRNA sense strand
ggagaagauuucacucaac

SEQ ID NO: 1550379 - RNA, 19 nt, Homo sapiens
  misc_RNA (1)...(19): siRNA sense strand
agagaaaccauaugaaugu

SEQ ID NO: 1550380 - RNA, 19 nt, Homo sapiens
  misc_RNA (1)...(19): siRNA sense strand
gugggaaggcuuucaguaa

SEQ ID NO: 1550381 - RNA, 19 nt, Homo sapiens
  misc_RNA (1)...(19): siRNA sense strand
cuuaggagauaaaccauau

SEQ ID NO: 1550382 - RNA, 19 nt, Homo sapiens
  misc_RNA (1)...(19): siRNA sense strand
acucauugcucugaccuua

SEQ ID NO: 1550383 - RNA, 19 nt, Homo sapiens
  misc_RNA (1)...(19): siRNA sense strand
ggaaauucacaccaaaugu

SEQ ID NO: 1550384 - RNA, 19 nt, Homo sapiens
  misc_RNA (1)...(19): siRNA sense strand
gaacucacacuggagagaa

SEQ ID NO: 1550385 - RNA, 19 nt, Homo sapiens
  misc_RNA (1)...(19): siRNA sense strand
guucuuaccuuagacaaca

SEQ ID NO: 1550386 - RNA, 19 nt, Homo sapiens
  misc_RNA (1)...(19): siRNA sense strand
gaacucacacuggagagaa

SEQ ID NO: 1550387 - RNA, 19 nt, Homo sapiens
  misc_RNA (1)...(19): siRNA sense strand
caguugugcuuucccaauu

SEQ ID NO: 1550388 - RNA, 19 nt, Homo sapiens
  misc_RNA (1)...(19): siRNA sense strand
caacaugagcgaagucaca

SEQ ID NO: 1550389 - RNA, 19 nt, Homo sapiens
  misc_RNA (1)...(19): siRNA sense strand
ucauugcucugaccuuaga

SEQ ID NO: 1550390 - RNA, 19 nt, Homo sapiens
  misc_RNA (1)...(19): siRNA sense strand
ugggaaagccuucaguaaa

SEQ ID NO: 1550391 - RNA, 19 nt, Homo sapiens
  misc_RNA (1)...(19): siRNA sense strand
ccaaaacucugcccuuaga

SEQ ID NO: 1550392 - RNA, 19 nt, Homo sapiens
  misc_RNA (1)...(19): siRNA sense strand
ugacuuaggagaagauuuc

SEQ ID NO: 1550393 - RNA, 19 nt, Homo sapiens
  misc_RNA (1)...(19): siRNA sense strand
gcauuaaacaucaagagau

SEQ ID NO: 1550394 - RNA, 19 nt, Homo sapiens
  misc_RNA (1)...(19): siRNA sense strand
ggacacaucccagagaaag

SEQ ID NO: 1550395 - RNA, 19 nt, Homo sapiens
  misc_RNA (1)...(19): siRNA sense strand
gaaugcaauauauguggua

SEQ ID NO: 1550396 - RNA, 19 nt, Homo sapiens
  misc_RNA (1)...(19): siRNA sense strand
ggaaaagccuucaaucacu

SEQ ID NO: 1550397 - RNA, 19 nt, Homo sapiens
  misc_RNA (1)...(19): siRNA sense strand
gacucacacuagagagaua

SEQ ID NO: 1550398 - RNA, 19 nt, Homo sapiens
  misc_RNA (1)...(19): siRNA sense strand
caugaaagaacucacaaug

SEQ ID NO: 1550399 - RNA, 19 nt, Homo sapiens
  misc_RNA (1)...(19): siRNA sense strand
caaucacucuucuguccuu

SEQ ID NO: 1550400 - RNA, 19 nt, Homo sapiens
  misc_RNA (1)...(19): siRNA sense strand
caacaugaaagaacucaca

SEQ ID NO: 1550401 - RNA, 19 nt, Homo sapiens
  misc_RNA (1)...(19): siRNA sense strand
gaccuucgaggauaucauu

SEQ ID NO: 1550402 - RNA, 19 nt, Homo sapiens
  misc_RNA (1)...(19): siRNA sense strand
cuucgaggauaucauugua

SEQ ID NO: 1550403 - RNA, 19 nt, Homo sapiens
  misc_RNA (1)...(19): siRNA sense strand
ucacucaacauauagcauu

SEQ ID NO: 1550404 - RNA, 19 nt, Homo sapiens
  misc_RNA (1)...(19): siRNA sense strand
ucacucuucuguccuuaga

SEQ ID NO: 1550405 - RNA, 19 nt, Homo sapiens
  misc_RNA (1)...(19): siRNA sense strand
gaacucacaauggagagaa

SEQ ID NO: 1550406 - RNA, 19 nt, Homo sapiens
  misc_RNA (1)...(19): siRNA sense strand
ucgaggauaucauuguaga

SEQ ID NO: 1550407 - RNA, 19 nt, Homo sapiens
  misc_RNA (1)...(19): siRNA sense strand
gugacugguuauccuuuaa

SEQ ID NO: 1550408 - RNA, 19 nt, Homo sapiens
  misc_RNA (1)...(19): siRNA sense strand
gaagccauauggaugucau

SEQ ID NO: 1550409 - RNA, 19 nt, Homo sapiens
  misc_RNA (1)...(19): siRNA sense strand
gaaugucaucuauguggaa

SEQ ID NO: 1550410 - RNA, 19 nt, Homo sapiens
  misc_RNA (1)...(19): siRNA sense strand
ugagaugauucacacuaga

SEQ ID NO: 1550411 - RNA, 19 nt, Homo sapiens
  misc_RNA (1)...(19): siRNA sense strand
gguagagaaguuggcauua

SEQ ID NO: 1550412 - RNA, 19 nt, Homo sapiens
  misc_RNA (1)...(19): siRNA sense strand
ugaaucuucugugcuuaaa

SEQ ID NO: 1550413 - RNA, 19 nt, Homo sapiens
  misc_RNA (1)...(19): siRNA sense strand
gugggaaagccuucaguaa

SEQ ID NO: 1550414 - RNA, 19 nt, Homo sapiens
  misc_RNA (1)...(19): siRNA sense strand
ucuaugcaaugacuuagga

SEQ ID NO: 1550415 - RNA, 19 nt, Homo sapiens
  misc_RNA (1)...(19): siRNA sense strand
ugguaaagccuucaauaga

SEQ ID NO: 1550416 - RNA, 19 nt, Homo sapiens
  misc_RNA (1)...(19): siRNA sense strand
caugagaugauucacacua

SEQ ID NO: 1550417 - RNA, 19 nt, Homo sapiens
  misc_RNA (1)...(19): siRNA sense strand
ucaagaggauccuuuucua

SEQ ID NO: 1550418 - RNA, 19 nt, Homo sapiens
  misc_RNA (1)...(19): siRNA sense strand
gugcuuaaacgacaugaga

SEQ ID NO: 1550419 - RNA, 19 nt, Homo sapiens
  misc_RNA (1)...(19): siRNA sense strand
gagaaaccauaugaauguc

SEQ ID NO: 1550420 - RNA, 19 nt, Homo sapiens
  misc_RNA (1)...(19): siRNA sense strand
aagaugugauguuggagaa

SEQ ID NO: 1550421 - RNA, 19 nt, Homo sapiens
  misc_RNA (1)...(19): siRNA sense strand
gauaaaccauauggauguc

SEQ ID NO: 1550422 - RNA, 19 nt, Homo sapiens
  misc_RNA (1)...(19): siRNA sense strand
uagacgacaugagaugauu

SEQ ID NO: 1550423 - RNA, 19 nt, Homo sapiens
  misc_RNA (1)...(19): siRNA sense strand
caacacaaagaauaagcuu

SEQ ID NO: 1550424 - RNA, 19 nt, Homo sapiens
  misc_RNA (1)...(19): siRNA sense strand
aaucuuaggcgacaugaga

SEQ ID NO: 1550425 - RNA, 19 nt, Homo sapiens
  misc_RNA (1)...(19): siRNA sense strand
aggagaagauuucacucaa

SEQ ID NO: 1550426 - RNA, 19 nt, Homo sapiens
  misc_RNA (1)...(19): siRNA sense strand
gggaaaaucuucagugacu

SEQ ID NO: 1550427 - RNA, 19 nt, Homo sapiens
  misc_RNA (1)...(19): siRNA sense strand
gagaaaccauaugaaugca

SEQ ID NO: 1550428 - RNA, 19 nt, Homo sapiens
  misc_RNA (1)...(19): siRNA sense strand
ucauuguucucaccuuaga

SEQ ID NO: 1550429 - RNA, 19 nt, Homo sapiens
  misc_RNA (1)...(19): siRNA sense strand
cacugaaucuucugugcuu

SEQ ID NO: 1550430 - RNA, 19 nt, Homo sapiens
  misc_RNA (1)...(19): siRNA sense strand
gaaagugugugcauucuuc

SEQ ID NO: 1550431 - RNA, 19 nt, Homo sapiens
  misc_RNA (1)...(19): siRNA sense strand
gaagagaagcuacaaaaua

SEQ ID NO: 1550432 - RNA, 19 nt, Homo sapiens
  misc_RNA (1)...(19): siRNA sense strand
ggauagcauucacuggaaa

SEQ ID NO: 1550433 - RNA, 19 nt, Homo sapiens
  misc_RNA (1)...(19): siRNA sense strand
gcauucuucucauaccuaa

SEQ ID NO: 1550434 - RNA, 19 nt, Homo sapiens
  misc_RNA (1)...(19): siRNA sense strand
aaaauaugcucgauggaua

SEQ ID NO: 1550435 - RNA, 19 nt, Homo sapiens
  misc_RNA (1)...(19): siRNA sense strand
ggaagaaacagagcacuca

SEQ ID NO: 1550436 - RNA, 19 nt, Homo sapiens
  misc_RNA (1)...(19): siRNA sense strand
ucaugggaaucauuucauu

SEQ ID NO: 1550437 - RNA, 19 nt, Homo sapiens
  misc_RNA (1)...(19): siRNA sense strand
gggaaucauuucauugacu

SEQ ID NO: 1550438 - RNA, 19 nt, Homo sapiens
  misc_RNA (1)...(19): siRNA sense strand
ugugugcauucuucucaua

SEQ ID NO: 1550439 - RNA, 19 nt, Homo sapiens
  misc_RNA (1)...(19): siRNA sense strand
uggauagcauucacuggaa

SEQ ID NO: 1550440 - RNA, 19 nt, Homo sapiens
  misc_RNA (1)...(19): siRNA sense strand
ggaaagugugugcauucuu

SEQ ID NO: 1550441 - RNA, 19 nt, Homo sapiens
  misc_RNA (1)...(19): siRNA sense strand
gcgaagagaagcuacaaaa

SEQ ID NO: 1550442 - RNA, 19 nt, Homo sapiens
  misc_RNA (1)...(19): siRNA sense strand
caucaugggaaucauuuca

SEQ ID NO: 1550443 - RNA, 19 nt, Homo sapiens
  misc_RNA (1)...(19): siRNA sense strand
uaucaucaugggaaucauu

SEQ ID NO: 1550444 - RNA, 19 nt, Homo sapiens
  misc_RNA (1)...(19): siRNA sense strand
caugggaaucauuucauug

SEQ ID NO: 1550445 - RNA, 19 nt, Homo sapiens
  misc_RNA (1)...(19): siRNA sense strand
gcacagaaaugcccuucaa

SEQ ID NO: 1550446 - RNA, 19 nt, Homo sapiens
  misc_RNA (1)...(19): siRNA sense strand
gaagaucacugaccuagac

SEQ ID NO: 1550447 - RNA, 19 nt, Homo sapiens
  misc_RNA (1)...(19): siRNA sense strand
cagagaagaugcugacaga

SEQ ID NO: 1550448 - RNA, 19 nt, Homo sapiens
  misc_RNA (1)...(19): siRNA sense strand
gaagcuggguuugaaauuc

SEQ ID NO: 1550449 - RNA, 19 nt, Homo sapiens
  misc_RNA (1)...(19): siRNA sense strand
gagauuaucaugaagauuc

SEQ ID NO: 1550450 - RNA, 19 nt, Homo sapiens
  misc_RNA (1)...(19): siRNA sense strand
uggaaagacugaugagauu

SEQ ID NO: 1550451 - RNA, 19 nt, Homo sapiens
  misc_RNA (1)...(19): siRNA sense strand
gaaagacugaugagauuau

SEQ ID NO: 1550452 - RNA, 19 nt, Homo sapiens
  misc_RNA (1)...(19): siRNA sense strand
gagaagaugcugacagaga

SEQ ID NO: 1550453 - RNA, 19 nt, Homo sapiens
  misc_RNA (1)...(19): siRNA sense strand
ggaaagacugaugagauua

SEQ ID NO: 1550454 - RNA, 19 nt, Homo sapiens
  misc_RNA (1)...(19): siRNA sense strand
ccaaaggacuaacuguugu

SEQ ID NO: 1550455 - RNA, 19 nt, Homo sapiens
  misc_RNA (1)...(19): siRNA sense strand
gaagugcgagccaaccuuu

SEQ ID NO: 1550456 - RNA, 19 nt, Homo sapiens
  misc_RNA (1)...(19): siRNA sense strand
ucaggaagcuggguuugaa

SEQ ID NO: 1550457 - RNA, 19 nt, Homo sapiens
  misc_RNA (1)...(19): siRNA sense strand
gaaagaauaauggugaaga

SEQ ID NO: 1550458 - RNA, 19 nt, Homo sapiens
  misc_RNA (1)...(19): siRNA sense strand
gaauaauggugaagaugag

SEQ ID NO: 1550459 - RNA, 19 nt, Homo sapiens
  misc_RNA (1)...(19): siRNA sense strand
agaagaugcugacagagaa

SEQ ID NO: 1550460 - RNA, 19 nt, Homo sapiens
  misc_RNA (1)...(19): siRNA sense strand
cagccaagguugaagauca

SEQ ID NO: 1550461 - RNA, 19 nt, Homo sapiens
  misc_RNA (1)...(19): siRNA sense strand
gaucacugaccuagacuaa

SEQ ID NO: 1550462 - RNA, 19 nt, Homo sapiens
  misc_RNA (1)...(19): siRNA sense strand
ugaugaagaugaauguguu

SEQ ID NO: 1550463 - RNA, 19 nt, Homo sapiens
  misc_RNA (1)...(19): siRNA sense strand
uugagaagcugguacauca

SEQ ID NO: 1550464 - RNA, 19 nt, Homo sapiens
  misc_RNA (1)...(19): siRNA sense strand
gagaggaggcauuugagaa

SEQ ID NO: 1550465 - RNA, 19 nt, Homo sapiens
  misc_RNA (1)...(19): siRNA sense strand
gaagaugaggacaugguuu

SEQ ID NO: 1550466 - RNA, 19 nt, Homo sapiens
  misc_RNA (1)...(19): siRNA sense strand
gagccaaccuuucuguuuu

SEQ ID NO: 1550467 - RNA, 19 nt, Homo sapiens
  misc_RNA (1)...(19): siRNA sense strand
uaacuguuguugaugucua

SEQ ID NO: 1550468 - RNA, 19 nt, Homo sapiens
  misc_RNA (1)...(19): siRNA sense strand
ucuaacaaaugaagagaga

SEQ ID NO: 1550469 - RNA, 19 nt, Homo sapiens
  misc_RNA (1)...(19): siRNA sense strand
gacaugguuucaucagaga

SEQ ID NO: 1550470 - RNA, 19 nt, Homo sapiens
  misc_RNA (1)...(19): siRNA sense strand
ggagggagcagccagaaag

SEQ ID NO: 1550471 - RNA, 19 nt, Homo sapiens
  misc_RNA (1)...(19): siRNA sense strand
ggaagcuggguuugaaauu

SEQ ID NO: 1550472 - RNA, 19 nt, Homo sapiens
  misc_RNA (1)...(19): siRNA sense strand
guacacagccaagguugaa

SEQ ID NO: 1550473 - RNA, 19 nt, Homo sapiens
  misc_RNA (1)...(19): siRNA sense strand
gacuaacuguuguugaugu

SEQ ID NO: 1550474 - RNA, 19 nt, Homo sapiens
  misc_RNA (1)...(19): siRNA sense strand
gaaagucuccgagcucagu

SEQ ID NO: 1550475 - RNA, 19 nt, Homo sapiens
  misc_RNA (1)...(19): siRNA sense strand
guaccuuggccaucauuaa

SEQ ID NO: 1550476 - RNA, 19 nt, Homo sapiens
  misc_RNA (1)...(19): siRNA sense strand
cgagccaaccuuucuguuu

SEQ ID NO: 1550477 - RNA, 19 nt, Homo sapiens
  misc_RNA (1)...(19): siRNA sense strand
agaauaauggugaagauga

SEQ ID NO: 1550478 - RNA, 19 nt, Homo sapiens
  misc_RNA (1)...(19): siRNA sense strand
ggagaggaggcauuugaga

SEQ ID NO: 1550479 - RNA, 19 nt, Homo sapiens
  misc_RNA (1)...(19): siRNA sense strand
ugacagagaacuggcauug

SEQ ID NO: 1550480 - RNA, 19 nt, Homo sapiens
  misc_RNA (1)...(19): siRNA sense strand
acagagaacuggcauugcu

SEQ ID NO: 1550481 - RNA, 19 nt, Homo sapiens
  misc_RNA (1)...(19): siRNA sense strand
gaugaagaugaauguguuu

SEQ ID NO: 1550482 - RNA, 19 nt, Homo sapiens
  misc_RNA (1)...(19): siRNA sense strand
acagaaaugcccuucaaug

SEQ ID NO: 1550483 - RNA, 19 nt, Homo sapiens
  misc_RNA (1)...(19): siRNA sense strand
gcucaguacggcacagaaa

SEQ ID NO: 1550484 - RNA, 19 nt, Homo sapiens
  misc_RNA (1)...(19): siRNA sense strand
augaggcucuuucugauga

SEQ ID NO: 1550485 - RNA, 19 nt, Homo sapiens
  misc_RNA (1)...(19): siRNA sense strand
caagguugaagaucacuga

SEQ ID NO: 1550486 - RNA, 19 nt, Homo sapiens
  misc_RNA (1)...(19): siRNA sense strand
gcucaguuccaaaggacua

SEQ ID NO: 1550487 - RNA, 19 nt, Homo sapiens
  misc_RNA (1)...(19): siRNA sense strand
gcagaggcagaucgucuug

SEQ ID NO: 1550488 - RNA, 19 nt, Homo sapiens
  misc_RNA (1)...(19): siRNA sense strand
ugaauguguuucccaugga

SEQ ID NO: 1550489 - RNA, 19 nt, Homo sapiens
  misc_RNA (1)...(19): siRNA sense strand
gagaagcugguacaucaca

SEQ ID NO: 1550490 - RNA, 19 nt, Homo sapiens
  misc_RNA (1)...(19): siRNA sense strand
ggacuaacuguuguugaug

SEQ ID NO: 1550491 - RNA, 19 nt, Homo sapiens
  misc_RNA (1)...(19): siRNA sense strand
gaugaggcucuuucugaug

SEQ ID NO: 1550492 - RNA, 19 nt, Homo sapiens
  misc_RNA (1)...(19): siRNA sense strand
cagaaaugcccuucaaugc

SEQ ID NO: 1550493 - RNA, 19 nt, Homo sapiens
  misc_RNA (1)...(19): siRNA sense strand
agaggcagaucgucuugau

SEQ ID NO: 1550494 - RNA, 19 nt, Homo sapiens
  misc_RNA (1)...(19): siRNA sense strand
gaagcugguacaucacaug

SEQ ID NO: 1550495 - RNA, 19 nt, Homo sapiens
  misc_RNA (1)...(19): siRNA sense strand
caucagagaggaccuguac

SEQ ID NO: 1550496 - RNA, 19 nt, Homo sapiens
  misc_RNA (1)...(19): siRNA sense strand
gccuggaccuucugcacuu

SEQ ID NO: 1550497 - RNA, 19 nt, Homo sapiens
  misc_RNA (1)...(19): siRNA sense strand
uggaaagaauaauggugaa

SEQ ID NO: 1550498 - RNA, 19 nt, Homo sapiens
  misc_RNA (1)...(19): siRNA sense strand
caaaggacuaacuguuguu

SEQ ID NO: 1550499 - RNA, 19 nt, Homo sapiens
  misc_RNA (1)...(19): siRNA sense strand
gcaguggcccauggaaaga

SEQ ID NO: 1550500 - RNA, 19 nt, Homo sapiens
  misc_RNA (1)...(19): siRNA sense strand
uaccuuggccaucauuaaa

SEQ ID NO: 1550501 - RNA, 19 nt, Homo sapiens
  misc_RNA (1)...(19): siRNA sense strand
agaugaggcucuuucugau

SEQ ID NO: 1550502 - RNA, 19 nt, Homo sapiens
  misc_RNA (1)...(19): siRNA sense strand
gcauugcucuuccccaguu

SEQ ID NO: 1550503 - RNA, 19 nt, Homo sapiens
  misc_RNA (1)...(19): siRNA sense strand
aggacuaacuguuguugau

SEQ ID NO: 1550504 - RNA, 19 nt, Homo sapiens
  misc_RNA (1)...(19): siRNA sense strand
ggaagugcgagccaaccuu

SEQ ID NO: 1550505 - RNA, 19 nt, Homo sapiens
  misc_RNA (1)...(19): siRNA sense strand
uccaaaggacuaacuguug

SEQ ID NO: 1550506 - RNA, 19 nt, Homo sapiens
  misc_RNA (1)...(19): siRNA sense strand
uaacaaaugaagagagaac

SEQ ID NO: 1550507 - RNA, 19 nt, Homo sapiens
  misc_RNA (1)...(19): siRNA sense strand
ccaguacacagccaagguu

SEQ ID NO: 1550508 - RNA, 19 nt, Homo sapiens
  misc_RNA (1)...(19): siRNA sense strand
ucaguacggcacagaaaug

SEQ ID NO: 1550509 - RNA, 19 nt, Homo sapiens
  misc_RNA (1)...(19): siRNA sense strand
aagcuggguuugaaauucu

SEQ ID NO: 1550510 - RNA, 19 nt, Homo sapiens
  misc_RNA (1)...(19): siRNA sense strand
gggagcagccagaaagucu

SEQ ID NO: 1550511 - RNA, 19 nt, Homo sapiens
  misc_RNA (1)...(19): siRNA sense strand
ggccaucauuaaaccagau

SEQ ID NO: 1550512 - RNA, 19 nt, Homo sapiens
  misc_RNA (1)...(19): siRNA sense strand
ucgaggacguggucacuac

SEQ ID NO: 1550513 - RNA, 19 nt, Homo sapiens
  misc_RNA (1)...(19): siRNA sense strand
caugacagaggcagaagug

SEQ ID NO: 1550514 - RNA, 19 nt, Homo sapiens
  misc_RNA (1)...(19): siRNA sense strand
aaagacugaugagauuauc

SEQ ID NO: 1550515 - RNA, 19 nt, Homo sapiens
  misc_RNA (1)...(19): siRNA sense strand
aggcagaucgucuugaugu

SEQ ID NO: 1550516 - RNA, 19 nt, Homo sapiens
  misc_RNA (1)...(19): siRNA sense strand
acacagccaagguugaaga

SEQ ID NO: 1550517 - RNA, 19 nt, Homo sapiens
  misc_RNA (1)...(19): siRNA sense strand
ggaaagaauaauggugaag

SEQ ID NO: 1550518 - RNA, 19 nt, Homo sapiens
  misc_RNA (1)...(19): siRNA sense strand
ugaagaugaggacaugguu

SEQ ID NO: 1550519 - RNA, 19 nt, Homo sapiens
  misc_RNA (1)...(19): siRNA sense strand
uggugagccucuuccagaa

SEQ ID NO: 1550520 - RNA, 19 nt, Homo sapiens
  misc_RNA (1)...(19): siRNA sense strand
cuggagaggaggcauuuga

SEQ ID NO: 1550521 - RNA, 19 nt, Homo sapiens
  misc_RNA (1)...(19): siRNA sense strand
gauucaggaagcuggguuu

SEQ ID NO: 1550522 - RNA, 19 nt, Homo sapiens
  misc_RNA (1)...(19): siRNA sense strand
caaaugaagagagaaccau

SEQ ID NO: 1550523 - RNA, 19 nt, Homo sapiens
  misc_RNA (1)...(19): siRNA sense strand
aagaugaggacaugguuuc

SEQ ID NO: 1550524 - RNA, 19 nt, Homo sapiens
  misc_RNA (1)...(19): siRNA sense strand
gcccuucaaugccguccau

SEQ ID NO: 1550525 - RNA, 19 nt, Homo sapiens
  misc_RNA (1)...(19): siRNA sense strand
ugacauugcugcugaguua

SEQ ID NO: 1550526 - RNA, 19 nt, Homo sapiens
  misc_RNA (1)...(19): siRNA sense strand
gcaacccacugcucauuua

SEQ ID NO: 1550527 - RNA, 19 nt, Homo sapiens
  misc_RNA (1)...(19): siRNA sense strand
gggaauacguaguuuauga

SEQ ID NO: 1550528 - RNA, 19 nt, Homo sapiens
  misc_RNA (1)...(19): siRNA sense strand
cagagaagcuggccugaga

SEQ ID NO: 1550529 - RNA, 19 nt, Homo sapiens
  misc_RNA (1)...(19): siRNA sense strand
ccaagaagguucaggaaag

SEQ ID NO: 1550530 - RNA, 19 nt, Homo sapiens
  misc_RNA (1)...(19): siRNA sense strand
gagaccaacugcaacuuug

SEQ ID NO: 1550531 - RNA, 19 nt, Homo sapiens
  misc_RNA (1)...(19): siRNA sense strand
ugaacgagauugugagugu

SEQ ID NO: 1550532 - RNA, 19 nt, Homo sapiens
  misc_RNA (1)...(19): siRNA sense strand
ggagaccaacugcaacuuu

SEQ ID NO: 1550533 - RNA, 19 nt, Homo sapiens
  misc_RNA (1)...(19): siRNA sense strand
caagagggaauacguaguu

SEQ ID NO: 1550534 - RNA, 19 nt, Homo sapiens
  misc_RNA (1)...(19): siRNA sense strand
gcauccagauuccgaacaa

SEQ ID NO: 1550535 - RNA, 19 nt, Homo sapiens
  misc_RNA (1)...(19): siRNA sense strand
gagggaauacguaguuuau

SEQ ID NO: 1550536 - RNA, 19 nt, Homo sapiens
  misc_RNA (1)...(19): siRNA sense strand
caacacggcgauggaguua

SEQ ID NO: 1550537 - RNA, 19 nt, Homo sapiens
  misc_RNA (1)...(19): siRNA sense strand
acacggcgauggaguuaga

SEQ ID NO: 1550538 - RNA, 19 nt, Homo sapiens
  misc_RNA (1)...(19): siRNA sense strand
caggaaagcauccagauuc

SEQ ID NO: 1550539 - RNA, 19 nt, Homo sapiens
  misc_RNA (1)...(19): siRNA sense strand
guaaaggggucacagagaa

SEQ ID NO: 1550540 - RNA, 19 nt, Homo sapiens
  misc_RNA (1)...(19): siRNA sense strand
gcaacacggcgauggaguu

SEQ ID NO: 1550541 - RNA, 19 nt, Homo sapiens
  misc_RNA (1)...(19): siRNA sense strand
ccacggagaccaacugcaa

SEQ ID NO: 1550542 - RNA, 19 nt, Homo sapiens
  misc_RNA (1)...(19): siRNA sense strand
ggaauacguaguuuaugau

SEQ ID NO: 1550543 - RNA, 19 nt, Homo sapiens
  misc_RNA (1)...(19): siRNA sense strand
ucuccaacguguuuaaugu

SEQ ID NO: 1550544 - RNA, 19 nt, Homo sapiens
  misc_RNA (1)...(19): siRNA sense strand
acacggcgcucaaguccau

SEQ ID NO: 1550545 - RNA, 19 nt, Homo sapiens
  misc_RNA (1)...(19): siRNA sense strand
ggccaucccucuucaacgu

SEQ ID NO: 1550546 - RNA, 19 nt, Homo sapiens
  misc_RNA (1)...(19): siRNA sense strand
gauacacaauguccuccau

SEQ ID NO: 1550547 - RNA, 19 nt, Homo sapiens
  misc_RNA (1)...(19): siRNA sense strand
caauucgucuuugcaggaa

SEQ ID NO: 1550548 - RNA, 19 nt, Homo sapiens
  misc_RNA (1)...(19): siRNA sense strand
auacguaguuuaugaucug

SEQ ID NO: 1550549 - RNA, 19 nt, Homo sapiens
  misc_RNA (1)...(19): siRNA sense strand
acacucgccuggccuggaa

SEQ ID NO: 1550550 - RNA, 19 nt, Homo sapiens
  misc_RNA (1)...(19): siRNA sense strand
gcuacaaggugacauugcu

SEQ ID NO: 1550551 - RNA, 19 nt, Homo sapiens
  misc_RNA (1)...(19): siRNA sense strand
gagucucucuggacaccaa

SEQ ID NO: 1550552 - RNA, 19 nt, Homo sapiens
  misc_RNA (1)...(19): siRNA sense strand
cgccuggccuggaacacua

SEQ ID NO: 1550553 - RNA, 19 nt, Homo sapiens
  misc_RNA (1)...(19): siRNA sense strand
acccacugcucauuuacua

SEQ ID NO: 1550554 - RNA, 19 nt, Homo sapiens
  misc_RNA (1)...(19): siRNA sense strand
gaauacguaguuuaugauc

SEQ ID NO: 1550555 - RNA, 19 nt, Homo sapiens
  misc_RNA (1)...(19): siRNA sense strand
caagaagguucaggaaagc

SEQ ID NO: 1550556 - RNA, 19 nt, Homo sapiens
  misc_RNA (1)...(19): siRNA sense strand
gggcagcgugcaagucuga

SEQ ID NO: 1550557 - RNA, 19 nt, Homo sapiens
  misc_RNA (1)...(19): siRNA sense strand
gaagaacacggcgcucaag

SEQ ID NO: 1550558 - RNA, 19 nt, Homo sapiens
  misc_RNA (1)...(19): siRNA sense strand
ggacauccugcgauacaca

SEQ ID NO: 1550559 - RNA, 19 nt, Homo sapiens
  misc_RNA (1)...(19): siRNA sense strand
gcacccaauucgucuuugc

SEQ ID NO: 1550560 - RNA, 19 nt, Homo sapiens
  misc_RNA (1)...(19): siRNA sense strand
ucaggaaagcauccagauu

SEQ ID NO: 1550561 - RNA, 19 nt, Homo sapiens
  misc_RNA (1)...(19): siRNA sense strand
agagggaauacguaguuua

SEQ ID NO: 1550562 - RNA, 19 nt, Homo sapiens
  misc_RNA (1)...(19): siRNA sense strand
acuuugagcuccuccacuu

SEQ ID NO: 1550563 - RNA, 19 nt, Homo sapiens
  misc_RNA (1)...(19): siRNA sense strand
ggccucauccugcugaaga

SEQ ID NO: 1550564 - RNA, 19 nt, Homo sapiens
  misc_RNA (1)...(19): siRNA sense strand
aagagggaauacguaguuu

SEQ ID NO: 1550565 - RNA, 19 nt, Homo sapiens
  misc_RNA (1)...(19): siRNA sense strand
gcauuaccuugcuguuggu

SEQ ID NO: 1550566 - RNA, 19 nt, Homo sapiens
  misc_RNA (1)...(19): siRNA sense strand
ccucuucaacgucaacuug

SEQ ID NO: 1550567 - RNA, 19 nt, Homo sapiens
  misc_RNA (1)...(19): siRNA sense strand
gcaucuucuuccucgugua

SEQ ID NO: 1550568 - RNA, 19 nt, Homo sapiens
  misc_RNA (1)...(19): siRNA sense strand
ugucaagagggaauacgua

SEQ ID NO: 1550569 - RNA, 19 nt, Homo sapiens
  misc_RNA (1)...(19): siRNA sense strand
guggugaacgagauuguga

SEQ ID NO: 1550570 - RNA, 19 nt, Homo sapiens
  misc_RNA (1)...(19): siRNA sense strand
caccaaggcucaccauccu

SEQ ID NO: 1550571 - RNA, 19 nt, Homo sapiens
  misc_RNA (1)...(19): siRNA sense strand
gugcacccaauucgucuuu

SEQ ID NO: 1550572 - RNA, 19 nt, Homo sapiens
  misc_RNA (1)...(19): siRNA sense strand
ugaagaacacggcgcucaa

SEQ ID NO: 1550573 - RNA, 19 nt, Homo sapiens
  misc_RNA (1)...(19): siRNA sense strand
caucuucuuccucguguau

SEQ ID NO: 1550574 - RNA, 19 nt, Homo sapiens
  misc_RNA (1)...(19): siRNA sense strand
caucuggccaucccucuuc

SEQ ID NO: 1550575 - RNA, 19 nt, Homo sapiens
  misc_RNA (1)...(19): siRNA sense strand
gcucuuccucagcaccaua

SEQ ID NO: 1550576 - RNA, 19 nt, Homo sapiens
  misc_RNA (1)...(19): siRNA sense strand
gagauugugagugucaaga

SEQ ID NO: 1550577 - RNA, 19 nt, Homo sapiens
  misc_RNA (1)...(19): siRNA sense strand
guggacauccugcgauaca

SEQ ID NO: 1550578 - RNA, 19 nt, Homo sapiens
  misc_RNA (1)...(19): siRNA sense strand
cguaguuuaugaucugaag

SEQ ID NO: 1550579 - RNA, 19 nt, Homo sapiens
  misc_RNA (1)...(19): siRNA sense strand
ccacguggugaacgagauu

SEQ ID NO: 1550580 - RNA, 19 nt, Homo sapiens
  misc_RNA (1)...(19): siRNA sense strand
guuugucuccaacguguuu

SEQ ID NO: 1550581 - RNA, 19 nt, Homo sapiens
  misc_RNA (1)...(19): siRNA sense strand
ggcgauggaguuagaguuc

SEQ ID NO: 1550582 - RNA, 19 nt, Homo sapiens
  misc_RNA (1)...(19): siRNA sense strand
gcaacugcagccucagcuu

SEQ ID NO: 1550583 - RNA, 19 nt, Homo sapiens
  misc_RNA (1)...(19): siRNA sense strand
ccuccaugcugcugcuuag

SEQ ID NO: 1550584 - RNA, 19 nt, Homo sapiens
  misc_RNA (1)...(19): siRNA sense strand
gaugugcggguguuugucu

SEQ ID NO: 1550585 - RNA, 19 nt, Homo sapiens
  misc_RNA (1)...(19): siRNA sense strand
gaagcaauauccuaaagua

SEQ ID NO: 1550586 - RNA, 19 nt, Homo sapiens
  misc_RNA (1)...(19): siRNA sense strand
gcacagugguugcaaauga

SEQ ID NO: 1550587 - RNA, 19 nt, Homo sapiens
  misc_RNA (1)...(19): siRNA sense strand
caauauagcuguccauguu

SEQ ID NO: 1550588 - RNA, 19 nt, Homo sapiens
  misc_RNA (1)...(19): siRNA sense strand
caacacagccggaguauga

SEQ ID NO: 1550589 - RNA, 19 nt, Homo sapiens
  misc_RNA (1)...(19): siRNA sense strand
gauuuaaccuuucagcuaa

SEQ ID NO: 1550590 - RNA, 19 nt, Homo sapiens
  misc_RNA (1)...(19): siRNA sense strand
aaagggauaugcaaagaua

SEQ ID NO: 1550591 - RNA, 19 nt, Homo sapiens
  misc_RNA (1)...(19): siRNA sense strand
ucauaugacucaaugcuua

SEQ ID NO: 1550592 - RNA, 19 nt, Homo sapiens
  misc_RNA (1)...(19): siRNA sense strand
gcaaagggauaugcaaaga

SEQ ID NO: 1550593 - RNA, 19 nt, Homo sapiens
  misc_RNA (1)...(19): siRNA sense strand
agaagacgauugugaaauu

SEQ ID NO: 1550594 - RNA, 19 nt, Homo sapiens
  misc_RNA (1)...(19): siRNA sense strand
gaacaaagggaacucaaug

SEQ ID NO: 1550595 - RNA, 19 nt, Homo sapiens
  misc_RNA (1)...(19): siRNA sense strand
ugacagcuauuaacaaugu

SEQ ID NO: 1550596 - RNA, 19 nt, Homo sapiens
  misc_RNA (1)...(19): siRNA sense strand
ggacaacacagccggagua

SEQ ID NO: 1550597 - RNA, 19 nt, Homo sapiens
  misc_RNA (1)...(19): siRNA sense strand
gaaauuaauccguaugugu

SEQ ID NO: 1550598 - RNA, 19 nt, Homo sapiens
  misc_RNA (1)...(19): siRNA sense strand
ggaacucaaugaaggcaaa

SEQ ID NO: 1550599 - RNA, 19 nt, Homo sapiens
  misc_RNA (1)...(19): siRNA sense strand
uaauugcacuccuuaaaug

SEQ ID NO: 1550600 - RNA, 19 nt, Homo sapiens
  misc_RNA (1)...(19): siRNA sense strand
gaaguuaugccucagaaug

SEQ ID NO: 1550601 - RNA, 19 nt, Homo sapiens
  misc_RNA (1)...(19): siRNA sense strand
uaaagaaauugcccauuca

SEQ ID NO: 1550602 - RNA, 19 nt, Homo sapiens
  misc_RNA (1)...(19): siRNA sense strand
uuaaagaaauugcccauuc

SEQ ID NO: 1550603 - RNA, 19 nt, Homo sapiens
  misc_RNA (1)...(19): siRNA sense strand
gagauuagcguccuucuuc

SEQ ID NO: 1550604 - RNA, 19 nt, Homo sapiens
  misc_RNA (1)...(19): siRNA sense strand
gaagauaaggaccuauuug

SEQ ID NO: 1550605 - RNA, 19 nt, Homo sapiens
  misc_RNA (1)...(19): siRNA sense strand
gugaaacuacgaucaaaua

SEQ ID NO: 1550606 - RNA, 19 nt, Homo sapiens
  misc_RNA (1)...(19): siRNA sense strand
caugacagcuauuaacaau

SEQ ID NO: 1550607 - RNA, 19 nt, Homo sapiens
  misc_RNA (1)...(19): siRNA sense strand
agauguaccuaccuucaua

SEQ ID NO: 1550608 - RNA, 19 nt, Homo sapiens
  misc_RNA (1)...(19): siRNA sense strand
gaagacgauugugaaauuc

SEQ ID NO: 1550609 - RNA, 19 nt, Homo sapiens
  misc_RNA (1)...(19): siRNA sense strand
guauguguccuuauuauga

SEQ ID NO: 1550610 - RNA, 19 nt, Homo sapiens
  misc_RNA (1)...(19): siRNA sense strand
ucaccagacucguucauau

SEQ ID NO: 1550611 - RNA, 19 nt, Homo sapiens
  misc_RNA (1)...(19): siRNA sense strand
gagcuaauugcacuccuua

SEQ ID NO: 1550612 - RNA, 19 nt, Homo sapiens
  misc_RNA (1)...(19): siRNA sense strand
guucauaucucagaguuuc

SEQ ID NO: 1550613 - RNA, 19 nt, Homo sapiens
  misc_RNA (1)...(19): siRNA sense strand
gaguaugagcaauaucuua

SEQ ID NO: 1550614 - RNA, 19 nt, Homo sapiens
  misc_RNA (1)...(19): siRNA sense strand
ccugaugauucuaacaaua

SEQ ID NO: 1550615 - RNA, 19 nt, Homo sapiens
  misc_RNA (1)...(19): siRNA sense strand
guggaaaguggaaauauaa

SEQ ID NO: 1550616 - RNA, 19 nt, Homo sapiens
  misc_RNA (1)...(19): siRNA sense strand
gcuguaacauuuauagaag

SEQ ID NO: 1550617 - RNA, 19 nt, Homo sapiens
  misc_RNA (1)...(19): siRNA sense strand
ucaacaaccugaugauucu

SEQ ID NO: 1550618 - RNA, 19 nt, Homo sapiens
  misc_RNA (1)...(19): siRNA sense strand
gcuaauugcacuccuuaaa

SEQ ID NO: 1550619 - RNA, 19 nt, Homo sapiens
  misc_RNA (1)...(19): siRNA sense strand
ggaauggccuacuuuaucc

SEQ ID NO: 1550620 - RNA, 19 nt, Homo sapiens
  misc_RNA (1)...(19): siRNA sense strand
ccuuucagcuaaaugauaa

SEQ ID NO: 1550621 - RNA, 19 nt, Homo sapiens
  misc_RNA (1)...(19): siRNA sense strand
ccacagagaaauuugaaga

SEQ ID NO: 1550622 - RNA, 19 nt, Homo sapiens
  misc_RNA (1)...(19): siRNA sense strand
aguggaaaguggaaauaua

SEQ ID NO: 1550623 - RNA, 19 nt, Homo sapiens
  misc_RNA (1)...(19): siRNA sense strand
cuaagcacauuaauuaugg

SEQ ID NO: 1550624 - RNA, 19 nt, Homo sapiens
  misc_RNA (1)...(19): siRNA sense strand
gcagcacagugguugcaaa

SEQ ID NO: 1550625 - RNA, 19 nt, Homo sapiens
  misc_RNA (1)...(19): siRNA sense strand
guaccuaccuucauaugac

SEQ ID NO: 1550626 - RNA, 19 nt, Homo sapiens
  misc_RNA (1)...(19): siRNA sense strand
ggaguccuuuggugagauu

SEQ ID NO: 1550627 - RNA, 19 nt, Homo sapiens
  misc_RNA (1)...(19): siRNA sense strand
ucuggaugcuguaacauuu

SEQ ID NO: 1550628 - RNA, 19 nt, Homo sapiens
  misc_RNA (1)...(19): siRNA sense strand
ugacagaagacgauuguga

SEQ ID NO: 1550629 - RNA, 19 nt, Homo sapiens
  misc_RNA (1)...(19): siRNA sense strand
gacagaagacgauugugaa

SEQ ID NO: 1550630 - RNA, 19 nt, Homo sapiens
  misc_RNA (1)...(19): siRNA sense strand
gaaaggcagcacagugguu

SEQ ID NO: 1550631 - RNA, 19 nt, Homo sapiens
  misc_RNA (1)...(19): siRNA sense strand
gcugagauguaccuaccuu

SEQ ID NO: 1550632 - RNA, 19 nt, Homo sapiens
  misc_RNA (1)...(19): siRNA sense strand
ggccuacuuuauccauaua

SEQ ID NO: 1550633 - RNA, 19 nt, Homo sapiens
  misc_RNA (1)...(19): siRNA sense strand
ggaaagucaacaucaacaa

SEQ ID NO: 1550634 - RNA, 19 nt, Homo sapiens
  misc_RNA (1)...(19): siRNA sense strand
gaagaauuccuagcuaucu

SEQ ID NO: 1550635 - RNA, 19 nt, Homo sapiens
  misc_RNA (1)...(19): siRNA sense strand
agaggaaagucaacaucaa

SEQ ID NO: 1550636 - RNA, 19 nt, Homo sapiens
  misc_RNA (1)...(19): siRNA sense strand
gaggaauggccuacuuuau

SEQ ID NO: 1550637 - RNA, 19 nt, Homo sapiens
  misc_RNA (1)...(19): siRNA sense strand
ugaggaauggccuacuuua

SEQ ID NO: 1550638 - RNA, 19 nt, Homo sapiens
  misc_RNA (1)...(19): siRNA sense strand
gcaaagauaaaggaggaaa

SEQ ID NO: 1550639 - RNA, 19 nt, Homo sapiens
  misc_RNA (1)...(19): siRNA sense strand
ggaacaaagggaacucaau

SEQ ID NO: 1550640 - RNA, 19 nt, Homo sapiens
  misc_RNA (1)...(19): siRNA sense strand
gauaugcaaagauaaagga

SEQ ID NO: 1550641 - RNA, 19 nt, Homo sapiens
  misc_RNA (1)...(19): siRNA sense strand
gacgccauaugaacacaaa

SEQ ID NO: 1550642 - RNA, 19 nt, Homo sapiens
  misc_RNA (1)...(19): siRNA sense strand
gcaaagaggaaagucaaca

SEQ ID NO: 1550643 - RNA, 19 nt, Homo sapiens
  misc_RNA (1)...(19): siRNA sense strand
uaugaggaauggccuacuu

SEQ ID NO: 1550644 - RNA, 19 nt, Homo sapiens
  misc_RNA (1)...(19): siRNA sense strand
uaaccuuucagcuaaauga

SEQ ID NO: 1550645 - RNA, 19 nt, Homo sapiens
  misc_RNA (1)...(19): siRNA sense strand
ucacaggacgccauaugaa

SEQ ID NO: 1550646 - RNA, 19 nt, Homo sapiens
  misc_RNA (1)...(19): siRNA sense strand
caaugaaggcaaagaggaa

SEQ ID NO: 1550647 - RNA, 19 nt, Homo sapiens
  misc_RNA (1)...(19): siRNA sense strand
cagcaaagggauaugcaaa

SEQ ID NO: 1550648 - RNA, 19 nt, Homo sapiens
  misc_RNA (1)...(19): siRNA sense strand
cauuuggagugaagaauuc

SEQ ID NO: 1550649 - RNA, 19 nt, Homo sapiens
  misc_RNA (1)...(19): siRNA sense strand
agauuuaaccuuucagcua

SEQ ID NO: 1550650 - RNA, 19 nt, Homo sapiens
  misc_RNA (1)...(19): siRNA sense strand
gaauuccuagcuaucuuaa

SEQ ID NO: 1550651 - RNA, 19 nt, Homo sapiens
  misc_RNA (1)...(19): siRNA sense strand
aaagagccacagagaaauu

SEQ ID NO: 1550652 - RNA, 19 nt, Homo sapiens
  misc_RNA (1)...(19): siRNA sense strand
gaaagucaacaucaacaac

SEQ ID NO: 1550653 - RNA, 19 nt, Homo sapiens
  misc_RNA (1)...(19): siRNA sense strand
uagcguccuucuucaaguu

SEQ ID NO: 1550654 - RNA, 19 nt, Homo sapiens
  misc_RNA (1)...(19): siRNA sense strand
agaauuccuagcuaucuua

SEQ ID NO: 1550655 - RNA, 19 nt, Homo sapiens
  misc_RNA (1)...(19): siRNA sense strand
acaaagggaacucaaugaa

SEQ ID NO: 1550656 - RNA, 19 nt, Homo sapiens
  misc_RNA (1)...(19): siRNA sense strand
ugaagauaaggaccuauuu

SEQ ID NO: 1550657 - RNA, 19 nt, Homo sapiens
  misc_RNA (1)...(19): siRNA sense strand
cagacucguucauaucuca

SEQ ID NO: 1550658 - RNA, 19 nt, Homo sapiens
  misc_RNA (1)...(19): siRNA sense strand
caaagggaacucaaugaag

SEQ ID NO: 1550659 - RNA, 19 nt, Homo sapiens
  misc_RNA (1)...(19): siRNA sense strand
cauuaauuauggccaguug

SEQ ID NO: 1550660 - RNA, 19 nt, Homo sapiens
  misc_RNA (1)...(19): siRNA sense strand
gaaguugagauggcaauca

SEQ ID NO: 1550661 - RNA, 19 nt, Homo sapiens
  misc_RNA (1)...(19): siRNA sense strand
cuaauugcacuccuuaaau

SEQ ID NO: 1550662 - RNA, 19 nt, Homo sapiens
  misc_RNA (1)...(19): siRNA sense strand
ccacuucacaguauaccaa

SEQ ID NO: 1550663 - RNA, 19 nt, Homo sapiens
  misc_RNA (1)...(19): siRNA sense strand
ccguauguguccuuauuau

SEQ ID NO: 1550664 - RNA, 19 nt, Homo sapiens
  misc_RNA (1)...(19): siRNA sense strand
uugaagaauuccuagcuau

SEQ ID NO: 1550665 - RNA, 19 nt, Homo sapiens
  misc_RNA (1)...(19): siRNA sense strand
caguauaccaaacuugaaa

SEQ ID NO: 1550666 - RNA, 19 nt, Homo sapiens
  misc_RNA (1)...(19): siRNA sense strand
gacgauugugaaauucuua

SEQ ID NO: 1550667 - RNA, 19 nt, Homo sapiens
  misc_RNA (1)...(19): siRNA sense strand
gcucacgauacauuuauga

SEQ ID NO: 1550668 - RNA, 19 nt, Homo sapiens
  misc_RNA (1)...(19): siRNA sense strand
gauaguggaaaguggaaau

SEQ ID NO: 1550669 - RNA, 19 nt, Homo sapiens
  misc_RNA (1)...(19): siRNA sense strand
cacaguauaccaaacuuga

SEQ ID NO: 1550670 - RNA, 19 nt, Homo sapiens
  misc_RNA (1)...(19): siRNA sense strand
ucagcucacgauacauuua

SEQ ID NO: 1550671 - RNA, 19 nt, Homo sapiens
  misc_RNA (1)...(19): siRNA sense strand
ucucacaugacagcuauua

SEQ ID NO: 1550672 - RNA, 19 nt, Homo sapiens
  misc_RNA (1)...(19): siRNA sense strand
cauugaagauaaggaccua

SEQ ID NO: 1550673 - RNA, 19 nt, Homo sapiens
  misc_RNA (1)...(19): siRNA sense strand
ggaaacuuaaggagaagga

SEQ ID NO: 1550674 - RNA, 19 nt, Homo sapiens
  misc_RNA (1)...(19): siRNA sense strand
ugaaauuaauccguaugug

SEQ ID NO: 1550675 - RNA, 19 nt, Homo sapiens
  misc_RNA (1)...(19): siRNA sense strand
uagcaaauggaguaccuuu

SEQ ID NO: 1550676 - RNA, 19 nt, Homo sapiens
  misc_RNA (1)...(19): siRNA sense strand
ucagcuaaaugauaagcau

SEQ ID NO: 1550677 - RNA, 19 nt, Homo sapiens
  misc_RNA (1)...(19): siRNA sense strand
uuugaagaauuccuagcua

SEQ ID NO: 1550678 - RNA, 19 nt, Homo sapiens
  misc_RNA (1)...(19): siRNA sense strand
gagccacagagaaauuuga

SEQ ID NO: 1550679 - RNA, 19 nt, Homo sapiens
  misc_RNA (1)...(19): siRNA sense strand
agacgauugugaaauucuu

SEQ ID NO: 1550680 - RNA, 19 nt, Homo sapiens
  misc_RNA (1)...(19): siRNA sense strand
uggaugcuguaacauuuau

SEQ ID NO: 1550681 - RNA, 19 nt, Homo sapiens
  misc_RNA (1)...(19): siRNA sense strand
uagcucgaccucaaacaaa

SEQ ID NO: 1550682 - RNA, 19 nt, Homo sapiens
  misc_RNA (1)...(19): siRNA sense strand
uggccuacuuuauccauau

SEQ ID NO: 1550683 - RNA, 19 nt, Homo sapiens
  misc_RNA (1)...(19): siRNA sense strand
ggaguaugagcaauaucuu

SEQ ID NO: 1550684 - RNA, 19 nt, Homo sapiens
  misc_RNA (1)...(19): siRNA sense strand
uggaaguuaugccucagaa

SEQ ID NO: 1550685 - RNA, 19 nt, Homo sapiens
  misc_RNA (1)...(19): siRNA sense strand
gcuguuaccguacauucua

SEQ ID NO: 1550686 - RNA, 19 nt, Homo sapiens
  misc_RNA (1)...(19): siRNA sense strand
caugagcccucgcuuugug

SEQ ID NO: 1550687 - RNA, 19 nt, Homo sapiens
  misc_RNA (1)...(19): siRNA sense strand
gcauggugguucuguaggu

SEQ ID NO: 1550688 - RNA, 19 nt, Homo sapiens
  misc_RNA (1)...(19): siRNA sense strand
gugcccaccugcucacaug

SEQ ID NO: 1550689 - RNA, 19 nt, Homo sapiens
  misc_RNA (1)...(19): siRNA sense strand
gugcccaccugcucaugug

SEQ ID NO: 1550690 - RNA, 19 nt, Homo sapiens
  misc_RNA (1)...(19): siRNA sense strand
gugcccauguggaguguuc

SEQ ID NO: 1550691 - RNA, 19 nt, Homo sapiens
  misc_RNA (1)...(19): siRNA sense strand
gugccugccugcucacaca

SEQ ID NO: 1550692 - RNA, 19 nt, Homo sapiens
  misc_RNA (1)...(19): siRNA sense strand
cauggugguucuguagguu

SEQ ID NO: 1550693 - RNA, 19 nt, Homo sapiens
  misc_RNA (1)...(19): siRNA sense strand
gcaugagcccucgcuuugu

SEQ ID NO: 1550694 - RNA, 19 nt, Homo sapiens
  misc_RNA (1)...(19): siRNA sense strand
uaccguacauucuacucau

SEQ ID NO: 1550695 - RNA, 19 nt, Homo sapiens
  misc_RNA (1)...(19): siRNA sense strand
caacugagcuccauagauu

SEQ ID NO: 1550696 - RNA, 19 nt, Homo sapiens
  misc_RNA (1)...(19): siRNA sense strand
gaaauuggcuuccagaaau

SEQ ID NO: 1550697 - RNA, 19 nt, Homo sapiens
  misc_RNA (1)...(19): siRNA sense strand
gaacaucucucuccaagga

SEQ ID NO: 1550698 - RNA, 19 nt, Homo sapiens
  misc_RNA (1)...(19): siRNA sense strand
ggaccuagcugggaacuua

SEQ ID NO: 1550699 - RNA, 19 nt, Homo sapiens
  misc_RNA (1)...(19): siRNA sense strand
gaacugaaguccaucuguu

SEQ ID NO: 1550700 - RNA, 19 nt, Homo sapiens
  misc_RNA (1)...(19): siRNA sense strand
ggaauaaucuggcccacuu

SEQ ID NO: 1550701 - RNA, 19 nt, Homo sapiens
  misc_RNA (1)...(19): siRNA sense strand
gaaaucgacuccuucaugu

SEQ ID NO: 1550702 - RNA, 19 nt, Homo sapiens
  misc_RNA (1)...(19): siRNA sense strand
ccacgaagaucgacagugu

SEQ ID NO: 1550703 - RNA, 19 nt, Homo sapiens
  misc_RNA (1)...(19): siRNA sense strand
gaugagaucacggauauaa

SEQ ID NO: 1550704 - RNA, 19 nt, Homo sapiens
  misc_RNA (1)...(19): siRNA sense strand
gaagauggaccacgucaug

SEQ ID NO: 1550705 - RNA, 19 nt, Homo sapiens
  misc_RNA (1)...(19): siRNA sense strand
ucacaaccuugcucuauga

SEQ ID NO: 1550706 - RNA, 19 nt, Homo sapiens
  misc_RNA (1)...(19): siRNA sense strand
gcagauguaugaccugauc

SEQ ID NO: 1550707 - RNA, 19 nt, Homo sapiens
  misc_RNA (1)...(19): siRNA sense strand
uaccagaauucuacaagua

SEQ ID NO: 1550708 - RNA, 19 nt, Homo sapiens
  misc_RNA (1)...(19): siRNA sense strand
cagcuguucuccauuauga

SEQ ID NO: 1550709 - RNA, 19 nt, Homo sapiens
  misc_RNA (1)...(19): siRNA sense strand
gcucaggaaguaucucuua

SEQ ID NO: 1550710 - RNA, 19 nt, Homo sapiens
  misc_RNA (1)...(19): siRNA sense strand
guccaucuguuguauaauu

SEQ ID NO: 1550711 - RNA, 19 nt, Homo sapiens
  misc_RNA (1)...(19): siRNA sense strand
agaaaaggcugucugauuu

SEQ ID NO: 1550712 - RNA, 19 nt, Homo sapiens
  misc_RNA (1)...(19): siRNA sense strand
uaaauaauaccacccaguu

SEQ ID NO: 1550713 - RNA, 19 nt, Homo sapiens
  misc_RNA (1)...(19): siRNA sense strand
ccaaucacagcaagcauua

SEQ ID NO: 1550714 - RNA, 19 nt, Homo sapiens
  misc_RNA (1)...(19): siRNA sense strand
cgaaauacaagcaccauug

SEQ ID NO: 1550715 - RNA, 19 nt, Homo sapiens
  misc_RNA (1)...(19): siRNA sense strand
cgaugcaucugaacgcuuu

SEQ ID NO: 1550716 - RNA, 19 nt, Homo sapiens
  misc_RNA (1)...(19): siRNA sense strand
gagaucacggauauaaaua

SEQ ID NO: 1550717 - RNA, 19 nt, Homo sapiens
  misc_RNA (1)...(19): siRNA sense strand
ucgaugagaucacggauau

SEQ ID NO: 1550718 - RNA, 19 nt, Homo sapiens
  misc_RNA (1)...(19): siRNA sense strand
caaggacacucccaaaucg

SEQ ID NO: 1550719 - RNA, 19 nt, Homo sapiens
  misc_RNA (1)...(19): siRNA sense strand
ugggagaaguuacgugaaa

SEQ ID NO: 1550720 - RNA, 19 nt, Homo sapiens
  misc_RNA (1)...(19): siRNA sense strand
gaugagaauuucgaugugu

SEQ ID NO: 1550721 - RNA, 19 nt, Homo sapiens
  misc_RNA (1)...(19): siRNA sense strand
gcgauggccugaacuacau

SEQ ID NO: 1550722 - RNA, 19 nt, Homo sapiens
  misc_RNA (1)...(19): siRNA sense strand
aaagcgaacugacucuguu

SEQ ID NO: 1550723 - RNA, 19 nt, Homo sapiens
  misc_RNA (1)...(19): siRNA sense strand
gaaguccaucuguuguaua

SEQ ID NO: 1550724 - RNA, 19 nt, Homo sapiens
  misc_RNA (1)...(19): siRNA sense strand
gcaagcauuaugaccagua

SEQ ID NO: 1550725 - RNA, 19 nt, Homo sapiens
  misc_RNA (1)...(19): siRNA sense strand
ugaaauuggcuuccagaaa

SEQ ID NO: 1550726 - RNA, 19 nt, Homo sapiens
  misc_RNA (1)...(19): siRNA sense strand
ccacccaguuggccauauu

SEQ ID NO: 1550727 - RNA, 19 nt, Homo sapiens
  misc_RNA (1)...(19): siRNA sense strand
gaaagcgaacugacucugu

SEQ ID NO: 1550728 - RNA, 19 nt, Homo sapiens
  misc_RNA (1)...(19): siRNA sense strand
guagcuacccgaaauacaa

SEQ ID NO: 1550729 - RNA, 19 nt, Homo sapiens
  misc_RNA (1)...(19): siRNA sense strand
gcaacacgguccugaagac

SEQ ID NO: 1550730 - RNA, 19 nt, Homo sapiens
  misc_RNA (1)...(19): siRNA sense strand
ugaaagcgauggccugaac

SEQ ID NO: 1550731 - RNA, 19 nt, Homo sapiens
  misc_RNA (1)...(19): siRNA sense strand
cuaagacgccacuaucaaa

SEQ ID NO: 1550732 - RNA, 19 nt, Homo sapiens
  misc_RNA (1)...(19): siRNA sense strand
gcaccuacaucugcgaaca

SEQ ID NO: 1550733 - RNA, 19 nt, Homo sapiens
  misc_RNA (1)...(19): siRNA sense strand
aaguccaucuguuguauaa

SEQ ID NO: 1550734 - RNA, 19 nt, Homo sapiens
  misc_RNA (1)...(19): siRNA sense strand
caagaccgaauuccagaaa

SEQ ID NO: 1550735 - RNA, 19 nt, Homo sapiens
  misc_RNA (1)...(19): siRNA sense strand
gaacuacauucccaaaauc

SEQ ID NO: 1550736 - RNA, 19 nt, Homo sapiens
  misc_RNA (1)...(19): siRNA sense strand
uggaagaaaucgacuccuu

SEQ ID NO: 1550737 - RNA, 19 nt, Homo sapiens
  misc_RNA (1)...(19): siRNA sense strand
ugagaucacggauauaaau

SEQ ID NO: 1550738 - RNA, 19 nt, Homo sapiens
  misc_RNA (1)...(19): siRNA sense strand
gcacgaggagcuccagaug

SEQ ID NO: 1550739 - RNA, 19 nt, Homo sapiens
  misc_RNA (1)...(19): siRNA sense strand
guccaaagaauauaaccua

SEQ ID NO: 1550740 - RNA, 19 nt, Homo sapiens
  misc_RNA (1)...(19): siRNA sense strand
agaaaucgacuccuucaug

SEQ ID NO: 1550741 - RNA, 19 nt, Homo sapiens
  misc_RNA (1)...(19): siRNA sense strand
ugaaguccaucuguuguau

SEQ ID NO: 1550742 - RNA, 19 nt, Homo sapiens
  misc_RNA (1)...(19): siRNA sense strand
gaugguggaugccaauaac

SEQ ID NO: 1550743 - RNA, 19 nt, Homo sapiens
  misc_RNA (1)...(19): siRNA sense strand
gugcggaacugaaguccau

SEQ ID NO: 1550744 - RNA, 19 nt, Homo sapiens
  misc_RNA (1)...(19): siRNA sense strand
caagcauuaugaccaguau

SEQ ID NO: 1550745 - RNA, 19 nt, Homo sapiens
  misc_RNA (1)...(19): siRNA sense strand
ccaaggacacucccaaauc

SEQ ID NO: 1550746 - RNA, 19 nt, Homo sapiens
  misc_RNA (1)...(19): siRNA sense strand
gccaauaacgggcuuguca

SEQ ID NO: 1550747 - RNA, 19 nt, Homo sapiens
  misc_RNA (1)...(19): siRNA sense strand
gacaugacgaugcaucuga

SEQ ID NO: 1550748 - RNA, 19 nt, Homo sapiens
  misc_RNA (1)...(19): siRNA sense strand
gcaagggugcggaacugaa

SEQ ID NO: 1550749 - RNA, 19 nt, Homo sapiens
  misc_RNA (1)...(19): siRNA sense strand
ccagugggauucuguacuc

SEQ ID NO: 1550750 - RNA, 19 nt, Homo sapiens
  misc_RNA (1)...(19): siRNA sense strand
gcuguucuccauuaugaaa

SEQ ID NO: 1550751 - RNA, 19 nt, Homo sapiens
  misc_RNA (1)...(19): siRNA sense strand
acacgguccugaagacgaa

SEQ ID NO: 1550752 - RNA, 19 nt, Homo sapiens
  misc_RNA (1)...(19): siRNA sense strand
cauauucuaucgcaaucga

SEQ ID NO: 1550753 - RNA, 19 nt, Homo sapiens
  misc_RNA (1)...(19): siRNA sense strand
aaggcugucugauuucaaa

SEQ ID NO: 1550754 - RNA, 19 nt, Homo sapiens
  misc_RNA (1)...(19): siRNA sense strand
ugaaguccgugaacuggau

SEQ ID NO: 1550755 - RNA, 19 nt, Homo sapiens
  misc_RNA (1)...(19): siRNA sense strand
agacucauuugacgaggaa

SEQ ID NO: 1550756 - RNA, 19 nt, Homo sapiens
  misc_RNA (1)...(19): siRNA sense strand
gaaauacaagcaccauugc

SEQ ID NO: 1550757 - RNA, 19 nt, Homo sapiens
  misc_RNA (1)...(19): siRNA sense strand
ugucugauuucaaacucua

SEQ ID NO: 1550758 - RNA, 19 nt, Homo sapiens
  misc_RNA (1)...(19): siRNA sense strand
gaauaaucuggcccacuuu

SEQ ID NO: 1550759 - RNA, 19 nt, Homo sapiens
  misc_RNA (1)...(19): siRNA sense strand
aaagaaugcgugacgagaa

SEQ ID NO: 1550760 - RNA, 19 nt, Homo sapiens
  misc_RNA (1)...(19): siRNA sense strand
gcaccauugcgcaaagauu

SEQ ID NO: 1550761 - RNA, 19 nt, Homo sapiens
  misc_RNA (1)...(19): siRNA sense strand
aaauuggcuuccagaaaug

SEQ ID NO: 1550762 - RNA, 19 nt, Homo sapiens
  misc_RNA (1)...(19): siRNA sense strand
uaaccuaagacgccacuau

SEQ ID NO: 1550763 - RNA, 19 nt, Homo sapiens
  misc_RNA (1)...(19): siRNA sense strand
caucugaacgcuuugaaca

SEQ ID NO: 1550764 - RNA, 19 nt, Homo sapiens
  misc_RNA (1)...(19): siRNA sense strand
gaaguccgugaacuggaua

SEQ ID NO: 1550765 - RNA, 19 nt, Homo sapiens
  misc_RNA (1)...(19): siRNA sense strand
ucauggacgugguagugaa

SEQ ID NO: 1550766 - RNA, 19 nt, Homo sapiens
  misc_RNA (1)...(19): siRNA sense strand
cgaugagaauuucgaugug

SEQ ID NO: 1550767 - RNA, 19 nt, Homo sapiens
  misc_RNA (1)...(19): siRNA sense strand
gaagacgaaauacgacaag

SEQ ID NO: 1550768 - RNA, 19 nt, Homo sapiens
  misc_RNA (1)...(19): siRNA sense strand
caaaucgucacgcagaugu

SEQ ID NO: 1550769 - RNA, 19 nt, Homo sapiens
  misc_RNA (1)...(19): siRNA sense strand
guucacaaccuugcucuau

SEQ ID NO: 1550770 - RNA, 19 nt, Homo sapiens
  misc_RNA (1)...(19): siRNA sense strand
ucugaacgcuuugaacauc

SEQ ID NO: 1550771 - RNA, 19 nt, Homo sapiens
  misc_RNA (1)...(19): siRNA sense strand
gcucccaguuaaaggauuc

SEQ ID NO: 1550772 - RNA, 19 nt, Homo sapiens
  misc_RNA (1)...(19): siRNA sense strand
caagcaccauugcgcaaag

SEQ ID NO: 1550773 - RNA, 19 nt, Homo sapiens
  misc_RNA (1)...(19): siRNA sense strand
ccaguuggccauauucauc

SEQ ID NO: 1550774 - RNA, 19 nt, Homo sapiens
  misc_RNA (1)...(19): siRNA sense strand
ucgaauccuuggaagaaau

SEQ ID NO: 1550775 - RNA, 19 nt, Homo sapiens
  misc_RNA (1)...(19): siRNA sense strand
ggaacugaaguccaucugu

SEQ ID NO: 1550776 - RNA, 19 nt, Homo sapiens
  misc_RNA (1)...(19): siRNA sense strand
aagaaugcgugacgagaag

SEQ ID NO: 1550777 - RNA, 19 nt, Homo sapiens
  misc_RNA (1)...(19): siRNA sense strand
acaugacgaugcaucugaa

SEQ ID NO: 1550778 - RNA, 19 nt, Homo sapiens
  misc_RNA (1)...(19): siRNA sense strand
agaccuggccuucuugguu

SEQ ID NO: 1550779 - RNA, 19 nt, Homo sapiens
  misc_RNA (1)...(19): siRNA sense strand
accaguauauggaaagaau

SEQ ID NO: 1550780 - RNA, 19 nt, Homo sapiens
  misc_RNA (1)...(19): siRNA sense strand
ggaacucaagaccgaauuc

SEQ ID NO: 1550781 - RNA, 19 nt, Homo sapiens
  misc_RNA (1)...(19): siRNA sense strand
ugaacuacauucccaaaau

SEQ ID NO: 1550782 - RNA, 19 nt, Homo sapiens
  misc_RNA (1)...(19): siRNA sense strand
ccuaagacgccacuaucaa

SEQ ID NO: 1550783 - RNA, 19 nt, Homo sapiens
  misc_RNA (1)...(19): siRNA sense strand
cgauguguccgaagaacuu

SEQ ID NO: 1550784 - RNA, 19 nt, Homo sapiens
  misc_RNA (1)...(19): siRNA sense strand
ccaaagaauauaaccuaag

SEQ ID NO: 1550785 - RNA, 19 nt, Homo sapiens
  misc_RNA (1)...(19): siRNA sense strand
uaugaccaguauauggaaa

SEQ ID NO: 1550786 - RNA, 19 nt, Homo sapiens
  misc_RNA (1)...(19): siRNA sense strand
guagugaaguccgugaacu

SEQ ID NO: 1550787 - RNA, 19 nt, Homo sapiens
  misc_RNA (1)...(19): siRNA sense strand
ggcauauucuaucgcaauc

SEQ ID NO: 1550788 - RNA, 19 nt, Homo sapiens
  misc_RNA (1)...(19): siRNA sense strand
caaggugggaauaccagaa

SEQ ID NO: 1550789 - RNA, 19 nt, Homo sapiens
  misc_RNA (1)...(19): siRNA sense strand
ugaccaguauauggaaaga

SEQ ID NO: 1550790 - RNA, 19 nt, Homo sapiens
  misc_RNA (1)...(19): siRNA sense strand
aaucacagcaagcauuaug

SEQ ID NO: 1550791 - RNA, 19 nt, Homo sapiens
  misc_RNA (1)...(19): siRNA sense strand
uccgagaccuggccuucuu

SEQ ID NO: 1550792 - RNA, 19 nt, Homo sapiens
  misc_RNA (1)...(19): siRNA sense strand
caauaacgggcuugucaca

SEQ ID NO: 1550793 - RNA, 19 nt, Homo sapiens
  misc_RNA (1)...(19): siRNA sense strand
augguagccuccuguacua

SEQ ID NO: 1550794 - RNA, 19 nt, Homo sapiens
  misc_RNA (1)...(19): siRNA sense strand
aaucgacuccuucauguca

SEQ ID NO: 1550795 - RNA, 19 nt, Homo sapiens
  misc_RNA (1)...(19): siRNA sense strand
caacugagcuccauagauu

SEQ ID NO: 1550796 - RNA, 19 nt, Homo sapiens
  misc_RNA (1)...(19): siRNA sense strand
gaaauuggcuuccagaaau

SEQ ID NO: 1550797 - RNA, 19 nt, Homo sapiens
  misc_RNA (1)...(19): siRNA sense strand
gaacaucucucuccaagga

SEQ ID NO: 1550798 - RNA, 19 nt, Homo sapiens
  misc_RNA (1)...(19): siRNA sense strand
ggaccuagcugggaacuua

SEQ ID NO: 1550799 - RNA, 19 nt, Homo sapiens
  misc_RNA (1)...(19): siRNA sense strand
gaacugaaguccaucuguu

SEQ ID NO: 1550800 - RNA, 19 nt, Homo sapiens
  misc_RNA (1)...(19): siRNA sense strand
ggaauaaucuggcccacuu

SEQ ID NO: 1550801 - RNA, 19 nt, Homo sapiens
  misc_RNA (1)...(19): siRNA sense strand
gaaagauuaucaagcauug

SEQ ID NO: 1550802 - RNA, 19 nt, Homo sapiens
  misc_RNA (1)...(19): siRNA sense strand
caacaugucucauaugcaa

SEQ ID NO: 1550803 - RNA, 19 nt, Homo sapiens
  misc_RNA (1)...(19): siRNA sense strand
gaaaucgacuccuucaugu

SEQ ID NO: 1550804 - RNA, 19 nt, Homo sapiens
  misc_RNA (1)...(19): siRNA sense strand
ggagagagcguauuucuuc

SEQ ID NO: 1550805 - RNA, 19 nt, Homo sapiens
  misc_RNA (1)...(19): siRNA sense strand
ccacgaagaucgacagugu

SEQ ID NO: 1550806 - RNA, 19 nt, Homo sapiens
  misc_RNA (1)...(19): siRNA sense strand
gaugagaucacggauauaa

SEQ ID NO: 1550807 - RNA, 19 nt, Homo sapiens
  misc_RNA (1)...(19): siRNA sense strand
gaagauggaccacgucaug

SEQ ID NO: 1550808 - RNA, 19 nt, Homo sapiens
  misc_RNA (1)...(19): siRNA sense strand
ucacaaccuugcucuauga

SEQ ID NO: 1550809 - RNA, 19 nt, Homo sapiens
  misc_RNA (1)...(19): siRNA sense strand
aaacaaagcaugucugugu

SEQ ID NO: 1550810 - RNA, 19 nt, Homo sapiens
  misc_RNA (1)...(19): siRNA sense strand
uaccagaauucuacaagua

SEQ ID NO: 1550811 - RNA, 19 nt, Homo sapiens
  misc_RNA (1)...(19): siRNA sense strand
gcagauguaugaccugauc

SEQ ID NO: 1550812 - RNA, 19 nt, Homo sapiens
  misc_RNA (1)...(19): siRNA sense strand
cagcuguucuccauuauga

SEQ ID NO: 1550813 - RNA, 19 nt, Homo sapiens
  misc_RNA (1)...(19): siRNA sense strand
ggaaagauuaucaagcauu

SEQ ID NO: 1550814 - RNA, 19 nt, Homo sapiens
  misc_RNA (1)...(19): siRNA sense strand
guccaucuguuguauaauu

SEQ ID NO: 1550815 - RNA, 19 nt, Homo sapiens
  misc_RNA (1)...(19): siRNA sense strand
gcucaggaaguaucucuua

SEQ ID NO: 1550816 - RNA, 19 nt, Homo sapiens
  misc_RNA (1)...(19): siRNA sense strand
gcaugucuguguccaaaga

SEQ ID NO: 1550817 - RNA, 19 nt, Homo sapiens
  misc_RNA (1)...(19): siRNA sense strand
agaaaaggcugucugauuu

SEQ ID NO: 1550818 - RNA, 19 nt, Homo sapiens
  misc_RNA (1)...(19): siRNA sense strand
cagcuaagagaacaaguua

SEQ ID NO: 1550819 - RNA, 19 nt, Homo sapiens
  misc_RNA (1)...(19): siRNA sense strand
uaaauaauaccacccaguu

SEQ ID NO: 1550820 - RNA, 19 nt, Homo sapiens
  misc_RNA (1)...(19): siRNA sense strand
gcuaagagaacaaguuaau

SEQ ID NO: 1550821 - RNA, 19 nt, Homo sapiens
  misc_RNA (1)...(19): siRNA sense strand
cgaaauacaagcaccauug

SEQ ID NO: 1550822 - RNA, 19 nt, Homo sapiens
  misc_RNA (1)...(19): siRNA sense strand
cgaugcaucugaacgcuuu

SEQ ID NO: 1550823 - RNA, 19 nt, Homo sapiens
  misc_RNA (1)...(19): siRNA sense strand
gagaucacggauauaaaua

SEQ ID NO: 1550824 - RNA, 19 nt, Homo sapiens
  misc_RNA (1)...(19): siRNA sense strand
ucgaugagaucacggauau

SEQ ID NO: 1550825 - RNA, 19 nt, Homo sapiens
  misc_RNA (1)...(19): siRNA sense strand
ccaaucacagcaagcauua

SEQ ID NO: 1550826 - RNA, 19 nt, Homo sapiens
  misc_RNA (1)...(19): siRNA sense strand
acaaguuaaugaccucuuu

SEQ ID NO: 1550827 - RNA, 19 nt, Homo sapiens
  misc_RNA (1)...(19): siRNA sense strand
aaggaaagauuaucaagca

SEQ ID NO: 1550828 - RNA, 19 nt, Homo sapiens
  misc_RNA (1)...(19): siRNA sense strand
gcaaacaaagcaugucugu

SEQ ID NO: 1550829 - RNA, 19 nt, Homo sapiens
  misc_RNA (1)...(19): siRNA sense strand
caaggacacucccaaaucg

SEQ ID NO: 1550830 - RNA, 19 nt, Homo sapiens
  misc_RNA (1)...(19): siRNA sense strand
ugggagaaguuacgugaaa

SEQ ID NO: 1550831 - RNA, 19 nt, Homo sapiens
  misc_RNA (1)...(19): siRNA sense strand
gaugagaauuucgaugugu

SEQ ID NO: 1550832 - RNA, 19 nt, Homo sapiens
  misc_RNA (1)...(19): siRNA sense strand
gcgauggccugaacuacau

SEQ ID NO: 1550833 - RNA, 19 nt, Homo sapiens
  misc_RNA (1)...(19): siRNA sense strand
aaagcgaacugacucuguu

SEQ ID NO: 1550834 - RNA, 19 nt, Homo sapiens
  misc_RNA (1)...(19): siRNA sense strand
gaaguccaucuguuguaua

SEQ ID NO: 1550835 - RNA, 19 nt, Homo sapiens
  misc_RNA (1)...(19): siRNA sense strand
uacagaauauuccaacaug

SEQ ID NO: 1550836 - RNA, 19 nt, Homo sapiens
  misc_RNA (1)...(19): siRNA sense strand
ugaaauuggcuuccagaaa

SEQ ID NO: 1550837 - RNA, 19 nt, Homo sapiens
  misc_RNA (1)...(19): siRNA sense strand
ccacccaguuggccauauu

SEQ ID NO: 1550838 - RNA, 19 nt, Homo sapiens
  misc_RNA (1)...(19): siRNA sense strand
gcaagcauuaugaccagua

SEQ ID NO: 1550839 - RNA, 19 nt, Homo sapiens
  misc_RNA (1)...(19): siRNA sense strand
ugucucauaugcaaacaaa

SEQ ID NO: 1550840 - RNA, 19 nt, Homo sapiens
  misc_RNA (1)...(19): siRNA sense strand
guagcuacccgaaauacaa

SEQ ID NO: 1550841 - RNA, 19 nt, Homo sapiens
  misc_RNA (1)...(19): siRNA sense strand
gcaacacgguccugaagac

SEQ ID NO: 1550842 - RNA, 19 nt, Homo sapiens
  misc_RNA (1)...(19): siRNA sense strand
gaaagcgaacugacucugu

SEQ ID NO: 1550843 - RNA, 19 nt, Homo sapiens
  misc_RNA (1)...(19): siRNA sense strand
cuaagacgccacuaucaaa

SEQ ID NO: 1550844 - RNA, 19 nt, Homo sapiens
  misc_RNA (1)...(19): siRNA sense strand
gcaccuacaucugcgaaca

SEQ ID NO: 1550845 - RNA, 19 nt, Homo sapiens
  misc_RNA (1)...(19): siRNA sense strand
caaguuaaugaccucuuua

SEQ ID NO: 1550846 - RNA, 19 nt, Homo sapiens
  misc_RNA (1)...(19): siRNA sense strand
ugaaagcgauggccugaac

SEQ ID NO: 1550847 - RNA, 19 nt, Homo sapiens
  misc_RNA (1)...(19): siRNA sense strand
aaguccaucuguuguauaa

SEQ ID NO: 1550848 - RNA, 19 nt, Homo sapiens
  misc_RNA (1)...(19): siRNA sense strand
caagaccgaauuccagaaa

SEQ ID NO: 1550849 - RNA, 19 nt, Homo sapiens
  misc_RNA (1)...(19): siRNA sense strand
gaacuacauucccaaaauc

SEQ ID NO: 1550850 - RNA, 19 nt, Homo sapiens
  misc_RNA (1)...(19): siRNA sense strand
uggaagaaaucgacuccuu

SEQ ID NO: 1550851 - RNA, 19 nt, Homo sapiens
  misc_RNA (1)...(19): siRNA sense strand
guccaaagaauauaaccua

SEQ ID NO: 1550852 - RNA, 19 nt, Homo sapiens
  misc_RNA (1)...(19): siRNA sense strand
gcacgaggagcuccagaug

SEQ ID NO: 1550853 - RNA, 19 nt, Homo sapiens
  misc_RNA (1)...(19): siRNA sense strand
ggcuugagcucaguaaugu

SEQ ID NO: 1550854 - RNA, 19 nt, Homo sapiens
  misc_RNA (1)...(19): siRNA sense strand
agaaaucgacuccuucaug

SEQ ID NO: 1550855 - RNA, 19 nt, Homo sapiens
  misc_RNA (1)...(19): siRNA sense strand
ugaaguccaucuguuguau

SEQ ID NO: 1550856 - RNA, 19 nt, Homo sapiens
  misc_RNA (1)...(19): siRNA sense strand
gaugguggaugccaauaac

SEQ ID NO: 1550857 - RNA, 19 nt, Homo sapiens
  misc_RNA (1)...(19): siRNA sense strand
ugagaucacggauauaaau

SEQ ID NO: 1550858 - RNA, 19 nt, Homo sapiens
  misc_RNA (1)...(19): siRNA sense strand
gauuaaacagcuaagagaa

SEQ ID NO: 1550859 - RNA, 19 nt, Homo sapiens
  misc_RNA (1)...(19): siRNA sense strand
caagcauuaugaccaguau

SEQ ID NO: 1550860 - RNA, 19 nt, Homo sapiens
  misc_RNA (1)...(19): siRNA sense strand
uuaaacagcuaagagaaca

SEQ ID NO: 1550861 - RNA, 19 nt, Homo sapiens
  misc_RNA (1)...(19): siRNA sense strand
gagaaggaaagauuaucaa

SEQ ID NO: 1550862 - RNA, 19 nt, Homo sapiens
  misc_RNA (1)...(19): siRNA sense strand
ccaaggacacucccaaauc

SEQ ID NO: 1550863 - RNA, 19 nt, Homo sapiens
  misc_RNA (1)...(19): siRNA sense strand
gugcggaacugaaguccau

SEQ ID NO: 1550864 - RNA, 19 nt, Homo sapiens
  misc_RNA (1)...(19): siRNA sense strand
aagcaugucuguguccaaa

SEQ ID NO: 1550865 - RNA, 19 nt, Homo sapiens
  misc_RNA (1)...(19): siRNA sense strand
ccaggagggccguguguuu

SEQ ID NO: 1550866 - RNA, 19 nt, Homo sapiens
  misc_RNA (1)...(19): siRNA sense strand
gccaauaacgggcuuguca

SEQ ID NO: 1550867 - RNA, 19 nt, Homo sapiens
  misc_RNA (1)...(19): siRNA sense strand
gacaugacgaugcaucuga

SEQ ID NO: 1550868 - RNA, 19 nt, Homo sapiens
  misc_RNA (1)...(19): siRNA sense strand
gcaagggugcggaacugaa

SEQ ID NO: 1550869 - RNA, 19 nt, Homo sapiens
  misc_RNA (1)...(19): siRNA sense strand
ccagugggauucuguacuc

SEQ ID NO: 1550870 - RNA, 19 nt, Homo sapiens
  misc_RNA (1)...(19): siRNA sense strand
gcuguucuccauuaugaaa

SEQ ID NO: 1550871 - RNA, 19 nt, Homo sapiens
  misc_RNA (1)...(19): siRNA sense strand
acacgguccugaagacgaa

SEQ ID NO: 1550872 - RNA, 19 nt, Homo sapiens
  misc_RNA (1)...(19): siRNA sense strand
guacagaauauuccaacau

SEQ ID NO: 1550873 - RNA, 19 nt, Homo sapiens
  misc_RNA (1)...(19): siRNA sense strand
aaggcugucugauuucaaa

SEQ ID NO: 1550874 - RNA, 19 nt, Homo sapiens
  misc_RNA (1)...(19): siRNA sense strand
ugacuguuccagauaauga

SEQ ID NO: 1550875 - RNA, 19 nt, Homo sapiens
  misc_RNA (1)...(19): siRNA sense strand
ugaaguccgugaacuggau

SEQ ID NO: 1550876 - RNA, 19 nt, Homo sapiens
  misc_RNA (1)...(19): siRNA sense strand
cauauucuaucgcaaucga

SEQ ID NO: 1550877 - RNA, 19 nt, Homo sapiens
  misc_RNA (1)...(19): siRNA sense strand
agacucauuugacgaggaa

SEQ ID NO: 1550878 - RNA, 19 nt, Homo sapiens
  misc_RNA (1)...(19): siRNA sense strand
gaaauacaagcaccauugc

SEQ ID NO: 1550879 - RNA, 19 nt, Homo sapiens
  misc_RNA (1)...(19): siRNA sense strand
ugucugauuucaaacucua

SEQ ID NO: 1550880 - RNA, 19 nt, Homo sapiens
  misc_RNA (1)...(19): siRNA sense strand
gggcuugagcucaguaaug

SEQ ID NO: 1550881 - RNA, 19 nt, Homo sapiens
  misc_RNA (1)...(19): siRNA sense strand
gaauaaucuggcccacuuu

SEQ ID NO: 1550882 - RNA, 19 nt, Homo sapiens
  misc_RNA (1)...(19): siRNA sense strand
gaaguacagaauauuccaa

SEQ ID NO: 1550883 - RNA, 19 nt, Homo sapiens
  misc_RNA (1)...(19): siRNA sense strand
gcaccauugcgcaaagauu

SEQ ID NO: 1550884 - RNA, 19 nt, Homo sapiens
  misc_RNA (1)...(19): siRNA sense strand
aaauuggcuuccagaaaug

SEQ ID NO: 1550885 - RNA, 19 nt, Homo sapiens
  misc_RNA (1)...(19): siRNA sense strand
aaagaaugcgugacgagaa

SEQ ID NO: 1550886 - RNA, 19 nt, Homo sapiens
  misc_RNA (1)...(19): siRNA sense strand
ggagggccguguguuucaa

SEQ ID NO: 1550887 - RNA, 19 nt, Homo sapiens
  misc_RNA (1)...(19): siRNA sense strand
uaaccuaagacgccacuau

SEQ ID NO: 1550888 - RNA, 19 nt, Homo sapiens
  misc_RNA (1)...(19): siRNA sense strand
caucugaacgcuuugaaca

SEQ ID NO: 1550889 - RNA, 19 nt, Homo sapiens
  misc_RNA (1)...(19): siRNA sense strand
gaaguccgugaacuggaua

SEQ ID NO: 1550890 - RNA, 19 nt, Homo sapiens
  misc_RNA (1)...(19): siRNA sense strand
ucauggacgugguagugaa

SEQ ID NO: 1550891 - RNA, 19 nt, Homo sapiens
  misc_RNA (1)...(19): siRNA sense strand
guucacaaccuugcucuau

SEQ ID NO: 1550892 - RNA, 19 nt, Homo sapiens
  misc_RNA (1)...(19): siRNA sense strand
ugagaaggaaagauuauca

SEQ ID NO: 1550893 - RNA, 19 nt, Homo sapiens
  misc_RNA (1)...(19): siRNA sense strand
gaagacgaaauacgacaag

SEQ ID NO: 1550894 - RNA, 19 nt, Homo sapiens
  misc_RNA (1)...(19): siRNA sense strand
caaaucgucacgcagaugu

SEQ ID NO: 1550895 - RNA, 19 nt, Homo sapiens
  misc_RNA (1)...(19): siRNA sense strand
gaacacagcugcagagaga

SEQ ID NO: 1550896 - RNA, 19 nt, Homo sapiens
  misc_RNA (1)...(19): siRNA sense strand
gagcagugauggugauuua

SEQ ID NO: 1550897 - RNA, 19 nt, Homo sapiens
  misc_RNA (1)...(19): siRNA sense strand
cauaaacacuucuguacua

SEQ ID NO: 1550898 - RNA, 19 nt, Homo sapiens
  misc_RNA (1)...(19): siRNA sense strand
gaacgaagauacucaaugc

SEQ ID NO: 1550899 - RNA, 19 nt, Homo sapiens
  misc_RNA (1)...(19): siRNA sense strand
gagagaaauucagcuguua

SEQ ID NO: 1550900 - RNA, 19 nt, Homo sapiens
  misc_RNA (1)...(19): siRNA sense strand
gaguuugacuugaauguaa

SEQ ID NO: 1550901 - RNA, 19 nt, Homo sapiens
  misc_RNA (1)...(19): siRNA sense strand
gcuuauagaugcacaauuc

SEQ ID NO: 1550902 - RNA, 19 nt, Homo sapiens
  misc_RNA (1)...(19): siRNA sense strand
gcagaaauuugauaugauc

SEQ ID NO: 1550903 - RNA, 19 nt, Homo sapiens
  misc_RNA (1)...(19): siRNA sense strand
cauguaauguuccuccuua

SEQ ID NO: 1550904 - RNA, 19 nt, Homo sapiens
  misc_RNA (1)...(19): siRNA sense strand
ggaguuauuugaaacaugu

SEQ ID NO: 1550905 - RNA, 19 nt, Homo sapiens
  misc_RNA (1)...(19): siRNA sense strand
gcaagucaccaucagauaa

SEQ ID NO: 1550906 - RNA, 19 nt, Homo sapiens
  misc_RNA (1)...(19): siRNA sense strand
uuacugggcuuucuuaaau

SEQ ID NO: 1550907 - RNA, 19 nt, Homo sapiens
  misc_RNA (1)...(19): siRNA sense strand
gaacuuaugcauaccuuga

SEQ ID NO: 1550908 - RNA, 19 nt, Homo sapiens
  misc_RNA (1)...(19): siRNA sense strand
gucuagagcugugucauua

SEQ ID NO: 1550909 - RNA, 19 nt, Homo sapiens
  misc_RNA (1)...(19): siRNA sense strand
caagagagauuugaacagu

SEQ ID NO: 1550910 - RNA, 19 nt, Homo sapiens
  misc_RNA (1)...(19): siRNA sense strand
gaccucagcuuccccauua

SEQ ID NO: 1550911 - RNA, 19 nt, Homo sapiens
  misc_RNA (1)...(19): siRNA sense strand
gcuauagucuuguauugau

SEQ ID NO: 1550912 - RNA, 19 nt, Homo sapiens
  misc_RNA (1)...(19): siRNA sense strand
ggaaaugucaguccaauac

SEQ ID NO: 1550913 - RNA, 19 nt, Homo sapiens
  misc_RNA (1)...(19): siRNA sense strand
cuacagaauuugacuggaa

SEQ ID NO: 1550914 - RNA, 19 nt, Homo sapiens
  misc_RNA (1)...(19): siRNA sense strand
uuaagcagcuauagucuug

SEQ ID NO: 1550915 - RNA, 19 nt, Homo sapiens
  misc_RNA (1)...(19): siRNA sense strand
ucagauguguuccaccuuu

SEQ ID NO: 1550916 - RNA, 19 nt, Homo sapiens
  misc_RNA (1)...(19): siRNA sense strand
uaaguugagucagcagaua

SEQ ID NO: 1550917 - RNA, 19 nt, Homo sapiens
  misc_RNA (1)...(19): siRNA sense strand
gcagauacuggaguuauuu

SEQ ID NO: 1550918 - RNA, 19 nt, Homo sapiens
  misc_RNA (1)...(19): siRNA sense strand
agagagauuugaacaguau

SEQ ID NO: 1550919 - RNA, 19 nt, Homo sapiens
  misc_RNA (1)...(19): siRNA sense strand
ucucagaacuuaugcauac

SEQ ID NO: 1550920 - RNA, 19 nt, Homo sapiens
  misc_RNA (1)...(19): siRNA sense strand
gaaagaacucugucgaaca

SEQ ID NO: 1550921 - RNA, 19 nt, Homo sapiens
  misc_RNA (1)...(19): siRNA sense strand
gagaaauucagcuguuauu

SEQ ID NO: 1550922 - RNA, 19 nt, Homo sapiens
  misc_RNA (1)...(19): siRNA sense strand
aaaucgaguucguccguua

SEQ ID NO: 1550923 - RNA, 19 nt, Homo sapiens
  misc_RNA (1)...(19): siRNA sense strand
cagcuauagucuuguauug

SEQ ID NO: 1550924 - RNA, 19 nt, Homo sapiens
  misc_RNA (1)...(19): siRNA sense strand
agagagaaauucagcuguu

SEQ ID NO: 1550925 - RNA, 19 nt, Homo sapiens
  misc_RNA (1)...(19): siRNA sense strand
ccaaaucaucaacaacaua

SEQ ID NO: 1550926 - RNA, 19 nt, Homo sapiens
  misc_RNA (1)...(19): siRNA sense strand
cguuagugcuggugauuaa

SEQ ID NO: 1550927 - RNA, 19 nt, Homo sapiens
  misc_RNA (1)...(19): siRNA sense strand
ccaaagauaaguugaguca

SEQ ID NO: 1550928 - RNA, 19 nt, Homo sapiens
  misc_RNA (1)...(19): siRNA sense strand
caagucaccaucagauaaa

SEQ ID NO: 1550929 - RNA, 19 nt, Homo sapiens
  misc_RNA (1)...(19): siRNA sense strand
ucaguuguguggaguuuga

SEQ ID NO: 1550930 - RNA, 19 nt, Homo sapiens
  misc_RNA (1)...(19): siRNA sense strand
gauuuaugccuaguuguua

SEQ ID NO: 1550931 - RNA, 19 nt, Homo sapiens
  misc_RNA (1)...(19): siRNA sense strand
ggugauuuaugccuaguug

SEQ ID NO: 1550932 - RNA, 19 nt, Homo sapiens
  misc_RNA (1)...(19): siRNA sense strand
gauauagucagauguguuc

SEQ ID NO: 1550933 - RNA, 19 nt, Homo sapiens
  misc_RNA (1)...(19): siRNA sense strand
ggaagagauuaagcgauga

SEQ ID NO: 1550934 - RNA, 19 nt, Homo sapiens
  misc_RNA (1)...(19): siRNA sense strand
caagcuccauguaauguuc

SEQ ID NO: 1550935 - RNA, 19 nt, Homo sapiens
  misc_RNA (1)...(19): siRNA sense strand
gggauaaagucaguugugu

SEQ ID NO: 1550936 - RNA, 19 nt, Homo sapiens
  misc_RNA (1)...(19): siRNA sense strand
gaagagauuaagcgaugaa

SEQ ID NO: 1550937 - RNA, 19 nt, Homo sapiens
  misc_RNA (1)...(19): siRNA sense strand
cuccuuaccucucaaagaa

SEQ ID NO: 1550938 - RNA, 19 nt, Homo sapiens
  misc_RNA (1)...(19): siRNA sense strand
gagcaaaagugccaauugu

SEQ ID NO: 1550939 - RNA, 19 nt, Homo sapiens
  misc_RNA (1)...(19): siRNA sense strand
gcagugauggugauuuaug

SEQ ID NO: 1550940 - RNA, 19 nt, Homo sapiens
  misc_RNA (1)...(19): siRNA sense strand
gcacaauucaacuuucaga

SEQ ID NO: 1550941 - RNA, 19 nt, Homo sapiens
  misc_RNA (1)...(19): siRNA sense strand
aaauuuacccagagucuuu

SEQ ID NO: 1550942 - RNA, 19 nt, Homo sapiens
  misc_RNA (1)...(19): siRNA sense strand
aagcagcuauagucuugua

SEQ ID NO: 1550943 - RNA, 19 nt, Homo sapiens
  misc_RNA (1)...(19): siRNA sense strand
cagcuguuauuuccacaaa

SEQ ID NO: 1550944 - RNA, 19 nt, Homo sapiens
  misc_RNA (1)...(19): siRNA sense strand
auacucaccuuaguccaua

SEQ ID NO: 1550945 - RNA, 19 nt, Homo sapiens
  misc_RNA (1)...(19): siRNA sense strand
cgaggaaggaagagauuaa

SEQ ID NO: 1550946 - RNA, 19 nt, Homo sapiens
  misc_RNA (1)...(19): siRNA sense strand
cuauacagcugcaccuugu

SEQ ID NO: 1550947 - RNA, 19 nt, Homo sapiens
  misc_RNA (1)...(19): siRNA sense strand
aaacaugucagcagcaaau

SEQ ID NO: 1550948 - RNA, 19 nt, Homo sapiens
  misc_RNA (1)...(19): siRNA sense strand
aagagagauuugaacagua

SEQ ID NO: 1550949 - RNA, 19 nt, Homo sapiens
  misc_RNA (1)...(19): siRNA sense strand
uaacuucuuuacccuguca

SEQ ID NO: 1550950 - RNA, 19 nt, Homo sapiens
  misc_RNA (1)...(19): siRNA sense strand
ggaguuugacuugaaugua

SEQ ID NO: 1550951 - RNA, 19 nt, Homo sapiens
  misc_RNA (1)...(19): siRNA sense strand
uaccagauauagucagaug

SEQ ID NO: 1550952 - RNA, 19 nt, Homo sapiens
  misc_RNA (1)...(19): siRNA sense strand
gaugcacaauucaacuuuc

SEQ ID NO: 1550953 - RNA, 19 nt, Homo sapiens
  misc_RNA (1)...(19): siRNA sense strand
guucagggauaaagucagu

SEQ ID NO: 1550954 - RNA, 19 nt, Homo sapiens
  misc_RNA (1)...(19): siRNA sense strand
guuggguccucuuuaaaug

SEQ ID NO: 1550955 - RNA, 19 nt, Homo sapiens
  misc_RNA (1)...(19): siRNA sense strand
gauacuggaguuauuugaa

SEQ ID NO: 1550956 - RNA, 19 nt, Homo sapiens
  misc_RNA (1)...(19): siRNA sense strand
cagcugacauauggaaaug

SEQ ID NO: 1550957 - RNA, 19 nt, Homo sapiens
  misc_RNA (1)...(19): siRNA sense strand
agucuuguauugaugguuu

SEQ ID NO: 1550958 - RNA, 19 nt, Homo sapiens
  misc_RNA (1)...(19): siRNA sense strand
gcagcuauagucuuguauu

SEQ ID NO: 1550959 - RNA, 19 nt, Homo sapiens
  misc_RNA (1)...(19): siRNA sense strand
gcaaaagugccaauuguga

SEQ ID NO: 1550960 - RNA, 19 nt, Homo sapiens
  misc_RNA (1)...(19): siRNA sense strand
aaagaacucugucgaacac

SEQ ID NO: 1550961 - RNA, 19 nt, Homo sapiens
  misc_RNA (1)...(19): siRNA sense strand
uuaaccagauagugccuuu

SEQ ID NO: 1550962 - RNA, 19 nt, Homo sapiens
  misc_RNA (1)...(19): siRNA sense strand
gaaguucagggauaaaguc

SEQ ID NO: 1550963 - RNA, 19 nt, Homo sapiens
  misc_RNA (1)...(19): siRNA sense strand
gaagcacggcauauacuca

SEQ ID NO: 1550964 - RNA, 19 nt, Homo sapiens
  misc_RNA (1)...(19): siRNA sense strand
ugaaacaugucagcagcaa

SEQ ID NO: 1550965 - RNA, 19 nt, Homo sapiens
  misc_RNA (1)...(19): siRNA sense strand
ccaccaagagccaacugua

SEQ ID NO: 1550966 - RNA, 19 nt, Homo sapiens
  misc_RNA (1)...(19): siRNA sense strand
uccaaggccugaugguauu

SEQ ID NO: 1550967 - RNA, 19 nt, Homo sapiens
  misc_RNA (1)...(19): siRNA sense strand
cuagagcugugucauuaca

SEQ ID NO: 1550968 - RNA, 19 nt, Homo sapiens
  misc_RNA (1)...(19): siRNA sense strand
ggccaaagauaaguugagu

SEQ ID NO: 1550969 - RNA, 19 nt, Homo sapiens
  misc_RNA (1)...(19): siRNA sense strand
uuuagaaccuagagaaauc

SEQ ID NO: 1550970 - RNA, 19 nt, Homo sapiens
  misc_RNA (1)...(19): siRNA sense strand
cagcagcaaauaagugauu

SEQ ID NO: 1550971 - RNA, 19 nt, Homo sapiens
  misc_RNA (1)...(19): siRNA sense strand
aagagcugcuguccugaaa

SEQ ID NO: 1550972 - RNA, 19 nt, Homo sapiens
  misc_RNA (1)...(19): siRNA sense strand
ggagaaauaaauacaucug

SEQ ID NO: 1550973 - RNA, 19 nt, Homo sapiens
  misc_RNA (1)...(19): siRNA sense strand
aaacacauuccuucucaga

SEQ ID NO: 1550974 - RNA, 19 nt, Homo sapiens
  misc_RNA (1)...(19): siRNA sense strand
gaaaugucaguccaauaca

SEQ ID NO: 1550975 - RNA, 19 nt, Homo sapiens
  misc_RNA (1)...(19): siRNA sense strand
ggcaagucaccaucagaua

SEQ ID NO: 1550976 - RNA, 19 nt, Homo sapiens
  misc_RNA (1)...(19): siRNA sense strand
guguggaguuugacuugaa

SEQ ID NO: 1550977 - RNA, 19 nt, Homo sapiens
  misc_RNA (1)...(19): siRNA sense strand
aaacacuucuguacuagac

SEQ ID NO: 1550978 - RNA, 19 nt, Homo sapiens
  misc_RNA (1)...(19): siRNA sense strand
gacugaagcacggcauaua

SEQ ID NO: 1550979 - RNA, 19 nt, Homo sapiens
  misc_RNA (1)...(19): siRNA sense strand
uugguuggguccucuuuaa

SEQ ID NO: 1550980 - RNA, 19 nt, Homo sapiens
  misc_RNA (1)...(19): siRNA sense strand
uuuaucaggugaacgaaga

SEQ ID NO: 1550981 - RNA, 19 nt, Homo sapiens
  misc_RNA (1)...(19): siRNA sense strand
ccugucaccuacuguuuau

SEQ ID NO: 1550982 - RNA, 19 nt, Homo sapiens
  misc_RNA (1)...(19): siRNA sense strand
ccagauauagucagaugug

SEQ ID NO: 1550983 - RNA, 19 nt, Homo sapiens
  misc_RNA (1)...(19): siRNA sense strand
gauuugaacaguauacuac

SEQ ID NO: 1550984 - RNA, 19 nt, Homo sapiens
  misc_RNA (1)...(19): siRNA sense strand
gcacgaaaagcagaaauuu

SEQ ID NO: 1550985 - RNA, 19 nt, Homo sapiens
  misc_RNA (1)...(19): siRNA sense strand
caucaagcuccauguaaug

SEQ ID NO: 1550986 - RNA, 19 nt, Homo sapiens
  misc_RNA (1)...(19): siRNA sense strand
gcagcugacauauggaaau

SEQ ID NO: 1550987 - RNA, 19 nt, Homo sapiens
  misc_RNA (1)...(19): siRNA sense strand
ggcauauacucaccuuagu

SEQ ID NO: 1550988 - RNA, 19 nt, Homo sapiens
  misc_RNA (1)...(19): siRNA sense strand
agaagaaccuuuugaugga

SEQ ID NO: 1550989 - RNA, 19 nt, Homo sapiens
  misc_RNA (1)...(19): siRNA sense strand
uacugggcuuucuuaaaua

SEQ ID NO: 1550990 - RNA, 19 nt, Homo sapiens
  misc_RNA (1)...(19): siRNA sense strand
uuacaaacccuaccugaac

SEQ ID NO: 1550991 - RNA, 19 nt, Homo sapiens
  misc_RNA (1)...(19): siRNA sense strand
caccuacuguuuauucaca

SEQ ID NO: 1550992 - RNA, 19 nt, Homo sapiens
  misc_RNA (1)...(19): siRNA sense strand
ugccagucgugguacuuua

SEQ ID NO: 1550993 - RNA, 19 nt, Homo sapiens
  misc_RNA (1)...(19): siRNA sense strand
gaagaaccuuuugauggaa

SEQ ID NO: 1550994 - RNA, 19 nt, Homo sapiens
  misc_RNA (1)...(19): siRNA sense strand
uaaagucauggcacagauu

SEQ ID NO: 1550995 - RNA, 19 nt, Homo sapiens
  misc_RNA (1)...(19): siRNA sense strand
gaacguggccgauucugua

SEQ ID NO: 1550996 - RNA, 19 nt, Homo sapiens
  misc_RNA (1)...(19): siRNA sense strand
ggacagugcucuccaagau

SEQ ID NO: 1550997 - RNA, 19 nt, Homo sapiens
  misc_RNA (1)...(19): siRNA sense strand
gaaauaacccaccuucaga

SEQ ID NO: 1550998 - RNA, 19 nt, Homo sapiens
  misc_RNA (1)...(19): siRNA sense strand
ccaaccagcuggauaaaga

SEQ ID NO: 1550999 - RNA, 19 nt, Homo sapiens
  misc_RNA (1)...(19): siRNA sense strand
gggaagauuucauaaacaa

SEQ ID NO: 1551000 - RNA, 19 nt, Homo sapiens
  misc_RNA (1)...(19): siRNA sense strand
ggaaggcuuugauugaaga

SEQ ID NO: 1551001 - RNA, 19 nt, Homo sapiens
  misc_RNA (1)...(19): siRNA sense strand
gauaaacccacuucaagaa

SEQ ID NO: 1551002 - RNA, 19 nt, Homo sapiens
  misc_RNA (1)...(19): siRNA sense strand
gcaccaccauguccagaaa

SEQ ID NO: 1551003 - RNA, 19 nt, Homo sapiens
  misc_RNA (1)...(19): siRNA sense strand
ggaagaaaguggccaacca

SEQ ID NO: 1551004 - RNA, 19 nt, Homo sapiens
  misc_RNA (1)...(19): siRNA sense strand
cagacuacgcucauuauua

SEQ ID NO: 1551005 - RNA, 19 nt, Homo sapiens
  misc_RNA (1)...(19): siRNA sense strand
uccaagaugucaaugauaa

SEQ ID NO: 1551006 - RNA, 19 nt, Homo sapiens
  misc_RNA (1)...(19): siRNA sense strand
gaucugcucucaccaggau

SEQ ID NO: 1551007 - RNA, 19 nt, Homo sapiens
  misc_RNA (1)...(19): siRNA sense strand
ugaagaagaccacgacaaa

SEQ ID NO: 1551008 - RNA, 19 nt, Homo sapiens
  misc_RNA (1)...(19): siRNA sense strand
aaacugcccuccucaagug

SEQ ID NO: 1551009 - RNA, 19 nt, Homo sapiens
  misc_RNA (1)...(19): siRNA sense strand
agacuacgcucauuauuac

SEQ ID NO: 1551010 - RNA, 19 nt, Homo sapiens
  misc_RNA (1)...(19): siRNA sense strand
caccaucccuucccaaguu

SEQ ID NO: 1551011 - RNA, 19 nt, Homo sapiens
  misc_RNA (1)...(19): siRNA sense strand
ccacggagcaugacuguau

SEQ ID NO: 1551012 - RNA, 19 nt, Homo sapiens
  misc_RNA (1)...(19): siRNA sense strand
ggaaauaacccaccuucag

SEQ ID NO: 1551013 - RNA, 19 nt, Homo sapiens
  misc_RNA (1)...(19): siRNA sense strand
gauuacagcuggucguauc

SEQ ID NO: 1551014 - RNA, 19 nt, Homo sapiens
  misc_RNA (1)...(19): siRNA sense strand
aagaacagauggaagaaug

SEQ ID NO: 1551015 - RNA, 19 nt, Homo sapiens
  misc_RNA (1)...(19): siRNA sense strand
ccaguugucuaacggguuu

SEQ ID NO: 1551016 - RNA, 19 nt, Homo sapiens
  misc_RNA (1)...(19): siRNA sense strand
ugaagaacguggccgauuc

SEQ ID NO: 1551017 - RNA, 19 nt, Homo sapiens
  misc_RNA (1)...(19): siRNA sense strand
gcagcagccugaacagugu

SEQ ID NO: 1551018 - RNA, 19 nt, Homo sapiens
  misc_RNA (1)...(19): siRNA sense strand
gacaaguccuccaccauuc

SEQ ID NO: 1551019 - RNA, 19 nt, Homo sapiens
  misc_RNA (1)...(19): siRNA sense strand
gaccauggacccucacaaa

SEQ ID NO: 1551020 - RNA, 19 nt, Homo sapiens
  misc_RNA (1)...(19): siRNA sense strand
cgacaaguccuccaccauu

SEQ ID NO: 1551021 - RNA, 19 nt, Homo sapiens
  misc_RNA (1)...(19): siRNA sense strand
ggccagugauugaagaaga

SEQ ID NO: 1551022 - RNA, 19 nt, Homo sapiens
  misc_RNA (1)...(19): siRNA sense strand
ggucaccucuguccaccuu

SEQ ID NO: 1551023 - RNA, 19 nt, Homo sapiens
  misc_RNA (1)...(19): siRNA sense strand
gaagaagaaaucucaaugc

SEQ ID NO: 1551024 - RNA, 19 nt, Homo sapiens
  misc_RNA (1)...(19): siRNA sense strand
cuucccaaguuucagauua

SEQ ID NO: 1551025 - RNA, 19 nt, Homo sapiens
  misc_RNA (1)...(19): siRNA sense strand
uaaacccacuucaagaaca

SEQ ID NO: 1551026 - RNA, 19 nt, Homo sapiens
  misc_RNA (1)...(19): siRNA sense strand
gauuauuucucuguaagug

SEQ ID NO: 1551027 - RNA, 19 nt, Homo sapiens
  misc_RNA (1)...(19): siRNA sense strand
ccggaaggcuuugauugaa

SEQ ID NO: 1551028 - RNA, 19 nt, Homo sapiens
  misc_RNA (1)...(19): siRNA sense strand
gccagugauugaagaagaa

SEQ ID NO: 1551029 - RNA, 19 nt, Homo sapiens
  misc_RNA (1)...(19): siRNA sense strand
gaacagauggaagaaugga

SEQ ID NO: 1551030 - RNA, 19 nt, Homo sapiens
  misc_RNA (1)...(19): siRNA sense strand
gcucauuauuacaccauug

SEQ ID NO: 1551031 - RNA, 19 nt, Homo sapiens
  misc_RNA (1)...(19): siRNA sense strand
acagugcucuccaagaugu

SEQ ID NO: 1551032 - RNA, 19 nt, Homo sapiens
  misc_RNA (1)...(19): siRNA sense strand
gauggaagaauggaagaaa

SEQ ID NO: 1551033 - RNA, 19 nt, Homo sapiens
  misc_RNA (1)...(19): siRNA sense strand
ggauaaagaccacgcaaaa

SEQ ID NO: 1551034 - RNA, 19 nt, Homo sapiens
  misc_RNA (1)...(19): siRNA sense strand
gacaggcaauuccagaaag

SEQ ID NO: 1551035 - RNA, 19 nt, Homo sapiens
  misc_RNA (1)...(19): siRNA sense strand
cuugaaagguucugauuac

SEQ ID NO: 1551036 - RNA, 19 nt, Homo sapiens
  misc_RNA (1)...(19): siRNA sense strand
uaacccaccuucagaccau

SEQ ID NO: 1551037 - RNA, 19 nt, Homo sapiens
  misc_RNA (1)...(19): siRNA sense strand
cagcaugcccuccucaaug

SEQ ID NO: 1551038 - RNA, 19 nt, Homo sapiens
  misc_RNA (1)...(19): siRNA sense strand
ugaagaagaaaucucaaug

SEQ ID NO: 1551039 - RNA, 19 nt, Homo sapiens
  misc_RNA (1)...(19): siRNA sense strand
gcgugaaacugaagaagac

SEQ ID NO: 1551040 - RNA, 19 nt, Homo sapiens
  misc_RNA (1)...(19): siRNA sense strand
caagugaacaggugauucu

SEQ ID NO: 1551041 - RNA, 19 nt, Homo sapiens
  misc_RNA (1)...(19): siRNA sense strand
cauggacccucacaaacug

SEQ ID NO: 1551042 - RNA, 19 nt, Homo sapiens
  misc_RNA (1)...(19): siRNA sense strand
ugauaaacccacuucaaga

SEQ ID NO: 1551043 - RNA, 19 nt, Homo sapiens
  misc_RNA (1)...(19): siRNA sense strand
gagcacagacaggcaauuc

SEQ ID NO: 1551044 - RNA, 19 nt, Homo sapiens
  misc_RNA (1)...(19): siRNA sense strand
agaagaaaucucaaugcua

SEQ ID NO: 1551045 - RNA, 19 nt, Homo sapiens
  misc_RNA (1)...(19): siRNA sense strand
cgcugaaacugcagaagaa

SEQ ID NO: 1551046 - RNA, 19 nt, Homo sapiens
  misc_RNA (1)...(19): siRNA sense strand
ugacauggccaccaacaca

SEQ ID NO: 1551047 - RNA, 19 nt, Homo sapiens
  misc_RNA (1)...(19): siRNA sense strand
gcacagacaggcaauucca

SEQ ID NO: 1551048 - RNA, 19 nt, Homo sapiens
  misc_RNA (1)...(19): siRNA sense strand
aagccaagcugaggcaguu

SEQ ID NO: 1551049 - RNA, 19 nt, Homo sapiens
  misc_RNA (1)...(19): siRNA sense strand
gcgcuuuaauugauugucu

SEQ ID NO: 1551050 - RNA, 19 nt, Homo sapiens
  misc_RNA (1)...(19): siRNA sense strand
ccuccaccauuccaagaaa

SEQ ID NO: 1551051 - RNA, 19 nt, Homo sapiens
  misc_RNA (1)...(19): siRNA sense strand
ucuccaagaugucaaugau

SEQ ID NO: 1551052 - RNA, 19 nt, Homo sapiens
  misc_RNA (1)...(19): siRNA sense strand
aagaagaaaucucaaugcu

SEQ ID NO: 1551053 - RNA, 19 nt, Homo sapiens
  misc_RNA (1)...(19): siRNA sense strand
cggccaagcuuccguuaac

SEQ ID NO: 1551054 - RNA, 19 nt, Homo sapiens
  misc_RNA (1)...(19): siRNA sense strand
ccaagaaacagcgacauca

SEQ ID NO: 1551055 - RNA, 19 nt, Homo sapiens
  misc_RNA (1)...(19): siRNA sense strand
ggaagaauggaagaaagug

SEQ ID NO: 1551056 - RNA, 19 nt, Homo sapiens
  misc_RNA (1)...(19): siRNA sense strand
gaagaccacgacaaacgau

SEQ ID NO: 1551057 - RNA, 19 nt, Homo sapiens
  misc_RNA (1)...(19): siRNA sense strand
agacaggcaauuccagaaa

SEQ ID NO: 1551058 - RNA, 19 nt, Homo sapiens
  misc_RNA (1)...(19): siRNA sense strand
caaacugcccuccucaagu

SEQ ID NO: 1551059 - RNA, 19 nt, Homo sapiens
  misc_RNA (1)...(19): siRNA sense strand
ggugauauccagccucagu

SEQ ID NO: 1551060 - RNA, 19 nt, Homo sapiens
  misc_RNA (1)...(19): siRNA sense strand
gaaggggcgugaaacugaa

SEQ ID NO: 1551061 - RNA, 19 nt, Homo sapiens
  misc_RNA (1)...(19): siRNA sense strand
ggccgauucuguaccuuca

SEQ ID NO: 1551062 - RNA, 19 nt, Homo sapiens
  misc_RNA (1)...(19): siRNA sense strand
auucuggacuugaaagguu

SEQ ID NO: 1551063 - RNA, 19 nt, Homo sapiens
  misc_RNA (1)...(19): siRNA sense strand
gcuauccaguuugggaaga

SEQ ID NO: 1551064 - RNA, 19 nt, Homo sapiens
  misc_RNA (1)...(19): siRNA sense strand
gaagaagaccacgacaaac

SEQ ID NO: 1551065 - RNA, 19 nt, Homo sapiens
  misc_RNA (1)...(19): siRNA sense strand
cgagcgcuuuaauugauug

SEQ ID NO: 1551066 - RNA, 19 nt, Homo sapiens
  misc_RNA (1)...(19): siRNA sense strand
cagagaccacggagcauga

SEQ ID NO: 1551067 - RNA, 19 nt, Homo sapiens
  misc_RNA (1)...(19): siRNA sense strand
gcauguucccgucaucuca

SEQ ID NO: 1551068 - RNA, 19 nt, Homo sapiens
  misc_RNA (1)...(19): siRNA sense strand
ugggaagauuucauaaaca

SEQ ID NO: 1551069 - RNA, 19 nt, Homo sapiens
  misc_RNA (1)...(19): siRNA sense strand
ggacuugaaagguucugau

SEQ ID NO: 1551070 - RNA, 19 nt, Homo sapiens
  misc_RNA (1)...(19): siRNA sense strand
uugggaagauuucauaaac

SEQ ID NO: 1551071 - RNA, 19 nt, Homo sapiens
  misc_RNA (1)...(19): siRNA sense strand
aaggggagcuauccaguuu

SEQ ID NO: 1551072 - RNA, 19 nt, Homo sapiens
  misc_RNA (1)...(19): siRNA sense strand
uccagaaagugaagcugaa

SEQ ID NO: 1551073 - RNA, 19 nt, Homo sapiens
  misc_RNA (1)...(19): siRNA sense strand
gacuugaaagguucugauu

SEQ ID NO: 1551074 - RNA, 19 nt, Homo sapiens
  misc_RNA (1)...(19): siRNA sense strand
caagaugucaaugauaagu

SEQ ID NO: 1551075 - RNA, 19 nt, Homo sapiens
  misc_RNA (1)...(19): siRNA sense strand
cggaaggcuuugauugaag

SEQ ID NO: 1551076 - RNA, 19 nt, Homo sapiens
  misc_RNA (1)...(19): siRNA sense strand
ggcgugaaacugaagaaga

SEQ ID NO: 1551077 - RNA, 19 nt, Homo sapiens
  misc_RNA (1)...(19): siRNA sense strand
gcaauuccagaaagugaag

SEQ ID NO: 1551078 - RNA, 19 nt, Homo sapiens
  misc_RNA (1)...(19): siRNA sense strand
cagcaggaguucgacaagu

SEQ ID NO: 1551079 - RNA, 19 nt, Homo sapiens
  misc_RNA (1)...(19): siRNA sense strand
uaacggguuuucucacuau

SEQ ID NO: 1551080 - RNA, 19 nt, Homo sapiens
  misc_RNA (1)...(19): siRNA sense strand
ccagacuacgcucauuauu

SEQ ID NO: 1551081 - RNA, 19 nt, Homo sapiens
  misc_RNA (1)...(19): siRNA sense strand
agcaugcccuccucaaugu

SEQ ID NO: 1551082 - RNA, 19 nt, Homo sapiens
  misc_RNA (1)...(19): siRNA sense strand
uucgagcgcuuuaauugau

SEQ ID NO: 1551083 - RNA, 19 nt, Homo sapiens
  misc_RNA (1)...(19): siRNA sense strand
acaggcaauuccagaaagu

SEQ ID NO: 1551084 - RNA, 19 nt, Homo sapiens
  misc_RNA (1)...(19): siRNA sense strand
ccaaguuucagauuaugau

SEQ ID NO: 1551085 - RNA, 19 nt, Homo sapiens
  misc_RNA (1)...(19): siRNA sense strand
uggccaaccagcuggauaa

SEQ ID NO: 1551086 - RNA, 19 nt, Homo sapiens
  misc_RNA (1)...(19): siRNA sense strand
caagaacagauggaagaau

SEQ ID NO: 1551087 - RNA, 19 nt, Homo sapiens
  misc_RNA (1)...(19): siRNA sense strand
gcuggaaggacugggcuaa

SEQ ID NO: 1551088 - RNA, 19 nt, Homo sapiens
  misc_RNA (1)...(19): siRNA sense strand
ucccaugacucaggauuca

SEQ ID NO: 1551089 - RNA, 19 nt, Homo sapiens
  misc_RNA (1)...(19): siRNA sense strand
ccauggacccucacaaacu

SEQ ID NO: 1551090 - RNA, 19 nt, Homo sapiens
  misc_RNA (1)...(19): siRNA sense strand
ucgagcgcuuuaauugauu

SEQ ID NO: 1551091 - RNA, 19 nt, Homo sapiens
  misc_RNA (1)...(19): siRNA sense strand
ucuguaccuucaucucuau

SEQ ID NO: 1551092 - RNA, 19 nt, Homo sapiens
  misc_RNA (1)...(19): siRNA sense strand
caagaaacagcgacaucag

SEQ ID NO: 1551093 - RNA, 19 nt, Homo sapiens
  misc_RNA (1)...(19): siRNA sense strand
aggcagaucagcaggaguu

SEQ ID NO: 1551094 - RNA, 19 nt, Homo sapiens
  misc_RNA (1)...(19): siRNA sense strand
acuugaaagguucugauua

SEQ ID NO: 1551095 - RNA, 19 nt, Homo sapiens
  misc_RNA (1)...(19): siRNA sense strand
ggacaucucuguuguguaa

SEQ ID NO: 1551096 - RNA, 19 nt, Homo sapiens
  misc_RNA (1)...(19): siRNA sense strand
gaaauaaggucacuucuca

SEQ ID NO: 1551097 - RNA, 19 nt, Homo sapiens
  misc_RNA (1)...(19): siRNA sense strand
gaaaggacaccaagacuua

SEQ ID NO: 1551098 - RNA, 19 nt, Homo sapiens
  misc_RNA (1)...(19): siRNA sense strand
gcucaacccuuuagcuuua

SEQ ID NO: 1551099 - RNA, 19 nt, Homo sapiens
  misc_RNA (1)...(19): siRNA sense strand
gaccauaggugaugauauu

SEQ ID NO: 1551100 - RNA, 19 nt, Homo sapiens
  misc_RNA (1)...(19): siRNA sense strand
guaaagaaaugccacagaa

SEQ ID NO: 1551101 - RNA, 19 nt, Homo sapiens
  misc_RNA (1)...(19): siRNA sense strand
ccagaggguuuguuuauuu

SEQ ID NO: 1551102 - RNA, 19 nt, Homo sapiens
  misc_RNA (1)...(19): siRNA sense strand
gggaagaccuaguauuuau

SEQ ID NO: 1551103 - RNA, 19 nt, Homo sapiens
  misc_RNA (1)...(19): siRNA sense strand
gguaguggaugaauaugua

SEQ ID NO: 1551104 - RNA, 19 nt, Homo sapiens
  misc_RNA (1)...(19): siRNA sense strand
ucagugagcucaacccuuu

SEQ ID NO: 1551105 - RNA, 19 nt, Homo sapiens
  misc_RNA (1)...(19): siRNA sense strand
aaacgaagaugucuauuuc

SEQ ID NO: 1551106 - RNA, 19 nt, Homo sapiens
  misc_RNA (1)...(19): siRNA sense strand
gauggaauccuuaacauuu

SEQ ID NO: 1551107 - RNA, 19 nt, Homo sapiens
  misc_RNA (1)...(19): siRNA sense strand
gaaaauaucucuucuaagg

SEQ ID NO: 1551108 - RNA, 19 nt, Homo sapiens
  misc_RNA (1)...(19): siRNA sense strand
gaccagcugucuuugauuu

SEQ ID NO: 1551109 - RNA, 19 nt, Homo sapiens
  misc_RNA (1)...(19): siRNA sense strand
gaacagagggccaugcuau

SEQ ID NO: 1551110 - RNA, 19 nt, Homo sapiens
  misc_RNA (1)...(19): siRNA sense strand
caccagagauccuaaagaa

SEQ ID NO: 1551111 - RNA, 19 nt, Homo sapiens
  misc_RNA (1)...(19): siRNA sense strand
caaagagacuguauggaau

SEQ ID NO: 1551112 - RNA, 19 nt, Homo sapiens
  misc_RNA (1)...(19): siRNA sense strand
ggauuucucucuauguuug

SEQ ID NO: 1551113 - RNA, 19 nt, Homo sapiens
  misc_RNA (1)...(19): siRNA sense strand
guggaaagcucaccagaga

SEQ ID NO: 1551114 - RNA, 19 nt, Homo sapiens
  misc_RNA (1)...(19): siRNA sense strand
caauauggauuucucucua

SEQ ID NO: 1551115 - RNA, 19 nt, Homo sapiens
  misc_RNA (1)...(19): siRNA sense strand
ugaaagccauuccagauga

SEQ ID NO: 1551116 - RNA, 19 nt, Homo sapiens
  misc_RNA (1)...(19): siRNA sense strand
gcaaguagaaacaaacaaa

SEQ ID NO: 1551117 - RNA, 19 nt, Homo sapiens
  misc_RNA (1)...(19): siRNA sense strand
gaagacaugaugauugaaa

SEQ ID NO: 1551118 - RNA, 19 nt, Homo sapiens
  misc_RNA (1)...(19): siRNA sense strand
aaagauaaguccacaguca

SEQ ID NO: 1551119 - RNA, 19 nt, Homo sapiens
  misc_RNA (1)...(19): siRNA sense strand
uaaggucacuucucauuuc

SEQ ID NO: 1551120 - RNA, 19 nt, Homo sapiens
  misc_RNA (1)...(19): siRNA sense strand
gaaaguagaaguccauaag

SEQ ID NO: 1551121 - RNA, 19 nt, Homo sapiens
  misc_RNA (1)...(19): siRNA sense strand
uaaugaagaccgaaagaua

SEQ ID NO: 1551122 - RNA, 19 nt, Homo sapiens
  misc_RNA (1)...(19): siRNA sense strand
ggagaacacauucaaauca

SEQ ID NO: 1551123 - RNA, 19 nt, Homo sapiens
  misc_RNA (1)...(19): siRNA sense strand
cuucgaaacucaaugcaua

SEQ ID NO: 1551124 - RNA, 19 nt, Homo sapiens
  misc_RNA (1)...(19): siRNA sense strand
ucaaagagacuguauggaa

SEQ ID NO: 1551125 - RNA, 19 nt, Homo sapiens
  misc_RNA (1)...(19): siRNA sense strand
caacugcaguggaugauuc

SEQ ID NO: 1551126 - RNA, 19 nt, Homo sapiens
  misc_RNA (1)...(19): siRNA sense strand
caaacgaagaugucuauuu

SEQ ID NO: 1551127 - RNA, 19 nt, Homo sapiens
  misc_RNA (1)...(19): siRNA sense strand
guaaggauuucugaggaua

SEQ ID NO: 1551128 - RNA, 19 nt, Homo sapiens
  misc_RNA (1)...(19): siRNA sense strand
gaaagccauuccagaugaa

SEQ ID NO: 1551129 - RNA, 19 nt, Homo sapiens
  misc_RNA (1)...(19): siRNA sense strand
gcuauuguaugccgagaaa

SEQ ID NO: 1551130 - RNA, 19 nt, Homo sapiens
  misc_RNA (1)...(19): siRNA sense strand
ggaugaauauguagaugga

SEQ ID NO: 1551131 - RNA, 19 nt, Homo sapiens
  misc_RNA (1)...(19): siRNA sense strand
cagagcagguucuuuguug

SEQ ID NO: 1551132 - RNA, 19 nt, Homo sapiens
  misc_RNA (1)...(19): siRNA sense strand
agacauaaaugguucuuca

SEQ ID NO: 1551133 - RNA, 19 nt, Homo sapiens
  misc_RNA (1)...(19): siRNA sense strand
aaagauacaugggaugauu

SEQ ID NO: 1551134 - RNA, 19 nt, Homo sapiens
  misc_RNA (1)...(19): siRNA sense strand
ggaaauauuggaauuguuc

SEQ ID NO: 1551135 - RNA, 19 nt, Homo sapiens
  misc_RNA (1)...(19): siRNA sense strand
ucgaagacaugaugauuga

SEQ ID NO: 1551136 - RNA, 19 nt, Homo sapiens
  misc_RNA (1)...(19): siRNA sense strand
caaaggaauagcaagcuua

SEQ ID NO: 1551137 - RNA, 19 nt, Homo sapiens
  misc_RNA (1)...(19): siRNA sense strand
ccagagauccuaaagaaug

SEQ ID NO: 1551138 - RNA, 19 nt, Homo sapiens
  misc_RNA (1)...(19): siRNA sense strand
caacagaagauuugcaaga

SEQ ID NO: 1551139 - RNA, 19 nt, Homo sapiens
  misc_RNA (1)...(19): siRNA sense strand
aaacagaggagcagccaua

SEQ ID NO: 1551140 - RNA, 19 nt, Homo sapiens
  misc_RNA (1)...(19): siRNA sense strand
uaaagaagaguguaacaga

SEQ ID NO: 1551141 - RNA, 19 nt, Homo sapiens
  misc_RNA (1)...(19): siRNA sense strand
gaccagagcagguucuuug

SEQ ID NO: 1551142 - RNA, 19 nt, Homo sapiens
  misc_RNA (1)...(19): siRNA sense strand
gagagugaguuacguaucu

SEQ ID NO: 1551143 - RNA, 19 nt, Homo sapiens
  misc_RNA (1)...(19): siRNA sense strand
agacaccaguucccucaua

SEQ ID NO: 1551144 - RNA, 19 nt, Homo sapiens
  misc_RNA (1)...(19): siRNA sense strand
gaacacauucaaaucaguu

SEQ ID NO: 1551145 - RNA, 19 nt, Homo sapiens
  misc_RNA (1)...(19): siRNA sense strand
gaagaccuaguauuuauuc

SEQ ID NO: 1551146 - RNA, 19 nt, Homo sapiens
  misc_RNA (1)...(19): siRNA sense strand
caaauaaugagcauggaaa

SEQ ID NO: 1551147 - RNA, 19 nt, Homo sapiens
  misc_RNA (1)...(19): siRNA sense strand
caacuagacauaaaugguu

SEQ ID NO: 1551148 - RNA, 19 nt, Homo sapiens
  misc_RNA (1)...(19): siRNA sense strand
gaggaacacuggacaucga

SEQ ID NO: 1551149 - RNA, 19 nt, Homo sapiens
  misc_RNA (1)...(19): siRNA sense strand
caaaucagagcucaacuug

SEQ ID NO: 1551150 - RNA, 19 nt, Homo sapiens
  misc_RNA (1)...(19): siRNA sense strand
gaacuuguuggagcucuua

SEQ ID NO: 1551151 - RNA, 19 nt, Homo sapiens
  misc_RNA (1)...(19): siRNA sense strand
cauaagggaagaccuagua

SEQ ID NO: 1551152 - RNA, 19 nt, Homo sapiens
  misc_RNA (1)...(19): siRNA sense strand
cagagauccuaaagaauga

SEQ ID NO: 1551153 - RNA, 19 nt, Homo sapiens
  misc_RNA (1)...(19): siRNA sense strand
gaugauauuugggaugaga

SEQ ID NO: 1551154 - RNA, 19 nt, Homo sapiens
  misc_RNA (1)...(19): siRNA sense strand
caccaagacuuacuagugu

SEQ ID NO: 1551155 - RNA, 19 nt, Homo sapiens
  misc_RNA (1)...(19): siRNA sense strand
ggaaaggacaccaagacuu

SEQ ID NO: 1551156 - RNA, 19 nt, Homo sapiens
  misc_RNA (1)...(19): siRNA sense strand
gaaccaccgaagcaaauaa

SEQ ID NO: 1551157 - RNA, 19 nt, Homo sapiens
  misc_RNA (1)...(19): siRNA sense strand
gaguauaucaucucuccua

SEQ ID NO: 1551158 - RNA, 19 nt, Homo sapiens
  misc_RNA (1)...(19): siRNA sense strand
ggaauagcaagcuuaguug

SEQ ID NO: 1551159 - RNA, 19 nt, Homo sapiens
  misc_RNA (1)...(19): siRNA sense strand
ugacacauccucaaacgaa

SEQ ID NO: 1551160 - RNA, 19 nt, Homo sapiens
  misc_RNA (1)...(19): siRNA sense strand
gaaacaggaaguugaagug

SEQ ID NO: 1551161 - RNA, 19 nt, Homo sapiens
  misc_RNA (1)...(19): siRNA sense strand
gaggguuuguuuauuucua

SEQ ID NO: 1551162 - RNA, 19 nt, Homo sapiens
  misc_RNA (1)...(19): siRNA sense strand
ggacgaucauuccaauaca

SEQ ID NO: 1551163 - RNA, 19 nt, Homo sapiens
  misc_RNA (1)...(19): siRNA sense strand
gagcucaacuuggcaaugg

SEQ ID NO: 1551164 - RNA, 19 nt, Homo sapiens
  misc_RNA (1)...(19): siRNA sense strand
ggaaagcucaccagagauc

SEQ ID NO: 1551165 - RNA, 19 nt, Homo sapiens
  misc_RNA (1)...(19): siRNA sense strand
guaaauggaacgaaaguag

SEQ ID NO: 1551166 - RNA, 19 nt, Homo sapiens
  misc_RNA (1)...(19): siRNA sense strand
gugaugauauuugggauga

SEQ ID NO: 1551167 - RNA, 19 nt, Homo sapiens
  misc_RNA (1)...(19): siRNA sense strand
uuacguaucuuggaugaga

SEQ ID NO: 1551168 - RNA, 19 nt, Homo sapiens
  misc_RNA (1)...(19): siRNA sense strand
gauaugucaugccagaaug

SEQ ID NO: 1551169 - RNA, 19 nt, Homo sapiens
  misc_RNA (1)...(19): siRNA sense strand
uaaauguaguggagacuuc

SEQ ID NO: 1551170 - RNA, 19 nt, Homo sapiens
  misc_RNA (1)...(19): siRNA sense strand
caacaacugcaguggauga

SEQ ID NO: 1551171 - RNA, 19 nt, Homo sapiens
  misc_RNA (1)...(19): siRNA sense strand
caucaugucuugagaacag

SEQ ID NO: 1551172 - RNA, 19 nt, Homo sapiens
  misc_RNA (1)...(19): siRNA sense strand
cuauggagcugguauugga

SEQ ID NO: 1551173 - RNA, 19 nt, Homo sapiens
  misc_RNA (1)...(19): siRNA sense strand
uaucaucucuccuagucaa

SEQ ID NO: 1551174 - RNA, 19 nt, Homo sapiens
  misc_RNA (1)...(19): siRNA sense strand
cuaaacugcuuggagagua

SEQ ID NO: 1551175 - RNA, 19 nt, Homo sapiens
  misc_RNA (1)...(19): siRNA sense strand
gagaacacauucaaaucag

SEQ ID NO: 1551176 - RNA, 19 nt, Homo sapiens
  misc_RNA (1)...(19): siRNA sense strand
guggagacuucaagacuga

SEQ ID NO: 1551177 - RNA, 19 nt, Homo sapiens
  misc_RNA (1)...(19): siRNA sense strand
ccaaaggaauagcaagcuu

SEQ ID NO: 1551178 - RNA, 19 nt, Homo sapiens
  misc_RNA (1)...(19): siRNA sense strand
cauaaaugguucuucagau

SEQ ID NO: 1551179 - RNA, 19 nt, Homo sapiens
  misc_RNA (1)...(19): siRNA sense strand
gcugguuucugaucgauau

SEQ ID NO: 1551180 - RNA, 19 nt, Homo sapiens
  misc_RNA (1)...(19): siRNA sense strand
gcaaauaaugagcauggaa

SEQ ID NO: 1551181 - RNA, 19 nt, Homo sapiens
  misc_RNA (1)...(19): siRNA sense strand
aagggaagaccuaguauuu

SEQ ID NO: 1551182 - RNA, 19 nt, Homo sapiens
  misc_RNA (1)...(19): siRNA sense strand
uauaucaucucuccuaguc

SEQ ID NO: 1551183 - RNA, 19 nt, Homo sapiens
  misc_RNA (1)...(19): siRNA sense strand
ggaagaccuaguauuuauu

SEQ ID NO: 1551184 - RNA, 19 nt, Homo sapiens
  misc_RNA (1)...(19): siRNA sense strand
agacaagcgucaagaaucu

SEQ ID NO: 1551185 - RNA, 19 nt, Homo sapiens
  misc_RNA (1)...(19): siRNA sense strand
aaugaagaccgaaagauaa

SEQ ID NO: 1551186 - RNA, 19 nt, Homo sapiens
  misc_RNA (1)...(19): siRNA sense strand
acaggaaguugaaguguuc

SEQ ID NO: 1551187 - RNA, 19 nt, Homo sapiens
  misc_RNA (1)...(19): siRNA sense strand
gaggauguccagcagguaa

SEQ ID NO: 1551188 - RNA, 19 nt, Homo sapiens
  misc_RNA (1)...(19): siRNA sense strand
ggcguuaucuccuguucuu

SEQ ID NO: 1551189 - RNA, 19 nt, Homo sapiens
  misc_RNA (1)...(19): siRNA sense strand
uaaacugcuuggagaguau

SEQ ID NO: 1551190 - RNA, 19 nt, Homo sapiens
  misc_RNA (1)...(19): siRNA sense strand
caaagacaagcgucaagaa

SEQ ID NO: 1551191 - RNA, 19 nt, Homo sapiens
  misc_RNA (1)...(19): siRNA sense strand
gagaacugguuaccucuac

SEQ ID NO: 1551192 - RNA, 19 nt, Homo sapiens
  misc_RNA (1)...(19): siRNA sense strand
guagauggaauccuuaaca

SEQ ID NO: 1551193 - RNA, 19 nt, Homo sapiens
  misc_RNA (1)...(19): siRNA sense strand
ugacagaacuggguuaucc

SEQ ID NO: 1551194 - RNA, 19 nt, Homo sapiens
  misc_RNA (1)...(19): siRNA sense strand
agagggccaugcuauugua

SEQ ID NO: 1551195 - RNA, 19 nt, Homo sapiens
  misc_RNA (1)...(19): siRNA sense strand
gcugggagguguuugcaaa

SEQ ID NO: 1551196 - RNA, 19 nt, Homo sapiens
  misc_RNA (1)...(19): siRNA sense strand
uggcuaagguuggacaaua

SEQ ID NO: 1551197 - RNA, 19 nt, Homo sapiens
  misc_RNA (1)...(19): siRNA sense strand
gagcacgcacgcacaacua

SEQ ID NO: 1551198 - RNA, 19 nt, Homo sapiens
  misc_RNA (1)...(19): siRNA sense strand
cuacagcaccaccaguauu

SEQ ID NO: 1551199 - RNA, 19 nt, Homo sapiens
  misc_RNA (1)...(19): siRNA sense strand
ugaaggaguggcuaagguu

SEQ ID NO: 1551200 - RNA, 19 nt, Homo sapiens
  misc_RNA (1)...(19): siRNA sense strand
gccuacagcaccaccagua

SEQ ID NO: 1551201 - RNA, 19 nt, Homo sapiens
  misc_RNA (1)...(19): siRNA sense strand
ggcuaagguuggacaauac

SEQ ID NO: 1551202 - RNA, 19 nt, Homo sapiens
  misc_RNA (1)...(19): siRNA sense strand
cggccucccuggucaagau

SEQ ID NO: 1551203 - RNA, 19 nt, Homo sapiens
  misc_RNA (1)...(19): siRNA sense strand
ggagggcugggagguguuu

SEQ ID NO: 1551204 - RNA, 19 nt, Homo sapiens
  misc_RNA (1)...(19): siRNA sense strand
uacagcaccaccaguauug

SEQ ID NO: 1551205 - RNA, 19 nt, Homo sapiens
  misc_RNA (1)...(19): siRNA sense strand
acgcacaacuacgggauug

SEQ ID NO: 1551206 - RNA, 19 nt, Homo sapiens
  misc_RNA (1)...(19): siRNA sense strand
uuucgucaguacugggaua

SEQ ID NO: 1551207 - RNA, 19 nt, Homo sapiens
  misc_RNA (1)...(19): siRNA sense strand
gaggagaacugcaccauug

SEQ ID NO: 1551208 - RNA, 19 nt, Homo sapiens
  misc_RNA (1)...(19): siRNA sense strand
caaccucacucuccagaua

SEQ ID NO: 1551209 - RNA, 19 nt, Homo sapiens
  misc_RNA (1)...(19): siRNA sense strand
gagaacaggugugagauga

SEQ ID NO: 1551210 - RNA, 19 nt, Homo sapiens
  misc_RNA (1)...(19): siRNA sense strand
caacagugccuuacauuga

SEQ ID NO: 1551211 - RNA, 19 nt, Homo sapiens
  misc_RNA (1)...(19): siRNA sense strand
gcauguggcuggugaucga

SEQ ID NO: 1551212 - RNA, 19 nt, Homo sapiens
  misc_RNA (1)...(19): siRNA sense strand
gcaggaaucaccagcuuug

SEQ ID NO: 1551213 - RNA, 19 nt, Homo sapiens
  misc_RNA (1)...(19): siRNA sense strand
ucacugcuguggcuaccua

SEQ ID NO: 1551214 - RNA, 19 nt, Homo sapiens
  misc_RNA (1)...(19): siRNA sense strand
cuacaacagugccuuacau

SEQ ID NO: 1551215 - RNA, 19 nt, Homo sapiens
  misc_RNA (1)...(19): siRNA sense strand
gagaaaccgcccuggaguu

SEQ ID NO: 1551216 - RNA, 19 nt, Homo sapiens
  misc_RNA (1)...(19): siRNA sense strand
gcugcugucuccaucuuga

SEQ ID NO: 1551217 - RNA, 19 nt, Homo sapiens
  misc_RNA (1)...(19): siRNA sense strand
ccacagggccaccagguau

SEQ ID NO: 1551218 - RNA, 19 nt, Homo sapiens
  misc_RNA (1)...(19): siRNA sense strand
gcucuacaacagugccuua

SEQ ID NO: 1551219 - RNA, 19 nt, Homo sapiens
  misc_RNA (1)...(19): siRNA sense strand
caucagcccugcccaucug

SEQ ID NO: 1551220 - RNA, 19 nt, Homo sapiens
  misc_RNA (1)...(19): siRNA sense strand
ggaggagaacugcaccauu

SEQ ID NO: 1551221 - RNA, 19 nt, Homo sapiens
  misc_RNA (1)...(19): siRNA sense strand
ggagcuguuugcugccauu

SEQ ID NO: 1551222 - RNA, 19 nt, Homo sapiens
  misc_RNA (1)...(19): siRNA sense strand
ggagaacaggugugagaug

SEQ ID NO: 1551223 - RNA, 19 nt, Homo sapiens
  misc_RNA (1)...(19): siRNA sense strand
uggaaugacucgcguugga

SEQ ID NO: 1551224 - RNA, 19 nt, Homo sapiens
  misc_RNA (1)...(19): siRNA sense strand
agacugagacacagacuug

SEQ ID NO: 1551225 - RNA, 19 nt, Homo sapiens
  misc_RNA (1)...(19): siRNA sense strand
aacagugccuuacauugaa

SEQ ID NO: 1551226 - RNA, 19 nt, Homo sapiens
  misc_RNA (1)...(19): siRNA sense strand
gcuggaggcggagcuguua

SEQ ID NO: 1551227 - RNA, 19 nt, Homo sapiens
  misc_RNA (1)...(19): siRNA sense strand
gggaggagacugagacaca

SEQ ID NO: 1551228 - RNA, 19 nt, Homo sapiens
  misc_RNA (1)...(19): siRNA sense strand
caggagaacaggugugaga

SEQ ID NO: 1551229 - RNA, 19 nt, Homo sapiens
  misc_RNA (1)...(19): siRNA sense strand
cagaagacccagucagauc

SEQ ID NO: 1551230 - RNA, 19 nt, Homo sapiens
  misc_RNA (1)...(19): siRNA sense strand
gaggccaccugucaauguc

SEQ ID NO: 1551231 - RNA, 19 nt, Homo sapiens
  misc_RNA (1)...(19): siRNA sense strand
gcuguuugcugccauuggu

SEQ ID NO: 1551232 - RNA, 19 nt, Homo sapiens
  misc_RNA (1)...(19): siRNA sense strand
gcaccugccagcugcuuuc

SEQ ID NO: 1551233 - RNA, 19 nt, Homo sapiens
  misc_RNA (1)...(19): siRNA sense strand
cgaggccaccugucaaugu

SEQ ID NO: 1551234 - RNA, 19 nt, Homo sapiens
  misc_RNA (1)...(19): siRNA sense strand
gguguugggcuggaaagaa

SEQ ID NO: 1551235 - RNA, 19 nt, Homo sapiens
  misc_RNA (1)...(19): siRNA sense strand
caucuugacacaacgaauc

SEQ ID NO: 1551236 - RNA, 19 nt, Homo sapiens
  misc_RNA (1)...(19): siRNA sense strand
gacucgcguuggagccuuu

SEQ ID NO: 1551237 - RNA, 19 nt, Homo sapiens
  misc_RNA (1)...(19): siRNA sense strand
guguugggcuggaaagaac

SEQ ID NO: 1551238 - RNA, 19 nt, Homo sapiens
  misc_RNA (1)...(19): siRNA sense strand
guaucccgcuuggucauca

SEQ ID NO: 1551239 - RNA, 19 nt, Homo sapiens
  misc_RNA (1)...(19): siRNA sense strand
acaacagugccuuacauug

SEQ ID NO: 1551240 - RNA, 19 nt, Homo sapiens
  misc_RNA (1)...(19): siRNA sense strand
cccagaagacccagucaga

SEQ ID NO: 1551241 - RNA, 19 nt, Homo sapiens
  misc_RNA (1)...(19): siRNA sense strand
gaggagacugagacacaga

SEQ ID NO: 1551242 - RNA, 19 nt, Homo sapiens
  misc_RNA (1)...(19): siRNA sense strand
aggcaggaaucaccagcuu

SEQ ID NO: 1551243 - RNA, 19 nt, Homo sapiens
  misc_RNA (1)...(19): siRNA sense strand
uacaggaaguggagcuaag

SEQ ID NO: 1551244 - RNA, 19 nt, Homo sapiens
  misc_RNA (1)...(19): siRNA sense strand
ggcaggagaacagguguga

SEQ ID NO: 1551245 - RNA, 19 nt, Homo sapiens
  misc_RNA (1)...(19): siRNA sense strand
aaucaccagcuuuggcuuu

SEQ ID NO: 1551246 - RNA, 19 nt, Homo sapiens
  misc_RNA (1)...(19): siRNA sense strand
uacaacagugccuuacauu

SEQ ID NO: 1551247 - RNA, 19 nt, Homo sapiens
  misc_RNA (1)...(19): siRNA sense strand
ccagaagacccagucagau

SEQ ID NO: 1551248 - RNA, 19 nt, Homo sapiens
  misc_RNA (1)...(19): siRNA sense strand
gggcgcuggugucugaaag

SEQ ID NO: 1551249 - RNA, 19 nt, Homo sapiens
  misc_RNA (1)...(19): siRNA sense strand
cuacaggaaguggagcuaa

SEQ ID NO: 1551250 - RNA, 19 nt, Homo sapiens
  misc_RNA (1)...(19): siRNA sense strand
gaacauggcucaucuuaua

SEQ ID NO: 1551251 - RNA, 19 nt, Homo sapiens
  misc_RNA (1)...(19): siRNA sense strand
ggacacaguucaaguaaua

SEQ ID NO: 1551252 - RNA, 19 nt, Homo sapiens
  misc_RNA (1)...(19): siRNA sense strand
ggacauggcuuuaguaauc

SEQ ID NO: 1551253 - RNA, 19 nt, Homo sapiens
  misc_RNA (1)...(19): siRNA sense strand
gaagauuccuacacuguua

SEQ ID NO: 1551254 - RNA, 19 nt, Homo sapiens
  misc_RNA (1)...(19): siRNA sense strand
gcaauauccuccaguauaa

SEQ ID NO: 1551255 - RNA, 19 nt, Homo sapiens
  misc_RNA (1)...(19): siRNA sense strand
ggaaacaacuaaugcaauu

SEQ ID NO: 1551256 - RNA, 19 nt, Homo sapiens
  misc_RNA (1)...(19): siRNA sense strand
ucacauaacuucacucaaa

SEQ ID NO: 1551257 - RNA, 19 nt, Homo sapiens
  misc_RNA (1)...(19): siRNA sense strand
gaaagcaccucauaaagga

SEQ ID NO: 1551258 - RNA, 19 nt, Homo sapiens
  misc_RNA (1)...(19): siRNA sense strand
ggaugaaccuugucaaauu

SEQ ID NO: 1551259 - RNA, 19 nt, Homo sapiens
  misc_RNA (1)...(19): siRNA sense strand
ggaagaagacuauguaauu

SEQ ID NO: 1551260 - RNA, 19 nt, Homo sapiens
  misc_RNA (1)...(19): siRNA sense strand
gaugaaccuugucaaauua

SEQ ID NO: 1551261 - RNA, 19 nt, Homo sapiens
  misc_RNA (1)...(19): siRNA sense strand
gaagaguucuacuuuguuu

SEQ ID NO: 1551262 - RNA, 19 nt, Homo sapiens
  misc_RNA (1)...(19): siRNA sense strand
acagauggcucucaaauaa

SEQ ID NO: 1551263 - RNA, 19 nt, Homo sapiens
  misc_RNA (1)...(19): siRNA sense strand
ggauuuggcuuuaaugaaa

SEQ ID NO: 1551264 - RNA, 19 nt, Homo sapiens
  misc_RNA (1)...(19): siRNA sense strand
gaagaaggauuuguuguga

SEQ ID NO: 1551265 - RNA, 19 nt, Homo sapiens
  misc_RNA (1)...(19): siRNA sense strand
ggacaaauguuucucuuca

SEQ ID NO: 1551266 - RNA, 19 nt, Homo sapiens
  misc_RNA (1)...(19): siRNA sense strand
gaaacaagaaguaucguua

SEQ ID NO: 1551267 - RNA, 19 nt, Homo sapiens
  misc_RNA (1)...(19): siRNA sense strand
ucacauaucuggccugauu

SEQ ID NO: 1551268 - RNA, 19 nt, Homo sapiens
  misc_RNA (1)...(19): siRNA sense strand
gaaaugaacucacacaaaa

SEQ ID NO: 1551269 - RNA, 19 nt, Homo sapiens
  misc_RNA (1)...(19): siRNA sense strand
gcacaagcauuauuccauu

SEQ ID NO: 1551270 - RNA, 19 nt, Homo sapiens
  misc_RNA (1)...(19): siRNA sense strand
gcaacaaggcugacuauaa

SEQ ID NO: 1551271 - RNA, 19 nt, Homo sapiens
  misc_RNA (1)...(19): siRNA sense strand
caaaucacauuaacuggua

SEQ ID NO: 1551272 - RNA, 19 nt, Homo sapiens
  misc_RNA (1)...(19): siRNA sense strand
gaacugaaaucaccauaag

SEQ ID NO: 1551273 - RNA, 19 nt, Homo sapiens
  misc_RNA (1)...(19): siRNA sense strand
ggaaacaacuggacuuaca

SEQ ID NO: 1551274 - RNA, 19 nt, Homo sapiens
  misc_RNA (1)...(19): siRNA sense strand
caacaaggcugacuauaag

SEQ ID NO: 1551275 - RNA, 19 nt, Homo sapiens
  misc_RNA (1)...(19): siRNA sense strand
ggaaguagcccuggguuua

SEQ ID NO: 1551276 - RNA, 19 nt, Homo sapiens
  misc_RNA (1)...(19): siRNA sense strand
gaaccuaccagaugcuuua

SEQ ID NO: 1551277 - RNA, 19 nt, Homo sapiens
  misc_RNA (1)...(19): siRNA sense strand
gaaggaacauggauuguag

SEQ ID NO: 1551278 - RNA, 19 nt, Homo sapiens
  misc_RNA (1)...(19): siRNA sense strand
cagaaacacugugaacuua

SEQ ID NO: 1551279 - RNA, 19 nt, Homo sapiens
  misc_RNA (1)...(19): siRNA sense strand
gggaaacagugugcaauua

SEQ ID NO: 1551280 - RNA, 19 nt, Homo sapiens
  misc_RNA (1)...(19): siRNA sense strand
gaauguggcucuuggaaau

SEQ ID NO: 1551281 - RNA, 19 nt, Homo sapiens
  misc_RNA (1)...(19): siRNA sense strand
agacauagauggcuccuuu

SEQ ID NO: 1551282 - RNA, 19 nt, Homo sapiens
  misc_RNA (1)...(19): siRNA sense strand
gcucugauguccuaacuaa

SEQ ID NO: 1551283 - RNA, 19 nt, Homo sapiens
  misc_RNA (1)...(19): siRNA sense strand
gaaauacacugggacaaau

SEQ ID NO: 1551284 - RNA, 19 nt, Homo sapiens
  misc_RNA (1)...(19): siRNA sense strand
guaccagucuucugaauga

SEQ ID NO: 1551285 - RNA, 19 nt, Homo sapiens
  misc_RNA (1)...(19): siRNA sense strand
caacucaaauuacaugcua

SEQ ID NO: 1551286 - RNA, 19 nt, Homo sapiens
  misc_RNA (1)...(19): siRNA sense strand
ggaaaugcaagaauaagua

SEQ ID NO: 1551287 - RNA, 19 nt, Homo sapiens
  misc_RNA (1)...(19): siRNA sense strand
ggaaaucuccgugaugaua

SEQ ID NO: 1551288 - RNA, 19 nt, Homo sapiens
  misc_RNA (1)...(19): siRNA sense strand
ggagaggccugaagcuuga

SEQ ID NO: 1551289 - RNA, 19 nt, Homo sapiens
  misc_RNA (1)...(19): siRNA sense strand
ggacacacaucuacaaucu

SEQ ID NO: 1551290 - RNA, 19 nt, Homo sapiens
  misc_RNA (1)...(19): siRNA sense strand
ggaaauugcugguucucuu

SEQ ID NO: 1551291 - RNA, 19 nt, Homo sapiens
  misc_RNA (1)...(19): siRNA sense strand
gagaagagauugugauaac

SEQ ID NO: 1551292 - RNA, 19 nt, Homo sapiens
  misc_RNA (1)...(19): siRNA sense strand
caacaucacugcucuugug

SEQ ID NO: 1551293 - RNA, 19 nt, Homo sapiens
  misc_RNA (1)...(19): siRNA sense strand
gcaagucauucaacucaaa

SEQ ID NO: 1551294 - RNA, 19 nt, Homo sapiens
  misc_RNA (1)...(19): siRNA sense strand
cgacugauguugcuuaaug

SEQ ID NO: 1551295 - RNA, 19 nt, Homo sapiens
  misc_RNA (1)...(19): siRNA sense strand
ggauauacaugccagagaa

SEQ ID NO: 1551296 - RNA, 19 nt, Homo sapiens
  misc_RNA (1)...(19): siRNA sense strand
gaaccuaucagaacagaaa

SEQ ID NO: 1551297 - RNA, 19 nt, Homo sapiens
  misc_RNA (1)...(19): siRNA sense strand
gauuguagcugacauagau

SEQ ID NO: 1551298 - RNA, 19 nt, Homo sapiens
  misc_RNA (1)...(19): siRNA sense strand
caccauagcugaagccaaa

SEQ ID NO: 1551299 - RNA, 19 nt, Homo sapiens
  misc_RNA (1)...(19): siRNA sense strand
aagcaucacuccuuacaua

SEQ ID NO: 1551300 - RNA, 19 nt, Homo sapiens
  misc_RNA (1)...(19): siRNA sense strand
gauaggcgauuuguacuuu

SEQ ID NO: 1551301 - RNA, 19 nt, Homo sapiens
  misc_RNA (1)...(19): siRNA sense strand
cauguucacuuuaccaaua

SEQ ID NO: 1551302 - RNA, 19 nt, Homo sapiens
  misc_RNA (1)...(19): siRNA sense strand
gauauggguucuaugguuu

SEQ ID NO: 1551303 - RNA, 19 nt, Homo sapiens
  misc_RNA (1)...(19): siRNA sense strand
caucucagguucaacauuu

SEQ ID NO: 1551304 - RNA, 19 nt, Homo sapiens
  misc_RNA (1)...(19): siRNA sense strand
gcacugcuaucaauacguu

SEQ ID NO: 1551305 - RNA, 19 nt, Homo sapiens
  misc_RNA (1)...(19): siRNA sense strand
gaacgaguuugucuacaga

SEQ ID NO: 1551306 - RNA, 19 nt, Homo sapiens
  misc_RNA (1)...(19): siRNA sense strand
gaaacagugugcaauuaau

SEQ ID NO: 1551307 - RNA, 19 nt, Homo sapiens
  misc_RNA (1)...(19): siRNA sense strand
gaaacacugugaacuuaau

SEQ ID NO: 1551308 - RNA, 19 nt, Homo sapiens
  misc_RNA (1)...(19): siRNA sense strand
caaccagccuucuccagua

SEQ ID NO: 1551309 - RNA, 19 nt, Homo sapiens
  misc_RNA (1)...(19): siRNA sense strand
caaaggacauaccgucauu

SEQ ID NO: 1551310 - RNA, 19 nt, Homo sapiens
  misc_RNA (1)...(19): siRNA sense strand
gcaccugcuuggagacuua

SEQ ID NO: 1551311 - RNA, 19 nt, Homo sapiens
  misc_RNA (1)...(19): siRNA sense strand
caaaugugauguugaguau

SEQ ID NO: 1551312 - RNA, 19 nt, Homo sapiens
  misc_RNA (1)...(19): siRNA sense strand
ggaaaugaacucacacaaa

SEQ ID NO: 1551313 - RNA, 19 nt, Homo sapiens
  misc_RNA (1)...(19): siRNA sense strand
gggaugggaucgcuucuaa

SEQ ID NO: 1551314 - RNA, 19 nt, Homo sapiens
  misc_RNA (1)...(19): siRNA sense strand
gaaguaauauugcacuaag

SEQ ID NO: 1551315 - RNA, 19 nt, Homo sapiens
  misc_RNA (1)...(19): siRNA sense strand
gaagauaaggugaggauug

SEQ ID NO: 1551316 - RNA, 19 nt, Homo sapiens
  misc_RNA (1)...(19): siRNA sense strand
cagagagugugcacauuua

SEQ ID NO: 1551317 - RNA, 19 nt, Homo sapiens
  misc_RNA (1)...(19): siRNA sense strand
guaagaggcugugcaauuc

SEQ ID NO: 1551318 - RNA, 19 nt, Homo sapiens
  misc_RNA (1)...(19): siRNA sense strand
ggagauaacauuguaauug

SEQ ID NO: 1551319 - RNA, 19 nt, Homo sapiens
  misc_RNA (1)...(19): siRNA sense strand
gguauuaguuggaaaugaa

SEQ ID NO: 1551320 - RNA, 19 nt, Homo sapiens
  misc_RNA (1)...(19): siRNA sense strand
gaagaaaugguuagcacua

SEQ ID NO: 1551321 - RNA, 19 nt, Homo sapiens
  misc_RNA (1)...(19): siRNA sense strand
uggaagagauacuggaaua

SEQ ID NO: 1551322 - RNA, 19 nt, Homo sapiens
  misc_RNA (1)...(19): siRNA sense strand
gcagggagguagauuaauc

SEQ ID NO: 1551323 - RNA, 19 nt, Homo sapiens
  misc_RNA (1)...(19): siRNA sense strand
aauaggaagugaccaauuu

SEQ ID NO: 1551324 - RNA, 19 nt, Homo sapiens
  misc_RNA (1)...(19): siRNA sense strand
gagcaagccugugaaguga

SEQ ID NO: 1551325 - RNA, 19 nt, Homo sapiens
  misc_RNA (1)...(19): siRNA sense strand
uagaaagcaucacuccuua

SEQ ID NO: 1551326 - RNA, 19 nt, Homo sapiens
  misc_RNA (1)...(19): siRNA sense strand
gggauaggauauaggauuu

SEQ ID NO: 1551327 - RNA, 19 nt, Homo sapiens
  misc_RNA (1)...(19): siRNA sense strand
gaacuucacagauauuaga

SEQ ID NO: 1551328 - RNA, 19 nt, Homo sapiens
  misc_RNA (1)...(19): siRNA sense strand
cauaguggguucuggauuu

SEQ ID NO: 1551329 - RNA, 19 nt, Homo sapiens
  misc_RNA (1)...(19): siRNA sense strand
aaaggaagguggcuuauuc

SEQ ID NO: 1551330 - RNA, 19 nt, Homo sapiens
  misc_RNA (1)...(19): siRNA sense strand
gauaaaggaagguggcuua

SEQ ID NO: 1551331 - RNA, 19 nt, Homo sapiens
  misc_RNA (1)...(19): siRNA sense strand
cagcagauguuaaaccaaa

SEQ ID NO: 1551332 - RNA, 19 nt, Homo sapiens
  misc_RNA (1)...(19): siRNA sense strand
gcuaauucauguucacuuu

SEQ ID NO: 1551333 - RNA, 19 nt, Homo sapiens
  misc_RNA (1)...(19): siRNA sense strand
ggaaacagugugcaauuaa

SEQ ID NO: 1551334 - RNA, 19 nt, Homo sapiens
  misc_RNA (1)...(19): siRNA sense strand
uaagaagcaucacaccuuu

SEQ ID NO: 1551335 - RNA, 19 nt, Homo sapiens
  misc_RNA (1)...(19): siRNA sense strand
uaaaggaacuauaccuguu

SEQ ID NO: 1551336 - RNA, 19 nt, Homo sapiens
  misc_RNA (1)...(19): siRNA sense strand
aaacuaagcucucagaaac

SEQ ID NO: 1551337 - RNA, 19 nt, Homo sapiens
  misc_RNA (1)...(19): siRNA sense strand
gaaaucauacuacacaaga

SEQ ID NO: 1551338 - RNA, 19 nt, Homo sapiens
  misc_RNA (1)...(19): siRNA sense strand
aaaggagacuuaaagauug

SEQ ID NO: 1551339 - RNA, 19 nt, Homo sapiens
  misc_RNA (1)...(19): siRNA sense strand
gauuauaccugaaggaaca

SEQ ID NO: 1551340 - RNA, 19 nt, Homo sapiens
  misc_RNA (1)...(19): siRNA sense strand
gauccuggcuccuuauguu

SEQ ID NO: 1551341 - RNA, 19 nt, Homo sapiens
  misc_RNA (1)...(19): siRNA sense strand
gcauagaccuucuggaucu

SEQ ID NO: 1551342 - RNA, 19 nt, Homo sapiens
  misc_RNA (1)...(19): siRNA sense strand
gacaauagcaagauuacua

SEQ ID NO: 1551343 - RNA, 19 nt, Homo sapiens
  misc_RNA (1)...(19): siRNA sense strand
ucaauacguuguccaauga

SEQ ID NO: 1551344 - RNA, 19 nt, Homo sapiens
  misc_RNA (1)...(19): siRNA sense strand
gauggaauaugcaaugaug

SEQ ID NO: 1551345 - RNA, 19 nt, Homo sapiens
  misc_RNA (1)...(19): siRNA sense strand
gagaagaaauaggaaguga

SEQ ID NO: 1551346 - RNA, 19 nt, Homo sapiens
  misc_RNA (1)...(19): siRNA sense strand
agaaggaucucuuguuguu

SEQ ID NO: 1551347 - RNA, 19 nt, Homo sapiens
  misc_RNA (1)...(19): siRNA sense strand
ggacauugcuguuuucauu

SEQ ID NO: 1551348 - RNA, 19 nt, Homo sapiens
  misc_RNA (1)...(19): siRNA sense strand
uaacaggagucuucccaaa

SEQ ID NO: 1551349 - RNA, 19 nt, Homo sapiens
  misc_RNA (1)...(19): siRNA sense strand
gaauaugcaaugaugguua

SEQ ID NO: 1551350 - RNA, 19 nt, Homo sapiens
  misc_RNA (1)...(19): siRNA sense strand
gaagagaaaugaagaauga

SEQ ID NO: 1551351 - RNA, 19 nt, Homo sapiens
  misc_RNA (1)...(19): siRNA sense strand
caaaucaucuucagcaaug

SEQ ID NO: 1551352 - RNA, 19 nt, Homo sapiens
  misc_RNA (1)...(19): siRNA sense strand
gcagauugcuccuaccaaa

SEQ ID NO: 1551353 - RNA, 19 nt, Homo sapiens
  misc_RNA (1)...(19): siRNA sense strand
gagcugaccugcaguacaa

SEQ ID NO: 1551354 - RNA, 19 nt, Homo sapiens
  misc_RNA (1)...(19): siRNA sense strand
ggaacugaauacuugauuu

SEQ ID NO: 1551355 - RNA, 19 nt, Homo sapiens
  misc_RNA (1)...(19): siRNA sense strand
gaugcauucuccaugauua

SEQ ID NO: 1551356 - RNA, 19 nt, Homo sapiens
  misc_RNA (1)...(19): siRNA sense strand
gaaguacacugcaacacau

SEQ ID NO: 1551357 - RNA, 19 nt, Homo sapiens
  misc_RNA (1)...(19): siRNA sense strand
ucacauguggcaucaauua

SEQ ID NO: 1551358 - RNA, 19 nt, Homo sapiens
  misc_RNA (1)...(19): siRNA sense strand
gauugaagcuuacuuucug

SEQ ID NO: 1551359 - RNA, 19 nt, Homo sapiens
  misc_RNA (1)...(19): siRNA sense strand
caaaucacccagucaguaa

SEQ ID NO: 1551360 - RNA, 19 nt, Homo sapiens
  misc_RNA (1)...(19): siRNA sense strand
uuacagcacugaccucuau

SEQ ID NO: 1551361 - RNA, 19 nt, Homo sapiens
  misc_RNA (1)...(19): siRNA sense strand
ugggugacauauucaauua

SEQ ID NO: 1551362 - RNA, 19 nt, Homo sapiens
  misc_RNA (1)...(19): siRNA sense strand
gaacugaauacuugauuuc

SEQ ID NO: 1551363 - RNA, 19 nt, Homo sapiens
  misc_RNA (1)...(19): siRNA sense strand
cuaaugaugaugcuacuua

SEQ ID NO: 1551364 - RNA, 19 nt, Homo sapiens
  misc_RNA (1)...(19): siRNA sense strand
gaagagugacgauccaaga

SEQ ID NO: 1551365 - RNA, 19 nt, Homo sapiens
  misc_RNA (1)...(19): siRNA sense strand
aacgugagcuggacuauug

SEQ ID NO: 1551366 - RNA, 19 nt, Homo sapiens
  misc_RNA (1)...(19): siRNA sense strand
gaugauggcuuggaaguac

SEQ ID NO: 1551367 - RNA, 19 nt, Homo sapiens
  misc_RNA (1)...(19): siRNA sense strand
gaaguccgaggcagcaaua

SEQ ID NO: 1551368 - RNA, 19 nt, Homo sapiens
  misc_RNA (1)...(19): siRNA sense strand
gcagcaauaugucauguac

SEQ ID NO: 1551369 - RNA, 19 nt, Homo sapiens
  misc_RNA (1)...(19): siRNA sense strand
guguggaacugaauacuug

SEQ ID NO: 1551370 - RNA, 19 nt, Homo sapiens
  misc_RNA (1)...(19): siRNA sense strand
ugacuacuauguggucuuu

SEQ ID NO: 1551371 - RNA, 19 nt, Homo sapiens
  misc_RNA (1)...(19): siRNA sense strand
ggaaguacacugcaacaca

SEQ ID NO: 1551372 - RNA, 19 nt, Homo sapiens
  misc_RNA (1)...(19): siRNA sense strand
gagugacgauccaagaaga

SEQ ID NO: 1551373 - RNA, 19 nt, Homo sapiens
  misc_RNA (1)...(19): siRNA sense strand
caucacauguggcaucaau

SEQ ID NO: 1551374 - RNA, 19 nt, Homo sapiens
  misc_RNA (1)...(19): siRNA sense strand
ucaaacccauguugcaguu

SEQ ID NO: 1551375 - RNA, 19 nt, Homo sapiens
  misc_RNA (1)...(19): siRNA sense strand
ucaaaucacccagucagua

SEQ ID NO: 1551376 - RNA, 19 nt, Homo sapiens
  misc_RNA (1)...(19): siRNA sense strand
ggaagagaaaugaagaaug

SEQ ID NO: 1551377 - RNA, 19 nt, Homo sapiens
  misc_RNA (1)...(19): siRNA sense strand
caauuacacagugacauua

SEQ ID NO: 1551378 - RNA, 19 nt, Homo sapiens
  misc_RNA (1)...(19): siRNA sense strand
gcaaaucaucuucagcaau

SEQ ID NO: 1551379 - RNA, 19 nt, Homo sapiens
  misc_RNA (1)...(19): siRNA sense strand
cacuuggaauggugauuua

SEQ ID NO: 1551380 - RNA, 19 nt, Homo sapiens
  misc_RNA (1)...(19): siRNA sense strand
aaaacaggauugaagcuua

SEQ ID NO: 1551381 - RNA, 19 nt, Homo sapiens
  misc_RNA (1)...(19): siRNA sense strand
ggucugacaguaacucaaa

SEQ ID NO: 1551382 - RNA, 19 nt, Homo sapiens
  misc_RNA (1)...(19): siRNA sense strand
ucaguaacuugcucuggaa

SEQ ID NO: 1551383 - RNA, 19 nt, Homo sapiens
  misc_RNA (1)...(19): siRNA sense strand
caacaucacaguguauuca

SEQ ID NO: 1551384 - RNA, 19 nt, Homo sapiens
  misc_RNA (1)...(19): siRNA sense strand
ucaauuacacagugacauu

SEQ ID NO: 1551385 - RNA, 19 nt, Homo sapiens
  misc_RNA (1)...(19): siRNA sense strand
cuaccaaaguuauuucucu

SEQ ID NO: 1551386 - RNA, 19 nt, Homo sapiens
  misc_RNA (1)...(19): siRNA sense strand
gagugaugauggcuuggaa

SEQ ID NO: 1551387 - RNA, 19 nt, Homo sapiens
  misc_RNA (1)...(19): siRNA sense strand
cacaguguauucauucaau

SEQ ID NO: 1551388 - RNA, 19 nt, Homo sapiens
  misc_RNA (1)...(19): siRNA sense strand
ugaccucuauggcuccaaa

SEQ ID NO: 1551389 - RNA, 19 nt, Homo sapiens
  misc_RNA (1)...(19): siRNA sense strand
ggccucaguuucugugaug

SEQ ID NO: 1551390 - RNA, 19 nt, Homo sapiens
  misc_RNA (1)...(19): siRNA sense strand
uaacaaggcagggcaaagu

SEQ ID NO: 1551391 - RNA, 19 nt, Homo sapiens
  misc_RNA (1)...(19): siRNA sense strand
gagggaagagaaaugaaga

SEQ ID NO: 1551392 - RNA, 19 nt, Homo sapiens
  misc_RNA (1)...(19): siRNA sense strand
ggaauggugauuuauagag

SEQ ID NO: 1551393 - RNA, 19 nt, Homo sapiens
  misc_RNA (1)...(19): siRNA sense strand
aaacaggauugaagcuuac

SEQ ID NO: 1551394 - RNA, 19 nt, Homo sapiens
  misc_RNA (1)...(19): siRNA sense strand
caaccggucugacaguaac

SEQ ID NO: 1551395 - RNA, 19 nt, Homo sapiens
  misc_RNA (1)...(19): siRNA sense strand
guaaugaugcuggaucuag

SEQ ID NO: 1551396 - RNA, 19 nt, Homo sapiens
  misc_RNA (1)...(19): siRNA sense strand
ggauugaagcuuacuuucu

SEQ ID NO: 1551397 - RNA, 19 nt, Homo sapiens
  misc_RNA (1)...(19): siRNA sense strand
ggauguauacacugugaug

SEQ ID NO: 1551398 - RNA, 19 nt, Homo sapiens
  misc_RNA (1)...(19): siRNA sense strand
gcuccuaccaaaguuauuu

SEQ ID NO: 1551399 - RNA, 19 nt, Homo sapiens
  misc_RNA (1)...(19): siRNA sense strand
gugccgaacuguaugaaac

SEQ ID NO: 1551400 - RNA, 19 nt, Homo sapiens
  misc_RNA (1)...(19): siRNA sense strand
ggucucaccaguugcuaaa

SEQ ID NO: 1551401 - RNA, 19 nt, Homo sapiens
  misc_RNA (1)...(19): siRNA sense strand
gcgauccacuaaugaugau

SEQ ID NO: 1551402 - RNA, 19 nt, Homo sapiens
  misc_RNA (1)...(19): siRNA sense strand
gcaaugacccugaaaacug

SEQ ID NO: 1551403 - RNA, 19 nt, Homo sapiens
  misc_RNA (1)...(19): siRNA sense strand
ggcaucaauuacacaguga

SEQ ID NO: 1551404 - RNA, 19 nt, Homo sapiens
  misc_RNA (1)...(19): siRNA sense strand
ggaugcauucuccaugauu

SEQ ID NO: 1551405 - RNA, 19 nt, Homo sapiens
  misc_RNA (1)...(19): siRNA sense strand
aagcuuacuuucuguccaa

SEQ ID NO: 1551406 - RNA, 19 nt, Homo sapiens
  misc_RNA (1)...(19): siRNA sense strand
caggauugaagcuuacuuu

SEQ ID NO: 1551407 - RNA, 19 nt, Homo sapiens
  misc_RNA (1)...(19): siRNA sense strand
cuaauggcauccggaucua

SEQ ID NO: 1551408 - RNA, 19 nt, Homo sapiens
  misc_RNA (1)...(19): siRNA sense strand
gaccugcaguacaacuuuc

SEQ ID NO: 1551409 - RNA, 19 nt, Homo sapiens
  misc_RNA (1)...(19): siRNA sense strand
gacaccaaguacaacauca

SEQ ID NO: 1551410 - RNA, 19 nt, Homo sapiens
  misc_RNA (1)...(19): siRNA sense strand
ggaucuagcaaaucaucuu

SEQ ID NO: 1551411 - RNA, 19 nt, Homo sapiens
  misc_RNA (1)...(19): siRNA sense strand
gggaugcauucuccaugau

SEQ ID NO: 1551412 - RNA, 19 nt, Homo sapiens
  misc_RNA (1)...(19): siRNA sense strand
agggaugcauucuccauga

SEQ ID NO: 1551413 - RNA, 19 nt, Homo sapiens
  misc_RNA (1)...(19): siRNA sense strand
caucacaguguauucauuc

SEQ ID NO: 1551414 - RNA, 19 nt, Homo sapiens
  misc_RNA (1)...(19): siRNA sense strand
gcaacacaucucucacuca

SEQ ID NO: 1551415 - RNA, 19 nt, Homo sapiens
  misc_RNA (1)...(19): siRNA sense strand
ggcgauccacuaaugauga

SEQ ID NO: 1551416 - RNA, 19 nt, Homo sapiens
  misc_RNA (1)...(19): siRNA sense strand
gugacagaguugagauugu

SEQ ID NO: 1551417 - RNA, 19 nt, Homo sapiens
  misc_RNA (1)...(19): siRNA sense strand
gauugcuccuaccaaaguu

SEQ ID NO: 1551418 - RNA, 19 nt, Homo sapiens
  misc_RNA (1)...(19): siRNA sense strand
gggagaaaggacuguauca

SEQ ID NO: 1551419 - RNA, 19 nt, Homo sapiens
  misc_RNA (1)...(19): siRNA sense strand
ccaaguacaacaucacagu

SEQ ID NO: 1551420 - RNA, 19 nt, Homo sapiens
  misc_RNA (1)...(19): siRNA sense strand
agaucugggugacuacuau

SEQ ID NO: 1551421 - RNA, 19 nt, Homo sapiens
  misc_RNA (1)...(19): siRNA sense strand
gggaagagaaaugaagaau

SEQ ID NO: 1551422 - RNA, 19 nt, Homo sapiens
  misc_RNA (1)...(19): siRNA sense strand
caacgugagcuggacuauu

SEQ ID NO: 1551423 - RNA, 19 nt, Homo sapiens
  misc_RNA (1)...(19): siRNA sense strand
cacuggcgauccacuaaug

SEQ ID NO: 1551424 - RNA, 19 nt, Homo sapiens
  misc_RNA (1)...(19): siRNA sense strand
acaucacaguguauucauu

SEQ ID NO: 1551425 - RNA, 19 nt, Homo sapiens
  misc_RNA (1)...(19): siRNA sense strand
caacuucuuaucugagugu

SEQ ID NO: 1551426 - RNA, 19 nt, Homo sapiens
  misc_RNA (1)...(19): siRNA sense strand
gcuuggaaguacacugcaa

SEQ ID NO: 1551427 - RNA, 19 nt, Homo sapiens
  misc_RNA (1)...(19): siRNA sense strand
uuggaauggugauuuauag

SEQ ID NO: 1551428 - RNA, 19 nt, Homo sapiens
  misc_RNA (1)...(19): siRNA sense strand
acacuuggaauggugauuu

SEQ ID NO: 1551429 - RNA, 19 nt, Homo sapiens
  misc_RNA (1)...(19): siRNA sense strand
gaucuagcaaaucaucuuc

SEQ ID NO: 1551430 - RNA, 19 nt, Homo sapiens
  misc_RNA (1)...(19): siRNA sense strand
gcacuggcgauccacuaau

SEQ ID NO: 1551431 - RNA, 19 nt, Homo sapiens
  misc_RNA (1)...(19): siRNA sense strand
uccuugcaguccugaaaua

SEQ ID NO: 1551432 - RNA, 19 nt, Homo sapiens
  misc_RNA (1)...(19): siRNA sense strand
uuucggcucuagaguguga

SEQ ID NO: 1551433 - RNA, 19 nt, Homo sapiens
  misc_RNA (1)...(19): siRNA sense strand
cagugcaacuucuuaucug

SEQ ID NO: 1551434 - RNA, 19 nt, Homo sapiens
  misc_RNA (1)...(19): siRNA sense strand
cgagugcuggccucaguuu

SEQ ID NO: 1551435 - RNA, 19 nt, Homo sapiens
  misc_RNA (1)...(19): siRNA sense strand
ugaccugcaguacaacuuu

SEQ ID NO: 1551436 - RNA, 19 nt, Homo sapiens
  misc_RNA (1)...(19): siRNA sense strand
ccaaccggucugacaguaa

SEQ ID NO: 1551437 - RNA, 19 nt, Homo sapiens
  misc_RNA (1)...(19): siRNA sense strand
uaaugaugaugcuacuuac

SEQ ID NO: 1551438 - RNA, 19 nt, Homo sapiens
  misc_RNA (1)...(19): siRNA sense strand
gaaaccaaggcuguagaug

SEQ ID NO: 1551439 - RNA, 19 nt, Homo sapiens
  misc_RNA (1)...(19): siRNA sense strand
guaugaaaccaaggcugua

SEQ ID NO: 1551440 - RNA, 19 nt, Homo sapiens
  misc_RNA (1)...(19): siRNA sense strand
cuuggaauggugauuuaua

SEQ ID NO: 1551441 - RNA, 19 nt, Homo sapiens
  misc_RNA (1)...(19): siRNA sense strand
caaugacccugaaaacugu

SEQ ID NO: 1551442 - RNA, 19 nt, Homo sapiens
  misc_RNA (1)...(19): siRNA sense strand
gcuccuugcaguccugaaa

SEQ ID NO: 1551443 - RNA, 19 nt, Homo sapiens
  misc_RNA (1)...(19): siRNA sense strand
acuacuauguggucuuugu

SEQ ID NO: 1551444 - RNA, 19 nt, Homo sapiens
  misc_RNA (1)...(19): siRNA sense strand
ucacugcuguggccgaaac

SEQ ID NO: 1551445 - RNA, 19 nt, Homo sapiens
  misc_RNA (1)...(19): siRNA sense strand
agcaauaugucauguacuc

SEQ ID NO: 1551446 - RNA, 19 nt, Homo sapiens
  misc_RNA (1)...(19): siRNA sense strand
aaacccauguugcaguucu

SEQ ID NO: 1551447 - RNA, 19 nt, Homo sapiens
  misc_RNA (1)...(19): siRNA sense strand
ccuuucggcucuagagugu

SEQ ID NO: 1551448 - RNA, 19 nt, Homo sapiens
  misc_RNA (1)...(19): siRNA sense strand
ggagaaaggacuguaucag

SEQ ID NO: 1551449 - RNA, 19 nt, Homo sapiens
  misc_RNA (1)...(19): siRNA sense strand
guccgaggcagcaauaugu

SEQ ID NO: 1551450 - RNA, 19 nt, Homo sapiens
  misc_RNA (1)...(19): siRNA sense strand
gagaauggcccuugccuua

SEQ ID NO: 1551451 - RNA, 19 nt, Homo sapiens
  misc_RNA (1)...(19): siRNA sense strand
gaauggcccuugccuuauu

SEQ ID NO: 1551452 - RNA, 19 nt, Homo sapiens
  misc_RNA (1)...(19): siRNA sense strand
ccgggaagcugauguaugu

SEQ ID NO: 1551453 - RNA, 19 nt, Homo sapiens
  misc_RNA (1)...(19): siRNA sense strand
cagauaccaugguccagua

SEQ ID NO: 1551454 - RNA, 19 nt, Homo sapiens
  misc_RNA (1)...(19): siRNA sense strand
ggagucugcugcucgaguu

SEQ ID NO: 1551455 - RNA, 19 nt, Homo sapiens
  misc_RNA (1)...(19): siRNA sense strand
gcaagaguguucagcaaac

SEQ ID NO: 1551456 - RNA, 19 nt, Homo sapiens
  misc_RNA (1)...(19): siRNA sense strand
gggcaagaguguucagcaa

SEQ ID NO: 1551457 - RNA, 19 nt, Homo sapiens
  misc_RNA (1)...(19): siRNA sense strand
acauggaacucuucaacaa

SEQ ID NO: 1551458 - RNA, 19 nt, Homo sapiens
  misc_RNA (1)...(19): siRNA sense strand
caacuuugaugugcuuaug

SEQ ID NO: 1551459 - RNA, 19 nt, Homo sapiens
  misc_RNA (1)...(19): siRNA sense strand
gcuaaggccagcaagauug

SEQ ID NO: 1551460 - RNA, 19 nt, Homo sapiens
  misc_RNA (1)...(19): siRNA sense strand
ggaagcugauguaugugau

SEQ ID NO: 1551461 - RNA, 19 nt, Homo sapiens
  misc_RNA (1)...(19): siRNA sense strand
gggaagcugauguauguga

SEQ ID NO: 1551462 - RNA, 19 nt, Homo sapiens
  misc_RNA (1)...(19): siRNA sense strand
ugacuugugugucccagau

SEQ ID NO: 1551463 - RNA, 19 nt, Homo sapiens
  misc_RNA (1)...(19): siRNA sense strand
ucgaguuccuacagaguuu

SEQ ID NO: 1551464 - RNA, 19 nt, Homo sapiens
  misc_RNA (1)...(19): siRNA sense strand
ucaacaagauccgcaagca

SEQ ID NO: 1551465 - RNA, 19 nt, Homo sapiens
  misc_RNA (1)...(19): siRNA sense strand
ggcaagaguguucagcaaa

SEQ ID NO: 1551466 - RNA, 19 nt, Homo sapiens
  misc_RNA (1)...(19): siRNA sense strand
guacauggaacucuucaac

SEQ ID NO: 1551467 - RNA, 19 nt, Homo sapiens
  misc_RNA (1)...(19): siRNA sense strand
agagaagcaaggaacauuu

SEQ ID NO: 1551468 - RNA, 19 nt, Homo sapiens
  misc_RNA (1)...(19): siRNA sense strand
gaguacccauugagcuguu

SEQ ID NO: 1551469 - RNA, 19 nt, Homo sapiens
  misc_RNA (1)...(19): siRNA sense strand
cagagaagcaaggaacauu

SEQ ID NO: 1551470 - RNA, 19 nt, Homo sapiens
  misc_RNA (1)...(19): siRNA sense strand
gagcuguuucgcccucuuu

SEQ ID NO: 1551471 - RNA, 19 nt, Homo sapiens
  misc_RNA (1)...(19): siRNA sense strand
caccaacuuugaugugcuu

SEQ ID NO: 1551472 - RNA, 19 nt, Homo sapiens
  misc_RNA (1)...(19): siRNA sense strand
gagaagcaaggaacauuuu

SEQ ID NO: 1551473 - RNA, 19 nt, Homo sapiens
  misc_RNA (1)...(19): siRNA sense strand
gaagcugauguaugugaug

SEQ ID NO: 1551474 - RNA, 19 nt, Homo sapiens
  misc_RNA (1)...(19): siRNA sense strand
uugaugugcuuauggugaa

SEQ ID NO: 1551475 - RNA, 19 nt, Homo sapiens
  misc_RNA (1)...(19): siRNA sense strand
gcagagaagcaaggaacau

SEQ ID NO: 1551476 - RNA, 19 nt, Homo sapiens
  misc_RNA (1)...(19): siRNA sense strand
guuucgcccucuuugagaa

SEQ ID NO: 1551477 - RNA, 19 nt, Homo sapiens
  misc_RNA (1)...(19): siRNA sense strand
gcugacaccaacuuugaug

SEQ ID NO: 1551478 - RNA, 19 nt, Homo sapiens
  misc_RNA (1)...(19): siRNA sense strand
cuaaggccagcaagauuga

SEQ ID NO: 1551479 - RNA, 19 nt, Homo sapiens
  misc_RNA (1)...(19): siRNA sense strand
caaaccguagagcuccuua

SEQ ID NO: 1551480 - RNA, 19 nt, Homo sapiens
  misc_RNA (1)...(19): siRNA sense strand
ugacaccaacuuugaugug

SEQ ID NO: 1551481 - RNA, 19 nt, Homo sapiens
  misc_RNA (1)...(19): siRNA sense strand
ggucuacggcccagcagau

SEQ ID NO: 1551482 - RNA, 19 nt, Homo sapiens
  misc_RNA (1)...(19): siRNA sense strand
guguggacugugagacuua

SEQ ID NO: 1551483 - RNA, 19 nt, Homo sapiens
  misc_RNA (1)...(19): siRNA sense strand
ccugugugguagcuaguga

SEQ ID NO: 1551484 - RNA, 19 nt, Homo sapiens
  misc_RNA (1)...(19): siRNA sense strand
agaccgggaagcugaugua

SEQ ID NO: 1551485 - RNA, 19 nt, Homo sapiens
  misc_RNA (1)...(19): siRNA sense strand
uugcugacaccaacuuuga

SEQ ID NO: 1551486 - RNA, 19 nt, Homo sapiens
  misc_RNA (1)...(19): siRNA sense strand
gaaggugggcacggucaca

SEQ ID NO: 1551487 - RNA, 19 nt, Homo sapiens
  misc_RNA (1)...(19): siRNA sense strand
ggugggcacggucacaaug

SEQ ID NO: 1551488 - RNA, 19 nt, Homo sapiens
  misc_RNA (1)...(19): siRNA sense strand
ucaaagacaugcagaaauu

SEQ ID NO: 1551489 - RNA, 19 nt, Homo sapiens
  misc_RNA (1)...(19): siRNA sense strand
gaaaugugcugauauugau

SEQ ID NO: 1551490 - RNA, 19 nt, Homo sapiens
  misc_RNA (1)...(19): siRNA sense strand
gaauugaaaugugcugaua

SEQ ID NO: 1551491 - RNA, 19 nt, Homo sapiens
  misc_RNA (1)...(19): siRNA sense strand
guacccaucucccacaaua

SEQ ID NO: 1551492 - RNA, 19 nt, Homo sapiens
  misc_RNA (1)...(19): siRNA sense strand
gcuaagugcuucacaaaug

SEQ ID NO: 1551493 - RNA, 19 nt, Homo sapiens
  misc_RNA (1)...(19): siRNA sense strand
gaaugaaucugaccaagca

SEQ ID NO: 1551494 - RNA, 19 nt, Homo sapiens
  misc_RNA (1)...(19): siRNA sense strand
ggaauccuauuguuugaaa

SEQ ID NO: 1551495 - RNA, 19 nt, Homo sapiens
  misc_RNA (1)...(19): siRNA sense strand
ggacugaugugcacuguag

SEQ ID NO: 1551496 - RNA, 19 nt, Homo sapiens
  misc_RNA (1)...(19): siRNA sense strand
ggaaagccauucaaagaca

SEQ ID NO: 1551497 - RNA, 19 nt, Homo sapiens
  misc_RNA (1)...(19): siRNA sense strand
ggacaaaacuggcuguauu

SEQ ID NO: 1551498 - RNA, 19 nt, Homo sapiens
  misc_RNA (1)...(19): siRNA sense strand
ggagaccuguuuagauuug

SEQ ID NO: 1551499 - RNA, 19 nt, Homo sapiens
  misc_RNA (1)...(19): siRNA sense strand
gaauguuugccaagaauua

SEQ ID NO: 1551500 - RNA, 19 nt, Homo sapiens
  misc_RNA (1)...(19): siRNA sense strand
aauaacaucuucaccauug

SEQ ID NO: 1551501 - RNA, 19 nt, Homo sapiens
  misc_RNA (1)...(19): siRNA sense strand
uaaaagggauagagacuua

SEQ ID NO: 1551502 - RNA, 19 nt, Homo sapiens
  misc_RNA (1)...(19): siRNA sense strand
aaagggauuucaacaauga

SEQ ID NO: 1551503 - RNA, 19 nt, Homo sapiens
  misc_RNA (1)...(19): siRNA sense strand
aaggagaccuguuuagauu

SEQ ID NO: 1551504 - RNA, 19 nt, Homo sapiens
  misc_RNA (1)...(19): siRNA sense strand
ggaaagguuuaaagggauu

SEQ ID NO: 1551505 - RNA, 19 nt, Homo sapiens
  misc_RNA (1)...(19): siRNA sense strand
gaagagagcuacugauacc

SEQ ID NO: 1551506 - RNA, 19 nt, Homo sapiens
  misc_RNA (1)...(19): siRNA sense strand
caaauaacaucuucaccau

SEQ ID NO: 1551507 - RNA, 19 nt, Homo sapiens
  misc_RNA (1)...(19): siRNA sense strand
gauagagacuuaccaggau

SEQ ID NO: 1551508 - RNA, 19 nt, Homo sapiens
  misc_RNA (1)...(19): siRNA sense strand
caacugcuauuaaacaaca

SEQ ID NO: 1551509 - RNA, 19 nt, Homo sapiens
  misc_RNA (1)...(19): siRNA sense strand
gaccaagcaugaugucuau

SEQ ID NO: 1551510 - RNA, 19 nt, Homo sapiens
  misc_RNA (1)...(19): siRNA sense strand
caaagaaaauuccagcaua

SEQ ID NO: 1551511 - RNA, 19 nt, Homo sapiens
  misc_RNA (1)...(19): siRNA sense strand
gugaagagagcuacugaua

SEQ ID NO: 1551512 - RNA, 19 nt, Homo sapiens
  misc_RNA (1)...(19): siRNA sense strand
ucaagguucuaacagauaa

SEQ ID NO: 1551513 - RNA, 19 nt, Homo sapiens
  misc_RNA (1)...(19): siRNA sense strand
gacuuaagguuauaugaug

SEQ ID NO: 1551514 - RNA, 19 nt, Homo sapiens
  misc_RNA (1)...(19): siRNA sense strand
cgaugcaacugcuauuaaa

SEQ ID NO: 1551515 - RNA, 19 nt, Homo sapiens
  misc_RNA (1)...(19): siRNA sense strand
gaacuucucagacuuuauc

SEQ ID NO: 1551516 - RNA, 19 nt, Homo sapiens
  misc_RNA (1)...(19): siRNA sense strand
ggauugcaauaaugaaaga

SEQ ID NO: 1551517 - RNA, 19 nt, Homo sapiens
  misc_RNA (1)...(19): siRNA sense strand
gagcuacugauaccuauaa

SEQ ID NO: 1551518 - RNA, 19 nt, Homo sapiens
  misc_RNA (1)...(19): siRNA sense strand
ucagauagcccauauucaa

SEQ ID NO: 1551519 - RNA, 19 nt, Homo sapiens
  misc_RNA (1)...(19): siRNA sense strand
gcaaauauaaagucuaugg

SEQ ID NO: 1551520 - RNA, 19 nt, Homo sapiens
  misc_RNA (1)...(19): siRNA sense strand
uaaagggauuucaacaaug

SEQ ID NO: 1551521 - RNA, 19 nt, Homo sapiens
  misc_RNA (1)...(19): siRNA sense strand
gaaaagagaugcuaaaccu

SEQ ID NO: 1551522 - RNA, 19 nt, Homo sapiens
  misc_RNA (1)...(19): siRNA sense strand
ccaauuacaacacaaagaa

SEQ ID NO: 1551523 - RNA, 19 nt, Homo sapiens
  misc_RNA (1)...(19): siRNA sense strand
aauagaaauuccucccaua

SEQ ID NO: 1551524 - RNA, 19 nt, Homo sapiens
  misc_RNA (1)...(19): siRNA sense strand
aaacacaggcagcaaauau

SEQ ID NO: 1551525 - RNA, 19 nt, Homo sapiens
  misc_RNA (1)...(19): siRNA sense strand
ugaaaugugcugauauuga

SEQ ID NO: 1551526 - RNA, 19 nt, Homo sapiens
  misc_RNA (1)...(19): siRNA sense strand
ccaagcaugaugucuauaa

SEQ ID NO: 1551527 - RNA, 19 nt, Homo sapiens
  misc_RNA (1)...(19): siRNA sense strand
gagaugcaauuccgguuca

SEQ ID NO: 1551528 - RNA, 19 nt, Homo sapiens
  misc_RNA (1)...(19): siRNA sense strand
uaaacaacaugugaagaga

SEQ ID NO: 1551529 - RNA, 19 nt, Homo sapiens
  misc_RNA (1)...(19): siRNA sense strand
caaagacaugcagaaauua

SEQ ID NO: 1551530 - RNA, 19 nt, Homo sapiens
  misc_RNA (1)...(19): siRNA sense strand
ggacuuaagguuauaugau

SEQ ID NO: 1551531 - RNA, 19 nt, Homo sapiens
  misc_RNA (1)...(19): siRNA sense strand
uaugaugccuaugugaaua

SEQ ID NO: 1551532 - RNA, 19 nt, Homo sapiens
  misc_RNA (1)...(19): siRNA sense strand
gcuauuaaacaacauguga

SEQ ID NO: 1551533 - RNA, 19 nt, Homo sapiens
  misc_RNA (1)...(19): siRNA sense strand
acacaggcagcaaauauaa

SEQ ID NO: 1551534 - RNA, 19 nt, Homo sapiens
  misc_RNA (1)...(19): siRNA sense strand
gagagcuacugauaccuau

SEQ ID NO: 1551535 - RNA, 19 nt, Homo sapiens
  misc_RNA (1)...(19): siRNA sense strand
caagaugccuacaacuucu

SEQ ID NO: 1551536 - RNA, 19 nt, Homo sapiens
  misc_RNA (1)...(19): siRNA sense strand
gaaagccauucaaagacau

SEQ ID NO: 1551537 - RNA, 19 nt, Homo sapiens
  misc_RNA (1)...(19): siRNA sense strand
aguaagcuauuuccaaaga

SEQ ID NO: 1551538 - RNA, 19 nt, Homo sapiens
  misc_RNA (1)...(19): siRNA sense strand
agcaugaugucuauaauga

SEQ ID NO: 1551539 - RNA, 19 nt, Homo sapiens
  misc_RNA (1)...(19): siRNA sense strand
gaauuacuuucuccuaagg

SEQ ID NO: 1551540 - RNA, 19 nt, Homo sapiens
  misc_RNA (1)...(19): siRNA sense strand
gugaacuucucagacuuua

SEQ ID NO: 1551541 - RNA, 19 nt, Homo sapiens
  misc_RNA (1)...(19): siRNA sense strand
gaugugcacuguagcuaag

SEQ ID NO: 1551542 - RNA, 19 nt, Homo sapiens
  misc_RNA (1)...(19): siRNA sense strand
caagcaugaugucuauaau

SEQ ID NO: 1551543 - RNA, 19 nt, Homo sapiens
  misc_RNA (1)...(19): siRNA sense strand
aaaacuggcuguauugauu

SEQ ID NO: 1551544 - RNA, 19 nt, Homo sapiens
  misc_RNA (1)...(19): siRNA sense strand
cagauccucuuccucauca

SEQ ID NO: 1551545 - RNA, 19 nt, Homo sapiens
  misc_RNA (1)...(19): siRNA sense strand
gaucaaaugcucaagaaaa

SEQ ID NO: 1551546 - RNA, 19 nt, Homo sapiens
  misc_RNA (1)...(19): siRNA sense strand
uaucaagguucuaacagau

SEQ ID NO: 1551547 - RNA, 19 nt, Homo sapiens
  misc_RNA (1)...(19): siRNA sense strand
cuucacaaauggcagcuuu

SEQ ID NO: 1551548 - RNA, 19 nt, Homo sapiens
  misc_RNA (1)...(19): siRNA sense strand
guaagcuauuuccaaagaa

SEQ ID NO: 1551549 - RNA, 19 nt, Homo sapiens
  misc_RNA (1)...(19): siRNA sense strand
ccaagaugccuacaacuuc

SEQ ID NO: 1551550 - RNA, 19 nt, Homo sapiens
  misc_RNA (1)...(19): siRNA sense strand
aauggcagcuuuccaagau

SEQ ID NO: 1551551 - RNA, 19 nt, Homo sapiens
  misc_RNA (1)...(19): siRNA sense strand
uaagcugaauccucuaaca

SEQ ID NO: 1551552 - RNA, 19 nt, Homo sapiens
  misc_RNA (1)...(19): siRNA sense strand
agaaauuccucccauaacu

SEQ ID NO: 1551553 - RNA, 19 nt, Homo sapiens
  misc_RNA (1)...(19): siRNA sense strand
ccuauuguuugaaauccua

SEQ ID NO: 1551554 - RNA, 19 nt, Homo sapiens
  misc_RNA (1)...(19): siRNA sense strand
ugggaaagccauucaaaga

SEQ ID NO: 1551555 - RNA, 19 nt, Homo sapiens
  misc_RNA (1)...(19): siRNA sense strand
guucagauagcccauauuc

SEQ ID NO: 1551556 - RNA, 19 nt, Homo sapiens
  misc_RNA (1)...(19): siRNA sense strand
gagcucaagagaugcaauu

SEQ ID NO: 1551557 - RNA, 19 nt, Homo sapiens
  misc_RNA (1)...(19): siRNA sense strand
ugaccaagcaugaugucua

SEQ ID NO: 1551558 - RNA, 19 nt, Homo sapiens
  misc_RNA (1)...(19): siRNA sense strand
aagguuauaugaugccuau

SEQ ID NO: 1551559 - RNA, 19 nt, Homo sapiens
  misc_RNA (1)...(19): siRNA sense strand
caacaugugaagagagcua

SEQ ID NO: 1551560 - RNA, 19 nt, Homo sapiens
  misc_RNA (1)...(19): siRNA sense strand
gcauuucuuugaggauuau

SEQ ID NO: 1551561 - RNA, 19 nt, Homo sapiens
  misc_RNA (1)...(19): siRNA sense strand
cagauagcccauauucaaa

SEQ ID NO: 1551562 - RNA, 19 nt, Homo sapiens
  misc_RNA (1)...(19): siRNA sense strand
gcaauuccgguucagauag

SEQ ID NO: 1551563 - RNA, 19 nt, Homo sapiens
  misc_RNA (1)...(19): siRNA sense strand
ggugaacuucucagacuuu

SEQ ID NO: 1551564 - RNA, 19 nt, Homo sapiens
  misc_RNA (1)...(19): siRNA sense strand
gagaugggaaggugaacuu

SEQ ID NO: 1551565 - RNA, 19 nt, Homo sapiens
  misc_RNA (1)...(19): siRNA sense strand
acaaauggcagcuuuccaa

SEQ ID NO: 1551566 - RNA, 19 nt, Homo sapiens
  misc_RNA (1)...(19): siRNA sense strand
gaaauuccucccauaacuc

SEQ ID NO: 1551567 - RNA, 19 nt, Homo sapiens
  misc_RNA (1)...(19): siRNA sense strand
gcagaaauuagagaugcua

SEQ ID NO: 1551568 - RNA, 19 nt, Homo sapiens
  misc_RNA (1)...(19): siRNA sense strand
aaauacccaucuuuccauu

SEQ ID NO: 1551569 - RNA, 19 nt, Homo sapiens
  misc_RNA (1)...(19): siRNA sense strand
cuucagcccuacccagaaa

SEQ ID NO: 1551570 - RNA, 19 nt, Homo sapiens
  misc_RNA (1)...(19): siRNA sense strand
uuaucaagguucuaacaga

SEQ ID NO: 1551571 - RNA, 19 nt, Homo sapiens
  misc_RNA (1)...(19): siRNA sense strand
uuaccaggaucucuucaau

SEQ ID NO: 1551572 - RNA, 19 nt, Homo sapiens
  misc_RNA (1)...(19): siRNA sense strand
gcauggcugccuuugcuaa

SEQ ID NO: 1551573 - RNA, 19 nt, Homo sapiens
  misc_RNA (1)...(19): siRNA sense strand
acccagaaagucuauaaua

SEQ ID NO: 1551574 - RNA, 19 nt, Homo sapiens
  misc_RNA (1)...(19): siRNA sense strand
guuauaugaugccuaugug

SEQ ID NO: 1551575 - RNA, 19 nt, Homo sapiens
  misc_RNA (1)...(19): siRNA sense strand
aaacuggcuguauugauuu

SEQ ID NO: 1551576 - RNA, 19 nt, Homo sapiens
  misc_RNA (1)...(19): siRNA sense strand
auagaaauuccucccauaa

SEQ ID NO: 1551577 - RNA, 19 nt, Homo sapiens
  misc_RNA (1)...(19): siRNA sense strand
gaagagcucaagagaugca

SEQ ID NO: 1551578 - RNA, 19 nt, Homo sapiens
  misc_RNA (1)...(19): siRNA sense strand
aaaggagaccuguuuagau

SEQ ID NO: 1551579 - RNA, 19 nt, Homo sapiens
  misc_RNA (1)...(19): siRNA sense strand
ucucagacuuuaucaaggu

SEQ ID NO: 1551580 - RNA, 19 nt, Homo sapiens
  misc_RNA (1)...(19): siRNA sense strand
cuaagugcuucacaaaugg

SEQ ID NO: 1551581 - RNA, 19 nt, Homo sapiens
  misc_RNA (1)...(19): siRNA sense strand
caaggcuucuagagacuuc

SEQ ID NO: 1551582 - RNA, 19 nt, Homo sapiens
  misc_RNA (1)...(19): siRNA sense strand
ccuacaacuucuucuacaa

SEQ ID NO: 1551583 - RNA, 19 nt, Homo sapiens
  misc_RNA (1)...(19): siRNA sense strand
gcugaauccucuaacaaaa

SEQ ID NO: 1551584 - RNA, 19 nt, Homo sapiens
  misc_RNA (1)...(19): siRNA sense strand
ggaauguuugccaagaauu

SEQ ID NO: 1551585 - RNA, 19 nt, Homo sapiens
  misc_RNA (1)...(19): siRNA sense strand
ccgaugcaacugcuauuaa

SEQ ID NO: 1551586 - RNA, 19 nt, Homo sapiens
  misc_RNA (1)...(19): siRNA sense strand
auacccaucuuuccauugu

SEQ ID NO: 1551587 - RNA, 19 nt, Homo sapiens
  misc_RNA (1)...(19): siRNA sense strand
caucagauaccagugaaug

SEQ ID NO: 1551588 - RNA, 19 nt, Homo sapiens
  misc_RNA (1)...(19): siRNA sense strand
gaaggaaccugcaucaaua

SEQ ID NO: 1551589 - RNA, 19 nt, Homo sapiens
  misc_RNA (1)...(19): siRNA sense strand
gaguaaacauguucacuua

SEQ ID NO: 1551590 - RNA, 19 nt, Homo sapiens
  misc_RNA (1)...(19): siRNA sense strand
gaaauuggagccacaguuu

SEQ ID NO: 1551591 - RNA, 19 nt, Homo sapiens
  misc_RNA (1)...(19): siRNA sense strand
ugaagaugcuguccaguuu

SEQ ID NO: 1551592 - RNA, 19 nt, Homo sapiens
  misc_RNA (1)...(19): siRNA sense strand
uuaaggaguucaugaguaa

SEQ ID NO: 1551593 - RNA, 19 nt, Homo sapiens
  misc_RNA (1)...(19): siRNA sense strand
gaaccugcaucaauaauac

SEQ ID NO: 1551594 - RNA, 19 nt, Homo sapiens
  misc_RNA (1)...(19): siRNA sense strand
gagaagaaccaccagcuuu

SEQ ID NO: 1551595 - RNA, 19 nt, Homo sapiens
  misc_RNA (1)...(19): siRNA sense strand
ugacagccaucaucaccua

SEQ ID NO: 1551596 - RNA, 19 nt, Homo sapiens
  misc_RNA (1)...(19): siRNA sense strand
ggaaccugcaucaauaaua

SEQ ID NO: 1551597 - RNA, 19 nt, Homo sapiens
  misc_RNA (1)...(19): siRNA sense strand
aagaagagaucaaagagau

SEQ ID NO: 1551598 - RNA, 19 nt, Homo sapiens
  misc_RNA (1)...(19): siRNA sense strand
caaguaugacccucaauuu

SEQ ID NO: 1551599 - RNA, 19 nt, Homo sapiens
  misc_RNA (1)...(19): siRNA sense strand
gaaaacagaccaagaaaug

SEQ ID NO: 1551600 - RNA, 19 nt, Homo sapiens
  misc_RNA (1)...(19): siRNA sense strand
gaagaagagaucaaagaga

SEQ ID NO: 1551601 - RNA, 19 nt, Homo sapiens
  misc_RNA (1)...(19): siRNA sense strand
ccaauuauaacuuccagua

SEQ ID NO: 1551602 - RNA, 19 nt, Homo sapiens
  misc_RNA (1)...(19): siRNA sense strand
ugacguaccugcugcgaau

SEQ ID NO: 1551603 - RNA, 19 nt, Homo sapiens
  misc_RNA (1)...(19): siRNA sense strand
agaagaaccaccagcuuua

SEQ ID NO: 1551604 - RNA, 19 nt, Homo sapiens
  misc_RNA (1)...(19): siRNA sense strand
gagacugacugaacaugug

SEQ ID NO: 1551605 - RNA, 19 nt, Homo sapiens
  misc_RNA (1)...(19): siRNA sense strand
cugaacaugugcaagauaa

SEQ ID NO: 1551606 - RNA, 19 nt, Homo sapiens
  misc_RNA (1)...(19): siRNA sense strand
gaagagaucaaagagauuc

SEQ ID NO: 1551607 - RNA, 19 nt, Homo sapiens
  misc_RNA (1)...(19): siRNA sense strand
cagaaccaauuauaacuuc

SEQ ID NO: 1551608 - RNA, 19 nt, Homo sapiens
  misc_RNA (1)...(19): siRNA sense strand
ggaucccacuucacuagaa

SEQ ID NO: 1551609 - RNA, 19 nt, Homo sapiens
  misc_RNA (1)...(19): siRNA sense strand
cuaagagacugacugaaca

SEQ ID NO: 1551610 - RNA, 19 nt, Homo sapiens
  misc_RNA (1)...(19): siRNA sense strand
cauguucacuuaauguguu

SEQ ID NO: 1551611 - RNA, 19 nt, Homo sapiens
  misc_RNA (1)...(19): siRNA sense strand
gcagaaccaauuauaacuu

SEQ ID NO: 1551612 - RNA, 19 nt, Homo sapiens
  misc_RNA (1)...(19): siRNA sense strand
ccaacggaaucauugcaaa

SEQ ID NO: 1551613 - RNA, 19 nt, Homo sapiens
  misc_RNA (1)...(19): siRNA sense strand
caaaugggagguuuaagga

SEQ ID NO: 1551614 - RNA, 19 nt, Homo sapiens
  misc_RNA (1)...(19): siRNA sense strand
gagcagaaccaauuauaac

SEQ ID NO: 1551615 - RNA, 19 nt, Homo sapiens
  misc_RNA (1)...(19): siRNA sense strand
gaaaugguggcaucugugu

SEQ ID NO: 1551616 - RNA, 19 nt, Homo sapiens
  misc_RNA (1)...(19): siRNA sense strand
uuuaaggaguucaugagua

SEQ ID NO: 1551617 - RNA, 19 nt, Homo sapiens
  misc_RNA (1)...(19): siRNA sense strand
caaaggaucccacuucacu

SEQ ID NO: 1551618 - RNA, 19 nt, Homo sapiens
  misc_RNA (1)...(19): siRNA sense strand
guaguaaggcucuggacaa

SEQ ID NO: 1551619 - RNA, 19 nt, Homo sapiens
  misc_RNA (1)...(19): siRNA sense strand
ugacugaacaugugcaaga

SEQ ID NO: 1551620 - RNA, 19 nt, Homo sapiens
  misc_RNA (1)...(19): siRNA sense strand
caacuguggugggauacuu

SEQ ID NO: 1551621 - RNA, 19 nt, Homo sapiens
  misc_RNA (1)...(19): siRNA sense strand
uagaagaagagaucaaaga

SEQ ID NO: 1551622 - RNA, 19 nt, Homo sapiens
  misc_RNA (1)...(19): siRNA sense strand
gcaucuguguggccaauca

SEQ ID NO: 1551623 - RNA, 19 nt, Homo sapiens
  misc_RNA (1)...(19): siRNA sense strand
guaaggcucuggacaacac

SEQ ID NO: 1551624 - RNA, 19 nt, Homo sapiens
  misc_RNA (1)...(19): siRNA sense strand
agaaggaaccugcaucaau

SEQ ID NO: 1551625 - RNA, 19 nt, Homo sapiens
  misc_RNA (1)...(19): siRNA sense strand
gcuaagagacugacugaac

SEQ ID NO: 1551626 - RNA, 19 nt, Homo sapiens
  misc_RNA (1)...(19): siRNA sense strand
gaugaugaggugacaaaga

SEQ ID NO: 1551627 - RNA, 19 nt, Homo sapiens
  misc_RNA (1)...(19): siRNA sense strand
ucaaguaugacccucaauu

SEQ ID NO: 1551628 - RNA, 19 nt, Homo sapiens
  misc_RNA (1)...(19): siRNA sense strand
gaagaugcuguccaguuug

SEQ ID NO: 1551629 - RNA, 19 nt, Homo sapiens
  misc_RNA (1)...(19): siRNA sense strand
ggagaagaaccaccagcuu

SEQ ID NO: 1551630 - RNA, 19 nt, Homo sapiens
  misc_RNA (1)...(19): siRNA sense strand
ugagcagaaccaauuauaa

SEQ ID NO: 1551631 - RNA, 19 nt, Homo sapiens
  misc_RNA (1)...(19): siRNA sense strand
uaucaaguaugacccucaa

SEQ ID NO: 1551632 - RNA, 19 nt, Homo sapiens
  misc_RNA (1)...(19): siRNA sense strand
ggcgaugccuucuggaaca

SEQ ID NO: 1551633 - RNA, 19 nt, Homo sapiens
  misc_RNA (1)...(19): siRNA sense strand
gugggauacuugccaaaug

SEQ ID NO: 1551634 - RNA, 19 nt, Homo sapiens
  misc_RNA (1)...(19): siRNA sense strand
gcgaauagggugaaaucug

SEQ ID NO: 1551635 - RNA, 19 nt, Homo sapiens
  misc_RNA (1)...(19): siRNA sense strand
ccgcaaacucuacaugaaa

SEQ ID NO: 1551636 - RNA, 19 nt, Homo sapiens
  misc_RNA (1)...(19): siRNA sense strand
ucaaggaggagcagcagaa

SEQ ID NO: 1551637 - RNA, 19 nt, Homo sapiens
  misc_RNA (1)...(19): siRNA sense strand
gcuguccaguuugcgaaua

SEQ ID NO: 1551638 - RNA, 19 nt, Homo sapiens
  misc_RNA (1)...(19): siRNA sense strand
gcccacacgucugguuuga

SEQ ID NO: 1551639 - RNA, 19 nt, Homo sapiens
  misc_RNA (1)...(19): siRNA sense strand
aagaaaugguggcaucugu

SEQ ID NO: 1551640 - RNA, 19 nt, Homo sapiens
  misc_RNA (1)...(19): siRNA sense strand
ggauagcacuggcuuucac

SEQ ID NO: 1551641 - RNA, 19 nt, Homo sapiens
  misc_RNA (1)...(19): siRNA sense strand
cgucgaagugguaguagua

SEQ ID NO: 1551642 - RNA, 19 nt, Homo sapiens
  misc_RNA (1)...(19): siRNA sense strand
gaggagccaaggagaagaa

SEQ ID NO: 1551643 - RNA, 19 nt, Homo sapiens
  misc_RNA (1)...(19): siRNA sense strand
aaauuggagccacaguuua

SEQ ID NO: 1551644 - RNA, 19 nt, Homo sapiens
  misc_RNA (1)...(19): siRNA sense strand
caagcugccuauccucauc

SEQ ID NO: 1551645 - RNA, 19 nt, Homo sapiens
  misc_RNA (1)...(19): siRNA sense strand
caucauagugccagccauu

SEQ ID NO: 1551646 - RNA, 19 nt, Homo sapiens
  misc_RNA (1)...(19): siRNA sense strand
uuugauagccugauuguca

SEQ ID NO: 1551647 - RNA, 19 nt, Homo sapiens
  misc_RNA (1)...(19): siRNA sense strand
cuagagaggcagaugaaga

SEQ ID NO: 1551648 - RNA, 19 nt, Homo sapiens
  misc_RNA (1)...(19): siRNA sense strand
guaccugccucccaugacu

SEQ ID NO: 1551649 - RNA, 19 nt, Homo sapiens
  misc_RNA (1)...(19): siRNA sense strand
gaacaugugcaagauaaaa

SEQ ID NO: 1551650 - RNA, 19 nt, Homo sapiens
  misc_RNA (1)...(19): siRNA sense strand
ugaguaaacauguucacuu

SEQ ID NO: 1551651 - RNA, 19 nt, Homo sapiens
  misc_RNA (1)...(19): siRNA sense strand
gaagaaccaccagcuuuac

SEQ ID NO: 1551652 - RNA, 19 nt, Homo sapiens
  misc_RNA (1)...(19): siRNA sense strand
ccaaaugggagguuuaagg

SEQ ID NO: 1551653 - RNA, 19 nt, Homo sapiens
  misc_RNA (1)...(19): siRNA sense strand
cuacaccaacggaaucauu

SEQ ID NO: 1551654 - RNA, 19 nt, Homo sapiens
  misc_RNA (1)...(19): siRNA sense strand
gacuagagaggcagaugaa

SEQ ID NO: 1551655 - RNA, 19 nt, Homo sapiens
  misc_RNA (1)...(19): siRNA sense strand
ccagaaggaaccugcauca

SEQ ID NO: 1551656 - RNA, 19 nt, Homo sapiens
  misc_RNA (1)...(19): siRNA sense strand
ucacagggauuagccuucu

SEQ ID NO: 1551657 - RNA, 19 nt, Homo sapiens
  misc_RNA (1)...(19): siRNA sense strand
gaaccaccagcuuuacaag

SEQ ID NO: 1551658 - RNA, 19 nt, Homo sapiens
  misc_RNA (1)...(19): siRNA sense strand
uuugagcgcucggaaguga

SEQ ID NO: 1551659 - RNA, 19 nt, Homo sapiens
  misc_RNA (1)...(19): siRNA sense strand
cggaaucauugcaaaggau

SEQ ID NO: 1551660 - RNA, 19 nt, Homo sapiens
  misc_RNA (1)...(19): siRNA sense strand
uagagaggcagaugaagau

SEQ ID NO: 1551661 - RNA, 19 nt, Homo sapiens
  misc_RNA (1)...(19): siRNA sense strand
caguuuacccuguugcuau

SEQ ID NO: 1551662 - RNA, 19 nt, Homo sapiens
  misc_RNA (1)...(19): siRNA sense strand
aaagcaagcugccuauccu

SEQ ID NO: 1551663 - RNA, 19 nt, Homo sapiens
  misc_RNA (1)...(19): siRNA sense strand
cugagcagaaccaauuaua

SEQ ID NO: 1551664 - RNA, 19 nt, Homo sapiens
  misc_RNA (1)...(19): siRNA sense strand
ugcaaaggaucccacuuca

SEQ ID NO: 1551665 - RNA, 19 nt, Homo sapiens
  misc_RNA (1)...(19): siRNA sense strand
caacggaaucauugcaaag

SEQ ID NO: 1551666 - RNA, 19 nt, Homo sapiens
  misc_RNA (1)...(19): siRNA sense strand
ugacuagagaggcagauga

SEQ ID NO: 1551667 - RNA, 19 nt, Homo sapiens
  misc_RNA (1)...(19): siRNA sense strand
cuguugcuaucaaguauga

SEQ ID NO: 1551668 - RNA, 19 nt, Homo sapiens
  misc_RNA (1)...(19): siRNA sense strand
ugaaauuggagccacaguu

SEQ ID NO: 1551669 - RNA, 19 nt, Homo sapiens
  misc_RNA (1)...(19): siRNA sense strand
ugggauacuugccaaaugg

SEQ ID NO: 1551670 - RNA, 19 nt, Homo sapiens
  misc_RNA (1)...(19): siRNA sense strand
gaaccaauuauaacuucca

SEQ ID NO: 1551671 - RNA, 19 nt, Homo sapiens
  misc_RNA (1)...(19): siRNA sense strand
ugggcuaccuugagaaugg

SEQ ID NO: 1551672 - RNA, 19 nt, Homo sapiens
  misc_RNA (1)...(19): siRNA sense strand
gacugaacaugugcaagau

SEQ ID NO: 1551673 - RNA, 19 nt, Homo sapiens
  misc_RNA (1)...(19): siRNA sense strand
uccgcaaacucuacaugaa

SEQ ID NO: 1551674 - RNA, 19 nt, Homo sapiens
  misc_RNA (1)...(19): siRNA sense strand
aaguaugacccucaauuug

SEQ ID NO: 1551675 - RNA, 19 nt, Homo sapiens
  misc_RNA (1)...(19): siRNA sense strand
ggacucaugggugugauuc

SEQ ID NO: 1551676 - RNA, 19 nt, Homo sapiens
  misc_RNA (1)...(19): siRNA sense strand
augaugaggugacaaagag

SEQ ID NO: 1551677 - RNA, 19 nt, Homo sapiens
  misc_RNA (1)...(19): siRNA sense strand
gaugaggugacaaagagau

SEQ ID NO: 1551678 - RNA, 19 nt, Homo sapiens
  misc_RNA (1)...(19): siRNA sense strand
caggauagcacuggcuuuc

SEQ ID NO: 1551679 - RNA, 19 nt, Homo sapiens
  misc_RNA (1)...(19): siRNA sense strand
agagggagaaggugaagga

SEQ ID NO: 1551680 - RNA, 19 nt, Homo sapiens
  misc_RNA (1)...(19): siRNA sense strand
gaagagggagaaggugaag

SEQ ID NO: 1551681 - RNA, 19 nt, Homo sapiens
  misc_RNA (1)...(19): siRNA sense strand
ugaagagggagaaggugaa

SEQ ID NO: 1551682 - RNA, 19 nt, Homo sapiens
  misc_RNA (1)...(19): siRNA sense strand
gagccaaggagaagaacca

SEQ ID NO: 1551683 - RNA, 19 nt, Homo sapiens
  misc_RNA (1)...(19): siRNA sense strand
uggaugaugaggugacaaa

SEQ ID NO: 1551684 - RNA, 19 nt, Homo sapiens
  misc_RNA (1)...(19): siRNA sense strand
aaggaaccugcaucaauaa

SEQ ID NO: 1551685 - RNA, 19 nt, Homo sapiens
  misc_RNA (1)...(19): siRNA sense strand
gcaagcugccuauccucau

SEQ ID NO: 1551686 - RNA, 19 nt, Homo sapiens
  misc_RNA (1)...(19): siRNA sense strand
ucagagagccauggugaag

SEQ ID NO: 1551687 - RNA, 19 nt, Homo sapiens
  misc_RNA (1)...(19): siRNA sense strand
ggaaaacagaccaagaaau

SEQ ID NO: 1551688 - RNA, 19 nt, Homo sapiens
  misc_RNA (1)...(19): siRNA sense strand
gcaaggagcagacaucaau

SEQ ID NO: 1551689 - RNA, 19 nt, Homo sapiens
  misc_RNA (1)...(19): siRNA sense strand
uaaagaaggucccagaaag

SEQ ID NO: 1551690 - RNA, 19 nt, Homo sapiens
  misc_RNA (1)...(19): siRNA sense strand
aaacauccaugaccaacuu

SEQ ID NO: 1551691 - RNA, 19 nt, Homo sapiens
  misc_RNA (1)...(19): siRNA sense strand
caacaaaggguauaaugau

SEQ ID NO: 1551692 - RNA, 19 nt, Homo sapiens
  misc_RNA (1)...(19): siRNA sense strand
guaaagaaggucccagaaa

SEQ ID NO: 1551693 - RNA, 19 nt, Homo sapiens
  misc_RNA (1)...(19): siRNA sense strand
auaaugaugucgugagauu

SEQ ID NO: 1551694 - RNA, 19 nt, Homo sapiens
  misc_RNA (1)...(19): siRNA sense strand
ggugguuacuuggauguua

SEQ ID NO: 1551695 - RNA, 19 nt, Homo sapiens
  misc_RNA (1)...(19): siRNA sense strand
gcacaacagcauuauugaa

SEQ ID NO: 1551696 - RNA, 19 nt, Homo sapiens
  misc_RNA (1)...(19): siRNA sense strand
gcagacccaucccugagaa

SEQ ID NO: 1551697 - RNA, 19 nt, Homo sapiens
  misc_RNA (1)...(19): siRNA sense strand
aaacaaggccaaugaacuu

SEQ ID NO: 1551698 - RNA, 19 nt, Homo sapiens
  misc_RNA (1)...(19): siRNA sense strand
gaaacaaggccaaugaacu

SEQ ID NO: 1551699 - RNA, 19 nt, Homo sapiens
  misc_RNA (1)...(19): siRNA sense strand
ugccuacgcuggccacaua

SEQ ID NO: 1551700 - RNA, 19 nt, Homo sapiens
  misc_RNA (1)...(19): siRNA sense strand
gaacuuccggcagaacuaa

SEQ ID NO: 1551701 - RNA, 19 nt, Homo sapiens
  misc_RNA (1)...(19): siRNA sense strand
cacaacagcauuauugaaa

SEQ ID NO: 1551702 - RNA, 19 nt, Homo sapiens
  misc_RNA (1)...(19): siRNA sense strand
gagcauccacugaauuuag

SEQ ID NO: 1551703 - RNA, 19 nt, Homo sapiens
  misc_RNA (1)...(19): siRNA sense strand
ccaacaaaggguauaauga

SEQ ID NO: 1551704 - RNA, 19 nt, Homo sapiens
  misc_RNA (1)...(19): siRNA sense strand
caacugcccuauucuuugc

SEQ ID NO: 1551705 - RNA, 19 nt, Homo sapiens
  misc_RNA (1)...(19): siRNA sense strand
ugagaaacaaggccaauga

SEQ ID NO: 1551706 - RNA, 19 nt, Homo sapiens
  misc_RNA (1)...(19): siRNA sense strand
gcggaacgauggcacaaca

SEQ ID NO: 1551707 - RNA, 19 nt, Homo sapiens
  misc_RNA (1)...(19): siRNA sense strand
gcaaggccauaaugauguc

SEQ ID NO: 1551708 - RNA, 19 nt, Homo sapiens
  misc_RNA (1)...(19): siRNA sense strand
ccauaaugaugucgugaga

SEQ ID NO: 1551709 - RNA, 19 nt, Homo sapiens
  misc_RNA (1)...(19): siRNA sense strand
caaaggguauaaugauguc

SEQ ID NO: 1551710 - RNA, 19 nt, Homo sapiens
  misc_RNA (1)...(19): siRNA sense strand
cagcaaggccauaaugaug

SEQ ID NO: 1551711 - RNA, 19 nt, Homo sapiens
  misc_RNA (1)...(19): siRNA sense strand
gagaaacaaggccaaugaa

SEQ ID NO: 1551712 - RNA, 19 nt, Homo sapiens
  misc_RNA (1)...(19): siRNA sense strand
guacaacugcccuauucuu

SEQ ID NO: 1551713 - RNA, 19 nt, Homo sapiens
  misc_RNA (1)...(19): siRNA sense strand
gcacggagcaaacauccau

SEQ ID NO: 1551714 - RNA, 19 nt, Homo sapiens
  misc_RNA (1)...(19): siRNA sense strand
uuacuuggauguuauucga

SEQ ID NO: 1551715 - RNA, 19 nt, Homo sapiens
  misc_RNA (1)...(19): siRNA sense strand
caacagcauuauugaaagc

SEQ ID NO: 1551716 - RNA, 19 nt, Homo sapiens
  misc_RNA (1)...(19): siRNA sense strand
aaagaaggucccagaaaga

SEQ ID NO: 1551717 - RNA, 19 nt, Homo sapiens
  misc_RNA (1)...(19): siRNA sense strand
aaacuccacuugccaaugc

SEQ ID NO: 1551718 - RNA, 19 nt, Homo sapiens
  misc_RNA (1)...(19): siRNA sense strand
gugcucaguggaaacauua

SEQ ID NO: 1551719 - RNA, 19 nt, Homo sapiens
  misc_RNA (1)...(19): siRNA sense strand
gacguggacugcagagaca

SEQ ID NO: 1551720 - RNA, 19 nt, Homo sapiens
  misc_RNA (1)...(19): siRNA sense strand
ugaccaacuuuaugaugga

SEQ ID NO: 1551721 - RNA, 19 nt, Homo sapiens
  misc_RNA (1)...(19): siRNA sense strand
ccacugaauuuaggaccaa

SEQ ID NO: 1551722 - RNA, 19 nt, Homo sapiens
  misc_RNA (1)...(19): siRNA sense strand
aacaaaggguauaaugaug

SEQ ID NO: 1551723 - RNA, 19 nt, Homo sapiens
  misc_RNA (1)...(19): siRNA sense strand
uggcacaacagcauuauug

SEQ ID NO: 1551724 - RNA, 19 nt, Homo sapiens
  misc_RNA (1)...(19): siRNA sense strand
agauuucucuuuggauuug

SEQ ID NO: 1551725 - RNA, 19 nt, Homo sapiens
  misc_RNA (1)...(19): siRNA sense strand
gugguuacuuggauguuau

SEQ ID NO: 1551726 - RNA, 19 nt, Homo sapiens
  misc_RNA (1)...(19): siRNA sense strand
ggagcauccacugaauuua

SEQ ID NO: 1551727 - RNA, 19 nt, Homo sapiens
  misc_RNA (1)...(19): siRNA sense strand
caguugcgcugcuccuaga

SEQ ID NO: 1551728 - RNA, 19 nt, Homo sapiens
  misc_RNA (1)...(19): siRNA sense strand
gaaacuccacuugccaaug

SEQ ID NO: 1551729 - RNA, 19 nt, Homo sapiens
  misc_RNA (1)...(19): siRNA sense strand
uacaacugcccuauucuuu

SEQ ID NO: 1551730 - RNA, 19 nt, Homo sapiens
  misc_RNA (1)...(19): siRNA sense strand
cgauggcacaacagcauua

SEQ ID NO: 1551731 - RNA, 19 nt, Homo sapiens
  misc_RNA (1)...(19): siRNA sense strand
caaugaacuuccggcagaa

SEQ ID NO: 1551732 - RNA, 19 nt, Homo sapiens
  misc_RNA (1)...(19): siRNA sense strand
ugcugaagcugcuguugaa

SEQ ID NO: 1551733 - RNA, 19 nt, Homo sapiens
  misc_RNA (1)...(19): siRNA sense strand
gccaacaaaggguauaaug

SEQ ID NO: 1551734 - RNA, 19 nt, Homo sapiens
  misc_RNA (1)...(19): siRNA sense strand
cagagagagucagguacaa

SEQ ID NO: 1551735 - RNA, 19 nt, Homo sapiens
  misc_RNA (1)...(19): siRNA sense strand
gcucaguggaaacauuaaa

SEQ ID NO: 1551736 - RNA, 19 nt, Homo sapiens
  misc_RNA (1)...(19): siRNA sense strand
uaaauucucacccacucuu

SEQ ID NO: 1551737 - RNA, 19 nt, Homo sapiens
  misc_RNA (1)...(19): siRNA sense strand
acaacagcauuauugaaag

SEQ ID NO: 1551738 - RNA, 19 nt, Homo sapiens
  misc_RNA (1)...(19): siRNA sense strand
agguacaacugcccuauuc

SEQ ID NO: 1551739 - RNA, 19 nt, Homo sapiens
  misc_RNA (1)...(19): siRNA sense strand
gaagcacggagcaaacauc

SEQ ID NO: 1551740 - RNA, 19 nt, Homo sapiens
  misc_RNA (1)...(19): siRNA sense strand
cuuccuagcugcccaaggu

SEQ ID NO: 1551741 - RNA, 19 nt, Homo sapiens
  misc_RNA (1)...(19): siRNA sense strand
caagaaggaaacuccacuu

SEQ ID NO: 1551742 - RNA, 19 nt, Homo sapiens
  misc_RNA (1)...(19): siRNA sense strand
ccugagaaguaaagaaggu

SEQ ID NO: 1551743 - RNA, 19 nt, Homo sapiens
  misc_RNA (1)...(19): siRNA sense strand
ggauguuauucgauuacug

SEQ ID NO: 1551744 - RNA, 19 nt, Homo sapiens
  misc_RNA (1)...(19): siRNA sense strand
ggaaacuccacuugccaau

SEQ ID NO: 1551745 - RNA, 19 nt, Homo sapiens
  misc_RNA (1)...(19): siRNA sense strand
ccagagagagucagguaca

SEQ ID NO: 1551746 - RNA, 19 nt, Homo sapiens
  misc_RNA (1)...(19): siRNA sense strand
cuuggauguuauucgauua

SEQ ID NO: 1551747 - RNA, 19 nt, Homo sapiens
  misc_RNA (1)...(19): siRNA sense strand
auugaaagcagccaacaaa

SEQ ID NO: 1551748 - RNA, 19 nt, Homo sapiens
  misc_RNA (1)...(19): siRNA sense strand
aagaguugcuuaaauucuc

SEQ ID NO: 1551749 - RNA, 19 nt, Homo sapiens
  misc_RNA (1)...(19): siRNA sense strand
acaaaggguauaaugaugu

SEQ ID NO: 1551750 - RNA, 19 nt, Homo sapiens
  misc_RNA (1)...(19): siRNA sense strand
ugaaagcagccaacaaagg

SEQ ID NO: 1551751 - RNA, 19 nt, Homo sapiens
  misc_RNA (1)...(19): siRNA sense strand
acaacugcccuauucuuug

SEQ ID NO: 1551752 - RNA, 19 nt, Homo sapiens
  misc_RNA (1)...(19): siRNA sense strand
ccagcaaggccauaaugau

SEQ ID NO: 1551753 - RNA, 19 nt, Homo sapiens
  misc_RNA (1)...(19): siRNA sense strand
gcagugcucaguggaaaca

SEQ ID NO: 1551754 - RNA, 19 nt, Homo sapiens
  misc_RNA (1)...(19): siRNA sense strand
acuuggauguuauucgauu

SEQ ID NO: 1551755 - RNA, 19 nt, Homo sapiens
  misc_RNA (1)...(19): siRNA sense strand
ggcacaacagcauuauuga

SEQ ID NO: 1551756 - RNA, 19 nt, Homo sapiens
  misc_RNA (1)...(19): siRNA sense strand
guggaucgcgucccagaug

SEQ ID NO: 1551757 - RNA, 19 nt, Homo sapiens
  misc_RNA (1)...(19): siRNA sense strand
gagagagucagguacaacu

SEQ ID NO: 1551758 - RNA, 19 nt, Homo sapiens
  misc_RNA (1)...(19): siRNA sense strand
gaaaccuggcgcugcugaa

SEQ ID NO: 1551759 - RNA, 19 nt, Homo sapiens
  misc_RNA (1)...(19): siRNA sense strand
uccaugaccaacuuuauga

SEQ ID NO: 1551760 - RNA, 19 nt, Homo sapiens
  misc_RNA (1)...(19): siRNA sense strand
agaguugcuuaaauucuca

SEQ ID NO: 1551761 - RNA, 19 nt, Homo sapiens
  misc_RNA (1)...(19): siRNA sense strand
gcccagcaaggccauaaug

SEQ ID NO: 1551762 - RNA, 19 nt, Homo sapiens
  misc_RNA (1)...(19): siRNA sense strand
caugaccaacuuuaugaug

SEQ ID NO: 1551763 - RNA, 19 nt, Homo sapiens
  misc_RNA (1)...(19): siRNA sense strand
gacaucagcgcuccaugca

SEQ ID NO: 1551764 - RNA, 19 nt, Homo sapiens
  misc_RNA (1)...(19): siRNA sense strand
aagaaggaaacuccacuug

SEQ ID NO: 1551765 - RNA, 19 nt, Homo sapiens
  misc_RNA (1)...(19): siRNA sense strand
uggagccacugcccucuuc

SEQ ID NO: 1551766 - RNA, 19 nt, Homo sapiens
  misc_RNA (1)...(19): siRNA sense strand
cauccaugaccaacuuuau

SEQ ID NO: 1551767 - RNA, 19 nt, Homo sapiens
  misc_RNA (1)...(19): siRNA sense strand
gcagccaacaaaggguaua

SEQ ID NO: 1551768 - RNA, 19 nt, Homo sapiens
  misc_RNA (1)...(19): siRNA sense strand
aaugaugucgugagauuuc

SEQ ID NO: 1551769 - RNA, 19 nt, Homo sapiens
  misc_RNA (1)...(19): siRNA sense strand
guggaaacauuaaaacagu

SEQ ID NO: 1551770 - RNA, 19 nt, Homo sapiens
  misc_RNA (1)...(19): siRNA sense strand
ugaacuuccggcagaacua

SEQ ID NO: 1551771 - RNA, 19 nt, Homo sapiens
  misc_RNA (1)...(19): siRNA sense strand
acccaucccugagaaacaa

SEQ ID NO: 1551772 - RNA, 19 nt, Homo sapiens
  misc_RNA (1)...(19): siRNA sense strand
gaagaucgccgucaagaug

SEQ ID NO: 1551773 - RNA, 19 nt, Homo sapiens
  misc_RNA (1)...(19): siRNA sense strand
gcaccuacuucaucuauag

SEQ ID NO: 1551774 - RNA, 19 nt, Homo sapiens
  misc_RNA (1)...(19): siRNA sense strand
gccauacucugaagaagaa

SEQ ID NO: 1551775 - RNA, 19 nt, Homo sapiens
  misc_RNA (1)...(19): siRNA sense strand
gaagaaaguaggcguguuc

SEQ ID NO: 1551776 - RNA, 19 nt, Homo sapiens
  misc_RNA (1)...(19): siRNA sense strand
gagcagauggcccaguuaa

SEQ ID NO: 1551777 - RNA, 19 nt, Homo sapiens
  misc_RNA (1)...(19): siRNA sense strand
gcugacaucuccaucaaca

SEQ ID NO: 1551778 - RNA, 19 nt, Homo sapiens
  misc_RNA (1)...(19): siRNA sense strand
ucacugacuuugccagcua

SEQ ID NO: 1551779 - RNA, 19 nt, Homo sapiens
  misc_RNA (1)...(19): siRNA sense strand
ccagauggcccuauugaau

SEQ ID NO: 1551780 - RNA, 19 nt, Homo sapiens
  misc_RNA (1)...(19): siRNA sense strand
agauggcccuauugaauuu

SEQ ID NO: 1551781 - RNA, 19 nt, Homo sapiens
  misc_RNA (1)...(19): siRNA sense strand
ggucagcaauucaagucaa

SEQ ID NO: 1551782 - RNA, 19 nt, Homo sapiens
  misc_RNA (1)...(19): siRNA sense strand
ggacggcaccuacuucauc

SEQ ID NO: 1551783 - RNA, 19 nt, Homo sapiens
  misc_RNA (1)...(19): siRNA sense strand
gaaguauacuacaucaacu

SEQ ID NO: 1551784 - RNA, 19 nt, Homo sapiens
  misc_RNA (1)...(19): siRNA sense strand
cagguggagugcucaauga

SEQ ID NO: 1551785 - RNA, 19 nt, Homo sapiens
  misc_RNA (1)...(19): siRNA sense strand
gaacagcugccugcucuuc

SEQ ID NO: 1551786 - RNA, 19 nt, Homo sapiens
  misc_RNA (1)...(19): siRNA sense strand
cagauggcccuauugaauu

SEQ ID NO: 1551787 - RNA, 19 nt, Homo sapiens
  misc_RNA (1)...(19): siRNA sense strand
ccuauugaauuucuucuuc

SEQ ID NO: 1551788 - RNA, 19 nt, Homo sapiens
  misc_RNA (1)...(19): siRNA sense strand
ggccaagggucagcaauuc

SEQ ID NO: 1551789 - RNA, 19 nt, Homo sapiens
  misc_RNA (1)...(19): siRNA sense strand
ggucucgcaucacuaugaa

SEQ ID NO: 1551790 - RNA, 19 nt, Homo sapiens
  misc_RNA (1)...(19): siRNA sense strand
ggcagaagaucgccgucaa

SEQ ID NO: 1551791 - RNA, 19 nt, Homo sapiens
  misc_RNA (1)...(19): siRNA sense strand
cuucaucuauagucaggua

SEQ ID NO: 1551792 - RNA, 19 nt, Homo sapiens
  misc_RNA (1)...(19): siRNA sense strand
ugacaucuccaucaacaug

SEQ ID NO: 1551793 - RNA, 19 nt, Homo sapiens
  misc_RNA (1)...(19): siRNA sense strand
auagucagguagaaguaua

SEQ ID NO: 1551794 - RNA, 19 nt, Homo sapiens
  misc_RNA (1)...(19): siRNA sense strand
gcagauggcccaguuaaaa

SEQ ID NO: 1551795 - RNA, 19 nt, Homo sapiens
  misc_RNA (1)...(19): siRNA sense strand
gcaagcacaccacguucuu

SEQ ID NO: 1551796 - RNA, 19 nt, Homo sapiens
  misc_RNA (1)...(19): siRNA sense strand
gaaaagccauacucugaag

SEQ ID NO: 1551797 - RNA, 19 nt, Homo sapiens
  misc_RNA (1)...(19): siRNA sense strand
ugacuggucucgcaucacu

SEQ ID NO: 1551798 - RNA, 19 nt, Homo sapiens
  misc_RNA (1)...(19): siRNA sense strand
caacuacaacacuugcuau

SEQ ID NO: 1551799 - RNA, 19 nt, Homo sapiens
  misc_RNA (1)...(19): siRNA sense strand
aagccgcacuccacucuga

SEQ ID NO: 1551800 - RNA, 19 nt, Homo sapiens
  misc_RNA (1)...(19): siRNA sense strand
caccuaagcagcagccauu

SEQ ID NO: 1551801 - RNA, 19 nt, Homo sapiens
  misc_RNA (1)...(19): siRNA sense strand
ccaacuacaacacuugcua

SEQ ID NO: 1551802 - RNA, 19 nt, Homo sapiens
  misc_RNA (1)...(19): siRNA sense strand
caucaacuucacugacuuu

SEQ ID NO: 1551803 - RNA, 19 nt, Homo sapiens
  misc_RNA (1)...(19): siRNA sense strand
ggcaccuacuucaucuaua

SEQ ID NO: 1551804 - RNA, 19 nt, Homo sapiens
  misc_RNA (1)...(19): siRNA sense strand
gggccaagggucagcaauu

SEQ ID NO: 1551805 - RNA, 19 nt, Homo sapiens
  misc_RNA (1)...(19): siRNA sense strand
ggagcagauggcccaguua

SEQ ID NO: 1551806 - RNA, 19 nt, Homo sapiens
  misc_RNA (1)...(19): siRNA sense strand
ggcaccagauggcccuauu

SEQ ID NO: 1551807 - RNA, 19 nt, Homo sapiens
  misc_RNA (1)...(19): siRNA sense strand
cuacaacacuugcuauacc

SEQ ID NO: 1551808 - RNA, 19 nt, Homo sapiens
  misc_RNA (1)...(19): siRNA sense strand
gcaccagauggcccuauug

SEQ ID NO: 1551809 - RNA, 19 nt, Homo sapiens
  misc_RNA (1)...(19): siRNA sense strand
cagaagaucgccgucaaga

SEQ ID NO: 1551810 - RNA, 19 nt, Homo sapiens
  misc_RNA (1)...(19): siRNA sense strand
ccaagguguuuaagcuaca

SEQ ID NO: 1551811 - RNA, 19 nt, Homo sapiens
  misc_RNA (1)...(19): siRNA sense strand
ccaagggucagcaauucaa

SEQ ID NO: 1551812 - RNA, 19 nt, Homo sapiens
  misc_RNA (1)...(19): siRNA sense strand
caccagauggcccuauuga

SEQ ID NO: 1551813 - RNA, 19 nt, Homo sapiens
  misc_RNA (1)...(19): siRNA sense strand
gcucuuccuggguuucuuu

SEQ ID NO: 1551814 - RNA, 19 nt, Homo sapiens
  misc_RNA (1)...(19): siRNA sense strand
ugagcaagcacaccacguu

SEQ ID NO: 1551815 - RNA, 19 nt, Homo sapiens
  misc_RNA (1)...(19): siRNA sense strand
gacggcaccuacuucaucu

SEQ ID NO: 1551816 - RNA, 19 nt, Homo sapiens
  misc_RNA (1)...(19): siRNA sense strand
cuaagcagcagccauugga

SEQ ID NO: 1551817 - RNA, 19 nt, Homo sapiens
  misc_RNA (1)...(19): siRNA sense strand
acgcugacaucuccaucaa

SEQ ID NO: 1551818 - RNA, 19 nt, Homo sapiens
  misc_RNA (1)...(19): siRNA sense strand
cagcaauucaagucaagaa

SEQ ID NO: 1551819 - RNA, 19 nt, Homo sapiens
  misc_RNA (1)...(19): siRNA sense strand
aggagcagauggcccaguu

SEQ ID NO: 1551820 - RNA, 19 nt, Homo sapiens
  misc_RNA (1)...(19): siRNA sense strand
aaagccauacucugaagaa

SEQ ID NO: 1551821 - RNA, 19 nt, Homo sapiens
  misc_RNA (1)...(19): siRNA sense strand
caagcacaccacguucuuu

SEQ ID NO: 1551822 - RNA, 19 nt, Homo sapiens
  misc_RNA (1)...(19): siRNA sense strand
gcagaagaucgccgucaag

SEQ ID NO: 1551823 - RNA, 19 nt, Homo sapiens
  misc_RNA (1)...(19): siRNA sense strand
uacaucaacuucacugacu

SEQ ID NO: 1551824 - RNA, 19 nt, Homo sapiens
  misc_RNA (1)...(19): siRNA sense strand
gugcugcuaccuagaguug

SEQ ID NO: 1551825 - RNA, 19 nt, Homo sapiens
  misc_RNA (1)...(19): siRNA sense strand
cccaggaauuccagggauu

SEQ ID NO: 1551826 - RNA, 19 nt, Homo sapiens
  misc_RNA (1)...(19): siRNA sense strand
ggcaagaccaacuacaaca

SEQ ID NO: 1551827 - RNA, 19 nt, Homo sapiens
  misc_RNA (1)...(19): siRNA sense strand
agaaguauacuacaucaac

SEQ ID NO: 1551828 - RNA, 19 nt, Homo sapiens
  misc_RNA (1)...(19): siRNA sense strand
agaagaaaguaggcguguu

SEQ ID NO: 1551829 - RNA, 19 nt, Homo sapiens
  misc_RNA (1)...(19): siRNA sense strand
gacguugugcugcuaccua

SEQ ID NO: 1551830 - RNA, 19 nt, Homo sapiens
  misc_RNA (1)...(19): siRNA sense strand
cagcuguggugcaucuaca

SEQ ID NO: 1551831 - RNA, 19 nt, Homo sapiens
  misc_RNA (1)...(19): siRNA sense strand
aaagcuggaacucgagaaa

SEQ ID NO: 1551832 - RNA, 19 nt, Homo sapiens
  misc_RNA (1)...(19): siRNA sense strand
aagcacaccacguucuuug

SEQ ID NO: 1551833 - RNA, 19 nt, Homo sapiens
  misc_RNA (1)...(19): siRNA sense strand
gggcaagaccaacuacaac

SEQ ID NO: 1551834 - RNA, 19 nt, Homo sapiens
  misc_RNA (1)...(19): siRNA sense strand
gacaucuccaucaacauga

SEQ ID NO: 1551835 - RNA, 19 nt, Homo sapiens
  misc_RNA (1)...(19): siRNA sense strand
aagaccaacuacaacacuu

SEQ ID NO: 1551836 - RNA, 19 nt, Homo sapiens
  misc_RNA (1)...(19): siRNA sense strand
aaaagaagcaaaagcaaug

SEQ ID NO: 1551837 - RNA, 19 nt, Homo sapiens
  misc_RNA (1)...(19): siRNA sense strand
agacgggcaagaccaacua

SEQ ID NO: 1551838 - RNA, 19 nt, Homo sapiens
  misc_RNA (1)...(19): siRNA sense strand
gaauuucuucuucccugau

SEQ ID NO: 1551839 - RNA, 19 nt, Homo sapiens
  misc_RNA (1)...(19): siRNA sense strand
cuucuggugcugcugauaa

SEQ ID NO: 1551840 - RNA, 19 nt, Homo sapiens
  misc_RNA (1)...(19): siRNA sense strand
ccuacuucaucuauaguca

SEQ ID NO: 1551841 - RNA, 19 nt, Homo sapiens
  misc_RNA (1)...(19): siRNA sense strand
ucagguggagugcucaaug

SEQ ID NO: 1551842 - RNA, 19 nt, Homo sapiens
  misc_RNA (1)...(19): siRNA sense strand
cggcaccuacuucaucuau

SEQ ID NO: 1551843 - RNA, 19 nt, Homo sapiens
  misc_RNA (1)...(19): siRNA sense strand
caccucagcuucugcuuua

SEQ ID NO: 1551844 - RNA, 19 nt, Homo sapiens
  misc_RNA (1)...(19): siRNA sense strand
gaagaccagucguccaaga

SEQ ID NO: 1551845 - RNA, 19 nt, Homo sapiens
  misc_RNA (1)...(19): siRNA sense strand
ggacauggcccagcaggaa

SEQ ID NO: 1551846 - RNA, 19 nt, Homo sapiens
  misc_RNA (1)...(19): siRNA sense strand
aggcggacauucccaaaua

SEQ ID NO: 1551847 - RNA, 19 nt, Homo sapiens
  misc_RNA (1)...(19): siRNA sense strand
gaugggagccagacagaga

SEQ ID NO: 1551848 - RNA, 19 nt, Homo sapiens
  misc_RNA (1)...(19): siRNA sense strand
gacggcagcuguucacaag

SEQ ID NO: 1551849 - RNA, 19 nt, Homo sapiens
  misc_RNA (1)...(19): siRNA sense strand
gcuuuagucuggccagugu

SEQ ID NO: 1551850 - RNA, 19 nt, Homo sapiens
  misc_RNA (1)...(19): siRNA sense strand
guuccugguuccuaucuug

SEQ ID NO: 1551851 - RNA, 19 nt, Homo sapiens
  misc_RNA (1)...(19): siRNA sense strand
ggcggacauucccaaauau

SEQ ID NO: 1551852 - RNA, 19 nt, Homo sapiens
  misc_RNA (1)...(19): siRNA sense strand
cggcagcuguucacaagca

SEQ ID NO: 1551853 - RNA, 19 nt, Homo sapiens
  misc_RNA (1)...(19): siRNA sense strand
ccaccucagcuucugcuuu

SEQ ID NO: 1551854 - RNA, 19 nt, Homo sapiens
  misc_RNA (1)...(19): siRNA sense strand
gcaguguuccugguuccua

SEQ ID NO: 1551855 - RNA, 19 nt, Homo sapiens
  misc_RNA (1)...(19): siRNA sense strand
ggacauucccaaauaucca

SEQ ID NO: 1551856 - RNA, 19 nt, Homo sapiens
  misc_RNA (1)...(19): siRNA sense strand
cugcagaccagaaucaaga

SEQ ID NO: 1551857 - RNA, 19 nt, Homo sapiens
  misc_RNA (1)...(19): siRNA sense strand
aagaagaccagucguccaa

SEQ ID NO: 1551858 - RNA, 19 nt, Homo sapiens
  misc_RNA (1)...(19): siRNA sense strand
guucgaagagcacuuugug

SEQ ID NO: 1551859 - RNA, 19 nt, Homo sapiens
  misc_RNA (1)...(19): siRNA sense strand
caguguuccugguuccuau

SEQ ID NO: 1551860 - RNA, 19 nt, Homo sapiens
  misc_RNA (1)...(19): siRNA sense strand
caaauauccaacucugcuu

SEQ ID NO: 1551861 - RNA, 19 nt, Homo sapiens
  misc_RNA (1)...(19): siRNA sense strand
gacauucccaaauauccaa

SEQ ID NO: 1551862 - RNA, 19 nt, Homo sapiens
  misc_RNA (1)...(19): siRNA sense strand
ccaagacggcagcuguuca

SEQ ID NO: 1551863 - RNA, 19 nt, Homo sapiens
  misc_RNA (1)...(19): siRNA sense strand
gcaacaaccucaccaauuu

SEQ ID NO: 1551864 - RNA, 19 nt, Homo sapiens
  misc_RNA (1)...(19): siRNA sense strand
gcaaaucuccuaccuuguu

SEQ ID NO: 1551865 - RNA, 19 nt, Homo sapiens
  misc_RNA (1)...(19): siRNA sense strand
gcaacagccucaagauuca

SEQ ID NO: 1551866 - RNA, 19 nt, Homo sapiens
  misc_RNA (1)...(19): siRNA sense strand
ugaggaacaugguguguaa

SEQ ID NO: 1551867 - RNA, 19 nt, Homo sapiens
  misc_RNA (1)...(19): siRNA sense strand
ggucuuaucucugcaacaa

SEQ ID NO: 1551868 - RNA, 19 nt, Homo sapiens
  misc_RNA (1)...(19): siRNA sense strand
caaaucuccuaccuuguuu

SEQ ID NO: 1551869 - RNA, 19 nt, Homo sapiens
  misc_RNA (1)...(19): siRNA sense strand
aggauugccucccaaauuu

SEQ ID NO: 1551870 - RNA, 19 nt, Homo sapiens
  misc_RNA (1)...(19): siRNA sense strand
gcgagcacaugaaggauug

SEQ ID NO: 1551871 - RNA, 19 nt, Homo sapiens
  misc_RNA (1)...(19): siRNA sense strand
gcagcucgucuucgucuua

SEQ ID NO: 1551872 - RNA, 19 nt, Homo sapiens
  misc_RNA (1)...(19): siRNA sense strand
caggcaggguuucucaaua

SEQ ID NO: 1551873 - RNA, 19 nt, Homo sapiens
  misc_RNA (1)...(19): siRNA sense strand
gaacauaaccagcuuuuag

SEQ ID NO: 1551874 - RNA, 19 nt, Homo sapiens
  misc_RNA (1)...(19): siRNA sense strand
auucagagcuguugcuuuc

SEQ ID NO: 1551875 - RNA, 19 nt, Homo sapiens
  misc_RNA (1)...(19): siRNA sense strand
cgucuuaggccuccuguuu

SEQ ID NO: 1551876 - RNA, 19 nt, Homo sapiens
  misc_RNA (1)...(19): siRNA sense strand
gagcuguugcuuuccauaa

SEQ ID NO: 1551877 - RNA, 19 nt, Homo sapiens
  misc_RNA (1)...(19): siRNA sense strand
guguuacaguuccaccuua

SEQ ID NO: 1551878 - RNA, 19 nt, Homo sapiens
  misc_RNA (1)...(19): siRNA sense strand
gaguguccauugccuccua

SEQ ID NO: 1551879 - RNA, 19 nt, Homo sapiens
  misc_RNA (1)...(19): siRNA sense strand
ggccagcacuccuaagucu

SEQ ID NO: 1551880 - RNA, 19 nt, Homo sapiens
  misc_RNA (1)...(19): siRNA sense strand
caacaaccucaccaauuug

SEQ ID NO: 1551881 - RNA, 19 nt, Homo sapiens
  misc_RNA (1)...(19): siRNA sense strand
ggugugcucgugaacauaa

SEQ ID NO: 1551882 - RNA, 19 nt, Homo sapiens
  misc_RNA (1)...(19): siRNA sense strand
gaagcaacagccucaagau

SEQ ID NO: 1551883 - RNA, 19 nt, Homo sapiens
  misc_RNA (1)...(19): siRNA sense strand
gcgaggagacgcuaguguu

SEQ ID NO: 1551884 - RNA, 19 nt, Homo sapiens
  misc_RNA (1)...(19): siRNA sense strand
cagcuguucugccuucuag

SEQ ID NO: 1551885 - RNA, 19 nt, Homo sapiens
  misc_RNA (1)...(19): siRNA sense strand
gcuucuacguguuacaguu

SEQ ID NO: 1551886 - RNA, 19 nt, Homo sapiens
  misc_RNA (1)...(19): siRNA sense strand
aaggauugccucccaaauu

SEQ ID NO: 1551887 - RNA, 19 nt, Homo sapiens
  misc_RNA (1)...(19): siRNA sense strand
gaaggauugccucccaaau

SEQ ID NO: 1551888 - RNA, 19 nt, Homo sapiens
  misc_RNA (1)...(19): siRNA sense strand
uguuacaguuccaccuuaa

SEQ ID NO: 1551889 - RNA, 19 nt, Homo sapiens
  misc_RNA (1)...(19): siRNA sense strand
cgucuuacccugcgcaaau

SEQ ID NO: 1551890 - RNA, 19 nt, Homo sapiens
  misc_RNA (1)...(19): siRNA sense strand
ugaagcaacagccucaaga

SEQ ID NO: 1551891 - RNA, 19 nt, Homo sapiens
  misc_RNA (1)...(19): siRNA sense strand
ccagcacuccuaagucuau

SEQ ID NO: 1551892 - RNA, 19 nt, Homo sapiens
  misc_RNA (1)...(19): siRNA sense strand
ggaguugugggcuuuaaag

SEQ ID NO: 1551893 - RNA, 19 nt, Homo sapiens
  misc_RNA (1)...(19): siRNA sense strand
ucacaucugcguccuguag

SEQ ID NO: 1551894 - RNA, 19 nt, Homo sapiens
  misc_RNA (1)...(19): siRNA sense strand
gagacgcuaguguucauug

SEQ ID NO: 1551895 - RNA, 19 nt, Homo sapiens
  misc_RNA (1)...(19): siRNA sense strand
aagcaacagccucaagauu

SEQ ID NO: 1551896 - RNA, 19 nt, Homo sapiens
  misc_RNA (1)...(19): siRNA sense strand
agacgcuaguguucauuga

SEQ ID NO: 1551897 - RNA, 19 nt, Homo sapiens
  misc_RNA (1)...(19): siRNA sense strand
ugcaacaaccucaccaauu

SEQ ID NO: 1551898 - RNA, 19 nt, Homo sapiens
  misc_RNA (1)...(19): siRNA sense strand
caucauauugggagcauca

SEQ ID NO: 1551899 - RNA, 19 nt, Homo sapiens
  misc_RNA (1)...(19): siRNA sense strand
acgcuaguguucauugaga

SEQ ID NO: 1551900 - RNA, 19 nt, Homo sapiens
  misc_RNA (1)...(19): siRNA sense strand
aggcaggguuucucaauac

SEQ ID NO: 1551901 - RNA, 19 nt, Homo sapiens
  misc_RNA (1)...(19): siRNA sense strand
gaggagacgcuaguguuca

SEQ ID NO: 1551902 - RNA, 19 nt, Homo sapiens
  misc_RNA (1)...(19): siRNA sense strand
uggcugcuucuacguguua

SEQ ID NO: 1551903 - RNA, 19 nt, Homo sapiens
  misc_RNA (1)...(19): siRNA sense strand
ucagagcuguugcuuucca

SEQ ID NO: 1551904 - RNA, 19 nt, Homo sapiens
  misc_RNA (1)...(19): siRNA sense strand
ucaaggccagcacuccuaa

SEQ ID NO: 1551905 - RNA, 19 nt, Homo sapiens
  misc_RNA (1)...(19): siRNA sense strand
gcuguugcuuuccauaacu

SEQ ID NO: 1551906 - RNA, 19 nt, Homo sapiens
  misc_RNA (1)...(19): siRNA sense strand
cgaggagacgcuaguguuc

SEQ ID NO: 1551907 - RNA, 19 nt, Homo sapiens
  misc_RNA (1)...(19): siRNA sense strand
ggaacaugguguguaagcu

SEQ ID NO: 1551908 - RNA, 19 nt, Homo sapiens
  misc_RNA (1)...(19): siRNA sense strand
gauucagagcuguugcuuu

SEQ ID NO: 1551909 - RNA, 19 nt, Homo sapiens
  misc_RNA (1)...(19): siRNA sense strand
ugaaggauugccucccaaa

SEQ ID NO: 1551910 - RNA, 19 nt, Homo sapiens
  misc_RNA (1)...(19): siRNA sense strand
agcaacagccucaagauuc

SEQ ID NO: 1551911 - RNA, 19 nt, Homo sapiens
  misc_RNA (1)...(19): siRNA sense strand
ggcgagcacaugaaggauu

SEQ ID NO: 1551912 - RNA, 19 nt, Homo sapiens
  misc_RNA (1)...(19): siRNA sense strand
guagcugcccgaccugugu

SEQ ID NO: 1551913 - RNA, 19 nt, Homo sapiens
  misc_RNA (1)...(19): siRNA sense strand
gggaguugugggcuuuaaa

SEQ ID NO: 1551914 - RNA, 19 nt, Homo sapiens
  misc_RNA (1)...(19): siRNA sense strand
cauauugggagcaucaaag

SEQ ID NO: 1551915 - RNA, 19 nt, Homo sapiens
  misc_RNA (1)...(19): siRNA sense strand
ugagacuugugcagcuguu

SEQ ID NO: 1551916 - RNA, 19 nt, Homo sapiens
  misc_RNA (1)...(19): siRNA sense strand
gauuauggcucuuguauua

SEQ ID NO: 1551917 - RNA, 19 nt, Homo sapiens
  misc_RNA (1)...(19): siRNA sense strand
gaaaggagcuuaucacugu

SEQ ID NO: 1551918 - RNA, 19 nt, Homo sapiens
  misc_RNA (1)...(19): siRNA sense strand
gaacagaugugcauucaga

SEQ ID NO: 1551919 - RNA, 19 nt, Homo sapiens
  misc_RNA (1)...(19): siRNA sense strand
gaaaagagauccugugaua

SEQ ID NO: 1551920 - RNA, 19 nt, Homo sapiens
  misc_RNA (1)...(19): siRNA sense strand
gaaauaacuugaugagguu

SEQ ID NO: 1551921 - RNA, 19 nt, Homo sapiens
  misc_RNA (1)...(19): siRNA sense strand
ugaaauugcucacuuauga

SEQ ID NO: 1551922 - RNA, 19 nt, Homo sapiens
  misc_RNA (1)...(19): siRNA sense strand
ucacagagcauuccauuua

SEQ ID NO: 1551923 - RNA, 19 nt, Homo sapiens
  misc_RNA (1)...(19): siRNA sense strand
ggaaagaaauaacuugaug

SEQ ID NO: 1551924 - RNA, 19 nt, Homo sapiens
  misc_RNA (1)...(19): siRNA sense strand
ggauagaguugcauuugua

SEQ ID NO: 1551925 - RNA, 19 nt, Homo sapiens
  misc_RNA (1)...(19): siRNA sense strand
cgaagacacucaugaagua

SEQ ID NO: 1551926 - RNA, 19 nt, Homo sapiens
  misc_RNA (1)...(19): siRNA sense strand
guuaauacauggucaagua

SEQ ID NO: 1551927 - RNA, 19 nt, Homo sapiens
  misc_RNA (1)...(19): siRNA sense strand
guucaagaauggauuguua

SEQ ID NO: 1551928 - RNA, 19 nt, Homo sapiens
  misc_RNA (1)...(19): siRNA sense strand
acgaagagcugucaaagua

SEQ ID NO: 1551929 - RNA, 19 nt, Homo sapiens
  misc_RNA (1)...(19): siRNA sense strand
gaagagaguucacccaaca

SEQ ID NO: 1551930 - RNA, 19 nt, Homo sapiens
  misc_RNA (1)...(19): siRNA sense strand
gcucacaccuguacacaaa

SEQ ID NO: 1551931 - RNA, 19 nt, Homo sapiens
  misc_RNA (1)...(19): siRNA sense strand
ccacuggacuuacgaauau

SEQ ID NO: 1551932 - RNA, 19 nt, Homo sapiens
  misc_RNA (1)...(19): siRNA sense strand
gaacauaacagaagagauc

SEQ ID NO: 1551933 - RNA, 19 nt, Homo sapiens
  misc_RNA (1)...(19): siRNA sense strand
gaaauacucagaugugaaa

SEQ ID NO: 1551934 - RNA, 19 nt, Homo sapiens
  misc_RNA (1)...(19): siRNA sense strand
ccauauaguuucucuguuu

SEQ ID NO: 1551935 - RNA, 19 nt, Homo sapiens
  misc_RNA (1)...(19): siRNA sense strand
ggaaguguuuaaagaagua

SEQ ID NO: 1551936 - RNA, 19 nt, Homo sapiens
  misc_RNA (1)...(19): siRNA sense strand
gagggaauguguauauauu

SEQ ID NO: 1551937 - RNA, 19 nt, Homo sapiens
  misc_RNA (1)...(19): siRNA sense strand
ggucaaguauuuacaaaga

SEQ ID NO: 1551938 - RNA, 19 nt, Homo sapiens
  misc_RNA (1)...(19): siRNA sense strand
gagaugugguugcuccuua

SEQ ID NO: 1551939 - RNA, 19 nt, Homo sapiens
  misc_RNA (1)...(19): siRNA sense strand
gaaggcaauuuccaauauu

SEQ ID NO: 1551940 - RNA, 19 nt, Homo sapiens
  misc_RNA (1)...(19): siRNA sense strand
gaacaguccuucagacaag

SEQ ID NO: 1551941 - RNA, 19 nt, Homo sapiens
  misc_RNA (1)...(19): siRNA sense strand
ucaguuggccguugaauua

SEQ ID NO: 1551942 - RNA, 19 nt, Homo sapiens
  misc_RNA (1)...(19): siRNA sense strand
gaagagcaguguguugaaa

SEQ ID NO: 1551943 - RNA, 19 nt, Homo sapiens
  misc_RNA (1)...(19): siRNA sense strand
caccaaaccugaagucauu

SEQ ID NO: 1551944 - RNA, 19 nt, Homo sapiens
  misc_RNA (1)...(19): siRNA sense strand
cugaagaacuggaguaauu

SEQ ID NO: 1551945 - RNA, 19 nt, Homo sapiens
  misc_RNA (1)...(19): siRNA sense strand
gaccaaagauugauacagu

SEQ ID NO: 1551946 - RNA, 19 nt, Homo sapiens
  misc_RNA (1)...(19): siRNA sense strand
ggaguaagcaugcauaaau

SEQ ID NO: 1551947 - RNA, 19 nt, Homo sapiens
  misc_RNA (1)...(19): siRNA sense strand
acacuuagcuccucucuuc

SEQ ID NO: 1551948 - RNA, 19 nt, Homo sapiens
  misc_RNA (1)...(19): siRNA sense strand
ggacuaagauuuggagcaa

SEQ ID NO: 1551949 - RNA, 19 nt, Homo sapiens
  misc_RNA (1)...(19): siRNA sense strand
gaagaacuuuacaacacua

SEQ ID NO: 1551950 - RNA, 19 nt, Homo sapiens
  misc_RNA (1)...(19): siRNA sense strand
gaguaagcaugcauaaauu

SEQ ID NO: 1551951 - RNA, 19 nt, Homo sapiens
  misc_RNA (1)...(19): siRNA sense strand
gaagagagaauucguguca

SEQ ID NO: 1551952 - RNA, 19 nt, Homo sapiens
  misc_RNA (1)...(19): siRNA sense strand
ccauauugcuguuagagua

SEQ ID NO: 1551953 - RNA, 19 nt, Homo sapiens
  misc_RNA (1)...(19): siRNA sense strand
gaaaguaaaccagaagauu

SEQ ID NO: 1551954 - RNA, 19 nt, Homo sapiens
  misc_RNA (1)...(19): siRNA sense strand
ggcaggaccuuauguaaug

SEQ ID NO: 1551955 - RNA, 19 nt, Homo sapiens
  misc_RNA (1)...(19): siRNA sense strand
ggaugagccuucagauuug

SEQ ID NO: 1551956 - RNA, 19 nt, Homo sapiens
  misc_RNA (1)...(19): siRNA sense strand
gggaggagguuuacgaaga

SEQ ID NO: 1551957 - RNA, 19 nt, Homo sapiens
  misc_RNA (1)...(19): siRNA sense strand
ggucucacuucuccauuua

SEQ ID NO: 1551958 - RNA, 19 nt, Homo sapiens
  misc_RNA (1)...(19): siRNA sense strand
gaaagaaagauaagacuuc

SEQ ID NO: 1551959 - RNA, 19 nt, Homo sapiens
  misc_RNA (1)...(19): siRNA sense strand
aaggugaucuugaaaguaa

SEQ ID NO: 1551960 - RNA, 19 nt, Homo sapiens
  misc_RNA (1)...(19): siRNA sense strand
gcucuuguauuacuuaguu

SEQ ID NO: 1551961 - RNA, 19 nt, Homo sapiens
  misc_RNA (1)...(19): siRNA sense strand
caagauagaccaucaaaca

SEQ ID NO: 1551962 - RNA, 19 nt, Homo sapiens
  misc_RNA (1)...(19): siRNA sense strand
ggacgugguugacuccauu

SEQ ID NO: 1551963 - RNA, 19 nt, Homo sapiens
  misc_RNA (1)...(19): siRNA sense strand
gauuugcacuaucggaaua

SEQ ID NO: 1551964 - RNA, 19 nt, Homo sapiens
  misc_RNA (1)...(19): siRNA sense strand
gaagagcugucaaaguaca

SEQ ID NO: 1551965 - RNA, 19 nt, Homo sapiens
  misc_RNA (1)...(19): siRNA sense strand
gaacugagcauuuccaaac

SEQ ID NO: 1551966 - RNA, 19 nt, Homo sapiens
  misc_RNA (1)...(19): siRNA sense strand
ugaaggcaauuuccaauau

SEQ ID NO: 1551967 - RNA, 19 nt, Homo sapiens
  misc_RNA (1)...(19): siRNA sense strand
gcagagcccgauauuauuu

SEQ ID NO: 1551968 - RNA, 19 nt, Homo sapiens
  misc_RNA (1)...(19): siRNA sense strand
cagcagagcccgauauuau

SEQ ID NO: 1551969 - RNA, 19 nt, Homo sapiens
  misc_RNA (1)...(19): siRNA sense strand
gaagaauggucuguggaaa

SEQ ID NO: 1551970 - RNA, 19 nt, Homo sapiens
  misc_RNA (1)...(19): siRNA sense strand
ccaaauccauaccauauuc

SEQ ID NO: 1551971 - RNA, 19 nt, Homo sapiens
  misc_RNA (1)...(19): siRNA sense strand
ggagaugggaggagguuua

SEQ ID NO: 1551972 - RNA, 19 nt, Homo sapiens
  misc_RNA (1)...(19): siRNA sense strand
ugaaguagauuccaaagca

SEQ ID NO: 1551973 - RNA, 19 nt, Homo sapiens
  misc_RNA (1)...(19): siRNA sense strand
uaagaucuaucguucaaug

SEQ ID NO: 1551974 - RNA, 19 nt, Homo sapiens
  misc_RNA (1)...(19): siRNA sense strand
gcaacauggugaagaauca

SEQ ID NO: 1551975 - RNA, 19 nt, Homo sapiens
  misc_RNA (1)...(19): siRNA sense strand
cagcagcacuccucaguug

SEQ ID NO: 1551976 - RNA, 19 nt, Homo sapiens
  misc_RNA (1)...(19): siRNA sense strand
ccaaugcuguuucaucuug

SEQ ID NO: 1551977 - RNA, 19 nt, Homo sapiens
  misc_RNA (1)...(19): siRNA sense strand
gcaaauggaguuacccaaa

SEQ ID NO: 1551978 - RNA, 19 nt, Homo sapiens
  misc_RNA (1)...(19): siRNA sense strand
gaacugaagaacuggagua

SEQ ID NO: 1551979 - RNA, 19 nt, Homo sapiens
  misc_RNA (1)...(19): siRNA sense strand
aaaccaagcgcuuuccuua

SEQ ID NO: 1551980 - RNA, 19 nt, Homo sapiens
  misc_RNA (1)...(19): siRNA sense strand
gcacagcccuaccgaccaa

SEQ ID NO: 1551981 - RNA, 19 nt, Homo sapiens
  misc_RNA (1)...(19): siRNA sense strand
gagaugcccucaaagaaca

SEQ ID NO: 1551982 - RNA, 19 nt, Homo sapiens
  misc_RNA (1)...(19): siRNA sense strand
uaggauuucugaugcuuua

SEQ ID NO: 1551983 - RNA, 19 nt, Homo sapiens
  misc_RNA (1)...(19): siRNA sense strand
agagugaccugguagauga

SEQ ID NO: 1551984 - RNA, 19 nt, Homo sapiens
  misc_RNA (1)...(19): siRNA sense strand
uaaacaagguccaacuaau

SEQ ID NO: 1551985 - RNA, 19 nt, Homo sapiens
  misc_RNA (1)...(19): siRNA sense strand
gagggugggccaaauguua

SEQ ID NO: 1551986 - RNA, 19 nt, Homo sapiens
  misc_RNA (1)...(19): siRNA sense strand
gaacaugcuuccagaucau

SEQ ID NO: 1551987 - RNA, 19 nt, Homo sapiens
  misc_RNA (1)...(19): siRNA sense strand
gcaaaugcauaugauaauc

SEQ ID NO: 1551988 - RNA, 19 nt, Homo sapiens
  misc_RNA (1)...(19): siRNA sense strand
gcauucccauuucauauug

SEQ ID NO: 1551989 - RNA, 19 nt, Homo sapiens
  misc_RNA (1)...(19): siRNA sense strand
caacuaauacucuggaaga

SEQ ID NO: 1551990 - RNA, 19 nt, Homo sapiens
  misc_RNA (1)...(19): siRNA sense strand
agaaggagauaauacagaa

SEQ ID NO: 1551991 - RNA, 19 nt, Homo sapiens
  misc_RNA (1)...(19): siRNA sense strand
gaagcuagcaaaguucaua

SEQ ID NO: 1551992 - RNA, 19 nt, Homo sapiens
  misc_RNA (1)...(19): siRNA sense strand
gcuaugaaauugcucacuu

SEQ ID NO: 1551993 - RNA, 19 nt, Homo sapiens
  misc_RNA (1)...(19): siRNA sense strand
ccaaagauugauacaguua

SEQ ID NO: 1551994 - RNA, 19 nt, Homo sapiens
  misc_RNA (1)...(19): siRNA sense strand
gcauucagauuaaagaagu

SEQ ID NO: 1551995 - RNA, 19 nt, Homo sapiens
  misc_RNA (1)...(19): siRNA sense strand
ccauggaaguguuuaaaga

SEQ ID NO: 1551996 - RNA, 19 nt, Homo sapiens
  misc_RNA (1)...(19): siRNA sense strand
cuaugaaauugcucacuua

SEQ ID NO: 1551997 - RNA, 19 nt, Homo sapiens
  misc_RNA (1)...(19): siRNA sense strand
gcuaucauaugacaccaaa

SEQ ID NO: 1551998 - RNA, 19 nt, Homo sapiens
  misc_RNA (1)...(19): siRNA sense strand
ugagagaaauucaacaaca

SEQ ID NO: 1551999 - RNA, 19 nt, Homo sapiens
  misc_RNA (1)...(19): siRNA sense strand
cagggcaucuuuauauuau

SEQ ID NO: 1552000 - RNA, 19 nt, Homo sapiens
  misc_RNA (1)...(19): siRNA sense strand
uguaagaccuucuguaugg

SEQ ID NO: 1552001 - RNA, 19 nt, Homo sapiens
  misc_RNA (1)...(19): siRNA sense strand
gcaguguguugaaauguau

SEQ ID NO: 1552002 - RNA, 19 nt, Homo sapiens
  misc_RNA (1)...(19): siRNA sense strand
guuggccguugaauuauua

SEQ ID NO: 1552003 - RNA, 19 nt, Homo sapiens
  misc_RNA (1)...(19): siRNA sense strand
caagagggaauguguauau

SEQ ID NO: 1552004 - RNA, 19 nt, Homo sapiens
  misc_RNA (1)...(19): siRNA sense strand
gaaaaggucuuauuaaagc

SEQ ID NO: 1552005 - RNA, 19 nt, Homo sapiens
  misc_RNA (1)...(19): siRNA sense strand
uauuaaagcugcaguuaca

SEQ ID NO: 1552006 - RNA, 19 nt, Homo sapiens
  misc_RNA (1)...(19): siRNA sense strand
gaagaggaaugauuauacg

SEQ ID NO: 1552007 - RNA, 19 nt, Homo sapiens
  misc_RNA (1)...(19): siRNA sense strand
aggagaagaugcaauuaaa

SEQ ID NO: 1552008 - RNA, 19 nt, Homo sapiens
  misc_RNA (1)...(19): siRNA sense strand
agaaugagauggagauaca

SEQ ID NO: 1552009 - RNA, 19 nt, Homo sapiens
  misc_RNA (1)...(19): siRNA sense strand
gcauaaccauuucauuaag

SEQ ID NO: 1552010 - RNA, 19 nt, Homo sapiens
  misc_RNA (1)...(19): siRNA sense strand
gauauaggacuuguuauug

SEQ ID NO: 1552011 - RNA, 19 nt, Homo sapiens
  misc_RNA (1)...(19): siRNA sense strand
ggaagaacuuuacaacacu

SEQ ID NO: 1552012 - RNA, 19 nt, Homo sapiens
  misc_RNA (1)...(19): siRNA sense strand
gcaauacuuuauccucaug

SEQ ID NO: 1552013 - RNA, 19 nt, Homo sapiens
  misc_RNA (1)...(19): siRNA sense strand
aaagagauccugugauaug

SEQ ID NO: 1552014 - RNA, 19 nt, Homo sapiens
  misc_RNA (1)...(19): siRNA sense strand
gaaaugccaucugaagaag

SEQ ID NO: 1552015 - RNA, 19 nt, Homo sapiens
  misc_RNA (1)...(19): siRNA sense strand
gagauagcauggauuuaca

SEQ ID NO: 1552016 - RNA, 19 nt, Homo sapiens
  misc_RNA (1)...(19): siRNA sense strand
aaagagcccuggaauauaa

SEQ ID NO: 1552017 - RNA, 19 nt, Homo sapiens
  misc_RNA (1)...(19): siRNA sense strand
ggagagaaaucuuacaaau

SEQ ID NO: 1552018 - RNA, 19 nt, Homo sapiens
  misc_RNA (1)...(19): siRNA sense strand
ggaaagugauguuagagaa

SEQ ID NO: 1552019 - RNA, 19 nt, Homo sapiens
  misc_RNA (1)...(19): siRNA sense strand
agagaaaccuuacaaaugu

SEQ ID NO: 1552020 - RNA, 19 nt, Homo sapiens
  misc_RNA (1)...(19): siRNA sense strand
cuacaaaugugaagaaugu

SEQ ID NO: 1552021 - RNA, 19 nt, Homo sapiens
  misc_RNA (1)...(19): siRNA sense strand
cuacaaaugugaagaaugu

SEQ ID NO: 1552022 - RNA, 19 nt, Homo sapiens
  misc_RNA (1)...(19): siRNA sense strand
gagagaaaccuuacaaaug

SEQ ID NO: 1552023 - RNA, 19 nt, Homo sapiens
  misc_RNA (1)...(19): siRNA sense strand
cuacaaaugugaagaaugu

SEQ ID NO: 1552024 - RNA, 19 nt, Homo sapiens
  misc_RNA (1)...(19): siRNA sense strand
gagaauuccuaccaaugua

SEQ ID NO: 1552025 - RNA, 19 nt, Homo sapiens
  misc_RNA (1)...(19): siRNA sense strand
ccaguuauauguucucauu

SEQ ID NO: 1552026 - RNA, 19 nt, Homo sapiens
  misc_RNA (1)...(19): siRNA sense strand
gggcagagcaggacauuaa

SEQ ID NO: 1552027 - RNA, 19 nt, Homo sapiens
  misc_RNA (1)...(19): siRNA sense strand
gagagaaacccuacaaaug

SEQ ID NO: 1552028 - RNA, 19 nt, Homo sapiens
  misc_RNA (1)...(19): siRNA sense strand
gagagaaacccuacaaaug

SEQ ID NO: 1552029 - RNA, 19 nt, Homo sapiens
  misc_RNA (1)...(19): siRNA sense strand
gagagaaacccuacaaaug

SEQ ID NO: 1552030 - RNA, 19 nt, Homo sapiens
  misc_RNA (1)...(19): siRNA sense strand
cuacaaaugugacgaaugu

SEQ ID NO: 1552031 - RNA, 19 nt, Homo sapiens
  misc_RNA (1)...(19): siRNA sense strand
gagagaaacccuacaaaug

SEQ ID NO: 1552032 - RNA, 19 nt, Homo sapiens
  misc_RNA (1)...(19): siRNA sense strand
gagagaaacccuacaaaug

SEQ ID NO: 1552033 - RNA, 19 nt, Homo sapiens
  misc_RNA (1)...(19): siRNA sense strand
gagagaaacccuacaaaug

SEQ ID NO: 1552034 - RNA, 19 nt, Homo sapiens
  misc_RNA (1)...(19): siRNA sense strand
gcaaagccuucaacugguu

SEQ ID NO: 1552035 - RNA, 19 nt, Homo sapiens
  misc_RNA (1)...(19): siRNA sense strand
agagaaaucuuacaaaugg

SEQ ID NO: 1552036 - RNA, 19 nt, Homo sapiens
  misc_RNA (1)...(19): siRNA sense strand
acaccuaacucaacauaaa

SEQ ID NO: 1552037 - RNA, 19 nt, Homo sapiens
  misc_RNA (1)...(19): siRNA sense strand
gauaagacauacuagaaag

SEQ ID NO: 1552038 - RNA, 19 nt, Homo sapiens
  misc_RNA (1)...(19): siRNA sense strand
ggaagaaugugguaaagac

SEQ ID NO: 1552039 - RNA, 19 nt, Homo sapiens
  misc_RNA (1)...(19): siRNA sense strand
gaaaagagcccuggaauau

SEQ ID NO: 1552040 - RNA, 19 nt, Homo sapiens
  misc_RNA (1)...(19): siRNA sense strand
gagaaacccuacaaaugug

SEQ ID NO: 1552041 - RNA, 19 nt, Homo sapiens
  misc_RNA (1)...(19): siRNA sense strand
gagaaacccuacaaaugug

SEQ ID NO: 1552042 - RNA, 19 nt, Homo sapiens
  misc_RNA (1)...(19): siRNA sense strand
gagaaacccuacaaaugug

SEQ ID NO: 1552043 - RNA, 19 nt, Homo sapiens
  misc_RNA (1)...(19): siRNA sense strand
gagaaacccuacaaaugug

SEQ ID NO: 1552044 - RNA, 19 nt, Homo sapiens
  misc_RNA (1)...(19): siRNA sense strand
gagaaacccuacaaaugug

SEQ ID NO: 1552045 - RNA, 19 nt, Homo sapiens
  misc_RNA (1)...(19): siRNA sense strand
gagaaacccuacaaaugug

SEQ ID NO: 1552046 - RNA, 19 nt, Homo sapiens
  misc_RNA (1)...(19): siRNA sense strand
aaagagacaugagauggua

SEQ ID NO: 1552047 - RNA, 19 nt, Homo sapiens
  misc_RNA (1)...(19): siRNA sense strand
ggagagaaaccuuacaaau

SEQ ID NO: 1552048 - RNA, 19 nt, Homo sapiens
  misc_RNA (1)...(19): siRNA sense strand
gagcaggacauuaaagauu

SEQ ID NO: 1552049 - RNA, 19 nt, Homo sapiens
  misc_RNA (1)...(19): siRNA sense strand
auacagaugugaagaaugu

SEQ ID NO: 1552050 - RNA, 19 nt, Homo sapiens
  misc_RNA (1)...(19): siRNA sense strand
ggagagaaacccuacaaau

SEQ ID NO: 1552051 - RNA, 19 nt, Homo sapiens
  misc_RNA (1)...(19): siRNA sense strand
ggagagaaacccuacaaau

SEQ ID NO: 1552052 - RNA, 19 nt, Homo sapiens
  misc_RNA (1)...(19): siRNA sense strand
ggagagaaacccuacaaau

SEQ ID NO: 1552053 - RNA, 19 nt, Homo sapiens
  misc_RNA (1)...(19): siRNA sense strand
ggagagaaacccuacaaau

SEQ ID NO: 1552054 - RNA, 19 nt, Homo sapiens
  misc_RNA (1)...(19): siRNA sense strand
ggagagaaacccuacaaau

SEQ ID NO: 1552055 - RNA, 19 nt, Homo sapiens
  misc_RNA (1)...(19): siRNA sense strand
ggagagaaacccuacaaau

SEQ ID NO: 1552056 - RNA, 19 nt, Homo sapiens
  misc_RNA (1)...(19): siRNA sense strand
cuacaaaugugaagaaugc

SEQ ID NO: 1552057 - RNA, 19 nt, Homo sapiens
  misc_RNA (1)...(19): siRNA sense strand
gcacaaagaacaugauaac

SEQ ID NO: 1552058 - RNA, 19 nt, Homo sapiens
  misc_RNA (1)...(19): siRNA sense strand
gagagaaaucuuacaaaug

SEQ ID NO: 1552059 - RNA, 19 nt, Homo sapiens
  misc_RNA (1)...(19): siRNA sense strand
ccucaacccuuacuaaaca

SEQ ID NO: 1552060 - RNA, 19 nt, Homo sapiens
  misc_RNA (1)...(19): siRNA sense strand
cuacaaaugugaggaaugu

SEQ ID NO: 1552061 - RNA, 19 nt, Homo sapiens
  misc_RNA (1)...(19): siRNA sense strand
acacacaggauaauucaua

SEQ ID NO: 1552062 - RNA, 19 nt, Homo sapiens
  misc_RNA (1)...(19): siRNA sense strand
gagagaaaccauacagaug

SEQ ID NO: 1552063 - RNA, 19 nt, Homo sapiens
  misc_RNA (1)...(19): siRNA sense strand
cagcaggguuuguauagga

SEQ ID NO: 1552064 - RNA, 19 nt, Homo sapiens
  misc_RNA (1)...(19): siRNA sense strand
gagaaaccauacagaugug

SEQ ID NO: 1552065 - RNA, 19 nt, Homo sapiens
  misc_RNA (1)...(19): siRNA sense strand
ggagagaaaccauacagau

SEQ ID NO: 1552066 - RNA, 19 nt, Homo sapiens
  misc_RNA (1)...(19): siRNA sense strand
acacacaggagaauucaua

SEQ ID NO: 1552067 - RNA, 19 nt, Homo sapiens
  misc_RNA (1)...(19): siRNA sense strand
agagaaacccuacaaaugu

SEQ ID NO: 1552068 - RNA, 19 nt, Homo sapiens
  misc_RNA (1)...(19): siRNA sense strand
agagaaacccuacaaaugu

SEQ ID NO: 1552069 - RNA, 19 nt, Homo sapiens
  misc_RNA (1)...(19): siRNA sense strand
agagaaacccuacaaaugu

SEQ ID NO: 1552070 - RNA, 19 nt, Homo sapiens
  misc_RNA (1)...(19): siRNA sense strand
agagaaacccuacaaaugu

SEQ ID NO: 1552071 - RNA, 19 nt, Homo sapiens
  misc_RNA (1)...(19): siRNA sense strand
agagaaacccuacaaaugu

SEQ ID NO: 1552072 - RNA, 19 nt, Homo sapiens
  misc_RNA (1)...(19): siRNA sense strand
agagaaacccuacaaaugu

SEQ ID NO: 1552073 - RNA, 19 nt, Homo sapiens
  misc_RNA (1)...(19): siRNA sense strand
gagugaaacccuacaaaug

SEQ ID NO: 1552074 - RNA, 19 nt, Homo sapiens
  misc_RNA (1)...(19): siRNA sense strand
ggagugaaacccuacaaau

SEQ ID NO: 1552075 - RNA, 19 nt, Homo sapiens
  misc_RNA (1)...(19): siRNA sense strand
uaccgauucucauaccuua

SEQ ID NO: 1552076 - RNA, 19 nt, Homo sapiens
  misc_RNA (1)...(19): siRNA sense strand
ccucagcccucacuaaaca

SEQ ID NO: 1552077 - RNA, 19 nt, Homo sapiens
  misc_RNA (1)...(19): siRNA sense strand
uaaccggucuucacaccuu

SEQ ID NO: 1552078 - RNA, 19 nt, Homo sapiens
  misc_RNA (1)...(19): siRNA sense strand
caacuaacugcacauaaga

SEQ ID NO: 1552079 - RNA, 19 nt, Homo sapiens
  misc_RNA (1)...(19): siRNA sense strand
ggauguggccauagaauuc

SEQ ID NO: 1552080 - RNA, 19 nt, Homo sapiens
  misc_RNA (1)...(19): siRNA sense strand
ccucacaccuuacuacaca

SEQ ID NO: 1552081 - RNA, 19 nt, Homo sapiens
  misc_RNA (1)...(19): siRNA sense strand
gauccucaacccuuacuaa

SEQ ID NO: 1552082 - RNA, 19 nt, Homo sapiens
  misc_RNA (1)...(19): siRNA sense strand
acaacuaacugcacauaag

SEQ ID NO: 1552083 - RNA, 19 nt, Homo sapiens
  misc_RNA (1)...(19): siRNA sense strand
uaaccgguccucacaacua

SEQ ID NO: 1552084 - RNA, 19 nt, Homo sapiens
  misc_RNA (1)...(19): siRNA sense strand
gagaaaccuuacaaaugug

SEQ ID NO: 1552085 - RNA, 19 nt, Homo sapiens
  misc_RNA (1)...(19): siRNA sense strand
ccucaacccuuacuacaca

SEQ ID NO: 1552086 - RNA, 19 nt, Homo sapiens
  misc_RNA (1)...(19): siRNA sense strand
ccucacaccuuacuacaca

SEQ ID NO: 1552087 - RNA, 19 nt, Homo sapiens
  misc_RNA (1)...(19): siRNA sense strand
ggacaugacaauuuacagu

SEQ ID NO: 1552088 - RNA, 19 nt, Homo sapiens
  misc_RNA (1)...(19): siRNA sense strand
aaccaguccucaacccuua

SEQ ID NO: 1552089 - RNA, 19 nt, Homo sapiens
  misc_RNA (1)...(19): siRNA sense strand
ggaaaagagcccuggaaua

SEQ ID NO: 1552090 - RNA, 19 nt, Homo sapiens
  misc_RNA (1)...(19): siRNA sense strand
cauaagagaauucauacug

SEQ ID NO: 1552091 - RNA, 19 nt, Homo sapiens
  misc_RNA (1)...(19): siRNA sense strand
guaaagugcacaaagaaca

SEQ ID NO: 1552092 - RNA, 19 nt, Homo sapiens
  misc_RNA (1)...(19): siRNA sense strand
gacauaagauaagacauac

SEQ ID NO: 1552093 - RNA, 19 nt, Homo sapiens
  misc_RNA (1)...(19): siRNA sense strand
gauucauacuggagagaaa

SEQ ID NO: 1552094 - RNA, 19 nt, Homo sapiens
  misc_RNA (1)...(19): siRNA sense strand
gauucauacuggagagaaa

SEQ ID NO: 1552095 - RNA, 19 nt, Homo sapiens
  misc_RNA (1)...(19): siRNA sense strand
cgauucucauaccuuauua

SEQ ID NO: 1552096 - RNA, 19 nt, Homo sapiens
  misc_RNA (1)...(19): siRNA sense strand
ucucaacccuuacuacaca

SEQ ID NO: 1552097 - RNA, 19 nt, Homo sapiens
  misc_RNA (1)...(19): siRNA sense strand
gcucagcaggguuuguaua

SEQ ID NO: 1552098 - RNA, 19 nt, Homo sapiens
  misc_RNA (1)...(19): siRNA sense strand
uauggaauguguccucuca

SEQ ID NO: 1552099 - RNA, 19 nt, Homo sapiens
  misc_RNA (1)...(19): siRNA sense strand
ugaagaauguggcaaagcu

SEQ ID NO: 1552100 - RNA, 19 nt, Homo sapiens
  misc_RNA (1)...(19): siRNA sense strand
ugaagaauguggcaaagcu

SEQ ID NO: 1552101 - RNA, 19 nt, Homo sapiens
  misc_RNA (1)...(19): siRNA sense strand
auaggaaagugauguuaga

SEQ ID NO: 1552102 - RNA, 19 nt, Homo sapiens
  misc_RNA (1)...(19): siRNA sense strand
ccauacagaugugaagaau

SEQ ID NO: 1552103 - RNA, 19 nt, Homo sapiens
  misc_RNA (1)...(19): siRNA sense strand
gacaugacaauuuacaguu

SEQ ID NO: 1552104 - RNA, 19 nt, Homo sapiens
  misc_RNA (1)...(19): siRNA sense strand
acacauaagauaacucaug

SEQ ID NO: 1552105 - RNA, 19 nt, Homo sapiens
  misc_RNA (1)...(19): siRNA sense strand
gauguuagagaacuacaga

SEQ ID NO: 1552106 - RNA, 19 nt, Homo sapiens
  misc_RNA (1)...(19): siRNA sense strand
gcagguauugcucucacua

SEQ ID NO: 1552107 - RNA, 19 nt, Homo sapiens
  misc_RNA (1)...(19): siRNA sense strand
uuacaaaugggaagaaugu

SEQ ID NO: 1552108 - RNA, 19 nt, Homo sapiens
  misc_RNA (1)...(19): siRNA sense strand
guauaggaaagugauguua

SEQ ID NO: 1552109 - RNA, 19 nt, Homo sapiens
  misc_RNA (1)...(19): siRNA sense strand
cuucacaccuuacuacaca

SEQ ID NO: 1552110 - RNA, 19 nt, Homo sapiens
  misc_RNA (1)...(19): siRNA sense strand
gaauuccuaccaauguaaa

SEQ ID NO: 1552111 - RNA, 19 nt, Homo sapiens
  misc_RNA (1)...(19): siRNA sense strand
acagagaauuccuaccaau

SEQ ID NO: 1552112 - RNA, 19 nt, Homo sapiens
  misc_RNA (1)...(19): siRNA sense strand
uuagggauguggccauaga

SEQ ID NO: 1552113 - RNA, 19 nt, Homo sapiens
  misc_RNA (1)...(19): siRNA sense strand
aaccgauccucaacccuua

SEQ ID NO: 1552114 - RNA, 19 nt, Homo sapiens
  misc_RNA (1)...(19): siRNA sense strand
gaaaccauacagaugugaa

SEQ ID NO: 1552115 - RNA, 19 nt, Homo sapiens
  misc_RNA (1)...(19): siRNA sense strand
ugaagaaugugggaaagca

SEQ ID NO: 1552116 - RNA, 19 nt, Homo sapiens
  misc_RNA (1)...(19): siRNA sense strand
gaagauggcuauauucauu

SEQ ID NO: 1552117 - RNA, 19 nt, Homo sapiens
  misc_RNA (1)...(19): siRNA sense strand
caugugaacugcuggaaua

SEQ ID NO: 1552118 - RNA, 19 nt, Homo sapiens
  misc_RNA (1)...(19): siRNA sense strand
gaaagacgaauuagaggua

SEQ ID NO: 1552119 - RNA, 19 nt, Homo sapiens
  misc_RNA (1)...(19): siRNA sense strand
gaugaggucucccauguga

SEQ ID NO: 1552120 - RNA, 19 nt, Homo sapiens
  misc_RNA (1)...(19): siRNA sense strand
gaccugagccuguguauga

SEQ ID NO: 1552121 - RNA, 19 nt, Homo sapiens
  misc_RNA (1)...(19): siRNA sense strand
gugaacugcuggaauauga

SEQ ID NO: 1552122 - RNA, 19 nt, Homo sapiens
  misc_RNA (1)...(19): siRNA sense strand
cagaugaggucucccaugu

SEQ ID NO: 1552123 - RNA, 19 nt, Homo sapiens
  misc_RNA (1)...(19): siRNA sense strand
ggucuuggcuccaggaagu

SEQ ID NO: 1552124 - RNA, 19 nt, Homo sapiens
  misc_RNA (1)...(19): siRNA sense strand
ggucaaguccuuagauaug

SEQ ID NO: 1552125 - RNA, 19 nt, Homo sapiens
  misc_RNA (1)...(19): siRNA sense strand
gaaguguaccuaacagaug

SEQ ID NO: 1552126 - RNA, 19 nt, Homo sapiens
  misc_RNA (1)...(19): siRNA sense strand
acagagaaguagaagacua

SEQ ID NO: 1552127 - RNA, 19 nt, Homo sapiens
  misc_RNA (1)...(19): siRNA sense strand
cagagaaguagaagacuaa

SEQ ID NO: 1552128 - RNA, 19 nt, Homo sapiens
  misc_RNA (1)...(19): siRNA sense strand
guguaugacuccagaugaa

SEQ ID NO: 1552129 - RNA, 19 nt, Homo sapiens
  misc_RNA (1)...(19): siRNA sense strand
ggaaguguaccuaacagau

SEQ ID NO: 1552130 - RNA, 19 nt, Homo sapiens
  misc_RNA (1)...(19): siRNA sense strand
ccaauuggcagaaacacuu

SEQ ID NO: 1552131 - RNA, 19 nt, Homo sapiens
  misc_RNA (1)...(19): siRNA sense strand
uaacugaagauggcuauau

SEQ ID NO: 1552132 - RNA, 19 nt, Homo sapiens
  misc_RNA (1)...(19): siRNA sense strand
ucauuacggugacaaagug

SEQ ID NO: 1552133 - RNA, 19 nt, Homo sapiens
  misc_RNA (1)...(19): siRNA sense strand
guagaagacuaaaacagaa

SEQ ID NO: 1552134 - RNA, 19 nt, Homo sapiens
  misc_RNA (1)...(19): siRNA sense strand
ugagaccgaugcaacuuuc

SEQ ID NO: 1552135 - RNA, 19 nt, Homo sapiens
  misc_RNA (1)...(19): siRNA sense strand
caggaggauuugacaacaa

SEQ ID NO: 1552136 - RNA, 19 nt, Homo sapiens
  misc_RNA (1)...(19): siRNA sense strand
ccaccggcaucuuuucuua

SEQ ID NO: 1552137 - RNA, 19 nt, Homo sapiens
  misc_RNA (1)...(19): siRNA sense strand
aaguguaccuaacagauga

SEQ ID NO: 1552138 - RNA, 19 nt, Homo sapiens
  misc_RNA (1)...(19): siRNA sense strand
cuggucaaguccuuagaua

SEQ ID NO: 1552139 - RNA, 19 nt, Homo sapiens
  misc_RNA (1)...(19): siRNA sense strand
gcagcccaccggcaucuuu

SEQ ID NO: 1552140 - RNA, 19 nt, Homo sapiens
  misc_RNA (1)...(19): siRNA sense strand
gcaacuuuccguaacugaa

SEQ ID NO: 1552141 - RNA, 19 nt, Homo sapiens
  misc_RNA (1)...(19): siRNA sense strand
caaucacugucacacaaau

SEQ ID NO: 1552142 - RNA, 19 nt, Homo sapiens
  misc_RNA (1)...(19): siRNA sense strand
aacugaagauggcuauauu

SEQ ID NO: 1552143 - RNA, 19 nt, Homo sapiens
  misc_RNA (1)...(19): siRNA sense strand
gggaaacuucucauacaga

SEQ ID NO: 1552144 - RNA, 19 nt, Homo sapiens
  misc_RNA (1)...(19): siRNA sense strand
cuccugaaaucgucuaaga

SEQ ID NO: 1552145 - RNA, 19 nt, Homo sapiens
  misc_RNA (1)...(19): siRNA sense strand
ccaucugaaagacgaauua

SEQ ID NO: 1552146 - RNA, 19 nt, Homo sapiens
  misc_RNA (1)...(19): siRNA sense strand
gaacugcuggaauaugaag

SEQ ID NO: 1552147 - RNA, 19 nt, Homo sapiens
  misc_RNA (1)...(19): siRNA sense strand
gaugcaacuuuccguaacu

SEQ ID NO: 1552148 - RNA, 19 nt, Homo sapiens
  misc_RNA (1)...(19): siRNA sense strand
ugaugauccugacacagaa

SEQ ID NO: 1552149 - RNA, 19 nt, Homo sapiens
  misc_RNA (1)...(19): siRNA sense strand
uguuguauuugucaaguga

SEQ ID NO: 1552150 - RNA, 19 nt, Homo sapiens
  misc_RNA (1)...(19): siRNA sense strand
caaagugaugcuugugaau

SEQ ID NO: 1552151 - RNA, 19 nt, Homo sapiens
  misc_RNA (1)...(19): siRNA sense strand
cugaugauccugacacaga

SEQ ID NO: 1552152 - RNA, 19 nt, Homo sapiens
  misc_RNA (1)...(19): siRNA sense strand
caacuuuccguaacugaag

SEQ ID NO: 1552153 - RNA, 19 nt, Homo sapiens
  misc_RNA (1)...(19): siRNA sense strand
ccaggaaguguaccuaaca

SEQ ID NO: 1552154 - RNA, 19 nt, Homo sapiens
  misc_RNA (1)...(19): siRNA sense strand
gauaacaggaggauuugac

SEQ ID NO: 1552155 - RNA, 19 nt, Homo sapiens
  misc_RNA (1)...(19): siRNA sense strand
ggggauaacaggaggauuu

SEQ ID NO: 1552156 - RNA, 19 nt, Homo sapiens
  misc_RNA (1)...(19): siRNA sense strand
gauaugggcaggacuuuug

SEQ ID NO: 1552157 - RNA, 19 nt, Homo sapiens
  misc_RNA (1)...(19): siRNA sense strand
caauuggcagaaacacuuu

SEQ ID NO: 1552158 - RNA, 19 nt, Homo sapiens
  misc_RNA (1)...(19): siRNA sense strand
uaacaggaggauuugacaa

SEQ ID NO: 1552159 - RNA, 19 nt, Homo sapiens
  misc_RNA (1)...(19): siRNA sense strand
gggauaacaggaggauuug

SEQ ID NO: 1552160 - RNA, 19 nt, Homo sapiens
  misc_RNA (1)...(19): siRNA sense strand
gcuugugaauccugaugau

SEQ ID NO: 1552161 - RNA, 19 nt, Homo sapiens
  misc_RNA (1)...(19): siRNA sense strand
ccgaugcaacuuuccguaa

SEQ ID NO: 1552162 - RNA, 19 nt, Homo sapiens
  misc_RNA (1)...(19): siRNA sense strand
ucugaaagacgaauuagag

SEQ ID NO: 1552163 - RNA, 19 nt, Homo sapiens
  misc_RNA (1)...(19): siRNA sense strand
guaugacuccagaugaaau

SEQ ID NO: 1552164 - RNA, 19 nt, Homo sapiens
  misc_RNA (1)...(19): siRNA sense strand
ucaaucacugucacacaaa

SEQ ID NO: 1552165 - RNA, 19 nt, Homo sapiens
  misc_RNA (1)...(19): siRNA sense strand
gaagagagacaaggggaaa

SEQ ID NO: 1552166 - RNA, 19 nt, Homo sapiens
  misc_RNA (1)...(19): siRNA sense strand
cgaugcaacuuuccguaac

SEQ ID NO: 1552167 - RNA, 19 nt, Homo sapiens
  misc_RNA (1)...(19): siRNA sense strand
acaggaggauuugacaaca

SEQ ID NO: 1552168 - RNA, 19 nt, Homo sapiens
  misc_RNA (1)...(19): siRNA sense strand
gucaaguccuuagauaugg

SEQ ID NO: 1552169 - RNA, 19 nt, Homo sapiens
  misc_RNA (1)...(19): siRNA sense strand
gcagaaacacuuuuaucau

SEQ ID NO: 1552170 - RNA, 19 nt, Homo sapiens
  misc_RNA (1)...(19): siRNA sense strand
aucaaucacugucacacaa

SEQ ID NO: 1552171 - RNA, 19 nt, Homo sapiens
  misc_RNA (1)...(19): siRNA sense strand
uaugacuccagaugaaauu

SEQ ID NO: 1552172 - RNA, 19 nt, Homo sapiens
  misc_RNA (1)...(19): siRNA sense strand
auacagagaaguagaagac

SEQ ID NO: 1552173 - RNA, 19 nt, Homo sapiens
  misc_RNA (1)...(19): siRNA sense strand
ggauaacaggaggauuuga

SEQ ID NO: 1552174 - RNA, 19 nt, Homo sapiens
  misc_RNA (1)...(19): siRNA sense strand
gaagagaaagcauacauua

SEQ ID NO: 1552175 - RNA, 19 nt, Homo sapiens
  misc_RNA (1)...(19): siRNA sense strand
gaacauuggagaauucaua

SEQ ID NO: 1552176 - RNA, 19 nt, Homo sapiens
  misc_RNA (1)...(19): siRNA sense strand
gagagaagccucacaaaug

SEQ ID NO: 1552177 - RNA, 19 nt, Homo sapiens
  misc_RNA (1)...(19): siRNA sense strand
gaacuucaggcacaaauuu

SEQ ID NO: 1552178 - RNA, 19 nt, Homo sapiens
  misc_RNA (1)...(19): siRNA sense strand
agagaaaccuuacaaaugu

SEQ ID NO: 1552179 - RNA, 19 nt, Homo sapiens
  misc_RNA (1)...(19): siRNA sense strand
agagaaaccuuacaaaugu

SEQ ID NO: 1552180 - RNA, 19 nt, Homo sapiens
  misc_RNA (1)...(19): siRNA sense strand
agagaaaccuuacaaaugu

SEQ ID NO: 1552181 - RNA, 19 nt, Homo sapiens
  misc_RNA (1)...(19): siRNA sense strand
gagagaaaccuuacaaaug

SEQ ID NO: 1552182 - RNA, 19 nt, Homo sapiens
  misc_RNA (1)...(19): siRNA sense strand
gagagaaaccuuacaaaug

SEQ ID NO: 1552183 - RNA, 19 nt, Homo sapiens
  misc_RNA (1)...(19): siRNA sense strand
ggcaaggucuucaaucaaa

SEQ ID NO: 1552184 - RNA, 19 nt, Homo sapiens
  misc_RNA (1)...(19): siRNA sense strand
gacagaagccuuacaaaug

SEQ ID NO: 1552185 - RNA, 19 nt, Homo sapiens
  misc_RNA (1)...(19): siRNA sense strand
ggacagaagccuuacaaau

SEQ ID NO: 1552186 - RNA, 19 nt, Homo sapiens
  misc_RNA (1)...(19): siRNA sense strand
ucacaaauguaacgaaugu

SEQ ID NO: 1552187 - RNA, 19 nt, Homo sapiens
  misc_RNA (1)...(19): siRNA sense strand
gaauaugaauguagugaag

SEQ ID NO: 1552188 - RNA, 19 nt, Homo sapiens
  misc_RNA (1)...(19): siRNA sense strand
ggagagagcccuugauucu

SEQ ID NO: 1552189 - RNA, 19 nt, Homo sapiens
  misc_RNA (1)...(19): siRNA sense strand
gcagagaaaccuuacaaau

SEQ ID NO: 1552190 - RNA, 19 nt, Homo sapiens
  misc_RNA (1)...(19): siRNA sense strand
agagagaccuuacaagugu

SEQ ID NO: 1552191 - RNA, 19 nt, Homo sapiens
  misc_RNA (1)...(19): siRNA sense strand
gggcgcaaauuauaccuaa

SEQ ID NO: 1552192 - RNA, 19 nt, Homo sapiens
  misc_RNA (1)...(19): siRNA sense strand
ggagagaaaccuuacaaau

SEQ ID NO: 1552193 - RNA, 19 nt, Homo sapiens
  misc_RNA (1)...(19): siRNA sense strand
ggagagaaaccuuacaaau

SEQ ID NO: 1552194 - RNA, 19 nt, Homo sapiens
  misc_RNA (1)...(19): siRNA sense strand
guagaacauuggagaauuc

SEQ ID NO: 1552195 - RNA, 19 nt, Homo sapiens
  misc_RNA (1)...(19): siRNA sense strand
cagagaagcccuacaaaug

SEQ ID NO: 1552196 - RNA, 19 nt, Homo sapiens
  misc_RNA (1)...(19): siRNA sense strand
acagaagccuuacaaaugu

SEQ ID NO: 1552197 - RNA, 19 nt, Homo sapiens
  misc_RNA (1)...(19): siRNA sense strand
ggacagagggcuuuauaca

SEQ ID NO: 1552198 - RNA, 19 nt, Homo sapiens
  misc_RNA (1)...(19): siRNA sense strand
cgacaucaaagaauucaua

SEQ ID NO: 1552199 - RNA, 19 nt, Homo sapiens
  misc_RNA (1)...(19): siRNA sense strand
ggagagagaccuuacaagu

SEQ ID NO: 1552200 - RNA, 19 nt, Homo sapiens
  misc_RNA (1)...(19): siRNA sense strand
gcagaaaacaagccuauua

SEQ ID NO: 1552201 - RNA, 19 nt, Homo sapiens
  misc_RNA (1)...(19): siRNA sense strand
agagaagccucacaaaugu

SEQ ID NO: 1552202 - RNA, 19 nt, Homo sapiens
  misc_RNA (1)...(19): siRNA sense strand
cagagaaaccuuacaaaug

SEQ ID NO: 1552203 - RNA, 19 nt, Homo sapiens
  misc_RNA (1)...(19): siRNA sense strand
guacagagaagcccuacaa

SEQ ID NO: 1552204 - RNA, 19 nt, Homo sapiens
  misc_RNA (1)...(19): siRNA sense strand
ggaagggaaugugucagaa

SEQ ID NO: 1552205 - RNA, 19 nt, Homo sapiens
  misc_RNA (1)...(19): siRNA sense strand
ggagagaagccucacaaau

SEQ ID NO: 1552206 - RNA, 19 nt, Homo sapiens
  misc_RNA (1)...(19): siRNA sense strand
gauuaacccuugagucaca

SEQ ID NO: 1552207 - RNA, 19 nt, Homo sapiens
  misc_RNA (1)...(19): siRNA sense strand
agucacaucugucugaauu

SEQ ID NO: 1552208 - RNA, 19 nt, Homo sapiens
  misc_RNA (1)...(19): siRNA sense strand
gagaaagcauacauuagag

SEQ ID NO: 1552209 - RNA, 19 nt, Homo sapiens
  misc_RNA (1)...(19): siRNA sense strand
agagaaagcauacauuaga

SEQ ID NO: 1552210 - RNA, 19 nt, Homo sapiens
  misc_RNA (1)...(19): siRNA sense strand
cagggacgcuugacauuca

SEQ ID NO: 1552211 - RNA, 19 nt, Homo sapiens
  misc_RNA (1)...(19): siRNA sense strand
gagagagaccuuacaagug

SEQ ID NO: 1552212 - RNA, 19 nt, Homo sapiens
  misc_RNA (1)...(19): siRNA sense strand
gggaggagcuguguauugg

SEQ ID NO: 1552213 - RNA, 19 nt, Homo sapiens
  misc_RNA (1)...(19): siRNA sense strand
uagugaagauggugaaguu

SEQ ID NO: 1552214 - RNA, 19 nt, Homo sapiens
  misc_RNA (1)...(19): siRNA sense strand
gcaagaacuucaggcacaa

SEQ ID NO: 1552215 - RNA, 19 nt, Homo sapiens
  misc_RNA (1)...(19): siRNA sense strand
ggucuucagucgcaauuca

SEQ ID NO: 1552216 - RNA, 19 nt, Homo sapiens
  misc_RNA (1)...(19): siRNA sense strand
uaaugaaugugacaaaguc

SEQ ID NO: 1552217 - RNA, 19 nt, Homo sapiens
  misc_RNA (1)...(19): siRNA sense strand
ggacuuacuacccaucuug

SEQ ID NO: 1552218 - RNA, 19 nt, Homo sapiens
  misc_RNA (1)...(19): siRNA sense strand
uaacgaauguggcaaagcu

SEQ ID NO: 1552219 - RNA, 19 nt, Homo sapiens
  misc_RNA (1)...(19): siRNA sense strand
gcaauucacaccuuguaga

SEQ ID NO: 1552220 - RNA, 19 nt, Homo sapiens
  misc_RNA (1)...(19): siRNA sense strand
gaaggaaaauuuacagaag

SEQ ID NO: 1552221 - RNA, 19 nt, Homo sapiens
  misc_RNA (1)...(19): siRNA sense strand
ucuuuagucugcuuucaua

SEQ ID NO: 1552222 - RNA, 19 nt, Homo sapiens
  misc_RNA (1)...(19): siRNA sense strand
gaauguggcaaggucuuua

SEQ ID NO: 1552223 - RNA, 19 nt, Homo sapiens
  misc_RNA (1)...(19): siRNA sense strand
guggcaaggucuucaauca

SEQ ID NO: 1552224 - RNA, 19 nt, Homo sapiens
  misc_RNA (1)...(19): siRNA sense strand
aaccaucguuccucaguuu

SEQ ID NO: 1552225 - RNA, 19 nt, Homo sapiens
  misc_RNA (1)...(19): siRNA sense strand
caucaaagaauucauacug

SEQ ID NO: 1552226 - RNA, 19 nt, Homo sapiens
  misc_RNA (1)...(19): siRNA sense strand
aagcauacauuagaggaaa

SEQ ID NO: 1552227 - RNA, 19 nt, Homo sapiens
  misc_RNA (1)...(19): siRNA sense strand
gaauucacugcguaccuua

SEQ ID NO: 1552228 - RNA, 19 nt, Homo sapiens
  misc_RNA (1)...(19): siRNA sense strand
cuuccugaccuaaguauua

SEQ ID NO: 1552229 - RNA, 19 nt, Homo sapiens
  misc_RNA (1)...(19): siRNA sense strand
gagaagccucacaaaugua

SEQ ID NO: 1552230 - RNA, 19 nt, Homo sapiens
  misc_RNA (1)...(19): siRNA sense strand
caucagagaauucauacug

SEQ ID NO: 1552231 - RNA, 19 nt, Homo sapiens
  misc_RNA (1)...(19): siRNA sense strand
cggcaucaaauaauucaua

SEQ ID NO: 1552232 - RNA, 19 nt, Homo sapiens
  misc_RNA (1)...(19): siRNA sense strand
cacaagaagagaaagcaua

SEQ ID NO: 1552233 - RNA, 19 nt, Homo sapiens
  misc_RNA (1)...(19): siRNA sense strand
gaaugugacaagguguuua

SEQ ID NO: 1552234 - RNA, 19 nt, Homo sapiens
  misc_RNA (1)...(19): siRNA sense strand
uguagaacauuggagaauu

SEQ ID NO: 1552235 - RNA, 19 nt, Homo sapiens
  misc_RNA (1)...(19): siRNA sense strand
uaaccaaccaucagagaau

SEQ ID NO: 1552236 - RNA, 19 nt, Homo sapiens
  misc_RNA (1)...(19): siRNA sense strand
gcacggcaucaaauaauuc

SEQ ID NO: 1552237 - RNA, 19 nt, Homo sapiens
  misc_RNA (1)...(19): siRNA sense strand
ccucacaaauguaacgaau

SEQ ID NO: 1552238 - RNA, 19 nt, Homo sapiens
  misc_RNA (1)...(19): siRNA sense strand
gcacgacaucaaagaauuc

SEQ ID NO: 1552239 - RNA, 19 nt, Homo sapiens
  misc_RNA (1)...(19): siRNA sense strand
gugacaagguguuuaaucg

SEQ ID NO: 1552240 - RNA, 19 nt, Homo sapiens
  misc_RNA (1)...(19): siRNA sense strand
acaaauguagugaauguga

SEQ ID NO: 1552241 - RNA, 19 nt, Homo sapiens
  misc_RNA (1)...(19): siRNA sense strand
agagaagcccuacaaaugu

SEQ ID NO: 1552242 - RNA, 19 nt, Homo sapiens
  misc_RNA (1)...(19): siRNA sense strand
caauucacaccuuguagaa

SEQ ID NO: 1552243 - RNA, 19 nt, Homo sapiens
  misc_RNA (1)...(19): siRNA sense strand
guaaugaguguggcaagaa

SEQ ID NO: 1552244 - RNA, 19 nt, Homo sapiens
  misc_RNA (1)...(19): siRNA sense strand
guaaugaaugugacaaagu

SEQ ID NO: 1552245 - RNA, 19 nt, Homo sapiens
  misc_RNA (1)...(19): siRNA sense strand
ggcaucaaauaauucauag

SEQ ID NO: 1552246 - RNA, 19 nt, Homo sapiens
  misc_RNA (1)...(19): siRNA sense strand
gaggaaagcaaaggaguca

SEQ ID NO: 1552247 - RNA, 19 nt, Homo sapiens
  misc_RNA (1)...(19): siRNA sense strand
gggacgugauguuggagaa

SEQ ID NO: 1552248 - RNA, 19 nt, Homo sapiens
  misc_RNA (1)...(19): siRNA sense strand
ucugcaaagucaaguuaaa

SEQ ID NO: 1552249 - RNA, 19 nt, Homo sapiens
  misc_RNA (1)...(19): siRNA sense strand
gguguuuaaucgcaauuca

SEQ ID NO: 1552250 - RNA, 19 nt, Homo sapiens
  misc_RNA (1)...(19): siRNA sense strand
gcccaucuucuaauccaua

SEQ ID NO: 1552251 - RNA, 19 nt, Homo sapiens
  misc_RNA (1)...(19): siRNA sense strand
auacuggacagaagccuua

SEQ ID NO: 1552252 - RNA, 19 nt, Homo sapiens
  misc_RNA (1)...(19): siRNA sense strand
agaauucacugcguaccuu

SEQ ID NO: 1552253 - RNA, 19 nt, Homo sapiens
  misc_RNA (1)...(19): siRNA sense strand
acagggacgugauguugga

SEQ ID NO: 1552254 - RNA, 19 nt, Homo sapiens
  misc_RNA (1)...(19): siRNA sense strand
uaaccaaucaucagagaag

SEQ ID NO: 1552255 - RNA, 19 nt, Homo sapiens
  misc_RNA (1)...(19): siRNA sense strand
ucuaaccaaucaucagaga

SEQ ID NO: 1552256 - RNA, 19 nt, Homo sapiens
  misc_RNA (1)...(19): siRNA sense strand
agaagccucacaaauguaa

SEQ ID NO: 1552257 - RNA, 19 nt, Homo sapiens
  misc_RNA (1)...(19): siRNA sense strand
gaagggaaugugucagaag

SEQ ID NO: 1552258 - RNA, 19 nt, Homo sapiens
  misc_RNA (1)...(19): siRNA sense strand
ccacaccuuucacgacauc

SEQ ID NO: 1552259 - RNA, 19 nt, Homo sapiens
  misc_RNA (1)...(19): siRNA sense strand
gaugaagaagcccagaaga

SEQ ID NO: 1552260 - RNA, 19 nt, Homo sapiens
  misc_RNA (1)...(19): siRNA sense strand
gaauucauacuggagagaa

SEQ ID NO: 1552261 - RNA, 19 nt, Homo sapiens
  misc_RNA (1)...(19): siRNA sense strand
gaauucauacuggacagaa

SEQ ID NO: 1552262 - RNA, 19 nt, Homo sapiens
  misc_RNA (1)...(19): siRNA sense strand
gaauugcagcuguuucaag

SEQ ID NO: 1552263 - RNA, 19 nt, Homo sapiens
  misc_RNA (1)...(19): siRNA sense strand
uggauuaacccuugaguca

SEQ ID NO: 1552264 - RNA, 19 nt, Homo sapiens
  misc_RNA (1)...(19): siRNA sense strand
gauggaagggaauguguca

SEQ ID NO: 1552265 - RNA, 19 nt, Homo sapiens
  misc_RNA (1)...(19): siRNA sense strand
uggaagagcauuucacaag

SEQ ID NO: 1552266 - RNA, 19 nt, Homo sapiens
  misc_RNA (1)...(19): siRNA sense strand
ggaaggaaaauuuacagaa

SEQ ID NO: 1552267 - RNA, 19 nt, Homo sapiens
  misc_RNA (1)...(19): siRNA sense strand
gcaaggucuucaaucaaaa

SEQ ID NO: 1552268 - RNA, 19 nt, Homo sapiens
  misc_RNA (1)...(19): siRNA sense strand
gcaaauuauaccuaaccaa

SEQ ID NO: 1552269 - RNA, 19 nt, Homo sapiens
  misc_RNA (1)...(19): siRNA sense strand
acagagaagcccuacaaau

SEQ ID NO: 1552270 - RNA, 19 nt, Homo sapiens
  misc_RNA (1)...(19): siRNA sense strand
caaggucuuuagucugcuu

SEQ ID NO: 1552271 - RNA, 19 nt, Homo sapiens
  misc_RNA (1)...(19): siRNA sense strand
ugcacgacaucaaagaauu

SEQ ID NO: 1552272 - RNA, 19 nt, Homo sapiens
  misc_RNA (1)...(19): siRNA sense strand
caagguguuuaaucgcaau

SEQ ID NO: 1552273 - RNA, 19 nt, Homo sapiens
  misc_RNA (1)...(19): siRNA sense strand
aaaccaucguuccucaguu

SEQ ID NO: 1552274 - RNA, 19 nt, Homo sapiens
  misc_RNA (1)...(19): siRNA sense strand
caaaauggauguuguccuu

SEQ ID NO: 1552275 - RNA, 19 nt, Homo sapiens
  misc_RNA (1)...(19): siRNA sense strand
ggucgcagaaccucucuuu

SEQ ID NO: 1552276 - RNA, 19 nt, Homo sapiens
  misc_RNA (1)...(19): siRNA sense strand
gcacuuguugcaccgaauu

SEQ ID NO: 1552277 - RNA, 19 nt, Homo sapiens
  misc_RNA (1)...(19): siRNA sense strand
guuccucggugccuccauu

SEQ ID NO: 1552278 - RNA, 19 nt, Homo sapiens
  misc_RNA (1)...(19): siRNA sense strand
ccggcuggcgucacucuua

SEQ ID NO: 1552279 - RNA, 19 nt, Homo sapiens
  misc_RNA (1)...(19): siRNA sense strand
ggucgcggcacaucuuguu

SEQ ID NO: 1552280 - RNA, 19 nt, Homo sapiens
  misc_RNA (1)...(19): siRNA sense strand
gaagacacaucguuaauga

SEQ ID NO: 1552281 - RNA, 19 nt, Homo sapiens
  misc_RNA (1)...(19): siRNA sense strand
ugacaguccuugcucauua

SEQ ID NO: 1552282 - RNA, 19 nt, Homo sapiens
  misc_RNA (1)...(19): siRNA sense strand
gcagacagaucaugggaaa

SEQ ID NO: 1552283 - RNA, 19 nt, Homo sapiens
  misc_RNA (1)...(19): siRNA sense strand
guacagaucugcuucucaa

SEQ ID NO: 1552284 - RNA, 19 nt, Homo sapiens
  misc_RNA (1)...(19): siRNA sense strand
ugagagaccugguugauga

SEQ ID NO: 1552285 - RNA, 19 nt, Homo sapiens
  misc_RNA (1)...(19): siRNA sense strand
acacaucguuaaugacaua

SEQ ID NO: 1552286 - RNA, 19 nt, Homo sapiens
  misc_RNA (1)...(19): siRNA sense strand
gaaaagcacucaaacuuca

SEQ ID NO: 1552287 - RNA, 19 nt, Homo sapiens
  misc_RNA (1)...(19): siRNA sense strand
ccuaacaacugaugaucua

SEQ ID NO: 1552288 - RNA, 19 nt, Homo sapiens
  misc_RNA (1)...(19): siRNA sense strand
gaugauaguccucaacaaa

SEQ ID NO: 1552289 - RNA, 19 nt, Homo sapiens
  misc_RNA (1)...(19): siRNA sense strand
ucaggaaucuucaguaucu

SEQ ID NO: 1552290 - RNA, 19 nt, Homo sapiens
  misc_RNA (1)...(19): siRNA sense strand
gggcaaggauaacuuuguu

SEQ ID NO: 1552291 - RNA, 19 nt, Homo sapiens
  misc_RNA (1)...(19): siRNA sense strand
aagauaagcuguacagauc

SEQ ID NO: 1552292 - RNA, 19 nt, Homo sapiens
  misc_RNA (1)...(19): siRNA sense strand
ggaaagcaauguggugaca

SEQ ID NO: 1552293 - RNA, 19 nt, Homo sapiens
  misc_RNA (1)...(19): siRNA sense strand
guagaagacacaucguuaa

SEQ ID NO: 1552294 - RNA, 19 nt, Homo sapiens
  misc_RNA (1)...(19): siRNA sense strand
gcaauguggugacaaaauu

SEQ ID NO: 1552295 - RNA, 19 nt, Homo sapiens
  misc_RNA (1)...(19): siRNA sense strand
aaagcaauguggugacaaa

SEQ ID NO: 1552296 - RNA, 19 nt, Homo sapiens
  misc_RNA (1)...(19): siRNA sense strand
gcaacuauauuuacaaacc

SEQ ID NO: 1552297 - RNA, 19 nt, Homo sapiens
  misc_RNA (1)...(19): siRNA sense strand
guggaaggcuggguucauu

SEQ ID NO: 1552298 - RNA, 19 nt, Homo sapiens
  misc_RNA (1)...(19): siRNA sense strand
cauuggacauugagaagaa

SEQ ID NO: 1552299 - RNA, 19 nt, Homo sapiens
  misc_RNA (1)...(19): siRNA sense strand
gaucuaggccaaauauauc

SEQ ID NO: 1552300 - RNA, 19 nt, Homo sapiens
  misc_RNA (1)...(19): siRNA sense strand
agaaggcuuugcaccauuu

SEQ ID NO: 1552301 - RNA, 19 nt, Homo sapiens
  misc_RNA (1)...(19): siRNA sense strand
ccuguuauacgcucaaaua

SEQ ID NO: 1552302 - RNA, 19 nt, Homo sapiens
  misc_RNA (1)...(19): siRNA sense strand
cccagcagauggaucauuu

SEQ ID NO: 1552303 - RNA, 19 nt, Homo sapiens
  misc_RNA (1)...(19): siRNA sense strand
gauaagcuguacagaucug

SEQ ID NO: 1552304 - RNA, 19 nt, Homo sapiens
  misc_RNA (1)...(19): siRNA sense strand
gaccacagauccaaaagaa

SEQ ID NO: 1552305 - RNA, 19 nt, Homo sapiens
  misc_RNA (1)...(19): siRNA sense strand
gcagauggaucauuuucuu

SEQ ID NO: 1552306 - RNA, 19 nt, Homo sapiens
  misc_RNA (1)...(19): siRNA sense strand
ucucaggaaucuucaguau

SEQ ID NO: 1552307 - RNA, 19 nt, Homo sapiens
  misc_RNA (1)...(19): siRNA sense strand
ccaugagccuaacaacuga

SEQ ID NO: 1552308 - RNA, 19 nt, Homo sapiens
  misc_RNA (1)...(19): siRNA sense strand
cccguuaacucugaugaua

SEQ ID NO: 1552309 - RNA, 19 nt, Homo sapiens
  misc_RNA (1)...(19): siRNA sense strand
aguccuugcucauuagaua

SEQ ID NO: 1552310 - RNA, 19 nt, Homo sapiens
  misc_RNA (1)...(19): siRNA sense strand
uguagaagacacaucguua

SEQ ID NO: 1552311 - RNA, 19 nt, Homo sapiens
  misc_RNA (1)...(19): siRNA sense strand
cagaaggcuuugcaccauu

SEQ ID NO: 1552312 - RNA, 19 nt, Homo sapiens
  misc_RNA (1)...(19): siRNA sense strand
aacaagaaaugccguggaa

SEQ ID NO: 1552313 - RNA, 19 nt, Homo sapiens
  misc_RNA (1)...(19): siRNA sense strand
gauggcucguuucacuaua

SEQ ID NO: 1552314 - RNA, 19 nt, Homo sapiens
  misc_RNA (1)...(19): siRNA sense strand
guugaagcccugaaacaaa

SEQ ID NO: 1552315 - RNA, 19 nt, Homo sapiens
  misc_RNA (1)...(19): siRNA sense strand
caacugaugaucuauuaag

SEQ ID NO: 1552316 - RNA, 19 nt, Homo sapiens
  misc_RNA (1)...(19): siRNA sense strand
gcucuacaggcuuauauug

SEQ ID NO: 1552317 - RNA, 19 nt, Homo sapiens
  misc_RNA (1)...(19): siRNA sense strand
guacugaagaauuaccaaa

SEQ ID NO: 1552318 - RNA, 19 nt, Homo sapiens
  misc_RNA (1)...(19): siRNA sense strand
aaagauaagcuguacagau

SEQ ID NO: 1552319 - RNA, 19 nt, Homo sapiens
  misc_RNA (1)...(19): siRNA sense strand
uugaagcccugaaacaaau

SEQ ID NO: 1552320 - RNA, 19 nt, Homo sapiens
  misc_RNA (1)...(19): siRNA sense strand
cuacaggcuuauauugaug

SEQ ID NO: 1552321 - RNA, 19 nt, Homo sapiens
  misc_RNA (1)...(19): siRNA sense strand
gggcaaagagugcuaaagg

SEQ ID NO: 1552322 - RNA, 19 nt, Homo sapiens
  misc_RNA (1)...(19): siRNA sense strand
ugagaagaauccacauuuu

SEQ ID NO: 1552323 - RNA, 19 nt, Homo sapiens
  misc_RNA (1)...(19): siRNA sense strand
ucuacaggcuuauauugau

SEQ ID NO: 1552324 - RNA, 19 nt, Homo sapiens
  misc_RNA (1)...(19): siRNA sense strand
gaaggcuuugcaccauuua

SEQ ID NO: 1552325 - RNA, 19 nt, Homo sapiens
  misc_RNA (1)...(19): siRNA sense strand
uaauucugauggcucguuu

SEQ ID NO: 1552326 - RNA, 19 nt, Homo sapiens
  misc_RNA (1)...(19): siRNA sense strand
ugaucuaggccaaauauau

SEQ ID NO: 1552327 - RNA, 19 nt, Homo sapiens
  misc_RNA (1)...(19): siRNA sense strand
gacaguccuugcucauuag

SEQ ID NO: 1552328 - RNA, 19 nt, Homo sapiens
  misc_RNA (1)...(19): siRNA sense strand
ucagaaggcuuugcaccau

SEQ ID NO: 1552329 - RNA, 19 nt, Homo sapiens
  misc_RNA (1)...(19): siRNA sense strand
gaauuaccaaaguccauga

SEQ ID NO: 1552330 - RNA, 19 nt, Homo sapiens
  misc_RNA (1)...(19): siRNA sense strand
gcucguuucacuauaaaga

SEQ ID NO: 1552331 - RNA, 19 nt, Homo sapiens
  misc_RNA (1)...(19): siRNA sense strand
gcacucaaacuucauaucc

SEQ ID NO: 1552332 - RNA, 19 nt, Homo sapiens
  misc_RNA (1)...(19): siRNA sense strand
caaacuucauauccuguag

SEQ ID NO: 1552333 - RNA, 19 nt, Homo sapiens
  misc_RNA (1)...(19): siRNA sense strand
cguuaacucugaugauagu

SEQ ID NO: 1552334 - RNA, 19 nt, Homo sapiens
  misc_RNA (1)...(19): siRNA sense strand
cuaaauuacaguugaagga

SEQ ID NO: 1552335 - RNA, 19 nt, Homo sapiens
  misc_RNA (1)...(19): siRNA sense strand
acuaauaugucacaguucu

SEQ ID NO: 1552336 - RNA, 19 nt, Homo sapiens
  misc_RNA (1)...(19): siRNA sense strand
aaucuccuguucccguuaa

SEQ ID NO: 1552337 - RNA, 19 nt, Homo sapiens
  misc_RNA (1)...(19): siRNA sense strand
cuuuguuacuccuguuaua

SEQ ID NO: 1552338 - RNA, 19 nt, Homo sapiens
  misc_RNA (1)...(19): siRNA sense strand
uugagaagaauccacauuu

SEQ ID NO: 1552339 - RNA, 19 nt, Homo sapiens
  misc_RNA (1)...(19): siRNA sense strand
agacacaucguuaaugaca

SEQ ID NO: 1552340 - RNA, 19 nt, Homo sapiens
  misc_RNA (1)...(19): siRNA sense strand
aaagcacucaaacuucaua

SEQ ID NO: 1552341 - RNA, 19 nt, Homo sapiens
  misc_RNA (1)...(19): siRNA sense strand
caaggacccuacacuucca

SEQ ID NO: 1552342 - RNA, 19 nt, Homo sapiens
  misc_RNA (1)...(19): siRNA sense strand
ucugauggcucguuucacu

SEQ ID NO: 1552343 - RNA, 19 nt, Homo sapiens
  misc_RNA (1)...(19): siRNA sense strand
uagaagacacaucguuaau

SEQ ID NO: 1552344 - RNA, 19 nt, Homo sapiens
  misc_RNA (1)...(19): siRNA sense strand
ucaaacuucauauccugua

SEQ ID NO: 1552345 - RNA, 19 nt, Homo sapiens
  misc_RNA (1)...(19): siRNA sense strand
ugauaguccucaacaaacu

SEQ ID NO: 1552346 - RNA, 19 nt, Homo sapiens
  misc_RNA (1)...(19): siRNA sense strand
gcucauuagauaaacuuga

SEQ ID NO: 1552347 - RNA, 19 nt, Homo sapiens
  misc_RNA (1)...(19): siRNA sense strand
uuaaugacauagacuccau

SEQ ID NO: 1552348 - RNA, 19 nt, Homo sapiens
  misc_RNA (1)...(19): siRNA sense strand
auuacuaggucacuucaga

SEQ ID NO: 1552349 - RNA, 19 nt, Homo sapiens
  misc_RNA (1)...(19): siRNA sense strand
ccacagauccaaaagaaga

SEQ ID NO: 1552350 - RNA, 19 nt, Homo sapiens
  misc_RNA (1)...(19): siRNA sense strand
gauaaucagagcuguacuc

SEQ ID NO: 1552351 - RNA, 19 nt, Homo sapiens
  misc_RNA (1)...(19): siRNA sense strand
acugaagaauuaccaaagu

SEQ ID NO: 1552352 - RNA, 19 nt, Homo sapiens
  misc_RNA (1)...(19): siRNA sense strand
gaaggccaagagaaaucua

SEQ ID NO: 1552353 - RNA, 19 nt, Homo sapiens
  misc_RNA (1)...(19): siRNA sense strand
ucaccgaacgagcaagaaa

SEQ ID NO: 1552354 - RNA, 19 nt, Homo sapiens
  misc_RNA (1)...(19): siRNA sense strand
acaaaccaaacaaugcuuu

SEQ ID NO: 1552355 - RNA, 19 nt, Homo sapiens
  misc_RNA (1)...(19): siRNA sense strand
ugaauugcuuaucuugaag

SEQ ID NO: 1552356 - RNA, 19 nt, Homo sapiens
  misc_RNA (1)...(19): siRNA sense strand
cuauaaagauaagcuguac

SEQ ID NO: 1552357 - RNA, 19 nt, Homo sapiens
  misc_RNA (1)...(19): siRNA sense strand
cugaugaucuauuaagacu

SEQ ID NO: 1552358 - RNA, 19 nt, Homo sapiens
  misc_RNA (1)...(19): siRNA sense strand
gagaccugguugaugauac

SEQ ID NO: 1552359 - RNA, 19 nt, Homo sapiens
  misc_RNA (1)...(19): siRNA sense strand
guaugauuccuauuacuag

SEQ ID NO: 1552360 - RNA, 19 nt, Homo sapiens
  misc_RNA (1)...(19): siRNA sense strand
guugaaggaaaguaugauu

SEQ ID NO: 1552361 - RNA, 19 nt, Homo sapiens
  misc_RNA (1)...(19): siRNA sense strand
gauaguccucaacaaacuu

SEQ ID NO: 1552362 - RNA, 19 nt, Homo sapiens
  misc_RNA (1)...(19): siRNA sense strand
gaauccacauuuucaagga

SEQ ID NO: 1552363 - RNA, 19 nt, Homo sapiens
  misc_RNA (1)...(19): siRNA sense strand
ggaaggcuggguucauugg

SEQ ID NO: 1552364 - RNA, 19 nt, Homo sapiens
  misc_RNA (1)...(19): siRNA sense strand
agacuuuguucucaggaau

SEQ ID NO: 1552365 - RNA, 19 nt, Homo sapiens
  misc_RNA (1)...(19): siRNA sense strand
guacaagaacguuuuaauc

SEQ ID NO: 1552366 - RNA, 19 nt, Homo sapiens
  misc_RNA (1)...(19): siRNA sense strand
caugggcaaggauaacuuu

SEQ ID NO: 1552367 - RNA, 19 nt, Homo sapiens
  misc_RNA (1)...(19): siRNA sense strand
acacuuccaugggcaagga

SEQ ID NO: 1552368 - RNA, 19 nt, Homo sapiens
  misc_RNA (1)...(19): siRNA sense strand
ggaccgagucaccgaacga

SEQ ID NO: 1552369 - RNA, 19 nt, Homo sapiens
  misc_RNA (1)...(19): siRNA sense strand
gagccuaacaacugaugau

SEQ ID NO: 1552370 - RNA, 19 nt, Homo sapiens
  misc_RNA (1)...(19): siRNA sense strand
gugguaguaauuccucuaa

SEQ ID NO: 1552371 - RNA, 19 nt, Homo sapiens
  misc_RNA (1)...(19): siRNA sense strand
gaaagcaauguggugacaa

SEQ ID NO: 1552372 - RNA, 19 nt, Homo sapiens
  misc_RNA (1)...(19): siRNA sense strand
gagaagaauccacauuuuc

SEQ ID NO: 1552373 - RNA, 19 nt, Homo sapiens
  misc_RNA (1)...(19): siRNA sense strand
guucauuggacauugagaa

SEQ ID NO: 1552374 - RNA, 19 nt, Homo sapiens
  misc_RNA (1)...(19): siRNA sense strand
uccaugagccuaacaacug

SEQ ID NO: 1552375 - RNA, 19 nt, Homo sapiens
  misc_RNA (1)...(19): siRNA sense strand
gcaguacaagaacguuuua

SEQ ID NO: 1552376 - RNA, 19 nt, Homo sapiens
  misc_RNA (1)...(19): siRNA sense strand
ugaugauaguccucaacaa

SEQ ID NO: 1552377 - RNA, 19 nt, Homo sapiens
  misc_RNA (1)...(19): siRNA sense strand
cugaagaauuaccaaaguc

SEQ ID NO: 1552378 - RNA, 19 nt, Homo sapiens
  misc_RNA (1)...(19): siRNA sense strand
ugaaaaccuugaucacgaa

SEQ ID NO: 1552379 - RNA, 19 nt, Homo sapiens
  misc_RNA (1)...(19): siRNA sense strand
gacagaucaugggaaaaua

SEQ ID NO: 1552380 - RNA, 19 nt, Homo sapiens
  misc_RNA (1)...(19): siRNA sense strand
cgccucagcucucggagua

SEQ ID NO: 1552381 - RNA, 19 nt, Homo sapiens
  misc_RNA (1)...(19): siRNA sense strand
guaggagcguuaaguugug

SEQ ID NO: 1552382 - RNA, 19 nt, Homo sapiens
  misc_RNA (1)...(19): siRNA sense strand
aaauggagcccuucaccaa

SEQ ID NO: 1552383 - RNA, 19 nt, Homo sapiens
  misc_RNA (1)...(19): siRNA sense strand
aaaguuggcagcucagguu

SEQ ID NO: 1552384 - RNA, 19 nt, Homo sapiens
  misc_RNA (1)...(19): siRNA sense strand
uguaggagcguuaaguugu

SEQ ID NO: 1552385 - RNA, 19 nt, Homo sapiens
  misc_RNA (1)...(19): siRNA sense strand
auggagcccuucaccaaug

SEQ ID NO: 1552386 - RNA, 19 nt, Homo sapiens
  misc_RNA (1)...(19): siRNA sense strand
ggagugggcagugggaaag

SEQ ID NO: 1552387 - RNA, 19 nt, Homo sapiens
  misc_RNA (1)...(19): siRNA sense strand
gcagaugccacgcuacuaa

SEQ ID NO: 1552388 - RNA, 19 nt, Homo sapiens
  misc_RNA (1)...(19): siRNA sense strand
gcgagagccucaccaagaa

SEQ ID NO: 1552389 - RNA, 19 nt, Homo sapiens
  misc_RNA (1)...(19): siRNA sense strand
gaagucagagaaacuguug

SEQ ID NO: 1552390 - RNA, 19 nt, Homo sapiens
  misc_RNA (1)...(19): siRNA sense strand
gggagacagugcucacgaa

SEQ ID NO: 1552391 - RNA, 19 nt, Homo sapiens
  misc_RNA (1)...(19): siRNA sense strand
gaacccagaggauaccuau

SEQ ID NO: 1552392 - RNA, 19 nt, Homo sapiens
  misc_RNA (1)...(19): siRNA sense strand
ggcccaggcuguagaugaa

SEQ ID NO: 1552393 - RNA, 19 nt, Homo sapiens
  misc_RNA (1)...(19): siRNA sense strand
ccaagaaagccaagagguu

SEQ ID NO: 1552394 - RNA, 19 nt, Homo sapiens
  misc_RNA (1)...(19): siRNA sense strand
gagaaacuguuggcagagu

SEQ ID NO: 1552395 - RNA, 19 nt, Homo sapiens
  misc_RNA (1)...(19): siRNA sense strand
gcaucaugguggauaagga

SEQ ID NO: 1552396 - RNA, 19 nt, Homo sapiens
  misc_RNA (1)...(19): siRNA sense strand
cuaaagaagucagagaaac

SEQ ID NO: 1552397 - RNA, 19 nt, Homo sapiens
  misc_RNA (1)...(19): siRNA sense strand
caccacgaccuacccguua

SEQ ID NO: 1552398 - RNA, 19 nt, Homo sapiens
  misc_RNA (1)...(19): siRNA sense strand
gacgcaucaugguggauaa

SEQ ID NO: 1552399 - RNA, 19 nt, Homo sapiens
  misc_RNA (1)...(19): siRNA sense strand
uaaagaagucagagaaacu

SEQ ID NO: 1552400 - RNA, 19 nt, Homo sapiens
  misc_RNA (1)...(19): siRNA sense strand
gggcccaggcuguagauga

SEQ ID NO: 1552401 - RNA, 19 nt, Homo sapiens
  misc_RNA (1)...(19): siRNA sense strand
gcgcaacgccaaguucuuc

SEQ ID NO: 1552402 - RNA, 19 nt, Homo sapiens
  misc_RNA (1)...(19): siRNA sense strand
gaugccacgcuacuaaaga

SEQ ID NO: 1552403 - RNA, 19 nt, Homo sapiens
  misc_RNA (1)...(19): siRNA sense strand
cgcgagagccucaccaaga

SEQ ID NO: 1552404 - RNA, 19 nt, Homo sapiens
  misc_RNA (1)...(19): siRNA sense strand
cgggaccacugccuucaga

SEQ ID NO: 1552405 - RNA, 19 nt, Homo sapiens
  misc_RNA (1)...(19): siRNA sense strand
ccggagaacccagaggaua

SEQ ID NO: 1552406 - RNA, 19 nt, Homo sapiens
  misc_RNA (1)...(19): siRNA sense strand
ucuagucguuuaugacauc

SEQ ID NO: 1552407 - RNA, 19 nt, Homo sapiens
  misc_RNA (1)...(19): siRNA sense strand
ccacgcuacuaaagaaguc

SEQ ID NO: 1552408 - RNA, 19 nt, Homo sapiens
  misc_RNA (1)...(19): siRNA sense strand
acccagaggauaccuauga

SEQ ID NO: 1552409 - RNA, 19 nt, Homo sapiens
  misc_RNA (1)...(19): siRNA sense strand
cagaugccacgcuacuaaa

SEQ ID NO: 1552410 - RNA, 19 nt, Homo sapiens
  misc_RNA (1)...(19): siRNA sense strand
caucuucaaggucaugcua

SEQ ID NO: 1552411 - RNA, 19 nt, Homo sapiens
  misc_RNA (1)...(19): siRNA sense strand
gcaacgccaaguucuucaa

SEQ ID NO: 1552412 - RNA, 19 nt, Homo sapiens
  misc_RNA (1)...(19): siRNA sense strand
cuacuaaagaagucagaga

SEQ ID NO: 1552413 - RNA, 19 nt, Homo sapiens
  misc_RNA (1)...(19): siRNA sense strand
ggauaaggaggaagugacu

SEQ ID NO: 1552414 - RNA, 19 nt, Homo sapiens
  misc_RNA (1)...(19): siRNA sense strand
caugguggauaaggaggaa

SEQ ID NO: 1552415 - RNA, 19 nt, Homo sapiens
  misc_RNA (1)...(19): siRNA sense strand
augccacgcuacuaaagaa

SEQ ID NO: 1552416 - RNA, 19 nt, Homo sapiens
  misc_RNA (1)...(19): siRNA sense strand
agacgcaucaugguggaua

SEQ ID NO: 1552417 - RNA, 19 nt, Homo sapiens
  misc_RNA (1)...(19): siRNA sense strand
agacgaagaggcaguaugc

SEQ ID NO: 1552418 - RNA, 19 nt, Homo sapiens
  misc_RNA (1)...(19): siRNA sense strand
cgagagccucaccaagaaa

SEQ ID NO: 1552419 - RNA, 19 nt, Homo sapiens
  misc_RNA (1)...(19): siRNA sense strand
uauccucguuggaaacaag

SEQ ID NO: 1552420 - RNA, 19 nt, Homo sapiens
  misc_RNA (1)...(19): siRNA sense strand
acuaaagaagucagagaaa

SEQ ID NO: 1552421 - RNA, 19 nt, Homo sapiens
  misc_RNA (1)...(19): siRNA sense strand
gagagccucaccaagaaag

SEQ ID NO: 1552422 - RNA, 19 nt, Homo sapiens
  misc_RNA (1)...(19): siRNA sense strand
ggcuguagaugaacuugac

SEQ ID NO: 1552423 - RNA, 19 nt, Homo sapiens
  misc_RNA (1)...(19): siRNA sense strand
ccguuauccucguuggaaa

SEQ ID NO: 1552424 - RNA, 19 nt, Homo sapiens
  misc_RNA (1)...(19): siRNA sense strand
ccagaggauaccuaugaga

SEQ ID NO: 1552425 - RNA, 19 nt, Homo sapiens
  misc_RNA (1)...(19): siRNA sense strand
uacuaaagaagucagagaa

SEQ ID NO: 1552426 - RNA, 19 nt, Homo sapiens
  misc_RNA (1)...(19): siRNA sense strand
ccaaggagaugaaggauaa

SEQ ID NO: 1552427 - RNA, 19 nt, Homo sapiens
  misc_RNA (1)...(19): siRNA sense strand
gauaagaccucugaagaaa

SEQ ID NO: 1552428 - RNA, 19 nt, Homo sapiens
  misc_RNA (1)...(19): siRNA sense strand
ucaagucucucaggaauua

SEQ ID NO: 1552429 - RNA, 19 nt, Homo sapiens
  misc_RNA (1)...(19): siRNA sense strand
cagcauagauuucccagaa

SEQ ID NO: 1552430 - RNA, 19 nt, Homo sapiens
  misc_RNA (1)...(19): siRNA sense strand
cagaagaggugaauccauu

SEQ ID NO: 1552431 - RNA, 19 nt, Homo sapiens
  misc_RNA (1)...(19): siRNA sense strand
gaacaugagccugaaagua

SEQ ID NO: 1552432 - RNA, 19 nt, Homo sapiens
  misc_RNA (1)...(19): siRNA sense strand
gcauagauuucccagaauu

SEQ ID NO: 1552433 - RNA, 19 nt, Homo sapiens
  misc_RNA (1)...(19): siRNA sense strand
gaagaggugaauccauuua

SEQ ID NO: 1552434 - RNA, 19 nt, Homo sapiens
  misc_RNA (1)...(19): siRNA sense strand
cgagagaucuucaaaauau

SEQ ID NO: 1552435 - RNA, 19 nt, Homo sapiens
  misc_RNA (1)...(19): siRNA sense strand
ucacagaagucauagaagu

SEQ ID NO: 1552436 - RNA, 19 nt, Homo sapiens
  misc_RNA (1)...(19): siRNA sense strand
ggauaagaccucugaagaa

SEQ ID NO: 1552437 - RNA, 19 nt, Homo sapiens
  misc_RNA (1)...(19): siRNA sense strand
gcucugauauuacaaacug

SEQ ID NO: 1552438 - RNA, 19 nt, Homo sapiens
  misc_RNA (1)...(19): siRNA sense strand
ucacagaucuuccagaaaa

SEQ ID NO: 1552439 - RNA, 19 nt, Homo sapiens
  misc_RNA (1)...(19): siRNA sense strand
agacagcucugauauuaca

SEQ ID NO: 1552440 - RNA, 19 nt, Homo sapiens
  misc_RNA (1)...(19): siRNA sense strand
gaauccauuuaccuucaua

SEQ ID NO: 1552441 - RNA, 19 nt, Homo sapiens
  misc_RNA (1)...(19): siRNA sense strand
cauaucaaaucuccuucua

SEQ ID NO: 1552442 - RNA, 19 nt, Homo sapiens
  misc_RNA (1)...(19): siRNA sense strand
gaacugaaucaaacacuuc

SEQ ID NO: 1552443 - RNA, 19 nt, Homo sapiens
  misc_RNA (1)...(19): siRNA sense strand
aacaugagccugaaaguaa

SEQ ID NO: 1552444 - RNA, 19 nt, Homo sapiens
  misc_RNA (1)...(19): siRNA sense strand
gucaccaucucaaacauaa

SEQ ID NO: 1552445 - RNA, 19 nt, Homo sapiens
  misc_RNA (1)...(19): siRNA sense strand
ugucacagaucuuccagaa

SEQ ID NO: 1552446 - RNA, 19 nt, Homo sapiens
  misc_RNA (1)...(19): siRNA sense strand
aagaaaagaugccugauuu

SEQ ID NO: 1552447 - RNA, 19 nt, Homo sapiens
  misc_RNA (1)...(19): siRNA sense strand
gaagaauccaggagcuuga

SEQ ID NO: 1552448 - RNA, 19 nt, Homo sapiens
  misc_RNA (1)...(19): siRNA sense strand
ucacagacaucaccgacau

SEQ ID NO: 1552449 - RNA, 19 nt, Homo sapiens
  misc_RNA (1)...(19): siRNA sense strand
gaaucaaacacuucaguuc

SEQ ID NO: 1552450 - RNA, 19 nt, Homo sapiens
  misc_RNA (1)...(19): siRNA sense strand
uguaagaauugucacagaa

SEQ ID NO: 1552451 - RNA, 19 nt, Homo sapiens
  misc_RNA (1)...(19): siRNA sense strand
gcccucaucucccucuuga

SEQ ID NO: 1552452 - RNA, 19 nt, Homo sapiens
  misc_RNA (1)...(19): siRNA sense strand
gaaagaauccucaaaacau

SEQ ID NO: 1552453 - RNA, 19 nt, Homo sapiens
  misc_RNA (1)...(19): siRNA sense strand
ucucaggaauuacgaauag

SEQ ID NO: 1552454 - RNA, 19 nt, Homo sapiens
  misc_RNA (1)...(19): siRNA sense strand
guagaaagugaggcaaaua

SEQ ID NO: 1552455 - RNA, 19 nt, Homo sapiens
  misc_RNA (1)...(19): siRNA sense strand
ggucccggauguaagaauu

SEQ ID NO: 1552456 - RNA, 19 nt, Homo sapiens
  misc_RNA (1)...(19): siRNA sense strand
uguaucuccucccauguua

SEQ ID NO: 1552457 - RNA, 19 nt, Homo sapiens
  misc_RNA (1)...(19): siRNA sense strand
gaaagugaggcaaauacau

SEQ ID NO: 1552458 - RNA, 19 nt, Homo sapiens
  misc_RNA (1)...(19): siRNA sense strand
gaauagcacagacaucaca

SEQ ID NO: 1552459 - RNA, 19 nt, Homo sapiens
  misc_RNA (1)...(19): siRNA sense strand
caggagaaagccaaaguuu

SEQ ID NO: 1552460 - RNA, 19 nt, Homo sapiens
  misc_RNA (1)...(19): siRNA sense strand
guaagagugaguugaaaga

SEQ ID NO: 1552461 - RNA, 19 nt, Homo sapiens
  misc_RNA (1)...(19): siRNA sense strand
ucugaagccuggguguuua

SEQ ID NO: 1552462 - RNA, 19 nt, Homo sapiens
  misc_RNA (1)...(19): siRNA sense strand
uaagaauugucacagaagu

SEQ ID NO: 1552463 - RNA, 19 nt, Homo sapiens
  misc_RNA (1)...(19): siRNA sense strand
agagugaguugaaagaauc

SEQ ID NO: 1552464 - RNA, 19 nt, Homo sapiens
  misc_RNA (1)...(19): siRNA sense strand
aaaguaagagugaguugaa

SEQ ID NO: 1552465 - RNA, 19 nt, Homo sapiens
  misc_RNA (1)...(19): siRNA sense strand
gaagaaaagaugccugauu

SEQ ID NO: 1552466 - RNA, 19 nt, Homo sapiens
  misc_RNA (1)...(19): siRNA sense strand
cuaauuuccucaaacuugu

SEQ ID NO: 1552467 - RNA, 19 nt, Homo sapiens
  misc_RNA (1)...(19): siRNA sense strand
ccaugaggaucaauaagca

SEQ ID NO: 1552468 - RNA, 19 nt, Homo sapiens
  misc_RNA (1)...(19): siRNA sense strand
gcaagacuaccaugaggau

SEQ ID NO: 1552469 - RNA, 19 nt, Homo sapiens
  misc_RNA (1)...(19): siRNA sense strand
ugaaggauaagaccucuga

SEQ ID NO: 1552470 - RNA, 19 nt, Homo sapiens
  misc_RNA (1)...(19): siRNA sense strand
ccagaggucccggauguaa

SEQ ID NO: 1552471 - RNA, 19 nt, Homo sapiens
  misc_RNA (1)...(19): siRNA sense strand
ccauggaugugacggaugu

SEQ ID NO: 1552472 - RNA, 19 nt, Homo sapiens
  misc_RNA (1)...(19): siRNA sense strand
gaagaacaccagcaagacu

SEQ ID NO: 1552473 - RNA, 19 nt, Homo sapiens
  misc_RNA (1)...(19): siRNA sense strand
gccaaaguuuccaaagugu

SEQ ID NO: 1552474 - RNA, 19 nt, Homo sapiens
  misc_RNA (1)...(19): siRNA sense strand
acaugagccugaaaguaaa

SEQ ID NO: 1552475 - RNA, 19 nt, Homo sapiens
  misc_RNA (1)...(19): siRNA sense strand
gaaaguaaagcuggugagu

SEQ ID NO: 1552476 - RNA, 19 nt, Homo sapiens
  misc_RNA (1)...(19): siRNA sense strand
uccaggagcuugagaacug

SEQ ID NO: 1552477 - RNA, 19 nt, Homo sapiens
  misc_RNA (1)...(19): siRNA sense strand
ucaucucccucuugaauca

SEQ ID NO: 1552478 - RNA, 19 nt, Homo sapiens
  misc_RNA (1)...(19): siRNA sense strand
ucucaaggcugaagaaucc

SEQ ID NO: 1552479 - RNA, 19 nt, Homo sapiens
  misc_RNA (1)...(19): siRNA sense strand
gagucacagugguguuuga

SEQ ID NO: 1552480 - RNA, 19 nt, Homo sapiens
  misc_RNA (1)...(19): siRNA sense strand
ucagggacagcauagauuu

SEQ ID NO: 1552481 - RNA, 19 nt, Homo sapiens
  misc_RNA (1)...(19): siRNA sense strand
gaggaucaauaagcaagau

SEQ ID NO: 1552482 - RNA, 19 nt, Homo sapiens
  misc_RNA (1)...(19): siRNA sense strand
ucaguucucuccccucaua

SEQ ID NO: 1552483 - RNA, 19 nt, Homo sapiens
  misc_RNA (1)...(19): siRNA sense strand
uggucgagccuacuacuua

SEQ ID NO: 1552484 - RNA, 19 nt, Homo sapiens
  misc_RNA (1)...(19): siRNA sense strand
aagaagaacaccagcaaga

SEQ ID NO: 1552485 - RNA, 19 nt, Homo sapiens
  misc_RNA (1)...(19): siRNA sense strand
aagagugaguugaaagaau

SEQ ID NO: 1552486 - RNA, 19 nt, Homo sapiens
  misc_RNA (1)...(19): siRNA sense strand
ccuggguguuuacaagaua

SEQ ID NO: 1552487 - RNA, 19 nt, Homo sapiens
  misc_RNA (1)...(19): siRNA sense strand
ugucggagguuucaagucu

SEQ ID NO: 1552488 - RNA, 19 nt, Homo sapiens
  misc_RNA (1)...(19): siRNA sense strand
cauauaaacaggacaccuu

SEQ ID NO: 1552489 - RNA, 19 nt, Homo sapiens
  misc_RNA (1)...(19): siRNA sense strand
ucacagugguguuugaaaa

SEQ ID NO: 1552490 - RNA, 19 nt, Homo sapiens
  misc_RNA (1)...(19): siRNA sense strand
agccaaaguuuccaaagug

SEQ ID NO: 1552491 - RNA, 19 nt, Homo sapiens
  misc_RNA (1)...(19): siRNA sense strand
ucccagaggucccggaugu

SEQ ID NO: 1552492 - RNA, 19 nt, Homo sapiens
  misc_RNA (1)...(19): siRNA sense strand
caacagaagaggugaaucc

SEQ ID NO: 1552493 - RNA, 19 nt, Homo sapiens
  misc_RNA (1)...(19): siRNA sense strand
ucuaauuuccucaaacuug

SEQ ID NO: 1552494 - RNA, 19 nt, Homo sapiens
  misc_RNA (1)...(19): siRNA sense strand
agaacugaaucaaacacuu

SEQ ID NO: 1552495 - RNA, 19 nt, Homo sapiens
  misc_RNA (1)...(19): siRNA sense strand
caaacauaacacugacuuu

SEQ ID NO: 1552496 - RNA, 19 nt, Homo sapiens
  misc_RNA (1)...(19): siRNA sense strand
aaacaugucaccaucucaa

SEQ ID NO: 1552497 - RNA, 19 nt, Homo sapiens
  misc_RNA (1)...(19): siRNA sense strand
agacaucaccgacaucaca

SEQ ID NO: 1552498 - RNA, 19 nt, Homo sapiens
  misc_RNA (1)...(19): siRNA sense strand
gaauuacgaauagcacaga

SEQ ID NO: 1552499 - RNA, 19 nt, Homo sapiens
  misc_RNA (1)...(19): siRNA sense strand
uuucaagucucucaggaau

SEQ ID NO: 1552500 - RNA, 19 nt, Homo sapiens
  misc_RNA (1)...(19): siRNA sense strand
aagccaaaguuuccaaagu

SEQ ID NO: 1552501 - RNA, 19 nt, Homo sapiens
  misc_RNA (1)...(19): siRNA sense strand
ggucgagccuacuacuuac

SEQ ID NO: 1552502 - RNA, 19 nt, Homo sapiens
  misc_RNA (1)...(19): siRNA sense strand
ccucuugaaucaggagaaa

SEQ ID NO: 1552503 - RNA, 19 nt, Homo sapiens
  misc_RNA (1)...(19): siRNA sense strand
ccucaucucccucuugaau

SEQ ID NO: 1552504 - RNA, 19 nt, Homo sapiens
  misc_RNA (1)...(19): siRNA sense strand
gcaccucugcauauaaaca

SEQ ID NO: 1552505 - RNA, 19 nt, Homo sapiens
  misc_RNA (1)...(19): siRNA sense strand
gaauccaggagcuugagaa

SEQ ID NO: 1552506 - RNA, 19 nt, Homo sapiens
  misc_RNA (1)...(19): siRNA sense strand
ugucacagaagucauagaa

SEQ ID NO: 1552507 - RNA, 19 nt, Homo sapiens
  misc_RNA (1)...(19): siRNA sense strand
ggagaacaugagccugaaa

SEQ ID NO: 1552508 - RNA, 19 nt, Homo sapiens
  misc_RNA (1)...(19): siRNA sense strand
aaacuugugccucaucugu

SEQ ID NO: 1552509 - RNA, 19 nt, Homo sapiens
  misc_RNA (1)...(19): siRNA sense strand
caaauacauccaaggagau

SEQ ID NO: 1552510 - RNA, 19 nt, Homo sapiens
  misc_RNA (1)...(19): siRNA sense strand
aaagugaggcaaauacauc

SEQ ID NO: 1552511 - RNA, 19 nt, Homo sapiens
  misc_RNA (1)...(19): siRNA sense strand
gggagucacagugguguuu

SEQ ID NO: 1552512 - RNA, 19 nt, Homo sapiens
  misc_RNA (1)...(19): siRNA sense strand
caaagugucggagguuuca

SEQ ID NO: 1552513 - RNA, 19 nt, Homo sapiens
  misc_RNA (1)...(19): siRNA sense strand
gagaacaugagccugaaag

SEQ ID NO: 1552514 - RNA, 19 nt, Homo sapiens
  misc_RNA (1)...(19): siRNA sense strand
cuaccaugaggaucaauaa

SEQ ID NO: 1552515 - RNA, 19 nt, Homo sapiens
  misc_RNA (1)...(19): siRNA sense strand
gagcuugagaacugaauca

SEQ ID NO: 1552516 - RNA, 19 nt, Homo sapiens
  misc_RNA (1)...(19): siRNA sense strand
ucaaacauaacacugacuu

SEQ ID NO: 1552517 - RNA, 19 nt, Homo sapiens
  misc_RNA (1)...(19): siRNA sense strand
acaaacugcucgggaguca

SEQ ID NO: 1552518 - RNA, 19 nt, Homo sapiens
  misc_RNA (1)...(19): siRNA sense strand
agucauagaagucagagaa

SEQ ID NO: 1552519 - RNA, 19 nt, Homo sapiens
  misc_RNA (1)...(19): siRNA sense strand
aagaacaccagcaagacua

SEQ ID NO: 1552520 - RNA, 19 nt, Homo sapiens
  misc_RNA (1)...(19): siRNA sense strand
caucacaggcuccauggau

SEQ ID NO: 1552521 - RNA, 19 nt, Homo sapiens
  misc_RNA (1)...(19): siRNA sense strand
guaagaauugucacagaag

SEQ ID NO: 1552522 - RNA, 19 nt, Homo sapiens
  misc_RNA (1)...(19): siRNA sense strand
ccaggagcuugagaacuga

SEQ ID NO: 1552523 - RNA, 19 nt, Homo sapiens
  misc_RNA (1)...(19): siRNA sense strand
uaagaccucugaagaaaag

SEQ ID NO: 1552524 - RNA, 19 nt, Homo sapiens
  misc_RNA (1)...(19): siRNA sense strand
acauaacacugacuuuuga

SEQ ID NO: 1552525 - RNA, 19 nt, Homo sapiens
  misc_RNA (1)...(19): siRNA sense strand
gggccaagcaagaggagaa

SEQ ID NO: 1552526 - RNA, 19 nt, Homo sapiens
  misc_RNA (1)...(19): siRNA sense strand
agacaggaccucucaauug

SEQ ID NO: 1552527 - RNA, 19 nt, Homo sapiens
  misc_RNA (1)...(19): siRNA sense strand
gcugaaagcccacaaacau

SEQ ID NO: 1552528 - RNA, 19 nt, Homo sapiens
  misc_RNA (1)...(19): siRNA sense strand
gacaggaccucucaauugc

SEQ ID NO: 1552529 - RNA, 19 nt, Homo sapiens
  misc_RNA (1)...(19): siRNA sense strand
cuacagcuaugaauacuac

SEQ ID NO: 1552530 - RNA, 19 nt, Homo sapiens
  misc_RNA (1)...(19): siRNA sense strand
aauacuaccuggacuaucu

SEQ ID NO: 1552531 - RNA, 19 nt, Homo sapiens
  misc_RNA (1)...(19): siRNA sense strand
ugaaagcccacaaacauuc

SEQ ID NO: 1552532 - RNA, 19 nt, Homo sapiens
  misc_RNA (1)...(19): siRNA sense strand
gaagcugaaagcccacaaa

SEQ ID NO: 1552533 - RNA, 19 nt, Homo sapiens
  misc_RNA (1)...(19): siRNA sense strand
gugcugcucuuccucaucu

SEQ ID NO: 1552534 - RNA, 19 nt, Homo sapiens
  misc_RNA (1)...(19): siRNA sense strand
ccaagcaccaccaaacaug

SEQ ID NO: 1552535 - RNA, 19 nt, Homo sapiens
  misc_RNA (1)...(19): siRNA sense strand
ggacuaucuggaccucauu

SEQ ID NO: 1552536 - RNA, 19 nt, Homo sapiens
  misc_RNA (1)...(19): siRNA sense strand
ucugggaacugacccucaa

SEQ ID NO: 1552537 - RNA, 19 nt, Homo sapiens
  misc_RNA (1)...(19): siRNA sense strand
ggacgagaagaagcugaaa

SEQ ID NO: 1552538 - RNA, 19 nt, Homo sapiens
  misc_RNA (1)...(19): siRNA sense strand
cugaaagcccacaaacauu

SEQ ID NO: 1552539 - RNA, 19 nt, Homo sapiens
  misc_RNA (1)...(19): siRNA sense strand
ugaauacuaccuggacuau

SEQ ID NO: 1552540 - RNA, 19 nt, Homo sapiens
  misc_RNA (1)...(19): siRNA sense strand
caaacauuccaucgugauc

SEQ ID NO: 1552541 - RNA, 19 nt, Homo sapiens
  misc_RNA (1)...(19): siRNA sense strand
gggaacugacccucaaugg

SEQ ID NO: 1552542 - RNA, 19 nt, Homo sapiens
  misc_RNA (1)...(19): siRNA sense strand
ggacaaacccaccagauuc

SEQ ID NO: 1552543 - RNA, 19 nt, Homo sapiens
  misc_RNA (1)...(19): siRNA sense strand
gagcagagagagccuauga

SEQ ID NO: 1552544 - RNA, 19 nt, Homo sapiens
  misc_RNA (1)...(19): siRNA sense strand
cacagaagccucucacuaa

SEQ ID NO: 1552545 - RNA, 19 nt, Homo sapiens
  misc_RNA (1)...(19): siRNA sense strand
ccucagaguucgacaguga

SEQ ID NO: 1552546 - RNA, 19 nt, Homo sapiens
  misc_RNA (1)...(19): siRNA sense strand
acagaagccucucacuaaa

SEQ ID NO: 1552547 - RNA, 19 nt, Homo sapiens
  misc_RNA (1)...(19): siRNA sense strand
ccacagaagccucucacua

SEQ ID NO: 1552548 - RNA, 19 nt, Homo sapiens
  misc_RNA (1)...(19): siRNA sense strand
agaagccucucacuaaaga

SEQ ID NO: 1552549 - RNA, 19 nt, Homo sapiens
  misc_RNA (1)...(19): siRNA sense strand
ggacccucaucaaggauaa

SEQ ID NO: 1552550 - RNA, 19 nt, Homo sapiens
  misc_RNA (1)...(19): siRNA sense strand
caacugaagcugcugaugu

SEQ ID NO: 1552551 - RNA, 19 nt, Homo sapiens
  misc_RNA (1)...(19): siRNA sense strand
gcagagagagccuaugaag

SEQ ID NO: 1552552 - RNA, 19 nt, Homo sapiens
  misc_RNA (1)...(19): siRNA sense strand
uaccaggucuucucuuguu

SEQ ID NO: 1552553 - RNA, 19 nt, Homo sapiens
  misc_RNA (1)...(19): siRNA sense strand
gagagagccuaugaagaga

SEQ ID NO: 1552554 - RNA, 19 nt, Homo sapiens
  misc_RNA (1)...(19): siRNA sense strand
ugcaagauccgccuacaua

SEQ ID NO: 1552555 - RNA, 19 nt, Homo sapiens
  misc_RNA (1)...(19): siRNA sense strand
cagcaucuaugucaucuac

SEQ ID NO: 1552556 - RNA, 19 nt, Homo sapiens
  misc_RNA (1)...(19): siRNA sense strand
ccaaauggccgagcagaga

SEQ ID NO: 1552557 - RNA, 19 nt, Homo sapiens
  misc_RNA (1)...(19): siRNA sense strand
gcaagauccgccuacauau

SEQ ID NO: 1552558 - RNA, 19 nt, Homo sapiens
  misc_RNA (1)...(19): siRNA sense strand
agagagagccuaugaagag

SEQ ID NO: 1552559 - RNA, 19 nt, Homo sapiens
  misc_RNA (1)...(19): siRNA sense strand
caagauccgccuacauaug

SEQ ID NO: 1552560 - RNA, 19 nt, Homo sapiens
  misc_RNA (1)...(19): siRNA sense strand
ccacugcacucgggaauac

SEQ ID NO: 1552561 - RNA, 19 nt, Homo sapiens
  misc_RNA (1)...(19): siRNA sense strand
cgggaauacucaccaaaug

SEQ ID NO: 1552562 - RNA, 19 nt, Homo sapiens
  misc_RNA (1)...(19): siRNA sense strand
gcaucuaugucaucuacca

SEQ ID NO: 1552563 - RNA, 19 nt, Homo sapiens
  misc_RNA (1)...(19): siRNA sense strand
ggaagggccagaggacaaa

SEQ ID NO: 1552564 - RNA, 19 nt, Homo sapiens
  misc_RNA (1)...(19): siRNA sense strand
ugaagagacgcgaauguug

SEQ ID NO: 1552565 - RNA, 19 nt, Homo sapiens
  misc_RNA (1)...(19): siRNA sense strand
ggucaucgaggagcacuuu

SEQ ID NO: 1552566 - RNA, 19 nt, Homo sapiens
  misc_RNA (1)...(19): siRNA sense strand
gcccaaugcaguagcagua

SEQ ID NO: 1552567 - RNA, 19 nt, Homo sapiens
  misc_RNA (1)...(19): siRNA sense strand
ucuaccaggucuucucuug

SEQ ID NO: 1552568 - RNA, 19 nt, Homo sapiens
  misc_RNA (1)...(19): siRNA sense strand
ccaccagauucuccuacaa

SEQ ID NO: 1552569 - RNA, 19 nt, Homo sapiens
  misc_RNA (1)...(19): siRNA sense strand
ccuggacccucaucaagga

SEQ ID NO: 1552570 - RNA, 19 nt, Homo sapiens
  misc_RNA (1)...(19): siRNA sense strand
agcaguaccuuuccuguca

SEQ ID NO: 1552571 - RNA, 19 nt, Homo sapiens
  misc_RNA (1)...(19): siRNA sense strand
caucaaggauaaggucauc

SEQ ID NO: 1552572 - RNA, 19 nt, Homo sapiens
  misc_RNA (1)...(19): siRNA sense strand
gcacccacagcaucuaugu

SEQ ID NO: 1552573 - RNA, 19 nt, Homo sapiens
  misc_RNA (1)...(19): siRNA sense strand
gacacuggaugaagcugau

SEQ ID NO: 1552574 - RNA, 19 nt, Homo sapiens
  misc_RNA (1)...(19): siRNA sense strand
ugggugaccugcgcaagaa

SEQ ID NO: 1552575 - RNA, 19 nt, Homo sapiens
  misc_RNA (1)...(19): siRNA sense strand
guaccuuuccugucagaug

SEQ ID NO: 1552576 - RNA, 19 nt, Homo sapiens
  misc_RNA (1)...(19): siRNA sense strand
gaagcacccacagcaucua

SEQ ID NO: 1552577 - RNA, 19 nt, Homo sapiens
  misc_RNA (1)...(19): siRNA sense strand
gggaauacucaccaaaugg

SEQ ID NO: 1552578 - RNA, 19 nt, Homo sapiens
  misc_RNA (1)...(19): siRNA sense strand
gauggacagcccugcaaga

SEQ ID NO: 1552579 - RNA, 19 nt, Homo sapiens
  misc_RNA (1)...(19): siRNA sense strand
gacaaacccaccagauucu

SEQ ID NO: 1552580 - RNA, 19 nt, Homo sapiens
  misc_RNA (1)...(19): siRNA sense strand
gaggacaaacccaccagau

SEQ ID NO: 1552581 - RNA, 19 nt, Homo sapiens
  misc_RNA (1)...(19): siRNA sense strand
caucugcugauacaacuga

SEQ ID NO: 1552582 - RNA, 19 nt, Homo sapiens
  misc_RNA (1)...(19): siRNA sense strand
ccacagcaucuaugucauc

SEQ ID NO: 1552583 - RNA, 19 nt, Homo sapiens
  misc_RNA (1)...(19): siRNA sense strand
cagagagagccuaugaaga

SEQ ID NO: 1552584 - RNA, 19 nt, Homo sapiens
  misc_RNA (1)...(19): siRNA sense strand
cccagauacugucagagaa

SEQ ID NO: 1552585 - RNA, 19 nt, Homo sapiens
  misc_RNA (1)...(19): siRNA sense strand
aacugaagcugcugaugug

SEQ ID NO: 1552586 - RNA, 19 nt, Homo sapiens
  misc_RNA (1)...(19): siRNA sense strand
ccuacugggugugcuggua

SEQ ID NO: 1552587 - RNA, 19 nt, Homo sapiens
  misc_RNA (1)...(19): siRNA sense strand
ccggcuacuucggucauua

SEQ ID NO: 1552588 - RNA, 19 nt, Homo sapiens
  misc_RNA (1)...(19): siRNA sense strand
gacccaaccucagcaucau

SEQ ID NO: 1552589 - RNA, 19 nt, Homo sapiens
  misc_RNA (1)...(19): siRNA sense strand
cagggucuauccucagagu

SEQ ID NO: 1552590 - RNA, 19 nt, Homo sapiens
  misc_RNA (1)...(19): siRNA sense strand
gggucuauccucagaguuc

SEQ ID NO: 1552591 - RNA, 19 nt, Homo sapiens
  misc_RNA (1)...(19): siRNA sense strand
ccaccuggacccucaucaa

SEQ ID NO: 1552592 - RNA, 19 nt, Homo sapiens
  misc_RNA (1)...(19): siRNA sense strand
aggacaaacccaccagauu

SEQ ID NO: 1552593 - RNA, 19 nt, Homo sapiens
  misc_RNA (1)...(19): siRNA sense strand
cuacugggugugcugguaa

SEQ ID NO: 1552594 - RNA, 19 nt, Homo sapiens
  misc_RNA (1)...(19): siRNA sense strand
cuucggucauuaccuguug

SEQ ID NO: 1552595 - RNA, 19 nt, Homo sapiens
  misc_RNA (1)...(19): siRNA sense strand
cagaagccucucacuaaag

SEQ ID NO: 1552596 - RNA, 19 nt, Homo sapiens
  misc_RNA (1)...(19): siRNA sense strand
aagauccgccuacauaugg

SEQ ID NO: 1552597 - RNA, 19 nt, Homo sapiens
  misc_RNA (1)...(19): siRNA sense strand
agacccaaccucagcauca

SEQ ID NO: 1552598 - RNA, 19 nt, Homo sapiens
  misc_RNA (1)...(19): siRNA sense strand
ucaaggauaaggucaucga

SEQ ID NO: 1552599 - RNA, 19 nt, Homo sapiens
  misc_RNA (1)...(19): siRNA sense strand
cgaagcacccacagcaucu

SEQ ID NO: 1552600 - RNA, 19 nt, Homo sapiens
  misc_RNA (1)...(19): siRNA sense strand
ugcagggucuauccucaga

SEQ ID NO: 1552601 - RNA, 19 nt, Homo sapiens
  misc_RNA (1)...(19): siRNA sense strand
ggagacagaugaagucgua

SEQ ID NO: 1552602 - RNA, 19 nt, Homo sapiens
  misc_RNA (1)...(19): siRNA sense strand
gcagacuacuuaugaauuu

SEQ ID NO: 1552603 - RNA, 19 nt, Homo sapiens
  misc_RNA (1)...(19): siRNA sense strand
uaaaucaggugaagaaaga

SEQ ID NO: 1552604 - RNA, 19 nt, Homo sapiens
  misc_RNA (1)...(19): siRNA sense strand
uaacaaucguggugaauaa

SEQ ID NO: 1552605 - RNA, 19 nt, Homo sapiens
  misc_RNA (1)...(19): siRNA sense strand
gaauaaugcugggacagua

SEQ ID NO: 1552606 - RNA, 19 nt, Homo sapiens
  misc_RNA (1)...(19): siRNA sense strand
gaaagaagugggugaugua

SEQ ID NO: 1552607 - RNA, 19 nt, Homo sapiens
  misc_RNA (1)...(19): siRNA sense strand
gaacgcgccucagcgauuu

SEQ ID NO: 1552608 - RNA, 19 nt, Homo sapiens
  misc_RNA (1)...(19): siRNA sense strand
gauggaauacuuaccaaua

SEQ ID NO: 1552609 - RNA, 19 nt, Homo sapiens
  misc_RNA (1)...(19): siRNA sense strand
gcaggcagacuacuuauga

SEQ ID NO: 1552610 - RNA, 19 nt, Homo sapiens
  misc_RNA (1)...(19): siRNA sense strand
ggaauaggcaggcagacua

SEQ ID NO: 1552611 - RNA, 19 nt, Homo sapiens
  misc_RNA (1)...(19): siRNA sense strand
gaacaucauccuagaaauc

SEQ ID NO: 1552612 - RNA, 19 nt, Homo sapiens
  misc_RNA (1)...(19): siRNA sense strand
caccaaggaugaagagauu

SEQ ID NO: 1552613 - RNA, 19 nt, Homo sapiens
  misc_RNA (1)...(19): siRNA sense strand
caacagagaagagaucuau

SEQ ID NO: 1552614 - RNA, 19 nt, Homo sapiens
  misc_RNA (1)...(19): siRNA sense strand
ucugauagauggaauacuu

SEQ ID NO: 1552615 - RNA, 19 nt, Homo sapiens
  misc_RNA (1)...(19): siRNA sense strand
guaagaagucugauagaug

SEQ ID NO: 1552616 - RNA, 19 nt, Homo sapiens
  misc_RNA (1)...(19): siRNA sense strand
gagauuaccaagacauuug

SEQ ID NO: 1552617 - RNA, 19 nt, Homo sapiens
  misc_RNA (1)...(19): siRNA sense strand
ucaugucucugcccaguuu

SEQ ID NO: 1552618 - RNA, 19 nt, Homo sapiens
  misc_RNA (1)...(19): siRNA sense strand
agaagugggugauguaaca

SEQ ID NO: 1552619 - RNA, 19 nt, Homo sapiens
  misc_RNA (1)...(19): siRNA sense strand
guaacaaucguggugaaua

SEQ ID NO: 1552620 - RNA, 19 nt, Homo sapiens
  misc_RNA (1)...(19): siRNA sense strand
gaaauccuucugcuucuga

SEQ ID NO: 1552621 - RNA, 19 nt, Homo sapiens
  misc_RNA (1)...(19): siRNA sense strand
gcacuucuuccaucgauga

SEQ ID NO: 1552622 - RNA, 19 nt, Homo sapiens
  misc_RNA (1)...(19): siRNA sense strand
gagaaaucauggccacauc

SEQ ID NO: 1552623 - RNA, 19 nt, Homo sapiens
  misc_RNA (1)...(19): siRNA sense strand
gauuauggccuguauugga

SEQ ID NO: 1552624 - RNA, 19 nt, Homo sapiens
  misc_RNA (1)...(19): siRNA sense strand
cagaugaagucguaagaag

SEQ ID NO: 1552625 - RNA, 19 nt, Homo sapiens
  misc_RNA (1)...(19): siRNA sense strand
agaaagaagugggugaugu

SEQ ID NO: 1552626 - RNA, 19 nt, Homo sapiens
  misc_RNA (1)...(19): siRNA sense strand
caucaucuacuccuacuug

SEQ ID NO: 1552627 - RNA, 19 nt, Homo sapiens
  misc_RNA (1)...(19): siRNA sense strand
uuccuuaccucaucccaua

SEQ ID NO: 1552628 - RNA, 19 nt, Homo sapiens
  misc_RNA (1)...(19): siRNA sense strand
gaagucguaagaagucuga

SEQ ID NO: 1552629 - RNA, 19 nt, Homo sapiens
  misc_RNA (1)...(19): siRNA sense strand
caauaucuuucugagacua

SEQ ID NO: 1552630 - RNA, 19 nt, Homo sapiens
  misc_RNA (1)...(19): siRNA sense strand
gaagucugauagauggaau

SEQ ID NO: 1552631 - RNA, 19 nt, Homo sapiens
  misc_RNA (1)...(19): siRNA sense strand
cguaagaagucugauagau

SEQ ID NO: 1552632 - RNA, 19 nt, Homo sapiens
  misc_RNA (1)...(19): siRNA sense strand
gaagaaagaagugggugau

SEQ ID NO: 1552633 - RNA, 19 nt, Homo sapiens
  misc_RNA (1)...(19): siRNA sense strand
gcaccaaggaugaagagau

SEQ ID NO: 1552634 - RNA, 19 nt, Homo sapiens
  misc_RNA (1)...(19): siRNA sense strand
ucacugcgcaugcguaugu

SEQ ID NO: 1552635 - RNA, 19 nt, Homo sapiens
  misc_RNA (1)...(19): siRNA sense strand
gaugaagucguaagaaguc

SEQ ID NO: 1552636 - RNA, 19 nt, Homo sapiens
  misc_RNA (1)...(19): siRNA sense strand
gaagagauuaccaagacau

SEQ ID NO: 1552637 - RNA, 19 nt, Homo sapiens
  misc_RNA (1)...(19): siRNA sense strand
gaugaagagauuaccaaga

SEQ ID NO: 1552638 - RNA, 19 nt, Homo sapiens
  misc_RNA (1)...(19): siRNA sense strand
acaagauuauggccuguau

SEQ ID NO: 1552639 - RNA, 19 nt, Homo sapiens
  misc_RNA (1)...(19): siRNA sense strand
gaucuaucgcucucuaaau

SEQ ID NO: 1552640 - RNA, 19 nt, Homo sapiens
  misc_RNA (1)...(19): siRNA sense strand
uaggcaggcagacuacuua

SEQ ID NO: 1552641 - RNA, 19 nt, Homo sapiens
  misc_RNA (1)...(19): siRNA sense strand
uggagucguuggugaaguu

SEQ ID NO: 1552642 - RNA, 19 nt, Homo sapiens
  misc_RNA (1)...(19): siRNA sense strand
ggcagacuacuuaugaauu

SEQ ID NO: 1552643 - RNA, 19 nt, Homo sapiens
  misc_RNA (1)...(19): siRNA sense strand
ccauauuguuccagcaaau

SEQ ID NO: 1552644 - RNA, 19 nt, Homo sapiens
  misc_RNA (1)...(19): siRNA sense strand
gcaaaacgacagagcauau

SEQ ID NO: 1552645 - RNA, 19 nt, Homo sapiens
  misc_RNA (1)...(19): siRNA sense strand
aagauuauggccuguauug

SEQ ID NO: 1552646 - RNA, 19 nt, Homo sapiens
  misc_RNA (1)...(19): siRNA sense strand
uugguucugugggauauua

SEQ ID NO: 1552647 - RNA, 19 nt, Homo sapiens
  misc_RNA (1)...(19): siRNA sense strand
ugaacgcgccucagcgauu

SEQ ID NO: 1552648 - RNA, 19 nt, Homo sapiens
  misc_RNA (1)...(19): siRNA sense strand
ucaccaucaucuacuccua

SEQ ID NO: 1552649 - RNA, 19 nt, Homo sapiens
  misc_RNA (1)...(19): siRNA sense strand
gugguagacugcagcaaca

SEQ ID NO: 1552650 - RNA, 19 nt, Homo sapiens
  misc_RNA (1)...(19): siRNA sense strand
guucugugggauauuaaua

SEQ ID NO: 1552651 - RNA, 19 nt, Homo sapiens
  misc_RNA (1)...(19): siRNA sense strand
ucaacauccuaggacauuu

SEQ ID NO: 1552652 - RNA, 19 nt, Homo sapiens
  misc_RNA (1)...(19): siRNA sense strand
gaauacuggguucaccaaa

SEQ ID NO: 1552653 - RNA, 19 nt, Homo sapiens
  misc_RNA (1)...(19): siRNA sense strand
caggcagacuacuuaugaa

SEQ ID NO: 1552654 - RNA, 19 nt, Homo sapiens
  misc_RNA (1)...(19): siRNA sense strand
uagauggaauacuuaccaa

SEQ ID NO: 1552655 - RNA, 19 nt, Homo sapiens
  misc_RNA (1)...(19): siRNA sense strand
aaagaagugggugauguaa

SEQ ID NO: 1552656 - RNA, 19 nt, Homo sapiens
  misc_RNA (1)...(19): siRNA sense strand
gacagaugaagucguaaga

SEQ ID NO: 1552657 - RNA, 19 nt, Homo sapiens
  misc_RNA (1)...(19): siRNA sense strand
augaagagauuaccaagac

SEQ ID NO: 1552658 - RNA, 19 nt, Homo sapiens
  misc_RNA (1)...(19): siRNA sense strand
uaagcgcgguguggaggaa

SEQ ID NO: 1552659 - RNA, 19 nt, Homo sapiens
  misc_RNA (1)...(19): siRNA sense strand
gcaacagagaagagaucua

SEQ ID NO: 1552660 - RNA, 19 nt, Homo sapiens
  misc_RNA (1)...(19): siRNA sense strand
gaauaggcaggcagacuac

SEQ ID NO: 1552661 - RNA, 19 nt, Homo sapiens
  misc_RNA (1)...(19): siRNA sense strand
ugaagagauuaccaagaca

SEQ ID NO: 1552662 - RNA, 19 nt, Homo sapiens
  misc_RNA (1)...(19): siRNA sense strand
gaaaucauggccacaucgu

SEQ ID NO: 1552663 - RNA, 19 nt, Homo sapiens
  misc_RNA (1)...(19): siRNA sense strand
cagacuacuuaugaauuug

SEQ ID NO: 1552664 - RNA, 19 nt, Homo sapiens
  misc_RNA (1)...(19): siRNA sense strand
gucaacauccuaggacauu

SEQ ID NO: 1552665 - RNA, 19 nt, Homo sapiens
  misc_RNA (1)...(19): siRNA sense strand
caaucguggugaauaaugc

SEQ ID NO: 1552666 - RNA, 19 nt, Homo sapiens
  misc_RNA (1)...(19): siRNA sense strand
uaccucaucccauauuguu

SEQ ID NO: 1552667 - RNA, 19 nt, Homo sapiens
  misc_RNA (1)...(19): siRNA sense strand
gacagagcauauugguucu

SEQ ID NO: 1552668 - RNA, 19 nt, Homo sapiens
  misc_RNA (1)...(19): siRNA sense strand
cauauuguuccagcaaauu

SEQ ID NO: 1552669 - RNA, 19 nt, Homo sapiens
  misc_RNA (1)...(19): siRNA sense strand
cugauagauggaauacuua

SEQ ID NO: 1552670 - RNA, 19 nt, Homo sapiens
  misc_RNA (1)...(19): siRNA sense strand
gaagugggugauguaacaa

SEQ ID NO: 1552671 - RNA, 19 nt, Homo sapiens
  misc_RNA (1)...(19): siRNA sense strand
aagcacuucuuccaucgau

SEQ ID NO: 1552672 - RNA, 19 nt, Homo sapiens
  misc_RNA (1)...(19): siRNA sense strand
caacauccuaggacauuuu

SEQ ID NO: 1552673 - RNA, 19 nt, Homo sapiens
  misc_RNA (1)...(19): siRNA sense strand
gguagacugcagcaacaga

SEQ ID NO: 1552674 - RNA, 19 nt, Homo sapiens
  misc_RNA (1)...(19): siRNA sense strand
gccacaaaaucaaaaugaa

SEQ ID NO: 1552675 - RNA, 19 nt, Homo sapiens
  misc_RNA (1)...(19): siRNA sense strand
cuaaaucaggugaagaaag

SEQ ID NO: 1552676 - RNA, 19 nt, Homo sapiens
  misc_RNA (1)...(19): siRNA sense strand
auaaugcugggacaguaua

SEQ ID NO: 1552677 - RNA, 19 nt, Homo sapiens
  misc_RNA (1)...(19): siRNA sense strand
caagauuauggccuguauu

SEQ ID NO: 1552678 - RNA, 19 nt, Homo sapiens
  misc_RNA (1)...(19): siRNA sense strand
agagauuaccaagacauuu

SEQ ID NO: 1552679 - RNA, 19 nt, Homo sapiens
  misc_RNA (1)...(19): siRNA sense strand
ccaaggaugaagagauuac

SEQ ID NO: 1552680 - RNA, 19 nt, Homo sapiens
  misc_RNA (1)...(19): siRNA sense strand
agucguaagaagucugaua

SEQ ID NO: 1552681 - RNA, 19 nt, Homo sapiens
  misc_RNA (1)...(19): siRNA sense strand
cccauauuguuccagcaaa

SEQ ID NO: 1552682 - RNA, 19 nt, Homo sapiens
  misc_RNA (1)...(19): siRNA sense strand
ucugugggauauuaauaag

SEQ ID NO: 1552683 - RNA, 19 nt, Homo sapiens
  misc_RNA (1)...(19): siRNA sense strand
guacucggccguuaggaaa

SEQ ID NO: 1552684 - RNA, 19 nt, Homo sapiens
  misc_RNA (1)...(19): siRNA sense strand
gcgccacccuccacuuuca

SEQ ID NO: 1552685 - RNA, 19 nt, Homo sapiens
  misc_RNA (1)...(19): siRNA sense strand
gugcagaaccagaaacaga

SEQ ID NO: 1552686 - RNA, 19 nt, Homo sapiens
  misc_RNA (1)...(19): siRNA sense strand
uaacuaccgugcagaacca

SEQ ID NO: 1552687 - RNA, 19 nt, Homo sapiens
  misc_RNA (1)...(19): siRNA sense strand
guuaggaaauccacuugca

SEQ ID NO: 1552688 - RNA, 19 nt, Homo sapiens
  misc_RNA (1)...(19): siRNA sense strand
uaggaaauccacuugcauu

SEQ ID NO: 1552689 - RNA, 19 nt, Homo sapiens
  misc_RNA (1)...(19): siRNA sense strand
uaccuguacucggccguua

SEQ ID NO: 1552690 - RNA, 19 nt, Homo sapiens
  misc_RNA (1)...(19): siRNA sense strand
gcagaaccagaaacagauc

SEQ ID NO: 1552691 - RNA, 19 nt, Homo sapiens
  misc_RNA (1)...(19): siRNA sense strand
ggaaugggcucuuugagaa

SEQ ID NO: 1552692 - RNA, 19 nt, Homo sapiens
  misc_RNA (1)...(19): siRNA sense strand
gaagugagcugcagucucu

SEQ ID NO: 1552693 - RNA, 19 nt, Homo sapiens
  misc_RNA (1)...(19): siRNA sense strand
gugcagauguugcucaaua

SEQ ID NO: 1552694 - RNA, 19 nt, Homo sapiens
  misc_RNA (1)...(19): siRNA sense strand
aaaggaaguuucuggaaua

SEQ ID NO: 1552695 - RNA, 19 nt, Homo sapiens
  misc_RNA (1)...(19): siRNA sense strand
ggaauucccucaucucugu

SEQ ID NO: 1552696 - RNA, 19 nt, Homo sapiens
  misc_RNA (1)...(19): siRNA sense strand
gaagaucacccacagcuuu

SEQ ID NO: 1552697 - RNA, 19 nt, Homo sapiens
  misc_RNA (1)...(19): siRNA sense strand
aaagagaacucaccugugu

SEQ ID NO: 1552698 - RNA, 19 nt, Homo sapiens
  misc_RNA (1)...(19): siRNA sense strand
ccaaacaucuggaaagaca

SEQ ID NO: 1552699 - RNA, 19 nt, Homo sapiens
  misc_RNA (1)...(19): siRNA sense strand
gaaacuggaucuccugaag

SEQ ID NO: 1552700 - RNA, 19 nt, Homo sapiens
  misc_RNA (1)...(19): siRNA sense strand
gcucuuggguggacacaaa

SEQ ID NO: 1552701 - RNA, 19 nt, Homo sapiens
  misc_RNA (1)...(19): siRNA sense strand
ggaaugcaguuguccugaa

SEQ ID NO: 1552702 - RNA, 19 nt, Homo sapiens
  misc_RNA (1)...(19): siRNA sense strand
gaagugagcgaggcuguaa

SEQ ID NO: 1552703 - RNA, 19 nt, Homo sapiens
  misc_RNA (1)...(19): siRNA sense strand
ggaaguuucuggaauacca

SEQ ID NO: 1552704 - RNA, 19 nt, Homo sapiens
  misc_RNA (1)...(19): siRNA sense strand
gggagaugcugcaaucaug

SEQ ID NO: 1552705 - RNA, 19 nt, Homo sapiens
  misc_RNA (1)...(19): siRNA sense strand
ugagagugaucuucaaguu

SEQ ID NO: 1552706 - RNA, 19 nt, Homo sapiens
  misc_RNA (1)...(19): siRNA sense strand
ggaucaggauggcuacuug

SEQ ID NO: 1552707 - RNA, 19 nt, Homo sapiens
  misc_RNA (1)...(19): siRNA sense strand
gagaugcugcucaguguaa

SEQ ID NO: 1552708 - RNA, 19 nt, Homo sapiens
  misc_RNA (1)...(19): siRNA sense strand
guuggcagcuggacaguug

SEQ ID NO: 1552709 - RNA, 19 nt, Homo sapiens
  misc_RNA (1)...(19): siRNA sense strand
agagugaucuucaaguuca

SEQ ID NO: 1552710 - RNA, 19 nt, Homo sapiens
  misc_RNA (1)...(19): siRNA sense strand
gaggaagucaggaaacaaa

SEQ ID NO: 1552711 - RNA, 19 nt, Homo sapiens
  misc_RNA (1)...(19): siRNA sense strand
ucacuuacccucagcuuga

SEQ ID NO: 1552712 - RNA, 19 nt, Homo sapiens
  misc_RNA (1)...(19): siRNA sense strand
gaaugcaguuguccugaag

SEQ ID NO: 1552713 - RNA, 19 nt, Homo sapiens
  misc_RNA (1)...(19): siRNA sense strand
gcacugggacccugucaau

SEQ ID NO: 1552714 - RNA, 19 nt, Homo sapiens
  misc_RNA (1)...(19): siRNA sense strand
ccacaaagccagugacucu

SEQ ID NO: 1552715 - RNA, 19 nt, Homo sapiens
  misc_RNA (1)...(19): siRNA sense strand
ugagggagaugcugcaauc

SEQ ID NO: 1552716 - RNA, 19 nt, Homo sapiens
  misc_RNA (1)...(19): siRNA sense strand
ggaggaaugggcucuuuga

SEQ ID NO: 1552717 - RNA, 19 nt, Homo sapiens
  misc_RNA (1)...(19): siRNA sense strand
gggacaugcuggaaaggaa

SEQ ID NO: 1552718 - RNA, 19 nt, Homo sapiens
  misc_RNA (1)...(19): siRNA sense strand
agauguugcucaauauuug

SEQ ID NO: 1552719 - RNA, 19 nt, Homo sapiens
  misc_RNA (1)...(19): siRNA sense strand
gaagcaagccaagaucaug

SEQ ID NO: 1552720 - RNA, 19 nt, Homo sapiens
  misc_RNA (1)...(19): siRNA sense strand
uccaaaggcuggcugaaga

SEQ ID NO: 1552721 - RNA, 19 nt, Homo sapiens
  misc_RNA (1)...(19): siRNA sense strand
gcagauguugcucaauauu

SEQ ID NO: 1552722 - RNA, 19 nt, Homo sapiens
  misc_RNA (1)...(19): siRNA sense strand
aagccaagaucaugaggaa

SEQ ID NO: 1552723 - RNA, 19 nt, Homo sapiens
  misc_RNA (1)...(19): siRNA sense strand
cuacgugccucaugagauc

SEQ ID NO: 1552724 - RNA, 19 nt, Homo sapiens
  misc_RNA (1)...(19): siRNA sense strand
gcuucaaguuccaucauga

SEQ ID NO: 1552725 - RNA, 19 nt, Homo sapiens
  misc_RNA (1)...(19): siRNA sense strand
gcccagaaccucagcauca

SEQ ID NO: 1552726 - RNA, 19 nt, Homo sapiens
  misc_RNA (1)...(19): siRNA sense strand
gccuuuaccucuucuuugu

SEQ ID NO: 1552727 - RNA, 19 nt, Homo sapiens
  misc_RNA (1)...(19): siRNA sense strand
guuucuaggucuuggaauu

SEQ ID NO: 1552728 - RNA, 19 nt, Homo sapiens
  misc_RNA (1)...(19): siRNA sense strand
gucaauggcuacuucuuca

SEQ ID NO: 1552729 - RNA, 19 nt, Homo sapiens
  misc_RNA (1)...(19): siRNA sense strand
gaagucaggaaacaaagug

SEQ ID NO: 1552730 - RNA, 19 nt, Homo sapiens
  misc_RNA (1)...(19): siRNA sense strand
uacagcaucugaucaagga

SEQ ID NO: 1552731 - RNA, 19 nt, Homo sapiens
  misc_RNA (1)...(19): siRNA sense strand
cagauguugcucaauauuu

SEQ ID NO: 1552732 - RNA, 19 nt, Homo sapiens
  misc_RNA (1)...(19): siRNA sense strand
ggauucaacuacugcucuu

SEQ ID NO: 1552733 - RNA, 19 nt, Homo sapiens
  misc_RNA (1)...(19): siRNA sense strand
gaggauggaugagggagau

SEQ ID NO: 1552734 - RNA, 19 nt, Homo sapiens
  misc_RNA (1)...(19): siRNA sense strand
gcaaccugcugcgcucuug

SEQ ID NO: 1552735 - RNA, 19 nt, Homo sapiens
  misc_RNA (1)...(19): siRNA sense strand
cgaaagguacagcaucuga

SEQ ID NO: 1552736 - RNA, 19 nt, Homo sapiens
  misc_RNA (1)...(19): siRNA sense strand
agaagagccuguugagucu

SEQ ID NO: 1552737 - RNA, 19 nt, Homo sapiens
  misc_RNA (1)...(19): siRNA sense strand
ccaggccauuugcagauuu

SEQ ID NO: 1552738 - RNA, 19 nt, Homo sapiens
  misc_RNA (1)...(19): siRNA sense strand
ggaggcagaagaucuuuca

SEQ ID NO: 1552739 - RNA, 19 nt, Homo sapiens
  misc_RNA (1)...(19): siRNA sense strand
caggaggaaugggcucuuu

SEQ ID NO: 1552740 - RNA, 19 nt, Homo sapiens
  misc_RNA (1)...(19): siRNA sense strand
cagcccaucucgcaguuug

SEQ ID NO: 1552741 - RNA, 19 nt, Homo sapiens
  misc_RNA (1)...(19): siRNA sense strand
ucaacgggcugcugucucu

SEQ ID NO: 1552742 - RNA, 19 nt, Homo sapiens
  misc_RNA (1)...(19): siRNA sense strand
gggcaggguugcugagucu

SEQ ID NO: 1552743 - RNA, 19 nt, Homo sapiens
  misc_RNA (1)...(19): siRNA sense strand
gaagaaccgccaggucaug

SEQ ID NO: 1552744 - RNA, 19 nt, Homo sapiens
  misc_RNA (1)...(19): siRNA sense strand
ggaaugcucgaaacuucuu

SEQ ID NO: 1552745 - RNA, 19 nt, Homo sapiens
  misc_RNA (1)...(19): siRNA sense strand
ucaagaucuuccuggauga

SEQ ID NO: 1552746 - RNA, 19 nt, Homo sapiens
  misc_RNA (1)...(19): siRNA sense strand
ccacagcucucugggacau

SEQ ID NO: 1552747 - RNA, 19 nt, Homo sapiens
  misc_RNA (1)...(19): siRNA sense strand
gcuauccucugcugcucaa

SEQ ID NO: 1552748 - RNA, 19 nt, Homo sapiens
  misc_RNA (1)...(19): siRNA sense strand
cucaugagauccugcgaaa

SEQ ID NO: 1552749 - RNA, 19 nt, Homo sapiens
  misc_RNA (1)...(19): siRNA sense strand
gcuaagacaguuucuaggu

SEQ ID NO: 1552750 - RNA, 19 nt, Homo sapiens
  misc_RNA (1)...(19): siRNA sense strand
ucaucaggaucuuugagaa

SEQ ID NO: 1552751 - RNA, 19 nt, Homo sapiens
  misc_RNA (1)...(19): siRNA sense strand
gagagugaucuucaaguuc

SEQ ID NO: 1552752 - RNA, 19 nt, Homo sapiens
  misc_RNA (1)...(19): siRNA sense strand
ggagaugcugcucagugua

SEQ ID NO: 1552753 - RNA, 19 nt, Homo sapiens
  misc_RNA (1)...(19): siRNA sense strand
gaagccaaacaucuggaaa

SEQ ID NO: 1552754 - RNA, 19 nt, Homo sapiens
  misc_RNA (1)...(19): siRNA sense strand
ggugaggaaugcaguuguc

SEQ ID NO: 1552755 - RNA, 19 nt, Homo sapiens
  misc_RNA (1)...(19): siRNA sense strand
gaaaggcucggugaggaau

SEQ ID NO: 1552756 - RNA, 19 nt, Homo sapiens
  misc_RNA (1)...(19): siRNA sense strand
gcugaggauuguagucaca

SEQ ID NO: 1552757 - RNA, 19 nt, Homo sapiens
  misc_RNA (1)...(19): siRNA sense strand
gaaagguacagcaucugau

SEQ ID NO: 1552758 - RNA, 19 nt, Homo sapiens
  misc_RNA (1)...(19): siRNA sense strand
caaaggcugaagacagaaa

SEQ ID NO: 1552759 - RNA, 19 nt, Homo sapiens
  misc_RNA (1)...(19): siRNA sense strand
gagcugaagguguuugaca

SEQ ID NO: 1552760 - RNA, 19 nt, Homo sapiens
  misc_RNA (1)...(19): siRNA sense strand
cuggaaugcucgaaacuuc

SEQ ID NO: 1552761 - RNA, 19 nt, Homo sapiens
  misc_RNA (1)...(19): siRNA sense strand
caugagauccugcgaaagg

SEQ ID NO: 1552762 - RNA, 19 nt, Homo sapiens
  misc_RNA (1)...(19): siRNA sense strand
ggaagcaagccaagaucau

SEQ ID NO: 1552763 - RNA, 19 nt, Homo sapiens
  misc_RNA (1)...(19): siRNA sense strand
ggaagccaaacaucuggaa

SEQ ID NO: 1552764 - RNA, 19 nt, Homo sapiens
  misc_RNA (1)...(19): siRNA sense strand
gguuguggauguucagaag

SEQ ID NO: 1552765 - RNA, 19 nt, Homo sapiens
  misc_RNA (1)...(19): siRNA sense strand
gccaagaucaugaggaagu

SEQ ID NO: 1552766 - RNA, 19 nt, Homo sapiens
  misc_RNA (1)...(19): siRNA sense strand
ggaagucaggaaacaaagu

SEQ ID NO: 1552767 - RNA, 19 nt, Homo sapiens
  misc_RNA (1)...(19): siRNA sense strand
ugaagacccagguuccaaa

SEQ ID NO: 1552768 - RNA, 19 nt, Homo sapiens
  misc_RNA (1)...(19): siRNA sense strand
uggagaugcugcucagugu

SEQ ID NO: 1552769 - RNA, 19 nt, Homo sapiens
  misc_RNA (1)...(19): siRNA sense strand
gaucuugggauucgugaag

SEQ ID NO: 1552770 - RNA, 19 nt, Homo sapiens
  misc_RNA (1)...(19): siRNA sense strand
gcugcucaguguaauaucu

SEQ ID NO: 1552771 - RNA, 19 nt, Homo sapiens
  misc_RNA (1)...(19): siRNA sense strand
gugcuaagacaguuucuag

SEQ ID NO: 1552772 - RNA, 19 nt, Homo sapiens
  misc_RNA (1)...(19): siRNA sense strand
gccaggccauuugcagauu

SEQ ID NO: 1552773 - RNA, 19 nt, Homo sapiens
  misc_RNA (1)...(19): siRNA sense strand
gcauggugcccuucaucaa

SEQ ID NO: 1552774 - RNA, 19 nt, Homo sapiens
  misc_RNA (1)...(19): siRNA sense strand
gggugacuguuaagaaucu

SEQ ID NO: 1552775 - RNA, 19 nt, Homo sapiens
  misc_RNA (1)...(19): siRNA sense strand
caucuggggugacuguuaa

SEQ ID NO: 1552776 - RNA, 19 nt, Homo sapiens
  misc_RNA (1)...(19): siRNA sense strand
uagaggcccugguguucga

SEQ ID NO: 1552777 - RNA, 19 nt, Homo sapiens
  misc_RNA (1)...(19): siRNA sense strand
gaugcugcucaguguaaua

SEQ ID NO: 1552778 - RNA, 19 nt, Homo sapiens
  misc_RNA (1)...(19): siRNA sense strand
ugaaccggaugugcuaaga

SEQ ID NO: 1552779 - RNA, 19 nt, Homo sapiens
  misc_RNA (1)...(19): siRNA sense strand
gaggaguacaugagcauca

SEQ ID NO: 1552780 - RNA, 19 nt, Homo sapiens
  misc_RNA (1)...(19): siRNA sense strand
gguuguaccaugaagauca

SEQ ID NO: 1552781 - RNA, 19 nt, Homo sapiens
  misc_RNA (1)...(19): siRNA sense strand
uacagugccuuuaccucuu

SEQ ID NO: 1552782 - RNA, 19 nt, Homo sapiens
  misc_RNA (1)...(19): siRNA sense strand
agccaaacaucuggaaaga

SEQ ID NO: 1552783 - RNA, 19 nt, Homo sapiens
  misc_RNA (1)...(19): siRNA sense strand
gcuggaagccaaacaucug

SEQ ID NO: 1552784 - RNA, 19 nt, Homo sapiens
  misc_RNA (1)...(19): siRNA sense strand
gcugcacccuggagucaca

SEQ ID NO: 1552785 - RNA, 19 nt, Homo sapiens
  misc_RNA (1)...(19): siRNA sense strand
gcugaagacagaaaugaag

SEQ ID NO: 1552786 - RNA, 19 nt, Homo sapiens
  misc_RNA (1)...(19): siRNA sense strand
uaagccugaucuugggauu

SEQ ID NO: 1552787 - RNA, 19 nt, Homo sapiens
  misc_RNA (1)...(19): siRNA sense strand
uaccagcaguugacucaca

SEQ ID NO: 1552788 - RNA, 19 nt, Homo sapiens
  misc_RNA (1)...(19): siRNA sense strand
cuaaaggccugggaacacu

SEQ ID NO: 1552789 - RNA, 19 nt, Homo sapiens
  misc_RNA (1)...(19): siRNA sense strand
ccauugagcgucagaagag

SEQ ID NO: 1552790 - RNA, 19 nt, Homo sapiens
  misc_RNA (1)...(19): siRNA sense strand
uggaggagaggauggauga

SEQ ID NO: 1552791 - RNA, 19 nt, Homo sapiens
  misc_RNA (1)...(19): siRNA sense strand
gggaauguguugcaguuug

SEQ ID NO: 1552792 - RNA, 19 nt, Homo sapiens
  misc_RNA (1)...(19): siRNA sense strand
ggaauguguugcaguuugu

SEQ ID NO: 1552793 - RNA, 19 nt, Homo sapiens
  misc_RNA (1)...(19): siRNA sense strand
gaccaucacuuucgcuucu

SEQ ID NO: 1552794 - RNA, 19 nt, Homo sapiens
  misc_RNA (1)...(19): siRNA sense strand
gugaauccguggcagagaa

SEQ ID NO: 1552795 - RNA, 19 nt, Homo sapiens
  misc_RNA (1)...(19): siRNA sense strand
gugggaauguguugcaguu

SEQ ID NO: 1552796 - RNA, 19 nt, Homo sapiens
  misc_RNA (1)...(19): siRNA sense strand
cgccguggaccaucacuuu

SEQ ID NO: 1552797 - RNA, 19 nt, Homo sapiens
  misc_RNA (1)...(19): siRNA sense strand
ugccugcucuugcgccuau

SEQ ID NO: 1552798 - RNA, 19 nt, Homo sapiens
  misc_RNA (1)...(19): siRNA sense strand
gcaacuacucacgcuccua

SEQ ID NO: 1552799 - RNA, 19 nt, Homo sapiens
  misc_RNA (1)...(19): siRNA sense strand
ccacacaguuggagaauaa

SEQ ID NO: 1552800 - RNA, 19 nt, Homo sapiens
  misc_RNA (1)...(19): siRNA sense strand
gacaaggcauauagggaua

SEQ ID NO: 1552801 - RNA, 19 nt, Homo sapiens
  misc_RNA (1)...(19): siRNA sense strand
ugagaggaguaaaguguuu

SEQ ID NO: 1552802 - RNA, 19 nt, Homo sapiens
  misc_RNA (1)...(19): siRNA sense strand
aaacugcuaugcccucuau

SEQ ID NO: 1552803 - RNA, 19 nt, Homo sapiens
  misc_RNA (1)...(19): siRNA sense strand
gauucuaaaugccaaacuu

SEQ ID NO: 1552804 - RNA, 19 nt, Homo sapiens
  misc_RNA (1)...(19): siRNA sense strand
ucacugguugguacaauua

SEQ ID NO: 1552805 - RNA, 19 nt, Homo sapiens
  misc_RNA (1)...(19): siRNA sense strand
gauauaugccauccugaga

SEQ ID NO: 1552806 - RNA, 19 nt, Homo sapiens
  misc_RNA (1)...(19): siRNA sense strand
ccacuuggucucacugguu

SEQ ID NO: 1552807 - RNA, 19 nt, Homo sapiens
  misc_RNA (1)...(19): siRNA sense strand
cacaguuggagaauaauuu

SEQ ID NO: 1552808 - RNA, 19 nt, Homo sapiens
  misc_RNA (1)...(19): siRNA sense strand
ggguaguacugggugcuuu

SEQ ID NO: 1552809 - RNA, 19 nt, Homo sapiens
  misc_RNA (1)...(19): siRNA sense strand
guacaauuaugaggguagu

SEQ ID NO: 1552810 - RNA, 19 nt, Homo sapiens
  misc_RNA (1)...(19): siRNA sense strand
guuggagaauaauuuguag

SEQ ID NO: 1552811 - RNA, 19 nt, Homo sapiens
  misc_RNA (1)...(19): siRNA sense strand
ccugagaggaguaaagugu

SEQ ID NO: 1552812 - RNA, 19 nt, Homo sapiens
  misc_RNA (1)...(19): siRNA sense strand
guguuuagauucugaaccu

SEQ ID NO: 1552813 - RNA, 19 nt, Homo sapiens
  misc_RNA (1)...(19): siRNA sense strand
acacaguuggagaauaauu

SEQ ID NO: 1552814 - RNA, 19 nt, Homo sapiens
  misc_RNA (1)...(19): siRNA sense strand
guuggaaacuucauuuuac

SEQ ID NO: 1552815 - RNA, 19 nt, Homo sapiens
  misc_RNA (1)...(19): siRNA sense strand
acaguuggagaauaauuug

SEQ ID NO: 1552816 - RNA, 19 nt, Homo sapiens
  misc_RNA (1)...(19): siRNA sense strand
cccacacaguuggagaaua

SEQ ID NO: 1552817 - RNA, 19 nt, Homo sapiens
  misc_RNA (1)...(19): siRNA sense strand
gaacacaagcuuucuauag

SEQ ID NO: 1552818 - RNA, 19 nt, Homo sapiens
  misc_RNA (1)...(19): siRNA sense strand
caaaagagguuccuacauu

SEQ ID NO: 1552819 - RNA, 19 nt, Homo sapiens
  misc_RNA (1)...(19): siRNA sense strand
cagaggagcugguuucuca

SEQ ID NO: 1552820 - RNA, 19 nt, Homo sapiens
  misc_RNA (1)...(19): siRNA sense strand
gcugguggcuucucuugaa

SEQ ID NO: 1552821 - RNA, 19 nt, Homo sapiens
  misc_RNA (1)...(19): siRNA sense strand
ugaacgaccugaaucacuu

SEQ ID NO: 1552822 - RNA, 19 nt, Homo sapiens
  misc_RNA (1)...(19): siRNA sense strand
caggaaacgugcucuggaa

SEQ ID NO: 1552823 - RNA, 19 nt, Homo sapiens
  misc_RNA (1)...(19): siRNA sense strand
agacaaggccuucuucaga

SEQ ID NO: 1552824 - RNA, 19 nt, Homo sapiens
  misc_RNA (1)...(19): siRNA sense strand
gaaggucuaggaacuguga

SEQ ID NO: 1552825 - RNA, 19 nt, Homo sapiens
  misc_RNA (1)...(19): siRNA sense strand
gaccugagccuggaauuug

SEQ ID NO: 1552826 - RNA, 19 nt, Homo sapiens
  misc_RNA (1)...(19): siRNA sense strand
ggaacacaagcuuucuaua

SEQ ID NO: 1552827 - RNA, 19 nt, Homo sapiens
  misc_RNA (1)...(19): siRNA sense strand
gaaccaagccaggacauag

SEQ ID NO: 1552828 - RNA, 19 nt, Homo sapiens
  misc_RNA (1)...(19): siRNA sense strand
ucagaugccuccucuccuu

SEQ ID NO: 1552829 - RNA, 19 nt, Homo sapiens
  misc_RNA (1)...(19): siRNA sense strand
gugaggaguuccagccauu

SEQ ID NO: 1552830 - RNA, 19 nt, Homo sapiens
  misc_RNA (1)...(19): siRNA sense strand
ccaccaguccaacaucuuu

SEQ ID NO: 1552831 - RNA, 19 nt, Homo sapiens
  misc_RNA (1)...(19): siRNA sense strand
gagaagaggccagacaucu

SEQ ID NO: 1552832 - RNA, 19 nt, Homo sapiens
  misc_RNA (1)...(19): siRNA sense strand
gggaacacaagcuuucuau

SEQ ID NO: 1552833 - RNA, 19 nt, Homo sapiens
  misc_RNA (1)...(19): siRNA sense strand
gaacugugaggccugaaca

SEQ ID NO: 1552834 - RNA, 19 nt, Homo sapiens
  misc_RNA (1)...(19): siRNA sense strand
ggagagcuucuuccagugu

SEQ ID NO: 1552835 - RNA, 19 nt, Homo sapiens
  misc_RNA (1)...(19): siRNA sense strand
agucggaggucuuaguuca

SEQ ID NO: 1552836 - RNA, 19 nt, Homo sapiens
  misc_RNA (1)...(19): siRNA sense strand
ugacugagaacaaggacuu

SEQ ID NO: 1552837 - RNA, 19 nt, Homo sapiens
  misc_RNA (1)...(19): siRNA sense strand
aaagagguuccuacauuga

SEQ ID NO: 1552838 - RNA, 19 nt, Homo sapiens
  misc_RNA (1)...(19): siRNA sense strand
guccaaagcccgagacaag

SEQ ID NO: 1552839 - RNA, 19 nt, Homo sapiens
  misc_RNA (1)...(19): siRNA sense strand
gacaauagacagacuccau

SEQ ID NO: 1552840 - RNA, 19 nt, Homo sapiens
  misc_RNA (1)...(19): siRNA sense strand
gagcugguggcuucucuug

SEQ ID NO: 1552841 - RNA, 19 nt, Homo sapiens
  misc_RNA (1)...(19): siRNA sense strand
ugaagacgccagccugaug

SEQ ID NO: 1552842 - RNA, 19 nt, Homo sapiens
  misc_RNA (1)...(19): siRNA sense strand
cccagcagcucuucugaca

SEQ ID NO: 1552843 - RNA, 19 nt, Homo sapiens
  misc_RNA (1)...(19): siRNA sense strand
aaaagagguuccuacauug

SEQ ID NO: 1552844 - RNA, 19 nt, Homo sapiens
  misc_RNA (1)...(19): siRNA sense strand
guccagcgaugccaagaag

SEQ ID NO: 1552845 - RNA, 19 nt, Homo sapiens
  misc_RNA (1)...(19): siRNA sense strand
ggaccuuucauccucagaa

SEQ ID NO: 1552846 - RNA, 19 nt, Homo sapiens
  misc_RNA (1)...(19): siRNA sense strand
gacugaaggucuaggaacu

SEQ ID NO: 1552847 - RNA, 19 nt, Homo sapiens
  misc_RNA (1)...(19): siRNA sense strand
gaacgaccugaaucacuuc

SEQ ID NO: 1552848 - RNA, 19 nt, Homo sapiens
  misc_RNA (1)...(19): siRNA sense strand
aacacaagcuuucuauagg

SEQ ID NO: 1552849 - RNA, 19 nt, Homo sapiens
  misc_RNA (1)...(19): siRNA sense strand
uggcaguucuuccuaugga

SEQ ID NO: 1552850 - RNA, 19 nt, Homo sapiens
  misc_RNA (1)...(19): siRNA sense strand
gccagagucggaggucuua

SEQ ID NO: 1552851 - RNA, 19 nt, Homo sapiens
  misc_RNA (1)...(19): siRNA sense strand
cgccaagucuccaggaagu

SEQ ID NO: 1552852 - RNA, 19 nt, Homo sapiens
  misc_RNA (1)...(19): siRNA sense strand
cacccugacugaaggucua

SEQ ID NO: 1552853 - RNA, 19 nt, Homo sapiens
  misc_RNA (1)...(19): siRNA sense strand
ccaggaaagcguccacugu

SEQ ID NO: 1552854 - RNA, 19 nt, Homo sapiens
  misc_RNA (1)...(19): siRNA sense strand
ccuggaauuugccgagaug

SEQ ID NO: 1552855 - RNA, 19 nt, Homo sapiens
  misc_RNA (1)...(19): siRNA sense strand
aaaaggggcuuggaccauu

SEQ ID NO: 1552856 - RNA, 19 nt, Homo sapiens
  misc_RNA (1)...(19): siRNA sense strand
cagcgagggaugccacauu

SEQ ID NO: 1552857 - RNA, 19 nt, Homo sapiens
  misc_RNA (1)...(19): siRNA sense strand
caacaucuuuauggugacu

SEQ ID NO: 1552858 - RNA, 19 nt, Homo sapiens
  misc_RNA (1)...(19): siRNA sense strand
ccaagccagugaggaguuc

SEQ ID NO: 1552859 - RNA, 19 nt, Homo sapiens
  misc_RNA (1)...(19): siRNA sense strand
caccaguccaacaucuuua

SEQ ID NO: 1552860 - RNA, 19 nt, Homo sapiens
  misc_RNA (1)...(19): siRNA sense strand
gagggacaauagacagacu

SEQ ID NO: 1552861 - RNA, 19 nt, Homo sapiens
  misc_RNA (1)...(19): siRNA sense strand
gcccaggaauggcuuucuc

SEQ ID NO: 1552862 - RNA, 19 nt, Homo sapiens
  misc_RNA (1)...(19): siRNA sense strand
gagacaaggccuucuucag

SEQ ID NO: 1552863 - RNA, 19 nt, Homo sapiens
  misc_RNA (1)...(19): siRNA sense strand
ggacaguggagagcuucuu

SEQ ID NO: 1552864 - RNA, 19 nt, Homo sapiens
  misc_RNA (1)...(19): siRNA sense strand
gcgagaagaggccagacau

SEQ ID NO: 1552865 - RNA, 19 nt, Homo sapiens
  misc_RNA (1)...(19): siRNA sense strand
gaccuuucauccucagaac

SEQ ID NO: 1552866 - RNA, 19 nt, Homo sapiens
  misc_RNA (1)...(19): siRNA sense strand
gcugguuucucaccguucu

SEQ ID NO: 1552867 - RNA, 19 nt, Homo sapiens
  misc_RNA (1)...(19): siRNA sense strand
uauggugacugagaacaag

SEQ ID NO: 1552868 - RNA, 19 nt, Homo sapiens
  misc_RNA (1)...(19): siRNA sense strand
ggaccauuccugcaaacag

SEQ ID NO: 1552869 - RNA, 19 nt, Homo sapiens
  misc_RNA (1)...(19): siRNA sense strand
ucggaggucuuaguucaca

SEQ ID NO: 1552870 - RNA, 19 nt, Homo sapiens
  misc_RNA (1)...(19): siRNA sense strand
ccuggcaguucuuccuaug

SEQ ID NO: 1552871 - RNA, 19 nt, Homo sapiens
  misc_RNA (1)...(19): siRNA sense strand
cuuggaccauuccugcaaa

SEQ ID NO: 1552872 - RNA, 19 nt, Homo sapiens
  misc_RNA (1)...(19): siRNA sense strand
gacaguggagagcuucuuc

SEQ ID NO: 1552873 - RNA, 19 nt, Homo sapiens
  misc_RNA (1)...(19): siRNA sense strand
ggaaacacaucaaguacaa

SEQ ID NO: 1552874 - RNA, 19 nt, Homo sapiens
  misc_RNA (1)...(19): siRNA sense strand
gaccacaacuucuucagua

SEQ ID NO: 1552875 - RNA, 19 nt, Homo sapiens
  misc_RNA (1)...(19): siRNA sense strand
gaaauugacuuggagaaau

SEQ ID NO: 1552876 - RNA, 19 nt, Homo sapiens
  misc_RNA (1)...(19): siRNA sense strand
gaccagaauuagcaaauaa

SEQ ID NO: 1552877 - RNA, 19 nt, Homo sapiens
  misc_RNA (1)...(19): siRNA sense strand
gaugaugccuuaaaacuua

SEQ ID NO: 1552878 - RNA, 19 nt, Homo sapiens
  misc_RNA (1)...(19): siRNA sense strand
ugagaagaaucgaccuuua

SEQ ID NO: 1552879 - RNA, 19 nt, Homo sapiens
  misc_RNA (1)...(19): siRNA sense strand
gagaagaaucgaccuuuaa

SEQ ID NO: 1552880 - RNA, 19 nt, Homo sapiens
  misc_RNA (1)...(19): siRNA sense strand
gcaguucuguuuauaagga

SEQ ID NO: 1552881 - RNA, 19 nt, Homo sapiens
  misc_RNA (1)...(19): siRNA sense strand
aaaggaaccuccacaagga

SEQ ID NO: 1552882 - RNA, 19 nt, Homo sapiens
  misc_RNA (1)...(19): siRNA sense strand
gacaugauuuggauaguug

SEQ ID NO: 1552883 - RNA, 19 nt, Homo sapiens
  misc_RNA (1)...(19): siRNA sense strand
gcaaauaaaguagacauga

SEQ ID NO: 1552884 - RNA, 19 nt, Homo sapiens
  misc_RNA (1)...(19): siRNA sense strand
cgaccagaauuagcaaaua

SEQ ID NO: 1552885 - RNA, 19 nt, Homo sapiens
  misc_RNA (1)...(19): siRNA sense strand
auaaacuucugccugaaua

SEQ ID NO: 1552886 - RNA, 19 nt, Homo sapiens
  misc_RNA (1)...(19): siRNA sense strand
uaugugagaaggaugauua

SEQ ID NO: 1552887 - RNA, 19 nt, Homo sapiens
  misc_RNA (1)...(19): siRNA sense strand
ccuaggccaucuuaaacua

SEQ ID NO: 1552888 - RNA, 19 nt, Homo sapiens
  misc_RNA (1)...(19): siRNA sense strand
gguggcaguucuguuuaua

SEQ ID NO: 1552889 - RNA, 19 nt, Homo sapiens
  misc_RNA (1)...(19): siRNA sense strand
cagcagagaacuaaaggaa

SEQ ID NO: 1552890 - RNA, 19 nt, Homo sapiens
  misc_RNA (1)...(19): siRNA sense strand
aaguuuggaugaugccuua

SEQ ID NO: 1552891 - RNA, 19 nt, Homo sapiens
  misc_RNA (1)...(19): siRNA sense strand
ucaccuaggccaucuuaaa

SEQ ID NO: 1552892 - RNA, 19 nt, Homo sapiens
  misc_RNA (1)...(19): siRNA sense strand
gaucaugcaggacuuugaa

SEQ ID NO: 1552893 - RNA, 19 nt, Homo sapiens
  misc_RNA (1)...(19): siRNA sense strand
ucagguauuuccagagaau

SEQ ID NO: 1552894 - RNA, 19 nt, Homo sapiens
  misc_RNA (1)...(19): siRNA sense strand
agacaugauuuggauaguu

SEQ ID NO: 1552895 - RNA, 19 nt, Homo sapiens
  misc_RNA (1)...(19): siRNA sense strand
gaagaccugguucuccauu

SEQ ID NO: 1552896 - RNA, 19 nt, Homo sapiens
  misc_RNA (1)...(19): siRNA sense strand
agaagaaucgaccuuuaaa

SEQ ID NO: 1552897 - RNA, 19 nt, Homo sapiens
  misc_RNA (1)...(19): siRNA sense strand
gaagaaucgaccuuuaaag

SEQ ID NO: 1552898 - RNA, 19 nt, Homo sapiens
  misc_RNA (1)...(19): siRNA sense strand
ugaaguaugugagaaggau

SEQ ID NO: 1552899 - RNA, 19 nt, Homo sapiens
  misc_RNA (1)...(19): siRNA sense strand
cacaucaaguacaaauuug

SEQ ID NO: 1552900 - RNA, 19 nt, Homo sapiens
  misc_RNA (1)...(19): siRNA sense strand
acaaggagcucauuuucuu

SEQ ID NO: 1552901 - RNA, 19 nt, Homo sapiens
  misc_RNA (1)...(19): siRNA sense strand
uaggccaucuuaaacuauu

SEQ ID NO: 1552902 - RNA, 19 nt, Homo sapiens
  misc_RNA (1)...(19): siRNA sense strand
gccagaaguuuggaugaug

SEQ ID NO: 1552903 - RNA, 19 nt, Homo sapiens
  misc_RNA (1)...(19): siRNA sense strand
guugguggcaguucuguuu

SEQ ID NO: 1552904 - RNA, 19 nt, Homo sapiens
  misc_RNA (1)...(19): siRNA sense strand
gauaguugguggcaguucu

SEQ ID NO: 1552905 - RNA, 19 nt, Homo sapiens
  misc_RNA (1)...(19): siRNA sense strand
gaacgaccagaauuagcaa

SEQ ID NO: 1552906 - RNA, 19 nt, Homo sapiens
  misc_RNA (1)...(19): siRNA sense strand
caaggaucaugcaggacuu

SEQ ID NO: 1552907 - RNA, 19 nt, Homo sapiens
  misc_RNA (1)...(19): siRNA sense strand
gaaugaccacaacuucuuc

SEQ ID NO: 1552908 - RNA, 19 nt, Homo sapiens
  misc_RNA (1)...(19): siRNA sense strand
guagacaugauuuggauag

SEQ ID NO: 1552909 - RNA, 19 nt, Homo sapiens
  misc_RNA (1)...(19): siRNA sense strand
uuacugaacgaccagaauu

SEQ ID NO: 1552910 - RNA, 19 nt, Homo sapiens
  misc_RNA (1)...(19): siRNA sense strand
cagguguucucucugaugu

SEQ ID NO: 1552911 - RNA, 19 nt, Homo sapiens
  misc_RNA (1)...(19): siRNA sense strand
auaaggaagccaugaauca

SEQ ID NO: 1552912 - RNA, 19 nt, Homo sapiens
  misc_RNA (1)...(19): siRNA sense strand
ccacaacuucuucaguaga

SEQ ID NO: 1552913 - RNA, 19 nt, Homo sapiens
  misc_RNA (1)...(19): siRNA sense strand
gaaacacaucaaguacaaa

SEQ ID NO: 1552914 - RNA, 19 nt, Homo sapiens
  misc_RNA (1)...(19): siRNA sense strand
uggcaguucuguuuauaag

SEQ ID NO: 1552915 - RNA, 19 nt, Homo sapiens
  misc_RNA (1)...(19): siRNA sense strand
uaaaguagacaugauuugg

SEQ ID NO: 1552916 - RNA, 19 nt, Homo sapiens
  misc_RNA (1)...(19): siRNA sense strand
gggaaacacaucaaguaca

SEQ ID NO: 1552917 - RNA, 19 nt, Homo sapiens
  misc_RNA (1)...(19): siRNA sense strand
caguagaggguaaacagaa

SEQ ID NO: 1552918 - RNA, 19 nt, Homo sapiens
  misc_RNA (1)...(19): siRNA sense strand
aaguagacaugauuuggau

SEQ ID NO: 1552919 - RNA, 19 nt, Homo sapiens
  misc_RNA (1)...(19): siRNA sense strand
aaucaccuaggccaucuua

SEQ ID NO: 1552920 - RNA, 19 nt, Homo sapiens
  misc_RNA (1)...(19): siRNA sense strand
agaaauugacuuggagaaa

SEQ ID NO: 1552921 - RNA, 19 nt, Homo sapiens
  misc_RNA (1)...(19): siRNA sense strand
ggaucaugcaggacuuuga

SEQ ID NO: 1552922 - RNA, 19 nt, Homo sapiens
  misc_RNA (1)...(19): siRNA sense strand
cagagaaugaccacaacuu

SEQ ID NO: 1552923 - RNA, 19 nt, Homo sapiens
  misc_RNA (1)...(19): siRNA sense strand
uacugaacgaccagaauua

SEQ ID NO: 1552924 - RNA, 19 nt, Homo sapiens
  misc_RNA (1)...(19): siRNA sense strand
gugauuauggguaggaaga

SEQ ID NO: 1552925 - RNA, 19 nt, Homo sapiens
  misc_RNA (1)...(19): siRNA sense strand
auucagguauuuccagaga

SEQ ID NO: 1552926 - RNA, 19 nt, Homo sapiens
  misc_RNA (1)...(19): siRNA sense strand
aaaguagacaugauuugga

SEQ ID NO: 1552927 - RNA, 19 nt, Homo sapiens
  misc_RNA (1)...(19): siRNA sense strand
cuucuucaguagaggguaa

SEQ ID NO: 1552928 - RNA, 19 nt, Homo sapiens
  misc_RNA (1)...(19): siRNA sense strand
acccagguguucucucuga

SEQ ID NO: 1552929 - RNA, 19 nt, Homo sapiens
  misc_RNA (1)...(19): siRNA sense strand
ugaacgaccagaauuagca

SEQ ID NO: 1552930 - RNA, 19 nt, Homo sapiens
  misc_RNA (1)...(19): siRNA sense strand
aguagaggguaaacagaau

SEQ ID NO: 1552931 - RNA, 19 nt, Homo sapiens
  misc_RNA (1)...(19): siRNA sense strand
cacaacuucuucaguagag

SEQ ID NO: 1552932 - RNA, 19 nt, Homo sapiens
  misc_RNA (1)...(19): siRNA sense strand
cuaaaggaaccuccacaag

SEQ ID NO: 1552933 - RNA, 19 nt, Homo sapiens
  misc_RNA (1)...(19): siRNA sense strand
agagaaugaccacaacuuc

SEQ ID NO: 1552934 - RNA, 19 nt, Homo sapiens
  misc_RNA (1)...(19): siRNA sense strand
uauaaacuucugccugaau

SEQ ID NO: 1552935 - RNA, 19 nt, Homo sapiens
  misc_RNA (1)...(19): siRNA sense strand
ugaaucaccuaggccaucu

SEQ ID NO: 1552936 - RNA, 19 nt, Homo sapiens
  misc_RNA (1)...(19): siRNA sense strand
ccagaauuagcaaauaaag

SEQ ID NO: 1552937 - RNA, 19 nt, Homo sapiens
  misc_RNA (1)...(19): siRNA sense strand
guggcaguucuguuuauaa

SEQ ID NO: 1552938 - RNA, 19 nt, Homo sapiens
  misc_RNA (1)...(19): siRNA sense strand
cagaaauugacuuggagaa

SEQ ID NO: 1552939 - RNA, 19 nt, Homo sapiens
  misc_RNA (1)...(19): siRNA sense strand
gaagaaagccuugugauua

SEQ ID NO: 1552940 - RNA, 19 nt, Homo sapiens
  misc_RNA (1)...(19): siRNA sense strand
guacagaacuucagacauu

SEQ ID NO: 1552941 - RNA, 19 nt, Homo sapiens
  misc_RNA (1)...(19): siRNA sense strand
uuacagagaugcuuuauug

SEQ ID NO: 1552942 - RNA, 19 nt, Homo sapiens
  misc_RNA (1)...(19): siRNA sense strand
uaaaugagccgucaaguuu

SEQ ID NO: 1552943 - RNA, 19 nt, Homo sapiens
  misc_RNA (1)...(19): siRNA sense strand
gaaagugcuucaauuagaa

SEQ ID NO: 1552944 - RNA, 19 nt, Homo sapiens
  misc_RNA (1)...(19): siRNA sense strand
gaaacaagcaggacuaaau

SEQ ID NO: 1552945 - RNA, 19 nt, Homo sapiens
  misc_RNA (1)...(19): siRNA sense strand
guaaguacaucacaguaaa

SEQ ID NO: 1552946 - RNA, 19 nt, Homo sapiens
  misc_RNA (1)...(19): siRNA sense strand
cgaaagugcuucaauuaga

SEQ ID NO: 1552947 - RNA, 19 nt, Homo sapiens
  misc_RNA (1)...(19): siRNA sense strand
gaaaacaccuaccaacuuu

SEQ ID NO: 1552948 - RNA, 19 nt, Homo sapiens
  misc_RNA (1)...(19): siRNA sense strand
uggaacaucugaauacaua

SEQ ID NO: 1552949 - RNA, 19 nt, Homo sapiens
  misc_RNA (1)...(19): siRNA sense strand
aagaaagccuugugauuaa

SEQ ID NO: 1552950 - RNA, 19 nt, Homo sapiens
  misc_RNA (1)...(19): siRNA sense strand
ucgaaucccuucauguuua

SEQ ID NO: 1552951 - RNA, 19 nt, Homo sapiens
  misc_RNA (1)...(19): siRNA sense strand
gaaagaaguuuuacagaga

SEQ ID NO: 1552952 - RNA, 19 nt, Homo sapiens
  misc_RNA (1)...(19): siRNA sense strand
gcuaaugaauacuacauga

SEQ ID NO: 1552953 - RNA, 19 nt, Homo sapiens
  misc_RNA (1)...(19): siRNA sense strand
caagagaaacuagaagaua

SEQ ID NO: 1552954 - RNA, 19 nt, Homo sapiens
  misc_RNA (1)...(19): siRNA sense strand
cuacgaaagugcuucaauu

SEQ ID NO: 1552955 - RNA, 19 nt, Homo sapiens
  misc_RNA (1)...(19): siRNA sense strand
uagaggaggucaguuuaua

SEQ ID NO: 1552956 - RNA, 19 nt, Homo sapiens
  misc_RNA (1)...(19): siRNA sense strand
gaugaaaguuaccauguag

SEQ ID NO: 1552957 - RNA, 19 nt, Homo sapiens
  misc_RNA (1)...(19): siRNA sense strand
ugacccagauuaauuguga

SEQ ID NO: 1552958 - RNA, 19 nt, Homo sapiens
  misc_RNA (1)...(19): siRNA sense strand
ucagugaauucauuacgua

SEQ ID NO: 1552959 - RNA, 19 nt, Homo sapiens
  misc_RNA (1)...(19): siRNA sense strand
gccacuaacuccucuauuc

SEQ ID NO: 1552960 - RNA, 19 nt, Homo sapiens
  misc_RNA (1)...(19): siRNA sense strand
gaaauaucaugcaauagac

SEQ ID NO: 1552961 - RNA, 19 nt, Homo sapiens
  misc_RNA (1)...(19): siRNA sense strand
agaaucagcuaaugaauac

SEQ ID NO: 1552962 - RNA, 19 nt, Homo sapiens
  misc_RNA (1)...(19): siRNA sense strand
ccacauggacuacaaugaa

SEQ ID NO: 1552963 - RNA, 19 nt, Homo sapiens
  misc_RNA (1)...(19): siRNA sense strand
aaauucagcuccacagaga

SEQ ID NO: 1552964 - RNA, 19 nt, Homo sapiens
  misc_RNA (1)...(19): siRNA sense strand
ccagaaccaagauuuauuu

SEQ ID NO: 1552965 - RNA, 19 nt, Homo sapiens
  misc_RNA (1)...(19): siRNA sense strand
cuucagacauuuccauuau

SEQ ID NO: 1552966 - RNA, 19 nt, Homo sapiens
  misc_RNA (1)...(19): siRNA sense strand
caguaaaccaggagaguua

SEQ ID NO: 1552967 - RNA, 19 nt, Homo sapiens
  misc_RNA (1)...(19): siRNA sense strand
gaauguuucucucuucaag

SEQ ID NO: 1552968 - RNA, 19 nt, Homo sapiens
  misc_RNA (1)...(19): siRNA sense strand
gaauggugacccagauuaa

SEQ ID NO: 1552969 - RNA, 19 nt, Homo sapiens
  misc_RNA (1)...(19): siRNA sense strand
gagaaugugguuagaaaga

SEQ ID NO: 1552970 - RNA, 19 nt, Homo sapiens
  misc_RNA (1)...(19): siRNA sense strand
gcagagugguggaaacaag

SEQ ID NO: 1552971 - RNA, 19 nt, Homo sapiens
  misc_RNA (1)...(19): siRNA sense strand
gcaauuagaaagauguaga

SEQ ID NO: 1552972 - RNA, 19 nt, Homo sapiens
  misc_RNA (1)...(19): siRNA sense strand
agaugaaaguuaccaugua

SEQ ID NO: 1552973 - RNA, 19 nt, Homo sapiens
  misc_RNA (1)...(19): siRNA sense strand
uaacaagcauggaauugag

SEQ ID NO: 1552974 - RNA, 19 nt, Homo sapiens
  misc_RNA (1)...(19): siRNA sense strand
aaaccagaaccaagauuua

SEQ ID NO: 1552975 - RNA, 19 nt, Homo sapiens
  misc_RNA (1)...(19): siRNA sense strand
cagagaugcuuuauugcuu

SEQ ID NO: 1552976 - RNA, 19 nt, Homo sapiens
  misc_RNA (1)...(19): siRNA sense strand
gaacuuuugucaagagaaa

SEQ ID NO: 1552977 - RNA, 19 nt, Homo sapiens
  misc_RNA (1)...(19): siRNA sense strand
caagaauggugacccagau

SEQ ID NO: 1552978 - RNA, 19 nt, Homo sapiens
  misc_RNA (1)...(19): siRNA sense strand
uacgaaagugcuucaauua

SEQ ID NO: 1552979 - RNA, 19 nt, Homo sapiens
  misc_RNA (1)...(19): siRNA sense strand
ugaagaaucagcuaaugaa

SEQ ID NO: 1552980 - RNA, 19 nt, Homo sapiens
  misc_RNA (1)...(19): siRNA sense strand
aauccagacucccaaauug

SEQ ID NO: 1552981 - RNA, 19 nt, Homo sapiens
  misc_RNA (1)...(19): siRNA sense strand
caagaaacuuuggaagcuu

SEQ ID NO: 1552982 - RNA, 19 nt, Homo sapiens
  misc_RNA (1)...(19): siRNA sense strand
gcuuacugcugaagaauca

SEQ ID NO: 1552983 - RNA, 19 nt, Homo sapiens
  misc_RNA (1)...(19): siRNA sense strand
agucucagcuguuucaguu

SEQ ID NO: 1552984 - RNA, 19 nt, Homo sapiens
  misc_RNA (1)...(19): siRNA sense strand
cauuaucuccgguuuguaa

SEQ ID NO: 1552985 - RNA, 19 nt, Homo sapiens
  misc_RNA (1)...(19): siRNA sense strand
aagaaacuuuggaagcuuu

SEQ ID NO: 1552986 - RNA, 19 nt, Homo sapiens
  misc_RNA (1)...(19): siRNA sense strand
gggaauguuucucucuuca

SEQ ID NO: 1552987 - RNA, 19 nt, Homo sapiens
  misc_RNA (1)...(19): siRNA sense strand
gugcuucaauuagaaugua

SEQ ID NO: 1552988 - RNA, 19 nt, Homo sapiens
  misc_RNA (1)...(19): siRNA sense strand
gaaugugguuagaaagaag

SEQ ID NO: 1552989 - RNA, 19 nt, Homo sapiens
  misc_RNA (1)...(19): siRNA sense strand
caagcaggacuaaaucuga

SEQ ID NO: 1552990 - RNA, 19 nt, Homo sapiens
  misc_RNA (1)...(19): siRNA sense strand
aaggacagaucuucacaga

SEQ ID NO: 1552991 - RNA, 19 nt, Homo sapiens
  misc_RNA (1)...(19): siRNA sense strand
ggacuaaaucugaaaauga

SEQ ID NO: 1552992 - RNA, 19 nt, Homo sapiens
  misc_RNA (1)...(19): siRNA sense strand
agaagaaagccuugugauu

SEQ ID NO: 1552993 - RNA, 19 nt, Homo sapiens
  misc_RNA (1)...(19): siRNA sense strand
cacagccaauauucaguua

SEQ ID NO: 1552994 - RNA, 19 nt, Homo sapiens
  misc_RNA (1)...(19): siRNA sense strand
cgaaucccuucauguuuau

SEQ ID NO: 1552995 - RNA, 19 nt, Homo sapiens
  misc_RNA (1)...(19): siRNA sense strand
gaagaaucagcuaaugaau

SEQ ID NO: 1552996 - RNA, 19 nt, Homo sapiens
  misc_RNA (1)...(19): siRNA sense strand
ccagaagagugcaguaaac

SEQ ID NO: 1552997 - RNA, 19 nt, Homo sapiens
  misc_RNA (1)...(19): siRNA sense strand
uaacaugccaacauucuuc

SEQ ID NO: 1552998 - RNA, 19 nt, Homo sapiens
  misc_RNA (1)...(19): siRNA sense strand
ccugucaguuguuuagaaa

SEQ ID NO: 1552999 - RNA, 19 nt, Homo sapiens
  misc_RNA (1)...(19): siRNA sense strand
cagccaauauucaguuaca

SEQ ID NO: 1553000 - RNA, 19 nt, Homo sapiens
  misc_RNA (1)...(19): siRNA sense strand
ucagacauuuccauuaucu

SEQ ID NO: 1553001 - RNA, 19 nt, Homo sapiens
  misc_RNA (1)...(19): siRNA sense strand
gaaccagaagagugcagua

SEQ ID NO: 1553002 - RNA, 19 nt, Homo sapiens
  misc_RNA (1)...(19): siRNA sense strand
aagagaaacuagaagauac

SEQ ID NO: 1553003 - RNA, 19 nt, Homo sapiens
  misc_RNA (1)...(19): siRNA sense strand
ucaagaaacuuuggaagcu

SEQ ID NO: 1553004 - RNA, 19 nt, Homo sapiens
  misc_RNA (1)...(19): siRNA sense strand
agaauggugacccagauua

SEQ ID NO: 1553005 - RNA, 19 nt, Homo sapiens
  misc_RNA (1)...(19): siRNA sense strand
aagcaggacuaaaucugaa

SEQ ID NO: 1553006 - RNA, 19 nt, Homo sapiens
  misc_RNA (1)...(19): siRNA sense strand
gaagcccuuugaacccauu

SEQ ID NO: 1553007 - RNA, 19 nt, Homo sapiens
  misc_RNA (1)...(19): siRNA sense strand
caacuuugccuacucucuu

SEQ ID NO: 1553008 - RNA, 19 nt, Homo sapiens
  misc_RNA (1)...(19): siRNA sense strand
agaaugugguuagaaagaa

SEQ ID NO: 1553009 - RNA, 19 nt, Homo sapiens
  misc_RNA (1)...(19): siRNA sense strand
gaaguuguuccaaguucaa

SEQ ID NO: 1553010 - RNA, 19 nt, Homo sapiens
  misc_RNA (1)...(19): siRNA sense strand
gcaguaaaccaggagaguu

SEQ ID NO: 1553011 - RNA, 19 nt, Homo sapiens
  misc_RNA (1)...(19): siRNA sense strand
aaacccagugccagaaaua

SEQ ID NO: 1553012 - RNA, 19 nt, Homo sapiens
  misc_RNA (1)...(19): siRNA sense strand
augagaaugugguuagaaa

SEQ ID NO: 1553013 - RNA, 19 nt, Homo sapiens
  misc_RNA (1)...(19): siRNA sense strand
gaacuucagacauuuccau

SEQ ID NO: 1553014 - RNA, 19 nt, Homo sapiens
  misc_RNA (1)...(19): siRNA sense strand
uuaaaugagccgucaaguu

SEQ ID NO: 1553015 - RNA, 19 nt, Homo sapiens
  misc_RNA (1)...(19): siRNA sense strand
ggaaacaagcaggacuaaa

SEQ ID NO: 1553016 - RNA, 19 nt, Homo sapiens
  misc_RNA (1)...(19): siRNA sense strand
ccacagccaauauucaguu

SEQ ID NO: 1553017 - RNA, 19 nt, Homo sapiens
  misc_RNA (1)...(19): siRNA sense strand
ccacagagauuuugaccau

SEQ ID NO: 1553018 - RNA, 19 nt, Homo sapiens
  misc_RNA (1)...(19): siRNA sense strand
guagaggaggucaguuuau

SEQ ID NO: 1553019 - RNA, 19 nt, Homo sapiens
  misc_RNA (1)...(19): siRNA sense strand
gaaagccuugugauuaauc

SEQ ID NO: 1553020 - RNA, 19 nt, Homo sapiens
  misc_RNA (1)...(19): siRNA sense strand
gacagauaccucagucuug

SEQ ID NO: 1553021 - RNA, 19 nt, Homo sapiens
  misc_RNA (1)...(19): siRNA sense strand
gauguggcaauuagaaaga

SEQ ID NO: 1553022 - RNA, 19 nt, Homo sapiens
  misc_RNA (1)...(19): siRNA sense strand
uacagaacuucagacauuu

SEQ ID NO: 1553023 - RNA, 19 nt, Homo sapiens
  misc_RNA (1)...(19): siRNA sense strand
gaugcuuuauugcuucgaa

SEQ ID NO: 1553024 - RNA, 19 nt, Homo sapiens
  misc_RNA (1)...(19): siRNA sense strand
gaggaggucaguuuauaca

SEQ ID NO: 1553025 - RNA, 19 nt, Homo sapiens
  misc_RNA (1)...(19): siRNA sense strand
cagggaauguuucucucuu

SEQ ID NO: 1553026 - RNA, 19 nt, Homo sapiens
  misc_RNA (1)...(19): siRNA sense strand
ugacagauaccucagucuu

SEQ ID NO: 1553027 - RNA, 19 nt, Homo sapiens
  misc_RNA (1)...(19): siRNA sense strand
aaacaagcaggacuaaauc

SEQ ID NO: 1553028 - RNA, 19 nt, Homo sapiens
  misc_RNA (1)...(19): siRNA sense strand
aaagaagaaagccuuguga

SEQ ID NO: 1553029 - RNA, 19 nt, Homo sapiens
  misc_RNA (1)...(19): siRNA sense strand
uaaagaagaaagccuugug

SEQ ID NO: 1553030 - RNA, 19 nt, Homo sapiens
  misc_RNA (1)...(19): siRNA sense strand
ccagugccagaaauaauaa

SEQ ID NO: 1553031 - RNA, 19 nt, Homo sapiens
  misc_RNA (1)...(19): siRNA sense strand
cccagugccagaaauaaua

SEQ ID NO: 1553032 - RNA, 19 nt, Homo sapiens
  misc_RNA (1)...(19): siRNA sense strand
uaaacccagugccagaaau

SEQ ID NO: 1553033 - RNA, 19 nt, Homo sapiens
  misc_RNA (1)...(19): siRNA sense strand
cuaacaagcauggaauuga

SEQ ID NO: 1553034 - RNA, 19 nt, Homo sapiens
  misc_RNA (1)...(19): siRNA sense strand
gcauggaauugaggauauc

SEQ ID NO: 1553035 - RNA, 19 nt, Homo sapiens
  misc_RNA (1)...(19): siRNA sense strand
gaauucauuacguacagaa

SEQ ID NO: 1553036 - RNA, 19 nt, Homo sapiens
  misc_RNA (1)...(19): siRNA sense strand
gaaacauuggaacaucuga

SEQ ID NO: 1553037 - RNA, 19 nt, Homo sapiens
  misc_RNA (1)...(19): siRNA sense strand
acacccacauggacuacaa

SEQ ID NO: 1553038 - RNA, 19 nt, Homo sapiens
  misc_RNA (1)...(19): siRNA sense strand
ggaaacauuggaacaucug

SEQ ID NO: 1553039 - RNA, 19 nt, Homo sapiens
  misc_RNA (1)...(19): siRNA sense strand
ggaagaaacuguccgagaa

SEQ ID NO: 1553040 - RNA, 19 nt, Homo sapiens
  misc_RNA (1)...(19): siRNA sense strand
gaaagagcuucacuucuaa

SEQ ID NO: 1553041 - RNA, 19 nt, Homo sapiens
  misc_RNA (1)...(19): siRNA sense strand
ggaggaggcuggaaugaaa

SEQ ID NO: 1553042 - RNA, 19 nt, Homo sapiens
  misc_RNA (1)...(19): siRNA sense strand
gaaaauaccaucacaguua

SEQ ID NO: 1553043 - RNA, 19 nt, Homo sapiens
  misc_RNA (1)...(19): siRNA sense strand
cgagccaucuguaaucuua

SEQ ID NO: 1553044 - RNA, 19 nt, Homo sapiens
  misc_RNA (1)...(19): siRNA sense strand
gaaggagccugggaaacua

SEQ ID NO: 1553045 - RNA, 19 nt, Homo sapiens
  misc_RNA (1)...(19): siRNA sense strand
ggucucagaugaugauaaa

SEQ ID NO: 1553046 - RNA, 19 nt, Homo sapiens
  misc_RNA (1)...(19): siRNA sense strand
caccagagauugacaagaa

SEQ ID NO: 1553047 - RNA, 19 nt, Homo sapiens
  misc_RNA (1)...(19): siRNA sense strand
ggacacagaagaauuagaa

SEQ ID NO: 1553048 - RNA, 19 nt, Homo sapiens
  misc_RNA (1)...(19): siRNA sense strand
gcaauuggguagacgaaga

SEQ ID NO: 1553049 - RNA, 19 nt, Homo sapiens
  misc_RNA (1)...(19): siRNA sense strand
gugauaaggugcugacuga

SEQ ID NO: 1553050 - RNA, 19 nt, Homo sapiens
  misc_RNA (1)...(19): siRNA sense strand
gagugaccguucaauauuu

SEQ ID NO: 1553051 - RNA, 19 nt, Homo sapiens
  misc_RNA (1)...(19): siRNA sense strand
gauuaucagugggauguua

SEQ ID NO: 1553052 - RNA, 19 nt, Homo sapiens
  misc_RNA (1)...(19): siRNA sense strand
uaaaggugauucucaucua

SEQ ID NO: 1553053 - RNA, 19 nt, Homo sapiens
  misc_RNA (1)...(19): siRNA sense strand
ggagugaccguucaauauu

SEQ ID NO: 1553054 - RNA, 19 nt, Homo sapiens
  misc_RNA (1)...(19): siRNA sense strand
gaagcaaggugaagauaac

SEQ ID NO: 1553055 - RNA, 19 nt, Homo sapiens
  misc_RNA (1)...(19): siRNA sense strand
gaaacuagcugggaaucuc

SEQ ID NO: 1553056 - RNA, 19 nt, Homo sapiens
  misc_RNA (1)...(19): siRNA sense strand
gaggaaagcugagccaucu

SEQ ID NO: 1553057 - RNA, 19 nt, Homo sapiens
  misc_RNA (1)...(19): siRNA sense strand
ggaaucucccaaacaaaua

SEQ ID NO: 1553058 - RNA, 19 nt, Homo sapiens
  misc_RNA (1)...(19): siRNA sense strand
gauaaggugcugacugauu

SEQ ID NO: 1553059 - RNA, 19 nt, Homo sapiens
  misc_RNA (1)...(19): siRNA sense strand
aaaggugauucucaucuaa

SEQ ID NO: 1553060 - RNA, 19 nt, Homo sapiens
  misc_RNA (1)...(19): siRNA sense strand
gaccuggccuugcugaaga

SEQ ID NO: 1553061 - RNA, 19 nt, Homo sapiens
  misc_RNA (1)...(19): siRNA sense strand
gaagaagaaccggaagaaa

SEQ ID NO: 1553062 - RNA, 19 nt, Homo sapiens
  misc_RNA (1)...(19): siRNA sense strand
ccaaaugggcggacuguug

SEQ ID NO: 1553063 - RNA, 19 nt, Homo sapiens
  misc_RNA (1)...(19): siRNA sense strand
gcaaagcagccaccagaga

SEQ ID NO: 1553064 - RNA, 19 nt, Homo sapiens
  misc_RNA (1)...(19): siRNA sense strand
caaaugggcggacuguuga

SEQ ID NO: 1553065 - RNA, 19 nt, Homo sapiens
  misc_RNA (1)...(19): siRNA sense strand
gaugaauggucuggguuaa

SEQ ID NO: 1553066 - RNA, 19 nt, Homo sapiens
  misc_RNA (1)...(19): siRNA sense strand
acaggacacagaagaauua

SEQ ID NO: 1553067 - RNA, 19 nt, Homo sapiens
  misc_RNA (1)...(19): siRNA sense strand
ugaauggucuggguuaaau

SEQ ID NO: 1553068 - RNA, 19 nt, Homo sapiens
  misc_RNA (1)...(19): siRNA sense strand
guaaaacucuccucacaga

SEQ ID NO: 1553069 - RNA, 19 nt, Homo sapiens
  misc_RNA (1)...(19): siRNA sense strand
gaaucucccaaacaaauaa

SEQ ID NO: 1553070 - RNA, 19 nt, Homo sapiens
  misc_RNA (1)...(19): siRNA sense strand
gcgaggaacagaagaagaa

SEQ ID NO: 1553071 - RNA, 19 nt, Homo sapiens
  misc_RNA (1)...(19): siRNA sense strand
ggaaugcaccagcagaaga

SEQ ID NO: 1553072 - RNA, 19 nt, Homo sapiens
  misc_RNA (1)...(19): siRNA sense strand
ucagguuucuucaggauug

SEQ ID NO: 1553073 - RNA, 19 nt, Homo sapiens
  misc_RNA (1)...(19): siRNA sense strand
gaagaagcaaggugaagau

SEQ ID NO: 1553074 - RNA, 19 nt, Homo sapiens
  misc_RNA (1)...(19): siRNA sense strand
gauguuagccguaaucaac

SEQ ID NO: 1553075 - RNA, 19 nt, Homo sapiens
  misc_RNA (1)...(19): siRNA sense strand
gaaguggaacuccguuuca

SEQ ID NO: 1553076 - RNA, 19 nt, Homo sapiens
  misc_RNA (1)...(19): siRNA sense strand
aaaccucacugucaaugga

SEQ ID NO: 1553077 - RNA, 19 nt, Homo sapiens
  misc_RNA (1)...(19): siRNA sense strand
acagauaaauccaagucaa

SEQ ID NO: 1553078 - RNA, 19 nt, Homo sapiens
  misc_RNA (1)...(19): siRNA sense strand
gagaagcccaaaccaaaug

SEQ ID NO: 1553079 - RNA, 19 nt, Homo sapiens
  misc_RNA (1)...(19): siRNA sense strand
guuagcaacuuuaaaucug

SEQ ID NO: 1553080 - RNA, 19 nt, Homo sapiens
  misc_RNA (1)...(19): siRNA sense strand
ccgagaagcccaaaccaaa

SEQ ID NO: 1553081 - RNA, 19 nt, Homo sapiens
  misc_RNA (1)...(19): siRNA sense strand
ccaagugccgccaauacua

SEQ ID NO: 1553082 - RNA, 19 nt, Homo sapiens
  misc_RNA (1)...(19): siRNA sense strand
cuauaucgaugaugaaugg

SEQ ID NO: 1553083 - RNA, 19 nt, Homo sapiens
  misc_RNA (1)...(19): siRNA sense strand
gaagaaaucaaagucagau

SEQ ID NO: 1553084 - RNA, 19 nt, Homo sapiens
  misc_RNA (1)...(19): siRNA sense strand
ugaaguggcugagggugaa

SEQ ID NO: 1553085 - RNA, 19 nt, Homo sapiens
  misc_RNA (1)...(19): siRNA sense strand
caagucaaauaccaagcaa

SEQ ID NO: 1553086 - RNA, 19 nt, Homo sapiens
  misc_RNA (1)...(19): siRNA sense strand
caagaagaauaaaggugau

SEQ ID NO: 1553087 - RNA, 19 nt, Homo sapiens
  misc_RNA (1)...(19): siRNA sense strand
guaaucaacccuauaucga

SEQ ID NO: 1553088 - RNA, 19 nt, Homo sapiens
  misc_RNA (1)...(19): siRNA sense strand
ggaaaagacuggggaagga

SEQ ID NO: 1553089 - RNA, 19 nt, Homo sapiens
  misc_RNA (1)...(19): siRNA sense strand
cagauaaauccaagucaaa

SEQ ID NO: 1553090 - RNA, 19 nt, Homo sapiens
  misc_RNA (1)...(19): siRNA sense strand
gcacaggacacagaagaau

SEQ ID NO: 1553091 - RNA, 19 nt, Homo sapiens
  misc_RNA (1)...(19): siRNA sense strand
auaaggugcugacugauuc

SEQ ID NO: 1553092 - RNA, 19 nt, Homo sapiens
  misc_RNA (1)...(19): siRNA sense strand
gaagaaacuguccgagaag

SEQ ID NO: 1553093 - RNA, 19 nt, Homo sapiens
  misc_RNA (1)...(19): siRNA sense strand
caaagcagccaccagagau

SEQ ID NO: 1553094 - RNA, 19 nt, Homo sapiens
  misc_RNA (1)...(19): siRNA sense strand
caaaaggucucagaugaug

SEQ ID NO: 1553095 - RNA, 19 nt, Homo sapiens
  misc_RNA (1)...(19): siRNA sense strand
aaacucuccucacagauca

SEQ ID NO: 1553096 - RNA, 19 nt, Homo sapiens
  misc_RNA (1)...(19): siRNA sense strand
aaaaggagauucuacacuu

SEQ ID NO: 1553097 - RNA, 19 nt, Homo sapiens
  misc_RNA (1)...(19): siRNA sense strand
gacugauucugguucauug

SEQ ID NO: 1553098 - RNA, 19 nt, Homo sapiens
  misc_RNA (1)...(19): siRNA sense strand
gaugaaggagccugggaaa

SEQ ID NO: 1553099 - RNA, 19 nt, Homo sapiens
  misc_RNA (1)...(19): siRNA sense strand
aaaggagauucuacacuuc

SEQ ID NO: 1553100 - RNA, 19 nt, Homo sapiens
  misc_RNA (1)...(19): siRNA sense strand
aaucaaagucagaugcuaa

SEQ ID NO: 1553101 - RNA, 19 nt, Homo sapiens
  misc_RNA (1)...(19): siRNA sense strand
gagccaguuucucagucua

SEQ ID NO: 1553102 - RNA, 19 nt, Homo sapiens
  misc_RNA (1)...(19): siRNA sense strand
gauucugguucauuggauu

SEQ ID NO: 1553103 - RNA, 19 nt, Homo sapiens
  misc_RNA (1)...(19): siRNA sense strand
gaaacgacagcagcguaaa

SEQ ID NO: 1553104 - RNA, 19 nt, Homo sapiens
  misc_RNA (1)...(19): siRNA sense strand
ggagcgaggaacagaagaa

SEQ ID NO: 1553105 - RNA, 19 nt, Homo sapiens
  misc_RNA (1)...(19): siRNA sense strand
gugauucucaucuaaaugu

SEQ ID NO: 1553106 - RNA, 19 nt, Homo sapiens
  misc_RNA (1)...(19): siRNA sense strand
ucucagaugaugauaaaga

SEQ ID NO: 1553107 - RNA, 19 nt, Homo sapiens
  misc_RNA (1)...(19): siRNA sense strand
aacccuauaucgaugauga

SEQ ID NO: 1553108 - RNA, 19 nt, Homo sapiens
  misc_RNA (1)...(19): siRNA sense strand
gauucuacacuucagguuu

SEQ ID NO: 1553109 - RNA, 19 nt, Homo sapiens
  misc_RNA (1)...(19): siRNA sense strand
ggagaugcuaauacaaaug

SEQ ID NO: 1553110 - RNA, 19 nt, Homo sapiens
  misc_RNA (1)...(19): siRNA sense strand
cauaagcacuagugaucca

SEQ ID NO: 1553111 - RNA, 19 nt, Homo sapiens
  misc_RNA (1)...(19): siRNA sense strand
agaagcaaggugaagauaa

SEQ ID NO: 1553112 - RNA, 19 nt, Homo sapiens
  misc_RNA (1)...(19): siRNA sense strand
agucuaccacuucugauua

SEQ ID NO: 1553113 - RNA, 19 nt, Homo sapiens
  misc_RNA (1)...(19): siRNA sense strand
gagaugcuaauacaaaugg

SEQ ID NO: 1553114 - RNA, 19 nt, Homo sapiens
  misc_RNA (1)...(19): siRNA sense strand
gagaaguggaacuccguuu

SEQ ID NO: 1553115 - RNA, 19 nt, Homo sapiens
  misc_RNA (1)...(19): siRNA sense strand
uacaagagacagauaaauc

SEQ ID NO: 1553116 - RNA, 19 nt, Homo sapiens
  misc_RNA (1)...(19): siRNA sense strand
ugaugaauggucuggguua

SEQ ID NO: 1553117 - RNA, 19 nt, Homo sapiens
  misc_RNA (1)...(19): siRNA sense strand
uggagugaccguucaauau

SEQ ID NO: 1553118 - RNA, 19 nt, Homo sapiens
  misc_RNA (1)...(19): siRNA sense strand
ucaagacacuggagaugcu

SEQ ID NO: 1553119 - RNA, 19 nt, Homo sapiens
  misc_RNA (1)...(19): siRNA sense strand
cugcugaucccaacucuga

SEQ ID NO: 1553120 - RNA, 19 nt, Homo sapiens
  misc_RNA (1)...(19): siRNA sense strand
cgagaagcccaaaccaaau

SEQ ID NO: 1553121 - RNA, 19 nt, Homo sapiens
  misc_RNA (1)...(19): siRNA sense strand
uggagaugcuaauacaaau

SEQ ID NO: 1553122 - RNA, 19 nt, Homo sapiens
  misc_RNA (1)...(19): siRNA sense strand
guucgaacaccucaaagug

SEQ ID NO: 1553123 - RNA, 19 nt, Homo sapiens
  misc_RNA (1)...(19): siRNA sense strand
gaaccaauuccugaugauc

SEQ ID NO: 1553124 - RNA, 19 nt, Homo sapiens
  misc_RNA (1)...(19): siRNA sense strand
uaaagucccaggaaccaau

SEQ ID NO: 1553125 - RNA, 19 nt, Homo sapiens
  misc_RNA (1)...(19): siRNA sense strand
ugaaaagucuguaaaacuc

SEQ ID NO: 1553126 - RNA, 19 nt, Homo sapiens
  misc_RNA (1)...(19): siRNA sense strand
cagcagcguaaacgugaua

SEQ ID NO: 1553127 - RNA, 19 nt, Homo sapiens
  misc_RNA (1)...(19): siRNA sense strand
agaaacgacagcagcguaa

SEQ ID NO: 1553128 - RNA, 19 nt, Homo sapiens
  misc_RNA (1)...(19): siRNA sense strand
gcugaucccaacucugauu

SEQ ID NO: 1553129 - RNA, 19 nt, Homo sapiens
  misc_RNA (1)...(19): siRNA sense strand
aaaucaaagucagaugcua

SEQ ID NO: 1553130 - RNA, 19 nt, Homo sapiens
  misc_RNA (1)...(19): siRNA sense strand
gaguuggagugaccguuca

SEQ ID NO: 1553131 - RNA, 19 nt, Homo sapiens
  misc_RNA (1)...(19): siRNA sense strand
ggaaugaaaagucuguaaa

SEQ ID NO: 1553132 - RNA, 19 nt, Homo sapiens
  misc_RNA (1)...(19): siRNA sense strand
gauagaaaauaccaucaca

SEQ ID NO: 1553133 - RNA, 19 nt, Homo sapiens
  misc_RNA (1)...(19): siRNA sense strand
gcugacugauucugguuca

SEQ ID NO: 1553134 - RNA, 19 nt, Homo sapiens
  misc_RNA (1)...(19): siRNA sense strand
gaaaucaaagucagaugcu

SEQ ID NO: 1553135 - RNA, 19 nt, Homo sapiens
  misc_RNA (1)...(19): siRNA sense strand
gucuaccacuucugauuau

SEQ ID NO: 1553136 - RNA, 19 nt, Homo sapiens
  misc_RNA (1)...(19): siRNA sense strand
uugaagaccauaagcacua

SEQ ID NO: 1553137 - RNA, 19 nt, Homo sapiens
  misc_RNA (1)...(19): siRNA sense strand
gcaaggugaagauaacucu

SEQ ID NO: 1553138 - RNA, 19 nt, Homo sapiens
  misc_RNA (1)...(19): siRNA sense strand
gaaugcaccagcagaagag

SEQ ID NO: 1553139 - RNA, 19 nt, Homo sapiens
  misc_RNA (1)...(19): siRNA sense strand
ggcagucgcugaaaguuua

SEQ ID NO: 1553140 - RNA, 19 nt, Homo sapiens
  misc_RNA (1)...(19): siRNA sense strand
cgaaaucucuguucucaug

SEQ ID NO: 1553141 - RNA, 19 nt, Homo sapiens
  misc_RNA (1)...(19): siRNA sense strand
gcauaagaaccucaagaaa

SEQ ID NO: 1553142 - RNA, 19 nt, Homo sapiens
  misc_RNA (1)...(19): siRNA sense strand
ggcaacaccugcaucuuuc

SEQ ID NO: 1553143 - RNA, 19 nt, Homo sapiens
  misc_RNA (1)...(19): siRNA sense strand
aauauaagccuguguucuu

SEQ ID NO: 1553144 - RNA, 19 nt, Homo sapiens
  misc_RNA (1)...(19): siRNA sense strand
ggcauaagaaccucaagaa

SEQ ID NO: 1553145 - RNA, 19 nt, Homo sapiens
  misc_RNA (1)...(19): siRNA sense strand
cauaagaaccucaagaaaa

SEQ ID NO: 1553146 - RNA, 19 nt, Homo sapiens
  misc_RNA (1)...(19): siRNA sense strand
caagaaaagcaaaggaaua

SEQ ID NO: 1553147 - RNA, 19 nt, Homo sapiens
  misc_RNA (1)...(19): siRNA sense strand
auauaagccuguguucuuu

SEQ ID NO: 1553148 - RNA, 19 nt, Homo sapiens
  misc_RNA (1)...(19): siRNA sense strand
aggcaacaccugcaucuuu

SEQ ID NO: 1553149 - RNA, 19 nt, Homo sapiens
  misc_RNA (1)...(19): siRNA sense strand
ggaggugcgugaccacaac

SEQ ID NO: 1553150 - RNA, 19 nt, Homo sapiens
  misc_RNA (1)...(19): siRNA sense strand
ccaccgaaaucucuguucu

SEQ ID NO: 1553151 - RNA, 19 nt, Homo sapiens
  misc_RNA (1)...(19): siRNA sense strand
ggaauauaagccuguguuc

SEQ ID NO: 1553152 - RNA, 19 nt, Homo sapiens
  misc_RNA (1)...(19): siRNA sense strand
gaauauaagccuguguucu

SEQ ID NO: 1553153 - RNA, 19 nt, Homo sapiens
  misc_RNA (1)...(19): siRNA sense strand
cagagacccuccuggaacu

SEQ ID NO: 1553154 - RNA, 19 nt, Homo sapiens
  misc_RNA (1)...(19): siRNA sense strand
guuucuuucuucccuguuu

SEQ ID NO: 1553155 - RNA, 19 nt, Homo sapiens
  misc_RNA (1)...(19): siRNA sense strand
caaugggguugguuucuuu

SEQ ID NO: 1553156 - RNA, 19 nt, Homo sapiens
  misc_RNA (1)...(19): siRNA sense strand
auaagaaccucaagaaaag

SEQ ID NO: 1553157 - RNA, 19 nt, Homo sapiens
  misc_RNA (1)...(19): siRNA sense strand
cugcaucuuuccggcauaa

SEQ ID NO: 1553158 - RNA, 19 nt, Homo sapiens
  misc_RNA (1)...(19): siRNA sense strand
accgaaaucucuguucuca

SEQ ID NO: 1553159 - RNA, 19 nt, Homo sapiens
  misc_RNA (1)...(19): siRNA sense strand
gcagucgcugaaaguuuaa

SEQ ID NO: 1553160 - RNA, 19 nt, Homo sapiens
  misc_RNA (1)...(19): siRNA sense strand
ucucauggcagucgcugaa

SEQ ID NO: 1553161 - RNA, 19 nt, Homo sapiens
  misc_RNA (1)...(19): siRNA sense strand
uggcagucgcugaaaguuu

SEQ ID NO: 1553162 - RNA, 19 nt, Homo sapiens
  misc_RNA (1)...(19): siRNA sense strand
ucaacgagcggcacaggua

SEQ ID NO: 1553163 - RNA, 19 nt, Homo sapiens
  misc_RNA (1)...(19): siRNA sense strand
gguacgacgacguggagua

SEQ ID NO: 1553164 - RNA, 19 nt, Homo sapiens
  misc_RNA (1)...(19): siRNA sense strand
gcgcgcuucucccugaauc

SEQ ID NO: 1553165 - RNA, 19 nt, Homo sapiens
  misc_RNA (1)...(19): siRNA sense strand
gaagcgucaucuggagaag

SEQ ID NO: 1553166 - RNA, 19 nt, Homo sapiens
  misc_RNA (1)...(19): siRNA sense strand
gacaauggcuugacuuuga

SEQ ID NO: 1553167 - RNA, 19 nt, Homo sapiens
  misc_RNA (1)...(19): siRNA sense strand
guacuuacaugcaauaaag

SEQ ID NO: 1553168 - RNA, 19 nt, Homo sapiens
  misc_RNA (1)...(19): siRNA sense strand
gcgcaucacuggcuacuau

SEQ ID NO: 1553169 - RNA, 19 nt, Homo sapiens
  misc_RNA (1)...(19): siRNA sense strand
gggaaaccuuuguggauuu

SEQ ID NO: 1553170 - RNA, 19 nt, Homo sapiens
  misc_RNA (1)...(19): siRNA sense strand
ccuauuauccucuacuuua

SEQ ID NO: 1553171 - RNA, 19 nt, Homo sapiens
  misc_RNA (1)...(19): siRNA sense strand
uggagaagccgccuuauuu

SEQ ID NO: 1553172 - RNA, 19 nt, Homo sapiens
  misc_RNA (1)...(19): siRNA sense strand
gggcgcaacucaagaagau

SEQ ID NO: 1553173 - RNA, 19 nt, Homo sapiens
  misc_RNA (1)...(19): siRNA sense strand
gcauugugaugaugaccua

SEQ ID NO: 1553174 - RNA, 19 nt, Homo sapiens
  misc_RNA (1)...(19): siRNA sense strand
gagcggauccugcgcauca

SEQ ID NO: 1553175 - RNA, 19 nt, Homo sapiens
  misc_RNA (1)...(19): siRNA sense strand
gagacaauggcuugacuuu

SEQ ID NO: 1553176 - RNA, 19 nt, Homo sapiens
  misc_RNA (1)...(19): siRNA sense strand
ccagucagaucgucuucaa

SEQ ID NO: 1553177 - RNA, 19 nt, Homo sapiens
  misc_RNA (1)...(19): siRNA sense strand
ggaauugccguuacauauc

SEQ ID NO: 1553178 - RNA, 19 nt, Homo sapiens
  misc_RNA (1)...(19): siRNA sense strand
ucaccugcauuccuauuau

SEQ ID NO: 1553179 - RNA, 19 nt, Homo sapiens
  misc_RNA (1)...(19): siRNA sense strand
gauuaaggaggaucugaaa

SEQ ID NO: 1553180 - RNA, 19 nt, Homo sapiens
  misc_RNA (1)...(19): siRNA sense strand
gcauuccuauuauccucua

SEQ ID NO: 1553181 - RNA, 19 nt, Homo sapiens
  misc_RNA (1)...(19): siRNA sense strand
gaauugccguuacauaucc

SEQ ID NO: 1553182 - RNA, 19 nt, Homo sapiens
  misc_RNA (1)...(19): siRNA sense strand
uaaggaggaucugaaaugg

SEQ ID NO: 1553183 - RNA, 19 nt, Homo sapiens
  misc_RNA (1)...(19): siRNA sense strand
cagggaaugcugucgauuu

SEQ ID NO: 1553184 - RNA, 19 nt, Homo sapiens
  misc_RNA (1)...(19): siRNA sense strand
ggucaucgccaucaucauc

SEQ ID NO: 1553185 - RNA, 19 nt, Homo sapiens
  misc_RNA (1)...(19): siRNA sense strand
cacaaacuaccuguacuua

SEQ ID NO: 1553186 - RNA, 19 nt, Homo sapiens
  misc_RNA (1)...(19): siRNA sense strand
ugggaugucugguugauca

SEQ ID NO: 1553187 - RNA, 19 nt, Homo sapiens
  misc_RNA (1)...(19): siRNA sense strand
uuaaggaggaucugaaaug

SEQ ID NO: 1553188 - RNA, 19 nt, Homo sapiens
  misc_RNA (1)...(19): siRNA sense strand
acaauggcuugacuuugaa

SEQ ID NO: 1553189 - RNA, 19 nt, Homo sapiens
  misc_RNA (1)...(19): siRNA sense strand
ggaaucguccucagcauac

SEQ ID NO: 1553190 - RNA, 19 nt, Homo sapiens
  misc_RNA (1)...(19): siRNA sense strand
ccugggcagugcuaaguuu

SEQ ID NO: 1553191 - RNA, 19 nt, Homo sapiens
  misc_RNA (1)...(19): siRNA sense strand
acucugaugucucuuggaa

SEQ ID NO: 1553192 - RNA, 19 nt, Homo sapiens
  misc_RNA (1)...(19): siRNA sense strand
ccucagagcaagaacagaa

SEQ ID NO: 1553193 - RNA, 19 nt, Homo sapiens
  misc_RNA (1)...(19): siRNA sense strand
aaauaaacacuacggaugu

SEQ ID NO: 1553194 - RNA, 19 nt, Homo sapiens
  misc_RNA (1)...(19): siRNA sense strand
ucugaugucucuuggaauc

SEQ ID NO: 1553195 - RNA, 19 nt, Homo sapiens
  misc_RNA (1)...(19): siRNA sense strand
ggagaagccgccuuauuuu

SEQ ID NO: 1553196 - RNA, 19 nt, Homo sapiens
  misc_RNA (1)...(19): siRNA sense strand
uuacauaucccacucugau

SEQ ID NO: 1553197 - RNA, 19 nt, Homo sapiens
  misc_RNA (1)...(19): siRNA sense strand
uggaauugccguuacauau

SEQ ID NO: 1553198 - RNA, 19 nt, Homo sapiens
  misc_RNA (1)...(19): siRNA sense strand
uuaccaaaguggaauacug

SEQ ID NO: 1553199 - RNA, 19 nt, Homo sapiens
  misc_RNA (1)...(19): siRNA sense strand
gaugaugaccuacgcugau

SEQ ID NO: 1553200 - RNA, 19 nt, Homo sapiens
  misc_RNA (1)...(19): siRNA sense strand
gggcagugcuaaguuugga

SEQ ID NO: 1553201 - RNA, 19 nt, Homo sapiens
  misc_RNA (1)...(19): siRNA sense strand
ucacaaacuaccuguacuu

SEQ ID NO: 1553202 - RNA, 19 nt, Homo sapiens
  misc_RNA (1)...(19): siRNA sense strand
ggaaaccuuuguggauuuu

SEQ ID NO: 1553203 - RNA, 19 nt, Homo sapiens
  misc_RNA (1)...(19): siRNA sense strand
gcaaguccacagagaagca

SEQ ID NO: 1553204 - RNA, 19 nt, Homo sapiens
  misc_RNA (1)...(19): siRNA sense strand
ucaaagugaggaagaagga

SEQ ID NO: 1553205 - RNA, 19 nt, Homo sapiens
  misc_RNA (1)...(19): siRNA sense strand
gaucacuacaccagucaga

SEQ ID NO: 1553206 - RNA, 19 nt, Homo sapiens
  misc_RNA (1)...(19): siRNA sense strand
uggaaucguccucagcaua

SEQ ID NO: 1553207 - RNA, 19 nt, Homo sapiens
  misc_RNA (1)...(19): siRNA sense strand
aagcagcgauacagggaau

SEQ ID NO: 1553208 - RNA, 19 nt, Homo sapiens
  misc_RNA (1)...(19): siRNA sense strand
agucagaucgucuucaaug

SEQ ID NO: 1553209 - RNA, 19 nt, Homo sapiens
  misc_RNA (1)...(19): siRNA sense strand
ggggaaaccuuuguggauu

SEQ ID NO: 1553210 - RNA, 19 nt, Homo sapiens
  misc_RNA (1)...(19): siRNA sense strand
guuuggagaagccgccuua

SEQ ID NO: 1553211 - RNA, 19 nt, Homo sapiens
  misc_RNA (1)...(19): siRNA sense strand
ccacagccacuccgucauc

SEQ ID NO: 1553212 - RNA, 19 nt, Homo sapiens
  misc_RNA (1)...(19): siRNA sense strand
guccucagcauaccuguga

SEQ ID NO: 1553213 - RNA, 19 nt, Homo sapiens
  misc_RNA (1)...(19): siRNA sense strand
uccggcagcucaaguacuu

SEQ ID NO: 1553214 - RNA, 19 nt, Homo sapiens
  misc_RNA (1)...(19): siRNA sense strand
ugucugcccucuacaaggu

SEQ ID NO: 1553215 - RNA, 19 nt, Homo sapiens
  misc_RNA (1)...(19): siRNA sense strand
ggagacaauggcuugacuu

SEQ ID NO: 1553216 - RNA, 19 nt, Homo sapiens
  misc_RNA (1)...(19): siRNA sense strand
gcugcucacccgacucaaa

SEQ ID NO: 1553217 - RNA, 19 nt, Homo sapiens
  misc_RNA (1)...(19): siRNA sense strand
uucaucaccugcauuccua

SEQ ID NO: 1553218 - RNA, 19 nt, Homo sapiens
  misc_RNA (1)...(19): siRNA sense strand
uuuaacauccucuucauca

SEQ ID NO: 1553219 - RNA, 19 nt, Homo sapiens
  misc_RNA (1)...(19): siRNA sense strand
ggaugucuccguguuguuc

SEQ ID NO: 1553220 - RNA, 19 nt, Homo sapiens
  misc_RNA (1)...(19): siRNA sense strand
guggaauacuggagcucuu

SEQ ID NO: 1553221 - RNA, 19 nt, Homo sapiens
  misc_RNA (1)...(19): siRNA sense strand
caucuuggguguguuuaac

SEQ ID NO: 1553222 - RNA, 19 nt, Homo sapiens
  misc_RNA (1)...(19): siRNA sense strand
cgauuaaggaggaucugaa

SEQ ID NO: 1553223 - RNA, 19 nt, Homo sapiens
  misc_RNA (1)...(19): siRNA sense strand
cuauuauccucuacuuuac

SEQ ID NO: 1553224 - RNA, 19 nt, Homo sapiens
  misc_RNA (1)...(19): siRNA sense strand
ccagaggagugggaugucu

SEQ ID NO: 1553225 - RNA, 19 nt, Homo sapiens
  misc_RNA (1)...(19): siRNA sense strand
ucacuacaccagucagauc

SEQ ID NO: 1553226 - RNA, 19 nt, Homo sapiens
  misc_RNA (1)...(19): siRNA sense strand
gcuugacuuugaagguguu

SEQ ID NO: 1553227 - RNA, 19 nt, Homo sapiens
  misc_RNA (1)...(19): siRNA sense strand
ggaccucagagcaagaaca

SEQ ID NO: 1553228 - RNA, 19 nt, Homo sapiens
  misc_RNA (1)...(19): siRNA sense strand
caccugcauuccuauuauc

SEQ ID NO: 1553229 - RNA, 19 nt, Homo sapiens
  misc_RNA (1)...(19): siRNA sense strand
gcgcaacucaagaagaucu

SEQ ID NO: 1553230 - RNA, 19 nt, Homo sapiens
  misc_RNA (1)...(19): siRNA sense strand
aauaaacacuacggauguc

SEQ ID NO: 1553231 - RNA, 19 nt, Homo sapiens
  misc_RNA (1)...(19): siRNA sense strand
gcgauuaaggaggaucuga

SEQ ID NO: 1553232 - RNA, 19 nt, Homo sapiens
  misc_RNA (1)...(19): siRNA sense strand
uauccucuacuuuaccaaa

SEQ ID NO: 1553233 - RNA, 19 nt, Homo sapiens
  misc_RNA (1)...(19): siRNA sense strand
gccaccaacuggaacuuuu

SEQ ID NO: 1553234 - RNA, 19 nt, Homo sapiens
  misc_RNA (1)...(19): siRNA sense strand
ucgcuggcauugugaugau

SEQ ID NO: 1553235 - RNA, 19 nt, Homo sapiens
  misc_RNA (1)...(19): siRNA sense strand
ccaaggagcugugaaauaa

SEQ ID NO: 1553236 - RNA, 19 nt, Homo sapiens
  misc_RNA (1)...(19): siRNA sense strand
gaaauuaaccuacaagaga

SEQ ID NO: 1553237 - RNA, 19 nt, Homo sapiens
  misc_RNA (1)...(19): siRNA sense strand
gaagaaaguuauacuggaa

SEQ ID NO: 1553238 - RNA, 19 nt, Homo sapiens
  misc_RNA (1)...(19): siRNA sense strand
gcaaagggcucgcaugcaa

SEQ ID NO: 1553239 - RNA, 19 nt, Homo sapiens
  misc_RNA (1)...(19): siRNA sense strand
caagacaccuuuaccaauu

SEQ ID NO: 1553240 - RNA, 19 nt, Homo sapiens
  misc_RNA (1)...(19): siRNA sense strand
gaggaaacgucuucaugua

SEQ ID NO: 1553241 - RNA, 19 nt, Homo sapiens
  misc_RNA (1)...(19): siRNA sense strand
acucaaagcugcacacaua

SEQ ID NO: 1553242 - RNA, 19 nt, Homo sapiens
  misc_RNA (1)...(19): siRNA sense strand
ggagagugcugguguguga

SEQ ID NO: 1553243 - RNA, 19 nt, Homo sapiens
  misc_RNA (1)...(19): siRNA sense strand
gaaauaaagugcccauguc

SEQ ID NO: 1553244 - RNA, 19 nt, Homo sapiens
  misc_RNA (1)...(19): siRNA sense strand
ggaggagccuggcgcauuu

SEQ ID NO: 1553245 - RNA, 19 nt, Homo sapiens
  misc_RNA (1)...(19): siRNA sense strand
gcaaaccuauggugccuuu

SEQ ID NO: 1553246 - RNA, 19 nt, Homo sapiens
  misc_RNA (1)...(19): siRNA sense strand
ggaugaggcuggccaagaa

SEQ ID NO: 1553247 - RNA, 19 nt, Homo sapiens
  misc_RNA (1)...(19): siRNA sense strand
caaaggcugugaagcaauu

SEQ ID NO: 1553248 - RNA, 19 nt, Homo sapiens
  misc_RNA (1)...(19): siRNA sense strand
ccaaagcgauguccaagga

SEQ ID NO: 1553249 - RNA, 19 nt, Homo sapiens
  misc_RNA (1)...(19): siRNA sense strand
caauggaaaucaaucacua

SEQ ID NO: 1553250 - RNA, 19 nt, Homo sapiens
  misc_RNA (1)...(19): siRNA sense strand
gcacaagaggcacauuuaa

SEQ ID NO: 1553251 - RNA, 19 nt, Homo sapiens
  misc_RNA (1)...(19): siRNA sense strand
ggaagcaaguggaccaguu

SEQ ID NO: 1553252 - RNA, 19 nt, Homo sapiens
  misc_RNA (1)...(19): siRNA sense strand
gggauuagauucaaauucu

SEQ ID NO: 1553253 - RNA, 19 nt, Homo sapiens
  misc_RNA (1)...(19): siRNA sense strand
gaauucagaugugcaguga

SEQ ID NO: 1553254 - RNA, 19 nt, Homo sapiens
  misc_RNA (1)...(19): siRNA sense strand
ccagagauuuccugugauu

SEQ ID NO: 1553255 - RNA, 19 nt, Homo sapiens
  misc_RNA (1)...(19): siRNA sense strand
gaaucucucugcucagcua

SEQ ID NO: 1553256 - RNA, 19 nt, Homo sapiens
  misc_RNA (1)...(19): siRNA sense strand
ccaaagagacuccagcaaa

SEQ ID NO: 1553257 - RNA, 19 nt, Homo sapiens
  misc_RNA (1)...(19): siRNA sense strand
ugacaugucucacucugaa

SEQ ID NO: 1553258 - RNA, 19 nt, Homo sapiens
  misc_RNA (1)...(19): siRNA sense strand
gaggagaggugacaugucu

SEQ ID NO: 1553259 - RNA, 19 nt, Homo sapiens
  misc_RNA (1)...(19): siRNA sense strand
gcacuccuuuggcacauuu

SEQ ID NO: 1553260 - RNA, 19 nt, Homo sapiens
  misc_RNA (1)...(19): siRNA sense strand
cagaagauguggcaagaga

SEQ ID NO: 1553261 - RNA, 19 nt, Homo sapiens
  misc_RNA (1)...(19): siRNA sense strand
uaagaaggaugguacuaug

SEQ ID NO: 1553262 - RNA, 19 nt, Homo sapiens
  misc_RNA (1)...(19): siRNA sense strand
ggaacaauccugugugaga

SEQ ID NO: 1553263 - RNA, 19 nt, Homo sapiens
  misc_RNA (1)...(19): siRNA sense strand
gauccaaaguuccugauuc

SEQ ID NO: 1553264 - RNA, 19 nt, Homo sapiens
  misc_RNA (1)...(19): siRNA sense strand
ggaaacuucagucucuuua

SEQ ID NO: 1553265 - RNA, 19 nt, Homo sapiens
  misc_RNA (1)...(19): siRNA sense strand
ggaaaucaaucacuaucca

SEQ ID NO: 1553266 - RNA, 19 nt, Homo sapiens
  misc_RNA (1)...(19): siRNA sense strand
aaacaugcuuucuggauug

SEQ ID NO: 1553267 - RNA, 19 nt, Homo sapiens
  misc_RNA (1)...(19): siRNA sense strand
ccacagacaugaugauuuu

SEQ ID NO: 1553268 - RNA, 19 nt, Homo sapiens
  misc_RNA (1)...(19): siRNA sense strand
gaaaucccaacuacccuua

SEQ ID NO: 1553269 - RNA, 19 nt, Homo sapiens
  misc_RNA (1)...(19): siRNA sense strand
gccaagaacuggaaggaau

SEQ ID NO: 1553270 - RNA, 19 nt, Homo sapiens
  misc_RNA (1)...(19): siRNA sense strand
gaagauguggcaagagauu

SEQ ID NO: 1553271 - RNA, 19 nt, Homo sapiens
  misc_RNA (1)...(19): siRNA sense strand
ccaguguccugcuuuguaa

SEQ ID NO: 1553272 - RNA, 19 nt, Homo sapiens
  misc_RNA (1)...(19): siRNA sense strand
gaaggaugguacuaugaau

SEQ ID NO: 1553273 - RNA, 19 nt, Homo sapiens
  misc_RNA (1)...(19): siRNA sense strand
cuaaauguuucccaguuaa

SEQ ID NO: 1553274 - RNA, 19 nt, Homo sapiens
  misc_RNA (1)...(19): siRNA sense strand
ucuaaauguuucccaguua

SEQ ID NO: 1553275 - RNA, 19 nt, Homo sapiens
  misc_RNA (1)...(19): siRNA sense strand
gaccaggaguucaucaaga

SEQ ID NO: 1553276 - RNA, 19 nt, Homo sapiens
  misc_RNA (1)...(19): siRNA sense strand
gaaccaaaaugcccucaaa

SEQ ID NO: 1553277 - RNA, 19 nt, Homo sapiens
  misc_RNA (1)...(19): siRNA sense strand
gaaaguacccacauuugca

SEQ ID NO: 1553278 - RNA, 19 nt, Homo sapiens
  misc_RNA (1)...(19): siRNA sense strand
cagugaagauuguuuguau

SEQ ID NO: 1553279 - RNA, 19 nt, Homo sapiens
  misc_RNA (1)...(19): siRNA sense strand
gcucaccucuucugucuuc

SEQ ID NO: 1553280 - RNA, 19 nt, Homo sapiens
  misc_RNA (1)...(19): siRNA sense strand
ggacugggaugcguuaagu

SEQ ID NO: 1553281 - RNA, 19 nt, Homo sapiens
  misc_RNA (1)...(19): siRNA sense strand
gaagccauccgagcaauuu

SEQ ID NO: 1553282 - RNA, 19 nt, Homo sapiens
  misc_RNA (1)...(19): siRNA sense strand
gaucugggcuaagagaaga

SEQ ID NO: 1553283 - RNA, 19 nt, Homo sapiens
  misc_RNA (1)...(19): siRNA sense strand
gagcaaaggcugugaagca

SEQ ID NO: 1553284 - RNA, 19 nt, Homo sapiens
  misc_RNA (1)...(19): siRNA sense strand
ucaaggaggugccaucauc

SEQ ID NO: 1553285 - RNA, 19 nt, Homo sapiens
  misc_RNA (1)...(19): siRNA sense strand
gaauccggcugaggaauga

SEQ ID NO: 1553286 - RNA, 19 nt, Homo sapiens
  misc_RNA (1)...(19): siRNA sense strand
ugagaagguuccagaauca

SEQ ID NO: 1553287 - RNA, 19 nt, Homo sapiens
  misc_RNA (1)...(19): siRNA sense strand
ggacagagccaacaguuuu

SEQ ID NO: 1553288 - RNA, 19 nt, Homo sapiens
  misc_RNA (1)...(19): siRNA sense strand
gggauauccauuagaaaua

SEQ ID NO: 1553289 - RNA, 19 nt, Homo sapiens
  misc_RNA (1)...(19): siRNA sense strand
ccacaacacuucagaaacg

SEQ ID NO: 1553290 - RNA, 19 nt, Homo sapiens
  misc_RNA (1)...(19): siRNA sense strand
ggcaagagauuuaggugau

SEQ ID NO: 1553291 - RNA, 19 nt, Homo sapiens
  misc_RNA (1)...(19): siRNA sense strand
caaagagacuccagcaaaa

SEQ ID NO: 1553292 - RNA, 19 nt, Homo sapiens
  misc_RNA (1)...(19): siRNA sense strand
gcagguuuaucucuggaaa

SEQ ID NO: 1553293 - RNA, 19 nt, Homo sapiens
  misc_RNA (1)...(19): siRNA sense strand
caggugauauugcgucuug

SEQ ID NO: 1553294 - RNA, 19 nt, Homo sapiens
  misc_RNA (1)...(19): siRNA sense strand
ccaaaguuccugauucuga

SEQ ID NO: 1553295 - RNA, 19 nt, Homo sapiens
  misc_RNA (1)...(19): siRNA sense strand
ggugaauguuggccaguuu

SEQ ID NO: 1553296 - RNA, 19 nt, Homo sapiens
  misc_RNA (1)...(19): siRNA sense strand
ccaaguacaucucgucucu

SEQ ID NO: 1553297 - RNA, 19 nt, Homo sapiens
  misc_RNA (1)...(19): siRNA sense strand
gaucaggaaaucccaacua

SEQ ID NO: 1553298 - RNA, 19 nt, Homo sapiens
  misc_RNA (1)...(19): siRNA sense strand
gcuggcggauguucaguuu

SEQ ID NO: 1553299 - RNA, 19 nt, Homo sapiens
  misc_RNA (1)...(19): siRNA sense strand
gccaccaacucccaacuuu

SEQ ID NO: 1553300 - RNA, 19 nt, Homo sapiens
  misc_RNA (1)...(19): siRNA sense strand
gaggagccauggucaagau

SEQ ID NO: 1553301 - RNA, 19 nt, Homo sapiens
  misc_RNA (1)...(19): siRNA sense strand
gcugucagauccaaaguuc

SEQ ID NO: 1553302 - RNA, 19 nt, Homo sapiens
  misc_RNA (1)...(19): siRNA sense strand
gaagcuauucccaagauga

SEQ ID NO: 1553303 - RNA, 19 nt, Homo sapiens
  misc_RNA (1)...(19): siRNA sense strand
caggcuagaucccaagaaa

SEQ ID NO: 1553304 - RNA, 19 nt, Homo sapiens
  misc_RNA (1)...(19): siRNA sense strand
gaucaugagcuacagagaa

SEQ ID NO: 1553305 - RNA, 19 nt, Homo sapiens
  misc_RNA (1)...(19): siRNA sense strand
ucagagugcuacuguguug

SEQ ID NO: 1553306 - RNA, 19 nt, Homo sapiens
  misc_RNA (1)...(19): siRNA sense strand
gagcaggucuucgaguugu

SEQ ID NO: 1553307 - RNA, 19 nt, Homo sapiens
  misc_RNA (1)...(19): siRNA sense strand
uaacagagagugcauccuu

SEQ ID NO: 1553308 - RNA, 19 nt, Homo sapiens
  misc_RNA (1)...(19): siRNA sense strand
gaagagauuguuucagcuu

SEQ ID NO: 1553309 - RNA, 19 nt, Homo sapiens
  misc_RNA (1)...(19): siRNA sense strand
gaagauaaagugaagaacu

SEQ ID NO: 1553310 - RNA, 19 nt, Homo sapiens
  misc_RNA (1)...(19): siRNA sense strand
gccagcaucuccaacagaa

SEQ ID NO: 1553311 - RNA, 19 nt, Homo sapiens
  misc_RNA (1)...(19): siRNA sense strand
ugagacagguuuggaguug

SEQ ID NO: 1553312 - RNA, 19 nt, Homo sapiens
  misc_RNA (1)...(19): siRNA sense strand
gcagaaguuugagaagguu

SEQ ID NO: 1553313 - RNA, 19 nt, Homo sapiens
  misc_RNA (1)...(19): siRNA sense strand
gaaggauucuaccaagucu

SEQ ID NO: 1553314 - RNA, 19 nt, Homo sapiens
  misc_RNA (1)...(19): siRNA sense strand
acaauacccuucucugcaa

SEQ ID NO: 1553315 - RNA, 19 nt, Homo sapiens
  misc_RNA (1)...(19): siRNA sense strand
uuacugaguggcuacauua

SEQ ID NO: 1553316 - RNA, 19 nt, Homo sapiens
  misc_RNA (1)...(19): siRNA sense strand
gcaagagauuuaggugaug

SEQ ID NO: 1553317 - RNA, 19 nt, Homo sapiens
  misc_RNA (1)...(19): siRNA sense strand
ucaaauuccuugcuucucu

SEQ ID NO: 1553318 - RNA, 19 nt, Homo sapiens
  misc_RNA (1)...(19): siRNA sense strand
gaagcaauuugaggaaagu

SEQ ID NO: 1553319 - RNA, 19 nt, Homo sapiens
  misc_RNA (1)...(19): siRNA sense strand
agccagagauuuccuguga

SEQ ID NO: 1553320 - RNA, 19 nt, Homo sapiens
  misc_RNA (1)...(19): siRNA sense strand
cgacggagccagagauuuc

SEQ ID NO: 1553321 - RNA, 19 nt, Homo sapiens
  misc_RNA (1)...(19): siRNA sense strand
guggaacaauccuguguga

SEQ ID NO: 1553322 - RNA, 19 nt, Homo sapiens
  misc_RNA (1)...(19): siRNA sense strand
uagugaagaucaugagcua

SEQ ID NO: 1553323 - RNA, 19 nt, Homo sapiens
  misc_RNA (1)...(19): siRNA sense strand
gaugggaggcucagaacaa

SEQ ID NO: 1553324 - RNA, 19 nt, Homo sapiens
  misc_RNA (1)...(19): siRNA sense strand
agauuuaggugaugugaug

SEQ ID NO: 1553325 - RNA, 19 nt, Homo sapiens
  misc_RNA (1)...(19): siRNA sense strand
uacaacagguuuccagaug

SEQ ID NO: 1553326 - RNA, 19 nt, Homo sapiens
  misc_RNA (1)...(19): siRNA sense strand
cggccaauaucuucgagua

SEQ ID NO: 1553327 - RNA, 19 nt, Homo sapiens
  misc_RNA (1)...(19): siRNA sense strand
cuggaaagauucugacaug

SEQ ID NO: 1553328 - RNA, 19 nt, Homo sapiens
  misc_RNA (1)...(19): siRNA sense strand
ggaggugguugguggaaca

SEQ ID NO: 1553329 - RNA, 19 nt, Homo sapiens
  misc_RNA (1)...(19): siRNA sense strand
gggcagcuuuggcuuugaa

SEQ ID NO: 1553330 - RNA, 19 nt, Homo sapiens
  misc_RNA (1)...(19): siRNA sense strand
uagggaagcccaagaaaug

SEQ ID NO: 1553331 - RNA, 19 nt, Homo sapiens
  misc_RNA (1)...(19): siRNA sense strand
gcugugagauguauguucu

SEQ ID NO: 1553332 - RNA, 19 nt, Homo sapiens
  misc_RNA (1)...(19): siRNA sense strand
ggccaaggauccaccacaa

SEQ ID NO: 1553333 - RNA, 19 nt, Homo sapiens
  misc_RNA (1)...(19): siRNA sense strand
gauccagaguggcucauuc

SEQ ID NO: 1553334 - RNA, 19 nt, Homo sapiens
  misc_RNA (1)...(19): siRNA sense strand
ugacuuacaugacauugag

SEQ ID NO: 1553335 - RNA, 19 nt, Homo sapiens
  misc_RNA (1)...(19): siRNA sense strand
ggaaaccuauuuggaauua

SEQ ID NO: 1553336 - RNA, 19 nt, Homo sapiens
  misc_RNA (1)...(19): siRNA sense strand
gaagucugcuuauugguuu

SEQ ID NO: 1553337 - RNA, 19 nt, Homo sapiens
  misc_RNA (1)...(19): siRNA sense strand
guacaaagacugagacaaa

SEQ ID NO: 1553338 - RNA, 19 nt, Homo sapiens
  misc_RNA (1)...(19): siRNA sense strand
caaaggcccugaagaaguu

SEQ ID NO: 1553339 - RNA, 19 nt, Homo sapiens
  misc_RNA (1)...(19): siRNA sense strand
gcuguaguuuggucaauua

SEQ ID NO: 1553340 - RNA, 19 nt, Homo sapiens
  misc_RNA (1)...(19): siRNA sense strand
gcacguuggucauggcuuu

SEQ ID NO: 1553341 - RNA, 19 nt, Homo sapiens
  misc_RNA (1)...(19): siRNA sense strand
gcaguugccugggacauuu

SEQ ID NO: 1553342 - RNA, 19 nt, Homo sapiens
  misc_RNA (1)...(19): siRNA sense strand
ggaggaaaccuauuuggaa

SEQ ID NO: 1553343 - RNA, 19 nt, Homo sapiens
  misc_RNA (1)...(19): siRNA sense strand
gaggaaaccuauuuggaau

SEQ ID NO: 1553344 - RNA, 19 nt, Homo sapiens
  misc_RNA (1)...(19): siRNA sense strand
caaguggucuuccucuuug

SEQ ID NO: 1553345 - RNA, 19 nt, Homo sapiens
  misc_RNA (1)...(19): siRNA sense strand
gaauggauguguugacagu

SEQ ID NO: 1553346 - RNA, 19 nt, Homo sapiens
  misc_RNA (1)...(19): siRNA sense strand
gcacaggaggagacaguua

SEQ ID NO: 1553347 - RNA, 19 nt, Homo sapiens
  misc_RNA (1)...(19): siRNA sense strand
ggucauggcuuuccuugca

SEQ ID NO: 1553348 - RNA, 19 nt, Homo sapiens
  misc_RNA (1)...(19): siRNA sense strand
gcaacuggaucuguucuug

SEQ ID NO: 1553349 - RNA, 19 nt, Homo sapiens
  misc_RNA (1)...(19): siRNA sense strand
gcucuacugucuuuaaugu

SEQ ID NO: 1553350 - RNA, 19 nt, Homo sapiens
  misc_RNA (1)...(19): siRNA sense strand
aaacuuguguguaagagaa

SEQ ID NO: 1553351 - RNA, 19 nt, Homo sapiens
  misc_RNA (1)...(19): siRNA sense strand
gagcagagguaucuauugc

SEQ ID NO: 1553352 - RNA, 19 nt, Homo sapiens
  misc_RNA (1)...(19): siRNA sense strand
ggaggaggcuaugguguug

SEQ ID NO: 1553353 - RNA, 19 nt, Homo sapiens
  misc_RNA (1)...(19): siRNA sense strand
uuaaagggcguuuguguaa

SEQ ID NO: 1553354 - RNA, 19 nt, Homo sapiens
  misc_RNA (1)...(19): siRNA sense strand
gcucaaagguauagaugca

SEQ ID NO: 1553355 - RNA, 19 nt, Homo sapiens
  misc_RNA (1)...(19): siRNA sense strand
ccaauuggaagucugcuua

SEQ ID NO: 1553356 - RNA, 19 nt, Homo sapiens
  misc_RNA (1)...(19): siRNA sense strand
ucaaagguauagaugcaaa

SEQ ID NO: 1553357 - RNA, 19 nt, Homo sapiens
  misc_RNA (1)...(19): siRNA sense strand
gcagagguaucuauugcau

SEQ ID NO: 1553358 - RNA, 19 nt, Homo sapiens
  misc_RNA (1)...(19): siRNA sense strand
uuaugaagcucaaagguau

SEQ ID NO: 1553359 - RNA, 19 nt, Homo sapiens
  misc_RNA (1)...(19): siRNA sense strand
caucauuggugguaaacuu

SEQ ID NO: 1553360 - RNA, 19 nt, Homo sapiens
  misc_RNA (1)...(19): siRNA sense strand
ugaagcaaaucacguacaa

SEQ ID NO: 1553361 - RNA, 19 nt, Homo sapiens
  misc_RNA (1)...(19): siRNA sense strand
ggaagucugcuuauugguu

SEQ ID NO: 1553362 - RNA, 19 nt, Homo sapiens
  misc_RNA (1)...(19): siRNA sense strand
gagagaaacaauuagaaga

SEQ ID NO: 1553363 - RNA, 19 nt, Homo sapiens
  misc_RNA (1)...(19): siRNA sense strand
gcaaaugaaccaacagaag

SEQ ID NO: 1553364 - RNA, 19 nt, Homo sapiens
  misc_RNA (1)...(19): siRNA sense strand
gugcacaucugcucuucuu

SEQ ID NO: 1553365 - RNA, 19 nt, Homo sapiens
  misc_RNA (1)...(19): siRNA sense strand
aaagggcguuuguguaaga

SEQ ID NO: 1553366 - RNA, 19 nt, Homo sapiens
  misc_RNA (1)...(19): siRNA sense strand
gaaguuaaagggcguuugu

SEQ ID NO: 1553367 - RNA, 19 nt, Homo sapiens
  misc_RNA (1)...(19): siRNA sense strand
ccacugccuucucuucuug

SEQ ID NO: 1553368 - RNA, 19 nt, Homo sapiens
  misc_RNA (1)...(19): siRNA sense strand
guuaugaagcucaaaggua

SEQ ID NO: 1553369 - RNA, 19 nt, Homo sapiens
  misc_RNA (1)...(19): siRNA sense strand
gcaaaucacguacaaagac

SEQ ID NO: 1553370 - RNA, 19 nt, Homo sapiens
  misc_RNA (1)...(19): siRNA sense strand
uaagagaacauuccuugug

SEQ ID NO: 1553371 - RNA, 19 nt, Homo sapiens
  misc_RNA (1)...(19): siRNA sense strand
ggacagggucauaacaaau

SEQ ID NO: 1553372 - RNA, 19 nt, Homo sapiens
  misc_RNA (1)...(19): siRNA sense strand
gaaccaacagaaggaagua

SEQ ID NO: 1553373 - RNA, 19 nt, Homo sapiens
  misc_RNA (1)...(19): siRNA sense strand
ggagagaaacaauuagaag

SEQ ID NO: 1553374 - RNA, 19 nt, Homo sapiens
  misc_RNA (1)...(19): siRNA sense strand
gaaauaucccagucaucaa

SEQ ID NO: 1553375 - RNA, 19 nt, Homo sapiens
  misc_RNA (1)...(19): siRNA sense strand
guaguuuggucaauuacug

SEQ ID NO: 1553376 - RNA, 19 nt, Homo sapiens
  misc_RNA (1)...(19): siRNA sense strand
caagaaacaccaacugaag

SEQ ID NO: 1553377 - RNA, 19 nt, Homo sapiens
  misc_RNA (1)...(19): siRNA sense strand
guuaaagggcguuugugua

SEQ ID NO: 1553378 - RNA, 19 nt, Homo sapiens
  misc_RNA (1)...(19): siRNA sense strand
aagagaacauuccuugugu

SEQ ID NO: 1553379 - RNA, 19 nt, Homo sapiens
  misc_RNA (1)...(19): siRNA sense strand
acauggagagaaacaauua

SEQ ID NO: 1553380 - RNA, 19 nt, Homo sapiens
  misc_RNA (1)...(19): siRNA sense strand
guccaugggucccuguauu

SEQ ID NO: 1553381 - RNA, 19 nt, Homo sapiens
  misc_RNA (1)...(19): siRNA sense strand
gagaaacaauuagaagacu

SEQ ID NO: 1553382 - RNA, 19 nt, Homo sapiens
  misc_RNA (1)...(19): siRNA sense strand
agaaauaucccagucauca

SEQ ID NO: 1553383 - RNA, 19 nt, Homo sapiens
  misc_RNA (1)...(19): siRNA sense strand
gacagggucauaacaaaug

SEQ ID NO: 1553384 - RNA, 19 nt, Homo sapiens
  misc_RNA (1)...(19): siRNA sense strand
agguauagaugcaaaugaa

SEQ ID NO: 1553385 - RNA, 19 nt, Homo sapiens
  misc_RNA (1)...(19): siRNA sense strand
aauaggaucuguggcuuug

SEQ ID NO: 1553386 - RNA, 19 nt, Homo sapiens
  misc_RNA (1)...(19): siRNA sense strand
gccuuggucuggauucaaa

SEQ ID NO: 1553387 - RNA, 19 nt, Homo sapiens
  misc_RNA (1)...(19): siRNA sense strand
cguaggcauugcaguauug

SEQ ID NO: 1553388 - RNA, 19 nt, Homo sapiens
  misc_RNA (1)...(19): siRNA sense strand
caaaucacguacaaagacu

SEQ ID NO: 1553389 - RNA, 19 nt, Homo sapiens
  misc_RNA (1)...(19): siRNA sense strand
gaaaagauaauugcaguug

SEQ ID NO: 1553390 - RNA, 19 nt, Homo sapiens
  misc_RNA (1)...(19): siRNA sense strand
cagcuucgaugacauucug

SEQ ID NO: 1553391 - RNA, 19 nt, Homo sapiens
  misc_RNA (1)...(19): siRNA sense strand
ucagaaauaucccagucau

SEQ ID NO: 1553392 - RNA, 19 nt, Homo sapiens
  misc_RNA (1)...(19): siRNA sense strand
uggacagggucauaacaaa

SEQ ID NO: 1553393 - RNA, 19 nt, Homo sapiens
  misc_RNA (1)...(19): siRNA sense strand
agagguaucuauugcaucu

SEQ ID NO: 1553394 - RNA, 19 nt, Homo sapiens
  misc_RNA (1)...(19): siRNA sense strand
ucacuggcuucaacacaug

SEQ ID NO: 1553395 - RNA, 19 nt, Homo sapiens
  misc_RNA (1)...(19): siRNA sense strand
gggaggaggcuaugguguu

SEQ ID NO: 1553396 - RNA, 19 nt, Homo sapiens
  misc_RNA (1)...(19): siRNA sense strand
cugcucuucuugcccauua

SEQ ID NO: 1553397 - RNA, 19 nt, Homo sapiens
  misc_RNA (1)...(19): siRNA sense strand
acaaguggucuuccucuuu

SEQ ID NO: 1553398 - RNA, 19 nt, Homo sapiens
  misc_RNA (1)...(19): siRNA sense strand
uacaaagacugagacaaau

SEQ ID NO: 1553399 - RNA, 19 nt, Homo sapiens
  misc_RNA (1)...(19): siRNA sense strand
agaagacuauggaauggau

SEQ ID NO: 1553400 - RNA, 19 nt, Homo sapiens
  misc_RNA (1)...(19): siRNA sense strand
ucucagaccagaaacugua

SEQ ID NO: 1553401 - RNA, 19 nt, Homo sapiens
  misc_RNA (1)...(19): siRNA sense strand
ggagcagagguaucuauug

SEQ ID NO: 1553402 - RNA, 19 nt, Homo sapiens
  misc_RNA (1)...(19): siRNA sense strand
gaaggaaguauucuuuuga

SEQ ID NO: 1553403 - RNA, 19 nt, Homo sapiens
  misc_RNA (1)...(19): siRNA sense strand
ucaaaggcccugaagaagu

SEQ ID NO: 1553404 - RNA, 19 nt, Homo sapiens
  misc_RNA (1)...(19): siRNA sense strand
aaacaccaacugaagcaaa

SEQ ID NO: 1553405 - RNA, 19 nt, Homo sapiens
  misc_RNA (1)...(19): siRNA sense strand
acaauuagaagacuaugga

SEQ ID NO: 1553406 - RNA, 19 nt, Homo sapiens
  misc_RNA (1)...(19): siRNA sense strand
caggaggacugugcacguu

SEQ ID NO: 1553407 - RNA, 19 nt, Homo sapiens
  misc_RNA (1)...(19): siRNA sense strand
ggaggagacaguuaugaag

SEQ ID NO: 1553408 - RNA, 19 nt, Homo sapiens
  misc_RNA (1)...(19): siRNA sense strand
ugcagaaaguugaacauca

SEQ ID NO: 1553409 - RNA, 19 nt, Homo sapiens
  misc_RNA (1)...(19): siRNA sense strand
caauaggaucuguggcuuu

SEQ ID NO: 1553410 - RNA, 19 nt, Homo sapiens
  misc_RNA (1)...(19): siRNA sense strand
aggcauugcaguauugaua

SEQ ID NO: 1553411 - RNA, 19 nt, Homo sapiens
  misc_RNA (1)...(19): siRNA sense strand
acaagaaacaccaacugaa

SEQ ID NO: 1553412 - RNA, 19 nt, Homo sapiens
  misc_RNA (1)...(19): siRNA sense strand
gaagcucaaagguauagau

SEQ ID NO: 1553413 - RNA, 19 nt, Homo sapiens
  misc_RNA (1)...(19): siRNA sense strand
aaggucacauggagagaaa

SEQ ID NO: 1553414 - RNA, 19 nt, Homo sapiens
  misc_RNA (1)...(19): siRNA sense strand
gaaacuguaggccuuugug

SEQ ID NO: 1553415 - RNA, 19 nt, Homo sapiens
  misc_RNA (1)...(19): siRNA sense strand
ucccagucaucaacgauaa

SEQ ID NO: 1553416 - RNA, 19 nt, Homo sapiens
  misc_RNA (1)...(19): siRNA sense strand
cauuucugaugguguguuu

SEQ ID NO: 1553417 - RNA, 19 nt, Homo sapiens
  misc_RNA (1)...(19): siRNA sense strand
caccguaggcauugcagua

SEQ ID NO: 1553418 - RNA, 19 nt, Homo sapiens
  misc_RNA (1)...(19): siRNA sense strand
acgauaaugugcagaucaa

SEQ ID NO: 1553419 - RNA, 19 nt, Homo sapiens
  misc_RNA (1)...(19): siRNA sense strand
caacgauaaugugcagauc

SEQ ID NO: 1553420 - RNA, 19 nt, Homo sapiens
  misc_RNA (1)...(19): siRNA sense strand
ggcagagguugaaaagaua

SEQ ID NO: 1553421 - RNA, 19 nt, Homo sapiens
  misc_RNA (1)...(19): siRNA sense strand
uaggaucuguggcuuugga

SEQ ID NO: 1553422 - RNA, 19 nt, Homo sapiens
  misc_RNA (1)...(19): siRNA sense strand
gcaucucucagaccagaaa

SEQ ID NO: 1553423 - RNA, 19 nt, Homo sapiens
  misc_RNA (1)...(19): siRNA sense strand
gaagcaaaucacguacaaa

SEQ ID NO: 1553424 - RNA, 19 nt, Homo sapiens
  misc_RNA (1)...(19): siRNA sense strand
agacaguuaugaagcucaa

SEQ ID NO: 1553425 - RNA, 19 nt, Homo sapiens
  misc_RNA (1)...(19): siRNA sense strand
uacaagaaacaccaacuga

SEQ ID NO: 1553426 - RNA, 19 nt, Homo sapiens
  misc_RNA (1)...(19): siRNA sense strand
ucacauggagagaaacaau

SEQ ID NO: 1553427 - RNA, 19 nt, Homo sapiens
  misc_RNA (1)...(19): siRNA sense strand
gaagaaguucaaggagaga

SEQ ID NO: 1553428 - RNA, 19 nt, Homo sapiens
  misc_RNA (1)...(19): siRNA sense strand
aagcaaaucacguacaaag

SEQ ID NO: 1553429 - RNA, 19 nt, Homo sapiens
  misc_RNA (1)...(19): siRNA sense strand
aggagagacuucugugcaa

SEQ ID NO: 1553430 - RNA, 19 nt, Homo sapiens
  misc_RNA (1)...(19): siRNA sense strand
cagaaacuguaggccuuug

SEQ ID NO: 1553431 - RNA, 19 nt, Homo sapiens
  misc_RNA (1)...(19): siRNA sense strand
cuggaucuguucuuggauu

SEQ ID NO: 1553432 - RNA, 19 nt, Homo sapiens
  misc_RNA (1)...(19): siRNA sense strand
ggcuguaguuuggucaauu

SEQ ID NO: 1553433 - RNA, 19 nt, Homo sapiens
  misc_RNA (1)...(19): siRNA sense strand
ucugugggcuguaguuugg

SEQ ID NO: 1553434 - RNA, 19 nt, Homo sapiens
  misc_RNA (1)...(19): siRNA sense strand
uggaauggauguguugaca

SEQ ID NO: 1553435 - RNA, 19 nt, Homo sapiens
  misc_RNA (1)...(19): siRNA sense strand
gagccaauacgaagagaag

SEQ ID NO: 1553436 - RNA, 19 nt, Homo sapiens
  misc_RNA (1)...(19): siRNA sense strand
gagcacugccgccacuaug

SEQ ID NO: 1553437 - RNA, 19 nt, Homo sapiens
  misc_RNA (1)...(19): siRNA sense strand
gcagagccaauacgaagag

SEQ ID NO: 1553438 - RNA, 19 nt, Homo sapiens
  misc_RNA (1)...(19): siRNA sense strand
gccaauacgaagagaagga

SEQ ID NO: 1553439 - RNA, 19 nt, Homo sapiens
  misc_RNA (1)...(19): siRNA sense strand
gcuccuccuuccucagcuu

SEQ ID NO: 1553440 - RNA, 19 nt, Homo sapiens
  misc_RNA (1)...(19): siRNA sense strand
gaccgugcguggagagaaa

SEQ ID NO: 1553441 - RNA, 19 nt, Homo sapiens
  misc_RNA (1)...(19): siRNA sense strand
gagaaaggccaagcugaug

SEQ ID NO: 1553442 - RNA, 19 nt, Homo sapiens
  misc_RNA (1)...(19): siRNA sense strand
agaaaggccaagcugauga

SEQ ID NO: 1553443 - RNA, 19 nt, Homo sapiens
  misc_RNA (1)...(19): siRNA sense strand
agagaaaggccaagcugau

SEQ ID NO: 1553444 - RNA, 19 nt, Homo sapiens
  misc_RNA (1)...(19): siRNA sense strand
gaaaggccaagcugaugac

SEQ ID NO: 1553445 - RNA, 19 nt, Homo sapiens
  misc_RNA (1)...(19): siRNA sense strand
ggaccgugcguggagagaa

SEQ ID NO: 1553446 - RNA, 19 nt, Homo sapiens
  misc_RNA (1)...(19): siRNA sense strand
gaaauuacggcuacagaaa

SEQ ID NO: 1553447 - RNA, 19 nt, Homo sapiens
  misc_RNA (1)...(19): siRNA sense strand
gaagaucacccgggaaauu

SEQ ID NO: 1553448 - RNA, 19 nt, Homo sapiens
  misc_RNA (1)...(19): siRNA sense strand
cuacagaaaugguacauca

SEQ ID NO: 1553449 - RNA, 19 nt, Homo sapiens
  misc_RNA (1)...(19): siRNA sense strand
gggaaauuguucagauuau

SEQ ID NO: 1553450 - RNA, 19 nt, Homo sapiens
  misc_RNA (1)...(19): siRNA sense strand
ggaaauacuuggccuuuug

SEQ ID NO: 1553451 - RNA, 19 nt, Homo sapiens
  misc_RNA (1)...(19): siRNA sense strand
ggaaauuacggcuacagaa

SEQ ID NO: 1553452 - RNA, 19 nt, Homo sapiens
  misc_RNA (1)...(19): siRNA sense strand
ggaaggagcuaaaacuugu

SEQ ID NO: 1553453 - RNA, 19 nt, Homo sapiens
  misc_RNA (1)...(19): siRNA sense strand
uggagcugcuggacaaaua

SEQ ID NO: 1553454 - RNA, 19 nt, Homo sapiens
  misc_RNA (1)...(19): siRNA sense strand
uagagauugugcaucguua

SEQ ID NO: 1553455 - RNA, 19 nt, Homo sapiens
  misc_RNA (1)...(19): siRNA sense strand
gauaaagagaggaagaaga

SEQ ID NO: 1553456 - RNA, 19 nt, Homo sapiens
  misc_RNA (1)...(19): siRNA sense strand
cgggaaauuguucagauua

SEQ ID NO: 1553457 - RNA, 19 nt, Homo sapiens
  misc_RNA (1)...(19): siRNA sense strand
ccgggaaauuguucagauu

SEQ ID NO: 1553458 - RNA, 19 nt, Homo sapiens
  misc_RNA (1)...(19): siRNA sense strand
ggucacaggacaagcaguu

SEQ ID NO: 1553459 - RNA, 19 nt, Homo sapiens
  misc_RNA (1)...(19): siRNA sense strand
auaaagagaggaagaagau

SEQ ID NO: 1553460 - RNA, 19 nt, Homo sapiens
  misc_RNA (1)...(19): siRNA sense strand
aaagagaggaagaagauca

SEQ ID NO: 1553461 - RNA, 19 nt, Homo sapiens
  misc_RNA (1)...(19): siRNA sense strand
aauuacggcuacagaaaug

SEQ ID NO: 1553462 - RNA, 19 nt, Homo sapiens
  misc_RNA (1)...(19): siRNA sense strand
aagaagaucacccgggaaa

SEQ ID NO: 1553463 - RNA, 19 nt, Homo sapiens
  misc_RNA (1)...(19): siRNA sense strand
ucaggacaaugagcucuug

SEQ ID NO: 1553464 - RNA, 19 nt, Homo sapiens
  misc_RNA (1)...(19): siRNA sense strand
uagaaaaucaggacaauga

SEQ ID NO: 1553465 - RNA, 19 nt, Homo sapiens
  misc_RNA (1)...(19): siRNA sense strand
gagcugcuggacaaauauu

SEQ ID NO: 1553466 - RNA, 19 nt, Homo sapiens
  misc_RNA (1)...(19): siRNA sense strand
gggaaauuacggcuacaga

SEQ ID NO: 1553467 - RNA, 19 nt, Homo sapiens
  misc_RNA (1)...(19): siRNA sense strand
gaucacccgggaaauuguu

SEQ ID NO: 1553468 - RNA, 19 nt, Homo sapiens
  misc_RNA (1)...(19): siRNA sense strand
ucacucucccugauaaaga

SEQ ID NO: 1553469 - RNA, 19 nt, Homo sapiens
  misc_RNA (1)...(19): siRNA sense strand
cauuucauauugcucuuca

SEQ ID NO: 1553470 - RNA, 19 nt, Homo sapiens
  misc_RNA (1)...(19): siRNA sense strand
aaauuacggcuacagaaau

SEQ ID NO: 1553471 - RNA, 19 nt, Homo sapiens
  misc_RNA (1)...(19): siRNA sense strand
ggagcugcuggacaaauau

SEQ ID NO: 1553472 - RNA, 19 nt, Homo sapiens
  misc_RNA (1)...(19): siRNA sense strand
acguggagcugcuggacaa

SEQ ID NO: 1553473 - RNA, 19 nt, Homo sapiens
  misc_RNA (1)...(19): siRNA sense strand
aagaucacccgggaaauug

SEQ ID NO: 1553474 - RNA, 19 nt, Homo sapiens
  misc_RNA (1)...(19): siRNA sense strand
ucuugacgcuagagauugu

SEQ ID NO: 1553475 - RNA, 19 nt, Homo sapiens
  misc_RNA (1)...(19): siRNA sense strand
cuagagauugugcaucguu

SEQ ID NO: 1553476 - RNA, 19 nt, Homo sapiens
  misc_RNA (1)...(19): siRNA sense strand
cccgggaaauuguucagau

SEQ ID NO: 1553477 - RNA, 19 nt, Homo sapiens
  misc_RNA (1)...(19): siRNA sense strand
ggacaaagcuacacagaca

SEQ ID NO: 1553478 - RNA, 19 nt, Homo sapiens
  misc_RNA (1)...(19): siRNA sense strand
caacuuauaccgcaagaua

SEQ ID NO: 1553479 - RNA, 19 nt, Homo sapiens
  misc_RNA (1)...(19): siRNA sense strand
ggaauagcguggaaggauu

SEQ ID NO: 1553480 - RNA, 19 nt, Homo sapiens
  misc_RNA (1)...(19): siRNA sense strand
ugaggaagcugaaggauag

SEQ ID NO: 1553481 - RNA, 19 nt, Homo sapiens
  misc_RNA (1)...(19): siRNA sense strand
caaaacagcuucaugaaau

SEQ ID NO: 1553482 - RNA, 19 nt, Homo sapiens
  misc_RNA (1)...(19): siRNA sense strand
gaagaaagggucucacaag

SEQ ID NO: 1553483 - RNA, 19 nt, Homo sapiens
  misc_RNA (1)...(19): siRNA sense strand
aaaggaagagcaacuuaua

SEQ ID NO: 1553484 - RNA, 19 nt, Homo sapiens
  misc_RNA (1)...(19): siRNA sense strand
guacagaucaacuuaagga

SEQ ID NO: 1553485 - RNA, 19 nt, Homo sapiens
  misc_RNA (1)...(19): siRNA sense strand
gugcaugggcugaagaaua

SEQ ID NO: 1553486 - RNA, 19 nt, Homo sapiens
  misc_RNA (1)...(19): siRNA sense strand
cggaugaccugcuuguuga

SEQ ID NO: 1553487 - RNA, 19 nt, Homo sapiens
  misc_RNA (1)...(19): siRNA sense strand
gcugaagaauacucugaaa

SEQ ID NO: 1553488 - RNA, 19 nt, Homo sapiens
  misc_RNA (1)...(19): siRNA sense strand
ccaaagagugcacuuauuc

SEQ ID NO: 1553489 - RNA, 19 nt, Homo sapiens
  misc_RNA (1)...(19): siRNA sense strand
caacaucguuccucaccau

SEQ ID NO: 1553490 - RNA, 19 nt, Homo sapiens
  misc_RNA (1)...(19): siRNA sense strand
cagaucaacuuaaggagau

SEQ ID NO: 1553491 - RNA, 19 nt, Homo sapiens
  misc_RNA (1)...(19): siRNA sense strand
gcacuuauuccuguaauuc

SEQ ID NO: 1553492 - RNA, 19 nt, Homo sapiens
  misc_RNA (1)...(19): siRNA sense strand
gaagaauacucugaaaaga

SEQ ID NO: 1553493 - RNA, 19 nt, Homo sapiens
  misc_RNA (1)...(19): siRNA sense strand
gaaaaggaagagcaacuua

SEQ ID NO: 1553494 - RNA, 19 nt, Homo sapiens
  misc_RNA (1)...(19): siRNA sense strand
gaauagcguggaaggauug

SEQ ID NO: 1553495 - RNA, 19 nt, Homo sapiens
  misc_RNA (1)...(19): siRNA sense strand
gcaguacagaucaacuuaa

SEQ ID NO: 1553496 - RNA, 19 nt, Homo sapiens
  misc_RNA (1)...(19): siRNA sense strand
gugaaagggucaaagucuu

SEQ ID NO: 1553497 - RNA, 19 nt, Homo sapiens
  misc_RNA (1)...(19): siRNA sense strand
uaaagagaaugggaacaau

SEQ ID NO: 1553498 - RNA, 19 nt, Homo sapiens
  misc_RNA (1)...(19): siRNA sense strand
gcaaccaugcagcuauuaa

SEQ ID NO: 1553499 - RNA, 19 nt, Homo sapiens
  misc_RNA (1)...(19): siRNA sense strand
ucaucgagauaaagaaaga

SEQ ID NO: 1553500 - RNA, 19 nt, Homo sapiens
  misc_RNA (1)...(19): siRNA sense strand
gccaucagcuucucuacuc

SEQ ID NO: 1553501 - RNA, 19 nt, Homo sapiens
  misc_RNA (1)...(19): siRNA sense strand
gcggaugaccugcuuguug

SEQ ID NO: 1553502 - RNA, 19 nt, Homo sapiens
  misc_RNA (1)...(19): siRNA sense strand
guaauucccaucaccaaau

SEQ ID NO: 1553503 - RNA, 19 nt, Homo sapiens
  misc_RNA (1)...(19): siRNA sense strand
caucguuccucaccauuuc

SEQ ID NO: 1553504 - RNA, 19 nt, Homo sapiens
  misc_RNA (1)...(19): siRNA sense strand
gcuguggccucccugucua

SEQ ID NO: 1553505 - RNA, 19 nt, Homo sapiens
  misc_RNA (1)...(19): siRNA sense strand
ggcaguacagaucaacuua

SEQ ID NO: 1553506 - RNA, 19 nt, Homo sapiens
  misc_RNA (1)...(19): siRNA sense strand
caucaucgagauaaagaaa

SEQ ID NO: 1553507 - RNA, 19 nt, Homo sapiens
  misc_RNA (1)...(19): siRNA sense strand
caguacagaucaacuuaag

SEQ ID NO: 1553508 - RNA, 19 nt, Homo sapiens
  misc_RNA (1)...(19): siRNA sense strand
aaagagaaugggaacaauu

SEQ ID NO: 1553509 - RNA, 19 nt, Homo sapiens
  misc_RNA (1)...(19): siRNA sense strand
ucccagagauaaagagaau

SEQ ID NO: 1553510 - RNA, 19 nt, Homo sapiens
  misc_RNA (1)...(19): siRNA sense strand
uccaaagagugcacuuauu

SEQ ID NO: 1553511 - RNA, 19 nt, Homo sapiens
  misc_RNA (1)...(19): siRNA sense strand
cacaagcgcucagcaucuu

SEQ ID NO: 1553512 - RNA, 19 nt, Homo sapiens
  misc_RNA (1)...(19): siRNA sense strand
uggcaaccaugcagcuauu

SEQ ID NO: 1553513 - RNA, 19 nt, Homo sapiens
  misc_RNA (1)...(19): siRNA sense strand
cuacaaacacagagcaaga

SEQ ID NO: 1553514 - RNA, 19 nt, Homo sapiens
  misc_RNA (1)...(19): siRNA sense strand
caacuuaaggagauugcaa

SEQ ID NO: 1553515 - RNA, 19 nt, Homo sapiens
  misc_RNA (1)...(19): siRNA sense strand
ugcaugggcugaagaauac

SEQ ID NO: 1553516 - RNA, 19 nt, Homo sapiens
  misc_RNA (1)...(19): siRNA sense strand
uggccucccugucuacaaa

SEQ ID NO: 1553517 - RNA, 19 nt, Homo sapiens
  misc_RNA (1)...(19): siRNA sense strand
gggaacaauucuccuuugc

SEQ ID NO: 1553518 - RNA, 19 nt, Homo sapiens
  misc_RNA (1)...(19): siRNA sense strand
uaauucccaucaccaaauc

SEQ ID NO: 1553519 - RNA, 19 nt, Homo sapiens
  misc_RNA (1)...(19): siRNA sense strand
ugggaacaauucuccuuug

SEQ ID NO: 1553520 - RNA, 19 nt, Homo sapiens
  misc_RNA (1)...(19): siRNA sense strand
gggcugaagaauacucuga

SEQ ID NO: 1553521 - RNA, 19 nt, Homo sapiens
  misc_RNA (1)...(19): siRNA sense strand
gagagugcaugggcugaag

SEQ ID NO: 1553522 - RNA, 19 nt, Homo sapiens
  misc_RNA (1)...(19): siRNA sense strand
gagugcacuuauuccugua

SEQ ID NO: 1553523 - RNA, 19 nt, Homo sapiens
  misc_RNA (1)...(19): siRNA sense strand
cgccagcaguugcagagaa

SEQ ID NO: 1553524 - RNA, 19 nt, Homo sapiens
  misc_RNA (1)...(19): siRNA sense strand
gggcaguacagaucaacuu

SEQ ID NO: 1553525 - RNA, 19 nt, Homo sapiens
  misc_RNA (1)...(19): siRNA sense strand
cagcaguugcagagaagua

SEQ ID NO: 1553526 - RNA, 19 nt, Homo sapiens
  misc_RNA (1)...(19): siRNA sense strand
gcagcacgcgcagcauuga

SEQ ID NO: 1553527 - RNA, 19 nt, Homo sapiens
  misc_RNA (1)...(19): siRNA sense strand
gcaguugcagagaaguaaa

SEQ ID NO: 1553528 - RNA, 19 nt, Homo sapiens
  misc_RNA (1)...(19): siRNA sense strand
cgaggaacaaguacaguca

SEQ ID NO: 1553529 - RNA, 19 nt, Homo sapiens
  misc_RNA (1)...(19): siRNA sense strand
ccagagauaaagagaaugg

SEQ ID NO: 1553530 - RNA, 19 nt, Homo sapiens
  misc_RNA (1)...(19): siRNA sense strand
ccaaaacagcuucaugaaa

SEQ ID NO: 1553531 - RNA, 19 nt, Homo sapiens
  misc_RNA (1)...(19): siRNA sense strand
gccagcaguugcagagaag

SEQ ID NO: 1553532 - RNA, 19 nt, Homo sapiens
  misc_RNA (1)...(19): siRNA sense strand
gaucccagagauaaagaga

SEQ ID NO: 1553533 - RNA, 19 nt, Homo sapiens
  misc_RNA (1)...(19): siRNA sense strand
guuccaaagagugcacuua

SEQ ID NO: 1553534 - RNA, 19 nt, Homo sapiens
  misc_RNA (1)...(19): siRNA sense strand
ggcaucaucgagauaaaga

SEQ ID NO: 1553535 - RNA, 19 nt, Homo sapiens
  misc_RNA (1)...(19): siRNA sense strand
acaaagcuacacagacaga

SEQ ID NO: 1553536 - RNA, 19 nt, Homo sapiens
  misc_RNA (1)...(19): siRNA sense strand
aggaacaaguacagucaug

SEQ ID NO: 1553537 - RNA, 19 nt, Homo sapiens
  misc_RNA (1)...(19): siRNA sense strand
auaaagagaaugggaacaa

SEQ ID NO: 1553538 - RNA, 19 nt, Homo sapiens
  misc_RNA (1)...(19): siRNA sense strand
cgagauaaagaaagacagu

SEQ ID NO: 1553539 - RNA, 19 nt, Homo sapiens
  misc_RNA (1)...(19): siRNA sense strand
uugaggaagcugaaggaua

SEQ ID NO: 1553540 - RNA, 19 nt, Homo sapiens
  misc_RNA (1)...(19): siRNA sense strand
gaggaaugcucgccaaaac

SEQ ID NO: 1553541 - RNA, 19 nt, Homo sapiens
  misc_RNA (1)...(19): siRNA sense strand
uagcagcacgcgcagcauu

SEQ ID NO: 1553542 - RNA, 19 nt, Homo sapiens
  misc_RNA (1)...(19): siRNA sense strand
gcugugaaagggucaaagu

SEQ ID NO: 1553543 - RNA, 19 nt, Homo sapiens
  misc_RNA (1)...(19): siRNA sense strand
agaagaaagggucucacaa

SEQ ID NO: 1553544 - RNA, 19 nt, Homo sapiens
  misc_RNA (1)...(19): siRNA sense strand
agaauacucugaaaagaag

SEQ ID NO: 1553545 - RNA, 19 nt, Homo sapiens
  misc_RNA (1)...(19): siRNA sense strand
gaaaucccagccuuuuauu

SEQ ID NO: 1553546 - RNA, 19 nt, Homo sapiens
  misc_RNA (1)...(19): siRNA sense strand
ucaugaaaucccagccuuu

SEQ ID NO: 1553547 - RNA, 19 nt, Homo sapiens
  misc_RNA (1)...(19): siRNA sense strand
ucacaagcgcucagcaucu

SEQ ID NO: 1553548 - RNA, 19 nt, Homo sapiens
  misc_RNA (1)...(19): siRNA sense strand
acuuauaccgcaagauauu

SEQ ID NO: 1553549 - RNA, 19 nt, Homo sapiens
  misc_RNA (1)...(19): siRNA sense strand
uaaagagacuggggaaaag

SEQ ID NO: 1553550 - RNA, 19 nt, Homo sapiens
  misc_RNA (1)...(19): siRNA sense strand
gugcacuuauuccuguaau

SEQ ID NO: 1553551 - RNA, 19 nt, Homo sapiens
  misc_RNA (1)...(19): siRNA sense strand
cggaauagcguggaaggau

SEQ ID NO: 1553552 - RNA, 19 nt, Homo sapiens
  misc_RNA (1)...(19): siRNA sense strand
gcuuguugaucccagagau

SEQ ID NO: 1553553 - RNA, 19 nt, Homo sapiens
  misc_RNA (1)...(19): siRNA sense strand
ggcaaccaugcagcuauua

SEQ ID NO: 1553554 - RNA, 19 nt, Homo sapiens
  misc_RNA (1)...(19): siRNA sense strand
aauaugcaaccucaccaaa

SEQ ID NO: 1553555 - RNA, 19 nt, Homo sapiens
  misc_RNA (1)...(19): siRNA sense strand
gaucaacuuaaggagauug

SEQ ID NO: 1553556 - RNA, 19 nt, Homo sapiens
  misc_RNA (1)...(19): siRNA sense strand
gagugcaugggcugaagaa

SEQ ID NO: 1553557 - RNA, 19 nt, Homo sapiens
  misc_RNA (1)...(19): siRNA sense strand
gaacauaacugguuugaga

SEQ ID NO: 1553558 - RNA, 19 nt, Homo sapiens
  misc_RNA (1)...(19): siRNA sense strand
gaaagaaccuuccauuuau

SEQ ID NO: 1553559 - RNA, 19 nt, Homo sapiens
  misc_RNA (1)...(19): siRNA sense strand
ggaaguaucugcugucauu

SEQ ID NO: 1553560 - RNA, 19 nt, Homo sapiens
  misc_RNA (1)...(19): siRNA sense strand
gaagaaagccuguacaugu

SEQ ID NO: 1553561 - RNA, 19 nt, Homo sapiens
  misc_RNA (1)...(19): siRNA sense strand
guacaaagauucaaguguu

SEQ ID NO: 1553562 - RNA, 19 nt, Homo sapiens
  misc_RNA (1)...(19): siRNA sense strand
gggcuaaucuucuuauaaa

SEQ ID NO: 1553563 - RNA, 19 nt, Homo sapiens
  misc_RNA (1)...(19): siRNA sense strand
gaacccaucuguuggaauu

SEQ ID NO: 1553564 - RNA, 19 nt, Homo sapiens
  misc_RNA (1)...(19): siRNA sense strand
gcacuacuauguggaaaua

SEQ ID NO: 1553565 - RNA, 19 nt, Homo sapiens
  misc_RNA (1)...(19): siRNA sense strand
gaaagacgauuaagacgau

SEQ ID NO: 1553566 - RNA, 19 nt, Homo sapiens
  misc_RNA (1)...(19): siRNA sense strand
ggaagaagcagaacagaaa

SEQ ID NO: 1553567 - RNA, 19 nt, Homo sapiens
  misc_RNA (1)...(19): siRNA sense strand
gcacaugaaugacuucuuc

SEQ ID NO: 1553568 - RNA, 19 nt, Homo sapiens
  misc_RNA (1)...(19): siRNA sense strand
gcaauuccauccaucauga

SEQ ID NO: 1553569 - RNA, 19 nt, Homo sapiens
  misc_RNA (1)...(19): siRNA sense strand
ggaauaugcugacaagguu

SEQ ID NO: 1553570 - RNA, 19 nt, Homo sapiens
  misc_RNA (1)...(19): siRNA sense strand
caagaaggcuggaauaucu

SEQ ID NO: 1553571 - RNA, 19 nt, Homo sapiens
  misc_RNA (1)...(19): siRNA sense strand
gauggaugcucuacgaaua

SEQ ID NO: 1553572 - RNA, 19 nt, Homo sapiens
  misc_RNA (1)...(19): siRNA sense strand
gcaugcagcucuuugguaa

SEQ ID NO: 1553573 - RNA, 19 nt, Homo sapiens
  misc_RNA (1)...(19): siRNA sense strand
gcaaagagaaacugaauga

SEQ ID NO: 1553574 - RNA, 19 nt, Homo sapiens
  misc_RNA (1)...(19): siRNA sense strand
ugaagaagcucucagaugu

SEQ ID NO: 1553575 - RNA, 19 nt, Homo sapiens
  misc_RNA (1)...(19): siRNA sense strand
cagaagaacagaagaaaua

SEQ ID NO: 1553576 - RNA, 19 nt, Homo sapiens
  misc_RNA (1)...(19): siRNA sense strand
gaaauuaaaccacuugaug

SEQ ID NO: 1553577 - RNA, 19 nt, Homo sapiens
  misc_RNA (1)...(19): siRNA sense strand
gaacaaccacugaaacuga

SEQ ID NO: 1553578 - RNA, 19 nt, Homo sapiens
  misc_RNA (1)...(19): siRNA sense strand
ggaaacagaugaccagagu

SEQ ID NO: 1553579 - RNA, 19 nt, Homo sapiens
  misc_RNA (1)...(19): siRNA sense strand
ggaggaacauaguauagaa

SEQ ID NO: 1553580 - RNA, 19 nt, Homo sapiens
  misc_RNA (1)...(19): siRNA sense strand
ccauggauccuuacuauua

SEQ ID NO: 1553581 - RNA, 19 nt, Homo sapiens
  misc_RNA (1)...(19): siRNA sense strand
gccaaucacuacuacuuua

SEQ ID NO: 1553582 - RNA, 19 nt, Homo sapiens
  misc_RNA (1)...(19): siRNA sense strand
uuaagacgauguuggaaua

SEQ ID NO: 1553583 - RNA, 19 nt, Homo sapiens
  misc_RNA (1)...(19): siRNA sense strand
gcacgcugcucuuugcuuu

SEQ ID NO: 1553584 - RNA, 19 nt, Homo sapiens
  misc_RNA (1)...(19): siRNA sense strand
gaagacgauuucagucauu

SEQ ID NO: 1553585 - RNA, 19 nt, Homo sapiens
  misc_RNA (1)...(19): siRNA sense strand
gaagaaaucggaggaagaa

SEQ ID NO: 1553586 - RNA, 19 nt, Homo sapiens
  misc_RNA (1)...(19): siRNA sense strand
gcacaaaggaguagcuuau

SEQ ID NO: 1553587 - RNA, 19 nt, Homo sapiens
  misc_RNA (1)...(19): siRNA sense strand
caaaggaugugggaucuga

SEQ ID NO: 1553588 - RNA, 19 nt, Homo sapiens
  misc_RNA (1)...(19): siRNA sense strand
aagaaagccuguacaugua

SEQ ID NO: 1553589 - RNA, 19 nt, Homo sapiens
  misc_RNA (1)...(19): siRNA sense strand
aggaguagcuuaugugaaa

SEQ ID NO: 1553590 - RNA, 19 nt, Homo sapiens
  misc_RNA (1)...(19): siRNA sense strand
ugacggaccauuucaauaa

SEQ ID NO: 1553591 - RNA, 19 nt, Homo sapiens
  misc_RNA (1)...(19): siRNA sense strand
gaucuugacuaucuuaaag

SEQ ID NO: 1553592 - RNA, 19 nt, Homo sapiens
  misc_RNA (1)...(19): siRNA sense strand
gaugacauguucaacuuug

SEQ ID NO: 1553593 - RNA, 19 nt, Homo sapiens
  misc_RNA (1)...(19): siRNA sense strand
gaucagcgaaagacgauua

SEQ ID NO: 1553594 - RNA, 19 nt, Homo sapiens
  misc_RNA (1)...(19): siRNA sense strand
ggacaaagaauguagauac

SEQ ID NO: 1553595 - RNA, 19 nt, Homo sapiens
  misc_RNA (1)...(19): siRNA sense strand
gcauauggcuaucaaacau

SEQ ID NO: 1553596 - RNA, 19 nt, Homo sapiens
  misc_RNA (1)...(19): siRNA sense strand
gguaaaagcuacaaagauu

SEQ ID NO: 1553597 - RNA, 19 nt, Homo sapiens
  misc_RNA (1)...(19): siRNA sense strand
guagaaaucccaauuaugg

SEQ ID NO: 1553598 - RNA, 19 nt, Homo sapiens
  misc_RNA (1)...(19): siRNA sense strand
ccacugucuugauaucuua

SEQ ID NO: 1553599 - RNA, 19 nt, Homo sapiens
  misc_RNA (1)...(19): siRNA sense strand
ggaagaaagcaaagagaaa

SEQ ID NO: 1553600 - RNA, 19 nt, Homo sapiens
  misc_RNA (1)...(19): siRNA sense strand
gaagaagcucucagaugua

SEQ ID NO: 1553601 - RNA, 19 nt, Homo sapiens
  misc_RNA (1)...(19): siRNA sense strand
gcaagaaggcaaagaugaa

SEQ ID NO: 1553602 - RNA, 19 nt, Homo sapiens
  misc_RNA (1)...(19): siRNA sense strand
ggacaucggcgcaccugua

SEQ ID NO: 1553603 - RNA, 19 nt, Homo sapiens
  misc_RNA (1)...(19): siRNA sense strand
caccaucuguauugucuua

SEQ ID NO: 1553604 - RNA, 19 nt, Homo sapiens
  misc_RNA (1)...(19): siRNA sense strand
gcaauggugugguuuccuu

SEQ ID NO: 1553605 - RNA, 19 nt, Homo sapiens
  misc_RNA (1)...(19): siRNA sense strand
gcaacugccucagaacauu

SEQ ID NO: 1553606 - RNA, 19 nt, Homo sapiens
  misc_RNA (1)...(19): siRNA sense strand
ugugaaagcugguagaaau

SEQ ID NO: 1553607 - RNA, 19 nt, Homo sapiens
  misc_RNA (1)...(19): siRNA sense strand
gaauaugugacuaccauuu

SEQ ID NO: 1553608 - RNA, 19 nt, Homo sapiens
  misc_RNA (1)...(19): siRNA sense strand
gcaguugauuccagaaaug

SEQ ID NO: 1553609 - RNA, 19 nt, Homo sapiens
  misc_RNA (1)...(19): siRNA sense strand
cagcaaaugccuuggguua

SEQ ID NO: 1553610 - RNA, 19 nt, Homo sapiens
  misc_RNA (1)...(19): siRNA sense strand
uuugagaccuucauuguuu

SEQ ID NO: 1553611 - RNA, 19 nt, Homo sapiens
  misc_RNA (1)...(19): siRNA sense strand
ggaauaucuuugacgguuu

SEQ ID NO: 1553612 - RNA, 19 nt, Homo sapiens
  misc_RNA (1)...(19): siRNA sense strand
ccguagagauuccuuguuu

SEQ ID NO: 1553613 - RNA, 19 nt, Homo sapiens
  misc_RNA (1)...(19): siRNA sense strand
guaaugauccugacugugu

SEQ ID NO: 1553614 - RNA, 19 nt, Homo sapiens
  misc_RNA (1)...(19): siRNA sense strand
ugaaagugauuacauguca

SEQ ID NO: 1553615 - RNA, 19 nt, Homo sapiens
  misc_RNA (1)...(19): siRNA sense strand
ugaauaaucuccaaauugc

SEQ ID NO: 1553616 - RNA, 19 nt, Homo sapiens
  misc_RNA (1)...(19): siRNA sense strand
gaaagaugaggaugaauuc

SEQ ID NO: 1553617 - RNA, 19 nt, Homo sapiens
  misc_RNA (1)...(19): siRNA sense strand
aaacugaucugaccauguc

SEQ ID NO: 1553618 - RNA, 19 nt, Homo sapiens
  misc_RNA (1)...(19): siRNA sense strand
ggacuguucuccauauugg

SEQ ID NO: 1553619 - RNA, 19 nt, Homo sapiens
  misc_RNA (1)...(19): siRNA sense strand
ucgaagacgugaauaauca

SEQ ID NO: 1553620 - RNA, 19 nt, Homo sapiens
  misc_RNA (1)...(19): siRNA sense strand
ugaaugugcuucugguuug

SEQ ID NO: 1553621 - RNA, 19 nt, Homo sapiens
  misc_RNA (1)...(19): siRNA sense strand
gaacuuggagccaucaaau

SEQ ID NO: 1553622 - RNA, 19 nt, Homo sapiens
  misc_RNA (1)...(19): siRNA sense strand
gcccaaagccaaauaguga

SEQ ID NO: 1553623 - RNA, 19 nt, Homo sapiens
  misc_RNA (1)...(19): siRNA sense strand
cuucugagcucauuuagug

SEQ ID NO: 1553624 - RNA, 19 nt, Homo sapiens
  misc_RNA (1)...(19): siRNA sense strand
gggaaccgauugacauaug

SEQ ID NO: 1553625 - RNA, 19 nt, Homo sapiens
  misc_RNA (1)...(19): siRNA sense strand
caucauauccuuccugguu

SEQ ID NO: 1553626 - RNA, 19 nt, Homo sapiens
  misc_RNA (1)...(19): siRNA sense strand
gacauaagcaucaugauuc

SEQ ID NO: 1553627 - RNA, 19 nt, Homo sapiens
  misc_RNA (1)...(19): siRNA sense strand
aaacauauuucaccaaugc

SEQ ID NO: 1553628 - RNA, 19 nt, Homo sapiens
  misc_RNA (1)...(19): siRNA sense strand
gcucuggcauuugaagaua

SEQ ID NO: 1553629 - RNA, 19 nt, Homo sapiens
  misc_RNA (1)...(19): siRNA sense strand
ucaaaucaauguggaagaa

SEQ ID NO: 1553630 - RNA, 19 nt, Homo sapiens
  misc_RNA (1)...(19): siRNA sense strand
ugaaggcuguguacaaaga

SEQ ID NO: 1553631 - RNA, 19 nt, Homo sapiens
  misc_RNA (1)...(19): siRNA sense strand
ugggaaagaucuugacuau

SEQ ID NO: 1553632 - RNA, 19 nt, Homo sapiens
  misc_RNA (1)...(19): siRNA sense strand
ggucaagccaugugccuua

SEQ ID NO: 1553633 - RNA, 19 nt, Homo sapiens
  misc_RNA (1)...(19): siRNA sense strand
uggaagaacuugaagaauc

SEQ ID NO: 1553634 - RNA, 19 nt, Homo sapiens
  misc_RNA (1)...(19): siRNA sense strand
ggaaccgauugacauauga

SEQ ID NO: 1553635 - RNA, 19 nt, Homo sapiens
  misc_RNA (1)...(19): siRNA sense strand
aagaagcucucagauguaa

SEQ ID NO: 1553636 - RNA, 19 nt, Homo sapiens
  misc_RNA (1)...(19): siRNA sense strand
gaggaugacuuugagaugu

SEQ ID NO: 1553637 - RNA, 19 nt, Homo sapiens
  misc_RNA (1)...(19): siRNA sense strand
gccuguacauguaucuuua

SEQ ID NO: 1553638 - RNA, 19 nt, Homo sapiens
  misc_RNA (1)...(19): siRNA sense strand
ugucuuauauucuggcuaa

SEQ ID NO: 1553639 - RNA, 19 nt, Homo sapiens
  misc_RNA (1)...(19): siRNA sense strand
uggcuggacuucuuaauug

SEQ ID NO: 1553640 - RNA, 19 nt, Homo sapiens
  misc_RNA (1)...(19): siRNA sense strand
ccacugaugaugauaauga

SEQ ID NO: 1553641 - RNA, 19 nt, Homo sapiens
  misc_RNA (1)...(19): siRNA sense strand
ucaauaaugugcuuacagu

SEQ ID NO: 1553642 - RNA, 19 nt, Homo sapiens
  misc_RNA (1)...(19): siRNA sense strand
gaguauagccagcauucua

SEQ ID NO: 1553643 - RNA, 19 nt, Homo sapiens
  misc_RNA (1)...(19): siRNA sense strand
gcacagcaccuuugaggau

SEQ ID NO: 1553644 - RNA, 19 nt, Homo sapiens
  misc_RNA (1)...(19): siRNA sense strand
caagagugcuaaggaaaga

SEQ ID NO: 1553645 - RNA, 19 nt, Homo sapiens
  misc_RNA (1)...(19): siRNA sense strand
gcagaugauugaacagcuu

SEQ ID NO: 1553646 - RNA, 19 nt, Homo sapiens
  misc_RNA (1)...(19): siRNA sense strand
gcucucagauguaaugauc

SEQ ID NO: 1553647 - RNA, 19 nt, Homo sapiens
  misc_RNA (1)...(19): siRNA sense strand
acagaaagaggccgaauuu

SEQ ID NO: 1553648 - RNA, 19 nt, Homo sapiens
  misc_RNA (1)...(19): siRNA sense strand
gaagacgugaauaaucaua

SEQ ID NO: 1553649 - RNA, 19 nt, Homo sapiens
  misc_RNA (1)...(19): siRNA sense strand
gaaacugaaaugagaaaga

SEQ ID NO: 1553650 - RNA, 19 nt, Homo sapiens
  misc_RNA (1)...(19): siRNA sense strand
uaacaaauacaguggaaga

SEQ ID NO: 1553651 - RNA, 19 nt, Homo sapiens
  misc_RNA (1)...(19): siRNA sense strand
cggauccacugucuugaua

SEQ ID NO: 1553652 - RNA, 19 nt, Homo sapiens
  misc_RNA (1)...(19): siRNA sense strand
gaacuucaguguugcuacu

SEQ ID NO: 1553653 - RNA, 19 nt, Homo sapiens
  misc_RNA (1)...(19): siRNA sense strand
uauaauguaugcagcaguu

SEQ ID NO: 1553654 - RNA, 19 nt, Homo sapiens
  misc_RNA (1)...(19): siRNA sense strand
gcaaaugccuuggguuacu

SEQ ID NO: 1553655 - RNA, 19 nt, Homo sapiens
  misc_RNA (1)...(19): siRNA sense strand
gaaagcaaagagaaacuga

SEQ ID NO: 1553656 - RNA, 19 nt, Homo sapiens
  misc_RNA (1)...(19): siRNA sense strand
ggaagaacuugaagaaucc

SEQ ID NO: 1553657 - RNA, 19 nt, Homo sapiens
  misc_RNA (1)...(19): siRNA sense strand
gaaaucaaggucaagaaua

SEQ ID NO: 1553658 - RNA, 19 nt, Homo sapiens
  misc_RNA (1)...(19): siRNA sense strand
gcaacaaccucaccuguca

SEQ ID NO: 1553659 - RNA, 19 nt, Homo sapiens
  misc_RNA (1)...(19): siRNA sense strand
gguaggagguguauacuuc

SEQ ID NO: 1553660 - RNA, 19 nt, Homo sapiens
  misc_RNA (1)...(19): siRNA sense strand
uggaauaccugcccauuga

SEQ ID NO: 1553661 - RNA, 19 nt, Homo sapiens
  misc_RNA (1)...(19): siRNA sense strand
gaacgaggcguccacuuug

SEQ ID NO: 1553662 - RNA, 19 nt, Homo sapiens
  misc_RNA (1)...(19): siRNA sense strand
gugcuuaccuucuaugaug

SEQ ID NO: 1553663 - RNA, 19 nt, Homo sapiens
  misc_RNA (1)...(19): siRNA sense strand
gacuggaucucuuuccuuu

SEQ ID NO: 1553664 - RNA, 19 nt, Homo sapiens
  misc_RNA (1)...(19): siRNA sense strand
gcaccuuccauuuccauua

SEQ ID NO: 1553665 - RNA, 19 nt, Homo sapiens
  misc_RNA (1)...(19): siRNA sense strand
cuaaaugucuccuggaaca

SEQ ID NO: 1553666 - RNA, 19 nt, Homo sapiens
  misc_RNA (1)...(19): siRNA sense strand
gcacagccgacgccucaua

SEQ ID NO: 1553667 - RNA, 19 nt, Homo sapiens
  misc_RNA (1)...(19): siRNA sense strand
caucucaccugucucaaug

SEQ ID NO: 1553668 - RNA, 19 nt, Homo sapiens
  misc_RNA (1)...(19): siRNA sense strand
gugaugugcuuaccuucua

SEQ ID NO: 1553669 - RNA, 19 nt, Homo sapiens
  misc_RNA (1)...(19): siRNA sense strand
gcauggcccugcgcuauga

SEQ ID NO: 1553670 - RNA, 19 nt, Homo sapiens
  misc_RNA (1)...(19): siRNA sense strand
agacucggcuggcguggua

SEQ ID NO: 1553671 - RNA, 19 nt, Homo sapiens
  misc_RNA (1)...(19): siRNA sense strand
ggccagcacuguccuuuca

SEQ ID NO: 1553672 - RNA, 19 nt, Homo sapiens
  misc_RNA (1)...(19): siRNA sense strand
ggaaaucaaggucaagaau

SEQ ID NO: 1553673 - RNA, 19 nt, Homo sapiens
  misc_RNA (1)...(19): siRNA sense strand
ggagauagccagcacuaca

SEQ ID NO: 1553674 - RNA, 19 nt, Homo sapiens
  misc_RNA (1)...(19): siRNA sense strand
caaaggagcccgucugcau

SEQ ID NO: 1553675 - RNA, 19 nt, Homo sapiens
  misc_RNA (1)...(19): siRNA sense strand
gcuaugagcccuuugucaa

SEQ ID NO: 1553676 - RNA, 19 nt, Homo sapiens
  misc_RNA (1)...(19): siRNA sense strand
gggccaccgugcaauauau

SEQ ID NO: 1553677 - RNA, 19 nt, Homo sapiens
  misc_RNA (1)...(19): siRNA sense strand
ggcuacaccugcacuuuga

SEQ ID NO: 1553678 - RNA, 19 nt, Homo sapiens
  misc_RNA (1)...(19): siRNA sense strand
gaagaggacaagcgcauca

SEQ ID NO: 1553679 - RNA, 19 nt, Homo sapiens
  misc_RNA (1)...(19): siRNA sense strand
gcuauggcguggaaaucaa

SEQ ID NO: 1553680 - RNA, 19 nt, Homo sapiens
  misc_RNA (1)...(19): siRNA sense strand
gcaggagacgagagaauau

SEQ ID NO: 1553681 - RNA, 19 nt, Homo sapiens
  misc_RNA (1)...(19): siRNA sense strand
cauugcagcugccaucuuc

SEQ ID NO: 1553682 - RNA, 19 nt, Homo sapiens
  misc_RNA (1)...(19): siRNA sense strand
cauaggcccuggugaugug

SEQ ID NO: 1553683 - RNA, 19 nt, Homo sapiens
  misc_RNA (1)...(19): siRNA sense strand
agaacgaggcguccacuuu

SEQ ID NO: 1553684 - RNA, 19 nt, Homo sapiens
  misc_RNA (1)...(19): siRNA sense strand
guccggagcugccugagau

SEQ ID NO: 1553685 - RNA, 19 nt, Homo sapiens
  misc_RNA (1)...(19): siRNA sense strand
gcucagcucuggcaaacac

SEQ ID NO: 1553686 - RNA, 19 nt, Homo sapiens
  misc_RNA (1)...(19): siRNA sense strand
ccacgauccuggagaugug

SEQ ID NO: 1553687 - RNA, 19 nt, Homo sapiens
  misc_RNA (1)...(19): siRNA sense strand
gauccaguguccucaugug

SEQ ID NO: 1553688 - RNA, 19 nt, Homo sapiens
  misc_RNA (1)...(19): siRNA sense strand
ccuuguagcuggaauuucu

SEQ ID NO: 1553689 - RNA, 19 nt, Homo sapiens
  misc_RNA (1)...(19): siRNA sense strand
gcagggccauugcuaugag

SEQ ID NO: 1553690 - RNA, 19 nt, Homo sapiens
  misc_RNA (1)...(19): siRNA sense strand
gguagugcccgcuuccauu

SEQ ID NO: 1553691 - RNA, 19 nt, Homo sapiens
  misc_RNA (1)...(19): siRNA sense strand
uaccauagagucagcguuu

SEQ ID NO: 1553692 - RNA, 19 nt, Homo sapiens
  misc_RNA (1)...(19): siRNA sense strand
uggcugaugucaccauuca

SEQ ID NO: 1553693 - RNA, 19 nt, Homo sapiens
  misc_RNA (1)...(19): siRNA sense strand
ccuggaugcugcccacauu

SEQ ID NO: 1553694 - RNA, 19 nt, Homo sapiens
  misc_RNA (1)...(19): siRNA sense strand
cuacaaccgcauuaccaua

SEQ ID NO: 1553695 - RNA, 19 nt, Homo sapiens
  misc_RNA (1)...(19): siRNA sense strand
uaggagguguauacuucua

SEQ ID NO: 1553696 - RNA, 19 nt, Homo sapiens
  misc_RNA (1)...(19): siRNA sense strand
guagugcccgcuuccauug

SEQ ID NO: 1553697 - RNA, 19 nt, Homo sapiens
  misc_RNA (1)...(19): siRNA sense strand
gggauccaguguccucaug

SEQ ID NO: 1553698 - RNA, 19 nt, Homo sapiens
  misc_RNA (1)...(19): siRNA sense strand
ggacugcuucuucuacauc

SEQ ID NO: 1553699 - RNA, 19 nt, Homo sapiens
  misc_RNA (1)...(19): siRNA sense strand
ucuccaggcuccagggaaa

SEQ ID NO: 1553700 - RNA, 19 nt, Homo sapiens
  misc_RNA (1)...(19): siRNA sense strand
ugucaaauacgguaacuuc

SEQ ID NO: 1553701 - RNA, 19 nt, Homo sapiens
  misc_RNA (1)...(19): siRNA sense strand
gcgcauaggcccuggugau

SEQ ID NO: 1553702 - RNA, 19 nt, Homo sapiens
  misc_RNA (1)...(19): siRNA sense strand
gaugaggagaccaccacua

SEQ ID NO: 1553703 - RNA, 19 nt, Homo sapiens
  misc_RNA (1)...(19): siRNA sense strand
ccauagagucagcguuuga

SEQ ID NO: 1553704 - RNA, 19 nt, Homo sapiens
  misc_RNA (1)...(19): siRNA sense strand
gcucacggacucucuuuag

SEQ ID NO: 1553705 - RNA, 19 nt, Homo sapiens
  misc_RNA (1)...(19): siRNA sense strand
cuccugagcugccacuuuc

SEQ ID NO: 1553706 - RNA, 19 nt, Homo sapiens
  misc_RNA (1)...(19): siRNA sense strand
gaggagaccaccacuacca

SEQ ID NO: 1553707 - RNA, 19 nt, Homo sapiens
  misc_RNA (1)...(19): siRNA sense strand
ugagaauggugcccgaagu

SEQ ID NO: 1553708 - RNA, 19 nt, Homo sapiens
  misc_RNA (1)...(19): siRNA sense strand
gcguggaaaucaaggucaa

SEQ ID NO: 1553709 - RNA, 19 nt, Homo sapiens
  misc_RNA (1)...(19): siRNA sense strand
cguuugacaauccaacuua

SEQ ID NO: 1553710 - RNA, 19 nt, Homo sapiens
  misc_RNA (1)...(19): siRNA sense strand
gcagggcuccaucaucauc

SEQ ID NO: 1553711 - RNA, 19 nt, Homo sapiens
  misc_RNA (1)...(19): siRNA sense strand
gcccuggcaccuuccauuu

SEQ ID NO: 1553712 - RNA, 19 nt, Homo sapiens
  misc_RNA (1)...(19): siRNA sense strand
caauccaacuuacgagacu

SEQ ID NO: 1553713 - RNA, 19 nt, Homo sapiens
  misc_RNA (1)...(19): siRNA sense strand
gguguauacuucuacuucu

SEQ ID NO: 1553714 - RNA, 19 nt, Homo sapiens
  misc_RNA (1)...(19): siRNA sense strand
ccauugcuaugagcccuuu

SEQ ID NO: 1553715 - RNA, 19 nt, Homo sapiens
  misc_RNA (1)...(19): siRNA sense strand
gcaucucaccugucucaau

SEQ ID NO: 1553716 - RNA, 19 nt, Homo sapiens
  misc_RNA (1)...(19): siRNA sense strand
ccaccaccaucaccacagu

SEQ ID NO: 1553717 - RNA, 19 nt, Homo sapiens
  misc_RNA (1)...(19): siRNA sense strand
ggagguguauacuucuacu

SEQ ID NO: 1553718 - RNA, 19 nt, Homo sapiens
  misc_RNA (1)...(19): siRNA sense strand
gcauaggcccuggugaugu

SEQ ID NO: 1553719 - RNA, 19 nt, Homo sapiens
  misc_RNA (1)...(19): siRNA sense strand
caguguaugauuccuauga

SEQ ID NO: 1553720 - RNA, 19 nt, Homo sapiens
  misc_RNA (1)...(19): siRNA sense strand
ggccuggacugcuucuucu

SEQ ID NO: 1553721 - RNA, 19 nt, Homo sapiens
  misc_RNA (1)...(19): siRNA sense strand
gagaauggugcccgaaguc

SEQ ID NO: 1553722 - RNA, 19 nt, Homo sapiens
  misc_RNA (1)...(19): siRNA sense strand
cccuaaaugucuccuggaa

SEQ ID NO: 1553723 - RNA, 19 nt, Homo sapiens
  misc_RNA (1)...(19): siRNA sense strand
agaggguccuggagacaug

SEQ ID NO: 1553724 - RNA, 19 nt, Homo sapiens
  misc_RNA (1)...(19): siRNA sense strand
caccuuccauuuccauuac

SEQ ID NO: 1553725 - RNA, 19 nt, Homo sapiens
  misc_RNA (1)...(19): siRNA sense strand
gccguggguugcagagguu

SEQ ID NO: 1553726 - RNA, 19 nt, Homo sapiens
  misc_RNA (1)...(19): siRNA sense strand
acaaccgcauuaccauaga

SEQ ID NO: 1553727 - RNA, 19 nt, Homo sapiens
  misc_RNA (1)...(19): siRNA sense strand
guggaauaccugcccauug

SEQ ID NO: 1553728 - RNA, 19 nt, Homo sapiens
  misc_RNA (1)...(19): siRNA sense strand
uuaccuccauggcugaugu

SEQ ID NO: 1553729 - RNA, 19 nt, Homo sapiens
  misc_RNA (1)...(19): siRNA sense strand
caaccgcauuaccauagag

SEQ ID NO: 1553730 - RNA, 19 nt, Homo sapiens
  misc_RNA (1)...(19): siRNA sense strand
gccagugggaccuaacuug

SEQ ID NO: 1553731 - RNA, 19 nt, Homo sapiens
  misc_RNA (1)...(19): siRNA sense strand
cggcuacaccugcacuuug

SEQ ID NO: 1553732 - RNA, 19 nt, Homo sapiens
  misc_RNA (1)...(19): siRNA sense strand
ugcaggagacgagagaaua

SEQ ID NO: 1553733 - RNA, 19 nt, Homo sapiens
  misc_RNA (1)...(19): siRNA sense strand
caucgcagccugagcuagu

SEQ ID NO: 1553734 - RNA, 19 nt, Homo sapiens
  misc_RNA (1)...(19): siRNA sense strand
gugguacucucucccaacu

SEQ ID NO: 1553735 - RNA, 19 nt, Homo sapiens
  misc_RNA (1)...(19): siRNA sense strand
ggucgugggcaggauugua

SEQ ID NO: 1553736 - RNA, 19 nt, Homo sapiens
  misc_RNA (1)...(19): siRNA sense strand
ucaaauacgguaacuucag

SEQ ID NO: 1553737 - RNA, 19 nt, Homo sapiens
  misc_RNA (1)...(19): siRNA sense strand
gaggccagcacuguccuuu

SEQ ID NO: 1553738 - RNA, 19 nt, Homo sapiens
  misc_RNA (1)...(19): siRNA sense strand
cuggugaugugcuuaccuu

SEQ ID NO: 1553739 - RNA, 19 nt, Homo sapiens
  misc_RNA (1)...(19): siRNA sense strand
gcccuuguagcuggaauuu

SEQ ID NO: 1553740 - RNA, 19 nt, Homo sapiens
  misc_RNA (1)...(19): siRNA sense strand
cuggaucucuuuccuuugc

SEQ ID NO: 1553741 - RNA, 19 nt, Homo sapiens
  misc_RNA (1)...(19): siRNA sense strand
guugguaggagguguauac

SEQ ID NO: 1553742 - RNA, 19 nt, Homo sapiens
  misc_RNA (1)...(19): siRNA sense strand
ugaugugcuuaccuucuau

SEQ ID NO: 1553743 - RNA, 19 nt, Homo sapiens
  misc_RNA (1)...(19): siRNA sense strand
ccagacaccaggcccuugu

SEQ ID NO: 1553744 - RNA, 19 nt, Homo sapiens
  misc_RNA (1)...(19): siRNA sense strand
uggcugcgguacccacuca

SEQ ID NO: 1553745 - RNA, 19 nt, Homo sapiens
  misc_RNA (1)...(19): siRNA sense strand
uggaaaggaugguguauua

SEQ ID NO: 1553746 - RNA, 19 nt, Homo sapiens
  misc_RNA (1)...(19): siRNA sense strand
gaacuuccuucuucucauu

SEQ ID NO: 1553747 - RNA, 19 nt, Homo sapiens
  misc_RNA (1)...(19): siRNA sense strand
gaaaggaugguguauuaaa

SEQ ID NO: 1553748 - RNA, 19 nt, Homo sapiens
  misc_RNA (1)...(19): siRNA sense strand
caacagacacuuucccuaa

SEQ ID NO: 1553749 - RNA, 19 nt, Homo sapiens
  misc_RNA (1)...(19): siRNA sense strand
gugcugaacuuccuucuuc

SEQ ID NO: 1553750 - RNA, 19 nt, Homo sapiens
  misc_RNA (1)...(19): siRNA sense strand
ggucgaggauuuggucuuu

SEQ ID NO: 1553751 - RNA, 19 nt, Homo sapiens
  misc_RNA (1)...(19): siRNA sense strand
aacagugucuuuggacuua

SEQ ID NO: 1553752 - RNA, 19 nt, Homo sapiens
  misc_RNA (1)...(19): siRNA sense strand
ggaaaggaugguguauuaa

SEQ ID NO: 1553753 - RNA, 19 nt, Homo sapiens
  misc_RNA (1)...(19): siRNA sense strand
cagugucuuuggacuuaua

SEQ ID NO: 1553754 - RNA, 19 nt, Homo sapiens
  misc_RNA (1)...(19): siRNA sense strand
ccgacagacuccacccuaa

SEQ ID NO: 1553755 - RNA, 19 nt, Homo sapiens
  misc_RNA (1)...(19): siRNA sense strand
guuauuacuuggcaugaca

SEQ ID NO: 1553756 - RNA, 19 nt, Homo sapiens
  misc_RNA (1)...(19): siRNA sense strand
aaaggaugguguauuaaac

SEQ ID NO: 1553757 - RNA, 19 nt, Homo sapiens
  misc_RNA (1)...(19): siRNA sense strand
uaaaccagccaaacagugu

SEQ ID NO: 1553758 - RNA, 19 nt, Homo sapiens
  misc_RNA (1)...(19): siRNA sense strand
guauuaaaccagccaaaca

SEQ ID NO: 1553759 - RNA, 19 nt, Homo sapiens
  misc_RNA (1)...(19): siRNA sense strand
gaaggaguucugcaucauc

SEQ ID NO: 1553760 - RNA, 19 nt, Homo sapiens
  misc_RNA (1)...(19): siRNA sense strand
guaccuggccuacauucug

SEQ ID NO: 1553761 - RNA, 19 nt, Homo sapiens
  misc_RNA (1)...(19): siRNA sense strand
cugaaggaguucugcauca

SEQ ID NO: 1553762 - RNA, 19 nt, Homo sapiens
  misc_RNA (1)...(19): siRNA sense strand
ucaucugcaucgucacgua

SEQ ID NO: 1553763 - RNA, 19 nt, Homo sapiens
  misc_RNA (1)...(19): siRNA sense strand
uaucaacuacaaacgacua

SEQ ID NO: 1553764 - RNA, 19 nt, Homo sapiens
  misc_RNA (1)...(19): siRNA sense strand
ugaaggaguucugcaucau

SEQ ID NO: 1553765 - RNA, 19 nt, Homo sapiens
  misc_RNA (1)...(19): siRNA sense strand
gacagacuccacccuaaca

SEQ ID NO: 1553766 - RNA, 19 nt, Homo sapiens
  misc_RNA (1)...(19): siRNA sense strand
aaacagugucuuuggacuu

SEQ ID NO: 1553767 - RNA, 19 nt, Homo sapiens
  misc_RNA (1)...(19): siRNA sense strand
uaccuggccuacauucugu

SEQ ID NO: 1553768 - RNA, 19 nt, Homo sapiens
  misc_RNA (1)...(19): siRNA sense strand
uuacuuggcaugacagcaa

SEQ ID NO: 1553769 - RNA, 19 nt, Homo sapiens
  misc_RNA (1)...(19): siRNA sense strand
cucaugacguccuccauca

SEQ ID NO: 1553770 - RNA, 19 nt, Homo sapiens
  misc_RNA (1)...(19): siRNA sense strand
aaggaguucugcaucaucu

SEQ ID NO: 1553771 - RNA, 19 nt, Homo sapiens
  misc_RNA (1)...(19): siRNA sense strand
ccagccaaacagugucuuu

SEQ ID NO: 1553772 - RNA, 19 nt, Homo sapiens
  misc_RNA (1)...(19): siRNA sense strand
ugaacuuccuucuucucau

SEQ ID NO: 1553773 - RNA, 19 nt, Homo sapiens
  misc_RNA (1)...(19): siRNA sense strand
cauuaucaacuacaaacga

SEQ ID NO: 1553774 - RNA, 19 nt, Homo sapiens
  misc_RNA (1)...(19): siRNA sense strand
caaaguaucuggaaauuga

SEQ ID NO: 1553775 - RNA, 19 nt, Homo sapiens
  misc_RNA (1)...(19): siRNA sense strand
gcacaagucugcucucaaa

SEQ ID NO: 1553776 - RNA, 19 nt, Homo sapiens
  misc_RNA (1)...(19): siRNA sense strand
gauaaagacugugagauaa

SEQ ID NO: 1553777 - RNA, 19 nt, Homo sapiens
  misc_RNA (1)...(19): siRNA sense strand
gaaucaagaucagggcuua

SEQ ID NO: 1553778 - RNA, 19 nt, Homo sapiens
  misc_RNA (1)...(19): siRNA sense strand
gaagacauuuacugccaaa

SEQ ID NO: 1553779 - RNA, 19 nt, Homo sapiens
  misc_RNA (1)...(19): siRNA sense strand
ugauaaagacugugagaua

SEQ ID NO: 1553780 - RNA, 19 nt, Homo sapiens
  misc_RNA (1)...(19): siRNA sense strand
gaggaagguuauucacuga

SEQ ID NO: 1553781 - RNA, 19 nt, Homo sapiens
  misc_RNA (1)...(19): siRNA sense strand
gaagauaguccuguaaaca

SEQ ID NO: 1553782 - RNA, 19 nt, Homo sapiens
  misc_RNA (1)...(19): siRNA sense strand
gagauguggucuugcagaa

SEQ ID NO: 1553783 - RNA, 19 nt, Homo sapiens
  misc_RNA (1)...(19): siRNA sense strand
agauaguccuguaaacaua

SEQ ID NO: 1553784 - RNA, 19 nt, Homo sapiens
  misc_RNA (1)...(19): siRNA sense strand
aaaugccacuguugugaua

SEQ ID NO: 1553785 - RNA, 19 nt, Homo sapiens
  misc_RNA (1)...(19): siRNA sense strand
gcacuuaaccucuguccau

SEQ ID NO: 1553786 - RNA, 19 nt, Homo sapiens
  misc_RNA (1)...(19): siRNA sense strand
ugagacagcagaauuuauu

SEQ ID NO: 1553787 - RNA, 19 nt, Homo sapiens
  misc_RNA (1)...(19): siRNA sense strand
ccucgaggcuuucuucaug

SEQ ID NO: 1553788 - RNA, 19 nt, Homo sapiens
  misc_RNA (1)...(19): siRNA sense strand
gaucagggcuuauuuugug

SEQ ID NO: 1553789 - RNA, 19 nt, Homo sapiens
  misc_RNA (1)...(19): siRNA sense strand
gagcagaguggcugaaguu

SEQ ID NO: 1553790 - RNA, 19 nt, Homo sapiens
  misc_RNA (1)...(19): siRNA sense strand
cauguagaauccaucagua

SEQ ID NO: 1553791 - RNA, 19 nt, Homo sapiens
  misc_RNA (1)...(19): siRNA sense strand
caguacagcuggugucgaa

SEQ ID NO: 1553792 - RNA, 19 nt, Homo sapiens
  misc_RNA (1)...(19): siRNA sense strand
aaggcaaagucuacuauaa

SEQ ID NO: 1553793 - RNA, 19 nt, Homo sapiens
  misc_RNA (1)...(19): siRNA sense strand
agucugauguucugcauuu

SEQ ID NO: 1553794 - RNA, 19 nt, Homo sapiens
  misc_RNA (1)...(19): siRNA sense strand
gugcagaaguuggcagaaa

SEQ ID NO: 1553795 - RNA, 19 nt, Homo sapiens
  misc_RNA (1)...(19): siRNA sense strand
gaaacacagcauucauuga

SEQ ID NO: 1553796 - RNA, 19 nt, Homo sapiens
  misc_RNA (1)...(19): siRNA sense strand
ccaguuaccuucagauggu

SEQ ID NO: 1553797 - RNA, 19 nt, Homo sapiens
  misc_RNA (1)...(19): siRNA sense strand
gaaaauuguuacugucuug

SEQ ID NO: 1553798 - RNA, 19 nt, Homo sapiens
  misc_RNA (1)...(19): siRNA sense strand
ugaaggaaguuaugguaca

SEQ ID NO: 1553799 - RNA, 19 nt, Homo sapiens
  misc_RNA (1)...(19): siRNA sense strand
aaacacagcauucauugau

SEQ ID NO: 1553800 - RNA, 19 nt, Homo sapiens
  misc_RNA (1)...(19): siRNA sense strand
uaaagaagaggaaagcaau

SEQ ID NO: 1553801 - RNA, 19 nt, Homo sapiens
  misc_RNA (1)...(19): siRNA sense strand
gaaauuuguauccuucaug

SEQ ID NO: 1553802 - RNA, 19 nt, Homo sapiens
  misc_RNA (1)...(19): siRNA sense strand
gucaaaguaucuggaaauu

SEQ ID NO: 1553803 - RNA, 19 nt, Homo sapiens
  misc_RNA (1)...(19): siRNA sense strand
auacggcccuuucagugua

SEQ ID NO: 1553804 - RNA, 19 nt, Homo sapiens
  misc_RNA (1)...(19): siRNA sense strand
acacagcauucauugauca

SEQ ID NO: 1553805 - RNA, 19 nt, Homo sapiens
  misc_RNA (1)...(19): siRNA sense strand
gaggcuuucuucauguuga

SEQ ID NO: 1553806 - RNA, 19 nt, Homo sapiens
  misc_RNA (1)...(19): siRNA sense strand
guugugauauggauuucaa

SEQ ID NO: 1553807 - RNA, 19 nt, Homo sapiens
  misc_RNA (1)...(19): siRNA sense strand
aagcauguauuucucugaa

SEQ ID NO: 1553808 - RNA, 19 nt, Homo sapiens
  misc_RNA (1)...(19): siRNA sense strand
gauguggucuugcagaaaa

SEQ ID NO: 1553809 - RNA, 19 nt, Homo sapiens
  misc_RNA (1)...(19): siRNA sense strand
ugagaauacugaaggaagu

SEQ ID NO: 1553810 - RNA, 19 nt, Homo sapiens
  misc_RNA (1)...(19): siRNA sense strand
cagaagauaguccuguaaa

SEQ ID NO: 1553811 - RNA, 19 nt, Homo sapiens
  misc_RNA (1)...(19): siRNA sense strand
gaaggaaguuaugguacag

SEQ ID NO: 1553812 - RNA, 19 nt, Homo sapiens
  misc_RNA (1)...(19): siRNA sense strand
caaaagcaagcauguauuu

SEQ ID NO: 1553813 - RNA, 19 nt, Homo sapiens
  misc_RNA (1)...(19): siRNA sense strand
gagacagcagaauuuauuu

SEQ ID NO: 1553814 - RNA, 19 nt, Homo sapiens
  misc_RNA (1)...(19): siRNA sense strand
ccauacaaaugccacuguu

SEQ ID NO: 1553815 - RNA, 19 nt, Homo sapiens
  misc_RNA (1)...(19): siRNA sense strand
cuucugauccugauguuaa

SEQ ID NO: 1553816 - RNA, 19 nt, Homo sapiens
  misc_RNA (1)...(19): siRNA sense strand
ugucagaaucaccaucuua

SEQ ID NO: 1553817 - RNA, 19 nt, Homo sapiens
  misc_RNA (1)...(19): siRNA sense strand
guacagugagugagauuca

SEQ ID NO: 1553818 - RNA, 19 nt, Homo sapiens
  misc_RNA (1)...(19): siRNA sense strand
caucagagagaaaggaaau

SEQ ID NO: 1553819 - RNA, 19 nt, Homo sapiens
  misc_RNA (1)...(19): siRNA sense strand
cagguguccucgaggcuuu

SEQ ID NO: 1553820 - RNA, 19 nt, Homo sapiens
  misc_RNA (1)...(19): siRNA sense strand
auccugauguuaagaauga

SEQ ID NO: 1553821 - RNA, 19 nt, Homo sapiens
  misc_RNA (1)...(19): siRNA sense strand
ccacuguugugauauggau

SEQ ID NO: 1553822 - RNA, 19 nt, Homo sapiens
  misc_RNA (1)...(19): siRNA sense strand
gggaucggccauacaaaug

SEQ ID NO: 1553823 - RNA, 19 nt, Homo sapiens
  misc_RNA (1)...(19): siRNA sense strand
caggaccacuugaacauac

SEQ ID NO: 1553824 - RNA, 19 nt, Homo sapiens
  misc_RNA (1)...(19): siRNA sense strand
gcugcuugcuccacuuuua

SEQ ID NO: 1553825 - RNA, 19 nt, Homo sapiens
  misc_RNA (1)...(19): siRNA sense strand
guucugcauuuccaguuug

SEQ ID NO: 1553826 - RNA, 19 nt, Homo sapiens
  misc_RNA (1)...(19): siRNA sense strand
ucagagagaaaggaaauga

SEQ ID NO: 1553827 - RNA, 19 nt, Homo sapiens
  misc_RNA (1)...(19): siRNA sense strand
gaaguuggcagaaaauugu

SEQ ID NO: 1553828 - RNA, 19 nt, Homo sapiens
  misc_RNA (1)...(19): siRNA sense strand
aaaggcaaagucuacuaua

SEQ ID NO: 1553829 - RNA, 19 nt, Homo sapiens
  misc_RNA (1)...(19): siRNA sense strand
ggcagaagcaguggugaaa

SEQ ID NO: 1553830 - RNA, 19 nt, Homo sapiens
  misc_RNA (1)...(19): siRNA sense strand
ucaagaucagggcuuauuu

SEQ ID NO: 1553831 - RNA, 19 nt, Homo sapiens
  misc_RNA (1)...(19): siRNA sense strand
ucacagccuuguaccucuu

SEQ ID NO: 1553832 - RNA, 19 nt, Homo sapiens
  misc_RNA (1)...(19): siRNA sense strand
ggaaguuaugguacaguga

SEQ ID NO: 1553833 - RNA, 19 nt, Homo sapiens
  misc_RNA (1)...(19): siRNA sense strand
agaaucaccaucuuacaga

SEQ ID NO: 1553834 - RNA, 19 nt, Homo sapiens
  misc_RNA (1)...(19): siRNA sense strand
gaauacugaaggaaguuau

SEQ ID NO: 1553835 - RNA, 19 nt, Homo sapiens
  misc_RNA (1)...(19): siRNA sense strand
ucagaagauaguccuguaa

SEQ ID NO: 1553836 - RNA, 19 nt, Homo sapiens
  misc_RNA (1)...(19): siRNA sense strand
gaaucuggaggaagguuau

SEQ ID NO: 1553837 - RNA, 19 nt, Homo sapiens
  misc_RNA (1)...(19): siRNA sense strand
agacauagguuuuaaagac

SEQ ID NO: 1553838 - RNA, 19 nt, Homo sapiens
  misc_RNA (1)...(19): siRNA sense strand
uuaaagaagaggaaagcaa

SEQ ID NO: 1553839 - RNA, 19 nt, Homo sapiens
  misc_RNA (1)...(19): siRNA sense strand
caaaugccacuguugugau

SEQ ID NO: 1553840 - RNA, 19 nt, Homo sapiens
  misc_RNA (1)...(19): siRNA sense strand
gagaauacugaaggaaguu

SEQ ID NO: 1553841 - RNA, 19 nt, Homo sapiens
  misc_RNA (1)...(19): siRNA sense strand
aaagcaagcauguauuucu

SEQ ID NO: 1553842 - RNA, 19 nt, Homo sapiens
  misc_RNA (1)...(19): siRNA sense strand
gagaaaggaaaugaaguca

SEQ ID NO: 1553843 - RNA, 19 nt, Homo sapiens
  misc_RNA (1)...(19): siRNA sense strand
gugcacagaagcuuuguca

SEQ ID NO: 1553844 - RNA, 19 nt, Homo sapiens
  misc_RNA (1)...(19): siRNA sense strand
uaucuaggccugaucucaa

SEQ ID NO: 1553845 - RNA, 19 nt, Homo sapiens
  misc_RNA (1)...(19): siRNA sense strand
gcacacuucaggaccacuu

SEQ ID NO: 1553846 - RNA, 19 nt, Homo sapiens
  misc_RNA (1)...(19): siRNA sense strand
cagaguggcugaaguuccu

SEQ ID NO: 1553847 - RNA, 19 nt, Homo sapiens
  misc_RNA (1)...(19): siRNA sense strand
gagagaaaggaaaugaagu

SEQ ID NO: 1553848 - RNA, 19 nt, Homo sapiens
  misc_RNA (1)...(19): siRNA sense strand
guuacugucuugcuauacu

SEQ ID NO: 1553849 - RNA, 19 nt, Homo sapiens
  misc_RNA (1)...(19): siRNA sense strand
uucagaagauaguccugua

SEQ ID NO: 1553850 - RNA, 19 nt, Homo sapiens
  misc_RNA (1)...(19): siRNA sense strand
cuucagaugguucacauug

SEQ ID NO: 1553851 - RNA, 19 nt, Homo sapiens
  misc_RNA (1)...(19): siRNA sense strand
ucaggaccacuugaacaua

SEQ ID NO: 1553852 - RNA, 19 nt, Homo sapiens
  misc_RNA (1)...(19): siRNA sense strand
cgacacauccgaggacaca

SEQ ID NO: 1553853 - RNA, 19 nt, Homo sapiens
  misc_RNA (1)...(19): siRNA sense strand
aaggagauguggucuugca

SEQ ID NO: 1553854 - RNA, 19 nt, Homo sapiens
  misc_RNA (1)...(19): siRNA sense strand
gauaguccuguaaacauag

SEQ ID NO: 1553855 - RNA, 19 nt, Homo sapiens
  misc_RNA (1)...(19): siRNA sense strand
aauuguuacugucuugcua

SEQ ID NO: 1553856 - RNA, 19 nt, Homo sapiens
  misc_RNA (1)...(19): siRNA sense strand
cagcagaauuuauuuugug

SEQ ID NO: 1553857 - RNA, 19 nt, Homo sapiens
  misc_RNA (1)...(19): siRNA sense strand
uugaucaauucuacaguug

SEQ ID NO: 1553858 - RNA, 19 nt, Homo sapiens
  misc_RNA (1)...(19): siRNA sense strand
gacaucagagagaaaggaa

SEQ ID NO: 1553859 - RNA, 19 nt, Homo sapiens
  misc_RNA (1)...(19): siRNA sense strand
acaacaaccaacacacuga

SEQ ID NO: 1553860 - RNA, 19 nt, Homo sapiens
  misc_RNA (1)...(19): siRNA sense strand
aaacaacaaccaacacacu

SEQ ID NO: 1553861 - RNA, 19 nt, Homo sapiens
  misc_RNA (1)...(19): siRNA sense strand
cuuacagagugcagaaguu

SEQ ID NO: 1553862 - RNA, 19 nt, Homo sapiens
  misc_RNA (1)...(19): siRNA sense strand
gggcuuauuuugugagaau

SEQ ID NO: 1553863 - RNA, 19 nt, Homo sapiens
  misc_RNA (1)...(19): siRNA sense strand
aagcaagcauguauuucuc

SEQ ID NO: 1553864 - RNA, 19 nt, Homo sapiens
  misc_RNA (1)...(19): siRNA sense strand
agaagauaguccuguaaac

SEQ ID NO: 1553865 - RNA, 19 nt, Homo sapiens
  misc_RNA (1)...(19): siRNA sense strand
ugucaaaguaucuggaaau

SEQ ID NO: 1553866 - RNA, 19 nt, Homo sapiens
  misc_RNA (1)...(19): siRNA sense strand
ggcagaaaauuguuacugu

SEQ ID NO: 1553867 - RNA, 19 nt, Homo sapiens
  misc_RNA (1)...(19): siRNA sense strand
uuacagagugcagaaguug

SEQ ID NO: 1553868 - RNA, 19 nt, Homo sapiens
  misc_RNA (1)...(19): siRNA sense strand
uguacugugugcuugaaga

SEQ ID NO: 1553869 - RNA, 19 nt, Homo sapiens
  misc_RNA (1)...(19): siRNA sense strand
caagaucagggcuuauuuu

SEQ ID NO: 1553870 - RNA, 19 nt, Homo sapiens
  misc_RNA (1)...(19): siRNA sense strand
gaagucaccagagcugucu

SEQ ID NO: 1553871 - RNA, 19 nt, Homo sapiens
  misc_RNA (1)...(19): siRNA sense strand
ucaaaguaucuggaaauug

SEQ ID NO: 1553872 - RNA, 19 nt, Homo sapiens
  misc_RNA (1)...(19): siRNA sense strand
guuaugguacagugaguga

SEQ ID NO: 1553873 - RNA, 19 nt, Homo sapiens
  misc_RNA (1)...(19): siRNA sense strand
ucgaggcuuucuucauguu

SEQ ID NO: 1553874 - RNA, 19 nt, Homo sapiens
  misc_RNA (1)...(19): siRNA sense strand
gcaccuaccugggucauuu

SEQ ID NO: 1553875 - RNA, 19 nt, Homo sapiens
  misc_RNA (1)...(19): siRNA sense strand
gaaguguucugccauuguu

SEQ ID NO: 1553876 - RNA, 19 nt, Homo sapiens
  misc_RNA (1)...(19): siRNA sense strand
gagaaugggcucuuuaaug

SEQ ID NO: 1553877 - RNA, 19 nt, Homo sapiens
  misc_RNA (1)...(19): siRNA sense strand
guauugaccuucucagaug

SEQ ID NO: 1553878 - RNA, 19 nt, Homo sapiens
  misc_RNA (1)...(19): siRNA sense strand
gcaaugaaggucucuuuga

SEQ ID NO: 1553879 - RNA, 19 nt, Homo sapiens
  misc_RNA (1)...(19): siRNA sense strand
caacugauguuugcagaug

SEQ ID NO: 1553880 - RNA, 19 nt, Homo sapiens
  misc_RNA (1)...(19): siRNA sense strand
agaaugggcucuuuaaugg

SEQ ID NO: 1553881 - RNA, 19 nt, Homo sapiens
  misc_RNA (1)...(19): siRNA sense strand
caaugaaggucucuuugag

SEQ ID NO: 1553882 - RNA, 19 nt, Homo sapiens
  misc_RNA (1)...(19): siRNA sense strand
ccagagcgccuccaaguca

SEQ ID NO: 1553883 - RNA, 19 nt, Homo sapiens
  misc_RNA (1)...(19): siRNA sense strand
ucagaugguucaagguaug

SEQ ID NO: 1553884 - RNA, 19 nt, Homo sapiens
  misc_RNA (1)...(19): siRNA sense strand
gauaugacaacaugaccuu

SEQ ID NO: 1553885 - RNA, 19 nt, Homo sapiens
  misc_RNA (1)...(19): siRNA sense strand
ccugaugguucucauggaa

SEQ ID NO: 1553886 - RNA, 19 nt, Homo sapiens
  misc_RNA (1)...(19): siRNA sense strand
gguauugaccuucucagau

SEQ ID NO: 1553887 - RNA, 19 nt, Homo sapiens
  misc_RNA (1)...(19): siRNA sense strand
ucucagaugguucaaggua

SEQ ID NO: 1553888 - RNA, 19 nt, Homo sapiens
  misc_RNA (1)...(19): siRNA sense strand
cauucgauaugacaacaug

SEQ ID NO: 1553889 - RNA, 19 nt, Homo sapiens
  misc_RNA (1)...(19): siRNA sense strand
uaugacaacaugaccuuug

SEQ ID NO: 1553890 - RNA, 19 nt, Homo sapiens
  misc_RNA (1)...(19): siRNA sense strand
ccgcaaugaaggucucuuu

SEQ ID NO: 1553891 - RNA, 19 nt, Homo sapiens
  misc_RNA (1)...(19): siRNA sense strand
augacaacaugaccuuuga

SEQ ID NO: 1553892 - RNA, 19 nt, Homo sapiens
  misc_RNA (1)...(19): siRNA sense strand
gaccuucucagaugguuca

SEQ ID NO: 1553893 - RNA, 19 nt, Homo sapiens
  misc_RNA (1)...(19): siRNA sense strand
caagucagccagaaaucuc

SEQ ID NO: 1553894 - RNA, 19 nt, Homo sapiens
  misc_RNA (1)...(19): siRNA sense strand
ugaugguucucauggaauc

SEQ ID NO: 1553895 - RNA, 19 nt, Homo sapiens
  misc_RNA (1)...(19): siRNA sense strand
ggagucuucauucgauaug

SEQ ID NO: 1553896 - RNA, 19 nt, Homo sapiens
  misc_RNA (1)...(19): siRNA sense strand
gucggagucuucauucgau

SEQ ID NO: 1553897 - RNA, 19 nt, Homo sapiens
  misc_RNA (1)...(19): siRNA sense strand
gacuuucccugaugguucu

SEQ ID NO: 1553898 - RNA, 19 nt, Homo sapiens
  misc_RNA (1)...(19): siRNA sense strand
cugcugacuuucccugaug

SEQ ID NO: 1553899 - RNA, 19 nt, Homo sapiens
  misc_RNA (1)...(19): siRNA sense strand
ucggagucuucauucgaua

SEQ ID NO: 1553900 - RNA, 19 nt, Homo sapiens
  misc_RNA (1)...(19): siRNA sense strand
uugagaaugggcucuuuaa

SEQ ID NO: 1553901 - RNA, 19 nt, Homo sapiens
  misc_RNA (1)...(19): siRNA sense strand
gcugcgacgugagaagugu

SEQ ID NO: 1553902 - RNA, 19 nt, Homo sapiens
  misc_RNA (1)...(19): siRNA sense strand
ggguauugaccuucucaga

SEQ ID NO: 1553903 - RNA, 19 nt, Homo sapiens
  misc_RNA (1)...(19): siRNA sense strand
ugagaaugggcucuuuaau

SEQ ID NO: 1553904 - RNA, 19 nt, Homo sapiens
  misc_RNA (1)...(19): siRNA sense strand
aaacaagccuccaaacuga

SEQ ID NO: 1553905 - RNA, 19 nt, Homo sapiens
  misc_RNA (1)...(19): siRNA sense strand
gcuaauacacccugaauuu

SEQ ID NO: 1553906 - RNA, 19 nt, Homo sapiens
  misc_RNA (1)...(19): siRNA sense strand
agagaaagcucgccuggaa

SEQ ID NO: 1553907 - RNA, 19 nt, Homo sapiens
  misc_RNA (1)...(19): siRNA sense strand
ggaccagucucucuucuuc

SEQ ID NO: 1553908 - RNA, 19 nt, Homo sapiens
  misc_RNA (1)...(19): siRNA sense strand
gaacucuuccuccuuauga

SEQ ID NO: 1553909 - RNA, 19 nt, Homo sapiens
  misc_RNA (1)...(19): siRNA sense strand
gaaaaugacuauacucaca

SEQ ID NO: 1553910 - RNA, 19 nt, Homo sapiens
  misc_RNA (1)...(19): siRNA sense strand
caaacaagccuccaaacug

SEQ ID NO: 1553911 - RNA, 19 nt, Homo sapiens
  misc_RNA (1)...(19): siRNA sense strand
ccucgaaucuggagagaga

SEQ ID NO: 1553912 - RNA, 19 nt, Homo sapiens
  misc_RNA (1)...(19): siRNA sense strand
aaacagccuucaccagcua

SEQ ID NO: 1553913 - RNA, 19 nt, Homo sapiens
  misc_RNA (1)...(19): siRNA sense strand
uggccaagaugacccauuu

SEQ ID NO: 1553914 - RNA, 19 nt, Homo sapiens
  misc_RNA (1)...(19): siRNA sense strand
ccaagcggaugccuuuaga

SEQ ID NO: 1553915 - RNA, 19 nt, Homo sapiens
  misc_RNA (1)...(19): siRNA sense strand
caucaagccauuucuuaaa

SEQ ID NO: 1553916 - RNA, 19 nt, Homo sapiens
  misc_RNA (1)...(19): siRNA sense strand
gaugaucccggcauuaaga

SEQ ID NO: 1553917 - RNA, 19 nt, Homo sapiens
  misc_RNA (1)...(19): siRNA sense strand
gcagaugaucccggcauua

SEQ ID NO: 1553918 - RNA, 19 nt, Homo sapiens
  misc_RNA (1)...(19): siRNA sense strand
cagaugaucccggcauuaa

SEQ ID NO: 1553919 - RNA, 19 nt, Homo sapiens
  misc_RNA (1)...(19): siRNA sense strand
ucaccaagcggaugccuuu

SEQ ID NO: 1553920 - RNA, 19 nt, Homo sapiens
  misc_RNA (1)...(19): siRNA sense strand
gaauuuggaggaacucuuc

SEQ ID NO: 1553921 - RNA, 19 nt, Homo sapiens
  misc_RNA (1)...(19): siRNA sense strand
guacauucaugcccucuac

SEQ ID NO: 1553922 - RNA, 19 nt, Homo sapiens
  misc_RNA (1)...(19): siRNA sense strand
cagcuuuccugcccgcuuu

SEQ ID NO: 1553923 - RNA, 19 nt, Homo sapiens
  misc_RNA (1)...(19): siRNA sense strand
gauccggagcuucagauaa

SEQ ID NO: 1553924 - RNA, 19 nt, Homo sapiens
  misc_RNA (1)...(19): siRNA sense strand
acucacacauccuauaaug

SEQ ID NO: 1553925 - RNA, 19 nt, Homo sapiens
  misc_RNA (1)...(19): siRNA sense strand
guccagagacuauagagaa

SEQ ID NO: 1553926 - RNA, 19 nt, Homo sapiens
  misc_RNA (1)...(19): siRNA sense strand
aagcauacguccucgaauc

SEQ ID NO: 1553927 - RNA, 19 nt, Homo sapiens
  misc_RNA (1)...(19): siRNA sense strand
caccaggccugacauugga

SEQ ID NO: 1553928 - RNA, 19 nt, Homo sapiens
  misc_RNA (1)...(19): siRNA sense strand
auccggagcuucagauaaa

SEQ ID NO: 1553929 - RNA, 19 nt, Homo sapiens
  misc_RNA (1)...(19): siRNA sense strand
caagaugacccauuuacag

SEQ ID NO: 1553930 - RNA, 19 nt, Homo sapiens
  misc_RNA (1)...(19): siRNA sense strand
gagaagggagagaaugaga

SEQ ID NO: 1553931 - RNA, 19 nt, Homo sapiens
  misc_RNA (1)...(19): siRNA sense strand
ggaggaguccacuuuguca

SEQ ID NO: 1553932 - RNA, 19 nt, Homo sapiens
  misc_RNA (1)...(19): siRNA sense strand
gcugggacccugaaacaug

SEQ ID NO: 1553933 - RNA, 19 nt, Homo sapiens
  misc_RNA (1)...(19): siRNA sense strand
ucacacauccuauaaugca

SEQ ID NO: 1553934 - RNA, 19 nt, Homo sapiens
  misc_RNA (1)...(19): siRNA sense strand
ggagauuuggccaagauga

SEQ ID NO: 1553935 - RNA, 19 nt, Homo sapiens
  misc_RNA (1)...(19): siRNA sense strand
uuagacuccuggcucagua

SEQ ID NO: 1553936 - RNA, 19 nt, Homo sapiens
  misc_RNA (1)...(19): siRNA sense strand
ucaucaagccauuucuuaa

SEQ ID NO: 1553937 - RNA, 19 nt, Homo sapiens
  misc_RNA (1)...(19): siRNA sense strand
gaucucagucugugguaga

SEQ ID NO: 1553938 - RNA, 19 nt, Homo sapiens
  misc_RNA (1)...(19): siRNA sense strand
gaagggagagaaugagaac

SEQ ID NO: 1553939 - RNA, 19 nt, Homo sapiens
  misc_RNA (1)...(19): siRNA sense strand
uccagagacuauagagaaa

SEQ ID NO: 1553940 - RNA, 19 nt, Homo sapiens
  misc_RNA (1)...(19): siRNA sense strand
cugggacccugaaacauga

SEQ ID NO: 1553941 - RNA, 19 nt, Homo sapiens
  misc_RNA (1)...(19): siRNA sense strand
uuaaagacaagaccaggaa

SEQ ID NO: 1553942 - RNA, 19 nt, Homo sapiens
  misc_RNA (1)...(19): siRNA sense strand
ggaacuccuucacagacau

SEQ ID NO: 1553943 - RNA, 19 nt, Homo sapiens
  misc_RNA (1)...(19): siRNA sense strand
gcaagucagggacaugauc

SEQ ID NO: 1553944 - RNA, 19 nt, Homo sapiens
  misc_RNA (1)...(19): siRNA sense strand
uccuuaaacuggccauuga

SEQ ID NO: 1553945 - RNA, 19 nt, Homo sapiens
  misc_RNA (1)...(19): siRNA sense strand
gugccauccugcugucauu

SEQ ID NO: 1553946 - RNA, 19 nt, Homo sapiens
  misc_RNA (1)...(19): siRNA sense strand
ccaauugggaucagaguag

SEQ ID NO: 1553947 - RNA, 19 nt, Homo sapiens
  misc_RNA (1)...(19): siRNA sense strand
ggcagaugaucccggcauu

SEQ ID NO: 1553948 - RNA, 19 nt, Homo sapiens
  misc_RNA (1)...(19): siRNA sense strand
caaacugacaccuucaauc

SEQ ID NO: 1553949 - RNA, 19 nt, Homo sapiens
  misc_RNA (1)...(19): siRNA sense strand
cuuaugacaugggaacuug

SEQ ID NO: 1553950 - RNA, 19 nt, Homo sapiens
  misc_RNA (1)...(19): siRNA sense strand
cagucucucuucuuccaaa

SEQ ID NO: 1553951 - RNA, 19 nt, Homo sapiens
  misc_RNA (1)...(19): siRNA sense strand
uggaaguccuaaucgaaga

SEQ ID NO: 1553952 - RNA, 19 nt, Homo sapiens
  misc_RNA (1)...(19): siRNA sense strand
auacucacacauccuauaa

SEQ ID NO: 1553953 - RNA, 19 nt, Homo sapiens
  misc_RNA (1)...(19): siRNA sense strand
gcauggaaacaauuuaaac

SEQ ID NO: 1553954 - RNA, 19 nt, Homo sapiens
  misc_RNA (1)...(19): siRNA sense strand
acacacucaucaagccauu

SEQ ID NO: 1553955 - RNA, 19 nt, Homo sapiens
  misc_RNA (1)...(19): siRNA sense strand
acugacaccuucaauccuu

SEQ ID NO: 1553956 - RNA, 19 nt, Homo sapiens
  misc_RNA (1)...(19): siRNA sense strand
cagcuaaaccuggacaugu

SEQ ID NO: 1553957 - RNA, 19 nt, Homo sapiens
  misc_RNA (1)...(19): siRNA sense strand
ugaagcauacguccucgaa

SEQ ID NO: 1553958 - RNA, 19 nt, Homo sapiens
  misc_RNA (1)...(19): siRNA sense strand
aaucgaagauccggagcuu

SEQ ID NO: 1553959 - RNA, 19 nt, Homo sapiens
  misc_RNA (1)...(19): siRNA sense strand
gaccauuacggcaggaaga

SEQ ID NO: 1553960 - RNA, 19 nt, Homo sapiens
  misc_RNA (1)...(19): siRNA sense strand
caccuucaauccuuaaacu

SEQ ID NO: 1553961 - RNA, 19 nt, Homo sapiens
  misc_RNA (1)...(19): siRNA sense strand
cugacaccuucaauccuua

SEQ ID NO: 1553962 - RNA, 19 nt, Homo sapiens
  misc_RNA (1)...(19): siRNA sense strand
agcuaaaccuggacauguu

SEQ ID NO: 1553963 - RNA, 19 nt, Homo sapiens
  misc_RNA (1)...(19): siRNA sense strand
ggccaagaugacccauuua

SEQ ID NO: 1553964 - RNA, 19 nt, Homo sapiens
  misc_RNA (1)...(19): siRNA sense strand
ccaagaugacccauuuaca

SEQ ID NO: 1553965 - RNA, 19 nt, Homo sapiens
  misc_RNA (1)...(19): siRNA sense strand
cagcaagucagggacauga

SEQ ID NO: 1553966 - RNA, 19 nt, Homo sapiens
  misc_RNA (1)...(19): siRNA sense strand
cugcauggaaacaauuuaa

SEQ ID NO: 1553967 - RNA, 19 nt, Homo sapiens
  misc_RNA (1)...(19): siRNA sense strand
cucaucaagccauuucuua

SEQ ID NO: 1553968 - RNA, 19 nt, Homo sapiens
  misc_RNA (1)...(19): siRNA sense strand
ucaaacaagccuccaaacu

SEQ ID NO: 1553969 - RNA, 19 nt, Homo sapiens
  misc_RNA (1)...(19): siRNA sense strand
cauuggaaguccuaaucga

SEQ ID NO: 1553970 - RNA, 19 nt, Homo sapiens
  misc_RNA (1)...(19): siRNA sense strand
gcagccaauugggaucaga

SEQ ID NO: 1553971 - RNA, 19 nt, Homo sapiens
  misc_RNA (1)...(19): siRNA sense strand
caagucagggacaugauca

SEQ ID NO: 1553972 - RNA, 19 nt, Homo sapiens
  misc_RNA (1)...(19): siRNA sense strand
gaggagaagggagagaaug

SEQ ID NO: 1553973 - RNA, 19 nt, Homo sapiens
  misc_RNA (1)...(19): siRNA sense strand
uaaagacaagaccaggaaa

SEQ ID NO: 1553974 - RNA, 19 nt, Homo sapiens
  misc_RNA (1)...(19): siRNA sense strand
gccuggaacugaaugaaaa

SEQ ID NO: 1553975 - RNA, 19 nt, Homo sapiens
  misc_RNA (1)...(19): siRNA sense strand
acacuuggaacggagauuu

SEQ ID NO: 1553976 - RNA, 19 nt, Homo sapiens
  misc_RNA (1)...(19): siRNA sense strand
cagcuaauacacccugaau

SEQ ID NO: 1553977 - RNA, 19 nt, Homo sapiens
  misc_RNA (1)...(19): siRNA sense strand
aaacugacaccuucaaucc

SEQ ID NO: 1553978 - RNA, 19 nt, Homo sapiens
  misc_RNA (1)...(19): siRNA sense strand
gcuaaaccuggacauguuc

SEQ ID NO: 1553979 - RNA, 19 nt, Homo sapiens
  misc_RNA (1)...(19): siRNA sense strand
aaagcucgccuggaacuga

SEQ ID NO: 1553980 - RNA, 19 nt, Homo sapiens
  misc_RNA (1)...(19): siRNA sense strand
aagcucgccuggaacugaa

SEQ ID NO: 1553981 - RNA, 19 nt, Homo sapiens
  misc_RNA (1)...(19): siRNA sense strand
gaacuccuucacagacauc

SEQ ID NO: 1553982 - RNA, 19 nt, Homo sapiens
  misc_RNA (1)...(19): siRNA sense strand
ccugaaacaugaggagaag

SEQ ID NO: 1553983 - RNA, 19 nt, Homo sapiens
  misc_RNA (1)...(19): siRNA sense strand
aaaugacuauacucacaca

SEQ ID NO: 1553984 - RNA, 19 nt, Homo sapiens
  misc_RNA (1)...(19): siRNA sense strand
ucaccaggccugacauugg

SEQ ID NO: 1553985 - RNA, 19 nt, Homo sapiens
  misc_RNA (1)...(19): siRNA sense strand
gaaugaaaaccccgauguu

SEQ ID NO: 1553986 - RNA, 19 nt, Homo sapiens
  misc_RNA (1)...(19): siRNA sense strand
ggaaguccuaaucgaagau

SEQ ID NO: 1553987 - RNA, 19 nt, Homo sapiens
  misc_RNA (1)...(19): siRNA sense strand
acuccuggcucuggacuga

SEQ ID NO: 1553988 - RNA, 19 nt, Homo sapiens
  misc_RNA (1)...(19): siRNA sense strand
gaagcauacguccucgaau

SEQ ID NO: 1553989 - RNA, 19 nt, Homo sapiens
  misc_RNA (1)...(19): siRNA sense strand
gccaauugggaucagagua

SEQ ID NO: 1553990 - RNA, 19 nt, Homo sapiens
  misc_RNA (1)...(19): siRNA sense strand
cagagacuauagagaaagc

SEQ ID NO: 1553991 - RNA, 19 nt, Homo sapiens
  misc_RNA (1)...(19): siRNA sense strand
cacccaagcugaugaaaag

SEQ ID NO: 1553992 - RNA, 19 nt, Homo sapiens
  misc_RNA (1)...(19): siRNA sense strand
ucucucuucuuccaaaaua

SEQ ID NO: 1553993 - RNA, 19 nt, Homo sapiens
  misc_RNA (1)...(19): siRNA sense strand
cacauccuauaaugcaaug

SEQ ID NO: 1553994 - RNA, 19 nt, Homo sapiens
  misc_RNA (1)...(19): siRNA sense strand
acggagauuuggccaagau

SEQ ID NO: 1553995 - RNA, 19 nt, Homo sapiens
  misc_RNA (1)...(19): siRNA sense strand
gccaagaugacccauuuac

SEQ ID NO: 1553996 - RNA, 19 nt, Homo sapiens
  misc_RNA (1)...(19): siRNA sense strand
ugacaccuucaauccuuaa

SEQ ID NO: 1553997 - RNA, 19 nt, Homo sapiens
  misc_RNA (1)...(19): siRNA sense strand
cuucaaacaagccuccaaa

SEQ ID NO: 1553998 - RNA, 19 nt, Homo sapiens
  misc_RNA (1)...(19): siRNA sense strand
aggagaagggagagaauga

SEQ ID NO: 1553999 - RNA, 19 nt, Homo sapiens
  misc_RNA (1)...(19): siRNA sense strand
ccaaacugacaccuucaau

SEQ ID NO: 1554000 - RNA, 19 nt, Homo sapiens
  misc_RNA (1)...(19): siRNA sense strand
caggauauucagcaaguca

SEQ ID NO: 1554001 - RNA, 19 nt, Homo sapiens
  misc_RNA (1)...(19): siRNA sense strand
caucaccaggccugacauu

SEQ ID NO: 1554002 - RNA, 19 nt, Homo sapiens
  misc_RNA (1)...(19): siRNA sense strand
gcucacccaagcugaugaa

SEQ ID NO: 1554003 - RNA, 19 nt, Homo sapiens
  misc_RNA (1)...(19): siRNA sense strand
uuuacaggcuggacucagu

SEQ ID NO: 1554004 - RNA, 19 nt, Homo sapiens
  misc_RNA (1)...(19): siRNA sense strand
gagaagggcugcaagaaga

SEQ ID NO: 1554005 - RNA, 19 nt, Homo sapiens
  misc_RNA (1)...(19): siRNA sense strand
gagaagggcugcaagaaga

SEQ ID NO: 1554006 - RNA, 19 nt, Homo sapiens
  misc_RNA (1)...(19): siRNA sense strand
gcaagaagaggugcaauua

SEQ ID NO: 1554007 - RNA, 19 nt, Homo sapiens
  misc_RNA (1)...(19): siRNA sense strand
ggaggauacugcugauuaa

SEQ ID NO: 1554008 - RNA, 19 nt, Homo sapiens
  misc_RNA (1)...(19): siRNA sense strand
ccacuggacuccucuguaa

SEQ ID NO: 1554009 - RNA, 19 nt, Homo sapiens
  misc_RNA (1)...(19): siRNA sense strand
gaagcgaggcugaaacuuu

SEQ ID NO: 1554010 - RNA, 19 nt, Homo sapiens
  misc_RNA (1)...(19): siRNA sense strand
aagcgaggcugaaacuuua

SEQ ID NO: 1554011 - RNA, 19 nt, Homo sapiens
  misc_RNA (1)...(19): siRNA sense strand
gcgaugacaugaagaagaa

SEQ ID NO: 1554012 - RNA, 19 nt, Homo sapiens
  misc_RNA (1)...(19): siRNA sense strand
ggauacugcugauuaagaa

SEQ ID NO: 1554013 - RNA, 19 nt, Homo sapiens
  misc_RNA (1)...(19): siRNA sense strand
gaagagcccauacucauga

SEQ ID NO: 1554014 - RNA, 19 nt, Homo sapiens
  misc_RNA (1)...(19): siRNA sense strand
ggagagggcauaagugaaa

SEQ ID NO: 1554015 - RNA, 19 nt, Homo sapiens
  misc_RNA (1)...(19): siRNA sense strand
gcgaauggcuggacaacau

SEQ ID NO: 1554016 - RNA, 19 nt, Homo sapiens
  misc_RNA (1)...(19): siRNA sense strand
gcaguuagaggaaguuaaa

SEQ ID NO: 1554017 - RNA, 19 nt, Homo sapiens
  misc_RNA (1)...(19): siRNA sense strand
aagaagaggugcaauuaga

SEQ ID NO: 1554018 - RNA, 19 nt, Homo sapiens
  misc_RNA (1)...(19): siRNA sense strand
ccagaggccugauucaaga

SEQ ID NO: 1554019 - RNA, 19 nt, Homo sapiens
  misc_RNA (1)...(19): siRNA sense strand
ggacagagcugccccugaa

SEQ ID NO: 1554020 - RNA, 19 nt, Homo sapiens
  misc_RNA (1)...(19): siRNA sense strand
ggaagaaagugagcccuau

SEQ ID NO: 1554021 - RNA, 19 nt, Homo sapiens
  misc_RNA (1)...(19): siRNA sense strand
aagaagggcugcaagaaga

SEQ ID NO: 1554022 - RNA, 19 nt, Homo sapiens
  misc_RNA (1)...(19): siRNA sense strand
aagaagggcugcaagaaga

SEQ ID NO: 1554023 - RNA, 19 nt, Homo sapiens
  misc_RNA (1)...(19): siRNA sense strand
gcgcgugccucucuccuuu

SEQ ID NO: 1554024 - RNA, 19 nt, Homo sapiens
  misc_RNA (1)...(19): siRNA sense strand
aagaagggcugcaagaaga

SEQ ID NO: 1554025 - RNA, 19 nt, Homo sapiens
  misc_RNA (1)...(19): siRNA sense strand
aagaagggcugcaagaaga

SEQ ID NO: 1554026 - RNA, 19 nt, Homo sapiens
  misc_RNA (1)...(19): siRNA sense strand
aagaagggcugcaagaaga

SEQ ID NO: 1554027 - RNA, 19 nt, Homo sapiens
  misc_RNA (1)...(19): siRNA sense strand
aagaagggcugcaagaaga

SEQ ID NO: 1554028 - RNA, 19 nt, Homo sapiens
  misc_RNA (1)...(19): siRNA sense strand
gcaguuagaggaaauugaa

SEQ ID NO: 1554029 - RNA, 19 nt, Homo sapiens
  misc_RNA (1)...(19): siRNA sense strand
ggacaacauuccagaagag

SEQ ID NO: 1554030 - RNA, 19 nt, Homo sapiens
  misc_RNA (1)...(19): siRNA sense strand
uaugaaaucuggacgaauc

SEQ ID NO: 1554031 - RNA, 19 nt, Homo sapiens
  misc_RNA (1)...(19): siRNA sense strand
agacaaagaucccaaacuc

SEQ ID NO: 1554032 - RNA, 19 nt, Homo sapiens
  misc_RNA (1)...(19): siRNA sense strand
caaugaggaugaagcagaa

SEQ ID NO: 1554033 - RNA, 19 nt, Homo sapiens
  misc_RNA (1)...(19): siRNA sense strand
gcaaagugagguucaaaga

SEQ ID NO: 1554034 - RNA, 19 nt, Homo sapiens
  misc_RNA (1)...(19): siRNA sense strand
gcaguuagcugaaaacaca

SEQ ID NO: 1554035 - RNA, 19 nt, Homo sapiens
  misc_RNA (1)...(19): siRNA sense strand
ccagaaggcagaagguaua

SEQ ID NO: 1554036 - RNA, 19 nt, Homo sapiens
  misc_RNA (1)...(19): siRNA sense strand
uaaagaaacggaaggagaa

SEQ ID NO: 1554037 - RNA, 19 nt, Homo sapiens
  misc_RNA (1)...(19): siRNA sense strand
aaccagaggucccaucaaa

SEQ ID NO: 1554038 - RNA, 19 nt, Homo sapiens
  misc_RNA (1)...(19): siRNA sense strand
caagaugacuuagauuucu

SEQ ID NO: 1554039 - RNA, 19 nt, Homo sapiens
  misc_RNA (1)...(19): siRNA sense strand
gaagaagguccgcaugaau

SEQ ID NO: 1554040 - RNA, 19 nt, Homo sapiens
  misc_RNA (1)...(19): siRNA sense strand
gaagaagggcugcaagaag

SEQ ID NO: 1554041 - RNA, 19 nt, Homo sapiens
  misc_RNA (1)...(19): siRNA sense strand
gaagaagggcugcaagaag

SEQ ID NO: 1554042 - RNA, 19 nt, Homo sapiens
  misc_RNA (1)...(19): siRNA sense strand
gaagaagggcugcaagaag

SEQ ID NO: 1554043 - RNA, 19 nt, Homo sapiens
  misc_RNA (1)...(19): siRNA sense strand
gaagaagggcugcaagaag

SEQ ID NO: 1554044 - RNA, 19 nt, Homo sapiens
  misc_RNA (1)...(19): siRNA sense strand
gaagaagggcugcaagaag

SEQ ID NO: 1554045 - RNA, 19 nt, Homo sapiens
  misc_RNA (1)...(19): siRNA sense strand
gaagaagggcugcaagaag

SEQ ID NO: 1554046 - RNA, 19 nt, Homo sapiens
  misc_RNA (1)...(19): siRNA sense strand
gcacagaggaacccacaga

SEQ ID NO: 1554047 - RNA, 19 nt, Homo sapiens
  misc_RNA (1)...(19): siRNA sense strand
ggaugaccauucucuggaa

SEQ ID NO: 1554048 - RNA, 19 nt, Homo sapiens
  misc_RNA (1)...(19): siRNA sense strand
cggaggauacugcugauua

SEQ ID NO: 1554049 - RNA, 19 nt, Homo sapiens
  misc_RNA (1)...(19): siRNA sense strand
gagaaggacagcaagaaga

SEQ ID NO: 1554050 - RNA, 19 nt, Homo sapiens
  misc_RNA (1)...(19): siRNA sense strand
ggaaggagaaggacagcaa

SEQ ID NO: 1554051 - RNA, 19 nt, Homo sapiens
  misc_RNA (1)...(19): siRNA sense strand
gggcugacuucaagaaaca

SEQ ID NO: 1554052 - RNA, 19 nt, Homo sapiens
  misc_RNA (1)...(19): siRNA sense strand
gccaagaugacuuagauuu

SEQ ID NO: 1554053 - RNA, 19 nt, Homo sapiens
  misc_RNA (1)...(19): siRNA sense strand
uagaggcccuggagacuga

SEQ ID NO: 1554054 - RNA, 19 nt, Homo sapiens
  misc_RNA (1)...(19): siRNA sense strand
ggcaggaggugaccaagau

SEQ ID NO: 1554055 - RNA, 19 nt, Homo sapiens
  misc_RNA (1)...(19): siRNA sense strand
gccagagacucaacagaga

SEQ ID NO: 1554056 - RNA, 19 nt, Homo sapiens
  misc_RNA (1)...(19): siRNA sense strand
ccagaggucccaucaaaga

SEQ ID NO: 1554057 - RNA, 19 nt, Homo sapiens
  misc_RNA (1)...(19): siRNA sense strand
uaaagaagggccagaagga

SEQ ID NO: 1554058 - RNA, 19 nt, Homo sapiens
  misc_RNA (1)...(19): siRNA sense strand
gaaaggcucccaggaagau

SEQ ID NO: 1554059 - RNA, 19 nt, Homo sapiens
  misc_RNA (1)...(19): siRNA sense strand
uaucugggcugacuucaag

SEQ ID NO: 1554060 - RNA, 19 nt, Homo sapiens
  misc_RNA (1)...(19): siRNA sense strand
gcagaaagacucagaaaau

SEQ ID NO: 1554061 - RNA, 19 nt, Homo sapiens
  misc_RNA (1)...(19): siRNA sense strand
aaagugagguucaaagacu

SEQ ID NO: 1554062 - RNA, 19 nt, Homo sapiens
  misc_RNA (1)...(19): siRNA sense strand
agaagaagguccgcaugaa

SEQ ID NO: 1554063 - RNA, 19 nt, Homo sapiens
  misc_RNA (1)...(19): siRNA sense strand
ugaagagggucucaaagag

SEQ ID NO: 1554064 - RNA, 19 nt, Homo sapiens
  misc_RNA (1)...(19): siRNA sense strand
agacagugguucucaguca

SEQ ID NO: 1554065 - RNA, 19 nt, Homo sapiens
  misc_RNA (1)...(19): siRNA sense strand
gggcagagaaggcacagaa

SEQ ID NO: 1554066 - RNA, 19 nt, Homo sapiens
  misc_RNA (1)...(19): siRNA sense strand
ugaagaaacaggaggagaa

SEQ ID NO: 1554067 - RNA, 19 nt, Homo sapiens
  misc_RNA (1)...(19): siRNA sense strand
cagccagagucagaaguua

SEQ ID NO: 1554068 - RNA, 19 nt, Homo sapiens
  misc_RNA (1)...(19): siRNA sense strand
ggaaaggcucccaggaaga

SEQ ID NO: 1554069 - RNA, 19 nt, Homo sapiens
  misc_RNA (1)...(19): siRNA sense strand
ggagaagggcugcaagaag

SEQ ID NO: 1554070 - RNA, 19 nt, Homo sapiens
  misc_RNA (1)...(19): siRNA sense strand
ggauguacccagaaaguuc

SEQ ID NO: 1554071 - RNA, 19 nt, Homo sapiens
  misc_RNA (1)...(19): siRNA sense strand
uagaggcccuggagguuga

SEQ ID NO: 1554072 - RNA, 19 nt, Homo sapiens
  misc_RNA (1)...(19): siRNA sense strand
gccagagucagaaguuaua

SEQ ID NO: 1554073 - RNA, 19 nt, Homo sapiens
  misc_RNA (1)...(19): siRNA sense strand
ggagggagagggcauaagu

SEQ ID NO: 1554074 - RNA, 19 nt, Homo sapiens
  misc_RNA (1)...(19): siRNA sense strand
gaagaaagugagcccuaug

SEQ ID NO: 1554075 - RNA, 19 nt, Homo sapiens
  misc_RNA (1)...(19): siRNA sense strand
ggagaagggcugcaagaag

SEQ ID NO: 1554076 - RNA, 19 nt, Homo sapiens
  misc_RNA (1)...(19): siRNA sense strand
agaagaagaggcgcaguua

SEQ ID NO: 1554077 - RNA, 19 nt, Homo sapiens
  misc_RNA (1)...(19): siRNA sense strand
gcugcuaccucugcucuga

SEQ ID NO: 1554078 - RNA, 19 nt, Homo sapiens
  misc_RNA (1)...(19): siRNA sense strand
gcuugagccugguuuggaa

SEQ ID NO: 1554079 - RNA, 19 nt, Homo sapiens
  misc_RNA (1)...(19): siRNA sense strand
ggaggccagugguguguca

SEQ ID NO: 1554080 - RNA, 19 nt, Homo sapiens
  misc_RNA (1)...(19): siRNA sense strand
ggaggcccaaccagaguua

SEQ ID NO: 1554081 - RNA, 19 nt, Homo sapiens
  misc_RNA (1)...(19): siRNA sense strand
ggaggcccaaccagaguua

SEQ ID NO: 1554082 - RNA, 19 nt, Homo sapiens
  misc_RNA (1)...(19): siRNA sense strand
caagagagagcuccagaag

SEQ ID NO: 1554083 - RNA, 19 nt, Homo sapiens
  misc_RNA (1)...(19): siRNA sense strand
agaggaaauugaagaaaca

SEQ ID NO: 1554084 - RNA, 19 nt, Homo sapiens
  misc_RNA (1)...(19): siRNA sense strand
uaaagaagggacagaagga

SEQ ID NO: 1554085 - RNA, 19 nt, Homo sapiens
  misc_RNA (1)...(19): siRNA sense strand
gaggugcaauuagaggaaa

SEQ ID NO: 1554086 - RNA, 19 nt, Homo sapiens
  misc_RNA (1)...(19): siRNA sense strand
caugagggauccagcgaau

SEQ ID NO: 1554087 - RNA, 19 nt, Homo sapiens
  misc_RNA (1)...(19): siRNA sense strand
ggaaggccaccaggaugua

SEQ ID NO: 1554088 - RNA, 19 nt, Homo sapiens
  misc_RNA (1)...(19): siRNA sense strand
gaaggcagaagguauagag

SEQ ID NO: 1554089 - RNA, 19 nt, Homo sapiens
  misc_RNA (1)...(19): siRNA sense strand
gcgcuugugccaccaauga

SEQ ID NO: 1554090 - RNA, 19 nt, Homo sapiens
  misc_RNA (1)...(19): siRNA sense strand
caagggagccucugguucu

SEQ ID NO: 1554091 - RNA, 19 nt, Homo sapiens
  misc_RNA (1)...(19): siRNA sense strand
cagaagagcccauacucau

SEQ ID NO: 1554092 - RNA, 19 nt, Homo sapiens
  misc_RNA (1)...(19): siRNA sense strand
uagaggaaauugaagaaac

SEQ ID NO: 1554093 - RNA, 19 nt, Homo sapiens
  misc_RNA (1)...(19): siRNA sense strand
aagaagaggcgcaguuaga

SEQ ID NO: 1554094 - RNA, 19 nt, Homo sapiens
  misc_RNA (1)...(19): siRNA sense strand
ccugagucuuucaucuuua

SEQ ID NO: 1554095 - RNA, 19 nt, Homo sapiens
  misc_RNA (1)...(19): siRNA sense strand
gccagaaucagaaggugua

SEQ ID NO: 1554096 - RNA, 19 nt, Homo sapiens
  misc_RNA (1)...(19): siRNA sense strand
ggaaaacccacaacaguga

SEQ ID NO: 1554097 - RNA, 19 nt, Homo sapiens
  misc_RNA (1)...(19): siRNA sense strand
caucuggguguccguguua

SEQ ID NO: 1554098 - RNA, 19 nt, Homo sapiens
  misc_RNA (1)...(19): siRNA sense strand
cugagucuuucaucuuuaa

SEQ ID NO: 1554099 - RNA, 19 nt, Homo sapiens
  misc_RNA (1)...(19): siRNA sense strand
gaggagaagggcugcaaga

SEQ ID NO: 1554100 - RNA, 19 nt, Homo sapiens
  misc_RNA (1)...(19): siRNA sense strand
ccaagaugacuuagauuuc

SEQ ID NO: 1554101 - RNA, 19 nt, Homo sapiens
  misc_RNA (1)...(19): siRNA sense strand
uggccaagaugacuuagau

SEQ ID NO: 1554102 - RNA, 19 nt, Homo sapiens
  misc_RNA (1)...(19): siRNA sense strand
ggaggaggaagcaggaaga

SEQ ID NO: 1554103 - RNA, 19 nt, Homo sapiens
  misc_RNA (1)...(19): siRNA sense strand
guuagaggaaguuaaagaa

SEQ ID NO: 1554104 - RNA, 19 nt, Homo sapiens
  misc_RNA (1)...(19): siRNA sense strand
gaagauugccuggauauuu

SEQ ID NO: 1554105 - RNA, 19 nt, Homo sapiens
  misc_RNA (1)...(19): siRNA sense strand
gcagaagcaucacagugua

SEQ ID NO: 1554106 - RNA, 19 nt, Homo sapiens
  misc_RNA (1)...(19): siRNA sense strand
gaugaagcaugcccucuuu

SEQ ID NO: 1554107 - RNA, 19 nt, Homo sapiens
  misc_RNA (1)...(19): siRNA sense strand
uagacaggcuucugaauuu

SEQ ID NO: 1554108 - RNA, 19 nt, Homo sapiens
  misc_RNA (1)...(19): siRNA sense strand
acaaggaacuggaagauug

SEQ ID NO: 1554109 - RNA, 19 nt, Homo sapiens
  misc_RNA (1)...(19): siRNA sense strand
ugacaacuauaaccaagua

SEQ ID NO: 1554110 - RNA, 19 nt, Homo sapiens
  misc_RNA (1)...(19): siRNA sense strand
agacuuggcuucacacaaa

SEQ ID NO: 1554111 - RNA, 19 nt, Homo sapiens
  misc_RNA (1)...(19): siRNA sense strand
ggugguaucugcuuuauag

SEQ ID NO: 1554112 - RNA, 19 nt, Homo sapiens
  misc_RNA (1)...(19): siRNA sense strand
gcaguuugauuccagcuaa

SEQ ID NO: 1554113 - RNA, 19 nt, Homo sapiens
  misc_RNA (1)...(19): siRNA sense strand
caucuagucucuacugaaa

SEQ ID NO: 1554114 - RNA, 19 nt, Homo sapiens
  misc_RNA (1)...(19): siRNA sense strand
ggaggcauuugguuuauug

SEQ ID NO: 1554115 - RNA, 19 nt, Homo sapiens
  misc_RNA (1)...(19): siRNA sense strand
ugaauuagaugcugagcuu

SEQ ID NO: 1554116 - RNA, 19 nt, Homo sapiens
  misc_RNA (1)...(19): siRNA sense strand
gugcugaaauuaacacauu

SEQ ID NO: 1554117 - RNA, 19 nt, Homo sapiens
  misc_RNA (1)...(19): siRNA sense strand
uguuaagacucucucauua

SEQ ID NO: 1554118 - RNA, 19 nt, Homo sapiens
  misc_RNA (1)...(19): siRNA sense strand
acaaacugcugucuguaua

SEQ ID NO: 1554119 - RNA, 19 nt, Homo sapiens
  misc_RNA (1)...(19): siRNA sense strand
ggauauugaucaacagaug

SEQ ID NO: 1554120 - RNA, 19 nt, Homo sapiens
  misc_RNA (1)...(19): siRNA sense strand
gcaagucgcagaaucagaa

SEQ ID NO: 1554121 - RNA, 19 nt, Homo sapiens
  misc_RNA (1)...(19): siRNA sense strand
gaaugacccauggcuauua

SEQ ID NO: 1554122 - RNA, 19 nt, Homo sapiens
  misc_RNA (1)...(19): siRNA sense strand
gagaugaaucagugaauaa

SEQ ID NO: 1554123 - RNA, 19 nt, Homo sapiens
  misc_RNA (1)...(19): siRNA sense strand
gcagugcuuugcuagcuaa

SEQ ID NO: 1554124 - RNA, 19 nt, Homo sapiens
  misc_RNA (1)...(19): siRNA sense strand
ucagauggauugcaguuug

SEQ ID NO: 1554125 - RNA, 19 nt, Homo sapiens
  misc_RNA (1)...(19): siRNA sense strand
gaacaaagccauuaauccu

SEQ ID NO: 1554126 - RNA, 19 nt, Homo sapiens
  misc_RNA (1)...(19): siRNA sense strand
acaaagcuaugcugucuau

SEQ ID NO: 1554127 - RNA, 19 nt, Homo sapiens
  misc_RNA (1)...(19): siRNA sense strand
ggaauuccaaccuguguaa

SEQ ID NO: 1554128 - RNA, 19 nt, Homo sapiens
  misc_RNA (1)...(19): siRNA sense strand
ccucugauguuguugaauu

SEQ ID NO: 1554129 - RNA, 19 nt, Homo sapiens
  misc_RNA (1)...(19): siRNA sense strand
aaacaaagcuaugcugucu

SEQ ID NO: 1554130 - RNA, 19 nt, Homo sapiens
  misc_RNA (1)...(19): siRNA sense strand
caacugaccguaacaagga

SEQ ID NO: 1554131 - RNA, 19 nt, Homo sapiens
  misc_RNA (1)...(19): siRNA sense strand
guuauggucuugaucuuug

SEQ ID NO: 1554132 - RNA, 19 nt, Homo sapiens
  misc_RNA (1)...(19): siRNA sense strand
gggaggauauugaucaaca

SEQ ID NO: 1554133 - RNA, 19 nt, Homo sapiens
  misc_RNA (1)...(19): siRNA sense strand
ugaaauaauugccacaaag

SEQ ID NO: 1554134 - RNA, 19 nt, Homo sapiens
  misc_RNA (1)...(19): siRNA sense strand
gcuaugcugucuaucgauu

SEQ ID NO: 1554135 - RNA, 19 nt, Homo sapiens
  misc_RNA (1)...(19): siRNA sense strand
aaggagaaaugcacagaaa

SEQ ID NO: 1554136 - RNA, 19 nt, Homo sapiens
  misc_RNA (1)...(19): siRNA sense strand
agacugaaacgcaaauuaa

SEQ ID NO: 1554137 - RNA, 19 nt, Homo sapiens
  misc_RNA (1)...(19): siRNA sense strand
aagacucucucauuaauug

SEQ ID NO: 1554138 - RNA, 19 nt, Homo sapiens
  misc_RNA (1)...(19): siRNA sense strand
uaauaaaucccucugaugu

SEQ ID NO: 1554139 - RNA, 19 nt, Homo sapiens
  misc_RNA (1)...(19): siRNA sense strand
ggcauuugguuuauugauu

SEQ ID NO: 1554140 - RNA, 19 nt, Homo sapiens
  misc_RNA (1)...(19): siRNA sense strand
agagaugaaucagugaaua

SEQ ID NO: 1554141 - RNA, 19 nt, Homo sapiens
  misc_RNA (1)...(19): siRNA sense strand
uagaguacuuggugauaaa

SEQ ID NO: 1554142 - RNA, 19 nt, Homo sapiens
  misc_RNA (1)...(19): siRNA sense strand
ucuagucucuacugaaauu

SEQ ID NO: 1554143 - RNA, 19 nt, Homo sapiens
  misc_RNA (1)...(19): siRNA sense strand
ucaaggauauucuaacaac

SEQ ID NO: 1554144 - RNA, 19 nt, Homo sapiens
  misc_RNA (1)...(19): siRNA sense strand
auaaaucccucugauguug

SEQ ID NO: 1554145 - RNA, 19 nt, Homo sapiens
  misc_RNA (1)...(19): siRNA sense strand
ccucaucuaucuugacaga

SEQ ID NO: 1554146 - RNA, 19 nt, Homo sapiens
  misc_RNA (1)...(19): siRNA sense strand
gcaaguacuacaaugauuc

SEQ ID NO: 1554147 - RNA, 19 nt, Homo sapiens
  misc_RNA (1)...(19): siRNA sense strand
ucuaacaaccagccauuua

SEQ ID NO: 1554148 - RNA, 19 nt, Homo sapiens
  misc_RNA (1)...(19): siRNA sense strand
ggugauaaacaaauaguug

SEQ ID NO: 1554149 - RNA, 19 nt, Homo sapiens
  misc_RNA (1)...(19): siRNA sense strand
gaaauaauugccacaaagg

SEQ ID NO: 1554150 - RNA, 19 nt, Homo sapiens
  misc_RNA (1)...(19): siRNA sense strand
ggacaauugcagacugaaa

SEQ ID NO: 1554151 - RNA, 19 nt, Homo sapiens
  misc_RNA (1)...(19): siRNA sense strand
caauaucuuugcaucacaa

SEQ ID NO: 1554152 - RNA, 19 nt, Homo sapiens
  misc_RNA (1)...(19): siRNA sense strand
cagauggauugcaguuuga

SEQ ID NO: 1554153 - RNA, 19 nt, Homo sapiens
  misc_RNA (1)...(19): siRNA sense strand
uuagaguacuuggugauaa

SEQ ID NO: 1554154 - RNA, 19 nt, Homo sapiens
  misc_RNA (1)...(19): siRNA sense strand
ggacuuacaauuugcucaa

SEQ ID NO: 1554155 - RNA, 19 nt, Homo sapiens
  misc_RNA (1)...(19): siRNA sense strand
cagacugaaacgcaaauua

SEQ ID NO: 1554156 - RNA, 19 nt, Homo sapiens
  misc_RNA (1)...(19): siRNA sense strand
aaucaacacucuaauuggu

SEQ ID NO: 1554157 - RNA, 19 nt, Homo sapiens
  misc_RNA (1)...(19): siRNA sense strand
gcaaugacaacuauaacca

SEQ ID NO: 1554158 - RNA, 19 nt, Homo sapiens
  misc_RNA (1)...(19): siRNA sense strand
ugauugcaaugacaacuau

SEQ ID NO: 1554159 - RNA, 19 nt, Homo sapiens
  misc_RNA (1)...(19): siRNA sense strand
aaacugcugucuguauaga

SEQ ID NO: 1554160 - RNA, 19 nt, Homo sapiens
  misc_RNA (1)...(19): siRNA sense strand
gcaugugccuggugcuaca

SEQ ID NO: 1554161 - RNA, 19 nt, Homo sapiens
  misc_RNA (1)...(19): siRNA sense strand
aagcaugcccucuuucaaa

SEQ ID NO: 1554162 - RNA, 19 nt, Homo sapiens
  misc_RNA (1)...(19): siRNA sense strand
gaagcaugcccucuuucaa

SEQ ID NO: 1554163 - RNA, 19 nt, Homo sapiens
  misc_RNA (1)...(19): siRNA sense strand
gugaguuuccacuugauua

SEQ ID NO: 1554164 - RNA, 19 nt, Homo sapiens
  misc_RNA (1)...(19): siRNA sense strand
ucaggugucuccucuccuu

SEQ ID NO: 1554165 - RNA, 19 nt, Homo sapiens
  misc_RNA (1)...(19): siRNA sense strand
ggaauuagugacaacuuca

SEQ ID NO: 1554166 - RNA, 19 nt, Homo sapiens
  misc_RNA (1)...(19): siRNA sense strand
gaagcaaauagcauaacuu

SEQ ID NO: 1554167 - RNA, 19 nt, Homo sapiens
  misc_RNA (1)...(19): siRNA sense strand
ggauuucaguauauaagag

SEQ ID NO: 1554168 - RNA, 19 nt, Homo sapiens
  misc_RNA (1)...(19): siRNA sense strand
guacaucccaggaaagaag

SEQ ID NO: 1554169 - RNA, 19 nt, Homo sapiens
  misc_RNA (1)...(19): siRNA sense strand
cugcaacgauaagaaauga

SEQ ID NO: 1554170 - RNA, 19 nt, Homo sapiens
  misc_RNA (1)...(19): siRNA sense strand
gauauugaucaacagauga

SEQ ID NO: 1554171 - RNA, 19 nt, Homo sapiens
  misc_RNA (1)...(19): siRNA sense strand
aagugauacucuacucaua

SEQ ID NO: 1554172 - RNA, 19 nt, Homo sapiens
  misc_RNA (1)...(19): siRNA sense strand
gcucaagcucuguuuguug

SEQ ID NO: 1554173 - RNA, 19 nt, Homo sapiens
  misc_RNA (1)...(19): siRNA sense strand
uaaucuaugugcaucuuca

SEQ ID NO: 1554174 - RNA, 19 nt, Homo sapiens
  misc_RNA (1)...(19): siRNA sense strand
guacuuggugauaaacaaa

SEQ ID NO: 1554175 - RNA, 19 nt, Homo sapiens
  misc_RNA (1)...(19): siRNA sense strand
caguguacaucccaggaaa

SEQ ID NO: 1554176 - RNA, 19 nt, Homo sapiens
  misc_RNA (1)...(19): siRNA sense strand
ucaucuaucuugacagaag

SEQ ID NO: 1554177 - RNA, 19 nt, Homo sapiens
  misc_RNA (1)...(19): siRNA sense strand
augcugagcuuggaaauca

SEQ ID NO: 1554178 - RNA, 19 nt, Homo sapiens
  misc_RNA (1)...(19): siRNA sense strand
gaugcaaggaauugugauu

SEQ ID NO: 1554179 - RNA, 19 nt, Homo sapiens
  misc_RNA (1)...(19): siRNA sense strand
gauuccagcuaaccuugug

SEQ ID NO: 1554180 - RNA, 19 nt, Homo sapiens
  misc_RNA (1)...(19): siRNA sense strand
agauaaacuugaacagcuu

SEQ ID NO: 1554181 - RNA, 19 nt, Homo sapiens
  misc_RNA (1)...(19): siRNA sense strand
gcccucaucuaucuugaca

SEQ ID NO: 1554182 - RNA, 19 nt, Homo sapiens
  misc_RNA (1)...(19): siRNA sense strand
gaaucugcaacgauaagaa

SEQ ID NO: 1554183 - RNA, 19 nt, Homo sapiens
  misc_RNA (1)...(19): siRNA sense strand
uauagaugauugcaaguac

SEQ ID NO: 1554184 - RNA, 19 nt, Homo sapiens
  misc_RNA (1)...(19): siRNA sense strand
caaagccauuaauccugaa

SEQ ID NO: 1554185 - RNA, 19 nt, Homo sapiens
  misc_RNA (1)...(19): siRNA sense strand
uguggaggcauuugguuua

SEQ ID NO: 1554186 - RNA, 19 nt, Homo sapiens
  misc_RNA (1)...(19): siRNA sense strand
uaauuggucagauggauug

SEQ ID NO: 1554187 - RNA, 19 nt, Homo sapiens
  misc_RNA (1)...(19): siRNA sense strand
ggcagugcuuugcuagcua

SEQ ID NO: 1554188 - RNA, 19 nt, Homo sapiens
  misc_RNA (1)...(19): siRNA sense strand
cccacucuauccaggaaua

SEQ ID NO: 1554189 - RNA, 19 nt, Homo sapiens
  misc_RNA (1)...(19): siRNA sense strand
aagauugccuggauauuuu

SEQ ID NO: 1554190 - RNA, 19 nt, Homo sapiens
  misc_RNA (1)...(19): siRNA sense strand
guaacaaggaacuggaaga

SEQ ID NO: 1554191 - RNA, 19 nt, Homo sapiens
  misc_RNA (1)...(19): siRNA sense strand
caagcucuguuuguugaug

SEQ ID NO: 1554192 - RNA, 19 nt, Homo sapiens
  misc_RNA (1)...(19): siRNA sense strand
gaguuuccacuugauuaua

SEQ ID NO: 1554193 - RNA, 19 nt, Homo sapiens
  misc_RNA (1)...(19): siRNA sense strand
caaguacuacaaugauuca

SEQ ID NO: 1554194 - RNA, 19 nt, Homo sapiens
  misc_RNA (1)...(19): siRNA sense strand
ggucagauggauugcaguu

SEQ ID NO: 1554195 - RNA, 19 nt, Homo sapiens
  misc_RNA (1)...(19): siRNA sense strand
gaaaugcacagaaaaucaa

SEQ ID NO: 1554196 - RNA, 19 nt, Homo sapiens
  misc_RNA (1)...(19): siRNA sense strand
guggauucaucuucaagga

SEQ ID NO: 1554197 - RNA, 19 nt, Homo sapiens
  misc_RNA (1)...(19): siRNA sense strand
auagacaggcuucugaauu

SEQ ID NO: 1554198 - RNA, 19 nt, Homo sapiens
  misc_RNA (1)...(19): siRNA sense strand
ggaagauugccuggauauu

SEQ ID NO: 1554199 - RNA, 19 nt, Homo sapiens
  misc_RNA (1)...(19): siRNA sense strand
uaacaaggaacuggaagau

SEQ ID NO: 1554200 - RNA, 19 nt, Homo sapiens
  misc_RNA (1)...(19): siRNA sense strand
ugucuccucuccuuaacuu

SEQ ID NO: 1554201 - RNA, 19 nt, Homo sapiens
  misc_RNA (1)...(19): siRNA sense strand
guggaggcauuugguuuau

SEQ ID NO: 1554202 - RNA, 19 nt, Homo sapiens
  misc_RNA (1)...(19): siRNA sense strand
acccauggcuauuaucuag

SEQ ID NO: 1554203 - RNA, 19 nt, Homo sapiens
  misc_RNA (1)...(19): siRNA sense strand
aagaaugacccauggcuau

SEQ ID NO: 1554204 - RNA, 19 nt, Homo sapiens
  misc_RNA (1)...(19): siRNA sense strand
agaagcagcucucauccua

SEQ ID NO: 1554205 - RNA, 19 nt, Homo sapiens
  misc_RNA (1)...(19): siRNA sense strand
gugaagcacuguguggaaa

SEQ ID NO: 1554206 - RNA, 19 nt, Homo sapiens
  misc_RNA (1)...(19): siRNA sense strand
gacacaaguucuccuacga

SEQ ID NO: 1554207 - RNA, 19 nt, Homo sapiens
  misc_RNA (1)...(19): siRNA sense strand
aagaugagagugcacauuu

SEQ ID NO: 1554208 - RNA, 19 nt, Homo sapiens
  misc_RNA (1)...(19): siRNA sense strand
gcagcucucauccuacaaa

SEQ ID NO: 1554209 - RNA, 19 nt, Homo sapiens
  misc_RNA (1)...(19): siRNA sense strand
aagcagcucucauccuaca

SEQ ID NO: 1554210 - RNA, 19 nt, Homo sapiens
  misc_RNA (1)...(19): siRNA sense strand
ggugaagcacuguguggaa

SEQ ID NO: 1554211 - RNA, 19 nt, Homo sapiens
  misc_RNA (1)...(19): siRNA sense strand
uuuguggacuacaguauug

SEQ ID NO: 1554212 - RNA, 19 nt, Homo sapiens
  misc_RNA (1)...(19): siRNA sense strand
agcaggagcuggugaagca

SEQ ID NO: 1554213 - RNA, 19 nt, Homo sapiens
  misc_RNA (1)...(19): siRNA sense strand
cuacaagagcgccaacuuc

SEQ ID NO: 1554214 - RNA, 19 nt, Homo sapiens
  misc_RNA (1)...(19): siRNA sense strand
gcuacaagagcgccaacuu

SEQ ID NO: 1554215 - RNA, 19 nt, Homo sapiens
  misc_RNA (1)...(19): siRNA sense strand
ccaucugccuggaggucua

SEQ ID NO: 1554216 - RNA, 19 nt, Homo sapiens
  misc_RNA (1)...(19): siRNA sense strand
ugucgaggcugcaacaaaa

SEQ ID NO: 1554217 - RNA, 19 nt, Homo sapiens
  misc_RNA (1)...(19): siRNA sense strand
agaugagagugcacauuuc

SEQ ID NO: 1554218 - RNA, 19 nt, Homo sapiens
  misc_RNA (1)...(19): siRNA sense strand
gaagcacuguguggaaagc

SEQ ID NO: 1554219 - RNA, 19 nt, Homo sapiens
  misc_RNA (1)...(19): siRNA sense strand
gaugagagugcacauuucg

SEQ ID NO: 1554220 - RNA, 19 nt, Homo sapiens
  misc_RNA (1)...(19): siRNA sense strand
gaagguccaggagcagaug

SEQ ID NO: 1554221 - RNA, 19 nt, Homo sapiens
  misc_RNA (1)...(19): siRNA sense strand
gcucuggcccugucucucu

SEQ ID NO: 1554222 - RNA, 19 nt, Homo sapiens
  misc_RNA (1)...(19): siRNA sense strand
aaagaugagagugcacauu

SEQ ID NO: 1554223 - RNA, 19 nt, Homo sapiens
  misc_RNA (1)...(19): siRNA sense strand
aggagcagauggccaacug

SEQ ID NO: 1554224 - RNA, 19 nt, Homo sapiens
  misc_RNA (1)...(19): siRNA sense strand
guucuccuacgacaccuuu

SEQ ID NO: 1554225 - RNA, 19 nt, Homo sapiens
  misc_RNA (1)...(19): siRNA sense strand
ggacggugcugaaagauga

SEQ ID NO: 1554226 - RNA, 19 nt, Homo sapiens
  misc_RNA (1)...(19): siRNA sense strand
caguauggcuucaacuaua

SEQ ID NO: 1554227 - RNA, 19 nt, Homo sapiens
  misc_RNA (1)...(19): siRNA sense strand
gcaagucuaccauaaguuu

SEQ ID NO: 1554228 - RNA, 19 nt, Homo sapiens
  misc_RNA (1)...(19): siRNA sense strand
guucgcagcucuccggaua

SEQ ID NO: 1554229 - RNA, 19 nt, Homo sapiens
  misc_RNA (1)...(19): siRNA sense strand
gagcaggugugagaaauau

SEQ ID NO: 1554230 - RNA, 19 nt, Homo sapiens
  misc_RNA (1)...(19): siRNA sense strand
gaaagugaguaaacaacau

SEQ ID NO: 1554231 - RNA, 19 nt, Homo sapiens
  misc_RNA (1)...(19): siRNA sense strand
uaacaaaggauaucuggaa

SEQ ID NO: 1554232 - RNA, 19 nt, Homo sapiens
  misc_RNA (1)...(19): siRNA sense strand
caaaggauaucuggaagga

SEQ ID NO: 1554233 - RNA, 19 nt, Homo sapiens
  misc_RNA (1)...(19): siRNA sense strand
gaaagcuacgaucaauuua

SEQ ID NO: 1554234 - RNA, 19 nt, Homo sapiens
  misc_RNA (1)...(19): siRNA sense strand
gaagaaagugaguaaacaa

SEQ ID NO: 1554235 - RNA, 19 nt, Homo sapiens
  misc_RNA (1)...(19): siRNA sense strand
ccagaaagcuacgaucaau

SEQ ID NO: 1554236 - RNA, 19 nt, Homo sapiens
  misc_RNA (1)...(19): siRNA sense strand
agaaagcuacgaucaauuu

SEQ ID NO: 1554237 - RNA, 19 nt, Homo sapiens
  misc_RNA (1)...(19): siRNA sense strand
ugagaaauauguugagaca

SEQ ID NO: 1554238 - RNA, 19 nt, Homo sapiens
  misc_RNA (1)...(19): siRNA sense strand
gaacaggagaagaaaauua

SEQ ID NO: 1554239 - RNA, 19 nt, Homo sapiens
  misc_RNA (1)...(19): siRNA sense strand
ucacgggccuucguucuaa

SEQ ID NO: 1554240 - RNA, 19 nt, Homo sapiens
  misc_RNA (1)...(19): siRNA sense strand
ggauaaagaccaaaucaag

SEQ ID NO: 1554241 - RNA, 19 nt, Homo sapiens
  misc_RNA (1)...(19): siRNA sense strand
ggaaucccauauaugaaug

SEQ ID NO: 1554242 - RNA, 19 nt, Homo sapiens
  misc_RNA (1)...(19): siRNA sense strand
guauauagcccauucuugu

SEQ ID NO: 1554243 - RNA, 19 nt, Homo sapiens
  misc_RNA (1)...(19): siRNA sense strand
cagcaagucuaccauaagu

SEQ ID NO: 1554244 - RNA, 19 nt, Homo sapiens
  misc_RNA (1)...(19): siRNA sense strand
gagcagcaagucuaccaua

SEQ ID NO: 1554245 - RNA, 19 nt, Homo sapiens
  misc_RNA (1)...(19): siRNA sense strand
ccaagucuguggcauagug

SEQ ID NO: 1554246 - RNA, 19 nt, Homo sapiens
  misc_RNA (1)...(19): siRNA sense strand
ugaagaaagugaguaaaca

SEQ ID NO: 1554247 - RNA, 19 nt, Homo sapiens
  misc_RNA (1)...(19): siRNA sense strand
gaaauauguugagacaaag

SEQ ID NO: 1554248 - RNA, 19 nt, Homo sapiens
  misc_RNA (1)...(19): siRNA sense strand
ccaagaguguaacaaagga

SEQ ID NO: 1554249 - RNA, 19 nt, Homo sapiens
  misc_RNA (1)...(19): siRNA sense strand
acaaguauauagcccauuc

SEQ ID NO: 1554250 - RNA, 19 nt, Homo sapiens
  misc_RNA (1)...(19): siRNA sense strand
uaccauaaguuucagaauc

SEQ ID NO: 1554251 - RNA, 19 nt, Homo sapiens
  misc_RNA (1)...(19): siRNA sense strand
ccuauuuccuguucucauu

SEQ ID NO: 1554252 - RNA, 19 nt, Homo sapiens
  misc_RNA (1)...(19): siRNA sense strand
gcagcucuccggauaaaga

SEQ ID NO: 1554253 - RNA, 19 nt, Homo sapiens
  misc_RNA (1)...(19): siRNA sense strand
ucccauauaugaaugaaga

SEQ ID NO: 1554254 - RNA, 19 nt, Homo sapiens
  misc_RNA (1)...(19): siRNA sense strand
ucagaguguucagcaauuu

SEQ ID NO: 1554255 - RNA, 19 nt, Homo sapiens
  misc_RNA (1)...(19): siRNA sense strand
ccgagggugucgaaucuuu

SEQ ID NO: 1554256 - RNA, 19 nt, Homo sapiens
  misc_RNA (1)...(19): siRNA sense strand
gagaggcaaacaaguauau

SEQ ID NO: 1554257 - RNA, 19 nt, Homo sapiens
  misc_RNA (1)...(19): siRNA sense strand
uggcaggucuggacauaga

SEQ ID NO: 1554258 - RNA, 19 nt, Homo sapiens
  misc_RNA (1)...(19): siRNA sense strand
ggagaggcaaacaaguaua

SEQ ID NO: 1554259 - RNA, 19 nt, Homo sapiens
  misc_RNA (1)...(19): siRNA sense strand
cagaauauccacagccuau

SEQ ID NO: 1554260 - RNA, 19 nt, Homo sapiens
  misc_RNA (1)...(19): siRNA sense strand
aguauggcuucaacuauaa

SEQ ID NO: 1554261 - RNA, 19 nt, Homo sapiens
  misc_RNA (1)...(19): siRNA sense strand
guucagcaauuuacagucu

SEQ ID NO: 1554262 - RNA, 19 nt, Homo sapiens
  misc_RNA (1)...(19): siRNA sense strand
gcaccuccaugagaaguuc

SEQ ID NO: 1554263 - RNA, 19 nt, Homo sapiens
  misc_RNA (1)...(19): siRNA sense strand
aaggagaggcaaacaagua

SEQ ID NO: 1554264 - RNA, 19 nt, Homo sapiens
  misc_RNA (1)...(19): siRNA sense strand
ccaucggagugguaucuaa

SEQ ID NO: 1554265 - RNA, 19 nt, Homo sapiens
  misc_RNA (1)...(19): siRNA sense strand
gcuccaagucuguggcaua

SEQ ID NO: 1554266 - RNA, 19 nt, Homo sapiens
  misc_RNA (1)...(19): siRNA sense strand
ucucuucccuacaacguuu

SEQ ID NO: 1554267 - RNA, 19 nt, Homo sapiens
  misc_RNA (1)...(19): siRNA sense strand
gucagaguguucagcaauu

SEQ ID NO: 1554268 - RNA, 19 nt, Homo sapiens
  misc_RNA (1)...(19): siRNA sense strand
gcaggugugagaaauaugu

SEQ ID NO: 1554269 - RNA, 19 nt, Homo sapiens
  misc_RNA (1)...(19): siRNA sense strand
gcgagcaggugugagaaau

SEQ ID NO: 1554270 - RNA, 19 nt, Homo sapiens
  misc_RNA (1)...(19): siRNA sense strand
uauauagcccauucuugua

SEQ ID NO: 1554271 - RNA, 19 nt, Homo sapiens
  misc_RNA (1)...(19): siRNA sense strand
aagcuacgaucaauuuaag

SEQ ID NO: 1554272 - RNA, 19 nt, Homo sapiens
  misc_RNA (1)...(19): siRNA sense strand
gagagcuguuggaaggaaa

SEQ ID NO: 1554273 - RNA, 19 nt, Homo sapiens
  misc_RNA (1)...(19): siRNA sense strand
ccuacaacguuugggauuu

SEQ ID NO: 1554274 - RNA, 19 nt, Homo sapiens
  misc_RNA (1)...(19): siRNA sense strand
gaagaaaauuagacacgau

SEQ ID NO: 1554275 - RNA, 19 nt, Homo sapiens
  misc_RNA (1)...(19): siRNA sense strand
gcacacuugcuucuacaga

SEQ ID NO: 1554276 - RNA, 19 nt, Homo sapiens
  misc_RNA (1)...(19): siRNA sense strand
ucuggaaggagaugaauuu

SEQ ID NO: 1554277 - RNA, 19 nt, Homo sapiens
  misc_RNA (1)...(19): siRNA sense strand
ucgcagcucuccggauaaa

SEQ ID NO: 1554278 - RNA, 19 nt, Homo sapiens
  misc_RNA (1)...(19): siRNA sense strand
uaaagacccgucagagugu

SEQ ID NO: 1554279 - RNA, 19 nt, Homo sapiens
  misc_RNA (1)...(19): siRNA sense strand
agucauccuuuccucagua

SEQ ID NO: 1554280 - RNA, 19 nt, Homo sapiens
  misc_RNA (1)...(19): siRNA sense strand
aaacggaaucccauauaug

SEQ ID NO: 1554281 - RNA, 19 nt, Homo sapiens
  misc_RNA (1)...(19): siRNA sense strand
cagaguguucagcaauuua

SEQ ID NO: 1554282 - RNA, 19 nt, Homo sapiens
  misc_RNA (1)...(19): siRNA sense strand
ucaacugccugcuccaagu

SEQ ID NO: 1554283 - RNA, 19 nt, Homo sapiens
  misc_RNA (1)...(19): siRNA sense strand
ccugaacagugacuugaau

SEQ ID NO: 1554284 - RNA, 19 nt, Homo sapiens
  misc_RNA (1)...(19): siRNA sense strand
caucguugguaucuucaga

SEQ ID NO: 1554285 - RNA, 19 nt, Homo sapiens
  misc_RNA (1)...(19): siRNA sense strand
aacggaaucccauauauga

SEQ ID NO: 1554286 - RNA, 19 nt, Homo sapiens
  misc_RNA (1)...(19): siRNA sense strand
gaaucaguauggcuucaac

SEQ ID NO: 1554287 - RNA, 19 nt, Homo sapiens
  misc_RNA (1)...(19): siRNA sense strand
gauuggauugucuguguuu

SEQ ID NO: 1554288 - RNA, 19 nt, Homo sapiens
  misc_RNA (1)...(19): siRNA sense strand
ucuuacuccugaccaauaa

SEQ ID NO: 1554289 - RNA, 19 nt, Homo sapiens
  misc_RNA (1)...(19): siRNA sense strand
ccacgaagccgcguaugau

SEQ ID NO: 1554290 - RNA, 19 nt, Homo sapiens
  misc_RNA (1)...(19): siRNA sense strand
ggaaaauauucuucucuca

SEQ ID NO: 1554291 - RNA, 19 nt, Homo sapiens
  misc_RNA (1)...(19): siRNA sense strand
ucuggacggugcugaaaga

SEQ ID NO: 1554292 - RNA, 19 nt, Homo sapiens
  misc_RNA (1)...(19): siRNA sense strand
gaggcaaacaaguauauag

SEQ ID NO: 1554293 - RNA, 19 nt, Homo sapiens
  misc_RNA (1)...(19): siRNA sense strand
gguccagauuaucccagua

SEQ ID NO: 1554294 - RNA, 19 nt, Homo sapiens
  misc_RNA (1)...(19): siRNA sense strand
gaaccaagugaaccucauc

SEQ ID NO: 1554295 - RNA, 19 nt, Homo sapiens
  misc_RNA (1)...(19): siRNA sense strand
guugguaucuucagaacac

SEQ ID NO: 1554296 - RNA, 19 nt, Homo sapiens
  misc_RNA (1)...(19): siRNA sense strand
gaugucaggcgacucacaa

SEQ ID NO: 1554297 - RNA, 19 nt, Homo sapiens
  misc_RNA (1)...(19): siRNA sense strand
cgagcaggugugagaaaua

SEQ ID NO: 1554298 - RNA, 19 nt, Homo sapiens
  misc_RNA (1)...(19): siRNA sense strand
gaaggagaggcaaacaagu

SEQ ID NO: 1554299 - RNA, 19 nt, Homo sapiens
  misc_RNA (1)...(19): siRNA sense strand
gguggugauugacgaagug

SEQ ID NO: 1554300 - RNA, 19 nt, Homo sapiens
  misc_RNA (1)...(19): siRNA sense strand
gcagcaagucuaccauaag

SEQ ID NO: 1554301 - RNA, 19 nt, Homo sapiens
  misc_RNA (1)...(19): siRNA sense strand
uugacgugcuggcuccuua

SEQ ID NO: 1554302 - RNA, 19 nt, Homo sapiens
  misc_RNA (1)...(19): siRNA sense strand
ggugugagaaauauguuga

SEQ ID NO: 1554303 - RNA, 19 nt, Homo sapiens
  misc_RNA (1)...(19): siRNA sense strand
uaccaagaguguaacaaag

SEQ ID NO: 1554304 - RNA, 19 nt, Homo sapiens
  misc_RNA (1)...(19): siRNA sense strand
gaaagcccagaagcccuua

SEQ ID NO: 1554305 - RNA, 19 nt, Homo sapiens
  misc_RNA (1)...(19): siRNA sense strand
caucggagugguaucuaaa

SEQ ID NO: 1554306 - RNA, 19 nt, Homo sapiens
  misc_RNA (1)...(19): siRNA sense strand
guucauccuuggaagaucu

SEQ ID NO: 1554307 - RNA, 19 nt, Homo sapiens
  misc_RNA (1)...(19): siRNA sense strand
agcagcaagucuaccauaa

SEQ ID NO: 1554308 - RNA, 19 nt, Homo sapiens
  misc_RNA (1)...(19): siRNA sense strand
augaaguccugaacaguga

SEQ ID NO: 1554309 - RNA, 19 nt, Homo sapiens
  misc_RNA (1)...(19): siRNA sense strand
gaaucuuucggaagucuau

SEQ ID NO: 1554310 - RNA, 19 nt, Homo sapiens
  misc_RNA (1)...(19): siRNA sense strand
ucuuguaacuucuaucucu

SEQ ID NO: 1554311 - RNA, 19 nt, Homo sapiens
  misc_RNA (1)...(19): siRNA sense strand
ugaccaauaaguuuaagga

SEQ ID NO: 1554312 - RNA, 19 nt, Homo sapiens
  misc_RNA (1)...(19): siRNA sense strand
ugaaggagaggcaaacaag

SEQ ID NO: 1554313 - RNA, 19 nt, Homo sapiens
  misc_RNA (1)...(19): siRNA sense strand
ugaagaacaggagaagaaa

SEQ ID NO: 1554314 - RNA, 19 nt, Homo sapiens
  misc_RNA (1)...(19): siRNA sense strand
gaaugaagaacaggagaag

SEQ ID NO: 1554315 - RNA, 19 nt, Homo sapiens
  misc_RNA (1)...(19): siRNA sense strand
cggaaucccauauaugaau

SEQ ID NO: 1554316 - RNA, 19 nt, Homo sapiens
  misc_RNA (1)...(19): siRNA sense strand
agagagcuguuggaaggaa

SEQ ID NO: 1554317 - RNA, 19 nt, Homo sapiens
  misc_RNA (1)...(19): siRNA sense strand
uacagaagauauaccacau

SEQ ID NO: 1554318 - RNA, 19 nt, Homo sapiens
  misc_RNA (1)...(19): siRNA sense strand
auaccaagaguguaacaaa

SEQ ID NO: 1554319 - RNA, 19 nt, Homo sapiens
  misc_RNA (1)...(19): siRNA sense strand
aaaacggaaucccauauau

SEQ ID NO: 1554320 - RNA, 19 nt, Homo sapiens
  misc_RNA (1)...(19): siRNA sense strand
ucaggcgacucacaagaag

SEQ ID NO: 1554321 - RNA, 19 nt, Homo sapiens
  misc_RNA (1)...(19): siRNA sense strand
cagaaagcuacgaucaauu

SEQ ID NO: 1554322 - RNA, 19 nt, Homo sapiens
  misc_RNA (1)...(19): siRNA sense strand
gugaguaaacaacaucguu

SEQ ID NO: 1554323 - RNA, 19 nt, Homo sapiens
  misc_RNA (1)...(19): siRNA sense strand
accauaaguuucagaaucu

SEQ ID NO: 1554324 - RNA, 19 nt, Homo sapiens
  misc_RNA (1)...(19): siRNA sense strand
auauagcccauucuuguaa

SEQ ID NO: 1554325 - RNA, 19 nt, Homo sapiens
  misc_RNA (1)...(19): siRNA sense strand
gaagagaccucaguuguau

SEQ ID NO: 1554326 - RNA, 19 nt, Homo sapiens
  misc_RNA (1)...(19): siRNA sense strand
aaacaaaggcgaaagauua

SEQ ID NO: 1554327 - RNA, 19 nt, Homo sapiens
  misc_RNA (1)...(19): siRNA sense strand
ggaggaagaugcugaaugu

SEQ ID NO: 1554328 - RNA, 19 nt, Homo sapiens
  misc_RNA (1)...(19): siRNA sense strand
ggaagaugcugaauguauu

SEQ ID NO: 1554329 - RNA, 19 nt, Homo sapiens
  misc_RNA (1)...(19): siRNA sense strand
ggaagaagcaguacaauca

SEQ ID NO: 1554330 - RNA, 19 nt, Homo sapiens
  misc_RNA (1)...(19): siRNA sense strand
aagauuaccuccaaagaua

SEQ ID NO: 1554331 - RNA, 19 nt, Homo sapiens
  misc_RNA (1)...(19): siRNA sense strand
ggaaugagccagagagaaa

SEQ ID NO: 1554332 - RNA, 19 nt, Homo sapiens
  misc_RNA (1)...(19): siRNA sense strand
caaccagucuugaaacaaa

SEQ ID NO: 1554333 - RNA, 19 nt, Homo sapiens
  misc_RNA (1)...(19): siRNA sense strand
caagaaagaccaucaaguu

SEQ ID NO: 1554334 - RNA, 19 nt, Homo sapiens
  misc_RNA (1)...(19): siRNA sense strand
gaaagaccaucaaguuuac

SEQ ID NO: 1554335 - RNA, 19 nt, Homo sapiens
  misc_RNA (1)...(19): siRNA sense strand
ccacagcgguauccaauug

SEQ ID NO: 1554336 - RNA, 19 nt, Homo sapiens
  misc_RNA (1)...(19): siRNA sense strand
caugaagacuugaacuuaa

SEQ ID NO: 1554337 - RNA, 19 nt, Homo sapiens
  misc_RNA (1)...(19): siRNA sense strand
caacauggcggacaacaaa

SEQ ID NO: 1554338 - RNA, 19 nt, Homo sapiens
  misc_RNA (1)...(19): siRNA sense strand
ggaaauaugagcagcauga

SEQ ID NO: 1554339 - RNA, 19 nt, Homo sapiens
  misc_RNA (1)...(19): siRNA sense strand
ggccauagcugugcagaaa

SEQ ID NO: 1554340 - RNA, 19 nt, Homo sapiens
  misc_RNA (1)...(19): siRNA sense strand
agaaagaccaucaaguuua

SEQ ID NO: 1554341 - RNA, 19 nt, Homo sapiens
  misc_RNA (1)...(19): siRNA sense strand
caacagcucuagccugaug

SEQ ID NO: 1554342 - RNA, 19 nt, Homo sapiens
  misc_RNA (1)...(19): siRNA sense strand
gaaccagaguggacuuaug

SEQ ID NO: 1554343 - RNA, 19 nt, Homo sapiens
  misc_RNA (1)...(19): siRNA sense strand
caagaucccuuuccaacug

SEQ ID NO: 1554344 - RNA, 19 nt, Homo sapiens
  misc_RNA (1)...(19): siRNA sense strand
ugaccgaucugacaaguug

SEQ ID NO: 1554345 - RNA, 19 nt, Homo sapiens
  misc_RNA (1)...(19): siRNA sense strand
gaucagaggauaaaucaug

SEQ ID NO: 1554346 - RNA, 19 nt, Homo sapiens
  misc_RNA (1)...(19): siRNA sense strand
gauguacuguuucagauug

SEQ ID NO: 1554347 - RNA, 19 nt, Homo sapiens
  misc_RNA (1)...(19): siRNA sense strand
ggaaggcuauggaacuaga

SEQ ID NO: 1554348 - RNA, 19 nt, Homo sapiens
  misc_RNA (1)...(19): siRNA sense strand
ggaagcagcgagcccuuua

SEQ ID NO: 1554349 - RNA, 19 nt, Homo sapiens
  misc_RNA (1)...(19): siRNA sense strand
gcaguaacccucauucuca

SEQ ID NO: 1554350 - RNA, 19 nt, Homo sapiens
  misc_RNA (1)...(19): siRNA sense strand
gaaacaaaggcgaaagauu

SEQ ID NO: 1554351 - RNA, 19 nt, Homo sapiens
  misc_RNA (1)...(19): siRNA sense strand
gcaguaaguuucccuuugg

SEQ ID NO: 1554352 - RNA, 19 nt, Homo sapiens
  misc_RNA (1)...(19): siRNA sense strand
ggaacuccaugacuccaaa

SEQ ID NO: 1554353 - RNA, 19 nt, Homo sapiens
  misc_RNA (1)...(19): siRNA sense strand
caaagcagacggcaaagaa

SEQ ID NO: 1554354 - RNA, 19 nt, Homo sapiens
  misc_RNA (1)...(19): siRNA sense strand
gaaagauuaccuccaaaga

SEQ ID NO: 1554355 - RNA, 19 nt, Homo sapiens
  misc_RNA (1)...(19): siRNA sense strand
ccagaugacuccaaugcaa

SEQ ID NO: 1554356 - RNA, 19 nt, Homo sapiens
  misc_RNA (1)...(19): siRNA sense strand
gugaugaugucccuuaaau

SEQ ID NO: 1554357 - RNA, 19 nt, Homo sapiens
  misc_RNA (1)...(19): siRNA sense strand
ucgacaagcugccaauaaa

SEQ ID NO: 1554358 - RNA, 19 nt, Homo sapiens
  misc_RNA (1)...(19): siRNA sense strand
caacagcaacaucccauuu

SEQ ID NO: 1554359 - RNA, 19 nt, Homo sapiens
  misc_RNA (1)...(19): siRNA sense strand
gagcaccgcagaccuauga

SEQ ID NO: 1554360 - RNA, 19 nt, Homo sapiens
  misc_RNA (1)...(19): siRNA sense strand
gggagaagaucacgaaggu

SEQ ID NO: 1554361 - RNA, 19 nt, Homo sapiens
  misc_RNA (1)...(19): siRNA sense strand
gaaaaugccugauugacau

SEQ ID NO: 1554362 - RNA, 19 nt, Homo sapiens
  misc_RNA (1)...(19): siRNA sense strand
ggcgaaagauuaccuccaa

SEQ ID NO: 1554363 - RNA, 19 nt, Homo sapiens
  misc_RNA (1)...(19): siRNA sense strand
guauggaccucaacagaca

SEQ ID NO: 1554364 - RNA, 19 nt, Homo sapiens
  misc_RNA (1)...(19): siRNA sense strand
gcaucuguguguccaauau

SEQ ID NO: 1554365 - RNA, 19 nt, Homo sapiens
  misc_RNA (1)...(19): siRNA sense strand
gaaagagcaagaaggcaaa

SEQ ID NO: 1554366 - RNA, 19 nt, Homo sapiens
  misc_RNA (1)...(19): siRNA sense strand
gagcaugcccgaugugaug

SEQ ID NO: 1554367 - RNA, 19 nt, Homo sapiens
  misc_RNA (1)...(19): siRNA sense strand
ugaagagaccucaguugua

SEQ ID NO: 1554368 - RNA, 19 nt, Homo sapiens
  misc_RNA (1)...(19): siRNA sense strand
gcagcgagcucccugaaaa

SEQ ID NO: 1554369 - RNA, 19 nt, Homo sapiens
  misc_RNA (1)...(19): siRNA sense strand
gagagcaagucaaagaagu

SEQ ID NO: 1554370 - RNA, 19 nt, Homo sapiens
  misc_RNA (1)...(19): siRNA sense strand
gaacuuaauacagcaagaa

SEQ ID NO: 1554371 - RNA, 19 nt, Homo sapiens
  misc_RNA (1)...(19): siRNA sense strand
ccaugaagacuugaacuua

SEQ ID NO: 1554372 - RNA, 19 nt, Homo sapiens
  misc_RNA (1)...(19): siRNA sense strand
gaacagcucggcagcaucu

SEQ ID NO: 1554373 - RNA, 19 nt, Homo sapiens
  misc_RNA (1)...(19): siRNA sense strand
gaagacagaaagcgaugaa

SEQ ID NO: 1554374 - RNA, 19 nt, Homo sapiens
  misc_RNA (1)...(19): siRNA sense strand
caggaaggcuauggaacua

SEQ ID NO: 1554375 - RNA, 19 nt, Homo sapiens
  misc_RNA (1)...(19): siRNA sense strand
gaagaugcugaauguauug

SEQ ID NO: 1554376 - RNA, 19 nt, Homo sapiens
  misc_RNA (1)...(19): siRNA sense strand
ccacgagcauccagagaga

SEQ ID NO: 1554377 - RNA, 19 nt, Homo sapiens
  misc_RNA (1)...(19): siRNA sense strand
gagacccucuguaaacuca

SEQ ID NO: 1554378 - RNA, 19 nt, Homo sapiens
  misc_RNA (1)...(19): siRNA sense strand
ggcgugagcuggcaaccaa

SEQ ID NO: 1554379 - RNA, 19 nt, Homo sapiens
  misc_RNA (1)...(19): siRNA sense strand
gugcaggaguucaauagug

SEQ ID NO: 1554380 - RNA, 19 nt, Homo sapiens
  misc_RNA (1)...(19): siRNA sense strand
gacaagcugccaauaaaga

SEQ ID NO: 1554381 - RNA, 19 nt, Homo sapiens
  misc_RNA (1)...(19): siRNA sense strand
gcuuuggacacuauuaaua

SEQ ID NO: 1554382 - RNA, 19 nt, Homo sapiens
  misc_RNA (1)...(19): siRNA sense strand
caacaucccauuuccaaca

SEQ ID NO: 1554383 - RNA, 19 nt, Homo sapiens
  misc_RNA (1)...(19): siRNA sense strand
gcaaguaucccagguaguc

SEQ ID NO: 1554384 - RNA, 19 nt, Homo sapiens
  misc_RNA (1)...(19): siRNA sense strand
gcaaaggcgacucugaaga

SEQ ID NO: 1554385 - RNA, 19 nt, Homo sapiens
  misc_RNA (1)...(19): siRNA sense strand
gaugcugaauguauugaug

SEQ ID NO: 1554386 - RNA, 19 nt, Homo sapiens
  misc_RNA (1)...(19): siRNA sense strand
caccgucacugccaaauca

SEQ ID NO: 1554387 - RNA, 19 nt, Homo sapiens
  misc_RNA (1)...(19): siRNA sense strand
caaagucccuccggagcaa

SEQ ID NO: 1554388 - RNA, 19 nt, Homo sapiens
  misc_RNA (1)...(19): siRNA sense strand
ggacauguacaaccaaagu

SEQ ID NO: 1554389 - RNA, 19 nt, Homo sapiens
  misc_RNA (1)...(19): siRNA sense strand
ucagauggcucaguaugga

SEQ ID NO: 1554390 - RNA, 19 nt, Homo sapiens
  misc_RNA (1)...(19): siRNA sense strand
caagguggaagaagcagua

SEQ ID NO: 1554391 - RNA, 19 nt, Homo sapiens
  misc_RNA (1)...(19): siRNA sense strand
gcaaugaugccgaaauguc

SEQ ID NO: 1554392 - RNA, 19 nt, Homo sapiens
  misc_RNA (1)...(19): siRNA sense strand
agacgagacuccucugugu

SEQ ID NO: 1554393 - RNA, 19 nt, Homo sapiens
  misc_RNA (1)...(19): siRNA sense strand
gaccgaaagcaguaaguuu

SEQ ID NO: 1554394 - RNA, 19 nt, Homo sapiens
  misc_RNA (1)...(19): siRNA sense strand
guagaaagaaagagcaaga

SEQ ID NO: 1554395 - RNA, 19 nt, Homo sapiens
  misc_RNA (1)...(19): siRNA sense strand
gaaccgcacagacgauaug

SEQ ID NO: 1554396 - RNA, 19 nt, Homo sapiens
  misc_RNA (1)...(19): siRNA sense strand
ggagauguacaaccaguau

SEQ ID NO: 1554397 - RNA, 19 nt, Homo sapiens
  misc_RNA (1)...(19): siRNA sense strand
gcacuacagcagcagcuaa

SEQ ID NO: 1554398 - RNA, 19 nt, Homo sapiens
  misc_RNA (1)...(19): siRNA sense strand
caagcaagccaguaaguuc

SEQ ID NO: 1554399 - RNA, 19 nt, Homo sapiens
  misc_RNA (1)...(19): siRNA sense strand
ccuaugagcccaacaagga

SEQ ID NO: 1554400 - RNA, 19 nt, Homo sapiens
  misc_RNA (1)...(19): siRNA sense strand
uaugaugucuccuggugaa

SEQ ID NO: 1554401 - RNA, 19 nt, Homo sapiens
  misc_RNA (1)...(19): siRNA sense strand
gcaagaaagaccaucaagu

SEQ ID NO: 1554402 - RNA, 19 nt, Homo sapiens
  misc_RNA (1)...(19): siRNA sense strand
gaaaggaagcauuggaaac

SEQ ID NO: 1554403 - RNA, 19 nt, Homo sapiens
  misc_RNA (1)...(19): siRNA sense strand
gcagaaaggaagcauugga

SEQ ID NO: 1554404 - RNA, 19 nt, Homo sapiens
  misc_RNA (1)...(19): siRNA sense strand
gcacauucagacucacuuu

SEQ ID NO: 1554405 - RNA, 19 nt, Homo sapiens
  misc_RNA (1)...(19): siRNA sense strand
gcgaaagauuaccuccaaa

SEQ ID NO: 1554406 - RNA, 19 nt, Homo sapiens
  misc_RNA (1)...(19): siRNA sense strand
aagaaagaccaucaaguuu

SEQ ID NO: 1554407 - RNA, 19 nt, Homo sapiens
  misc_RNA (1)...(19): siRNA sense strand
gcacaagaucccuuuccaa

SEQ ID NO: 1554408 - RNA, 19 nt, Homo sapiens
  misc_RNA (1)...(19): siRNA sense strand
gggcagcacgcaaugauau

SEQ ID NO: 1554409 - RNA, 19 nt, Homo sapiens
  misc_RNA (1)...(19): siRNA sense strand
acaaagaaacccucagaug

SEQ ID NO: 1554410 - RNA, 19 nt, Homo sapiens
  misc_RNA (1)...(19): siRNA sense strand
ggaaucccgccucagauga

SEQ ID NO: 1554411 - RNA, 19 nt, Homo sapiens
  misc_RNA (1)...(19): siRNA sense strand
caaaggagaagcccaagca

SEQ ID NO: 1554412 - RNA, 19 nt, Homo sapiens
  misc_RNA (1)...(19): siRNA sense strand
gcacagacgauaugauggu

SEQ ID NO: 1554413 - RNA, 19 nt, Homo sapiens
  misc_RNA (1)...(19): siRNA sense strand
gaacggaagcaacuuugag

SEQ ID NO: 1554414 - RNA, 19 nt, Homo sapiens
  misc_RNA (1)...(19): siRNA sense strand
gguugcaucugucaucugu

SEQ ID NO: 1554415 - RNA, 19 nt, Homo sapiens
  misc_RNA (1)...(19): siRNA sense strand
gaaauguccauggcgcuuu

SEQ ID NO: 1554416 - RNA, 19 nt, Homo sapiens
  misc_RNA (1)...(19): siRNA sense strand
guaaguuucccuuugguau

SEQ ID NO: 1554417 - RNA, 19 nt, Homo sapiens
  misc_RNA (1)...(19): siRNA sense strand
guccacagaugagccagua

SEQ ID NO: 1554418 - RNA, 19 nt, Homo sapiens
  misc_RNA (1)...(19): siRNA sense strand
ggcccaaucucuccugcaa

SEQ ID NO: 1554419 - RNA, 19 nt, Homo sapiens
  misc_RNA (1)...(19): siRNA sense strand
acaauaauguggaccugau

SEQ ID NO: 1554420 - RNA, 19 nt, Homo sapiens
  misc_RNA (1)...(19): siRNA sense strand
caagcugccaauaaagaua

SEQ ID NO: 1554421 - RNA, 19 nt, Homo sapiens
  misc_RNA (1)...(19): siRNA sense strand
acccacagcagccgaauua

SEQ ID NO: 1554422 - RNA, 19 nt, Homo sapiens
  misc_RNA (1)...(19): siRNA sense strand
ucucaaagcagacggcaaa

SEQ ID NO: 1554423 - RNA, 19 nt, Homo sapiens
  misc_RNA (1)...(19): siRNA sense strand
gagccaguauggaccacaa

SEQ ID NO: 1554424 - RNA, 19 nt, Homo sapiens
  misc_RNA (1)...(19): siRNA sense strand
gagaaaagcaucauagcaa

SEQ ID NO: 1554425 - RNA, 19 nt, Homo sapiens
  misc_RNA (1)...(19): siRNA sense strand
gaagagaccucaguuguau

SEQ ID NO: 1554426 - RNA, 19 nt, Homo sapiens
  misc_RNA (1)...(19): siRNA sense strand
aaacaaaggcgaaagauua

SEQ ID NO: 1554427 - RNA, 19 nt, Homo sapiens
  misc_RNA (1)...(19): siRNA sense strand
ggaggaagaugcugaaugu

SEQ ID NO: 1554428 - RNA, 19 nt, Homo sapiens
  misc_RNA (1)...(19): siRNA sense strand
ggaagaugcugaauguauu

SEQ ID NO: 1554429 - RNA, 19 nt, Homo sapiens
  misc_RNA (1)...(19): siRNA sense strand
ggaagaagcaguacaauca

SEQ ID NO: 1554430 - RNA, 19 nt, Homo sapiens
  misc_RNA (1)...(19): siRNA sense strand
aagauuaccuccaaagaua

SEQ ID NO: 1554431 - RNA, 19 nt, Homo sapiens
  misc_RNA (1)...(19): siRNA sense strand
ggaaugagccagagagaaa

SEQ ID NO: 1554432 - RNA, 19 nt, Homo sapiens
  misc_RNA (1)...(19): siRNA sense strand
caaccagucuugaaacaaa

SEQ ID NO: 1554433 - RNA, 19 nt, Homo sapiens
  misc_RNA (1)...(19): siRNA sense strand
caagaaagaccaucaaguu

SEQ ID NO: 1554434 - RNA, 19 nt, Homo sapiens
  misc_RNA (1)...(19): siRNA sense strand
gaaagaccaucaaguuuac

SEQ ID NO: 1554435 - RNA, 19 nt, Homo sapiens
  misc_RNA (1)...(19): siRNA sense strand
ccacagcgguauccaauug

SEQ ID NO: 1554436 - RNA, 19 nt, Homo sapiens
  misc_RNA (1)...(19): siRNA sense strand
caugaagacuugaacuuaa

SEQ ID NO: 1554437 - RNA, 19 nt, Homo sapiens
  misc_RNA (1)...(19): siRNA sense strand
caacauggcggacaacaaa

SEQ ID NO: 1554438 - RNA, 19 nt, Homo sapiens
  misc_RNA (1)...(19): siRNA sense strand
ggaaauaugagcagcauga

SEQ ID NO: 1554439 - RNA, 19 nt, Homo sapiens
  misc_RNA (1)...(19): siRNA sense strand
ggccauagcugugcagaaa

SEQ ID NO: 1554440 - RNA, 19 nt, Homo sapiens
  misc_RNA (1)...(19): siRNA sense strand
agaaagaccaucaaguuua

SEQ ID NO: 1554441 - RNA, 19 nt, Homo sapiens
  misc_RNA (1)...(19): siRNA sense strand
caacagcucuagccugaug

SEQ ID NO: 1554442 - RNA, 19 nt, Homo sapiens
  misc_RNA (1)...(19): siRNA sense strand
gaaccagaguggacuuaug

SEQ ID NO: 1554443 - RNA, 19 nt, Homo sapiens
  misc_RNA (1)...(19): siRNA sense strand
caagaucccuuuccaacug

SEQ ID NO: 1554444 - RNA, 19 nt, Homo sapiens
  misc_RNA (1)...(19): siRNA sense strand
ugaccgaucugacaaguug

SEQ ID NO: 1554445 - RNA, 19 nt, Homo sapiens
  misc_RNA (1)...(19): siRNA sense strand
gaucagaggauaaaucaug

SEQ ID NO: 1554446 - RNA, 19 nt, Homo sapiens
  misc_RNA (1)...(19): siRNA sense strand
gauguacuguuucagauug

SEQ ID NO: 1554447 - RNA, 19 nt, Homo sapiens
  misc_RNA (1)...(19): siRNA sense strand
ggaaggcuauggaacuaga

SEQ ID NO: 1554448 - RNA, 19 nt, Homo sapiens
  misc_RNA (1)...(19): siRNA sense strand
ggaagcagcgagcccuuua

SEQ ID NO: 1554449 - RNA, 19 nt, Homo sapiens
  misc_RNA (1)...(19): siRNA sense strand
gcaguaacccucauucuca

SEQ ID NO: 1554450 - RNA, 19 nt, Homo sapiens
  misc_RNA (1)...(19): siRNA sense strand
gaaacaaaggcgaaagauu

SEQ ID NO: 1554451 - RNA, 19 nt, Homo sapiens
  misc_RNA (1)...(19): siRNA sense strand
gcaguaaguuucccuuugg

SEQ ID NO: 1554452 - RNA, 19 nt, Homo sapiens
  misc_RNA (1)...(19): siRNA sense strand
ggaacuccaugacuccaaa

SEQ ID NO: 1554453 - RNA, 19 nt, Homo sapiens
  misc_RNA (1)...(19): siRNA sense strand
caaagcagacggcaaagaa

SEQ ID NO: 1554454 - RNA, 19 nt, Homo sapiens
  misc_RNA (1)...(19): siRNA sense strand
gaaagauuaccuccaaaga

SEQ ID NO: 1554455 - RNA, 19 nt, Homo sapiens
  misc_RNA (1)...(19): siRNA sense strand
ccagaugacuccaaugcaa

SEQ ID NO: 1554456 - RNA, 19 nt, Homo sapiens
  misc_RNA (1)...(19): siRNA sense strand
gugaugaugucccuuaaau

SEQ ID NO: 1554457 - RNA, 19 nt, Homo sapiens
  misc_RNA (1)...(19): siRNA sense strand
ucgacaagcugccaauaaa

SEQ ID NO: 1554458 - RNA, 19 nt, Homo sapiens
  misc_RNA (1)...(19): siRNA sense strand
caacagcaacaucccauuu

SEQ ID NO: 1554459 - RNA, 19 nt, Homo sapiens
  misc_RNA (1)...(19): siRNA sense strand
gagcaccgcagaccuauga

SEQ ID NO: 1554460 - RNA, 19 nt, Homo sapiens
  misc_RNA (1)...(19): siRNA sense strand
gggagaagaucacgaaggu

SEQ ID NO: 1554461 - RNA, 19 nt, Homo sapiens
  misc_RNA (1)...(19): siRNA sense strand
gaaaaugccugauugacau

SEQ ID NO: 1554462 - RNA, 19 nt, Homo sapiens
  misc_RNA (1)...(19): siRNA sense strand
ggcgaaagauuaccuccaa

SEQ ID NO: 1554463 - RNA, 19 nt, Homo sapiens
  misc_RNA (1)...(19): siRNA sense strand
guauggaccucaacagaca

SEQ ID NO: 1554464 - RNA, 19 nt, Homo sapiens
  misc_RNA (1)...(19): siRNA sense strand
gcaucuguguguccaauau

SEQ ID NO: 1554465 - RNA, 19 nt, Homo sapiens
  misc_RNA (1)...(19): siRNA sense strand
gaaagagcaagaaggcaaa

SEQ ID NO: 1554466 - RNA, 19 nt, Homo sapiens
  misc_RNA (1)...(19): siRNA sense strand
gagcaugcccgaugugaug

SEQ ID NO: 1554467 - RNA, 19 nt, Homo sapiens
  misc_RNA (1)...(19): siRNA sense strand
ugaagagaccucaguugua

SEQ ID NO: 1554468 - RNA, 19 nt, Homo sapiens
  misc_RNA (1)...(19): siRNA sense strand
gcagcgagcucccugaaaa

SEQ ID NO: 1554469 - RNA, 19 nt, Homo sapiens
  misc_RNA (1)...(19): siRNA sense strand
gagagcaagucaaagaagu

SEQ ID NO: 1554470 - RNA, 19 nt, Homo sapiens
  misc_RNA (1)...(19): siRNA sense strand
gaacuuaauacagcaagaa

SEQ ID NO: 1554471 - RNA, 19 nt, Homo sapiens
  misc_RNA (1)...(19): siRNA sense strand
ccaugaagacuugaacuua

SEQ ID NO: 1554472 - RNA, 19 nt, Homo sapiens
  misc_RNA (1)...(19): siRNA sense strand
gaacagcucggcagcaucu

SEQ ID NO: 1554473 - RNA, 19 nt, Homo sapiens
  misc_RNA (1)...(19): siRNA sense strand
gaagacagaaagcgaugaa

SEQ ID NO: 1554474 - RNA, 19 nt, Homo sapiens
  misc_RNA (1)...(19): siRNA sense strand
caggaaggcuauggaacua

SEQ ID NO: 1554475 - RNA, 19 nt, Homo sapiens
  misc_RNA (1)...(19): siRNA sense strand
gaagaugcugaauguauug

SEQ ID NO: 1554476 - RNA, 19 nt, Homo sapiens
  misc_RNA (1)...(19): siRNA sense strand
ccacgagcauccagagaga

SEQ ID NO: 1554477 - RNA, 19 nt, Homo sapiens
  misc_RNA (1)...(19): siRNA sense strand
gagacccucuguaaacuca

SEQ ID NO: 1554478 - RNA, 19 nt, Homo sapiens
  misc_RNA (1)...(19): siRNA sense strand
ggcgugagcuggcaaccaa

SEQ ID NO: 1554479 - RNA, 19 nt, Homo sapiens
  misc_RNA (1)...(19): siRNA sense strand
gugcaggaguucaauagug

SEQ ID NO: 1554480 - RNA, 19 nt, Homo sapiens
  misc_RNA (1)...(19): siRNA sense strand
gacaagcugccaauaaaga

SEQ ID NO: 1554481 - RNA, 19 nt, Homo sapiens
  misc_RNA (1)...(19): siRNA sense strand
gcuuuggacacuauuaaua

SEQ ID NO: 1554482 - RNA, 19 nt, Homo sapiens
  misc_RNA (1)...(19): siRNA sense strand
caacaucccauuuccaaca

SEQ ID NO: 1554483 - RNA, 19 nt, Homo sapiens
  misc_RNA (1)...(19): siRNA sense strand
gcaaguaucccagguaguc

SEQ ID NO: 1554484 - RNA, 19 nt, Homo sapiens
  misc_RNA (1)...(19): siRNA sense strand
gcaaaggcgacucugaaga

SEQ ID NO: 1554485 - RNA, 19 nt, Homo sapiens
  misc_RNA (1)...(19): siRNA sense strand
gaugcugaauguauugaug

SEQ ID NO: 1554486 - RNA, 19 nt, Homo sapiens
  misc_RNA (1)...(19): siRNA sense strand
caccgucacugccaaauca

SEQ ID NO: 1554487 - RNA, 19 nt, Homo sapiens
  misc_RNA (1)...(19): siRNA sense strand
caaagucccuccggagcaa

SEQ ID NO: 1554488 - RNA, 19 nt, Homo sapiens
  misc_RNA (1)...(19): siRNA sense strand
ggacauguacaaccaaagu

SEQ ID NO: 1554489 - RNA, 19 nt, Homo sapiens
  misc_RNA (1)...(19): siRNA sense strand
ucagauggcucaguaugga

SEQ ID NO: 1554490 - RNA, 19 nt, Homo sapiens
  misc_RNA (1)...(19): siRNA sense strand
caagguggaagaagcagua

SEQ ID NO: 1554491 - RNA, 19 nt, Homo sapiens
  misc_RNA (1)...(19): siRNA sense strand
gcaaugaugccgaaauguc

SEQ ID NO: 1554492 - RNA, 19 nt, Homo sapiens
  misc_RNA (1)...(19): siRNA sense strand
agacgagacuccucugugu

SEQ ID NO: 1554493 - RNA, 19 nt, Homo sapiens
  misc_RNA (1)...(19): siRNA sense strand
gaccgaaagcaguaaguuu

SEQ ID NO: 1554494 - RNA, 19 nt, Homo sapiens
  misc_RNA (1)...(19): siRNA sense strand
guagaaagaaagagcaaga

SEQ ID NO: 1554495 - RNA, 19 nt, Homo sapiens
  misc_RNA (1)...(19): siRNA sense strand
gaaccgcacagacgauaug

SEQ ID NO: 1554496 - RNA, 19 nt, Homo sapiens
  misc_RNA (1)...(19): siRNA sense strand
ggagauguacaaccaguau

SEQ ID NO: 1554497 - RNA, 19 nt, Homo sapiens
  misc_RNA (1)...(19): siRNA sense strand
gcacuacagcagcagcuaa

SEQ ID NO: 1554498 - RNA, 19 nt, Homo sapiens
  misc_RNA (1)...(19): siRNA sense strand
caagcaagccaguaaguuc

SEQ ID NO: 1554499 - RNA, 19 nt, Homo sapiens
  misc_RNA (1)...(19): siRNA sense strand
ccuaugagcccaacaagga

SEQ ID NO: 1554500 - RNA, 19 nt, Homo sapiens
  misc_RNA (1)...(19): siRNA sense strand
uaugaugucuccuggugaa

SEQ ID NO: 1554501 - RNA, 19 nt, Homo sapiens
  misc_RNA (1)...(19): siRNA sense strand
gcaagaaagaccaucaagu

SEQ ID NO: 1554502 - RNA, 19 nt, Homo sapiens
  misc_RNA (1)...(19): siRNA sense strand
gaaaggaagcauuggaaac

SEQ ID NO: 1554503 - RNA, 19 nt, Homo sapiens
  misc_RNA (1)...(19): siRNA sense strand
gcagaaaggaagcauugga

SEQ ID NO: 1554504 - RNA, 19 nt, Homo sapiens
  misc_RNA (1)...(19): siRNA sense strand
gcacauucagacucacuuu

SEQ ID NO: 1554505 - RNA, 19 nt, Homo sapiens
  misc_RNA (1)...(19): siRNA sense strand
gcgaaagauuaccuccaaa

SEQ ID NO: 1554506 - RNA, 19 nt, Homo sapiens
  misc_RNA (1)...(19): siRNA sense strand
aagaaagaccaucaaguuu

SEQ ID NO: 1554507 - RNA, 19 nt, Homo sapiens
  misc_RNA (1)...(19): siRNA sense strand
gcacaagaucccuuuccaa

SEQ ID NO: 1554508 - RNA, 19 nt, Homo sapiens
  misc_RNA (1)...(19): siRNA sense strand
gggcagcacgcaaugauau

SEQ ID NO: 1554509 - RNA, 19 nt, Homo sapiens
  misc_RNA (1)...(19): siRNA sense strand
acaaagaaacccucagaug

SEQ ID NO: 1554510 - RNA, 19 nt, Homo sapiens
  misc_RNA (1)...(19): siRNA sense strand
ggaaucccgccucagauga

SEQ ID NO: 1554511 - RNA, 19 nt, Homo sapiens
  misc_RNA (1)...(19): siRNA sense strand
caaaggagaagcccaagca

SEQ ID NO: 1554512 - RNA, 19 nt, Homo sapiens
  misc_RNA (1)...(19): siRNA sense strand
gcacagacgauaugauggu

SEQ ID NO: 1554513 - RNA, 19 nt, Homo sapiens
  misc_RNA (1)...(19): siRNA sense strand
gaacggaagcaacuuugag

SEQ ID NO: 1554514 - RNA, 19 nt, Homo sapiens
  misc_RNA (1)...(19): siRNA sense strand
gguugcaucugucaucugu

SEQ ID NO: 1554515 - RNA, 19 nt, Homo sapiens
  misc_RNA (1)...(19): siRNA sense strand
gaaauguccauggcgcuuu

SEQ ID NO: 1554516 - RNA, 19 nt, Homo sapiens
  misc_RNA (1)...(19): siRNA sense strand
guaaguuucccuuugguau

SEQ ID NO: 1554517 - RNA, 19 nt, Homo sapiens
  misc_RNA (1)...(19): siRNA sense strand
guccacagaugagccagua

SEQ ID NO: 1554518 - RNA, 19 nt, Homo sapiens
  misc_RNA (1)...(19): siRNA sense strand
ggcccaaucucuccugcaa

SEQ ID NO: 1554519 - RNA, 19 nt, Homo sapiens
  misc_RNA (1)...(19): siRNA sense strand
acaauaauguggaccugau

SEQ ID NO: 1554520 - RNA, 19 nt, Homo sapiens
  misc_RNA (1)...(19): siRNA sense strand
caagcugccaauaaagaua

SEQ ID NO: 1554521 - RNA, 19 nt, Homo sapiens
  misc_RNA (1)...(19): siRNA sense strand
acccacagcagccgaauua

SEQ ID NO: 1554522 - RNA, 19 nt, Homo sapiens
  misc_RNA (1)...(19): siRNA sense strand
ucucaaagcagacggcaaa

SEQ ID NO: 1554523 - RNA, 19 nt, Homo sapiens
  misc_RNA (1)...(19): siRNA sense strand
gagccaguauggaccacaa

SEQ ID NO: 1554524 - RNA, 19 nt, Homo sapiens
  misc_RNA (1)...(19): siRNA sense strand
gagaaaagcaucauagcaa

SEQ ID NO: 1554525 - RNA, 19 nt, Homo sapiens
  misc_RNA (1)...(19): siRNA sense strand
gaacaggcaccacuaauga

SEQ ID NO: 1554526 - RNA, 19 nt, Homo sapiens
  misc_RNA (1)...(19): siRNA sense strand
gagugaagaugaacugauu

SEQ ID NO: 1554527 - RNA, 19 nt, Homo sapiens
  misc_RNA (1)...(19): siRNA sense strand
gcaugggccuggauaagaa

SEQ ID NO: 1554528 - RNA, 19 nt, Homo sapiens
  misc_RNA (1)...(19): siRNA sense strand
gaagaugaacugauuaaca

SEQ ID NO: 1554529 - RNA, 19 nt, Homo sapiens
  misc_RNA (1)...(19): siRNA sense strand
gcagcuccauuacuucaaa

SEQ ID NO: 1554530 - RNA, 19 nt, Homo sapiens
  misc_RNA (1)...(19): siRNA sense strand
caagaacaaugauggauac

SEQ ID NO: 1554531 - RNA, 19 nt, Homo sapiens
  misc_RNA (1)...(19): siRNA sense strand
ggagaugucgccacaagaa

SEQ ID NO: 1554532 - RNA, 19 nt, Homo sapiens
  misc_RNA (1)...(19): siRNA sense strand
ccacagccaucacucaugu

SEQ ID NO: 1554533 - RNA, 19 nt, Homo sapiens
  misc_RNA (1)...(19): siRNA sense strand
cauaauagaugguguuuug

SEQ ID NO: 1554534 - RNA, 19 nt, Homo sapiens
  misc_RNA (1)...(19): siRNA sense strand
uaauuugcuugauggcuua

SEQ ID NO: 1554535 - RNA, 19 nt, Homo sapiens
  misc_RNA (1)...(19): siRNA sense strand
cauugacuaugcugaauuu

SEQ ID NO: 1554536 - RNA, 19 nt, Homo sapiens
  misc_RNA (1)...(19): siRNA sense strand
uagaaggugucaucaacaa

SEQ ID NO: 1554537 - RNA, 19 nt, Homo sapiens
  misc_RNA (1)...(19): siRNA sense strand
ucacucauguccauaagga

SEQ ID NO: 1554538 - RNA, 19 nt, Homo sapiens
  misc_RNA (1)...(19): siRNA sense strand
gaacacagugcacgaccaa

SEQ ID NO: 1554539 - RNA, 19 nt, Homo sapiens
  misc_RNA (1)...(19): siRNA sense strand
aagaauugcagcuccauua

SEQ ID NO: 1554540 - RNA, 19 nt, Homo sapiens
  misc_RNA (1)...(19): siRNA sense strand
gagaugaugacaagaacaa

SEQ ID NO: 1554541 - RNA, 19 nt, Homo sapiens
  misc_RNA (1)...(19): siRNA sense strand
ugacuaugcugaauuugca

SEQ ID NO: 1554542 - RNA, 19 nt, Homo sapiens
  misc_RNA (1)...(19): siRNA sense strand
acaagaacaaugauggaua

SEQ ID NO: 1554543 - RNA, 19 nt, Homo sapiens
  misc_RNA (1)...(19): siRNA sense strand
gcggagaugucgccacaag

SEQ ID NO: 1554544 - RNA, 19 nt, Homo sapiens
  misc_RNA (1)...(19): siRNA sense strand
gagagaugaugacaagaac

SEQ ID NO: 1554545 - RNA, 19 nt, Homo sapiens
  misc_RNA (1)...(19): siRNA sense strand
ugagagaugaugacaagaa

SEQ ID NO: 1554546 - RNA, 19 nt, Homo sapiens
  misc_RNA (1)...(19): siRNA sense strand
gugaagaugaacugauuaa

SEQ ID NO: 1554547 - RNA, 19 nt, Homo sapiens
  misc_RNA (1)...(19): siRNA sense strand
uaucauggagcaucuagaa

SEQ ID NO: 1554548 - RNA, 19 nt, Homo sapiens
  misc_RNA (1)...(19): siRNA sense strand
acuaaugagugaagaugaa

SEQ ID NO: 1554549 - RNA, 19 nt, Homo sapiens
  misc_RNA (1)...(19): siRNA sense strand
gaaggugucaucaacaaac

SEQ ID NO: 1554550 - RNA, 19 nt, Homo sapiens
  misc_RNA (1)...(19): siRNA sense strand
gaugaugacaagaacaaug

SEQ ID NO: 1554551 - RNA, 19 nt, Homo sapiens
  misc_RNA (1)...(19): siRNA sense strand
aauugcagcuccauuacuu

SEQ ID NO: 1554552 - RNA, 19 nt, Homo sapiens
  misc_RNA (1)...(19): siRNA sense strand
gaugucgccacaagaauug

SEQ ID NO: 1554553 - RNA, 19 nt, Homo sapiens
  misc_RNA (1)...(19): siRNA sense strand
cgaccaagagcauaucaug

SEQ ID NO: 1554554 - RNA, 19 nt, Homo sapiens
  misc_RNA (1)...(19): siRNA sense strand
gcaugauuaugauggcaau

SEQ ID NO: 1554555 - RNA, 19 nt, Homo sapiens
  misc_RNA (1)...(19): siRNA sense strand
ugaacaggcaccacuaaug

SEQ ID NO: 1554556 - RNA, 19 nt, Homo sapiens
  misc_RNA (1)...(19): siRNA sense strand
ucuagaaggugucaucaac

SEQ ID NO: 1554557 - RNA, 19 nt, Homo sapiens
  misc_RNA (1)...(19): siRNA sense strand
uuugagagaugaugacaag

SEQ ID NO: 1554558 - RNA, 19 nt, Homo sapiens
  misc_RNA (1)...(19): siRNA sense strand
gcagcaugggccuggauaa

SEQ ID NO: 1554559 - RNA, 19 nt, Homo sapiens
  misc_RNA (1)...(19): siRNA sense strand
acacagugcacgaccaaga

SEQ ID NO: 1554560 - RNA, 19 nt, Homo sapiens
  misc_RNA (1)...(19): siRNA sense strand
gaugacaagaacaaugaug

SEQ ID NO: 1554561 - RNA, 19 nt, Homo sapiens
  misc_RNA (1)...(19): siRNA sense strand
ccaucacucauguccauaa

SEQ ID NO: 1554562 - RNA, 19 nt, Homo sapiens
  misc_RNA (1)...(19): siRNA sense strand
ugacaagaacaaugaugga

SEQ ID NO: 1554563 - RNA, 19 nt, Homo sapiens
  misc_RNA (1)...(19): siRNA sense strand
cauggagcaucuagaaggu

SEQ ID NO: 1554564 - RNA, 19 nt, Homo sapiens
  misc_RNA (1)...(19): siRNA sense strand
gcaucuagaaggugucauc

SEQ ID NO: 1554565 - RNA, 19 nt, Homo sapiens
  misc_RNA (1)...(19): siRNA sense strand
gagaugucgccacaagaau

SEQ ID NO: 1554566 - RNA, 19 nt, Homo sapiens
  misc_RNA (1)...(19): siRNA sense strand
caagaauugcagcuccauu

SEQ ID NO: 1554567 - RNA, 19 nt, Homo sapiens
  misc_RNA (1)...(19): siRNA sense strand
agaugucgccacaagaauu

SEQ ID NO: 1554568 - RNA, 19 nt, Homo sapiens
  misc_RNA (1)...(19): siRNA sense strand
gaauugcagcuccauuacu

SEQ ID NO: 1554569 - RNA, 19 nt, Homo sapiens
  misc_RNA (1)...(19): siRNA sense strand
cuugauggcuuagaacucu

SEQ ID NO: 1554570 - RNA, 19 nt, Homo sapiens
  misc_RNA (1)...(19): siRNA sense strand
ugauggauacauugacuau

SEQ ID NO: 1554571 - RNA, 19 nt, Homo sapiens
  misc_RNA (1)...(19): siRNA sense strand
gacaagaacaaugauggau

SEQ ID NO: 1554572 - RNA, 19 nt, Homo sapiens
  misc_RNA (1)...(19): siRNA sense strand
caucacucauguccauaag

SEQ ID NO: 1554573 - RNA, 19 nt, Homo sapiens
  misc_RNA (1)...(19): siRNA sense strand
accaagagcauaucaugga

SEQ ID NO: 1554574 - RNA, 19 nt, Homo sapiens
  misc_RNA (1)...(19): siRNA sense strand
ggaggaagggagugaacag

SEQ ID NO: 1554575 - RNA, 19 nt, Homo sapiens
  misc_RNA (1)...(19): siRNA sense strand
gaacucuccacagccauca

SEQ ID NO: 1554576 - RNA, 19 nt, Homo sapiens
  misc_RNA (1)...(19): siRNA sense strand
auacauugacuaugcugaa

SEQ ID NO: 1554577 - RNA, 19 nt, Homo sapiens
  misc_RNA (1)...(19): siRNA sense strand
uacauugacuaugcugaau

SEQ ID NO: 1554578 - RNA, 19 nt, Homo sapiens
  misc_RNA (1)...(19): siRNA sense strand
auggauacauugacuaugc

SEQ ID NO: 1554579 - RNA, 19 nt, Homo sapiens
  misc_RNA (1)...(19): siRNA sense strand
ggaguuguguuacugcuua

SEQ ID NO: 1554580 - RNA, 19 nt, Homo sapiens
  misc_RNA (1)...(19): siRNA sense strand
gcagacagaucucagaaga

SEQ ID NO: 1554581 - RNA, 19 nt, Homo sapiens
  misc_RNA (1)...(19): siRNA sense strand
ccagaaggauugcuuugua

SEQ ID NO: 1554582 - RNA, 19 nt, Homo sapiens
  misc_RNA (1)...(19): siRNA sense strand
ggaaauggaggauaaaguu

SEQ ID NO: 1554583 - RNA, 19 nt, Homo sapiens
  misc_RNA (1)...(19): siRNA sense strand
gagagcaucuucccacaau

SEQ ID NO: 1554584 - RNA, 19 nt, Homo sapiens
  misc_RNA (1)...(19): siRNA sense strand
cgaagucacucaaguuaau

SEQ ID NO: 1554585 - RNA, 19 nt, Homo sapiens
  misc_RNA (1)...(19): siRNA sense strand
gugaagaaauugagagaga

SEQ ID NO: 1554586 - RNA, 19 nt, Homo sapiens
  misc_RNA (1)...(19): siRNA sense strand
uagcggaaauggaggauaa

SEQ ID NO: 1554587 - RNA, 19 nt, Homo sapiens
  misc_RNA (1)...(19): siRNA sense strand
gcaacaauauguccacaag

SEQ ID NO: 1554588 - RNA, 19 nt, Homo sapiens
  misc_RNA (1)...(19): siRNA sense strand
gaaauggaggauaaaguuu

SEQ ID NO: 1554589 - RNA, 19 nt, Homo sapiens
  misc_RNA (1)...(19): siRNA sense strand
ccucgaaacugauaauaug

SEQ ID NO: 1554590 - RNA, 19 nt, Homo sapiens
  misc_RNA (1)...(19): siRNA sense strand
gagcaucuucccacaauuu

SEQ ID NO: 1554591 - RNA, 19 nt, Homo sapiens
  misc_RNA (1)...(19): siRNA sense strand
gacgaagucacucaaguua

SEQ ID NO: 1554592 - RNA, 19 nt, Homo sapiens
  misc_RNA (1)...(19): siRNA sense strand
caccgggucuuucaacuuu

SEQ ID NO: 1554593 - RNA, 19 nt, Homo sapiens
  misc_RNA (1)...(19): siRNA sense strand
gggaaggccugggcaugua

SEQ ID NO: 1554594 - RNA, 19 nt, Homo sapiens
  misc_RNA (1)...(19): siRNA sense strand
aacaauauguccacaaguu

SEQ ID NO: 1554595 - RNA, 19 nt, Homo sapiens
  misc_RNA (1)...(19): siRNA sense strand
ccacuacaguccagaagga

SEQ ID NO: 1554596 - RNA, 19 nt, Homo sapiens
  misc_RNA (1)...(19): siRNA sense strand
ccugaaagcacuauggaua

SEQ ID NO: 1554597 - RNA, 19 nt, Homo sapiens
  misc_RNA (1)...(19): siRNA sense strand
gaccuucucugugcacuga

SEQ ID NO: 1554598 - RNA, 19 nt, Homo sapiens
  misc_RNA (1)...(19): siRNA sense strand
gcauguacaucaaaucaac

SEQ ID NO: 1554599 - RNA, 19 nt, Homo sapiens
  misc_RNA (1)...(19): siRNA sense strand
ccaacauucugcccacaaa

SEQ ID NO: 1554600 - RNA, 19 nt, Homo sapiens
  misc_RNA (1)...(19): siRNA sense strand
caggaaagccggagacgaa

SEQ ID NO: 1554601 - RNA, 19 nt, Homo sapiens
  misc_RNA (1)...(19): siRNA sense strand
gaagccaccucuuguacag

SEQ ID NO: 1554602 - RNA, 19 nt, Homo sapiens
  misc_RNA (1)...(19): siRNA sense strand
gaacaaaauuauccagcuu

SEQ ID NO: 1554603 - RNA, 19 nt, Homo sapiens
  misc_RNA (1)...(19): siRNA sense strand
gagaauggcaguuuuguuu

SEQ ID NO: 1554604 - RNA, 19 nt, Homo sapiens
  misc_RNA (1)...(19): siRNA sense strand
ggaccgggcuccguuuaca

SEQ ID NO: 1554605 - RNA, 19 nt, Homo sapiens
  misc_RNA (1)...(19): siRNA sense strand
ggacuagaggguuggauga

SEQ ID NO: 1554606 - RNA, 19 nt, Homo sapiens
  misc_RNA (1)...(19): siRNA sense strand
gugcaugucuggaggaagu

SEQ ID NO: 1554607 - RNA, 19 nt, Homo sapiens
  misc_RNA (1)...(19): siRNA sense strand
gaagaaauugagagagaau

SEQ ID NO: 1554608 - RNA, 19 nt, Homo sapiens
  misc_RNA (1)...(19): siRNA sense strand
aaaucuggcuccucagcua

SEQ ID NO: 1554609 - RNA, 19 nt, Homo sapiens
  misc_RNA (1)...(19): siRNA sense strand
guacaucaaaucaaccuau

SEQ ID NO: 1554610 - RNA, 19 nt, Homo sapiens
  misc_RNA (1)...(19): siRNA sense strand
ggugcuacaucaacucaga

SEQ ID NO: 1554611 - RNA, 19 nt, Homo sapiens
  misc_RNA (1)...(19): siRNA sense strand
ugaagaaauugagagagaa

SEQ ID NO: 1554612 - RNA, 19 nt, Homo sapiens
  misc_RNA (1)...(19): siRNA sense strand
cagaaggauugcuuuguag

SEQ ID NO: 1554613 - RNA, 19 nt, Homo sapiens
  misc_RNA (1)...(19): siRNA sense strand
uaaauggcaucugugacaa

SEQ ID NO: 1554614 - RNA, 19 nt, Homo sapiens
  misc_RNA (1)...(19): siRNA sense strand
gaaguccucguccacagaa

SEQ ID NO: 1554615 - RNA, 19 nt, Homo sapiens
  misc_RNA (1)...(19): siRNA sense strand
gguacucgguggaaaccaa

SEQ ID NO: 1554616 - RNA, 19 nt, Homo sapiens
  misc_RNA (1)...(19): siRNA sense strand
gaaagccggagacgaagau

SEQ ID NO: 1554617 - RNA, 19 nt, Homo sapiens
  misc_RNA (1)...(19): siRNA sense strand
gggaugagaauggcaguuu

SEQ ID NO: 1554618 - RNA, 19 nt, Homo sapiens
  misc_RNA (1)...(19): siRNA sense strand
guucacuuaccaaacauua

SEQ ID NO: 1554619 - RNA, 19 nt, Homo sapiens
  misc_RNA (1)...(19): siRNA sense strand
caauauguccacaaguuug

SEQ ID NO: 1554620 - RNA, 19 nt, Homo sapiens
  misc_RNA (1)...(19): siRNA sense strand
ggauuccuccgaucauuga

SEQ ID NO: 1554621 - RNA, 19 nt, Homo sapiens
  misc_RNA (1)...(19): siRNA sense strand
gagagaaaacaccaucuua

SEQ ID NO: 1554622 - RNA, 19 nt, Homo sapiens
  misc_RNA (1)...(19): siRNA sense strand
gaauggcaguuuuguuuau

SEQ ID NO: 1554623 - RNA, 19 nt, Homo sapiens
  misc_RNA (1)...(19): siRNA sense strand
gauucaugcuggugacgaa

SEQ ID NO: 1554624 - RNA, 19 nt, Homo sapiens
  misc_RNA (1)...(19): siRNA sense strand
cgaaacugauaauaugaag

SEQ ID NO: 1554625 - RNA, 19 nt, Homo sapiens
  misc_RNA (1)...(19): siRNA sense strand
gggcauguacaucaaauca

SEQ ID NO: 1554626 - RNA, 19 nt, Homo sapiens
  misc_RNA (1)...(19): siRNA sense strand
gcuuggaccugaccacuac

SEQ ID NO: 1554627 - RNA, 19 nt, Homo sapiens
  misc_RNA (1)...(19): siRNA sense strand
gagaaucccaccggaguug

SEQ ID NO: 1554628 - RNA, 19 nt, Homo sapiens
  misc_RNA (1)...(19): siRNA sense strand
auggauaccucacugaaga

SEQ ID NO: 1554629 - RNA, 19 nt, Homo sapiens
  misc_RNA (1)...(19): siRNA sense strand
auaccucacugaagaagga

SEQ ID NO: 1554630 - RNA, 19 nt, Homo sapiens
  misc_RNA (1)...(19): siRNA sense strand
ggaaagccggagacgaaga

SEQ ID NO: 1554631 - RNA, 19 nt, Homo sapiens
  misc_RNA (1)...(19): siRNA sense strand
auuauggccucgaaacuga

SEQ ID NO: 1554632 - RNA, 19 nt, Homo sapiens
  misc_RNA (1)...(19): siRNA sense strand
ccacagcagcgccacgauu

SEQ ID NO: 1554633 - RNA, 19 nt, Homo sapiens
  misc_RNA (1)...(19): siRNA sense strand
gaugacugccugcaacaau

SEQ ID NO: 1554634 - RNA, 19 nt, Homo sapiens
  misc_RNA (1)...(19): siRNA sense strand
accaggagcuuguguugga

SEQ ID NO: 1554635 - RNA, 19 nt, Homo sapiens
  misc_RNA (1)...(19): siRNA sense strand
uuaaauggcaucugugaca

SEQ ID NO: 1554636 - RNA, 19 nt, Homo sapiens
  misc_RNA (1)...(19): siRNA sense strand
uaacuguggucaagguuuu

SEQ ID NO: 1554637 - RNA, 19 nt, Homo sapiens
  misc_RNA (1)...(19): siRNA sense strand
ggaagccaccucuuguaca

SEQ ID NO: 1554638 - RNA, 19 nt, Homo sapiens
  misc_RNA (1)...(19): siRNA sense strand
gagaaaacaccaucuuaug

SEQ ID NO: 1554639 - RNA, 19 nt, Homo sapiens
  misc_RNA (1)...(19): siRNA sense strand
augacugccugcaacaaua

SEQ ID NO: 1554640 - RNA, 19 nt, Homo sapiens
  misc_RNA (1)...(19): siRNA sense strand
gaguuguguuacugcuuaa

SEQ ID NO: 1554641 - RNA, 19 nt, Homo sapiens
  misc_RNA (1)...(19): siRNA sense strand
acaauauguccacaaguuu

SEQ ID NO: 1554642 - RNA, 19 nt, Homo sapiens
  misc_RNA (1)...(19): siRNA sense strand
ucugugcacugaauuaugg

SEQ ID NO: 1554643 - RNA, 19 nt, Homo sapiens
  misc_RNA (1)...(19): siRNA sense strand
uaagugcaaacaaccauug

SEQ ID NO: 1554644 - RNA, 19 nt, Homo sapiens
  misc_RNA (1)...(19): siRNA sense strand
ggaaaagucccgcuuacga

SEQ ID NO: 1554645 - RNA, 19 nt, Homo sapiens
  misc_RNA (1)...(19): siRNA sense strand
uuacgcgccucaaacuguu

SEQ ID NO: 1554646 - RNA, 19 nt, Homo sapiens
  misc_RNA (1)...(19): siRNA sense strand
ggaugagaauggcaguuuu

SEQ ID NO: 1554647 - RNA, 19 nt, Homo sapiens
  misc_RNA (1)...(19): siRNA sense strand
cuacaguccagaaggauug

SEQ ID NO: 1554648 - RNA, 19 nt, Homo sapiens
  misc_RNA (1)...(19): siRNA sense strand
uacaucaaaucaaccuaug

SEQ ID NO: 1554649 - RNA, 19 nt, Homo sapiens
  misc_RNA (1)...(19): siRNA sense strand
gugguggacuggacuagag

SEQ ID NO: 1554650 - RNA, 19 nt, Homo sapiens
  misc_RNA (1)...(19): siRNA sense strand
gaauuauggccucgaaacu

SEQ ID NO: 1554651 - RNA, 19 nt, Homo sapiens
  misc_RNA (1)...(19): siRNA sense strand
gaugagccagugugcaugu

SEQ ID NO: 1554652 - RNA, 19 nt, Homo sapiens
  misc_RNA (1)...(19): siRNA sense strand
gcagcgccacgauuccauu

SEQ ID NO: 1554653 - RNA, 19 nt, Homo sapiens
  misc_RNA (1)...(19): siRNA sense strand
guaagugcaaacaaccauu

SEQ ID NO: 1554654 - RNA, 19 nt, Homo sapiens
  misc_RNA (1)...(19): siRNA sense strand
ggccugggcauguacauca

SEQ ID NO: 1554655 - RNA, 19 nt, Homo sapiens
  misc_RNA (1)...(19): siRNA sense strand
gaaaagucccgcuuacgau

SEQ ID NO: 1554656 - RNA, 19 nt, Homo sapiens
  misc_RNA (1)...(19): siRNA sense strand
gcccuuugccgguauuuca

SEQ ID NO: 1554657 - RNA, 19 nt, Homo sapiens
  misc_RNA (1)...(19): siRNA sense strand
guuggaggcuguggaccuu

SEQ ID NO: 1554658 - RNA, 19 nt, Homo sapiens
  misc_RNA (1)...(19): siRNA sense strand
caucuucccacaauuuaca

SEQ ID NO: 1554659 - RNA, 19 nt, Homo sapiens
  misc_RNA (1)...(19): siRNA sense strand
aaauucuccugcagacaga

SEQ ID NO: 1554660 - RNA, 19 nt, Homo sapiens
  misc_RNA (1)...(19): siRNA sense strand
gaucggacaccaggagcuu

SEQ ID NO: 1554661 - RNA, 19 nt, Homo sapiens
  misc_RNA (1)...(19): siRNA sense strand
ggaugcccuuugccgguau

SEQ ID NO: 1554662 - RNA, 19 nt, Homo sapiens
  misc_RNA (1)...(19): siRNA sense strand
ugacugccugcaacaauau

SEQ ID NO: 1554663 - RNA, 19 nt, Homo sapiens
  misc_RNA (1)...(19): siRNA sense strand
gauggguuacacgugauua

SEQ ID NO: 1554664 - RNA, 19 nt, Homo sapiens
  misc_RNA (1)...(19): siRNA sense strand
cauaaguagccgacggaaa

SEQ ID NO: 1554665 - RNA, 19 nt, Homo sapiens
  misc_RNA (1)...(19): siRNA sense strand
gcgccacgauuccauucca

SEQ ID NO: 1554666 - RNA, 19 nt, Homo sapiens
  misc_RNA (1)...(19): siRNA sense strand
gaagucacucaaguuaauc

SEQ ID NO: 1554667 - RNA, 19 nt, Homo sapiens
  misc_RNA (1)...(19): siRNA sense strand
auaaguagccgacggaaaa

SEQ ID NO: 1554668 - RNA, 19 nt, Homo sapiens
  misc_RNA (1)...(19): siRNA sense strand
cgaaguccucguccacaga

SEQ ID NO: 1554669 - RNA, 19 nt, Homo sapiens
  misc_RNA (1)...(19): siRNA sense strand
gguggaaaccaacauucug

SEQ ID NO: 1554670 - RNA, 19 nt, Homo sapiens
  misc_RNA (1)...(19): siRNA sense strand
ccaccgggucuuucaacuu

SEQ ID NO: 1554671 - RNA, 19 nt, Homo sapiens
  misc_RNA (1)...(19): siRNA sense strand
ccaccggaguuguguuacu

SEQ ID NO: 1554672 - RNA, 19 nt, Homo sapiens
  misc_RNA (1)...(19): siRNA sense strand
gugaugagccagugugcau

SEQ ID NO: 1554673 - RNA, 19 nt, Homo sapiens
  misc_RNA (1)...(19): siRNA sense strand
caccggaguuguguuacug

SEQ ID NO: 1554674 - RNA, 19 nt, Homo sapiens
  misc_RNA (1)...(19): siRNA sense strand
gcaagccacggccuuuguc

SEQ ID NO: 1554675 - RNA, 19 nt, Homo sapiens
  misc_RNA (1)...(19): siRNA sense strand
ucccaccggaguuguguua

SEQ ID NO: 1554676 - RNA, 19 nt, Homo sapiens
  misc_RNA (1)...(19): siRNA sense strand
gccucgaaacugauaauau

SEQ ID NO: 1554677 - RNA, 19 nt, Homo sapiens
  misc_RNA (1)...(19): siRNA sense strand
gcacuauggauaccucacu

SEQ ID NO: 1554678 - RNA, 19 nt, Homo sapiens
  misc_RNA (1)...(19): siRNA sense strand
cacagcagcgccacgauuc

SEQ ID NO: 1554679 - RNA, 19 nt, Homo sapiens
  misc_RNA (1)...(19): siRNA sense strand
uggaaaggcuugagaaauu

SEQ ID NO: 1554680 - RNA, 19 nt, Homo sapiens
  misc_RNA (1)...(19): siRNA sense strand
ggaaaggcuugagaaauug

SEQ ID NO: 1554681 - RNA, 19 nt, Homo sapiens
  misc_RNA (1)...(19): siRNA sense strand
gcgcaugucuuuccagcuu

SEQ ID NO: 1554682 - RNA, 19 nt, Homo sapiens
  misc_RNA (1)...(19): siRNA sense strand
gcacugucuuuguaucuga

SEQ ID NO: 1554683 - RNA, 19 nt, Homo sapiens
  misc_RNA (1)...(19): siRNA sense strand
gcggcuaacugugucaaua

SEQ ID NO: 1554684 - RNA, 19 nt, Homo sapiens
  misc_RNA (1)...(19): siRNA sense strand
guaguuauuucucggauca

SEQ ID NO: 1554685 - RNA, 19 nt, Homo sapiens
  misc_RNA (1)...(19): siRNA sense strand
gaacauguugacaaagaaa

SEQ ID NO: 1554686 - RNA, 19 nt, Homo sapiens
  misc_RNA (1)...(19): siRNA sense strand
auggagaacuugagccuua

SEQ ID NO: 1554687 - RNA, 19 nt, Homo sapiens
  misc_RNA (1)...(19): siRNA sense strand
aaaugugaauugccaguuu

SEQ ID NO: 1554688 - RNA, 19 nt, Homo sapiens
  misc_RNA (1)...(19): siRNA sense strand
ccuuaugucuacuucaaua

SEQ ID NO: 1554689 - RNA, 19 nt, Homo sapiens
  misc_RNA (1)...(19): siRNA sense strand
ccaaggugaugguggagaa

SEQ ID NO: 1554690 - RNA, 19 nt, Homo sapiens
  misc_RNA (1)...(19): siRNA sense strand
gaacuugagccuuaugucu

SEQ ID NO: 1554691 - RNA, 19 nt, Homo sapiens
  misc_RNA (1)...(19): siRNA sense strand
gaucaucacgggcuucaug

SEQ ID NO: 1554692 - RNA, 19 nt, Homo sapiens
  misc_RNA (1)...(19): siRNA sense strand
gaaccgaagcuccaagaca

SEQ ID NO: 1554693 - RNA, 19 nt, Homo sapiens
  misc_RNA (1)...(19): siRNA sense strand
ugaacauguugacaaagaa

SEQ ID NO: 1554694 - RNA, 19 nt, Homo sapiens
  misc_RNA (1)...(19): siRNA sense strand
gcugaccugucuggcuuua

SEQ ID NO: 1554695 - RNA, 19 nt, Homo sapiens
  misc_RNA (1)...(19): siRNA sense strand
gugaaggacaggaaugaaa

SEQ ID NO: 1554696 - RNA, 19 nt, Homo sapiens
  misc_RNA (1)...(19): siRNA sense strand
uaaagggaaucugcgugaa

SEQ ID NO: 1554697 - RNA, 19 nt, Homo sapiens
  misc_RNA (1)...(19): siRNA sense strand
gaaaugugaauugccaguu

SEQ ID NO: 1554698 - RNA, 19 nt, Homo sapiens
  misc_RNA (1)...(19): siRNA sense strand
ggacugggccaaggugaug

SEQ ID NO: 1554699 - RNA, 19 nt, Homo sapiens
  misc_RNA (1)...(19): siRNA sense strand
caacuacaccaacaggaau

SEQ ID NO: 1554700 - RNA, 19 nt, Homo sapiens
  misc_RNA (1)...(19): siRNA sense strand
augaacauguugacaaaga

SEQ ID NO: 1554701 - RNA, 19 nt, Homo sapiens
  misc_RNA (1)...(19): siRNA sense strand
gacagcaggagcucauaaa

SEQ ID NO: 1554702 - RNA, 19 nt, Homo sapiens
  misc_RNA (1)...(19): siRNA sense strand
cgacagcaggagcucauaa

SEQ ID NO: 1554703 - RNA, 19 nt, Homo sapiens
  misc_RNA (1)...(19): siRNA sense strand
ccacaucagucaggcagau

SEQ ID NO: 1554704 - RNA, 19 nt, Homo sapiens
  misc_RNA (1)...(19): siRNA sense strand
ucaggcagauggcccuuuc

SEQ ID NO: 1554705 - RNA, 19 nt, Homo sapiens
  misc_RNA (1)...(19): siRNA sense strand
gcuucaugcuccaguucua

SEQ ID NO: 1554706 - RNA, 19 nt, Homo sapiens
  misc_RNA (1)...(19): siRNA sense strand
gugaauugccaguuuccua

SEQ ID NO: 1554707 - RNA, 19 nt, Homo sapiens
  misc_RNA (1)...(19): siRNA sense strand
agauggcccuuuccuacuu

SEQ ID NO: 1554708 - RNA, 19 nt, Homo sapiens
  misc_RNA (1)...(19): siRNA sense strand
ugaauugccaguuuccuau

SEQ ID NO: 1554709 - RNA, 19 nt, Homo sapiens
  misc_RNA (1)...(19): siRNA sense strand
cuugagaaauugcacuuca

SEQ ID NO: 1554710 - RNA, 19 nt, Homo sapiens
  misc_RNA (1)...(19): siRNA sense strand
ggcaucacccaaguaguua

SEQ ID NO: 1554711 - RNA, 19 nt, Homo sapiens
  misc_RNA (1)...(19): siRNA sense strand
ggacaggaaugaaaaugag

SEQ ID NO: 1554712 - RNA, 19 nt, Homo sapiens
  misc_RNA (1)...(19): siRNA sense strand
ucaacuacaccaacaggaa

SEQ ID NO: 1554713 - RNA, 19 nt, Homo sapiens
  misc_RNA (1)...(19): siRNA sense strand
ucacccaaguaguuauuuc

SEQ ID NO: 1554714 - RNA, 19 nt, Homo sapiens
  misc_RNA (1)...(19): siRNA sense strand
ccauaggcaucacccaagu

SEQ ID NO: 1554715 - RNA, 19 nt, Homo sapiens
  misc_RNA (1)...(19): siRNA sense strand
ugaccugucuggcuuuaac

SEQ ID NO: 1554716 - RNA, 19 nt, Homo sapiens
  misc_RNA (1)...(19): siRNA sense strand
ccaguggcgugugggcuuu

SEQ ID NO: 1554717 - RNA, 19 nt, Homo sapiens
  misc_RNA (1)...(19): siRNA sense strand
gauggcccuuuccuacuuc

SEQ ID NO: 1554718 - RNA, 19 nt, Homo sapiens
  misc_RNA (1)...(19): siRNA sense strand
cauggaaaggcuugagaaa

SEQ ID NO: 1554719 - RNA, 19 nt, Homo sapiens
  misc_RNA (1)...(19): siRNA sense strand
aggcaucacccaaguaguu

SEQ ID NO: 1554720 - RNA, 19 nt, Homo sapiens
  misc_RNA (1)...(19): siRNA sense strand
ugagaaauugcacuucaug

SEQ ID NO: 1554721 - RNA, 19 nt, Homo sapiens
  misc_RNA (1)...(19): siRNA sense strand
ggcuaacugugucaauauc

SEQ ID NO: 1554722 - RNA, 19 nt, Homo sapiens
  misc_RNA (1)...(19): siRNA sense strand
caucacccaaguaguuauu

SEQ ID NO: 1554723 - RNA, 19 nt, Homo sapiens
  misc_RNA (1)...(19): siRNA sense strand
gagcgggugcuuccucauc

SEQ ID NO: 1554724 - RNA, 19 nt, Homo sapiens
  misc_RNA (1)...(19): siRNA sense strand
guccuucaaugccuuaguc

SEQ ID NO: 1554725 - RNA, 19 nt, Homo sapiens
  misc_RNA (1)...(19): siRNA sense strand
gagaacuugagccuuaugu

SEQ ID NO: 1554726 - RNA, 19 nt, Homo sapiens
  misc_RNA (1)...(19): siRNA sense strand
aaugugaauugccaguuuc

SEQ ID NO: 1554727 - RNA, 19 nt, Homo sapiens
  misc_RNA (1)...(19): siRNA sense strand
cauaggcaucacccaagua

SEQ ID NO: 1554728 - RNA, 19 nt, Homo sapiens
  misc_RNA (1)...(19): siRNA sense strand
cggcuaacugugucaauau

SEQ ID NO: 1554729 - RNA, 19 nt, Homo sapiens
  misc_RNA (1)...(19): siRNA sense strand
agccuuaugucuacuucaa

SEQ ID NO: 1554730 - RNA, 19 nt, Homo sapiens
  misc_RNA (1)...(19): siRNA sense strand
ggagaacuugagccuuaug

SEQ ID NO: 1554731 - RNA, 19 nt, Homo sapiens
  misc_RNA (1)...(19): siRNA sense strand
gcgugaaggacaggaauga

SEQ ID NO: 1554732 - RNA, 19 nt, Homo sapiens
  misc_RNA (1)...(19): siRNA sense strand
acacuaucaaggccaagua

SEQ ID NO: 1554733 - RNA, 19 nt, Homo sapiens
  misc_RNA (1)...(19): siRNA sense strand
gcuccaagacacuaucaag

SEQ ID NO: 1554734 - RNA, 19 nt, Homo sapiens
  misc_RNA (1)...(19): siRNA sense strand
gaauugccaguuuccuauc

SEQ ID NO: 1554735 - RNA, 19 nt, Homo sapiens
  misc_RNA (1)...(19): siRNA sense strand
gccaagaagcuguaugacu

SEQ ID NO: 1554736 - RNA, 19 nt, Homo sapiens
  misc_RNA (1)...(19): siRNA sense strand
cagcaggagcucauaaagg

SEQ ID NO: 1554737 - RNA, 19 nt, Homo sapiens
  misc_RNA (1)...(19): siRNA sense strand
gcgggugcuuccucaucuu

SEQ ID NO: 1554738 - RNA, 19 nt, Homo sapiens
  misc_RNA (1)...(19): siRNA sense strand
gcugcuguaugccaagaag

SEQ ID NO: 1554739 - RNA, 19 nt, Homo sapiens
  misc_RNA (1)...(19): siRNA sense strand
uaucaaggccaaguaugga

SEQ ID NO: 1554740 - RNA, 19 nt, Homo sapiens
  misc_RNA (1)...(19): siRNA sense strand
caaggccaaguauggagaa

SEQ ID NO: 1554741 - RNA, 19 nt, Homo sapiens
  misc_RNA (1)...(19): siRNA sense strand
gacaacagcucuaugauuu

SEQ ID NO: 1554742 - RNA, 19 nt, Homo sapiens
  misc_RNA (1)...(19): siRNA sense strand
gagauaagauuucaguuuc

SEQ ID NO: 1554743 - RNA, 19 nt, Homo sapiens
  misc_RNA (1)...(19): siRNA sense strand
gaagagugcuauguguaua

SEQ ID NO: 1554744 - RNA, 19 nt, Homo sapiens
  misc_RNA (1)...(19): siRNA sense strand
ugagguagaucaugaaaga

SEQ ID NO: 1554745 - RNA, 19 nt, Homo sapiens
  misc_RNA (1)...(19): siRNA sense strand
uaggagggaucauaagaua

SEQ ID NO: 1554746 - RNA, 19 nt, Homo sapiens
  misc_RNA (1)...(19): siRNA sense strand
gaacaucuauacuaagcau

SEQ ID NO: 1554747 - RNA, 19 nt, Homo sapiens
  misc_RNA (1)...(19): siRNA sense strand
ggagggaucauaagauauu

SEQ ID NO: 1554748 - RNA, 19 nt, Homo sapiens
  misc_RNA (1)...(19): siRNA sense strand
gaacaacaagaaacaagaa

SEQ ID NO: 1554749 - RNA, 19 nt, Homo sapiens
  misc_RNA (1)...(19): siRNA sense strand
ggacuggccuuuguauuca

SEQ ID NO: 1554750 - RNA, 19 nt, Homo sapiens
  misc_RNA (1)...(19): siRNA sense strand
caagagaauucauuacuac

SEQ ID NO: 1554751 - RNA, 19 nt, Homo sapiens
  misc_RNA (1)...(19): siRNA sense strand
gggcguggcuaaccugauu

SEQ ID NO: 1554752 - RNA, 19 nt, Homo sapiens
  misc_RNA (1)...(19): siRNA sense strand
uggaaugugugucaucaua

SEQ ID NO: 1554753 - RNA, 19 nt, Homo sapiens
  misc_RNA (1)...(19): siRNA sense strand
ugacauggccuaaauuaau

SEQ ID NO: 1554754 - RNA, 19 nt, Homo sapiens
  misc_RNA (1)...(19): siRNA sense strand
gauccuggaccuaugaaua

SEQ ID NO: 1554755 - RNA, 19 nt, Homo sapiens
  misc_RNA (1)...(19): siRNA sense strand
uuucaagucuccuucauuu

SEQ ID NO: 1554756 - RNA, 19 nt, Homo sapiens
  misc_RNA (1)...(19): siRNA sense strand
ccauugggcucugcuuaua

SEQ ID NO: 1554757 - RNA, 19 nt, Homo sapiens
  misc_RNA (1)...(19): siRNA sense strand
gaucauggccuguuucuac

SEQ ID NO: 1554758 - RNA, 19 nt, Homo sapiens
  misc_RNA (1)...(19): siRNA sense strand
uaucuucggugacauuuau

SEQ ID NO: 1554759 - RNA, 19 nt, Homo sapiens
  misc_RNA (1)...(19): siRNA sense strand
aaacauaggagggaucaua

SEQ ID NO: 1554760 - RNA, 19 nt, Homo sapiens
  misc_RNA (1)...(19): siRNA sense strand
cacaggagcccaacaguuu

SEQ ID NO: 1554761 - RNA, 19 nt, Homo sapiens
  misc_RNA (1)...(19): siRNA sense strand
gacauggccuaaauuaauc

SEQ ID NO: 1554762 - RNA, 19 nt, Homo sapiens
  misc_RNA (1)...(19): siRNA sense strand
gugagggacuugugcauug

SEQ ID NO: 1554763 - RNA, 19 nt, Homo sapiens
  misc_RNA (1)...(19): siRNA sense strand
gggauuucauuuggaauuu

SEQ ID NO: 1554764 - RNA, 19 nt, Homo sapiens
  misc_RNA (1)...(19): siRNA sense strand
aaaguuacacugaaggaua

SEQ ID NO: 1554765 - RNA, 19 nt, Homo sapiens
  misc_RNA (1)...(19): siRNA sense strand
uaauuucccuccaccaaga

SEQ ID NO: 1554766 - RNA, 19 nt, Homo sapiens
  misc_RNA (1)...(19): siRNA sense strand
ugacauuuauccuagcauu

SEQ ID NO: 1554767 - RNA, 19 nt, Homo sapiens
  misc_RNA (1)...(19): siRNA sense strand
guauagagcccacaaacau

SEQ ID NO: 1554768 - RNA, 19 nt, Homo sapiens
  misc_RNA (1)...(19): siRNA sense strand
cagugucuguccuuuauuu

SEQ ID NO: 1554769 - RNA, 19 nt, Homo sapiens
  misc_RNA (1)...(19): siRNA sense strand
cuaugaauauccaguuuga

SEQ ID NO: 1554770 - RNA, 19 nt, Homo sapiens
  misc_RNA (1)...(19): siRNA sense strand
gggcucugcuuauaaacuu

SEQ ID NO: 1554771 - RNA, 19 nt, Homo sapiens
  misc_RNA (1)...(19): siRNA sense strand
ccagaagagugcuaugugu

SEQ ID NO: 1554772 - RNA, 19 nt, Homo sapiens
  misc_RNA (1)...(19): siRNA sense strand
gacuguauacccacucuua

SEQ ID NO: 1554773 - RNA, 19 nt, Homo sapiens
  misc_RNA (1)...(19): siRNA sense strand
ugacaacagcucuaugauu

SEQ ID NO: 1554774 - RNA, 19 nt, Homo sapiens
  misc_RNA (1)...(19): siRNA sense strand
cgucugacauggccuaaau

SEQ ID NO: 1554775 - RNA, 19 nt, Homo sapiens
  misc_RNA (1)...(19): siRNA sense strand
acccaucucucaucuauau

SEQ ID NO: 1554776 - RNA, 19 nt, Homo sapiens
  misc_RNA (1)...(19): siRNA sense strand
gcagacaaggcacugauug

SEQ ID NO: 1554777 - RNA, 19 nt, Homo sapiens
  misc_RNA (1)...(19): siRNA sense strand
gggaacaucuauacuaagc

SEQ ID NO: 1554778 - RNA, 19 nt, Homo sapiens
  misc_RNA (1)...(19): siRNA sense strand
gaacaagagaauucauuac

SEQ ID NO: 1554779 - RNA, 19 nt, Homo sapiens
  misc_RNA (1)...(19): siRNA sense strand
uggcuaaccugauuguuca

SEQ ID NO: 1554780 - RNA, 19 nt, Homo sapiens
  misc_RNA (1)...(19): siRNA sense strand
ggccauaucuucggugaca

SEQ ID NO: 1554781 - RNA, 19 nt, Homo sapiens
  misc_RNA (1)...(19): siRNA sense strand
cuuauaugcuggugacauu

SEQ ID NO: 1554782 - RNA, 19 nt, Homo sapiens
  misc_RNA (1)...(19): siRNA sense strand
gcuguucgcuugggauuuc

SEQ ID NO: 1554783 - RNA, 19 nt, Homo sapiens
  misc_RNA (1)...(19): siRNA sense strand
aauaauagcaacccuguga

SEQ ID NO: 1554784 - RNA, 19 nt, Homo sapiens
  misc_RNA (1)...(19): siRNA sense strand
gaaugugugucaucauacu

SEQ ID NO: 1554785 - RNA, 19 nt, Homo sapiens
  misc_RNA (1)...(19): siRNA sense strand
uuggagcaaugauaguuua

SEQ ID NO: 1554786 - RNA, 19 nt, Homo sapiens
  misc_RNA (1)...(19): siRNA sense strand
ccaccauuauccaaagauu

SEQ ID NO: 1554787 - RNA, 19 nt, Homo sapiens
  misc_RNA (1)...(19): siRNA sense strand
gaagaacaacaagaaacaa

SEQ ID NO: 1554788 - RNA, 19 nt, Homo sapiens
  misc_RNA (1)...(19): siRNA sense strand
cagaagagugcuaugugua

SEQ ID NO: 1554789 - RNA, 19 nt, Homo sapiens
  misc_RNA (1)...(19): siRNA sense strand
aagaagagcgucugacaug

SEQ ID NO: 1554790 - RNA, 19 nt, Homo sapiens
  misc_RNA (1)...(19): siRNA sense strand
gagugaucauggccuguuu

SEQ ID NO: 1554791 - RNA, 19 nt, Homo sapiens
  misc_RNA (1)...(19): siRNA sense strand
uuagacaacuucccuagca

SEQ ID NO: 1554792 - RNA, 19 nt, Homo sapiens
  misc_RNA (1)...(19): siRNA sense strand
uagcaacccugugauuugu

SEQ ID NO: 1554793 - RNA, 19 nt, Homo sapiens
  misc_RNA (1)...(19): siRNA sense strand
aagauuguauugagcagaa

SEQ ID NO: 1554794 - RNA, 19 nt, Homo sapiens
  misc_RNA (1)...(19): siRNA sense strand
gauaagauuucaguuucca

SEQ ID NO: 1554795 - RNA, 19 nt, Homo sapiens
  misc_RNA (1)...(19): siRNA sense strand
uccaugugcugauucuuaa

SEQ ID NO: 1554796 - RNA, 19 nt, Homo sapiens
  misc_RNA (1)...(19): siRNA sense strand
auacccaucucucaucuau

SEQ ID NO: 1554797 - RNA, 19 nt, Homo sapiens
  misc_RNA (1)...(19): siRNA sense strand
cauguggacuggccuuugu

SEQ ID NO: 1554798 - RNA, 19 nt, Homo sapiens
  misc_RNA (1)...(19): siRNA sense strand
gaaagagauccuggaccua

SEQ ID NO: 1554799 - RNA, 19 nt, Homo sapiens
  misc_RNA (1)...(19): siRNA sense strand
ggacuugugcauugcuuau

SEQ ID NO: 1554800 - RNA, 19 nt, Homo sapiens
  misc_RNA (1)...(19): siRNA sense strand
uaaugacacagacacuaua

SEQ ID NO: 1554801 - RNA, 19 nt, Homo sapiens
  misc_RNA (1)...(19): siRNA sense strand
uaauagcaacccugugauu

SEQ ID NO: 1554802 - RNA, 19 nt, Homo sapiens
  misc_RNA (1)...(19): siRNA sense strand
ucugacauggccuaaauua

SEQ ID NO: 1554803 - RNA, 19 nt, Homo sapiens
  misc_RNA (1)...(19): siRNA sense strand
ccaucucucaucuauauaa

SEQ ID NO: 1554804 - RNA, 19 nt, Homo sapiens
  misc_RNA (1)...(19): siRNA sense strand
ugugggagcuggagugauc

SEQ ID NO: 1554805 - RNA, 19 nt, Homo sapiens
  misc_RNA (1)...(19): siRNA sense strand
gauuuggaauaccaugaug

SEQ ID NO: 1554806 - RNA, 19 nt, Homo sapiens
  misc_RNA (1)...(19): siRNA sense strand
uaccagagauaagauuuca

SEQ ID NO: 1554807 - RNA, 19 nt, Homo sapiens
  misc_RNA (1)...(19): siRNA sense strand
aaagagauccuggaccuau

SEQ ID NO: 1554808 - RNA, 19 nt, Homo sapiens
  misc_RNA (1)...(19): siRNA sense strand
gaaaaguggugggauaagu

SEQ ID NO: 1554809 - RNA, 19 nt, Homo sapiens
  misc_RNA (1)...(19): siRNA sense strand
aaacaggcuggauuuacua

SEQ ID NO: 1554810 - RNA, 19 nt, Homo sapiens
  misc_RNA (1)...(19): siRNA sense strand
augggaacaucuauacuaa

SEQ ID NO: 1554811 - RNA, 19 nt, Homo sapiens
  misc_RNA (1)...(19): siRNA sense strand
gggugcuuaugucaaauuu

SEQ ID NO: 1554812 - RNA, 19 nt, Homo sapiens
  misc_RNA (1)...(19): siRNA sense strand
cauaggagggaucauaaga

SEQ ID NO: 1554813 - RNA, 19 nt, Homo sapiens
  misc_RNA (1)...(19): siRNA sense strand
ggauauuccugcuguucca

SEQ ID NO: 1554814 - RNA, 19 nt, Homo sapiens
  misc_RNA (1)...(19): siRNA sense strand
ugaagaacaacaagaaaca

SEQ ID NO: 1554815 - RNA, 19 nt, Homo sapiens
  misc_RNA (1)...(19): siRNA sense strand
ggauuucauuuggaauuuc

SEQ ID NO: 1554816 - RNA, 19 nt, Homo sapiens
  misc_RNA (1)...(19): siRNA sense strand
ggucgagucuccucuucuc

SEQ ID NO: 1554817 - RNA, 19 nt, Homo sapiens
  misc_RNA (1)...(19): siRNA sense strand
gguagaucaugaaagagau

SEQ ID NO: 1554818 - RNA, 19 nt, Homo sapiens
  misc_RNA (1)...(19): siRNA sense strand
ccaagaagagcgucugaca

SEQ ID NO: 1554819 - RNA, 19 nt, Homo sapiens
  misc_RNA (1)...(19): siRNA sense strand
ggagcaaugauaguuuauu

SEQ ID NO: 1554820 - RNA, 19 nt, Homo sapiens
  misc_RNA (1)...(19): siRNA sense strand
gccaugaacaagagaauuc

SEQ ID NO: 1554821 - RNA, 19 nt, Homo sapiens
  misc_RNA (1)...(19): siRNA sense strand
ccugacaacagcucuauga

SEQ ID NO: 1554822 - RNA, 19 nt, Homo sapiens
  misc_RNA (1)...(19): siRNA sense strand
gacacagacacuauacuga

SEQ ID NO: 1554823 - RNA, 19 nt, Homo sapiens
  misc_RNA (1)...(19): siRNA sense strand
gacauuauuucggcuccuu

SEQ ID NO: 1554824 - RNA, 19 nt, Homo sapiens
  misc_RNA (1)...(19): siRNA sense strand
uccagaugaugacuguaua

SEQ ID NO: 1554825 - RNA, 19 nt, Homo sapiens
  misc_RNA (1)...(19): siRNA sense strand
uauauuggaguccugguuu

SEQ ID NO: 1554826 - RNA, 19 nt, Homo sapiens
  misc_RNA (1)...(19): siRNA sense strand
uauaugcuggugacauuaa

SEQ ID NO: 1554827 - RNA, 19 nt, Homo sapiens
  misc_RNA (1)...(19): siRNA sense strand
ccagagauaagauuucagu

SEQ ID NO: 1554828 - RNA, 19 nt, Homo sapiens
  misc_RNA (1)...(19): siRNA sense strand
caacagcucuaugauuuuc

SEQ ID NO: 1554829 - RNA, 19 nt, Homo sapiens
  misc_RNA (1)...(19): siRNA sense strand
gauaguuuauugggugcuu

SEQ ID NO: 1554830 - RNA, 19 nt, Homo sapiens
  misc_RNA (1)...(19): siRNA sense strand
agaagagugcuauguguau

SEQ ID NO: 1554831 - RNA, 19 nt, Homo sapiens
  misc_RNA (1)...(19): siRNA sense strand
gacauuuauccuagcauuu

SEQ ID NO: 1554832 - RNA, 19 nt, Homo sapiens
  misc_RNA (1)...(19): siRNA sense strand
ugacacagacacuauacug

SEQ ID NO: 1554833 - RNA, 19 nt, Homo sapiens
  misc_RNA (1)...(19): siRNA sense strand
ucaccaccauuauccaaag

SEQ ID NO: 1554834 - RNA, 19 nt, Homo sapiens
  misc_RNA (1)...(19): siRNA sense strand
ggagugaucauggccuguu

SEQ ID NO: 1554835 - RNA, 19 nt, Homo sapiens
  misc_RNA (1)...(19): siRNA sense strand
uuaaugacacagacacuau

SEQ ID NO: 1554836 - RNA, 19 nt, Homo sapiens
  misc_RNA (1)...(19): siRNA sense strand
ccugugauuuguccaagug

SEQ ID NO: 1554837 - RNA, 19 nt, Homo sapiens
  misc_RNA (1)...(19): siRNA sense strand
gugcuuaugucaaauuuuc

SEQ ID NO: 1554838 - RNA, 19 nt, Homo sapiens
  misc_RNA (1)...(19): siRNA sense strand
gcuggugacauuaacuuau

SEQ ID NO: 1554839 - RNA, 19 nt, Homo sapiens
  misc_RNA (1)...(19): siRNA sense strand
aauagcaacccugugauuu

SEQ ID NO: 1554840 - RNA, 19 nt, Homo sapiens
  misc_RNA (1)...(19): siRNA sense strand
cacagacacuauacugagu

SEQ ID NO: 1554841 - RNA, 19 nt, Homo sapiens
  misc_RNA (1)...(19): siRNA sense strand
gaaacaggcucaccaaaga

SEQ ID NO: 1554842 - RNA, 19 nt, Homo sapiens
  misc_RNA (1)...(19): siRNA sense strand
ggagacacacacacacaua

SEQ ID NO: 1554843 - RNA, 19 nt, Homo sapiens
  misc_RNA (1)...(19): siRNA sense strand
acacacacacagagucuua

SEQ ID NO: 1554844 - RNA, 19 nt, Homo sapiens
  misc_RNA (1)...(19): siRNA sense strand
gaagagagaaugggagaca

SEQ ID NO: 1554845 - RNA, 19 nt, Homo sapiens
  misc_RNA (1)...(19): siRNA sense strand
gcagaaacaggcucaccaa

SEQ ID NO: 1554846 - RNA, 19 nt, Homo sapiens
  misc_RNA (1)...(19): siRNA sense strand
acagagagagggaaagaaa

SEQ ID NO: 1554847 - RNA, 19 nt, Homo sapiens
  misc_RNA (1)...(19): siRNA sense strand
acacaaaccgacagagaga

SEQ ID NO: 1554848 - RNA, 19 nt, Homo sapiens
  misc_RNA (1)...(19): siRNA sense strand
acacacacagagucuuaua

SEQ ID NO: 1554849 - RNA, 19 nt, Homo sapiens
  misc_RNA (1)...(19): siRNA sense strand
cgacagagagagggaaaga

SEQ ID NO: 1554850 - RNA, 19 nt, Homo sapiens
  misc_RNA (1)...(19): siRNA sense strand
acacacaaaccgacagaga

SEQ ID NO: 1554851 - RNA, 19 nt, Homo sapiens
  misc_RNA (1)...(19): siRNA sense strand
acacagacacacacacaga

SEQ ID NO: 1554852 - RNA, 19 nt, Homo sapiens
  misc_RNA (1)...(19): siRNA sense strand
gcacacgggcacacacaca

SEQ ID NO: 1554853 - RNA, 19 nt, Homo sapiens
  misc_RNA (1)...(19): siRNA sense strand
agaaacaggcucaccaaag

SEQ ID NO: 1554854 - RNA, 19 nt, Homo sapiens
  misc_RNA (1)...(19): siRNA sense strand
cagaaacaggcucaccaaa

SEQ ID NO: 1554855 - RNA, 19 nt, Homo sapiens
  misc_RNA (1)...(19): siRNA sense strand
agagagagggaaagaaaca

SEQ ID NO: 1554856 - RNA, 19 nt, Homo sapiens
  misc_RNA (1)...(19): siRNA sense strand
agacugagagacagagaga

SEQ ID NO: 1554857 - RNA, 19 nt, Homo sapiens
  misc_RNA (1)...(19): siRNA sense strand
gacagagagagaagagaga

SEQ ID NO: 1554858 - RNA, 19 nt, Homo sapiens
  misc_RNA (1)...(19): siRNA sense strand
gagacacacacacacauac

SEQ ID NO: 1554859 - RNA, 19 nt, Homo sapiens
  misc_RNA (1)...(19): siRNA sense strand
agagagagaagagagaaug

SEQ ID NO: 1554860 - RNA, 19 nt, Homo sapiens
  misc_RNA (1)...(19): siRNA sense strand
gagagagaagagagaaugg

SEQ ID NO: 1554861 - RNA, 19 nt, Homo sapiens
  misc_RNA (1)...(19): siRNA sense strand
gagagacagagagagaaga

SEQ ID NO: 1554862 - RNA, 19 nt, Homo sapiens
  misc_RNA (1)...(19): siRNA sense strand
aggcagagaggcagaaaca

SEQ ID NO: 1554863 - RNA, 19 nt, Homo sapiens
  misc_RNA (1)...(19): siRNA sense strand
gagacaagcugcugugugu

SEQ ID NO: 1554864 - RNA, 19 nt, Homo sapiens
  misc_RNA (1)...(19): siRNA sense strand
gaugaguggcugugaguua

SEQ ID NO: 1554865 - RNA, 19 nt, Homo sapiens
  misc_RNA (1)...(19): siRNA sense strand
cauaagaauugcaggaaga

SEQ ID NO: 1554866 - RNA, 19 nt, Homo sapiens
  misc_RNA (1)...(19): siRNA sense strand
gacaauggcaguagagaug

SEQ ID NO: 1554867 - RNA, 19 nt, Homo sapiens
  misc_RNA (1)...(19): siRNA sense strand
gcaggaagaauaccacugu

SEQ ID NO: 1554868 - RNA, 19 nt, Homo sapiens
  misc_RNA (1)...(19): siRNA sense strand
ggaccaggaugaggaagau

SEQ ID NO: 1554869 - RNA, 19 nt, Homo sapiens
  misc_RNA (1)...(19): siRNA sense strand
aagaauugcaggaagaaua

SEQ ID NO: 1554870 - RNA, 19 nt, Homo sapiens
  misc_RNA (1)...(19): siRNA sense strand
ggaugaggaagauaaagaa

SEQ ID NO: 1554871 - RNA, 19 nt, Homo sapiens
  misc_RNA (1)...(19): siRNA sense strand
uguguuugcugagaaguua

SEQ ID NO: 1554872 - RNA, 19 nt, Homo sapiens
  misc_RNA (1)...(19): siRNA sense strand
uaaggacaauggcaguaga

SEQ ID NO: 1554873 - RNA, 19 nt, Homo sapiens
  misc_RNA (1)...(19): siRNA sense strand
gaaagaaaggggaggaaaa

SEQ ID NO: 1554874 - RNA, 19 nt, Homo sapiens
  misc_RNA (1)...(19): siRNA sense strand
gaagacaggaacagugagu

SEQ ID NO: 1554875 - RNA, 19 nt, Homo sapiens
  misc_RNA (1)...(19): siRNA sense strand
gcugagaaguuaauaucac

SEQ ID NO: 1554876 - RNA, 19 nt, Homo sapiens
  misc_RNA (1)...(19): siRNA sense strand
ggacaauggcaguagagau

SEQ ID NO: 1554877 - RNA, 19 nt, Homo sapiens
  misc_RNA (1)...(19): siRNA sense strand
gucagaagcuaaggacaau

SEQ ID NO: 1554878 - RNA, 19 nt, Homo sapiens
  misc_RNA (1)...(19): siRNA sense strand
ugaggaagauaaagaaucc

SEQ ID NO: 1554879 - RNA, 19 nt, Homo sapiens
  misc_RNA (1)...(19): siRNA sense strand
caguagagaugagguucuu

SEQ ID NO: 1554880 - RNA, 19 nt, Homo sapiens
  misc_RNA (1)...(19): siRNA sense strand
guagagaugagguucuugu

SEQ ID NO: 1554881 - RNA, 19 nt, Homo sapiens
  misc_RNA (1)...(19): siRNA sense strand
gcugugaguuagagacaag

SEQ ID NO: 1554882 - RNA, 19 nt, Homo sapiens
  misc_RNA (1)...(19): siRNA sense strand
gucucuggcuccuguguuu

SEQ ID NO: 1554883 - RNA, 19 nt, Homo sapiens
  misc_RNA (1)...(19): siRNA sense strand
gagaaguuaauaucaccaa

SEQ ID NO: 1554884 - RNA, 19 nt, Homo sapiens
  misc_RNA (1)...(19): siRNA sense strand
gcuaaggacaauggcagua

SEQ ID NO: 1554885 - RNA, 19 nt, Homo sapiens
  misc_RNA (1)...(19): siRNA sense strand
gaaugaagacaggaacagu

SEQ ID NO: 1554886 - RNA, 19 nt, Homo sapiens
  misc_RNA (1)...(19): siRNA sense strand
agacaggaacagugaguug

SEQ ID NO: 1554887 - RNA, 19 nt, Homo sapiens
  misc_RNA (1)...(19): siRNA sense strand
gaugaggaagauaaagaau

SEQ ID NO: 1554888 - RNA, 19 nt, Homo sapiens
  misc_RNA (1)...(19): siRNA sense strand
gcuccuguguuugcugaga

SEQ ID NO: 1554889 - RNA, 19 nt, Homo sapiens
  misc_RNA (1)...(19): siRNA sense strand
ccaggaugaggaagauaaa

SEQ ID NO: 1554890 - RNA, 19 nt, Homo sapiens
  misc_RNA (1)...(19): siRNA sense strand
gagaaugaagacaggaaca

SEQ ID NO: 1554891 - RNA, 19 nt, Homo sapiens
  misc_RNA (1)...(19): siRNA sense strand
aaguuaauaucaccaagca

SEQ ID NO: 1554892 - RNA, 19 nt, Homo sapiens
  misc_RNA (1)...(19): siRNA sense strand
ccacugucccgggaaagaa

SEQ ID NO: 1554893 - RNA, 19 nt, Homo sapiens
  misc_RNA (1)...(19): siRNA sense strand
cagaagcuaaggacaaugg

SEQ ID NO: 1554894 - RNA, 19 nt, Homo sapiens
  misc_RNA (1)...(19): siRNA sense strand
auaccacugucccgggaaa

SEQ ID NO: 1554895 - RNA, 19 nt, Homo sapiens
  misc_RNA (1)...(19): siRNA sense strand
gugagagccaccaggagaa

SEQ ID NO: 1554896 - RNA, 19 nt, Homo sapiens
  misc_RNA (1)...(19): siRNA sense strand
ggaagagauuuguggauua

SEQ ID NO: 1554897 - RNA, 19 nt, Homo sapiens
  misc_RNA (1)...(19): siRNA sense strand
gaagagauuuguggauuaa

SEQ ID NO: 1554898 - RNA, 19 nt, Homo sapiens
  misc_RNA (1)...(19): siRNA sense strand
ggccagaucugcuuuagaa

SEQ ID NO: 1554899 - RNA, 19 nt, Homo sapiens
  misc_RNA (1)...(19): siRNA sense strand
ucacggagcuaauucauau

SEQ ID NO: 1554900 - RNA, 19 nt, Homo sapiens
  misc_RNA (1)...(19): siRNA sense strand
gaauauggcauuucaguau

SEQ ID NO: 1554901 - RNA, 19 nt, Homo sapiens
  misc_RNA (1)...(19): siRNA sense strand
ggaaucagguagugucaga

SEQ ID NO: 1554902 - RNA, 19 nt, Homo sapiens
  misc_RNA (1)...(19): siRNA sense strand
guacaugacagcuggaaua

SEQ ID NO: 1554903 - RNA, 19 nt, Homo sapiens
  misc_RNA (1)...(19): siRNA sense strand
gaucagagaggcucaagaa

SEQ ID NO: 1554904 - RNA, 19 nt, Homo sapiens
  misc_RNA (1)...(19): siRNA sense strand
aaacucagcuccuguaguc

SEQ ID NO: 1554905 - RNA, 19 nt, Homo sapiens
  misc_RNA (1)...(19): siRNA sense strand
aaucaaagcuggcaaaggu

SEQ ID NO: 1554906 - RNA, 19 nt, Homo sapiens
  misc_RNA (1)...(19): siRNA sense strand
ucauauugcucuccuugua

SEQ ID NO: 1554907 - RNA, 19 nt, Homo sapiens
  misc_RNA (1)...(19): siRNA sense strand
ugaaagacaugcaauuugg

SEQ ID NO: 1554908 - RNA, 19 nt, Homo sapiens
  misc_RNA (1)...(19): siRNA sense strand
ggaauagccuccaguugag

SEQ ID NO: 1554909 - RNA, 19 nt, Homo sapiens
  misc_RNA (1)...(19): siRNA sense strand
gaagauuggacuaugcuaa

SEQ ID NO: 1554910 - RNA, 19 nt, Homo sapiens
  misc_RNA (1)...(19): siRNA sense strand
caaggaguauaucaugaaa

SEQ ID NO: 1554911 - RNA, 19 nt, Homo sapiens
  misc_RNA (1)...(19): siRNA sense strand
caucaggaauuucuuggaa

SEQ ID NO: 1554912 - RNA, 19 nt, Homo sapiens
  misc_RNA (1)...(19): siRNA sense strand
guacaucgugggauaguaa

SEQ ID NO: 1554913 - RNA, 19 nt, Homo sapiens
  misc_RNA (1)...(19): siRNA sense strand
gaucuacucaugucaaaga

SEQ ID NO: 1554914 - RNA, 19 nt, Homo sapiens
  misc_RNA (1)...(19): siRNA sense strand
gagacuuucuucuagcaaa

SEQ ID NO: 1554915 - RNA, 19 nt, Homo sapiens
  misc_RNA (1)...(19): siRNA sense strand
guacaaggaguauaucaug

SEQ ID NO: 1554916 - RNA, 19 nt, Homo sapiens
  misc_RNA (1)...(19): siRNA sense strand
ggaaaguuauaucacagau

SEQ ID NO: 1554917 - RNA, 19 nt, Homo sapiens
  misc_RNA (1)...(19): siRNA sense strand
gcagagaucacggagcuaa

SEQ ID NO: 1554918 - RNA, 19 nt, Homo sapiens
  misc_RNA (1)...(19): siRNA sense strand
cuauugaccugugucguua

SEQ ID NO: 1554919 - RNA, 19 nt, Homo sapiens
  misc_RNA (1)...(19): siRNA sense strand
ggauuaaacagaucagaga

SEQ ID NO: 1554920 - RNA, 19 nt, Homo sapiens
  misc_RNA (1)...(19): siRNA sense strand
gggaucuacucaugucaaa

SEQ ID NO: 1554921 - RNA, 19 nt, Homo sapiens
  misc_RNA (1)...(19): siRNA sense strand
gaacaccaagguuguggaa

SEQ ID NO: 1554922 - RNA, 19 nt, Homo sapiens
  misc_RNA (1)...(19): siRNA sense strand
ucagugggaucuacucaug

SEQ ID NO: 1554923 - RNA, 19 nt, Homo sapiens
  misc_RNA (1)...(19): siRNA sense strand
uggaagagauuuguggauu

SEQ ID NO: 1554924 - RNA, 19 nt, Homo sapiens
  misc_RNA (1)...(19): siRNA sense strand
gaguggagacuuucuucua

SEQ ID NO: 1554925 - RNA, 19 nt, Homo sapiens
  misc_RNA (1)...(19): siRNA sense strand
agucuuacaucaggaauuu

SEQ ID NO: 1554926 - RNA, 19 nt, Homo sapiens
  misc_RNA (1)...(19): siRNA sense strand
gaauaucgacuuggaagga

SEQ ID NO: 1554927 - RNA, 19 nt, Homo sapiens
  misc_RNA (1)...(19): siRNA sense strand
aaaggaagauuggacuaug

SEQ ID NO: 1554928 - RNA, 19 nt, Homo sapiens
  misc_RNA (1)...(19): siRNA sense strand
gcacuugccacguuaucuu

SEQ ID NO: 1554929 - RNA, 19 nt, Homo sapiens
  misc_RNA (1)...(19): siRNA sense strand
uauccugaguggagacuuu

SEQ ID NO: 1554930 - RNA, 19 nt, Homo sapiens
  misc_RNA (1)...(19): siRNA sense strand
gcuauugaccugugucguu

SEQ ID NO: 1554931 - RNA, 19 nt, Homo sapiens
  misc_RNA (1)...(19): siRNA sense strand
ggugugacuucagcuauug

SEQ ID NO: 1554932 - RNA, 19 nt, Homo sapiens
  misc_RNA (1)...(19): siRNA sense strand
cugccaagcugcaauggaa

SEQ ID NO: 1554933 - RNA, 19 nt, Homo sapiens
  misc_RNA (1)...(19): siRNA sense strand
uacaaggaguauaucauga

SEQ ID NO: 1554934 - RNA, 19 nt, Homo sapiens
  misc_RNA (1)...(19): siRNA sense strand
uaugcuaaguugcgagaaa

SEQ ID NO: 1554935 - RNA, 19 nt, Homo sapiens
  misc_RNA (1)...(19): siRNA sense strand
ggaauuagcaaagcaugau

SEQ ID NO: 1554936 - RNA, 19 nt, Homo sapiens
  misc_RNA (1)...(19): siRNA sense strand
cauggugccuuacuagcaa

SEQ ID NO: 1554937 - RNA, 19 nt, Homo sapiens
  misc_RNA (1)...(19): siRNA sense strand
ccagugacuccaugacuuu

SEQ ID NO: 1554938 - RNA, 19 nt, Homo sapiens
  misc_RNA (1)...(19): siRNA sense strand
gcaauggaauuagcaaagc

SEQ ID NO: 1554939 - RNA, 19 nt, Homo sapiens
  misc_RNA (1)...(19): siRNA sense strand
gcgacgagcucagcaacau

SEQ ID NO: 1554940 - RNA, 19 nt, Homo sapiens
  misc_RNA (1)...(19): siRNA sense strand
cuacucaugucaaagaagu

SEQ ID NO: 1554941 - RNA, 19 nt, Homo sapiens
  misc_RNA (1)...(19): siRNA sense strand
ccuuguacaucgugggaua

SEQ ID NO: 1554942 - RNA, 19 nt, Homo sapiens
  misc_RNA (1)...(19): siRNA sense strand
gaaaguuauaucacagaug

SEQ ID NO: 1554943 - RNA, 19 nt, Homo sapiens
  misc_RNA (1)...(19): siRNA sense strand
ggaggccagaucugcuuua

SEQ ID NO: 1554944 - RNA, 19 nt, Homo sapiens
  misc_RNA (1)...(19): siRNA sense strand
aaagaaguuuggcagagau

SEQ ID NO: 1554945 - RNA, 19 nt, Homo sapiens
  misc_RNA (1)...(19): siRNA sense strand
ucacagaugauauuggaau

SEQ ID NO: 1554946 - RNA, 19 nt, Homo sapiens
  misc_RNA (1)...(19): siRNA sense strand
ucucucccauggugccuua

SEQ ID NO: 1554947 - RNA, 19 nt, Homo sapiens
  misc_RNA (1)...(19): siRNA sense strand
uggcaaaggugugacuuca

SEQ ID NO: 1554948 - RNA, 19 nt, Homo sapiens
  misc_RNA (1)...(19): siRNA sense strand
cgugggauaguaaauuuaa

SEQ ID NO: 1554949 - RNA, 19 nt, Homo sapiens
  misc_RNA (1)...(19): siRNA sense strand
aauauggcauuucaguaug

SEQ ID NO: 1554950 - RNA, 19 nt, Homo sapiens
  misc_RNA (1)...(19): siRNA sense strand
caauggaauuagcaaagca

SEQ ID NO: 1554951 - RNA, 19 nt, Homo sapiens
  misc_RNA (1)...(19): siRNA sense strand
ccaagcugcaauggaauua

SEQ ID NO: 1554952 - RNA, 19 nt, Homo sapiens
  misc_RNA (1)...(19): siRNA sense strand
gaacacuucaugucagaac

SEQ ID NO: 1554953 - RNA, 19 nt, Homo sapiens
  misc_RNA (1)...(19): siRNA sense strand
ggaagcuggugggcacuca

SEQ ID NO: 1554954 - RNA, 19 nt, Homo sapiens
  misc_RNA (1)...(19): siRNA sense strand
auucugauguccagccuuu

SEQ ID NO: 1554955 - RNA, 19 nt, Homo sapiens
  misc_RNA (1)...(19): siRNA sense strand
acaaggaguauaucaugaa

SEQ ID NO: 1554956 - RNA, 19 nt, Homo sapiens
  misc_RNA (1)...(19): siRNA sense strand
ggagcuaauucauauugcu

SEQ ID NO: 1554957 - RNA, 19 nt, Homo sapiens
  misc_RNA (1)...(19): siRNA sense strand
acaccaagguuguggaacu

SEQ ID NO: 1554958 - RNA, 19 nt, Homo sapiens
  misc_RNA (1)...(19): siRNA sense strand
cagaauauggcauuucagu

SEQ ID NO: 1554959 - RNA, 19 nt, Homo sapiens
  misc_RNA (1)...(19): siRNA sense strand
uaaaauugcuauccugagu

SEQ ID NO: 1554960 - RNA, 19 nt, Homo sapiens
  misc_RNA (1)...(19): siRNA sense strand
ugucagaggcggagaagau

SEQ ID NO: 1554961 - RNA, 19 nt, Homo sapiens
  misc_RNA (1)...(19): siRNA sense strand
ccagcagcgugaacacuuc

SEQ ID NO: 1554962 - RNA, 19 nt, Homo sapiens
  misc_RNA (1)...(19): siRNA sense strand
caucgugggauaguaaauu

SEQ ID NO: 1554963 - RNA, 19 nt, Homo sapiens
  misc_RNA (1)...(19): siRNA sense strand
gaggccagaucugcuuuag

SEQ ID NO: 1554964 - RNA, 19 nt, Homo sapiens
  misc_RNA (1)...(19): siRNA sense strand
agaauauggcauuucagua

SEQ ID NO: 1554965 - RNA, 19 nt, Homo sapiens
  misc_RNA (1)...(19): siRNA sense strand
gagaucacggagcuaauuc

SEQ ID NO: 1554966 - RNA, 19 nt, Homo sapiens
  misc_RNA (1)...(19): siRNA sense strand
cucagcuccuguagucuua

SEQ ID NO: 1554967 - RNA, 19 nt, Homo sapiens
  misc_RNA (1)...(19): siRNA sense strand
gauguccagccuuuuauua

SEQ ID NO: 1554968 - RNA, 19 nt, Homo sapiens
  misc_RNA (1)...(19): siRNA sense strand
ggaaggagcagacuuuucu

SEQ ID NO: 1554969 - RNA, 19 nt, Homo sapiens
  misc_RNA (1)...(19): siRNA sense strand
cugaaagacaugcaauuug

SEQ ID NO: 1554970 - RNA, 19 nt, Homo sapiens
  misc_RNA (1)...(19): siRNA sense strand
acugaaagacaugcaauuu

SEQ ID NO: 1554971 - RNA, 19 nt, Homo sapiens
  misc_RNA (1)...(19): siRNA sense strand
ggaagauuggacuaugcua

SEQ ID NO: 1554972 - RNA, 19 nt, Homo sapiens
  misc_RNA (1)...(19): siRNA sense strand
ucagagaggcucaagaaaa

SEQ ID NO: 1554973 - RNA, 19 nt, Homo sapiens
  misc_RNA (1)...(19): siRNA sense strand
gagauuuguggauuaaaca

SEQ ID NO: 1554974 - RNA, 19 nt, Homo sapiens
  misc_RNA (1)...(19): siRNA sense strand
agagauuuguggauuaaac

SEQ ID NO: 1554975 - RNA, 19 nt, Homo sapiens
  misc_RNA (1)...(19): siRNA sense strand
ucuaaacucagcuccugua

SEQ ID NO: 1554976 - RNA, 19 nt, Homo sapiens
  misc_RNA (1)...(19): siRNA sense strand
gaauuagcaaagcaugaug

SEQ ID NO: 1554977 - RNA, 19 nt, Homo sapiens
  misc_RNA (1)...(19): siRNA sense strand
caccaagguuguggaacuu

SEQ ID NO: 1554978 - RNA, 19 nt, Homo sapiens
  misc_RNA (1)...(19): siRNA sense strand
agagaucacggagcuaauu

SEQ ID NO: 1554979 - RNA, 19 nt, Homo sapiens
  misc_RNA (1)...(19): siRNA sense strand
gauuggacuaugcuaaguu

SEQ ID NO: 1554980 - RNA, 19 nt, Homo sapiens
  misc_RNA (1)...(19): siRNA sense strand
gccaagcugcaauggaauu

SEQ ID NO: 1554981 - RNA, 19 nt, Homo sapiens
  misc_RNA (1)...(19): siRNA sense strand
aguggagacuuucuucuag

SEQ ID NO: 1554982 - RNA, 19 nt, Homo sapiens
  misc_RNA (1)...(19): siRNA sense strand
agacuuucuucuagcaaau

SEQ ID NO: 1554983 - RNA, 19 nt, Homo sapiens
  misc_RNA (1)...(19): siRNA sense strand
uucagaauauggcauuuca

SEQ ID NO: 1554984 - RNA, 19 nt, Homo sapiens
  misc_RNA (1)...(19): siRNA sense strand
gaucacggagcuaauucau

SEQ ID NO: 1554985 - RNA, 19 nt, Homo sapiens
  misc_RNA (1)...(19): siRNA sense strand
uggaggcccuggagagcuu

SEQ ID NO: 1554986 - RNA, 19 nt, Homo sapiens
  misc_RNA (1)...(19): siRNA sense strand
gcuaaguugcgagaaagaa

SEQ ID NO: 1554987 - RNA, 19 nt, Homo sapiens
  misc_RNA (1)...(19): siRNA sense strand
ucagcaacaucgcuaugca

SEQ ID NO: 1554988 - RNA, 19 nt, Homo sapiens
  misc_RNA (1)...(19): siRNA sense strand
gaugguccacugaaagaca

SEQ ID NO: 1554989 - RNA, 19 nt, Homo sapiens
  misc_RNA (1)...(19): siRNA sense strand
caaaggaaaguuauaucac

SEQ ID NO: 1554990 - RNA, 19 nt, Homo sapiens
  misc_RNA (1)...(19): siRNA sense strand
uuacaucaggaauuucuug

SEQ ID NO: 1554991 - RNA, 19 nt, Homo sapiens
  misc_RNA (1)...(19): siRNA sense strand
gcuugguggugcuccuuau

SEQ ID NO: 1554992 - RNA, 19 nt, Homo sapiens
  misc_RNA (1)...(19): siRNA sense strand
ucuagcaaaugccugcaau

SEQ ID NO: 1554993 - RNA, 19 nt, Homo sapiens
  misc_RNA (1)...(19): siRNA sense strand
cuuggaaggagcagacuuu

SEQ ID NO: 1554994 - RNA, 19 nt, Homo sapiens
  misc_RNA (1)...(19): siRNA sense strand
acacuucaugucagaacua

SEQ ID NO: 1554995 - RNA, 19 nt, Homo sapiens
  misc_RNA (1)...(19): siRNA sense strand
guggugcuccuuaucucua

SEQ ID NO: 1554996 - RNA, 19 nt, Homo sapiens
  misc_RNA (1)...(19): siRNA sense strand
gaacuuggcuacccguuaa

SEQ ID NO: 1554997 - RNA, 19 nt, Homo sapiens
  misc_RNA (1)...(19): siRNA sense strand
gcaaauggguauuauaaug

SEQ ID NO: 1554998 - RNA, 19 nt, Homo sapiens
  misc_RNA (1)...(19): siRNA sense strand
gagagaagauuggguuaua

SEQ ID NO: 1554999 - RNA, 19 nt, Homo sapiens
  misc_RNA (1)...(19): siRNA sense strand
gaaaggagaggaagaagaa

SEQ ID NO: 1555000 - RNA, 19 nt, Homo sapiens
  misc_RNA (1)...(19): siRNA sense strand
aagcagaccuggaauaauu

SEQ ID NO: 1555001 - RNA, 19 nt, Homo sapiens
  misc_RNA (1)...(19): siRNA sense strand
gaucugagccugaaucuga

SEQ ID NO: 1555002 - RNA, 19 nt, Homo sapiens
  misc_RNA (1)...(19): siRNA sense strand
gauggaaagugucgaauug

SEQ ID NO: 1555003 - RNA, 19 nt, Homo sapiens
  misc_RNA (1)...(19): siRNA sense strand
ggaauucucucuguuauca

SEQ ID NO: 1555004 - RNA, 19 nt, Homo sapiens
  misc_RNA (1)...(19): siRNA sense strand
gauaaaugcagcagacuua

SEQ ID NO: 1555005 - RNA, 19 nt, Homo sapiens
  misc_RNA (1)...(19): siRNA sense strand
gcagaaggauugcaaaugg

SEQ ID NO: 1555006 - RNA, 19 nt, Homo sapiens
  misc_RNA (1)...(19): siRNA sense strand
caggaucgauaaacaaaua

SEQ ID NO: 1555007 - RNA, 19 nt, Homo sapiens
  misc_RNA (1)...(19): siRNA sense strand
gagggaaguuauagaagua

SEQ ID NO: 1555008 - RNA, 19 nt, Homo sapiens
  misc_RNA (1)...(19): siRNA sense strand
gauaaauacuguccauuca

SEQ ID NO: 1555009 - RNA, 19 nt, Homo sapiens
  misc_RNA (1)...(19): siRNA sense strand
uguccuagcugcucgauua

SEQ ID NO: 1555010 - RNA, 19 nt, Homo sapiens
  misc_RNA (1)...(19): siRNA sense strand
gaaacguucuucaacaaug

SEQ ID NO: 1555011 - RNA, 19 nt, Homo sapiens
  misc_RNA (1)...(19): siRNA sense strand
gaggagaccuuuagcuuca

SEQ ID NO: 1555012 - RNA, 19 nt, Homo sapiens
  misc_RNA (1)...(19): siRNA sense strand
ggacuuuacuuucgagaug

SEQ ID NO: 1555013 - RNA, 19 nt, Homo sapiens
  misc_RNA (1)...(19): siRNA sense strand
gaaguagaaucgugcauca

SEQ ID NO: 1555014 - RNA, 19 nt, Homo sapiens
  misc_RNA (1)...(19): siRNA sense strand
gcgauaacaucugacuuua

SEQ ID NO: 1555015 - RNA, 19 nt, Homo sapiens
  misc_RNA (1)...(19): siRNA sense strand
ggagaugguuaccuaagaa

SEQ ID NO: 1555016 - RNA, 19 nt, Homo sapiens
  misc_RNA (1)...(19): siRNA sense strand
gaggcaagcucuucuggaa

SEQ ID NO: 1555017 - RNA, 19 nt, Homo sapiens
  misc_RNA (1)...(19): siRNA sense strand
gaaaugauucuucaguuug

SEQ ID NO: 1555018 - RNA, 19 nt, Homo sapiens
  misc_RNA (1)...(19): siRNA sense strand
aaagaagucugccaagcua

SEQ ID NO: 1555019 - RNA, 19 nt, Homo sapiens
  misc_RNA (1)...(19): siRNA sense strand
ggaaguccuuggaagauau

SEQ ID NO: 1555020 - RNA, 19 nt, Homo sapiens
  misc_RNA (1)...(19): siRNA sense strand
gaugauguaugaagcagaa

SEQ ID NO: 1555021 - RNA, 19 nt, Homo sapiens
  misc_RNA (1)...(19): siRNA sense strand
ggccaaggaugucaauauu

SEQ ID NO: 1555022 - RNA, 19 nt, Homo sapiens
  misc_RNA (1)...(19): siRNA sense strand
acucuucgaugaauacuua

SEQ ID NO: 1555023 - RNA, 19 nt, Homo sapiens
  misc_RNA (1)...(19): siRNA sense strand
gaaccgaucugagccugaa

SEQ ID NO: 1555024 - RNA, 19 nt, Homo sapiens
  misc_RNA (1)...(19): siRNA sense strand
gcagaacaaaugaauguaa

SEQ ID NO: 1555025 - RNA, 19 nt, Homo sapiens
  misc_RNA (1)...(19): siRNA sense strand
uaaauacuguccauucaug

SEQ ID NO: 1555026 - RNA, 19 nt, Homo sapiens
  misc_RNA (1)...(19): siRNA sense strand
gaagauaugcagaacaaau

SEQ ID NO: 1555027 - RNA, 19 nt, Homo sapiens
  misc_RNA (1)...(19): siRNA sense strand
gaagagagaaguacuugau

SEQ ID NO: 1555028 - RNA, 19 nt, Homo sapiens
  misc_RNA (1)...(19): siRNA sense strand
ggacuccucuuaaguacug

SEQ ID NO: 1555029 - RNA, 19 nt, Homo sapiens
  misc_RNA (1)...(19): siRNA sense strand
gguguaugcuuauaaguau

SEQ ID NO: 1555030 - RNA, 19 nt, Homo sapiens
  misc_RNA (1)...(19): siRNA sense strand
caaugaggcuggacaagga

SEQ ID NO: 1555031 - RNA, 19 nt, Homo sapiens
  misc_RNA (1)...(19): siRNA sense strand
gaacauggaccugaaagga

SEQ ID NO: 1555032 - RNA, 19 nt, Homo sapiens
  misc_RNA (1)...(19): siRNA sense strand
gaaagugucgaauugacua

SEQ ID NO: 1555033 - RNA, 19 nt, Homo sapiens
  misc_RNA (1)...(19): siRNA sense strand
gggaaguccuuggaagaua

SEQ ID NO: 1555034 - RNA, 19 nt, Homo sapiens
  misc_RNA (1)...(19): siRNA sense strand
caaaucaaauggacuuuac

SEQ ID NO: 1555035 - RNA, 19 nt, Homo sapiens
  misc_RNA (1)...(19): siRNA sense strand
ggaauaauuucauggaacu

SEQ ID NO: 1555036 - RNA, 19 nt, Homo sapiens
  misc_RNA (1)...(19): siRNA sense strand
caacuucuguaucauuaug

SEQ ID NO: 1555037 - RNA, 19 nt, Homo sapiens
  misc_RNA (1)...(19): siRNA sense strand
cuacagauaucaucaugug

SEQ ID NO: 1555038 - RNA, 19 nt, Homo sapiens
  misc_RNA (1)...(19): siRNA sense strand
caaauggacuuuacuuucg

SEQ ID NO: 1555039 - RNA, 19 nt, Homo sapiens
  misc_RNA (1)...(19): siRNA sense strand
cagaauugguggacuagaa

SEQ ID NO: 1555040 - RNA, 19 nt, Homo sapiens
  misc_RNA (1)...(19): siRNA sense strand
aaauucgacuugaugcuua

SEQ ID NO: 1555041 - RNA, 19 nt, Homo sapiens
  misc_RNA (1)...(19): siRNA sense strand
ccuaguggaugccuuauug

SEQ ID NO: 1555042 - RNA, 19 nt, Homo sapiens
  misc_RNA (1)...(19): siRNA sense strand
gagagaaguauuugaaaga

SEQ ID NO: 1555043 - RNA, 19 nt, Homo sapiens
  misc_RNA (1)...(19): siRNA sense strand
uaaagcagaccuggaauaa

SEQ ID NO: 1555044 - RNA, 19 nt, Homo sapiens
  misc_RNA (1)...(19): siRNA sense strand
ccaaggaugucaauauucu

SEQ ID NO: 1555045 - RNA, 19 nt, Homo sapiens
  misc_RNA (1)...(19): siRNA sense strand
ccaccgacaucuacucuau

SEQ ID NO: 1555046 - RNA, 19 nt, Homo sapiens
  misc_RNA (1)...(19): siRNA sense strand
ggagagacagugccagaaa

SEQ ID NO: 1555047 - RNA, 19 nt, Homo sapiens
  misc_RNA (1)...(19): siRNA sense strand
cuucuggccuuacugaaua

SEQ ID NO: 1555048 - RNA, 19 nt, Homo sapiens
  misc_RNA (1)...(19): siRNA sense strand
gacauuaucuuugugaagu

SEQ ID NO: 1555049 - RNA, 19 nt, Homo sapiens
  misc_RNA (1)...(19): siRNA sense strand
guauaaagcaccucauuuc

SEQ ID NO: 1555050 - RNA, 19 nt, Homo sapiens
  misc_RNA (1)...(19): siRNA sense strand
ccuauggacucuucgauga

SEQ ID NO: 1555051 - RNA, 19 nt, Homo sapiens
  misc_RNA (1)...(19): siRNA sense strand
gcagcagacuuaucguuuc

SEQ ID NO: 1555052 - RNA, 19 nt, Homo sapiens
  misc_RNA (1)...(19): siRNA sense strand
ucagacagcuguguauaug

SEQ ID NO: 1555053 - RNA, 19 nt, Homo sapiens
  misc_RNA (1)...(19): siRNA sense strand
gaucacagccaagucagua

SEQ ID NO: 1555054 - RNA, 19 nt, Homo sapiens
  misc_RNA (1)...(19): siRNA sense strand
gagaagauuggguuauauu

SEQ ID NO: 1555055 - RNA, 19 nt, Homo sapiens
  misc_RNA (1)...(19): siRNA sense strand
gauugcaaauggagaaaga

SEQ ID NO: 1555056 - RNA, 19 nt, Homo sapiens
  misc_RNA (1)...(19): siRNA sense strand
ccuaagggaucgaaugaga

SEQ ID NO: 1555057 - RNA, 19 nt, Homo sapiens
  misc_RNA (1)...(19): siRNA sense strand
gccagaaccuuaucaagca

SEQ ID NO: 1555058 - RNA, 19 nt, Homo sapiens
  misc_RNA (1)...(19): siRNA sense strand
ggaagaagaggaggaagaa

SEQ ID NO: 1555059 - RNA, 19 nt, Homo sapiens
  misc_RNA (1)...(19): siRNA sense strand
ggucugaaucguuugcuua

SEQ ID NO: 1555060 - RNA, 19 nt, Homo sapiens
  misc_RNA (1)...(19): siRNA sense strand
uggaagauaugcagaacaa

SEQ ID NO: 1555061 - RNA, 19 nt, Homo sapiens
  misc_RNA (1)...(19): siRNA sense strand
ggugauugcugccguguuc

SEQ ID NO: 1555062 - RNA, 19 nt, Homo sapiens
  misc_RNA (1)...(19): siRNA sense strand
gaagccaaguauuccaaga

SEQ ID NO: 1555063 - RNA, 19 nt, Homo sapiens
  misc_RNA (1)...(19): siRNA sense strand
aaacaagauuggucugaau

SEQ ID NO: 1555064 - RNA, 19 nt, Homo sapiens
  misc_RNA (1)...(19): siRNA sense strand
agaagaggaggaagaaaua

SEQ ID NO: 1555065 - RNA, 19 nt, Homo sapiens
  misc_RNA (1)...(19): siRNA sense strand
gaaauucgacuugaugcuu

SEQ ID NO: 1555066 - RNA, 19 nt, Homo sapiens
  misc_RNA (1)...(19): siRNA sense strand
ggaacuuggcuacccguua

SEQ ID NO: 1555067 - RNA, 19 nt, Homo sapiens
  misc_RNA (1)...(19): siRNA sense strand
gaauaacucucagguugca

SEQ ID NO: 1555068 - RNA, 19 nt, Homo sapiens
  misc_RNA (1)...(19): siRNA sense strand
gcacuuucgcugccuuuaa

SEQ ID NO: 1555069 - RNA, 19 nt, Homo sapiens
  misc_RNA (1)...(19): siRNA sense strand
gaacgaaaggagaggaaga

SEQ ID NO: 1555070 - RNA, 19 nt, Homo sapiens
  misc_RNA (1)...(19): siRNA sense strand
gcauuggaauucucucugu

SEQ ID NO: 1555071 - RNA, 19 nt, Homo sapiens
  misc_RNA (1)...(19): siRNA sense strand
ggcaagcucuucuggaauc

SEQ ID NO: 1555072 - RNA, 19 nt, Homo sapiens
  misc_RNA (1)...(19): siRNA sense strand
ucauagcgauaacaucuga

SEQ ID NO: 1555073 - RNA, 19 nt, Homo sapiens
  misc_RNA (1)...(19): siRNA sense strand
gaagagugccacccuagug

SEQ ID NO: 1555074 - RNA, 19 nt, Homo sapiens
  misc_RNA (1)...(19): siRNA sense strand
gcaaagaugacgauucucu

SEQ ID NO: 1555075 - RNA, 19 nt, Homo sapiens
  misc_RNA (1)...(19): siRNA sense strand
gcaaaggauccaucacuuc

SEQ ID NO: 1555076 - RNA, 19 nt, Homo sapiens
  misc_RNA (1)...(19): siRNA sense strand
gaaugccuauggacucuuc

SEQ ID NO: 1555077 - RNA, 19 nt, Homo sapiens
  misc_RNA (1)...(19): siRNA sense strand
ccaaguauuccaagaaaga

SEQ ID NO: 1555078 - RNA, 19 nt, Homo sapiens
  misc_RNA (1)...(19): siRNA sense strand
caucauguguccugugugu

SEQ ID NO: 1555079 - RNA, 19 nt, Homo sapiens
  misc_RNA (1)...(19): siRNA sense strand
caucauacacaacaaagaa

SEQ ID NO: 1555080 - RNA, 19 nt, Homo sapiens
  misc_RNA (1)...(19): siRNA sense strand
caaaggauccaucacuuca

SEQ ID NO: 1555081 - RNA, 19 nt, Homo sapiens
  misc_RNA (1)...(19): siRNA sense strand
cuucggagaugguuaccua

SEQ ID NO: 1555082 - RNA, 19 nt, Homo sapiens
  misc_RNA (1)...(19): siRNA sense strand
ggccaaagacauaggaauu

SEQ ID NO: 1555083 - RNA, 19 nt, Homo sapiens
  misc_RNA (1)...(19): siRNA sense strand
acauggaccugaaaggaaa

SEQ ID NO: 1555084 - RNA, 19 nt, Homo sapiens
  misc_RNA (1)...(19): siRNA sense strand
acaagaacauggaccugaa

SEQ ID NO: 1555085 - RNA, 19 nt, Homo sapiens
  misc_RNA (1)...(19): siRNA sense strand
gggcguuaaucaggaauaa

SEQ ID NO: 1555086 - RNA, 19 nt, Homo sapiens
  misc_RNA (1)...(19): siRNA sense strand
gcuuaugacugggauuuga

SEQ ID NO: 1555087 - RNA, 19 nt, Homo sapiens
  misc_RNA (1)...(19): siRNA sense strand
ucaaauggacuuuacuuuc

SEQ ID NO: 1555088 - RNA, 19 nt, Homo sapiens
  misc_RNA (1)...(19): siRNA sense strand
uucaggagaugauguauga

SEQ ID NO: 1555089 - RNA, 19 nt, Homo sapiens
  misc_RNA (1)...(19): siRNA sense strand
agagagaaguacuugauuc

SEQ ID NO: 1555090 - RNA, 19 nt, Homo sapiens
  misc_RNA (1)...(19): siRNA sense strand
cagcaguccuugcaaagau

SEQ ID NO: 1555091 - RNA, 19 nt, Homo sapiens
  misc_RNA (1)...(19): siRNA sense strand
auaaacagguggagacuag

SEQ ID NO: 1555092 - RNA, 19 nt, Homo sapiens
  misc_RNA (1)...(19): siRNA sense strand
ccuggaaaccugacuagua

SEQ ID NO: 1555093 - RNA, 19 nt, Homo sapiens
  misc_RNA (1)...(19): siRNA sense strand
gaaaagacggcgagcagua

SEQ ID NO: 1555094 - RNA, 19 nt, Homo sapiens
  misc_RNA (1)...(19): siRNA sense strand
guaugaagcagaacuggaa

SEQ ID NO: 1555095 - RNA, 19 nt, Homo sapiens
  misc_RNA (1)...(19): siRNA sense strand
gagagacagugccagaaag

SEQ ID NO: 1555096 - RNA, 19 nt, Homo sapiens
  misc_RNA (1)...(19): siRNA sense strand
gaccgucuuugaccuucua

SEQ ID NO: 1555097 - RNA, 19 nt, Homo sapiens
  misc_RNA (1)...(19): siRNA sense strand
guaccaccuuccagagaug

SEQ ID NO: 1555098 - RNA, 19 nt, Homo sapiens
  misc_RNA (1)...(19): siRNA sense strand
agaaagaagacgccacaga

SEQ ID NO: 1555099 - RNA, 19 nt, Homo sapiens
  misc_RNA (1)...(19): siRNA sense strand
cagcugcuuucccugaaug

SEQ ID NO: 1555100 - RNA, 19 nt, Homo sapiens
  misc_RNA (1)...(19): siRNA sense strand
aaagaagacgccacagaca

SEQ ID NO: 1555101 - RNA, 19 nt, Homo sapiens
  misc_RNA (1)...(19): siRNA sense strand
ugagugugaccgucuuuga

SEQ ID NO: 1555102 - RNA, 19 nt, Homo sapiens
  misc_RNA (1)...(19): siRNA sense strand
ccagcugcuuucccugaau

SEQ ID NO: 1555103 - RNA, 19 nt, Homo sapiens
  misc_RNA (1)...(19): siRNA sense strand
caacacaacuuucuacuuu

SEQ ID NO: 1555104 - RNA, 19 nt, Homo sapiens
  misc_RNA (1)...(19): siRNA sense strand
ggaaaggucucccucaucu

SEQ ID NO: 1555105 - RNA, 19 nt, Homo sapiens
  misc_RNA (1)...(19): siRNA sense strand
gguaacauuuggaagauuu

SEQ ID NO: 1555106 - RNA, 19 nt, Homo sapiens
  misc_RNA (1)...(19): siRNA sense strand
agaagacgcuuggguauuu

SEQ ID NO: 1555107 - RNA, 19 nt, Homo sapiens
  misc_RNA (1)...(19): siRNA sense strand
gaaaauuacugcagaaaug

SEQ ID NO: 1555108 - RNA, 19 nt, Homo sapiens
  misc_RNA (1)...(19): siRNA sense strand
gcauuuauuugccaccaua

SEQ ID NO: 1555109 - RNA, 19 nt, Homo sapiens
  misc_RNA (1)...(19): siRNA sense strand
gaaacugucugaagaacca

SEQ ID NO: 1555110 - RNA, 19 nt, Homo sapiens
  misc_RNA (1)...(19): siRNA sense strand
gauuaugucuugugucaug

SEQ ID NO: 1555111 - RNA, 19 nt, Homo sapiens
  misc_RNA (1)...(19): siRNA sense strand
ggucgccacuucauuauug

SEQ ID NO: 1555112 - RNA, 19 nt, Homo sapiens
  misc_RNA (1)...(19): siRNA sense strand
ccucaucucuacagguuua

SEQ ID NO: 1555113 - RNA, 19 nt, Homo sapiens
  misc_RNA (1)...(19): siRNA sense strand
caucgugauuucuguauuu

SEQ ID NO: 1555114 - RNA, 19 nt, Homo sapiens
  misc_RNA (1)...(19): siRNA sense strand
cagaaaugaugaccuggua

SEQ ID NO: 1555115 - RNA, 19 nt, Homo sapiens
  misc_RNA (1)...(19): siRNA sense strand
ggaaauguucuacugcuuu

SEQ ID NO: 1555116 - RNA, 19 nt, Homo sapiens
  misc_RNA (1)...(19): siRNA sense strand
gggaaucuuucaucgguuu

SEQ ID NO: 1555117 - RNA, 19 nt, Homo sapiens
  misc_RNA (1)...(19): siRNA sense strand
caauaaaacuuucggcuuu

SEQ ID NO: 1555118 - RNA, 19 nt, Homo sapiens
  misc_RNA (1)...(19): siRNA sense strand
ugucauugcugauugauug

SEQ ID NO: 1555119 - RNA, 19 nt, Homo sapiens
  misc_RNA (1)...(19): siRNA sense strand
caccauaacuccuucuuag

SEQ ID NO: 1555120 - RNA, 19 nt, Homo sapiens
  misc_RNA (1)...(19): siRNA sense strand
gacaauuucucucucacaa

SEQ ID NO: 1555121 - RNA, 19 nt, Homo sapiens
  misc_RNA (1)...(19): siRNA sense strand
cgucauggcuauuacaaau

SEQ ID NO: 1555122 - RNA, 19 nt, Homo sapiens
  misc_RNA (1)...(19): siRNA sense strand
uagcaaagcuuggaaaggu

SEQ ID NO: 1555123 - RNA, 19 nt, Homo sapiens
  misc_RNA (1)...(19): siRNA sense strand
uagccacgcuugugucauu

SEQ ID NO: 1555124 - RNA, 19 nt, Homo sapiens
  misc_RNA (1)...(19): siRNA sense strand
uguggauacuugacauuua

SEQ ID NO: 1555125 - RNA, 19 nt, Homo sapiens
  misc_RNA (1)...(19): siRNA sense strand
caaggacacacuccgauaa

SEQ ID NO: 1555126 - RNA, 19 nt, Homo sapiens
  misc_RNA (1)...(19): siRNA sense strand
gaagacgcuuggguauuug

SEQ ID NO: 1555127 - RNA, 19 nt, Homo sapiens
  misc_RNA (1)...(19): siRNA sense strand
cagcagacaacacaacuuu

SEQ ID NO: 1555128 - RNA, 19 nt, Homo sapiens
  misc_RNA (1)...(19): siRNA sense strand
gaagaacccacaguagcua

SEQ ID NO: 1555129 - RNA, 19 nt, Homo sapiens
  misc_RNA (1)...(19): siRNA sense strand
caaggggacuuauuugaaa

SEQ ID NO: 1555130 - RNA, 19 nt, Homo sapiens
  misc_RNA (1)...(19): siRNA sense strand
ccuauggaaugcuuuguga

SEQ ID NO: 1555131 - RNA, 19 nt, Homo sapiens
  misc_RNA (1)...(19): siRNA sense strand
augaugaccugguaacauu

SEQ ID NO: 1555132 - RNA, 19 nt, Homo sapiens
  misc_RNA (1)...(19): siRNA sense strand
ggacacacuccgauaagau

SEQ ID NO: 1555133 - RNA, 19 nt, Homo sapiens
  misc_RNA (1)...(19): siRNA sense strand
guaccgaaauauagcaaag

SEQ ID NO: 1555134 - RNA, 19 nt, Homo sapiens
  misc_RNA (1)...(19): siRNA sense strand
ggcaggaaauguucuacug

SEQ ID NO: 1555135 - RNA, 19 nt, Homo sapiens
  misc_RNA (1)...(19): siRNA sense strand
gguuaugucuuuugcauuu

SEQ ID NO: 1555136 - RNA, 19 nt, Homo sapiens
  misc_RNA (1)...(19): siRNA sense strand
gguaucugcuccucucugu

SEQ ID NO: 1555137 - RNA, 19 nt, Homo sapiens
  misc_RNA (1)...(19): siRNA sense strand
ggauucgucauggcuauua

SEQ ID NO: 1555138 - RNA, 19 nt, Homo sapiens
  misc_RNA (1)...(19): siRNA sense strand
ccaaggacacacuccgaua

SEQ ID NO: 1555139 - RNA, 19 nt, Homo sapiens
  misc_RNA (1)...(19): siRNA sense strand
ggucccgccuuauccauau

SEQ ID NO: 1555140 - RNA, 19 nt, Homo sapiens
  misc_RNA (1)...(19): siRNA sense strand
gcagacaacacaacuuucu

SEQ ID NO: 1555141 - RNA, 19 nt, Homo sapiens
  misc_RNA (1)...(19): siRNA sense strand
acagauaccuaccagucuu

SEQ ID NO: 1555142 - RNA, 19 nt, Homo sapiens
  misc_RNA (1)...(19): siRNA sense strand
caagcuggguuuccuuugg

SEQ ID NO: 1555143 - RNA, 19 nt, Homo sapiens
  misc_RNA (1)...(19): siRNA sense strand
gacacacuccgauaagauu

SEQ ID NO: 1555144 - RNA, 19 nt, Homo sapiens
  misc_RNA (1)...(19): siRNA sense strand
ccaccauaacuccuucuua

SEQ ID NO: 1555145 - RNA, 19 nt, Homo sapiens
  misc_RNA (1)...(19): siRNA sense strand
gaagcaagcuggguuuccu

SEQ ID NO: 1555146 - RNA, 19 nt, Homo sapiens
  misc_RNA (1)...(19): siRNA sense strand
guaauggcaagggcaauuu

SEQ ID NO: 1555147 - RNA, 19 nt, Homo sapiens
  misc_RNA (1)...(19): siRNA sense strand
gaaaugaugaccugguaac

SEQ ID NO: 1555148 - RNA, 19 nt, Homo sapiens
  misc_RNA (1)...(19): siRNA sense strand
guuuaucggucgccacuuc

SEQ ID NO: 1555149 - RNA, 19 nt, Homo sapiens
  misc_RNA (1)...(19): siRNA sense strand
guggauacuugacauuuac

SEQ ID NO: 1555150 - RNA, 19 nt, Homo sapiens
  misc_RNA (1)...(19): siRNA sense strand
guauauucuuugcuacaug

SEQ ID NO: 1555151 - RNA, 19 nt, Homo sapiens
  misc_RNA (1)...(19): siRNA sense strand
cgugauuucuguauuuauc

SEQ ID NO: 1555152 - RNA, 19 nt, Homo sapiens
  misc_RNA (1)...(19): siRNA sense strand
uaccuuuacucugccuuua

SEQ ID NO: 1555153 - RNA, 19 nt, Homo sapiens
  misc_RNA (1)...(19): siRNA sense strand
ccauauguccaucgugauu

SEQ ID NO: 1555154 - RNA, 19 nt, Homo sapiens
  misc_RNA (1)...(19): siRNA sense strand
ccacuucauuauuggacuu

SEQ ID NO: 1555155 - RNA, 19 nt, Homo sapiens
  misc_RNA (1)...(19): siRNA sense strand
ucuagaagaacccacagua

SEQ ID NO: 1555156 - RNA, 19 nt, Homo sapiens
  misc_RNA (1)...(19): siRNA sense strand
cuacugcuuuccugacaau

SEQ ID NO: 1555157 - RNA, 19 nt, Homo sapiens
  misc_RNA (1)...(19): siRNA sense strand
gaugaccugguaacauuug

SEQ ID NO: 1555158 - RNA, 19 nt, Homo sapiens
  misc_RNA (1)...(19): siRNA sense strand
acacacuccgauaagauua

SEQ ID NO: 1555159 - RNA, 19 nt, Homo sapiens
  misc_RNA (1)...(19): siRNA sense strand
ccucucuguucuucaguuu

SEQ ID NO: 1555160 - RNA, 19 nt, Homo sapiens
  misc_RNA (1)...(19): siRNA sense strand
gaagaaccaaggacacacu

SEQ ID NO: 1555161 - RNA, 19 nt, Homo sapiens
  misc_RNA (1)...(19): siRNA sense strand
uauucuggguuucauaugu

SEQ ID NO: 1555162 - RNA, 19 nt, Homo sapiens
  misc_RNA (1)...(19): siRNA sense strand
ucccucaucucuacagguu

SEQ ID NO: 1555163 - RNA, 19 nt, Homo sapiens
  misc_RNA (1)...(19): siRNA sense strand
uaucugcuccucucuguuc

SEQ ID NO: 1555164 - RNA, 19 nt, Homo sapiens
  misc_RNA (1)...(19): siRNA sense strand
ccugacaauuucucucuca

SEQ ID NO: 1555165 - RNA, 19 nt, Homo sapiens
  misc_RNA (1)...(19): siRNA sense strand
cagaagacgcuuggguauu

SEQ ID NO: 1555166 - RNA, 19 nt, Homo sapiens
  misc_RNA (1)...(19): siRNA sense strand
ccaucgugauuucuguauu

SEQ ID NO: 1555167 - RNA, 19 nt, Homo sapiens
  misc_RNA (1)...(19): siRNA sense strand
ccucagagucucauguuca

SEQ ID NO: 1555168 - RNA, 19 nt, Homo sapiens
  misc_RNA (1)...(19): siRNA sense strand
cuacagguuuaacaacucu

SEQ ID NO: 1555169 - RNA, 19 nt, Homo sapiens
  misc_RNA (1)...(19): siRNA sense strand
caaauaccucagagucuca

SEQ ID NO: 1555170 - RNA, 19 nt, Homo sapiens
  misc_RNA (1)...(19): siRNA sense strand
cugcuuuccugacaauuuc

SEQ ID NO: 1555171 - RNA, 19 nt, Homo sapiens
  misc_RNA (1)...(19): siRNA sense strand
gcaagcuggguuuccuuug

SEQ ID NO: 1555172 - RNA, 19 nt, Homo sapiens
  misc_RNA (1)...(19): siRNA sense strand
acgcuuggguauuugcaaa

SEQ ID NO: 1555173 - RNA, 19 nt, Homo sapiens
  misc_RNA (1)...(19): siRNA sense strand
cuucuuaguuuacaguucu

SEQ ID NO: 1555174 - RNA, 19 nt, Homo sapiens
  misc_RNA (1)...(19): siRNA sense strand
gcuccucucuguucuucag

SEQ ID NO: 1555175 - RNA, 19 nt, Homo sapiens
  misc_RNA (1)...(19): siRNA sense strand
ccugguaacauuuggaaga

SEQ ID NO: 1555176 - RNA, 19 nt, Homo sapiens
  misc_RNA (1)...(19): siRNA sense strand
gaccugguaacauuuggaa

SEQ ID NO: 1555177 - RNA, 19 nt, Homo sapiens
  misc_RNA (1)...(19): siRNA sense strand
ccuuuacucugccuuuauc

SEQ ID NO: 1555178 - RNA, 19 nt, Homo sapiens
  misc_RNA (1)...(19): siRNA sense strand
cagacaacacaacuuucua

SEQ ID NO: 1555179 - RNA, 19 nt, Homo sapiens
  misc_RNA (1)...(19): siRNA sense strand
uaucugaaacugucugaag

SEQ ID NO: 1555180 - RNA, 19 nt, Homo sapiens
  misc_RNA (1)...(19): siRNA sense strand
uucacuggguccacacaua

SEQ ID NO: 1555181 - RNA, 19 nt, Homo sapiens
  misc_RNA (1)...(19): siRNA sense strand
uuaacaacucugauucuug

SEQ ID NO: 1555182 - RNA, 19 nt, Homo sapiens
  misc_RNA (1)...(19): siRNA sense strand
agacuuuucccuuguuuua

SEQ ID NO: 1555183 - RNA, 19 nt, Homo sapiens
  misc_RNA (1)...(19): siRNA sense strand
cagauaccuaccagucuuu

SEQ ID NO: 1555184 - RNA, 19 nt, Homo sapiens
  misc_RNA (1)...(19): siRNA sense strand
ccacaguuaccuuuacucu

SEQ ID NO: 1555185 - RNA, 19 nt, Homo sapiens
  misc_RNA (1)...(19): siRNA sense strand
gcacccaugggcaggaaau

SEQ ID NO: 1555186 - RNA, 19 nt, Homo sapiens
  misc_RNA (1)...(19): siRNA sense strand
gugcaacuccccucauuuu

SEQ ID NO: 1555187 - RNA, 19 nt, Homo sapiens
  misc_RNA (1)...(19): siRNA sense strand
gaacccacaguagcuaagu

SEQ ID NO: 1555188 - RNA, 19 nt, Homo sapiens
  misc_RNA (1)...(19): siRNA sense strand
acagaagacgcuuggguau

SEQ ID NO: 1555189 - RNA, 19 nt, Homo sapiens
  misc_RNA (1)...(19): siRNA sense strand
aaaggucucccucaucucu

SEQ ID NO: 1555190 - RNA, 19 nt, Homo sapiens
  misc_RNA (1)...(19): siRNA sense strand
gauugauugccucgggaua

SEQ ID NO: 1555191 - RNA, 19 nt, Homo sapiens
  misc_RNA (1)...(19): siRNA sense strand
cuagaagaacccacaguag

SEQ ID NO: 1555192 - RNA, 19 nt, Homo sapiens
  misc_RNA (1)...(19): siRNA sense strand
gguuuaacaacucugauuc

SEQ ID NO: 1555193 - RNA, 19 nt, Homo sapiens
  misc_RNA (1)...(19): siRNA sense strand
aaauauagcaaagcuugga

SEQ ID NO: 1555194 - RNA, 19 nt, Homo sapiens
  misc_RNA (1)...(19): siRNA sense strand
acaacacaacuuucuacuu

SEQ ID NO: 1555195 - RNA, 19 nt, Homo sapiens
  misc_RNA (1)...(19): siRNA sense strand
ggugugcucugugcaacuc

SEQ ID NO: 1555196 - RNA, 19 nt, Homo sapiens
  misc_RNA (1)...(19): siRNA sense strand
cauauguccaucgugauuu

SEQ ID NO: 1555197 - RNA, 19 nt, Homo sapiens
  misc_RNA (1)...(19): siRNA sense strand
auucuggguuucauauguu

SEQ ID NO: 1555198 - RNA, 19 nt, Homo sapiens
  misc_RNA (1)...(19): siRNA sense strand
ugcuacauguggauacuug

SEQ ID NO: 1555199 - RNA, 19 nt, Homo sapiens
  misc_RNA (1)...(19): siRNA sense strand
guuauggugucacugucau

SEQ ID NO: 1555200 - RNA, 19 nt, Homo sapiens
  misc_RNA (1)...(19): siRNA sense strand
uauggaaugcuuugugaca

SEQ ID NO: 1555201 - RNA, 19 nt, Homo sapiens
  misc_RNA (1)...(19): siRNA sense strand
agacaacacaacuuucuac

SEQ ID NO: 1555202 - RNA, 19 nt, Homo sapiens
  misc_RNA (1)...(19): siRNA sense strand
aggaaauguucuacugcuu

SEQ ID NO: 1555203 - RNA, 19 nt, Homo sapiens
  misc_RNA (1)...(19): siRNA sense strand
gcaaagcccaggugagcaa

SEQ ID NO: 1555204 - RNA, 19 nt, Homo sapiens
  misc_RNA (1)...(19): siRNA sense strand
gaacugcguggaugacuca

SEQ ID NO: 1555205 - RNA, 19 nt, Homo sapiens
  misc_RNA (1)...(19): siRNA sense strand
agcaaaggcugcagcuuga

SEQ ID NO: 1555206 - RNA, 19 nt, Homo sapiens
  misc_RNA (1)...(19): siRNA sense strand
gcaaaggcugcagcuugaa

SEQ ID NO: 1555207 - RNA, 19 nt, Homo sapiens
  misc_RNA (1)...(19): siRNA sense strand
gcugugcuacuccugcaaa

SEQ ID NO: 1555208 - RNA, 19 nt, Homo sapiens
  misc_RNA (1)...(19): siRNA sense strand
gcugugacaccgacuugug

SEQ ID NO: 1555209 - RNA, 19 nt, Homo sapiens
  misc_RNA (1)...(19): siRNA sense strand
uggaagagaugcuuugguu

SEQ ID NO: 1555210 - RNA, 19 nt, Homo sapiens
  misc_RNA (1)...(19): siRNA sense strand
cuaaacaaccuaagagaaa

SEQ ID NO: 1555211 - RNA, 19 nt, Homo sapiens
  misc_RNA (1)...(19): siRNA sense strand
gcaucucccuggaaucauu

SEQ ID NO: 1555212 - RNA, 19 nt, Homo sapiens
  misc_RNA (1)...(19): siRNA sense strand
gaucacaacagccuaaaca

SEQ ID NO: 1555213 - RNA, 19 nt, Homo sapiens
  misc_RNA (1)...(19): siRNA sense strand
gaagagaugcuuugguuuu

SEQ ID NO: 1555214 - RNA, 19 nt, Homo sapiens
  misc_RNA (1)...(19): siRNA sense strand
gaaacuuugcucucagaaa

SEQ ID NO: 1555215 - RNA, 19 nt, Homo sapiens
  misc_RNA (1)...(19): siRNA sense strand
cuccagaaguccugcauuu

SEQ ID NO: 1555216 - RNA, 19 nt, Homo sapiens
  misc_RNA (1)...(19): siRNA sense strand
gagaugugcugucaguuuu

SEQ ID NO: 1555217 - RNA, 19 nt, Homo sapiens
  misc_RNA (1)...(19): siRNA sense strand
cagaaguccugcauuugga

SEQ ID NO: 1555218 - RNA, 19 nt, Homo sapiens
  misc_RNA (1)...(19): siRNA sense strand
agagagagaugugcuguca

SEQ ID NO: 1555219 - RNA, 19 nt, Homo sapiens
  misc_RNA (1)...(19): siRNA sense strand
ggaagagaugcuuugguuu

SEQ ID NO: 1555220 - RNA, 19 nt, Homo sapiens
  misc_RNA (1)...(19): siRNA sense strand
aaacuuugcucucagaaaa

SEQ ID NO: 1555221 - RNA, 19 nt, Homo sapiens
  misc_RNA (1)...(19): siRNA sense strand
cagcugugguggucauuau

SEQ ID NO: 1555222 - RNA, 19 nt, Homo sapiens
  misc_RNA (1)...(19): siRNA sense strand
agagagaugugcugucagu

SEQ ID NO: 1555223 - RNA, 19 nt, Homo sapiens
  misc_RNA (1)...(19): siRNA sense strand
caaccuaagagaaacuuug

SEQ ID NO: 1555224 - RNA, 19 nt, Homo sapiens
  misc_RNA (1)...(19): siRNA sense strand
gcugugguggucauuauaa

SEQ ID NO: 1555225 - RNA, 19 nt, Homo sapiens
  misc_RNA (1)...(19): siRNA sense strand
aaaagaaacuccagaaguc

SEQ ID NO: 1555226 - RNA, 19 nt, Homo sapiens
  misc_RNA (1)...(19): siRNA sense strand
agagaugugcugucaguuu

SEQ ID NO: 1555227 - RNA, 19 nt, Homo sapiens
  misc_RNA (1)...(19): siRNA sense strand
uaaacaaccuaagagaaac

SEQ ID NO: 1555228 - RNA, 19 nt, Homo sapiens
  misc_RNA (1)...(19): siRNA sense strand
aaacuuggcccagguggaa

SEQ ID NO: 1555229 - RNA, 19 nt, Homo sapiens
  misc_RNA (1)...(19): siRNA sense strand
ccagaaguccugcauuugg

SEQ ID NO: 1555230 - RNA, 19 nt, Homo sapiens
  misc_RNA (1)...(19): siRNA sense strand
uaccagaaacugagagcua

SEQ ID NO: 1555231 - RNA, 19 nt, Homo sapiens
  misc_RNA (1)...(19): siRNA sense strand
ccuaaacaaccuaagagaa

SEQ ID NO: 1555232 - RNA, 19 nt, Homo sapiens
  misc_RNA (1)...(19): siRNA sense strand
gcagcugugguggucauua

SEQ ID NO: 1555233 - RNA, 19 nt, Homo sapiens
  misc_RNA (1)...(19): siRNA sense strand
caacagccuaaacaaccua

SEQ ID NO: 1555234 - RNA, 19 nt, Homo sapiens
  misc_RNA (1)...(19): siRNA sense strand
uggaugaggccaaggauca

SEQ ID NO: 1555235 - RNA, 19 nt, Homo sapiens
  misc_RNA (1)...(19): siRNA sense strand
cagccuaaacaaccuaaga

SEQ ID NO: 1555236 - RNA, 19 nt, Homo sapiens
  misc_RNA (1)...(19): siRNA sense strand
uggcccagguggaacuuga

SEQ ID NO: 1555237 - RNA, 19 nt, Homo sapiens
  misc_RNA (1)...(19): siRNA sense strand
ucacaacagccuaaacaac

SEQ ID NO: 1555238 - RNA, 19 nt, Homo sapiens
  misc_RNA (1)...(19): siRNA sense strand
gauguaccagaaacugaga

SEQ ID NO: 1555239 - RNA, 19 nt, Homo sapiens
  misc_RNA (1)...(19): siRNA sense strand
caagggcuauuaguacaga

SEQ ID NO: 1555240 - RNA, 19 nt, Homo sapiens
  misc_RNA (1)...(19): siRNA sense strand
gaucacuggcggaauccua

SEQ ID NO: 1555241 - RNA, 19 nt, Homo sapiens
  misc_RNA (1)...(19): siRNA sense strand
aauccaagggcuauuagua

SEQ ID NO: 1555242 - RNA, 19 nt, Homo sapiens
  misc_RNA (1)...(19): siRNA sense strand
uauuacugcugcaagaaga

SEQ ID NO: 1555243 - RNA, 19 nt, Homo sapiens
  misc_RNA (1)...(19): siRNA sense strand
ugugaucacuggcggaauc

SEQ ID NO: 1555244 - RNA, 19 nt, Homo sapiens
  misc_RNA (1)...(19): siRNA sense strand
ucauugccguccugugcua

SEQ ID NO: 1555245 - RNA, 19 nt, Homo sapiens
  misc_RNA (1)...(19): siRNA sense strand
gauccuccucugcaucauu

SEQ ID NO: 1555246 - RNA, 19 nt, Homo sapiens
  misc_RNA (1)...(19): siRNA sense strand
uccaagggcuauuaguaca

SEQ ID NO: 1555247 - RNA, 19 nt, Homo sapiens
  misc_RNA (1)...(19): siRNA sense strand
gcucccacauacuacaaag

SEQ ID NO: 1555248 - RNA, 19 nt, Homo sapiens
  misc_RNA (1)...(19): siRNA sense strand
aauccuagcuacggugauc

SEQ ID NO: 1555249 - RNA, 19 nt, Homo sapiens
  misc_RNA (1)...(19): siRNA sense strand
ccuuugcucccacauacua

SEQ ID NO: 1555250 - RNA, 19 nt, Homo sapiens
  misc_RNA (1)...(19): siRNA sense strand
gcugacauggugcccaaug

SEQ ID NO: 1555251 - RNA, 19 nt, Homo sapiens
  misc_RNA (1)...(19): siRNA sense strand
gguggaggcuggacuguga

SEQ ID NO: 1555252 - RNA, 19 nt, Homo sapiens
  misc_RNA (1)...(19): siRNA sense strand
ucagucaacuucuucacua

SEQ ID NO: 1555253 - RNA, 19 nt, Homo sapiens
  misc_RNA (1)...(19): siRNA sense strand
gcaagaugguucagucaac

SEQ ID NO: 1555254 - RNA, 19 nt, Homo sapiens
  misc_RNA (1)...(19): siRNA sense strand
gaacagaguggaguguaug

SEQ ID NO: 1555255 - RNA, 19 nt, Homo sapiens
  misc_RNA (1)...(19): siRNA sense strand
gagcacgugcccacuauga

SEQ ID NO: 1555256 - RNA, 19 nt, Homo sapiens
  misc_RNA (1)...(19): siRNA sense strand
cuaccuggcagcacuauaa

SEQ ID NO: 1555257 - RNA, 19 nt, Homo sapiens
  misc_RNA (1)...(19): siRNA sense strand
gcacgugcccacuaugaug

SEQ ID NO: 1555258 - RNA, 19 nt, Homo sapiens
  misc_RNA (1)...(19): siRNA sense strand
cgagacuccuauucuggua

SEQ ID NO: 1555259 - RNA, 19 nt, Homo sapiens
  misc_RNA (1)...(19): siRNA sense strand
ugaacagaguggaguguau

SEQ ID NO: 1555260 - RNA, 19 nt, Homo sapiens
  misc_RNA (1)...(19): siRNA sense strand
gaccgagacuccuauucug

SEQ ID NO: 1555261 - RNA, 19 nt, Homo sapiens
  misc_RNA (1)...(19): siRNA sense strand
ggaccgagacuccuauucu

SEQ ID NO: 1555262 - RNA, 19 nt, Homo sapiens
  misc_RNA (1)...(19): siRNA sense strand
gggcauauucucucaggaa

SEQ ID NO: 1555263 - RNA, 19 nt, Homo sapiens
  misc_RNA (1)...(19): siRNA sense strand
caagaugguucagucaacu

SEQ ID NO: 1555264 - RNA, 19 nt, Homo sapiens
  misc_RNA (1)...(19): siRNA sense strand
ucucuuuccuggcacaaug

SEQ ID NO: 1555265 - RNA, 19 nt, Homo sapiens
  misc_RNA (1)...(19): siRNA sense strand
ucacguagugucaguaugg

SEQ ID NO: 1555266 - RNA, 19 nt, Homo sapiens
  misc_RNA (1)...(19): siRNA sense strand
gccuugaacccguguauca

SEQ ID NO: 1555267 - RNA, 19 nt, Homo sapiens
  misc_RNA (1)...(19): siRNA sense strand
uggagcacgugcccacuau

SEQ ID NO: 1555268 - RNA, 19 nt, Homo sapiens
  misc_RNA (1)...(19): siRNA sense strand
gagaccagacccagagaca

SEQ ID NO: 1555269 - RNA, 19 nt, Homo sapiens
  misc_RNA (1)...(19): siRNA sense strand
aauacuggcugggccuuga

SEQ ID NO: 1555270 - RNA, 19 nt, Homo sapiens
  misc_RNA (1)...(19): siRNA sense strand
ggcaggccaugaacagagu

SEQ ID NO: 1555271 - RNA, 19 nt, Homo sapiens
  misc_RNA (1)...(19): siRNA sense strand
gagacuccuauucugguaa

SEQ ID NO: 1555272 - RNA, 19 nt, Homo sapiens
  misc_RNA (1)...(19): siRNA sense strand
gcaccagugacaccaguag

SEQ ID NO: 1555273 - RNA, 19 nt, Homo sapiens
  misc_RNA (1)...(19): siRNA sense strand
cuacugggcugaguuucgu

SEQ ID NO: 1555274 - RNA, 19 nt, Homo sapiens
  misc_RNA (1)...(19): siRNA sense strand
guggguagcaccagugaca

SEQ ID NO: 1555275 - RNA, 19 nt, Homo sapiens
  misc_RNA (1)...(19): siRNA sense strand
ccagcuggacgucaaguuc

SEQ ID NO: 1555276 - RNA, 19 nt, Homo sapiens
  misc_RNA (1)...(19): siRNA sense strand
ggcaagaugguucagucaa

SEQ ID NO: 1555277 - RNA, 19 nt, Homo sapiens
  misc_RNA (1)...(19): siRNA sense strand
ggaaguacgucaucaacau

SEQ ID NO: 1555278 - RNA, 19 nt, Homo sapiens
  misc_RNA (1)...(19): siRNA sense strand
gauaauaggauucagaaga

SEQ ID NO: 1555279 - RNA, 19 nt, Homo sapiens
  misc_RNA (1)...(19): siRNA sense strand
ggucugggcuugagaggaa

SEQ ID NO: 1555280 - RNA, 19 nt, Homo sapiens
  misc_RNA (1)...(19): siRNA sense strand
ccaacaagauggcagcaaa

SEQ ID NO: 1555281 - RNA, 19 nt, Homo sapiens
  misc_RNA (1)...(19): siRNA sense strand
ccaacagccugaaccauga

SEQ ID NO: 1555282 - RNA, 19 nt, Homo sapiens
  misc_RNA (1)...(19): siRNA sense strand
gcagcucugucuugcagua

SEQ ID NO: 1555283 - RNA, 19 nt, Homo sapiens
  misc_RNA (1)...(19): siRNA sense strand
gaggucaaggucaccauua

SEQ ID NO: 1555284 - RNA, 19 nt, Homo sapiens
  misc_RNA (1)...(19): siRNA sense strand
caagauggcagcaaagagu

SEQ ID NO: 1555285 - RNA, 19 nt, Homo sapiens
  misc_RNA (1)...(19): siRNA sense strand
gaaguacgucaucaacaug

SEQ ID NO: 1555286 - RNA, 19 nt, Homo sapiens
  misc_RNA (1)...(19): siRNA sense strand
ccauaggacgucuguguuu

SEQ ID NO: 1555287 - RNA, 19 nt, Homo sapiens
  misc_RNA (1)...(19): siRNA sense strand
cauaggacgucuguguuug

SEQ ID NO: 1555288 - RNA, 19 nt, Homo sapiens
  misc_RNA (1)...(19): siRNA sense strand
aaagucagcaucaucaaga

SEQ ID NO: 1555289 - RNA, 19 nt, Homo sapiens
  misc_RNA (1)...(19): siRNA sense strand
auaauaggauucagaagag

SEQ ID NO: 1555290 - RNA, 19 nt, Homo sapiens
  misc_RNA (1)...(19): siRNA sense strand
ucucaagcaugccaaagug

SEQ ID NO: 1555291 - RNA, 19 nt, Homo sapiens
  misc_RNA (1)...(19): siRNA sense strand
gccacaagcucagcgacaa

SEQ ID NO: 1555292 - RNA, 19 nt, Homo sapiens
  misc_RNA (1)...(19): siRNA sense strand
cagcagcagcucugucuug

SEQ ID NO: 1555293 - RNA, 19 nt, Homo sapiens
  misc_RNA (1)...(19): siRNA sense strand
caucaucgccauucucaag

SEQ ID NO: 1555294 - RNA, 19 nt, Homo sapiens
  misc_RNA (1)...(19): siRNA sense strand
gcaugcugcuggaucucaa

SEQ ID NO: 1555295 - RNA, 19 nt, Homo sapiens
  misc_RNA (1)...(19): siRNA sense strand
gacaucaucgccauucuca

SEQ ID NO: 1555296 - RNA, 19 nt, Homo sapiens
  misc_RNA (1)...(19): siRNA sense strand
ucaccagcaccaagaguaa

SEQ ID NO: 1555297 - RNA, 19 nt, Homo sapiens
  misc_RNA (1)...(19): siRNA sense strand
gcugcuggaucucaauaag

SEQ ID NO: 1555298 - RNA, 19 nt, Homo sapiens
  misc_RNA (1)...(19): siRNA sense strand
gucaaggucaccauuaaga

SEQ ID NO: 1555299 - RNA, 19 nt, Homo sapiens
  misc_RNA (1)...(19): siRNA sense strand
ccgggucacugcugagaug

SEQ ID NO: 1555300 - RNA, 19 nt, Homo sapiens
  misc_RNA (1)...(19): siRNA sense strand
aggucaaggucaccauuaa

SEQ ID NO: 1555301 - RNA, 19 nt, Homo sapiens
  misc_RNA (1)...(19): siRNA sense strand
guuuguggauaauaggauu

SEQ ID NO: 1555302 - RNA, 19 nt, Homo sapiens
  misc_RNA (1)...(19): siRNA sense strand
gcaaaaggucuccauagga

SEQ ID NO: 1555303 - RNA, 19 nt, Homo sapiens
  misc_RNA (1)...(19): siRNA sense strand
gcacugugagcguguucaa

SEQ ID NO: 1555304 - RNA, 19 nt, Homo sapiens
  misc_RNA (1)...(19): siRNA sense strand
ccggaguccuugucuaaag

SEQ ID NO: 1555305 - RNA, 19 nt, Homo sapiens
  misc_RNA (1)...(19): siRNA sense strand
caaagcugccacugaguca

SEQ ID NO: 1555306 - RNA, 19 nt, Homo sapiens
  misc_RNA (1)...(19): siRNA sense strand
ugcuggaucucaauaagga

SEQ ID NO: 1555307 - RNA, 19 nt, Homo sapiens
  misc_RNA (1)...(19): siRNA sense strand
gacaccagcaccuccaaga

SEQ ID NO: 1555308 - RNA, 19 nt, Homo sapiens
  misc_RNA (1)...(19): siRNA sense strand
ucuaaagucagcaucauca

SEQ ID NO: 1555309 - RNA, 19 nt, Homo sapiens
  misc_RNA (1)...(19): siRNA sense strand
agugcugccucccgaauga

SEQ ID NO: 1555310 - RNA, 19 nt, Homo sapiens
  misc_RNA (1)...(19): siRNA sense strand
cguggugggugacaucauc

SEQ ID NO: 1555311 - RNA, 19 nt, Homo sapiens
  misc_RNA (1)...(19): siRNA sense strand
caacaagauggcagcaaag

SEQ ID NO: 1555312 - RNA, 19 nt, Homo sapiens
  misc_RNA (1)...(19): siRNA sense strand
gggaaguacgucaucaaca

SEQ ID NO: 1555313 - RNA, 19 nt, Homo sapiens
  misc_RNA (1)...(19): siRNA sense strand
cggaguccuugucuaaagu

SEQ ID NO: 1555314 - RNA, 19 nt, Homo sapiens
  misc_RNA (1)...(19): siRNA sense strand
uggauaauaggauucagaa

SEQ ID NO: 1555315 - RNA, 19 nt, Homo sapiens
  misc_RNA (1)...(19): siRNA sense strand
uaaagucagcaucaucaag

SEQ ID NO: 1555316 - RNA, 19 nt, Homo sapiens
  misc_RNA (1)...(19): siRNA sense strand
caccagcaccuccaagauc

SEQ ID NO: 1555317 - RNA, 19 nt, Homo sapiens
  misc_RNA (1)...(19): siRNA sense strand
gucacuguguccaacaaga

SEQ ID NO: 1555318 - RNA, 19 nt, Homo sapiens
  misc_RNA (1)...(19): siRNA sense strand
guggauaauaggauucaga

SEQ ID NO: 1555319 - RNA, 19 nt, Homo sapiens
  misc_RNA (1)...(19): siRNA sense strand
gucaccagcaccaagagua

SEQ ID NO: 1555320 - RNA, 19 nt, Homo sapiens
  misc_RNA (1)...(19): siRNA sense strand
ucaucaacaugcccaaagg

SEQ ID NO: 1555321 - RNA, 19 nt, Homo sapiens
  misc_RNA (1)...(19): siRNA sense strand
ggucaaggucaccauuaag

SEQ ID NO: 1555322 - RNA, 19 nt, Homo sapiens
  misc_RNA (1)...(19): siRNA sense strand
cucaauaaggagauaauga

SEQ ID NO: 1555323 - RNA, 19 nt, Homo sapiens
  misc_RNA (1)...(19): siRNA sense strand
uaaacccacaggagucuuc

SEQ ID NO: 1555324 - RNA, 19 nt, Homo sapiens
  misc_RNA (1)...(19): siRNA sense strand
cagaaacggacgaggaucu

SEQ ID NO: 1555325 - RNA, 19 nt, Homo sapiens
  misc_RNA (1)...(19): siRNA sense strand
caacagggaugucucuuua

SEQ ID NO: 1555326 - RNA, 19 nt, Homo sapiens
  misc_RNA (1)...(19): siRNA sense strand
ccaaagccauccucuaaua

SEQ ID NO: 1555327 - RNA, 19 nt, Homo sapiens
  misc_RNA (1)...(19): siRNA sense strand
ccuaaugacuggauucuuu

SEQ ID NO: 1555328 - RNA, 19 nt, Homo sapiens
  misc_RNA (1)...(19): siRNA sense strand
ggaugucucuuuauaauag

SEQ ID NO: 1555329 - RNA, 19 nt, Homo sapiens
  misc_RNA (1)...(19): siRNA sense strand
gaagcugacagaaauguua

SEQ ID NO: 1555330 - RNA, 19 nt, Homo sapiens
  misc_RNA (1)...(19): siRNA sense strand
gaugaugauuguccaguaa

SEQ ID NO: 1555331 - RNA, 19 nt, Homo sapiens
  misc_RNA (1)...(19): siRNA sense strand
ggaguaaaucccaguguua

SEQ ID NO: 1555332 - RNA, 19 nt, Homo sapiens
  misc_RNA (1)...(19): siRNA sense strand
ggaggaggaugaugauugu

SEQ ID NO: 1555333 - RNA, 19 nt, Homo sapiens
  misc_RNA (1)...(19): siRNA sense strand
gagccaagcuaagcaugua

SEQ ID NO: 1555334 - RNA, 19 nt, Homo sapiens
  misc_RNA (1)...(19): siRNA sense strand
acagggaugucucuuuaua

SEQ ID NO: 1555335 - RNA, 19 nt, Homo sapiens
  misc_RNA (1)...(19): siRNA sense strand
ugaugaagaugaagaaguu

SEQ ID NO: 1555336 - RNA, 19 nt, Homo sapiens
  misc_RNA (1)...(19): siRNA sense strand
ggaugaugauuguccagua

SEQ ID NO: 1555337 - RNA, 19 nt, Homo sapiens
  misc_RNA (1)...(19): siRNA sense strand
uuccauaccugggauauua

SEQ ID NO: 1555338 - RNA, 19 nt, Homo sapiens
  misc_RNA (1)...(19): siRNA sense strand
ugacagaaauguuaaccau

SEQ ID NO: 1555339 - RNA, 19 nt, Homo sapiens
  misc_RNA (1)...(19): siRNA sense strand
gagggaauuugaugagguu

SEQ ID NO: 1555340 - RNA, 19 nt, Homo sapiens
  misc_RNA (1)...(19): siRNA sense strand
ccugggauauuagauguua

SEQ ID NO: 1555341 - RNA, 19 nt, Homo sapiens
  misc_RNA (1)...(19): siRNA sense strand
gagaggaggaggaggauga

SEQ ID NO: 1555342 - RNA, 19 nt, Homo sapiens
  misc_RNA (1)...(19): siRNA sense strand
gaagaaauggaucagacaa

SEQ ID NO: 1555343 - RNA, 19 nt, Homo sapiens
  misc_RNA (1)...(19): siRNA sense strand
caggauaauugaugaagau

SEQ ID NO: 1555344 - RNA, 19 nt, Homo sapiens
  misc_RNA (1)...(19): siRNA sense strand
ggagauugaggacaggaua

SEQ ID NO: 1555345 - RNA, 19 nt, Homo sapiens
  misc_RNA (1)...(19): siRNA sense strand
acagaaauguuaaccaucu

SEQ ID NO: 1555346 - RNA, 19 nt, Homo sapiens
  misc_RNA (1)...(19): siRNA sense strand
gcgcggacguguuucuguu

SEQ ID NO: 1555347 - RNA, 19 nt, Homo sapiens
  misc_RNA (1)...(19): siRNA sense strand
ccugaacuccuuucugaua

SEQ ID NO: 1555348 - RNA, 19 nt, Homo sapiens
  misc_RNA (1)...(19): siRNA sense strand
ucccugaacuccuuucuga

SEQ ID NO: 1555349 - RNA, 19 nt, Homo sapiens
  misc_RNA (1)...(19): siRNA sense strand
gaaagaaaaggauaacuga

SEQ ID NO: 1555350 - RNA, 19 nt, Homo sapiens
  misc_RNA (1)...(19): siRNA sense strand
ccucuaauacuaagaacua

SEQ ID NO: 1555351 - RNA, 19 nt, Homo sapiens
  misc_RNA (1)...(19): siRNA sense strand
gcucugugcugguccuaau

SEQ ID NO: 1555352 - RNA, 19 nt, Homo sapiens
  misc_RNA (1)...(19): siRNA sense strand
gaagagggaauuugaugag

SEQ ID NO: 1555353 - RNA, 19 nt, Homo sapiens
  misc_RNA (1)...(19): siRNA sense strand
ucagacaacuggagaacca

SEQ ID NO: 1555354 - RNA, 19 nt, Homo sapiens
  misc_RNA (1)...(19): siRNA sense strand
gcacagaagaagagaugga

SEQ ID NO: 1555355 - RNA, 19 nt, Homo sapiens
  misc_RNA (1)...(19): siRNA sense strand
gggaugucucuuuauaaua

SEQ ID NO: 1555356 - RNA, 19 nt, Homo sapiens
  misc_RNA (1)...(19): siRNA sense strand
gaggacaggauaauugaug

SEQ ID NO: 1555357 - RNA, 19 nt, Homo sapiens
  misc_RNA (1)...(19): siRNA sense strand
guguuucuguucacuguaa

SEQ ID NO: 1555358 - RNA, 19 nt, Homo sapiens
  misc_RNA (1)...(19): siRNA sense strand
cugaacuccuuucugauaa

SEQ ID NO: 1555359 - RNA, 19 nt, Homo sapiens
  misc_RNA (1)...(19): siRNA sense strand
caggagagagccaagcuaa

SEQ ID NO: 1555360 - RNA, 19 nt, Homo sapiens
  misc_RNA (1)...(19): siRNA sense strand
ggagcuuguucucuggaaa

SEQ ID NO: 1555361 - RNA, 19 nt, Homo sapiens
  misc_RNA (1)...(19): siRNA sense strand
gagauugaggacaggauaa

SEQ ID NO: 1555362 - RNA, 19 nt, Homo sapiens
  misc_RNA (1)...(19): siRNA sense strand
guaaaucccaguguuagug

SEQ ID NO: 1555363 - RNA, 19 nt, Homo sapiens
  misc_RNA (1)...(19): siRNA sense strand
agggaugucucuuuauaau

SEQ ID NO: 1555364 - RNA, 19 nt, Homo sapiens
  misc_RNA (1)...(19): siRNA sense strand
ccaacagggaugucucuuu

SEQ ID NO: 1555365 - RNA, 19 nt, Homo sapiens
  misc_RNA (1)...(19): siRNA sense strand
agucuuguccuuucugaua

SEQ ID NO: 1555366 - RNA, 19 nt, Homo sapiens
  misc_RNA (1)...(19): siRNA sense strand
ggaagcuucaggagauuga

SEQ ID NO: 1555367 - RNA, 19 nt, Homo sapiens
  misc_RNA (1)...(19): siRNA sense strand
aguugaagcugacagaaau

SEQ ID NO: 1555368 - RNA, 19 nt, Homo sapiens
  misc_RNA (1)...(19): siRNA sense strand
ggacaggauaauugaugaa

SEQ ID NO: 1555369 - RNA, 19 nt, Homo sapiens
  misc_RNA (1)...(19): siRNA sense strand
aagccauccucuaauacua

SEQ ID NO: 1555370 - RNA, 19 nt, Homo sapiens
  misc_RNA (1)...(19): siRNA sense strand
agccaaagccauccucuaa

SEQ ID NO: 1555371 - RNA, 19 nt, Homo sapiens
  misc_RNA (1)...(19): siRNA sense strand
ggauaauugaugaagauga

SEQ ID NO: 1555372 - RNA, 19 nt, Homo sapiens
  misc_RNA (1)...(19): siRNA sense strand
uggaguaaaucccaguguu

SEQ ID NO: 1555373 - RNA, 19 nt, Homo sapiens
  misc_RNA (1)...(19): siRNA sense strand
gaaauggaucagacaacug

SEQ ID NO: 1555374 - RNA, 19 nt, Homo sapiens
  misc_RNA (1)...(19): siRNA sense strand
gaaaaugauugagucuaug

SEQ ID NO: 1555375 - RNA, 19 nt, Homo sapiens
  misc_RNA (1)...(19): siRNA sense strand
ggagagagccaagcuaagc

SEQ ID NO: 1555376 - RNA, 19 nt, Homo sapiens
  misc_RNA (1)...(19): siRNA sense strand
gaaguugaagcugacagaa

SEQ ID NO: 1555377 - RNA, 19 nt, Homo sapiens
  misc_RNA (1)...(19): siRNA sense strand
ugaagagggaauuugauga

SEQ ID NO: 1555378 - RNA, 19 nt, Homo sapiens
  misc_RNA (1)...(19): siRNA sense strand
ccagucuuguccuuucuga

SEQ ID NO: 1555379 - RNA, 19 nt, Homo sapiens
  misc_RNA (1)...(19): siRNA sense strand
guuaguggccuuuccauac

SEQ ID NO: 1555380 - RNA, 19 nt, Homo sapiens
  misc_RNA (1)...(19): siRNA sense strand
cagggaugucucuuuauaa

SEQ ID NO: 1555381 - RNA, 19 nt, Homo sapiens
  misc_RNA (1)...(19): siRNA sense strand
acaggauaauugaugaaga

SEQ ID NO: 1555382 - RNA, 19 nt, Homo sapiens
  misc_RNA (1)...(19): siRNA sense strand
agaaauggaucagacaacu

SEQ ID NO: 1555383 - RNA, 19 nt, Homo sapiens
  misc_RNA (1)...(19): siRNA sense strand
gaguaaaucccaguguuag

SEQ ID NO: 1555384 - RNA, 19 nt, Homo sapiens
  misc_RNA (1)...(19): siRNA sense strand
gcggacguguuucuguuca

SEQ ID NO: 1555385 - RNA, 19 nt, Homo sapiens
  misc_RNA (1)...(19): siRNA sense strand
gaacuccuuucugauaagc

SEQ ID NO: 1555386 - RNA, 19 nt, Homo sapiens
  misc_RNA (1)...(19): siRNA sense strand
ugaugauuguccaguaaga

SEQ ID NO: 1555387 - RNA, 19 nt, Homo sapiens
  misc_RNA (1)...(19): siRNA sense strand
uaccugggauauuagaugu

SEQ ID NO: 1555388 - RNA, 19 nt, Homo sapiens
  misc_RNA (1)...(19): siRNA sense strand
uagcacagaagaagagaug

SEQ ID NO: 1555389 - RNA, 19 nt, Homo sapiens
  misc_RNA (1)...(19): siRNA sense strand
ggaggaggaggaugaugau

SEQ ID NO: 1555390 - RNA, 19 nt, Homo sapiens
  misc_RNA (1)...(19): siRNA sense strand
gaugauuguccaguaagaa

SEQ ID NO: 1555391 - RNA, 19 nt, Homo sapiens
  misc_RNA (1)...(19): siRNA sense strand
gauuguccaguaagaaaga

SEQ ID NO: 1555392 - RNA, 19 nt, Homo sapiens
  misc_RNA (1)...(19): siRNA sense strand
guuugaagagggaauuuga

SEQ ID NO: 1555393 - RNA, 19 nt, Homo sapiens
  misc_RNA (1)...(19): siRNA sense strand
ggacguguuucuguucacu

SEQ ID NO: 1555394 - RNA, 19 nt, Homo sapiens
  misc_RNA (1)...(19): siRNA sense strand
aggacaggauaauugauga

SEQ ID NO: 1555395 - RNA, 19 nt, Homo sapiens
  misc_RNA (1)...(19): siRNA sense strand
gauugaggacaggauaauu

SEQ ID NO: 1555396 - RNA, 19 nt, Homo sapiens
  misc_RNA (1)...(19): siRNA sense strand
ugaagaugaagaaguugaa

SEQ ID NO: 1555397 - RNA, 19 nt, Homo sapiens
  misc_RNA (1)...(19): siRNA sense strand
cuaaugacuggauucuuug

SEQ ID NO: 1555398 - RNA, 19 nt, Homo sapiens
  misc_RNA (1)...(19): siRNA sense strand
caaagccauccucuaauac

SEQ ID NO: 1555399 - RNA, 19 nt, Homo sapiens
  misc_RNA (1)...(19): siRNA sense strand
ugaacuccuuucugauaag

SEQ ID NO: 1555400 - RNA, 19 nt, Homo sapiens
  misc_RNA (1)...(19): siRNA sense strand
ggaaaccccucccugaacu

SEQ ID NO: 1555401 - RNA, 19 nt, Homo sapiens
  misc_RNA (1)...(19): siRNA sense strand
gaagaugaagaaguugaag

SEQ ID NO: 1555402 - RNA, 19 nt, Homo sapiens
  misc_RNA (1)...(19): siRNA sense strand
cauccucuaauacuaagaa

SEQ ID NO: 1555403 - RNA, 19 nt, Homo sapiens
  misc_RNA (1)...(19): siRNA sense strand
aggaggaggaugaugauug

SEQ ID NO: 1555404 - RNA, 19 nt, Homo sapiens
  misc_RNA (1)...(19): siRNA sense strand
gagagagccaagcuaagca

SEQ ID NO: 1555405 - RNA, 19 nt, Homo sapiens
  misc_RNA (1)...(19): siRNA sense strand
gccaaagccauccucuaau

SEQ ID NO: 1555406 - RNA, 19 nt, Homo sapiens
  misc_RNA (1)...(19): siRNA sense strand
aagcugacagaaauguuaa

SEQ ID NO: 1555407 - RNA, 19 nt, Homo sapiens
  misc_RNA (1)...(19): siRNA sense strand
ugaagaaauggaucagaca

SEQ ID NO: 1555408 - RNA, 19 nt, Homo sapiens
  misc_RNA (1)...(19): siRNA sense strand
aggaggaggaggaugauga

SEQ ID NO: 1555409 - RNA, 19 nt, Homo sapiens
  misc_RNA (1)...(19): siRNA sense strand
gaucagacaacuggagaac

SEQ ID NO: 1555410 - RNA, 19 nt, Homo sapiens
  misc_RNA (1)...(19): siRNA sense strand
cagaagaagagauggaacu

SEQ ID NO: 1555411 - RNA, 19 nt, Homo sapiens
  misc_RNA (1)...(19): siRNA sense strand
cuacuagcacagaagaaga

SEQ ID NO: 1555412 - RNA, 19 nt, Homo sapiens
  misc_RNA (1)...(19): siRNA sense strand
gccauccucuaauacuaag

SEQ ID NO: 1555413 - RNA, 19 nt, Homo sapiens
  misc_RNA (1)...(19): siRNA sense strand
gaacaacggugauuucuuc

SEQ ID NO: 1555414 - RNA, 19 nt, Homo sapiens
  misc_RNA (1)...(19): siRNA sense strand
ggaagaaguucgaugauga

SEQ ID NO: 1555415 - RNA, 19 nt, Homo sapiens
  misc_RNA (1)...(19): siRNA sense strand
gcucauaaaugcuguguug

SEQ ID NO: 1555416 - RNA, 19 nt, Homo sapiens
  misc_RNA (1)...(19): siRNA sense strand
gaaacaaggugucaucaag

SEQ ID NO: 1555417 - RNA, 19 nt, Homo sapiens
  misc_RNA (1)...(19): siRNA sense strand
cagaggaccugauugauga

SEQ ID NO: 1555418 - RNA, 19 nt, Homo sapiens
  misc_RNA (1)...(19): siRNA sense strand
gcaaggcccuguuuagcaa

SEQ ID NO: 1555419 - RNA, 19 nt, Homo sapiens
  misc_RNA (1)...(19): siRNA sense strand
caacggugauuucuucauu

SEQ ID NO: 1555420 - RNA, 19 nt, Homo sapiens
  misc_RNA (1)...(19): siRNA sense strand
gaagauaucccggaaacaa

SEQ ID NO: 1555421 - RNA, 19 nt, Homo sapiens
  misc_RNA (1)...(19): siRNA sense strand
gagaugagguccuggaaca

SEQ ID NO: 1555422 - RNA, 19 nt, Homo sapiens
  misc_RNA (1)...(19): siRNA sense strand
gaacaggaacugcauaagu

SEQ ID NO: 1555423 - RNA, 19 nt, Homo sapiens
  misc_RNA (1)...(19): siRNA sense strand
gcagagcaaccaaggauaa

SEQ ID NO: 1555424 - RNA, 19 nt, Homo sapiens
  misc_RNA (1)...(19): siRNA sense strand
gugcugaacuucucugaug

SEQ ID NO: 1555425 - RNA, 19 nt, Homo sapiens
  misc_RNA (1)...(19): siRNA sense strand
gaagaacaacggugauuuc

SEQ ID NO: 1555426 - RNA, 19 nt, Homo sapiens
  misc_RNA (1)...(19): siRNA sense strand
gcagaggaccugauugaug

SEQ ID NO: 1555427 - RNA, 19 nt, Homo sapiens
  misc_RNA (1)...(19): siRNA sense strand
gaagaagaagguauccaaa

SEQ ID NO: 1555428 - RNA, 19 nt, Homo sapiens
  misc_RNA (1)...(19): siRNA sense strand
gcuggaagccugcagauga

SEQ ID NO: 1555429 - RNA, 19 nt, Homo sapiens
  misc_RNA (1)...(19): siRNA sense strand
ucaucaagcugaagaacaa

SEQ ID NO: 1555430 - RNA, 19 nt, Homo sapiens
  misc_RNA (1)...(19): siRNA sense strand
gaacccuccuccagugaga

SEQ ID NO: 1555431 - RNA, 19 nt, Homo sapiens
  misc_RNA (1)...(19): siRNA sense strand
ucaaggacaugcgagauga

SEQ ID NO: 1555432 - RNA, 19 nt, Homo sapiens
  misc_RNA (1)...(19): siRNA sense strand
gcucuacgauccugucauc

SEQ ID NO: 1555433 - RNA, 19 nt, Homo sapiens
  misc_RNA (1)...(19): siRNA sense strand
acaguaagcucaaggacau

SEQ ID NO: 1555434 - RNA, 19 nt, Homo sapiens
  misc_RNA (1)...(19): siRNA sense strand
gguccggccuggaagauau

SEQ ID NO: 1555435 - RNA, 19 nt, Homo sapiens
  misc_RNA (1)...(19): siRNA sense strand
ccaaggauaaccagauuga

SEQ ID NO: 1555436 - RNA, 19 nt, Homo sapiens
  misc_RNA (1)...(19): siRNA sense strand
ggaaacaaggugucaucaa

SEQ ID NO: 1555437 - RNA, 19 nt, Homo sapiens
  misc_RNA (1)...(19): siRNA sense strand
aacaggaacugcauaagug

SEQ ID NO: 1555438 - RNA, 19 nt, Homo sapiens
  misc_RNA (1)...(19): siRNA sense strand
cgauucgucuuccuuauca

SEQ ID NO: 1555439 - RNA, 19 nt, Homo sapiens
  misc_RNA (1)...(19): siRNA sense strand
aaauucagcugccgcuuca

SEQ ID NO: 1555440 - RNA, 19 nt, Homo sapiens
  misc_RNA (1)...(19): siRNA sense strand
ccaaauggcgccucagcaa

SEQ ID NO: 1555441 - RNA, 19 nt, Homo sapiens
  misc_RNA (1)...(19): siRNA sense strand
ggaccugauugaugacagu

SEQ ID NO: 1555442 - RNA, 19 nt, Homo sapiens
  misc_RNA (1)...(19): siRNA sense strand
aaccaaggauaaccagauu

SEQ ID NO: 1555443 - RNA, 19 nt, Homo sapiens
  misc_RNA (1)...(19): siRNA sense strand
ggacuucgacaaccagaca

SEQ ID NO: 1555444 - RNA, 19 nt, Homo sapiens
  misc_RNA (1)...(19): siRNA sense strand
gggcugaggcugccaagau

SEQ ID NO: 1555445 - RNA, 19 nt, Homo sapiens
  misc_RNA (1)...(19): siRNA sense strand
gguacgcccugcucuacga

SEQ ID NO: 1555446 - RNA, 19 nt, Homo sapiens
  misc_RNA (1)...(19): siRNA sense strand
ggaccucauugcccucauc

SEQ ID NO: 1555447 - RNA, 19 nt, Homo sapiens
  misc_RNA (1)...(19): siRNA sense strand
cugaugcgcucgcgugaga

SEQ ID NO: 1555448 - RNA, 19 nt, Homo sapiens
  misc_RNA (1)...(19): siRNA sense strand
agaagaagguauccaaagc

SEQ ID NO: 1555449 - RNA, 19 nt, Homo sapiens
  misc_RNA (1)...(19): siRNA sense strand
caaccaaggauaaccagau

SEQ ID NO: 1555450 - RNA, 19 nt, Homo sapiens
  misc_RNA (1)...(19): siRNA sense strand
gaagaaguucgaugaugag

SEQ ID NO: 1555451 - RNA, 19 nt, Homo sapiens
  misc_RNA (1)...(19): siRNA sense strand
gggcagagcaaccaaggau

SEQ ID NO: 1555452 - RNA, 19 nt, Homo sapiens
  misc_RNA (1)...(19): siRNA sense strand
caugagcucuccggacuuc

SEQ ID NO: 1555453 - RNA, 19 nt, Homo sapiens
  misc_RNA (1)...(19): siRNA sense strand
agaggaagaaguucgauga

SEQ ID NO: 1555454 - RNA, 19 nt, Homo sapiens
  misc_RNA (1)...(19): siRNA sense strand
ccagguucaucaagaggaa

SEQ ID NO: 1555455 - RNA, 19 nt, Homo sapiens
  misc_RNA (1)...(19): siRNA sense strand
ccagagcaaggcccuguuu

SEQ ID NO: 1555456 - RNA, 19 nt, Homo sapiens
  misc_RNA (1)...(19): siRNA sense strand
ugaagaacaacggugauuu

SEQ ID NO: 1555457 - RNA, 19 nt, Homo sapiens
  misc_RNA (1)...(19): siRNA sense strand
gaugagguccuggaacaug

SEQ ID NO: 1555458 - RNA, 19 nt, Homo sapiens
  misc_RNA (1)...(19): siRNA sense strand
agaagaagaagguauccaa

SEQ ID NO: 1555459 - RNA, 19 nt, Homo sapiens
  misc_RNA (1)...(19): siRNA sense strand
ccaagcgugugaagaagag

SEQ ID NO: 1555460 - RNA, 19 nt, Homo sapiens
  misc_RNA (1)...(19): siRNA sense strand
cagagcaaggcccuguuua

SEQ ID NO: 1555461 - RNA, 19 nt, Homo sapiens
  misc_RNA (1)...(19): siRNA sense strand
aggaagaaguucgaugaug

SEQ ID NO: 1555462 - RNA, 19 nt, Homo sapiens
  misc_RNA (1)...(19): siRNA sense strand
uggaagauaucccggaaac

SEQ ID NO: 1555463 - RNA, 19 nt, Homo sapiens
  misc_RNA (1)...(19): siRNA sense strand
aaggauaaccagauugaug

SEQ ID NO: 1555464 - RNA, 19 nt, Homo sapiens
  misc_RNA (1)...(19): siRNA sense strand
gccaagaucacaccacagu

SEQ ID NO: 1555465 - RNA, 19 nt, Homo sapiens
  misc_RNA (1)...(19): siRNA sense strand
ccagugagaagaagaaggu

SEQ ID NO: 1555466 - RNA, 19 nt, Homo sapiens
  misc_RNA (1)...(19): siRNA sense strand
ggcugaggcugccaagauc

SEQ ID NO: 1555467 - RNA, 19 nt, Homo sapiens
  misc_RNA (1)...(19): siRNA sense strand
uaucaaccaggaccucauu

SEQ ID NO: 1555468 - RNA, 19 nt, Homo sapiens
  misc_RNA (1)...(19): siRNA sense strand
ggcagcucaugaagcagua

SEQ ID NO: 1555469 - RNA, 19 nt, Homo sapiens
  misc_RNA (1)...(19): siRNA sense strand
gaccuccugcucauaaaug

SEQ ID NO: 1555470 - RNA, 19 nt, Homo sapiens
  misc_RNA (1)...(19): siRNA sense strand
uggaacaggaacugcauaa

SEQ ID NO: 1555471 - RNA, 19 nt, Homo sapiens
  misc_RNA (1)...(19): siRNA sense strand
gagcaaggcccuguuuagc

SEQ ID NO: 1555472 - RNA, 19 nt, Homo sapiens
  misc_RNA (1)...(19): siRNA sense strand
gcgauucgucuuccuuauc

SEQ ID NO: 1555473 - RNA, 19 nt, Homo sapiens
  misc_RNA (1)...(19): siRNA sense strand
gagcaaccaaggauaacca

SEQ ID NO: 1555474 - RNA, 19 nt, Homo sapiens
  misc_RNA (1)...(19): siRNA sense strand
gaggaagaaguucgaugau

SEQ ID NO: 1555475 - RNA, 19 nt, Homo sapiens
  misc_RNA (1)...(19): siRNA sense strand
acuggcagcucaugaagca

SEQ ID NO: 1555476 - RNA, 19 nt, Homo sapiens
  misc_RNA (1)...(19): siRNA sense strand
cacuucaggugaccaagga

SEQ ID NO: 1555477 - RNA, 19 nt, Homo sapiens
  misc_RNA (1)...(19): siRNA sense strand
gacagcaucacaggcauga

SEQ ID NO: 1555478 - RNA, 19 nt, Homo sapiens
  misc_RNA (1)...(19): siRNA sense strand
ucaucaagaggaagaaguu

SEQ ID NO: 1555479 - RNA, 19 nt, Homo sapiens
  misc_RNA (1)...(19): siRNA sense strand
gauccugucaucuccaagu

SEQ ID NO: 1555480 - RNA, 19 nt, Homo sapiens
  misc_RNA (1)...(19): siRNA sense strand
agaguaaacagccacuuca

SEQ ID NO: 1555481 - RNA, 19 nt, Homo sapiens
  misc_RNA (1)...(19): siRNA sense strand
acaacucugugguggagau

SEQ ID NO: 1555482 - RNA, 19 nt, Homo sapiens
  misc_RNA (1)...(19): siRNA sense strand
aaauggcgccucagcaaca

SEQ ID NO: 1555483 - RNA, 19 nt, Homo sapiens
  misc_RNA (1)...(19): siRNA sense strand
ggcagagcaaccaaggaua

SEQ ID NO: 1555484 - RNA, 19 nt, Homo sapiens
  misc_RNA (1)...(19): siRNA sense strand
ccuggaacaugagcugaug

SEQ ID NO: 1555485 - RNA, 19 nt, Homo sapiens
  misc_RNA (1)...(19): siRNA sense strand
ccaccugggcgugaaauuc

SEQ ID NO: 1555486 - RNA, 19 nt, Homo sapiens
  misc_RNA (1)...(19): siRNA sense strand
gugagaagaagaagguauc

SEQ ID NO: 1555487 - RNA, 19 nt, Homo sapiens
  misc_RNA (1)...(19): siRNA sense strand
gcuaguggacagcaucaca

SEQ ID NO: 1555488 - RNA, 19 nt, Homo sapiens
  misc_RNA (1)...(19): siRNA sense strand
gcacccagaggcuauugca

SEQ ID NO: 1555489 - RNA, 19 nt, Homo sapiens
  misc_RNA (1)...(19): siRNA sense strand
gaagaguaaacagccacuu

SEQ ID NO: 1555490 - RNA, 19 nt, Homo sapiens
  misc_RNA (1)...(19): siRNA sense strand
aggauaaccagauugaugu

SEQ ID NO: 1555491 - RNA, 19 nt, Homo sapiens
  misc_RNA (1)...(19): siRNA sense strand
gcauaaguggcaggugcua

SEQ ID NO: 1555492 - RNA, 19 nt, Homo sapiens
  misc_RNA (1)...(19): siRNA sense strand
augagguccuggaacauga

SEQ ID NO: 1555493 - RNA, 19 nt, Homo sapiens
  misc_RNA (1)...(19): siRNA sense strand
agaagcuccuccagguuca

SEQ ID NO: 1555494 - RNA, 19 nt, Homo sapiens
  misc_RNA (1)...(19): siRNA sense strand
ccugauugaugacaguaag

SEQ ID NO: 1555495 - RNA, 19 nt, Homo sapiens
  misc_RNA (1)...(19): siRNA sense strand
ucauaaaugcuguguugca

SEQ ID NO: 1555496 - RNA, 19 nt, Homo sapiens
  misc_RNA (1)...(19): siRNA sense strand
ucaagaggaagaaguucga

SEQ ID NO: 1555497 - RNA, 19 nt, Homo sapiens
  misc_RNA (1)...(19): siRNA sense strand
ggauaaccagauugaugug

SEQ ID NO: 1555498 - RNA, 19 nt, Homo sapiens
  misc_RNA (1)...(19): siRNA sense strand
aagaagaagguauccaaag

SEQ ID NO: 1555499 - RNA, 19 nt, Homo sapiens
  misc_RNA (1)...(19): siRNA sense strand
augcagaggaccugauuga

SEQ ID NO: 1555500 - RNA, 19 nt, Homo sapiens
  misc_RNA (1)...(19): siRNA sense strand
gaaaguggauggugcaaca

SEQ ID NO: 1555501 - RNA, 19 nt, Homo sapiens
  misc_RNA (1)...(19): siRNA sense strand
caaccagacuguucuagau

SEQ ID NO: 1555502 - RNA, 19 nt, Homo sapiens
  misc_RNA (1)...(19): siRNA sense strand
guucugggcuggccacuau

SEQ ID NO: 1555503 - RNA, 19 nt, Homo sapiens
  misc_RNA (1)...(19): siRNA sense strand
caagaaggccuccgaaagu

SEQ ID NO: 1555504 - RNA, 19 nt, Homo sapiens
  misc_RNA (1)...(19): siRNA sense strand
caagaugggcguccgcuuu

SEQ ID NO: 1555505 - RNA, 19 nt, Homo sapiens
  misc_RNA (1)...(19): siRNA sense strand
gauaguggcaggauugaga

SEQ ID NO: 1555506 - RNA, 19 nt, Homo sapiens
  misc_RNA (1)...(19): siRNA sense strand
gugaccaacuccaguguga

SEQ ID NO: 1555507 - RNA, 19 nt, Homo sapiens
  misc_RNA (1)...(19): siRNA sense strand
ccagacuguucuagauaaa

SEQ ID NO: 1555508 - RNA, 19 nt, Homo sapiens
  misc_RNA (1)...(19): siRNA sense strand
guacagacuccucguccaa

SEQ ID NO: 1555509 - RNA, 19 nt, Homo sapiens
  misc_RNA (1)...(19): siRNA sense strand
ccaagaaggccuccgaaag

SEQ ID NO: 1555510 - RNA, 19 nt, Homo sapiens
  misc_RNA (1)...(19): siRNA sense strand
guggcaggauugagauuug

SEQ ID NO: 1555511 - RNA, 19 nt, Homo sapiens
  misc_RNA (1)...(19): siRNA sense strand
ucauucagcugguguugca

SEQ ID NO: 1555512 - RNA, 19 nt, Homo sapiens
  misc_RNA (1)...(19): siRNA sense strand
aagaaggccuccgaaagug

SEQ ID NO: 1555513 - RNA, 19 nt, Homo sapiens
  misc_RNA (1)...(19): siRNA sense strand
accagacuguucuagauaa

SEQ ID NO: 1555514 - RNA, 19 nt, Homo sapiens
  misc_RNA (1)...(19): siRNA sense strand
cagcugguguugcaagaag

SEQ ID NO: 1555515 - RNA, 19 nt, Homo sapiens
  misc_RNA (1)...(19): siRNA sense strand
caucggacgcaaccuuauu

SEQ ID NO: 1555516 - RNA, 19 nt, Homo sapiens
  misc_RNA (1)...(19): siRNA sense strand
agacgugcuucgugacuuc

SEQ ID NO: 1555517 - RNA, 19 nt, Homo sapiens
  misc_RNA (1)...(19): siRNA sense strand
gaccaacuccagugugauc

SEQ ID NO: 1555518 - RNA, 19 nt, Homo sapiens
  misc_RNA (1)...(19): siRNA sense strand
gcuggauaguggcaggauu

SEQ ID NO: 1555519 - RNA, 19 nt, Homo sapiens
  misc_RNA (1)...(19): siRNA sense strand
ucacccacguguucuccaa

SEQ ID NO: 1555520 - RNA, 19 nt, Homo sapiens
  misc_RNA (1)...(19): siRNA sense strand
ccaaccagacuguucuaga

SEQ ID NO: 1555521 - RNA, 19 nt, Homo sapiens
  misc_RNA (1)...(19): siRNA sense strand
gccaagaaggccuccgaaa

SEQ ID NO: 1555522 - RNA, 19 nt, Homo sapiens
  misc_RNA (1)...(19): siRNA sense strand
aaccagacuguucuagaua

SEQ ID NO: 1555523 - RNA, 19 nt, Homo sapiens
  misc_RNA (1)...(19): siRNA sense strand
caacaaugccugccuucac

SEQ ID NO: 1555524 - RNA, 19 nt, Homo sapiens
  misc_RNA (1)...(19): siRNA sense strand
gcaggauugagauuugugu

SEQ ID NO: 1555525 - RNA, 19 nt, Homo sapiens
  misc_RNA (1)...(19): siRNA sense strand
cagacgugcuucgugacuu

SEQ ID NO: 1555526 - RNA, 19 nt, Homo sapiens
  misc_RNA (1)...(19): siRNA sense strand
aagaugggcguccgcuuug

SEQ ID NO: 1555527 - RNA, 19 nt, Homo sapiens
  misc_RNA (1)...(19): siRNA sense strand
cccaucggacgcaaccuua

SEQ ID NO: 1555528 - RNA, 19 nt, Homo sapiens
  misc_RNA (1)...(19): siRNA sense strand
ggaaauguaugauguagua

SEQ ID NO: 1555529 - RNA, 19 nt, Homo sapiens
  misc_RNA (1)...(19): siRNA sense strand
gaaagaauauucagagaga

SEQ ID NO: 1555530 - RNA, 19 nt, Homo sapiens
  misc_RNA (1)...(19): siRNA sense strand
ggugaaaccucauuuagua

SEQ ID NO: 1555531 - RNA, 19 nt, Homo sapiens
  misc_RNA (1)...(19): siRNA sense strand
gagcagaacucuuccacua

SEQ ID NO: 1555532 - RNA, 19 nt, Homo sapiens
  misc_RNA (1)...(19): siRNA sense strand
caaaaucacugcaccauua

SEQ ID NO: 1555533 - RNA, 19 nt, Homo sapiens
  misc_RNA (1)...(19): siRNA sense strand
gaugguagcugccuuugaa

SEQ ID NO: 1555534 - RNA, 19 nt, Homo sapiens
  misc_RNA (1)...(19): siRNA sense strand
gaacuuguaccuuggauuu

SEQ ID NO: 1555535 - RNA, 19 nt, Homo sapiens
  misc_RNA (1)...(19): siRNA sense strand
aaauauaccucgggaguua

SEQ ID NO: 1555536 - RNA, 19 nt, Homo sapiens
  misc_RNA (1)...(19): siRNA sense strand
aaagagaucuggauauugu

SEQ ID NO: 1555537 - RNA, 19 nt, Homo sapiens
  misc_RNA (1)...(19): siRNA sense strand
ucaaagagaucuggauauu

SEQ ID NO: 1555538 - RNA, 19 nt, Homo sapiens
  misc_RNA (1)...(19): siRNA sense strand
ugaaguccaucacacauaa

SEQ ID NO: 1555539 - RNA, 19 nt, Homo sapiens
  misc_RNA (1)...(19): siRNA sense strand
gcagaacucuuccacuaca

SEQ ID NO: 1555540 - RNA, 19 nt, Homo sapiens
  misc_RNA (1)...(19): siRNA sense strand
ggagcgauauacaucagua

SEQ ID NO: 1555541 - RNA, 19 nt, Homo sapiens
  misc_RNA (1)...(19): siRNA sense strand
gauauucaaugcaggaaau

SEQ ID NO: 1555542 - RNA, 19 nt, Homo sapiens
  misc_RNA (1)...(19): siRNA sense strand
gaauuucgaucacuucuac

SEQ ID NO: 1555543 - RNA, 19 nt, Homo sapiens
  misc_RNA (1)...(19): siRNA sense strand
cgauauacaucaguaguaa

SEQ ID NO: 1555544 - RNA, 19 nt, Homo sapiens
  misc_RNA (1)...(19): siRNA sense strand
guaaaggcaucuuguacug

SEQ ID NO: 1555545 - RNA, 19 nt, Homo sapiens
  misc_RNA (1)...(19): siRNA sense strand
uaucgggaguggaggauua

SEQ ID NO: 1555546 - RNA, 19 nt, Homo sapiens
  misc_RNA (1)...(19): siRNA sense strand
ggagauaugugcacgaacu

SEQ ID NO: 1555547 - RNA, 19 nt, Homo sapiens
  misc_RNA (1)...(19): siRNA sense strand
gaaagaagagcauguaagc

SEQ ID NO: 1555548 - RNA, 19 nt, Homo sapiens
  misc_RNA (1)...(19): siRNA sense strand
gcacgaacuuucuucaaaa

SEQ ID NO: 1555549 - RNA, 19 nt, Homo sapiens
  misc_RNA (1)...(19): siRNA sense strand
gcaggaaauguaugaugua

SEQ ID NO: 1555550 - RNA, 19 nt, Homo sapiens
  misc_RNA (1)...(19): siRNA sense strand
ucaaucauuuggagacuau

SEQ ID NO: 1555551 - RNA, 19 nt, Homo sapiens
  misc_RNA (1)...(19): siRNA sense strand
gggaguuaaugcuucauga

SEQ ID NO: 1555552 - RNA, 19 nt, Homo sapiens
  misc_RNA (1)...(19): siRNA sense strand
gagacuauuuggcguuuua

SEQ ID NO: 1555553 - RNA, 19 nt, Homo sapiens
  misc_RNA (1)...(19): siRNA sense strand
gaagagcauguaagcugua

SEQ ID NO: 1555554 - RNA, 19 nt, Homo sapiens
  misc_RNA (1)...(19): siRNA sense strand
gcggaauggcagauauuua

SEQ ID NO: 1555555 - RNA, 19 nt, Homo sapiens
  misc_RNA (1)...(19): siRNA sense strand
gcgauauacaucaguagua

SEQ ID NO: 1555556 - RNA, 19 nt, Homo sapiens
  misc_RNA (1)...(19): siRNA sense strand
ucacugcaccauuaauaaa

SEQ ID NO: 1555557 - RNA, 19 nt, Homo sapiens
  misc_RNA (1)...(19): siRNA sense strand
ugcacgaacuuucuucaaa

SEQ ID NO: 1555558 - RNA, 19 nt, Homo sapiens
  misc_RNA (1)...(19): siRNA sense strand
guaguaaccuuggugaaac

SEQ ID NO: 1555559 - RNA, 19 nt, Homo sapiens
  misc_RNA (1)...(19): siRNA sense strand
ccacuacauaccucaauuu

SEQ ID NO: 1555560 - RNA, 19 nt, Homo sapiens
  misc_RNA (1)...(19): siRNA sense strand
aaucacugcaccauuaaua

SEQ ID NO: 1555561 - RNA, 19 nt, Homo sapiens
  misc_RNA (1)...(19): siRNA sense strand
ggaguuaaugcuucaugaa

SEQ ID NO: 1555562 - RNA, 19 nt, Homo sapiens
  misc_RNA (1)...(19): siRNA sense strand
uaagcuguaugguccagaa

SEQ ID NO: 1555563 - RNA, 19 nt, Homo sapiens
  misc_RNA (1)...(19): siRNA sense strand
aaaggcaucuuguacugau

SEQ ID NO: 1555564 - RNA, 19 nt, Homo sapiens
  misc_RNA (1)...(19): siRNA sense strand
ggucauacggccuugagaa

SEQ ID NO: 1555565 - RNA, 19 nt, Homo sapiens
  misc_RNA (1)...(19): siRNA sense strand
caaagagaucuggauauug

SEQ ID NO: 1555566 - RNA, 19 nt, Homo sapiens
  misc_RNA (1)...(19): siRNA sense strand
gcuguaugguccagaaaca

SEQ ID NO: 1555567 - RNA, 19 nt, Homo sapiens
  misc_RNA (1)...(19): siRNA sense strand
gagcauguaagcuguaugg

SEQ ID NO: 1555568 - RNA, 19 nt, Homo sapiens
  misc_RNA (1)...(19): siRNA sense strand
gauaugugcacgaacuuuc

SEQ ID NO: 1555569 - RNA, 19 nt, Homo sapiens
  misc_RNA (1)...(19): siRNA sense strand
cggaauggcagauauuuag

SEQ ID NO: 1555570 - RNA, 19 nt, Homo sapiens
  misc_RNA (1)...(19): siRNA sense strand
caaugcaggaaauguauga

SEQ ID NO: 1555571 - RNA, 19 nt, Homo sapiens
  misc_RNA (1)...(19): siRNA sense strand
gaauauucagagagaagaa

SEQ ID NO: 1555572 - RNA, 19 nt, Homo sapiens
  misc_RNA (1)...(19): siRNA sense strand
caggaaauguaugauguag

SEQ ID NO: 1555573 - RNA, 19 nt, Homo sapiens
  misc_RNA (1)...(19): siRNA sense strand
gugaaaccucauuuaguaa

SEQ ID NO: 1555574 - RNA, 19 nt, Homo sapiens
  misc_RNA (1)...(19): siRNA sense strand
ugcaggaaauguaugaugu

SEQ ID NO: 1555575 - RNA, 19 nt, Homo sapiens
  misc_RNA (1)...(19): siRNA sense strand
cuacauaccucaauuuugc

SEQ ID NO: 1555576 - RNA, 19 nt, Homo sapiens
  misc_RNA (1)...(19): siRNA sense strand
caaauauaccucgggaguu

SEQ ID NO: 1555577 - RNA, 19 nt, Homo sapiens
  misc_RNA (1)...(19): siRNA sense strand
aggaaagaauauucagaga

SEQ ID NO: 1555578 - RNA, 19 nt, Homo sapiens
  misc_RNA (1)...(19): siRNA sense strand
aaggagauaugugcacgaa

SEQ ID NO: 1555579 - RNA, 19 nt, Homo sapiens
  misc_RNA (1)...(19): siRNA sense strand
caccuguguuggagcgaua

SEQ ID NO: 1555580 - RNA, 19 nt, Homo sapiens
  misc_RNA (1)...(19): siRNA sense strand
ggagacuuuucaaucauuu

SEQ ID NO: 1555581 - RNA, 19 nt, Homo sapiens
  misc_RNA (1)...(19): siRNA sense strand
uuaguaaaggcaucuugua

SEQ ID NO: 1555582 - RNA, 19 nt, Homo sapiens
  misc_RNA (1)...(19): siRNA sense strand
gaacucuuccacuacauac

SEQ ID NO: 1555583 - RNA, 19 nt, Homo sapiens
  misc_RNA (1)...(19): siRNA sense strand
auacaucaguaguaaccuu

SEQ ID NO: 1555584 - RNA, 19 nt, Homo sapiens
  misc_RNA (1)...(19): siRNA sense strand
gcagcucggacuggucaua

SEQ ID NO: 1555585 - RNA, 19 nt, Homo sapiens
  misc_RNA (1)...(19): siRNA sense strand
cuuccuggcuacccaagaa

SEQ ID NO: 1555586 - RNA, 19 nt, Homo sapiens
  misc_RNA (1)...(19): siRNA sense strand
uauuuagcuuccuguggua

SEQ ID NO: 1555587 - RNA, 19 nt, Homo sapiens
  misc_RNA (1)...(19): siRNA sense strand
uaaaggcaucuuguacuga

SEQ ID NO: 1555588 - RNA, 19 nt, Homo sapiens
  misc_RNA (1)...(19): siRNA sense strand
gguauacugaugagcagaa

SEQ ID NO: 1555589 - RNA, 19 nt, Homo sapiens
  misc_RNA (1)...(19): siRNA sense strand
gagaucuggauauuguaaa

SEQ ID NO: 1555590 - RNA, 19 nt, Homo sapiens
  misc_RNA (1)...(19): siRNA sense strand
agagaucuggauauuguaa

SEQ ID NO: 1555591 - RNA, 19 nt, Homo sapiens
  misc_RNA (1)...(19): siRNA sense strand
cugaugagcagaacucuuc

SEQ ID NO: 1555592 - RNA, 19 nt, Homo sapiens
  misc_RNA (1)...(19): siRNA sense strand
cgaacuuucuucaaaauca

SEQ ID NO: 1555593 - RNA, 19 nt, Homo sapiens
  misc_RNA (1)...(19): siRNA sense strand
agaacucuuccacuacaua

SEQ ID NO: 1555594 - RNA, 19 nt, Homo sapiens
  misc_RNA (1)...(19): siRNA sense strand
ugaaagaagagcauguaag

SEQ ID NO: 1555595 - RNA, 19 nt, Homo sapiens
  misc_RNA (1)...(19): siRNA sense strand
uugaugaaguugugaagca

SEQ ID NO: 1555596 - RNA, 19 nt, Homo sapiens
  misc_RNA (1)...(19): siRNA sense strand
ggauauucaaugcaggaaa

SEQ ID NO: 1555597 - RNA, 19 nt, Homo sapiens
  misc_RNA (1)...(19): siRNA sense strand
uggagacuauuuggcguuu

SEQ ID NO: 1555598 - RNA, 19 nt, Homo sapiens
  misc_RNA (1)...(19): siRNA sense strand
ccagcuugccacacucuuu

SEQ ID NO: 1555599 - RNA, 19 nt, Homo sapiens
  misc_RNA (1)...(19): siRNA sense strand
uucgaucacuucuacauuc

SEQ ID NO: 1555600 - RNA, 19 nt, Homo sapiens
  misc_RNA (1)...(19): siRNA sense strand
gaguggaggauuacaagca

SEQ ID NO: 1555601 - RNA, 19 nt, Homo sapiens
  misc_RNA (1)...(19): siRNA sense strand
uaugguccagaaacaaaua

SEQ ID NO: 1555602 - RNA, 19 nt, Homo sapiens
  misc_RNA (1)...(19): siRNA sense strand
uguaugguccagaaacaaa

SEQ ID NO: 1555603 - RNA, 19 nt, Homo sapiens
  misc_RNA (1)...(19): siRNA sense strand
aauggcagauauuuagcuu

SEQ ID NO: 1555604 - RNA, 19 nt, Homo sapiens
  misc_RNA (1)...(19): siRNA sense strand
gggagacuuuucaaucauu

SEQ ID NO: 1555605 - RNA, 19 nt, Homo sapiens
  misc_RNA (1)...(19): siRNA sense strand
aguaguaaccuuggugaaa

SEQ ID NO: 1555606 - RNA, 19 nt, Homo sapiens
  misc_RNA (1)...(19): siRNA sense strand
guggaggauuacaagcauu

SEQ ID NO: 1555607 - RNA, 19 nt, Homo sapiens
  misc_RNA (1)...(19): siRNA sense strand
gagauaugugcacgaacuu

SEQ ID NO: 1555608 - RNA, 19 nt, Homo sapiens
  misc_RNA (1)...(19): siRNA sense strand
uggaggauuacaagcauuu

SEQ ID NO: 1555609 - RNA, 19 nt, Homo sapiens
  misc_RNA (1)...(19): siRNA sense strand
uccacuacauaccucaauu

SEQ ID NO: 1555610 - RNA, 19 nt, Homo sapiens
  misc_RNA (1)...(19): siRNA sense strand
cagauguuauaucaaagag

SEQ ID NO: 1555611 - RNA, 19 nt, Homo sapiens
  misc_RNA (1)...(19): siRNA sense strand
gggaguggaggauuacaag

SEQ ID NO: 1555612 - RNA, 19 nt, Homo sapiens
  misc_RNA (1)...(19): siRNA sense strand
gagagaagaauuuuaggau

SEQ ID NO: 1555613 - RNA, 19 nt, Homo sapiens
  misc_RNA (1)...(19): siRNA sense strand
ugaauuucgaucacuucua

SEQ ID NO: 1555614 - RNA, 19 nt, Homo sapiens
  misc_RNA (1)...(19): siRNA sense strand
gugcggaauggcagauauu

SEQ ID NO: 1555615 - RNA, 19 nt, Homo sapiens
  misc_RNA (1)...(19): siRNA sense strand
auucaaugcaggaaaugua

SEQ ID NO: 1555616 - RNA, 19 nt, Homo sapiens
  misc_RNA (1)...(19): siRNA sense strand
gaauggcagauauuuagcu

SEQ ID NO: 1555617 - RNA, 19 nt, Homo sapiens
  misc_RNA (1)...(19): siRNA sense strand
cuuggugaaaccucauuua

SEQ ID NO: 1555618 - RNA, 19 nt, Homo sapiens
  misc_RNA (1)...(19): siRNA sense strand
cgugcggaauggcagauau

SEQ ID NO: 1555619 - RNA, 19 nt, Homo sapiens
  misc_RNA (1)...(19): siRNA sense strand
caagacagaucaauuggaa

SEQ ID NO: 1555620 - RNA, 19 nt, Homo sapiens
  misc_RNA (1)...(19): siRNA sense strand
gaucauggccaucaucaau

SEQ ID NO: 1555621 - RNA, 19 nt, Homo sapiens
  misc_RNA (1)...(19): siRNA sense strand
gcucagggcagcuauaguu

SEQ ID NO: 1555622 - RNA, 19 nt, Homo sapiens
  misc_RNA (1)...(19): siRNA sense strand
gaugcugguugguucgaua

SEQ ID NO: 1555623 - RNA, 19 nt, Homo sapiens
  misc_RNA (1)...(19): siRNA sense strand
agacacagccuccugagaa

SEQ ID NO: 1555624 - RNA, 19 nt, Homo sapiens
  misc_RNA (1)...(19): siRNA sense strand
gcccauggcugugcugaug

SEQ ID NO: 1555625 - RNA, 19 nt, Homo sapiens
  misc_RNA (1)...(19): siRNA sense strand
ggacucccaucaguuccua

SEQ ID NO: 1555626 - RNA, 19 nt, Homo sapiens
  misc_RNA (1)...(19): siRNA sense strand
cugaugagcuugccuugga

SEQ ID NO: 1555627 - RNA, 19 nt, Homo sapiens
  misc_RNA (1)...(19): siRNA sense strand
gaggccaccuguuccaugu

SEQ ID NO: 1555628 - RNA, 19 nt, Homo sapiens
  misc_RNA (1)...(19): siRNA sense strand
ucccagggcugacuccaaa

SEQ ID NO: 1555629 - RNA, 19 nt, Homo sapiens
  misc_RNA (1)...(19): siRNA sense strand
cagaucaauuggaauggaa

SEQ ID NO: 1555630 - RNA, 19 nt, Homo sapiens
  misc_RNA (1)...(19): siRNA sense strand
ggcaggaguuggcgagaug

SEQ ID NO: 1555631 - RNA, 19 nt, Homo sapiens
  misc_RNA (1)...(19): siRNA sense strand
cccauauccucaagaauga

SEQ ID NO: 1555632 - RNA, 19 nt, Homo sapiens
  misc_RNA (1)...(19): siRNA sense strand
caacgucgucuuccuguuc

SEQ ID NO: 1555633 - RNA, 19 nt, Homo sapiens
  misc_RNA (1)...(19): siRNA sense strand
ugaaggugcuggccucagu

SEQ ID NO: 1555634 - RNA, 19 nt, Homo sapiens
  misc_RNA (1)...(19): siRNA sense strand
agacagaucaauuggaaug

SEQ ID NO: 1555635 - RNA, 19 nt, Homo sapiens
  misc_RNA (1)...(19): siRNA sense strand
gcccugguccuguucauga

SEQ ID NO: 1555636 - RNA, 19 nt, Homo sapiens
  misc_RNA (1)...(19): siRNA sense strand
ggccaucucccugguguuu

SEQ ID NO: 1555637 - RNA, 19 nt, Homo sapiens
  misc_RNA (1)...(19): siRNA sense strand
gacacagccuccugagaag

SEQ ID NO: 1555638 - RNA, 19 nt, Homo sapiens
  misc_RNA (1)...(19): siRNA sense strand
acaugcagcugguaaggau

SEQ ID NO: 1555639 - RNA, 19 nt, Homo sapiens
  misc_RNA (1)...(19): siRNA sense strand
caucaguuccuacccaaga

SEQ ID NO: 1555640 - RNA, 19 nt, Homo sapiens
  misc_RNA (1)...(19): siRNA sense strand
ucccauauccucaagaaug

SEQ ID NO: 1555641 - RNA, 19 nt, Homo sapiens
  misc_RNA (1)...(19): siRNA sense strand
gcugguugguucgauauuc

SEQ ID NO: 1555642 - RNA, 19 nt, Homo sapiens
  misc_RNA (1)...(19): siRNA sense strand
gcgagauggugcugcagau

SEQ ID NO: 1555643 - RNA, 19 nt, Homo sapiens
  misc_RNA (1)...(19): siRNA sense strand
gcuccucuccauucccaua

SEQ ID NO: 1555644 - RNA, 19 nt, Homo sapiens
  misc_RNA (1)...(19): siRNA sense strand
aggacucgcugcaguacaa

SEQ ID NO: 1555645 - RNA, 19 nt, Homo sapiens
  misc_RNA (1)...(19): siRNA sense strand
ccuuauugcugacccuuuc

SEQ ID NO: 1555646 - RNA, 19 nt, Homo sapiens
  misc_RNA (1)...(19): siRNA sense strand
acagaucaauuggaaugga

SEQ ID NO: 1555647 - RNA, 19 nt, Homo sapiens
  misc_RNA (1)...(19): siRNA sense strand
gcuuuuaccuucuauaucu

SEQ ID NO: 1555648 - RNA, 19 nt, Homo sapiens
  misc_RNA (1)...(19): siRNA sense strand
ucauggccaucaucaaucu

SEQ ID NO: 1555649 - RNA, 19 nt, Homo sapiens
  misc_RNA (1)...(19): siRNA sense strand
gggcaggaguuggcgagau

SEQ ID NO: 1555650 - RNA, 19 nt, Homo sapiens
  misc_RNA (1)...(19): siRNA sense strand
uacaaaggcugugcaacca

SEQ ID NO: 1555651 - RNA, 19 nt, Homo sapiens
  misc_RNA (1)...(19): siRNA sense strand
ccaaaggaagaaccucaga

SEQ ID NO: 1555652 - RNA, 19 nt, Homo sapiens
  misc_RNA (1)...(19): siRNA sense strand
ggugcuggccucagucaug

SEQ ID NO: 1555653 - RNA, 19 nt, Homo sapiens
  misc_RNA (1)...(19): siRNA sense strand
ggucuguggcgugaucuuu

SEQ ID NO: 1555654 - RNA, 19 nt, Homo sapiens
  misc_RNA (1)...(19): siRNA sense strand
gagacacagccuccugaga

SEQ ID NO: 1555655 - RNA, 19 nt, Homo sapiens
  misc_RNA (1)...(19): siRNA sense strand
ugaugcugcuguccaagga

SEQ ID NO: 1555656 - RNA, 19 nt, Homo sapiens
  misc_RNA (1)...(19): siRNA sense strand
gccaacaugcagcugguaa

SEQ ID NO: 1555657 - RNA, 19 nt, Homo sapiens
  misc_RNA (1)...(19): siRNA sense strand
gccaauagcacggccaaca

SEQ ID NO: 1555658 - RNA, 19 nt, Homo sapiens
  misc_RNA (1)...(19): siRNA sense strand
ggcgugaucuuugguuguc

SEQ ID NO: 1555659 - RNA, 19 nt, Homo sapiens
  misc_RNA (1)...(19): siRNA sense strand
agucacaccuagggcauga

SEQ ID NO: 1555660 - RNA, 19 nt, Homo sapiens
  misc_RNA (1)...(19): siRNA sense strand
ggccaccuguuccaugucu

SEQ ID NO: 1555661 - RNA, 19 nt, Homo sapiens
  misc_RNA (1)...(19): siRNA sense strand
cuacuggagcgucuucuuc

SEQ ID NO: 1555662 - RNA, 19 nt, Homo sapiens
  misc_RNA (1)...(19): siRNA sense strand
cggaggacucgcugcagua

SEQ ID NO: 1555663 - RNA, 19 nt, Homo sapiens
  misc_RNA (1)...(19): siRNA sense strand
acccaagacagaucaauug

SEQ ID NO: 1555664 - RNA, 19 nt, Homo sapiens
  misc_RNA (1)...(19): siRNA sense strand
ggagcgucuucuucagcuu

SEQ ID NO: 1555665 - RNA, 19 nt, Homo sapiens
  misc_RNA (1)...(19): siRNA sense strand
uccaggugcuccauuucuu

SEQ ID NO: 1555666 - RNA, 19 nt, Homo sapiens
  misc_RNA (1)...(19): siRNA sense strand
uacccaagacagaucaauu

SEQ ID NO: 1555667 - RNA, 19 nt, Homo sapiens
  misc_RNA (1)...(19): siRNA sense strand
gaucuccugggucuucuuc

SEQ ID NO: 1555668 - RNA, 19 nt, Homo sapiens
  misc_RNA (1)...(19): siRNA sense strand
gcagcaccuuucccagcau

SEQ ID NO: 1555669 - RNA, 19 nt, Homo sapiens
  misc_RNA (1)...(19): siRNA sense strand
uccuaugccuucuggauca

SEQ ID NO: 1555670 - RNA, 19 nt, Homo sapiens
  misc_RNA (1)...(19): siRNA sense strand
ugucugaggccaacugcuu

SEQ ID NO: 1555671 - RNA, 19 nt, Homo sapiens
  misc_RNA (1)...(19): siRNA sense strand
ccuauuccgccuucgugua

SEQ ID NO: 1555672 - RNA, 19 nt, Homo sapiens
  misc_RNA (1)...(19): siRNA sense strand
caggaaagauccagaaauu

SEQ ID NO: 1555673 - RNA, 19 nt, Homo sapiens
  misc_RNA (1)...(19): siRNA sense strand
gauaaaagcuuucugcaaa

SEQ ID NO: 1555674 - RNA, 19 nt, Homo sapiens
  misc_RNA (1)...(19): siRNA sense strand
ggaaagauccagaaauuca

SEQ ID NO: 1555675 - RNA, 19 nt, Homo sapiens
  misc_RNA (1)...(19): siRNA sense strand
gaaagcgugggcagaauua

SEQ ID NO: 1555676 - RNA, 19 nt, Homo sapiens
  misc_RNA (1)...(19): siRNA sense strand
gucaacaacuccaacauuu

SEQ ID NO: 1555677 - RNA, 19 nt, Homo sapiens
  misc_RNA (1)...(19): siRNA sense strand
ggagaugucgccacaauga

SEQ ID NO: 1555678 - RNA, 19 nt, Homo sapiens
  misc_RNA (1)...(19): siRNA sense strand
ggaccuaacuccuaugcau

SEQ ID NO: 1555679 - RNA, 19 nt, Homo sapiens
  misc_RNA (1)...(19): siRNA sense strand
cgaaguacaucguguuugu

SEQ ID NO: 1555680 - RNA, 19 nt, Homo sapiens
  misc_RNA (1)...(19): siRNA sense strand
ccgcagagcucgaggacuu

SEQ ID NO: 1555681 - RNA, 19 nt, Homo sapiens
  misc_RNA (1)...(19): siRNA sense strand
ggaacgacaucuaaaucug

SEQ ID NO: 1555682 - RNA, 19 nt, Homo sapiens
  misc_RNA (1)...(19): siRNA sense strand
gcaaagggaagaucucuca

SEQ ID NO: 1555683 - RNA, 19 nt, Homo sapiens
  misc_RNA (1)...(19): siRNA sense strand
ggacccugcuccuggauga

SEQ ID NO: 1555684 - RNA, 19 nt, Homo sapiens
  misc_RNA (1)...(19): siRNA sense strand
ccagagcaguugcggauga

SEQ ID NO: 1555685 - RNA, 19 nt, Homo sapiens
  misc_RNA (1)...(19): siRNA sense strand
caacaacuccaacauuuua

SEQ ID NO: 1555686 - RNA, 19 nt, Homo sapiens
  misc_RNA (1)...(19): siRNA sense strand
acaaugaugugucugaugu

SEQ ID NO: 1555687 - RNA, 19 nt, Homo sapiens
  misc_RNA (1)...(19): siRNA sense strand
gcagaaagcgugggcagaa

SEQ ID NO: 1555688 - RNA, 19 nt, Homo sapiens
  misc_RNA (1)...(19): siRNA sense strand
cuauggaacuggaguaugu

SEQ ID NO: 1555689 - RNA, 19 nt, Homo sapiens
  misc_RNA (1)...(19): siRNA sense strand
gaacgacaucuaaaucugu

SEQ ID NO: 1555690 - RNA, 19 nt, Homo sapiens
  misc_RNA (1)...(19): siRNA sense strand
gagaggcaccuuccuguau

SEQ ID NO: 1555691 - RNA, 19 nt, Homo sapiens
  misc_RNA (1)...(19): siRNA sense strand
gaagacaccagagcaguug

SEQ ID NO: 1555692 - RNA, 19 nt, Homo sapiens
  misc_RNA (1)...(19): siRNA sense strand
gaaagauccagaaauucaa

SEQ ID NO: 1555693 - RNA, 19 nt, Homo sapiens
  misc_RNA (1)...(19): siRNA sense strand
uggaguauguccucaagaa

SEQ ID NO: 1555694 - RNA, 19 nt, Homo sapiens
  misc_RNA (1)...(19): siRNA sense strand
gaaacugcaugagaagaca

SEQ ID NO: 1555695 - RNA, 19 nt, Homo sapiens
  misc_RNA (1)...(19): siRNA sense strand
gaacagucccgugacauuc

SEQ ID NO: 1555696 - RNA, 19 nt, Homo sapiens
  misc_RNA (1)...(19): siRNA sense strand
caggagaugucgccacaau

SEQ ID NO: 1555697 - RNA, 19 nt, Homo sapiens
  misc_RNA (1)...(19): siRNA sense strand
gguguccgcuuccucaguu

SEQ ID NO: 1555698 - RNA, 19 nt, Homo sapiens
  misc_RNA (1)...(19): siRNA sense strand
agccagacuucuccaguua

SEQ ID NO: 1555699 - RNA, 19 nt, Homo sapiens
  misc_RNA (1)...(19): siRNA sense strand
gccugaaacugcaugagaa

SEQ ID NO: 1555700 - RNA, 19 nt, Homo sapiens
  misc_RNA (1)...(19): siRNA sense strand
gagcauuggccucugcaaa

SEQ ID NO: 1555701 - RNA, 19 nt, Homo sapiens
  misc_RNA (1)...(19): siRNA sense strand
ucaagacccagcaauacua

SEQ ID NO: 1555702 - RNA, 19 nt, Homo sapiens
  misc_RNA (1)...(19): siRNA sense strand
ucaagaaggugggcugcaa

SEQ ID NO: 1555703 - RNA, 19 nt, Homo sapiens
  misc_RNA (1)...(19): siRNA sense strand
gcacagagggucccagaac

SEQ ID NO: 1555704 - RNA, 19 nt, Homo sapiens
  misc_RNA (1)...(19): siRNA sense strand
cagccagacuucuccaguu

SEQ ID NO: 1555705 - RNA, 19 nt, Homo sapiens
  misc_RNA (1)...(19): siRNA sense strand
gaucaggacaagugguauu

SEQ ID NO: 1555706 - RNA, 19 nt, Homo sapiens
  misc_RNA (1)...(19): siRNA sense strand
ccagacuucuccaguuaug

SEQ ID NO: 1555707 - RNA, 19 nt, Homo sapiens
  misc_RNA (1)...(19): siRNA sense strand
gcacuucccugaggacacu

SEQ ID NO: 1555708 - RNA, 19 nt, Homo sapiens
  misc_RNA (1)...(19): siRNA sense strand
caggacaagugguauugga

SEQ ID NO: 1555709 - RNA, 19 nt, Homo sapiens
  misc_RNA (1)...(19): siRNA sense strand
aagggaagaucucucacuu

SEQ ID NO: 1555710 - RNA, 19 nt, Homo sapiens
  misc_RNA (1)...(19): siRNA sense strand
gcaucauucuggugucugu

SEQ ID NO: 1555711 - RNA, 19 nt, Homo sapiens
  misc_RNA (1)...(19): siRNA sense strand
guuaugacaucucgaccau

SEQ ID NO: 1555712 - RNA, 19 nt, Homo sapiens
  misc_RNA (1)...(19): siRNA sense strand
gagccaucaucaacaagau

SEQ ID NO: 1555713 - RNA, 19 nt, Homo sapiens
  misc_RNA (1)...(19): siRNA sense strand
ucccagaucugaccacagu

SEQ ID NO: 1555714 - RNA, 19 nt, Homo sapiens
  misc_RNA (1)...(19): siRNA sense strand
agaggcaccuuccuguaug

SEQ ID NO: 1555715 - RNA, 19 nt, Homo sapiens
  misc_RNA (1)...(19): siRNA sense strand
guacaucguguuugucaca

SEQ ID NO: 1555716 - RNA, 19 nt, Homo sapiens
  misc_RNA (1)...(19): siRNA sense strand
gccaucaucaacaagauaa

SEQ ID NO: 1555717 - RNA, 19 nt, Homo sapiens
  misc_RNA (1)...(19): siRNA sense strand
aaaagcaucuuaacagcaa

SEQ ID NO: 1555718 - RNA, 19 nt, Homo sapiens
  misc_RNA (1)...(19): siRNA sense strand
gcauuggccucugcaaagg

SEQ ID NO: 1555719 - RNA, 19 nt, Homo sapiens
  misc_RNA (1)...(19): siRNA sense strand
agagauuugugccugcauu

SEQ ID NO: 1555720 - RNA, 19 nt, Homo sapiens
  misc_RNA (1)...(19): siRNA sense strand
gucagaggcucccagaucu

SEQ ID NO: 1555721 - RNA, 19 nt, Homo sapiens
  misc_RNA (1)...(19): siRNA sense strand
guucaggggugcaccaaaa

SEQ ID NO: 1555722 - RNA, 19 nt, Homo sapiens
  misc_RNA (1)...(19): siRNA sense strand
cagaaagcgugggcagaau

SEQ ID NO: 1555723 - RNA, 19 nt, Homo sapiens
  misc_RNA (1)...(19): siRNA sense strand
ugucaacaacuccaacauu

SEQ ID NO: 1555724 - RNA, 19 nt, Homo sapiens
  misc_RNA (1)...(19): siRNA sense strand
gcucuaaggauaugaucau

SEQ ID NO: 1555725 - RNA, 19 nt, Homo sapiens
  misc_RNA (1)...(19): siRNA sense strand
agagaacagucccgugaca

SEQ ID NO: 1555726 - RNA, 19 nt, Homo sapiens
  misc_RNA (1)...(19): siRNA sense strand
gauccgagccaucaucaac

SEQ ID NO: 1555727 - RNA, 19 nt, Homo sapiens
  misc_RNA (1)...(19): siRNA sense strand
caugaagacgucagguuga

SEQ ID NO: 1555728 - RNA, 19 nt, Homo sapiens
  misc_RNA (1)...(19): siRNA sense strand
auccagaaauucaaacuuc

SEQ ID NO: 1555729 - RNA, 19 nt, Homo sapiens
  misc_RNA (1)...(19): siRNA sense strand
gauccagaaauucaaacuu

SEQ ID NO: 1555730 - RNA, 19 nt, Homo sapiens
  misc_RNA (1)...(19): siRNA sense strand
ucaaggaggagguggacaa

SEQ ID NO: 1555731 - RNA, 19 nt, Homo sapiens
  misc_RNA (1)...(19): siRNA sense strand
agaacagucccgugacauu

SEQ ID NO: 1555732 - RNA, 19 nt, Homo sapiens
  misc_RNA (1)...(19): siRNA sense strand
agaaagcgugggcagaauu

SEQ ID NO: 1555733 - RNA, 19 nt, Homo sapiens
  misc_RNA (1)...(19): siRNA sense strand
gagaugucgccacaaugaa

SEQ ID NO: 1555734 - RNA, 19 nt, Homo sapiens
  misc_RNA (1)...(19): siRNA sense strand
cagggacgcuggcaaagcu

SEQ ID NO: 1555735 - RNA, 19 nt, Homo sapiens
  misc_RNA (1)...(19): siRNA sense strand
gcaauucaagacccagcaa

SEQ ID NO: 1555736 - RNA, 19 nt, Homo sapiens
  misc_RNA (1)...(19): siRNA sense strand
caaggaggagguggacaaa

SEQ ID NO: 1555737 - RNA, 19 nt, Homo sapiens
  misc_RNA (1)...(19): siRNA sense strand
aauucaagacccagcaaua

SEQ ID NO: 1555738 - RNA, 19 nt, Homo sapiens
  misc_RNA (1)...(19): siRNA sense strand
gaccuuugcccaacucaag

SEQ ID NO: 1555739 - RNA, 19 nt, Homo sapiens
  misc_RNA (1)...(19): siRNA sense strand
ggaccuggugguugcuuau

SEQ ID NO: 1555740 - RNA, 19 nt, Homo sapiens
  misc_RNA (1)...(19): siRNA sense strand
uaggagagcgccugaaacu

SEQ ID NO: 1555741 - RNA, 19 nt, Homo sapiens
  misc_RNA (1)...(19): siRNA sense strand
gaugucgccacaaugaaug

SEQ ID NO: 1555742 - RNA, 19 nt, Homo sapiens
  misc_RNA (1)...(19): siRNA sense strand
gcagagagagaggcaccuu

SEQ ID NO: 1555743 - RNA, 19 nt, Homo sapiens
  misc_RNA (1)...(19): siRNA sense strand
agaagacaccagagcaguu

SEQ ID NO: 1555744 - RNA, 19 nt, Homo sapiens
  misc_RNA (1)...(19): siRNA sense strand
ucaggaaagauccagaaau

SEQ ID NO: 1555745 - RNA, 19 nt, Homo sapiens
  misc_RNA (1)...(19): siRNA sense strand
gcuuauggaaccacagaga

SEQ ID NO: 1555746 - RNA, 19 nt, Homo sapiens
  misc_RNA (1)...(19): siRNA sense strand
gaggcaccuuccuguaugg

SEQ ID NO: 1555747 - RNA, 19 nt, Homo sapiens
  misc_RNA (1)...(19): siRNA sense strand
agagaggcaccuuccugua

SEQ ID NO: 1555748 - RNA, 19 nt, Homo sapiens
  misc_RNA (1)...(19): siRNA sense strand
ucaagauuccgaaguacau

SEQ ID NO: 1555749 - RNA, 19 nt, Homo sapiens
  misc_RNA (1)...(19): siRNA sense strand
ccaauacaaccagcaguuc

SEQ ID NO: 1555750 - RNA, 19 nt, Homo sapiens
  misc_RNA (1)...(19): siRNA sense strand
uggaggagauaaaagcuuu

SEQ ID NO: 1555751 - RNA, 19 nt, Homo sapiens
  misc_RNA (1)...(19): siRNA sense strand
uggaucaggacaaguggua

SEQ ID NO: 1555752 - RNA, 19 nt, Homo sapiens
  misc_RNA (1)...(19): siRNA sense strand
cagaggaagcaguggauca

SEQ ID NO: 1555753 - RNA, 19 nt, Homo sapiens
  misc_RNA (1)...(19): siRNA sense strand
gggcaucauucuggugucu

SEQ ID NO: 1555754 - RNA, 19 nt, Homo sapiens
  misc_RNA (1)...(19): siRNA sense strand
caaugaugugucugaugua

SEQ ID NO: 1555755 - RNA, 19 nt, Homo sapiens
  misc_RNA (1)...(19): siRNA sense strand
acaacguccugaagcagau

SEQ ID NO: 1555756 - RNA, 19 nt, Homo sapiens
  misc_RNA (1)...(19): siRNA sense strand
gagauuugugccugcauuc

SEQ ID NO: 1555757 - RNA, 19 nt, Homo sapiens
  misc_RNA (1)...(19): siRNA sense strand
ggaguauguccucaagaag

SEQ ID NO: 1555758 - RNA, 19 nt, Homo sapiens
  misc_RNA (1)...(19): siRNA sense strand
cgagccaucaucaacaaga

SEQ ID NO: 1555759 - RNA, 19 nt, Homo sapiens
  misc_RNA (1)...(19): siRNA sense strand
ccuggccucucccaucuuc

SEQ ID NO: 1555760 - RNA, 19 nt, Homo sapiens
  misc_RNA (1)...(19): siRNA sense strand
gaggccaucagcagagaga

SEQ ID NO: 1555761 - RNA, 19 nt, Homo sapiens
  misc_RNA (1)...(19): siRNA sense strand
ccagaaauucaaacuucga

SEQ ID NO: 1555762 - RNA, 19 nt, Homo sapiens
  misc_RNA (1)...(19): siRNA sense strand
aggaggagguggacaaagc

SEQ ID NO: 1555763 - RNA, 19 nt, Homo sapiens
  misc_RNA (1)...(19): siRNA sense strand
ccuggugguugcuuaugga

SEQ ID NO: 1555764 - RNA, 19 nt, Homo sapiens
  misc_RNA (1)...(19): siRNA sense strand
uccgagccaucaucaacaa

SEQ ID NO: 1555765 - RNA, 19 nt, Homo sapiens
  misc_RNA (1)...(19): siRNA sense strand
cuaccaggcuauggaacug

SEQ ID NO: 1555766 - RNA, 19 nt, Homo sapiens
  misc_RNA (1)...(19): siRNA sense strand
agucagaggcucccagauc

SEQ ID NO: 1555767 - RNA, 19 nt, Homo sapiens
  misc_RNA (1)...(19): siRNA sense strand
cucgaggacuucuuucaca

SEQ ID NO: 1555768 - RNA, 19 nt, Homo sapiens
  misc_RNA (1)...(19): siRNA sense strand
agagcucgaggacuucuuu

SEQ ID NO: 1555769 - RNA, 19 nt, Homo sapiens
  misc_RNA (1)...(19): siRNA sense strand
ugaaugagcagggcuucug

SEQ ID NO: 1555770 - RNA, 19 nt, Homo sapiens
  misc_RNA (1)...(19): siRNA sense strand
gcacagagguugucuucua

SEQ ID NO: 1555771 - RNA, 19 nt, Homo sapiens
  misc_RNA (1)...(19): siRNA sense strand
acacaaauaugguggauua

SEQ ID NO: 1555772 - RNA, 19 nt, Homo sapiens
  misc_RNA (1)...(19): siRNA sense strand
gagcaguucucaauucaua

SEQ ID NO: 1555773 - RNA, 19 nt, Homo sapiens
  misc_RNA (1)...(19): siRNA sense strand
ggaguaagcuacccaagaa

SEQ ID NO: 1555774 - RNA, 19 nt, Homo sapiens
  misc_RNA (1)...(19): siRNA sense strand
caaaccaacuacagaauaa

SEQ ID NO: 1555775 - RNA, 19 nt, Homo sapiens
  misc_RNA (1)...(19): siRNA sense strand
gaagauguuuggcuuggua

SEQ ID NO: 1555776 - RNA, 19 nt, Homo sapiens
  misc_RNA (1)...(19): siRNA sense strand
ggagagagguuguagaaca

SEQ ID NO: 1555777 - RNA, 19 nt, Homo sapiens
  misc_RNA (1)...(19): siRNA sense strand
gauaacagaucgagcaguu

SEQ ID NO: 1555778 - RNA, 19 nt, Homo sapiens
  misc_RNA (1)...(19): siRNA sense strand
gcaagaauuuguaaccauu

SEQ ID NO: 1555779 - RNA, 19 nt, Homo sapiens
  misc_RNA (1)...(19): siRNA sense strand
gaaggacgcguuuggcuua

SEQ ID NO: 1555780 - RNA, 19 nt, Homo sapiens
  misc_RNA (1)...(19): siRNA sense strand
uaagaagccuggacaagaa

SEQ ID NO: 1555781 - RNA, 19 nt, Homo sapiens
  misc_RNA (1)...(19): siRNA sense strand
gaagaggaaguacuugaua

SEQ ID NO: 1555782 - RNA, 19 nt, Homo sapiens
  misc_RNA (1)...(19): siRNA sense strand
caaccagcaucauaccuua

SEQ ID NO: 1555783 - RNA, 19 nt, Homo sapiens
  misc_RNA (1)...(19): siRNA sense strand
gacaggauguuuguuauuu

SEQ ID NO: 1555784 - RNA, 19 nt, Homo sapiens
  misc_RNA (1)...(19): siRNA sense strand
gagaacucauccugcauua

SEQ ID NO: 1555785 - RNA, 19 nt, Homo sapiens
  misc_RNA (1)...(19): siRNA sense strand
agacaaauguguugacuug

SEQ ID NO: 1555786 - RNA, 19 nt, Homo sapiens
  misc_RNA (1)...(19): siRNA sense strand
cgaaauacauugacuacug

SEQ ID NO: 1555787 - RNA, 19 nt, Homo sapiens
  misc_RNA (1)...(19): siRNA sense strand
ugaaacaguuccuccagua

SEQ ID NO: 1555788 - RNA, 19 nt, Homo sapiens
  misc_RNA (1)...(19): siRNA sense strand
gaaugugaaugguuaccua

SEQ ID NO: 1555789 - RNA, 19 nt, Homo sapiens
  misc_RNA (1)...(19): siRNA sense strand
gagggcacauguucagaua

SEQ ID NO: 1555790 - RNA, 19 nt, Homo sapiens
  misc_RNA (1)...(19): siRNA sense strand
caauucauauggugacuuu

SEQ ID NO: 1555791 - RNA, 19 nt, Homo sapiens
  misc_RNA (1)...(19): siRNA sense strand
gcccugaacuggagaaaga

SEQ ID NO: 1555792 - RNA, 19 nt, Homo sapiens
  misc_RNA (1)...(19): siRNA sense strand
gaagauccuuacaugaaga

SEQ ID NO: 1555793 - RNA, 19 nt, Homo sapiens
  misc_RNA (1)...(19): siRNA sense strand
cauauuaucucggugauga

SEQ ID NO: 1555794 - RNA, 19 nt, Homo sapiens
  misc_RNA (1)...(19): siRNA sense strand
ggccggacauucaagauuu

SEQ ID NO: 1555795 - RNA, 19 nt, Homo sapiens
  misc_RNA (1)...(19): siRNA sense strand
gaguauaccuuaaacuaca

SEQ ID NO: 1555796 - RNA, 19 nt, Homo sapiens
  misc_RNA (1)...(19): siRNA sense strand
uaaaggagauggaagugau

SEQ ID NO: 1555797 - RNA, 19 nt, Homo sapiens
  misc_RNA (1)...(19): siRNA sense strand
uaaacuacauggagcagaa

SEQ ID NO: 1555798 - RNA, 19 nt, Homo sapiens
  misc_RNA (1)...(19): siRNA sense strand
ggacauucaagauuuauga

SEQ ID NO: 1555799 - RNA, 19 nt, Homo sapiens
  misc_RNA (1)...(19): siRNA sense strand
aaagagagaugugaagaug

SEQ ID NO: 1555800 - RNA, 19 nt, Homo sapiens
  misc_RNA (1)...(19): siRNA sense strand
gugaugaucuucuagaauc

SEQ ID NO: 1555801 - RNA, 19 nt, Homo sapiens
  misc_RNA (1)...(19): siRNA sense strand
cagaagauccuuacaugaa

SEQ ID NO: 1555802 - RNA, 19 nt, Homo sapiens
  misc_RNA (1)...(19): siRNA sense strand
guucagauauggauuucuu

SEQ ID NO: 1555803 - RNA, 19 nt, Homo sapiens
  misc_RNA (1)...(19): siRNA sense strand
caucauggguagccuuuga

SEQ ID NO: 1555804 - RNA, 19 nt, Homo sapiens
  misc_RNA (1)...(19): siRNA sense strand
gggcacauguucagauaug

SEQ ID NO: 1555805 - RNA, 19 nt, Homo sapiens
  misc_RNA (1)...(19): siRNA sense strand
gaaaagaagucgcguuaag

SEQ ID NO: 1555806 - RNA, 19 nt, Homo sapiens
  misc_RNA (1)...(19): siRNA sense strand
gguaugccaucaccuauuc

SEQ ID NO: 1555807 - RNA, 19 nt, Homo sapiens
  misc_RNA (1)...(19): siRNA sense strand
ccaaaccaacuacagaaua

SEQ ID NO: 1555808 - RNA, 19 nt, Homo sapiens
  misc_RNA (1)...(19): siRNA sense strand
agagagaugugaagauguu

SEQ ID NO: 1555809 - RNA, 19 nt, Homo sapiens
  misc_RNA (1)...(19): siRNA sense strand
gaagaugacacaauucaag

SEQ ID NO: 1555810 - RNA, 19 nt, Homo sapiens
  misc_RNA (1)...(19): siRNA sense strand
aagaggaaguacuugauaa

SEQ ID NO: 1555811 - RNA, 19 nt, Homo sapiens
  misc_RNA (1)...(19): siRNA sense strand
gaauuucgacacuuucauu

SEQ ID NO: 1555812 - RNA, 19 nt, Homo sapiens
  misc_RNA (1)...(19): siRNA sense strand
gcugaugaguauaccuuaa

SEQ ID NO: 1555813 - RNA, 19 nt, Homo sapiens
  misc_RNA (1)...(19): siRNA sense strand
ugugaaugguuaccuauuu

SEQ ID NO: 1555814 - RNA, 19 nt, Homo sapiens
  misc_RNA (1)...(19): siRNA sense strand
gaugacacaauucaaguaa

SEQ ID NO: 1555815 - RNA, 19 nt, Homo sapiens
  misc_RNA (1)...(19): siRNA sense strand
gaacucauccugcauuacu

SEQ ID NO: 1555816 - RNA, 19 nt, Homo sapiens
  misc_RNA (1)...(19): siRNA sense strand
gcagagcaagaauuuguaa

SEQ ID NO: 1555817 - RNA, 19 nt, Homo sapiens
  misc_RNA (1)...(19): siRNA sense strand
gaaccuauagagaggaauu

SEQ ID NO: 1555818 - RNA, 19 nt, Homo sapiens
  misc_RNA (1)...(19): siRNA sense strand
ggacaggauguuuguuauu

SEQ ID NO: 1555819 - RNA, 19 nt, Homo sapiens
  misc_RNA (1)...(19): siRNA sense strand
gagugaugaucuucuagaa

SEQ ID NO: 1555820 - RNA, 19 nt, Homo sapiens
  misc_RNA (1)...(19): siRNA sense strand
gccggacauucaagauuua

SEQ ID NO: 1555821 - RNA, 19 nt, Homo sapiens
  misc_RNA (1)...(19): siRNA sense strand
ccgaggagcuguacauugg

SEQ ID NO: 1555822 - RNA, 19 nt, Homo sapiens
  misc_RNA (1)...(19): siRNA sense strand
agacagcuauggcuccaaa

SEQ ID NO: 1555823 - RNA, 19 nt, Homo sapiens
  misc_RNA (1)...(19): siRNA sense strand
gaaaauaggggucaaagug

SEQ ID NO: 1555824 - RNA, 19 nt, Homo sapiens
  misc_RNA (1)...(19): siRNA sense strand
gccuaaauguagcauauau

SEQ ID NO: 1555825 - RNA, 19 nt, Homo sapiens
  misc_RNA (1)...(19): siRNA sense strand
cggugaaugugaaugguua

SEQ ID NO: 1555826 - RNA, 19 nt, Homo sapiens
  misc_RNA (1)...(19): siRNA sense strand
acaaauguguugacuugga

SEQ ID NO: 1555827 - RNA, 19 nt, Homo sapiens
  misc_RNA (1)...(19): siRNA sense strand
agauaaagccuaaauguag

SEQ ID NO: 1555828 - RNA, 19 nt, Homo sapiens
  misc_RNA (1)...(19): siRNA sense strand
uaaaugaaccagaggugaa

SEQ ID NO: 1555829 - RNA, 19 nt, Homo sapiens
  misc_RNA (1)...(19): siRNA sense strand
aaagcaauauacuccguuu

SEQ ID NO: 1555830 - RNA, 19 nt, Homo sapiens
  misc_RNA (1)...(19): siRNA sense strand
gcccuuacgucccuacgaa

SEQ ID NO: 1555831 - RNA, 19 nt, Homo sapiens
  misc_RNA (1)...(19): siRNA sense strand
aaggagaaguuucacaaau

SEQ ID NO: 1555832 - RNA, 19 nt, Homo sapiens
  misc_RNA (1)...(19): siRNA sense strand
gcacacaaauaugguggau

SEQ ID NO: 1555833 - RNA, 19 nt, Homo sapiens
  misc_RNA (1)...(19): siRNA sense strand
aaagaagucgcguuaagaa

SEQ ID NO: 1555834 - RNA, 19 nt, Homo sapiens
  misc_RNA (1)...(19): siRNA sense strand
gaaacaguuccuccaguau

SEQ ID NO: 1555835 - RNA, 19 nt, Homo sapiens
  misc_RNA (1)...(19): siRNA sense strand
ccagauuaccuuugaguga

SEQ ID NO: 1555836 - RNA, 19 nt, Homo sapiens
  misc_RNA (1)...(19): siRNA sense strand
uuaaagcugcugacucuaa

SEQ ID NO: 1555837 - RNA, 19 nt, Homo sapiens
  misc_RNA (1)...(19): siRNA sense strand
ccucaaacuugcccuacaa

SEQ ID NO: 1555838 - RNA, 19 nt, Homo sapiens
  misc_RNA (1)...(19): siRNA sense strand
ggagaaguuucacaaaucc

SEQ ID NO: 1555839 - RNA, 19 nt, Homo sapiens
  misc_RNA (1)...(19): siRNA sense strand
gcaaccagcaucauaccuu

SEQ ID NO: 1555840 - RNA, 19 nt, Homo sapiens
  misc_RNA (1)...(19): siRNA sense strand
gagcaagaauuuguaacca

SEQ ID NO: 1555841 - RNA, 19 nt, Homo sapiens
  misc_RNA (1)...(19): siRNA sense strand
gcucaagcagguauuuaaa

SEQ ID NO: 1555842 - RNA, 19 nt, Homo sapiens
  misc_RNA (1)...(19): siRNA sense strand
guaagcuacccaagaauug

SEQ ID NO: 1555843 - RNA, 19 nt, Homo sapiens
  misc_RNA (1)...(19): siRNA sense strand
cauccugcauuacuucuug

SEQ ID NO: 1555844 - RNA, 19 nt, Homo sapiens
  misc_RNA (1)...(19): siRNA sense strand
ccaacuacagaauaagaua

SEQ ID NO: 1555845 - RNA, 19 nt, Homo sapiens
  misc_RNA (1)...(19): siRNA sense strand
aagccuaaauguagcauau

SEQ ID NO: 1555846 - RNA, 19 nt, Homo sapiens
  misc_RNA (1)...(19): siRNA sense strand
acucuaagcacacaaauau

SEQ ID NO: 1555847 - RNA, 19 nt, Homo sapiens
  misc_RNA (1)...(19): siRNA sense strand
gugaaugguuaccuauuuc

SEQ ID NO: 1555848 - RNA, 19 nt, Homo sapiens
  misc_RNA (1)...(19): siRNA sense strand
ccaguaucauggcaagauu

SEQ ID NO: 1555849 - RNA, 19 nt, Homo sapiens
  misc_RNA (1)...(19): siRNA sense strand
ggaagaggaaguacuugau

SEQ ID NO: 1555850 - RNA, 19 nt, Homo sapiens
  misc_RNA (1)...(19): siRNA sense strand
gagcucaagcagguauuua

SEQ ID NO: 1555851 - RNA, 19 nt, Homo sapiens
  misc_RNA (1)...(19): siRNA sense strand
uacaaaagcugaagcaaga

SEQ ID NO: 1555852 - RNA, 19 nt, Homo sapiens
  misc_RNA (1)...(19): siRNA sense strand
caggauguuuguuauuuca

SEQ ID NO: 1555853 - RNA, 19 nt, Homo sapiens
  misc_RNA (1)...(19): siRNA sense strand
ggcaaaagauaaagccuaa

SEQ ID NO: 1555854 - RNA, 19 nt, Homo sapiens
  misc_RNA (1)...(19): siRNA sense strand
caagauuuaugacugugau

SEQ ID NO: 1555855 - RNA, 19 nt, Homo sapiens
  misc_RNA (1)...(19): siRNA sense strand
uggaauagguggagaacca

SEQ ID NO: 1555856 - RNA, 19 nt, Homo sapiens
  misc_RNA (1)...(19): siRNA sense strand
uuucacaaaucccaacauu

SEQ ID NO: 1555857 - RNA, 19 nt, Homo sapiens
  misc_RNA (1)...(19): siRNA sense strand
uugagaauuucgacacuuu

SEQ ID NO: 1555858 - RNA, 19 nt, Homo sapiens
  misc_RNA (1)...(19): siRNA sense strand
ggagucaccaucaaugugu

SEQ ID NO: 1555859 - RNA, 19 nt, Homo sapiens
  misc_RNA (1)...(19): siRNA sense strand
aaaaguagaccaagaguuu

SEQ ID NO: 1555860 - RNA, 19 nt, Homo sapiens
  misc_RNA (1)...(19): siRNA sense strand
gaucgagcaguucucaauu

SEQ ID NO: 1555861 - RNA, 19 nt, Homo sapiens
  misc_RNA (1)...(19): siRNA sense strand
uccagaagauccuuacaug

SEQ ID NO: 1555862 - RNA, 19 nt, Homo sapiens
  misc_RNA (1)...(19): siRNA sense strand
cacagagguugucuucuau

SEQ ID NO: 1555863 - RNA, 19 nt, Homo sapiens
  misc_RNA (1)...(19): siRNA sense strand
agaauccagugccugaauu

SEQ ID NO: 1555864 - RNA, 19 nt, Homo sapiens
  misc_RNA (1)...(19): siRNA sense strand
cagauuaccuuugagugau

SEQ ID NO: 1555865 - RNA, 19 nt, Homo sapiens
  misc_RNA (1)...(19): siRNA sense strand
gugaugaauuuacgaaguc

SEQ ID NO: 1555866 - RNA, 19 nt, Homo sapiens
  misc_RNA (1)...(19): siRNA sense strand
gauauaagcuaggaaaagu

SEQ ID NO: 1555867 - RNA, 19 nt, Homo sapiens
  misc_RNA (1)...(19): siRNA sense strand
gcuaccuguucgauagaua

SEQ ID NO: 1555868 - RNA, 19 nt, Homo sapiens
  misc_RNA (1)...(19): siRNA sense strand
ucuagaauccuuauuguca

SEQ ID NO: 1555869 - RNA, 19 nt, Homo sapiens
  misc_RNA (1)...(19): siRNA sense strand
uaaagcugcugacucuaag

SEQ ID NO: 1555870 - RNA, 19 nt, Homo sapiens
  misc_RNA (1)...(19): siRNA sense strand
gauagcagcuuuauucaca

SEQ ID NO: 1555871 - RNA, 19 nt, Homo sapiens
  misc_RNA (1)...(19): siRNA sense strand
ccacauaccucaaguccaa

SEQ ID NO: 1555872 - RNA, 19 nt, Homo sapiens
  misc_RNA (1)...(19): siRNA sense strand
cuaaggaacuguacauaau

SEQ ID NO: 1555873 - RNA, 19 nt, Homo sapiens
  misc_RNA (1)...(19): siRNA sense strand
gaaaacaacucugucaaaa

SEQ ID NO: 1555874 - RNA, 19 nt, Homo sapiens
  misc_RNA (1)...(19): siRNA sense strand
ccagauagcagcuuuauuc

SEQ ID NO: 1555875 - RNA, 19 nt, Homo sapiens
  misc_RNA (1)...(19): siRNA sense strand
caacuuggcugcuucacau

SEQ ID NO: 1555876 - RNA, 19 nt, Homo sapiens
  misc_RNA (1)...(19): siRNA sense strand
gagcauggcagcaauguga

SEQ ID NO: 1555877 - RNA, 19 nt, Homo sapiens
  misc_RNA (1)...(19): siRNA sense strand
ggacaguaccaaugcauaa

SEQ ID NO: 1555878 - RNA, 19 nt, Homo sapiens
  misc_RNA (1)...(19): siRNA sense strand
aauaaacacucacauccua

SEQ ID NO: 1555879 - RNA, 19 nt, Homo sapiens
  misc_RNA (1)...(19): siRNA sense strand
acaaguaccugacucugaa

SEQ ID NO: 1555880 - RNA, 19 nt, Homo sapiens
  misc_RNA (1)...(19): siRNA sense strand
caacaaagagggaagugaa

SEQ ID NO: 1555881 - RNA, 19 nt, Homo sapiens
  misc_RNA (1)...(19): siRNA sense strand
gaaggccucguuccacaua

SEQ ID NO: 1555882 - RNA, 19 nt, Homo sapiens
  misc_RNA (1)...(19): siRNA sense strand
gcagaaacuucagcugugu

SEQ ID NO: 1555883 - RNA, 19 nt, Homo sapiens
  misc_RNA (1)...(19): siRNA sense strand
uuucauagccacagugaua

SEQ ID NO: 1555884 - RNA, 19 nt, Homo sapiens
  misc_RNA (1)...(19): siRNA sense strand
gaaguauccuggccaaacg

SEQ ID NO: 1555885 - RNA, 19 nt, Homo sapiens
  misc_RNA (1)...(19): siRNA sense strand
ccuaaggaacuguacauaa

SEQ ID NO: 1555886 - RNA, 19 nt, Homo sapiens
  misc_RNA (1)...(19): siRNA sense strand
gaagugaacagugcuaucu

SEQ ID NO: 1555887 - RNA, 19 nt, Homo sapiens
  misc_RNA (1)...(19): siRNA sense strand
ccuaaagguuccagaaaca

SEQ ID NO: 1555888 - RNA, 19 nt, Homo sapiens
  misc_RNA (1)...(19): siRNA sense strand
gcaaugugacccuggaaug

SEQ ID NO: 1555889 - RNA, 19 nt, Homo sapiens
  misc_RNA (1)...(19): siRNA sense strand
gucaaaagcuguauucuuc

SEQ ID NO: 1555890 - RNA, 19 nt, Homo sapiens
  misc_RNA (1)...(19): siRNA sense strand
gaaggacaguaccaaugca

SEQ ID NO: 1555891 - RNA, 19 nt, Homo sapiens
  misc_RNA (1)...(19): siRNA sense strand
gagcaauaacagccaguuu

SEQ ID NO: 1555892 - RNA, 19 nt, Homo sapiens
  misc_RNA (1)...(19): siRNA sense strand
ugugaaccuuggagcaaua

SEQ ID NO: 1555893 - RNA, 19 nt, Homo sapiens
  misc_RNA (1)...(19): siRNA sense strand
gaaaauaaacacucacauc

SEQ ID NO: 1555894 - RNA, 19 nt, Homo sapiens
  misc_RNA (1)...(19): siRNA sense strand
caucauugcuuucauuuuc

SEQ ID NO: 1555895 - RNA, 19 nt, Homo sapiens
  misc_RNA (1)...(19): siRNA sense strand
gaaccuuggagcaauaaca

SEQ ID NO: 1555896 - RNA, 19 nt, Homo sapiens
  misc_RNA (1)...(19): siRNA sense strand
agaaacagaugagguagag

SEQ ID NO: 1555897 - RNA, 19 nt, Homo sapiens
  misc_RNA (1)...(19): siRNA sense strand
uaaacacucacauccuaaa

SEQ ID NO: 1555898 - RNA, 19 nt, Homo sapiens
  misc_RNA (1)...(19): siRNA sense strand
ggacgaaggacaguaccaa

SEQ ID NO: 1555899 - RNA, 19 nt, Homo sapiens
  misc_RNA (1)...(19): siRNA sense strand
ugcaaaagguggaaaauga

SEQ ID NO: 1555900 - RNA, 19 nt, Homo sapiens
  misc_RNA (1)...(19): siRNA sense strand
cugcaucauugcuuucauu

SEQ ID NO: 1555901 - RNA, 19 nt, Homo sapiens
  misc_RNA (1)...(19): siRNA sense strand
gaacccaggacccauccaa

SEQ ID NO: 1555902 - RNA, 19 nt, Homo sapiens
  misc_RNA (1)...(19): siRNA sense strand
caguaccaaugcauaauca

SEQ ID NO: 1555903 - RNA, 19 nt, Homo sapiens
  misc_RNA (1)...(19): siRNA sense strand
ggaaugcaacuuugacacu

SEQ ID NO: 1555904 - RNA, 19 nt, Homo sapiens
  misc_RNA (1)...(19): siRNA sense strand
agugaacagugcuaucuga

SEQ ID NO: 1555905 - RNA, 19 nt, Homo sapiens
  misc_RNA (1)...(19): siRNA sense strand
acacucacauccuaaaggu

SEQ ID NO: 1555906 - RNA, 19 nt, Homo sapiens
  misc_RNA (1)...(19): siRNA sense strand
aaggaacuguacauaauag

SEQ ID NO: 1555907 - RNA, 19 nt, Homo sapiens
  misc_RNA (1)...(19): siRNA sense strand
ccuccugcaucauugcuuu

SEQ ID NO: 1555908 - RNA, 19 nt, Homo sapiens
  misc_RNA (1)...(19): siRNA sense strand
aaacuucagcuguguguuc

SEQ ID NO: 1555909 - RNA, 19 nt, Homo sapiens
  misc_RNA (1)...(19): siRNA sense strand
gacccuggaaugcaacuuu

SEQ ID NO: 1555910 - RNA, 19 nt, Homo sapiens
  misc_RNA (1)...(19): siRNA sense strand
uaaagguuccagaaacaga

SEQ ID NO: 1555911 - RNA, 19 nt, Homo sapiens
  misc_RNA (1)...(19): siRNA sense strand
caaaagcuguauucuucaa

SEQ ID NO: 1555912 - RNA, 19 nt, Homo sapiens
  misc_RNA (1)...(19): siRNA sense strand
uaauagagcauggcagcaa

SEQ ID NO: 1555913 - RNA, 19 nt, Homo sapiens
  misc_RNA (1)...(19): siRNA sense strand
ccaggacccauccaacuug

SEQ ID NO: 1555914 - RNA, 19 nt, Homo sapiens
  misc_RNA (1)...(19): siRNA sense strand
ucagcuguguguucuggaa

SEQ ID NO: 1555915 - RNA, 19 nt, Homo sapiens
  misc_RNA (1)...(19): siRNA sense strand
aauaacagccaguuugcaa

SEQ ID NO: 1555916 - RNA, 19 nt, Homo sapiens
  misc_RNA (1)...(19): siRNA sense strand
caaaagguggaaaaugaua

SEQ ID NO: 1555917 - RNA, 19 nt, Homo sapiens
  misc_RNA (1)...(19): siRNA sense strand
ccacagugauagcccuaag

SEQ ID NO: 1555918 - RNA, 19 nt, Homo sapiens
  misc_RNA (1)...(19): siRNA sense strand
gacacuggaagucauguga

SEQ ID NO: 1555919 - RNA, 19 nt, Homo sapiens
  misc_RNA (1)...(19): siRNA sense strand
ccaguguucugcgccuaaa

SEQ ID NO: 1555920 - RNA, 19 nt, Homo sapiens
  misc_RNA (1)...(19): siRNA sense strand
guaccaaugcauaaucauc

SEQ ID NO: 1555921 - RNA, 19 nt, Homo sapiens
  misc_RNA (1)...(19): siRNA sense strand
aaacaacucugucaaaagc

SEQ ID NO: 1555922 - RNA, 19 nt, Homo sapiens
  misc_RNA (1)...(19): siRNA sense strand
uacaaguaccugacucuga

SEQ ID NO: 1555923 - RNA, 19 nt, Homo sapiens
  misc_RNA (1)...(19): siRNA sense strand
aauugcagcuucaccagau

SEQ ID NO: 1555924 - RNA, 19 nt, Homo sapiens
  misc_RNA (1)...(19): siRNA sense strand
ggaagugaacagugcuauc

SEQ ID NO: 1555925 - RNA, 19 nt, Homo sapiens
  misc_RNA (1)...(19): siRNA sense strand
acagugauagcccuaagaa

SEQ ID NO: 1555926 - RNA, 19 nt, Homo sapiens
  misc_RNA (1)...(19): siRNA sense strand
ggaacuguacauaauagag

SEQ ID NO: 1555927 - RNA, 19 nt, Homo sapiens
  misc_RNA (1)...(19): siRNA sense strand
uccagaaacagaugaggua

SEQ ID NO: 1555928 - RNA, 19 nt, Homo sapiens
  misc_RNA (1)...(19): siRNA sense strand
gaccugucaccacaacaaa

SEQ ID NO: 1555929 - RNA, 19 nt, Homo sapiens
  misc_RNA (1)...(19): siRNA sense strand
cgaaggacaguaccaaugc

SEQ ID NO: 1555930 - RNA, 19 nt, Homo sapiens
  misc_RNA (1)...(19): siRNA sense strand
aauagagcauggcagcaau

SEQ ID NO: 1555931 - RNA, 19 nt, Homo sapiens
  misc_RNA (1)...(19): siRNA sense strand
cagugacagucccuaagga

SEQ ID NO: 1555932 - RNA, 19 nt, Homo sapiens
  misc_RNA (1)...(19): siRNA sense strand
gaucuuccuccugcuaaug

SEQ ID NO: 1555933 - RNA, 19 nt, Homo sapiens
  misc_RNA (1)...(19): siRNA sense strand
ggacuacaaguaccugacu

SEQ ID NO: 1555934 - RNA, 19 nt, Homo sapiens
  misc_RNA (1)...(19): siRNA sense strand
accaaugcauaaucaucua

SEQ ID NO: 1555935 - RNA, 19 nt, Homo sapiens
  misc_RNA (1)...(19): siRNA sense strand
ccaagugagggacgaagga

SEQ ID NO: 1555936 - RNA, 19 nt, Homo sapiens
  misc_RNA (1)...(19): siRNA sense strand
aaagaccugucaccacaac

SEQ ID NO: 1555937 - RNA, 19 nt, Homo sapiens
  misc_RNA (1)...(19): siRNA sense strand
uagcagcuuuauucacagu

SEQ ID NO: 1555938 - RNA, 19 nt, Homo sapiens
  misc_RNA (1)...(19): siRNA sense strand
ucuaccaggucaccagugu

SEQ ID NO: 1555939 - RNA, 19 nt, Homo sapiens
  misc_RNA (1)...(19): siRNA sense strand
cagauagcagcuuuauuca

SEQ ID NO: 1555940 - RNA, 19 nt, Homo sapiens
  misc_RNA (1)...(19): siRNA sense strand
cagaaacagaugagguaga

SEQ ID NO: 1555941 - RNA, 19 nt, Homo sapiens
  misc_RNA (1)...(19): siRNA sense strand
cauccuaaagguuccagaa

SEQ ID NO: 1555942 - RNA, 19 nt, Homo sapiens
  misc_RNA (1)...(19): siRNA sense strand
ucaccagauagcagcuuua

SEQ ID NO: 1555943 - RNA, 19 nt, Homo sapiens
  misc_RNA (1)...(19): siRNA sense strand
ggagcaauaacagccaguu

SEQ ID NO: 1555944 - RNA, 19 nt, Homo sapiens
  misc_RNA (1)...(19): siRNA sense strand
uaauguugagccuggaauu

SEQ ID NO: 1555945 - RNA, 19 nt, Homo sapiens
  misc_RNA (1)...(19): siRNA sense strand
ccaaugcauaaucaucuau

SEQ ID NO: 1555946 - RNA, 19 nt, Homo sapiens
  misc_RNA (1)...(19): siRNA sense strand
gacaguaccaaugcauaau

SEQ ID NO: 1555947 - RNA, 19 nt, Homo sapiens
  misc_RNA (1)...(19): siRNA sense strand
gacgaaggacaguaccaau

SEQ ID NO: 1555948 - RNA, 19 nt, Homo sapiens
  misc_RNA (1)...(19): siRNA sense strand
uaacagccaguuugcaaaa

SEQ ID NO: 1555949 - RNA, 19 nt, Homo sapiens
  misc_RNA (1)...(19): siRNA sense strand
caugugaaccuuggagcaa

SEQ ID NO: 1555950 - RNA, 19 nt, Homo sapiens
  misc_RNA (1)...(19): siRNA sense strand
ccugucaccacaacaaaga

SEQ ID NO: 1555951 - RNA, 19 nt, Homo sapiens
  misc_RNA (1)...(19): siRNA sense strand
cugccaggcuacagguuau

SEQ ID NO: 1555952 - RNA, 19 nt, Homo sapiens
  misc_RNA (1)...(19): siRNA sense strand
caaguaccugacucugaaa

SEQ ID NO: 1555953 - RNA, 19 nt, Homo sapiens
  misc_RNA (1)...(19): siRNA sense strand
ggauauggauucucaauuc

SEQ ID NO: 1555954 - RNA, 19 nt, Homo sapiens
  misc_RNA (1)...(19): siRNA sense strand
uaucagaggucauaagaag

SEQ ID NO: 1555955 - RNA, 19 nt, Homo sapiens
  misc_RNA (1)...(19): siRNA sense strand
gauaucagaggucauaaga

SEQ ID NO: 1555956 - RNA, 19 nt, Homo sapiens
  misc_RNA (1)...(19): siRNA sense strand
gauauggauucucaauucu

SEQ ID NO: 1555957 - RNA, 19 nt, Homo sapiens
  misc_RNA (1)...(19): siRNA sense strand
caauucuacugaaauccua

SEQ ID NO: 1555958 - RNA, 19 nt, Homo sapiens
  misc_RNA (1)...(19): siRNA sense strand
gguuauggcuguggcuuug

SEQ ID NO: 1555959 - RNA, 19 nt, Homo sapiens
  misc_RNA (1)...(19): siRNA sense strand
gcuacuauggcagcuauua

SEQ ID NO: 1555960 - RNA, 19 nt, Homo sapiens
  misc_RNA (1)...(19): siRNA sense strand
uggaggauauggauucuca

SEQ ID NO: 1555961 - RNA, 19 nt, Homo sapiens
  misc_RNA (1)...(19): siRNA sense strand
ggucauaagaagaucauuc

SEQ ID NO: 1555962 - RNA, 19 nt, Homo sapiens
  misc_RNA (1)...(19): siRNA sense strand
gaggauauggauucucaau

SEQ ID NO: 1555963 - RNA, 19 nt, Homo sapiens
  misc_RNA (1)...(19): siRNA sense strand
ucucaauucuacugaaauc

SEQ ID NO: 1555964 - RNA, 19 nt, Homo sapiens
  misc_RNA (1)...(19): siRNA sense strand
gauucucaauucuacugaa

SEQ ID NO: 1555965 - RNA, 19 nt, Homo sapiens
  misc_RNA (1)...(19): siRNA sense strand
cacgauaucagaggucaua

SEQ ID NO: 1555966 - RNA, 19 nt, Homo sapiens
  misc_RNA (1)...(19): siRNA sense strand
ucagaggucauaagaagau

SEQ ID NO: 1555967 - RNA, 19 nt, Homo sapiens
  misc_RNA (1)...(19): siRNA sense strand
cuauggcuguggaggcuuu

SEQ ID NO: 1555968 - RNA, 19 nt, Homo sapiens
  misc_RNA (1)...(19): siRNA sense strand
gucauaagaagaucauuca

SEQ ID NO: 1555969 - RNA, 19 nt, Homo sapiens
  misc_RNA (1)...(19): siRNA sense strand
uauggauucucaauucuac

SEQ ID NO: 1555970 - RNA, 19 nt, Homo sapiens
  misc_RNA (1)...(19): siRNA sense strand
acagaggccugggcuaugg

SEQ ID NO: 1555971 - RNA, 19 nt, Homo sapiens
  misc_RNA (1)...(19): siRNA sense strand
ggcuauggcuguggaugug

SEQ ID NO: 1555972 - RNA, 19 nt, Homo sapiens
  misc_RNA (1)...(19): siRNA sense strand
ggccuaggcuauggcuaug

SEQ ID NO: 1555973 - RNA, 19 nt, Homo sapiens
  misc_RNA (1)...(19): siRNA sense strand
uuacagaggccugggcuau

SEQ ID NO: 1555974 - RNA, 19 nt, Homo sapiens
  misc_RNA (1)...(19): siRNA sense strand
cuauggaggauauggauuc

SEQ ID NO: 1555975 - RNA, 19 nt, Homo sapiens
  misc_RNA (1)...(19): siRNA sense strand
gagagggaguucaggauua

SEQ ID NO: 1555976 - RNA, 19 nt, Homo sapiens
  misc_RNA (1)...(19): siRNA sense strand
gcaaagcaguucccaguga

SEQ ID NO: 1555977 - RNA, 19 nt, Homo sapiens
  misc_RNA (1)...(19): siRNA sense strand
gagcaggacugaccaaugu

SEQ ID NO: 1555978 - RNA, 19 nt, Homo sapiens
  misc_RNA (1)...(19): siRNA sense strand
gagaacagccuuccugaaa

SEQ ID NO: 1555979 - RNA, 19 nt, Homo sapiens
  misc_RNA (1)...(19): siRNA sense strand
gaacagccuuccugaaaca

SEQ ID NO: 1555980 - RNA, 19 nt, Homo sapiens
  misc_RNA (1)...(19): siRNA sense strand
caagcaagcuccacauaug

SEQ ID NO: 1555981 - RNA, 19 nt, Homo sapiens
  misc_RNA (1)...(19): siRNA sense strand
gagagucgcugcagaaugg

SEQ ID NO: 1555982 - RNA, 19 nt, Homo sapiens
  misc_RNA (1)...(19): siRNA sense strand
ggaauuagaagcucucuug

SEQ ID NO: 1555983 - RNA, 19 nt, Homo sapiens
  misc_RNA (1)...(19): siRNA sense strand
gagaugcccuucacaaauc

SEQ ID NO: 1555984 - RNA, 19 nt, Homo sapiens
  misc_RNA (1)...(19): siRNA sense strand
ggaaagcccgcuccuguuu

SEQ ID NO: 1555985 - RNA, 19 nt, Homo sapiens
  misc_RNA (1)...(19): siRNA sense strand
uagaagcucucuuggguuu

SEQ ID NO: 1555986 - RNA, 19 nt, Homo sapiens
  misc_RNA (1)...(19): siRNA sense strand
aaagaaggguuccggguuu

SEQ ID NO: 1555987 - RNA, 19 nt, Homo sapiens
  misc_RNA (1)...(19): siRNA sense strand
ggagaaagccaaagcugaa

SEQ ID NO: 1555988 - RNA, 19 nt, Homo sapiens
  misc_RNA (1)...(19): siRNA sense strand
gaacuggaacuucuauaug

SEQ ID NO: 1555989 - RNA, 19 nt, Homo sapiens
  misc_RNA (1)...(19): siRNA sense strand
gagaguagguguuccaaac

SEQ ID NO: 1555990 - RNA, 19 nt, Homo sapiens
  misc_RNA (1)...(19): siRNA sense strand
cauaaacggucacaaaugg

SEQ ID NO: 1555991 - RNA, 19 nt, Homo sapiens
  misc_RNA (1)...(19): siRNA sense strand
cuggaaagcugaccgaauu

SEQ ID NO: 1555992 - RNA, 19 nt, Homo sapiens
  misc_RNA (1)...(19): siRNA sense strand
gauguacugucuccaaaug

SEQ ID NO: 1555993 - RNA, 19 nt, Homo sapiens
  misc_RNA (1)...(19): siRNA sense strand
ucgaagaccucaaggagaa

SEQ ID NO: 1555994 - RNA, 19 nt, Homo sapiens
  misc_RNA (1)...(19): siRNA sense strand
ugaccgaauuugugucuaa

SEQ ID NO: 1555995 - RNA, 19 nt, Homo sapiens
  misc_RNA (1)...(19): siRNA sense strand
ggucacaaaugguggauca

SEQ ID NO: 1555996 - RNA, 19 nt, Homo sapiens
  misc_RNA (1)...(19): siRNA sense strand
gcccaggucucaucuacaa

SEQ ID NO: 1555997 - RNA, 19 nt, Homo sapiens
  misc_RNA (1)...(19): siRNA sense strand
ugaaagcccuugcaaaugc

SEQ ID NO: 1555998 - RNA, 19 nt, Homo sapiens
  misc_RNA (1)...(19): siRNA sense strand
acagcugccuggcucauua

SEQ ID NO: 1555999 - RNA, 19 nt, Homo sapiens
  misc_RNA (1)...(19): siRNA sense strand
gcaagcaagcuccacauau

SEQ ID NO: 1556000 - RNA, 19 nt, Homo sapiens
  misc_RNA (1)...(19): siRNA sense strand
ucacaaauccguuaacaag

SEQ ID NO: 1556001 - RNA, 19 nt, Homo sapiens
  misc_RNA (1)...(19): siRNA sense strand
ggauuucgcagucaaagaa

SEQ ID NO: 1556002 - RNA, 19 nt, Homo sapiens
  misc_RNA (1)...(19): siRNA sense strand
gaagcucucuuggguuuua

SEQ ID NO: 1556003 - RNA, 19 nt, Homo sapiens
  misc_RNA (1)...(19): siRNA sense strand
gaaaaugggcccuggauga

SEQ ID NO: 1556004 - RNA, 19 nt, Homo sapiens
  misc_RNA (1)...(19): siRNA sense strand
uaugaaagcccuugcaaau

SEQ ID NO: 1556005 - RNA, 19 nt, Homo sapiens
  misc_RNA (1)...(19): siRNA sense strand
gaagcugccagacuuggua

SEQ ID NO: 1556006 - RNA, 19 nt, Homo sapiens
  misc_RNA (1)...(19): siRNA sense strand
gaccuuggaacaaaucuaa

SEQ ID NO: 1556007 - RNA, 19 nt, Homo sapiens
  misc_RNA (1)...(19): siRNA sense strand
gcucugaaauguuaaagac

SEQ ID NO: 1556008 - RNA, 19 nt, Homo sapiens
  misc_RNA (1)...(19): siRNA sense strand
gggagacuuugcucugaaa

SEQ ID NO: 1556009 - RNA, 19 nt, Homo sapiens
  misc_RNA (1)...(19): siRNA sense strand
ucaaagacuuacuggguau

SEQ ID NO: 1556010 - RNA, 19 nt, Homo sapiens
  misc_RNA (1)...(19): siRNA sense strand
acuuugcucugaaauguua

SEQ ID NO: 1556011 - RNA, 19 nt, Homo sapiens
  misc_RNA (1)...(19): siRNA sense strand
caugggcgguguucucauu

SEQ ID NO: 1556012 - RNA, 19 nt, Homo sapiens
  misc_RNA (1)...(19): siRNA sense strand
cgaaagauuccuugcagaa

SEQ ID NO: 1556013 - RNA, 19 nt, Homo sapiens
  misc_RNA (1)...(19): siRNA sense strand
gcauggaagggaucuguaa

SEQ ID NO: 1556014 - RNA, 19 nt, Homo sapiens
  misc_RNA (1)...(19): siRNA sense strand
uaacucaaauucgggcaaa

SEQ ID NO: 1556015 - RNA, 19 nt, Homo sapiens
  misc_RNA (1)...(19): siRNA sense strand
gcagucaaauccaacuuac

SEQ ID NO: 1556016 - RNA, 19 nt, Homo sapiens
  misc_RNA (1)...(19): siRNA sense strand
cauugaggcuuccaucaga

SEQ ID NO: 1556017 - RNA, 19 nt, Homo sapiens
  misc_RNA (1)...(19): siRNA sense strand
guaucgagcuuccgaaacu

SEQ ID NO: 1556018 - RNA, 19 nt, Homo sapiens
  misc_RNA (1)...(19): siRNA sense strand
uaugagagcagaaauaaca

SEQ ID NO: 1556019 - RNA, 19 nt, Homo sapiens
  misc_RNA (1)...(19): siRNA sense strand
uggagaggcugaucgaaug

SEQ ID NO: 1556020 - RNA, 19 nt, Homo sapiens
  misc_RNA (1)...(19): siRNA sense strand
gauggaagguggugaaaau

SEQ ID NO: 1556021 - RNA, 19 nt, Homo sapiens
  misc_RNA (1)...(19): siRNA sense strand
acaaauccguuaacaaggu

SEQ ID NO: 1556022 - RNA, 19 nt, Homo sapiens
  misc_RNA (1)...(19): siRNA sense strand
aagauuccuugcagaagua

SEQ ID NO: 1556023 - RNA, 19 nt, Homo sapiens
  misc_RNA (1)...(19): siRNA sense strand
aaaagaagcugccagacuu

SEQ ID NO: 1556024 - RNA, 19 nt, Homo sapiens
  misc_RNA (1)...(19): siRNA sense strand
caaagcaguucccagugau

SEQ ID NO: 1556025 - RNA, 19 nt, Homo sapiens
  misc_RNA (1)...(19): siRNA sense strand
agacuuugcucugaaaugu

SEQ ID NO: 1556026 - RNA, 19 nt, Homo sapiens
  misc_RNA (1)...(19): siRNA sense strand
ugccaacucuguguguuua

SEQ ID NO: 1556027 - RNA, 19 nt, Homo sapiens
  misc_RNA (1)...(19): siRNA sense strand
cagguugccucuucagaug

SEQ ID NO: 1556028 - RNA, 19 nt, Homo sapiens
  misc_RNA (1)...(19): siRNA sense strand
agccaaagcugaaggacuu

SEQ ID NO: 1556029 - RNA, 19 nt, Homo sapiens
  misc_RNA (1)...(19): siRNA sense strand
gaaagcugaccgaauuugu

SEQ ID NO: 1556030 - RNA, 19 nt, Homo sapiens
  misc_RNA (1)...(19): siRNA sense strand
aaagauuccuugcagaagu

SEQ ID NO: 1556031 - RNA, 19 nt, Homo sapiens
  misc_RNA (1)...(19): siRNA sense strand
agacugcaguaaaggaauu

SEQ ID NO: 1556032 - RNA, 19 nt, Homo sapiens
  misc_RNA (1)...(19): siRNA sense strand
ucaaagagaugcccuucac

SEQ ID NO: 1556033 - RNA, 19 nt, Homo sapiens
  misc_RNA (1)...(19): siRNA sense strand
gaccacaggcccauuggaa

SEQ ID NO: 1556034 - RNA, 19 nt, Homo sapiens
  misc_RNA (1)...(19): siRNA sense strand
agucaaauccaacuuacua

SEQ ID NO: 1556035 - RNA, 19 nt, Homo sapiens
  misc_RNA (1)...(19): siRNA sense strand
ggagaacagccuuccugaa

SEQ ID NO: 1556036 - RNA, 19 nt, Homo sapiens
  misc_RNA (1)...(19): siRNA sense strand
ugucauaaacggucacaaa

SEQ ID NO: 1556037 - RNA, 19 nt, Homo sapiens
  misc_RNA (1)...(19): siRNA sense strand
acaggcagcaggaguuaua

SEQ ID NO: 1556038 - RNA, 19 nt, Homo sapiens
  misc_RNA (1)...(19): siRNA sense strand
ggaaagcugaccgaauuug

SEQ ID NO: 1556039 - RNA, 19 nt, Homo sapiens
  misc_RNA (1)...(19): siRNA sense strand
gugcugagagguauuaaug

SEQ ID NO: 1556040 - RNA, 19 nt, Homo sapiens
  misc_RNA (1)...(19): siRNA sense strand
cauauacacugccaugaac

SEQ ID NO: 1556041 - RNA, 19 nt, Homo sapiens
  misc_RNA (1)...(19): siRNA sense strand
ggcagucaaauccaacuua

SEQ ID NO: 1556042 - RNA, 19 nt, Homo sapiens
  misc_RNA (1)...(19): siRNA sense strand
ugaccaauguggaauaugc

SEQ ID NO: 1556043 - RNA, 19 nt, Homo sapiens
  misc_RNA (1)...(19): siRNA sense strand
gaaagccaaagcugaagga

SEQ ID NO: 1556044 - RNA, 19 nt, Homo sapiens
  misc_RNA (1)...(19): siRNA sense strand
guccuugacugggaacuuu

SEQ ID NO: 1556045 - RNA, 19 nt, Homo sapiens
  misc_RNA (1)...(19): siRNA sense strand
gcugagagguauuaaugac

SEQ ID NO: 1556046 - RNA, 19 nt, Homo sapiens
  misc_RNA (1)...(19): siRNA sense strand
gacgguguauggacuggaa

SEQ ID NO: 1556047 - RNA, 19 nt, Homo sapiens
  misc_RNA (1)...(19): siRNA sense strand
ccacaggcagcaggaguua

SEQ ID NO: 1556048 - RNA, 19 nt, Homo sapiens
  misc_RNA (1)...(19): siRNA sense strand
uugaugaccuuggaacaaa

SEQ ID NO: 1556049 - RNA, 19 nt, Homo sapiens
  misc_RNA (1)...(19): siRNA sense strand
gcucuugguucccauggau

SEQ ID NO: 1556050 - RNA, 19 nt, Homo sapiens
  misc_RNA (1)...(19): siRNA sense strand
gaacuucuauauggcuuuu

SEQ ID NO: 1556051 - RNA, 19 nt, Homo sapiens
  misc_RNA (1)...(19): siRNA sense strand
gaggaguauuucaggaugu

SEQ ID NO: 1556052 - RNA, 19 nt, Homo sapiens
  misc_RNA (1)...(19): siRNA sense strand
ucgacaaccugguguuuca

SEQ ID NO: 1556053 - RNA, 19 nt, Homo sapiens
  misc_RNA (1)...(19): siRNA sense strand
ccauauacacugccaugaa

SEQ ID NO: 1556054 - RNA, 19 nt, Homo sapiens
  misc_RNA (1)...(19): siRNA sense strand
aaucguaucccuucuggaa

SEQ ID NO: 1556055 - RNA, 19 nt, Homo sapiens
  misc_RNA (1)...(19): siRNA sense strand
ucagaugccaccaacauug

SEQ ID NO: 1556056 - RNA, 19 nt, Homo sapiens
  misc_RNA (1)...(19): siRNA sense strand
aaagagaugcccuucacaa

SEQ ID NO: 1556057 - RNA, 19 nt, Homo sapiens
  misc_RNA (1)...(19): siRNA sense strand
ccacagacgagccauauac

SEQ ID NO: 1556058 - RNA, 19 nt, Homo sapiens
  misc_RNA (1)...(19): siRNA sense strand
uaacguucuugaucucugu

SEQ ID NO: 1556059 - RNA, 19 nt, Homo sapiens
  misc_RNA (1)...(19): siRNA sense strand
acugcagucuugagcaaua

SEQ ID NO: 1556060 - RNA, 19 nt, Homo sapiens
  misc_RNA (1)...(19): siRNA sense strand
gagaggaggacagcuucua

SEQ ID NO: 1556061 - RNA, 19 nt, Homo sapiens
  misc_RNA (1)...(19): siRNA sense strand
ccacauaugcggaacaaac

SEQ ID NO: 1556062 - RNA, 19 nt, Homo sapiens
  misc_RNA (1)...(19): siRNA sense strand
ggcaagcaagcuccacaua

SEQ ID NO: 1556063 - RNA, 19 nt, Homo sapiens
  misc_RNA (1)...(19): siRNA sense strand
ccguguggcugcaauccua

SEQ ID NO: 1556064 - RNA, 19 nt, Homo sapiens
  misc_RNA (1)...(19): siRNA sense strand
gaagauucaagugucauug

SEQ ID NO: 1556065 - RNA, 19 nt, Homo sapiens
  misc_RNA (1)...(19): siRNA sense strand
gaaagauuccuugcagaag

SEQ ID NO: 1556066 - RNA, 19 nt, Homo sapiens
  misc_RNA (1)...(19): siRNA sense strand
ccaaacacucggccuguga

SEQ ID NO: 1556067 - RNA, 19 nt, Homo sapiens
  misc_RNA (1)...(19): siRNA sense strand
gaucuaguucugaggaaga

SEQ ID NO: 1556068 - RNA, 19 nt, Homo sapiens
  misc_RNA (1)...(19): siRNA sense strand
gggaaagcccgcuccuguu

SEQ ID NO: 1556069 - RNA, 19 nt, Homo sapiens
  misc_RNA (1)...(19): siRNA sense strand
ggagcaggacugaccaaug

SEQ ID NO: 1556070 - RNA, 19 nt, Homo sapiens
  misc_RNA (1)...(19): siRNA sense strand
uaaugacugugacuugaca

SEQ ID NO: 1556071 - RNA, 19 nt, Homo sapiens
  misc_RNA (1)...(19): siRNA sense strand
cagaaugggagguacagaa

SEQ ID NO: 1556072 - RNA, 19 nt, Homo sapiens
  misc_RNA (1)...(19): siRNA sense strand
gaagaugcaccaggcuguu

SEQ ID NO: 1556073 - RNA, 19 nt, Homo sapiens
  misc_RNA (1)...(19): siRNA sense strand
agagggaguucaggauuau

SEQ ID NO: 1556074 - RNA, 19 nt, Homo sapiens
  misc_RNA (1)...(19): siRNA sense strand
aaauccaacuuacuacauc

SEQ ID NO: 1556075 - RNA, 19 nt, Homo sapiens
  misc_RNA (1)...(19): siRNA sense strand
ggaaguaagugacaggaua

SEQ ID NO: 1556076 - RNA, 19 nt, Homo sapiens
  misc_RNA (1)...(19): siRNA sense strand
gauaaaggcuucagucaga

SEQ ID NO: 1556077 - RNA, 19 nt, Homo sapiens
  misc_RNA (1)...(19): siRNA sense strand
gguaagagcuucagucaga

SEQ ID NO: 1556078 - RNA, 19 nt, Homo sapiens
  misc_RNA (1)...(19): siRNA sense strand
gguaagggcuuuaguaaga

SEQ ID NO: 1556079 - RNA, 19 nt, Homo sapiens
  misc_RNA (1)...(19): siRNA sense strand
gaacucauaucuucauguu

SEQ ID NO: 1556080 - RNA, 19 nt, Homo sapiens
  misc_RNA (1)...(19): siRNA sense strand
gagcaaaccucugaugaaa

SEQ ID NO: 1556081 - RNA, 19 nt, Homo sapiens
  misc_RNA (1)...(19): siRNA sense strand
ggagagaaaugcuauagga

SEQ ID NO: 1556082 - RNA, 19 nt, Homo sapiens
  misc_RNA (1)...(19): siRNA sense strand
ggaaaaggcuuaaguguug

SEQ ID NO: 1556083 - RNA, 19 nt, Homo sapiens
  misc_RNA (1)...(19): siRNA sense strand
gggaagggcuuuagucaga

SEQ ID NO: 1556084 - RNA, 19 nt, Homo sapiens
  misc_RNA (1)...(19): siRNA sense strand
gauaagggcuucaguaagg

SEQ ID NO: 1556085 - RNA, 19 nt, Homo sapiens
  misc_RNA (1)...(19): siRNA sense strand
agagaaagcuguaccaaga

SEQ ID NO: 1556086 - RNA, 19 nt, Homo sapiens
  misc_RNA (1)...(19): siRNA sense strand
ugagagaaccacagaauua

SEQ ID NO: 1556087 - RNA, 19 nt, Homo sapiens
  misc_RNA (1)...(19): siRNA sense strand
guaagugacaggauauuua

SEQ ID NO: 1556088 - RNA, 19 nt, Homo sapiens
  misc_RNA (1)...(19): siRNA sense strand
gagagaaacccuauaaaug

SEQ ID NO: 1556089 - RNA, 19 nt, Homo sapiens
  misc_RNA (1)...(19): siRNA sense strand
gaaguaagauuaagauucc

SEQ ID NO: 1556090 - RNA, 19 nt, Homo sapiens
  misc_RNA (1)...(19): siRNA sense strand
ggagagaaaccauauaaau

SEQ ID NO: 1556091 - RNA, 19 nt, Homo sapiens
  misc_RNA (1)...(19): siRNA sense strand
ggagagaaguuguguacau

SEQ ID NO: 1556092 - RNA, 19 nt, Homo sapiens
  misc_RNA (1)...(19): siRNA sense strand
gagaaaugcuauaggaaug

SEQ ID NO: 1556093 - RNA, 19 nt, Homo sapiens
  misc_RNA (1)...(19): siRNA sense strand
caacuacacuuaagagaca

SEQ ID NO: 1556094 - RNA, 19 nt, Homo sapiens
  misc_RNA (1)...(19): siRNA sense strand
ccacagaauuaucagagua

SEQ ID NO: 1556095 - RNA, 19 nt, Homo sapiens
  misc_RNA (1)...(19): siRNA sense strand
gggaaaggcuucaguugga

SEQ ID NO: 1556096 - RNA, 19 nt, Homo sapiens
  misc_RNA (1)...(19): siRNA sense strand
gagagaaucccuacaaaug

SEQ ID NO: 1556097 - RNA, 19 nt, Homo sapiens
  misc_RNA (1)...(19): siRNA sense strand
gagagaaacccuacaaaug

SEQ ID NO: 1556098 - RNA, 19 nt, Homo sapiens
  misc_RNA (1)...(19): siRNA sense strand
gagagaaacccuacaaaug

SEQ ID NO: 1556099 - RNA, 19 nt, Homo sapiens
  misc_RNA (1)...(19): siRNA sense strand
gggcuuccaucauagcuua

SEQ ID NO: 1556100 - RNA, 19 nt, Homo sapiens
  misc_RNA (1)...(19): siRNA sense strand
ggaaaggcuucaucuggaa

SEQ ID NO: 1556101 - RNA, 19 nt, Homo sapiens
  misc_RNA (1)...(19): siRNA sense strand
gagagaagccauacaaaug

SEQ ID NO: 1556102 - RNA, 19 nt, Homo sapiens
  misc_RNA (1)...(19): siRNA sense strand
agacaagccucauguaaau

SEQ ID NO: 1556103 - RNA, 19 nt, Homo sapiens
  misc_RNA (1)...(19): siRNA sense strand
ggagagaaacccuauaaau

SEQ ID NO: 1556104 - RNA, 19 nt, Homo sapiens
  misc_RNA (1)...(19): siRNA sense strand
gagaaacccuauaaaugug

SEQ ID NO: 1556105 - RNA, 19 nt, Homo sapiens
  misc_RNA (1)...(19): siRNA sense strand
gagagaaaccauauaaaug

SEQ ID NO: 1556106 - RNA, 19 nt, Homo sapiens
  misc_RNA (1)...(19): siRNA sense strand
gagaaaccauacaaauguu

SEQ ID NO: 1556107 - RNA, 19 nt, Homo sapiens
  misc_RNA (1)...(19): siRNA sense strand
cagaguaggugucagcaaa

SEQ ID NO: 1556108 - RNA, 19 nt, Homo sapiens
  misc_RNA (1)...(19): siRNA sense strand
cuacaaaugugaugugugu

SEQ ID NO: 1556109 - RNA, 19 nt, Homo sapiens
  misc_RNA (1)...(19): siRNA sense strand
gagaaucccuacaaaugug

SEQ ID NO: 1556110 - RNA, 19 nt, Homo sapiens
  misc_RNA (1)...(19): siRNA sense strand
gagaaacccuacaaaugug

SEQ ID NO: 1556111 - RNA, 19 nt, Homo sapiens
  misc_RNA (1)...(19): siRNA sense strand
cuacaaaugugaugugugu

SEQ ID NO: 1556112 - RNA, 19 nt, Homo sapiens
  misc_RNA (1)...(19): siRNA sense strand
gagaaacccuacaaaugug

SEQ ID NO: 1556113 - RNA, 19 nt, Homo sapiens
  misc_RNA (1)...(19): siRNA sense strand
gaccuuauaugcuggcaaa

SEQ ID NO: 1556114 - RNA, 19 nt, Homo sapiens
  misc_RNA (1)...(19): siRNA sense strand
gagagaaaccauacaaaug

SEQ ID NO: 1556115 - RNA, 19 nt, Homo sapiens
  misc_RNA (1)...(19): siRNA sense strand
gagagaaaccauacaaaug

SEQ ID NO: 1556116 - RNA, 19 nt, Homo sapiens
  misc_RNA (1)...(19): siRNA sense strand
gagagagccuguaaaugug

SEQ ID NO: 1556117 - RNA, 19 nt, Homo sapiens
  misc_RNA (1)...(19): siRNA sense strand
ggagagagagccuguaaau

SEQ ID NO: 1556118 - RNA, 19 nt, Homo sapiens
  misc_RNA (1)...(19): siRNA sense strand
gcaucaguguuuccauaua

SEQ ID NO: 1556119 - RNA, 19 nt, Homo sapiens
  misc_RNA (1)...(19): siRNA sense strand
gagacaagccucauguaaa

SEQ ID NO: 1556120 - RNA, 19 nt, Homo sapiens
  misc_RNA (1)...(19): siRNA sense strand
gaagaugagaacuauguaa

SEQ ID NO: 1556121 - RNA, 19 nt, Homo sapiens
  misc_RNA (1)...(19): siRNA sense strand
ggagagaaaccauacaaau

SEQ ID NO: 1556122 - RNA, 19 nt, Homo sapiens
  misc_RNA (1)...(19): siRNA sense strand
ggagagaaaccauacaaau

SEQ ID NO: 1556123 - RNA, 19 nt, Homo sapiens
  misc_RNA (1)...(19): siRNA sense strand
cuacagaugucagguauau

SEQ ID NO: 1556124 - RNA, 19 nt, Homo sapiens
  misc_RNA (1)...(19): siRNA sense strand
uaucaacccuucaaacuag

SEQ ID NO: 1556125 - RNA, 19 nt, Homo sapiens
  misc_RNA (1)...(19): siRNA sense strand
ggagagaagccauacaaau

SEQ ID NO: 1556126 - RNA, 19 nt, Homo sapiens
  misc_RNA (1)...(19): siRNA sense strand
ggagagaaacccuacaaau

SEQ ID NO: 1556127 - RNA, 19 nt, Homo sapiens
  misc_RNA (1)...(19): siRNA sense strand
ggagagaaacccuacaaau

SEQ ID NO: 1556128 - RNA, 19 nt, Homo sapiens
  misc_RNA (1)...(19): siRNA sense strand
gagaaaccauauaaaugug

SEQ ID NO: 1556129 - RNA, 19 nt, Homo sapiens
  misc_RNA (1)...(19): siRNA sense strand
gagagaaguuguguacaug

SEQ ID NO: 1556130 - RNA, 19 nt, Homo sapiens
  misc_RNA (1)...(19): siRNA sense strand
agagagagccuguaaaugu

SEQ ID NO: 1556131 - RNA, 19 nt, Homo sapiens
  misc_RNA (1)...(19): siRNA sense strand
gcaaaccucugaugaaaau

SEQ ID NO: 1556132 - RNA, 19 nt, Homo sapiens
  misc_RNA (1)...(19): siRNA sense strand
gagaaaccauacaaaugug

SEQ ID NO: 1556133 - RNA, 19 nt, Homo sapiens
  misc_RNA (1)...(19): siRNA sense strand
ugagauagauacccuucaa

SEQ ID NO: 1556134 - RNA, 19 nt, Homo sapiens
  misc_RNA (1)...(19): siRNA sense strand
agagaaacccuauaaaugu

SEQ ID NO: 1556135 - RNA, 19 nt, Homo sapiens
  misc_RNA (1)...(19): siRNA sense strand
agacagugcuggagagaga

SEQ ID NO: 1556136 - RNA, 19 nt, Homo sapiens
  misc_RNA (1)...(19): siRNA sense strand
ugggaacaauuuacaagua

SEQ ID NO: 1556137 - RNA, 19 nt, Homo sapiens
  misc_RNA (1)...(19): siRNA sense strand
caucauagcuuagauuuug

SEQ ID NO: 1556138 - RNA, 19 nt, Homo sapiens
  misc_RNA (1)...(19): siRNA sense strand
acucauaucuucauguuca

SEQ ID NO: 1556139 - RNA, 19 nt, Homo sapiens
  misc_RNA (1)...(19): siRNA sense strand
gagaagccauacaaaugug

SEQ ID NO: 1556140 - RNA, 19 nt, Homo sapiens
  misc_RNA (1)...(19): siRNA sense strand
gauagauacccuucaagaa

SEQ ID NO: 1556141 - RNA, 19 nt, Homo sapiens
  misc_RNA (1)...(19): siRNA sense strand
agagaaacccuacaaaugu

SEQ ID NO: 1556142 - RNA, 19 nt, Homo sapiens
  misc_RNA (1)...(19): siRNA sense strand
agagaaacccuacaaaugu

SEQ ID NO: 1556143 - RNA, 19 nt, Homo sapiens
  misc_RNA (1)...(19): siRNA sense strand
aauaagcucuguaaaugug

SEQ ID NO: 1556144 - RNA, 19 nt, Homo sapiens
  misc_RNA (1)...(19): siRNA sense strand
gaaaauguaucugagagaa

SEQ ID NO: 1556145 - RNA, 19 nt, Homo sapiens
  misc_RNA (1)...(19): siRNA sense strand
ggauguggcuguggucuuc

SEQ ID NO: 1556146 - RNA, 19 nt, Homo sapiens
  misc_RNA (1)...(19): siRNA sense strand
gaaguaagugacaggauau

SEQ ID NO: 1556147 - RNA, 19 nt, Homo sapiens
  misc_RNA (1)...(19): siRNA sense strand
gagacaagacauacaaaug

SEQ ID NO: 1556148 - RNA, 19 nt, Homo sapiens
  misc_RNA (1)...(19): siRNA sense strand
gagaaguuguguacaugug

SEQ ID NO: 1556149 - RNA, 19 nt, Homo sapiens
  misc_RNA (1)...(19): siRNA sense strand
gagaaccacagaauuauca

SEQ ID NO: 1556150 - RNA, 19 nt, Homo sapiens
  misc_RNA (1)...(19): siRNA sense strand
gaguaggugucagcaaauu

SEQ ID NO: 1556151 - RNA, 19 nt, Homo sapiens
  misc_RNA (1)...(19): siRNA sense strand
ggagagaaucccuacaaau

SEQ ID NO: 1556152 - RNA, 19 nt, Homo sapiens
  misc_RNA (1)...(19): siRNA sense strand
aaccagaacuccugucuuc

SEQ ID NO: 1556153 - RNA, 19 nt, Homo sapiens
  misc_RNA (1)...(19): siRNA sense strand
cagcauagcauaauccaau

SEQ ID NO: 1556154 - RNA, 19 nt, Homo sapiens
  misc_RNA (1)...(19): siRNA sense strand
gaacuucaccagcaacuac

SEQ ID NO: 1556155 - RNA, 19 nt, Homo sapiens
  misc_RNA (1)...(19): siRNA sense strand
gugauaagggcuucaguaa

SEQ ID NO: 1556156 - RNA, 19 nt, Homo sapiens
  misc_RNA (1)...(19): siRNA sense strand
caucaguguuuccauauag

SEQ ID NO: 1556157 - RNA, 19 nt, Homo sapiens
  misc_RNA (1)...(19): siRNA sense strand
ccaaggagauggguguuca

SEQ ID NO: 1556158 - RNA, 19 nt, Homo sapiens
  misc_RNA (1)...(19): siRNA sense strand
ggagaguucaaauagcaua

SEQ ID NO: 1556159 - RNA, 19 nt, Homo sapiens
  misc_RNA (1)...(19): siRNA sense strand
gagagaaccacagaauuau

SEQ ID NO: 1556160 - RNA, 19 nt, Homo sapiens
  misc_RNA (1)...(19): siRNA sense strand
agagaaaccauacaaaugu

SEQ ID NO: 1556161 - RNA, 19 nt, Homo sapiens
  misc_RNA (1)...(19): siRNA sense strand
cuauaaauguggcaugugu

SEQ ID NO: 1556162 - RNA, 19 nt, Homo sapiens
  misc_RNA (1)...(19): siRNA sense strand
agagaaaccauacaaaugu

SEQ ID NO: 1556163 - RNA, 19 nt, Homo sapiens
  misc_RNA (1)...(19): siRNA sense strand
ccauauaaaugugagguau

SEQ ID NO: 1556164 - RNA, 19 nt, Homo sapiens
  misc_RNA (1)...(19): siRNA sense strand
aagaauugcucaucaacau

SEQ ID NO: 1556165 - RNA, 19 nt, Homo sapiens
  misc_RNA (1)...(19): siRNA sense strand
aguaaggccucaaaucuuc

SEQ ID NO: 1556166 - RNA, 19 nt, Homo sapiens
  misc_RNA (1)...(19): siRNA sense strand
aggcaucaguguuuccaua

SEQ ID NO: 1556167 - RNA, 19 nt, Homo sapiens
  misc_RNA (1)...(19): siRNA sense strand
aguguuggcucuaaucuug

SEQ ID NO: 1556168 - RNA, 19 nt, Homo sapiens
  misc_RNA (1)...(19): siRNA sense strand
gaaggaaucaucccagcau

SEQ ID NO: 1556169 - RNA, 19 nt, Homo sapiens
  misc_RNA (1)...(19): siRNA sense strand
gcuuaaguguuggcucuaa

SEQ ID NO: 1556170 - RNA, 19 nt, Homo sapiens
  misc_RNA (1)...(19): siRNA sense strand
agucagacaucacaacuuc

SEQ ID NO: 1556171 - RNA, 19 nt, Homo sapiens
  misc_RNA (1)...(19): siRNA sense strand
gagaaccucuacagauguc

SEQ ID NO: 1556172 - RNA, 19 nt, Homo sapiens
  misc_RNA (1)...(19): siRNA sense strand
guaggugucagcaaauuga

SEQ ID NO: 1556173 - RNA, 19 nt, Homo sapiens
  misc_RNA (1)...(19): siRNA sense strand
agaaagcuguaccaagaug

SEQ ID NO: 1556174 - RNA, 19 nt, Homo sapiens
  misc_RNA (1)...(19): siRNA sense strand
aaugugaugugugugauaa

SEQ ID NO: 1556175 - RNA, 19 nt, Homo sapiens
  misc_RNA (1)...(19): siRNA sense strand
gagaaacccuauaaaugua

SEQ ID NO: 1556176 - RNA, 19 nt, Homo sapiens
  misc_RNA (1)...(19): siRNA sense strand
gagaaacccuauaaaugua

SEQ ID NO: 1556177 - RNA, 19 nt, Homo sapiens
  misc_RNA (1)...(19): siRNA sense strand
acacaaaguucuaaccuua

SEQ ID NO: 1556178 - RNA, 19 nt, Homo sapiens
  misc_RNA (1)...(19): siRNA sense strand
gaucauaucucaacaacca

SEQ ID NO: 1556179 - RNA, 19 nt, Homo sapiens
  misc_RNA (1)...(19): siRNA sense strand
ucagagaccucacaaaugu

SEQ ID NO: 1556180 - RNA, 19 nt, Homo sapiens
  misc_RNA (1)...(19): siRNA sense strand
gagagaaacccuauaaaug

SEQ ID NO: 1556181 - RNA, 19 nt, Homo sapiens
  misc_RNA (1)...(19): siRNA sense strand
gagagaaacccuauaaaug

SEQ ID NO: 1556182 - RNA, 19 nt, Homo sapiens
  misc_RNA (1)...(19): siRNA sense strand
gagagaagcccuaugaaug

SEQ ID NO: 1556183 - RNA, 19 nt, Homo sapiens
  misc_RNA (1)...(19): siRNA sense strand
ggagaaacccuacaagugu

SEQ ID NO: 1556184 - RNA, 19 nt, Homo sapiens
  misc_RNA (1)...(19): siRNA sense strand
ggagagaaacccuauaaau

SEQ ID NO: 1556185 - RNA, 19 nt, Homo sapiens
  misc_RNA (1)...(19): siRNA sense strand
ggagagaaacccuauaaau

SEQ ID NO: 1556186 - RNA, 19 nt, Homo sapiens
  misc_RNA (1)...(19): siRNA sense strand
gaagagaagcccuacaaau

SEQ ID NO: 1556187 - RNA, 19 nt, Homo sapiens
  misc_RNA (1)...(19): siRNA sense strand
gagagaagcccuacaagug

SEQ ID NO: 1556188 - RNA, 19 nt, Homo sapiens
  misc_RNA (1)...(19): siRNA sense strand
gggaaagccuucagugaug

SEQ ID NO: 1556189 - RNA, 19 nt, Homo sapiens
  misc_RNA (1)...(19): siRNA sense strand
gaucagagaccucacaaau

SEQ ID NO: 1556190 - RNA, 19 nt, Homo sapiens
  misc_RNA (1)...(19): siRNA sense strand
aaucuucagugcaaacuua

SEQ ID NO: 1556191 - RNA, 19 nt, Homo sapiens
  misc_RNA (1)...(19): siRNA sense strand
agugauggcucaauccuua

SEQ ID NO: 1556192 - RNA, 19 nt, Homo sapiens
  misc_RNA (1)...(19): siRNA sense strand
cuacaaaugugaugagugu

SEQ ID NO: 1556193 - RNA, 19 nt, Homo sapiens
  misc_RNA (1)...(19): siRNA sense strand
ccacugugcugcugccuuu

SEQ ID NO: 1556194 - RNA, 19 nt, Homo sapiens
  misc_RNA (1)...(19): siRNA sense strand
ggagacauuuggugaggaa

SEQ ID NO: 1556195 - RNA, 19 nt, Homo sapiens
  misc_RNA (1)...(19): siRNA sense strand
gagagaaacccuacagaug

SEQ ID NO: 1556196 - RNA, 19 nt, Homo sapiens
  misc_RNA (1)...(19): siRNA sense strand
gagaagcccuacaaaugug

SEQ ID NO: 1556197 - RNA, 19 nt, Homo sapiens
  misc_RNA (1)...(19): siRNA sense strand
guucuaaccuuauccaaca

SEQ ID NO: 1556198 - RNA, 19 nt, Homo sapiens
  misc_RNA (1)...(19): siRNA sense strand
ccagggaucugagccagua

SEQ ID NO: 1556199 - RNA, 19 nt, Homo sapiens
  misc_RNA (1)...(19): siRNA sense strand
ggagagaagcccuaugaau

SEQ ID NO: 1556200 - RNA, 19 nt, Homo sapiens
  misc_RNA (1)...(19): siRNA sense strand
gggagaagcccuacaagug

SEQ ID NO: 1556201 - RNA, 19 nt, Homo sapiens
  misc_RNA (1)...(19): siRNA sense strand
agagaaacccuauaaaugu

SEQ ID NO: 1556202 - RNA, 19 nt, Homo sapiens
  misc_RNA (1)...(19): siRNA sense strand
aaaccaaacucguggaaca

SEQ ID NO: 1556203 - RNA, 19 nt, Homo sapiens
  misc_RNA (1)...(19): siRNA sense strand
agagaaacccuauaaaugu

SEQ ID NO: 1556204 - RNA, 19 nt, Homo sapiens
  misc_RNA (1)...(19): siRNA sense strand
gaccagaacugaguacaag

SEQ ID NO: 1556205 - RNA, 19 nt, Homo sapiens
  misc_RNA (1)...(19): siRNA sense strand
caacaaccauaagcgugua

SEQ ID NO: 1556206 - RNA, 19 nt, Homo sapiens
  misc_RNA (1)...(19): siRNA sense strand
gagaaacccuacagaugca

SEQ ID NO: 1556207 - RNA, 19 nt, Homo sapiens
  misc_RNA (1)...(19): siRNA sense strand
caaugacuguggcaaaguu

SEQ ID NO: 1556208 - RNA, 19 nt, Homo sapiens
  misc_RNA (1)...(19): siRNA sense strand
caagaccuguuccugauca

SEQ ID NO: 1556209 - RNA, 19 nt, Homo sapiens
  misc_RNA (1)...(19): siRNA sense strand
aagagaagcccuacaaaug

SEQ ID NO: 1556210 - RNA, 19 nt, Homo sapiens
  misc_RNA (1)...(19): siRNA sense strand
gggagaaacccuacaagug

SEQ ID NO: 1556211 - RNA, 19 nt, Homo sapiens
  misc_RNA (1)...(19): siRNA sense strand
ggagagaaacccuacagau

SEQ ID NO: 1556212 - RNA, 19 nt, Homo sapiens
  misc_RNA (1)...(19): siRNA sense strand
ggagagaagccauuugagu

SEQ ID NO: 1556213 - RNA, 19 nt, Homo sapiens
  misc_RNA (1)...(19): siRNA sense strand
gcugcgaguucaucaauca

SEQ ID NO: 1556214 - RNA, 19 nt, Homo sapiens
  misc_RNA (1)...(19): siRNA sense strand
ggagagaagcccuacaagu

SEQ ID NO: 1556215 - RNA, 19 nt, Homo sapiens
  misc_RNA (1)...(19): siRNA sense strand
acaaggaguugacuucaca

SEQ ID NO: 1556216 - RNA, 19 nt, Homo sapiens
  misc_RNA (1)...(19): siRNA sense strand
ccagagcacguacuugauu

SEQ ID NO: 1556217 - RNA, 19 nt, Homo sapiens
  misc_RNA (1)...(19): siRNA sense strand
gucaagaccuguuccugau

SEQ ID NO: 1556218 - RNA, 19 nt, Homo sapiens
  misc_RNA (1)...(19): siRNA sense strand
gaagcccuaugaaugcaau

SEQ ID NO: 1556219 - RNA, 19 nt, Homo sapiens
  misc_RNA (1)...(19): siRNA sense strand
cacaacaguuccagacuca

SEQ ID NO: 1556220 - RNA, 19 nt, Homo sapiens
  misc_RNA (1)...(19): siRNA sense strand
ggaccagaacugaguacaa

SEQ ID NO: 1556221 - RNA, 19 nt, Homo sapiens
  misc_RNA (1)...(19): siRNA sense strand
caacaucagagaauucaca

SEQ ID NO: 1556222 - RNA, 19 nt, Homo sapiens
  misc_RNA (1)...(19): siRNA sense strand
cgccuacucuucccugauu

SEQ ID NO: 1556223 - RNA, 19 nt, Homo sapiens
  misc_RNA (1)...(19): siRNA sense strand
ugacuucacaggagacauu

SEQ ID NO: 1556224 - RNA, 19 nt, Homo sapiens
  misc_RNA (1)...(19): siRNA sense strand
gagaagcccuaugaaugca

SEQ ID NO: 1556225 - RNA, 19 nt, Homo sapiens
  misc_RNA (1)...(19): siRNA sense strand
ccaaacucguggaacauca

SEQ ID NO: 1556226 - RNA, 19 nt, Homo sapiens
  misc_RNA (1)...(19): siRNA sense strand
acaaaguucuaaccuuauc

SEQ ID NO: 1556227 - RNA, 19 nt, Homo sapiens
  misc_RNA (1)...(19): siRNA sense strand
agagaagcccuacaaaugu

SEQ ID NO: 1556228 - RNA, 19 nt, Homo sapiens
  misc_RNA (1)...(19): siRNA sense strand
ugauauaugugagcaaagu

SEQ ID NO: 1556229 - RNA, 19 nt, Homo sapiens
  misc_RNA (1)...(19): siRNA sense strand
cggcacaguuccaacaugu

SEQ ID NO: 1556230 - RNA, 19 nt, Homo sapiens
  misc_RNA (1)...(19): siRNA sense strand
uauccaacaucagagaauu

SEQ ID NO: 1556231 - RNA, 19 nt, Homo sapiens
  misc_RNA (1)...(19): siRNA sense strand
ggcccaaccucaugaagca

SEQ ID NO: 1556232 - RNA, 19 nt, Homo sapiens
  misc_RNA (1)...(19): siRNA sense strand
ucgaggacguggcugugua

SEQ ID NO: 1556233 - RNA, 19 nt, Homo sapiens
  misc_RNA (1)...(19): siRNA sense strand
ccggagagaaacccuauaa

SEQ ID NO: 1556234 - RNA, 19 nt, Homo sapiens
  misc_RNA (1)...(19): siRNA sense strand
gagcugcgaguucaucaau

SEQ ID NO: 1556235 - RNA, 19 nt, Homo sapiens
  misc_RNA (1)...(19): siRNA sense strand
ggggaaaucuucagugcaa

SEQ ID NO: 1556236 - RNA, 19 nt, Homo sapiens
  misc_RNA (1)...(19): siRNA sense strand
gcgggaaagccuucaguga

SEQ ID NO: 1556237 - RNA, 19 nt, Homo sapiens
  misc_RNA (1)...(19): siRNA sense strand
ugugauauaugugagcaaa

SEQ ID NO: 1556238 - RNA, 19 nt, Homo sapiens
  misc_RNA (1)...(19): siRNA sense strand
ccaaagcacacaccucauc

SEQ ID NO: 1556239 - RNA, 19 nt, Homo sapiens
  misc_RNA (1)...(19): siRNA sense strand
cagagcacguacuugauuc

SEQ ID NO: 1556240 - RNA, 19 nt, Homo sapiens
  misc_RNA (1)...(19): siRNA sense strand
caacaguuccagacucauc

SEQ ID NO: 1556241 - RNA, 19 nt, Homo sapiens
  misc_RNA (1)...(19): siRNA sense strand
caggagagaagcccuacaa

SEQ ID NO: 1556242 - RNA, 19 nt, Homo sapiens
  misc_RNA (1)...(19): siRNA sense strand
caacaugugucagcaucag

SEQ ID NO: 1556243 - RNA, 19 nt, Homo sapiens
  misc_RNA (1)...(19): siRNA sense strand
gacauuuggugaggaagau

SEQ ID NO: 1556244 - RNA, 19 nt, Homo sapiens
  misc_RNA (1)...(19): siRNA sense strand
ccggagagaagccauuuga

SEQ ID NO: 1556245 - RNA, 19 nt, Homo sapiens
  misc_RNA (1)...(19): siRNA sense strand
ggacucacaccggagagaa

SEQ ID NO: 1556246 - RNA, 19 nt, Homo sapiens
  misc_RNA (1)...(19): siRNA sense strand
ucauaucucaacaaccaua

SEQ ID NO: 1556247 - RNA, 19 nt, Homo sapiens
  misc_RNA (1)...(19): siRNA sense strand
gaauucacacuggagagaa

SEQ ID NO: 1556248 - RNA, 19 nt, Homo sapiens
  misc_RNA (1)...(19): siRNA sense strand
gugcaaggaauguggcaaa

SEQ ID NO: 1556249 - RNA, 19 nt, Homo sapiens
  misc_RNA (1)...(19): siRNA sense strand
gaugcacucaggagagauu

SEQ ID NO: 1556250 - RNA, 19 nt, Homo sapiens
  misc_RNA (1)...(19): siRNA sense strand
ugaagagaagcccuacaaa

SEQ ID NO: 1556251 - RNA, 19 nt, Homo sapiens
  misc_RNA (1)...(19): siRNA sense strand
ccauuugagugcaaggaau

SEQ ID NO: 1556252 - RNA, 19 nt, Homo sapiens
  misc_RNA (1)...(19): siRNA sense strand
guacaaggaguugacuuca

SEQ ID NO: 1556253 - RNA, 19 nt, Homo sapiens
  misc_RNA (1)...(19): siRNA sense strand
cuggagagaaacccuauaa

SEQ ID NO: 1556254 - RNA, 19 nt, Homo sapiens
  misc_RNA (1)...(19): siRNA sense strand
uacacaaaguucuaaccuu

SEQ ID NO: 1556255 - RNA, 19 nt, Homo sapiens
  misc_RNA (1)...(19): siRNA sense strand
gggaaaucuucagugcaaa

SEQ ID NO: 1556256 - RNA, 19 nt, Homo sapiens
  misc_RNA (1)...(19): siRNA sense strand
cgggaaagccuucagugau

SEQ ID NO: 1556257 - RNA, 19 nt, Homo sapiens
  misc_RNA (1)...(19): siRNA sense strand
ccagaacugaguacaagga

SEQ ID NO: 1556258 - RNA, 19 nt, Homo sapiens
  misc_RNA (1)...(19): siRNA sense strand
cuggagagaagcccuauga

SEQ ID NO: 1556259 - RNA, 19 nt, Homo sapiens
  misc_RNA (1)...(19): siRNA sense strand
aauucacacuggagagaaa

SEQ ID NO: 1556260 - RNA, 19 nt, Homo sapiens
  misc_RNA (1)...(19): siRNA sense strand
gauauaugugagcaaaguu

SEQ ID NO: 1556261 - RNA, 19 nt, Homo sapiens
  misc_RNA (1)...(19): siRNA sense strand
gcaaugacuguggcaaagu

SEQ ID NO: 1556262 - RNA, 19 nt, Homo sapiens
  misc_RNA (1)...(19): siRNA sense strand
ggaaaucuucagugcaaac

SEQ ID NO: 1556263 - RNA, 19 nt, Homo sapiens
  misc_RNA (1)...(19): siRNA sense strand
cugaagagaagcccuacaa

SEQ ID NO: 1556264 - RNA, 19 nt, Homo sapiens
  misc_RNA (1)...(19): siRNA sense strand
ggagaccuacgggaaccua

SEQ ID NO: 1556265 - RNA, 19 nt, Homo sapiens
  misc_RNA (1)...(19): siRNA sense strand
gaagccacacuggagagaa

SEQ ID NO: 1556266 - RNA, 19 nt, Homo sapiens
  misc_RNA (1)...(19): siRNA sense strand
uguaaugacugcgggaaag

SEQ ID NO: 1556267 - RNA, 19 nt, Homo sapiens
  misc_RNA (1)...(19): siRNA sense strand
ccuacucuucccugauuua

SEQ ID NO: 1556268 - RNA, 19 nt, Homo sapiens
  misc_RNA (1)...(19): siRNA sense strand
cuaccggugugacgagugu

SEQ ID NO: 1556269 - RNA, 19 nt, Homo sapiens
  misc_RNA (1)...(19): siRNA sense strand
agccagagcugcgaguuca

SEQ ID NO: 1556270 - RNA, 19 nt, Homo sapiens
  misc_RNA (1)...(19): siRNA sense strand
agagaagcccuaugaaugc

SEQ ID NO: 1556271 - RNA, 19 nt, Homo sapiens
  misc_RNA (1)...(19): siRNA sense strand
uaaugaaugugagaaagcu

SEQ ID NO: 1556272 - RNA, 19 nt, Homo sapiens
  misc_RNA (1)...(19): siRNA sense strand
cuucagugauggcucaauc

SEQ ID NO: 1556273 - RNA, 19 nt, Homo sapiens
  misc_RNA (1)...(19): siRNA sense strand
gcacuuuagcgccuacucu

SEQ ID NO: 1556274 - RNA, 19 nt, Homo sapiens
  misc_RNA (1)...(19): siRNA sense strand
cccuacagaugcagcgauu

SEQ ID NO: 1556275 - RNA, 19 nt, Homo sapiens
  misc_RNA (1)...(19): siRNA sense strand
gaagaugucuggaaugaug

SEQ ID NO: 1556276 - RNA, 19 nt, Homo sapiens
  misc_RNA (1)...(19): siRNA sense strand
gaaguuggauucaugauug

SEQ ID NO: 1556277 - RNA, 19 nt, Homo sapiens
  misc_RNA (1)...(19): siRNA sense strand
gaugaaagcucaguuaaga

SEQ ID NO: 1556278 - RNA, 19 nt, Homo sapiens
  misc_RNA (1)...(19): siRNA sense strand
gaaccuugcuuugcacuua

SEQ ID NO: 1556279 - RNA, 19 nt, Homo sapiens
  misc_RNA (1)...(19): siRNA sense strand
gaaggaacauaaugaauuc

SEQ ID NO: 1556280 - RNA, 19 nt, Homo sapiens
  misc_RNA (1)...(19): siRNA sense strand
gagcacaucugcaaauuca

SEQ ID NO: 1556281 - RNA, 19 nt, Homo sapiens
  misc_RNA (1)...(19): siRNA sense strand
aaauaaagcuccacucaga

SEQ ID NO: 1556282 - RNA, 19 nt, Homo sapiens
  misc_RNA (1)...(19): siRNA sense strand
caaccaggcugcagaaaug

SEQ ID NO: 1556283 - RNA, 19 nt, Homo sapiens
  misc_RNA (1)...(19): siRNA sense strand
gaagagaggcaaaggauga

SEQ ID NO: 1556284 - RNA, 19 nt, Homo sapiens
  misc_RNA (1)...(19): siRNA sense strand
gcuuugcacuuaugugaua

SEQ ID NO: 1556285 - RNA, 19 nt, Homo sapiens
  misc_RNA (1)...(19): siRNA sense strand
gaagaaggaacauaaugaa

SEQ ID NO: 1556286 - RNA, 19 nt, Homo sapiens
  misc_RNA (1)...(19): siRNA sense strand
aaugagauuuccacacuua

SEQ ID NO: 1556287 - RNA, 19 nt, Homo sapiens
  misc_RNA (1)...(19): siRNA sense strand
ggagguagaguuugaaaug

SEQ ID NO: 1556288 - RNA, 19 nt, Homo sapiens
  misc_RNA (1)...(19): siRNA sense strand
ggucagaaccuguaauaau

SEQ ID NO: 1556289 - RNA, 19 nt, Homo sapiens
  misc_RNA (1)...(19): siRNA sense strand
aaacacugcugauucuuug

SEQ ID NO: 1556290 - RNA, 19 nt, Homo sapiens
  misc_RNA (1)...(19): siRNA sense strand
gagauacucuggaggaagu

SEQ ID NO: 1556291 - RNA, 19 nt, Homo sapiens
  misc_RNA (1)...(19): siRNA sense strand
cacaucaguucaaacaaua

SEQ ID NO: 1556292 - RNA, 19 nt, Homo sapiens
  misc_RNA (1)...(19): siRNA sense strand
ggacuggaaucuccuugga

SEQ ID NO: 1556293 - RNA, 19 nt, Homo sapiens
  misc_RNA (1)...(19): siRNA sense strand
gaccaggccuuuccuaucu

SEQ ID NO: 1556294 - RNA, 19 nt, Homo sapiens
  misc_RNA (1)...(19): siRNA sense strand
aagagaaacugaaggcaaa

SEQ ID NO: 1556295 - RNA, 19 nt, Homo sapiens
  misc_RNA (1)...(19): siRNA sense strand
uuuccuaucucccucauua

SEQ ID NO: 1556296 - RNA, 19 nt, Homo sapiens
  misc_RNA (1)...(19): siRNA sense strand
gcaguguacccuaguuuaa

SEQ ID NO: 1556297 - RNA, 19 nt, Homo sapiens
  misc_RNA (1)...(19): siRNA sense strand
caacacaucaguucaaaca

SEQ ID NO: 1556298 - RNA, 19 nt, Homo sapiens
  misc_RNA (1)...(19): siRNA sense strand
gaacaaccaggcugcagaa

SEQ ID NO: 1556299 - RNA, 19 nt, Homo sapiens
  misc_RNA (1)...(19): siRNA sense strand
gucagaaccuguaauaauc

SEQ ID NO: 1556300 - RNA, 19 nt, Homo sapiens
  misc_RNA (1)...(19): siRNA sense strand
ggccacccguguccaaaua

SEQ ID NO: 1556301 - RNA, 19 nt, Homo sapiens
  misc_RNA (1)...(19): siRNA sense strand
cauaaugaauuccaugcaa

SEQ ID NO: 1556302 - RNA, 19 nt, Homo sapiens
  misc_RNA (1)...(19): siRNA sense strand
acacaucaguucaaacaau

SEQ ID NO: 1556303 - RNA, 19 nt, Homo sapiens
  misc_RNA (1)...(19): siRNA sense strand
gagauuuccacacuuagua

SEQ ID NO: 1556304 - RNA, 19 nt, Homo sapiens
  misc_RNA (1)...(19): siRNA sense strand
gcagaaauguaugcuacga

SEQ ID NO: 1556305 - RNA, 19 nt, Homo sapiens
  misc_RNA (1)...(19): siRNA sense strand
caaacacugcugauucuuu

SEQ ID NO: 1556306 - RNA, 19 nt, Homo sapiens
  misc_RNA (1)...(19): siRNA sense strand
guucauauuucgaaugcuu

SEQ ID NO: 1556307 - RNA, 19 nt, Homo sapiens
  misc_RNA (1)...(19): siRNA sense strand
ugaagaaggaacauaauga

SEQ ID NO: 1556308 - RNA, 19 nt, Homo sapiens
  misc_RNA (1)...(19): siRNA sense strand
ggaggagauuggagcaaga

SEQ ID NO: 1556309 - RNA, 19 nt, Homo sapiens
  misc_RNA (1)...(19): siRNA sense strand
ugggagggcuguccuuuga

SEQ ID NO: 1556310 - RNA, 19 nt, Homo sapiens
  misc_RNA (1)...(19): siRNA sense strand
ccacccguguccaaauaua

SEQ ID NO: 1556311 - RNA, 19 nt, Homo sapiens
  misc_RNA (1)...(19): siRNA sense strand
cuaaugagauuuccacacu

SEQ ID NO: 1556312 - RNA, 19 nt, Homo sapiens
  misc_RNA (1)...(19): siRNA sense strand
ggaaaagaacuuaauggua

SEQ ID NO: 1556313 - RNA, 19 nt, Homo sapiens
  misc_RNA (1)...(19): siRNA sense strand
ucacuuagagccgcuauuu

SEQ ID NO: 1556314 - RNA, 19 nt, Homo sapiens
  misc_RNA (1)...(19): siRNA sense strand
ucaccauccuguucauauu

SEQ ID NO: 1556315 - RNA, 19 nt, Homo sapiens
  misc_RNA (1)...(19): siRNA sense strand
cugaagaugucuggaauga

SEQ ID NO: 1556316 - RNA, 19 nt, Homo sapiens
  misc_RNA (1)...(19): siRNA sense strand
gaaagcucaguuaagagua

SEQ ID NO: 1556317 - RNA, 19 nt, Homo sapiens
  misc_RNA (1)...(19): siRNA sense strand
uggaggagguagaguuuga

SEQ ID NO: 1556318 - RNA, 19 nt, Homo sapiens
  misc_RNA (1)...(19): siRNA sense strand
gacaguaccuuuuauaugg

SEQ ID NO: 1556319 - RNA, 19 nt, Homo sapiens
  misc_RNA (1)...(19): siRNA sense strand
ugaauuccaugcaaacaag

SEQ ID NO: 1556320 - RNA, 19 nt, Homo sapiens
  misc_RNA (1)...(19): siRNA sense strand
acuuagagccgcuauuuaa

SEQ ID NO: 1556321 - RNA, 19 nt, Homo sapiens
  misc_RNA (1)...(19): siRNA sense strand
acacuuaguacuaguugua

SEQ ID NO: 1556322 - RNA, 19 nt, Homo sapiens
  misc_RNA (1)...(19): siRNA sense strand
aauacaaguugaagaagga

SEQ ID NO: 1556323 - RNA, 19 nt, Homo sapiens
  misc_RNA (1)...(19): siRNA sense strand
guaggcggguucccacaga

SEQ ID NO: 1556324 - RNA, 19 nt, Homo sapiens
  misc_RNA (1)...(19): siRNA sense strand
uagagccgcuauuuaagug

SEQ ID NO: 1556325 - RNA, 19 nt, Homo sapiens
  misc_RNA (1)...(19): siRNA sense strand
cacauccacuccaccauga

SEQ ID NO: 1556326 - RNA, 19 nt, Homo sapiens
  misc_RNA (1)...(19): siRNA sense strand
cuaaauaaagcuccacuca

SEQ ID NO: 1556327 - RNA, 19 nt, Homo sapiens
  misc_RNA (1)...(19): siRNA sense strand
gagccaggguuggucagaa

SEQ ID NO: 1556328 - RNA, 19 nt, Homo sapiens
  misc_RNA (1)...(19): siRNA sense strand
ccaaauccugacaaucaua

SEQ ID NO: 1556329 - RNA, 19 nt, Homo sapiens
  misc_RNA (1)...(19): siRNA sense strand
agaggaaccuugcuuugca

SEQ ID NO: 1556330 - RNA, 19 nt, Homo sapiens
  misc_RNA (1)...(19): siRNA sense strand
acugagaguucuugaggaa

SEQ ID NO: 1556331 - RNA, 19 nt, Homo sapiens
  misc_RNA (1)...(19): siRNA sense strand
ucaagggccaguucagaaa

SEQ ID NO: 1556332 - RNA, 19 nt, Homo sapiens
  misc_RNA (1)...(19): siRNA sense strand
ggugauauuugugucuuca

SEQ ID NO: 1556333 - RNA, 19 nt, Homo sapiens
  misc_RNA (1)...(19): siRNA sense strand
aaaaggaacuacuacucua

SEQ ID NO: 1556334 - RNA, 19 nt, Homo sapiens
  misc_RNA (1)...(19): siRNA sense strand
uguagcagcugaagauguc

SEQ ID NO: 1556335 - RNA, 19 nt, Homo sapiens
  misc_RNA (1)...(19): siRNA sense strand
gaaacugaaggcaaagaca

SEQ ID NO: 1556336 - RNA, 19 nt, Homo sapiens
  misc_RNA (1)...(19): siRNA sense strand
ggaugaaagcucaguuaag

SEQ ID NO: 1556337 - RNA, 19 nt, Homo sapiens
  misc_RNA (1)...(19): siRNA sense strand
ucacuugacauuccaaaca

SEQ ID NO: 1556338 - RNA, 19 nt, Homo sapiens
  misc_RNA (1)...(19): siRNA sense strand
ccagcuaacugcgauugga

SEQ ID NO: 1556339 - RNA, 19 nt, Homo sapiens
  misc_RNA (1)...(19): siRNA sense strand
uauuccagguguugcuaua

SEQ ID NO: 1556340 - RNA, 19 nt, Homo sapiens
  misc_RNA (1)...(19): siRNA sense strand
gcaaagacagcaaaaggaa

SEQ ID NO: 1556341 - RNA, 19 nt, Homo sapiens
  misc_RNA (1)...(19): siRNA sense strand
gaugagcagucuggcuuca

SEQ ID NO: 1556342 - RNA, 19 nt, Homo sapiens
  misc_RNA (1)...(19): siRNA sense strand
ccaaauaccagagcacauc

SEQ ID NO: 1556343 - RNA, 19 nt, Homo sapiens
  misc_RNA (1)...(19): siRNA sense strand
gagauuggagcaagagcuu

SEQ ID NO: 1556344 - RNA, 19 nt, Homo sapiens
  misc_RNA (1)...(19): siRNA sense strand
aaagcucaguuaagaguag

SEQ ID NO: 1556345 - RNA, 19 nt, Homo sapiens
  misc_RNA (1)...(19): siRNA sense strand
ugaaagcucaguuaagagu

SEQ ID NO: 1556346 - RNA, 19 nt, Homo sapiens
  misc_RNA (1)...(19): siRNA sense strand
aaggaugaaagcucaguua

SEQ ID NO: 1556347 - RNA, 19 nt, Homo sapiens
  misc_RNA (1)...(19): siRNA sense strand
gccaaauccugacaaucau

SEQ ID NO: 1556348 - RNA, 19 nt, Homo sapiens
  misc_RNA (1)...(19): siRNA sense strand
guacccuaguuuaaauuca

SEQ ID NO: 1556349 - RNA, 19 nt, Homo sapiens
  misc_RNA (1)...(19): siRNA sense strand
gcaaacaaggcaaaacaaa

SEQ ID NO: 1556350 - RNA, 19 nt, Homo sapiens
  misc_RNA (1)...(19): siRNA sense strand
gauuggagcaagagcuuug

SEQ ID NO: 1556351 - RNA, 19 nt, Homo sapiens
  misc_RNA (1)...(19): siRNA sense strand
gaggagguagaguuugaaa

SEQ ID NO: 1556352 - RNA, 19 nt, Homo sapiens
  misc_RNA (1)...(19): siRNA sense strand
aaaccgcgguggcuuagag

SEQ ID NO: 1556353 - RNA, 19 nt, Homo sapiens
  misc_RNA (1)...(19): siRNA sense strand
ccagccaaauccugacaau

SEQ ID NO: 1556354 - RNA, 19 nt, Homo sapiens
  misc_RNA (1)...(19): siRNA sense strand
gcacaucugcaaauucacu

SEQ ID NO: 1556355 - RNA, 19 nt, Homo sapiens
  misc_RNA (1)...(19): siRNA sense strand
ccaaauauaaucgacuguu

SEQ ID NO: 1556356 - RNA, 19 nt, Homo sapiens
  misc_RNA (1)...(19): siRNA sense strand
ggacaguaccuuuuauaug

SEQ ID NO: 1556357 - RNA, 19 nt, Homo sapiens
  misc_RNA (1)...(19): siRNA sense strand
gauucaugauuggacagua

SEQ ID NO: 1556358 - RNA, 19 nt, Homo sapiens
  misc_RNA (1)...(19): siRNA sense strand
caccauccuguucauauuu

SEQ ID NO: 1556359 - RNA, 19 nt, Homo sapiens
  misc_RNA (1)...(19): siRNA sense strand
agaggucaccguucuauuc

SEQ ID NO: 1556360 - RNA, 19 nt, Homo sapiens
  misc_RNA (1)...(19): siRNA sense strand
agccaaauccugacaauca

SEQ ID NO: 1556361 - RNA, 19 nt, Homo sapiens
  misc_RNA (1)...(19): siRNA sense strand
gagguagaguuugaaaugc

SEQ ID NO: 1556362 - RNA, 19 nt, Homo sapiens
  misc_RNA (1)...(19): siRNA sense strand
cagaaagggcacagucaga

SEQ ID NO: 1556363 - RNA, 19 nt, Homo sapiens
  misc_RNA (1)...(19): siRNA sense strand
uggaaaccgcgguggcuua

SEQ ID NO: 1556364 - RNA, 19 nt, Homo sapiens
  misc_RNA (1)...(19): siRNA sense strand
ugagcagucuggcuucauc

SEQ ID NO: 1556365 - RNA, 19 nt, Homo sapiens
  misc_RNA (1)...(19): siRNA sense strand
uaaugagauuuccacacuu

SEQ ID NO: 1556366 - RNA, 19 nt, Homo sapiens
  misc_RNA (1)...(19): siRNA sense strand
gaggaagagaggcaaagga

SEQ ID NO: 1556367 - RNA, 19 nt, Homo sapiens
  misc_RNA (1)...(19): siRNA sense strand
caccaugauuggaaagauc

SEQ ID NO: 1556368 - RNA, 19 nt, Homo sapiens
  misc_RNA (1)...(19): siRNA sense strand
ucagaggaaccuugcuuug

SEQ ID NO: 1556369 - RNA, 19 nt, Homo sapiens
  misc_RNA (1)...(19): siRNA sense strand
uccaaacacugcugauucu

SEQ ID NO: 1556370 - RNA, 19 nt, Homo sapiens
  misc_RNA (1)...(19): siRNA sense strand
gaaagggcacagucagaac

SEQ ID NO: 1556371 - RNA, 19 nt, Homo sapiens
  misc_RNA (1)...(19): siRNA sense strand
agaaagggcacagucagaa

SEQ ID NO: 1556372 - RNA, 19 nt, Homo sapiens
  misc_RNA (1)...(19): siRNA sense strand
caaacaaggcaaaacaaaa

SEQ ID NO: 1556373 - RNA, 19 nt, Homo sapiens
  misc_RNA (1)...(19): siRNA sense strand
ggguguagcagcugaagau

SEQ ID NO: 1556374 - RNA, 19 nt, Homo sapiens
  misc_RNA (1)...(19): siRNA sense strand
cagcugaagaugucuggaa

SEQ ID NO: 1556375 - RNA, 19 nt, Homo sapiens
  misc_RNA (1)...(19): siRNA sense strand
gaugaacccugucgggaau

SEQ ID NO: 1556376 - RNA, 19 nt, Homo sapiens
  misc_RNA (1)...(19): siRNA sense strand
gagccagccuucaaugugu

SEQ ID NO: 1556377 - RNA, 19 nt, Homo sapiens
  misc_RNA (1)...(19): siRNA sense strand
gacucuauccaaccuauua

SEQ ID NO: 1556378 - RNA, 19 nt, Homo sapiens
  misc_RNA (1)...(19): siRNA sense strand
gaaggacucuauccaaccu

SEQ ID NO: 1556379 - RNA, 19 nt, Homo sapiens
  misc_RNA (1)...(19): siRNA sense strand
ggagugcacagaagccaaa

SEQ ID NO: 1556380 - RNA, 19 nt, Homo sapiens
  misc_RNA (1)...(19): siRNA sense strand
ggagccagccuucaaugug

SEQ ID NO: 1556381 - RNA, 19 nt, Homo sapiens
  misc_RNA (1)...(19): siRNA sense strand
gcucuuggagugcacagaa

SEQ ID NO: 1556382 - RNA, 19 nt, Homo sapiens
  misc_RNA (1)...(19): siRNA sense strand
guacgaacagguagugaag

SEQ ID NO: 1556383 - RNA, 19 nt, Homo sapiens
  misc_RNA (1)...(19): siRNA sense strand
guauuucgaaggacucuau

SEQ ID NO: 1556384 - RNA, 19 nt, Homo sapiens
  misc_RNA (1)...(19): siRNA sense strand
gcauugcugguauuucgaa

SEQ ID NO: 1556385 - RNA, 19 nt, Homo sapiens
  misc_RNA (1)...(19): siRNA sense strand
gaggagccagccuucaaug

SEQ ID NO: 1556386 - RNA, 19 nt, Homo sapiens
  misc_RNA (1)...(19): siRNA sense strand
uugcugguauuucgaagga

SEQ ID NO: 1556387 - RNA, 19 nt, Homo sapiens
  misc_RNA (1)...(19): siRNA sense strand
cagaggcugugguacuucu

SEQ ID NO: 1556388 - RNA, 19 nt, Homo sapiens
  misc_RNA (1)...(19): siRNA sense strand
ggacucuauccaaccuauu

SEQ ID NO: 1556389 - RNA, 19 nt, Homo sapiens
  misc_RNA (1)...(19): siRNA sense strand
cgaggagccagccuucaau

SEQ ID NO: 1556390 - RNA, 19 nt, Homo sapiens
  misc_RNA (1)...(19): siRNA sense strand
ccaggucccacccaacuca

SEQ ID NO: 1556391 - RNA, 19 nt, Homo sapiens
  misc_RNA (1)...(19): siRNA sense strand
gguagugaaggccaaguag

SEQ ID NO: 1556392 - RNA, 19 nt, Homo sapiens
  misc_RNA (1)...(19): siRNA sense strand
ggaaagaacuguugaagaa

SEQ ID NO: 1556393 - RNA, 19 nt, Homo sapiens
  misc_RNA (1)...(19): siRNA sense strand
gaaggaggaugaaucuuuc

SEQ ID NO: 1556394 - RNA, 19 nt, Homo sapiens
  misc_RNA (1)...(19): siRNA sense strand
cuacuuggcucacgcuaua

SEQ ID NO: 1556395 - RNA, 19 nt, Homo sapiens
  misc_RNA (1)...(19): siRNA sense strand
ccacaucacugucucugaa

SEQ ID NO: 1556396 - RNA, 19 nt, Homo sapiens
  misc_RNA (1)...(19): siRNA sense strand
ucacuggaguugagaugua

SEQ ID NO: 1556397 - RNA, 19 nt, Homo sapiens
  misc_RNA (1)...(19): siRNA sense strand
ggcaacaccuuaucucuuc

SEQ ID NO: 1556398 - RNA, 19 nt, Homo sapiens
  misc_RNA (1)...(19): siRNA sense strand
agaaggaggaugaaucuuu

SEQ ID NO: 1556399 - RNA, 19 nt, Homo sapiens
  misc_RNA (1)...(19): siRNA sense strand
caccuuaucucuucuggau

SEQ ID NO: 1556400 - RNA, 19 nt, Homo sapiens
  misc_RNA (1)...(19): siRNA sense strand
gauaagauggcuaacuuca

SEQ ID NO: 1556401 - RNA, 19 nt, Homo sapiens
  misc_RNA (1)...(19): siRNA sense strand
ggagaaggaggaugaaucu

SEQ ID NO: 1556402 - RNA, 19 nt, Homo sapiens
  misc_RNA (1)...(19): siRNA sense strand
uugauaagauggcuaacuu

SEQ ID NO: 1556403 - RNA, 19 nt, Homo sapiens
  misc_RNA (1)...(19): siRNA sense strand
cacacugucuucuaccuuu

SEQ ID NO: 1556404 - RNA, 19 nt, Homo sapiens
  misc_RNA (1)...(19): siRNA sense strand
gaacuguugaagaagcuuu

SEQ ID NO: 1556405 - RNA, 19 nt, Homo sapiens
  misc_RNA (1)...(19): siRNA sense strand
gaggcacacugucuucuac

SEQ ID NO: 1556406 - RNA, 19 nt, Homo sapiens
  misc_RNA (1)...(19): siRNA sense strand
gggcaacaccuuaucucuu

SEQ ID NO: 1556407 - RNA, 19 nt, Homo sapiens
  misc_RNA (1)...(19): siRNA sense strand
agauguaacuauuccuaug

SEQ ID NO: 1556408 - RNA, 19 nt, Homo sapiens
  misc_RNA (1)...(19): siRNA sense strand
uaucagcucagccacauug

SEQ ID NO: 1556409 - RNA, 19 nt, Homo sapiens
  misc_RNA (1)...(19): siRNA sense strand
gagauguaacuauuccuau

SEQ ID NO: 1556410 - RNA, 19 nt, Homo sapiens
  misc_RNA (1)...(19): siRNA sense strand
uaucucuucuggauggaaa

SEQ ID NO: 1556411 - RNA, 19 nt, Homo sapiens
  misc_RNA (1)...(19): siRNA sense strand
ugucuucuaccuuugauaa

SEQ ID NO: 1556412 - RNA, 19 nt, Homo sapiens
  misc_RNA (1)...(19): siRNA sense strand
gaaagaacuguugaagaag

SEQ ID NO: 1556413 - RNA, 19 nt, Homo sapiens
  misc_RNA (1)...(19): siRNA sense strand
ugagauguaacuauuccua

SEQ ID NO: 1556414 - RNA, 19 nt, Homo sapiens
  misc_RNA (1)...(19): siRNA sense strand
cacuggaguugagauguaa

SEQ ID NO: 1556415 - RNA, 19 nt, Homo sapiens
  misc_RNA (1)...(19): siRNA sense strand
guuaucagcucagccacau

SEQ ID NO: 1556416 - RNA, 19 nt, Homo sapiens
  misc_RNA (1)...(19): siRNA sense strand
gcacacugucuucuaccuu

SEQ ID NO: 1556417 - RNA, 19 nt, Homo sapiens
  misc_RNA (1)...(19): siRNA sense strand
ggcucacgcuauaauguau

SEQ ID NO: 1556418 - RNA, 19 nt, Homo sapiens
  misc_RNA (1)...(19): siRNA sense strand
gauggaaagaacuguugaa

SEQ ID NO: 1556419 - RNA, 19 nt, Homo sapiens
  misc_RNA (1)...(19): siRNA sense strand
ggauggaaagaacuguuga

SEQ ID NO: 1556420 - RNA, 19 nt, Homo sapiens
  misc_RNA (1)...(19): siRNA sense strand
gauguaacuauuccuaugg

SEQ ID NO: 1556421 - RNA, 19 nt, Homo sapiens
  misc_RNA (1)...(19): siRNA sense strand
gcaaguagucuggagaaaa

SEQ ID NO: 1556422 - RNA, 19 nt, Homo sapiens
  misc_RNA (1)...(19): siRNA sense strand
uggaaagaacuguugaaga

SEQ ID NO: 1556423 - RNA, 19 nt, Homo sapiens
  misc_RNA (1)...(19): siRNA sense strand
gcaacaccuuaucucuucu

SEQ ID NO: 1556424 - RNA, 19 nt, Homo sapiens
  misc_RNA (1)...(19): siRNA sense strand
uggcucacgcuauaaugua

SEQ ID NO: 1556425 - RNA, 19 nt, Homo sapiens
  misc_RNA (1)...(19): siRNA sense strand
acacugucuucuaccuuug

SEQ ID NO: 1556426 - RNA, 19 nt, Homo sapiens
  misc_RNA (1)...(19): siRNA sense strand
gccagagcccagucaguga

SEQ ID NO: 1556427 - RNA, 19 nt, Homo sapiens
  misc_RNA (1)...(19): siRNA sense strand
uagcaaguagucuggagaa

SEQ ID NO: 1556428 - RNA, 19 nt, Homo sapiens
  misc_RNA (1)...(19): siRNA sense strand
aaaaggagaaggaggauga

SEQ ID NO: 1556429 - RNA, 19 nt, Homo sapiens
  misc_RNA (1)...(19): siRNA sense strand
cuucuaccuuugauaagau

SEQ ID NO: 1556430 - RNA, 19 nt, Homo sapiens
  misc_RNA (1)...(19): siRNA sense strand
uguauuagaggcacacugu

SEQ ID NO: 1556431 - RNA, 19 nt, Homo sapiens
  misc_RNA (1)...(19): siRNA sense strand
guugagauguaacuauucc

SEQ ID NO: 1556432 - RNA, 19 nt, Homo sapiens
  misc_RNA (1)...(19): siRNA sense strand
gcuaacuucaggugacuca

SEQ ID NO: 1556433 - RNA, 19 nt, Homo sapiens
  misc_RNA (1)...(19): siRNA sense strand
gaaagugcguguguuugaa

SEQ ID NO: 1556434 - RNA, 19 nt, Homo sapiens
  misc_RNA (1)...(19): siRNA sense strand
gaacaaaguccauuucaac

SEQ ID NO: 1556435 - RNA, 19 nt, Homo sapiens
  misc_RNA (1)...(19): siRNA sense strand
aaagagauuuccaaguuga

SEQ ID NO: 1556436 - RNA, 19 nt, Homo sapiens
  misc_RNA (1)...(19): siRNA sense strand
aaucauagcuacaucuuca

SEQ ID NO: 1556437 - RNA, 19 nt, Homo sapiens
  misc_RNA (1)...(19): siRNA sense strand
uggaagggcucaaccaaga

SEQ ID NO: 1556438 - RNA, 19 nt, Homo sapiens
  misc_RNA (1)...(19): siRNA sense strand
aagaggagcugcugaggau

SEQ ID NO: 1556439 - RNA, 19 nt, Homo sapiens
  misc_RNA (1)...(19): siRNA sense strand
ccagaaggcugugagaaag

SEQ ID NO: 1556440 - RNA, 19 nt, Homo sapiens
  misc_RNA (1)...(19): siRNA sense strand
gaccuggccuuccugacuu

SEQ ID NO: 1556441 - RNA, 19 nt, Homo sapiens
  misc_RNA (1)...(19): siRNA sense strand
ugagaaagugcguguguuu

SEQ ID NO: 1556442 - RNA, 19 nt, Homo sapiens
  misc_RNA (1)...(19): siRNA sense strand
agaacaaaguccauuucaa

SEQ ID NO: 1556443 - RNA, 19 nt, Homo sapiens
  misc_RNA (1)...(19): siRNA sense strand
ggacacccagccuuucuug

SEQ ID NO: 1556444 - RNA, 19 nt, Homo sapiens
  misc_RNA (1)...(19): siRNA sense strand
agaaagugcguguguuuga

SEQ ID NO: 1556445 - RNA, 19 nt, Homo sapiens
  misc_RNA (1)...(19): siRNA sense strand
caagaacaaaguccauuuc

SEQ ID NO: 1556446 - RNA, 19 nt, Homo sapiens
  misc_RNA (1)...(19): siRNA sense strand
cagaagagccugugcuuuu

SEQ ID NO: 1556447 - RNA, 19 nt, Homo sapiens
  misc_RNA (1)...(19): siRNA sense strand
gcacacaagcgcucagcau

SEQ ID NO: 1556448 - RNA, 19 nt, Homo sapiens
  misc_RNA (1)...(19): siRNA sense strand
acaagaacaaaguccauuu

SEQ ID NO: 1556449 - RNA, 19 nt, Homo sapiens
  misc_RNA (1)...(19): siRNA sense strand
uggaggagguauuugugaa

SEQ ID NO: 1556450 - RNA, 19 nt, Homo sapiens
  misc_RNA (1)...(19): siRNA sense strand
gagaaagugcguguguuug

SEQ ID NO: 1556451 - RNA, 19 nt, Homo sapiens
  misc_RNA (1)...(19): siRNA sense strand
ugaaggagcagggagaaga

SEQ ID NO: 1556452 - RNA, 19 nt, Homo sapiens
  misc_RNA (1)...(19): siRNA sense strand
cugcugaggauccuugaua

SEQ ID NO: 1556453 - RNA, 19 nt, Homo sapiens
  misc_RNA (1)...(19): siRNA sense strand
acacccagccuuucuugaa

SEQ ID NO: 1556454 - RNA, 19 nt, Homo sapiens
  misc_RNA (1)...(19): siRNA sense strand
gacaagaacaaaguccauu

SEQ ID NO: 1556455 - RNA, 19 nt, Homo sapiens
  misc_RNA (1)...(19): siRNA sense strand
cagcccaucuccaguccuu

SEQ ID NO: 1556456 - RNA, 19 nt, Homo sapiens
  misc_RNA (1)...(19): siRNA sense strand
gaaggugagcgugccaguu

SEQ ID NO: 1556457 - RNA, 19 nt, Homo sapiens
  misc_RNA (1)...(19): siRNA sense strand
cccagaaggcugugagaaa

SEQ ID NO: 1556458 - RNA, 19 nt, Homo sapiens
  misc_RNA (1)...(19): siRNA sense strand
gcagugggaaagagaagga

SEQ ID NO: 1556459 - RNA, 19 nt, Homo sapiens
  misc_RNA (1)...(19): siRNA sense strand
gcacagaccaccgaaaaga

SEQ ID NO: 1556460 - RNA, 19 nt, Homo sapiens
  misc_RNA (1)...(19): siRNA sense strand
gugagaaagugcguguguu

SEQ ID NO: 1556461 - RNA, 19 nt, Homo sapiens
  misc_RNA (1)...(19): siRNA sense strand
cggcaugggcuucaucuuc

SEQ ID NO: 1556462 - RNA, 19 nt, Homo sapiens
  misc_RNA (1)...(19): siRNA sense strand
ccagaaaagucagugugua

SEQ ID NO: 1556463 - RNA, 19 nt, Homo sapiens
  misc_RNA (1)...(19): siRNA sense strand
agaaggcugugagaaagug

SEQ ID NO: 1556464 - RNA, 19 nt, Homo sapiens
  misc_RNA (1)...(19): siRNA sense strand
aaaagagauuuccaaguug

SEQ ID NO: 1556465 - RNA, 19 nt, Homo sapiens
  misc_RNA (1)...(19): siRNA sense strand
gaaggagcagggagaagag

SEQ ID NO: 1556466 - RNA, 19 nt, Homo sapiens
  misc_RNA (1)...(19): siRNA sense strand
ucauagcuacaucuucaaa

SEQ ID NO: 1556467 - RNA, 19 nt, Homo sapiens
  misc_RNA (1)...(19): siRNA sense strand
ggaggagguauuugugaag

SEQ ID NO: 1556468 - RNA, 19 nt, Homo sapiens
  misc_RNA (1)...(19): siRNA sense strand
gaccuaaucauagcuacau

SEQ ID NO: 1556469 - RNA, 19 nt, Homo sapiens
  misc_RNA (1)...(19): siRNA sense strand
ccuggagccuggcaaccuu

SEQ ID NO: 1556470 - RNA, 19 nt, Homo sapiens
  misc_RNA (1)...(19): siRNA sense strand
cagaguggcagcugugauc

SEQ ID NO: 1556471 - RNA, 19 nt, Homo sapiens
  misc_RNA (1)...(19): siRNA sense strand
aaagagaaggagcgagguu

SEQ ID NO: 1556472 - RNA, 19 nt, Homo sapiens
  misc_RNA (1)...(19): siRNA sense strand
cacccagccuuucuugaag

SEQ ID NO: 1556473 - RNA, 19 nt, Homo sapiens
  misc_RNA (1)...(19): siRNA sense strand
gauccuugauaucccugau

SEQ ID NO: 1556474 - RNA, 19 nt, Homo sapiens
  misc_RNA (1)...(19): siRNA sense strand
ggcuucaucuuccguaacu

SEQ ID NO: 1556475 - RNA, 19 nt, Homo sapiens
  misc_RNA (1)...(19): siRNA sense strand
ucagaagagccugugcuuu

SEQ ID NO: 1556476 - RNA, 19 nt, Homo sapiens
  misc_RNA (1)...(19): siRNA sense strand
aaggugagcgugccaguuc

SEQ ID NO: 1556477 - RNA, 19 nt, Homo sapiens
  misc_RNA (1)...(19): siRNA sense strand
gcgagguucaccacuccua

SEQ ID NO: 1556478 - RNA, 19 nt, Homo sapiens
  misc_RNA (1)...(19): siRNA sense strand
aagaacaaaguccauuuca

SEQ ID NO: 1556479 - RNA, 19 nt, Homo sapiens
  misc_RNA (1)...(19): siRNA sense strand
gcagcacagaccaccgaaa

SEQ ID NO: 1556480 - RNA, 19 nt, Homo sapiens
  misc_RNA (1)...(19): siRNA sense strand
ggaaggaagcagagaauua

SEQ ID NO: 1556481 - RNA, 19 nt, Homo sapiens
  misc_RNA (1)...(19): siRNA sense strand
gggaugagcuaguugaauu

SEQ ID NO: 1556482 - RNA, 19 nt, Homo sapiens
  misc_RNA (1)...(19): siRNA sense strand
gaagaugauuuaagucaga

SEQ ID NO: 1556483 - RNA, 19 nt, Homo sapiens
  misc_RNA (1)...(19): siRNA sense strand
gaucagggcauacaucuuu

SEQ ID NO: 1556484 - RNA, 19 nt, Homo sapiens
  misc_RNA (1)...(19): siRNA sense strand
ggaggaaacugcuuauugg

SEQ ID NO: 1556485 - RNA, 19 nt, Homo sapiens
  misc_RNA (1)...(19): siRNA sense strand
ggaugaagcaagagauuua

SEQ ID NO: 1556486 - RNA, 19 nt, Homo sapiens
  misc_RNA (1)...(19): siRNA sense strand
gugaagauauaccagauuu

SEQ ID NO: 1556487 - RNA, 19 nt, Homo sapiens
  misc_RNA (1)...(19): siRNA sense strand
gaagcuagagcaucaauau

SEQ ID NO: 1556488 - RNA, 19 nt, Homo sapiens
  misc_RNA (1)...(19): siRNA sense strand
acaaagaaauagagacuug

SEQ ID NO: 1556489 - RNA, 19 nt, Homo sapiens
  misc_RNA (1)...(19): siRNA sense strand
ggaaagacaacaggaagua

SEQ ID NO: 1556490 - RNA, 19 nt, Homo sapiens
  misc_RNA (1)...(19): siRNA sense strand
guuaaaggaugaagcaaga

SEQ ID NO: 1556491 - RNA, 19 nt, Homo sapiens
  misc_RNA (1)...(19): siRNA sense strand
gcuaggauaucagcacuaa

SEQ ID NO: 1556492 - RNA, 19 nt, Homo sapiens
  misc_RNA (1)...(19): siRNA sense strand
guacaagcaucacuuucuu

SEQ ID NO: 1556493 - RNA, 19 nt, Homo sapiens
  misc_RNA (1)...(19): siRNA sense strand
uaaaggaggaaacugcuua

SEQ ID NO: 1556494 - RNA, 19 nt, Homo sapiens
  misc_RNA (1)...(19): siRNA sense strand
uuaaggagcaguugcauaa

SEQ ID NO: 1556495 - RNA, 19 nt, Homo sapiens
  misc_RNA (1)...(19): siRNA sense strand
gaaggaagcagagaauuag

SEQ ID NO: 1556496 - RNA, 19 nt, Homo sapiens
  misc_RNA (1)...(19): siRNA sense strand
caacaggaaguaacuagaa

SEQ ID NO: 1556497 - RNA, 19 nt, Homo sapiens
  misc_RNA (1)...(19): siRNA sense strand
gaacaaagaaauagagacu

SEQ ID NO: 1556498 - RNA, 19 nt, Homo sapiens
  misc_RNA (1)...(19): siRNA sense strand
accaaagacugaaauauga

SEQ ID NO: 1556499 - RNA, 19 nt, Homo sapiens
  misc_RNA (1)...(19): siRNA sense strand
gcugauaaccaaagacuga

SEQ ID NO: 1556500 - RNA, 19 nt, Homo sapiens
  misc_RNA (1)...(19): siRNA sense strand
gaaagacaacaggaaguaa

SEQ ID NO: 1556501 - RNA, 19 nt, Homo sapiens
  misc_RNA (1)...(19): siRNA sense strand
ggcuuuagaauccaaauua

SEQ ID NO: 1556502 - RNA, 19 nt, Homo sapiens
  misc_RNA (1)...(19): siRNA sense strand
cgaaagcuauaccaaaugg

SEQ ID NO: 1556503 - RNA, 19 nt, Homo sapiens
  misc_RNA (1)...(19): siRNA sense strand
gcuccuagcucuccaacuc

SEQ ID NO: 1556504 - RNA, 19 nt, Homo sapiens
  misc_RNA (1)...(19): siRNA sense strand
gauaucagcacuaaacauc

SEQ ID NO: 1556505 - RNA, 19 nt, Homo sapiens
  misc_RNA (1)...(19): siRNA sense strand
aacaauaguuucacuggaa

SEQ ID NO: 1556506 - RNA, 19 nt, Homo sapiens
  misc_RNA (1)...(19): siRNA sense strand
gaauggcaauggcacaaag

SEQ ID NO: 1556507 - RNA, 19 nt, Homo sapiens
  misc_RNA (1)...(19): siRNA sense strand
agaguuggaggcacaauua

SEQ ID NO: 1556508 - RNA, 19 nt, Homo sapiens
  misc_RNA (1)...(19): siRNA sense strand
aauaugaaguggaggcauu

SEQ ID NO: 1556509 - RNA, 19 nt, Homo sapiens
  misc_RNA (1)...(19): siRNA sense strand
caagagauuuaaggcaaga

SEQ ID NO: 1556510 - RNA, 19 nt, Homo sapiens
  misc_RNA (1)...(19): siRNA sense strand
agaauuagaagcagaguug

SEQ ID NO: 1556511 - RNA, 19 nt, Homo sapiens
  misc_RNA (1)...(19): siRNA sense strand
ggagaacacuuuuccuuca

SEQ ID NO: 1556512 - RNA, 19 nt, Homo sapiens
  misc_RNA (1)...(19): siRNA sense strand
uaagcaggucucaguguua

SEQ ID NO: 1556513 - RNA, 19 nt, Homo sapiens
  misc_RNA (1)...(19): siRNA sense strand
gcaggcugauaaccaaaga

SEQ ID NO: 1556514 - RNA, 19 nt, Homo sapiens
  misc_RNA (1)...(19): siRNA sense strand
guuggaggcacaauuagua

SEQ ID NO: 1556515 - RNA, 19 nt, Homo sapiens
  misc_RNA (1)...(19): siRNA sense strand
aguacaggcugaacaaaga

SEQ ID NO: 1556516 - RNA, 19 nt, Homo sapiens
  misc_RNA (1)...(19): siRNA sense strand
ggacuccgccguacaagca

SEQ ID NO: 1556517 - RNA, 19 nt, Homo sapiens
  misc_RNA (1)...(19): siRNA sense strand
aggagcaguugcauaagua

SEQ ID NO: 1556518 - RNA, 19 nt, Homo sapiens
  misc_RNA (1)...(19): siRNA sense strand
gcuauaagcaggucucagu

SEQ ID NO: 1556519 - RNA, 19 nt, Homo sapiens
  misc_RNA (1)...(19): siRNA sense strand
gagacuugcaggcugauaa

SEQ ID NO: 1556520 - RNA, 19 nt, Homo sapiens
  misc_RNA (1)...(19): siRNA sense strand
aggagaagcuagagcauca

SEQ ID NO: 1556521 - RNA, 19 nt, Homo sapiens
  misc_RNA (1)...(19): siRNA sense strand
caauaugcacagagcuaua

SEQ ID NO: 1556522 - RNA, 19 nt, Homo sapiens
  misc_RNA (1)...(19): siRNA sense strand
gaugaagcaagagauuuaa

SEQ ID NO: 1556523 - RNA, 19 nt, Homo sapiens
  misc_RNA (1)...(19): siRNA sense strand
gcuuuagaauccaaauuag

SEQ ID NO: 1556524 - RNA, 19 nt, Homo sapiens
  misc_RNA (1)...(19): siRNA sense strand
ggaccaagcaucacgaaaa

SEQ ID NO: 1556525 - RNA, 19 nt, Homo sapiens
  misc_RNA (1)...(19): siRNA sense strand
aaccaaagacugaaauaug

SEQ ID NO: 1556526 - RNA, 19 nt, Homo sapiens
  misc_RNA (1)...(19): siRNA sense strand
ccacuaacucccucugcua

SEQ ID NO: 1556527 - RNA, 19 nt, Homo sapiens
  misc_RNA (1)...(19): siRNA sense strand
gauggacuccgccguacaa

SEQ ID NO: 1556528 - RNA, 19 nt, Homo sapiens
  misc_RNA (1)...(19): siRNA sense strand
aacaggaaguaacuagaaa

SEQ ID NO: 1556529 - RNA, 19 nt, Homo sapiens
  misc_RNA (1)...(19): siRNA sense strand
gcaggucucaguguuagaa

SEQ ID NO: 1556530 - RNA, 19 nt, Homo sapiens
  misc_RNA (1)...(19): siRNA sense strand
ccaggaagcucgggaugag

SEQ ID NO: 1556531 - RNA, 19 nt, Homo sapiens
  misc_RNA (1)...(19): siRNA sense strand
gcaggaauuuugcaaagga

SEQ ID NO: 1556532 - RNA, 19 nt, Homo sapiens
  misc_RNA (1)...(19): siRNA sense strand
ccaaagacugaaauaugaa

SEQ ID NO: 1556533 - RNA, 19 nt, Homo sapiens
  misc_RNA (1)...(19): siRNA sense strand
accgaaagcuauaccaaau

SEQ ID NO: 1556534 - RNA, 19 nt, Homo sapiens
  misc_RNA (1)...(19): siRNA sense strand
auaagcaggucucaguguu

SEQ ID NO: 1556535 - RNA, 19 nt, Homo sapiens
  misc_RNA (1)...(19): siRNA sense strand
gauaaccaaagacugaaau

SEQ ID NO: 1556536 - RNA, 19 nt, Homo sapiens
  misc_RNA (1)...(19): siRNA sense strand
gaauccaaauuagcagcuu

SEQ ID NO: 1556537 - RNA, 19 nt, Homo sapiens
  misc_RNA (1)...(19): siRNA sense strand
uaaaggaugaagcaagaga

SEQ ID NO: 1556538 - RNA, 19 nt, Homo sapiens
  misc_RNA (1)...(19): siRNA sense strand
caaaagggcaacaauaguu

SEQ ID NO: 1556539 - RNA, 19 nt, Homo sapiens
  misc_RNA (1)...(19): siRNA sense strand
ggaagcagagaauuagaag

SEQ ID NO: 1556540 - RNA, 19 nt, Homo sapiens
  misc_RNA (1)...(19): siRNA sense strand
gggcaacaauaguuucacu

SEQ ID NO: 1556541 - RNA, 19 nt, Homo sapiens
  misc_RNA (1)...(19): siRNA sense strand
ucacuuucuuugccagcua

SEQ ID NO: 1556542 - RNA, 19 nt, Homo sapiens
  misc_RNA (1)...(19): siRNA sense strand
gaaguggaggcauuaaagg

SEQ ID NO: 1556543 - RNA, 19 nt, Homo sapiens
  misc_RNA (1)...(19): siRNA sense strand
auacaucuuucuucgacaa

SEQ ID NO: 1556544 - RNA, 19 nt, Homo sapiens
  misc_RNA (1)...(19): siRNA sense strand
gaccaagcaucacgaaaau

SEQ ID NO: 1556545 - RNA, 19 nt, Homo sapiens
  misc_RNA (1)...(19): siRNA sense strand
cuccaacucuagacuguga

SEQ ID NO: 1556546 - RNA, 19 nt, Homo sapiens
  misc_RNA (1)...(19): siRNA sense strand
gcuaaaccaggccauugaa

SEQ ID NO: 1556547 - RNA, 19 nt, Homo sapiens
  misc_RNA (1)...(19): siRNA sense strand
uacagagguuaaaggauga

SEQ ID NO: 1556548 - RNA, 19 nt, Homo sapiens
  misc_RNA (1)...(19): siRNA sense strand
ggcacaaaguucucucgau

SEQ ID NO: 1556549 - RNA, 19 nt, Homo sapiens
  misc_RNA (1)...(19): siRNA sense strand
gcaaaggaacggagaacac

SEQ ID NO: 1556550 - RNA, 19 nt, Homo sapiens
  misc_RNA (1)...(19): siRNA sense strand
aaggagcaguugcauaagu

SEQ ID NO: 1556551 - RNA, 19 nt, Homo sapiens
  misc_RNA (1)...(19): siRNA sense strand
gaggaaacugcuuauugga

SEQ ID NO: 1556552 - RNA, 19 nt, Homo sapiens
  misc_RNA (1)...(19): siRNA sense strand
acaagcaucacuuucuuug

SEQ ID NO: 1556553 - RNA, 19 nt, Homo sapiens
  misc_RNA (1)...(19): siRNA sense strand
aggaggaaacugcuuauug

SEQ ID NO: 1556554 - RNA, 19 nt, Homo sapiens
  misc_RNA (1)...(19): siRNA sense strand
guacaggcugaacaaagaa

SEQ ID NO: 1556555 - RNA, 19 nt, Homo sapiens
  misc_RNA (1)...(19): siRNA sense strand
gagaagcuagagcaucaau

SEQ ID NO: 1556556 - RNA, 19 nt, Homo sapiens
  misc_RNA (1)...(19): siRNA sense strand
caccgaaagcuauaccaaa

SEQ ID NO: 1556557 - RNA, 19 nt, Homo sapiens
  misc_RNA (1)...(19): siRNA sense strand
gagguuaaaggaugaagca

SEQ ID NO: 1556558 - RNA, 19 nt, Homo sapiens
  misc_RNA (1)...(19): siRNA sense strand
uaguuucacuggaagacuu

SEQ ID NO: 1556559 - RNA, 19 nt, Homo sapiens
  misc_RNA (1)...(19): siRNA sense strand
ucucaguguuagaagauga

SEQ ID NO: 1556560 - RNA, 19 nt, Homo sapiens
  misc_RNA (1)...(19): siRNA sense strand
aauaugcacagagcuauaa

SEQ ID NO: 1556561 - RNA, 19 nt, Homo sapiens
  misc_RNA (1)...(19): siRNA sense strand
ugaaguggaggcauuaaag

SEQ ID NO: 1556562 - RNA, 19 nt, Homo sapiens
  misc_RNA (1)...(19): siRNA sense strand
aagcagagaauuagaagca

SEQ ID NO: 1556563 - RNA, 19 nt, Homo sapiens
  misc_RNA (1)...(19): siRNA sense strand
uaucagcacuaaacaucgu

SEQ ID NO: 1556564 - RNA, 19 nt, Homo sapiens
  misc_RNA (1)...(19): siRNA sense strand
cuaacucccucugcuagga

SEQ ID NO: 1556565 - RNA, 19 nt, Homo sapiens
  misc_RNA (1)...(19): siRNA sense strand
aaggaacggagaacacuuu

SEQ ID NO: 1556566 - RNA, 19 nt, Homo sapiens
  misc_RNA (1)...(19): siRNA sense strand
gacaacaggaaguaacuag

SEQ ID NO: 1556567 - RNA, 19 nt, Homo sapiens
  misc_RNA (1)...(19): siRNA sense strand
ggcuaaaccaggccauuga

SEQ ID NO: 1556568 - RNA, 19 nt, Homo sapiens
  misc_RNA (1)...(19): siRNA sense strand
acaaaguucucucgaucag

SEQ ID NO: 1556569 - RNA, 19 nt, Homo sapiens
  misc_RNA (1)...(19): siRNA sense strand
aagcaggucucaguguuag

SEQ ID NO: 1556570 - RNA, 19 nt, Homo sapiens
  misc_RNA (1)...(19): siRNA sense strand
caggcugaacaaagaaaua

SEQ ID NO: 1556571 - RNA, 19 nt, Homo sapiens
  misc_RNA (1)...(19): siRNA sense strand
ggugaagauauaccagauu

SEQ ID NO: 1556572 - RNA, 19 nt, Homo sapiens
  misc_RNA (1)...(19): siRNA sense strand
cauuaaaggagaagcuaga

SEQ ID NO: 1556573 - RNA, 19 nt, Homo sapiens
  misc_RNA (1)...(19): siRNA sense strand
auuagcagcuugcaggaau

SEQ ID NO: 1556574 - RNA, 19 nt, Homo sapiens
  misc_RNA (1)...(19): siRNA sense strand
ggauaucagcacuaaacau

SEQ ID NO: 1556575 - RNA, 19 nt, Homo sapiens
  misc_RNA (1)...(19): siRNA sense strand
uaggauaucagcacuaaac

SEQ ID NO: 1556576 - RNA, 19 nt, Homo sapiens
  misc_RNA (1)...(19): siRNA sense strand
ccaggaaggaagcagagaa

SEQ ID NO: 1556577 - RNA, 19 nt, Homo sapiens
  misc_RNA (1)...(19): siRNA sense strand
agauuuaaggcaagaacua

SEQ ID NO: 1556578 - RNA, 19 nt, Homo sapiens
  misc_RNA (1)...(19): siRNA sense strand
gucagacucgggccauuaa

SEQ ID NO: 1556579 - RNA, 19 nt, Homo sapiens
  misc_RNA (1)...(19): siRNA sense strand
aaaccaggccauugaacga

SEQ ID NO: 1556580 - RNA, 19 nt, Homo sapiens
  misc_RNA (1)...(19): siRNA sense strand
ggauauggcucuggcuuug

SEQ ID NO: 1556581 - RNA, 19 nt, Homo sapiens
  misc_RNA (1)...(19): siRNA sense strand
ggauauggauucucuggau

SEQ ID NO: 1556582 - RNA, 19 nt, Homo sapiens
  misc_RNA (1)...(19): siRNA sense strand
gauauggauucucuggauu

SEQ ID NO: 1556583 - RNA, 19 nt, Homo sapiens
  misc_RNA (1)...(19): siRNA sense strand
uggauucucuggauucuau

SEQ ID NO: 1556584 - RNA, 19 nt, Homo sapiens
  misc_RNA (1)...(19): siRNA sense strand
gauucucuggauucuauua

SEQ ID NO: 1556585 - RNA, 19 nt, Homo sapiens
  misc_RNA (1)...(19): siRNA sense strand
gcuauggaggcuacggaua

SEQ ID NO: 1556586 - RNA, 19 nt, Homo sapiens
  misc_RNA (1)...(19): siRNA sense strand
uggaggauauggauucucu

SEQ ID NO: 1556587 - RNA, 19 nt, Homo sapiens
  misc_RNA (1)...(19): siRNA sense strand
cuauggcuguggaggcuuu

SEQ ID NO: 1556588 - RNA, 19 nt, Homo sapiens
  misc_RNA (1)...(19): siRNA sense strand
cuauggaggcuacggauau

SEQ ID NO: 1556589 - RNA, 19 nt, Homo sapiens
  misc_RNA (1)...(19): siRNA sense strand
cuacuacggcagcuacuau

SEQ ID NO: 1556590 - RNA, 19 nt, Homo sapiens
  misc_RNA (1)...(19): siRNA sense strand
cuucggaggcuacggauau

SEQ ID NO: 1556591 - RNA, 19 nt, Homo sapiens
  misc_RNA (1)...(19): siRNA sense strand
ggcuauggcuguggaugug

SEQ ID NO: 1556592 - RNA, 19 nt, Homo sapiens
  misc_RNA (1)...(19): siRNA sense strand
uauggaggcuacggauaug

SEQ ID NO: 1556593 - RNA, 19 nt, Homo sapiens
  misc_RNA (1)...(19): siRNA sense strand
ggccugggcuauggcuaug

SEQ ID NO: 1556594 - RNA, 19 nt, Homo sapiens
  misc_RNA (1)...(19): siRNA sense strand
cuauggaggauauggauuc

SEQ ID NO: 1556595 - RNA, 19 nt, Homo sapiens
  misc_RNA (1)...(19): siRNA sense strand
cggauauggcucuggcuuu

SEQ ID NO: 1556596 - RNA, 19 nt, Homo sapiens
  misc_RNA (1)...(19): siRNA sense strand
caucucaacuuacucauua

SEQ ID NO: 1556597 - RNA, 19 nt, Homo sapiens
  misc_RNA (1)...(19): siRNA sense strand
ggaauaaggacaucaaaga

SEQ ID NO: 1556598 - RNA, 19 nt, Homo sapiens
  misc_RNA (1)...(19): siRNA sense strand
ugacagcaauggcauauga

SEQ ID NO: 1556599 - RNA, 19 nt, Homo sapiens
  misc_RNA (1)...(19): siRNA sense strand
ucaaacagcuauaacugaa

SEQ ID NO: 1556600 - RNA, 19 nt, Homo sapiens
  misc_RNA (1)...(19): siRNA sense strand
gcagcgccaucuuuacaua

SEQ ID NO: 1556601 - RNA, 19 nt, Homo sapiens
  misc_RNA (1)...(19): siRNA sense strand
gaaagaaucaaacagcuau

SEQ ID NO: 1556602 - RNA, 19 nt, Homo sapiens
  misc_RNA (1)...(19): siRNA sense strand
gaauaaggacaucaaagaa

SEQ ID NO: 1556603 - RNA, 19 nt, Homo sapiens
  misc_RNA (1)...(19): siRNA sense strand
gagcaagguucuaugcaau

SEQ ID NO: 1556604 - RNA, 19 nt, Homo sapiens
  misc_RNA (1)...(19): siRNA sense strand
cuagggaacuuggccuuua

SEQ ID NO: 1556605 - RNA, 19 nt, Homo sapiens
  misc_RNA (1)...(19): siRNA sense strand
gaaacacuucugucaauga

SEQ ID NO: 1556606 - RNA, 19 nt, Homo sapiens
  misc_RNA (1)...(19): siRNA sense strand
gaacuuggccuuuauugac

SEQ ID NO: 1556607 - RNA, 19 nt, Homo sapiens
  misc_RNA (1)...(19): siRNA sense strand
ggaaagaaagaaucaaaca

SEQ ID NO: 1556608 - RNA, 19 nt, Homo sapiens
  misc_RNA (1)...(19): siRNA sense strand
ggaaacacuucugucaaug

SEQ ID NO: 1556609 - RNA, 19 nt, Homo sapiens
  misc_RNA (1)...(19): siRNA sense strand
gaucuugucuuguggaaac

SEQ ID NO: 1556610 - RNA, 19 nt, Homo sapiens
  misc_RNA (1)...(19): siRNA sense strand
caucaaagaagcugucaaa

SEQ ID NO: 1556611 - RNA, 19 nt, Homo sapiens
  misc_RNA (1)...(19): siRNA sense strand
ggacuccuuuccuuuguau

SEQ ID NO: 1556612 - RNA, 19 nt, Homo sapiens
  misc_RNA (1)...(19): siRNA sense strand
caaagaagcugucaaaacu

SEQ ID NO: 1556613 - RNA, 19 nt, Homo sapiens
  misc_RNA (1)...(19): siRNA sense strand
uaucguacuuuccuacauu

SEQ ID NO: 1556614 - RNA, 19 nt, Homo sapiens
  misc_RNA (1)...(19): siRNA sense strand
aaagaaagauagguugguu

SEQ ID NO: 1556615 - RNA, 19 nt, Homo sapiens
  misc_RNA (1)...(19): siRNA sense strand
gcaagguucuaugcaauca

SEQ ID NO: 1556616 - RNA, 19 nt, Homo sapiens
  misc_RNA (1)...(19): siRNA sense strand
ggcauaugaucguuacauu

SEQ ID NO: 1556617 - RNA, 19 nt, Homo sapiens
  misc_RNA (1)...(19): siRNA sense strand
uggaaacacuucugucaau

SEQ ID NO: 1556618 - RNA, 19 nt, Homo sapiens
  misc_RNA (1)...(19): siRNA sense strand
gcaauggcauaugaucguu

SEQ ID NO: 1556619 - RNA, 19 nt, Homo sapiens
  misc_RNA (1)...(19): siRNA sense strand
gcaaucugcaauccuuuaa

SEQ ID NO: 1556620 - RNA, 19 nt, Homo sapiens
  misc_RNA (1)...(19): siRNA sense strand
ggaacuuggccuuuauuga

SEQ ID NO: 1556621 - RNA, 19 nt, Homo sapiens
  misc_RNA (1)...(19): siRNA sense strand
acacuucugucaaugaguu

SEQ ID NO: 1556622 - RNA, 19 nt, Homo sapiens
  misc_RNA (1)...(19): siRNA sense strand
ugagcaagguucuaugcaa

SEQ ID NO: 1556623 - RNA, 19 nt, Homo sapiens
  misc_RNA (1)...(19): siRNA sense strand
ccaccuggccauugucuuu

SEQ ID NO: 1556624 - RNA, 19 nt, Homo sapiens
  misc_RNA (1)...(19): siRNA sense strand
ucuccaaccuaaaugaauu

SEQ ID NO: 1556625 - RNA, 19 nt, Homo sapiens
  misc_RNA (1)...(19): siRNA sense strand
gcauaugaucguuacauug

SEQ ID NO: 1556626 - RNA, 19 nt, Homo sapiens
  misc_RNA (1)...(19): siRNA sense strand
cauaaucuccaccaucuug

SEQ ID NO: 1556627 - RNA, 19 nt, Homo sapiens
  misc_RNA (1)...(19): siRNA sense strand
gguucuaugcaaucaauua

SEQ ID NO: 1556628 - RNA, 19 nt, Homo sapiens
  misc_RNA (1)...(19): siRNA sense strand
gaucagagcgucuccuacu

SEQ ID NO: 1556629 - RNA, 19 nt, Homo sapiens
  misc_RNA (1)...(19): siRNA sense strand
gaaagaaagaaucaaacag

SEQ ID NO: 1556630 - RNA, 19 nt, Homo sapiens
  misc_RNA (1)...(19): siRNA sense strand
uagguugguuucaguguug

SEQ ID NO: 1556631 - RNA, 19 nt, Homo sapiens
  misc_RNA (1)...(19): siRNA sense strand
gcaccuccucucaaagaaa

SEQ ID NO: 1556632 - RNA, 19 nt, Homo sapiens
  misc_RNA (1)...(19): siRNA sense strand
caugcuaaacccuauaauu

SEQ ID NO: 1556633 - RNA, 19 nt, Homo sapiens
  misc_RNA (1)...(19): siRNA sense strand
gaaucaaacagcuauaacu

SEQ ID NO: 1556634 - RNA, 19 nt, Homo sapiens
  misc_RNA (1)...(19): siRNA sense strand
guacuuuccuacauuugca

SEQ ID NO: 1556635 - RNA, 19 nt, Homo sapiens
  misc_RNA (1)...(19): siRNA sense strand
gggauucuccaaccuaaau

SEQ ID NO: 1556636 - RNA, 19 nt, Homo sapiens
  misc_RNA (1)...(19): siRNA sense strand
guacggcccaucucaacuu

SEQ ID NO: 1556637 - RNA, 19 nt, Homo sapiens
  misc_RNA (1)...(19): siRNA sense strand
aaagauagguugguuucag

SEQ ID NO: 1556638 - RNA, 19 nt, Homo sapiens
  misc_RNA (1)...(19): siRNA sense strand
uagggaacuuggccuuuau

SEQ ID NO: 1556639 - RNA, 19 nt, Homo sapiens
  misc_RNA (1)...(19): siRNA sense strand
aaacacuucugucaaugag

SEQ ID NO: 1556640 - RNA, 19 nt, Homo sapiens
  misc_RNA (1)...(19): siRNA sense strand
ccaucuucuuucugacuua

SEQ ID NO: 1556641 - RNA, 19 nt, Homo sapiens
  misc_RNA (1)...(19): siRNA sense strand
uugcugaucuugucuugug

SEQ ID NO: 1556642 - RNA, 19 nt, Homo sapiens
  misc_RNA (1)...(19): siRNA sense strand
gugcaccuccucucaaaga

SEQ ID NO: 1556643 - RNA, 19 nt, Homo sapiens
  misc_RNA (1)...(19): siRNA sense strand
gccauugucuuucucuuuu

SEQ ID NO: 1556644 - RNA, 19 nt, Homo sapiens
  misc_RNA (1)...(19): siRNA sense strand
ggccauugucuuucucuuu

SEQ ID NO: 1556645 - RNA, 19 nt, Homo sapiens
  misc_RNA (1)...(19): siRNA sense strand
gcccuucuguggcaacaau

SEQ ID NO: 1556646 - RNA, 19 nt, Homo sapiens
  misc_RNA (1)...(19): siRNA sense strand
agaaagaaucaaacagcua

SEQ ID NO: 1556647 - RNA, 19 nt, Homo sapiens
  misc_RNA (1)...(19): siRNA sense strand
uacggcccaucucaacuua

SEQ ID NO: 1556648 - RNA, 19 nt, Homo sapiens
  misc_RNA (1)...(19): siRNA sense strand
gaggaauaaggacaucaaa

SEQ ID NO: 1556649 - RNA, 19 nt, Homo sapiens
  misc_RNA (1)...(19): siRNA sense strand
cccuauaauuuacacauug

SEQ ID NO: 1556650 - RNA, 19 nt, Homo sapiens
  misc_RNA (1)...(19): siRNA sense strand
caauggcauaugaucguua

SEQ ID NO: 1556651 - RNA, 19 nt, Homo sapiens
  misc_RNA (1)...(19): siRNA sense strand
ugcauaaucuccaccaucu

SEQ ID NO: 1556652 - RNA, 19 nt, Homo sapiens
  misc_RNA (1)...(19): siRNA sense strand
ugcauacaguguugacauu

SEQ ID NO: 1556653 - RNA, 19 nt, Homo sapiens
  misc_RNA (1)...(19): siRNA sense strand
uaugaucguuacauugcaa

SEQ ID NO: 1556654 - RNA, 19 nt, Homo sapiens
  misc_RNA (1)...(19): siRNA sense strand
ucuaugcaaucaauuagca

SEQ ID NO: 1556655 - RNA, 19 nt, Homo sapiens
  misc_RNA (1)...(19): siRNA sense strand
aagguucuaugcaaucaau

SEQ ID NO: 1556656 - RNA, 19 nt, Homo sapiens
  misc_RNA (1)...(19): siRNA sense strand
gggcugcugguuuccuuaa

SEQ ID NO: 1556657 - RNA, 19 nt, Homo sapiens
  misc_RNA (1)...(19): siRNA sense strand
cauaugaucguuacauugc

SEQ ID NO: 1556658 - RNA, 19 nt, Homo sapiens
  misc_RNA (1)...(19): siRNA sense strand
agccaccaauuuccucuuu

SEQ ID NO: 1556659 - RNA, 19 nt, Homo sapiens
  misc_RNA (1)...(19): siRNA sense strand
acuauucaccaucuucuuu

SEQ ID NO: 1556660 - RNA, 19 nt, Homo sapiens
  misc_RNA (1)...(19): siRNA sense strand
ucaguguuguacaguguug

SEQ ID NO: 1556661 - RNA, 19 nt, Homo sapiens
  misc_RNA (1)...(19): siRNA sense strand
aagauagguugguuucagu

SEQ ID NO: 1556662 - RNA, 19 nt, Homo sapiens
  misc_RNA (1)...(19): siRNA sense strand
cauacaguguugacauucu

SEQ ID NO: 1556663 - RNA, 19 nt, Homo sapiens
  misc_RNA (1)...(19): siRNA sense strand
uggugcaccuccucucaaa

SEQ ID NO: 1556664 - RNA, 19 nt, Homo sapiens
  misc_RNA (1)...(19): siRNA sense strand
agcuauaacugaauucauc

SEQ ID NO: 1556665 - RNA, 19 nt, Homo sapiens
  misc_RNA (1)...(19): siRNA sense strand
acacauugaggaauaagga

SEQ ID NO: 1556666 - RNA, 19 nt, Homo sapiens
  misc_RNA (1)...(19): siRNA sense strand
gcgccaucuuuacauaugu

SEQ ID NO: 1556667 - RNA, 19 nt, Homo sapiens
  misc_RNA (1)...(19): siRNA sense strand
caucuucuuucugacuuau

SEQ ID NO: 1556668 - RNA, 19 nt, Homo sapiens
  misc_RNA (1)...(19): siRNA sense strand
gauggugcaccuccucuca

SEQ ID NO: 1556669 - RNA, 19 nt, Homo sapiens
  misc_RNA (1)...(19): siRNA sense strand
ccacaccugcauacaccua

SEQ ID NO: 1556670 - RNA, 19 nt, Homo sapiens
  misc_RNA (1)...(19): siRNA sense strand
ggauaguaaacucacuuau

SEQ ID NO: 1556671 - RNA, 19 nt, Homo sapiens
  misc_RNA (1)...(19): siRNA sense strand
uggauaguaaacucacuua

SEQ ID NO: 1556672 - RNA, 19 nt, Homo sapiens
  misc_RNA (1)...(19): siRNA sense strand
aaucaaacagcuauaacug

SEQ ID NO: 1556673 - RNA, 19 nt, Homo sapiens
  misc_RNA (1)...(19): siRNA sense strand
ccucccaccuggccauugu

SEQ ID NO: 1556674 - RNA, 19 nt, Homo sapiens
  misc_RNA (1)...(19): siRNA sense strand
guaucguacuuuccuacau

SEQ ID NO: 1556675 - RNA, 19 nt, Homo sapiens
  misc_RNA (1)...(19): siRNA sense strand
guuggacuccuuuccuuug

SEQ ID NO: 1556676 - RNA, 19 nt, Homo sapiens
  misc_RNA (1)...(19): siRNA sense strand
gggaacuuggccuuuauug

SEQ ID NO: 1556677 - RNA, 19 nt, Homo sapiens
  misc_RNA (1)...(19): siRNA sense strand
gcuauaacugaauucauca

SEQ ID NO: 1556678 - RNA, 19 nt, Homo sapiens
  misc_RNA (1)...(19): siRNA sense strand
uggacuccuuuccuuugua

SEQ ID NO: 1556679 - RNA, 19 nt, Homo sapiens
  misc_RNA (1)...(19): siRNA sense strand
gauucuccaaccuaaauga

SEQ ID NO: 1556680 - RNA, 19 nt, Homo sapiens
  misc_RNA (1)...(19): siRNA sense strand
uucaccaucuucuuucuga

SEQ ID NO: 1556681 - RNA, 19 nt, Homo sapiens
  misc_RNA (1)...(19): siRNA sense strand
uaauuaucuugacgacugu

SEQ ID NO: 1556682 - RNA, 19 nt, Homo sapiens
  misc_RNA (1)...(19): siRNA sense strand
uuuccucuuuggauaguaa

SEQ ID NO: 1556683 - RNA, 19 nt, Homo sapiens
  misc_RNA (1)...(19): siRNA sense strand
gccaccaauuuccucuuug

SEQ ID NO: 1556684 - RNA, 19 nt, Homo sapiens
  misc_RNA (1)...(19): siRNA sense strand
gguuggacuccuuuccuuu

SEQ ID NO: 1556685 - RNA, 19 nt, Homo sapiens
  misc_RNA (1)...(19): siRNA sense strand
ccuaaaugaauugcaguuu

SEQ ID NO: 1556686 - RNA, 19 nt, Homo sapiens
  misc_RNA (1)...(19): siRNA sense strand
aagaagcugucaaaacuau

SEQ ID NO: 1556687 - RNA, 19 nt, Homo sapiens
  misc_RNA (1)...(19): siRNA sense strand
aauaaggacaucaaagaag

SEQ ID NO: 1556688 - RNA, 19 nt, Homo sapiens
  misc_RNA (1)...(19): siRNA sense strand
gcccaucucaacuuacuca

SEQ ID NO: 1556689 - RNA, 19 nt, Homo sapiens
  misc_RNA (1)...(19): siRNA sense strand
guggaaacacuucugucaa

SEQ ID NO: 1556690 - RNA, 19 nt, Homo sapiens
  misc_RNA (1)...(19): siRNA sense strand
gcauacaguguugacauuc

SEQ ID NO: 1556691 - RNA, 19 nt, Homo sapiens
  misc_RNA (1)...(19): siRNA sense strand
gcugcugguuuccuuaacu

SEQ ID NO: 1556692 - RNA, 19 nt, Homo sapiens
  misc_RNA (1)...(19): siRNA sense strand
ugaggaauaaggacaucaa

SEQ ID NO: 1556693 - RNA, 19 nt, Homo sapiens
  misc_RNA (1)...(19): siRNA sense strand
gauagguugguuucagugu

SEQ ID NO: 1556694 - RNA, 19 nt, Homo sapiens
  misc_RNA (1)...(19): siRNA sense strand
caaacagcuauaacugaau

SEQ ID NO: 1556695 - RNA, 19 nt, Homo sapiens
  misc_RNA (1)...(19): siRNA sense strand
caauuuccucuuuggauag

SEQ ID NO: 1556696 - RNA, 19 nt, Homo sapiens
  misc_RNA (1)...(19): siRNA sense strand
ccacaggguucccauguuu

SEQ ID NO: 1556697 - RNA, 19 nt, Homo sapiens
  misc_RNA (1)...(19): siRNA sense strand
ucagugcccuccuggguua

SEQ ID NO: 1556698 - RNA, 19 nt, Homo sapiens
  misc_RNA (1)...(19): siRNA sense strand
gcucuaacccggcuacaga

SEQ ID NO: 1556699 - RNA, 19 nt, Homo sapiens
  misc_RNA (1)...(19): siRNA sense strand
uaacccggcuacagaagug

SEQ ID NO: 1556700 - RNA, 19 nt, Homo sapiens
  misc_RNA (1)...(19): siRNA sense strand
ggaacagugucuggaaugg

SEQ ID NO: 1556701 - RNA, 19 nt, Homo sapiens
  misc_RNA (1)...(19): siRNA sense strand
gguccaaggcccugacuau

SEQ ID NO: 1556702 - RNA, 19 nt, Homo sapiens
  misc_RNA (1)...(19): siRNA sense strand
ccaaggcccugacuaugac

SEQ ID NO: 1556703 - RNA, 19 nt, Homo sapiens
  misc_RNA (1)...(19): siRNA sense strand
gcccuggccuuucuuucug

SEQ ID NO: 1556704 - RNA, 19 nt, Homo sapiens
  misc_RNA (1)...(19): siRNA sense strand
uccaaggcccugacuauga

SEQ ID NO: 1556705 - RNA, 19 nt, Homo sapiens
  misc_RNA (1)...(19): siRNA sense strand
gggaacagugucuggaaug

SEQ ID NO: 1556706 - RNA, 19 nt, Homo sapiens
  misc_RNA (1)...(19): siRNA sense strand
ggccaagccucuccaaaau

SEQ ID NO: 1556707 - RNA, 19 nt, Homo sapiens
  misc_RNA (1)...(19): siRNA sense strand
cagcuuuguugccuguuca

SEQ ID NO: 1556708 - RNA, 19 nt, Homo sapiens
  misc_RNA (1)...(19): siRNA sense strand
uuuguugccuguucaaucu

SEQ ID NO: 1556709 - RNA, 19 nt, Homo sapiens
  misc_RNA (1)...(19): siRNA sense strand
cagagcggcugggaacagu

SEQ ID NO: 1556710 - RNA, 19 nt, Homo sapiens
  misc_RNA (1)...(19): siRNA sense strand
gagcggcugggaacagugu

SEQ ID NO: 1556711 - RNA, 19 nt, Homo sapiens
  misc_RNA (1)...(19): siRNA sense strand
cugauuuguuucucuggaa

SEQ ID NO: 1556712 - RNA, 19 nt, Homo sapiens
  misc_RNA (1)...(19): siRNA sense strand
ccaagccucuccaaaaugg

SEQ ID NO: 1556713 - RNA, 19 nt, Homo sapiens
  misc_RNA (1)...(19): siRNA sense strand
ugggaacagugucuggaau

SEQ ID NO: 1556714 - RNA, 19 nt, Homo sapiens
  misc_RNA (1)...(19): siRNA sense strand
ugauuuguuucucuggaau

SEQ ID NO: 1556715 - RNA, 19 nt, Homo sapiens
  misc_RNA (1)...(19): siRNA sense strand
cccacaggguucccauguu

SEQ ID NO: 1556716 - RNA, 19 nt, Homo sapiens
  misc_RNA (1)...(19): siRNA sense strand
gaacucaacaccaccauug

SEQ ID NO: 1556717 - RNA, 19 nt, Homo sapiens
  misc_RNA (1)...(19): siRNA sense strand
caagugcuaugucaucgaa

SEQ ID NO: 1556718 - RNA, 19 nt, Homo sapiens
  misc_RNA (1)...(19): siRNA sense strand
gcuguggugugcuguauga

SEQ ID NO: 1556719 - RNA, 19 nt, Homo sapiens
  misc_RNA (1)...(19): siRNA sense strand
ucugggagcuccucaugaa

SEQ ID NO: 1556720 - RNA, 19 nt, Homo sapiens
  misc_RNA (1)...(19): siRNA sense strand
gcuggaagaggaugugaaa

SEQ ID NO: 1556721 - RNA, 19 nt, Homo sapiens
  misc_RNA (1)...(19): siRNA sense strand
gcaaugccauccgccacuu

SEQ ID NO: 1556722 - RNA, 19 nt, Homo sapiens
  misc_RNA (1)...(19): siRNA sense strand
cuacagauacuucuuccuu

SEQ ID NO: 1556723 - RNA, 19 nt, Homo sapiens
  misc_RNA (1)...(19): siRNA sense strand
gcucaugggccucguguuc

SEQ ID NO: 1556724 - RNA, 19 nt, Homo sapiens
  misc_RNA (1)...(19): siRNA sense strand
gaacuacgagcgcaucaac

SEQ ID NO: 1556725 - RNA, 19 nt, Homo sapiens
  misc_RNA (1)...(19): siRNA sense strand
ggcccgagauaacuucuuc

SEQ ID NO: 1556726 - RNA, 19 nt, Homo sapiens
  misc_RNA (1)...(19): siRNA sense strand
ggaagaggaugugaaaauc

SEQ ID NO: 1556727 - RNA, 19 nt, Homo sapiens
  misc_RNA (1)...(19): siRNA sense strand
ccacaacaucgauccaaga

SEQ ID NO: 1556728 - RNA, 19 nt, Homo sapiens
  misc_RNA (1)...(19): siRNA sense strand
guucgccucugucuacauc

SEQ ID NO: 1556729 - RNA, 19 nt, Homo sapiens
  misc_RNA (1)...(19): siRNA sense strand
gcaacgggaaagacaccua

SEQ ID NO: 1556730 - RNA, 19 nt, Homo sapiens
  misc_RNA (1)...(19): siRNA sense strand
gcuaugucaucgaacucaa

SEQ ID NO: 1556731 - RNA, 19 nt, Homo sapiens
  misc_RNA (1)...(19): siRNA sense strand
gcagcuggcccgagauaac

SEQ ID NO: 1556732 - RNA, 19 nt, Homo sapiens
  misc_RNA (1)...(19): siRNA sense strand
ugacugcguaccaugauau

SEQ ID NO: 1556733 - RNA, 19 nt, Homo sapiens
  misc_RNA (1)...(19): siRNA sense strand
aagaggaugugaaaaucua

SEQ ID NO: 1556734 - RNA, 19 nt, Homo sapiens
  misc_RNA (1)...(19): siRNA sense strand
ucgccucugucuacaucua

SEQ ID NO: 1556735 - RNA, 19 nt, Homo sapiens
  misc_RNA (1)...(19): siRNA sense strand
cugacugcguaccaugaua

SEQ ID NO: 1556736 - RNA, 19 nt, Homo sapiens
  misc_RNA (1)...(19): siRNA sense strand
gcggugacccugcagacau

SEQ ID NO: 1556737 - RNA, 19 nt, Homo sapiens
  misc_RNA (1)...(19): siRNA sense strand
gaggaaagcuguagacaug

SEQ ID NO: 1556738 - RNA, 19 nt, Homo sapiens
  misc_RNA (1)...(19): siRNA sense strand
ggacguguguggauguuua

SEQ ID NO: 1556739 - RNA, 19 nt, Homo sapiens
  misc_RNA (1)...(19): siRNA sense strand
gaagaguaguuuccaaauc

SEQ ID NO: 1556740 - RNA, 19 nt, Homo sapiens
  misc_RNA (1)...(19): siRNA sense strand
gaagaagaguaguuuccaa

SEQ ID NO: 1556741 - RNA, 19 nt, Homo sapiens
  misc_RNA (1)...(19): siRNA sense strand
gcaagaagaagaguaguuu

SEQ ID NO: 1556742 - RNA, 19 nt, Homo sapiens
  misc_RNA (1)...(19): siRNA sense strand
aagaguaguuuccaaauca

SEQ ID NO: 1556743 - RNA, 19 nt, Homo sapiens
  misc_RNA (1)...(19): siRNA sense strand
gaagucccaccucauguuu

SEQ ID NO: 1556744 - RNA, 19 nt, Homo sapiens
  misc_RNA (1)...(19): siRNA sense strand
gcaaagccaaggcagagaa

SEQ ID NO: 1556745 - RNA, 19 nt, Homo sapiens
  misc_RNA (1)...(19): siRNA sense strand
ggccaucaguggucaccua

SEQ ID NO: 1556746 - RNA, 19 nt, Homo sapiens
  misc_RNA (1)...(19): siRNA sense strand
gggcagaucuuuggauucc

SEQ ID NO: 1556747 - RNA, 19 nt, Homo sapiens
  misc_RNA (1)...(19): siRNA sense strand
gaagccugguuggcauuga

SEQ ID NO: 1556748 - RNA, 19 nt, Homo sapiens
  misc_RNA (1)...(19): siRNA sense strand
ggaggaaagcuguagacau

SEQ ID NO: 1556749 - RNA, 19 nt, Homo sapiens
  misc_RNA (1)...(19): siRNA sense strand
caaugggcccuccgucuga

SEQ ID NO: 1556750 - RNA, 19 nt, Homo sapiens
  misc_RNA (1)...(19): siRNA sense strand
caaagccaaggcagagaaa

SEQ ID NO: 1556751 - RNA, 19 nt, Homo sapiens
  misc_RNA (1)...(19): siRNA sense strand
aagaagaguaguuuccaaa

SEQ ID NO: 1556752 - RNA, 19 nt, Homo sapiens
  misc_RNA (1)...(19): siRNA sense strand
ggcaagaagaagaguaguu

SEQ ID NO: 1556753 - RNA, 19 nt, Homo sapiens
  misc_RNA (1)...(19): siRNA sense strand
aguagcagcucagaaguuc

SEQ ID NO: 1556754 - RNA, 19 nt, Homo sapiens
  misc_RNA (1)...(19): siRNA sense strand
ugaagucccaccucauguu

SEQ ID NO: 1556755 - RNA, 19 nt, Homo sapiens
  misc_RNA (1)...(19): siRNA sense strand
cuagacagcgacgaugaua

SEQ ID NO: 1556756 - RNA, 19 nt, Homo sapiens
  misc_RNA (1)...(19): siRNA sense strand
caucaguggucaccuagac

SEQ ID NO: 1556757 - RNA, 19 nt, Homo sapiens
  misc_RNA (1)...(19): siRNA sense strand
cagccugguucacaaaucu

SEQ ID NO: 1556758 - RNA, 19 nt, Homo sapiens
  misc_RNA (1)...(19): siRNA sense strand
agacagcgacgaugauagu

SEQ ID NO: 1556759 - RNA, 19 nt, Homo sapiens
  misc_RNA (1)...(19): siRNA sense strand
guugggugcuccagaagag

SEQ ID NO: 1556760 - RNA, 19 nt, Homo sapiens
  misc_RNA (1)...(19): siRNA sense strand
caagaagaagaguaguuuc

SEQ ID NO: 1556761 - RNA, 19 nt, Homo sapiens
  misc_RNA (1)...(19): siRNA sense strand
gcaguagcagcucagaagu

SEQ ID NO: 1556762 - RNA, 19 nt, Homo sapiens
  misc_RNA (1)...(19): siRNA sense strand
caguagcagcucagaaguu

SEQ ID NO: 1556763 - RNA, 19 nt, Homo sapiens
  misc_RNA (1)...(19): siRNA sense strand
agaagaguaguuuccaaau

SEQ ID NO: 1556764 - RNA, 19 nt, Homo sapiens
  misc_RNA (1)...(19): siRNA sense strand
agguggaggugcugaagga

SEQ ID NO: 1556765 - RNA, 19 nt, Homo sapiens
  misc_RNA (1)...(19): siRNA sense strand
ggaagccugguuggcauug

SEQ ID NO: 1556766 - RNA, 19 nt, Homo sapiens
  misc_RNA (1)...(19): siRNA sense strand
gaacuuggacgcuuguuuc

SEQ ID NO: 1556767 - RNA, 19 nt, Homo sapiens
  misc_RNA (1)...(19): siRNA sense strand
uaggagcccuggaaacuug

SEQ ID NO: 1556768 - RNA, 19 nt, Homo sapiens
  misc_RNA (1)...(19): siRNA sense strand
ggacagaauggcagcaaga

SEQ ID NO: 1556769 - RNA, 19 nt, Homo sapiens
  misc_RNA (1)...(19): siRNA sense strand
gaaacuugacggagagaga

SEQ ID NO: 1556770 - RNA, 19 nt, Homo sapiens
  misc_RNA (1)...(19): siRNA sense strand
ggacccugcuuuccucuac

SEQ ID NO: 1556771 - RNA, 19 nt, Homo sapiens
  misc_RNA (1)...(19): siRNA sense strand
ggaacuuggacgcuuguuu

SEQ ID NO: 1556772 - RNA, 19 nt, Homo sapiens
  misc_RNA (1)...(19): siRNA sense strand
ccggaagccuccacacuca

SEQ ID NO: 1556773 - RNA, 19 nt, Homo sapiens
  misc_RNA (1)...(19): siRNA sense strand
ccagaagcaugcccugucu

SEQ ID NO: 1556774 - RNA, 19 nt, Homo sapiens
  misc_RNA (1)...(19): siRNA sense strand
gaguggcccuucccucaca

SEQ ID NO: 1556775 - RNA, 19 nt, Homo sapiens
  misc_RNA (1)...(19): siRNA sense strand
aggagcagguguucucaga

SEQ ID NO: 1556776 - RNA, 19 nt, Homo sapiens
  misc_RNA (1)...(19): siRNA sense strand
ggcugcaggucacacuuga

SEQ ID NO: 1556777 - RNA, 19 nt, Homo sapiens
  misc_RNA (1)...(19): siRNA sense strand
uagcagccaccagagguua

SEQ ID NO: 1556778 - RNA, 19 nt, Homo sapiens
  misc_RNA (1)...(19): siRNA sense strand
ggaagccuccacacucaag

SEQ ID NO: 1556779 - RNA, 19 nt, Homo sapiens
  misc_RNA (1)...(19): siRNA sense strand
gcaggucacacuugaagac

SEQ ID NO: 1556780 - RNA, 19 nt, Homo sapiens
  misc_RNA (1)...(19): siRNA sense strand
gcgcagccuugccucuuac

SEQ ID NO: 1556781 - RNA, 19 nt, Homo sapiens
  misc_RNA (1)...(19): siRNA sense strand
agcgcagccuugccucuua

SEQ ID NO: 1556782 - RNA, 19 nt, Homo sapiens
  misc_RNA (1)...(19): siRNA sense strand
aaacuugacggagagagaa

SEQ ID NO: 1556783 - RNA, 19 nt, Homo sapiens
  misc_RNA (1)...(19): siRNA sense strand
gagcgcagccuugccucuu

SEQ ID NO: 1556784 - RNA, 19 nt, Homo sapiens
  misc_RNA (1)...(19): siRNA sense strand
gaagauggacggggaacuu

SEQ ID NO: 1556785 - RNA, 19 nt, Homo sapiens
  misc_RNA (1)...(19): siRNA sense strand
gaaccaagacuguguauua

SEQ ID NO: 1556786 - RNA, 19 nt, Homo sapiens
  misc_RNA (1)...(19): siRNA sense strand
gaaauuagauggacuagca

SEQ ID NO: 1556787 - RNA, 19 nt, Homo sapiens
  misc_RNA (1)...(19): siRNA sense strand
gaacaagugucaggaauug

SEQ ID NO: 1556788 - RNA, 19 nt, Homo sapiens
  misc_RNA (1)...(19): siRNA sense strand
ggaauuguguugugaguug

SEQ ID NO: 1556789 - RNA, 19 nt, Homo sapiens
  misc_RNA (1)...(19): siRNA sense strand
gcagaaagguggcaguguu

SEQ ID NO: 1556790 - RNA, 19 nt, Homo sapiens
  misc_RNA (1)...(19): siRNA sense strand
agaagaagcugauacagaa

SEQ ID NO: 1556791 - RNA, 19 nt, Homo sapiens
  misc_RNA (1)...(19): siRNA sense strand
gaacaggaauugcauuugg

SEQ ID NO: 1556792 - RNA, 19 nt, Homo sapiens
  misc_RNA (1)...(19): siRNA sense strand
ggaggagauuucccuguua

SEQ ID NO: 1556793 - RNA, 19 nt, Homo sapiens
  misc_RNA (1)...(19): siRNA sense strand
ggaagaaugcuaauaagaa

SEQ ID NO: 1556794 - RNA, 19 nt, Homo sapiens
  misc_RNA (1)...(19): siRNA sense strand
agaaagaccugaaggaaga

SEQ ID NO: 1556795 - RNA, 19 nt, Homo sapiens
  misc_RNA (1)...(19): siRNA sense strand
ggaaauagaacaggaauug

SEQ ID NO: 1556796 - RNA, 19 nt, Homo sapiens
  misc_RNA (1)...(19): siRNA sense strand
ucaaagaacugcagaccaa

SEQ ID NO: 1556797 - RNA, 19 nt, Homo sapiens
  misc_RNA (1)...(19): siRNA sense strand
guuuaggucucucagauua

SEQ ID NO: 1556798 - RNA, 19 nt, Homo sapiens
  misc_RNA (1)...(19): siRNA sense strand
gaaagagucuggagguagu

SEQ ID NO: 1556799 - RNA, 19 nt, Homo sapiens
  misc_RNA (1)...(19): siRNA sense strand
gcuaaguccuccaaaugua

SEQ ID NO: 1556800 - RNA, 19 nt, Homo sapiens
  misc_RNA (1)...(19): siRNA sense strand
aaaggaaagugugcuaaua

SEQ ID NO: 1556801 - RNA, 19 nt, Homo sapiens
  misc_RNA (1)...(19): siRNA sense strand
gaagaaugcuaauaagaac

SEQ ID NO: 1556802 - RNA, 19 nt, Homo sapiens
  misc_RNA (1)...(19): siRNA sense strand
ggaagaagaagaagaacaa

SEQ ID NO: 1556803 - RNA, 19 nt, Homo sapiens
  misc_RNA (1)...(19): siRNA sense strand
ggaaaugguugugaaagug

SEQ ID NO: 1556804 - RNA, 19 nt, Homo sapiens
  misc_RNA (1)...(19): siRNA sense strand
gaaugaacuugaagacaug

SEQ ID NO: 1556805 - RNA, 19 nt, Homo sapiens
  misc_RNA (1)...(19): siRNA sense strand
caacugaacaugagaguga

SEQ ID NO: 1556806 - RNA, 19 nt, Homo sapiens
  misc_RNA (1)...(19): siRNA sense strand
gugcagaaauggaaaugaa

SEQ ID NO: 1556807 - RNA, 19 nt, Homo sapiens
  misc_RNA (1)...(19): siRNA sense strand
gaaagugugcuaauaagug

SEQ ID NO: 1556808 - RNA, 19 nt, Homo sapiens
  misc_RNA (1)...(19): siRNA sense strand
gaaagaaagcgaacuuaag

SEQ ID NO: 1556809 - RNA, 19 nt, Homo sapiens
  misc_RNA (1)...(19): siRNA sense strand
gaaauccacacuuguagaa

SEQ ID NO: 1556810 - RNA, 19 nt, Homo sapiens
  misc_RNA (1)...(19): siRNA sense strand
aagaagagguggaagaaga

SEQ ID NO: 1556811 - RNA, 19 nt, Homo sapiens
  misc_RNA (1)...(19): siRNA sense strand
gaagcuaaauccacagaag

SEQ ID NO: 1556812 - RNA, 19 nt, Homo sapiens
  misc_RNA (1)...(19): siRNA sense strand
gcaaugagaaggacacaga

SEQ ID NO: 1556813 - RNA, 19 nt, Homo sapiens
  misc_RNA (1)...(19): siRNA sense strand
cgacaagaaugagaucaaa

SEQ ID NO: 1556814 - RNA, 19 nt, Homo sapiens
  misc_RNA (1)...(19): siRNA sense strand
aaugagagcuauuacaaga

SEQ ID NO: 1556815 - RNA, 19 nt, Homo sapiens
  misc_RNA (1)...(19): siRNA sense strand
aaagcgaacuuaaggaaau

SEQ ID NO: 1556816 - RNA, 19 nt, Homo sapiens
  misc_RNA (1)...(19): siRNA sense strand
gaaggaagaagacagugaa

SEQ ID NO: 1556817 - RNA, 19 nt, Homo sapiens
  misc_RNA (1)...(19): siRNA sense strand
ggcagaagcacauguauga

SEQ ID NO: 1556818 - RNA, 19 nt, Homo sapiens
  misc_RNA (1)...(19): siRNA sense strand
uggaagagcuacagcauca

SEQ ID NO: 1556819 - RNA, 19 nt, Homo sapiens
  misc_RNA (1)...(19): siRNA sense strand
gcagaaagaccugaaggaa

SEQ ID NO: 1556820 - RNA, 19 nt, Homo sapiens
  misc_RNA (1)...(19): siRNA sense strand
aaugagaacugucgcaaga

SEQ ID NO: 1556821 - RNA, 19 nt, Homo sapiens
  misc_RNA (1)...(19): siRNA sense strand
gagaaagaaagcgaacuua

SEQ ID NO: 1556822 - RNA, 19 nt, Homo sapiens
  misc_RNA (1)...(19): siRNA sense strand
agcaagagcuuucucaaga

SEQ ID NO: 1556823 - RNA, 19 nt, Homo sapiens
  misc_RNA (1)...(19): siRNA sense strand
gcucaagugugcucagaau

SEQ ID NO: 1556824 - RNA, 19 nt, Homo sapiens
  misc_RNA (1)...(19): siRNA sense strand
uugcagaucuggagaguga

SEQ ID NO: 1556825 - RNA, 19 nt, Homo sapiens
  misc_RNA (1)...(19): siRNA sense strand
gaaagcgaacuuaaggaaa

SEQ ID NO: 1556826 - RNA, 19 nt, Homo sapiens
  misc_RNA (1)...(19): siRNA sense strand
agaaugaacuugaagacau

SEQ ID NO: 1556827 - RNA, 19 nt, Homo sapiens
  misc_RNA (1)...(19): siRNA sense strand
ucaaagagagcaaugagaa

SEQ ID NO: 1556828 - RNA, 19 nt, Homo sapiens
  misc_RNA (1)...(19): siRNA sense strand
gaagaacaagugucaggaa

SEQ ID NO: 1556829 - RNA, 19 nt, Homo sapiens
  misc_RNA (1)...(19): siRNA sense strand
ggaagaagagguggaagaa

SEQ ID NO: 1556830 - RNA, 19 nt, Homo sapiens
  misc_RNA (1)...(19): siRNA sense strand
gaagagcugcgacguuuca

SEQ ID NO: 1556831 - RNA, 19 nt, Homo sapiens
  misc_RNA (1)...(19): siRNA sense strand
caugaaauccacacuugua

SEQ ID NO: 1556832 - RNA, 19 nt, Homo sapiens
  misc_RNA (1)...(19): siRNA sense strand
ggaggaagaggaagaggaa

SEQ ID NO: 1556833 - RNA, 19 nt, Homo sapiens
  misc_RNA (1)...(19): siRNA sense strand
acgaagagcugcgacguuu

SEQ ID NO: 1556834 - RNA, 19 nt, Homo sapiens
  misc_RNA (1)...(19): siRNA sense strand
gaggagauuucccuguuag

SEQ ID NO: 1556835 - RNA, 19 nt, Homo sapiens
  misc_RNA (1)...(19): siRNA sense strand
agaaugagaucaaagaacu

SEQ ID NO: 1556836 - RNA, 19 nt, Homo sapiens
  misc_RNA (1)...(19): siRNA sense strand
cagcugcacugacgaggaa

SEQ ID NO: 1556837 - RNA, 19 nt, Homo sapiens
  misc_RNA (1)...(19): siRNA sense strand
gcaagagcuuucucaagag

SEQ ID NO: 1556838 - RNA, 19 nt, Homo sapiens
  misc_RNA (1)...(19): siRNA sense strand
gaacagaagaagcugauac

SEQ ID NO: 1556839 - RNA, 19 nt, Homo sapiens
  misc_RNA (1)...(19): siRNA sense strand
gucaugaaauccacacuug

SEQ ID NO: 1556840 - RNA, 19 nt, Homo sapiens
  misc_RNA (1)...(19): siRNA sense strand
gcagaaauggaaaugaaga

SEQ ID NO: 1556841 - RNA, 19 nt, Homo sapiens
  misc_RNA (1)...(19): siRNA sense strand
ggaagaagacagugaagag

SEQ ID NO: 1556842 - RNA, 19 nt, Homo sapiens
  misc_RNA (1)...(19): siRNA sense strand
acagcagcauuaccuauaa

SEQ ID NO: 1556843 - RNA, 19 nt, Homo sapiens
  misc_RNA (1)...(19): siRNA sense strand
aaaugagccuugaguccua

SEQ ID NO: 1556844 - RNA, 19 nt, Homo sapiens
  misc_RNA (1)...(19): siRNA sense strand
caaauguaaucgaaacaag

SEQ ID NO: 1556845 - RNA, 19 nt, Homo sapiens
  misc_RNA (1)...(19): siRNA sense strand
ugaaccauccgguaguuua

SEQ ID NO: 1556846 - RNA, 19 nt, Homo sapiens
  misc_RNA (1)...(19): siRNA sense strand
agaaagaaagcgaacuuaa

SEQ ID NO: 1556847 - RNA, 19 nt, Homo sapiens
  misc_RNA (1)...(19): siRNA sense strand
ggccuucuguugucaaaga

SEQ ID NO: 1556848 - RNA, 19 nt, Homo sapiens
  misc_RNA (1)...(19): siRNA sense strand
gaaaugcagcugcuucaag

SEQ ID NO: 1556849 - RNA, 19 nt, Homo sapiens
  misc_RNA (1)...(19): siRNA sense strand
aaccaagacuguguauuaa

SEQ ID NO: 1556850 - RNA, 19 nt, Homo sapiens
  misc_RNA (1)...(19): siRNA sense strand
gaugcagaaugaacuugaa

SEQ ID NO: 1556851 - RNA, 19 nt, Homo sapiens
  misc_RNA (1)...(19): siRNA sense strand
ugaaagugcugaucaagcu

SEQ ID NO: 1556852 - RNA, 19 nt, Homo sapiens
  misc_RNA (1)...(19): siRNA sense strand
aauuagagauccacgaaga

SEQ ID NO: 1556853 - RNA, 19 nt, Homo sapiens
  misc_RNA (1)...(19): siRNA sense strand
cagaagaagcugauacaga

SEQ ID NO: 1556854 - RNA, 19 nt, Homo sapiens
  misc_RNA (1)...(19): siRNA sense strand
ggagcuacucaccaaguua

SEQ ID NO: 1556855 - RNA, 19 nt, Homo sapiens
  misc_RNA (1)...(19): siRNA sense strand
ggacacagagagcaacaga

SEQ ID NO: 1556856 - RNA, 19 nt, Homo sapiens
  misc_RNA (1)...(19): siRNA sense strand
acacugcuguccagacuga

SEQ ID NO: 1556857 - RNA, 19 nt, Homo sapiens
  misc_RNA (1)...(19): siRNA sense strand
gggaagaaugcuaauaaga

SEQ ID NO: 1556858 - RNA, 19 nt, Homo sapiens
  misc_RNA (1)...(19): siRNA sense strand
ccaagacuguguauuaaaa

SEQ ID NO: 1556859 - RNA, 19 nt, Homo sapiens
  misc_RNA (1)...(19): siRNA sense strand
gaaaugaagagcucugaac

SEQ ID NO: 1556860 - RNA, 19 nt, Homo sapiens
  misc_RNA (1)...(19): siRNA sense strand
caaguuagaagaccugugu

SEQ ID NO: 1556861 - RNA, 19 nt, Homo sapiens
  misc_RNA (1)...(19): siRNA sense strand
aaagugugcuaauaagugu

SEQ ID NO: 1556862 - RNA, 19 nt, Homo sapiens
  misc_RNA (1)...(19): siRNA sense strand
ucaagugugcucagaauga

SEQ ID NO: 1556863 - RNA, 19 nt, Homo sapiens
  misc_RNA (1)...(19): siRNA sense strand
gcaugaagaacaaguguca

SEQ ID NO: 1556864 - RNA, 19 nt, Homo sapiens
  misc_RNA (1)...(19): siRNA sense strand
caaaagaggaggaaaagaa

SEQ ID NO: 1556865 - RNA, 19 nt, Homo sapiens
  misc_RNA (1)...(19): siRNA sense strand
aaaugcagcugcuucaagu

SEQ ID NO: 1556866 - RNA, 19 nt, Homo sapiens
  misc_RNA (1)...(19): siRNA sense strand
gguggaagaagaagaagaa

SEQ ID NO: 1556867 - RNA, 19 nt, Homo sapiens
  misc_RNA (1)...(19): siRNA sense strand
gggauacgguggccuccuu

SEQ ID NO: 1556868 - RNA, 19 nt, Homo sapiens
  misc_RNA (1)...(19): siRNA sense strand
gaagaacaagugcagaaag

SEQ ID NO: 1556869 - RNA, 19 nt, Homo sapiens
  misc_RNA (1)...(19): siRNA sense strand
ugagagcuauuacaagagu

SEQ ID NO: 1556870 - RNA, 19 nt, Homo sapiens
  misc_RNA (1)...(19): siRNA sense strand
gaaacaagcaauccaagcu

SEQ ID NO: 1556871 - RNA, 19 nt, Homo sapiens
  misc_RNA (1)...(19): siRNA sense strand
aaggaaagugugcuaauaa

SEQ ID NO: 1556872 - RNA, 19 nt, Homo sapiens
  misc_RNA (1)...(19): siRNA sense strand
gaacaugagagugacauag

SEQ ID NO: 1556873 - RNA, 19 nt, Homo sapiens
  misc_RNA (1)...(19): siRNA sense strand
gaacuuaaggaaauagaac

SEQ ID NO: 1556874 - RNA, 19 nt, Homo sapiens
  misc_RNA (1)...(19): siRNA sense strand
gaggaaauuagauggacua

SEQ ID NO: 1556875 - RNA, 19 nt, Homo sapiens
  misc_RNA (1)...(19): siRNA sense strand
acaaugagagcuauuacaa

SEQ ID NO: 1556876 - RNA, 19 nt, Homo sapiens
  misc_RNA (1)...(19): siRNA sense strand
agaacugucgcaagacuua

SEQ ID NO: 1556877 - RNA, 19 nt, Homo sapiens
  misc_RNA (1)...(19): siRNA sense strand
gcagagggagcucaagugu

SEQ ID NO: 1556878 - RNA, 19 nt, Homo sapiens
  misc_RNA (1)...(19): siRNA sense strand
acacagagagcaacagaga

SEQ ID NO: 1556879 - RNA, 19 nt, Homo sapiens
  misc_RNA (1)...(19): siRNA sense strand
gaagagcuacagcaucauc

SEQ ID NO: 1556880 - RNA, 19 nt, Homo sapiens
  misc_RNA (1)...(19): siRNA sense strand
caacagcagcauuaccuau

SEQ ID NO: 1556881 - RNA, 19 nt, Homo sapiens
  misc_RNA (1)...(19): siRNA sense strand
gucaggagcuacucaccaa

SEQ ID NO: 1556882 - RNA, 19 nt, Homo sapiens
  misc_RNA (1)...(19): siRNA sense strand
guacaaggccagccagaag

SEQ ID NO: 1556883 - RNA, 19 nt, Homo sapiens
  misc_RNA (1)...(19): siRNA sense strand
cacagaagaucaggaggaa

SEQ ID NO: 1556884 - RNA, 19 nt, Homo sapiens
  misc_RNA (1)...(19): siRNA sense strand
ggagaaggaagaagacagu

SEQ ID NO: 1556885 - RNA, 19 nt, Homo sapiens
  misc_RNA (1)...(19): siRNA sense strand
gagaacugcugguaucaua

SEQ ID NO: 1556886 - RNA, 19 nt, Homo sapiens
  misc_RNA (1)...(19): siRNA sense strand
ggaagaggaucaagaggaa

SEQ ID NO: 1556887 - RNA, 19 nt, Homo sapiens
  misc_RNA (1)...(19): siRNA sense strand
gcgaagagguggauucuca

SEQ ID NO: 1556888 - RNA, 19 nt, Homo sapiens
  misc_RNA (1)...(19): siRNA sense strand
ggaugaagaugaugaagau

SEQ ID NO: 1556889 - RNA, 19 nt, Homo sapiens
  misc_RNA (1)...(19): siRNA sense strand
gcuguaagcucuuggaugu

SEQ ID NO: 1556890 - RNA, 19 nt, Homo sapiens
  misc_RNA (1)...(19): siRNA sense strand
gagaacagccugagagaga

SEQ ID NO: 1556891 - RNA, 19 nt, Homo sapiens
  misc_RNA (1)...(19): siRNA sense strand
gcagauagaauaugaagau

SEQ ID NO: 1556892 - RNA, 19 nt, Homo sapiens
  misc_RNA (1)...(19): siRNA sense strand
gcgcaucuguuccauuuau

SEQ ID NO: 1556893 - RNA, 19 nt, Homo sapiens
  misc_RNA (1)...(19): siRNA sense strand
gggaccaggugacgguuua

SEQ ID NO: 1556894 - RNA, 19 nt, Homo sapiens
  misc_RNA (1)...(19): siRNA sense strand
gauagaauaugaagauggu

SEQ ID NO: 1556895 - RNA, 19 nt, Homo sapiens
  misc_RNA (1)...(19): siRNA sense strand
ucaagugucuggcucaaga

SEQ ID NO: 1556896 - RNA, 19 nt, Homo sapiens
  misc_RNA (1)...(19): siRNA sense strand
uuacggugcuggagaaauu

SEQ ID NO: 1556897 - RNA, 19 nt, Homo sapiens
  misc_RNA (1)...(19): siRNA sense strand
gaaaaugccccauauaaau

SEQ ID NO: 1556898 - RNA, 19 nt, Homo sapiens
  misc_RNA (1)...(19): siRNA sense strand
gggaagggauagaggaaga

SEQ ID NO: 1556899 - RNA, 19 nt, Homo sapiens
  misc_RNA (1)...(19): siRNA sense strand
uuaaugaugucaaggaaga

SEQ ID NO: 1556900 - RNA, 19 nt, Homo sapiens
  misc_RNA (1)...(19): siRNA sense strand
ugaaagagcccgagaacug

SEQ ID NO: 1556901 - RNA, 19 nt, Homo sapiens
  misc_RNA (1)...(19): siRNA sense strand
guuggcagcuuugcagaua

SEQ ID NO: 1556902 - RNA, 19 nt, Homo sapiens
  misc_RNA (1)...(19): siRNA sense strand
ggaagguacugacccaaag

SEQ ID NO: 1556903 - RNA, 19 nt, Homo sapiens
  misc_RNA (1)...(19): siRNA sense strand
uguaagcucuuggauguaa

SEQ ID NO: 1556904 - RNA, 19 nt, Homo sapiens
  misc_RNA (1)...(19): siRNA sense strand
caaagccguucucucaguu

SEQ ID NO: 1556905 - RNA, 19 nt, Homo sapiens
  misc_RNA (1)...(19): siRNA sense strand
ugacaucacagaacagaaa

SEQ ID NO: 1556906 - RNA, 19 nt, Homo sapiens
  misc_RNA (1)...(19): siRNA sense strand
ugaagaugaugaagaggaa

SEQ ID NO: 1556907 - RNA, 19 nt, Homo sapiens
  misc_RNA (1)...(19): siRNA sense strand
cgguuuaucuguucuguga

SEQ ID NO: 1556908 - RNA, 19 nt, Homo sapiens
  misc_RNA (1)...(19): siRNA sense strand
gcagggcaguguuaaugau

SEQ ID NO: 1556909 - RNA, 19 nt, Homo sapiens
  misc_RNA (1)...(19): siRNA sense strand
gaggagcagggcaguguua

SEQ ID NO: 1556910 - RNA, 19 nt, Homo sapiens
  misc_RNA (1)...(19): siRNA sense strand
guacggaaagugcguuaaa

SEQ ID NO: 1556911 - RNA, 19 nt, Homo sapiens
  misc_RNA (1)...(19): siRNA sense strand
gcuggaggcuguucaacug

SEQ ID NO: 1556912 - RNA, 19 nt, Homo sapiens
  misc_RNA (1)...(19): siRNA sense strand
gaagagguggauucucauu

SEQ ID NO: 1556913 - RNA, 19 nt, Homo sapiens
  misc_RNA (1)...(19): siRNA sense strand
ggaagaaaaugaugaccaa

SEQ ID NO: 1556914 - RNA, 19 nt, Homo sapiens
  misc_RNA (1)...(19): siRNA sense strand
cugcgcaucuguuccauuu

SEQ ID NO: 1556915 - RNA, 19 nt, Homo sapiens
  misc_RNA (1)...(19): siRNA sense strand
ccaaagccguucucucagu

SEQ ID NO: 1556916 - RNA, 19 nt, Homo sapiens
  misc_RNA (1)...(19): siRNA sense strand
gagcagggcaguguuaaug

SEQ ID NO: 1556917 - RNA, 19 nt, Homo sapiens
  misc_RNA (1)...(19): siRNA sense strand
cagcuuugcagauagaaua

SEQ ID NO: 1556918 - RNA, 19 nt, Homo sapiens
  misc_RNA (1)...(19): siRNA sense strand
ggaagaggaggaugaagau

SEQ ID NO: 1556919 - RNA, 19 nt, Homo sapiens
  misc_RNA (1)...(19): siRNA sense strand
gggcacugaugaacuuaga

SEQ ID NO: 1556920 - RNA, 19 nt, Homo sapiens
  misc_RNA (1)...(19): siRNA sense strand
gaacugaucguggccaaca

SEQ ID NO: 1556921 - RNA, 19 nt, Homo sapiens
  misc_RNA (1)...(19): siRNA sense strand
gguggauucucauugcaaa

SEQ ID NO: 1556922 - RNA, 19 nt, Homo sapiens
  misc_RNA (1)...(19): siRNA sense strand
gagcaggucaggcaacgaa

SEQ ID NO: 1556923 - RNA, 19 nt, Homo sapiens
  misc_RNA (1)...(19): siRNA sense strand
ccauuaaggcguggaauaa

SEQ ID NO: 1556924 - RNA, 19 nt, Homo sapiens
  misc_RNA (1)...(19): siRNA sense strand
aaccagagccucaggauga

SEQ ID NO: 1556925 - RNA, 19 nt, Homo sapiens
  misc_RNA (1)...(19): siRNA sense strand
gcucaagagguaaauauuc

SEQ ID NO: 1556926 - RNA, 19 nt, Homo sapiens
  misc_RNA (1)...(19): siRNA sense strand
ugaugaagaugaugaagag

SEQ ID NO: 1556927 - RNA, 19 nt, Homo sapiens
  misc_RNA (1)...(19): siRNA sense strand
agaggaagauaagaacauu

SEQ ID NO: 1556928 - RNA, 19 nt, Homo sapiens
  misc_RNA (1)...(19): siRNA sense strand
aaacuggccugcagcucuu

SEQ ID NO: 1556929 - RNA, 19 nt, Homo sapiens
  misc_RNA (1)...(19): siRNA sense strand
guauuuaccuaaggccauu

SEQ ID NO: 1556930 - RNA, 19 nt, Homo sapiens
  misc_RNA (1)...(19): siRNA sense strand
cuggagaaauuuagguauu

SEQ ID NO: 1556931 - RNA, 19 nt, Homo sapiens
  misc_RNA (1)...(19): siRNA sense strand
gcauuggucagguuuguga

SEQ ID NO: 1556932 - RNA, 19 nt, Homo sapiens
  misc_RNA (1)...(19): siRNA sense strand
uaugacaccauguaucuuu

SEQ ID NO: 1556933 - RNA, 19 nt, Homo sapiens
  misc_RNA (1)...(19): siRNA sense strand
agaauuaugacaccaugua

SEQ ID NO: 1556934 - RNA, 19 nt, Homo sapiens
  misc_RNA (1)...(19): siRNA sense strand
ugaagaugaugaagaugau

SEQ ID NO: 1556935 - RNA, 19 nt, Homo sapiens
  misc_RNA (1)...(19): siRNA sense strand
guacggagucagauguaaa

SEQ ID NO: 1556936 - RNA, 19 nt, Homo sapiens
  misc_RNA (1)...(19): siRNA sense strand
ggaguucagggaagggaua

SEQ ID NO: 1556937 - RNA, 19 nt, Homo sapiens
  misc_RNA (1)...(19): siRNA sense strand
gccaugaguugacccacaa

SEQ ID NO: 1556938 - RNA, 19 nt, Homo sapiens
  misc_RNA (1)...(19): siRNA sense strand
ugaguugacccacaagaaa

SEQ ID NO: 1556939 - RNA, 19 nt, Homo sapiens
  misc_RNA (1)...(19): siRNA sense strand
ggugacgguuuaucuguuc

SEQ ID NO: 1556940 - RNA, 19 nt, Homo sapiens
  misc_RNA (1)...(19): siRNA sense strand
acggaaugcucgccgauuu

SEQ ID NO: 1556941 - RNA, 19 nt, Homo sapiens
  misc_RNA (1)...(19): siRNA sense strand
gccauuaaggcguggaaua

SEQ ID NO: 1556942 - RNA, 19 nt, Homo sapiens
  misc_RNA (1)...(19): siRNA sense strand
gugucuggcucaagaggua

SEQ ID NO: 1556943 - RNA, 19 nt, Homo sapiens
  misc_RNA (1)...(19): siRNA sense strand
gaagucuccauauacacua

SEQ ID NO: 1556944 - RNA, 19 nt, Homo sapiens
  misc_RNA (1)...(19): siRNA sense strand
caccaagacuggacggaau

SEQ ID NO: 1556945 - RNA, 19 nt, Homo sapiens
  misc_RNA (1)...(19): siRNA sense strand
gcagagcucaagggcguua

SEQ ID NO: 1556946 - RNA, 19 nt, Homo sapiens
  misc_RNA (1)...(19): siRNA sense strand
gcauggcauuggucagguu

SEQ ID NO: 1556947 - RNA, 19 nt, Homo sapiens
  misc_RNA (1)...(19): siRNA sense strand
gaauuaugacaccauguau

SEQ ID NO: 1556948 - RNA, 19 nt, Homo sapiens
  misc_RNA (1)...(19): siRNA sense strand
ggauagaggaagaggauca

SEQ ID NO: 1556949 - RNA, 19 nt, Homo sapiens
  misc_RNA (1)...(19): siRNA sense strand
ggauuggauuguugaccuu

SEQ ID NO: 1556950 - RNA, 19 nt, Homo sapiens
  misc_RNA (1)...(19): siRNA sense strand
gcagcugcaugggcucaaa

SEQ ID NO: 1556951 - RNA, 19 nt, Homo sapiens
  misc_RNA (1)...(19): siRNA sense strand
gggaagguacugacccaaa

SEQ ID NO: 1556952 - RNA, 19 nt, Homo sapiens
  misc_RNA (1)...(19): siRNA sense strand
aaagugcguuaaagggaaa

SEQ ID NO: 1556953 - RNA, 19 nt, Homo sapiens
  misc_RNA (1)...(19): siRNA sense strand
gagagagaccugggaguug

SEQ ID NO: 1556954 - RNA, 19 nt, Homo sapiens
  misc_RNA (1)...(19): siRNA sense strand
gauccggccuaccuacauc

SEQ ID NO: 1556955 - RNA, 19 nt, Homo sapiens
  misc_RNA (1)...(19): siRNA sense strand
ggaccagccugugcuagag

SEQ ID NO: 1556956 - RNA, 19 nt, Homo sapiens
  misc_RNA (1)...(19): siRNA sense strand
gaagaggaagacagaaugg

SEQ ID NO: 1556957 - RNA, 19 nt, Homo sapiens
  misc_RNA (1)...(19): siRNA sense strand
agguaaauauuccggauug

SEQ ID NO: 1556958 - RNA, 19 nt, Homo sapiens
  misc_RNA (1)...(19): siRNA sense strand
ggaggaagaggaggaugaa

SEQ ID NO: 1556959 - RNA, 19 nt, Homo sapiens
  misc_RNA (1)...(19): siRNA sense strand
auugggaagucuccauaua

SEQ ID NO: 1556960 - RNA, 19 nt, Homo sapiens
  misc_RNA (1)...(19): siRNA sense strand
uugaacaguuggcagcuuu

SEQ ID NO: 1556961 - RNA, 19 nt, Homo sapiens
  misc_RNA (1)...(19): siRNA sense strand
gaaaccagagccucaggau

SEQ ID NO: 1556962 - RNA, 19 nt, Homo sapiens
  misc_RNA (1)...(19): siRNA sense strand
gcuacuuuguccuggauug

SEQ ID NO: 1556963 - RNA, 19 nt, Homo sapiens
  misc_RNA (1)...(19): siRNA sense strand
aggcugugcuggaugcuuu

SEQ ID NO: 1556964 - RNA, 19 nt, Homo sapiens
  misc_RNA (1)...(19): siRNA sense strand
gaauggagguggggccuuu

SEQ ID NO: 1556965 - RNA, 19 nt, Homo sapiens
  misc_RNA (1)...(19): siRNA sense strand
ggaagucuccauauacacu

SEQ ID NO: 1556966 - RNA, 19 nt, Homo sapiens
  misc_RNA (1)...(19): siRNA sense strand
cagagaggaagacaaaguu

SEQ ID NO: 1556967 - RNA, 19 nt, Homo sapiens
  misc_RNA (1)...(19): siRNA sense strand
agaggaggaugaagaugau

SEQ ID NO: 1556968 - RNA, 19 nt, Homo sapiens
  misc_RNA (1)...(19): siRNA sense strand
ugggaagucuccauauaca

SEQ ID NO: 1556969 - RNA, 19 nt, Homo sapiens
  misc_RNA (1)...(19): siRNA sense strand
gauggaccguugaacugau

SEQ ID NO: 1556970 - RNA, 19 nt, Homo sapiens
  misc_RNA (1)...(19): siRNA sense strand
ugccaaagccguucucuca

SEQ ID NO: 1556971 - RNA, 19 nt, Homo sapiens
  misc_RNA (1)...(19): siRNA sense strand
uaaauauuccggauuggau

SEQ ID NO: 1556972 - RNA, 19 nt, Homo sapiens
  misc_RNA (1)...(19): siRNA sense strand
guaaauauuccggauugga

SEQ ID NO: 1556973 - RNA, 19 nt, Homo sapiens
  misc_RNA (1)...(19): siRNA sense strand
aaaaggcccugagucauaa

SEQ ID NO: 1556974 - RNA, 19 nt, Homo sapiens
  misc_RNA (1)...(19): siRNA sense strand
ggaggaugaagaugaugaa

SEQ ID NO: 1556975 - RNA, 19 nt, Homo sapiens
  misc_RNA (1)...(19): siRNA sense strand
aagaggaggaugaagauga

SEQ ID NO: 1556976 - RNA, 19 nt, Homo sapiens
  misc_RNA (1)...(19): siRNA sense strand
ucagguuugugaaucuuau

SEQ ID NO: 1556977 - RNA, 19 nt, Homo sapiens
  misc_RNA (1)...(19): siRNA sense strand
gagcucaugcuggagaauu

SEQ ID NO: 1556978 - RNA, 19 nt, Homo sapiens
  misc_RNA (1)...(19): siRNA sense strand
ccugggaguuggaggaguu

SEQ ID NO: 1556979 - RNA, 19 nt, Homo sapiens
  misc_RNA (1)...(19): siRNA sense strand
gauacgcuguaagcucuug

SEQ ID NO: 1556980 - RNA, 19 nt, Homo sapiens
  misc_RNA (1)...(19): siRNA sense strand
uugugaaucuuaucucaga

SEQ ID NO: 1556981 - RNA, 19 nt, Homo sapiens
  misc_RNA (1)...(19): siRNA sense strand
ugaagaggaagacagaaug

SEQ ID NO: 1556982 - RNA, 19 nt, Homo sapiens
  misc_RNA (1)...(19): siRNA sense strand
ggucagguuugugaaucuu

SEQ ID NO: 1556983 - RNA, 19 nt, Homo sapiens
  misc_RNA (1)...(19): siRNA sense strand
guuugugaaucuuaucuca

SEQ ID NO: 1556984 - RNA, 19 nt, Homo sapiens
  misc_RNA (1)...(19): siRNA sense strand
ucaaggaagaggagaagga

SEQ ID NO: 1556985 - RNA, 19 nt, Homo sapiens
  misc_RNA (1)...(19): siRNA sense strand
gaaaucuucuugaguguaa

SEQ ID NO: 1556986 - RNA, 19 nt, Homo sapiens
  misc_RNA (1)...(19): siRNA sense strand
cacaauaccuccaggaauu

SEQ ID NO: 1556987 - RNA, 19 nt, Homo sapiens
  misc_RNA (1)...(19): siRNA sense strand
ugaccuaccucaucaagaa

SEQ ID NO: 1556988 - RNA, 19 nt, Homo sapiens
  misc_RNA (1)...(19): siRNA sense strand
gaagcuacgccacucuuua

SEQ ID NO: 1556989 - RNA, 19 nt, Homo sapiens
  misc_RNA (1)...(19): siRNA sense strand
gcaaagacaaaguggaauu

SEQ ID NO: 1556990 - RNA, 19 nt, Homo sapiens
  misc_RNA (1)...(19): siRNA sense strand
acaaagagcuugcuuacac

SEQ ID NO: 1556991 - RNA, 19 nt, Homo sapiens
  misc_RNA (1)...(19): siRNA sense strand
uuccaggucuucaucauua

SEQ ID NO: 1556992 - RNA, 19 nt, Homo sapiens
  misc_RNA (1)...(19): siRNA sense strand
ggugucauuuccauucuuu

SEQ ID NO: 1556993 - RNA, 19 nt, Homo sapiens
  misc_RNA (1)...(19): siRNA sense strand
caaaguggaauucuacaga

SEQ ID NO: 1556994 - RNA, 19 nt, Homo sapiens
  misc_RNA (1)...(19): siRNA sense strand
guucugggcucagcugaaa

SEQ ID NO: 1556995 - RNA, 19 nt, Homo sapiens
  misc_RNA (1)...(19): siRNA sense strand
cuacgccacucuuuacuau

SEQ ID NO: 1556996 - RNA, 19 nt, Homo sapiens
  misc_RNA (1)...(19): siRNA sense strand
ggagcacuguuuuaaauuu

SEQ ID NO: 1556997 - RNA, 19 nt, Homo sapiens
  misc_RNA (1)...(19): siRNA sense strand
acaaugaggagcacuguuu

SEQ ID NO: 1556998 - RNA, 19 nt, Homo sapiens
  misc_RNA (1)...(19): siRNA sense strand
caaagagcuugcuuacaca

SEQ ID NO: 1556999 - RNA, 19 nt, Homo sapiens
  misc_RNA (1)...(19): siRNA sense strand
gaggagcacuguuuuaaau

SEQ ID NO: 1557000 - RNA, 19 nt, Homo sapiens
  misc_RNA (1)...(19): siRNA sense strand
aagaagacuuggauguuug

SEQ ID NO: 1557001 - RNA, 19 nt, Homo sapiens
  misc_RNA (1)...(19): siRNA sense strand
ggucauccuuguuuguuuc

SEQ ID NO: 1557002 - RNA, 19 nt, Homo sapiens
  misc_RNA (1)...(19): siRNA sense strand
ucacguuccuauucuaugu

SEQ ID NO: 1557003 - RNA, 19 nt, Homo sapiens
  misc_RNA (1)...(19): siRNA sense strand
ccauggcggucauuaacuu

SEQ ID NO: 1557004 - RNA, 19 nt, Homo sapiens
  misc_RNA (1)...(19): siRNA sense strand
gcuaugauuugcuucucuu

SEQ ID NO: 1557005 - RNA, 19 nt, Homo sapiens
  misc_RNA (1)...(19): siRNA sense strand
aagacaaaguggaauucua

SEQ ID NO: 1557006 - RNA, 19 nt, Homo sapiens
  misc_RNA (1)...(19): siRNA sense strand
gugcaaagacaaaguggaa

SEQ ID NO: 1557007 - RNA, 19 nt, Homo sapiens
  misc_RNA (1)...(19): siRNA sense strand
gagcuugcuuacacauaug

SEQ ID NO: 1557008 - RNA, 19 nt, Homo sapiens
  misc_RNA (1)...(19): siRNA sense strand
agagcuugcuuacacauau

SEQ ID NO: 1557009 - RNA, 19 nt, Homo sapiens
  misc_RNA (1)...(19): siRNA sense strand
cauagccguugcugugauu

SEQ ID NO: 1557010 - RNA, 19 nt, Homo sapiens
  misc_RNA (1)...(19): siRNA sense strand
guaccucacguuccuauuc

SEQ ID NO: 1557011 - RNA, 19 nt, Homo sapiens
  misc_RNA (1)...(19): siRNA sense strand
gggucauccuuguuuguuu

SEQ ID NO: 1557012 - RNA, 19 nt, Homo sapiens
  misc_RNA (1)...(19): siRNA sense strand
uaacgaaaucuucuugagu

SEQ ID NO: 1557013 - RNA, 19 nt, Homo sapiens
  misc_RNA (1)...(19): siRNA sense strand
uuaaucagccucuacuuca

SEQ ID NO: 1557014 - RNA, 19 nt, Homo sapiens
  misc_RNA (1)...(19): siRNA sense strand
acagugccauuucgcuuga

SEQ ID NO: 1557015 - RNA, 19 nt, Homo sapiens
  misc_RNA (1)...(19): siRNA sense strand
gggaagccauugguuuaag

SEQ ID NO: 1557016 - RNA, 19 nt, Homo sapiens
  misc_RNA (1)...(19): siRNA sense strand
aaucagccucuacuucaua

SEQ ID NO: 1557017 - RNA, 19 nt, Homo sapiens
  misc_RNA (1)...(19): siRNA sense strand
uguggacgcuggugauugu

SEQ ID NO: 1557018 - RNA, 19 nt, Homo sapiens
  misc_RNA (1)...(19): siRNA sense strand
uaccucaucuucuucaagu

SEQ ID NO: 1557019 - RNA, 19 nt, Homo sapiens
  misc_RNA (1)...(19): siRNA sense strand
ucacaaagagcuugcuuac

SEQ ID NO: 1557020 - RNA, 19 nt, Homo sapiens
  misc_RNA (1)...(19): siRNA sense strand
ggaagccauugguuuaagc

SEQ ID NO: 1557021 - RNA, 19 nt, Homo sapiens
  misc_RNA (1)...(19): siRNA sense strand
ccaccauggcggucauuaa

SEQ ID NO: 1557022 - RNA, 19 nt, Homo sapiens
  misc_RNA (1)...(19): siRNA sense strand
gcuacgccacucuuuacua

SEQ ID NO: 1557023 - RNA, 19 nt, Homo sapiens
  misc_RNA (1)...(19): siRNA sense strand
caaagacaaaguggaauuc

SEQ ID NO: 1557024 - RNA, 19 nt, Homo sapiens
  misc_RNA (1)...(19): siRNA sense strand
ccacaauaccuccaggaau

SEQ ID NO: 1557025 - RNA, 19 nt, Homo sapiens
  misc_RNA (1)...(19): siRNA sense strand
cgaaaucuucuugagugua

SEQ ID NO: 1557026 - RNA, 19 nt, Homo sapiens
  misc_RNA (1)...(19): siRNA sense strand
caagugcaaagacaaagug

SEQ ID NO: 1557027 - RNA, 19 nt, Homo sapiens
  misc_RNA (1)...(19): siRNA sense strand
ggacgcuggugauugucau

SEQ ID NO: 1557028 - RNA, 19 nt, Homo sapiens
  misc_RNA (1)...(19): siRNA sense strand
agacaaaguggaauucuac

SEQ ID NO: 1557029 - RNA, 19 nt, Homo sapiens
  misc_RNA (1)...(19): siRNA sense strand
uaccaguucuuuaggaucu

SEQ ID NO: 1557030 - RNA, 19 nt, Homo sapiens
  misc_RNA (1)...(19): siRNA sense strand
gcuggugauugucauugug

SEQ ID NO: 1557031 - RNA, 19 nt, Homo sapiens
  misc_RNA (1)...(19): siRNA sense strand
gcaaaagauaauuggcuua

SEQ ID NO: 1557032 - RNA, 19 nt, Homo sapiens
  misc_RNA (1)...(19): siRNA sense strand
gaauuccucuugcgauccu

SEQ ID NO: 1557033 - RNA, 19 nt, Homo sapiens
  misc_RNA (1)...(19): siRNA sense strand
gaauccaugaggaauacaa

SEQ ID NO: 1557034 - RNA, 19 nt, Homo sapiens
  misc_RNA (1)...(19): siRNA sense strand
gauaccucaucuucuucaa

SEQ ID NO: 1557035 - RNA, 19 nt, Homo sapiens
  misc_RNA (1)...(19): siRNA sense strand
ggaucuauuacuugaaugu

SEQ ID NO: 1557036 - RNA, 19 nt, Homo sapiens
  misc_RNA (1)...(19): siRNA sense strand
ggucuucaucauuauguug

SEQ ID NO: 1557037 - RNA, 19 nt, Homo sapiens
  misc_RNA (1)...(19): siRNA sense strand
uaaucagccucuacuucau

SEQ ID NO: 1557038 - RNA, 19 nt, Homo sapiens
  misc_RNA (1)...(19): siRNA sense strand
augauuugcuucucuuugu

SEQ ID NO: 1557039 - RNA, 19 nt, Homo sapiens
  misc_RNA (1)...(19): siRNA sense strand
agccauugguuuaagcaaa

SEQ ID NO: 1557040 - RNA, 19 nt, Homo sapiens
  misc_RNA (1)...(19): siRNA sense strand
ggugauugucauuguggua

SEQ ID NO: 1557041 - RNA, 19 nt, Homo sapiens
  misc_RNA (1)...(19): siRNA sense strand
gccauugguuuaagcaaaa

SEQ ID NO: 1557042 - RNA, 19 nt, Homo sapiens
  misc_RNA (1)...(19): siRNA sense strand
gagcacuguuuuaaauuuc

SEQ ID NO: 1557043 - RNA, 19 nt, Homo sapiens
  misc_RNA (1)...(19): siRNA sense strand
uuauguugauggugcagaa

SEQ ID NO: 1557044 - RNA, 19 nt, Homo sapiens
  misc_RNA (1)...(19): siRNA sense strand
auaacgaaaucuucuugag

SEQ ID NO: 1557045 - RNA, 19 nt, Homo sapiens
  misc_RNA (1)...(19): siRNA sense strand
ccaguucuuuaggaucuau

SEQ ID NO: 1557046 - RNA, 19 nt, Homo sapiens
  misc_RNA (1)...(19): siRNA sense strand
cauccuuguuuguuuccuu

SEQ ID NO: 1557047 - RNA, 19 nt, Homo sapiens
  misc_RNA (1)...(19): siRNA sense strand
uugcuucucuuugucuuug

SEQ ID NO: 1557048 - RNA, 19 nt, Homo sapiens
  misc_RNA (1)...(19): siRNA sense strand
uccaugaggaauacaauga

SEQ ID NO: 1557049 - RNA, 19 nt, Homo sapiens
  misc_RNA (1)...(19): siRNA sense strand
gccacaauaccuccaggaa

SEQ ID NO: 1557050 - RNA, 19 nt, Homo sapiens
  misc_RNA (1)...(19): siRNA sense strand
gcuggugggugucauuucc

SEQ ID NO: 1557051 - RNA, 19 nt, Homo sapiens
  misc_RNA (1)...(19): siRNA sense strand
ucauagccguugcugugau

SEQ ID NO: 1557052 - RNA, 19 nt, Homo sapiens
  misc_RNA (1)...(19): siRNA sense strand
gggugucauuuccauucuu

SEQ ID NO: 1557053 - RNA, 19 nt, Homo sapiens
  misc_RNA (1)...(19): siRNA sense strand
ccuauucuauguggugauc

SEQ ID NO: 1557054 - RNA, 19 nt, Homo sapiens
  misc_RNA (1)...(19): siRNA sense strand
gaagccauugguuuaagca

SEQ ID NO: 1557055 - RNA, 19 nt, Homo sapiens
  misc_RNA (1)...(19): siRNA sense strand
gcauguggacgcuggugau

SEQ ID NO: 1557056 - RNA, 19 nt, Homo sapiens
  misc_RNA (1)...(19): siRNA sense strand
gcaagaaccuuuccaguua

SEQ ID NO: 1557057 - RNA, 19 nt, Homo sapiens
  misc_RNA (1)...(19): siRNA sense strand
gaaccaagcuucagugcua

SEQ ID NO: 1557058 - RNA, 19 nt, Homo sapiens
  misc_RNA (1)...(19): siRNA sense strand
gcucaggaguucaauauua

SEQ ID NO: 1557059 - RNA, 19 nt, Homo sapiens
  misc_RNA (1)...(19): siRNA sense strand
gaauugagcacccacauuu

SEQ ID NO: 1557060 - RNA, 19 nt, Homo sapiens
  misc_RNA (1)...(19): siRNA sense strand
uaguauggcuguagaauuu

SEQ ID NO: 1557061 - RNA, 19 nt, Homo sapiens
  misc_RNA (1)...(19): siRNA sense strand
agaauuuccucuagucuua

SEQ ID NO: 1557062 - RNA, 19 nt, Homo sapiens
  misc_RNA (1)...(19): siRNA sense strand
aaggaggacucaaacauua

SEQ ID NO: 1557063 - RNA, 19 nt, Homo sapiens
  misc_RNA (1)...(19): siRNA sense strand
gagaacagauaaaggaguu

SEQ ID NO: 1557064 - RNA, 19 nt, Homo sapiens
  misc_RNA (1)...(19): siRNA sense strand
acacguagcccuaagaaua

SEQ ID NO: 1557065 - RNA, 19 nt, Homo sapiens
  misc_RNA (1)...(19): siRNA sense strand
ccaacggugugauuaauuu

SEQ ID NO: 1557066 - RNA, 19 nt, Homo sapiens
  misc_RNA (1)...(19): siRNA sense strand
gaccaaagauggauggaau

SEQ ID NO: 1557067 - RNA, 19 nt, Homo sapiens
  misc_RNA (1)...(19): siRNA sense strand
uaugauggcuauccucuuu

SEQ ID NO: 1557068 - RNA, 19 nt, Homo sapiens
  misc_RNA (1)...(19): siRNA sense strand
gcagaccagugccuuugua

SEQ ID NO: 1557069 - RNA, 19 nt, Homo sapiens
  misc_RNA (1)...(19): siRNA sense strand
aaacuaagcgugcauuuga

SEQ ID NO: 1557070 - RNA, 19 nt, Homo sapiens
  misc_RNA (1)...(19): siRNA sense strand
ggacuguaaugacacacua

SEQ ID NO: 1557071 - RNA, 19 nt, Homo sapiens
  misc_RNA (1)...(19): siRNA sense strand
uugaugagcugcugaauau

SEQ ID NO: 1557072 - RNA, 19 nt, Homo sapiens
  misc_RNA (1)...(19): siRNA sense strand
gagugaagaugcgcacaua

SEQ ID NO: 1557073 - RNA, 19 nt, Homo sapiens
  misc_RNA (1)...(19): siRNA sense strand
gcuauccucuuucugauug

SEQ ID NO: 1557074 - RNA, 19 nt, Homo sapiens
  misc_RNA (1)...(19): siRNA sense strand
guuaagcccucugucauaa

SEQ ID NO: 1557075 - RNA, 19 nt, Homo sapiens
  misc_RNA (1)...(19): siRNA sense strand
aaacucacauguuguauag

SEQ ID NO: 1557076 - RNA, 19 nt, Homo sapiens
  misc_RNA (1)...(19): siRNA sense strand
caagaggugcaaagacuua

SEQ ID NO: 1557077 - RNA, 19 nt, Homo sapiens
  misc_RNA (1)...(19): siRNA sense strand
aaccaagacucgacuagua

SEQ ID NO: 1557078 - RNA, 19 nt, Homo sapiens
  misc_RNA (1)...(19): siRNA sense strand
gcagacagacauccaacua

SEQ ID NO: 1557079 - RNA, 19 nt, Homo sapiens
  misc_RNA (1)...(19): siRNA sense strand
gaccuucgcucucaguuuc

SEQ ID NO: 1557080 - RNA, 19 nt, Homo sapiens
  misc_RNA (1)...(19): siRNA sense strand
ggagauggcaagaaccuuu

SEQ ID NO: 1557081 - RNA, 19 nt, Homo sapiens
  misc_RNA (1)...(19): siRNA sense strand
gugaagaugcgcacauaua

SEQ ID NO: 1557082 - RNA, 19 nt, Homo sapiens
  misc_RNA (1)...(19): siRNA sense strand
acucacauguuguauagua

SEQ ID NO: 1557083 - RNA, 19 nt, Homo sapiens
  misc_RNA (1)...(19): siRNA sense strand
uauucuaucugcucaagua

SEQ ID NO: 1557084 - RNA, 19 nt, Homo sapiens
  misc_RNA (1)...(19): siRNA sense strand
aaagauggauggaaugaca

SEQ ID NO: 1557085 - RNA, 19 nt, Homo sapiens
  misc_RNA (1)...(19): siRNA sense strand
caagaaccuuuccaguuau

SEQ ID NO: 1557086 - RNA, 19 nt, Homo sapiens
  misc_RNA (1)...(19): siRNA sense strand
caacaacugugggcuaauc

SEQ ID NO: 1557087 - RNA, 19 nt, Homo sapiens
  misc_RNA (1)...(19): siRNA sense strand
agccagagauuauugauga

SEQ ID NO: 1557088 - RNA, 19 nt, Homo sapiens
  misc_RNA (1)...(19): siRNA sense strand
ugaagaugcgcacauauaa

SEQ ID NO: 1557089 - RNA, 19 nt, Homo sapiens
  misc_RNA (1)...(19): siRNA sense strand
gaccagugccuuuguagaa

SEQ ID NO: 1557090 - RNA, 19 nt, Homo sapiens
  misc_RNA (1)...(19): siRNA sense strand
ggcaagaaccuuuccaguu

SEQ ID NO: 1557091 - RNA, 19 nt, Homo sapiens
  misc_RNA (1)...(19): siRNA sense strand
uccgaggacuuuaauguaa

SEQ ID NO: 1557092 - RNA, 19 nt, Homo sapiens
  misc_RNA (1)...(19): siRNA sense strand
uaaggaggacucaaacauu

SEQ ID NO: 1557093 - RNA, 19 nt, Homo sapiens
  misc_RNA (1)...(19): siRNA sense strand
uacgagaacuggagcaaga

SEQ ID NO: 1557094 - RNA, 19 nt, Homo sapiens
  misc_RNA (1)...(19): siRNA sense strand
agacagacauccaacuauc

SEQ ID NO: 1557095 - RNA, 19 nt, Homo sapiens
  misc_RNA (1)...(19): siRNA sense strand
caacgaagagggucugugu

SEQ ID NO: 1557096 - RNA, 19 nt, Homo sapiens
  misc_RNA (1)...(19): siRNA sense strand
ccaguuaugucaguuugaa

SEQ ID NO: 1557097 - RNA, 19 nt, Homo sapiens
  misc_RNA (1)...(19): siRNA sense strand
ucagaggacuauucuaucu

SEQ ID NO: 1557098 - RNA, 19 nt, Homo sapiens
  misc_RNA (1)...(19): siRNA sense strand
gaagacacguagcccuaag

SEQ ID NO: 1557099 - RNA, 19 nt, Homo sapiens
  misc_RNA (1)...(19): siRNA sense strand
cgaagagggucuguguuga

SEQ ID NO: 1557100 - RNA, 19 nt, Homo sapiens
  misc_RNA (1)...(19): siRNA sense strand
ggacucaaacauuagagaa

SEQ ID NO: 1557101 - RNA, 19 nt, Homo sapiens
  misc_RNA (1)...(19): siRNA sense strand
gggcuuugcuagucaggaa

SEQ ID NO: 1557102 - RNA, 19 nt, Homo sapiens
  misc_RNA (1)...(19): siRNA sense strand
guagaaagcagacagacau

SEQ ID NO: 1557103 - RNA, 19 nt, Homo sapiens
  misc_RNA (1)...(19): siRNA sense strand
gaauaggaccaaagaugga

SEQ ID NO: 1557104 - RNA, 19 nt, Homo sapiens
  misc_RNA (1)...(19): siRNA sense strand
gaugagcugcugaauauag

SEQ ID NO: 1557105 - RNA, 19 nt, Homo sapiens
  misc_RNA (1)...(19): siRNA sense strand
gagaagccagagauuauug

SEQ ID NO: 1557106 - RNA, 19 nt, Homo sapiens
  misc_RNA (1)...(19): siRNA sense strand
ggagaagccagagauuauu

SEQ ID NO: 1557107 - RNA, 19 nt, Homo sapiens
  misc_RNA (1)...(19): siRNA sense strand
gcacccacauuuauuccau

SEQ ID NO: 1557108 - RNA, 19 nt, Homo sapiens
  misc_RNA (1)...(19): siRNA sense strand
ccaggaggcucaggaguuc

SEQ ID NO: 1557109 - RNA, 19 nt, Homo sapiens
  misc_RNA (1)...(19): siRNA sense strand
ccaguacccuguggaauag

SEQ ID NO: 1557110 - RNA, 19 nt, Homo sapiens
  misc_RNA (1)...(19): siRNA sense strand
uacaaggacuggacacugu

SEQ ID NO: 1557111 - RNA, 19 nt, Homo sapiens
  misc_RNA (1)...(19): siRNA sense strand
uacaacaacugugggcuaa

SEQ ID NO: 1557112 - RNA, 19 nt, Homo sapiens
  misc_RNA (1)...(19): siRNA sense strand
gauaaugacacagacagaa

SEQ ID NO: 1557113 - RNA, 19 nt, Homo sapiens
  misc_RNA (1)...(19): siRNA sense strand
gcugaagagauccguuaua

SEQ ID NO: 1557114 - RNA, 19 nt, Homo sapiens
  misc_RNA (1)...(19): siRNA sense strand
gacagaaaccagacugaga

SEQ ID NO: 1557115 - RNA, 19 nt, Homo sapiens
  misc_RNA (1)...(19): siRNA sense strand
ugucaaaacucacauguug

SEQ ID NO: 1557116 - RNA, 19 nt, Homo sapiens
  misc_RNA (1)...(19): siRNA sense strand
gaugugggagaacagauaa

SEQ ID NO: 1557117 - RNA, 19 nt, Homo sapiens
  misc_RNA (1)...(19): siRNA sense strand
gaagaugcgcacauauaag

SEQ ID NO: 1557118 - RNA, 19 nt, Homo sapiens
  misc_RNA (1)...(19): siRNA sense strand
gaauggagaagccagagau

SEQ ID NO: 1557119 - RNA, 19 nt, Homo sapiens
  misc_RNA (1)...(19): siRNA sense strand
gauauuguaaccauggauu

SEQ ID NO: 1557120 - RNA, 19 nt, Homo sapiens
  misc_RNA (1)...(19): siRNA sense strand
gaacagauaaaggaguuag

SEQ ID NO: 1557121 - RNA, 19 nt, Homo sapiens
  misc_RNA (1)...(19): siRNA sense strand
cauguuguauaguaugcua

SEQ ID NO: 1557122 - RNA, 19 nt, Homo sapiens
  misc_RNA (1)...(19): siRNA sense strand
gguacucccuccagacauc

SEQ ID NO: 1557123 - RNA, 19 nt, Homo sapiens
  misc_RNA (1)...(19): siRNA sense strand
acagaaaccagacugagaa

SEQ ID NO: 1557124 - RNA, 19 nt, Homo sapiens
  misc_RNA (1)...(19): siRNA sense strand
ccaaagauggauggaauga

SEQ ID NO: 1557125 - RNA, 19 nt, Homo sapiens
  misc_RNA (1)...(19): siRNA sense strand
caauauuacccaccuacaa

SEQ ID NO: 1557126 - RNA, 19 nt, Homo sapiens
  misc_RNA (1)...(19): siRNA sense strand
ccaaaagccucaauauagu

SEQ ID NO: 1557127 - RNA, 19 nt, Homo sapiens
  misc_RNA (1)...(19): siRNA sense strand
gaaaccagacugagaagcu

SEQ ID NO: 1557128 - RNA, 19 nt, Homo sapiens
  misc_RNA (1)...(19): siRNA sense strand
ggccaggcauuccuuuauc

SEQ ID NO: 1557129 - RNA, 19 nt, Homo sapiens
  misc_RNA (1)...(19): siRNA sense strand
cugaagagauccguuauac

SEQ ID NO: 1557130 - RNA, 19 nt, Homo sapiens
  misc_RNA (1)...(19): siRNA sense strand
ggaggacucaaacauuaga

SEQ ID NO: 1557131 - RNA, 19 nt, Homo sapiens
  misc_RNA (1)...(19): siRNA sense strand
uaagcccucugucauaaag

SEQ ID NO: 1557132 - RNA, 19 nt, Homo sapiens
  misc_RNA (1)...(19): siRNA sense strand
gaaauguuaagcccucugu

SEQ ID NO: 1557133 - RNA, 19 nt, Homo sapiens
  misc_RNA (1)...(19): siRNA sense strand
gccaggcauuccuuuauca

SEQ ID NO: 1557134 - RNA, 19 nt, Homo sapiens
  misc_RNA (1)...(19): siRNA sense strand
gggauuccgaggacuuuaa

SEQ ID NO: 1557135 - RNA, 19 nt, Homo sapiens
  misc_RNA (1)...(19): siRNA sense strand
gcugcugaauauagagaaa

SEQ ID NO: 1557136 - RNA, 19 nt, Homo sapiens
  misc_RNA (1)...(19): siRNA sense strand
gaacuuguguaaaauggau

SEQ ID NO: 1557137 - RNA, 19 nt, Homo sapiens
  misc_RNA (1)...(19): siRNA sense strand
gugcugauuuagauauugu

SEQ ID NO: 1557138 - RNA, 19 nt, Homo sapiens
  misc_RNA (1)...(19): siRNA sense strand
ccagacauccguauauugg

SEQ ID NO: 1557139 - RNA, 19 nt, Homo sapiens
  misc_RNA (1)...(19): siRNA sense strand
gauccguuauacccacauu

SEQ ID NO: 1557140 - RNA, 19 nt, Homo sapiens
  misc_RNA (1)...(19): siRNA sense strand
gaaagcagacagacaucca

SEQ ID NO: 1557141 - RNA, 19 nt, Homo sapiens
  misc_RNA (1)...(19): siRNA sense strand
agacugagaagcuccuaaa

SEQ ID NO: 1557142 - RNA, 19 nt, Homo sapiens
  misc_RNA (1)...(19): siRNA sense strand
gcaagaggugcaaagacuu

SEQ ID NO: 1557143 - RNA, 19 nt, Homo sapiens
  misc_RNA (1)...(19): siRNA sense strand
uggagaagccagagauuau

SEQ ID NO: 1557144 - RNA, 19 nt, Homo sapiens
  misc_RNA (1)...(19): siRNA sense strand
aggcauuccuuuaucauca

SEQ ID NO: 1557145 - RNA, 19 nt, Homo sapiens
  misc_RNA (1)...(19): siRNA sense strand
cgaugugggagaacagaua

SEQ ID NO: 1557146 - RNA, 19 nt, Homo sapiens
  misc_RNA (1)...(19): siRNA sense strand
aauauaguauggcuguaga

SEQ ID NO: 1557147 - RNA, 19 nt, Homo sapiens
  misc_RNA (1)...(19): siRNA sense strand
guagccaacggugugauua

SEQ ID NO: 1557148 - RNA, 19 nt, Homo sapiens
  misc_RNA (1)...(19): siRNA sense strand
ggagcaagaggugcaaaga

SEQ ID NO: 1557149 - RNA, 19 nt, Homo sapiens
  misc_RNA (1)...(19): siRNA sense strand
uuaugcagcucagaaguau

SEQ ID NO: 1557150 - RNA, 19 nt, Homo sapiens
  misc_RNA (1)...(19): siRNA sense strand
gcacccaugauuucaggaa

SEQ ID NO: 1557151 - RNA, 19 nt, Homo sapiens
  misc_RNA (1)...(19): siRNA sense strand
uggauggaaugacagaaug

SEQ ID NO: 1557152 - RNA, 19 nt, Homo sapiens
  misc_RNA (1)...(19): siRNA sense strand
caacugugggcuaaucaug

SEQ ID NO: 1557153 - RNA, 19 nt, Homo sapiens
  misc_RNA (1)...(19): siRNA sense strand
uaaaugccaaggacuggaa

SEQ ID NO: 1557154 - RNA, 19 nt, Homo sapiens
  misc_RNA (1)...(19): siRNA sense strand
gaagagggucuguguugac

SEQ ID NO: 1557155 - RNA, 19 nt, Homo sapiens
  misc_RNA (1)...(19): siRNA sense strand
cgaauugagcacccacauu

SEQ ID NO: 1557156 - RNA, 19 nt, Homo sapiens
  misc_RNA (1)...(19): siRNA sense strand
ugaaauuccucaaugauuc

SEQ ID NO: 1557157 - RNA, 19 nt, Homo sapiens
  misc_RNA (1)...(19): siRNA sense strand
gaacagcaggugcgacuca

SEQ ID NO: 1557158 - RNA, 19 nt, Homo sapiens
  misc_RNA (1)...(19): siRNA sense strand
cggcugaaauuccucaaug

SEQ ID NO: 1557159 - RNA, 19 nt, Homo sapiens
  misc_RNA (1)...(19): siRNA sense strand
gaaauuccucaaugauuca

SEQ ID NO: 1557160 - RNA, 19 nt, Homo sapiens
  misc_RNA (1)...(19): siRNA sense strand
ggcugaaauuccucaauga

SEQ ID NO: 1557161 - RNA, 19 nt, Homo sapiens
  misc_RNA (1)...(19): siRNA sense strand
gcagcuaccgacagcauga

SEQ ID NO: 1557162 - RNA, 19 nt, Homo sapiens
  misc_RNA (1)...(19): siRNA sense strand
gcugaaauuccucaaugau

SEQ ID NO: 1557163 - RNA, 19 nt, Homo sapiens
  misc_RNA (1)...(19): siRNA sense strand
cugaaauuccucaaugauu

SEQ ID NO: 1557164 - RNA, 19 nt, Homo sapiens
  misc_RNA (1)...(19): siRNA sense strand
caccauuggcuccuugaaa

SEQ ID NO: 1557165 - RNA, 19 nt, Homo sapiens
  misc_RNA (1)...(19): siRNA sense strand
gaugaggugaccguccuuu

SEQ ID NO: 1557166 - RNA, 19 nt, Homo sapiens
  misc_RNA (1)...(19): siRNA sense strand
gaaggaugcagauaugguu

SEQ ID NO: 1557167 - RNA, 19 nt, Homo sapiens
  misc_RNA (1)...(19): siRNA sense strand
uaugaaggaugcagauaug

SEQ ID NO: 1557168 - RNA, 19 nt, Homo sapiens
  misc_RNA (1)...(19): siRNA sense strand
cuacagaagauauagauuc

SEQ ID NO: 1557169 - RNA, 19 nt, Homo sapiens
  misc_RNA (1)...(19): siRNA sense strand
cagaagauauagauucacu

SEQ ID NO: 1557170 - RNA, 19 nt, Homo sapiens
  misc_RNA (1)...(19): siRNA sense strand
gcuaugaaggaugcagaua

SEQ ID NO: 1557171 - RNA, 19 nt, Homo sapiens
  misc_RNA (1)...(19): siRNA sense strand
ggaugcagauaugguugug

SEQ ID NO: 1557172 - RNA, 19 nt, Homo sapiens
  misc_RNA (1)...(19): siRNA sense strand
cuaugaaggaugcagauau

SEQ ID NO: 1557173 - RNA, 19 nt, Homo sapiens
  misc_RNA (1)...(19): siRNA sense strand
caucaugcuacagaagaua

SEQ ID NO: 1557174 - RNA, 19 nt, Homo sapiens
  misc_RNA (1)...(19): siRNA sense strand
ccaucaugcuacagaagau

SEQ ID NO: 1557175 - RNA, 19 nt, Homo sapiens
  misc_RNA (1)...(19): siRNA sense strand
ggcuauggcugcggcuaug

SEQ ID NO: 1557176 - RNA, 19 nt, Homo sapiens
  misc_RNA (1)...(19): siRNA sense strand
gcuacagaagauauagauu

SEQ ID NO: 1557177 - RNA, 19 nt, Homo sapiens
  misc_RNA (1)...(19): siRNA sense strand
gcacaacgccugccacuga

SEQ ID NO: 1557178 - RNA, 19 nt, Homo sapiens
  misc_RNA (1)...(19): siRNA sense strand
gcaaguggcuuaugcaucu

SEQ ID NO: 1557179 - RNA, 19 nt, Homo sapiens
  misc_RNA (1)...(19): siRNA sense strand
cuacaagccugaugucuac

SEQ ID NO: 1557180 - RNA, 19 nt, Homo sapiens
  misc_RNA (1)...(19): siRNA sense strand
uuaagugccugcucaccua

SEQ ID NO: 1557181 - RNA, 19 nt, Homo sapiens
  misc_RNA (1)...(19): siRNA sense strand
gggcuggauugcaguguau

SEQ ID NO: 1557182 - RNA, 19 nt, Homo sapiens
  misc_RNA (1)...(19): siRNA sense strand
uacccaccaucccaaguua

SEQ ID NO: 1557183 - RNA, 19 nt, Homo sapiens
  misc_RNA (1)...(19): siRNA sense strand
acaccuaccugggcaucua

SEQ ID NO: 1557184 - RNA, 19 nt, Homo sapiens
  misc_RNA (1)...(19): siRNA sense strand
ugagagccguuuccagcuu

SEQ ID NO: 1557185 - RNA, 19 nt, Homo sapiens
  misc_RNA (1)...(19): siRNA sense strand
guacccaccaucccaaguu

SEQ ID NO: 1557186 - RNA, 19 nt, Homo sapiens
  misc_RNA (1)...(19): siRNA sense strand
ccuacaagccugaugucua

SEQ ID NO: 1557187 - RNA, 19 nt, Homo sapiens
  misc_RNA (1)...(19): siRNA sense strand
gccaggucaucuguguuua

SEQ ID NO: 1557188 - RNA, 19 nt, Homo sapiens
  misc_RNA (1)...(19): siRNA sense strand
cgccaggucaucuguguuu

SEQ ID NO: 1557189 - RNA, 19 nt, Homo sapiens
  misc_RNA (1)...(19): siRNA sense strand
agccugaugucuacaccua

SEQ ID NO: 1557190 - RNA, 19 nt, Homo sapiens
  misc_RNA (1)...(19): siRNA sense strand
caggucaucuguguuuaca

SEQ ID NO: 1557191 - RNA, 19 nt, Homo sapiens
  misc_RNA (1)...(19): siRNA sense strand
gugcagcgggcauuaagug

SEQ ID NO: 1557192 - RNA, 19 nt, Homo sapiens
  misc_RNA (1)...(19): siRNA sense strand
gccaacaacguggaacuga

SEQ ID NO: 1557193 - RNA, 19 nt, Homo sapiens
  misc_RNA (1)...(19): siRNA sense strand
caggugaggagcuggaaga

SEQ ID NO: 1557194 - RNA, 19 nt, Homo sapiens
  misc_RNA (1)...(19): siRNA sense strand
ugggcuggauugcagugua

SEQ ID NO: 1557195 - RNA, 19 nt, Homo sapiens
  misc_RNA (1)...(19): siRNA sense strand
ggcgccaggucaucugugu

SEQ ID NO: 1557196 - RNA, 19 nt, Homo sapiens
  misc_RNA (1)...(19): siRNA sense strand
gaagacccaucgcgaggaa

SEQ ID NO: 1557197 - RNA, 19 nt, Homo sapiens
  misc_RNA (1)...(19): siRNA sense strand
ggagaaacaggaacacuga

SEQ ID NO: 1557198 - RNA, 19 nt, Homo sapiens
  misc_RNA (1)...(19): siRNA sense strand
ggaggaagaugggaagagu

SEQ ID NO: 1557199 - RNA, 19 nt, Homo sapiens
  misc_RNA (1)...(19): siRNA sense strand
ggaccugggugcagucaca

SEQ ID NO: 1557200 - RNA, 19 nt, Homo sapiens
  misc_RNA (1)...(19): siRNA sense strand
gcaggaaguucugguaucu

SEQ ID NO: 1557201 - RNA, 19 nt, Homo sapiens
  misc_RNA (1)...(19): siRNA sense strand
ggacgagccugaggaccuu

SEQ ID NO: 1557202 - RNA, 19 nt, Homo sapiens
  misc_RNA (1)...(19): siRNA sense strand
gcaggcgucugagcugauu

SEQ ID NO: 1557203 - RNA, 19 nt, Homo sapiens
  misc_RNA (1)...(19): siRNA sense strand
gugaguggcuggagacuac

SEQ ID NO: 1557204 - RNA, 19 nt, Homo sapiens
  misc_RNA (1)...(19): siRNA sense strand
gcacaacuccguccucacu

SEQ ID NO: 1557205 - RNA, 19 nt, Homo sapiens
  misc_RNA (1)...(19): siRNA sense strand
gaagaugggaagaguccaa

SEQ ID NO: 1557206 - RNA, 19 nt, Homo sapiens
  misc_RNA (1)...(19): siRNA sense strand
gcaaggucuuccugcacaa

SEQ ID NO: 1557207 - RNA, 19 nt, Homo sapiens
  misc_RNA (1)...(19): siRNA sense strand
caaaagacccuuccagugu

SEQ ID NO: 1557208 - RNA, 19 nt, Homo sapiens
  misc_RNA (1)...(19): siRNA sense strand
aaaagacccuuccagugua

SEQ ID NO: 1557209 - RNA, 19 nt, Homo sapiens
  misc_RNA (1)...(19): siRNA sense strand
caaaggugguacccaagag

SEQ ID NO: 1557210 - RNA, 19 nt, Homo sapiens
  misc_RNA (1)...(19): siRNA sense strand
acaacuccguccucacuga

SEQ ID NO: 1557211 - RNA, 19 nt, Homo sapiens
  misc_RNA (1)...(19): siRNA sense strand
gaguuucggugaggaggaa

SEQ ID NO: 1557212 - RNA, 19 nt, Homo sapiens
  misc_RNA (1)...(19): siRNA sense strand
ccaaaggugguacccaaga

SEQ ID NO: 1557213 - RNA, 19 nt, Homo sapiens
  misc_RNA (1)...(19): siRNA sense strand
ucacugagcauggcaagau

SEQ ID NO: 1557214 - RNA, 19 nt, Homo sapiens
  misc_RNA (1)...(19): siRNA sense strand
cgaaggagaaacaggaaca

SEQ ID NO: 1557215 - RNA, 19 nt, Homo sapiens
  misc_RNA (1)...(19): siRNA sense strand
aaagacccuuccaguguag

SEQ ID NO: 1557216 - RNA, 19 nt, Homo sapiens
  misc_RNA (1)...(19): siRNA sense strand
ggaugguccaccucauuga

SEQ ID NO: 1557217 - RNA, 19 nt, Homo sapiens
  misc_RNA (1)...(19): siRNA sense strand
guccaaggucccagaaaga

SEQ ID NO: 1557218 - RNA, 19 nt, Homo sapiens
  misc_RNA (1)...(19): siRNA sense strand
aaccaucgcaggcgucuga

SEQ ID NO: 1557219 - RNA, 19 nt, Homo sapiens
  misc_RNA (1)...(19): siRNA sense strand
gguccaagugcucagagaa

SEQ ID NO: 1557220 - RNA, 19 nt, Homo sapiens
  misc_RNA (1)...(19): siRNA sense strand
cagcaggaaguucugguau

SEQ ID NO: 1557221 - RNA, 19 nt, Homo sapiens
  misc_RNA (1)...(19): siRNA sense strand
gcagaagggacugugaucu

SEQ ID NO: 1557222 - RNA, 19 nt, Homo sapiens
  misc_RNA (1)...(19): siRNA sense strand
aggaaguucugguaucucu

SEQ ID NO: 1557223 - RNA, 19 nt, Homo sapiens
  misc_RNA (1)...(19): siRNA sense strand
ccaagugcucagagaauca

SEQ ID NO: 1557224 - RNA, 19 nt, Homo sapiens
  misc_RNA (1)...(19): siRNA sense strand
gaugggaagaguccaaggu

SEQ ID NO: 1557225 - RNA, 19 nt, Homo sapiens
  misc_RNA (1)...(19): siRNA sense strand
gggcagaagggacugugau

SEQ ID NO: 1557226 - RNA, 19 nt, Homo sapiens
  misc_RNA (1)...(19): siRNA sense strand
aguccaaggucccagaaag

SEQ ID NO: 1557227 - RNA, 19 nt, Homo sapiens
  misc_RNA (1)...(19): siRNA sense strand
ccucugaagccgaguaucu

SEQ ID NO: 1557228 - RNA, 19 nt, Homo sapiens
  misc_RNA (1)...(19): siRNA sense strand
ggguccaagugcucagaga

SEQ ID NO: 1557229 - RNA, 19 nt, Homo sapiens
  misc_RNA (1)...(19): siRNA sense strand
cagaagggacugugaucuc

SEQ ID NO: 1557230 - RNA, 19 nt, Homo sapiens
  misc_RNA (1)...(19): siRNA sense strand
gaacagggauuuaugcaaa

SEQ ID NO: 1557231 - RNA, 19 nt, Homo sapiens
  misc_RNA (1)...(19): siRNA sense strand
uaaugaagauucucucaga

SEQ ID NO: 1557232 - RNA, 19 nt, Homo sapiens
  misc_RNA (1)...(19): siRNA sense strand
gcaagcagcugaaaaggaa

SEQ ID NO: 1557233 - RNA, 19 nt, Homo sapiens
  misc_RNA (1)...(19): siRNA sense strand
gagcgccguucucuaauga

SEQ ID NO: 1557234 - RNA, 19 nt, Homo sapiens
  misc_RNA (1)...(19): siRNA sense strand
gaagcaggacugacaagaa

SEQ ID NO: 1557235 - RNA, 19 nt, Homo sapiens
  misc_RNA (1)...(19): siRNA sense strand
gaaggcagcaguguggaua

SEQ ID NO: 1557236 - RNA, 19 nt, Homo sapiens
  misc_RNA (1)...(19): siRNA sense strand
caggagcgccguucucuaa

SEQ ID NO: 1557237 - RNA, 19 nt, Homo sapiens
  misc_RNA (1)...(19): siRNA sense strand
gcagaaagagguucaagag

SEQ ID NO: 1557238 - RNA, 19 nt, Homo sapiens
  misc_RNA (1)...(19): siRNA sense strand
ggagcgccguucucuaaug

SEQ ID NO: 1557239 - RNA, 19 nt, Homo sapiens
  misc_RNA (1)...(19): siRNA sense strand
ggaggcugcuggcacaaga

SEQ ID NO: 1557240 - RNA, 19 nt, Homo sapiens
  misc_RNA (1)...(19): siRNA sense strand
gcccacaucuuucccacaa

SEQ ID NO: 1557241 - RNA, 19 nt, Homo sapiens
  misc_RNA (1)...(19): siRNA sense strand
aggagacgcugcagaaaga

SEQ ID NO: 1557242 - RNA, 19 nt, Homo sapiens
  misc_RNA (1)...(19): siRNA sense strand
uucaagagcugcaggauuc

SEQ ID NO: 1557243 - RNA, 19 nt, Homo sapiens
  misc_RNA (1)...(19): siRNA sense strand
ggacugacaagaagaugga

SEQ ID NO: 1557244 - RNA, 19 nt, Homo sapiens
  misc_RNA (1)...(19): siRNA sense strand
uggaacagguggcucagaa

SEQ ID NO: 1557245 - RNA, 19 nt, Homo sapiens
  misc_RNA (1)...(19): siRNA sense strand
gaaggagacgcugcagaaa

SEQ ID NO: 1557246 - RNA, 19 nt, Homo sapiens
  misc_RNA (1)...(19): siRNA sense strand
gagcugaacagggauuuau

SEQ ID NO: 1557247 - RNA, 19 nt, Homo sapiens
  misc_RNA (1)...(19): siRNA sense strand
gcugcaggauucccucuug

SEQ ID NO: 1557248 - RNA, 19 nt, Homo sapiens
  misc_RNA (1)...(19): siRNA sense strand
gaagagcaacgccggaagu

SEQ ID NO: 1557249 - RNA, 19 nt, Homo sapiens
  misc_RNA (1)...(19): siRNA sense strand
cagaagcagcccuacagua

SEQ ID NO: 1557250 - RNA, 19 nt, Homo sapiens
  misc_RNA (1)...(19): siRNA sense strand
aagcagcccuacaguacaa

SEQ ID NO: 1557251 - RNA, 19 nt, Homo sapiens
  misc_RNA (1)...(19): siRNA sense strand
aagcaggacugacaagaag

SEQ ID NO: 1557252 - RNA, 19 nt, Homo sapiens
  misc_RNA (1)...(19): siRNA sense strand
agaaggagacgcugcagaa

SEQ ID NO: 1557253 - RNA, 19 nt, Homo sapiens
  misc_RNA (1)...(19): siRNA sense strand
caucuggccuugcaguaca

SEQ ID NO: 1557254 - RNA, 19 nt, Homo sapiens
  misc_RNA (1)...(19): siRNA sense strand
aaacagcaguggcggacau

SEQ ID NO: 1557255 - RNA, 19 nt, Homo sapiens
  misc_RNA (1)...(19): siRNA sense strand
agaggaggcugccauggau

SEQ ID NO: 1557256 - RNA, 19 nt, Homo sapiens
  misc_RNA (1)...(19): siRNA sense strand
gagcccugcccacaucuuu

SEQ ID NO: 1557257 - RNA, 19 nt, Homo sapiens
  misc_RNA (1)...(19): siRNA sense strand
ggaagcaggacugacaaga

SEQ ID NO: 1557258 - RNA, 19 nt, Homo sapiens
  misc_RNA (1)...(19): siRNA sense strand
gaaguuggagcagcagaug

SEQ ID NO: 1557259 - RNA, 19 nt, Homo sapiens
  misc_RNA (1)...(19): siRNA sense strand
gaagcagcccuacaguaca

SEQ ID NO: 1557260 - RNA, 19 nt, Homo sapiens
  misc_RNA (1)...(19): siRNA sense strand
gccguucucuaaugaagau

SEQ ID NO: 1557261 - RNA, 19 nt, Homo sapiens
  misc_RNA (1)...(19): siRNA sense strand
gcucaaaugcuuuaaucgu

SEQ ID NO: 1557262 - RNA, 19 nt, Homo sapiens
  misc_RNA (1)...(19): siRNA sense strand
ggagaagacacaaauucag

SEQ ID NO: 1557263 - RNA, 19 nt, Homo sapiens
  misc_RNA (1)...(19): siRNA sense strand
ggacgaggaagagugguau

SEQ ID NO: 1557264 - RNA, 19 nt, Homo sapiens
  misc_RNA (1)...(19): siRNA sense strand
guucaagagcugcaggauu

SEQ ID NO: 1557265 - RNA, 19 nt, Homo sapiens
  misc_RNA (1)...(19): siRNA sense strand
gcaggacugacaagaagau

SEQ ID NO: 1557266 - RNA, 19 nt, Homo sapiens
  misc_RNA (1)...(19): siRNA sense strand
agaagcagcccuacaguac

SEQ ID NO: 1557267 - RNA, 19 nt, Homo sapiens
  misc_RNA (1)...(19): siRNA sense strand
gcgccguucucuaaugaag

SEQ ID NO: 1557268 - RNA, 19 nt, Homo sapiens
  misc_RNA (1)...(19): siRNA sense strand
gggacgaggaagaguggua

SEQ ID NO: 1557269 - RNA, 19 nt, Homo sapiens
  misc_RNA (1)...(19): siRNA sense strand
cuaggaagcaggacugaca

SEQ ID NO: 1557270 - RNA, 19 nt, Homo sapiens
  misc_RNA (1)...(19): siRNA sense strand
aggagcagcugcagucucu

SEQ ID NO: 1557271 - RNA, 19 nt, Homo sapiens
  misc_RNA (1)...(19): siRNA sense strand
ggaaguuggagcagcagau

SEQ ID NO: 1557272 - RNA, 19 nt, Homo sapiens
  misc_RNA (1)...(19): siRNA sense strand
gugaaggccucagcaugca

SEQ ID NO: 1557273 - RNA, 19 nt, Homo sapiens
  misc_RNA (1)...(19): siRNA sense strand
cgacuggagaagacacaaa

SEQ ID NO: 1557274 - RNA, 19 nt, Homo sapiens
  misc_RNA (1)...(19): siRNA sense strand
uggagaagacacaaauuca

SEQ ID NO: 1557275 - RNA, 19 nt, Homo sapiens
  misc_RNA (1)...(19): siRNA sense strand
cugcaggauucccucuuga

SEQ ID NO: 1557276 - RNA, 19 nt, Homo sapiens
  misc_RNA (1)...(19): siRNA sense strand
gacuggagaagacacaaau

SEQ ID NO: 1557277 - RNA, 19 nt, Homo sapiens
  misc_RNA (1)...(19): siRNA sense strand
aagaggaggcugccaugga

SEQ ID NO: 1557278 - RNA, 19 nt, Homo sapiens
  misc_RNA (1)...(19): siRNA sense strand
gcaggagcacagcagaauc

SEQ ID NO: 1557279 - RNA, 19 nt, Homo sapiens
  misc_RNA (1)...(19): siRNA sense strand
ugaguagccgagaggauga

SEQ ID NO: 1557280 - RNA, 19 nt, Homo sapiens
  misc_RNA (1)...(19): siRNA sense strand
gagcagcagauggcacuca

SEQ ID NO: 1557281 - RNA, 19 nt, Homo sapiens
  misc_RNA (1)...(19): siRNA sense strand
ugaacagggauuuaugcaa

SEQ ID NO: 1557282 - RNA, 19 nt, Homo sapiens
  misc_RNA (1)...(19): siRNA sense strand
cagcagaaccuguacuuua

SEQ ID NO: 1557283 - RNA, 19 nt, Homo sapiens
  misc_RNA (1)...(19): siRNA sense strand
gaagauggagccucuguca

SEQ ID NO: 1557284 - RNA, 19 nt, Homo sapiens
  misc_RNA (1)...(19): siRNA sense strand
agcagaaccuguacuuuaa

SEQ ID NO: 1557285 - RNA, 19 nt, Homo sapiens
  misc_RNA (1)...(19): siRNA sense strand
gagcagcugcgucaaguau

SEQ ID NO: 1557286 - RNA, 19 nt, Homo sapiens
  misc_RNA (1)...(19): siRNA sense strand
gcagcugcgucaaguaucu

SEQ ID NO: 1557287 - RNA, 19 nt, Homo sapiens
  misc_RNA (1)...(19): siRNA sense strand
ucaaguaucugaucuuccu

SEQ ID NO: 1557288 - RNA, 19 nt, Homo sapiens
  misc_RNA (1)...(19): siRNA sense strand
gggagcagcugcgucaagu

SEQ ID NO: 1557289 - RNA, 19 nt, Homo sapiens
  misc_RNA (1)...(19): siRNA sense strand
cgucaaguaucugaucuuc

SEQ ID NO: 1557290 - RNA, 19 nt, Homo sapiens
  misc_RNA (1)...(19): siRNA sense strand
gaucuuccucuccaacuuc

SEQ ID NO: 1557291 - RNA, 19 nt, Homo sapiens
  misc_RNA (1)...(19): siRNA sense strand
gagaggagccccuuacugu

SEQ ID NO: 1557292 - RNA, 19 nt, Homo sapiens
  misc_RNA (1)...(19): siRNA sense strand
gcagcagaaccuguacuuu

SEQ ID NO: 1557293 - RNA, 19 nt, Homo sapiens
  misc_RNA (1)...(19): siRNA sense strand
ggaaacugcaggccagaag

SEQ ID NO: 1557294 - RNA, 19 nt, Homo sapiens
  misc_RNA (1)...(19): siRNA sense strand
ggagcagcugcgucaagua

SEQ ID NO: 1557295 - RNA, 19 nt, Homo sapiens
  misc_RNA (1)...(19): siRNA sense strand
cagaaccuguacuuuaacu

SEQ ID NO: 1557296 - RNA, 19 nt, Homo sapiens
  misc_RNA (1)...(19): siRNA sense strand
gcgaagauggagccucugu

SEQ ID NO: 1557297 - RNA, 19 nt, Homo sapiens
  misc_RNA (1)...(19): siRNA sense strand
ugaucuuccucuccaacuu

SEQ ID NO: 1557298 - RNA, 19 nt, Homo sapiens
  misc_RNA (1)...(19): siRNA sense strand
ggcagcagaaccuguacuu

SEQ ID NO: 1557299 - RNA, 19 nt, Homo sapiens
  misc_RNA (1)...(19): siRNA sense strand
gcagaaccuguacuuuaac

SEQ ID NO: 1557300 - RNA, 19 nt, Homo sapiens
  misc_RNA (1)...(19): siRNA sense strand
gaaauacccuuugaacuga

SEQ ID NO: 1557301 - RNA, 19 nt, Homo sapiens
  misc_RNA (1)...(19): siRNA sense strand
gaaaucagcuguaaaugag

SEQ ID NO: 1557302 - RNA, 19 nt, Homo sapiens
  misc_RNA (1)...(19): siRNA sense strand
ucagaaaggucaagaggua

SEQ ID NO: 1557303 - RNA, 19 nt, Homo sapiens
  misc_RNA (1)...(19): siRNA sense strand
ugaaauuccucguuugaua

SEQ ID NO: 1557304 - RNA, 19 nt, Homo sapiens
  misc_RNA (1)...(19): siRNA sense strand
gcacuaagcaggaauaaau

SEQ ID NO: 1557305 - RNA, 19 nt, Homo sapiens
  misc_RNA (1)...(19): siRNA sense strand
gaagacagcagcucugaaa

SEQ ID NO: 1557306 - RNA, 19 nt, Homo sapiens
  misc_RNA (1)...(19): siRNA sense strand
agacucaucugauuucuuu

SEQ ID NO: 1557307 - RNA, 19 nt, Homo sapiens
  misc_RNA (1)...(19): siRNA sense strand
ggacaagcaagagauauua

SEQ ID NO: 1557308 - RNA, 19 nt, Homo sapiens
  misc_RNA (1)...(19): siRNA sense strand
gcucugaaauuccucguuu

SEQ ID NO: 1557309 - RNA, 19 nt, Homo sapiens
  misc_RNA (1)...(19): siRNA sense strand
ggaacaaauugacaucaug

SEQ ID NO: 1557310 - RNA, 19 nt, Homo sapiens
  misc_RNA (1)...(19): siRNA sense strand
gaucaagaauuggcaaaug

SEQ ID NO: 1557311 - RNA, 19 nt, Homo sapiens
  misc_RNA (1)...(19): siRNA sense strand
gaaaauggauugggaaaga

SEQ ID NO: 1557312 - RNA, 19 nt, Homo sapiens
  misc_RNA (1)...(19): siRNA sense strand
caaauugacaucaugguaa

SEQ ID NO: 1557313 - RNA, 19 nt, Homo sapiens
  misc_RNA (1)...(19): siRNA sense strand
gaugcaagaucaaccaaau

SEQ ID NO: 1557314 - RNA, 19 nt, Homo sapiens
  misc_RNA (1)...(19): siRNA sense strand
uagcaaugacucagaauua

SEQ ID NO: 1557315 - RNA, 19 nt, Homo sapiens
  misc_RNA (1)...(19): siRNA sense strand
gaaauuggacagucuggaa

SEQ ID NO: 1557316 - RNA, 19 nt, Homo sapiens
  misc_RNA (1)...(19): siRNA sense strand
gaaauuccucguuugauau

SEQ ID NO: 1557317 - RNA, 19 nt, Homo sapiens
  misc_RNA (1)...(19): siRNA sense strand
gacagcagcucugaaauuc

SEQ ID NO: 1557318 - RNA, 19 nt, Homo sapiens
  misc_RNA (1)...(19): siRNA sense strand
ggacaacuacaaagccuaa

SEQ ID NO: 1557319 - RNA, 19 nt, Homo sapiens
  misc_RNA (1)...(19): siRNA sense strand
ugaaaucagcuguaaauga

SEQ ID NO: 1557320 - RNA, 19 nt, Homo sapiens
  misc_RNA (1)...(19): siRNA sense strand
agaaacaggcacaaaguua

SEQ ID NO: 1557321 - RNA, 19 nt, Homo sapiens
  misc_RNA (1)...(19): siRNA sense strand
ugagaaguguaaucaguuu

SEQ ID NO: 1557322 - RNA, 19 nt, Homo sapiens
  misc_RNA (1)...(19): siRNA sense strand
uaaagaaccagaaaggaaa

SEQ ID NO: 1557323 - RNA, 19 nt, Homo sapiens
  misc_RNA (1)...(19): siRNA sense strand
gaagaaauacccuuugaac

SEQ ID NO: 1557324 - RNA, 19 nt, Homo sapiens
  misc_RNA (1)...(19): siRNA sense strand
caucuuauuugccuucuau

SEQ ID NO: 1557325 - RNA, 19 nt, Homo sapiens
  misc_RNA (1)...(19): siRNA sense strand
uaaaugagauagcacuaag

SEQ ID NO: 1557326 - RNA, 19 nt, Homo sapiens
  misc_RNA (1)...(19): siRNA sense strand
aagaagaaauacccuuuga

SEQ ID NO: 1557327 - RNA, 19 nt, Homo sapiens
  misc_RNA (1)...(19): siRNA sense strand
gauaagaagccaacuccaa

SEQ ID NO: 1557328 - RNA, 19 nt, Homo sapiens
  misc_RNA (1)...(19): siRNA sense strand
gaaauggaacgauugcaau

SEQ ID NO: 1557329 - RNA, 19 nt, Homo sapiens
  misc_RNA (1)...(19): siRNA sense strand
aaacaaaguuccacgaaaa

SEQ ID NO: 1557330 - RNA, 19 nt, Homo sapiens
  misc_RNA (1)...(19): siRNA sense strand
caaacucaacuaaauggua

SEQ ID NO: 1557331 - RNA, 19 nt, Homo sapiens
  misc_RNA (1)...(19): siRNA sense strand
uaccacaccuuaaagaaga

SEQ ID NO: 1557332 - RNA, 19 nt, Homo sapiens
  misc_RNA (1)...(19): siRNA sense strand
caaugacucagaauuauga

SEQ ID NO: 1557333 - RNA, 19 nt, Homo sapiens
  misc_RNA (1)...(19): siRNA sense strand
ccuuugaacugagcaauuu

SEQ ID NO: 1557334 - RNA, 19 nt, Homo sapiens
  misc_RNA (1)...(19): siRNA sense strand
agaaauacccuuugaacug

SEQ ID NO: 1557335 - RNA, 19 nt, Homo sapiens
  misc_RNA (1)...(19): siRNA sense strand
agaauuaccacaccuuaaa

SEQ ID NO: 1557336 - RNA, 19 nt, Homo sapiens
  misc_RNA (1)...(19): siRNA sense strand
caagaucaaccaaaucaug

SEQ ID NO: 1557337 - RNA, 19 nt, Homo sapiens
  misc_RNA (1)...(19): siRNA sense strand
aaacagugcuuagaagaca

SEQ ID NO: 1557338 - RNA, 19 nt, Homo sapiens
  misc_RNA (1)...(19): siRNA sense strand
gagaaugggacaagcaaga

SEQ ID NO: 1557339 - RNA, 19 nt, Homo sapiens
  misc_RNA (1)...(19): siRNA sense strand
gagacacgauuagaucuuc

SEQ ID NO: 1557340 - RNA, 19 nt, Homo sapiens
  misc_RNA (1)...(19): siRNA sense strand
guaaaugagauagcacuaa

SEQ ID NO: 1557341 - RNA, 19 nt, Homo sapiens
  misc_RNA (1)...(19): siRNA sense strand
gaauuuagagcaaagucaa

SEQ ID NO: 1557342 - RNA, 19 nt, Homo sapiens
  misc_RNA (1)...(19): siRNA sense strand
gaauuaugaaggacaacua

SEQ ID NO: 1557343 - RNA, 19 nt, Homo sapiens
  misc_RNA (1)...(19): siRNA sense strand
gcaaugacucagaauuaug

SEQ ID NO: 1557344 - RNA, 19 nt, Homo sapiens
  misc_RNA (1)...(19): siRNA sense strand
uuaaagaaccagaaaggaa

SEQ ID NO: 1557345 - RNA, 19 nt, Homo sapiens
  misc_RNA (1)...(19): siRNA sense strand
gaaccagaaauuagaggaa

SEQ ID NO: 1557346 - RNA, 19 nt, Homo sapiens
  misc_RNA (1)...(19): siRNA sense strand
aaagaauuaccacaccuua

SEQ ID NO: 1557347 - RNA, 19 nt, Homo sapiens
  misc_RNA (1)...(19): siRNA sense strand
gaucaaccaaaucaugaaa

SEQ ID NO: 1557348 - RNA, 19 nt, Homo sapiens
  misc_RNA (1)...(19): siRNA sense strand
agacagcagcucugaaauu

SEQ ID NO: 1557349 - RNA, 19 nt, Homo sapiens
  misc_RNA (1)...(19): siRNA sense strand
gaaacaggcacaaaguuac

SEQ ID NO: 1557350 - RNA, 19 nt, Homo sapiens
  misc_RNA (1)...(19): siRNA sense strand
gcaggaauaaauuacaaga

SEQ ID NO: 1557351 - RNA, 19 nt, Homo sapiens
  misc_RNA (1)...(19): siRNA sense strand
ugacccagaucccaauugu

SEQ ID NO: 1557352 - RNA, 19 nt, Homo sapiens
  misc_RNA (1)...(19): siRNA sense strand
ccaaaaugcucaaggaaau

SEQ ID NO: 1557353 - RNA, 19 nt, Homo sapiens
  misc_RNA (1)...(19): siRNA sense strand
gacagaaauuggacagucu

SEQ ID NO: 1557354 - RNA, 19 nt, Homo sapiens
  misc_RNA (1)...(19): siRNA sense strand
gaguuacagucacgugaug

SEQ ID NO: 1557355 - RNA, 19 nt, Homo sapiens
  misc_RNA (1)...(19): siRNA sense strand
gggacaagcaagagauauu

SEQ ID NO: 1557356 - RNA, 19 nt, Homo sapiens
  misc_RNA (1)...(19): siRNA sense strand
gaaaucaaugaaagagaug

SEQ ID NO: 1557357 - RNA, 19 nt, Homo sapiens
  misc_RNA (1)...(19): siRNA sense strand
uuagaggaauuuagagcaa

SEQ ID NO: 1557358 - RNA, 19 nt, Homo sapiens
  misc_RNA (1)...(19): siRNA sense strand
gaacugaaaauguaccaaa

SEQ ID NO: 1557359 - RNA, 19 nt, Homo sapiens
  misc_RNA (1)...(19): siRNA sense strand
ucagaauuaugaaggacaa

SEQ ID NO: 1557360 - RNA, 19 nt, Homo sapiens
  misc_RNA (1)...(19): siRNA sense strand
gaaccagaaaggaaaauaa

SEQ ID NO: 1557361 - RNA, 19 nt, Homo sapiens
  misc_RNA (1)...(19): siRNA sense strand
ugagcaauuugaaccagaa

SEQ ID NO: 1557362 - RNA, 19 nt, Homo sapiens
  misc_RNA (1)...(19): siRNA sense strand
ugcaagaacugaaaaugua

SEQ ID NO: 1557363 - RNA, 19 nt, Homo sapiens
  misc_RNA (1)...(19): siRNA sense strand
gaucccaauugugaaauca

SEQ ID NO: 1557364 - RNA, 19 nt, Homo sapiens
  misc_RNA (1)...(19): siRNA sense strand
ccagaucccaauugugaaa

SEQ ID NO: 1557365 - RNA, 19 nt, Homo sapiens
  misc_RNA (1)...(19): siRNA sense strand
acaaauugacaucauggua

SEQ ID NO: 1557366 - RNA, 19 nt, Homo sapiens
  misc_RNA (1)...(19): siRNA sense strand
gagcaaagucaagagaaug

SEQ ID NO: 1557367 - RNA, 19 nt, Homo sapiens
  misc_RNA (1)...(19): siRNA sense strand
ggagacacgauuagaucuu

SEQ ID NO: 1557368 - RNA, 19 nt, Homo sapiens
  misc_RNA (1)...(19): siRNA sense strand
caagagguaggguuacuuc

SEQ ID NO: 1557369 - RNA, 19 nt, Homo sapiens
  misc_RNA (1)...(19): siRNA sense strand
agagcaaagucaagagaau

SEQ ID NO: 1557370 - RNA, 19 nt, Homo sapiens
  misc_RNA (1)...(19): siRNA sense strand
uagaggaauuuagagcaaa

SEQ ID NO: 1557371 - RNA, 19 nt, Homo sapiens
  misc_RNA (1)...(19): siRNA sense strand
gaacgauugcaauuacaca

SEQ ID NO: 1557372 - RNA, 19 nt, Homo sapiens
  misc_RNA (1)...(19): siRNA sense strand
cauggaagcaggucucuca

SEQ ID NO: 1557373 - RNA, 19 nt, Homo sapiens
  misc_RNA (1)...(19): siRNA sense strand
cagaaacaggcacaaaguu

SEQ ID NO: 1557374 - RNA, 19 nt, Homo sapiens
  misc_RNA (1)...(19): siRNA sense strand
ggaauuuagagcaaaguca

SEQ ID NO: 1557375 - RNA, 19 nt, Homo sapiens
  misc_RNA (1)...(19): siRNA sense strand
uaugaaggacaacuacaaa

SEQ ID NO: 1557376 - RNA, 19 nt, Homo sapiens
  misc_RNA (1)...(19): siRNA sense strand
aaagagcuguuuucaguga

SEQ ID NO: 1557377 - RNA, 19 nt, Homo sapiens
  misc_RNA (1)...(19): siRNA sense strand
aaauugacaucaugguaag

SEQ ID NO: 1557378 - RNA, 19 nt, Homo sapiens
  misc_RNA (1)...(19): siRNA sense strand
gaaugggacaagcaagaga

SEQ ID NO: 1557379 - RNA, 19 nt, Homo sapiens
  misc_RNA (1)...(19): siRNA sense strand
gaugcgggcuuuggagaca

SEQ ID NO: 1557380 - RNA, 19 nt, Homo sapiens
  misc_RNA (1)...(19): siRNA sense strand
gaauuaccacaccuuaaag

SEQ ID NO: 1557381 - RNA, 19 nt, Homo sapiens
  misc_RNA (1)...(19): siRNA sense strand
caaugaaagagaugaguuc

SEQ ID NO: 1557382 - RNA, 19 nt, Homo sapiens
  misc_RNA (1)...(19): siRNA sense strand
gcucaauuuuccaaacuaa

SEQ ID NO: 1557383 - RNA, 19 nt, Homo sapiens
  misc_RNA (1)...(19): siRNA sense strand
acccagaucccaauuguga

SEQ ID NO: 1557384 - RNA, 19 nt, Homo sapiens
  misc_RNA (1)...(19): siRNA sense strand
gacaagcaagagauauuau

SEQ ID NO: 1557385 - RNA, 19 nt, Homo sapiens
  misc_RNA (1)...(19): siRNA sense strand
cagcagcucugaaauuccu

SEQ ID NO: 1557386 - RNA, 19 nt, Homo sapiens
  misc_RNA (1)...(19): siRNA sense strand
aagaucaaccaaaucauga

SEQ ID NO: 1557387 - RNA, 19 nt, Homo sapiens
  misc_RNA (1)...(19): siRNA sense strand
aauggaacgauugcaauua

SEQ ID NO: 1557388 - RNA, 19 nt, Homo sapiens
  misc_RNA (1)...(19): siRNA sense strand
aaauggaacgauugcaauu

SEQ ID NO: 1557389 - RNA, 19 nt, Homo sapiens
  misc_RNA (1)...(19): siRNA sense strand
agaaauggaacgauugcaa

SEQ ID NO: 1557390 - RNA, 19 nt, Homo sapiens
  misc_RNA (1)...(19): siRNA sense strand
caugguaagcaacaagaaa

SEQ ID NO: 1557391 - RNA, 19 nt, Homo sapiens
  misc_RNA (1)...(19): siRNA sense strand
agcaaugacucagaauuau

SEQ ID NO: 1557392 - RNA, 19 nt, Homo sapiens
  misc_RNA (1)...(19): siRNA sense strand
gauugcaauuacacagaga

SEQ ID NO: 1557393 - RNA, 19 nt, Homo sapiens
  misc_RNA (1)...(19): siRNA sense strand
ucaaugaaagagaugaguu

SEQ ID NO: 1557394 - RNA, 19 nt, Homo sapiens
  misc_RNA (1)...(19): siRNA sense strand
ucagaaacaggcacaaagu

SEQ ID NO: 1557395 - RNA, 19 nt, Homo sapiens
  misc_RNA (1)...(19): siRNA sense strand
aaaacaaaguuccacgaaa

SEQ ID NO: 1557396 - RNA, 19 nt, Homo sapiens
  misc_RNA (1)...(19): siRNA sense strand
caagagaaugggacaagca

SEQ ID NO: 1557397 - RNA, 19 nt, Homo sapiens
  misc_RNA (1)...(19): siRNA sense strand
aaucagcuguaaaugagau

SEQ ID NO: 1557398 - RNA, 19 nt, Homo sapiens
  misc_RNA (1)...(19): siRNA sense strand
uaucugagaaguguaauca

SEQ ID NO: 1557399 - RNA, 19 nt, Homo sapiens
  misc_RNA (1)...(19): siRNA sense strand
uggaacaaauugacaucau

SEQ ID NO: 1557400 - RNA, 19 nt, Homo sapiens
  misc_RNA (1)...(19): siRNA sense strand
ccagugcccuucaccaauu

SEQ ID NO: 1557401 - RNA, 19 nt, Homo sapiens
  misc_RNA (1)...(19): siRNA sense strand
cagcaaagacaccgaguuu

SEQ ID NO: 1557402 - RNA, 19 nt, Homo sapiens
  misc_RNA (1)...(19): siRNA sense strand
ccaaaaccaucaagaauga

SEQ ID NO: 1557403 - RNA, 19 nt, Homo sapiens
  misc_RNA (1)...(19): siRNA sense strand
gcaagaaggaugccugcaa

SEQ ID NO: 1557404 - RNA, 19 nt, Homo sapiens
  misc_RNA (1)...(19): siRNA sense strand
gaguggcccuggcaaguca

SEQ ID NO: 1557405 - RNA, 19 nt, Homo sapiens
  misc_RNA (1)...(19): siRNA sense strand
ccaggaugcugaaccgaau

SEQ ID NO: 1557406 - RNA, 19 nt, Homo sapiens
  misc_RNA (1)...(19): siRNA sense strand
gcgcacugcuuccgcaaca

SEQ ID NO: 1557407 - RNA, 19 nt, Homo sapiens
  misc_RNA (1)...(19): siRNA sense strand
cagugcccuucaccaauua

SEQ ID NO: 1557408 - RNA, 19 nt, Homo sapiens
  misc_RNA (1)...(19): siRNA sense strand
ugaggcagguggagagcaa

SEQ ID NO: 1557409 - RNA, 19 nt, Homo sapiens
  misc_RNA (1)...(19): siRNA sense strand
ccucugagacgucccugua

SEQ ID NO: 1557410 - RNA, 19 nt, Homo sapiens
  misc_RNA (1)...(19): siRNA sense strand
ggaccacacgcuauguaug

SEQ ID NO: 1557411 - RNA, 19 nt, Homo sapiens
  misc_RNA (1)...(19): siRNA sense strand
gaaccgcccaggugucuac

SEQ ID NO: 1557412 - RNA, 19 nt, Homo sapiens
  misc_RNA (1)...(19): siRNA sense strand
gaccacacgcuauguaugc

SEQ ID NO: 1557413 - RNA, 19 nt, Homo sapiens
  misc_RNA (1)...(19): siRNA sense strand
gggaccacacgcuauguau

SEQ ID NO: 1557414 - RNA, 19 nt, Homo sapiens
  misc_RNA (1)...(19): siRNA sense strand
ccaagugcaaccugcucua

SEQ ID NO: 1557415 - RNA, 19 nt, Homo sapiens
  misc_RNA (1)...(19): siRNA sense strand
caccagugcccuucaccaa

SEQ ID NO: 1557416 - RNA, 19 nt, Homo sapiens
  misc_RNA (1)...(19): siRNA sense strand
ccgcccaggugucuacauc

SEQ ID NO: 1557417 - RNA, 19 nt, Homo sapiens
  misc_RNA (1)...(19): siRNA sense strand
aagcauagcuauuggauuu

SEQ ID NO: 1557418 - RNA, 19 nt, Homo sapiens
  misc_RNA (1)...(19): siRNA sense strand
ggaauaaguuugauaagca

SEQ ID NO: 1557419 - RNA, 19 nt, Homo sapiens
  misc_RNA (1)...(19): siRNA sense strand
gcacuucccuguaccaguu

SEQ ID NO: 1557420 - RNA, 19 nt, Homo sapiens
  misc_RNA (1)...(19): siRNA sense strand
guucguggcugaauacuuu

SEQ ID NO: 1557421 - RNA, 19 nt, Homo sapiens
  misc_RNA (1)...(19): siRNA sense strand
ccaccaagcuuaccaggaa

SEQ ID NO: 1557422 - RNA, 19 nt, Homo sapiens
  misc_RNA (1)...(19): siRNA sense strand
gcagaaauauaucuccaau

SEQ ID NO: 1557423 - RNA, 19 nt, Homo sapiens
  misc_RNA (1)...(19): siRNA sense strand
gcaggcaacuuuguucuug

SEQ ID NO: 1557424 - RNA, 19 nt, Homo sapiens
  misc_RNA (1)...(19): siRNA sense strand
gcacacgccucacaagaca

SEQ ID NO: 1557425 - RNA, 19 nt, Homo sapiens
  misc_RNA (1)...(19): siRNA sense strand
uugcaagccugcugaguua

SEQ ID NO: 1557426 - RNA, 19 nt, Homo sapiens
  misc_RNA (1)...(19): siRNA sense strand
caagagcuccagaaacuaa

SEQ ID NO: 1557427 - RNA, 19 nt, Homo sapiens
  misc_RNA (1)...(19): siRNA sense strand
caccaacacuggagaagaa

SEQ ID NO: 1557428 - RNA, 19 nt, Homo sapiens
  misc_RNA (1)...(19): siRNA sense strand
caagggagaugccacaaag

SEQ ID NO: 1557429 - RNA, 19 nt, Homo sapiens
  misc_RNA (1)...(19): siRNA sense strand
aaacaauuaugcccauuug

SEQ ID NO: 1557430 - RNA, 19 nt, Homo sapiens
  misc_RNA (1)...(19): siRNA sense strand
gcaccaagcauagcuauug

SEQ ID NO: 1557431 - RNA, 19 nt, Homo sapiens
  misc_RNA (1)...(19): siRNA sense strand
ccaaguucguggcugaaua

SEQ ID NO: 1557432 - RNA, 19 nt, Homo sapiens
  misc_RNA (1)...(19): siRNA sense strand
gaugacaacuugaaaccau

SEQ ID NO: 1557433 - RNA, 19 nt, Homo sapiens
  misc_RNA (1)...(19): siRNA sense strand
gcgcugggaucuuugagaa

SEQ ID NO: 1557434 - RNA, 19 nt, Homo sapiens
  misc_RNA (1)...(19): siRNA sense strand
gaucuccgcaucuauguuu

SEQ ID NO: 1557435 - RNA, 19 nt, Homo sapiens
  misc_RNA (1)...(19): siRNA sense strand
ccaaacaccugaagcacau

SEQ ID NO: 1557436 - RNA, 19 nt, Homo sapiens
  misc_RNA (1)...(19): siRNA sense strand
ggucaugguuguaaaugga

SEQ ID NO: 1557437 - RNA, 19 nt, Homo sapiens
  misc_RNA (1)...(19): siRNA sense strand
guacauagugcagaaauau

SEQ ID NO: 1557438 - RNA, 19 nt, Homo sapiens
  misc_RNA (1)...(19): siRNA sense strand
caacagcagcaucaauaaa

SEQ ID NO: 1557439 - RNA, 19 nt, Homo sapiens
  misc_RNA (1)...(19): siRNA sense strand
gaauguacaacgaggauga

SEQ ID NO: 1557440 - RNA, 19 nt, Homo sapiens
  misc_RNA (1)...(19): siRNA sense strand
gacauccucuuuccgaaug

SEQ ID NO: 1557441 - RNA, 19 nt, Homo sapiens
  misc_RNA (1)...(19): siRNA sense strand
gagaagaucaaagaaguga

SEQ ID NO: 1557442 - RNA, 19 nt, Homo sapiens
  misc_RNA (1)...(19): siRNA sense strand
agaaauauaucuccaaucc

SEQ ID NO: 1557443 - RNA, 19 nt, Homo sapiens
  misc_RNA (1)...(19): siRNA sense strand
acaaagcaagcccaaguua

SEQ ID NO: 1557444 - RNA, 19 nt, Homo sapiens
  misc_RNA (1)...(19): siRNA sense strand
uuaagccuuugaccauuua

SEQ ID NO: 1557445 - RNA, 19 nt, Homo sapiens
  misc_RNA (1)...(19): siRNA sense strand
gguggaauaaguuugauaa

SEQ ID NO: 1557446 - RNA, 19 nt, Homo sapiens
  misc_RNA (1)...(19): siRNA sense strand
aggaauggauuaaauguca

SEQ ID NO: 1557447 - RNA, 19 nt, Homo sapiens
  misc_RNA (1)...(19): siRNA sense strand
gaagugauuggucaugguu

SEQ ID NO: 1557448 - RNA, 19 nt, Homo sapiens
  misc_RNA (1)...(19): siRNA sense strand
ggaauggauuaaaugucaa

SEQ ID NO: 1557449 - RNA, 19 nt, Homo sapiens
  misc_RNA (1)...(19): siRNA sense strand
ugacagaggugggcuugau

SEQ ID NO: 1557450 - RNA, 19 nt, Homo sapiens
  misc_RNA (1)...(19): siRNA sense strand
agagaaaacuuguccauga

SEQ ID NO: 1557451 - RNA, 19 nt, Homo sapiens
  misc_RNA (1)...(19): siRNA sense strand
gaaaacuuguccaugauau

SEQ ID NO: 1557452 - RNA, 19 nt, Homo sapiens
  misc_RNA (1)...(19): siRNA sense strand
uccaagagcuccagaaacu

SEQ ID NO: 1557453 - RNA, 19 nt, Homo sapiens
  misc_RNA (1)...(19): siRNA sense strand
cugacugucuuccuuauga

SEQ ID NO: 1557454 - RNA, 19 nt, Homo sapiens
  misc_RNA (1)...(19): siRNA sense strand
ucagugacuuuaaagacuu

SEQ ID NO: 1557455 - RNA, 19 nt, Homo sapiens
  misc_RNA (1)...(19): siRNA sense strand
gcuccugacugucuuccuu

SEQ ID NO: 1557456 - RNA, 19 nt, Homo sapiens
  misc_RNA (1)...(19): siRNA sense strand
caagcagaauguacaacga

SEQ ID NO: 1557457 - RNA, 19 nt, Homo sapiens
  misc_RNA (1)...(19): siRNA sense strand
ccacaaagcaagcccaagu

SEQ ID NO: 1557458 - RNA, 19 nt, Homo sapiens
  misc_RNA (1)...(19): siRNA sense strand
caaugacuauaccaaguuc

SEQ ID NO: 1557459 - RNA, 19 nt, Homo sapiens
  misc_RNA (1)...(19): siRNA sense strand
cuccagaaacuaaugaaua

SEQ ID NO: 1557460 - RNA, 19 nt, Homo sapiens
  misc_RNA (1)...(19): siRNA sense strand
caauugcuuugagcucuuu

SEQ ID NO: 1557461 - RNA, 19 nt, Homo sapiens
  misc_RNA (1)...(19): siRNA sense strand
ccaacagcagcaucaauaa

SEQ ID NO: 1557462 - RNA, 19 nt, Homo sapiens
  misc_RNA (1)...(19): siRNA sense strand
aguuugaccucaguaauuu

SEQ ID NO: 1557463 - RNA, 19 nt, Homo sapiens
  misc_RNA (1)...(19): siRNA sense strand
ccgcaucuauguuuguguu

SEQ ID NO: 1557464 - RNA, 19 nt, Homo sapiens
  misc_RNA (1)...(19): siRNA sense strand
ggacauccucuuuccgaau

SEQ ID NO: 1557465 - RNA, 19 nt, Homo sapiens
  misc_RNA (1)...(19): siRNA sense strand
gagaugagugggcaggauu

SEQ ID NO: 1557466 - RNA, 19 nt, Homo sapiens
  misc_RNA (1)...(19): siRNA sense strand
uuuaagccuuugaccauuu

SEQ ID NO: 1557467 - RNA, 19 nt, Homo sapiens
  misc_RNA (1)...(19): siRNA sense strand
uguacauagugcagaaaua

SEQ ID NO: 1557468 - RNA, 19 nt, Homo sapiens
  misc_RNA (1)...(19): siRNA sense strand
caacacuggagaagaagaa

SEQ ID NO: 1557469 - RNA, 19 nt, Homo sapiens
  misc_RNA (1)...(19): siRNA sense strand
ccaaugacuauaccaaguu

SEQ ID NO: 1557470 - RNA, 19 nt, Homo sapiens
  misc_RNA (1)...(19): siRNA sense strand
guauggcacuucccuguac

SEQ ID NO: 1557471 - RNA, 19 nt, Homo sapiens
  misc_RNA (1)...(19): siRNA sense strand
ggaaggguugguucgguuu

SEQ ID NO: 1557472 - RNA, 19 nt, Homo sapiens
  misc_RNA (1)...(19): siRNA sense strand
ccuggaaccaccaagcuua

SEQ ID NO: 1557473 - RNA, 19 nt, Homo sapiens
  misc_RNA (1)...(19): siRNA sense strand
guacaacgaggaugacucu

SEQ ID NO: 1557474 - RNA, 19 nt, Homo sapiens
  misc_RNA (1)...(19): siRNA sense strand
gaaaauccaccgcaugguu

SEQ ID NO: 1557475 - RNA, 19 nt, Homo sapiens
  misc_RNA (1)...(19): siRNA sense strand
aaugugaucuccgcaucua

SEQ ID NO: 1557476 - RNA, 19 nt, Homo sapiens
  misc_RNA (1)...(19): siRNA sense strand
cuccaauccuuuacuuauu

SEQ ID NO: 1557477 - RNA, 19 nt, Homo sapiens
  misc_RNA (1)...(19): siRNA sense strand
uaucuccaauccuuuacuu

SEQ ID NO: 1557478 - RNA, 19 nt, Homo sapiens
  misc_RNA (1)...(19): siRNA sense strand
gcuugaugcuccugacugu

SEQ ID NO: 1557479 - RNA, 19 nt, Homo sapiens
  misc_RNA (1)...(19): siRNA sense strand
gcugggauguggacgaucu

SEQ ID NO: 1557480 - RNA, 19 nt, Homo sapiens
  misc_RNA (1)...(19): siRNA sense strand
aauggacgcucagcagauu

SEQ ID NO: 1557481 - RNA, 19 nt, Homo sapiens
  misc_RNA (1)...(19): siRNA sense strand
gauuggucaugguuguaaa

SEQ ID NO: 1557482 - RNA, 19 nt, Homo sapiens
  misc_RNA (1)...(19): siRNA sense strand
ccaauugcuuugagcucuu

SEQ ID NO: 1557483 - RNA, 19 nt, Homo sapiens
  misc_RNA (1)...(19): siRNA sense strand
ccuuugaccauuuauguuu

SEQ ID NO: 1557484 - RNA, 19 nt, Homo sapiens
  misc_RNA (1)...(19): siRNA sense strand
ccaagcaggcaacuuuguu

SEQ ID NO: 1557485 - RNA, 19 nt, Homo sapiens
  misc_RNA (1)...(19): siRNA sense strand
guaaugccacacauggaaa

SEQ ID NO: 1557486 - RNA, 19 nt, Homo sapiens
  misc_RNA (1)...(19): siRNA sense strand
gagaaaacuuguccaugau

SEQ ID NO: 1557487 - RNA, 19 nt, Homo sapiens
  misc_RNA (1)...(19): siRNA sense strand
accaacagcagcaucaaua

SEQ ID NO: 1557488 - RNA, 19 nt, Homo sapiens
  misc_RNA (1)...(19): siRNA sense strand
cuuaugagaagaucaaaga

SEQ ID NO: 1557489 - RNA, 19 nt, Homo sapiens
  misc_RNA (1)...(19): siRNA sense strand
gcaacuuuguucuuguuuu

SEQ ID NO: 1557490 - RNA, 19 nt, Homo sapiens
  misc_RNA (1)...(19): siRNA sense strand
caacaccaacacuggagaa

SEQ ID NO: 1557491 - RNA, 19 nt, Homo sapiens
  misc_RNA (1)...(19): siRNA sense strand
gcucuuuggguuugauauu

SEQ ID NO: 1557492 - RNA, 19 nt, Homo sapiens
  misc_RNA (1)...(19): siRNA sense strand
gauguggacgaucugcuuu

SEQ ID NO: 1557493 - RNA, 19 nt, Homo sapiens
  misc_RNA (1)...(19): siRNA sense strand
gcauagcuauuggauuugc

SEQ ID NO: 1557494 - RNA, 19 nt, Homo sapiens
  misc_RNA (1)...(19): siRNA sense strand
acagauguguuggugaaga

SEQ ID NO: 1557495 - RNA, 19 nt, Homo sapiens
  misc_RNA (1)...(19): siRNA sense strand
uuugauugaugacaacuug

SEQ ID NO: 1557496 - RNA, 19 nt, Homo sapiens
  misc_RNA (1)...(19): siRNA sense strand
ggauguggacgaucugcuu

SEQ ID NO: 1557497 - RNA, 19 nt, Homo sapiens
  misc_RNA (1)...(19): siRNA sense strand
ggaaaaguuugaccucagu

SEQ ID NO: 1557498 - RNA, 19 nt, Homo sapiens
  misc_RNA (1)...(19): siRNA sense strand
gaccauuuauguuuaucag

SEQ ID NO: 1557499 - RNA, 19 nt, Homo sapiens
  misc_RNA (1)...(19): siRNA sense strand
cgaaugaccgaacacaaca

SEQ ID NO: 1557500 - RNA, 19 nt, Homo sapiens
  misc_RNA (1)...(19): siRNA sense strand
augagaagaucaaagaagu

SEQ ID NO: 1557501 - RNA, 19 nt, Homo sapiens
  misc_RNA (1)...(19): siRNA sense strand
gcaagccugcugaguuauc

SEQ ID NO: 1557502 - RNA, 19 nt, Homo sapiens
  misc_RNA (1)...(19): siRNA sense strand
gccuugaccuuggauuguu

SEQ ID NO: 1557503 - RNA, 19 nt, Homo sapiens
  misc_RNA (1)...(19): siRNA sense strand
uggcagauauaaaugugau

SEQ ID NO: 1557504 - RNA, 19 nt, Homo sapiens
  misc_RNA (1)...(19): siRNA sense strand
cccaaugacuauaccaagu

SEQ ID NO: 1557505 - RNA, 19 nt, Homo sapiens
  misc_RNA (1)...(19): siRNA sense strand
gagcuccagaaacuaauga

SEQ ID NO: 1557506 - RNA, 19 nt, Homo sapiens
  misc_RNA (1)...(19): siRNA sense strand
ccaggaauggauuaaaugu

SEQ ID NO: 1557507 - RNA, 19 nt, Homo sapiens
  misc_RNA (1)...(19): siRNA sense strand
acagcagcaucaauaaauc

SEQ ID NO: 1557508 - RNA, 19 nt, Homo sapiens
  misc_RNA (1)...(19): siRNA sense strand
gccuuuacccuuaacauuc

SEQ ID NO: 1557509 - RNA, 19 nt, Homo sapiens
  misc_RNA (1)...(19): siRNA sense strand
gaaggguugguucgguuug

SEQ ID NO: 1557510 - RNA, 19 nt, Homo sapiens
  misc_RNA (1)...(19): siRNA sense strand
aggcaacuuuguucuuguu

SEQ ID NO: 1557511 - RNA, 19 nt, Homo sapiens
  misc_RNA (1)...(19): siRNA sense strand
ugaccucaguaauuugcaa

SEQ ID NO: 1557512 - RNA, 19 nt, Homo sapiens
  misc_RNA (1)...(19): siRNA sense strand
ucuccaauccuuuacuuau

SEQ ID NO: 1557513 - RNA, 19 nt, Homo sapiens
  misc_RNA (1)...(19): siRNA sense strand
caagcaggcaacuuuguuc

SEQ ID NO: 1557514 - RNA, 19 nt, Homo sapiens
  misc_RNA (1)...(19): siRNA sense strand
caaagcaagcccaaguuac

SEQ ID NO: 1557515 - RNA, 19 nt, Homo sapiens
  misc_RNA (1)...(19): siRNA sense strand
aaguuugaccucaguaauu

SEQ ID NO: 1557516 - RNA, 19 nt, Homo sapiens
  misc_RNA (1)...(19): siRNA sense strand
gcaucuauguuuguguuac

SEQ ID NO: 1557517 - RNA, 19 nt, Homo sapiens
  misc_RNA (1)...(19): siRNA sense strand
gaacaaaucuuccagaaua

SEQ ID NO: 1557518 - RNA, 19 nt, Homo sapiens
  misc_RNA (1)...(19): siRNA sense strand
uaacacaagucauuggaua

SEQ ID NO: 1557519 - RNA, 19 nt, Homo sapiens
  misc_RNA (1)...(19): siRNA sense strand
caacuuggaugacagcuuu

SEQ ID NO: 1557520 - RNA, 19 nt, Homo sapiens
  misc_RNA (1)...(19): siRNA sense strand
gcauuuaucucaucuacuu

SEQ ID NO: 1557521 - RNA, 19 nt, Homo sapiens
  misc_RNA (1)...(19): siRNA sense strand
ccaagaagcuuccaaacga

SEQ ID NO: 1557522 - RNA, 19 nt, Homo sapiens
  misc_RNA (1)...(19): siRNA sense strand
agaaagaucucauggcaaa

SEQ ID NO: 1557523 - RNA, 19 nt, Homo sapiens
  misc_RNA (1)...(19): siRNA sense strand
gggauuaccucauuggaaa

SEQ ID NO: 1557524 - RNA, 19 nt, Homo sapiens
  misc_RNA (1)...(19): siRNA sense strand
cagaaacgauugagaaaga

SEQ ID NO: 1557525 - RNA, 19 nt, Homo sapiens
  misc_RNA (1)...(19): siRNA sense strand
gaagagaaaugguccacau

SEQ ID NO: 1557526 - RNA, 19 nt, Homo sapiens
  misc_RNA (1)...(19): siRNA sense strand
gagcaaguuuccugaauau

SEQ ID NO: 1557527 - RNA, 19 nt, Homo sapiens
  misc_RNA (1)...(19): siRNA sense strand
agaaggagcugacacuuug

SEQ ID NO: 1557528 - RNA, 19 nt, Homo sapiens
  misc_RNA (1)...(19): siRNA sense strand
gcaaugauccggaacaaau

SEQ ID NO: 1557529 - RNA, 19 nt, Homo sapiens
  misc_RNA (1)...(19): siRNA sense strand
ggauggcaguguuugcuua

SEQ ID NO: 1557530 - RNA, 19 nt, Homo sapiens
  misc_RNA (1)...(19): siRNA sense strand
gaauauacaguuccagaaa

SEQ ID NO: 1557531 - RNA, 19 nt, Homo sapiens
  misc_RNA (1)...(19): siRNA sense strand
gcaugaaacuaacagguau

SEQ ID NO: 1557532 - RNA, 19 nt, Homo sapiens
  misc_RNA (1)...(19): siRNA sense strand
gcuuacagcuucaucauuc

SEQ ID NO: 1557533 - RNA, 19 nt, Homo sapiens
  misc_RNA (1)...(19): siRNA sense strand
gacagaagcugagggcauu

SEQ ID NO: 1557534 - RNA, 19 nt, Homo sapiens
  misc_RNA (1)...(19): siRNA sense strand
cgaagaacauugugcugaa

SEQ ID NO: 1557535 - RNA, 19 nt, Homo sapiens
  misc_RNA (1)...(19): siRNA sense strand
gcuuauaccaugccucuua

SEQ ID NO: 1557536 - RNA, 19 nt, Homo sapiens
  misc_RNA (1)...(19): siRNA sense strand
caaaacagcugccauagug

SEQ ID NO: 1557537 - RNA, 19 nt, Homo sapiens
  misc_RNA (1)...(19): siRNA sense strand
cagcaagaguggcaggaua

SEQ ID NO: 1557538 - RNA, 19 nt, Homo sapiens
  misc_RNA (1)...(19): siRNA sense strand
cagggaagcuauauuggaa

SEQ ID NO: 1557539 - RNA, 19 nt, Homo sapiens
  misc_RNA (1)...(19): siRNA sense strand
gcgcacaccuaugacauuu

SEQ ID NO: 1557540 - RNA, 19 nt, Homo sapiens
  misc_RNA (1)...(19): siRNA sense strand
ggaucuggaugacuugauu

SEQ ID NO: 1557541 - RNA, 19 nt, Homo sapiens
  misc_RNA (1)...(19): siRNA sense strand
gcacaccuaugacauuuac

SEQ ID NO: 1557542 - RNA, 19 nt, Homo sapiens
  misc_RNA (1)...(19): siRNA sense strand
gagagcaaguuuccugaau

SEQ ID NO: 1557543 - RNA, 19 nt, Homo sapiens
  misc_RNA (1)...(19): siRNA sense strand
gaucuggcguugccuccua

SEQ ID NO: 1557544 - RNA, 19 nt, Homo sapiens
  misc_RNA (1)...(19): siRNA sense strand
aagcagagauuggaucaaa

SEQ ID NO: 1557545 - RNA, 19 nt, Homo sapiens
  misc_RNA (1)...(19): siRNA sense strand
ggaaaugaggauaaagaaa

SEQ ID NO: 1557546 - RNA, 19 nt, Homo sapiens
  misc_RNA (1)...(19): siRNA sense strand
ccaggaacgugcgacaaua

SEQ ID NO: 1557547 - RNA, 19 nt, Homo sapiens
  misc_RNA (1)...(19): siRNA sense strand
gauacaagccaucucuaaa

SEQ ID NO: 1557548 - RNA, 19 nt, Homo sapiens
  misc_RNA (1)...(19): siRNA sense strand
agagcaaguuuccugaaua

SEQ ID NO: 1557549 - RNA, 19 nt, Homo sapiens
  misc_RNA (1)...(19): siRNA sense strand
caaaauagcugagaaugug

SEQ ID NO: 1557550 - RNA, 19 nt, Homo sapiens
  misc_RNA (1)...(19): siRNA sense strand
caagccaucucuaaacugu

SEQ ID NO: 1557551 - RNA, 19 nt, Homo sapiens
  misc_RNA (1)...(19): siRNA sense strand
ccaguacucuguccucuuc

SEQ ID NO: 1557552 - RNA, 19 nt, Homo sapiens
  misc_RNA (1)...(19): siRNA sense strand
gaccacaggccucgacuuu

SEQ ID NO: 1557553 - RNA, 19 nt, Homo sapiens
  misc_RNA (1)...(19): siRNA sense strand
gggaagcuauauuggaaga

SEQ ID NO: 1557554 - RNA, 19 nt, Homo sapiens
  misc_RNA (1)...(19): siRNA sense strand
caaguuuccugaauaugga

SEQ ID NO: 1557555 - RNA, 19 nt, Homo sapiens
  misc_RNA (1)...(19): siRNA sense strand
agaccagcauuucagcuua

SEQ ID NO: 1557556 - RNA, 19 nt, Homo sapiens
  misc_RNA (1)...(19): siRNA sense strand
gaacauugugcugaaguuu

SEQ ID NO: 1557557 - RNA, 19 nt, Homo sapiens
  misc_RNA (1)...(19): siRNA sense strand
gcaccaagaagcuuccaaa

SEQ ID NO: 1557558 - RNA, 19 nt, Homo sapiens
  misc_RNA (1)...(19): siRNA sense strand
gcaaugcuccuguuuaugc

SEQ ID NO: 1557559 - RNA, 19 nt, Homo sapiens
  misc_RNA (1)...(19): siRNA sense strand
cugaagcucuccaucauug

SEQ ID NO: 1557560 - RNA, 19 nt, Homo sapiens
  misc_RNA (1)...(19): siRNA sense strand
gaaaugccagccagugcua

SEQ ID NO: 1557561 - RNA, 19 nt, Homo sapiens
  misc_RNA (1)...(19): siRNA sense strand
gagcugacacuuugggaaa

SEQ ID NO: 1557562 - RNA, 19 nt, Homo sapiens
  misc_RNA (1)...(19): siRNA sense strand
gagcauuuaucucaucuac

SEQ ID NO: 1557563 - RNA, 19 nt, Homo sapiens
  misc_RNA (1)...(19): siRNA sense strand
guuaacagcaugagcauug

SEQ ID NO: 1557564 - RNA, 19 nt, Homo sapiens
  misc_RNA (1)...(19): siRNA sense strand
ggcuagagcaugaaacuaa

SEQ ID NO: 1557565 - RNA, 19 nt, Homo sapiens
  misc_RNA (1)...(19): siRNA sense strand
uggcaaugcuccuguuuau

SEQ ID NO: 1557566 - RNA, 19 nt, Homo sapiens
  misc_RNA (1)...(19): siRNA sense strand
gcaugagcauugaggaaau

SEQ ID NO: 1557567 - RNA, 19 nt, Homo sapiens
  misc_RNA (1)...(19): siRNA sense strand
caucagggaagcuauauug

SEQ ID NO: 1557568 - RNA, 19 nt, Homo sapiens
  misc_RNA (1)...(19): siRNA sense strand
ccagauacuaugucauuaa

SEQ ID NO: 1557569 - RNA, 19 nt, Homo sapiens
  misc_RNA (1)...(19): siRNA sense strand
gcaaguuuccugaauaugg

SEQ ID NO: 1557570 - RNA, 19 nt, Homo sapiens
  misc_RNA (1)...(19): siRNA sense strand
ggaagagaccagcauuuca

SEQ ID NO: 1557571 - RNA, 19 nt, Homo sapiens
  misc_RNA (1)...(19): siRNA sense strand
gauagcaccaucagccuuu

SEQ ID NO: 1557572 - RNA, 19 nt, Homo sapiens
  misc_RNA (1)...(19): siRNA sense strand
uaccaugccucuuauaaag

SEQ ID NO: 1557573 - RNA, 19 nt, Homo sapiens
  misc_RNA (1)...(19): siRNA sense strand
cagccuaugugcccagaaa

SEQ ID NO: 1557574 - RNA, 19 nt, Homo sapiens
  misc_RNA (1)...(19): siRNA sense strand
ccaaacgacagugaucuua

SEQ ID NO: 1557575 - RNA, 19 nt, Homo sapiens
  misc_RNA (1)...(19): siRNA sense strand
agacuagccuccacacuca

SEQ ID NO: 1557576 - RNA, 19 nt, Homo sapiens
  misc_RNA (1)...(19): siRNA sense strand
gaagaacauugugcugaag

SEQ ID NO: 1557577 - RNA, 19 nt, Homo sapiens
  misc_RNA (1)...(19): siRNA sense strand
ccacaggccucgacuuugc

SEQ ID NO: 1557578 - RNA, 19 nt, Homo sapiens
  misc_RNA (1)...(19): siRNA sense strand
caagaucagaggauaagaa

SEQ ID NO: 1557579 - RNA, 19 nt, Homo sapiens
  misc_RNA (1)...(19): siRNA sense strand
gaccagcauuucagcuuau

SEQ ID NO: 1557580 - RNA, 19 nt, Homo sapiens
  misc_RNA (1)...(19): siRNA sense strand
acaagucauuggauagauu

SEQ ID NO: 1557581 - RNA, 19 nt, Homo sapiens
  misc_RNA (1)...(19): siRNA sense strand
ugaccucauugcugccuua

SEQ ID NO: 1557582 - RNA, 19 nt, Homo sapiens
  misc_RNA (1)...(19): siRNA sense strand
gaagagaccagcauuucag

SEQ ID NO: 1557583 - RNA, 19 nt, Homo sapiens
  misc_RNA (1)...(19): siRNA sense strand
aauauugugcucaccauua

SEQ ID NO: 1557584 - RNA, 19 nt, Homo sapiens
  misc_RNA (1)...(19): siRNA sense strand
gcauucugcucauagacuu

SEQ ID NO: 1557585 - RNA, 19 nt, Homo sapiens
  misc_RNA (1)...(19): siRNA sense strand
acauugugcugaaguuuga

SEQ ID NO: 1557586 - RNA, 19 nt, Homo sapiens
  misc_RNA (1)...(19): siRNA sense strand
gggcugugcugaccugcaa

SEQ ID NO: 1557587 - RNA, 19 nt, Homo sapiens
  misc_RNA (1)...(19): siRNA sense strand
guugggaucuggagagcaa

SEQ ID NO: 1557588 - RNA, 19 nt, Homo sapiens
  misc_RNA (1)...(19): siRNA sense strand
gcugggagcauuuaucuca

SEQ ID NO: 1557589 - RNA, 19 nt, Homo sapiens
  misc_RNA (1)...(19): siRNA sense strand
gaagcuauauuggaagaac

SEQ ID NO: 1557590 - RNA, 19 nt, Homo sapiens
  misc_RNA (1)...(19): siRNA sense strand
uaaagaaaaucgagaguca

SEQ ID NO: 1557591 - RNA, 19 nt, Homo sapiens
  misc_RNA (1)...(19): siRNA sense strand
gggaaaugaggauaaagaa

SEQ ID NO: 1557592 - RNA, 19 nt, Homo sapiens
  misc_RNA (1)...(19): siRNA sense strand
cgauacaagccaucucuaa

SEQ ID NO: 1557593 - RNA, 19 nt, Homo sapiens
  misc_RNA (1)...(19): siRNA sense strand
gagcaaaacagcugccaua

SEQ ID NO: 1557594 - RNA, 19 nt, Homo sapiens
  misc_RNA (1)...(19): siRNA sense strand
cuggaugacuugauuuguu

SEQ ID NO: 1557595 - RNA, 19 nt, Homo sapiens
  misc_RNA (1)...(19): siRNA sense strand
ucgaagauguacacucaga

SEQ ID NO: 1557596 - RNA, 19 nt, Homo sapiens
  misc_RNA (1)...(19): siRNA sense strand
caacacaugggccuuggaa

SEQ ID NO: 1557597 - RNA, 19 nt, Homo sapiens
  misc_RNA (1)...(19): siRNA sense strand
ggaagaaagcaccaagaag

SEQ ID NO: 1557598 - RNA, 19 nt, Homo sapiens
  misc_RNA (1)...(19): siRNA sense strand
uuacaacgcacaucgaaga

SEQ ID NO: 1557599 - RNA, 19 nt, Homo sapiens
  misc_RNA (1)...(19): siRNA sense strand
ggcguugccuccuauuuca

SEQ ID NO: 1557600 - RNA, 19 nt, Homo sapiens
  misc_RNA (1)...(19): siRNA sense strand
uaaugaaugugacucuuac

SEQ ID NO: 1557601 - RNA, 19 nt, Homo sapiens
  misc_RNA (1)...(19): siRNA sense strand
aauccaggcuagagcauga

SEQ ID NO: 1557602 - RNA, 19 nt, Homo sapiens
  misc_RNA (1)...(19): siRNA sense strand
ucuauuaucuccagagcau

SEQ ID NO: 1557603 - RNA, 19 nt, Homo sapiens
  misc_RNA (1)...(19): siRNA sense strand
gaauggggcucaggagaaa

SEQ ID NO: 1557604 - RNA, 19 nt, Homo sapiens
  misc_RNA (1)...(19): siRNA sense strand
ccucauugcugccuuagag

SEQ ID NO: 1557605 - RNA, 19 nt, Homo sapiens
  misc_RNA (1)...(19): siRNA sense strand
gccagugcuuccaaugaaa

SEQ ID NO: 1557606 - RNA, 19 nt, Homo sapiens
  misc_RNA (1)...(19): siRNA sense strand
gaaggcaucccagcgcuau

SEQ ID NO: 1557607 - RNA, 19 nt, Homo sapiens
  misc_RNA (1)...(19): siRNA sense strand
gacuugauuuguucagaug

SEQ ID NO: 1557608 - RNA, 19 nt, Homo sapiens
  misc_RNA (1)...(19): siRNA sense strand
gaagaaggagcugacacuu

SEQ ID NO: 1557609 - RNA, 19 nt, Homo sapiens
  misc_RNA (1)...(19): siRNA sense strand
gagaugguuauuuggaauu

SEQ ID NO: 1557610 - RNA, 19 nt, Homo sapiens
  misc_RNA (1)...(19): siRNA sense strand
ugacuugauuuguucagau

SEQ ID NO: 1557611 - RNA, 19 nt, Homo sapiens
  misc_RNA (1)...(19): siRNA sense strand
gaauccagacccaggaaga

SEQ ID NO: 1557612 - RNA, 19 nt, Homo sapiens
  misc_RNA (1)...(19): siRNA sense strand
guucaacguucucaaacuc

SEQ ID NO: 1557613 - RNA, 19 nt, Homo sapiens
  misc_RNA (1)...(19): siRNA sense strand
acacaugggccuuggaaga

SEQ ID NO: 1557614 - RNA, 19 nt, Homo sapiens
  misc_RNA (1)...(19): siRNA sense strand
ggaagcacagccaggaaga

SEQ ID NO: 1557615 - RNA, 19 nt, Homo sapiens
  misc_RNA (1)...(19): siRNA sense strand
gagcaucgcacggucucua

SEQ ID NO: 1557616 - RNA, 19 nt, Homo sapiens
  misc_RNA (1)...(19): siRNA sense strand
uggaugacuugauuuguuc

SEQ ID NO: 1557617 - RNA, 19 nt, Homo sapiens
  misc_RNA (1)...(19): siRNA sense strand
caacacagcugggaaagga

SEQ ID NO: 1557618 - RNA, 19 nt, Homo sapiens
  misc_RNA (1)...(19): siRNA sense strand
gcaaggugcuggagaaguc

SEQ ID NO: 1557619 - RNA, 19 nt, Homo sapiens
  misc_RNA (1)...(19): siRNA sense strand
gaaaggacucgauggaaga

SEQ ID NO: 1557620 - RNA, 19 nt, Homo sapiens
  misc_RNA (1)...(19): siRNA sense strand
ggaaugaggaagcaaagaa

SEQ ID NO: 1557621 - RNA, 19 nt, Homo sapiens
  misc_RNA (1)...(19): siRNA sense strand
gaagaaggccugggaacau

SEQ ID NO: 1557622 - RNA, 19 nt, Homo sapiens
  misc_RNA (1)...(19): siRNA sense strand
gaaacucacagaagcaaca

SEQ ID NO: 1557623 - RNA, 19 nt, Homo sapiens
  misc_RNA (1)...(19): siRNA sense strand
gggagagauuccugcacua

SEQ ID NO: 1557624 - RNA, 19 nt, Homo sapiens
  misc_RNA (1)...(19): siRNA sense strand
aagaaggccugggaacauu

SEQ ID NO: 1557625 - RNA, 19 nt, Homo sapiens
  misc_RNA (1)...(19): siRNA sense strand
gcccaaggccacagugaaa

SEQ ID NO: 1557626 - RNA, 19 nt, Homo sapiens
  misc_RNA (1)...(19): siRNA sense strand
ggagagauuccugcacuau

SEQ ID NO: 1557627 - RNA, 19 nt, Homo sapiens
  misc_RNA (1)...(19): siRNA sense strand
gagggaaugaggaagcaaa

SEQ ID NO: 1557628 - RNA, 19 nt, Homo sapiens
  misc_RNA (1)...(19): siRNA sense strand
gcugggacgccaucucuga

SEQ ID NO: 1557629 - RNA, 19 nt, Homo sapiens
  misc_RNA (1)...(19): siRNA sense strand
gaaugaggaagcaaagaag

SEQ ID NO: 1557630 - RNA, 19 nt, Homo sapiens
  misc_RNA (1)...(19): siRNA sense strand
gggaaaggacucgauggaa

SEQ ID NO: 1557631 - RNA, 19 nt, Homo sapiens
  misc_RNA (1)...(19): siRNA sense strand
gagagauuccugcacuaug

SEQ ID NO: 1557632 - RNA, 19 nt, Homo sapiens
  misc_RNA (1)...(19): siRNA sense strand
acacagaccagaccuacug

SEQ ID NO: 1557633 - RNA, 19 nt, Homo sapiens
  misc_RNA (1)...(19): siRNA sense strand
gcaacacagaccagaccua

SEQ ID NO: 1557634 - RNA, 19 nt, Homo sapiens
  misc_RNA (1)...(19): siRNA sense strand
agagauuccugcacuaugc

SEQ ID NO: 1557635 - RNA, 19 nt, Homo sapiens
  misc_RNA (1)...(19): siRNA sense strand
gcgccuuucucaucagcuu

SEQ ID NO: 1557636 - RNA, 19 nt, Homo sapiens
  misc_RNA (1)...(19): siRNA sense strand
gaaggccugggaacauugu

SEQ ID NO: 1557637 - RNA, 19 nt, Homo sapiens
  misc_RNA (1)...(19): siRNA sense strand
aagcaacacagcugggaaa

SEQ ID NO: 1557638 - RNA, 19 nt, Homo sapiens
  misc_RNA (1)...(19): siRNA sense strand
cagacuggagggagagauu

SEQ ID NO: 1557639 - RNA, 19 nt, Homo sapiens
  misc_RNA (1)...(19): siRNA sense strand
uaaaggacauuauggagaa

SEQ ID NO: 1557640 - RNA, 19 nt, Homo sapiens
  misc_RNA (1)...(19): siRNA sense strand
caucuucacuggccuguuu

SEQ ID NO: 1557641 - RNA, 19 nt, Homo sapiens
  misc_RNA (1)...(19): siRNA sense strand
gcaccuaccuggucagcuu

SEQ ID NO: 1557642 - RNA, 19 nt, Homo sapiens
  misc_RNA (1)...(19): siRNA sense strand
gaguugaaaugaugaagaa

SEQ ID NO: 1557643 - RNA, 19 nt, Homo sapiens
  misc_RNA (1)...(19): siRNA sense strand
gaauguggccugacccuaa

SEQ ID NO: 1557644 - RNA, 19 nt, Homo sapiens
  misc_RNA (1)...(19): siRNA sense strand
ugccauagcucgaaaauua

SEQ ID NO: 1557645 - RNA, 19 nt, Homo sapiens
  misc_RNA (1)...(19): siRNA sense strand
gaaaauuacugcugauguu

SEQ ID NO: 1557646 - RNA, 19 nt, Homo sapiens
  misc_RNA (1)...(19): siRNA sense strand
cauaggaguugaaaugaug

SEQ ID NO: 1557647 - RNA, 19 nt, Homo sapiens
  misc_RNA (1)...(19): siRNA sense strand
gagacugaacuuagaauaa

SEQ ID NO: 1557648 - RNA, 19 nt, Homo sapiens
  misc_RNA (1)...(19): siRNA sense strand
gcuccaaugucuucacuga

SEQ ID NO: 1557649 - RNA, 19 nt, Homo sapiens
  misc_RNA (1)...(19): siRNA sense strand
acacaaaguucucguucaa

SEQ ID NO: 1557650 - RNA, 19 nt, Homo sapiens
  misc_RNA (1)...(19): siRNA sense strand
caaaugccauagcucgaaa

SEQ ID NO: 1557651 - RNA, 19 nt, Homo sapiens
  misc_RNA (1)...(19): siRNA sense strand
aaacacaaaugcugaacug

SEQ ID NO: 1557652 - RNA, 19 nt, Homo sapiens
  misc_RNA (1)...(19): siRNA sense strand
caggaaaggugacugacuu

SEQ ID NO: 1557653 - RNA, 19 nt, Homo sapiens
  misc_RNA (1)...(19): siRNA sense strand
ugacucagccucccacgua

SEQ ID NO: 1557654 - RNA, 19 nt, Homo sapiens
  misc_RNA (1)...(19): siRNA sense strand
gaaaggugacugacuucaa

SEQ ID NO: 1557655 - RNA, 19 nt, Homo sapiens
  misc_RNA (1)...(19): siRNA sense strand
gaaccaagggaacaucuuc

SEQ ID NO: 1557656 - RNA, 19 nt, Homo sapiens
  misc_RNA (1)...(19): siRNA sense strand
gagaaaauacucauccaua

SEQ ID NO: 1557657 - RNA, 19 nt, Homo sapiens
  misc_RNA (1)...(19): siRNA sense strand
ggagugcaguggcaugauc

SEQ ID NO: 1557658 - RNA, 19 nt, Homo sapiens
  misc_RNA (1)...(19): siRNA sense strand
caacagaagcuccaauguc

SEQ ID NO: 1557659 - RNA, 19 nt, Homo sapiens
  misc_RNA (1)...(19): siRNA sense strand
ucauuuacuuggcuucaaa

SEQ ID NO: 1557660 - RNA, 19 nt, Homo sapiens
  misc_RNA (1)...(19): siRNA sense strand
gaaacuagaccagcagauc

SEQ ID NO: 1557661 - RNA, 19 nt, Homo sapiens
  misc_RNA (1)...(19): siRNA sense strand
caaaagaccacacaaaguu

SEQ ID NO: 1557662 - RNA, 19 nt, Homo sapiens
  misc_RNA (1)...(19): siRNA sense strand
aacagaagcuccaaugucu

SEQ ID NO: 1557663 - RNA, 19 nt, Homo sapiens
  misc_RNA (1)...(19): siRNA sense strand
ccacagguccaacauagga

SEQ ID NO: 1557664 - RNA, 19 nt, Homo sapiens
  misc_RNA (1)...(19): siRNA sense strand
gaaccaaggaugugauagg

SEQ ID NO: 1557665 - RNA, 19 nt, Homo sapiens
  misc_RNA (1)...(19): siRNA sense strand
aaggaagaauggaggcuuu

SEQ ID NO: 1557666 - RNA, 19 nt, Homo sapiens
  misc_RNA (1)...(19): siRNA sense strand
ggaguugaaaugaugaaga

SEQ ID NO: 1557667 - RNA, 19 nt, Homo sapiens
  misc_RNA (1)...(19): siRNA sense strand
guccagcaguuucaccaaa

SEQ ID NO: 1557668 - RNA, 19 nt, Homo sapiens
  misc_RNA (1)...(19): siRNA sense strand
gcacagccaccauccucaa

SEQ ID NO: 1557669 - RNA, 19 nt, Homo sapiens
  misc_RNA (1)...(19): siRNA sense strand
aaaagagacugaacuuaga

SEQ ID NO: 1557670 - RNA, 19 nt, Homo sapiens
  misc_RNA (1)...(19): siRNA sense strand
aaaggugacugacuucaac

SEQ ID NO: 1557671 - RNA, 19 nt, Homo sapiens
  misc_RNA (1)...(19): siRNA sense strand
uccauaggauacucacuuu

SEQ ID NO: 1557672 - RNA, 19 nt, Homo sapiens
  misc_RNA (1)...(19): siRNA sense strand
cauaggauacucacuuugu

SEQ ID NO: 1557673 - RNA, 19 nt, Homo sapiens
  misc_RNA (1)...(19): siRNA sense strand
gcaaggaaccaaggaugug

SEQ ID NO: 1557674 - RNA, 19 nt, Homo sapiens
  misc_RNA (1)...(19): siRNA sense strand
guacuccacagcacuaaug

SEQ ID NO: 1557675 - RNA, 19 nt, Homo sapiens
  misc_RNA (1)...(19): siRNA sense strand
gauguacuccacagcacua

SEQ ID NO: 1557676 - RNA, 19 nt, Homo sapiens
  misc_RNA (1)...(19): siRNA sense strand
caaaagagacugaacuuag

SEQ ID NO: 1557677 - RNA, 19 nt, Homo sapiens
  misc_RNA (1)...(19): siRNA sense strand
ccaagggaacaucuucaaa

SEQ ID NO: 1557678 - RNA, 19 nt, Homo sapiens
  misc_RNA (1)...(19): siRNA sense strand
ccacuaggacaagaaauau

SEQ ID NO: 1557679 - RNA, 19 nt, Homo sapiens
  misc_RNA (1)...(19): siRNA sense strand
aauguggccugacccuaaa

SEQ ID NO: 1557680 - RNA, 19 nt, Homo sapiens
  misc_RNA (1)...(19): siRNA sense strand
ggccugacccuaaacacaa

SEQ ID NO: 1557681 - RNA, 19 nt, Homo sapiens
  misc_RNA (1)...(19): siRNA sense strand
gcacaggaagcaauauggu

SEQ ID NO: 1557682 - RNA, 19 nt, Homo sapiens
  misc_RNA (1)...(19): siRNA sense strand
ggcaggugcuucaggaaag

SEQ ID NO: 1557683 - RNA, 19 nt, Homo sapiens
  misc_RNA (1)...(19): siRNA sense strand
ggaggugagggaccacuug

SEQ ID NO: 1557684 - RNA, 19 nt, Homo sapiens
  misc_RNA (1)...(19): siRNA sense strand
ccaaaugccauagcucgaa

SEQ ID NO: 1557685 - RNA, 19 nt, Homo sapiens
  misc_RNA (1)...(19): siRNA sense strand
uaggauacucacuuuguuu

SEQ ID NO: 1557686 - RNA, 19 nt, Homo sapiens
  misc_RNA (1)...(19): siRNA sense strand
ugacccacaugaccacuag

SEQ ID NO: 1557687 - RNA, 19 nt, Homo sapiens
  misc_RNA (1)...(19): siRNA sense strand
cucaacauaugcccuguga

SEQ ID NO: 1557688 - RNA, 19 nt, Homo sapiens
  misc_RNA (1)...(19): siRNA sense strand
gccugacccuaaacacaaa

SEQ ID NO: 1557689 - RNA, 19 nt, Homo sapiens
  misc_RNA (1)...(19): siRNA sense strand
caaggaaccaaggauguga

SEQ ID NO: 1557690 - RNA, 19 nt, Homo sapiens
  misc_RNA (1)...(19): siRNA sense strand
cuggucagcuucacucugu

SEQ ID NO: 1557691 - RNA, 19 nt, Homo sapiens
  misc_RNA (1)...(19): siRNA sense strand
ggacauuauggagaaacua

SEQ ID NO: 1557692 - RNA, 19 nt, Homo sapiens
  misc_RNA (1)...(19): siRNA sense strand
caagggaacaucuucaaaa

SEQ ID NO: 1557693 - RNA, 19 nt, Homo sapiens
  misc_RNA (1)...(19): siRNA sense strand
ggaugacagagaccaagaa

SEQ ID NO: 1557694 - RNA, 19 nt, Homo sapiens
  misc_RNA (1)...(19): siRNA sense strand
gauacucacuuuguuucca

SEQ ID NO: 1557695 - RNA, 19 nt, Homo sapiens
  misc_RNA (1)...(19): siRNA sense strand
aaagagacugaacuuagaa

SEQ ID NO: 1557696 - RNA, 19 nt, Homo sapiens
  misc_RNA (1)...(19): siRNA sense strand
aagcgauucuccugacuca

SEQ ID NO: 1557697 - RNA, 19 nt, Homo sapiens
  misc_RNA (1)...(19): siRNA sense strand
acauaggaguugaaaugau

SEQ ID NO: 1557698 - RNA, 19 nt, Homo sapiens
  misc_RNA (1)...(19): siRNA sense strand
cacacaaaguucucguuca

SEQ ID NO: 1557699 - RNA, 19 nt, Homo sapiens
  misc_RNA (1)...(19): siRNA sense strand
ccagaccuuucacccaugu

SEQ ID NO: 1557700 - RNA, 19 nt, Homo sapiens
  misc_RNA (1)...(19): siRNA sense strand
auaggauacucacuuuguu

SEQ ID NO: 1557701 - RNA, 19 nt, Homo sapiens
  misc_RNA (1)...(19): siRNA sense strand
aaccaaggaugugauagga

SEQ ID NO: 1557702 - RNA, 19 nt, Homo sapiens
  misc_RNA (1)...(19): siRNA sense strand
gacugaacuuagaauaaag

SEQ ID NO: 1557703 - RNA, 19 nt, Homo sapiens
  misc_RNA (1)...(19): siRNA sense strand
gccaacagaagcuccaaug

SEQ ID NO: 1557704 - RNA, 19 nt, Homo sapiens
  misc_RNA (1)...(19): siRNA sense strand
ggaaaggugacugacuuca

SEQ ID NO: 1557705 - RNA, 19 nt, Homo sapiens
  misc_RNA (1)...(19): siRNA sense strand
agagacugaacuuagaaua

SEQ ID NO: 1557706 - RNA, 19 nt, Homo sapiens
  misc_RNA (1)...(19): siRNA sense strand
gggcacaggaagcaauaug

SEQ ID NO: 1557707 - RNA, 19 nt, Homo sapiens
  misc_RNA (1)...(19): siRNA sense strand
ccucaacccucaagauacg

SEQ ID NO: 1557708 - RNA, 19 nt, Homo sapiens
  misc_RNA (1)...(19): siRNA sense strand
gacauuauggagaaacuag

SEQ ID NO: 1557709 - RNA, 19 nt, Homo sapiens
  misc_RNA (1)...(19): siRNA sense strand
aaaggacauuauggagaaa

SEQ ID NO: 1557710 - RNA, 19 nt, Homo sapiens
  misc_RNA (1)...(19): siRNA sense strand
auacucacuuuguuuccaa

SEQ ID NO: 1557711 - RNA, 19 nt, Homo sapiens
  misc_RNA (1)...(19): siRNA sense strand
ggcaaggaaccaaggaugu

SEQ ID NO: 1557712 - RNA, 19 nt, Homo sapiens
  misc_RNA (1)...(19): siRNA sense strand
agaaaauacucauccauag

SEQ ID NO: 1557713 - RNA, 19 nt, Homo sapiens
  misc_RNA (1)...(19): siRNA sense strand
accacuaggacaagaaaua

SEQ ID NO: 1557714 - RNA, 19 nt, Homo sapiens
  misc_RNA (1)...(19): siRNA sense strand
gcaggugcuucaggaaagg

SEQ ID NO: 1557715 - RNA, 19 nt, Homo sapiens
  misc_RNA (1)...(19): siRNA sense strand
uuccacagguccaacauag

SEQ ID NO: 1557716 - RNA, 19 nt, Homo sapiens
  misc_RNA (1)...(19): siRNA sense strand
caugaccacuaggacaaga

SEQ ID NO: 1557717 - RNA, 19 nt, Homo sapiens
  misc_RNA (1)...(19): siRNA sense strand
aaauuacugcugauguuga

SEQ ID NO: 1557718 - RNA, 19 nt, Homo sapiens
  misc_RNA (1)...(19): siRNA sense strand
gcaauaugguggggauuuc

SEQ ID NO: 1557719 - RNA, 19 nt, Homo sapiens
  misc_RNA (1)...(19): siRNA sense strand
cacaugaccacuaggacaa

SEQ ID NO: 1557720 - RNA, 19 nt, Homo sapiens
  misc_RNA (1)...(19): siRNA sense strand
gaugacagagaccaagaag

SEQ ID NO: 1557721 - RNA, 19 nt, Homo sapiens
  misc_RNA (1)...(19): siRNA sense strand
gaucauuuacuuggcuuca

SEQ ID NO: 1557722 - RNA, 19 nt, Homo sapiens
  misc_RNA (1)...(19): siRNA sense strand
ugaccacuaggacaagaaa

SEQ ID NO: 1557723 - RNA, 19 nt, Homo sapiens
  misc_RNA (1)...(19): siRNA sense strand
ccaacagaagcuccaaugu

SEQ ID NO: 1557724 - RNA, 19 nt, Homo sapiens
  misc_RNA (1)...(19): siRNA sense strand
ccaaaagagacugaacuua

SEQ ID NO: 1557725 - RNA, 19 nt, Homo sapiens
  misc_RNA (1)...(19): siRNA sense strand
gaucccacccagaccuuuc

SEQ ID NO: 1557726 - RNA, 19 nt, Homo sapiens
  misc_RNA (1)...(19): siRNA sense strand
ggucagcuucacucuguuc

SEQ ID NO: 1557727 - RNA, 19 nt, Homo sapiens
  misc_RNA (1)...(19): siRNA sense strand
ggauauggauucucuggau

SEQ ID NO: 1557728 - RNA, 19 nt, Homo sapiens
  misc_RNA (1)...(19): siRNA sense strand
gauauggauucucuggauu

SEQ ID NO: 1557729 - RNA, 19 nt, Homo sapiens
  misc_RNA (1)...(19): siRNA sense strand
gaacuacuacggcaacuac

SEQ ID NO: 1557730 - RNA, 19 nt, Homo sapiens
  misc_RNA (1)...(19): siRNA sense strand
gaccugggcuauggcuaug

SEQ ID NO: 1557731 - RNA, 19 nt, Homo sapiens
  misc_RNA (1)...(19): siRNA sense strand
uggaggauauggauucucu

SEQ ID NO: 1557732 - RNA, 19 nt, Homo sapiens
  misc_RNA (1)...(19): siRNA sense strand
cuacuacggcaacuacuau

SEQ ID NO: 1557733 - RNA, 19 nt, Homo sapiens
  misc_RNA (1)...(19): siRNA sense strand
ucgaugaccugggcuaugg

SEQ ID NO: 1557734 - RNA, 19 nt, Homo sapiens
  misc_RNA (1)...(19): siRNA sense strand
cuacggaggcuacggauac

SEQ ID NO: 1557735 - RNA, 19 nt, Homo sapiens
  misc_RNA (1)...(19): siRNA sense strand
gcagcugccguccaucaug

SEQ ID NO: 1557736 - RNA, 19 nt, Homo sapiens
  misc_RNA (1)...(19): siRNA sense strand
ggcuauggcuguggaugug

SEQ ID NO: 1557737 - RNA, 19 nt, Homo sapiens
  misc_RNA (1)...(19): siRNA sense strand
ugaccugggcuauggcuau

SEQ ID NO: 1557738 - RNA, 19 nt, Homo sapiens
  misc_RNA (1)...(19): siRNA sense strand
uggauucucuggauuuuau

SEQ ID NO: 1557739 - RNA, 19 nt, Homo sapiens
  misc_RNA (1)...(19): siRNA sense strand
uaccgcagcugccguccau

SEQ ID NO: 1557740 - RNA, 19 nt, Homo sapiens
  misc_RNA (1)...(19): siRNA sense strand
gcuacggaggcuacggaua

SEQ ID NO: 1557741 - RNA, 19 nt, Homo sapiens
  misc_RNA (1)...(19): siRNA sense strand
cuauggaggauauggauuc

SEQ ID NO: 1557742 - RNA, 19 nt, Homo sapiens
  misc_RNA (1)...(19): siRNA sense strand
cuacggcaacuacuaugga

SEQ ID NO: 1557743 - RNA, 19 nt, Homo sapiens
  misc_RNA (1)...(19): siRNA sense strand
ggaaugcuauguaagaaag

SEQ ID NO: 1557744 - RNA, 19 nt, Homo sapiens
  misc_RNA (1)...(19): siRNA sense strand
guauuggaaugcuauguaa

SEQ ID NO: 1557745 - RNA, 19 nt, Homo sapiens
  misc_RNA (1)...(19): siRNA sense strand
caaagccaauccaacguuu

SEQ ID NO: 1557746 - RNA, 19 nt, Homo sapiens
  misc_RNA (1)...(19): siRNA sense strand
acagacaguucuucuaauu

SEQ ID NO: 1557747 - RNA, 19 nt, Homo sapiens
  misc_RNA (1)...(19): siRNA sense strand
gaaaggacuuggucuacac

SEQ ID NO: 1557748 - RNA, 19 nt, Homo sapiens
  misc_RNA (1)...(19): siRNA sense strand
gagcaccggaggauuuaua

SEQ ID NO: 1557749 - RNA, 19 nt, Homo sapiens
  misc_RNA (1)...(19): siRNA sense strand
cuacagacaguucuucuaa

SEQ ID NO: 1557750 - RNA, 19 nt, Homo sapiens
  misc_RNA (1)...(19): siRNA sense strand
gcagggacauguucaacca

SEQ ID NO: 1557751 - RNA, 19 nt, Homo sapiens
  misc_RNA (1)...(19): siRNA sense strand
gacccuugcucgugcgaua

SEQ ID NO: 1557752 - RNA, 19 nt, Homo sapiens
  misc_RNA (1)...(19): siRNA sense strand
gaaagacaaacugguggua

SEQ ID NO: 1557753 - RNA, 19 nt, Homo sapiens
  misc_RNA (1)...(19): siRNA sense strand
uaagaaaggacuuggucua

SEQ ID NO: 1557754 - RNA, 19 nt, Homo sapiens
  misc_RNA (1)...(19): siRNA sense strand
gguauuggaaugcuaugua

SEQ ID NO: 1557755 - RNA, 19 nt, Homo sapiens
  misc_RNA (1)...(19): siRNA sense strand
gacgaugacagcuauauug

SEQ ID NO: 1557756 - RNA, 19 nt, Homo sapiens
  misc_RNA (1)...(19): siRNA sense strand
aagacaaacuggugguauu

SEQ ID NO: 1557757 - RNA, 19 nt, Homo sapiens
  misc_RNA (1)...(19): siRNA sense strand
aaucgaagaccuuauagaa

SEQ ID NO: 1557758 - RNA, 19 nt, Homo sapiens
  misc_RNA (1)...(19): siRNA sense strand
aaacacacccagacgauga

SEQ ID NO: 1557759 - RNA, 19 nt, Homo sapiens
  misc_RNA (1)...(19): siRNA sense strand
gaggagaucgugcgcauca

SEQ ID NO: 1557760 - RNA, 19 nt, Homo sapiens
  misc_RNA (1)...(19): siRNA sense strand
gaaagcaaucgaagaccuu

SEQ ID NO: 1557761 - RNA, 19 nt, Homo sapiens
  misc_RNA (1)...(19): siRNA sense strand
ucuaauuccucucagaaga

SEQ ID NO: 1557762 - RNA, 19 nt, Homo sapiens
  misc_RNA (1)...(19): siRNA sense strand
gaagagagagcaaccuacu

SEQ ID NO: 1557763 - RNA, 19 nt, Homo sapiens
  misc_RNA (1)...(19): siRNA sense strand
caucuuccaccauccauaa

SEQ ID NO: 1557764 - RNA, 19 nt, Homo sapiens
  misc_RNA (1)...(19): siRNA sense strand
ugucaaggcugugguuaug

SEQ ID NO: 1557765 - RNA, 19 nt, Homo sapiens
  misc_RNA (1)...(19): siRNA sense strand
caacagcuacagacaguuc

SEQ ID NO: 1557766 - RNA, 19 nt, Homo sapiens
  misc_RNA (1)...(19): siRNA sense strand
acuggaaggucgauaauag

SEQ ID NO: 1557767 - RNA, 19 nt, Homo sapiens
  misc_RNA (1)...(19): siRNA sense strand
gcuuggcgaugaugacguu

SEQ ID NO: 1557768 - RNA, 19 nt, Homo sapiens
  misc_RNA (1)...(19): siRNA sense strand
ccaagcaugacuacaacua

SEQ ID NO: 1557769 - RNA, 19 nt, Homo sapiens
  misc_RNA (1)...(19): siRNA sense strand
uacaacagcuacagacagu

SEQ ID NO: 1557770 - RNA, 19 nt, Homo sapiens
  misc_RNA (1)...(19): siRNA sense strand
cagaagagagagcaaccua

SEQ ID NO: 1557771 - RNA, 19 nt, Homo sapiens
  misc_RNA (1)...(19): siRNA sense strand
caacguuucaucacuggaa

SEQ ID NO: 1557772 - RNA, 19 nt, Homo sapiens
  misc_RNA (1)...(19): siRNA sense strand
ggaaggaggcgggaucagu

SEQ ID NO: 1557773 - RNA, 19 nt, Homo sapiens
  misc_RNA (1)...(19): siRNA sense strand
uaaggaaagcaaucgaaga

SEQ ID NO: 1557774 - RNA, 19 nt, Homo sapiens
  misc_RNA (1)...(19): siRNA sense strand
agaaaggacuuggucuaca

SEQ ID NO: 1557775 - RNA, 19 nt, Homo sapiens
  misc_RNA (1)...(19): siRNA sense strand
ggucgauaauaggaaguuu

SEQ ID NO: 1557776 - RNA, 19 nt, Homo sapiens
  misc_RNA (1)...(19): siRNA sense strand
ccaaagccaauccaacguu

SEQ ID NO: 1557777 - RNA, 19 nt, Homo sapiens
  misc_RNA (1)...(19): siRNA sense strand
acaaacuggugguauugga

SEQ ID NO: 1557778 - RNA, 19 nt, Homo sapiens
  misc_RNA (1)...(19): siRNA sense strand
ggaaggucgauaauaggaa

SEQ ID NO: 1557779 - RNA, 19 nt, Homo sapiens
  misc_RNA (1)...(19): siRNA sense strand
guucaacaacgucaucuuc

SEQ ID NO: 1557780 - RNA, 19 nt, Homo sapiens
  misc_RNA (1)...(19): siRNA sense strand
cuuccaccauccauaauga

SEQ ID NO: 1557781 - RNA, 19 nt, Homo sapiens
  misc_RNA (1)...(19): siRNA sense strand
ucucauccauggugaacga

SEQ ID NO: 1557782 - RNA, 19 nt, Homo sapiens
  misc_RNA (1)...(19): siRNA sense strand
ugugagcaccggaggauuu

SEQ ID NO: 1557783 - RNA, 19 nt, Homo sapiens
  misc_RNA (1)...(19): siRNA sense strand
gcuacagacaguucuucua

SEQ ID NO: 1557784 - RNA, 19 nt, Homo sapiens
  misc_RNA (1)...(19): siRNA sense strand
cguggacuccucagacuuu

SEQ ID NO: 1557785 - RNA, 19 nt, Homo sapiens
  misc_RNA (1)...(19): siRNA sense strand
gugagcaccggaggauuua

SEQ ID NO: 1557786 - RNA, 19 nt, Homo sapiens
  misc_RNA (1)...(19): siRNA sense strand
caaacuggugguauuggaa

SEQ ID NO: 1557787 - RNA, 19 nt, Homo sapiens
  misc_RNA (1)...(19): siRNA sense strand
gggagaagaucuggaugac

SEQ ID NO: 1557788 - RNA, 19 nt, Homo sapiens
  misc_RNA (1)...(19): siRNA sense strand
ggacgacgacgaggagauc

SEQ ID NO: 1557789 - RNA, 19 nt, Homo sapiens
  misc_RNA (1)...(19): siRNA sense strand
cccagacgaugacagcuau

SEQ ID NO: 1557790 - RNA, 19 nt, Homo sapiens
  misc_RNA (1)...(19): siRNA sense strand
gcaaucgaagaccuuauag

SEQ ID NO: 1557791 - RNA, 19 nt, Homo sapiens
  misc_RNA (1)...(19): siRNA sense strand
cggacagcaugcucuauca

SEQ ID NO: 1557792 - RNA, 19 nt, Homo sapiens
  misc_RNA (1)...(19): siRNA sense strand
guacugcagggacauguuc

SEQ ID NO: 1557793 - RNA, 19 nt, Homo sapiens
  misc_RNA (1)...(19): siRNA sense strand
caaccuacucggacaaucu

SEQ ID NO: 1557794 - RNA, 19 nt, Homo sapiens
  misc_RNA (1)...(19): siRNA sense strand
agacaguucuucuaauucc

SEQ ID NO: 1557795 - RNA, 19 nt, Homo sapiens
  misc_RNA (1)...(19): siRNA sense strand
ucaacaacgucaucuucca

SEQ ID NO: 1557796 - RNA, 19 nt, Homo sapiens
  misc_RNA (1)...(19): siRNA sense strand
ccaauccaacguuucauca

SEQ ID NO: 1557797 - RNA, 19 nt, Homo sapiens
  misc_RNA (1)...(19): siRNA sense strand
agacaaacuggugguauug

SEQ ID NO: 1557798 - RNA, 19 nt, Homo sapiens
  misc_RNA (1)...(19): siRNA sense strand
uacagacaguucuucuaau

SEQ ID NO: 1557799 - RNA, 19 nt, Homo sapiens
  misc_RNA (1)...(19): siRNA sense strand
aaagcaaucgaagaccuua

SEQ ID NO: 1557800 - RNA, 19 nt, Homo sapiens
  misc_RNA (1)...(19): siRNA sense strand
agcaaucgaagaccuuaua

SEQ ID NO: 1557801 - RNA, 19 nt, Homo sapiens
  misc_RNA (1)...(19): siRNA sense strand
gcaaccuacucggacaauc

SEQ ID NO: 1557802 - RNA, 19 nt, Homo sapiens
  misc_RNA (1)...(19): siRNA sense strand
ggucuacaccaaagccaau

SEQ ID NO: 1557803 - RNA, 19 nt, Homo sapiens
  misc_RNA (1)...(19): siRNA sense strand
gcggacagcaugcucuauc

SEQ ID NO: 1557804 - RNA, 19 nt, Homo sapiens
  misc_RNA (1)...(19): siRNA sense strand
ggugaacgacagaaagaca

SEQ ID NO: 1557805 - RNA, 19 nt, Homo sapiens
  misc_RNA (1)...(19): siRNA sense strand
cgggagaagaucuggauga

SEQ ID NO: 1557806 - RNA, 19 nt, Homo sapiens
  misc_RNA (1)...(19): siRNA sense strand
ucaaggcugugguuaugac

SEQ ID NO: 1557807 - RNA, 19 nt, Homo sapiens
  misc_RNA (1)...(19): siRNA sense strand
ugaacgacagaaagacaaa

SEQ ID NO: 1557808 - RNA, 19 nt, Homo sapiens
  misc_RNA (1)...(19): siRNA sense strand
caaucgaagaccuuauaga

SEQ ID NO: 1557809 - RNA, 19 nt, Homo sapiens
  misc_RNA (1)...(19): siRNA sense strand
gcgauacuagcgacgagaa

SEQ ID NO: 1557810 - RNA, 19 nt, Homo sapiens
  misc_RNA (1)...(19): siRNA sense strand
caugcucuaucacuguaug

SEQ ID NO: 1557811 - RNA, 19 nt, Homo sapiens
  misc_RNA (1)...(19): siRNA sense strand
gcgcggacagcaugcucua

SEQ ID NO: 1557812 - RNA, 19 nt, Homo sapiens
  misc_RNA (1)...(19): siRNA sense strand
gagcaaccuacucggacaa

SEQ ID NO: 1557813 - RNA, 19 nt, Homo sapiens
  misc_RNA (1)...(19): siRNA sense strand
agcaugcucuaucacugua

SEQ ID NO: 1557814 - RNA, 19 nt, Homo sapiens
  misc_RNA (1)...(19): siRNA sense strand
cagcaugcucuaucacugu

SEQ ID NO: 1557815 - RNA, 19 nt, Homo sapiens
  misc_RNA (1)...(19): siRNA sense strand
agaccacuaucaccucgau

SEQ ID NO: 1557816 - RNA, 19 nt, Homo sapiens
  misc_RNA (1)...(19): siRNA sense strand
agaaacacacccagacgau

SEQ ID NO: 1557817 - RNA, 19 nt, Homo sapiens
  misc_RNA (1)...(19): siRNA sense strand
agacgaugacagcuauauu

SEQ ID NO: 1557818 - RNA, 19 nt, Homo sapiens
  misc_RNA (1)...(19): siRNA sense strand
gcugaugcccgagccuuug

SEQ ID NO: 1557819 - RNA, 19 nt, Homo sapiens
  misc_RNA (1)...(19): siRNA sense strand
aaagacaaacuggugguau

SEQ ID NO: 1557820 - RNA, 19 nt, Homo sapiens
  misc_RNA (1)...(19): siRNA sense strand
ggagaucgugcgcaucaac

SEQ ID NO: 1557821 - RNA, 19 nt, Homo sapiens
  misc_RNA (1)...(19): siRNA sense strand
auagaagguucaacaacgu

SEQ ID NO: 1557822 - RNA, 19 nt, Homo sapiens
  misc_RNA (1)...(19): siRNA sense strand
aauccaacguuucaucacu

SEQ ID NO: 1557823 - RNA, 19 nt, Homo sapiens
  misc_RNA (1)...(19): siRNA sense strand
gauacuagcgacgagaagu

SEQ ID NO: 1557824 - RNA, 19 nt, Homo sapiens
  misc_RNA (1)...(19): siRNA sense strand
uuggaaugcuauguaagaa

SEQ ID NO: 1557825 - RNA, 19 nt, Homo sapiens
  misc_RNA (1)...(19): siRNA sense strand
aaacuggugguauuggaau

SEQ ID NO: 1557826 - RNA, 19 nt, Homo sapiens
  misc_RNA (1)...(19): siRNA sense strand
gugaacgacagaaagacaa

SEQ ID NO: 1557827 - RNA, 19 nt, Homo sapiens
  misc_RNA (1)...(19): siRNA sense strand
cagacaguucuucuaauuc

SEQ ID NO: 1557828 - RNA, 19 nt, Homo sapiens
  misc_RNA (1)...(19): siRNA sense strand
ucacuggaaggucgauaau

SEQ ID NO: 1557829 - RNA, 19 nt, Homo sapiens
  misc_RNA (1)...(19): siRNA sense strand
agaaggaggugaugcagua

SEQ ID NO: 1557830 - RNA, 19 nt, Homo sapiens
  misc_RNA (1)...(19): siRNA sense strand
ucaagaagcagaagaagaa

SEQ ID NO: 1557831 - RNA, 19 nt, Homo sapiens
  misc_RNA (1)...(19): siRNA sense strand
caggaggacuuucuguuug

SEQ ID NO: 1557832 - RNA, 19 nt, Homo sapiens
  misc_RNA (1)...(19): siRNA sense strand
agacgugguuccuggauuu

SEQ ID NO: 1557833 - RNA, 19 nt, Homo sapiens
  misc_RNA (1)...(19): siRNA sense strand
ccucuuauucguaacauua

SEQ ID NO: 1557834 - RNA, 19 nt, Homo sapiens
  misc_RNA (1)...(19): siRNA sense strand
agagagggcagcacuuaua

SEQ ID NO: 1557835 - RNA, 19 nt, Homo sapiens
  misc_RNA (1)...(19): siRNA sense strand
gcauugagaacacauuaga

SEQ ID NO: 1557836 - RNA, 19 nt, Homo sapiens
  misc_RNA (1)...(19): siRNA sense strand
gaaaccacuuuuagaacua

SEQ ID NO: 1557837 - RNA, 19 nt, Homo sapiens
  misc_RNA (1)...(19): siRNA sense strand
ucagagagggcagcacuua

SEQ ID NO: 1557838 - RNA, 19 nt, Homo sapiens
  misc_RNA (1)...(19): siRNA sense strand
ucaggaggacuuucuguuu

SEQ ID NO: 1557839 - RNA, 19 nt, Homo sapiens
  misc_RNA (1)...(19): siRNA sense strand
gaaaacagacuccugauag

SEQ ID NO: 1557840 - RNA, 19 nt, Homo sapiens
  misc_RNA (1)...(19): siRNA sense strand
gaagcaggaucugaagaag

SEQ ID NO: 1557841 - RNA, 19 nt, Homo sapiens
  misc_RNA (1)...(19): siRNA sense strand
gagacgugguuccuggauu

SEQ ID NO: 1557842 - RNA, 19 nt, Homo sapiens
  misc_RNA (1)...(19): siRNA sense strand
agaaaggcauaucugaugu

SEQ ID NO: 1557843 - RNA, 19 nt, Homo sapiens
  misc_RNA (1)...(19): siRNA sense strand
cgaagcaggaucugaagaa

SEQ ID NO: 1557844 - RNA, 19 nt, Homo sapiens
  misc_RNA (1)...(19): siRNA sense strand
guuccuggauuucaaagug

SEQ ID NO: 1557845 - RNA, 19 nt, Homo sapiens
  misc_RNA (1)...(19): siRNA sense strand
caauauccauuccaucaac

SEQ ID NO: 1557846 - RNA, 19 nt, Homo sapiens
  misc_RNA (1)...(19): siRNA sense strand
ggaggacuuucuguuuguu

SEQ ID NO: 1557847 - RNA, 19 nt, Homo sapiens
  misc_RNA (1)...(19): siRNA sense strand
ucaaaguguuaccucaaga

SEQ ID NO: 1557848 - RNA, 19 nt, Homo sapiens
  misc_RNA (1)...(19): siRNA sense strand
gcaauauccauuccaucaa

SEQ ID NO: 1557849 - RNA, 19 nt, Homo sapiens
  misc_RNA (1)...(19): siRNA sense strand
caacucauggccaggauug

SEQ ID NO: 1557850 - RNA, 19 nt, Homo sapiens
  misc_RNA (1)...(19): siRNA sense strand
gcuaugugcugcccaucau

SEQ ID NO: 1557851 - RNA, 19 nt, Homo sapiens
  misc_RNA (1)...(19): siRNA sense strand
agccagagcucccaugcuu

SEQ ID NO: 1557852 - RNA, 19 nt, Homo sapiens
  misc_RNA (1)...(19): siRNA sense strand
caaaguguuaccucaagaa

SEQ ID NO: 1557853 - RNA, 19 nt, Homo sapiens
  misc_RNA (1)...(19): siRNA sense strand
aagaaaggcauaucugaug

SEQ ID NO: 1557854 - RNA, 19 nt, Homo sapiens
  misc_RNA (1)...(19): siRNA sense strand
aaacagacuccugauaguu

SEQ ID NO: 1557855 - RNA, 19 nt, Homo sapiens
  misc_RNA (1)...(19): siRNA sense strand
uuugaccucuuauucguaa

SEQ ID NO: 1557856 - RNA, 19 nt, Homo sapiens
  misc_RNA (1)...(19): siRNA sense strand
gcccaucauuucauucauc

SEQ ID NO: 1557857 - RNA, 19 nt, Homo sapiens
  misc_RNA (1)...(19): siRNA sense strand
gaucugaagaagcugaaga

SEQ ID NO: 1557858 - RNA, 19 nt, Homo sapiens
  misc_RNA (1)...(19): siRNA sense strand
aggaggugaugcaguauga

SEQ ID NO: 1557859 - RNA, 19 nt, Homo sapiens
  misc_RNA (1)...(19): siRNA sense strand
ucaaggggcuuuuggcuau

SEQ ID NO: 1557860 - RNA, 19 nt, Homo sapiens
  misc_RNA (1)...(19): siRNA sense strand
aaaggcauaucugauguca

SEQ ID NO: 1557861 - RNA, 19 nt, Homo sapiens
  misc_RNA (1)...(19): siRNA sense strand
guuaauacuugcauaugcu

SEQ ID NO: 1557862 - RNA, 19 nt, Homo sapiens
  misc_RNA (1)...(19): siRNA sense strand
agaguuaaaugugaaugga

SEQ ID NO: 1557863 - RNA, 19 nt, Homo sapiens
  misc_RNA (1)...(19): siRNA sense strand
aaagaaaggcauaucugau

SEQ ID NO: 1557864 - RNA, 19 nt, Homo sapiens
  misc_RNA (1)...(19): siRNA sense strand
aguguuaccucaagaagca

SEQ ID NO: 1557865 - RNA, 19 nt, Homo sapiens
  misc_RNA (1)...(19): siRNA sense strand
gugauccuuucgaagcuuu

SEQ ID NO: 1557866 - RNA, 19 nt, Homo sapiens
  misc_RNA (1)...(19): siRNA sense strand
gaaaagaaaggcauaucug

SEQ ID NO: 1557867 - RNA, 19 nt, Homo sapiens
  misc_RNA (1)...(19): siRNA sense strand
gaaaggcauaucugauguc

SEQ ID NO: 1557868 - RNA, 19 nt, Homo sapiens
  misc_RNA (1)...(19): siRNA sense strand
gaggacuuucuguuuguuu

SEQ ID NO: 1557869 - RNA, 19 nt, Homo sapiens
  misc_RNA (1)...(19): siRNA sense strand
cgcaauauccauuccauca

SEQ ID NO: 1557870 - RNA, 19 nt, Homo sapiens
  misc_RNA (1)...(19): siRNA sense strand
ugagaacacauuagagaag

SEQ ID NO: 1557871 - RNA, 19 nt, Homo sapiens
  misc_RNA (1)...(19): siRNA sense strand
ugagaaaccacuuuuagaa

SEQ ID NO: 1557872 - RNA, 19 nt, Homo sapiens
  misc_RNA (1)...(19): siRNA sense strand
uaugugcugcccaucauuu

SEQ ID NO: 1557873 - RNA, 19 nt, Homo sapiens
  misc_RNA (1)...(19): siRNA sense strand
caucauuucauucauccuu

SEQ ID NO: 1557874 - RNA, 19 nt, Homo sapiens
  misc_RNA (1)...(19): siRNA sense strand
gagagggcagcacuuauac

SEQ ID NO: 1557875 - RNA, 19 nt, Homo sapiens
  misc_RNA (1)...(19): siRNA sense strand
acagacuccugauaguuca

SEQ ID NO: 1557876 - RNA, 19 nt, Homo sapiens
  misc_RNA (1)...(19): siRNA sense strand
caagaagcagaagaagaaa

SEQ ID NO: 1557877 - RNA, 19 nt, Homo sapiens
  misc_RNA (1)...(19): siRNA sense strand
aggaggacuuucuguuugu

SEQ ID NO: 1557878 - RNA, 19 nt, Homo sapiens
  misc_RNA (1)...(19): siRNA sense strand
acuuauaccugguggucuu

SEQ ID NO: 1557879 - RNA, 19 nt, Homo sapiens
  misc_RNA (1)...(19): siRNA sense strand
uuucgaagcuuuucucuca

SEQ ID NO: 1557880 - RNA, 19 nt, Homo sapiens
  misc_RNA (1)...(19): siRNA sense strand
guuuguuugucaccuuuga

SEQ ID NO: 1557881 - RNA, 19 nt, Homo sapiens
  misc_RNA (1)...(19): siRNA sense strand
ggacuuucuguuuguuugu

SEQ ID NO: 1557882 - RNA, 19 nt, Homo sapiens
  misc_RNA (1)...(19): siRNA sense strand
guaugacuacuauucuuca

SEQ ID NO: 1557883 - RNA, 19 nt, Homo sapiens
  misc_RNA (1)...(19): siRNA sense strand
caccuuugaccucuuauuc

SEQ ID NO: 1557884 - RNA, 19 nt, Homo sapiens
  misc_RNA (1)...(19): siRNA sense strand
ccagagcucccaugcuucu

SEQ ID NO: 1557885 - RNA, 19 nt, Homo sapiens
  misc_RNA (1)...(19): siRNA sense strand
ccaccugccagaagacaug

SEQ ID NO: 1557886 - RNA, 19 nt, Homo sapiens
  misc_RNA (1)...(19): siRNA sense strand
augcuucucugcgcaauau

SEQ ID NO: 1557887 - RNA, 19 nt, Homo sapiens
  misc_RNA (1)...(19): siRNA sense strand
gaaggaggugaugcaguau

SEQ ID NO: 1557888 - RNA, 19 nt, Homo sapiens
  misc_RNA (1)...(19): siRNA sense strand
aggcauugagaacacauua

SEQ ID NO: 1557889 - RNA, 19 nt, Homo sapiens
  misc_RNA (1)...(19): siRNA sense strand
cgugguuccuggauuucaa

SEQ ID NO: 1557890 - RNA, 19 nt, Homo sapiens
  misc_RNA (1)...(19): siRNA sense strand
agaacacauuagagaagga

SEQ ID NO: 1557891 - RNA, 19 nt, Homo sapiens
  misc_RNA (1)...(19): siRNA sense strand
ggaaaagaaaggcauaucu

SEQ ID NO: 1557892 - RNA, 19 nt, Homo sapiens
  misc_RNA (1)...(19): siRNA sense strand
gaugucaggaggacuuucu

SEQ ID NO: 1557893 - RNA, 19 nt, Homo sapiens
  misc_RNA (1)...(19): siRNA sense strand
aaaagaaaggcauaucuga

SEQ ID NO: 1557894 - RNA, 19 nt, Homo sapiens
  misc_RNA (1)...(19): siRNA sense strand
aggacuuucuguuuguuug

SEQ ID NO: 1557895 - RNA, 19 nt, Homo sapiens
  misc_RNA (1)...(19): siRNA sense strand
ccuuugaccucuuauucgu

SEQ ID NO: 1557896 - RNA, 19 nt, Homo sapiens
  misc_RNA (1)...(19): siRNA sense strand
ugaggaggcugucaugaua

SEQ ID NO: 1557897 - RNA, 19 nt, Homo sapiens
  misc_RNA (1)...(19): siRNA sense strand
uaauccaccuccuuacuua

SEQ ID NO: 1557898 - RNA, 19 nt, Homo sapiens
  misc_RNA (1)...(19): siRNA sense strand
ggauggagcaccucugaua

SEQ ID NO: 1557899 - RNA, 19 nt, Homo sapiens
  misc_RNA (1)...(19): siRNA sense strand
gaaauauucacaucucuga

SEQ ID NO: 1557900 - RNA, 19 nt, Homo sapiens
  misc_RNA (1)...(19): siRNA sense strand
ggaaauaucgagcaucaga

SEQ ID NO: 1557901 - RNA, 19 nt, Homo sapiens
  misc_RNA (1)...(19): siRNA sense strand
gagcaagcaagaccuguua

SEQ ID NO: 1557902 - RNA, 19 nt, Homo sapiens
  misc_RNA (1)...(19): siRNA sense strand
ggcacuaccugauuucaaa

SEQ ID NO: 1557903 - RNA, 19 nt, Homo sapiens
  misc_RNA (1)...(19): siRNA sense strand
ggaauuugauaucucugaa

SEQ ID NO: 1557904 - RNA, 19 nt, Homo sapiens
  misc_RNA (1)...(19): siRNA sense strand
gagcaccucugauagcaau

SEQ ID NO: 1557905 - RNA, 19 nt, Homo sapiens
  misc_RNA (1)...(19): siRNA sense strand
uuacuuaacuugugagagu

SEQ ID NO: 1557906 - RNA, 19 nt, Homo sapiens
  misc_RNA (1)...(19): siRNA sense strand
ccaaagagagcaagcaaga

SEQ ID NO: 1557907 - RNA, 19 nt, Homo sapiens
  misc_RNA (1)...(19): siRNA sense strand
gaccauuugugacugcuuu

SEQ ID NO: 1557908 - RNA, 19 nt, Homo sapiens
  misc_RNA (1)...(19): siRNA sense strand
caagaggaaagauggcuua

SEQ ID NO: 1557909 - RNA, 19 nt, Homo sapiens
  misc_RNA (1)...(19): siRNA sense strand
aaauuaauccaccuccuua

SEQ ID NO: 1557910 - RNA, 19 nt, Homo sapiens
  misc_RNA (1)...(19): siRNA sense strand
acaaacaagugauccuaau

SEQ ID NO: 1557911 - RNA, 19 nt, Homo sapiens
  misc_RNA (1)...(19): siRNA sense strand
aguaaagacugggaaauau

SEQ ID NO: 1557912 - RNA, 19 nt, Homo sapiens
  misc_RNA (1)...(19): siRNA sense strand
gacccaugcugcuaguuga

SEQ ID NO: 1557913 - RNA, 19 nt, Homo sapiens
  misc_RNA (1)...(19): siRNA sense strand
uaguaaagacugggaaaua

SEQ ID NO: 1557914 - RNA, 19 nt, Homo sapiens
  misc_RNA (1)...(19): siRNA sense strand
aagcaagaccuguuagaaa

SEQ ID NO: 1557915 - RNA, 19 nt, Homo sapiens
  misc_RNA (1)...(19): siRNA sense strand
ucaaaggaauacaaacaag

SEQ ID NO: 1557916 - RNA, 19 nt, Homo sapiens
  misc_RNA (1)...(19): siRNA sense strand
gaucgggcacuaccugauu

SEQ ID NO: 1557917 - RNA, 19 nt, Homo sapiens
  misc_RNA (1)...(19): siRNA sense strand
gcaagcaagaccuguuaga

SEQ ID NO: 1557918 - RNA, 19 nt, Homo sapiens
  misc_RNA (1)...(19): siRNA sense strand
ugggaaauaucgagcauca

SEQ ID NO: 1557919 - RNA, 19 nt, Homo sapiens
  misc_RNA (1)...(19): siRNA sense strand
caagcaagaccuguuagaa

SEQ ID NO: 1557920 - RNA, 19 nt, Homo sapiens
  misc_RNA (1)...(19): siRNA sense strand
ggaauacaaacaagugauc

SEQ ID NO: 1557921 - RNA, 19 nt, Homo sapiens
  misc_RNA (1)...(19): siRNA sense strand
guggcacacuucacauuga

SEQ ID NO: 1557922 - RNA, 19 nt, Homo sapiens
  misc_RNA (1)...(19): siRNA sense strand
gacugcagccagaaguuua

SEQ ID NO: 1557923 - RNA, 19 nt, Homo sapiens
  misc_RNA (1)...(19): siRNA sense strand
ggaaaccagagaagacguu

SEQ ID NO: 1557924 - RNA, 19 nt, Homo sapiens
  misc_RNA (1)...(19): siRNA sense strand
gauuggcaccagaacauuu

SEQ ID NO: 1557925 - RNA, 19 nt, Homo sapiens
  misc_RNA (1)...(19): siRNA sense strand
caccagaacauuuucauua

SEQ ID NO: 1557926 - RNA, 19 nt, Homo sapiens
  misc_RNA (1)...(19): siRNA sense strand
guaaagacugggaaauauc

SEQ ID NO: 1557927 - RNA, 19 nt, Homo sapiens
  misc_RNA (1)...(19): siRNA sense strand
ccacaaagccagguauuac

SEQ ID NO: 1557928 - RNA, 19 nt, Homo sapiens
  misc_RNA (1)...(19): siRNA sense strand
caaacaagugauccuaaug

SEQ ID NO: 1557929 - RNA, 19 nt, Homo sapiens
  misc_RNA (1)...(19): siRNA sense strand
aaagccagguauuacaaga

SEQ ID NO: 1557930 - RNA, 19 nt, Homo sapiens
  misc_RNA (1)...(19): siRNA sense strand
gcacaggaagcucuuaaaa

SEQ ID NO: 1557931 - RNA, 19 nt, Homo sapiens
  misc_RNA (1)...(19): siRNA sense strand
ugugacugcuuuagaguau

SEQ ID NO: 1557932 - RNA, 19 nt, Homo sapiens
  misc_RNA (1)...(19): siRNA sense strand
agcaagaccuguuagaaag

SEQ ID NO: 1557933 - RNA, 19 nt, Homo sapiens
  misc_RNA (1)...(19): siRNA sense strand
caaaggaauacaaacaagu

SEQ ID NO: 1557934 - RNA, 19 nt, Homo sapiens
  misc_RNA (1)...(19): siRNA sense strand
gcgcacaggaagcucuuaa

SEQ ID NO: 1557935 - RNA, 19 nt, Homo sapiens
  misc_RNA (1)...(19): siRNA sense strand
ucugauagcaauccacaaa

SEQ ID NO: 1557936 - RNA, 19 nt, Homo sapiens
  misc_RNA (1)...(19): siRNA sense strand
gggccuggaccauuuguga

SEQ ID NO: 1557937 - RNA, 19 nt, Homo sapiens
  misc_RNA (1)...(19): siRNA sense strand
gaaauaucgagcaucagau

SEQ ID NO: 1557938 - RNA, 19 nt, Homo sapiens
  misc_RNA (1)...(19): siRNA sense strand
ccaugcugcuaguugauga

SEQ ID NO: 1557939 - RNA, 19 nt, Homo sapiens
  misc_RNA (1)...(19): siRNA sense strand
gguauuacaagaggaaaga

SEQ ID NO: 1557940 - RNA, 19 nt, Homo sapiens
  misc_RNA (1)...(19): siRNA sense strand
guuacguggugcuucugua

SEQ ID NO: 1557941 - RNA, 19 nt, Homo sapiens
  misc_RNA (1)...(19): siRNA sense strand
ugaccaauacaaccaaaga

SEQ ID NO: 1557942 - RNA, 19 nt, Homo sapiens
  misc_RNA (1)...(19): siRNA sense strand
aaaggaauacaaacaagug

SEQ ID NO: 1557943 - RNA, 19 nt, Homo sapiens
  misc_RNA (1)...(19): siRNA sense strand
cuaccugauuucaaaggaa

SEQ ID NO: 1557944 - RNA, 19 nt, Homo sapiens
  misc_RNA (1)...(19): siRNA sense strand
cucugaagaugaaauauuc

SEQ ID NO: 1557945 - RNA, 19 nt, Homo sapiens
  misc_RNA (1)...(19): siRNA sense strand
gcagccagaaguuuacuag

SEQ ID NO: 1557946 - RNA, 19 nt, Homo sapiens
  misc_RNA (1)...(19): siRNA sense strand
ucauuagguuugugaccaa

SEQ ID NO: 1557947 - RNA, 19 nt, Homo sapiens
  misc_RNA (1)...(19): siRNA sense strand
gggauuggcaccagaacau

SEQ ID NO: 1557948 - RNA, 19 nt, Homo sapiens
  misc_RNA (1)...(19): siRNA sense strand
acaaagccagguauuacaa

SEQ ID NO: 1557949 - RNA, 19 nt, Homo sapiens
  misc_RNA (1)...(19): siRNA sense strand
ugacugcagccagaaguuu

SEQ ID NO: 1557950 - RNA, 19 nt, Homo sapiens
  misc_RNA (1)...(19): siRNA sense strand
ccaccuccuuacuuaacuu

SEQ ID NO: 1557951 - RNA, 19 nt, Homo sapiens
  misc_RNA (1)...(19): siRNA sense strand
gagaugauugcagggauga

SEQ ID NO: 1557952 - RNA, 19 nt, Homo sapiens
  misc_RNA (1)...(19): siRNA sense strand
uaccugauuucaaaggaau

SEQ ID NO: 1557953 - RNA, 19 nt, Homo sapiens
  misc_RNA (1)...(19): siRNA sense strand
acaggaagcucuuaaaagg

SEQ ID NO: 1557954 - RNA, 19 nt, Homo sapiens
  misc_RNA (1)...(19): siRNA sense strand
gauggagcaccucugauag

SEQ ID NO: 1557955 - RNA, 19 nt, Homo sapiens
  misc_RNA (1)...(19): siRNA sense strand
uacaaacaagugauccuaa

SEQ ID NO: 1557956 - RNA, 19 nt, Homo sapiens
  misc_RNA (1)...(19): siRNA sense strand
gaugauugcagggaugaug

SEQ ID NO: 1557957 - RNA, 19 nt, Homo sapiens
  misc_RNA (1)...(19): siRNA sense strand
aaucaagcauuccgguuac

SEQ ID NO: 1557958 - RNA, 19 nt, Homo sapiens
  misc_RNA (1)...(19): siRNA sense strand
aaacaagugauccuaaugc

SEQ ID NO: 1557959 - RNA, 19 nt, Homo sapiens
  misc_RNA (1)...(19): siRNA sense strand
agccagaaguuuacuagag

SEQ ID NO: 1557960 - RNA, 19 nt, Homo sapiens
  misc_RNA (1)...(19): siRNA sense strand
ggauuggcaccagaacauu

SEQ ID NO: 1557961 - RNA, 19 nt, Homo sapiens
  misc_RNA (1)...(19): siRNA sense strand
ugauagcaauccacaaagc

SEQ ID NO: 1557962 - RNA, 19 nt, Homo sapiens
  misc_RNA (1)...(19): siRNA sense strand
gcaagaccuguuagaaagg

SEQ ID NO: 1557963 - RNA, 19 nt, Homo sapiens
  misc_RNA (1)...(19): siRNA sense strand
uuaauccaccuccuuacuu

SEQ ID NO: 1557964 - RNA, 19 nt, Homo sapiens
  misc_RNA (1)...(19): siRNA sense strand
ccagguauuacaagaggaa

SEQ ID NO: 1557965 - RNA, 19 nt, Homo sapiens
  misc_RNA (1)...(19): siRNA sense strand
ggaagcucuuaaaagguua

SEQ ID NO: 1557966 - RNA, 19 nt, Homo sapiens
  misc_RNA (1)...(19): siRNA sense strand
uaaagacugggaaauaucg

SEQ ID NO: 1557967 - RNA, 19 nt, Homo sapiens
  misc_RNA (1)...(19): siRNA sense strand
gggcacuaccugauuucaa

SEQ ID NO: 1557968 - RNA, 19 nt, Homo sapiens
  misc_RNA (1)...(19): siRNA sense strand
ugacugcuuuagaguaugc

SEQ ID NO: 1557969 - RNA, 19 nt, Homo sapiens
  misc_RNA (1)...(19): siRNA sense strand
ccuccuuacuuaacuugug

SEQ ID NO: 1557970 - RNA, 19 nt, Homo sapiens
  misc_RNA (1)...(19): siRNA sense strand
gaauuugauaucucugaag

SEQ ID NO: 1557971 - RNA, 19 nt, Homo sapiens
  misc_RNA (1)...(19): siRNA sense strand
caugauaggagaugauugc

SEQ ID NO: 1557972 - RNA, 19 nt, Homo sapiens
  misc_RNA (1)...(19): siRNA sense strand
cuccuuacuuaacuuguga

SEQ ID NO: 1557973 - RNA, 19 nt, Homo sapiens
  misc_RNA (1)...(19): siRNA sense strand
auacaaacaagugauccua

SEQ ID NO: 1557974 - RNA, 19 nt, Homo sapiens
  misc_RNA (1)...(19): siRNA sense strand
cacaaagccagguauuaca

SEQ ID NO: 1557975 - RNA, 19 nt, Homo sapiens
  misc_RNA (1)...(19): siRNA sense strand
uccacaaagccagguauua

SEQ ID NO: 1557976 - RNA, 19 nt, Homo sapiens
  misc_RNA (1)...(19): siRNA sense strand
uguuagaaagguugagaaa

SEQ ID NO: 1557977 - RNA, 19 nt, Homo sapiens
  misc_RNA (1)...(19): siRNA sense strand
aggaagcucuuaaaagguu

SEQ ID NO: 1557978 - RNA, 19 nt, Homo sapiens
  misc_RNA (1)...(19): siRNA sense strand
uugcagggaugauguuggu

SEQ ID NO: 1557979 - RNA, 19 nt, Homo sapiens
  misc_RNA (1)...(19): siRNA sense strand
uuagguuugugaccaauac

SEQ ID NO: 1557980 - RNA, 19 nt, Homo sapiens
  misc_RNA (1)...(19): siRNA sense strand
caaagccagguauuacaag

SEQ ID NO: 1557981 - RNA, 19 nt, Homo sapiens
  misc_RNA (1)...(19): siRNA sense strand
ggauauggcucuggcuuug

SEQ ID NO: 1557982 - RNA, 19 nt, Homo sapiens
  misc_RNA (1)...(19): siRNA sense strand
ggauauggcucuggcuuug

SEQ ID NO: 1557983 - RNA, 19 nt, Homo sapiens
  misc_RNA (1)...(19): siRNA sense strand
ggauauggcucuggcuuug

SEQ ID NO: 1557984 - RNA, 19 nt, Homo sapiens
  misc_RNA (1)...(19): siRNA sense strand
caauggaggauacggauuc

SEQ ID NO: 1557985 - RNA, 19 nt, Homo sapiens
  misc_RNA (1)...(19): siRNA sense strand
gcuauggaggcuacggaua

SEQ ID NO: 1557986 - RNA, 19 nt, Homo sapiens
  misc_RNA (1)...(19): siRNA sense strand
cuauggaggcuacggauau

SEQ ID NO: 1557987 - RNA, 19 nt, Homo sapiens
  misc_RNA (1)...(19): siRNA sense strand
caucguacaauggaggaua

SEQ ID NO: 1557988 - RNA, 19 nt, Homo sapiens
  misc_RNA (1)...(19): siRNA sense strand
ggcuauggcuguggaugug

SEQ ID NO: 1557989 - RNA, 19 nt, Homo sapiens
  misc_RNA (1)...(19): siRNA sense strand
uauggaggcuacggauaug

SEQ ID NO: 1557990 - RNA, 19 nt, Homo sapiens
  misc_RNA (1)...(19): siRNA sense strand
auacggauucucuggcuuu

SEQ ID NO: 1557991 - RNA, 19 nt, Homo sapiens
  misc_RNA (1)...(19): siRNA sense strand
cggauucucuggcuuuuau

SEQ ID NO: 1557992 - RNA, 19 nt, Homo sapiens
  misc_RNA (1)...(19): siRNA sense strand
ggccugggcuauggcuaug

SEQ ID NO: 1557993 - RNA, 19 nt, Homo sapiens
  misc_RNA (1)...(19): siRNA sense strand
cggauauggcucuggcuuu

SEQ ID NO: 1557994 - RNA, 19 nt, Homo sapiens
  misc_RNA (1)...(19): siRNA sense strand
cggauauggcucuggcuuu

SEQ ID NO: 1557995 - RNA, 19 nt, Homo sapiens
  misc_RNA (1)...(19): siRNA sense strand
cggauauggcucuggcuuu

SEQ ID NO: 1557996 - RNA, 19 nt, Homo sapiens
  misc_RNA (1)...(19): siRNA sense strand
uuuggaagcuacggauaug

SEQ ID NO: 1557997 - RNA, 19 nt, Homo sapiens
  misc_RNA (1)...(19): siRNA sense strand
ggacauaaguggauuaauu

SEQ ID NO: 1557998 - RNA, 19 nt, Homo sapiens
  misc_RNA (1)...(19): siRNA sense strand
ggaagaaacuggcaacuac

SEQ ID NO: 1557999 - RNA, 19 nt, Homo sapiens
  misc_RNA (1)...(19): siRNA sense strand
gcuaugaacuucuuauaca

SEQ ID NO: 1558000 - RNA, 19 nt, Homo sapiens
  misc_RNA (1)...(19): siRNA sense strand
gaauagcuaucauugacuu

SEQ ID NO: 1558001 - RNA, 19 nt, Homo sapiens
  misc_RNA (1)...(19): siRNA sense strand
ggacgaaaauucccuauga

SEQ ID NO: 1558002 - RNA, 19 nt, Homo sapiens
  misc_RNA (1)...(19): siRNA sense strand
ucacugcaguuucuacuuu

SEQ ID NO: 1558003 - RNA, 19 nt, Homo sapiens
  misc_RNA (1)...(19): siRNA sense strand
gaguggucguuucuaauua

SEQ ID NO: 1558004 - RNA, 19 nt, Homo sapiens
  misc_RNA (1)...(19): siRNA sense strand
ugacaacgcaauauguuua

SEQ ID NO: 1558005 - RNA, 19 nt, Homo sapiens
  misc_RNA (1)...(19): siRNA sense strand
gagcuugcuuugccuauau

SEQ ID NO: 1558006 - RNA, 19 nt, Homo sapiens
  misc_RNA (1)...(19): siRNA sense strand
gcugucugcuggucuguua

SEQ ID NO: 1558007 - RNA, 19 nt, Homo sapiens
  misc_RNA (1)...(19): siRNA sense strand
ucuagugucuacauucaua

SEQ ID NO: 1558008 - RNA, 19 nt, Homo sapiens
  misc_RNA (1)...(19): siRNA sense strand
ggagcuugcuuugccuaua

SEQ ID NO: 1558009 - RNA, 19 nt, Homo sapiens
  misc_RNA (1)...(19): siRNA sense strand
caagaagaauccagugaag

SEQ ID NO: 1558010 - RNA, 19 nt, Homo sapiens
  misc_RNA (1)...(19): siRNA sense strand
gauugcaucuaccuucauu

SEQ ID NO: 1558011 - RNA, 19 nt, Homo sapiens
  misc_RNA (1)...(19): siRNA sense strand
ggucuagugucuacauuca

SEQ ID NO: 1558012 - RNA, 19 nt, Homo sapiens
  misc_RNA (1)...(19): siRNA sense strand
gaaugcuucugguaagaga

SEQ ID NO: 1558013 - RNA, 19 nt, Homo sapiens
  misc_RNA (1)...(19): siRNA sense strand
ggaaugagggaagcuauga

SEQ ID NO: 1558014 - RNA, 19 nt, Homo sapiens
  misc_RNA (1)...(19): siRNA sense strand
cuauauaguugaucagugu

SEQ ID NO: 1558015 - RNA, 19 nt, Homo sapiens
  misc_RNA (1)...(19): siRNA sense strand
caagguacccuguuugcuu

SEQ ID NO: 1558016 - RNA, 19 nt, Homo sapiens
  misc_RNA (1)...(19): siRNA sense strand
gacauaaguggauuaauuc

SEQ ID NO: 1558017 - RNA, 19 nt, Homo sapiens
  misc_RNA (1)...(19): siRNA sense strand
gggaagaaacuggcaacua

SEQ ID NO: 1558018 - RNA, 19 nt, Homo sapiens
  misc_RNA (1)...(19): siRNA sense strand
uuaccgaacuuacaugcuu

SEQ ID NO: 1558019 - RNA, 19 nt, Homo sapiens
  misc_RNA (1)...(19): siRNA sense strand
gaaacuggcaacuacacuu

SEQ ID NO: 1558020 - RNA, 19 nt, Homo sapiens
  misc_RNA (1)...(19): siRNA sense strand
ucaccacucugcuggaaug

SEQ ID NO: 1558021 - RNA, 19 nt, Homo sapiens
  misc_RNA (1)...(19): siRNA sense strand
gcaauuauaccacauuuug

SEQ ID NO: 1558022 - RNA, 19 nt, Homo sapiens
  misc_RNA (1)...(19): siRNA sense strand
gugucuacauucauacuuu

SEQ ID NO: 1558023 - RNA, 19 nt, Homo sapiens
  misc_RNA (1)...(19): siRNA sense strand
aaagaguguucaucucaga

SEQ ID NO: 1558024 - RNA, 19 nt, Homo sapiens
  misc_RNA (1)...(19): siRNA sense strand
caauauguuuaucggagaa

SEQ ID NO: 1558025 - RNA, 19 nt, Homo sapiens
  misc_RNA (1)...(19): siRNA sense strand
gcuggucuguuacuacuuc

SEQ ID NO: 1558026 - RNA, 19 nt, Homo sapiens
  misc_RNA (1)...(19): siRNA sense strand
ucuguuugcuuugcuauuu

SEQ ID NO: 1558027 - RNA, 19 nt, Homo sapiens
  misc_RNA (1)...(19): siRNA sense strand
guuuggcucuguuugcuuu

SEQ ID NO: 1558028 - RNA, 19 nt, Homo sapiens
  misc_RNA (1)...(19): siRNA sense strand
gcaauauuucugaguguga

SEQ ID NO: 1558029 - RNA, 19 nt, Homo sapiens
  misc_RNA (1)...(19): siRNA sense strand
gagaauaugggaagaaacu

SEQ ID NO: 1558030 - RNA, 19 nt, Homo sapiens
  misc_RNA (1)...(19): siRNA sense strand
cggagaauaugggaagaaa

SEQ ID NO: 1558031 - RNA, 19 nt, Homo sapiens
  misc_RNA (1)...(19): siRNA sense strand
cagccacuguugcuuggua

SEQ ID NO: 1558032 - RNA, 19 nt, Homo sapiens
  misc_RNA (1)...(19): siRNA sense strand
ggacugucaucuggcuauu

SEQ ID NO: 1558033 - RNA, 19 nt, Homo sapiens
  misc_RNA (1)...(19): siRNA sense strand
gaaccugccauuuuccuua

SEQ ID NO: 1558034 - RNA, 19 nt, Homo sapiens
  misc_RNA (1)...(19): siRNA sense strand
ugaguggucguuucuaauu

SEQ ID NO: 1558035 - RNA, 19 nt, Homo sapiens
  misc_RNA (1)...(19): siRNA sense strand
aaacuggcaacuacacuuu

SEQ ID NO: 1558036 - RNA, 19 nt, Homo sapiens
  misc_RNA (1)...(19): siRNA sense strand
ggaggagucacugcaguuu

SEQ ID NO: 1558037 - RNA, 19 nt, Homo sapiens
  misc_RNA (1)...(19): siRNA sense strand
gaauguuacuaugucaugu

SEQ ID NO: 1558038 - RNA, 19 nt, Homo sapiens
  misc_RNA (1)...(19): siRNA sense strand
caauauuucugagugugaa

SEQ ID NO: 1558039 - RNA, 19 nt, Homo sapiens
  misc_RNA (1)...(19): siRNA sense strand
gaagaaacuggcaacuaca

SEQ ID NO: 1558040 - RNA, 19 nt, Homo sapiens
  misc_RNA (1)...(19): siRNA sense strand
guucuacgguccauguugu

SEQ ID NO: 1558041 - RNA, 19 nt, Homo sapiens
  misc_RNA (1)...(19): siRNA sense strand
ccacucugcuggaaugaag

SEQ ID NO: 1558042 - RNA, 19 nt, Homo sapiens
  misc_RNA (1)...(19): siRNA sense strand
ucgaauagcuaucauugac

SEQ ID NO: 1558043 - RNA, 19 nt, Homo sapiens
  misc_RNA (1)...(19): siRNA sense strand
uaccuucauuggugcauuu

SEQ ID NO: 1558044 - RNA, 19 nt, Homo sapiens
  misc_RNA (1)...(19): siRNA sense strand
gaagaauccagugaagaug

SEQ ID NO: 1558045 - RNA, 19 nt, Homo sapiens
  misc_RNA (1)...(19): siRNA sense strand
caucucagaauguuacuau

SEQ ID NO: 1558046 - RNA, 19 nt, Homo sapiens
  misc_RNA (1)...(19): siRNA sense strand
uggcaauuauaccacauuu

SEQ ID NO: 1558047 - RNA, 19 nt, Homo sapiens
  misc_RNA (1)...(19): siRNA sense strand
gugcauuugcuaugacuuu

SEQ ID NO: 1558048 - RNA, 19 nt, Homo sapiens
  misc_RNA (1)...(19): siRNA sense strand
caucugauagcaauauuuc

SEQ ID NO: 1558049 - RNA, 19 nt, Homo sapiens
  misc_RNA (1)...(19): siRNA sense strand
agaagaauccagugaagau

SEQ ID NO: 1558050 - RNA, 19 nt, Homo sapiens
  misc_RNA (1)...(19): siRNA sense strand
uuugaguggucguuucuaa

SEQ ID NO: 1558051 - RNA, 19 nt, Homo sapiens
  misc_RNA (1)...(19): siRNA sense strand
ggacuuguuacuggacuaa

SEQ ID NO: 1558052 - RNA, 19 nt, Homo sapiens
  misc_RNA (1)...(19): siRNA sense strand
ccacugacaacgcaauaug

SEQ ID NO: 1558053 - RNA, 19 nt, Homo sapiens
  misc_RNA (1)...(19): siRNA sense strand
ccaggaggaaguucagaaa

SEQ ID NO: 1558054 - RNA, 19 nt, Homo sapiens
  misc_RNA (1)...(19): siRNA sense strand
gauggacauaaguggauua

SEQ ID NO: 1558055 - RNA, 19 nt, Homo sapiens
  misc_RNA (1)...(19): siRNA sense strand
uggauuaauuccuggucua

SEQ ID NO: 1558056 - RNA, 19 nt, Homo sapiens
  misc_RNA (1)...(19): siRNA sense strand
gaaugagggaagcuaugaa

SEQ ID NO: 1558057 - RNA, 19 nt, Homo sapiens
  misc_RNA (1)...(19): siRNA sense strand
ucagaauguuacuauguca

SEQ ID NO: 1558058 - RNA, 19 nt, Homo sapiens
  misc_RNA (1)...(19): siRNA sense strand
ggagauccagugaaagagu

SEQ ID NO: 1558059 - RNA, 19 nt, Homo sapiens
  misc_RNA (1)...(19): siRNA sense strand
acaagaagaauccagugaa

SEQ ID NO: 1558060 - RNA, 19 nt, Homo sapiens
  misc_RNA (1)...(19): siRNA sense strand
ugagggaagcuaugaacuu

SEQ ID NO: 1558061 - RNA, 19 nt, Homo sapiens
  misc_RNA (1)...(19): siRNA sense strand
guacccuguuugcuuguau

SEQ ID NO: 1558062 - RNA, 19 nt, Homo sapiens
  misc_RNA (1)...(19): siRNA sense strand
gaguguucaucucagaaug

SEQ ID NO: 1558063 - RNA, 19 nt, Homo sapiens
  misc_RNA (1)...(19): siRNA sense strand
cuuagugcauuugcuauga

SEQ ID NO: 1558064 - RNA, 19 nt, Homo sapiens
  misc_RNA (1)...(19): siRNA sense strand
gaauuuacucagccacugu

SEQ ID NO: 1558065 - RNA, 19 nt, Homo sapiens
  misc_RNA (1)...(19): siRNA sense strand
ugacaggaauggcuaugac

SEQ ID NO: 1558066 - RNA, 19 nt, Homo sapiens
  misc_RNA (1)...(19): siRNA sense strand
uaccgaacuuacaugcuuu

SEQ ID NO: 1558067 - RNA, 19 nt, Homo sapiens
  misc_RNA (1)...(19): siRNA sense strand
gccuuuccauuccagcuuu

SEQ ID NO: 1558068 - RNA, 19 nt, Homo sapiens
  misc_RNA (1)...(19): siRNA sense strand
gacaacgcaauauguuuau

SEQ ID NO: 1558069 - RNA, 19 nt, Homo sapiens
  misc_RNA (1)...(19): siRNA sense strand
uagcaauauuucugagugu

SEQ ID NO: 1558070 - RNA, 19 nt, Homo sapiens
  misc_RNA (1)...(19): siRNA sense strand
guugaucaguguaaagaac

SEQ ID NO: 1558071 - RNA, 19 nt, Homo sapiens
  misc_RNA (1)...(19): siRNA sense strand
gccaucagucuauguguug

SEQ ID NO: 1558072 - RNA, 19 nt, Homo sapiens
  misc_RNA (1)...(19): siRNA sense strand
uacgguccauguugucaaa

SEQ ID NO: 1558073 - RNA, 19 nt, Homo sapiens
  misc_RNA (1)...(19): siRNA sense strand
ggucguuucuaauuauugc

SEQ ID NO: 1558074 - RNA, 19 nt, Homo sapiens
  misc_RNA (1)...(19): siRNA sense strand
aucauugacuuucuacuug

SEQ ID NO: 1558075 - RNA, 19 nt, Homo sapiens
  misc_RNA (1)...(19): siRNA sense strand
cugugucucuugcuguuaa

SEQ ID NO: 1558076 - RNA, 19 nt, Homo sapiens
  misc_RNA (1)...(19): siRNA sense strand
uuaccacgaugacaggaau

SEQ ID NO: 1558077 - RNA, 19 nt, Homo sapiens
  misc_RNA (1)...(19): siRNA sense strand
ucggagauccagugaaaga

SEQ ID NO: 1558078 - RNA, 19 nt, Homo sapiens
  misc_RNA (1)...(19): siRNA sense strand
gcauuugcuaugacuuuga

SEQ ID NO: 1558079 - RNA, 19 nt, Homo sapiens
  misc_RNA (1)...(19): siRNA sense strand
gguacccuguuugcuugua

SEQ ID NO: 1558080 - RNA, 19 nt, Homo sapiens
  misc_RNA (1)...(19): siRNA sense strand
guggucguuucuaauuauu

SEQ ID NO: 1558081 - RNA, 19 nt, Homo sapiens
  misc_RNA (1)...(19): siRNA sense strand
gcucuugcaaccagcguuu

SEQ ID NO: 1558082 - RNA, 19 nt, Homo sapiens
  misc_RNA (1)...(19): siRNA sense strand
aguggucguuucuaauuau

SEQ ID NO: 1558083 - RNA, 19 nt, Homo sapiens
  misc_RNA (1)...(19): siRNA sense strand
aacaaaagcagcccaauuu

SEQ ID NO: 1558084 - RNA, 19 nt, Homo sapiens
  misc_RNA (1)...(19): siRNA sense strand
gguuauggaucagcuuugg

SEQ ID NO: 1558085 - RNA, 19 nt, Homo sapiens
  misc_RNA (1)...(19): siRNA sense strand
auuaauuccuggucuagug

SEQ ID NO: 1558086 - RNA, 19 nt, Homo sapiens
  misc_RNA (1)...(19): siRNA sense strand
uuagagagcuagguuuuga

SEQ ID NO: 1558087 - RNA, 19 nt, Homo sapiens
  misc_RNA (1)...(19): siRNA sense strand
guguucaucucagaauguu

SEQ ID NO: 1558088 - RNA, 19 nt, Homo sapiens
  misc_RNA (1)...(19): siRNA sense strand
ucucagaauguuacuaugu

SEQ ID NO: 1558089 - RNA, 19 nt, Homo sapiens
  misc_RNA (1)...(19): siRNA sense strand
gucuauguguugucaagug

SEQ ID NO: 1558090 - RNA, 19 nt, Homo sapiens
  misc_RNA (1)...(19): siRNA sense strand
uugcuuugccuauauaguu

SEQ ID NO: 1558091 - RNA, 19 nt, Homo sapiens
  misc_RNA (1)...(19): siRNA sense strand
gucucuugcuguuaauuug

SEQ ID NO: 1558092 - RNA, 19 nt, Homo sapiens
  misc_RNA (1)...(19): siRNA sense strand
uguagaaccugccauuuuc

SEQ ID NO: 1558093 - RNA, 19 nt, Homo sapiens
  misc_RNA (1)...(19): siRNA sense strand
acaauucgaauagcuauca

SEQ ID NO: 1558094 - RNA, 19 nt, Homo sapiens
  misc_RNA (1)...(19): siRNA sense strand
ugaccgcguuugccaguac

SEQ ID NO: 1558095 - RNA, 19 nt, Homo sapiens
  misc_RNA (1)...(19): siRNA sense strand
uacaagaagaauccaguga

SEQ ID NO: 1558096 - RNA, 19 nt, Homo sapiens
  misc_RNA (1)...(19): siRNA sense strand
aggagucacugcaguuucu

SEQ ID NO: 1558097 - RNA, 19 nt, Homo sapiens
  misc_RNA (1)...(19): siRNA sense strand
gaaagaacuugcauuaaga

SEQ ID NO: 1558098 - RNA, 19 nt, Homo sapiens
  misc_RNA (1)...(19): siRNA sense strand
gcaaacaccauuauucuua

SEQ ID NO: 1558099 - RNA, 19 nt, Homo sapiens
  misc_RNA (1)...(19): siRNA sense strand
gcgacuauaucacaaauua

SEQ ID NO: 1558100 - RNA, 19 nt, Homo sapiens
  misc_RNA (1)...(19): siRNA sense strand
ccaaaguccucuccaaaua

SEQ ID NO: 1558101 - RNA, 19 nt, Homo sapiens
  misc_RNA (1)...(19): siRNA sense strand
gaucaucgcuggucaguuc

SEQ ID NO: 1558102 - RNA, 19 nt, Homo sapiens
  misc_RNA (1)...(19): siRNA sense strand
gagaaaugcuacuugcuaa

SEQ ID NO: 1558103 - RNA, 19 nt, Homo sapiens
  misc_RNA (1)...(19): siRNA sense strand
ucaaugaguugcagaauga

SEQ ID NO: 1558104 - RNA, 19 nt, Homo sapiens
  misc_RNA (1)...(19): siRNA sense strand
agagagaacuggauauaaa

SEQ ID NO: 1558105 - RNA, 19 nt, Homo sapiens
  misc_RNA (1)...(19): siRNA sense strand
agaaagcccugaauaaguu

SEQ ID NO: 1558106 - RNA, 19 nt, Homo sapiens
  misc_RNA (1)...(19): siRNA sense strand
guaaagaugguguagauuu

SEQ ID NO: 1558107 - RNA, 19 nt, Homo sapiens
  misc_RNA (1)...(19): siRNA sense strand
gaaugaaauugacagagaa

SEQ ID NO: 1558108 - RNA, 19 nt, Homo sapiens
  misc_RNA (1)...(19): siRNA sense strand
gaaagugaacuauuuagga

SEQ ID NO: 1558109 - RNA, 19 nt, Homo sapiens
  misc_RNA (1)...(19): siRNA sense strand
ccaaauaggcaccgauuaa

SEQ ID NO: 1558110 - RNA, 19 nt, Homo sapiens
  misc_RNA (1)...(19): siRNA sense strand
gcaaggagaggaagaagaa

SEQ ID NO: 1558111 - RNA, 19 nt, Homo sapiens
  misc_RNA (1)...(19): siRNA sense strand
agaaagaacuugcauuaag

SEQ ID NO: 1558112 - RNA, 19 nt, Homo sapiens
  misc_RNA (1)...(19): siRNA sense strand
ugaaugaaauugacagaga

SEQ ID NO: 1558113 - RNA, 19 nt, Homo sapiens
  misc_RNA (1)...(19): siRNA sense strand
ccagaagaauauccuuuaa

SEQ ID NO: 1558114 - RNA, 19 nt, Homo sapiens
  misc_RNA (1)...(19): siRNA sense strand
gaaagagaagaacuugaua

SEQ ID NO: 1558115 - RNA, 19 nt, Homo sapiens
  misc_RNA (1)...(19): siRNA sense strand
ucaaagaacgcuuaagaaa

SEQ ID NO: 1558116 - RNA, 19 nt, Homo sapiens
  misc_RNA (1)...(19): siRNA sense strand
caaagaaacaguauggaaa

SEQ ID NO: 1558117 - RNA, 19 nt, Homo sapiens
  misc_RNA (1)...(19): siRNA sense strand
acagagaacuccaagauuc

SEQ ID NO: 1558118 - RNA, 19 nt, Homo sapiens
  misc_RNA (1)...(19): siRNA sense strand
agagaaagaacuugcauua

SEQ ID NO: 1558119 - RNA, 19 nt, Homo sapiens
  misc_RNA (1)...(19): siRNA sense strand
ggagagagaacuggauaua

SEQ ID NO: 1558120 - RNA, 19 nt, Homo sapiens
  misc_RNA (1)...(19): siRNA sense strand
ggaaagagaagaacuugau

SEQ ID NO: 1558121 - RNA, 19 nt, Homo sapiens
  misc_RNA (1)...(19): siRNA sense strand
gcagagaucaagaacauga

SEQ ID NO: 1558122 - RNA, 19 nt, Homo sapiens
  misc_RNA (1)...(19): siRNA sense strand
cagcagagaucaagaacau

SEQ ID NO: 1558123 - RNA, 19 nt, Homo sapiens
  misc_RNA (1)...(19): siRNA sense strand
ucaagaacaugaugaagau

SEQ ID NO: 1558124 - RNA, 19 nt, Homo sapiens
  misc_RNA (1)...(19): siRNA sense strand
aaacuacacucccgagaga

SEQ ID NO: 1558125 - RNA, 19 nt, Homo sapiens
  misc_RNA (1)...(19): siRNA sense strand
ugaugaagaugaaggcuuu

SEQ ID NO: 1558126 - RNA, 19 nt, Homo sapiens
  misc_RNA (1)...(19): siRNA sense strand
caaaguccucuccaaauaa

SEQ ID NO: 1558127 - RNA, 19 nt, Homo sapiens
  misc_RNA (1)...(19): siRNA sense strand
gacauugacccucuaaauu

SEQ ID NO: 1558128 - RNA, 19 nt, Homo sapiens
  misc_RNA (1)...(19): siRNA sense strand
gagaaagcccugaauaagu

SEQ ID NO: 1558129 - RNA, 19 nt, Homo sapiens
  misc_RNA (1)...(19): siRNA sense strand
cagcagaguuaaaguuaga

SEQ ID NO: 1558130 - RNA, 19 nt, Homo sapiens
  misc_RNA (1)...(19): siRNA sense strand
gaauuaaggagcuaucgaa

SEQ ID NO: 1558131 - RNA, 19 nt, Homo sapiens
  misc_RNA (1)...(19): siRNA sense strand
aagaaagacugaagagaga

SEQ ID NO: 1558132 - RNA, 19 nt, Homo sapiens
  misc_RNA (1)...(19): siRNA sense strand
aaaguccucuccaaauaaa

SEQ ID NO: 1558133 - RNA, 19 nt, Homo sapiens
  misc_RNA (1)...(19): siRNA sense strand
gagaaagaacuugcauuaa

SEQ ID NO: 1558134 - RNA, 19 nt, Homo sapiens
  misc_RNA (1)...(19): siRNA sense strand
gaagaagaaagacugaaga

SEQ ID NO: 1558135 - RNA, 19 nt, Homo sapiens
  misc_RNA (1)...(19): siRNA sense strand
gaagaacuccaugucguaa

SEQ ID NO: 1558136 - RNA, 19 nt, Homo sapiens
  misc_RNA (1)...(19): siRNA sense strand
ggagaaagcccugaauaag

SEQ ID NO: 1558137 - RNA, 19 nt, Homo sapiens
  misc_RNA (1)...(19): siRNA sense strand
ggucagaauucaggaaaug

SEQ ID NO: 1558138 - RNA, 19 nt, Homo sapiens
  misc_RNA (1)...(19): siRNA sense strand
gccagaagaauauccuuua

SEQ ID NO: 1558139 - RNA, 19 nt, Homo sapiens
  misc_RNA (1)...(19): siRNA sense strand
gagaaaaggguaaaagaua

SEQ ID NO: 1558140 - RNA, 19 nt, Homo sapiens
  misc_RNA (1)...(19): siRNA sense strand
gauuacagcacucaaagaa

SEQ ID NO: 1558141 - RNA, 19 nt, Homo sapiens
  misc_RNA (1)...(19): siRNA sense strand
aaacauacagguucucuga

SEQ ID NO: 1558142 - RNA, 19 nt, Homo sapiens
  misc_RNA (1)...(19): siRNA sense strand
gagaagaauuaaggagcua

SEQ ID NO: 1558143 - RNA, 19 nt, Homo sapiens
  misc_RNA (1)...(19): siRNA sense strand
ggagguacagcgacuauau

SEQ ID NO: 1558144 - RNA, 19 nt, Homo sapiens
  misc_RNA (1)...(19): siRNA sense strand
acauugacccucuaaauuu

SEQ ID NO: 1558145 - RNA, 19 nt, Homo sapiens
  misc_RNA (1)...(19): siRNA sense strand
gagagagaacuggauauaa

SEQ ID NO: 1558146 - RNA, 19 nt, Homo sapiens
  misc_RNA (1)...(19): siRNA sense strand
caaauaggcaccgauuaaa

SEQ ID NO: 1558147 - RNA, 19 nt, Homo sapiens
  misc_RNA (1)...(19): siRNA sense strand
ggaagaaguuuuaauccaa

SEQ ID NO: 1558148 - RNA, 19 nt, Homo sapiens
  misc_RNA (1)...(19): siRNA sense strand
ucagagaggucaaauccau

SEQ ID NO: 1558149 - RNA, 19 nt, Homo sapiens
  misc_RNA (1)...(19): siRNA sense strand
gaaagacugaagagagaaa

SEQ ID NO: 1558150 - RNA, 19 nt, Homo sapiens
  misc_RNA (1)...(19): siRNA sense strand
caggacaucuuacuuugga

SEQ ID NO: 1558151 - RNA, 19 nt, Homo sapiens
  misc_RNA (1)...(19): siRNA sense strand
agaaagaacgggcaacuga

SEQ ID NO: 1558152 - RNA, 19 nt, Homo sapiens
  misc_RNA (1)...(19): siRNA sense strand
uaguaaagaugguguagau

SEQ ID NO: 1558153 - RNA, 19 nt, Homo sapiens
  misc_RNA (1)...(19): siRNA sense strand
guacagcgacuauaucaca

SEQ ID NO: 1558154 - RNA, 19 nt, Homo sapiens
  misc_RNA (1)...(19): siRNA sense strand
gagagccacuucggaaaga

SEQ ID NO: 1558155 - RNA, 19 nt, Homo sapiens
  misc_RNA (1)...(19): siRNA sense strand
gaauaaaggcagcagagau

SEQ ID NO: 1558156 - RNA, 19 nt, Homo sapiens
  misc_RNA (1)...(19): siRNA sense strand
ccaaagaaacaguauggaa

SEQ ID NO: 1558157 - RNA, 19 nt, Homo sapiens
  misc_RNA (1)...(19): siRNA sense strand
gaaccaggacaucuuacuu

SEQ ID NO: 1558158 - RNA, 19 nt, Homo sapiens
  misc_RNA (1)...(19): siRNA sense strand
aaaagcagcugauucugua

SEQ ID NO: 1558159 - RNA, 19 nt, Homo sapiens
  misc_RNA (1)...(19): siRNA sense strand
cuaauuugauggaacaguu

SEQ ID NO: 1558160 - RNA, 19 nt, Homo sapiens
  misc_RNA (1)...(19): siRNA sense strand
gaagagagaaaugcuacuu

SEQ ID NO: 1558161 - RNA, 19 nt, Homo sapiens
  misc_RNA (1)...(19): siRNA sense strand
gggauucuaaacccaauua

SEQ ID NO: 1558162 - RNA, 19 nt, Homo sapiens
  misc_RNA (1)...(19): siRNA sense strand
uaucugaacuccaggucaa

SEQ ID NO: 1558163 - RNA, 19 nt, Homo sapiens
  misc_RNA (1)...(19): siRNA sense strand
ccucagagagauuauuuaa

SEQ ID NO: 1558164 - RNA, 19 nt, Homo sapiens
  misc_RNA (1)...(19): siRNA sense strand
guacugaucaagaaagaga

SEQ ID NO: 1558165 - RNA, 19 nt, Homo sapiens
  misc_RNA (1)...(19): siRNA sense strand
ggacaaaauuuuccuuaca

SEQ ID NO: 1558166 - RNA, 19 nt, Homo sapiens
  misc_RNA (1)...(19): siRNA sense strand
uacagaaacugaaagagau

SEQ ID NO: 1558167 - RNA, 19 nt, Homo sapiens
  misc_RNA (1)...(19): siRNA sense strand
guagcuacgugccuucguu

SEQ ID NO: 1558168 - RNA, 19 nt, Homo sapiens
  misc_RNA (1)...(19): siRNA sense strand
gacaguugcuugcugaaag

SEQ ID NO: 1558169 - RNA, 19 nt, Homo sapiens
  misc_RNA (1)...(19): siRNA sense strand
cagaauucaggaaauguua

SEQ ID NO: 1558170 - RNA, 19 nt, Homo sapiens
  misc_RNA (1)...(19): siRNA sense strand
uuacagaaacugaaagaga

SEQ ID NO: 1558171 - RNA, 19 nt, Homo sapiens
  misc_RNA (1)...(19): siRNA sense strand
ugacagagaacuccaagau

SEQ ID NO: 1558172 - RNA, 19 nt, Homo sapiens
  misc_RNA (1)...(19): siRNA sense strand
gaagguaccaacuaggaau

SEQ ID NO: 1558173 - RNA, 19 nt, Homo sapiens
  misc_RNA (1)...(19): siRNA sense strand
caaacaccauuauucuuac

SEQ ID NO: 1558174 - RNA, 19 nt, Homo sapiens
  misc_RNA (1)...(19): siRNA sense strand
gguaaaagauacagaaagu

SEQ ID NO: 1558175 - RNA, 19 nt, Homo sapiens
  misc_RNA (1)...(19): siRNA sense strand
gaagaaguagcacugagau

SEQ ID NO: 1558176 - RNA, 19 nt, Homo sapiens
  misc_RNA (1)...(19): siRNA sense strand
gacgauaaaccagcaguaa

SEQ ID NO: 1558177 - RNA, 19 nt, Homo sapiens
  misc_RNA (1)...(19): siRNA sense strand
ggaagaagaaagacugaag

SEQ ID NO: 1558178 - RNA, 19 nt, Homo sapiens
  misc_RNA (1)...(19): siRNA sense strand
caacuaggaauguauccaa

SEQ ID NO: 1558179 - RNA, 19 nt, Homo sapiens
  misc_RNA (1)...(19): siRNA sense strand
ugaagaacuccaugucgua

SEQ ID NO: 1558180 - RNA, 19 nt, Homo sapiens
  misc_RNA (1)...(19): siRNA sense strand
uugcagaccuguguacaaa

SEQ ID NO: 1558181 - RNA, 19 nt, Homo sapiens
  misc_RNA (1)...(19): siRNA sense strand
gcacucaaagaacgcuuaa

SEQ ID NO: 1558182 - RNA, 19 nt, Homo sapiens
  misc_RNA (1)...(19): siRNA sense strand
gcagcaccauuuccuccaa

SEQ ID NO: 1558183 - RNA, 19 nt, Homo sapiens
  misc_RNA (1)...(19): siRNA sense strand
gggcaucauuugcaagaca

SEQ ID NO: 1558184 - RNA, 19 nt, Homo sapiens
  misc_RNA (1)...(19): siRNA sense strand
acauacagguucucugaau

SEQ ID NO: 1558185 - RNA, 19 nt, Homo sapiens
  misc_RNA (1)...(19): siRNA sense strand
agagaaaugcuacuugcua

SEQ ID NO: 1558186 - RNA, 19 nt, Homo sapiens
  misc_RNA (1)...(19): siRNA sense strand
agaaagagaggcaggcaaa

SEQ ID NO: 1558187 - RNA, 19 nt, Homo sapiens
  misc_RNA (1)...(19): siRNA sense strand
acaccuaccugaacgagau

SEQ ID NO: 1558188 - RNA, 19 nt, Homo sapiens
  misc_RNA (1)...(19): siRNA sense strand
gguaccaacuaggaaugua

SEQ ID NO: 1558189 - RNA, 19 nt, Homo sapiens
  misc_RNA (1)...(19): siRNA sense strand
gcuacuugcuaaacugaau

SEQ ID NO: 1558190 - RNA, 19 nt, Homo sapiens
  misc_RNA (1)...(19): siRNA sense strand
gaaagcccugaauaaguuu

SEQ ID NO: 1558191 - RNA, 19 nt, Homo sapiens
  misc_RNA (1)...(19): siRNA sense strand
agaaguagcacugagauga

SEQ ID NO: 1558192 - RNA, 19 nt, Homo sapiens
  misc_RNA (1)...(19): siRNA sense strand
ggaagguaccaacuaggaa

SEQ ID NO: 1558193 - RNA, 19 nt, Homo sapiens
  misc_RNA (1)...(19): siRNA sense strand
gcaggcaaacaccauuauu

SEQ ID NO: 1558194 - RNA, 19 nt, Homo sapiens
  misc_RNA (1)...(19): siRNA sense strand
gcaagacaggcauggagaa

SEQ ID NO: 1558195 - RNA, 19 nt, Homo sapiens
  misc_RNA (1)...(19): siRNA sense strand
gaugacaccgagagaagaa

SEQ ID NO: 1558196 - RNA, 19 nt, Homo sapiens
  misc_RNA (1)...(19): siRNA sense strand
ggaauaaaggcagcagaga

SEQ ID NO: 1558197 - RNA, 19 nt, Homo sapiens
  misc_RNA (1)...(19): siRNA sense strand
ggacaaagauguagaagau

SEQ ID NO: 1558198 - RNA, 19 nt, Homo sapiens
  misc_RNA (1)...(19): siRNA sense strand
gaagagaagucaacaugaa

SEQ ID NO: 1558199 - RNA, 19 nt, Homo sapiens
  misc_RNA (1)...(19): siRNA sense strand
ccaauaagauaucaacuga

SEQ ID NO: 1558200 - RNA, 19 nt, Homo sapiens
  misc_RNA (1)...(19): siRNA sense strand
ggaacaagauaucuagaug

SEQ ID NO: 1558201 - RNA, 19 nt, Homo sapiens
  misc_RNA (1)...(19): siRNA sense strand
gaagaaccaaguuuaguuu

SEQ ID NO: 1558202 - RNA, 19 nt, Homo sapiens
  misc_RNA (1)...(19): siRNA sense strand
acaaagauguagaagauga

SEQ ID NO: 1558203 - RNA, 19 nt, Homo sapiens
  misc_RNA (1)...(19): siRNA sense strand
ugaggaagaugaaauuaug

SEQ ID NO: 1558204 - RNA, 19 nt, Homo sapiens
  misc_RNA (1)...(19): siRNA sense strand
gaacaagauaucuagauga

SEQ ID NO: 1558205 - RNA, 19 nt, Homo sapiens
  misc_RNA (1)...(19): siRNA sense strand
gaagauccucagacaauuu

SEQ ID NO: 1558206 - RNA, 19 nt, Homo sapiens
  misc_RNA (1)...(19): siRNA sense strand
guccagaucuuucuauuuc

SEQ ID NO: 1558207 - RNA, 19 nt, Homo sapiens
  misc_RNA (1)...(19): siRNA sense strand
gaaauuaugaggucuaaag

SEQ ID NO: 1558208 - RNA, 19 nt, Homo sapiens
  misc_RNA (1)...(19): siRNA sense strand
gggaaccuauguauuuaaa

SEQ ID NO: 1558209 - RNA, 19 nt, Homo sapiens
  misc_RNA (1)...(19): siRNA sense strand
gugaaggaguuauauuuga

SEQ ID NO: 1558210 - RNA, 19 nt, Homo sapiens
  misc_RNA (1)...(19): siRNA sense strand
ugacucaacuauacuauca

SEQ ID NO: 1558211 - RNA, 19 nt, Homo sapiens
  misc_RNA (1)...(19): siRNA sense strand
gaauaguccuccaucacuu

SEQ ID NO: 1558212 - RNA, 19 nt, Homo sapiens
  misc_RNA (1)...(19): siRNA sense strand
gaaccaaguuuaguuugug

SEQ ID NO: 1558213 - RNA, 19 nt, Homo sapiens
  misc_RNA (1)...(19): siRNA sense strand
gaacaggagcauuauacaa

SEQ ID NO: 1558214 - RNA, 19 nt, Homo sapiens
  misc_RNA (1)...(19): siRNA sense strand
cccaggaucuacacaguua

SEQ ID NO: 1558215 - RNA, 19 nt, Homo sapiens
  misc_RNA (1)...(19): siRNA sense strand
aaauggaaaucaaccagua

SEQ ID NO: 1558216 - RNA, 19 nt, Homo sapiens
  misc_RNA (1)...(19): siRNA sense strand
caacuauacuaucaccaaa

SEQ ID NO: 1558217 - RNA, 19 nt, Homo sapiens
  misc_RNA (1)...(19): siRNA sense strand
caacaugaaucugggagaa

SEQ ID NO: 1558218 - RNA, 19 nt, Homo sapiens
  misc_RNA (1)...(19): siRNA sense strand
ugauaugucugaaagcaaa

SEQ ID NO: 1558219 - RNA, 19 nt, Homo sapiens
  misc_RNA (1)...(19): siRNA sense strand
gaaccaaaggaacauauau

SEQ ID NO: 1558220 - RNA, 19 nt, Homo sapiens
  misc_RNA (1)...(19): siRNA sense strand
caucugaacuugauauguc

SEQ ID NO: 1558221 - RNA, 19 nt, Homo sapiens
  misc_RNA (1)...(19): siRNA sense strand
agaaugcgcuuauggaaca

SEQ ID NO: 1558222 - RNA, 19 nt, Homo sapiens
  misc_RNA (1)...(19): siRNA sense strand
gaacuugauaugucugaaa

SEQ ID NO: 1558223 - RNA, 19 nt, Homo sapiens
  misc_RNA (1)...(19): siRNA sense strand
uauccuguaucacguauuu

SEQ ID NO: 1558224 - RNA, 19 nt, Homo sapiens
  misc_RNA (1)...(19): siRNA sense strand
gaaucuagcauguugucua

SEQ ID NO: 1558225 - RNA, 19 nt, Homo sapiens
  misc_RNA (1)...(19): siRNA sense strand
gugaugauuuggacauuga

SEQ ID NO: 1558226 - RNA, 19 nt, Homo sapiens
  misc_RNA (1)...(19): siRNA sense strand
aagaugaacaggagcauua

SEQ ID NO: 1558227 - RNA, 19 nt, Homo sapiens
  misc_RNA (1)...(19): siRNA sense strand
cuacacaguuagugaaaug

SEQ ID NO: 1558228 - RNA, 19 nt, Homo sapiens
  misc_RNA (1)...(19): siRNA sense strand
acaugaaucugggagaaua

SEQ ID NO: 1558229 - RNA, 19 nt, Homo sapiens
  misc_RNA (1)...(19): siRNA sense strand
ggaagagaagucaacauga

SEQ ID NO: 1558230 - RNA, 19 nt, Homo sapiens
  misc_RNA (1)...(19): siRNA sense strand
gauguuuguuugaccauga

SEQ ID NO: 1558231 - RNA, 19 nt, Homo sapiens
  misc_RNA (1)...(19): siRNA sense strand
cagaagauccucagacaau

SEQ ID NO: 1558232 - RNA, 19 nt, Homo sapiens
  misc_RNA (1)...(19): siRNA sense strand
ucaaauacaccaauaaugg

SEQ ID NO: 1558233 - RNA, 19 nt, Homo sapiens
  misc_RNA (1)...(19): siRNA sense strand
ucagacaauuucagaaugu

SEQ ID NO: 1558234 - RNA, 19 nt, Homo sapiens
  misc_RNA (1)...(19): siRNA sense strand
ggauggugauugugaagga

SEQ ID NO: 1558235 - RNA, 19 nt, Homo sapiens
  misc_RNA (1)...(19): siRNA sense strand
gaaaguuuagugaaccaaa

SEQ ID NO: 1558236 - RNA, 19 nt, Homo sapiens
  misc_RNA (1)...(19): siRNA sense strand
caaauacaccaauaaugga

SEQ ID NO: 1558237 - RNA, 19 nt, Homo sapiens
  misc_RNA (1)...(19): siRNA sense strand
gaugguuguucuagcugua

SEQ ID NO: 1558238 - RNA, 19 nt, Homo sapiens
  misc_RNA (1)...(19): siRNA sense strand
guauuuaaaugugggagaa

SEQ ID NO: 1558239 - RNA, 19 nt, Homo sapiens
  misc_RNA (1)...(19): siRNA sense strand
gagaacgaauggaaaauau

SEQ ID NO: 1558240 - RNA, 19 nt, Homo sapiens
  misc_RNA (1)...(19): siRNA sense strand
ugaagaaccaaguuuaguu

SEQ ID NO: 1558241 - RNA, 19 nt, Homo sapiens
  misc_RNA (1)...(19): siRNA sense strand
gcgcuuauggaacaagaua

SEQ ID NO: 1558242 - RNA, 19 nt, Homo sapiens
  misc_RNA (1)...(19): siRNA sense strand
gaugaacaggagcauuaua

SEQ ID NO: 1558243 - RNA, 19 nt, Homo sapiens
  misc_RNA (1)...(19): siRNA sense strand
gagagagaacgaauggaaa

SEQ ID NO: 1558244 - RNA, 19 nt, Homo sapiens
  misc_RNA (1)...(19): siRNA sense strand
uaaggauggugauugugaa

SEQ ID NO: 1558245 - RNA, 19 nt, Homo sapiens
  misc_RNA (1)...(19): siRNA sense strand
uaugaggucuaaagaaagu

SEQ ID NO: 1558246 - RNA, 19 nt, Homo sapiens
  misc_RNA (1)...(19): siRNA sense strand
gaucuacacaguuagugaa

SEQ ID NO: 1558247 - RNA, 19 nt, Homo sapiens
  misc_RNA (1)...(19): siRNA sense strand
gaacgaauggaaaauauug

SEQ ID NO: 1558248 - RNA, 19 nt, Homo sapiens
  misc_RNA (1)...(19): siRNA sense strand
ugagagagaacgaauggaa

SEQ ID NO: 1558249 - RNA, 19 nt, Homo sapiens
  misc_RNA (1)...(19): siRNA sense strand
cgcaagauuuauauccuaa

SEQ ID NO: 1558250 - RNA, 19 nt, Homo sapiens
  misc_RNA (1)...(19): siRNA sense strand
gaaauggaugcuaggaugu

SEQ ID NO: 1558251 - RNA, 19 nt, Homo sapiens
  misc_RNA (1)...(19): siRNA sense strand
ucgcaagauuuauauccua

SEQ ID NO: 1558252 - RNA, 19 nt, Homo sapiens
  misc_RNA (1)...(19): siRNA sense strand
gcaagcauucuccucauuc

SEQ ID NO: 1558253 - RNA, 19 nt, Homo sapiens
  misc_RNA (1)...(19): siRNA sense strand
guuaugaugcuuuacagaa

SEQ ID NO: 1558254 - RNA, 19 nt, Homo sapiens
  misc_RNA (1)...(19): siRNA sense strand
gccuuuaccuaaugauguu

SEQ ID NO: 1558255 - RNA, 19 nt, Homo sapiens
  misc_RNA (1)...(19): siRNA sense strand
gagaaaguuuagugaacca

SEQ ID NO: 1558256 - RNA, 19 nt, Homo sapiens
  misc_RNA (1)...(19): siRNA sense strand
gcuucuagcaguuucagua

SEQ ID NO: 1558257 - RNA, 19 nt, Homo sapiens
  misc_RNA (1)...(19): siRNA sense strand
gcuaggauguuaugaugcu

SEQ ID NO: 1558258 - RNA, 19 nt, Homo sapiens
  misc_RNA (1)...(19): siRNA sense strand
gaugaaauuaugaggucua

SEQ ID NO: 1558259 - RNA, 19 nt, Homo sapiens
  misc_RNA (1)...(19): siRNA sense strand
agaagauccucagacaauu

SEQ ID NO: 1558260 - RNA, 19 nt, Homo sapiens
  misc_RNA (1)...(19): siRNA sense strand
aauggaugcuaggauguua

SEQ ID NO: 1558261 - RNA, 19 nt, Homo sapiens
  misc_RNA (1)...(19): siRNA sense strand
gaaaucaaccaguaaaauc

SEQ ID NO: 1558262 - RNA, 19 nt, Homo sapiens
  misc_RNA (1)...(19): siRNA sense strand
gaagaugaacaggagcauu

SEQ ID NO: 1558263 - RNA, 19 nt, Homo sapiens
  misc_RNA (1)...(19): siRNA sense strand
aggauguuaugaugcuuua

SEQ ID NO: 1558264 - RNA, 19 nt, Homo sapiens
  misc_RNA (1)...(19): siRNA sense strand
ccagaaugcgcuuauggaa

SEQ ID NO: 1558265 - RNA, 19 nt, Homo sapiens
  misc_RNA (1)...(19): siRNA sense strand
ucacuuugauucuucuagu

SEQ ID NO: 1558266 - RNA, 19 nt, Homo sapiens
  misc_RNA (1)...(19): siRNA sense strand
gaggaagaugaaauuauga

SEQ ID NO: 1558267 - RNA, 19 nt, Homo sapiens
  misc_RNA (1)...(19): siRNA sense strand
agaaccaaguuuaguuugu

SEQ ID NO: 1558268 - RNA, 19 nt, Homo sapiens
  misc_RNA (1)...(19): siRNA sense strand
ucccaugagugcacuggua

SEQ ID NO: 1558269 - RNA, 19 nt, Homo sapiens
  misc_RNA (1)...(19): siRNA sense strand
ugaaccaaaggaacauaua

SEQ ID NO: 1558270 - RNA, 19 nt, Homo sapiens
  misc_RNA (1)...(19): siRNA sense strand
cggaagagaagucaacaug

SEQ ID NO: 1558271 - RNA, 19 nt, Homo sapiens
  misc_RNA (1)...(19): siRNA sense strand
caaagaaaaucggaagaga

SEQ ID NO: 1558272 - RNA, 19 nt, Homo sapiens
  misc_RNA (1)...(19): siRNA sense strand
cccagaagauccucagaca

SEQ ID NO: 1558273 - RNA, 19 nt, Homo sapiens
  misc_RNA (1)...(19): siRNA sense strand
ccacucauggacuucauaa

SEQ ID NO: 1558274 - RNA, 19 nt, Homo sapiens
  misc_RNA (1)...(19): siRNA sense strand
gauguuaugaugcuuuaca

SEQ ID NO: 1558275 - RNA, 19 nt, Homo sapiens
  misc_RNA (1)...(19): siRNA sense strand
gugaggaagaugaaauuau

SEQ ID NO: 1558276 - RNA, 19 nt, Homo sapiens
  misc_RNA (1)...(19): siRNA sense strand
ggaucuacacaguuaguga

SEQ ID NO: 1558277 - RNA, 19 nt, Homo sapiens
  misc_RNA (1)...(19): siRNA sense strand
aaguuuaguuugugaggaa

SEQ ID NO: 1558278 - RNA, 19 nt, Homo sapiens
  misc_RNA (1)...(19): siRNA sense strand
gagggacaaagauguagaa

SEQ ID NO: 1558279 - RNA, 19 nt, Homo sapiens
  misc_RNA (1)...(19): siRNA sense strand
uuaaggauggugauuguga

SEQ ID NO: 1558280 - RNA, 19 nt, Homo sapiens
  misc_RNA (1)...(19): siRNA sense strand
caugagugcacugguauuu

SEQ ID NO: 1558281 - RNA, 19 nt, Homo sapiens
  misc_RNA (1)...(19): siRNA sense strand
caaagcaacgaaucuagca

SEQ ID NO: 1558282 - RNA, 19 nt, Homo sapiens
  misc_RNA (1)...(19): siRNA sense strand
caaagauguagaagaugaa

SEQ ID NO: 1558283 - RNA, 19 nt, Homo sapiens
  misc_RNA (1)...(19): siRNA sense strand
ucaacuauacuaucaccaa

SEQ ID NO: 1558284 - RNA, 19 nt, Homo sapiens
  misc_RNA (1)...(19): siRNA sense strand
gaaggaguuauauuugaag

SEQ ID NO: 1558285 - RNA, 19 nt, Homo sapiens
  misc_RNA (1)...(19): siRNA sense strand
ccagaucuuucuauuucuc

SEQ ID NO: 1558286 - RNA, 19 nt, Homo sapiens
  misc_RNA (1)...(19): siRNA sense strand
aaaggagaaaguuuaguga

SEQ ID NO: 1558287 - RNA, 19 nt, Homo sapiens
  misc_RNA (1)...(19): siRNA sense strand
uguucuagcuguauacaca

SEQ ID NO: 1558288 - RNA, 19 nt, Homo sapiens
  misc_RNA (1)...(19): siRNA sense strand
gauuuggacauugaaacua

SEQ ID NO: 1558289 - RNA, 19 nt, Homo sapiens
  misc_RNA (1)...(19): siRNA sense strand
acaggagcauuauacaagu

SEQ ID NO: 1558290 - RNA, 19 nt, Homo sapiens
  misc_RNA (1)...(19): siRNA sense strand
gcaguuucaguauccugua

SEQ ID NO: 1558291 - RNA, 19 nt, Homo sapiens
  misc_RNA (1)...(19): siRNA sense strand
gcaacgaaucuagcauguu

SEQ ID NO: 1558292 - RNA, 19 nt, Homo sapiens
  misc_RNA (1)...(19): siRNA sense strand
cagacaauuucagaauguu

SEQ ID NO: 1558293 - RNA, 19 nt, Homo sapiens
  misc_RNA (1)...(19): siRNA sense strand
ccucagacaauuucagaau

SEQ ID NO: 1558294 - RNA, 19 nt, Homo sapiens
  misc_RNA (1)...(19): siRNA sense strand
aaaguuuagugaaccaaag

SEQ ID NO: 1558295 - RNA, 19 nt, Homo sapiens
  misc_RNA (1)...(19): siRNA sense strand
cuaaagaaaguccagaucu

SEQ ID NO: 1558296 - RNA, 19 nt, Homo sapiens
  misc_RNA (1)...(19): siRNA sense strand
caggagcauuauacaagug

SEQ ID NO: 1558297 - RNA, 19 nt, Homo sapiens
  misc_RNA (1)...(19): siRNA sense strand
gaagaugcccugaaacaua

SEQ ID NO: 1558298 - RNA, 19 nt, Homo sapiens
  misc_RNA (1)...(19): siRNA sense strand
gaaugugucuacagaauuu

SEQ ID NO: 1558299 - RNA, 19 nt, Homo sapiens
  misc_RNA (1)...(19): siRNA sense strand
ccagcaaacugauguaaua

SEQ ID NO: 1558300 - RNA, 19 nt, Homo sapiens
  misc_RNA (1)...(19): siRNA sense strand
gaacaacagacauacuuua

SEQ ID NO: 1558301 - RNA, 19 nt, Homo sapiens
  misc_RNA (1)...(19): siRNA sense strand
ggagaauucuguuaaaguu

SEQ ID NO: 1558302 - RNA, 19 nt, Homo sapiens
  misc_RNA (1)...(19): siRNA sense strand
aaacauaccuucaguucaa

SEQ ID NO: 1558303 - RNA, 19 nt, Homo sapiens
  misc_RNA (1)...(19): siRNA sense strand
gacaggaaaugacuaguaa

SEQ ID NO: 1558304 - RNA, 19 nt, Homo sapiens
  misc_RNA (1)...(19): siRNA sense strand
caacagacauacuuuagug

SEQ ID NO: 1558305 - RNA, 19 nt, Homo sapiens
  misc_RNA (1)...(19): siRNA sense strand
uagagaagcugcuauugaa

SEQ ID NO: 1558306 - RNA, 19 nt, Homo sapiens
  misc_RNA (1)...(19): siRNA sense strand
gaaguucaaucuccauuag

SEQ ID NO: 1558307 - RNA, 19 nt, Homo sapiens
  misc_RNA (1)...(19): siRNA sense strand
ccagauaguucuucuacaa

SEQ ID NO: 1558308 - RNA, 19 nt, Homo sapiens
  misc_RNA (1)...(19): siRNA sense strand
aaaggaagaugcccugaaa

SEQ ID NO: 1558309 - RNA, 19 nt, Homo sapiens
  misc_RNA (1)...(19): siRNA sense strand
ggacaggaaaugacuagua

SEQ ID NO: 1558310 - RNA, 19 nt, Homo sapiens
  misc_RNA (1)...(19): siRNA sense strand
gagaaugugucuacagaau

SEQ ID NO: 1558311 - RNA, 19 nt, Homo sapiens
  misc_RNA (1)...(19): siRNA sense strand
gagaaagcauggacaggaa

SEQ ID NO: 1558312 - RNA, 19 nt, Homo sapiens
  misc_RNA (1)...(19): siRNA sense strand
gaagcucggucuccacuau

SEQ ID NO: 1558313 - RNA, 19 nt, Homo sapiens
  misc_RNA (1)...(19): siRNA sense strand
ugaagaggcuccuagagaa

SEQ ID NO: 1558314 - RNA, 19 nt, Homo sapiens
  misc_RNA (1)...(19): siRNA sense strand
gcaaaucccagcaaacuga

SEQ ID NO: 1558315 - RNA, 19 nt, Homo sapiens
  misc_RNA (1)...(19): siRNA sense strand
aaagucagcugauguuaga

SEQ ID NO: 1558316 - RNA, 19 nt, Homo sapiens
  misc_RNA (1)...(19): siRNA sense strand
gaagaggccucagcuaaag

SEQ ID NO: 1558317 - RNA, 19 nt, Homo sapiens
  misc_RNA (1)...(19): siRNA sense strand
cagcaaacuuggacaaaga

SEQ ID NO: 1558318 - RNA, 19 nt, Homo sapiens
  misc_RNA (1)...(19): siRNA sense strand
ucaauucuguccuuaaaga

SEQ ID NO: 1558319 - RNA, 19 nt, Homo sapiens
  misc_RNA (1)...(19): siRNA sense strand
aagaugcccugaaacauaa

SEQ ID NO: 1558320 - RNA, 19 nt, Homo sapiens
  misc_RNA (1)...(19): siRNA sense strand
gaagcucagucuccacuau

SEQ ID NO: 1558321 - RNA, 19 nt, Homo sapiens
  misc_RNA (1)...(19): siRNA sense strand
agaaguaacuguaccuguu

SEQ ID NO: 1558322 - RNA, 19 nt, Homo sapiens
  misc_RNA (1)...(19): siRNA sense strand
gagaagcugcuauugaauu

SEQ ID NO: 1558323 - RNA, 19 nt, Homo sapiens
  misc_RNA (1)...(19): siRNA sense strand
gaagaggccuccguugaca

SEQ ID NO: 1558324 - RNA, 19 nt, Homo sapiens
  misc_RNA (1)...(19): siRNA sense strand
agaagaggcucgagaacuu

SEQ ID NO: 1558325 - RNA, 19 nt, Homo sapiens
  misc_RNA (1)...(19): siRNA sense strand
gcaaacugauguaauagag

SEQ ID NO: 1558326 - RNA, 19 nt, Homo sapiens
  misc_RNA (1)...(19): siRNA sense strand
caacaaacagcaaugaaga

SEQ ID NO: 1558327 - RNA, 19 nt, Homo sapiens
  misc_RNA (1)...(19): siRNA sense strand
cagcagaacuucauuuacu

SEQ ID NO: 1558328 - RNA, 19 nt, Homo sapiens
  misc_RNA (1)...(19): siRNA sense strand
uagaguaucuucugagcuu

SEQ ID NO: 1558329 - RNA, 19 nt, Homo sapiens
  misc_RNA (1)...(19): siRNA sense strand
cagaagaggcuccuacuga

SEQ ID NO: 1558330 - RNA, 19 nt, Homo sapiens
  misc_RNA (1)...(19): siRNA sense strand
gagccuccaucaacagaaa

SEQ ID NO: 1558331 - RNA, 19 nt, Homo sapiens
  misc_RNA (1)...(19): siRNA sense strand
guacagccaucaacugaag

SEQ ID NO: 1558332 - RNA, 19 nt, Homo sapiens
  misc_RNA (1)...(19): siRNA sense strand
gcuauugaauugccagaga

SEQ ID NO: 1558333 - RNA, 19 nt, Homo sapiens
  misc_RNA (1)...(19): siRNA sense strand
agaagaggcucaugcugaa

SEQ ID NO: 1558334 - RNA, 19 nt, Homo sapiens
  misc_RNA (1)...(19): siRNA sense strand
agaagaggcuccuacugaa

SEQ ID NO: 1558335 - RNA, 19 nt, Homo sapiens
  misc_RNA (1)...(19): siRNA sense strand
gaaauuccaccaaacauac

SEQ ID NO: 1558336 - RNA, 19 nt, Homo sapiens
  misc_RNA (1)...(19): siRNA sense strand
gaauuucagucuccauuac

SEQ ID NO: 1558337 - RNA, 19 nt, Homo sapiens
  misc_RNA (1)...(19): siRNA sense strand
gaaauagagccuccaucaa

SEQ ID NO: 1558338 - RNA, 19 nt, Homo sapiens
  misc_RNA (1)...(19): siRNA sense strand
gaaguaacuguaccuguug

SEQ ID NO: 1558339 - RNA, 19 nt, Homo sapiens
  misc_RNA (1)...(19): siRNA sense strand
agaagaggcuccugcugaa

SEQ ID NO: 1558340 - RNA, 19 nt, Homo sapiens
  misc_RNA (1)...(19): siRNA sense strand
agaagaggcuccugcugaa

SEQ ID NO: 1558341 - RNA, 19 nt, Homo sapiens
  misc_RNA (1)...(19): siRNA sense strand
ggaacaacagacauacuuu

SEQ ID NO: 1558342 - RNA, 19 nt, Homo sapiens
  misc_RNA (1)...(19): siRNA sense strand
guaggcaaaucccagcaaa

SEQ ID NO: 1558343 - RNA, 19 nt, Homo sapiens
  misc_RNA (1)...(19): siRNA sense strand
gcccagaccugcugaagag

SEQ ID NO: 1558344 - RNA, 19 nt, Homo sapiens
  misc_RNA (1)...(19): siRNA sense strand
aagaugagcuuagggaaga

SEQ ID NO: 1558345 - RNA, 19 nt, Homo sapiens
  misc_RNA (1)...(19): siRNA sense strand
ggacaaggaacaacagaca

SEQ ID NO: 1558346 - RNA, 19 nt, Homo sapiens
  misc_RNA (1)...(19): siRNA sense strand
ggcaggaauuccagcagua

SEQ ID NO: 1558347 - RNA, 19 nt, Homo sapiens
  misc_RNA (1)...(19): siRNA sense strand
ugaaauagagccuccauca

SEQ ID NO: 1558348 - RNA, 19 nt, Homo sapiens
  misc_RNA (1)...(19): siRNA sense strand
cuaagggaguuucuauaga

SEQ ID NO: 1558349 - RNA, 19 nt, Homo sapiens
  misc_RNA (1)...(19): siRNA sense strand
ccacugcaguugcggagaa

SEQ ID NO: 1558350 - RNA, 19 nt, Homo sapiens
  misc_RNA (1)...(19): siRNA sense strand
uaaaauacagccuccauua

SEQ ID NO: 1558351 - RNA, 19 nt, Homo sapiens
  misc_RNA (1)...(19): siRNA sense strand
agaagcugcuauugaauug

SEQ ID NO: 1558352 - RNA, 19 nt, Homo sapiens
  misc_RNA (1)...(19): siRNA sense strand
aaauuaggaucgguuguuu

SEQ ID NO: 1558353 - RNA, 19 nt, Homo sapiens
  misc_RNA (1)...(19): siRNA sense strand
ugaagaggccucagcuaaa

SEQ ID NO: 1558354 - RNA, 19 nt, Homo sapiens
  misc_RNA (1)...(19): siRNA sense strand
agagacccauguccaagua

SEQ ID NO: 1558355 - RNA, 19 nt, Homo sapiens
  misc_RNA (1)...(19): siRNA sense strand
acaaggaacaacagacaua

SEQ ID NO: 1558356 - RNA, 19 nt, Homo sapiens
  misc_RNA (1)...(19): siRNA sense strand
ggacaggcucccacucuug

SEQ ID NO: 1558357 - RNA, 19 nt, Homo sapiens
  misc_RNA (1)...(19): siRNA sense strand
cagaagaggccuccguuga

SEQ ID NO: 1558358 - RNA, 19 nt, Homo sapiens
  misc_RNA (1)...(19): siRNA sense strand
gcuaagggaguuucuauag

SEQ ID NO: 1558359 - RNA, 19 nt, Homo sapiens
  misc_RNA (1)...(19): siRNA sense strand
uauagaggcuccugcagau

SEQ ID NO: 1558360 - RNA, 19 nt, Homo sapiens
  misc_RNA (1)...(19): siRNA sense strand
gaagagucccuuucagaag

SEQ ID NO: 1558361 - RNA, 19 nt, Homo sapiens
  misc_RNA (1)...(19): siRNA sense strand
ugaagaaauugggcagaaa

SEQ ID NO: 1558362 - RNA, 19 nt, Homo sapiens
  misc_RNA (1)...(19): siRNA sense strand
gaagaaaagucagcugaug

SEQ ID NO: 1558363 - RNA, 19 nt, Homo sapiens
  misc_RNA (1)...(19): siRNA sense strand
ccauugaaguacagccuuu

SEQ ID NO: 1558364 - RNA, 19 nt, Homo sapiens
  misc_RNA (1)...(19): siRNA sense strand
aagagucccuuucagaaga

SEQ ID NO: 1558365 - RNA, 19 nt, Homo sapiens
  misc_RNA (1)...(19): siRNA sense strand
ccaaacauaccuucaguuc

SEQ ID NO: 1558366 - RNA, 19 nt, Homo sapiens
  misc_RNA (1)...(19): siRNA sense strand
agaaauuccaccaaacaua

SEQ ID NO: 1558367 - RNA, 19 nt, Homo sapiens
  misc_RNA (1)...(19): siRNA sense strand
gcaacaaacagcaaugaag

SEQ ID NO: 1558368 - RNA, 19 nt, Homo sapiens
  misc_RNA (1)...(19): siRNA sense strand
gaaguucagucuccaucag

SEQ ID NO: 1558369 - RNA, 19 nt, Homo sapiens
  misc_RNA (1)...(19): siRNA sense strand
aaacuuggacaaagagaaa

SEQ ID NO: 1558370 - RNA, 19 nt, Homo sapiens
  misc_RNA (1)...(19): siRNA sense strand
gaagaggcuccuacugaau

SEQ ID NO: 1558371 - RNA, 19 nt, Homo sapiens
  misc_RNA (1)...(19): siRNA sense strand
ccagacagacaccauugua

SEQ ID NO: 1558372 - RNA, 19 nt, Homo sapiens
  misc_RNA (1)...(19): siRNA sense strand
cugauuugcuucugacuga

SEQ ID NO: 1558373 - RNA, 19 nt, Homo sapiens
  misc_RNA (1)...(19): siRNA sense strand
gaacuucagcuuucaacag

SEQ ID NO: 1558374 - RNA, 19 nt, Homo sapiens
  misc_RNA (1)...(19): siRNA sense strand
aauacagccuccauuaguu

SEQ ID NO: 1558375 - RNA, 19 nt, Homo sapiens
  misc_RNA (1)...(19): siRNA sense strand
gagcuuagggaagaaguaa

SEQ ID NO: 1558376 - RNA, 19 nt, Homo sapiens
  misc_RNA (1)...(19): siRNA sense strand
gacauacuuuagugaauca

SEQ ID NO: 1558377 - RNA, 19 nt, Homo sapiens
  misc_RNA (1)...(19): siRNA sense strand
guagaaauuccaccaaaca

SEQ ID NO: 1558378 - RNA, 19 nt, Homo sapiens
  misc_RNA (1)...(19): siRNA sense strand
gauaguucuucuacaaagu

SEQ ID NO: 1558379 - RNA, 19 nt, Homo sapiens
  misc_RNA (1)...(19): siRNA sense strand
gcaggaauuccagcaguaa

SEQ ID NO: 1558380 - RNA, 19 nt, Homo sapiens
  misc_RNA (1)...(19): siRNA sense strand
gaacaaaccccugaagaug

SEQ ID NO: 1558381 - RNA, 19 nt, Homo sapiens
  misc_RNA (1)...(19): siRNA sense strand
gaagagaccacugcagaag

SEQ ID NO: 1558382 - RNA, 19 nt, Homo sapiens
  misc_RNA (1)...(19): siRNA sense strand
gaagagaccacugcagaag

SEQ ID NO: 1558383 - RNA, 19 nt, Homo sapiens
  misc_RNA (1)...(19): siRNA sense strand
agaagagccuccugcugaa

SEQ ID NO: 1558384 - RNA, 19 nt, Homo sapiens
  misc_RNA (1)...(19): siRNA sense strand
caaagccuaugagucuauu

SEQ ID NO: 1558385 - RNA, 19 nt, Homo sapiens
  misc_RNA (1)...(19): siRNA sense strand
gauacuggaccaugaugaa

SEQ ID NO: 1558386 - RNA, 19 nt, Homo sapiens
  misc_RNA (1)...(19): siRNA sense strand
acaaaaggcucccauugaa

SEQ ID NO: 1558387 - RNA, 19 nt, Homo sapiens
  misc_RNA (1)...(19): siRNA sense strand
gacagacaccauuguagaa

SEQ ID NO: 1558388 - RNA, 19 nt, Homo sapiens
  misc_RNA (1)...(19): siRNA sense strand
agaugaaacuccugcugaa

SEQ ID NO: 1558389 - RNA, 19 nt, Homo sapiens
  misc_RNA (1)...(19): siRNA sense strand
uaaagagaccacugcagaa

SEQ ID NO: 1558390 - RNA, 19 nt, Homo sapiens
  misc_RNA (1)...(19): siRNA sense strand
cagagaguguucaggaugu

SEQ ID NO: 1558391 - RNA, 19 nt, Homo sapiens
  misc_RNA (1)...(19): siRNA sense strand
uuagagaagcugcuauuga

SEQ ID NO: 1558392 - RNA, 19 nt, Homo sapiens
  misc_RNA (1)...(19): siRNA sense strand
ccaaagcuacccaucguau

SEQ ID NO: 1558393 - RNA, 19 nt, Homo sapiens
  misc_RNA (1)...(19): siRNA sense strand
acaggauacuggaccauga

SEQ ID NO: 1558394 - RNA, 19 nt, Homo sapiens
  misc_RNA (1)...(19): siRNA sense strand
gaagaggccacugcuaaag

SEQ ID NO: 1558395 - RNA, 19 nt, Homo sapiens
  misc_RNA (1)...(19): siRNA sense strand
gcucgagaacuucagcuuu

SEQ ID NO: 1558396 - RNA, 19 nt, Homo sapiens
  misc_RNA (1)...(19): siRNA sense strand
gaagagccuccugcugaaa

SEQ ID NO: 1558397 - RNA, 19 nt, Homo sapiens
  misc_RNA (1)...(19): siRNA sense strand
gaacaagccuacugcuaua

SEQ ID NO: 1558398 - RNA, 19 nt, Homo sapiens
  misc_RNA (1)...(19): siRNA sense strand
caagauagcuacucagaaa

SEQ ID NO: 1558399 - RNA, 19 nt, Homo sapiens
  misc_RNA (1)...(19): siRNA sense strand
cgacagagcaugcuauuua

SEQ ID NO: 1558400 - RNA, 19 nt, Homo sapiens
  misc_RNA (1)...(19): siRNA sense strand
caaauaagcgucacagaua

SEQ ID NO: 1558401 - RNA, 19 nt, Homo sapiens
  misc_RNA (1)...(19): siRNA sense strand
caaaguuggugacaagaua

SEQ ID NO: 1558402 - RNA, 19 nt, Homo sapiens
  misc_RNA (1)...(19): siRNA sense strand
gcagacaucuaccagaauu

SEQ ID NO: 1558403 - RNA, 19 nt, Homo sapiens
  misc_RNA (1)...(19): siRNA sense strand
ggaagacucaccucaaaua

SEQ ID NO: 1558404 - RNA, 19 nt, Homo sapiens
  misc_RNA (1)...(19): siRNA sense strand
gaauugcugugaagccuuu

SEQ ID NO: 1558405 - RNA, 19 nt, Homo sapiens
  misc_RNA (1)...(19): siRNA sense strand
gcgcagacaucuaccagaa

SEQ ID NO: 1558406 - RNA, 19 nt, Homo sapiens
  misc_RNA (1)...(19): siRNA sense strand
agaaagagcagaugcaauu

SEQ ID NO: 1558407 - RNA, 19 nt, Homo sapiens
  misc_RNA (1)...(19): siRNA sense strand
gaagacucaccucaaauaa

SEQ ID NO: 1558408 - RNA, 19 nt, Homo sapiens
  misc_RNA (1)...(19): siRNA sense strand
gugaauugcuggauauguu

SEQ ID NO: 1558409 - RNA, 19 nt, Homo sapiens
  misc_RNA (1)...(19): siRNA sense strand
caagucaagugaagaacaa

SEQ ID NO: 1558410 - RNA, 19 nt, Homo sapiens
  misc_RNA (1)...(19): siRNA sense strand
gcaagcaagucaagugaag

SEQ ID NO: 1558411 - RNA, 19 nt, Homo sapiens
  misc_RNA (1)...(19): siRNA sense strand
guggaagacucaccucaaa

SEQ ID NO: 1558412 - RNA, 19 nt, Homo sapiens
  misc_RNA (1)...(19): siRNA sense strand
gauaaagucacaguaauug

SEQ ID NO: 1558413 - RNA, 19 nt, Homo sapiens
  misc_RNA (1)...(19): siRNA sense strand
gggauuagguacugcaugu

SEQ ID NO: 1558414 - RNA, 19 nt, Homo sapiens
  misc_RNA (1)...(19): siRNA sense strand
gacagagcaugcuauuuau

SEQ ID NO: 1558415 - RNA, 19 nt, Homo sapiens
  misc_RNA (1)...(19): siRNA sense strand
gcaaaugaaagaguuauug

SEQ ID NO: 1558416 - RNA, 19 nt, Homo sapiens
  misc_RNA (1)...(19): siRNA sense strand
ggucgugucuguccucuuc

SEQ ID NO: 1558417 - RNA, 19 nt, Homo sapiens
  misc_RNA (1)...(19): siRNA sense strand
ggaggugggugacaucagu

SEQ ID NO: 1558418 - RNA, 19 nt, Homo sapiens
  misc_RNA (1)...(19): siRNA sense strand
ccacaugcuuacaaaguug

SEQ ID NO: 1558419 - RNA, 19 nt, Homo sapiens
  misc_RNA (1)...(19): siRNA sense strand
guaauuggagcuggaguua

SEQ ID NO: 1558420 - RNA, 19 nt, Homo sapiens
  misc_RNA (1)...(19): siRNA sense strand
uggauggaauacuuacuua

SEQ ID NO: 1558421 - RNA, 19 nt, Homo sapiens
  misc_RNA (1)...(19): siRNA sense strand
aaauaagcgucacagauau

SEQ ID NO: 1558422 - RNA, 19 nt, Homo sapiens
  misc_RNA (1)...(19): siRNA sense strand
cagcggaggucgugucugu

SEQ ID NO: 1558423 - RNA, 19 nt, Homo sapiens
  misc_RNA (1)...(19): siRNA sense strand
gaugaaguauaaacagaca

SEQ ID NO: 1558424 - RNA, 19 nt, Homo sapiens
  misc_RNA (1)...(19): siRNA sense strand
ugaaagaguuauuguucug

SEQ ID NO: 1558425 - RNA, 19 nt, Homo sapiens
  misc_RNA (1)...(19): siRNA sense strand
uuacaaaguuggugacaag

SEQ ID NO: 1558426 - RNA, 19 nt, Homo sapiens
  misc_RNA (1)...(19): siRNA sense strand
gugaaccgcuugggacaaa

SEQ ID NO: 1558427 - RNA, 19 nt, Homo sapiens
  misc_RNA (1)...(19): siRNA sense strand
ggauauguuuggaaucagu

SEQ ID NO: 1558428 - RNA, 19 nt, Homo sapiens
  misc_RNA (1)...(19): siRNA sense strand
gccacggugucaaugauaa

SEQ ID NO: 1558429 - RNA, 19 nt, Homo sapiens
  misc_RNA (1)...(19): siRNA sense strand
cuagugaauugcuggauau

SEQ ID NO: 1558430 - RNA, 19 nt, Homo sapiens
  misc_RNA (1)...(19): siRNA sense strand
ggucagggauuagguacug

SEQ ID NO: 1558431 - RNA, 19 nt, Homo sapiens
  misc_RNA (1)...(19): siRNA sense strand
gacaagauagcuacucaga

SEQ ID NO: 1558432 - RNA, 19 nt, Homo sapiens
  misc_RNA (1)...(19): siRNA sense strand
uccacacgaugaaguauaa

SEQ ID NO: 1558433 - RNA, 19 nt, Homo sapiens
  misc_RNA (1)...(19): siRNA sense strand
gaaagccagugccaaaaga

SEQ ID NO: 1558434 - RNA, 19 nt, Homo sapiens
  misc_RNA (1)...(19): siRNA sense strand
gcagaaaauuggcauggaa

SEQ ID NO: 1558435 - RNA, 19 nt, Homo sapiens
  misc_RNA (1)...(19): siRNA sense strand
gaaagaguuauuguucuga

SEQ ID NO: 1558436 - RNA, 19 nt, Homo sapiens
  misc_RNA (1)...(19): siRNA sense strand
cagggaagguggcauugga

SEQ ID NO: 1558437 - RNA, 19 nt, Homo sapiens
  misc_RNA (1)...(19): siRNA sense strand
uaccggguguucugccuua

SEQ ID NO: 1558438 - RNA, 19 nt, Homo sapiens
  misc_RNA (1)...(19): siRNA sense strand
ucaaauaagcgucacagau

SEQ ID NO: 1558439 - RNA, 19 nt, Homo sapiens
  misc_RNA (1)...(19): siRNA sense strand
caaaaucgccuguggaaga

SEQ ID NO: 1558440 - RNA, 19 nt, Homo sapiens
  misc_RNA (1)...(19): siRNA sense strand
gaaagagcagaugcaauug

SEQ ID NO: 1558441 - RNA, 19 nt, Homo sapiens
  misc_RNA (1)...(19): siRNA sense strand
caagccuacugcuauaguu

SEQ ID NO: 1558442 - RNA, 19 nt, Homo sapiens
  misc_RNA (1)...(19): siRNA sense strand
agaacaagccuacugcuau

SEQ ID NO: 1558443 - RNA, 19 nt, Homo sapiens
  misc_RNA (1)...(19): siRNA sense strand
gugacaagauagcuacuca

SEQ ID NO: 1558444 - RNA, 19 nt, Homo sapiens
  misc_RNA (1)...(19): siRNA sense strand
gaccaucuuucucaacaag

SEQ ID NO: 1558445 - RNA, 19 nt, Homo sapiens
  misc_RNA (1)...(19): siRNA sense strand
uaaagucacaguaauugga

SEQ ID NO: 1558446 - RNA, 19 nt, Homo sapiens
  misc_RNA (1)...(19): siRNA sense strand
gauggaauacuuacuuagu

SEQ ID NO: 1558447 - RNA, 19 nt, Homo sapiens
  misc_RNA (1)...(19): siRNA sense strand
acuagugaauugcuggaua

SEQ ID NO: 1558448 - RNA, 19 nt, Homo sapiens
  misc_RNA (1)...(19): siRNA sense strand
ggacaacgaccgguucauc

SEQ ID NO: 1558449 - RNA, 19 nt, Homo sapiens
  misc_RNA (1)...(19): siRNA sense strand
gaacaaaacaugguaagug

SEQ ID NO: 1558450 - RNA, 19 nt, Homo sapiens
  misc_RNA (1)...(19): siRNA sense strand
aaaaugaccuccccacaug

SEQ ID NO: 1558451 - RNA, 19 nt, Homo sapiens
  misc_RNA (1)...(19): siRNA sense strand
aaacugggccgugcaaaug

SEQ ID NO: 1558452 - RNA, 19 nt, Homo sapiens
  misc_RNA (1)...(19): siRNA sense strand
cgaaccagccaaccagaaa

SEQ ID NO: 1558453 - RNA, 19 nt, Homo sapiens
  misc_RNA (1)...(19): siRNA sense strand
cgaagcauucccaauugua

SEQ ID NO: 1558454 - RNA, 19 nt, Homo sapiens
  misc_RNA (1)...(19): siRNA sense strand
uggaggaucuagccauguu

SEQ ID NO: 1558455 - RNA, 19 nt, Homo sapiens
  misc_RNA (1)...(19): siRNA sense strand
gagcagaugcaauugucaa

SEQ ID NO: 1558456 - RNA, 19 nt, Homo sapiens
  misc_RNA (1)...(19): siRNA sense strand
cuuagaagcugcugaccau

SEQ ID NO: 1558457 - RNA, 19 nt, Homo sapiens
  misc_RNA (1)...(19): siRNA sense strand
aagaacacccugagcguuu

SEQ ID NO: 1558458 - RNA, 19 nt, Homo sapiens
  misc_RNA (1)...(19): siRNA sense strand
agacucaccucaaauaagc

SEQ ID NO: 1558459 - RNA, 19 nt, Homo sapiens
  misc_RNA (1)...(19): siRNA sense strand
gcauguggaauggcuuaua

SEQ ID NO: 1558460 - RNA, 19 nt, Homo sapiens
  misc_RNA (1)...(19): siRNA sense strand
cauuauagcagccguaaca

SEQ ID NO: 1558461 - RNA, 19 nt, Homo sapiens
  misc_RNA (1)...(19): siRNA sense strand
gcaagucaagugaagaaca

SEQ ID NO: 1558462 - RNA, 19 nt, Homo sapiens
  misc_RNA (1)...(19): siRNA sense strand
aagccaauaucaaccuuau

SEQ ID NO: 1558463 - RNA, 19 nt, Homo sapiens
  misc_RNA (1)...(19): siRNA sense strand
cauguggaauggcuuauac

SEQ ID NO: 1558464 - RNA, 19 nt, Homo sapiens
  misc_RNA (1)...(19): siRNA sense strand
ggaagguggcauuggagaa

SEQ ID NO: 1558465 - RNA, 19 nt, Homo sapiens
  misc_RNA (1)...(19): siRNA sense strand
aauaagcgucacagauaua

SEQ ID NO: 1558466 - RNA, 19 nt, Homo sapiens
  misc_RNA (1)...(19): siRNA sense strand
gccuuuggauggaauacuu

SEQ ID NO: 1558467 - RNA, 19 nt, Homo sapiens
  misc_RNA (1)...(19): siRNA sense strand
uauagcagccguaacacuu

SEQ ID NO: 1558468 - RNA, 19 nt, Homo sapiens
  misc_RNA (1)...(19): siRNA sense strand
gaagguggcauuggagaag

SEQ ID NO: 1558469 - RNA, 19 nt, Homo sapiens
  misc_RNA (1)...(19): siRNA sense strand
gaaacuucacagcgacuug

SEQ ID NO: 1558470 - RNA, 19 nt, Homo sapiens
  misc_RNA (1)...(19): siRNA sense strand
ggaaucaguaccagacaca

SEQ ID NO: 1558471 - RNA, 19 nt, Homo sapiens
  misc_RNA (1)...(19): siRNA sense strand
ugaauugcuggauauguuu

SEQ ID NO: 1558472 - RNA, 19 nt, Homo sapiens
  misc_RNA (1)...(19): siRNA sense strand
gagcaugcuauuuaucuag

SEQ ID NO: 1558473 - RNA, 19 nt, Homo sapiens
  misc_RNA (1)...(19): siRNA sense strand
agagcaugcuauuuaucua

SEQ ID NO: 1558474 - RNA, 19 nt, Homo sapiens
  misc_RNA (1)...(19): siRNA sense strand
acgaugaaguauaaacaga

SEQ ID NO: 1558475 - RNA, 19 nt, Homo sapiens
  misc_RNA (1)...(19): siRNA sense strand
cccacaugcuuacaaaguu

SEQ ID NO: 1558476 - RNA, 19 nt, Homo sapiens
  misc_RNA (1)...(19): siRNA sense strand
gauacagaccaaugagaau

SEQ ID NO: 1558477 - RNA, 19 nt, Homo sapiens
  misc_RNA (1)...(19): siRNA sense strand
cagaacacccggacaacga

SEQ ID NO: 1558478 - RNA, 19 nt, Homo sapiens
  misc_RNA (1)...(19): siRNA sense strand
uaaacagacagacccagaa

SEQ ID NO: 1558479 - RNA, 19 nt, Homo sapiens
  misc_RNA (1)...(19): siRNA sense strand
cuggauauguuuggaauca

SEQ ID NO: 1558480 - RNA, 19 nt, Homo sapiens
  misc_RNA (1)...(19): siRNA sense strand
gaagcauucccaauuguac

SEQ ID NO: 1558481 - RNA, 19 nt, Homo sapiens
  misc_RNA (1)...(19): siRNA sense strand
uccgaagcauucccaauug

SEQ ID NO: 1558482 - RNA, 19 nt, Homo sapiens
  misc_RNA (1)...(19): siRNA sense strand
uaaacugggccgugcaaau

SEQ ID NO: 1558483 - RNA, 19 nt, Homo sapiens
  misc_RNA (1)...(19): siRNA sense strand
gauauguuuggaaucagua

SEQ ID NO: 1558484 - RNA, 19 nt, Homo sapiens
  misc_RNA (1)...(19): siRNA sense strand
agaagcugcugaccaucuu

SEQ ID NO: 1558485 - RNA, 19 nt, Homo sapiens
  misc_RNA (1)...(19): siRNA sense strand
ccgaagcauucccaauugu

SEQ ID NO: 1558486 - RNA, 19 nt, Homo sapiens
  misc_RNA (1)...(19): siRNA sense strand
caagccaauaucaaccuua

SEQ ID NO: 1558487 - RNA, 19 nt, Homo sapiens
  misc_RNA (1)...(19): siRNA sense strand
cuaccagaauugcugugaa

SEQ ID NO: 1558488 - RNA, 19 nt, Homo sapiens
  misc_RNA (1)...(19): siRNA sense strand
caucgacccauuuaccauu

SEQ ID NO: 1558489 - RNA, 19 nt, Homo sapiens
  misc_RNA (1)...(19): siRNA sense strand
uaccagaauugcugugaag

SEQ ID NO: 1558490 - RNA, 19 nt, Homo sapiens
  misc_RNA (1)...(19): siRNA sense strand
ucacagcgacuuggagaga

SEQ ID NO: 1558491 - RNA, 19 nt, Homo sapiens
  misc_RNA (1)...(19): siRNA sense strand
ugggaaaacuagugaauug

SEQ ID NO: 1558492 - RNA, 19 nt, Homo sapiens
  misc_RNA (1)...(19): siRNA sense strand
cuacagggaagguggcauu

SEQ ID NO: 1558493 - RNA, 19 nt, Homo sapiens
  misc_RNA (1)...(19): siRNA sense strand
agagucagauacagaccaa

SEQ ID NO: 1558494 - RNA, 19 nt, Homo sapiens
  misc_RNA (1)...(19): siRNA sense strand
uaauugagagucagauaca

SEQ ID NO: 1558495 - RNA, 19 nt, Homo sapiens
  misc_RNA (1)...(19): siRNA sense strand
gcagaugcaauugucaaau

SEQ ID NO: 1558496 - RNA, 19 nt, Homo sapiens
  misc_RNA (1)...(19): siRNA sense strand
aagagcagaugcaauuguc

SEQ ID NO: 1558497 - RNA, 19 nt, Homo sapiens
  misc_RNA (1)...(19): siRNA sense strand
ggauauggauucucuggau

SEQ ID NO: 1558498 - RNA, 19 nt, Homo sapiens
  misc_RNA (1)...(19): siRNA sense strand
gauauggauucucuggauu

SEQ ID NO: 1558499 - RNA, 19 nt, Homo sapiens
  misc_RNA (1)...(19): siRNA sense strand
ugaaggauauggauucucu

SEQ ID NO: 1558500 - RNA, 19 nt, Homo sapiens
  misc_RNA (1)...(19): siRNA sense strand
caucaugccgugaaggaua

SEQ ID NO: 1558501 - RNA, 19 nt, Homo sapiens
  misc_RNA (1)...(19): siRNA sense strand
uauggaggcuauagauaug

SEQ ID NO: 1558502 - RNA, 19 nt, Homo sapiens
  misc_RNA (1)...(19): siRNA sense strand
cuacagaggccugggauau

SEQ ID NO: 1558503 - RNA, 19 nt, Homo sapiens
  misc_RNA (1)...(19): siRNA sense strand
uggauucucuggauucuac

SEQ ID NO: 1558504 - RNA, 19 nt, Homo sapiens
  misc_RNA (1)...(19): siRNA sense strand
gauacuauggcagcuacua

SEQ ID NO: 1558505 - RNA, 19 nt, Homo sapiens
  misc_RNA (1)...(19): siRNA sense strand
uguggaggcuacagauaug

SEQ ID NO: 1558506 - RNA, 19 nt, Homo sapiens
  misc_RNA (1)...(19): siRNA sense strand
agauauggcucuggcuaug

SEQ ID NO: 1558507 - RNA, 19 nt, Homo sapiens
  misc_RNA (1)...(19): siRNA sense strand
acagaggccugggauaugg

SEQ ID NO: 1558508 - RNA, 19 nt, Homo sapiens
  misc_RNA (1)...(19): siRNA sense strand
auauggcuguggaggcuuu

SEQ ID NO: 1558509 - RNA, 19 nt, Homo sapiens
  misc_RNA (1)...(19): siRNA sense strand
gggagaagcugcaggaguu

SEQ ID NO: 1558510 - RNA, 19 nt, Homo sapiens
  misc_RNA (1)...(19): siRNA sense strand
ggaagcagcuccucauugg

SEQ ID NO: 1558511 - RNA, 19 nt, Homo sapiens
  misc_RNA (1)...(19): siRNA sense strand
ggaaaugaaacuaaaggua

SEQ ID NO: 1558512 - RNA, 19 nt, Homo sapiens
  misc_RNA (1)...(19): siRNA sense strand
gcaggucuguuuaccauug

SEQ ID NO: 1558513 - RNA, 19 nt, Homo sapiens
  misc_RNA (1)...(19): siRNA sense strand
gcaaacauguccgccauug

SEQ ID NO: 1558514 - RNA, 19 nt, Homo sapiens
  misc_RNA (1)...(19): siRNA sense strand
ggaaagagucccucgcaaa

SEQ ID NO: 1558515 - RNA, 19 nt, Homo sapiens
  misc_RNA (1)...(19): siRNA sense strand
ucaccugccucuuuaauga

SEQ ID NO: 1558516 - RNA, 19 nt, Homo sapiens
  misc_RNA (1)...(19): siRNA sense strand
ggacagagacccugcuuuc

SEQ ID NO: 1558517 - RNA, 19 nt, Homo sapiens
  misc_RNA (1)...(19): siRNA sense strand
ugacucaguucauuaauuc

SEQ ID NO: 1558518 - RNA, 19 nt, Homo sapiens
  misc_RNA (1)...(19): siRNA sense strand
caagcuaaguuuauacuca

SEQ ID NO: 1558519 - RNA, 19 nt, Homo sapiens
  misc_RNA (1)...(19): siRNA sense strand
gacaagguguauaagauga

SEQ ID NO: 1558520 - RNA, 19 nt, Homo sapiens
  misc_RNA (1)...(19): siRNA sense strand
caagaaagccgagucagaa

SEQ ID NO: 1558521 - RNA, 19 nt, Homo sapiens
  misc_RNA (1)...(19): siRNA sense strand
gaaaagaagccaagaagaa

SEQ ID NO: 1558522 - RNA, 19 nt, Homo sapiens
  misc_RNA (1)...(19): siRNA sense strand
ggaagaagcaggccuccaa

SEQ ID NO: 1558523 - RNA, 19 nt, Homo sapiens
  misc_RNA (1)...(19): siRNA sense strand
gcccauaugucuuaaucuu

SEQ ID NO: 1558524 - RNA, 19 nt, Homo sapiens
  misc_RNA (1)...(19): siRNA sense strand
ggacaguuguggaaagagu

SEQ ID NO: 1558525 - RNA, 19 nt, Homo sapiens
  misc_RNA (1)...(19): siRNA sense strand
gacagugacucaguucauu

SEQ ID NO: 1558526 - RNA, 19 nt, Homo sapiens
  misc_RNA (1)...(19): siRNA sense strand
ucaagaagcgguuucagaa

SEQ ID NO: 1558527 - RNA, 19 nt, Homo sapiens
  misc_RNA (1)...(19): siRNA sense strand
ugacggagcuccucagacu

SEQ ID NO: 1558528 - RNA, 19 nt, Homo sapiens
  misc_RNA (1)...(19): siRNA sense strand
ucaacaggauuacaagaug

SEQ ID NO: 1558529 - RNA, 19 nt, Homo sapiens
  misc_RNA (1)...(19): siRNA sense strand
aagaagcgguuucagaaga

SEQ ID NO: 1558530 - RNA, 19 nt, Homo sapiens
  misc_RNA (1)...(19): siRNA sense strand
gaaacuacaaggcaaagau

SEQ ID NO: 1558531 - RNA, 19 nt, Homo sapiens
  misc_RNA (1)...(19): siRNA sense strand
gugacucaguucauuaauu

SEQ ID NO: 1558532 - RNA, 19 nt, Homo sapiens
  misc_RNA (1)...(19): siRNA sense strand
cauuacaccuucuaugaug

SEQ ID NO: 1558533 - RNA, 19 nt, Homo sapiens
  misc_RNA (1)...(19): siRNA sense strand
gaagauauccaaggaagca

SEQ ID NO: 1558534 - RNA, 19 nt, Homo sapiens
  misc_RNA (1)...(19): siRNA sense strand
gaaagagucccucgcaaac

SEQ ID NO: 1558535 - RNA, 19 nt, Homo sapiens
  misc_RNA (1)...(19): siRNA sense strand
caaggugaaugaggaaaug

SEQ ID NO: 1558536 - RNA, 19 nt, Homo sapiens
  misc_RNA (1)...(19): siRNA sense strand
gaaaauaggcaaaucuaga

SEQ ID NO: 1558537 - RNA, 19 nt, Homo sapiens
  misc_RNA (1)...(19): siRNA sense strand
aaaggaggaggaagaauuu

SEQ ID NO: 1558538 - RNA, 19 nt, Homo sapiens
  misc_RNA (1)...(19): siRNA sense strand
gcaaaucuagaacuacaga

SEQ ID NO: 1558539 - RNA, 19 nt, Homo sapiens
  misc_RNA (1)...(19): siRNA sense strand
caccuggaauccucaauug

SEQ ID NO: 1558540 - RNA, 19 nt, Homo sapiens
  misc_RNA (1)...(19): siRNA sense strand
gaaagggccacauggaaag

SEQ ID NO: 1558541 - RNA, 19 nt, Homo sapiens
  misc_RNA (1)...(19): siRNA sense strand
ugaaagggccacauggaaa

SEQ ID NO: 1558542 - RNA, 19 nt, Homo sapiens
  misc_RNA (1)...(19): siRNA sense strand
ggacaucaccaggcgcuuu

SEQ ID NO: 1558543 - RNA, 19 nt, Homo sapiens
  misc_RNA (1)...(19): siRNA sense strand
cagcagggacagcaagaua

SEQ ID NO: 1558544 - RNA, 19 nt, Homo sapiens
  misc_RNA (1)...(19): siRNA sense strand
gacaagagagccugaagug

SEQ ID NO: 1558545 - RNA, 19 nt, Homo sapiens
  misc_RNA (1)...(19): siRNA sense strand
cagagacuuugaaggauga

SEQ ID NO: 1558546 - RNA, 19 nt, Homo sapiens
  misc_RNA (1)...(19): siRNA sense strand
uuaaugacauaccuggauu

SEQ ID NO: 1558547 - RNA, 19 nt, Homo sapiens
  misc_RNA (1)...(19): siRNA sense strand
acagcaagauaacuaguug

SEQ ID NO: 1558548 - RNA, 19 nt, Homo sapiens
  misc_RNA (1)...(19): siRNA sense strand
ggaagacuauguggagaag

SEQ ID NO: 1558549 - RNA, 19 nt, Homo sapiens
  misc_RNA (1)...(19): siRNA sense strand
gaaagccgagucagaagau

SEQ ID NO: 1558550 - RNA, 19 nt, Homo sapiens
  misc_RNA (1)...(19): siRNA sense strand
gacuacaaauucaguguuc

SEQ ID NO: 1558551 - RNA, 19 nt, Homo sapiens
  misc_RNA (1)...(19): siRNA sense strand
gauauggccucagcaagca

SEQ ID NO: 1558552 - RNA, 19 nt, Homo sapiens
  misc_RNA (1)...(19): siRNA sense strand
gcugaacacucucuacaac

SEQ ID NO: 1558553 - RNA, 19 nt, Homo sapiens
  misc_RNA (1)...(19): siRNA sense strand
ggaagcucaugcucaagga

SEQ ID NO: 1558554 - RNA, 19 nt, Homo sapiens
  misc_RNA (1)...(19): siRNA sense strand
gauggcuccuccuucguuu

SEQ ID NO: 1558555 - RNA, 19 nt, Homo sapiens
  misc_RNA (1)...(19): siRNA sense strand
gaagcaggccuccaagaag

SEQ ID NO: 1558556 - RNA, 19 nt, Homo sapiens
  misc_RNA (1)...(19): siRNA sense strand
ggaggaggaagaauuuguu

SEQ ID NO: 1558557 - RNA, 19 nt, Homo sapiens
  misc_RNA (1)...(19): siRNA sense strand
agaagacagugacucaguu

SEQ ID NO: 1558558 - RNA, 19 nt, Homo sapiens
  misc_RNA (1)...(19): siRNA sense strand
ccacauagaagcugaaagg

SEQ ID NO: 1558559 - RNA, 19 nt, Homo sapiens
  misc_RNA (1)...(19): siRNA sense strand
gucagaagauauccaagga

SEQ ID NO: 1558560 - RNA, 19 nt, Homo sapiens
  misc_RNA (1)...(19): siRNA sense strand
cauugaauaucccaccaaa

SEQ ID NO: 1558561 - RNA, 19 nt, Homo sapiens
  misc_RNA (1)...(19): siRNA sense strand
gcuccuccuucguuuacua

SEQ ID NO: 1558562 - RNA, 19 nt, Homo sapiens
  misc_RNA (1)...(19): siRNA sense strand
gcuacuuccugccggauga

SEQ ID NO: 1558563 - RNA, 19 nt, Homo sapiens
  misc_RNA (1)...(19): siRNA sense strand
uggaauggcauaugacaaa

SEQ ID NO: 1558564 - RNA, 19 nt, Homo sapiens
  misc_RNA (1)...(19): siRNA sense strand
cagcugaucuaccacucuu

SEQ ID NO: 1558565 - RNA, 19 nt, Homo sapiens
  misc_RNA (1)...(19): siRNA sense strand
gcggacaguuguggaaaga

SEQ ID NO: 1558566 - RNA, 19 nt, Homo sapiens
  misc_RNA (1)...(19): siRNA sense strand
accaucaccugccucuuua

SEQ ID NO: 1558567 - RNA, 19 nt, Homo sapiens
  misc_RNA (1)...(19): siRNA sense strand
auaggcaaaucuagaacua

SEQ ID NO: 1558568 - RNA, 19 nt, Homo sapiens
  misc_RNA (1)...(19): siRNA sense strand
gaagacagugacucaguuc

SEQ ID NO: 1558569 - RNA, 19 nt, Homo sapiens
  misc_RNA (1)...(19): siRNA sense strand
gcuauguaguccacaagug

SEQ ID NO: 1558570 - RNA, 19 nt, Homo sapiens
  misc_RNA (1)...(19): siRNA sense strand
ucaagaaagccgagucaga

SEQ ID NO: 1558571 - RNA, 19 nt, Homo sapiens
  misc_RNA (1)...(19): siRNA sense strand
aagaugagauccagaacuc

SEQ ID NO: 1558572 - RNA, 19 nt, Homo sapiens
  misc_RNA (1)...(19): siRNA sense strand
uggaauacaaggugaauga

SEQ ID NO: 1558573 - RNA, 19 nt, Homo sapiens
  misc_RNA (1)...(19): siRNA sense strand
ggaaagggaggaauaucuc

SEQ ID NO: 1558574 - RNA, 19 nt, Homo sapiens
  misc_RNA (1)...(19): siRNA sense strand
cauuggcccuggaagacua

SEQ ID NO: 1558575 - RNA, 19 nt, Homo sapiens
  misc_RNA (1)...(19): siRNA sense strand
ccggaugacuacaaauuca

SEQ ID NO: 1558576 - RNA, 19 nt, Homo sapiens
  misc_RNA (1)...(19): siRNA sense strand
gaauuuguucgguucaaga

SEQ ID NO: 1558577 - RNA, 19 nt, Homo sapiens
  misc_RNA (1)...(19): siRNA sense strand
cgacaagguguauaagaug

SEQ ID NO: 1558578 - RNA, 19 nt, Homo sapiens
  misc_RNA (1)...(19): siRNA sense strand
cccaugaucuuacgaaacu

SEQ ID NO: 1558579 - RNA, 19 nt, Homo sapiens
  misc_RNA (1)...(19): siRNA sense strand
aagcaggccuccaagaagu

SEQ ID NO: 1558580 - RNA, 19 nt, Homo sapiens
  misc_RNA (1)...(19): siRNA sense strand
ggucucaacaggauuacaa

SEQ ID NO: 1558581 - RNA, 19 nt, Homo sapiens
  misc_RNA (1)...(19): siRNA sense strand
cggcugaaccgcagaauca

SEQ ID NO: 1558582 - RNA, 19 nt, Homo sapiens
  misc_RNA (1)...(19): siRNA sense strand
uguguucacuacaaccuaa

SEQ ID NO: 1558583 - RNA, 19 nt, Homo sapiens
  misc_RNA (1)...(19): siRNA sense strand
ggaugauucugauguuugc

SEQ ID NO: 1558584 - RNA, 19 nt, Homo sapiens
  misc_RNA (1)...(19): siRNA sense strand
gggaugauucugauguuug

SEQ ID NO: 1558585 - RNA, 19 nt, Homo sapiens
  misc_RNA (1)...(19): siRNA sense strand
ugaacacucucuacaacca

SEQ ID NO: 1558586 - RNA, 19 nt, Homo sapiens
  misc_RNA (1)...(19): siRNA sense strand
caguugcccauaugucuua

SEQ ID NO: 1558587 - RNA, 19 nt, Homo sapiens
  misc_RNA (1)...(19): siRNA sense strand
gaaacgucgcuguauguca

SEQ ID NO: 1558588 - RNA, 19 nt, Homo sapiens
  misc_RNA (1)...(19): siRNA sense strand
agaagcaggccuccaagaa

SEQ ID NO: 1558589 - RNA, 19 nt, Homo sapiens
  misc_RNA (1)...(19): siRNA sense strand
aagacuauguggagaagga

SEQ ID NO: 1558590 - RNA, 19 nt, Homo sapiens
  misc_RNA (1)...(19): siRNA sense strand
ccgcaggucuguuuaccau

SEQ ID NO: 1558591 - RNA, 19 nt, Homo sapiens
  misc_RNA (1)...(19): siRNA sense strand
acagugacucaguucauua

SEQ ID NO: 1558592 - RNA, 19 nt, Homo sapiens
  misc_RNA (1)...(19): siRNA sense strand
gaaugaggaaaugaaacua

SEQ ID NO: 1558593 - RNA, 19 nt, Homo sapiens
  misc_RNA (1)...(19): siRNA sense strand
aaccaucaccugccucuuu

SEQ ID NO: 1558594 - RNA, 19 nt, Homo sapiens
  misc_RNA (1)...(19): siRNA sense strand
acgacaagguguauaagau

SEQ ID NO: 1558595 - RNA, 19 nt, Homo sapiens
  misc_RNA (1)...(19): siRNA sense strand
ggugaaugaggaaaugaaa

SEQ ID NO: 1558596 - RNA, 19 nt, Homo sapiens
  misc_RNA (1)...(19): siRNA sense strand
aggcaaaucuagaacuaca

SEQ ID NO: 1558597 - RNA, 19 nt, Homo sapiens
  misc_RNA (1)...(19): siRNA sense strand
gacagcaagauaacuaguu

SEQ ID NO: 1558598 - RNA, 19 nt, Homo sapiens
  misc_RNA (1)...(19): siRNA sense strand
cuacagcagcggacaguug

SEQ ID NO: 1558599 - RNA, 19 nt, Homo sapiens
  misc_RNA (1)...(19): siRNA sense strand
uuuguucgguucaagauga

SEQ ID NO: 1558600 - RNA, 19 nt, Homo sapiens
  misc_RNA (1)...(19): siRNA sense strand
ucagcaacauggacgacaa

SEQ ID NO: 1558601 - RNA, 19 nt, Homo sapiens
  misc_RNA (1)...(19): siRNA sense strand
gacgacaagguguauaaga

SEQ ID NO: 1558602 - RNA, 19 nt, Homo sapiens
  misc_RNA (1)...(19): siRNA sense strand
gcugaaagggccacaugga

SEQ ID NO: 1558603 - RNA, 19 nt, Homo sapiens
  misc_RNA (1)...(19): siRNA sense strand
gcaagauaacuaguuggaa

SEQ ID NO: 1558604 - RNA, 19 nt, Homo sapiens
  misc_RNA (1)...(19): siRNA sense strand
ccaccuggaauccucaauu

SEQ ID NO: 1558605 - RNA, 19 nt, Homo sapiens
  misc_RNA (1)...(19): siRNA sense strand
aagagucccucgcaaacau

SEQ ID NO: 1558606 - RNA, 19 nt, Homo sapiens
  misc_RNA (1)...(19): siRNA sense strand
ggaauggcauaugacaaac

SEQ ID NO: 1558607 - RNA, 19 nt, Homo sapiens
  misc_RNA (1)...(19): siRNA sense strand
uugcagagacuuugaagga

SEQ ID NO: 1558608 - RNA, 19 nt, Homo sapiens
  misc_RNA (1)...(19): siRNA sense strand
gccuucaacugccugauca

SEQ ID NO: 1558609 - RNA, 19 nt, Homo sapiens
  misc_RNA (1)...(19): siRNA sense strand
auacuggucuucuggauuc

SEQ ID NO: 1558610 - RNA, 19 nt, Homo sapiens
  misc_RNA (1)...(19): siRNA sense strand
ggccugggcuauggcuaua

SEQ ID NO: 1558611 - RNA, 19 nt, Homo sapiens
  misc_RNA (1)...(19): siRNA sense strand
gcuauggaggcuacagaua

SEQ ID NO: 1558612 - RNA, 19 nt, Homo sapiens
  misc_RNA (1)...(19): siRNA sense strand
cuacggcuguggaggauuc

SEQ ID NO: 1558613 - RNA, 19 nt, Homo sapiens
  misc_RNA (1)...(19): siRNA sense strand
ggcuauagcuguggaugug

SEQ ID NO: 1558614 - RNA, 19 nt, Homo sapiens
  misc_RNA (1)...(19): siRNA sense strand
ggauacuggucuucuggau

SEQ ID NO: 1558615 - RNA, 19 nt, Homo sapiens
  misc_RNA (1)...(19): siRNA sense strand
uauggaggcuacagauaca

SEQ ID NO: 1558616 - RNA, 19 nt, Homo sapiens
  misc_RNA (1)...(19): siRNA sense strand
gauacuggucuucuggauu

SEQ ID NO: 1558617 - RNA, 19 nt, Homo sapiens
  misc_RNA (1)...(19): siRNA sense strand
ggucuucuggauucuauug

SEQ ID NO: 1558618 - RNA, 19 nt, Homo sapiens
  misc_RNA (1)...(19): siRNA sense strand
ggcuauggcuguggcuaug

SEQ ID NO: 1558619 - RNA, 19 nt, Homo sapiens
  misc_RNA (1)...(19): siRNA sense strand
gggcuauggcuguggcuau

SEQ ID NO: 1558620 - RNA, 19 nt, Homo sapiens
  misc_RNA (1)...(19): siRNA sense strand
gaaaggacccggauaguuu

SEQ ID NO: 1558621 - RNA, 19 nt, Homo sapiens
  misc_RNA (1)...(19): siRNA sense strand
ggucauacuucuuuaacua

SEQ ID NO: 1558622 - RNA, 19 nt, Homo sapiens
  misc_RNA (1)...(19): siRNA sense strand
agaaaccacugccauguua

SEQ ID NO: 1558623 - RNA, 19 nt, Homo sapiens
  misc_RNA (1)...(19): siRNA sense strand
gcaaauacuugugcccuuu

SEQ ID NO: 1558624 - RNA, 19 nt, Homo sapiens
  misc_RNA (1)...(19): siRNA sense strand
uauaauagcugccaaacau

SEQ ID NO: 1558625 - RNA, 19 nt, Homo sapiens
  misc_RNA (1)...(19): siRNA sense strand
uaauaagucugcucaaguu

SEQ ID NO: 1558626 - RNA, 19 nt, Homo sapiens
  misc_RNA (1)...(19): siRNA sense strand
aaagggaacuuggaaauga

SEQ ID NO: 1558627 - RNA, 19 nt, Homo sapiens
  misc_RNA (1)...(19): siRNA sense strand
gacauuggcauccagauua

SEQ ID NO: 1558628 - RNA, 19 nt, Homo sapiens
  misc_RNA (1)...(19): siRNA sense strand
ugaugaagaugcuauugua

SEQ ID NO: 1558629 - RNA, 19 nt, Homo sapiens
  misc_RNA (1)...(19): siRNA sense strand
cuacauuucuccauuaguu

SEQ ID NO: 1558630 - RNA, 19 nt, Homo sapiens
  misc_RNA (1)...(19): siRNA sense strand
ccuuauaacucuugccaua

SEQ ID NO: 1558631 - RNA, 19 nt, Homo sapiens
  misc_RNA (1)...(19): siRNA sense strand
caaagaagacugguauaaa

SEQ ID NO: 1558632 - RNA, 19 nt, Homo sapiens
  misc_RNA (1)...(19): siRNA sense strand
ugaagaugcuauuguagaa

SEQ ID NO: 1558633 - RNA, 19 nt, Homo sapiens
  misc_RNA (1)...(19): siRNA sense strand
caucauggcauugcaaaua

SEQ ID NO: 1558634 - RNA, 19 nt, Homo sapiens
  misc_RNA (1)...(19): siRNA sense strand
ccuaauaauuggcaacuug

SEQ ID NO: 1558635 - RNA, 19 nt, Homo sapiens
  misc_RNA (1)...(19): siRNA sense strand
ggaaaggacccggauaguu

SEQ ID NO: 1558636 - RNA, 19 nt, Homo sapiens
  misc_RNA (1)...(19): siRNA sense strand
uccauuaguugguguauuu

SEQ ID NO: 1558637 - RNA, 19 nt, Homo sapiens
  misc_RNA (1)...(19): siRNA sense strand
guccaggaguaaauaauaa

SEQ ID NO: 1558638 - RNA, 19 nt, Homo sapiens
  misc_RNA (1)...(19): siRNA sense strand
ggaauccaguggcaucaug

SEQ ID NO: 1558639 - RNA, 19 nt, Homo sapiens
  misc_RNA (1)...(19): siRNA sense strand
guaauuugguggccauuca

SEQ ID NO: 1558640 - RNA, 19 nt, Homo sapiens
  misc_RNA (1)...(19): siRNA sense strand
ccacugccauguuacaaga

SEQ ID NO: 1558641 - RNA, 19 nt, Homo sapiens
  misc_RNA (1)...(19): siRNA sense strand
uaagucugcucaaguucua

SEQ ID NO: 1558642 - RNA, 19 nt, Homo sapiens
  misc_RNA (1)...(19): siRNA sense strand
ucaaagaagacugguauaa

SEQ ID NO: 1558643 - RNA, 19 nt, Homo sapiens
  misc_RNA (1)...(19): siRNA sense strand
gguccaggaguaaauaaua

SEQ ID NO: 1558644 - RNA, 19 nt, Homo sapiens
  misc_RNA (1)...(19): siRNA sense strand
ugagaccuauuacuacauu

SEQ ID NO: 1558645 - RNA, 19 nt, Homo sapiens
  misc_RNA (1)...(19): siRNA sense strand
cauauuggcuuggauaagu

SEQ ID NO: 1558646 - RNA, 19 nt, Homo sapiens
  misc_RNA (1)...(19): siRNA sense strand
gguuguuacuacccauuua

SEQ ID NO: 1558647 - RNA, 19 nt, Homo sapiens
  misc_RNA (1)...(19): siRNA sense strand
agugauuccuggacauuua

SEQ ID NO: 1558648 - RNA, 19 nt, Homo sapiens
  misc_RNA (1)...(19): siRNA sense strand
cagauuauccacugcagua

SEQ ID NO: 1558649 - RNA, 19 nt, Homo sapiens
  misc_RNA (1)...(19): siRNA sense strand
ucaucaagcugcagccaaa

SEQ ID NO: 1558650 - RNA, 19 nt, Homo sapiens
  misc_RNA (1)...(19): siRNA sense strand
ccucuacacuauucauuug

SEQ ID NO: 1558651 - RNA, 19 nt, Homo sapiens
  misc_RNA (1)...(19): siRNA sense strand
cuaccuaccuccauuuaca

SEQ ID NO: 1558652 - RNA, 19 nt, Homo sapiens
  misc_RNA (1)...(19): siRNA sense strand
ccaaaaguaugaugacuau

SEQ ID NO: 1558653 - RNA, 19 nt, Homo sapiens
  misc_RNA (1)...(19): siRNA sense strand
cagcuaugguuauaaguag

SEQ ID NO: 1558654 - RNA, 19 nt, Homo sapiens
  misc_RNA (1)...(19): siRNA sense strand
ccaguggcaucauggcauu

SEQ ID NO: 1558655 - RNA, 19 nt, Homo sapiens
  misc_RNA (1)...(19): siRNA sense strand
ugguugggauuguuguuua

SEQ ID NO: 1558656 - RNA, 19 nt, Homo sapiens
  misc_RNA (1)...(19): siRNA sense strand
uuaccuugaucauuccaua

SEQ ID NO: 1558657 - RNA, 19 nt, Homo sapiens
  misc_RNA (1)...(19): siRNA sense strand
gaaaaguggaaccuaauaa

SEQ ID NO: 1558658 - RNA, 19 nt, Homo sapiens
  misc_RNA (1)...(19): siRNA sense strand
gcaugguacuggauauagu

SEQ ID NO: 1558659 - RNA, 19 nt, Homo sapiens
  misc_RNA (1)...(19): siRNA sense strand
guucaaagaagacugguau

SEQ ID NO: 1558660 - RNA, 19 nt, Homo sapiens
  misc_RNA (1)...(19): siRNA sense strand
acugggagguguucagaaa

SEQ ID NO: 1558661 - RNA, 19 nt, Homo sapiens
  misc_RNA (1)...(19): siRNA sense strand
gcucaaguucuacugcuuu

SEQ ID NO: 1558662 - RNA, 19 nt, Homo sapiens
  misc_RNA (1)...(19): siRNA sense strand
cuagcaggauuucuaccua

SEQ ID NO: 1558663 - RNA, 19 nt, Homo sapiens
  misc_RNA (1)...(19): siRNA sense strand
gaucauuccauacuucugu

SEQ ID NO: 1558664 - RNA, 19 nt, Homo sapiens
  misc_RNA (1)...(19): siRNA sense strand
ugaugacuaugccaauuau

SEQ ID NO: 1558665 - RNA, 19 nt, Homo sapiens
  misc_RNA (1)...(19): siRNA sense strand
aaacuugguugggauuguu

SEQ ID NO: 1558666 - RNA, 19 nt, Homo sapiens
  misc_RNA (1)...(19): siRNA sense strand
aaacauccagccacaagaa

SEQ ID NO: 1558667 - RNA, 19 nt, Homo sapiens
  misc_RNA (1)...(19): siRNA sense strand
agaagugaccccaaaauua

SEQ ID NO: 1558668 - RNA, 19 nt, Homo sapiens
  misc_RNA (1)...(19): siRNA sense strand
uaugaugacuaugccaauu

SEQ ID NO: 1558669 - RNA, 19 nt, Homo sapiens
  misc_RNA (1)...(19): siRNA sense strand
uuaaugguauuggugguaa

SEQ ID NO: 1558670 - RNA, 19 nt, Homo sapiens
  misc_RNA (1)...(19): siRNA sense strand
ucaaagggaacuuggaaau

SEQ ID NO: 1558671 - RNA, 19 nt, Homo sapiens
  misc_RNA (1)...(19): siRNA sense strand
caaagggaacuuggaaaug

SEQ ID NO: 1558672 - RNA, 19 nt, Homo sapiens
  misc_RNA (1)...(19): siRNA sense strand
cagaaaaguuacagaaguu

SEQ ID NO: 1558673 - RNA, 19 nt, Homo sapiens
  misc_RNA (1)...(19): siRNA sense strand
aaguggaaccuaauaauug

SEQ ID NO: 1558674 - RNA, 19 nt, Homo sapiens
  misc_RNA (1)...(19): siRNA sense strand
ccacugcaguaaauauugg

SEQ ID NO: 1558675 - RNA, 19 nt, Homo sapiens
  misc_RNA (1)...(19): siRNA sense strand
aguuucagcuggcauggua

SEQ ID NO: 1558676 - RNA, 19 nt, Homo sapiens
  misc_RNA (1)...(19): siRNA sense strand
uauaacucuugccauauug

SEQ ID NO: 1558677 - RNA, 19 nt, Homo sapiens
  misc_RNA (1)...(19): siRNA sense strand
gauuauccacugcaguaaa

SEQ ID NO: 1558678 - RNA, 19 nt, Homo sapiens
  misc_RNA (1)...(19): siRNA sense strand
caguaaauauugggaagau

SEQ ID NO: 1558679 - RNA, 19 nt, Homo sapiens
  misc_RNA (1)...(19): siRNA sense strand
uauuggagaucgagaugga

SEQ ID NO: 1558680 - RNA, 19 nt, Homo sapiens
  misc_RNA (1)...(19): siRNA sense strand
gguuaucguugguucaaag

SEQ ID NO: 1558681 - RNA, 19 nt, Homo sapiens
  misc_RNA (1)...(19): siRNA sense strand
uggagauguuggagacuaa

SEQ ID NO: 1558682 - RNA, 19 nt, Homo sapiens
  misc_RNA (1)...(19): siRNA sense strand
agaucgagauggagauguu

SEQ ID NO: 1558683 - RNA, 19 nt, Homo sapiens
  misc_RNA (1)...(19): siRNA sense strand
aauaauaagucugcucaag

SEQ ID NO: 1558684 - RNA, 19 nt, Homo sapiens
  misc_RNA (1)...(19): siRNA sense strand
caaacuugguugggauugu

SEQ ID NO: 1558685 - RNA, 19 nt, Homo sapiens
  misc_RNA (1)...(19): siRNA sense strand
gguauaaauccugauaaug

SEQ ID NO: 1558686 - RNA, 19 nt, Homo sapiens
  misc_RNA (1)...(19): siRNA sense strand
gaagugaccccaaaauuac

SEQ ID NO: 1558687 - RNA, 19 nt, Homo sapiens
  misc_RNA (1)...(19): siRNA sense strand
acccaaagguuguuacuac

SEQ ID NO: 1558688 - RNA, 19 nt, Homo sapiens
  misc_RNA (1)...(19): siRNA sense strand
guuuacacgccaguuauua

SEQ ID NO: 1558689 - RNA, 19 nt, Homo sapiens
  misc_RNA (1)...(19): siRNA sense strand
gcacugggagguguucaga

SEQ ID NO: 1558690 - RNA, 19 nt, Homo sapiens
  misc_RNA (1)...(19): siRNA sense strand
acagcuaugguuauaagua

SEQ ID NO: 1558691 - RNA, 19 nt, Homo sapiens
  misc_RNA (1)...(19): siRNA sense strand
gauuauaauagcugccaaa

SEQ ID NO: 1558692 - RNA, 19 nt, Homo sapiens
  misc_RNA (1)...(19): siRNA sense strand
ugacauuggcauccagauu

SEQ ID NO: 1558693 - RNA, 19 nt, Homo sapiens
  misc_RNA (1)...(19): siRNA sense strand
cagaaaccacugccauguu

SEQ ID NO: 1558694 - RNA, 19 nt, Homo sapiens
  misc_RNA (1)...(19): siRNA sense strand
acauuggcauccagauuau

SEQ ID NO: 1558695 - RNA, 19 nt, Homo sapiens
  misc_RNA (1)...(19): siRNA sense strand
uaacagcauugggugaucu

SEQ ID NO: 1558696 - RNA, 19 nt, Homo sapiens
  misc_RNA (1)...(19): siRNA sense strand
caucacuucuggaggaaag

SEQ ID NO: 1558697 - RNA, 19 nt, Homo sapiens
  misc_RNA (1)...(19): siRNA sense strand
caggcuagcaggauuucua

SEQ ID NO: 1558698 - RNA, 19 nt, Homo sapiens
  misc_RNA (1)...(19): siRNA sense strand
acacgccaguuauuaaugg

SEQ ID NO: 1558699 - RNA, 19 nt, Homo sapiens
  misc_RNA (1)...(19): siRNA sense strand
ccaaacauccagccacaag

SEQ ID NO: 1558700 - RNA, 19 nt, Homo sapiens
  misc_RNA (1)...(19): siRNA sense strand
gcagguucaggcaacagua

SEQ ID NO: 1558701 - RNA, 19 nt, Homo sapiens
  misc_RNA (1)...(19): siRNA sense strand
guuguuuacacgccaguua

SEQ ID NO: 1558702 - RNA, 19 nt, Homo sapiens
  misc_RNA (1)...(19): siRNA sense strand
gcugggagccugucauaac

SEQ ID NO: 1558703 - RNA, 19 nt, Homo sapiens
  misc_RNA (1)...(19): siRNA sense strand
gagaccuauuacuacauuu

SEQ ID NO: 1558704 - RNA, 19 nt, Homo sapiens
  misc_RNA (1)...(19): siRNA sense strand
uaucguugguucaaagaag

SEQ ID NO: 1558705 - RNA, 19 nt, Homo sapiens
  misc_RNA (1)...(19): siRNA sense strand
aagaugcuauuguagaagu

SEQ ID NO: 1558706 - RNA, 19 nt, Homo sapiens
  misc_RNA (1)...(19): siRNA sense strand
gcagggaauaauaaugguu

SEQ ID NO: 1558707 - RNA, 19 nt, Homo sapiens
  misc_RNA (1)...(19): siRNA sense strand
ggcuuauacuccugucuug

SEQ ID NO: 1558708 - RNA, 19 nt, Homo sapiens
  misc_RNA (1)...(19): siRNA sense strand
cuacacuauucauuugaug

SEQ ID NO: 1558709 - RNA, 19 nt, Homo sapiens
  misc_RNA (1)...(19): siRNA sense strand
uuucuuugguccaggagua

SEQ ID NO: 1558710 - RNA, 19 nt, Homo sapiens
  misc_RNA (1)...(19): siRNA sense strand
uguaucagacccaaacuug

SEQ ID NO: 1558711 - RNA, 19 nt, Homo sapiens
  misc_RNA (1)...(19): siRNA sense strand
aggcaacaguaguggguuu

SEQ ID NO: 1558712 - RNA, 19 nt, Homo sapiens
  misc_RNA (1)...(19): siRNA sense strand
ugguauuggugguaauuug

SEQ ID NO: 1558713 - RNA, 19 nt, Homo sapiens
  misc_RNA (1)...(19): siRNA sense strand
gggcuuauacuccugucuu

SEQ ID NO: 1558714 - RNA, 19 nt, Homo sapiens
  misc_RNA (1)...(19): siRNA sense strand
gcaguaaauauugggaaga

SEQ ID NO: 1558715 - RNA, 19 nt, Homo sapiens
  misc_RNA (1)...(19): siRNA sense strand
cuugagaccuauuacuaca

SEQ ID NO: 1558716 - RNA, 19 nt, Homo sapiens
  misc_RNA (1)...(19): siRNA sense strand
gaagacugguauaaauccu

SEQ ID NO: 1558717 - RNA, 19 nt, Homo sapiens
  misc_RNA (1)...(19): siRNA sense strand
cauucaggcuagcaggauu

SEQ ID NO: 1558718 - RNA, 19 nt, Homo sapiens
  misc_RNA (1)...(19): siRNA sense strand
uuuauuuggcgcuguguua

SEQ ID NO: 1558719 - RNA, 19 nt, Homo sapiens
  misc_RNA (1)...(19): siRNA sense strand
acauagcauuccaggagaa

SEQ ID NO: 1558720 - RNA, 19 nt, Homo sapiens
  misc_RNA (1)...(19): siRNA sense strand
gaacaaggccuaugucauc

SEQ ID NO: 1558721 - RNA, 19 nt, Homo sapiens
  misc_RNA (1)...(19): siRNA sense strand
ggaccaagcacuucacuga

SEQ ID NO: 1558722 - RNA, 19 nt, Homo sapiens
  misc_RNA (1)...(19): siRNA sense strand
caagaagggugaggacauu

SEQ ID NO: 1558723 - RNA, 19 nt, Homo sapiens
  misc_RNA (1)...(19): siRNA sense strand
ccacaggcaugaucuuugu

SEQ ID NO: 1558724 - RNA, 19 nt, Homo sapiens
  misc_RNA (1)...(19): siRNA sense strand
guccaagcguccagguuua

SEQ ID NO: 1558725 - RNA, 19 nt, Homo sapiens
  misc_RNA (1)...(19): siRNA sense strand
gugaggacauuccguuaau

SEQ ID NO: 1558726 - RNA, 19 nt, Homo sapiens
  misc_RNA (1)...(19): siRNA sense strand
ucaagcugcucauguggaa

SEQ ID NO: 1558727 - RNA, 19 nt, Homo sapiens
  misc_RNA (1)...(19): siRNA sense strand
gguccaagcguccagguuu

SEQ ID NO: 1558728 - RNA, 19 nt, Homo sapiens
  misc_RNA (1)...(19): siRNA sense strand
cgucauugcugaggacuug

SEQ ID NO: 1558729 - RNA, 19 nt, Homo sapiens
  misc_RNA (1)...(19): siRNA sense strand
ggaguuggcggucgagugu

SEQ ID NO: 1558730 - RNA, 19 nt, Homo sapiens
  misc_RNA (1)...(19): siRNA sense strand
ggugaggacauuccguuaa

SEQ ID NO: 1558731 - RNA, 19 nt, Homo sapiens
  misc_RNA (1)...(19): siRNA sense strand
ucacugaggccaccaagau

SEQ ID NO: 1558732 - RNA, 19 nt, Homo sapiens
  misc_RNA (1)...(19): siRNA sense strand
gugcguggcugaacuuugc

SEQ ID NO: 1558733 - RNA, 19 nt, Homo sapiens
  misc_RNA (1)...(19): siRNA sense strand
ggaacaaggccuaugucau

SEQ ID NO: 1558734 - RNA, 19 nt, Homo sapiens
  misc_RNA (1)...(19): siRNA sense strand
gcagaucaacuggcuguca

SEQ ID NO: 1558735 - RNA, 19 nt, Homo sapiens
  misc_RNA (1)...(19): siRNA sense strand
ggcucaagcugcucaugug

SEQ ID NO: 1558736 - RNA, 19 nt, Homo sapiens
  misc_RNA (1)...(19): siRNA sense strand
ccaacaugcucgccaccau

SEQ ID NO: 1558737 - RNA, 19 nt, Homo sapiens
  misc_RNA (1)...(19): siRNA sense strand
ccauggagcagaucaacug

SEQ ID NO: 1558738 - RNA, 19 nt, Homo sapiens
  misc_RNA (1)...(19): siRNA sense strand
caagcguccagguuuauug

SEQ ID NO: 1558739 - RNA, 19 nt, Homo sapiens
  misc_RNA (1)...(19): siRNA sense strand
gggugaggacauuccguua

SEQ ID NO: 1558740 - RNA, 19 nt, Homo sapiens
  misc_RNA (1)...(19): siRNA sense strand
gcgaucagccugcucaacu

SEQ ID NO: 1558741 - RNA, 19 nt, Homo sapiens
  misc_RNA (1)...(19): siRNA sense strand
guuaaugcucggugucuau

SEQ ID NO: 1558742 - RNA, 19 nt, Homo sapiens
  misc_RNA (1)...(19): siRNA sense strand
cgaucagccugcucaacug

SEQ ID NO: 1558743 - RNA, 19 nt, Homo sapiens
  misc_RNA (1)...(19): siRNA sense strand
gaucucugccagcuucuca

SEQ ID NO: 1558744 - RNA, 19 nt, Homo sapiens
  misc_RNA (1)...(19): siRNA sense strand
gggcucaagcugcucaugu

SEQ ID NO: 1558745 - RNA, 19 nt, Homo sapiens
  misc_RNA (1)...(19): siRNA sense strand
ggagugugcuacgcauggu

SEQ ID NO: 1558746 - RNA, 19 nt, Homo sapiens
  misc_RNA (1)...(19): siRNA sense strand
uuaaugcucggugucuaua

SEQ ID NO: 1558747 - RNA, 19 nt, Homo sapiens
  misc_RNA (1)...(19): siRNA sense strand
ucaagaagggugaggacau

SEQ ID NO: 1558748 - RNA, 19 nt, Homo sapiens
  misc_RNA (1)...(19): siRNA sense strand
cauccuggcggucuucuuc

SEQ ID NO: 1558749 - RNA, 19 nt, Homo sapiens
  misc_RNA (1)...(19): siRNA sense strand
gccacaggcaugaucuuug

SEQ ID NO: 1558750 - RNA, 19 nt, Homo sapiens
  misc_RNA (1)...(19): siRNA sense strand
cgagggaauacucaucaug

SEQ ID NO: 1558751 - RNA, 19 nt, Homo sapiens
  misc_RNA (1)...(19): siRNA sense strand
ggaccggaccaagcacuuc

SEQ ID NO: 1558752 - RNA, 19 nt, Homo sapiens
  misc_RNA (1)...(19): siRNA sense strand
caaugacggcacugacugu

SEQ ID NO: 1558753 - RNA, 19 nt, Homo sapiens
  misc_RNA (1)...(19): siRNA sense strand
gccgagggaauacucauca

SEQ ID NO: 1558754 - RNA, 19 nt, Homo sapiens
  misc_RNA (1)...(19): siRNA sense strand
accuguggcugacgucauu

SEQ ID NO: 1558755 - RNA, 19 nt, Homo sapiens
  misc_RNA (1)...(19): siRNA sense strand
gaccggaccaagcacuuca

SEQ ID NO: 1558756 - RNA, 19 nt, Homo sapiens
  misc_RNA (1)...(19): siRNA sense strand
gcaacgagcuggacaugga

SEQ ID NO: 1558757 - RNA, 19 nt, Homo sapiens
  misc_RNA (1)...(19): siRNA sense strand
gagagcuacucauguaaga

SEQ ID NO: 1558758 - RNA, 19 nt, Homo sapiens
  misc_RNA (1)...(19): siRNA sense strand
ccacaucauuggcaggauu

SEQ ID NO: 1558759 - RNA, 19 nt, Homo sapiens
  misc_RNA (1)...(19): siRNA sense strand
aagcgaaucgucuucuuua

SEQ ID NO: 1558760 - RNA, 19 nt, Homo sapiens
  misc_RNA (1)...(19): siRNA sense strand
caacugcagucuguucuca

SEQ ID NO: 1558761 - RNA, 19 nt, Homo sapiens
  misc_RNA (1)...(19): siRNA sense strand
ucaacuacuucuucuacaa

SEQ ID NO: 1558762 - RNA, 19 nt, Homo sapiens
  misc_RNA (1)...(19): siRNA sense strand
ugugacaucuacagcuaua

SEQ ID NO: 1558763 - RNA, 19 nt, Homo sapiens
  misc_RNA (1)...(19): siRNA sense strand
gagcuacucauguaagaug

SEQ ID NO: 1558764 - RNA, 19 nt, Homo sapiens
  misc_RNA (1)...(19): siRNA sense strand
ggagaacucgagcuuugaa

SEQ ID NO: 1558765 - RNA, 19 nt, Homo sapiens
  misc_RNA (1)...(19): siRNA sense strand
caagcgaaucgucuucuuu

SEQ ID NO: 1558766 - RNA, 19 nt, Homo sapiens
  misc_RNA (1)...(19): siRNA sense strand
uuggagaacucgagcuuug

SEQ ID NO: 1558767 - RNA, 19 nt, Homo sapiens
  misc_RNA (1)...(19): siRNA sense strand
cgaaucgucuucuuuagcu

SEQ ID NO: 1558768 - RNA, 19 nt, Homo sapiens
  misc_RNA (1)...(19): siRNA sense strand
gguagccucugguccuuca

SEQ ID NO: 1558769 - RNA, 19 nt, Homo sapiens
  misc_RNA (1)...(19): siRNA sense strand
acaagcggcucaagcgaau

SEQ ID NO: 1558770 - RNA, 19 nt, Homo sapiens
  misc_RNA (1)...(19): siRNA sense strand
gggaggacuucaaggaucu

SEQ ID NO: 1558771 - RNA, 19 nt, Homo sapiens
  misc_RNA (1)...(19): siRNA sense strand
aggaggagguggaggaaga

SEQ ID NO: 1558772 - RNA, 19 nt, Homo sapiens
  misc_RNA (1)...(19): siRNA sense strand
gcuauaacccagacuugga

SEQ ID NO: 1558773 - RNA, 19 nt, Homo sapiens
  misc_RNA (1)...(19): siRNA sense strand
gauggcaggagacgacaaa

SEQ ID NO: 1558774 - RNA, 19 nt, Homo sapiens
  misc_RNA (1)...(19): siRNA sense strand
gacaagugcagccgcaaga

SEQ ID NO: 1558775 - RNA, 19 nt, Homo sapiens
  misc_RNA (1)...(19): siRNA sense strand
ucaagcgaaucgucuucuu

SEQ ID NO: 1558776 - RNA, 19 nt, Homo sapiens
  misc_RNA (1)...(19): siRNA sense strand
ggagacgacaaacacaugu

SEQ ID NO: 1558777 - RNA, 19 nt, Homo sapiens
  misc_RNA (1)...(19): siRNA sense strand
gcaggagacgacaaacaca

SEQ ID NO: 1558778 - RNA, 19 nt, Homo sapiens
  misc_RNA (1)...(19): siRNA sense strand
uagcugccguuccaucagu

SEQ ID NO: 1558779 - RNA, 19 nt, Homo sapiens
  misc_RNA (1)...(19): siRNA sense strand
ggagaucugccuggcugaa

SEQ ID NO: 1558780 - RNA, 19 nt, Homo sapiens
  misc_RNA (1)...(19): siRNA sense strand
gguggugaaugcagucaac

SEQ ID NO: 1558781 - RNA, 19 nt, Homo sapiens
  misc_RNA (1)...(19): siRNA sense strand
gaggaagaaagcagaagca

SEQ ID NO: 1558782 - RNA, 19 nt, Homo sapiens
  misc_RNA (1)...(19): siRNA sense strand
caacuacuucuucuacaac

SEQ ID NO: 1558783 - RNA, 19 nt, Homo sapiens
  misc_RNA (1)...(19): siRNA sense strand
gaucugccuggcugaaugu

SEQ ID NO: 1558784 - RNA, 19 nt, Homo sapiens
  misc_RNA (1)...(19): siRNA sense strand
agaucugccuggcugaaug

SEQ ID NO: 1558785 - RNA, 19 nt, Homo sapiens
  misc_RNA (1)...(19): siRNA sense strand
ggaggagguggaggaagaa

SEQ ID NO: 1558786 - RNA, 19 nt, Homo sapiens
  misc_RNA (1)...(19): siRNA sense strand
ggaggaggagguggaggaa

SEQ ID NO: 1558787 - RNA, 19 nt, Homo sapiens
  misc_RNA (1)...(19): siRNA sense strand
cagcuauaacccagacuug

SEQ ID NO: 1558788 - RNA, 19 nt, Homo sapiens
  misc_RNA (1)...(19): siRNA sense strand
ggagguggaggaagaaagc

SEQ ID NO: 1558789 - RNA, 19 nt, Homo sapiens
  misc_RNA (1)...(19): siRNA sense strand
ccaccuacacacccucaga

SEQ ID NO: 1558790 - RNA, 19 nt, Homo sapiens
  misc_RNA (1)...(19): siRNA sense strand
acccagacuuggacucaga

SEQ ID NO: 1558791 - RNA, 19 nt, Homo sapiens
  misc_RNA (1)...(19): siRNA sense strand
uaacccagacuuggacuca

SEQ ID NO: 1558792 - RNA, 19 nt, Homo sapiens
  misc_RNA (1)...(19): siRNA sense strand
ucccagugaucuguauuug

SEQ ID NO: 1558793 - RNA, 19 nt, Homo sapiens
  misc_RNA (1)...(19): siRNA sense strand
gcucaagcgaaucgucuuc

SEQ ID NO: 1558794 - RNA, 19 nt, Homo sapiens
  misc_RNA (1)...(19): siRNA sense strand
ggaauugccugaugcgaua

SEQ ID NO: 1558795 - RNA, 19 nt, Homo sapiens
  misc_RNA (1)...(19): siRNA sense strand
ucgaagacaugauugauua

SEQ ID NO: 1558796 - RNA, 19 nt, Homo sapiens
  misc_RNA (1)...(19): siRNA sense strand
gccuauaucuucauucaua

SEQ ID NO: 1558797 - RNA, 19 nt, Homo sapiens
  misc_RNA (1)...(19): siRNA sense strand
ggagaaagaagugucauua

SEQ ID NO: 1558798 - RNA, 19 nt, Homo sapiens
  misc_RNA (1)...(19): siRNA sense strand
gaaagaagugucauuauca

SEQ ID NO: 1558799 - RNA, 19 nt, Homo sapiens
  misc_RNA (1)...(19): siRNA sense strand
ggacugaucucacagaaaa

SEQ ID NO: 1558800 - RNA, 19 nt, Homo sapiens
  misc_RNA (1)...(19): siRNA sense strand
gaacuacaggcuuuacuuu

SEQ ID NO: 1558801 - RNA, 19 nt, Homo sapiens
  misc_RNA (1)...(19): siRNA sense strand
gggauuuacuuuauacuga

SEQ ID NO: 1558802 - RNA, 19 nt, Homo sapiens
  misc_RNA (1)...(19): siRNA sense strand
ggacaagaauggacuggau

SEQ ID NO: 1558803 - RNA, 19 nt, Homo sapiens
  misc_RNA (1)...(19): siRNA sense strand
caaagguguuccuggauuu

SEQ ID NO: 1558804 - RNA, 19 nt, Homo sapiens
  misc_RNA (1)...(19): siRNA sense strand
agaaagaagugucauuauc

SEQ ID NO: 1558805 - RNA, 19 nt, Homo sapiens
  misc_RNA (1)...(19): siRNA sense strand
ucaaagguguuccuggauu

SEQ ID NO: 1558806 - RNA, 19 nt, Homo sapiens
  misc_RNA (1)...(19): siRNA sense strand
cgauauagcuaccucagau

SEQ ID NO: 1558807 - RNA, 19 nt, Homo sapiens
  misc_RNA (1)...(19): siRNA sense strand
ggaaauggaaggaugacaa

SEQ ID NO: 1558808 - RNA, 19 nt, Homo sapiens
  misc_RNA (1)...(19): siRNA sense strand
cagcaagucucgaaguaau

SEQ ID NO: 1558809 - RNA, 19 nt, Homo sapiens
  misc_RNA (1)...(19): siRNA sense strand
cacccuaccuguggcauua

SEQ ID NO: 1558810 - RNA, 19 nt, Homo sapiens
  misc_RNA (1)...(19): siRNA sense strand
gagaaagaagugucauuau

SEQ ID NO: 1558811 - RNA, 19 nt, Homo sapiens
  misc_RNA (1)...(19): siRNA sense strand
uccaagaacuacaggcuuu

SEQ ID NO: 1558812 - RNA, 19 nt, Homo sapiens
  misc_RNA (1)...(19): siRNA sense strand
guaaacccaucuugguauc

SEQ ID NO: 1558813 - RNA, 19 nt, Homo sapiens
  misc_RNA (1)...(19): siRNA sense strand
caagagccauuucgaagac

SEQ ID NO: 1558814 - RNA, 19 nt, Homo sapiens
  misc_RNA (1)...(19): siRNA sense strand
ccucaaagcgagucucaaa

SEQ ID NO: 1558815 - RNA, 19 nt, Homo sapiens
  misc_RNA (1)...(19): siRNA sense strand
agaagggacugaucucaca

SEQ ID NO: 1558816 - RNA, 19 nt, Homo sapiens
  misc_RNA (1)...(19): siRNA sense strand
gaaauggaaggaugacaag

SEQ ID NO: 1558817 - RNA, 19 nt, Homo sapiens
  misc_RNA (1)...(19): siRNA sense strand
caaagcgagucucaaaggu

SEQ ID NO: 1558818 - RNA, 19 nt, Homo sapiens
  misc_RNA (1)...(19): siRNA sense strand
ccacuucaacuccucauau

SEQ ID NO: 1558819 - RNA, 19 nt, Homo sapiens
  misc_RNA (1)...(19): siRNA sense strand
aacagcaagucucgaagua

SEQ ID NO: 1558820 - RNA, 19 nt, Homo sapiens
  misc_RNA (1)...(19): siRNA sense strand
gaaaacagcaagucucgaa

SEQ ID NO: 1558821 - RNA, 19 nt, Homo sapiens
  misc_RNA (1)...(19): siRNA sense strand
ugacaagagccauuucgaa

SEQ ID NO: 1558822 - RNA, 19 nt, Homo sapiens
  misc_RNA (1)...(19): siRNA sense strand
cacuucaacuccucauauu

SEQ ID NO: 1558823 - RNA, 19 nt, Homo sapiens
  misc_RNA (1)...(19): siRNA sense strand
gauauucacgaaccacuuc

SEQ ID NO: 1558824 - RNA, 19 nt, Homo sapiens
  misc_RNA (1)...(19): siRNA sense strand
guaaugcauuugcugaaaa

SEQ ID NO: 1558825 - RNA, 19 nt, Homo sapiens
  misc_RNA (1)...(19): siRNA sense strand
gauauagcuaccucagauu

SEQ ID NO: 1558826 - RNA, 19 nt, Homo sapiens
  misc_RNA (1)...(19): siRNA sense strand
aguaaugcauuugcugaaa

SEQ ID NO: 1558827 - RNA, 19 nt, Homo sapiens
  misc_RNA (1)...(19): siRNA sense strand
ccaagaacuacaggcuuua

SEQ ID NO: 1558828 - RNA, 19 nt, Homo sapiens
  misc_RNA (1)...(19): siRNA sense strand
caugaaccaucggacaaga

SEQ ID NO: 1558829 - RNA, 19 nt, Homo sapiens
  misc_RNA (1)...(19): siRNA sense strand
ugguaucgcuggaucaaca

SEQ ID NO: 1558830 - RNA, 19 nt, Homo sapiens
  misc_RNA (1)...(19): siRNA sense strand
cugccuauaucuucauuca

SEQ ID NO: 1558831 - RNA, 19 nt, Homo sapiens
  misc_RNA (1)...(19): siRNA sense strand
ccauuucgaagacaugauu

SEQ ID NO: 1558832 - RNA, 19 nt, Homo sapiens
  misc_RNA (1)...(19): siRNA sense strand
acaagagccauuucgaaga

SEQ ID NO: 1558833 - RNA, 19 nt, Homo sapiens
  misc_RNA (1)...(19): siRNA sense strand
ucaaagcgagucucaaagg

SEQ ID NO: 1558834 - RNA, 19 nt, Homo sapiens
  misc_RNA (1)...(19): siRNA sense strand
gcugcugccuauaucuuca

SEQ ID NO: 1558835 - RNA, 19 nt, Homo sapiens
  misc_RNA (1)...(19): siRNA sense strand
ucacgaaccacuucaacuc

SEQ ID NO: 1558836 - RNA, 19 nt, Homo sapiens
  misc_RNA (1)...(19): siRNA sense strand
ccuguggaauugccugaug

SEQ ID NO: 1558837 - RNA, 19 nt, Homo sapiens
  misc_RNA (1)...(19): siRNA sense strand
gaagacaugauugauuacu

SEQ ID NO: 1558838 - RNA, 19 nt, Homo sapiens
  misc_RNA (1)...(19): siRNA sense strand
cauggaaagggauuuacuu

SEQ ID NO: 1558839 - RNA, 19 nt, Homo sapiens
  misc_RNA (1)...(19): siRNA sense strand
ugucauggaaagggauuua

SEQ ID NO: 1558840 - RNA, 19 nt, Homo sapiens
  misc_RNA (1)...(19): siRNA sense strand
aaacagcaagucucgaagu

SEQ ID NO: 1558841 - RNA, 19 nt, Homo sapiens
  misc_RNA (1)...(19): siRNA sense strand
uguaaacccaucuugguau

SEQ ID NO: 1558842 - RNA, 19 nt, Homo sapiens
  misc_RNA (1)...(19): siRNA sense strand
gcgauauagcuaccucaga

SEQ ID NO: 1558843 - RNA, 19 nt, Homo sapiens
  misc_RNA (1)...(19): siRNA sense strand
gucucgaaguaaugcauuu

SEQ ID NO: 1558844 - RNA, 19 nt, Homo sapiens
  misc_RNA (1)...(19): siRNA sense strand
ugaaccaucggacaagaau

SEQ ID NO: 1558845 - RNA, 19 nt, Homo sapiens
  misc_RNA (1)...(19): siRNA sense strand
gggacugaucucacagaaa

SEQ ID NO: 1558846 - RNA, 19 nt, Homo sapiens
  misc_RNA (1)...(19): siRNA sense strand
gcauuuguuccuggagaaa

SEQ ID NO: 1558847 - RNA, 19 nt, Homo sapiens
  misc_RNA (1)...(19): siRNA sense strand
agaacuacaggcuuuacuu

SEQ ID NO: 1558848 - RNA, 19 nt, Homo sapiens
  misc_RNA (1)...(19): siRNA sense strand
gcaagucucgaaguaaugc

SEQ ID NO: 1558849 - RNA, 19 nt, Homo sapiens
  misc_RNA (1)...(19): siRNA sense strand
caagaauggacuggauguu

SEQ ID NO: 1558850 - RNA, 19 nt, Homo sapiens
  misc_RNA (1)...(19): siRNA sense strand
gaaccaucggacaagaaug

SEQ ID NO: 1558851 - RNA, 19 nt, Homo sapiens
  misc_RNA (1)...(19): siRNA sense strand
aagaauggacuggauguuc

SEQ ID NO: 1558852 - RNA, 19 nt, Homo sapiens
  misc_RNA (1)...(19): siRNA sense strand
ggaauugccugaugcgaua

SEQ ID NO: 1558853 - RNA, 19 nt, Homo sapiens
  misc_RNA (1)...(19): siRNA sense strand
ucgaagacaugauugauua

SEQ ID NO: 1558854 - RNA, 19 nt, Homo sapiens
  misc_RNA (1)...(19): siRNA sense strand
gccuauaucuucauucaua

SEQ ID NO: 1558855 - RNA, 19 nt, Homo sapiens
  misc_RNA (1)...(19): siRNA sense strand
ggagaaagaagugucauua

SEQ ID NO: 1558856 - RNA, 19 nt, Homo sapiens
  misc_RNA (1)...(19): siRNA sense strand
gaaagaagugucauuauca

SEQ ID NO: 1558857 - RNA, 19 nt, Homo sapiens
  misc_RNA (1)...(19): siRNA sense strand
ggacugaucucacagaaaa

SEQ ID NO: 1558858 - RNA, 19 nt, Homo sapiens
  misc_RNA (1)...(19): siRNA sense strand
gaacuacaggcuuuacuuu

SEQ ID NO: 1558859 - RNA, 19 nt, Homo sapiens
  misc_RNA (1)...(19): siRNA sense strand
gggauuuacuuuauacuga

SEQ ID NO: 1558860 - RNA, 19 nt, Homo sapiens
  misc_RNA (1)...(19): siRNA sense strand
ggacaagaauggacuggau

SEQ ID NO: 1558861 - RNA, 19 nt, Homo sapiens
  misc_RNA (1)...(19): siRNA sense strand
caaagguguuccuggauuu

SEQ ID NO: 1558862 - RNA, 19 nt, Homo sapiens
  misc_RNA (1)...(19): siRNA sense strand
agaaagaagugucauuauc

SEQ ID NO: 1558863 - RNA, 19 nt, Homo sapiens
  misc_RNA (1)...(19): siRNA sense strand
ucaaagguguuccuggauu

SEQ ID NO: 1558864 - RNA, 19 nt, Homo sapiens
  misc_RNA (1)...(19): siRNA sense strand
cgauauagcuaccucagau

SEQ ID NO: 1558865 - RNA, 19 nt, Homo sapiens
  misc_RNA (1)...(19): siRNA sense strand
ggaaauggaaggaugacaa

SEQ ID NO: 1558866 - RNA, 19 nt, Homo sapiens
  misc_RNA (1)...(19): siRNA sense strand
cagcaagucucgaaguaau

SEQ ID NO: 1558867 - RNA, 19 nt, Homo sapiens
  misc_RNA (1)...(19): siRNA sense strand
cacccuaccuguggcauua

SEQ ID NO: 1558868 - RNA, 19 nt, Homo sapiens
  misc_RNA (1)...(19): siRNA sense strand
gagaaagaagugucauuau

SEQ ID NO: 1558869 - RNA, 19 nt, Homo sapiens
  misc_RNA (1)...(19): siRNA sense strand
uccaagaacuacaggcuuu

SEQ ID NO: 1558870 - RNA, 19 nt, Homo sapiens
  misc_RNA (1)...(19): siRNA sense strand
guaaacccaucuugguauc

SEQ ID NO: 1558871 - RNA, 19 nt, Homo sapiens
  misc_RNA (1)...(19): siRNA sense strand
caagagccauuucgaagac

SEQ ID NO: 1558872 - RNA, 19 nt, Homo sapiens
  misc_RNA (1)...(19): siRNA sense strand
ccucaaagcgagucucaaa

SEQ ID NO: 1558873 - RNA, 19 nt, Homo sapiens
  misc_RNA (1)...(19): siRNA sense strand
agaagggacugaucucaca

SEQ ID NO: 1558874 - RNA, 19 nt, Homo sapiens
  misc_RNA (1)...(19): siRNA sense strand
gaaauggaaggaugacaag

SEQ ID NO: 1558875 - RNA, 19 nt, Homo sapiens
  misc_RNA (1)...(19): siRNA sense strand
caaagcgagucucaaaggu

SEQ ID NO: 1558876 - RNA, 19 nt, Homo sapiens
  misc_RNA (1)...(19): siRNA sense strand
ccacuucaacuccucauau

SEQ ID NO: 1558877 - RNA, 19 nt, Homo sapiens
  misc_RNA (1)...(19): siRNA sense strand
aacagcaagucucgaagua

SEQ ID NO: 1558878 - RNA, 19 nt, Homo sapiens
  misc_RNA (1)...(19): siRNA sense strand
gaaaacagcaagucucgaa

SEQ ID NO: 1558879 - RNA, 19 nt, Homo sapiens
  misc_RNA (1)...(19): siRNA sense strand
ugacaagagccauuucgaa

SEQ ID NO: 1558880 - RNA, 19 nt, Homo sapiens
  misc_RNA (1)...(19): siRNA sense strand
cacuucaacuccucauauu

SEQ ID NO: 1558881 - RNA, 19 nt, Homo sapiens
  misc_RNA (1)...(19): siRNA sense strand
gauauucacgaaccacuuc

SEQ ID NO: 1558882 - RNA, 19 nt, Homo sapiens
  misc_RNA (1)...(19): siRNA sense strand
guaaugcauuugcugaaaa

SEQ ID NO: 1558883 - RNA, 19 nt, Homo sapiens
  misc_RNA (1)...(19): siRNA sense strand
gauauagcuaccucagauu

SEQ ID NO: 1558884 - RNA, 19 nt, Homo sapiens
  misc_RNA (1)...(19): siRNA sense strand
aguaaugcauuugcugaaa

SEQ ID NO: 1558885 - RNA, 19 nt, Homo sapiens
  misc_RNA (1)...(19): siRNA sense strand
ccaagaacuacaggcuuua

SEQ ID NO: 1558886 - RNA, 19 nt, Homo sapiens
  misc_RNA (1)...(19): siRNA sense strand
caugaaccaucggacaaga

SEQ ID NO: 1558887 - RNA, 19 nt, Homo sapiens
  misc_RNA (1)...(19): siRNA sense strand
ugguaucgcuggaucaaca

SEQ ID NO: 1558888 - RNA, 19 nt, Homo sapiens
  misc_RNA (1)...(19): siRNA sense strand
cugccuauaucuucauuca

SEQ ID NO: 1558889 - RNA, 19 nt, Homo sapiens
  misc_RNA (1)...(19): siRNA sense strand
ccauuucgaagacaugauu

SEQ ID NO: 1558890 - RNA, 19 nt, Homo sapiens
  misc_RNA (1)...(19): siRNA sense strand
acaagagccauuucgaaga

SEQ ID NO: 1558891 - RNA, 19 nt, Homo sapiens
  misc_RNA (1)...(19): siRNA sense strand
ucaaagcgagucucaaagg

SEQ ID NO: 1558892 - RNA, 19 nt, Homo sapiens
  misc_RNA (1)...(19): siRNA sense strand
gcugcugccuauaucuuca

SEQ ID NO: 1558893 - RNA, 19 nt, Homo sapiens
  misc_RNA (1)...(19): siRNA sense strand
ucacgaaccacuucaacuc

SEQ ID NO: 1558894 - RNA, 19 nt, Homo sapiens
  misc_RNA (1)...(19): siRNA sense strand
ccuguggaauugccugaug

SEQ ID NO: 1558895 - RNA, 19 nt, Homo sapiens
  misc_RNA (1)...(19): siRNA sense strand
gaagacaugauugauuacu

SEQ ID NO: 1558896 - RNA, 19 nt, Homo sapiens
  misc_RNA (1)...(19): siRNA sense strand
cauggaaagggauuuacuu

SEQ ID NO: 1558897 - RNA, 19 nt, Homo sapiens
  misc_RNA (1)...(19): siRNA sense strand
ugucauggaaagggauuua

SEQ ID NO: 1558898 - RNA, 19 nt, Homo sapiens
  misc_RNA (1)...(19): siRNA sense strand
aaacagcaagucucgaagu

SEQ ID NO: 1558899 - RNA, 19 nt, Homo sapiens
  misc_RNA (1)...(19): siRNA sense strand
uguaaacccaucuugguau

SEQ ID NO: 1558900 - RNA, 19 nt, Homo sapiens
  misc_RNA (1)...(19): siRNA sense strand
gcgauauagcuaccucaga

SEQ ID NO: 1558901 - RNA, 19 nt, Homo sapiens
  misc_RNA (1)...(19): siRNA sense strand
gucucgaaguaaugcauuu

SEQ ID NO: 1558902 - RNA, 19 nt, Homo sapiens
  misc_RNA (1)...(19): siRNA sense strand
ugaaccaucggacaagaau

SEQ ID NO: 1558903 - RNA, 19 nt, Homo sapiens
  misc_RNA (1)...(19): siRNA sense strand
gggacugaucucacagaaa

SEQ ID NO: 1558904 - RNA, 19 nt, Homo sapiens
  misc_RNA (1)...(19): siRNA sense strand
gcauuuguuccuggagaaa

SEQ ID NO: 1558905 - RNA, 19 nt, Homo sapiens
  misc_RNA (1)...(19): siRNA sense strand
agaacuacaggcuuuacuu

SEQ ID NO: 1558906 - RNA, 19 nt, Homo sapiens
  misc_RNA (1)...(19): siRNA sense strand
gcaagucucgaaguaaugc

SEQ ID NO: 1558907 - RNA, 19 nt, Homo sapiens
  misc_RNA (1)...(19): siRNA sense strand
caagaauggacuggauguu

SEQ ID NO: 1558908 - RNA, 19 nt, Homo sapiens
  misc_RNA (1)...(19): siRNA sense strand
gaaccaucggacaagaaug

SEQ ID NO: 1558909 - RNA, 19 nt, Homo sapiens
  misc_RNA (1)...(19): siRNA sense strand
aagaauggacuggauguuc

SEQ ID NO: 1558910 - RNA, 19 nt, Homo sapiens
  misc_RNA (1)...(19): siRNA sense strand
ggaaagagacguccuaaug

SEQ ID NO: 1558911 - RNA, 19 nt, Homo sapiens
  misc_RNA (1)...(19): siRNA sense strand
gcagugcaaugcccaguaa

SEQ ID NO: 1558912 - RNA, 19 nt, Homo sapiens
  misc_RNA (1)...(19): siRNA sense strand
aaagagaacucgucaaugg

SEQ ID NO: 1558913 - RNA, 19 nt, Homo sapiens
  misc_RNA (1)...(19): siRNA sense strand
gaagaguaaugccuggaaa

SEQ ID NO: 1558914 - RNA, 19 nt, Homo sapiens
  misc_RNA (1)...(19): siRNA sense strand
caagaaaguuccuaaaggu

SEQ ID NO: 1558915 - RNA, 19 nt, Homo sapiens
  misc_RNA (1)...(19): siRNA sense strand
gcaaagagaacucgucaau

SEQ ID NO: 1558916 - RNA, 19 nt, Homo sapiens
  misc_RNA (1)...(19): siRNA sense strand
gcaaagugacgucaagaaa

SEQ ID NO: 1558917 - RNA, 19 nt, Homo sapiens
  misc_RNA (1)...(19): siRNA sense strand
gaaaguuccuaaagguguu

SEQ ID NO: 1558918 - RNA, 19 nt, Homo sapiens
  misc_RNA (1)...(19): siRNA sense strand
gcaaaguggugcccagcaa

SEQ ID NO: 1558919 - RNA, 19 nt, Homo sapiens
  misc_RNA (1)...(19): siRNA sense strand
caaguugaaucgaaaggaa

SEQ ID NO: 1558920 - RNA, 19 nt, Homo sapiens
  misc_RNA (1)...(19): siRNA sense strand
gagccacucucacauacaa

SEQ ID NO: 1558921 - RNA, 19 nt, Homo sapiens
  misc_RNA (1)...(19): siRNA sense strand
ggaauuaguccuaugaauc

SEQ ID NO: 1558922 - RNA, 19 nt, Homo sapiens
  misc_RNA (1)...(19): siRNA sense strand
gaaagagacguccuaaugg

SEQ ID NO: 1558923 - RNA, 19 nt, Homo sapiens
  misc_RNA (1)...(19): siRNA sense strand
agacagggaugacguugaa

SEQ ID NO: 1558924 - RNA, 19 nt, Homo sapiens
  misc_RNA (1)...(19): siRNA sense strand
gaauacagaacaacugcua

SEQ ID NO: 1558925 - RNA, 19 nt, Homo sapiens
  misc_RNA (1)...(19): siRNA sense strand
aaagagacguccuaaugga

SEQ ID NO: 1558926 - RNA, 19 nt, Homo sapiens
  misc_RNA (1)...(19): siRNA sense strand
uaacaaagcgggagcaaag

SEQ ID NO: 1558927 - RNA, 19 nt, Homo sapiens
  misc_RNA (1)...(19): siRNA sense strand
gcccagcaauucaggauga

SEQ ID NO: 1558928 - RNA, 19 nt, Homo sapiens
  misc_RNA (1)...(19): siRNA sense strand
aaucauagaggaagaguaa

SEQ ID NO: 1558929 - RNA, 19 nt, Homo sapiens
  misc_RNA (1)...(19): siRNA sense strand
gaagacuccuccagcaaag

SEQ ID NO: 1558930 - RNA, 19 nt, Homo sapiens
  misc_RNA (1)...(19): siRNA sense strand
ucaagaaaguuccuaaagg

SEQ ID NO: 1558931 - RNA, 19 nt, Homo sapiens
  misc_RNA (1)...(19): siRNA sense strand
aaagugacgucaagaaagu

SEQ ID NO: 1558932 - RNA, 19 nt, Homo sapiens
  misc_RNA (1)...(19): siRNA sense strand
gaaaggaagggaagaagca

SEQ ID NO: 1558933 - RNA, 19 nt, Homo sapiens
  misc_RNA (1)...(19): siRNA sense strand
gaggaaaccaguagcaguu

SEQ ID NO: 1558934 - RNA, 19 nt, Homo sapiens
  misc_RNA (1)...(19): siRNA sense strand
gaagggaagaagcagaauu

SEQ ID NO: 1558935 - RNA, 19 nt, Homo sapiens
  misc_RNA (1)...(19): siRNA sense strand
gauaugucuuuggaugaua

SEQ ID NO: 1558936 - RNA, 19 nt, Homo sapiens
  misc_RNA (1)...(19): siRNA sense strand
gcaaaccuucugagacaaa

SEQ ID NO: 1558937 - RNA, 19 nt, Homo sapiens
  misc_RNA (1)...(19): siRNA sense strand
ggagcaaagugacgucaag

SEQ ID NO: 1558938 - RNA, 19 nt, Homo sapiens
  misc_RNA (1)...(19): siRNA sense strand
uaccaggaguggaaauaaa

SEQ ID NO: 1558939 - RNA, 19 nt, Homo sapiens
  misc_RNA (1)...(19): siRNA sense strand
aguaaugccuggaaagaga

SEQ ID NO: 1558940 - RNA, 19 nt, Homo sapiens
  misc_RNA (1)...(19): siRNA sense strand
gaaaacgacuggaauucga

SEQ ID NO: 1558941 - RNA, 19 nt, Homo sapiens
  misc_RNA (1)...(19): siRNA sense strand
gaauuaguccuaugaaucg

SEQ ID NO: 1558942 - RNA, 19 nt, Homo sapiens
  misc_RNA (1)...(19): siRNA sense strand
aggcaaaccuucugagaca

SEQ ID NO: 1558943 - RNA, 19 nt, Homo sapiens
  misc_RNA (1)...(19): siRNA sense strand
ggacuuccaccacaaaugg

SEQ ID NO: 1558944 - RNA, 19 nt, Homo sapiens
  misc_RNA (1)...(19): siRNA sense strand
gugcaggcccaguugaaua

SEQ ID NO: 1558945 - RNA, 19 nt, Homo sapiens
  misc_RNA (1)...(19): siRNA sense strand
ggaagaguaaugccuggaa

SEQ ID NO: 1558946 - RNA, 19 nt, Homo sapiens
  misc_RNA (1)...(19): siRNA sense strand
caccacaaauggagggauu

SEQ ID NO: 1558947 - RNA, 19 nt, Homo sapiens
  misc_RNA (1)...(19): siRNA sense strand
ccaguugaauacagaacaa

SEQ ID NO: 1558948 - RNA, 19 nt, Homo sapiens
  misc_RNA (1)...(19): siRNA sense strand
caggaguggaaauaaauua

SEQ ID NO: 1558949 - RNA, 19 nt, Homo sapiens
  misc_RNA (1)...(19): siRNA sense strand
acucagaaaccacgauuaa

SEQ ID NO: 1558950 - RNA, 19 nt, Homo sapiens
  misc_RNA (1)...(19): siRNA sense strand
gaacaauauuuuccagugu

SEQ ID NO: 1558951 - RNA, 19 nt, Homo sapiens
  misc_RNA (1)...(19): siRNA sense strand
gaaggugcaggcccaguug

SEQ ID NO: 1558952 - RNA, 19 nt, Homo sapiens
  misc_RNA (1)...(19): siRNA sense strand
aagggaagaagcagaauuu

SEQ ID NO: 1558953 - RNA, 19 nt, Homo sapiens
  misc_RNA (1)...(19): siRNA sense strand
caaagugacgucaagaaag

SEQ ID NO: 1558954 - RNA, 19 nt, Homo sapiens
  misc_RNA (1)...(19): siRNA sense strand
gagacguccuaauggaguu

SEQ ID NO: 1558955 - RNA, 19 nt, Homo sapiens
  misc_RNA (1)...(19): siRNA sense strand
caaagcgggagcaaaguga

SEQ ID NO: 1558956 - RNA, 19 nt, Homo sapiens
  misc_RNA (1)...(19): siRNA sense strand
ggagggauuuugacuguau

SEQ ID NO: 1558957 - RNA, 19 nt, Homo sapiens
  misc_RNA (1)...(19): siRNA sense strand
ggaaaccaguagcaguucu

SEQ ID NO: 1558958 - RNA, 19 nt, Homo sapiens
  misc_RNA (1)...(19): siRNA sense strand
gaagcagaauuuuccaaga

SEQ ID NO: 1558959 - RNA, 19 nt, Homo sapiens
  misc_RNA (1)...(19): siRNA sense strand
cauaaacagugucggaaaa

SEQ ID NO: 1558960 - RNA, 19 nt, Homo sapiens
  misc_RNA (1)...(19): siRNA sense strand
uagacgauguaguagcaaa

SEQ ID NO: 1558961 - RNA, 19 nt, Homo sapiens
  misc_RNA (1)...(19): siRNA sense strand
gacguugaaugagcgguuu

SEQ ID NO: 1558962 - RNA, 19 nt, Homo sapiens
  misc_RNA (1)...(19): siRNA sense strand
agaagacuccuccagcaaa

SEQ ID NO: 1558963 - RNA, 19 nt, Homo sapiens
  misc_RNA (1)...(19): siRNA sense strand
ucagaaaccacgauuaacu

SEQ ID NO: 1558964 - RNA, 19 nt, Homo sapiens
  misc_RNA (1)...(19): siRNA sense strand
ccucuaagugacaagaaua

SEQ ID NO: 1558965 - RNA, 19 nt, Homo sapiens
  misc_RNA (1)...(19): siRNA sense strand
uaacucagaaaccacgauu

SEQ ID NO: 1558966 - RNA, 19 nt, Homo sapiens
  misc_RNA (1)...(19): siRNA sense strand
caaagagaacucgucaaug

SEQ ID NO: 1558967 - RNA, 19 nt, Homo sapiens
  misc_RNA (1)...(19): siRNA sense strand
gggcagaggaaaccaguag

SEQ ID NO: 1558968 - RNA, 19 nt, Homo sapiens
  misc_RNA (1)...(19): siRNA sense strand
gauguaguagcaaagagaa

SEQ ID NO: 1558969 - RNA, 19 nt, Homo sapiens
  misc_RNA (1)...(19): siRNA sense strand
ucauagaggaagaguaaug

SEQ ID NO: 1558970 - RNA, 19 nt, Homo sapiens
  misc_RNA (1)...(19): siRNA sense strand
gagccacggcgacuucuuc

SEQ ID NO: 1558971 - RNA, 19 nt, Homo sapiens
  misc_RNA (1)...(19): siRNA sense strand
gcagaggaaaccaguagca

SEQ ID NO: 1558972 - RNA, 19 nt, Homo sapiens
  misc_RNA (1)...(19): siRNA sense strand
ugaaaaccucgacaaaaua

SEQ ID NO: 1558973 - RNA, 19 nt, Homo sapiens
  misc_RNA (1)...(19): siRNA sense strand
gcagaauuuuccaagacua

SEQ ID NO: 1558974 - RNA, 19 nt, Homo sapiens
  misc_RNA (1)...(19): siRNA sense strand
gaaaaccucgacaaaauag

SEQ ID NO: 1558975 - RNA, 19 nt, Homo sapiens
  misc_RNA (1)...(19): siRNA sense strand
cagggaugacguugaauga

SEQ ID NO: 1558976 - RNA, 19 nt, Homo sapiens
  misc_RNA (1)...(19): siRNA sense strand
aaaguggugcccagcaauu

SEQ ID NO: 1558977 - RNA, 19 nt, Homo sapiens
  misc_RNA (1)...(19): siRNA sense strand
cuaagugacaagaauauag

SEQ ID NO: 1558978 - RNA, 19 nt, Homo sapiens
  misc_RNA (1)...(19): siRNA sense strand
ccaggaguggaaauaaauu

SEQ ID NO: 1558979 - RNA, 19 nt, Homo sapiens
  misc_RNA (1)...(19): siRNA sense strand
gagcaaagugacgucaaga

SEQ ID NO: 1558980 - RNA, 19 nt, Homo sapiens
  misc_RNA (1)...(19): siRNA sense strand
gaaucauagaggaagagua

SEQ ID NO: 1558981 - RNA, 19 nt, Homo sapiens
  misc_RNA (1)...(19): siRNA sense strand
agauaugucuuuggaugau

SEQ ID NO: 1558982 - RNA, 19 nt, Homo sapiens
  misc_RNA (1)...(19): siRNA sense strand
uaugaaucguccaccucua

SEQ ID NO: 1558983 - RNA, 19 nt, Homo sapiens
  misc_RNA (1)...(19): siRNA sense strand
acugcuagacgauguagua

SEQ ID NO: 1558984 - RNA, 19 nt, Homo sapiens
  misc_RNA (1)...(19): siRNA sense strand
ucaggcaacuuuucuuuuc

SEQ ID NO: 1558985 - RNA, 19 nt, Homo sapiens
  misc_RNA (1)...(19): siRNA sense strand
caguagcaguucucaagag

SEQ ID NO: 1558986 - RNA, 19 nt, Homo sapiens
  misc_RNA (1)...(19): siRNA sense strand
uagauaugucuuuggauga

SEQ ID NO: 1558987 - RNA, 19 nt, Homo sapiens
  misc_RNA (1)...(19): siRNA sense strand
gucaagaaaguuccuaaag

SEQ ID NO: 1558988 - RNA, 19 nt, Homo sapiens
  misc_RNA (1)...(19): siRNA sense strand
gugacaagaauauagaaca

SEQ ID NO: 1558989 - RNA, 19 nt, Homo sapiens
  misc_RNA (1)...(19): siRNA sense strand
caaaguggugcccagcaau

SEQ ID NO: 1558990 - RNA, 19 nt, Homo sapiens
  misc_RNA (1)...(19): siRNA sense strand
augaaaaccucgacaaaau

SEQ ID NO: 1558991 - RNA, 19 nt, Homo sapiens
  misc_RNA (1)...(19): siRNA sense strand
cgucaagaaaguuccuaaa

SEQ ID NO: 1558992 - RNA, 19 nt, Homo sapiens
  misc_RNA (1)...(19): siRNA sense strand
gauggggaauccaacagaa

SEQ ID NO: 1558993 - RNA, 19 nt, Homo sapiens
  misc_RNA (1)...(19): siRNA sense strand
cagaaaccacgauuaacuc

SEQ ID NO: 1558994 - RNA, 19 nt, Homo sapiens
  misc_RNA (1)...(19): siRNA sense strand
cgauguaguagcaaagaga

SEQ ID NO: 1558995 - RNA, 19 nt, Homo sapiens
  misc_RNA (1)...(19): siRNA sense strand
ugaaggugcaggcccaguu

SEQ ID NO: 1558996 - RNA, 19 nt, Homo sapiens
  misc_RNA (1)...(19): siRNA sense strand
acauaaacagugucggaaa

SEQ ID NO: 1558997 - RNA, 19 nt, Homo sapiens
  misc_RNA (1)...(19): siRNA sense strand
uagaagacuccuccagcaa

SEQ ID NO: 1558998 - RNA, 19 nt, Homo sapiens
  misc_RNA (1)...(19): siRNA sense strand
auacagaacaacugcuaga

SEQ ID NO: 1558999 - RNA, 19 nt, Homo sapiens
  misc_RNA (1)...(19): siRNA sense strand
agaguaaugccuggaaaga

SEQ ID NO: 1559000 - RNA, 19 nt, Homo sapiens
  misc_RNA (1)...(19): siRNA sense strand
uuaccaggaguggaaauaa

SEQ ID NO: 1559001 - RNA, 19 nt, Homo sapiens
  misc_RNA (1)...(19): siRNA sense strand
ccaguagcaguucucaaga

SEQ ID NO: 1559002 - RNA, 19 nt, Homo sapiens
  misc_RNA (1)...(19): siRNA sense strand
ggcaaaccuucugagacaa

SEQ ID NO: 1559003 - RNA, 19 nt, Homo sapiens
  misc_RNA (1)...(19): siRNA sense strand
aaacgacuggaauucgaaa

SEQ ID NO: 1559004 - RNA, 19 nt, Homo sapiens
  misc_RNA (1)...(19): siRNA sense strand
auacucgucaggcaacuuu

SEQ ID NO: 1559005 - RNA, 19 nt, Homo sapiens
  misc_RNA (1)...(19): siRNA sense strand
gcaaugaaaaccucgacaa

SEQ ID NO: 1559006 - RNA, 19 nt, Homo sapiens
  misc_RNA (1)...(19): siRNA sense strand
caaugaaaaccucgacaaa

SEQ ID NO: 1559007 - RNA, 19 nt, Homo sapiens
  misc_RNA (1)...(19): siRNA sense strand
acaaagcgggagcaaagug

SEQ ID NO: 1559008 - RNA, 19 nt, Homo sapiens
  misc_RNA (1)...(19): siRNA sense strand
cccaguaacucagaaacca

SEQ ID NO: 1559009 - RNA, 19 nt, Homo sapiens
  misc_RNA (1)...(19): siRNA sense strand
uggcggacuuccaccacaa

SEQ ID NO: 1559010 - RNA, 19 nt, Homo sapiens
  misc_RNA (1)...(19): siRNA sense strand
caacuauuaugguggcuau

SEQ ID NO: 1559011 - RNA, 19 nt, Homo sapiens
  misc_RNA (1)...(19): siRNA sense strand
gggcuuggcuguggcuaug

SEQ ID NO: 1559012 - RNA, 19 nt, Homo sapiens
  misc_RNA (1)...(19): siRNA sense strand
gucauaugguuucuacuga

SEQ ID NO: 1559013 - RNA, 19 nt, Homo sapiens
  misc_RNA (1)...(19): siRNA sense strand
ggucauaugguuucuacug

SEQ ID NO: 1559014 - RNA, 19 nt, Homo sapiens
  misc_RNA (1)...(19): siRNA sense strand
uauggaggcuauggaaaug

SEQ ID NO: 1559015 - RNA, 19 nt, Homo sapiens
  misc_RNA (1)...(19): siRNA sense strand
cuauggaaauggcuacuac

SEQ ID NO: 1559016 - RNA, 19 nt, Homo sapiens
  misc_RNA (1)...(19): siRNA sense strand
ggcuauggcugugguuauc

SEQ ID NO: 1559017 - RNA, 19 nt, Homo sapiens
  misc_RNA (1)...(19): siRNA sense strand
uaucguggcuauggaugug

SEQ ID NO: 1559018 - RNA, 19 nt, Homo sapiens
  misc_RNA (1)...(19): siRNA sense strand
ggcuauggaugugguuaug

SEQ ID NO: 1559019 - RNA, 19 nt, Homo sapiens
  misc_RNA (1)...(19): siRNA sense strand
gcuauggaggcuauggaaa

SEQ ID NO: 1559020 - RNA, 19 nt, Homo sapiens
  misc_RNA (1)...(19): siRNA sense strand
cuauggaggcuauggaaau

SEQ ID NO: 1559021 - RNA, 19 nt, Homo sapiens
  misc_RNA (1)...(19): siRNA sense strand
gauuuacuacagcaacuau

SEQ ID NO: 1559022 - RNA, 19 nt, Homo sapiens
  misc_RNA (1)...(19): siRNA sense strand
cuacugcccaucuugcuau

SEQ ID NO: 1559023 - RNA, 19 nt, Homo sapiens
  misc_RNA (1)...(19): siRNA sense strand
uauggaagauauuggucau

SEQ ID NO: 1559024 - RNA, 19 nt, Homo sapiens
  misc_RNA (1)...(19): siRNA sense strand
gcuauggaaauggcuacua

SEQ ID NO: 1559025 - RNA, 19 nt, Homo sapiens
  misc_RNA (1)...(19): siRNA sense strand
cuauggaugugguuauggu

SEQ ID NO: 1559026 - RNA, 19 nt, Homo sapiens
  misc_RNA (1)...(19): siRNA sense strand
cuacagcaacuauuauggu

SEQ ID NO: 1559027 - RNA, 19 nt, Homo sapiens
  misc_RNA (1)...(19): siRNA sense strand
gcuacuacugcccaucuug

SEQ ID NO: 1559028 - RNA, 19 nt, Homo sapiens
  misc_RNA (1)...(19): siRNA sense strand
uaugguggcuauggguaug

SEQ ID NO: 1559029 - RNA, 19 nt, Homo sapiens
  misc_RNA (1)...(19): siRNA sense strand
gaacagacgugcacuuaga

SEQ ID NO: 1559030 - RNA, 19 nt, Homo sapiens
  misc_RNA (1)...(19): siRNA sense strand
ccaaagggcuggaagauuc

SEQ ID NO: 1559031 - RNA, 19 nt, Homo sapiens
  misc_RNA (1)...(19): siRNA sense strand
ggaauaaacugcuucugau

SEQ ID NO: 1559032 - RNA, 19 nt, Homo sapiens
  misc_RNA (1)...(19): siRNA sense strand
gaaaauggcucuucagaug

SEQ ID NO: 1559033 - RNA, 19 nt, Homo sapiens
  misc_RNA (1)...(19): siRNA sense strand
gcagagagcugaggauugu

SEQ ID NO: 1559034 - RNA, 19 nt, Homo sapiens
  misc_RNA (1)...(19): siRNA sense strand
aaacugaaauccauuguga

SEQ ID NO: 1559035 - RNA, 19 nt, Homo sapiens
  misc_RNA (1)...(19): siRNA sense strand
ccaugaaucuggacaaauu

SEQ ID NO: 1559036 - RNA, 19 nt, Homo sapiens
  misc_RNA (1)...(19): siRNA sense strand
gaaaggaaacgccacauug

SEQ ID NO: 1559037 - RNA, 19 nt, Homo sapiens
  misc_RNA (1)...(19): siRNA sense strand
gcaguaauuucccucauga

SEQ ID NO: 1559038 - RNA, 19 nt, Homo sapiens
  misc_RNA (1)...(19): siRNA sense strand
gaugagauguucagcaaug

SEQ ID NO: 1559039 - RNA, 19 nt, Homo sapiens
  misc_RNA (1)...(19): siRNA sense strand
gcauggagaucaaagaaau

SEQ ID NO: 1559040 - RNA, 19 nt, Homo sapiens
  misc_RNA (1)...(19): siRNA sense strand
gcagugaggucaucuagca

SEQ ID NO: 1559041 - RNA, 19 nt, Homo sapiens
  misc_RNA (1)...(19): siRNA sense strand
gaaccaggcucccuaugca

SEQ ID NO: 1559042 - RNA, 19 nt, Homo sapiens
  misc_RNA (1)...(19): siRNA sense strand
ggaaucuucuccugccuuu

SEQ ID NO: 1559043 - RNA, 19 nt, Homo sapiens
  misc_RNA (1)...(19): siRNA sense strand
gaacuacauuggaaacgau

SEQ ID NO: 1559044 - RNA, 19 nt, Homo sapiens
  misc_RNA (1)...(19): siRNA sense strand
guacaagauuccacuuaga

SEQ ID NO: 1559045 - RNA, 19 nt, Homo sapiens
  misc_RNA (1)...(19): siRNA sense strand
gauauauacuucacagcaa

SEQ ID NO: 1559046 - RNA, 19 nt, Homo sapiens
  misc_RNA (1)...(19): siRNA sense strand
ugagucaccuguugaagaa

SEQ ID NO: 1559047 - RNA, 19 nt, Homo sapiens
  misc_RNA (1)...(19): siRNA sense strand
cgucagaacuacauuggaa

SEQ ID NO: 1559048 - RNA, 19 nt, Homo sapiens
  misc_RNA (1)...(19): siRNA sense strand
gaauagggcaggcacuaaa

SEQ ID NO: 1559049 - RNA, 19 nt, Homo sapiens
  misc_RNA (1)...(19): siRNA sense strand
caccagcaccucauuguua

SEQ ID NO: 1559050 - RNA, 19 nt, Homo sapiens
  misc_RNA (1)...(19): siRNA sense strand
guacgaagauggagaagcu

SEQ ID NO: 1559051 - RNA, 19 nt, Homo sapiens
  misc_RNA (1)...(19): siRNA sense strand
gaaaacaaguuggagaaaa

SEQ ID NO: 1559052 - RNA, 19 nt, Homo sapiens
  misc_RNA (1)...(19): siRNA sense strand
caacugcagcugugaauga

SEQ ID NO: 1559053 - RNA, 19 nt, Homo sapiens
  misc_RNA (1)...(19): siRNA sense strand
caucuuaagugccaugaau

SEQ ID NO: 1559054 - RNA, 19 nt, Homo sapiens
  misc_RNA (1)...(19): siRNA sense strand
gaacaaacagcagguggaa

SEQ ID NO: 1559055 - RNA, 19 nt, Homo sapiens
  misc_RNA (1)...(19): siRNA sense strand
ggaaaggaaacgccacauu

SEQ ID NO: 1559056 - RNA, 19 nt, Homo sapiens
  misc_RNA (1)...(19): siRNA sense strand
gcaacugcccugccuggua

SEQ ID NO: 1559057 - RNA, 19 nt, Homo sapiens
  misc_RNA (1)...(19): siRNA sense strand
gcuaguggaugaugaccuu

SEQ ID NO: 1559058 - RNA, 19 nt, Homo sapiens
  misc_RNA (1)...(19): siRNA sense strand
gggauacauucaguuuaua

SEQ ID NO: 1559059 - RNA, 19 nt, Homo sapiens
  misc_RNA (1)...(19): siRNA sense strand
gcacuuagagaacccagaa

SEQ ID NO: 1559060 - RNA, 19 nt, Homo sapiens
  misc_RNA (1)...(19): siRNA sense strand
cugguuugcuguuguguua

SEQ ID NO: 1559061 - RNA, 19 nt, Homo sapiens
  misc_RNA (1)...(19): siRNA sense strand
gaagaauuccaguacauca

SEQ ID NO: 1559062 - RNA, 19 nt, Homo sapiens
  misc_RNA (1)...(19): siRNA sense strand
ccacagggauacauucagu

SEQ ID NO: 1559063 - RNA, 19 nt, Homo sapiens
  misc_RNA (1)...(19): siRNA sense strand
gugacaaucucaucugugu

SEQ ID NO: 1559064 - RNA, 19 nt, Homo sapiens
  misc_RNA (1)...(19): siRNA sense strand
ggaaacgccacauuggaaa

SEQ ID NO: 1559065 - RNA, 19 nt, Homo sapiens
  misc_RNA (1)...(19): siRNA sense strand
gaucuuuacaccaggauuu

SEQ ID NO: 1559066 - RNA, 19 nt, Homo sapiens
  misc_RNA (1)...(19): siRNA sense strand
gaagcugguuugcuguugu

SEQ ID NO: 1559067 - RNA, 19 nt, Homo sapiens
  misc_RNA (1)...(19): siRNA sense strand
cgaacgaccucugaaguca

SEQ ID NO: 1559068 - RNA, 19 nt, Homo sapiens
  misc_RNA (1)...(19): siRNA sense strand
uuacagaccaccaggaauu

SEQ ID NO: 1559069 - RNA, 19 nt, Homo sapiens
  misc_RNA (1)...(19): siRNA sense strand
cggaagcgguuagaagaaa

SEQ ID NO: 1559070 - RNA, 19 nt, Homo sapiens
  misc_RNA (1)...(19): siRNA sense strand
aauuugauguggugaauga

SEQ ID NO: 1559071 - RNA, 19 nt, Homo sapiens
  misc_RNA (1)...(19): siRNA sense strand
cggaauaaacugcuucuga

SEQ ID NO: 1559072 - RNA, 19 nt, Homo sapiens
  misc_RNA (1)...(19): siRNA sense strand
gcaaaugcaugugcuugag

SEQ ID NO: 1559073 - RNA, 19 nt, Homo sapiens
  misc_RNA (1)...(19): siRNA sense strand
cagaauaccacaccagaug

SEQ ID NO: 1559074 - RNA, 19 nt, Homo sapiens
  misc_RNA (1)...(19): siRNA sense strand
caucagugcccguguuuga

SEQ ID NO: 1559075 - RNA, 19 nt, Homo sapiens
  misc_RNA (1)...(19): siRNA sense strand
ucaauaccgugcaauucuu

SEQ ID NO: 1559076 - RNA, 19 nt, Homo sapiens
  misc_RNA (1)...(19): siRNA sense strand
gaaacgaugccgagaagag

SEQ ID NO: 1559077 - RNA, 19 nt, Homo sapiens
  misc_RNA (1)...(19): siRNA sense strand
ucugugaaguccaucuuaa

SEQ ID NO: 1559078 - RNA, 19 nt, Homo sapiens
  misc_RNA (1)...(19): siRNA sense strand
ugaagacauuauagacuug

SEQ ID NO: 1559079 - RNA, 19 nt, Homo sapiens
  misc_RNA (1)...(19): siRNA sense strand
ccaucaggcuccuuggaaa

SEQ ID NO: 1559080 - RNA, 19 nt, Homo sapiens
  misc_RNA (1)...(19): siRNA sense strand
uaggaaacauuauggaucu

SEQ ID NO: 1559081 - RNA, 19 nt, Homo sapiens
  misc_RNA (1)...(19): siRNA sense strand
ggcggaguuuguuagaaua

SEQ ID NO: 1559082 - RNA, 19 nt, Homo sapiens
  misc_RNA (1)...(19): siRNA sense strand
agggauacauucaguuuau

SEQ ID NO: 1559083 - RNA, 19 nt, Homo sapiens
  misc_RNA (1)...(19): siRNA sense strand
caguguuucugcaguaauu

SEQ ID NO: 1559084 - RNA, 19 nt, Homo sapiens
  misc_RNA (1)...(19): siRNA sense strand
ucacggcuuucuccgauga

SEQ ID NO: 1559085 - RNA, 19 nt, Homo sapiens
  misc_RNA (1)...(19): siRNA sense strand
gaagaacagacgugcacuu

SEQ ID NO: 1559086 - RNA, 19 nt, Homo sapiens
  misc_RNA (1)...(19): siRNA sense strand
cuauugauguguacgaaga

SEQ ID NO: 1559087 - RNA, 19 nt, Homo sapiens
  misc_RNA (1)...(19): siRNA sense strand
aaucuucuccugccuuuaa

SEQ ID NO: 1559088 - RNA, 19 nt, Homo sapiens
  misc_RNA (1)...(19): siRNA sense strand
aagaacagacgugcacuua

SEQ ID NO: 1559089 - RNA, 19 nt, Homo sapiens
  misc_RNA (1)...(19): siRNA sense strand
ugccagauuugcauaagaa

SEQ ID NO: 1559090 - RNA, 19 nt, Homo sapiens
  misc_RNA (1)...(19): siRNA sense strand
cgccaaaggccaaaucaaa

SEQ ID NO: 1559091 - RNA, 19 nt, Homo sapiens
  misc_RNA (1)...(19): siRNA sense strand
gagugacaaucucaucugu

SEQ ID NO: 1559092 - RNA, 19 nt, Homo sapiens
  misc_RNA (1)...(19): siRNA sense strand
ggcguacccuggauauguu

SEQ ID NO: 1559093 - RNA, 19 nt, Homo sapiens
  misc_RNA (1)...(19): siRNA sense strand
gcccgaaauucuccucaga

SEQ ID NO: 1559094 - RNA, 19 nt, Homo sapiens
  misc_RNA (1)...(19): siRNA sense strand
gcaauugucugugcuuucc

SEQ ID NO: 1559095 - RNA, 19 nt, Homo sapiens
  misc_RNA (1)...(19): siRNA sense strand
gaauaaacugcuucugauc

SEQ ID NO: 1559096 - RNA, 19 nt, Homo sapiens
  misc_RNA (1)...(19): siRNA sense strand
ucucagagcagacaaagga

SEQ ID NO: 1559097 - RNA, 19 nt, Homo sapiens
  misc_RNA (1)...(19): siRNA sense strand
cuggauauguugauuagau

SEQ ID NO: 1559098 - RNA, 19 nt, Homo sapiens
  misc_RNA (1)...(19): siRNA sense strand
gacaaguccgucagaacua

SEQ ID NO: 1559099 - RNA, 19 nt, Homo sapiens
  misc_RNA (1)...(19): siRNA sense strand
ggaagcgguuagaagaaag

SEQ ID NO: 1559100 - RNA, 19 nt, Homo sapiens
  misc_RNA (1)...(19): siRNA sense strand
ggagaucaaagaaauagca

SEQ ID NO: 1559101 - RNA, 19 nt, Homo sapiens
  misc_RNA (1)...(19): siRNA sense strand
ccaauuugauguggugaau

SEQ ID NO: 1559102 - RNA, 19 nt, Homo sapiens
  misc_RNA (1)...(19): siRNA sense strand
aggauuugaugccagauuu

SEQ ID NO: 1559103 - RNA, 19 nt, Homo sapiens
  misc_RNA (1)...(19): siRNA sense strand
augauccgcucccacuuua

SEQ ID NO: 1559104 - RNA, 19 nt, Homo sapiens
  misc_RNA (1)...(19): siRNA sense strand
ccaccauguugccauauuc

SEQ ID NO: 1559105 - RNA, 19 nt, Homo sapiens
  misc_RNA (1)...(19): siRNA sense strand
gcugccaccuguaugcuau

SEQ ID NO: 1559106 - RNA, 19 nt, Homo sapiens
  misc_RNA (1)...(19): siRNA sense strand
gcucccacuuuacacauau

SEQ ID NO: 1559107 - RNA, 19 nt, Homo sapiens
  misc_RNA (1)...(19): siRNA sense strand
caagucagcgcggaagaaa

SEQ ID NO: 1559108 - RNA, 19 nt, Homo sapiens
  misc_RNA (1)...(19): siRNA sense strand
uguaugcuauuaacacuca

SEQ ID NO: 1559109 - RNA, 19 nt, Homo sapiens
  misc_RNA (1)...(19): siRNA sense strand
aaauaugccuucccuacag

SEQ ID NO: 1559110 - RNA, 19 nt, Homo sapiens
  misc_RNA (1)...(19): siRNA sense strand
gaagacauuauagacuuga

SEQ ID NO: 1559111 - RNA, 19 nt, Homo sapiens
  misc_RNA (1)...(19): siRNA sense strand
uugcagcuauugaugugua

SEQ ID NO: 1559112 - RNA, 19 nt, Homo sapiens
  misc_RNA (1)...(19): siRNA sense strand
gggaagagcaggucugacu

SEQ ID NO: 1559113 - RNA, 19 nt, Homo sapiens
  misc_RNA (1)...(19): siRNA sense strand
cuguggagcugcuuauuuc

SEQ ID NO: 1559114 - RNA, 19 nt, Homo sapiens
  misc_RNA (1)...(19): siRNA sense strand
caugauccgcucccacuuu

SEQ ID NO: 1559115 - RNA, 19 nt, Homo sapiens
  misc_RNA (1)...(19): siRNA sense strand
ccgaaauucuccucagaca

SEQ ID NO: 1559116 - RNA, 19 nt, Homo sapiens
  misc_RNA (1)...(19): siRNA sense strand
gaagauggagaagcugguu

SEQ ID NO: 1559117 - RNA, 19 nt, Homo sapiens
  misc_RNA (1)...(19): siRNA sense strand
gaacucugccagugaagca

SEQ ID NO: 1559118 - RNA, 19 nt, Homo sapiens
  misc_RNA (1)...(19): siRNA sense strand
caauaccgugcaauucuuu

SEQ ID NO: 1559119 - RNA, 19 nt, Homo sapiens
  misc_RNA (1)...(19): siRNA sense strand
uguacaagauuccacuuag

SEQ ID NO: 1559120 - RNA, 19 nt, Homo sapiens
  misc_RNA (1)...(19): siRNA sense strand
ugucugugcuuucccguau

SEQ ID NO: 1559121 - RNA, 19 nt, Homo sapiens
  misc_RNA (1)...(19): siRNA sense strand
ucacugaugaugagauguu

SEQ ID NO: 1559122 - RNA, 19 nt, Homo sapiens
  misc_RNA (1)...(19): siRNA sense strand
acagggauacauucaguuu

SEQ ID NO: 1559123 - RNA, 19 nt, Homo sapiens
  misc_RNA (1)...(19): siRNA sense strand
ccugguacuuggcgaagaa

SEQ ID NO: 1559124 - RNA, 19 nt, Homo sapiens
  misc_RNA (1)...(19): siRNA sense strand
ccucugaagucacccuuag

SEQ ID NO: 1559125 - RNA, 19 nt, Homo sapiens
  misc_RNA (1)...(19): siRNA sense strand
uacaagauuccacuuagaa

SEQ ID NO: 1559126 - RNA, 19 nt, Homo sapiens
  misc_RNA (1)...(19): siRNA sense strand
gagaagcugguuugcuguu

SEQ ID NO: 1559127 - RNA, 19 nt, Homo sapiens
  misc_RNA (1)...(19): siRNA sense strand
ggugaugaccuuaguggau

SEQ ID NO: 1559128 - RNA, 19 nt, Homo sapiens
  misc_RNA (1)...(19): siRNA sense strand
agucaccuguugaagaauu

SEQ ID NO: 1559129 - RNA, 19 nt, Homo sapiens
  misc_RNA (1)...(19): siRNA sense strand
gcuaugguggcuauggaua

SEQ ID NO: 1559130 - RNA, 19 nt, Homo sapiens
  misc_RNA (1)...(19): siRNA sense strand
uaugguggcuauggauaug

SEQ ID NO: 1559131 - RNA, 19 nt, Homo sapiens
  misc_RNA (1)...(19): siRNA sense strand
ggcuguggcugugguuaug

SEQ ID NO: 1559132 - RNA, 19 nt, Homo sapiens
  misc_RNA (1)...(19): siRNA sense strand
gcucugugcuucaucuucu

SEQ ID NO: 1559133 - RNA, 19 nt, Homo sapiens
  misc_RNA (1)...(19): siRNA sense strand
gcuccaagccagacugaug

SEQ ID NO: 1559134 - RNA, 19 nt, Homo sapiens
  misc_RNA (1)...(19): siRNA sense strand
aagccagacugaugaagga

SEQ ID NO: 1559135 - RNA, 19 nt, Homo sapiens
  misc_RNA (1)...(19): siRNA sense strand
ggagguuggagccugaaga

SEQ ID NO: 1559136 - RNA, 19 nt, Homo sapiens
  misc_RNA (1)...(19): siRNA sense strand
gaaauacucugaugaccua

SEQ ID NO: 1559137 - RNA, 19 nt, Homo sapiens
  misc_RNA (1)...(19): siRNA sense strand
gggaagauaugaaaggaau

SEQ ID NO: 1559138 - RNA, 19 nt, Homo sapiens
  misc_RNA (1)...(19): siRNA sense strand
ccauucuucuggauuauua

SEQ ID NO: 1559139 - RNA, 19 nt, Homo sapiens
  misc_RNA (1)...(19): siRNA sense strand
gaagagaggcaucggauuc

SEQ ID NO: 1559140 - RNA, 19 nt, Homo sapiens
  misc_RNA (1)...(19): siRNA sense strand
ucaaggacaucuccaguau

SEQ ID NO: 1559141 - RNA, 19 nt, Homo sapiens
  misc_RNA (1)...(19): siRNA sense strand
ucgcauacguugcauauau

SEQ ID NO: 1559142 - RNA, 19 nt, Homo sapiens
  misc_RNA (1)...(19): siRNA sense strand
gaauagugcgcagaaguua

SEQ ID NO: 1559143 - RNA, 19 nt, Homo sapiens
  misc_RNA (1)...(19): siRNA sense strand
ggacuaugcccaugacuau

SEQ ID NO: 1559144 - RNA, 19 nt, Homo sapiens
  misc_RNA (1)...(19): siRNA sense strand
caaacgagcccaaauccuu

SEQ ID NO: 1559145 - RNA, 19 nt, Homo sapiens
  misc_RNA (1)...(19): siRNA sense strand
gagaucaauuccauucuuc

SEQ ID NO: 1559146 - RNA, 19 nt, Homo sapiens
  misc_RNA (1)...(19): siRNA sense strand
ucaccauguuugcugauua

SEQ ID NO: 1559147 - RNA, 19 nt, Homo sapiens
  misc_RNA (1)...(19): siRNA sense strand
ggagagaucaauuccauuc

SEQ ID NO: 1559148 - RNA, 19 nt, Homo sapiens
  misc_RNA (1)...(19): siRNA sense strand
ggcaucggauucucaauga

SEQ ID NO: 1559149 - RNA, 19 nt, Homo sapiens
  misc_RNA (1)...(19): siRNA sense strand
cauguuugcugauuauaga

SEQ ID NO: 1559150 - RNA, 19 nt, Homo sapiens
  misc_RNA (1)...(19): siRNA sense strand
gcauacguugcauauauua

SEQ ID NO: 1559151 - RNA, 19 nt, Homo sapiens
  misc_RNA (1)...(19): siRNA sense strand
aaggacaucuccaguauca

SEQ ID NO: 1559152 - RNA, 19 nt, Homo sapiens
  misc_RNA (1)...(19): siRNA sense strand
gaagauaugaaaggaauuc

SEQ ID NO: 1559153 - RNA, 19 nt, Homo sapiens
  misc_RNA (1)...(19): siRNA sense strand
gagaugugacucuguuuga

SEQ ID NO: 1559154 - RNA, 19 nt, Homo sapiens
  misc_RNA (1)...(19): siRNA sense strand
ccaaauccuuguagcagau

SEQ ID NO: 1559155 - RNA, 19 nt, Homo sapiens
  misc_RNA (1)...(19): siRNA sense strand
cugaugaccuacugaagaa

SEQ ID NO: 1559156 - RNA, 19 nt, Homo sapiens
  misc_RNA (1)...(19): siRNA sense strand
ggaguguauuggaaggaaa

SEQ ID NO: 1559157 - RNA, 19 nt, Homo sapiens
  misc_RNA (1)...(19): siRNA sense strand
gcaagagguggaaaucaga

SEQ ID NO: 1559158 - RNA, 19 nt, Homo sapiens
  misc_RNA (1)...(19): siRNA sense strand
agagaucaauuccauucuu

SEQ ID NO: 1559159 - RNA, 19 nt, Homo sapiens
  misc_RNA (1)...(19): siRNA sense strand
caccauguuugcugauuau

SEQ ID NO: 1559160 - RNA, 19 nt, Homo sapiens
  misc_RNA (1)...(19): siRNA sense strand
ggcaagagguggaaaucag

SEQ ID NO: 1559161 - RNA, 19 nt, Homo sapiens
  misc_RNA (1)...(19): siRNA sense strand
gcccugaaauacucugaug

SEQ ID NO: 1559162 - RNA, 19 nt, Homo sapiens
  misc_RNA (1)...(19): siRNA sense strand
gagaauagugcgcagaagu

SEQ ID NO: 1559163 - RNA, 19 nt, Homo sapiens
  misc_RNA (1)...(19): siRNA sense strand
caucggauucucaaugaaa

SEQ ID NO: 1559164 - RNA, 19 nt, Homo sapiens
  misc_RNA (1)...(19): siRNA sense strand
cgcauacguugcauauauu

SEQ ID NO: 1559165 - RNA, 19 nt, Homo sapiens
  misc_RNA (1)...(19): siRNA sense strand
caacugcguccgagaaagu

SEQ ID NO: 1559166 - RNA, 19 nt, Homo sapiens
  misc_RNA (1)...(19): siRNA sense strand
gcaucggauucucaaugaa

SEQ ID NO: 1559167 - RNA, 19 nt, Homo sapiens
  misc_RNA (1)...(19): siRNA sense strand
uaugaaaggaauuccguuu

SEQ ID NO: 1559168 - RNA, 19 nt, Homo sapiens
  misc_RNA (1)...(19): siRNA sense strand
gggacuaugcccaugacua

SEQ ID NO: 1559169 - RNA, 19 nt, Homo sapiens
  misc_RNA (1)...(19): siRNA sense strand
agaauagugcgcagaaguu

SEQ ID NO: 1559170 - RNA, 19 nt, Homo sapiens
  misc_RNA (1)...(19): siRNA sense strand
caucgcauacguugcauau

SEQ ID NO: 1559171 - RNA, 19 nt, Homo sapiens
  misc_RNA (1)...(19): siRNA sense strand
uagggaagauaugaaagga

SEQ ID NO: 1559172 - RNA, 19 nt, Homo sapiens
  misc_RNA (1)...(19): siRNA sense strand
cgagaaagugagaauagug

SEQ ID NO: 1559173 - RNA, 19 nt, Homo sapiens
  misc_RNA (1)...(19): siRNA sense strand
cuauagggaagauaugaaa

SEQ ID NO: 1559174 - RNA, 19 nt, Homo sapiens
  misc_RNA (1)...(19): siRNA sense strand
ggugcucgcuuuggugugu

SEQ ID NO: 1559175 - RNA, 19 nt, Homo sapiens
  misc_RNA (1)...(19): siRNA sense strand
gaucaauuccauucuucug

SEQ ID NO: 1559176 - RNA, 19 nt, Homo sapiens
  misc_RNA (1)...(19): siRNA sense strand
uuacaaacgagcccaaauc

SEQ ID NO: 1559177 - RNA, 19 nt, Homo sapiens
  misc_RNA (1)...(19): siRNA sense strand
ccuaauggagagaucaauu

SEQ ID NO: 1559178 - RNA, 19 nt, Homo sapiens
  misc_RNA (1)...(19): siRNA sense strand
cuaauggagagaucaauuc

SEQ ID NO: 1559179 - RNA, 19 nt, Homo sapiens
  misc_RNA (1)...(19): siRNA sense strand
gacuauagggaagauauga

SEQ ID NO: 1559180 - RNA, 19 nt, Homo sapiens
  misc_RNA (1)...(19): siRNA sense strand
ggaagauaugaaaggaauu

SEQ ID NO: 1559181 - RNA, 19 nt, Homo sapiens
  misc_RNA (1)...(19): siRNA sense strand
caaauccuuguagcagaua

SEQ ID NO: 1559182 - RNA, 19 nt, Homo sapiens
  misc_RNA (1)...(19): siRNA sense strand
ucugaugaccuacugaaga

SEQ ID NO: 1559183 - RNA, 19 nt, Homo sapiens
  misc_RNA (1)...(19): siRNA sense strand
gguucuugcucaucuugga

SEQ ID NO: 1559184 - RNA, 19 nt, Homo sapiens
  misc_RNA (1)...(19): siRNA sense strand
ccgagaaagugagaauagu

SEQ ID NO: 1559185 - RNA, 19 nt, Homo sapiens
  misc_RNA (1)...(19): siRNA sense strand
gugagaauagugcgcagaa

SEQ ID NO: 1559186 - RNA, 19 nt, Homo sapiens
  misc_RNA (1)...(19): siRNA sense strand
uacguggaguguauuggaa

SEQ ID NO: 1559187 - RNA, 19 nt, Homo sapiens
  misc_RNA (1)...(19): siRNA sense strand
caucuuggagcccugaaau

SEQ ID NO: 1559188 - RNA, 19 nt, Homo sapiens
  misc_RNA (1)...(19): siRNA sense strand
aaaggaauuccguuucauc

SEQ ID NO: 1559189 - RNA, 19 nt, Homo sapiens
  misc_RNA (1)...(19): siRNA sense strand
gagauggcugcuucaagga

SEQ ID NO: 1559190 - RNA, 19 nt, Homo sapiens
  misc_RNA (1)...(19): siRNA sense strand
agaaaugcucucauaugga

SEQ ID NO: 1559191 - RNA, 19 nt, Homo sapiens
  misc_RNA (1)...(19): siRNA sense strand
ucuccaguaucaccauguu

SEQ ID NO: 1559192 - RNA, 19 nt, Homo sapiens
  misc_RNA (1)...(19): siRNA sense strand
gauugucuucuggagcuua

SEQ ID NO: 1559193 - RNA, 19 nt, Homo sapiens
  misc_RNA (1)...(19): siRNA sense strand
caaugaaaccgggaaaauu

SEQ ID NO: 1559194 - RNA, 19 nt, Homo sapiens
  misc_RNA (1)...(19): siRNA sense strand
gacuaugcccaugacuaua

SEQ ID NO: 1559195 - RNA, 19 nt, Homo sapiens
  misc_RNA (1)...(19): siRNA sense strand
uagcagauacguggagugu

SEQ ID NO: 1559196 - RNA, 19 nt, Homo sapiens
  misc_RNA (1)...(19): siRNA sense strand
uggaguguauuggaaggaa

SEQ ID NO: 1559197 - RNA, 19 nt, Homo sapiens
  misc_RNA (1)...(19): siRNA sense strand
agagggugcucgcuuuggu

SEQ ID NO: 1559198 - RNA, 19 nt, Homo sapiens
  misc_RNA (1)...(19): siRNA sense strand
uucuggagcuuauugaaca

SEQ ID NO: 1559199 - RNA, 19 nt, Homo sapiens
  misc_RNA (1)...(19): siRNA sense strand
ggaaaucacguuuaagaau

SEQ ID NO: 1559200 - RNA, 19 nt, Homo sapiens
  misc_RNA (1)...(19): siRNA sense strand
uggaggagcugcagaucua

SEQ ID NO: 1559201 - RNA, 19 nt, Homo sapiens
  misc_RNA (1)...(19): siRNA sense strand
ugacauggcuagaauaucg

SEQ ID NO: 1559202 - RNA, 19 nt, Homo sapiens
  misc_RNA (1)...(19): siRNA sense strand
ggagggagcccaggaguau

SEQ ID NO: 1559203 - RNA, 19 nt, Homo sapiens
  misc_RNA (1)...(19): siRNA sense strand
caggaaaucacguuuaaga

SEQ ID NO: 1559204 - RNA, 19 nt, Homo sapiens
  misc_RNA (1)...(19): siRNA sense strand
cagcagaugugggcacuga

SEQ ID NO: 1559205 - RNA, 19 nt, Homo sapiens
  misc_RNA (1)...(19): siRNA sense strand
ugcaggaaaucacguuuaa

SEQ ID NO: 1559206 - RNA, 19 nt, Homo sapiens
  misc_RNA (1)...(19): siRNA sense strand
gaguauguaucgcuguuca

SEQ ID NO: 1559207 - RNA, 19 nt, Homo sapiens
  misc_RNA (1)...(19): siRNA sense strand
guuaugaccugaacuugcu

SEQ ID NO: 1559208 - RNA, 19 nt, Homo sapiens
  misc_RNA (1)...(19): siRNA sense strand
ugauguggauggcuguuau

SEQ ID NO: 1559209 - RNA, 19 nt, Homo sapiens
  misc_RNA (1)...(19): siRNA sense strand
cggcagccaucaccacugu

SEQ ID NO: 1559210 - RNA, 19 nt, Homo sapiens
  misc_RNA (1)...(19): siRNA sense strand
aagaauuacuacacagcuu

SEQ ID NO: 1559211 - RNA, 19 nt, Homo sapiens
  misc_RNA (1)...(19): siRNA sense strand
gaacuugcucuccuacacu

SEQ ID NO: 1559212 - RNA, 19 nt, Homo sapiens
  misc_RNA (1)...(19): siRNA sense strand
ugugugacauggcuagaau

SEQ ID NO: 1559213 - RNA, 19 nt, Homo sapiens
  misc_RNA (1)...(19): siRNA sense strand
agaauuacuacacagcuuu

SEQ ID NO: 1559214 - RNA, 19 nt, Homo sapiens
  misc_RNA (1)...(19): siRNA sense strand
ugaccugccugcgggacua

SEQ ID NO: 1559215 - RNA, 19 nt, Homo sapiens
  misc_RNA (1)...(19): siRNA sense strand
guacaccucagcacacaca

SEQ ID NO: 1559216 - RNA, 19 nt, Homo sapiens
  misc_RNA (1)...(19): siRNA sense strand
gcagaugugggcacugaca

SEQ ID NO: 1559217 - RNA, 19 nt, Homo sapiens
  misc_RNA (1)...(19): siRNA sense strand
cugcgggacuacugccuaa

SEQ ID NO: 1559218 - RNA, 19 nt, Homo sapiens
  misc_RNA (1)...(19): siRNA sense strand
gcacacacaccugccaagu

SEQ ID NO: 1559219 - RNA, 19 nt, Homo sapiens
  misc_RNA (1)...(19): siRNA sense strand
gcuguuaugaccugaacuu

SEQ ID NO: 1559220 - RNA, 19 nt, Homo sapiens
  misc_RNA (1)...(19): siRNA sense strand
uaucagcagggaccaaaga

SEQ ID NO: 1559221 - RNA, 19 nt, Homo sapiens
  misc_RNA (1)...(19): siRNA sense strand
gcgggacuacugccuaaug

SEQ ID NO: 1559222 - RNA, 19 nt, Homo sapiens
  misc_RNA (1)...(19): siRNA sense strand
uaucggagcuacgccugau

SEQ ID NO: 1559223 - RNA, 19 nt, Homo sapiens
  misc_RNA (1)...(19): siRNA sense strand
agucacaccuccgcaagga

SEQ ID NO: 1559224 - RNA, 19 nt, Homo sapiens
  misc_RNA (1)...(19): siRNA sense strand
gcauccguguccgucagua

SEQ ID NO: 1559225 - RNA, 19 nt, Homo sapiens
  misc_RNA (1)...(19): siRNA sense strand
uugcaggaaaucacguuua

SEQ ID NO: 1559226 - RNA, 19 nt, Homo sapiens
  misc_RNA (1)...(19): siRNA sense strand
ugaacuugcucuccuacac

SEQ ID NO: 1559227 - RNA, 19 nt, Homo sapiens
  misc_RNA (1)...(19): siRNA sense strand
caguacaccucagcacaca

SEQ ID NO: 1559228 - RNA, 19 nt, Homo sapiens
  misc_RNA (1)...(19): siRNA sense strand
aggaguauguaucgcuguu

SEQ ID NO: 1559229 - RNA, 19 nt, Homo sapiens
  misc_RNA (1)...(19): siRNA sense strand
ugugggcacugacagagau

SEQ ID NO: 1559230 - RNA, 19 nt, Homo sapiens
  misc_RNA (1)...(19): siRNA sense strand
uccgugaccuuucccaagu

SEQ ID NO: 1559231 - RNA, 19 nt, Homo sapiens
  misc_RNA (1)...(19): siRNA sense strand
ggacugaagugaaggauuu

SEQ ID NO: 1559232 - RNA, 19 nt, Homo sapiens
  misc_RNA (1)...(19): siRNA sense strand
ccacaaaggcggaagauga

SEQ ID NO: 1559233 - RNA, 19 nt, Homo sapiens
  misc_RNA (1)...(19): siRNA sense strand
gcaaaggagcuaugggaaa

SEQ ID NO: 1559234 - RNA, 19 nt, Homo sapiens
  misc_RNA (1)...(19): siRNA sense strand
gagaaaucuuccuggauga

SEQ ID NO: 1559235 - RNA, 19 nt, Homo sapiens
  misc_RNA (1)...(19): siRNA sense strand
ggcggaagaugauguuuau

SEQ ID NO: 1559236 - RNA, 19 nt, Homo sapiens
  misc_RNA (1)...(19): siRNA sense strand
uggaguaccuggaggauau

SEQ ID NO: 1559237 - RNA, 19 nt, Homo sapiens
  misc_RNA (1)...(19): siRNA sense strand
aaauggagcugugauuaug

SEQ ID NO: 1559238 - RNA, 19 nt, Homo sapiens
  misc_RNA (1)...(19): siRNA sense strand
ucuggaagcugcuaagaug

SEQ ID NO: 1559239 - RNA, 19 nt, Homo sapiens
  misc_RNA (1)...(19): siRNA sense strand
caaaggagcuaugggaaaa

SEQ ID NO: 1559240 - RNA, 19 nt, Homo sapiens
  misc_RNA (1)...(19): siRNA sense strand
gaugauguuuaugggauuu

SEQ ID NO: 1559241 - RNA, 19 nt, Homo sapiens
  misc_RNA (1)...(19): siRNA sense strand
ggaaagcagggcauucuuc

SEQ ID NO: 1559242 - RNA, 19 nt, Homo sapiens
  misc_RNA (1)...(19): siRNA sense strand
gaaaucuuccuggaugaaa

SEQ ID NO: 1559243 - RNA, 19 nt, Homo sapiens
  misc_RNA (1)...(19): siRNA sense strand
guaaaccuacuuucuguuc

SEQ ID NO: 1559244 - RNA, 19 nt, Homo sapiens
  misc_RNA (1)...(19): siRNA sense strand
gagaaggaaccaaggacuu

SEQ ID NO: 1559245 - RNA, 19 nt, Homo sapiens
  misc_RNA (1)...(19): siRNA sense strand
aaaguucuaugguccacaa

SEQ ID NO: 1559246 - RNA, 19 nt, Homo sapiens
  misc_RNA (1)...(19): siRNA sense strand
ugaaaacacuggagaagga

SEQ ID NO: 1559247 - RNA, 19 nt, Homo sapiens
  misc_RNA (1)...(19): siRNA sense strand
gaaagcagggcauucuucu

SEQ ID NO: 1559248 - RNA, 19 nt, Homo sapiens
  misc_RNA (1)...(19): siRNA sense strand
gacuuuggccucagagaaa

SEQ ID NO: 1559249 - RNA, 19 nt, Homo sapiens
  misc_RNA (1)...(19): siRNA sense strand
aagcagggcauucuucuug

SEQ ID NO: 1559250 - RNA, 19 nt, Homo sapiens
  misc_RNA (1)...(19): siRNA sense strand
ggaucuguccucccugaaa

SEQ ID NO: 1559251 - RNA, 19 nt, Homo sapiens
  misc_RNA (1)...(19): siRNA sense strand
ggaagcugcuaagaugauc

SEQ ID NO: 1559252 - RNA, 19 nt, Homo sapiens
  misc_RNA (1)...(19): siRNA sense strand
agaaggaaccaaggacuuu

SEQ ID NO: 1559253 - RNA, 19 nt, Homo sapiens
  misc_RNA (1)...(19): siRNA sense strand
uuuccagccuuauuucaaa

SEQ ID NO: 1559254 - RNA, 19 nt, Homo sapiens
  misc_RNA (1)...(19): siRNA sense strand
gaucuguccucccugaaaa

SEQ ID NO: 1559255 - RNA, 19 nt, Homo sapiens
  misc_RNA (1)...(19): siRNA sense strand
ucuaugcagugguaaagga

SEQ ID NO: 1559256 - RNA, 19 nt, Homo sapiens
  misc_RNA (1)...(19): siRNA sense strand
ggaaccaaggacuuucaaa

SEQ ID NO: 1559257 - RNA, 19 nt, Homo sapiens
  misc_RNA (1)...(19): siRNA sense strand
aaaccuacuuucuguucug

SEQ ID NO: 1559258 - RNA, 19 nt, Homo sapiens
  misc_RNA (1)...(19): siRNA sense strand
gcagggcauucuucuugag

SEQ ID NO: 1559259 - RNA, 19 nt, Homo sapiens
  misc_RNA (1)...(19): siRNA sense strand
gagaggaagcugcggaucu

SEQ ID NO: 1559260 - RNA, 19 nt, Homo sapiens
  misc_RNA (1)...(19): siRNA sense strand
gccaggcuguuuccucugu

SEQ ID NO: 1559261 - RNA, 19 nt, Homo sapiens
  misc_RNA (1)...(19): siRNA sense strand
gaaggaaccaaggacuuuc

SEQ ID NO: 1559262 - RNA, 19 nt, Homo sapiens
  misc_RNA (1)...(19): siRNA sense strand
aacggaggcuucucuggaa

SEQ ID NO: 1559263 - RNA, 19 nt, Homo sapiens
  misc_RNA (1)...(19): siRNA sense strand
caaaggcggaagaugaugu

SEQ ID NO: 1559264 - RNA, 19 nt, Homo sapiens
  misc_RNA (1)...(19): siRNA sense strand
ugaucaaaccacagacuuu

SEQ ID NO: 1559265 - RNA, 19 nt, Homo sapiens
  misc_RNA (1)...(19): siRNA sense strand
agaggaagcugcggaucug

SEQ ID NO: 1559266 - RNA, 19 nt, Homo sapiens
  misc_RNA (1)...(19): siRNA sense strand
ccuacuuucuguucuggaa

SEQ ID NO: 1559267 - RNA, 19 nt, Homo sapiens
  misc_RNA (1)...(19): siRNA sense strand
ggagugugguacaacuucu

SEQ ID NO: 1559268 - RNA, 19 nt, Homo sapiens
  misc_RNA (1)...(19): siRNA sense strand
guucuaugguccacaaagg

SEQ ID NO: 1559269 - RNA, 19 nt, Homo sapiens
  misc_RNA (1)...(19): siRNA sense strand
ggaguaccuggaggauaua

SEQ ID NO: 1559270 - RNA, 19 nt, Homo sapiens
  misc_RNA (1)...(19): siRNA sense strand
uggaggauauagaccugaa

SEQ ID NO: 1559271 - RNA, 19 nt, Homo sapiens
  misc_RNA (1)...(19): siRNA sense strand
cggaagaugauguuuaugg

SEQ ID NO: 1559272 - RNA, 19 nt, Homo sapiens
  misc_RNA (1)...(19): siRNA sense strand
ggauuuccagccuuauuuc

SEQ ID NO: 1559273 - RNA, 19 nt, Homo sapiens
  misc_RNA (1)...(19): siRNA sense strand
aggcggaagaugauguuua

SEQ ID NO: 1559274 - RNA, 19 nt, Homo sapiens
  misc_RNA (1)...(19): siRNA sense strand
cacaaaggcggaagaugau

SEQ ID NO: 1559275 - RNA, 19 nt, Homo sapiens
  misc_RNA (1)...(19): siRNA sense strand
uaaaccuacuuucuguucu

SEQ ID NO: 1559276 - RNA, 19 nt, Homo sapiens
  misc_RNA (1)...(19): siRNA sense strand
ucaaagcaaaggagcuaug

SEQ ID NO: 1559277 - RNA, 19 nt, Homo sapiens
  misc_RNA (1)...(19): siRNA sense strand
cacagacuuuggccucaga

SEQ ID NO: 1559278 - RNA, 19 nt, Homo sapiens
  misc_RNA (1)...(19): siRNA sense strand
ggaggauauagaccugaaa

SEQ ID NO: 1559279 - RNA, 19 nt, Homo sapiens
  misc_RNA (1)...(19): siRNA sense strand
gggagugugguacaacuuc

SEQ ID NO: 1559280 - RNA, 19 nt, Homo sapiens
  misc_RNA (1)...(19): siRNA sense strand
aagaugaucaaaccacaga

SEQ ID NO: 1559281 - RNA, 19 nt, Homo sapiens
  misc_RNA (1)...(19): siRNA sense strand
cugcuaagaugaucaaacc

SEQ ID NO: 1559282 - RNA, 19 nt, Homo sapiens
  misc_RNA (1)...(19): siRNA sense strand
agaugauguuuaugggauu

SEQ ID NO: 1559283 - RNA, 19 nt, Homo sapiens
  misc_RNA (1)...(19): siRNA sense strand
agacuuuggccucagagaa

SEQ ID NO: 1559284 - RNA, 19 nt, Homo sapiens
  misc_RNA (1)...(19): siRNA sense strand
ggauauagaccugaaaaca

SEQ ID NO: 1559285 - RNA, 19 nt, Homo sapiens
  misc_RNA (1)...(19): siRNA sense strand
aggauuuccagccuuauuu

SEQ ID NO: 1559286 - RNA, 19 nt, Homo sapiens
  misc_RNA (1)...(19): siRNA sense strand
caaagcaaaggagcuaugg

SEQ ID NO: 1559287 - RNA, 19 nt, Homo sapiens
  misc_RNA (1)...(19): siRNA sense strand
ccacaggcaugaauuauuu

SEQ ID NO: 1559288 - RNA, 19 nt, Homo sapiens
  misc_RNA (1)...(19): siRNA sense strand
gaucaaguguuucauguca

SEQ ID NO: 1559289 - RNA, 19 nt, Homo sapiens
  misc_RNA (1)...(19): siRNA sense strand
gcauaauguuugcugguua

SEQ ID NO: 1559290 - RNA, 19 nt, Homo sapiens
  misc_RNA (1)...(19): siRNA sense strand
gaaagcaucacuaaugaau

SEQ ID NO: 1559291 - RNA, 19 nt, Homo sapiens
  misc_RNA (1)...(19): siRNA sense strand
cgugaagacuuaguaaaua

SEQ ID NO: 1559292 - RNA, 19 nt, Homo sapiens
  misc_RNA (1)...(19): siRNA sense strand
gcugaaagcaucacuaaug

SEQ ID NO: 1559293 - RNA, 19 nt, Homo sapiens
  misc_RNA (1)...(19): siRNA sense strand
gaugaaagcggaagcaaau

SEQ ID NO: 1559294 - RNA, 19 nt, Homo sapiens
  misc_RNA (1)...(19): siRNA sense strand
agacaaauaugauccuuuc

SEQ ID NO: 1559295 - RNA, 19 nt, Homo sapiens
  misc_RNA (1)...(19): siRNA sense strand
gcaauuuggcuauuccuaa

SEQ ID NO: 1559296 - RNA, 19 nt, Homo sapiens
  misc_RNA (1)...(19): siRNA sense strand
cauaggagcauuugauauu

SEQ ID NO: 1559297 - RNA, 19 nt, Homo sapiens
  misc_RNA (1)...(19): siRNA sense strand
gcauaaacccuggcucuuu

SEQ ID NO: 1559298 - RNA, 19 nt, Homo sapiens
  misc_RNA (1)...(19): siRNA sense strand
gcagaagguugguuugaag

SEQ ID NO: 1559299 - RNA, 19 nt, Homo sapiens
  misc_RNA (1)...(19): siRNA sense strand
uagcaaacuucaaggcuuu

SEQ ID NO: 1559300 - RNA, 19 nt, Homo sapiens
  misc_RNA (1)...(19): siRNA sense strand
ggaagcagcaguccaggaa

SEQ ID NO: 1559301 - RNA, 19 nt, Homo sapiens
  misc_RNA (1)...(19): siRNA sense strand
gaagaucaaguguuucaug

SEQ ID NO: 1559302 - RNA, 19 nt, Homo sapiens
  misc_RNA (1)...(19): siRNA sense strand
caaccacccugcaccaaau

SEQ ID NO: 1559303 - RNA, 19 nt, Homo sapiens
  misc_RNA (1)...(19): siRNA sense strand
aagcaucacuaaugaauuc

SEQ ID NO: 1559304 - RNA, 19 nt, Homo sapiens
  misc_RNA (1)...(19): siRNA sense strand
gaaaccuuauuggguagua

SEQ ID NO: 1559305 - RNA, 19 nt, Homo sapiens
  misc_RNA (1)...(19): siRNA sense strand
ccuccaaccugcuuuauuc

SEQ ID NO: 1559306 - RNA, 19 nt, Homo sapiens
  misc_RNA (1)...(19): siRNA sense strand
cugaaagcaucacuaauga

SEQ ID NO: 1559307 - RNA, 19 nt, Homo sapiens
  misc_RNA (1)...(19): siRNA sense strand
gaauuagagcuugaagaua

SEQ ID NO: 1559308 - RNA, 19 nt, Homo sapiens
  misc_RNA (1)...(19): siRNA sense strand
caauuuggcuauuccuaau

SEQ ID NO: 1559309 - RNA, 19 nt, Homo sapiens
  misc_RNA (1)...(19): siRNA sense strand
uagaagaggagaauaaaga

SEQ ID NO: 1559310 - RNA, 19 nt, Homo sapiens
  misc_RNA (1)...(19): siRNA sense strand
ucaguuccauagugguuua

SEQ ID NO: 1559311 - RNA, 19 nt, Homo sapiens
  misc_RNA (1)...(19): siRNA sense strand
cgugagcgauauaccauuu

SEQ ID NO: 1559312 - RNA, 19 nt, Homo sapiens
  misc_RNA (1)...(19): siRNA sense strand
gcagucagucuguugauga

SEQ ID NO: 1559313 - RNA, 19 nt, Homo sapiens
  misc_RNA (1)...(19): siRNA sense strand
ggaagauccuacuggaaca

SEQ ID NO: 1559314 - RNA, 19 nt, Homo sapiens
  misc_RNA (1)...(19): siRNA sense strand
gcuugaagauaaacuggaa

SEQ ID NO: 1559315 - RNA, 19 nt, Homo sapiens
  misc_RNA (1)...(19): siRNA sense strand
caaauaugauccuuucacu

SEQ ID NO: 1559316 - RNA, 19 nt, Homo sapiens
  misc_RNA (1)...(19): siRNA sense strand
ccagauauucaccaaagua

SEQ ID NO: 1559317 - RNA, 19 nt, Homo sapiens
  misc_RNA (1)...(19): siRNA sense strand
ccacugagcccucuaguac

SEQ ID NO: 1559318 - RNA, 19 nt, Homo sapiens
  misc_RNA (1)...(19): siRNA sense strand
guaaagcucaguuccauag

SEQ ID NO: 1559319 - RNA, 19 nt, Homo sapiens
  misc_RNA (1)...(19): siRNA sense strand
ggaaugcagucagucuguu

SEQ ID NO: 1559320 - RNA, 19 nt, Homo sapiens
  misc_RNA (1)...(19): siRNA sense strand
gaagguugguuugaagauc

SEQ ID NO: 1559321 - RNA, 19 nt, Homo sapiens
  misc_RNA (1)...(19): siRNA sense strand
gauaauuaaugcaguugag

SEQ ID NO: 1559322 - RNA, 19 nt, Homo sapiens
  misc_RNA (1)...(19): siRNA sense strand
gacaguagaagauagcaaa

SEQ ID NO: 1559323 - RNA, 19 nt, Homo sapiens
  misc_RNA (1)...(19): siRNA sense strand
gaagcaacccuugucauca

SEQ ID NO: 1559324 - RNA, 19 nt, Homo sapiens
  misc_RNA (1)...(19): siRNA sense strand
guggugaagcuauuaagua

SEQ ID NO: 1559325 - RNA, 19 nt, Homo sapiens
  misc_RNA (1)...(19): siRNA sense strand
gauuguucuuggaaugaua

SEQ ID NO: 1559326 - RNA, 19 nt, Homo sapiens
  misc_RNA (1)...(19): siRNA sense strand
aagcaacccuugucaucaa

SEQ ID NO: 1559327 - RNA, 19 nt, Homo sapiens
  misc_RNA (1)...(19): siRNA sense strand
aaacaugauugaacgaucu

SEQ ID NO: 1559328 - RNA, 19 nt, Homo sapiens
  misc_RNA (1)...(19): siRNA sense strand
gcaccuccaaccugcuuua

SEQ ID NO: 1559329 - RNA, 19 nt, Homo sapiens
  misc_RNA (1)...(19): siRNA sense strand
gaagaggagaauaaagaug

SEQ ID NO: 1559330 - RNA, 19 nt, Homo sapiens
  misc_RNA (1)...(19): siRNA sense strand
ugucaaugccuuuggauuu

SEQ ID NO: 1559331 - RNA, 19 nt, Homo sapiens
  misc_RNA (1)...(19): siRNA sense strand
gagauaaagcagagauguu

SEQ ID NO: 1559332 - RNA, 19 nt, Homo sapiens
  misc_RNA (1)...(19): siRNA sense strand
ugaacgaucugugguggaa

SEQ ID NO: 1559333 - RNA, 19 nt, Homo sapiens
  misc_RNA (1)...(19): siRNA sense strand
ugaauuagagcuugaagau

SEQ ID NO: 1559334 - RNA, 19 nt, Homo sapiens
  misc_RNA (1)...(19): siRNA sense strand
gcagacaaauaugauccuu

SEQ ID NO: 1559335 - RNA, 19 nt, Homo sapiens
  misc_RNA (1)...(19): siRNA sense strand
ggagguccuucuaauacau

SEQ ID NO: 1559336 - RNA, 19 nt, Homo sapiens
  misc_RNA (1)...(19): siRNA sense strand
guacuacuagggcauacua

SEQ ID NO: 1559337 - RNA, 19 nt, Homo sapiens
  misc_RNA (1)...(19): siRNA sense strand
acugagcccucuaguacua

SEQ ID NO: 1559338 - RNA, 19 nt, Homo sapiens
  misc_RNA (1)...(19): siRNA sense strand
ucaaguguuucaugucaau

SEQ ID NO: 1559339 - RNA, 19 nt, Homo sapiens
  misc_RNA (1)...(19): siRNA sense strand
cuaauaagacaguagaaga

SEQ ID NO: 1559340 - RNA, 19 nt, Homo sapiens
  misc_RNA (1)...(19): siRNA sense strand
gcucuccgccuucaaguug

SEQ ID NO: 1559341 - RNA, 19 nt, Homo sapiens
  misc_RNA (1)...(19): siRNA sense strand
ucuaauacaucugugaaga

SEQ ID NO: 1559342 - RNA, 19 nt, Homo sapiens
  misc_RNA (1)...(19): siRNA sense strand
gacccacaggcaugaauua

SEQ ID NO: 1559343 - RNA, 19 nt, Homo sapiens
  misc_RNA (1)...(19): siRNA sense strand
cauaaacccuggcucuuuu

SEQ ID NO: 1559344 - RNA, 19 nt, Homo sapiens
  misc_RNA (1)...(19): siRNA sense strand
ccaaccugcuuuauucugu

SEQ ID NO: 1559345 - RNA, 19 nt, Homo sapiens
  misc_RNA (1)...(19): siRNA sense strand
ggaccagguggaaguauug

SEQ ID NO: 1559346 - RNA, 19 nt, Homo sapiens
  misc_RNA (1)...(19): siRNA sense strand
agauaaagcagagauguuu

SEQ ID NO: 1559347 - RNA, 19 nt, Homo sapiens
  misc_RNA (1)...(19): siRNA sense strand
guauugggcauaugacuau

SEQ ID NO: 1559348 - RNA, 19 nt, Homo sapiens
  misc_RNA (1)...(19): siRNA sense strand
uaaagaugcuauguuugug

SEQ ID NO: 1559349 - RNA, 19 nt, Homo sapiens
  misc_RNA (1)...(19): siRNA sense strand
gcuagaagaggagaauaaa

SEQ ID NO: 1559350 - RNA, 19 nt, Homo sapiens
  misc_RNA (1)...(19): siRNA sense strand
agaggcaugcuuugucuua

SEQ ID NO: 1559351 - RNA, 19 nt, Homo sapiens
  misc_RNA (1)...(19): siRNA sense strand
gauagguucucacccugau

SEQ ID NO: 1559352 - RNA, 19 nt, Homo sapiens
  misc_RNA (1)...(19): siRNA sense strand
gauauuccacgcuuugugu

SEQ ID NO: 1559353 - RNA, 19 nt, Homo sapiens
  misc_RNA (1)...(19): siRNA sense strand
aguagaagauagcaaacuu

SEQ ID NO: 1559354 - RNA, 19 nt, Homo sapiens
  misc_RNA (1)...(19): siRNA sense strand
caucacuaaugaauucaga

SEQ ID NO: 1559355 - RNA, 19 nt, Homo sapiens
  misc_RNA (1)...(19): siRNA sense strand
gauauucaccaaaguaguc

SEQ ID NO: 1559356 - RNA, 19 nt, Homo sapiens
  misc_RNA (1)...(19): siRNA sense strand
aaaucaaguucaagcuuug

SEQ ID NO: 1559357 - RNA, 19 nt, Homo sapiens
  misc_RNA (1)...(19): siRNA sense strand
gaagauaaacuggaaaaga

SEQ ID NO: 1559358 - RNA, 19 nt, Homo sapiens
  misc_RNA (1)...(19): siRNA sense strand
ccauagugguuuauacaca

SEQ ID NO: 1559359 - RNA, 19 nt, Homo sapiens
  misc_RNA (1)...(19): siRNA sense strand
ggcuauuccuaaucacuuu

SEQ ID NO: 1559360 - RNA, 19 nt, Homo sapiens
  misc_RNA (1)...(19): siRNA sense strand
gagaauaaagaugcuaugu

SEQ ID NO: 1559361 - RNA, 19 nt, Homo sapiens
  misc_RNA (1)...(19): siRNA sense strand
aauguuugcugguuauuca

SEQ ID NO: 1559362 - RNA, 19 nt, Homo sapiens
  misc_RNA (1)...(19): siRNA sense strand
caauaucauaggagcauuu

SEQ ID NO: 1559363 - RNA, 19 nt, Homo sapiens
  misc_RNA (1)...(19): siRNA sense strand
gaaugcagucagucuguug

SEQ ID NO: 1559364 - RNA, 19 nt, Homo sapiens
  misc_RNA (1)...(19): siRNA sense strand
ggauuugguuccaucuuac

SEQ ID NO: 1559365 - RNA, 19 nt, Homo sapiens
  misc_RNA (1)...(19): siRNA sense strand
ucagugaauuagagcuuga

SEQ ID NO: 1559366 - RNA, 19 nt, Homo sapiens
  misc_RNA (1)...(19): siRNA sense strand
gucaaugccuuuggauuuc

SEQ ID NO: 1559367 - RNA, 19 nt, Homo sapiens
  misc_RNA (1)...(19): siRNA sense strand
aagaucaaguguuucaugu

SEQ ID NO: 1559368 - RNA, 19 nt, Homo sapiens
  misc_RNA (1)...(19): siRNA sense strand
ccacccugcaccaaauuua

SEQ ID NO: 1559369 - RNA, 19 nt, Homo sapiens
  misc_RNA (1)...(19): siRNA sense strand
uguguacaauucagaaaga

SEQ ID NO: 1559370 - RNA, 19 nt, Homo sapiens
  misc_RNA (1)...(19): siRNA sense strand
aagcagcaguccaggaaug

SEQ ID NO: 1559371 - RNA, 19 nt, Homo sapiens
  misc_RNA (1)...(19): siRNA sense strand
ggacccacaggcaugaauu

SEQ ID NO: 1559372 - RNA, 19 nt, Homo sapiens
  misc_RNA (1)...(19): siRNA sense strand
ugaaagcggaagcaaauuc

SEQ ID NO: 1559373 - RNA, 19 nt, Homo sapiens
  misc_RNA (1)...(19): siRNA sense strand
uuaaugcaguugagaagca

SEQ ID NO: 1559374 - RNA, 19 nt, Homo sapiens
  misc_RNA (1)...(19): siRNA sense strand
acuaauccuugcagaauuc

SEQ ID NO: 1559375 - RNA, 19 nt, Homo sapiens
  misc_RNA (1)...(19): siRNA sense strand
ggccaccacuugcugaaag

SEQ ID NO: 1559376 - RNA, 19 nt, Homo sapiens
  misc_RNA (1)...(19): siRNA sense strand
aaagcucaguuccauagug

SEQ ID NO: 1559377 - RNA, 19 nt, Homo sapiens
  misc_RNA (1)...(19): siRNA sense strand
ggagaugcgauuguucuug

SEQ ID NO: 1559378 - RNA, 19 nt, Homo sapiens
  misc_RNA (1)...(19): siRNA sense strand
gcuccguggugaagcuauu

SEQ ID NO: 1559379 - RNA, 19 nt, Homo sapiens
  misc_RNA (1)...(19): siRNA sense strand
aagaugcuauguuuguguu

SEQ ID NO: 1559380 - RNA, 19 nt, Homo sapiens
  misc_RNA (1)...(19): siRNA sense strand
cuacuaauccuugcagaau

SEQ ID NO: 1559381 - RNA, 19 nt, Homo sapiens
  misc_RNA (1)...(19): siRNA sense strand
cagacaaaggguaccauuu

SEQ ID NO: 1559382 - RNA, 19 nt, Homo sapiens
  misc_RNA (1)...(19): siRNA sense strand
uaucugauguuugguugga

SEQ ID NO: 1559383 - RNA, 19 nt, Homo sapiens
  misc_RNA (1)...(19): siRNA sense strand
uaauacaucugugaagacu

SEQ ID NO: 1559384 - RNA, 19 nt, Homo sapiens
  misc_RNA (1)...(19): siRNA sense strand
gaaguggauuuucauucaa

SEQ ID NO: 1559385 - RNA, 19 nt, Homo sapiens
  misc_RNA (1)...(19): siRNA sense strand
aauaugauccuuucacuac

SEQ ID NO: 1559386 - RNA, 19 nt, Homo sapiens
  misc_RNA (1)...(19): siRNA sense strand
gcuuuauucugugugguaa

SEQ ID NO: 1559387 - RNA, 19 nt, Homo sapiens
  misc_RNA (1)...(19): siRNA sense strand
gaaagauguucaagagaua

SEQ ID NO: 1559388 - RNA, 19 nt, Homo sapiens
  misc_RNA (1)...(19): siRNA sense strand
gcuaaaagcuuacggagua

SEQ ID NO: 1559389 - RNA, 19 nt, Homo sapiens
  misc_RNA (1)...(19): siRNA sense strand
gauagcaacugugguggua

SEQ ID NO: 1559390 - RNA, 19 nt, Homo sapiens
  misc_RNA (1)...(19): siRNA sense strand
caauauggaugaaccaaag

SEQ ID NO: 1559391 - RNA, 19 nt, Homo sapiens
  misc_RNA (1)...(19): siRNA sense strand
caaacuagacggugauguu

SEQ ID NO: 1559392 - RNA, 19 nt, Homo sapiens
  misc_RNA (1)...(19): siRNA sense strand
ggagacugauauuaagaga

SEQ ID NO: 1559393 - RNA, 19 nt, Homo sapiens
  misc_RNA (1)...(19): siRNA sense strand
gcauggacaguacccaaua

SEQ ID NO: 1559394 - RNA, 19 nt, Homo sapiens
  misc_RNA (1)...(19): siRNA sense strand
ggacaguacccaauaugga

SEQ ID NO: 1559395 - RNA, 19 nt, Homo sapiens
  misc_RNA (1)...(19): siRNA sense strand
gaaggcaaagcgagagaaa

SEQ ID NO: 1559396 - RNA, 19 nt, Homo sapiens
  misc_RNA (1)...(19): siRNA sense strand
gaaaaugcaaugugaggua

SEQ ID NO: 1559397 - RNA, 19 nt, Homo sapiens
  misc_RNA (1)...(19): siRNA sense strand
gaaaauggagacugauauu

SEQ ID NO: 1559398 - RNA, 19 nt, Homo sapiens
  misc_RNA (1)...(19): siRNA sense strand
guacccaaacccaaacauu

SEQ ID NO: 1559399 - RNA, 19 nt, Homo sapiens
  misc_RNA (1)...(19): siRNA sense strand
cauggacaguacccaauau

SEQ ID NO: 1559400 - RNA, 19 nt, Homo sapiens
  misc_RNA (1)...(19): siRNA sense strand
gaaagaugcgugcugaaaa

SEQ ID NO: 1559401 - RNA, 19 nt, Homo sapiens
  misc_RNA (1)...(19): siRNA sense strand
agaaagaugcgugcugaaa

SEQ ID NO: 1559402 - RNA, 19 nt, Homo sapiens
  misc_RNA (1)...(19): siRNA sense strand
caaacauugccaagagaaa

SEQ ID NO: 1559403 - RNA, 19 nt, Homo sapiens
  misc_RNA (1)...(19): siRNA sense strand
gacaguacccaauauggau

SEQ ID NO: 1559404 - RNA, 19 nt, Homo sapiens
  misc_RNA (1)...(19): siRNA sense strand
ggugguacccaaacccaaa

SEQ ID NO: 1559405 - RNA, 19 nt, Homo sapiens
  misc_RNA (1)...(19): siRNA sense strand
ugaaaguggcaaaggguuu

SEQ ID NO: 1559406 - RNA, 19 nt, Homo sapiens
  misc_RNA (1)...(19): siRNA sense strand
gaaccaaaggcaaagaaaa

SEQ ID NO: 1559407 - RNA, 19 nt, Homo sapiens
  misc_RNA (1)...(19): siRNA sense strand
ccagcaggcuuaaaaguau

SEQ ID NO: 1559408 - RNA, 19 nt, Homo sapiens
  misc_RNA (1)...(19): siRNA sense strand
aauggagacugauauuaag

SEQ ID NO: 1559409 - RNA, 19 nt, Homo sapiens
  misc_RNA (1)...(19): siRNA sense strand
acuagacggugauguuuua

SEQ ID NO: 1559410 - RNA, 19 nt, Homo sapiens
  misc_RNA (1)...(19): siRNA sense strand
ccaaacauugccaagagaa

SEQ ID NO: 1559411 - RNA, 19 nt, Homo sapiens
  misc_RNA (1)...(19): siRNA sense strand
ccaauauggaugaaccaaa

SEQ ID NO: 1559412 - RNA, 19 nt, Homo sapiens
  misc_RNA (1)...(19): siRNA sense strand
uacccaaacccaaacauug

SEQ ID NO: 1559413 - RNA, 19 nt, Homo sapiens
  misc_RNA (1)...(19): siRNA sense strand
gcaaagcgagagaaaagaa

SEQ ID NO: 1559414 - RNA, 19 nt, Homo sapiens
  misc_RNA (1)...(19): siRNA sense strand
uucaagagauagcaacugu

SEQ ID NO: 1559415 - RNA, 19 nt, Homo sapiens
  misc_RNA (1)...(19): siRNA sense strand
aagagaaaaugcaauguga

SEQ ID NO: 1559416 - RNA, 19 nt, Homo sapiens
  misc_RNA (1)...(19): siRNA sense strand
ggaguaaguggaaaagaaa

SEQ ID NO: 1559417 - RNA, 19 nt, Homo sapiens
  misc_RNA (1)...(19): siRNA sense strand
cccaaacauugccaagaga

SEQ ID NO: 1559418 - RNA, 19 nt, Homo sapiens
  misc_RNA (1)...(19): siRNA sense strand
cggaguaaguggaaaagaa

SEQ ID NO: 1559419 - RNA, 19 nt, Homo sapiens
  misc_RNA (1)...(19): siRNA sense strand
aaggaggccagcaggcuua

SEQ ID NO: 1559420 - RNA, 19 nt, Homo sapiens
  misc_RNA (1)...(19): siRNA sense strand
uggaugaaccaaaggcaaa

SEQ ID NO: 1559421 - RNA, 19 nt, Homo sapiens
  misc_RNA (1)...(19): siRNA sense strand
gaaaagcaaagcaaaagca

SEQ ID NO: 1559422 - RNA, 19 nt, Homo sapiens
  misc_RNA (1)...(19): siRNA sense strand
ugaaccaaaggcaaagaaa

SEQ ID NO: 1559423 - RNA, 19 nt, Homo sapiens
  misc_RNA (1)...(19): siRNA sense strand
aaaaugcaaugugagguaa

SEQ ID NO: 1559424 - RNA, 19 nt, Homo sapiens
  misc_RNA (1)...(19): siRNA sense strand
gagacugauauuaagagaa

SEQ ID NO: 1559425 - RNA, 19 nt, Homo sapiens
  misc_RNA (1)...(19): siRNA sense strand
acccaaacauugccaagag

SEQ ID NO: 1559426 - RNA, 19 nt, Homo sapiens
  misc_RNA (1)...(19): siRNA sense strand
agacggugauguuuuaaug

SEQ ID NO: 1559427 - RNA, 19 nt, Homo sapiens
  misc_RNA (1)...(19): siRNA sense strand
gaugcgugcugaaaagaga

SEQ ID NO: 1559428 - RNA, 19 nt, Homo sapiens
  misc_RNA (1)...(19): siRNA sense strand
aaugugagguaaaagauga

SEQ ID NO: 1559429 - RNA, 19 nt, Homo sapiens
  misc_RNA (1)...(19): siRNA sense strand
gccagcaggcuuaaaagua

SEQ ID NO: 1559430 - RNA, 19 nt, Homo sapiens
  misc_RNA (1)...(19): siRNA sense strand
aaagaugcgugcugaaaag

SEQ ID NO: 1559431 - RNA, 19 nt, Homo sapiens
  misc_RNA (1)...(19): siRNA sense strand
agaccagcauggacaguac

SEQ ID NO: 1559432 - RNA, 19 nt, Homo sapiens
  misc_RNA (1)...(19): siRNA sense strand
gcacugaucuuuggauaga

SEQ ID NO: 1559433 - RNA, 19 nt, Homo sapiens
  misc_RNA (1)...(19): siRNA sense strand
gaaauucgcaggagccaaa

SEQ ID NO: 1559434 - RNA, 19 nt, Homo sapiens
  misc_RNA (1)...(19): siRNA sense strand
ccaaagccaucucaucuga

SEQ ID NO: 1559435 - RNA, 19 nt, Homo sapiens
  misc_RNA (1)...(19): siRNA sense strand
gaagaaggacucugauuuc

SEQ ID NO: 1559436 - RNA, 19 nt, Homo sapiens
  misc_RNA (1)...(19): siRNA sense strand
ccagauugaucguaagaaa

SEQ ID NO: 1559437 - RNA, 19 nt, Homo sapiens
  misc_RNA (1)...(19): siRNA sense strand
gcucgcagcuggacuuguu

SEQ ID NO: 1559438 - RNA, 19 nt, Homo sapiens
  misc_RNA (1)...(19): siRNA sense strand
ccaauggugugaugaauuc

SEQ ID NO: 1559439 - RNA, 19 nt, Homo sapiens
  misc_RNA (1)...(19): siRNA sense strand
ggacuuguuugacgauguu

SEQ ID NO: 1559440 - RNA, 19 nt, Homo sapiens
  misc_RNA (1)...(19): siRNA sense strand
ucaagcauccggccuauuu

SEQ ID NO: 1559441 - RNA, 19 nt, Homo sapiens
  misc_RNA (1)...(19): siRNA sense strand
caucucaucugacauguuc

SEQ ID NO: 1559442 - RNA, 19 nt, Homo sapiens
  misc_RNA (1)...(19): siRNA sense strand
gcucaggccucgagucuag

SEQ ID NO: 1559443 - RNA, 19 nt, Homo sapiens
  misc_RNA (1)...(19): siRNA sense strand
guagugccguuccuaauca

SEQ ID NO: 1559444 - RNA, 19 nt, Homo sapiens
  misc_RNA (1)...(19): siRNA sense strand
gccaacaccaaauauaaua

SEQ ID NO: 1559445 - RNA, 19 nt, Homo sapiens
  misc_RNA (1)...(19): siRNA sense strand
gaagugaccaucucaagca

SEQ ID NO: 1559446 - RNA, 19 nt, Homo sapiens
  misc_RNA (1)...(19): siRNA sense strand
ggagguggaugcggaguau

SEQ ID NO: 1559447 - RNA, 19 nt, Homo sapiens
  misc_RNA (1)...(19): siRNA sense strand
agaagaaggacucugauuu

SEQ ID NO: 1559448 - RNA, 19 nt, Homo sapiens
  misc_RNA (1)...(19): siRNA sense strand
ggacucugauuucuucaca

SEQ ID NO: 1559449 - RNA, 19 nt, Homo sapiens
  misc_RNA (1)...(19): siRNA sense strand
ucacggagcaggaagugua

SEQ ID NO: 1559450 - RNA, 19 nt, Homo sapiens
  misc_RNA (1)...(19): siRNA sense strand
gcauggcacugaucuuugg

SEQ ID NO: 1559451 - RNA, 19 nt, Homo sapiens
  misc_RNA (1)...(19): siRNA sense strand
agccagagcuucagugaga

SEQ ID NO: 1559452 - RNA, 19 nt, Homo sapiens
  misc_RNA (1)...(19): siRNA sense strand
gagaagaaggacucugauu

SEQ ID NO: 1559453 - RNA, 19 nt, Homo sapiens
  misc_RNA (1)...(19): siRNA sense strand
uagccgagcugcccagaug

SEQ ID NO: 1559454 - RNA, 19 nt, Homo sapiens
  misc_RNA (1)...(19): siRNA sense strand
cagcggacauugcccaguu

SEQ ID NO: 1559455 - RNA, 19 nt, Homo sapiens
  misc_RNA (1)...(19): siRNA sense strand
ggacaaucccuuuuccuua

SEQ ID NO: 1559456 - RNA, 19 nt, Homo sapiens
  misc_RNA (1)...(19): siRNA sense strand
accaggagcuccagauuga

SEQ ID NO: 1559457 - RNA, 19 nt, Homo sapiens
  misc_RNA (1)...(19): siRNA sense strand
caucugacauguucuuugg

SEQ ID NO: 1559458 - RNA, 19 nt, Homo sapiens
  misc_RNA (1)...(19): siRNA sense strand
gaugccaacaccaaauaua

SEQ ID NO: 1559459 - RNA, 19 nt, Homo sapiens
  misc_RNA (1)...(19): siRNA sense strand
gaaaagaagcuacagaauc

SEQ ID NO: 1559460 - RNA, 19 nt, Homo sapiens
  misc_RNA (1)...(19): siRNA sense strand
ggagaaggagccagaagug

SEQ ID NO: 1559461 - RNA, 19 nt, Homo sapiens
  misc_RNA (1)...(19): siRNA sense strand
cugaaaagcuccaucauug

SEQ ID NO: 1559462 - RNA, 19 nt, Homo sapiens
  misc_RNA (1)...(19): siRNA sense strand
ucgcuacgguuccuacuga

SEQ ID NO: 1559463 - RNA, 19 nt, Homo sapiens
  misc_RNA (1)...(19): siRNA sense strand
uaagaggcuucgcgcaguu

SEQ ID NO: 1559464 - RNA, 19 nt, Homo sapiens
  misc_RNA (1)...(19): siRNA sense strand
aaaagaagcuacagaaucu

SEQ ID NO: 1559465 - RNA, 19 nt, Homo sapiens
  misc_RNA (1)...(19): siRNA sense strand
gugaggcgcgucagaaauu

SEQ ID NO: 1559466 - RNA, 19 nt, Homo sapiens
  misc_RNA (1)...(19): siRNA sense strand
ggauagacaacaugaguag

SEQ ID NO: 1559467 - RNA, 19 nt, Homo sapiens
  misc_RNA (1)...(19): siRNA sense strand
ggacauugcccaguuuaag

SEQ ID NO: 1559468 - RNA, 19 nt, Homo sapiens
  misc_RNA (1)...(19): siRNA sense strand
gcagugccaucagcucuuc

SEQ ID NO: 1559469 - RNA, 19 nt, Homo sapiens
  misc_RNA (1)...(19): siRNA sense strand
ccaaugaugccaacaccaa

SEQ ID NO: 1559470 - RNA, 19 nt, Homo sapiens
  misc_RNA (1)...(19): siRNA sense strand
gagaaggagccagaaguga

SEQ ID NO: 1559471 - RNA, 19 nt, Homo sapiens
  misc_RNA (1)...(19): siRNA sense strand
caucagguccacagaguug

SEQ ID NO: 1559472 - RNA, 19 nt, Homo sapiens
  misc_RNA (1)...(19): siRNA sense strand
uggcacugaucuuuggaua

SEQ ID NO: 1559473 - RNA, 19 nt, Homo sapiens
  misc_RNA (1)...(19): siRNA sense strand
gccagcagcagcuaagaaa

SEQ ID NO: 1559474 - RNA, 19 nt, Homo sapiens
  misc_RNA (1)...(19): siRNA sense strand
aaagccaucucaucugaca

SEQ ID NO: 1559475 - RNA, 19 nt, Homo sapiens
  misc_RNA (1)...(19): siRNA sense strand
gagagcaggcagaaagguu

SEQ ID NO: 1559476 - RNA, 19 nt, Homo sapiens
  misc_RNA (1)...(19): siRNA sense strand
cauccggccuauuucagaa

SEQ ID NO: 1559477 - RNA, 19 nt, Homo sapiens
  misc_RNA (1)...(19): siRNA sense strand
gcaggugauugagcaggaa

SEQ ID NO: 1559478 - RNA, 19 nt, Homo sapiens
  misc_RNA (1)...(19): siRNA sense strand
gcagccagagcuucaguga

SEQ ID NO: 1559479 - RNA, 19 nt, Homo sapiens
  misc_RNA (1)...(19): siRNA sense strand
uaagcagggugucaagucu

SEQ ID NO: 1559480 - RNA, 19 nt, Homo sapiens
  misc_RNA (1)...(19): siRNA sense strand
gcgccaagaauccgaguug

SEQ ID NO: 1559481 - RNA, 19 nt, Homo sapiens
  misc_RNA (1)...(19): siRNA sense strand
agauugaucguaagaaaga

SEQ ID NO: 1559482 - RNA, 19 nt, Homo sapiens
  misc_RNA (1)...(19): siRNA sense strand
gaagcgagagcaggcagaa

SEQ ID NO: 1559483 - RNA, 19 nt, Homo sapiens
  misc_RNA (1)...(19): siRNA sense strand
gaacugaaaagcuccauca

SEQ ID NO: 1559484 - RNA, 19 nt, Homo sapiens
  misc_RNA (1)...(19): siRNA sense strand
gccaauggugugaugaauu

SEQ ID NO: 1559485 - RNA, 19 nt, Homo sapiens
  misc_RNA (1)...(19): siRNA sense strand
gacaaucccuuuuccuuag

SEQ ID NO: 1559486 - RNA, 19 nt, Homo sapiens
  misc_RNA (1)...(19): siRNA sense strand
ugacgauguugguacuuuc

SEQ ID NO: 1559487 - RNA, 19 nt, Homo sapiens
  misc_RNA (1)...(19): siRNA sense strand
ugucugagaugcaggugau

SEQ ID NO: 1559488 - RNA, 19 nt, Homo sapiens
  misc_RNA (1)...(19): siRNA sense strand
gagccgaacaagaccgaaa

SEQ ID NO: 1559489 - RNA, 19 nt, Homo sapiens
  misc_RNA (1)...(19): siRNA sense strand
gagccaaagccaucucauc

SEQ ID NO: 1559490 - RNA, 19 nt, Homo sapiens
  misc_RNA (1)...(19): siRNA sense strand
gcauccggccuauuucaga

SEQ ID NO: 1559491 - RNA, 19 nt, Homo sapiens
  misc_RNA (1)...(19): siRNA sense strand
acccaaagccucacuggaa

SEQ ID NO: 1559492 - RNA, 19 nt, Homo sapiens
  misc_RNA (1)...(19): siRNA sense strand
gguuccagcugagguguau

SEQ ID NO: 1559493 - RNA, 19 nt, Homo sapiens
  misc_RNA (1)...(19): siRNA sense strand
agaccgaaauccagacucu

SEQ ID NO: 1559494 - RNA, 19 nt, Homo sapiens
  misc_RNA (1)...(19): siRNA sense strand
gcggacauugcccaguuua

SEQ ID NO: 1559495 - RNA, 19 nt, Homo sapiens
  misc_RNA (1)...(19): siRNA sense strand
ugaguagugccguuccuaa

SEQ ID NO: 1559496 - RNA, 19 nt, Homo sapiens
  misc_RNA (1)...(19): siRNA sense strand
ggccaauggugugaugaau

SEQ ID NO: 1559497 - RNA, 19 nt, Homo sapiens
  misc_RNA (1)...(19): siRNA sense strand
gagcaggaaguguaucucu

SEQ ID NO: 1559498 - RNA, 19 nt, Homo sapiens
  misc_RNA (1)...(19): siRNA sense strand
gagcucaggccucgagucu

SEQ ID NO: 1559499 - RNA, 19 nt, Homo sapiens
  misc_RNA (1)...(19): siRNA sense strand
caaaguacaaggacaaucc

SEQ ID NO: 1559500 - RNA, 19 nt, Homo sapiens
  misc_RNA (1)...(19): siRNA sense strand
gagcuucagugagauugag

SEQ ID NO: 1559501 - RNA, 19 nt, Homo sapiens
  misc_RNA (1)...(19): siRNA sense strand
gaagccagcagcagcuaag

SEQ ID NO: 1559502 - RNA, 19 nt, Homo sapiens
  misc_RNA (1)...(19): siRNA sense strand
caaugaugccaacaccaaa

SEQ ID NO: 1559503 - RNA, 19 nt, Homo sapiens
  misc_RNA (1)...(19): siRNA sense strand
gcuggccaauggugugaug

SEQ ID NO: 1559504 - RNA, 19 nt, Homo sapiens
  misc_RNA (1)...(19): siRNA sense strand
aggcucagguggcagagaa

SEQ ID NO: 1559505 - RNA, 19 nt, Homo sapiens
  misc_RNA (1)...(19): siRNA sense strand
gaguagugccguuccuaau

SEQ ID NO: 1559506 - RNA, 19 nt, Homo sapiens
  misc_RNA (1)...(19): siRNA sense strand
aagccucacuggaacugaa

SEQ ID NO: 1559507 - RNA, 19 nt, Homo sapiens
  misc_RNA (1)...(19): siRNA sense strand
gcgcaguuccaaccaacaa

SEQ ID NO: 1559508 - RNA, 19 nt, Homo sapiens
  misc_RNA (1)...(19): siRNA sense strand
ccacaaaccggagggaagu

SEQ ID NO: 1559509 - RNA, 19 nt, Homo sapiens
  misc_RNA (1)...(19): siRNA sense strand
guaagaaagaggaaaagaa

SEQ ID NO: 1559510 - RNA, 19 nt, Homo sapiens
  misc_RNA (1)...(19): siRNA sense strand
cagcaucacguacgguguu

SEQ ID NO: 1559511 - RNA, 19 nt, Homo sapiens
  misc_RNA (1)...(19): siRNA sense strand
gaucguaagaaagaggaaa

SEQ ID NO: 1559512 - RNA, 19 nt, Homo sapiens
  misc_RNA (1)...(19): siRNA sense strand
gccgagcugcccagaugua

SEQ ID NO: 1559513 - RNA, 19 nt, Homo sapiens
  misc_RNA (1)...(19): siRNA sense strand
uugacgauguugguacuuu

SEQ ID NO: 1559514 - RNA, 19 nt, Homo sapiens
  misc_RNA (1)...(19): siRNA sense strand
ccuaaucacuccccagaga

SEQ ID NO: 1559515 - RNA, 19 nt, Homo sapiens
  misc_RNA (1)...(19): siRNA sense strand
aggcauggcacugaucuuu

SEQ ID NO: 1559516 - RNA, 19 nt, Homo sapiens
  misc_RNA (1)...(19): siRNA sense strand
augccaacaccaaauauaa

SEQ ID NO: 1559517 - RNA, 19 nt, Homo sapiens
  misc_RNA (1)...(19): siRNA sense strand
gggagguggaugcggagua

SEQ ID NO: 1559518 - RNA, 19 nt, Homo sapiens
  misc_RNA (1)...(19): siRNA sense strand
cgaacaagaccgaaaucca

SEQ ID NO: 1559519 - RNA, 19 nt, Homo sapiens
  misc_RNA (1)...(19): siRNA sense strand
ggaaaagaagcuacagaau

SEQ ID NO: 1559520 - RNA, 19 nt, Homo sapiens
  misc_RNA (1)...(19): siRNA sense strand
ccagagcuucagugagauu

SEQ ID NO: 1559521 - RNA, 19 nt, Homo sapiens
  misc_RNA (1)...(19): siRNA sense strand
gcuccaucauuggcaagaa

SEQ ID NO: 1559522 - RNA, 19 nt, Homo sapiens
  misc_RNA (1)...(19): siRNA sense strand
gguguuuucuugugcauug

SEQ ID NO: 1559523 - RNA, 19 nt, Homo sapiens
  misc_RNA (1)...(19): siRNA sense strand
ggaugcacagccaaugaug

SEQ ID NO: 1559524 - RNA, 19 nt, Homo sapiens
  misc_RNA (1)...(19): siRNA sense strand
accgaaauccagacucuuu

SEQ ID NO: 1559525 - RNA, 19 nt, Homo sapiens
  misc_RNA (1)...(19): siRNA sense strand
cagcagcagcuaagaaagg

SEQ ID NO: 1559526 - RNA, 19 nt, Homo sapiens
  misc_RNA (1)...(19): siRNA sense strand
cagaagugaccaucucaag

SEQ ID NO: 1559527 - RNA, 19 nt, Homo sapiens
  misc_RNA (1)...(19): siRNA sense strand
uaccaggagcuccagauug

SEQ ID NO: 1559528 - RNA, 19 nt, Homo sapiens
  misc_RNA (1)...(19): siRNA sense strand
uggauagacaacaugagua

SEQ ID NO: 1559529 - RNA, 19 nt, Homo sapiens
  misc_RNA (1)...(19): siRNA sense strand
ggacaggguagaggagaag

SEQ ID NO: 1559530 - RNA, 19 nt, Homo sapiens
  misc_RNA (1)...(19): siRNA sense strand
ggcauggcacugaucuuug

SEQ ID NO: 1559531 - RNA, 19 nt, Homo sapiens
  misc_RNA (1)...(19): siRNA sense strand
auagacaacaugaguagug

SEQ ID NO: 1559532 - RNA, 19 nt, Homo sapiens
  misc_RNA (1)...(19): siRNA sense strand
gaacaggccuucuauaugg

SEQ ID NO: 1559533 - RNA, 19 nt, Homo sapiens
  misc_RNA (1)...(19): siRNA sense strand
ccaagaaggucaagaugua

SEQ ID NO: 1559534 - RNA, 19 nt, Homo sapiens
  misc_RNA (1)...(19): siRNA sense strand
ugaaagaggucccaucaaa

SEQ ID NO: 1559535 - RNA, 19 nt, Homo sapiens
  misc_RNA (1)...(19): siRNA sense strand
gcaaugauuuauaccauga

SEQ ID NO: 1559536 - RNA, 19 nt, Homo sapiens
  misc_RNA (1)...(19): siRNA sense strand
gauaacaucuuucgcuuca

SEQ ID NO: 1559537 - RNA, 19 nt, Homo sapiens
  misc_RNA (1)...(19): siRNA sense strand
caagauguacugcuauuua

SEQ ID NO: 1559538 - RNA, 19 nt, Homo sapiens
  misc_RNA (1)...(19): siRNA sense strand
ggacuaccaccaauucuaa

SEQ ID NO: 1559539 - RNA, 19 nt, Homo sapiens
  misc_RNA (1)...(19): siRNA sense strand
uaucauggaucccaacauu

SEQ ID NO: 1559540 - RNA, 19 nt, Homo sapiens
  misc_RNA (1)...(19): siRNA sense strand
gaaauucuggugacuggua

SEQ ID NO: 1559541 - RNA, 19 nt, Homo sapiens
  misc_RNA (1)...(19): siRNA sense strand
gcugguauauggucaaaug

SEQ ID NO: 1559542 - RNA, 19 nt, Homo sapiens
  misc_RNA (1)...(19): siRNA sense strand
agaggugucugcauuauug

SEQ ID NO: 1559543 - RNA, 19 nt, Homo sapiens
  misc_RNA (1)...(19): siRNA sense strand
gcagugagcauuacgaugu

SEQ ID NO: 1559544 - RNA, 19 nt, Homo sapiens
  misc_RNA (1)...(19): siRNA sense strand
cuacuacguuugcccauuu

SEQ ID NO: 1559545 - RNA, 19 nt, Homo sapiens
  misc_RNA (1)...(19): siRNA sense strand
ggaugaacuuucugaggaa

SEQ ID NO: 1559546 - RNA, 19 nt, Homo sapiens
  misc_RNA (1)...(19): siRNA sense strand
cugauaagcuggcugaaga

SEQ ID NO: 1559547 - RNA, 19 nt, Homo sapiens
  misc_RNA (1)...(19): siRNA sense strand
gauguacugcuauuuauug

SEQ ID NO: 1559548 - RNA, 19 nt, Homo sapiens
  misc_RNA (1)...(19): siRNA sense strand
gagaaccuauugaugaaag

SEQ ID NO: 1559549 - RNA, 19 nt, Homo sapiens
  misc_RNA (1)...(19): siRNA sense strand
gaauuaccacuaccaagaa

SEQ ID NO: 1559550 - RNA, 19 nt, Homo sapiens
  misc_RNA (1)...(19): siRNA sense strand
gguauauggucaaaugaau

SEQ ID NO: 1559551 - RNA, 19 nt, Homo sapiens
  misc_RNA (1)...(19): siRNA sense strand
aaacaucuccuucgccaaa

SEQ ID NO: 1559552 - RNA, 19 nt, Homo sapiens
  misc_RNA (1)...(19): siRNA sense strand
ugaaggcaaugauuuauac

SEQ ID NO: 1559553 - RNA, 19 nt, Homo sapiens
  misc_RNA (1)...(19): siRNA sense strand
gaaggagaccaucaaagga

SEQ ID NO: 1559554 - RNA, 19 nt, Homo sapiens
  misc_RNA (1)...(19): siRNA sense strand
gacuguggcugaauacuuc

SEQ ID NO: 1559555 - RNA, 19 nt, Homo sapiens
  misc_RNA (1)...(19): siRNA sense strand
guacugaucauggaguuaa

SEQ ID NO: 1559556 - RNA, 19 nt, Homo sapiens
  misc_RNA (1)...(19): siRNA sense strand
uaagguagcgcugguauau

SEQ ID NO: 1559557 - RNA, 19 nt, Homo sapiens
  misc_RNA (1)...(19): siRNA sense strand
uaaggacuauugcuaugga

SEQ ID NO: 1559558 - RNA, 19 nt, Homo sapiens
  misc_RNA (1)...(19): siRNA sense strand
uggagaaccuauugaugaa

SEQ ID NO: 1559559 - RNA, 19 nt, Homo sapiens
  misc_RNA (1)...(19): siRNA sense strand
ccaaagcccauggugguua

SEQ ID NO: 1559560 - RNA, 19 nt, Homo sapiens
  misc_RNA (1)...(19): siRNA sense strand
aaucaacaaugucgccaaa

SEQ ID NO: 1559561 - RNA, 19 nt, Homo sapiens
  misc_RNA (1)...(19): siRNA sense strand
ggagguggcccagcauuug

SEQ ID NO: 1559562 - RNA, 19 nt, Homo sapiens
  misc_RNA (1)...(19): siRNA sense strand
caggaaagaauuaccacua

SEQ ID NO: 1559563 - RNA, 19 nt, Homo sapiens
  misc_RNA (1)...(19): siRNA sense strand
gugaaggcaaugauuuaua

SEQ ID NO: 1559564 - RNA, 19 nt, Homo sapiens
  misc_RNA (1)...(19): siRNA sense strand
gguuagaggccagaaagua

SEQ ID NO: 1559565 - RNA, 19 nt, Homo sapiens
  misc_RNA (1)...(19): siRNA sense strand
uaaaagaugccaccucuaa

SEQ ID NO: 1559566 - RNA, 19 nt, Homo sapiens
  misc_RNA (1)...(19): siRNA sense strand
gcaagacuguacugaucau

SEQ ID NO: 1559567 - RNA, 19 nt, Homo sapiens
  misc_RNA (1)...(19): siRNA sense strand
gucaagauguacugcuauu

SEQ ID NO: 1559568 - RNA, 19 nt, Homo sapiens
  misc_RNA (1)...(19): siRNA sense strand
ugaagaagcuguggcaaaa

SEQ ID NO: 1559569 - RNA, 19 nt, Homo sapiens
  misc_RNA (1)...(19): siRNA sense strand
uggcaagacuguacugauc

SEQ ID NO: 1559570 - RNA, 19 nt, Homo sapiens
  misc_RNA (1)...(19): siRNA sense strand
agaauuaccacuaccaaga

SEQ ID NO: 1559571 - RNA, 19 nt, Homo sapiens
  misc_RNA (1)...(19): siRNA sense strand
gaaagaauuaccacuacca

SEQ ID NO: 1559572 - RNA, 19 nt, Homo sapiens
  misc_RNA (1)...(19): siRNA sense strand
ugacugguaucaagguugu

SEQ ID NO: 1559573 - RNA, 19 nt, Homo sapiens
  misc_RNA (1)...(19): siRNA sense strand
uaagcuggcugaagagcau

SEQ ID NO: 1559574 - RNA, 19 nt, Homo sapiens
  misc_RNA (1)...(19): siRNA sense strand
ggguauggaugaacuuucu

SEQ ID NO: 1559575 - RNA, 19 nt, Homo sapiens
  misc_RNA (1)...(19): siRNA sense strand
gaugagggacuaccaccaa

SEQ ID NO: 1559576 - RNA, 19 nt, Homo sapiens
  misc_RNA (1)...(19): siRNA sense strand
guaucaagguugucgaucu

SEQ ID NO: 1559577 - RNA, 19 nt, Homo sapiens
  misc_RNA (1)...(19): siRNA sense strand
guacagaaggcuugguuag

SEQ ID NO: 1559578 - RNA, 19 nt, Homo sapiens
  misc_RNA (1)...(19): siRNA sense strand
caaaggauuccagcagauu

SEQ ID NO: 1559579 - RNA, 19 nt, Homo sapiens
  misc_RNA (1)...(19): siRNA sense strand
ucaaaggauuccagcagau

SEQ ID NO: 1559580 - RNA, 19 nt, Homo sapiens
  misc_RNA (1)...(19): siRNA sense strand
aaucugguguuaucaacuu

SEQ ID NO: 1559581 - RNA, 19 nt, Homo sapiens
  misc_RNA (1)...(19): siRNA sense strand
gaaagaggucccaucaaaa

SEQ ID NO: 1559582 - RNA, 19 nt, Homo sapiens
  misc_RNA (1)...(19): siRNA sense strand
ucauggaguuaaucaacaa

SEQ ID NO: 1559583 - RNA, 19 nt, Homo sapiens
  misc_RNA (1)...(19): siRNA sense strand
gaucauggaguuaaucaac

SEQ ID NO: 1559584 - RNA, 19 nt, Homo sapiens
  misc_RNA (1)...(19): siRNA sense strand
acagaaggcuugguuagag

SEQ ID NO: 1559585 - RNA, 19 nt, Homo sapiens
  misc_RNA (1)...(19): siRNA sense strand
gggacuaccaccaauucua

SEQ ID NO: 1559586 - RNA, 19 nt, Homo sapiens
  misc_RNA (1)...(19): siRNA sense strand
ugaaggagaccaucaaagg

SEQ ID NO: 1559587 - RNA, 19 nt, Homo sapiens
  misc_RNA (1)...(19): siRNA sense strand
ggugagagcacaguaagga

SEQ ID NO: 1559588 - RNA, 19 nt, Homo sapiens
  misc_RNA (1)...(19): siRNA sense strand
gcuacuacguuugcccauu

SEQ ID NO: 1559589 - RNA, 19 nt, Homo sapiens
  misc_RNA (1)...(19): siRNA sense strand
ggcugacuguggcugaaua

SEQ ID NO: 1559590 - RNA, 19 nt, Homo sapiens
  misc_RNA (1)...(19): siRNA sense strand
agacuguacugaucaugga

SEQ ID NO: 1559591 - RNA, 19 nt, Homo sapiens
  misc_RNA (1)...(19): siRNA sense strand
acaauuugcucccauucau

SEQ ID NO: 1559592 - RNA, 19 nt, Homo sapiens
  misc_RNA (1)...(19): siRNA sense strand
ggcagaaucaugaauguca

SEQ ID NO: 1559593 - RNA, 19 nt, Homo sapiens
  misc_RNA (1)...(19): siRNA sense strand
gagagcacaguaaggacua

SEQ ID NO: 1559594 - RNA, 19 nt, Homo sapiens
  misc_RNA (1)...(19): siRNA sense strand
gagggacuaccaccaauuc

SEQ ID NO: 1559595 - RNA, 19 nt, Homo sapiens
  misc_RNA (1)...(19): siRNA sense strand
uuggagaaccuauugauga

SEQ ID NO: 1559596 - RNA, 19 nt, Homo sapiens
  misc_RNA (1)...(19): siRNA sense strand
ccagguugcugaggucuuc

SEQ ID NO: 1559597 - RNA, 19 nt, Homo sapiens
  misc_RNA (1)...(19): siRNA sense strand
gacuccaccucucguauca

SEQ ID NO: 1559598 - RNA, 19 nt, Homo sapiens
  misc_RNA (1)...(19): siRNA sense strand
acaguaaggacuauugcua

SEQ ID NO: 1559599 - RNA, 19 nt, Homo sapiens
  misc_RNA (1)...(19): siRNA sense strand
uugcugagcugggcaucua

SEQ ID NO: 1559600 - RNA, 19 nt, Homo sapiens
  misc_RNA (1)...(19): siRNA sense strand
gcgcugguauauggucaaa

SEQ ID NO: 1559601 - RNA, 19 nt, Homo sapiens
  misc_RNA (1)...(19): siRNA sense strand
ccgugaaggcaaugauuua

SEQ ID NO: 1559602 - RNA, 19 nt, Homo sapiens
  misc_RNA (1)...(19): siRNA sense strand
uaucaagguugucgaucug

SEQ ID NO: 1559603 - RNA, 19 nt, Homo sapiens
  misc_RNA (1)...(19): siRNA sense strand
gaggacccgugaaggcaau

SEQ ID NO: 1559604 - RNA, 19 nt, Homo sapiens
  misc_RNA (1)...(19): siRNA sense strand
ggucuucacaggucauaug

SEQ ID NO: 1559605 - RNA, 19 nt, Homo sapiens
  misc_RNA (1)...(19): siRNA sense strand
ccaguuugaugagggacua

SEQ ID NO: 1559606 - RNA, 19 nt, Homo sapiens
  misc_RNA (1)...(19): siRNA sense strand
caaagcccauggugguuac

SEQ ID NO: 1559607 - RNA, 19 nt, Homo sapiens
  misc_RNA (1)...(19): siRNA sense strand
gguacagaaggcuugguua

SEQ ID NO: 1559608 - RNA, 19 nt, Homo sapiens
  misc_RNA (1)...(19): siRNA sense strand
ggagaaccuauugaugaaa

SEQ ID NO: 1559609 - RNA, 19 nt, Homo sapiens
  misc_RNA (1)...(19): siRNA sense strand
aguaaggacuauugcuaug

SEQ ID NO: 1559610 - RNA, 19 nt, Homo sapiens
  misc_RNA (1)...(19): siRNA sense strand
ggaguuggcaagacuguac

SEQ ID NO: 1559611 - RNA, 19 nt, Homo sapiens
  misc_RNA (1)...(19): siRNA sense strand
aaaggauuccagcagauuu

SEQ ID NO: 1559612 - RNA, 19 nt, Homo sapiens
  misc_RNA (1)...(19): siRNA sense strand
ucauggaucccaacauugu

SEQ ID NO: 1559613 - RNA, 19 nt, Homo sapiens
  misc_RNA (1)...(19): siRNA sense strand
ucaacaaugucgccaaagc

SEQ ID NO: 1559614 - RNA, 19 nt, Homo sapiens
  misc_RNA (1)...(19): siRNA sense strand
gcaggaaauucuggugacu

SEQ ID NO: 1559615 - RNA, 19 nt, Homo sapiens
  misc_RNA (1)...(19): siRNA sense strand
uggaguuaaucaacaaugu

SEQ ID NO: 1559616 - RNA, 19 nt, Homo sapiens
  misc_RNA (1)...(19): siRNA sense strand
ggugacugguaucaagguu

SEQ ID NO: 1559617 - RNA, 19 nt, Homo sapiens
  misc_RNA (1)...(19): siRNA sense strand
cagugagcauuacgauguu

SEQ ID NO: 1559618 - RNA, 19 nt, Homo sapiens
  misc_RNA (1)...(19): siRNA sense strand
ggugguuacucuguguuug

SEQ ID NO: 1559619 - RNA, 19 nt, Homo sapiens
  misc_RNA (1)...(19): siRNA sense strand
caagguugucgaucugcua

SEQ ID NO: 1559620 - RNA, 19 nt, Homo sapiens
  misc_RNA (1)...(19): siRNA sense strand
aggaaagaauuaccacuac

SEQ ID NO: 1559621 - RNA, 19 nt, Homo sapiens
  misc_RNA (1)...(19): siRNA sense strand
ugacuguggcugaauacuu

SEQ ID NO: 1559622 - RNA, 19 nt, Homo sapiens
  misc_RNA (1)...(19): siRNA sense strand
agguagcgcugguauaugg

SEQ ID NO: 1559623 - RNA, 19 nt, Homo sapiens
  misc_RNA (1)...(19): siRNA sense strand
caguaaggacuauugcuau

SEQ ID NO: 1559624 - RNA, 19 nt, Homo sapiens
  misc_RNA (1)...(19): siRNA sense strand
ucuaugugccugcugauga

SEQ ID NO: 1559625 - RNA, 19 nt, Homo sapiens
  misc_RNA (1)...(19): siRNA sense strand
aggagaccaucaaaggauu

SEQ ID NO: 1559626 - RNA, 19 nt, Homo sapiens
  misc_RNA (1)...(19): siRNA sense strand
guauggaugaacuuucuga

SEQ ID NO: 1559627 - RNA, 19 nt, Homo sapiens
  misc_RNA (1)...(19): siRNA sense strand
ucauugccauccuggguau

SEQ ID NO: 1559628 - RNA, 19 nt, Homo sapiens
  misc_RNA (1)...(19): siRNA sense strand
ggaguuaaucaacaauguc

SEQ ID NO: 1559629 - RNA, 19 nt, Homo sapiens
  misc_RNA (1)...(19): siRNA sense strand
uguacaggcuaucuaugug

SEQ ID NO: 1559630 - RNA, 19 nt, Homo sapiens
  misc_RNA (1)...(19): siRNA sense strand
acuaugcaggaaagaauua

SEQ ID NO: 1559631 - RNA, 19 nt, Homo sapiens
  misc_RNA (1)...(19): siRNA sense strand
aaauacagcguuucuuguc

SEQ ID NO: 1559632 - RNA, 19 nt, Homo sapiens
  misc_RNA (1)...(19): siRNA sense strand
agagaacccuccaccauau

SEQ ID NO: 1559633 - RNA, 19 nt, Homo sapiens
  misc_RNA (1)...(19): siRNA sense strand
gguagaagaccaaagaaga

SEQ ID NO: 1559634 - RNA, 19 nt, Homo sapiens
  misc_RNA (1)...(19): siRNA sense strand
ccaaagaagagaugagcua

SEQ ID NO: 1559635 - RNA, 19 nt, Homo sapiens
  misc_RNA (1)...(19): siRNA sense strand
aagaagagaugagcuagga

SEQ ID NO: 1559636 - RNA, 19 nt, Homo sapiens
  misc_RNA (1)...(19): siRNA sense strand
caagagaacccuccaccau

SEQ ID NO: 1559637 - RNA, 19 nt, Homo sapiens
  misc_RNA (1)...(19): siRNA sense strand
aagagaacccuccaccaua

SEQ ID NO: 1559638 - RNA, 19 nt, Homo sapiens
  misc_RNA (1)...(19): siRNA sense strand
gaagaccaaagaagagaug

SEQ ID NO: 1559639 - RNA, 19 nt, Homo sapiens
  misc_RNA (1)...(19): siRNA sense strand
caguguaugugguagaaga

SEQ ID NO: 1559640 - RNA, 19 nt, Homo sapiens
  misc_RNA (1)...(19): siRNA sense strand
guagaagaccaaagaagag

SEQ ID NO: 1559641 - RNA, 19 nt, Homo sapiens
  misc_RNA (1)...(19): siRNA sense strand
ccaaggauacccacaguac

SEQ ID NO: 1559642 - RNA, 19 nt, Homo sapiens
  misc_RNA (1)...(19): siRNA sense strand
gcuggacggcucucuguug

SEQ ID NO: 1559643 - RNA, 19 nt, Homo sapiens
  misc_RNA (1)...(19): siRNA sense strand
uaccaaggauacccacagu

SEQ ID NO: 1559644 - RNA, 19 nt, Homo sapiens
  misc_RNA (1)...(19): siRNA sense strand
uagaagaccaaagaagaga

SEQ ID NO: 1559645 - RNA, 19 nt, Homo sapiens
  misc_RNA (1)...(19): siRNA sense strand
gagaacccuccaccauauc

SEQ ID NO: 1559646 - RNA, 19 nt, Homo sapiens
  misc_RNA (1)...(19): siRNA sense strand
ggauauggcuguggauaca

SEQ ID NO: 1559647 - RNA, 19 nt, Homo sapiens
  misc_RNA (1)...(19): siRNA sense strand
ggauacggcucuggcugua

SEQ ID NO: 1559648 - RNA, 19 nt, Homo sapiens
  misc_RNA (1)...(19): siRNA sense strand
ggaacuggcuguggcuaug

SEQ ID NO: 1559649 - RNA, 19 nt, Homo sapiens
  misc_RNA (1)...(19): siRNA sense strand
ccacuuugcuacagaagau

SEQ ID NO: 1559650 - RNA, 19 nt, Homo sapiens
  misc_RNA (1)...(19): siRNA sense strand
cuauuccucuugcuacuaa

SEQ ID NO: 1559651 - RNA, 19 nt, Homo sapiens
  misc_RNA (1)...(19): siRNA sense strand
ggauaugguuguggcuaug

SEQ ID NO: 1559652 - RNA, 19 nt, Homo sapiens
  misc_RNA (1)...(19): siRNA sense strand
cgaccacuuugcuacagaa

SEQ ID NO: 1559653 - RNA, 19 nt, Homo sapiens
  misc_RNA (1)...(19): siRNA sense strand
auacggcucuggcuguaga

SEQ ID NO: 1559654 - RNA, 19 nt, Homo sapiens
  misc_RNA (1)...(19): siRNA sense strand
agauauggcucuggcuaug

SEQ ID NO: 1559655 - RNA, 19 nt, Homo sapiens
  misc_RNA (1)...(19): siRNA sense strand
gaugcuauuccucuugcua

SEQ ID NO: 1559656 - RNA, 19 nt, Homo sapiens
  misc_RNA (1)...(19): siRNA sense strand
ggcucuggcuguagauaug

SEQ ID NO: 1559657 - RNA, 19 nt, Homo sapiens
  misc_RNA (1)...(19): siRNA sense strand
uggauaugguuguggcuau

SEQ ID NO: 1559658 - RNA, 19 nt, Homo sapiens
  misc_RNA (1)...(19): siRNA sense strand
ggaguuccggcuguggaua

SEQ ID NO: 1559659 - RNA, 19 nt, Homo sapiens
  misc_RNA (1)...(19): siRNA sense strand
gcuauuccucuugcuacua

SEQ ID NO: 1559660 - RNA, 19 nt, Homo sapiens
  misc_RNA (1)...(19): siRNA sense strand
gaguuccggcuguggauau

SEQ ID NO: 1559661 - RNA, 19 nt, Homo sapiens
  misc_RNA (1)...(19): siRNA sense strand
guggauauggcuguggaua

SEQ ID NO: 1559662 - RNA, 19 nt, Homo sapiens
  misc_RNA (1)...(19): siRNA sense strand
uguugcaacuacuacagaa

SEQ ID NO: 1559663 - RNA, 19 nt, Homo sapiens
  misc_RNA (1)...(19): siRNA sense strand
uacagaagaugcuauuccu

SEQ ID NO: 1559664 - RNA, 19 nt, Homo sapiens
  misc_RNA (1)...(19): siRNA sense strand
gaacuggcuguggcuaugg

SEQ ID NO: 1559665 - RNA, 19 nt, Homo sapiens
  misc_RNA (1)...(19): siRNA sense strand
gaagaaagccauaaaguua

SEQ ID NO: 1559666 - RNA, 19 nt, Homo sapiens
  misc_RNA (1)...(19): siRNA sense strand
caaagaagcugaagaaucu

SEQ ID NO: 1559667 - RNA, 19 nt, Homo sapiens
  misc_RNA (1)...(19): siRNA sense strand
gaauaaaccucuuaaagca

SEQ ID NO: 1559668 - RNA, 19 nt, Homo sapiens
  misc_RNA (1)...(19): siRNA sense strand
gauacucacucauuccuua

SEQ ID NO: 1559669 - RNA, 19 nt, Homo sapiens
  misc_RNA (1)...(19): siRNA sense strand
gcaaaggaagcauaucuua

SEQ ID NO: 1559670 - RNA, 19 nt, Homo sapiens
  misc_RNA (1)...(19): siRNA sense strand
gaacaaggaauaacaguug

SEQ ID NO: 1559671 - RNA, 19 nt, Homo sapiens
  misc_RNA (1)...(19): siRNA sense strand
gaacuaaauccaaagcaua

SEQ ID NO: 1559672 - RNA, 19 nt, Homo sapiens
  misc_RNA (1)...(19): siRNA sense strand
ucacugaugccucaaauua

SEQ ID NO: 1559673 - RNA, 19 nt, Homo sapiens
  misc_RNA (1)...(19): siRNA sense strand
gaaagaaaauuccaacuga

SEQ ID NO: 1559674 - RNA, 19 nt, Homo sapiens
  misc_RNA (1)...(19): siRNA sense strand
gcagagauuuggaugaaga

SEQ ID NO: 1559675 - RNA, 19 nt, Homo sapiens
  misc_RNA (1)...(19): siRNA sense strand
ggacagaaauaaugcagau

SEQ ID NO: 1559676 - RNA, 19 nt, Homo sapiens
  misc_RNA (1)...(19): siRNA sense strand
gcuaauggguauuucaauu

SEQ ID NO: 1559677 - RNA, 19 nt, Homo sapiens
  misc_RNA (1)...(19): siRNA sense strand
caacaagaguagugugauu

SEQ ID NO: 1559678 - RNA, 19 nt, Homo sapiens
  misc_RNA (1)...(19): siRNA sense strand
uagaagagauugaacguau

SEQ ID NO: 1559679 - RNA, 19 nt, Homo sapiens
  misc_RNA (1)...(19): siRNA sense strand
gaagagauugaacguauuu

SEQ ID NO: 1559680 - RNA, 19 nt, Homo sapiens
  misc_RNA (1)...(19): siRNA sense strand
ggagauggauccaagcaau

SEQ ID NO: 1559681 - RNA, 19 nt, Homo sapiens
  misc_RNA (1)...(19): siRNA sense strand
ccaguaagauuucaagugu

SEQ ID NO: 1559682 - RNA, 19 nt, Homo sapiens
  misc_RNA (1)...(19): siRNA sense strand
ggaagcauaucuuaaagca

SEQ ID NO: 1559683 - RNA, 19 nt, Homo sapiens
  misc_RNA (1)...(19): siRNA sense strand
gaaauaaugcagaucuuug

SEQ ID NO: 1559684 - RNA, 19 nt, Homo sapiens
  misc_RNA (1)...(19): siRNA sense strand
guauugacauuucgcuuaa

SEQ ID NO: 1559685 - RNA, 19 nt, Homo sapiens
  misc_RNA (1)...(19): siRNA sense strand
gggauaagauuuccucauc

SEQ ID NO: 1559686 - RNA, 19 nt, Homo sapiens
  misc_RNA (1)...(19): siRNA sense strand
gaauaacaguuguaggaau

SEQ ID NO: 1559687 - RNA, 19 nt, Homo sapiens
  misc_RNA (1)...(19): siRNA sense strand
guagugugauugcuucuuu

SEQ ID NO: 1559688 - RNA, 19 nt, Homo sapiens
  misc_RNA (1)...(19): siRNA sense strand
gagcgaguauuauauguuc

SEQ ID NO: 1559689 - RNA, 19 nt, Homo sapiens
  misc_RNA (1)...(19): siRNA sense strand
gaacuuaaagaaccaaaug

SEQ ID NO: 1559690 - RNA, 19 nt, Homo sapiens
  misc_RNA (1)...(19): siRNA sense strand
ugagagagcuuugaaauac

SEQ ID NO: 1559691 - RNA, 19 nt, Homo sapiens
  misc_RNA (1)...(19): siRNA sense strand
gaacaauaccacuuauaga

SEQ ID NO: 1559692 - RNA, 19 nt, Homo sapiens
  misc_RNA (1)...(19): siRNA sense strand
ccagacaauuccauaauau

SEQ ID NO: 1559693 - RNA, 19 nt, Homo sapiens
  misc_RNA (1)...(19): siRNA sense strand
gaagugcuuuguuuaaucu

SEQ ID NO: 1559694 - RNA, 19 nt, Homo sapiens
  misc_RNA (1)...(19): siRNA sense strand
gcauccaucuacaccuuua

SEQ ID NO: 1559695 - RNA, 19 nt, Homo sapiens
  misc_RNA (1)...(19): siRNA sense strand
gcaagaaucaggugagguu

SEQ ID NO: 1559696 - RNA, 19 nt, Homo sapiens
  misc_RNA (1)...(19): siRNA sense strand
ccaauugccuugacagugu

SEQ ID NO: 1559697 - RNA, 19 nt, Homo sapiens
  misc_RNA (1)...(19): siRNA sense strand
cacuagagcuggacagaaa

SEQ ID NO: 1559698 - RNA, 19 nt, Homo sapiens
  misc_RNA (1)...(19): siRNA sense strand
gcuguaccgucaagcaaua

SEQ ID NO: 1559699 - RNA, 19 nt, Homo sapiens
  misc_RNA (1)...(19): siRNA sense strand
gauacuacccugaucauau

SEQ ID NO: 1559700 - RNA, 19 nt, Homo sapiens
  misc_RNA (1)...(19): siRNA sense strand
ggaauuugcuguguguaug

SEQ ID NO: 1559701 - RNA, 19 nt, Homo sapiens
  misc_RNA (1)...(19): siRNA sense strand
caaaggaagcauaucuuaa

SEQ ID NO: 1559702 - RNA, 19 nt, Homo sapiens
  misc_RNA (1)...(19): siRNA sense strand
ggaacaauaccacuuauag

SEQ ID NO: 1559703 - RNA, 19 nt, Homo sapiens
  misc_RNA (1)...(19): siRNA sense strand
aaucuuacaugauggcuaa

SEQ ID NO: 1559704 - RNA, 19 nt, Homo sapiens
  misc_RNA (1)...(19): siRNA sense strand
caagcaaugugcaaggaaa

SEQ ID NO: 1559705 - RNA, 19 nt, Homo sapiens
  misc_RNA (1)...(19): siRNA sense strand
ggaacuaaauccaaagcau

SEQ ID NO: 1559706 - RNA, 19 nt, Homo sapiens
  misc_RNA (1)...(19): siRNA sense strand
cagcaauacuggauaacaa

SEQ ID NO: 1559707 - RNA, 19 nt, Homo sapiens
  misc_RNA (1)...(19): siRNA sense strand
gcuguaagcccaacuccua

SEQ ID NO: 1559708 - RNA, 19 nt, Homo sapiens
  misc_RNA (1)...(19): siRNA sense strand
ggacaaugaagcagagauu

SEQ ID NO: 1559709 - RNA, 19 nt, Homo sapiens
  misc_RNA (1)...(19): siRNA sense strand
gagcagaacuuuugucauc

SEQ ID NO: 1559710 - RNA, 19 nt, Homo sapiens
  misc_RNA (1)...(19): siRNA sense strand
gugauugcuucuuuacuuu

SEQ ID NO: 1559711 - RNA, 19 nt, Homo sapiens
  misc_RNA (1)...(19): siRNA sense strand
cagacaaacacaaauagua

SEQ ID NO: 1559712 - RNA, 19 nt, Homo sapiens
  misc_RNA (1)...(19): siRNA sense strand
uaaucuggcucuccuguau

SEQ ID NO: 1559713 - RNA, 19 nt, Homo sapiens
  misc_RNA (1)...(19): siRNA sense strand
ugaagaaagccauaaaguu

SEQ ID NO: 1559714 - RNA, 19 nt, Homo sapiens
  misc_RNA (1)...(19): siRNA sense strand
ugugaaugcuugguuguua

SEQ ID NO: 1559715 - RNA, 19 nt, Homo sapiens
  misc_RNA (1)...(19): siRNA sense strand
gugauuagaguccagguua

SEQ ID NO: 1559716 - RNA, 19 nt, Homo sapiens
  misc_RNA (1)...(19): siRNA sense strand
gaaaggguagcauuccauu

SEQ ID NO: 1559717 - RNA, 19 nt, Homo sapiens
  misc_RNA (1)...(19): siRNA sense strand
cuacaaggcaacuaacuuu

SEQ ID NO: 1559718 - RNA, 19 nt, Homo sapiens
  misc_RNA (1)...(19): siRNA sense strand
agagaagccacaagucuua

SEQ ID NO: 1559719 - RNA, 19 nt, Homo sapiens
  misc_RNA (1)...(19): siRNA sense strand
gagcuggacagaaauaaug

SEQ ID NO: 1559720 - RNA, 19 nt, Homo sapiens
  misc_RNA (1)...(19): siRNA sense strand
ccauaugaauguaggaaga

SEQ ID NO: 1559721 - RNA, 19 nt, Homo sapiens
  misc_RNA (1)...(19): siRNA sense strand
ccaguuggauuuguuguug

SEQ ID NO: 1559722 - RNA, 19 nt, Homo sapiens
  misc_RNA (1)...(19): siRNA sense strand
guaggaauuugcugugugu

SEQ ID NO: 1559723 - RNA, 19 nt, Homo sapiens
  misc_RNA (1)...(19): siRNA sense strand
aaaccaaugucauaucauc

SEQ ID NO: 1559724 - RNA, 19 nt, Homo sapiens
  misc_RNA (1)...(19): siRNA sense strand
aagcagagauuuggaugaa

SEQ ID NO: 1559725 - RNA, 19 nt, Homo sapiens
  misc_RNA (1)...(19): siRNA sense strand
cgaagugcuuuguuuaauc

SEQ ID NO: 1559726 - RNA, 19 nt, Homo sapiens
  misc_RNA (1)...(19): siRNA sense strand
ggaccagacaauuccauaa

SEQ ID NO: 1559727 - RNA, 19 nt, Homo sapiens
  misc_RNA (1)...(19): siRNA sense strand
ccaaagaagcugaagaauc

SEQ ID NO: 1559728 - RNA, 19 nt, Homo sapiens
  misc_RNA (1)...(19): siRNA sense strand
gauugggagucugaauaua

SEQ ID NO: 1559729 - RNA, 19 nt, Homo sapiens
  misc_RNA (1)...(19): siRNA sense strand
gggauugggagucugaaua

SEQ ID NO: 1559730 - RNA, 19 nt, Homo sapiens
  misc_RNA (1)...(19): siRNA sense strand
ggccacauuuacuuucuuu

SEQ ID NO: 1559731 - RNA, 19 nt, Homo sapiens
  misc_RNA (1)...(19): siRNA sense strand
gcaacuaacuuuuaacuac

SEQ ID NO: 1559732 - RNA, 19 nt, Homo sapiens
  misc_RNA (1)...(19): siRNA sense strand
ggauuugucugucuauggu

SEQ ID NO: 1559733 - RNA, 19 nt, Homo sapiens
  misc_RNA (1)...(19): siRNA sense strand
ccaauauucccaaccagua

SEQ ID NO: 1559734 - RNA, 19 nt, Homo sapiens
  misc_RNA (1)...(19): siRNA sense strand
gaagagccacuagaugcua

SEQ ID NO: 1559735 - RNA, 19 nt, Homo sapiens
  misc_RNA (1)...(19): siRNA sense strand
agaaucaggugagguuaaa

SEQ ID NO: 1559736 - RNA, 19 nt, Homo sapiens
  misc_RNA (1)...(19): siRNA sense strand
acugaugccucaaauuauu

SEQ ID NO: 1559737 - RNA, 19 nt, Homo sapiens
  misc_RNA (1)...(19): siRNA sense strand
ccacagaaauugggauugg

SEQ ID NO: 1559738 - RNA, 19 nt, Homo sapiens
  misc_RNA (1)...(19): siRNA sense strand
caaggcaacuaacuuuuaa

SEQ ID NO: 1559739 - RNA, 19 nt, Homo sapiens
  misc_RNA (1)...(19): siRNA sense strand
aaggagacauucugaugaa

SEQ ID NO: 1559740 - RNA, 19 nt, Homo sapiens
  misc_RNA (1)...(19): siRNA sense strand
uaauggcgcuuuguuuaau

SEQ ID NO: 1559741 - RNA, 19 nt, Homo sapiens
  misc_RNA (1)...(19): siRNA sense strand
guuauucaaucccaacuuc

SEQ ID NO: 1559742 - RNA, 19 nt, Homo sapiens
  misc_RNA (1)...(19): siRNA sense strand
gagagaagccacaagucuu

SEQ ID NO: 1559743 - RNA, 19 nt, Homo sapiens
  misc_RNA (1)...(19): siRNA sense strand
guauucaccagguuugaua

SEQ ID NO: 1559744 - RNA, 19 nt, Homo sapiens
  misc_RNA (1)...(19): siRNA sense strand
ugugauugcuucuuuacuu

SEQ ID NO: 1559745 - RNA, 19 nt, Homo sapiens
  misc_RNA (1)...(19): siRNA sense strand
caacucuguuauaguaaug

SEQ ID NO: 1559746 - RNA, 19 nt, Homo sapiens
  misc_RNA (1)...(19): siRNA sense strand
gcauuauucaacucuguua

SEQ ID NO: 1559747 - RNA, 19 nt, Homo sapiens
  misc_RNA (1)...(19): siRNA sense strand
gaggagaauugcuuuuaaa

SEQ ID NO: 1559748 - RNA, 19 nt, Homo sapiens
  misc_RNA (1)...(19): siRNA sense strand
ccuaaccaccuaaauguuu

SEQ ID NO: 1559749 - RNA, 19 nt, Homo sapiens
  misc_RNA (1)...(19): siRNA sense strand
gaauguaggaagaacuuau

SEQ ID NO: 1559750 - RNA, 19 nt, Homo sapiens
  misc_RNA (1)...(19): siRNA sense strand
ggauugggagucugaauau

SEQ ID NO: 1559751 - RNA, 19 nt, Homo sapiens
  misc_RNA (1)...(19): siRNA sense strand
uuuaauggcgcuuuguuua

SEQ ID NO: 1559752 - RNA, 19 nt, Homo sapiens
  misc_RNA (1)...(19): siRNA sense strand
ggaauaacaguuguaggaa

SEQ ID NO: 1559753 - RNA, 19 nt, Homo sapiens
  misc_RNA (1)...(19): siRNA sense strand
accagacaauuccauaaua

SEQ ID NO: 1559754 - RNA, 19 nt, Homo sapiens
  misc_RNA (1)...(19): siRNA sense strand
ggagagaagccacaagucu

SEQ ID NO: 1559755 - RNA, 19 nt, Homo sapiens
  misc_RNA (1)...(19): siRNA sense strand
uaccgucccuuaacaguau

SEQ ID NO: 1559756 - RNA, 19 nt, Homo sapiens
  misc_RNA (1)...(19): siRNA sense strand
gagccaauauucccaacca

SEQ ID NO: 1559757 - RNA, 19 nt, Homo sapiens
  misc_RNA (1)...(19): siRNA sense strand
ugaauauagucagggauaa

SEQ ID NO: 1559758 - RNA, 19 nt, Homo sapiens
  misc_RNA (1)...(19): siRNA sense strand
ggaugaagaaagccauaaa

SEQ ID NO: 1559759 - RNA, 19 nt, Homo sapiens
  misc_RNA (1)...(19): siRNA sense strand
gcagaucuuugguacaacu

SEQ ID NO: 1559760 - RNA, 19 nt, Homo sapiens
  misc_RNA (1)...(19): siRNA sense strand
gaucagcuguaccgucaag

SEQ ID NO: 1559761 - RNA, 19 nt, Homo sapiens
  misc_RNA (1)...(19): siRNA sense strand
gggaacaauaccacuuaua

SEQ ID NO: 1559762 - RNA, 19 nt, Homo sapiens
  misc_RNA (1)...(19): siRNA sense strand
ugaugauguuucagcaaua

SEQ ID NO: 1559763 - RNA, 19 nt, Homo sapiens
  misc_RNA (1)...(19): siRNA sense strand
agaggugaauccagacaaa

SEQ ID NO: 1559764 - RNA, 19 nt, Homo sapiens
  misc_RNA (1)...(19): siRNA sense strand
ggcauuagcaccacaugaa

SEQ ID NO: 1559765 - RNA, 19 nt, Homo sapiens
  misc_RNA (1)...(19): siRNA sense strand
gaacggaacugcacagaua

SEQ ID NO: 1559766 - RNA, 19 nt, Homo sapiens
  misc_RNA (1)...(19): siRNA sense strand
gcaaagaccuggacgaaug

SEQ ID NO: 1559767 - RNA, 19 nt, Homo sapiens
  misc_RNA (1)...(19): siRNA sense strand
gcaaagaugucgacgaaug

SEQ ID NO: 1559768 - RNA, 19 nt, Homo sapiens
  misc_RNA (1)...(19): siRNA sense strand
ggcaacaacugcauggaua

SEQ ID NO: 1559769 - RNA, 19 nt, Homo sapiens
  misc_RNA (1)...(19): siRNA sense strand
gcuacuaccugccuggaua

SEQ ID NO: 1559770 - RNA, 19 nt, Homo sapiens
  misc_RNA (1)...(19): siRNA sense strand
gugaagaugugaaugaaug

SEQ ID NO: 1559771 - RNA, 19 nt, Homo sapiens
  misc_RNA (1)...(19): siRNA sense strand
gcacagaugacaaugaaug

SEQ ID NO: 1559772 - RNA, 19 nt, Homo sapiens
  misc_RNA (1)...(19): siRNA sense strand
gcucugauguggaugaaug

SEQ ID NO: 1559773 - RNA, 19 nt, Homo sapiens
  misc_RNA (1)...(19): siRNA sense strand
caagggacaugcaccaaug

SEQ ID NO: 1559774 - RNA, 19 nt, Homo sapiens
  misc_RNA (1)...(19): siRNA sense strand
gaaaugggaccugcaagaa

SEQ ID NO: 1559775 - RNA, 19 nt, Homo sapiens
  misc_RNA (1)...(19): siRNA sense strand
ggacuucacuggcaucaac

SEQ ID NO: 1559776 - RNA, 19 nt, Homo sapiens
  misc_RNA (1)...(19): siRNA sense strand
caacaccacugaguacaga

SEQ ID NO: 1559777 - RNA, 19 nt, Homo sapiens
  misc_RNA (1)...(19): siRNA sense strand
ccagggaguuucagcugua

SEQ ID NO: 1559778 - RNA, 19 nt, Homo sapiens
  misc_RNA (1)...(19): siRNA sense strand
gggccgagauguagaugaa

SEQ ID NO: 1559779 - RNA, 19 nt, Homo sapiens
  misc_RNA (1)...(19): siRNA sense strand
ggaaaugggaccugcaaga

SEQ ID NO: 1559780 - RNA, 19 nt, Homo sapiens
  misc_RNA (1)...(19): siRNA sense strand
ccuggcaacucuaauauug

SEQ ID NO: 1559781 - RNA, 19 nt, Homo sapiens
  misc_RNA (1)...(19): siRNA sense strand
gcgaggacaucgacgaaug

SEQ ID NO: 1559782 - RNA, 19 nt, Homo sapiens
  misc_RNA (1)...(19): siRNA sense strand
acacggagaucugcaaaga

SEQ ID NO: 1559783 - RNA, 19 nt, Homo sapiens
  misc_RNA (1)...(19): siRNA sense strand
gugaggauauugacgaaug

SEQ ID NO: 1559784 - RNA, 19 nt, Homo sapiens
  misc_RNA (1)...(19): siRNA sense strand
gacgugcacuguauuaaca

SEQ ID NO: 1559785 - RNA, 19 nt, Homo sapiens
  misc_RNA (1)...(19): siRNA sense strand
ggugugacgugcacuguau

SEQ ID NO: 1559786 - RNA, 19 nt, Homo sapiens
  misc_RNA (1)...(19): siRNA sense strand
cugcaaagaugucgacgaa

SEQ ID NO: 1559787 - RNA, 19 nt, Homo sapiens
  misc_RNA (1)...(19): siRNA sense strand
cagaguaccuccaagucaa

SEQ ID NO: 1559788 - RNA, 19 nt, Homo sapiens
  misc_RNA (1)...(19): siRNA sense strand
ggaggcagcugcgucaaca

SEQ ID NO: 1559789 - RNA, 19 nt, Homo sapiens
  misc_RNA (1)...(19): siRNA sense strand
gcagugggcuuggcauuac

SEQ ID NO: 1559790 - RNA, 19 nt, Homo sapiens
  misc_RNA (1)...(19): siRNA sense strand
gugcauugauguagacgaa

SEQ ID NO: 1559791 - RNA, 19 nt, Homo sapiens
  misc_RNA (1)...(19): siRNA sense strand
ggccauggcugugaagaug

SEQ ID NO: 1559792 - RNA, 19 nt, Homo sapiens
  misc_RNA (1)...(19): siRNA sense strand
ccaauggcaucugcauaaa

SEQ ID NO: 1559793 - RNA, 19 nt, Homo sapiens
  misc_RNA (1)...(19): siRNA sense strand
gggaaccucugugcauuug

SEQ ID NO: 1559794 - RNA, 19 nt, Homo sapiens
  misc_RNA (1)...(19): siRNA sense strand
ggacgagugugaagagaac

SEQ ID NO: 1559795 - RNA, 19 nt, Homo sapiens
  misc_RNA (1)...(19): siRNA sense strand
gaaacacggugggcagcuu

SEQ ID NO: 1559796 - RNA, 19 nt, Homo sapiens
  misc_RNA (1)...(19): siRNA sense strand
caacgagugugcucuggau

SEQ ID NO: 1559797 - RNA, 19 nt, Homo sapiens
  misc_RNA (1)...(19): siRNA sense strand
agugugagcuguaugaaug

SEQ ID NO: 1559798 - RNA, 19 nt, Homo sapiens
  misc_RNA (1)...(19): siRNA sense strand
guagaugaaugccguaugc

SEQ ID NO: 1559799 - RNA, 19 nt, Homo sapiens
  misc_RNA (1)...(19): siRNA sense strand
gugagaaccugccuggaau

SEQ ID NO: 1559800 - RNA, 19 nt, Homo sapiens
  misc_RNA (1)...(19): siRNA sense strand
ggacgagugugcagauggu

SEQ ID NO: 1559801 - RNA, 19 nt, Homo sapiens
  misc_RNA (1)...(19): siRNA sense strand
gcgagugcauugauguaga

SEQ ID NO: 1559802 - RNA, 19 nt, Homo sapiens
  misc_RNA (1)...(19): siRNA sense strand
cugcacagaugacaaugaa

SEQ ID NO: 1559803 - RNA, 19 nt, Homo sapiens
  misc_RNA (1)...(19): siRNA sense strand
aaaaugagcuggccuucaa

SEQ ID NO: 1559804 - RNA, 19 nt, Homo sapiens
  misc_RNA (1)...(19): siRNA sense strand
gcagaguaccuccaaguca

SEQ ID NO: 1559805 - RNA, 19 nt, Homo sapiens
  misc_RNA (1)...(19): siRNA sense strand
caacacugcugggucuuuc

SEQ ID NO: 1559806 - RNA, 19 nt, Homo sapiens
  misc_RNA (1)...(19): siRNA sense strand
gccuuccgcugccacaaua

SEQ ID NO: 1559807 - RNA, 19 nt, Homo sapiens
  misc_RNA (1)...(19): siRNA sense strand
caucggaggcuucgaaugu

SEQ ID NO: 1559808 - RNA, 19 nt, Homo sapiens
  misc_RNA (1)...(19): siRNA sense strand
ucacuggcaucaacugugu

SEQ ID NO: 1559809 - RNA, 19 nt, Homo sapiens
  misc_RNA (1)...(19): siRNA sense strand
ggaagccccuugacauuga

SEQ ID NO: 1559810 - RNA, 19 nt, Homo sapiens
  misc_RNA (1)...(19): siRNA sense strand
caacacguuuggcaguuuc

SEQ ID NO: 1559811 - RNA, 19 nt, Homo sapiens
  misc_RNA (1)...(19): siRNA sense strand
agaggugacugucucaaug

SEQ ID NO: 1559812 - RNA, 19 nt, Homo sapiens
  misc_RNA (1)...(19): siRNA sense strand
gcacuaacggcgucugugu

SEQ ID NO: 1559813 - RNA, 19 nt, Homo sapiens
  misc_RNA (1)...(19): siRNA sense strand
gaaccagaccauugacauc

SEQ ID NO: 1559814 - RNA, 19 nt, Homo sapiens
  misc_RNA (1)...(19): siRNA sense strand
gcugugaagaugugaauga

SEQ ID NO: 1559815 - RNA, 19 nt, Homo sapiens
  misc_RNA (1)...(19): siRNA sense strand
gaaugagugugcagagaac

SEQ ID NO: 1559816 - RNA, 19 nt, Homo sapiens
  misc_RNA (1)...(19): siRNA sense strand
gccacaggcugcucugaug

SEQ ID NO: 1559817 - RNA, 19 nt, Homo sapiens
  misc_RNA (1)...(19): siRNA sense strand
cacgguaccugcagaaaca

SEQ ID NO: 1559818 - RNA, 19 nt, Homo sapiens
  misc_RNA (1)...(19): siRNA sense strand
gaugugagauuggaaccau

SEQ ID NO: 1559819 - RNA, 19 nt, Homo sapiens
  misc_RNA (1)...(19): siRNA sense strand
caaggccacugcaccaaca

SEQ ID NO: 1559820 - RNA, 19 nt, Homo sapiens
  misc_RNA (1)...(19): siRNA sense strand
gccgagauguagaugaaug

SEQ ID NO: 1559821 - RNA, 19 nt, Homo sapiens
  misc_RNA (1)...(19): siRNA sense strand
gcucggugcccaaagcuuu

SEQ ID NO: 1559822 - RNA, 19 nt, Homo sapiens
  misc_RNA (1)...(19): siRNA sense strand
gcauccugcuggcuuguga

SEQ ID NO: 1559823 - RNA, 19 nt, Homo sapiens
  misc_RNA (1)...(19): siRNA sense strand
ggaugaaugugccgagaac

SEQ ID NO: 1559824 - RNA, 19 nt, Homo sapiens
  misc_RNA (1)...(19): siRNA sense strand
ggacaccggcucagugaca

SEQ ID NO: 1559825 - RNA, 19 nt, Homo sapiens
  misc_RNA (1)...(19): siRNA sense strand
ggccuuccaugugaacuuu

SEQ ID NO: 1559826 - RNA, 19 nt, Homo sapiens
  misc_RNA (1)...(19): siRNA sense strand
uauaacggcacaugucaaa

SEQ ID NO: 1559827 - RNA, 19 nt, Homo sapiens
  misc_RNA (1)...(19): siRNA sense strand
gguggcaacugcacagaca

SEQ ID NO: 1559828 - RNA, 19 nt, Homo sapiens
  misc_RNA (1)...(19): siRNA sense strand
gcguggacaucaacgaaug

SEQ ID NO: 1559829 - RNA, 19 nt, Homo sapiens
  misc_RNA (1)...(19): siRNA sense strand
cuacgagaguggcuucaug

SEQ ID NO: 1559830 - RNA, 19 nt, Homo sapiens
  misc_RNA (1)...(19): siRNA sense strand
ccaaugaauuccagcaacu

SEQ ID NO: 1559831 - RNA, 19 nt, Homo sapiens
  misc_RNA (1)...(19): siRNA sense strand
gcaagggacaugcaccaau

SEQ ID NO: 1559832 - RNA, 19 nt, Homo sapiens
  misc_RNA (1)...(19): siRNA sense strand
gcaacaacugcauggauau

SEQ ID NO: 1559833 - RNA, 19 nt, Homo sapiens
  misc_RNA (1)...(19): siRNA sense strand
ucaacacguuuggcaguuu

SEQ ID NO: 1559834 - RNA, 19 nt, Homo sapiens
  misc_RNA (1)...(19): siRNA sense strand
ucacugucauucuggaaga

SEQ ID NO: 1559835 - RNA, 19 nt, Homo sapiens
  misc_RNA (1)...(19): siRNA sense strand
gcgaagacagggaugaaug

SEQ ID NO: 1559836 - RNA, 19 nt, Homo sapiens
  misc_RNA (1)...(19): siRNA sense strand
cgaccauucuauaaagaug

SEQ ID NO: 1559837 - RNA, 19 nt, Homo sapiens
  misc_RNA (1)...(19): siRNA sense strand
gugcguggaugugagauug

SEQ ID NO: 1559838 - RNA, 19 nt, Homo sapiens
  misc_RNA (1)...(19): siRNA sense strand
ucugguaccuucugucuag

SEQ ID NO: 1559839 - RNA, 19 nt, Homo sapiens
  misc_RNA (1)...(19): siRNA sense strand
ucaccaaccugugucugaa

SEQ ID NO: 1559840 - RNA, 19 nt, Homo sapiens
  misc_RNA (1)...(19): siRNA sense strand
uaccagauccuguguggaa

SEQ ID NO: 1559841 - RNA, 19 nt, Homo sapiens
  misc_RNA (1)...(19): siRNA sense strand
ccgcaucacugucauucug

SEQ ID NO: 1559842 - RNA, 19 nt, Homo sapiens
  misc_RNA (1)...(19): siRNA sense strand
aaugugagaugggcuuuga

SEQ ID NO: 1559843 - RNA, 19 nt, Homo sapiens
  misc_RNA (1)...(19): siRNA sense strand
gucacgaccuggaugaaug

SEQ ID NO: 1559844 - RNA, 19 nt, Homo sapiens
  misc_RNA (1)...(19): siRNA sense strand
gggauggcuucgaauguca

SEQ ID NO: 1559845 - RNA, 19 nt, Homo sapiens
  misc_RNA (1)...(19): siRNA sense strand
ggaggcacuugcaccaaca

SEQ ID NO: 1559846 - RNA, 19 nt, Homo sapiens
  misc_RNA (1)...(19): siRNA sense strand
ggacacggagaucugcaaa

SEQ ID NO: 1559847 - RNA, 19 nt, Homo sapiens
  misc_RNA (1)...(19): siRNA sense strand
ggagaucccgaaugucugu

SEQ ID NO: 1559848 - RNA, 19 nt, Homo sapiens
  misc_RNA (1)...(19): siRNA sense strand
gcauggauaugaggaagag

SEQ ID NO: 1559849 - RNA, 19 nt, Homo sapiens
  misc_RNA (1)...(19): siRNA sense strand
cauugccgcuguccaguug

SEQ ID NO: 1559850 - RNA, 19 nt, Homo sapiens
  misc_RNA (1)...(19): siRNA sense strand
ggccgaccauucuauaaag

SEQ ID NO: 1559851 - RNA, 19 nt, Homo sapiens
  misc_RNA (1)...(19): siRNA sense strand
ggacugcacagacguggau

SEQ ID NO: 1559852 - RNA, 19 nt, Homo sapiens
  misc_RNA (1)...(19): siRNA sense strand
ggucggcccuguugugcau

SEQ ID NO: 1559853 - RNA, 19 nt, Homo sapiens
  misc_RNA (1)...(19): siRNA sense strand
ggccaugugucgagaugug

SEQ ID NO: 1559854 - RNA, 19 nt, Homo sapiens
  misc_RNA (1)...(19): siRNA sense strand
aaugggaccugcaagaaca

SEQ ID NO: 1559855 - RNA, 19 nt, Homo sapiens
  misc_RNA (1)...(19): siRNA sense strand
ucaacggcgugugcauuaa

SEQ ID NO: 1559856 - RNA, 19 nt, Homo sapiens
  misc_RNA (1)...(19): siRNA sense strand
caagggaaccucugugcau

SEQ ID NO: 1559857 - RNA, 19 nt, Homo sapiens
  misc_RNA (1)...(19): siRNA sense strand
gaccugaacccucacaucu

SEQ ID NO: 1559858 - RNA, 19 nt, Homo sapiens
  misc_RNA (1)...(19): siRNA sense strand
gagauuggaaccauguuuc

SEQ ID NO: 1559859 - RNA, 19 nt, Homo sapiens
  misc_RNA (1)...(19): siRNA sense strand
gcacuauaacggcacaugu

SEQ ID NO: 1559860 - RNA, 19 nt, Homo sapiens
  misc_RNA (1)...(19): siRNA sense strand
cuaccugccuggauaugga

SEQ ID NO: 1559861 - RNA, 19 nt, Homo sapiens
  misc_RNA (1)...(19): siRNA sense strand
gcaccucugccuacaggaa

SEQ ID NO: 1559862 - RNA, 19 nt, Homo sapiens
  misc_RNA (1)...(19): siRNA sense strand
gugaaugagugugcagaga

SEQ ID NO: 1559863 - RNA, 19 nt, Homo sapiens
  misc_RNA (1)...(19): siRNA sense strand
gggcaccguugcuuugaca

SEQ ID NO: 1559864 - RNA, 19 nt, Homo sapiens
  misc_RNA (1)...(19): siRNA sense strand
gaaugagugucgggagauc

SEQ ID NO: 1559865 - RNA, 19 nt, Homo sapiens
  misc_RNA (1)...(19): siRNA sense strand
ggacagugcuacuuguaua

SEQ ID NO: 1559866 - RNA, 19 nt, Homo sapiens
  misc_RNA (1)...(19): siRNA sense strand
gaacggguccggcuuagua

SEQ ID NO: 1559867 - RNA, 19 nt, Homo sapiens
  misc_RNA (1)...(19): siRNA sense strand
ucaccaagaucacccaaua

SEQ ID NO: 1559868 - RNA, 19 nt, Homo sapiens
  misc_RNA (1)...(19): siRNA sense strand
gaaaggacagugcuacuug

SEQ ID NO: 1559869 - RNA, 19 nt, Homo sapiens
  misc_RNA (1)...(19): siRNA sense strand
aagcagagauucaccaaga

SEQ ID NO: 1559870 - RNA, 19 nt, Homo sapiens
  misc_RNA (1)...(19): siRNA sense strand
caagaucacccaauaccua

SEQ ID NO: 1559871 - RNA, 19 nt, Homo sapiens
  misc_RNA (1)...(19): siRNA sense strand
gaaccaagacucagagcuu

SEQ ID NO: 1559872 - RNA, 19 nt, Homo sapiens
  misc_RNA (1)...(19): siRNA sense strand
aaagagaauuugucgaaga

SEQ ID NO: 1559873 - RNA, 19 nt, Homo sapiens
  misc_RNA (1)...(19): siRNA sense strand
agaaagcacuggagcaaau

SEQ ID NO: 1559874 - RNA, 19 nt, Homo sapiens
  misc_RNA (1)...(19): siRNA sense strand
ugucgaagauggugaggua

SEQ ID NO: 1559875 - RNA, 19 nt, Homo sapiens
  misc_RNA (1)...(19): siRNA sense strand
cgacaaagcccuggaacaa

SEQ ID NO: 1559876 - RNA, 19 nt, Homo sapiens
  misc_RNA (1)...(19): siRNA sense strand
gaaaagagaauuugucgaa

SEQ ID NO: 1559877 - RNA, 19 nt, Homo sapiens
  misc_RNA (1)...(19): siRNA sense strand
gagagugacauaagugauu

SEQ ID NO: 1559878 - RNA, 19 nt, Homo sapiens
  misc_RNA (1)...(19): siRNA sense strand
ggauauggauaaacuggau

SEQ ID NO: 1559879 - RNA, 19 nt, Homo sapiens
  misc_RNA (1)...(19): siRNA sense strand
gaaagcacuggagcaaaua

SEQ ID NO: 1559880 - RNA, 19 nt, Homo sapiens
  misc_RNA (1)...(19): siRNA sense strand
gcagucggaugauguuauc

SEQ ID NO: 1559881 - RNA, 19 nt, Homo sapiens
  misc_RNA (1)...(19): siRNA sense strand
acaaagcccuggaacaaca

SEQ ID NO: 1559882 - RNA, 19 nt, Homo sapiens
  misc_RNA (1)...(19): siRNA sense strand
gaaacuuguuccuuugagu

SEQ ID NO: 1559883 - RNA, 19 nt, Homo sapiens
  misc_RNA (1)...(19): siRNA sense strand
guaugccacuauuaaagaa

SEQ ID NO: 1559884 - RNA, 19 nt, Homo sapiens
  misc_RNA (1)...(19): siRNA sense strand
gaucacccaauaccuaauu

SEQ ID NO: 1559885 - RNA, 19 nt, Homo sapiens
  misc_RNA (1)...(19): siRNA sense strand
uggagagacugaaacaaga

SEQ ID NO: 1559886 - RNA, 19 nt, Homo sapiens
  misc_RNA (1)...(19): siRNA sense strand
gagagacugaaacaagaua

SEQ ID NO: 1559887 - RNA, 19 nt, Homo sapiens
  misc_RNA (1)...(19): siRNA sense strand
cgacagaggaaacuuguuc

SEQ ID NO: 1559888 - RNA, 19 nt, Homo sapiens
  misc_RNA (1)...(19): siRNA sense strand
acacaaauguaagcagaga

SEQ ID NO: 1559889 - RNA, 19 nt, Homo sapiens
  misc_RNA (1)...(19): siRNA sense strand
cccaauaccuaauucgaau

SEQ ID NO: 1559890 - RNA, 19 nt, Homo sapiens
  misc_RNA (1)...(19): siRNA sense strand
agagugacauaagugauuu

SEQ ID NO: 1559891 - RNA, 19 nt, Homo sapiens
  misc_RNA (1)...(19): siRNA sense strand
gggauacacuaggaaacaa

SEQ ID NO: 1559892 - RNA, 19 nt, Homo sapiens
  misc_RNA (1)...(19): siRNA sense strand
aaacuuguuccuuugagua

SEQ ID NO: 1559893 - RNA, 19 nt, Homo sapiens
  misc_RNA (1)...(19): siRNA sense strand
gucaguaugccacuauuaa

SEQ ID NO: 1559894 - RNA, 19 nt, Homo sapiens
  misc_RNA (1)...(19): siRNA sense strand
aaacgagccuauguggaaa

SEQ ID NO: 1559895 - RNA, 19 nt, Homo sapiens
  misc_RNA (1)...(19): siRNA sense strand
gagcuucugccgaaaugaa

SEQ ID NO: 1559896 - RNA, 19 nt, Homo sapiens
  misc_RNA (1)...(19): siRNA sense strand
gcacuggagcaaauagaug

SEQ ID NO: 1559897 - RNA, 19 nt, Homo sapiens
  misc_RNA (1)...(19): siRNA sense strand
aagagaauuugucgaagau

SEQ ID NO: 1559898 - RNA, 19 nt, Homo sapiens
  misc_RNA (1)...(19): siRNA sense strand
acaaauguaagcagagauu

SEQ ID NO: 1559899 - RNA, 19 nt, Homo sapiens
  misc_RNA (1)...(19): siRNA sense strand
guagaugagagugacauaa

SEQ ID NO: 1559900 - RNA, 19 nt, Homo sapiens
  misc_RNA (1)...(19): siRNA sense strand
cagugcuacuuguauauga

SEQ ID NO: 1559901 - RNA, 19 nt, Homo sapiens
  misc_RNA (1)...(19): siRNA sense strand
gaugagagugacauaagug

SEQ ID NO: 1559902 - RNA, 19 nt, Homo sapiens
  misc_RNA (1)...(19): siRNA sense strand
gagaaagcacuggagcaaa

SEQ ID NO: 1559903 - RNA, 19 nt, Homo sapiens
  misc_RNA (1)...(19): siRNA sense strand
aaaggacagugcuacuugu

SEQ ID NO: 1559904 - RNA, 19 nt, Homo sapiens
  misc_RNA (1)...(19): siRNA sense strand
gaagaucaggaugguaaau

SEQ ID NO: 1559905 - RNA, 19 nt, Homo sapiens
  misc_RNA (1)...(19): siRNA sense strand
gcagagauucaccaagauc

SEQ ID NO: 1559906 - RNA, 19 nt, Homo sapiens
  misc_RNA (1)...(19): siRNA sense strand
ucaguaugccacuauuaaa

SEQ ID NO: 1559907 - RNA, 19 nt, Homo sapiens
  misc_RNA (1)...(19): siRNA sense strand
cgaagauggugagguagau

SEQ ID NO: 1559908 - RNA, 19 nt, Homo sapiens
  misc_RNA (1)...(19): siRNA sense strand
ugaugaugaugaugaggaa

SEQ ID NO: 1559909 - RNA, 19 nt, Homo sapiens
  misc_RNA (1)...(19): siRNA sense strand
gaauuacuggagagacuga

SEQ ID NO: 1559910 - RNA, 19 nt, Homo sapiens
  misc_RNA (1)...(19): siRNA sense strand
uagccugacuggacugugu

SEQ ID NO: 1559911 - RNA, 19 nt, Homo sapiens
  misc_RNA (1)...(19): siRNA sense strand
ccagugaggaggaggaaga

SEQ ID NO: 1559912 - RNA, 19 nt, Homo sapiens
  misc_RNA (1)...(19): siRNA sense strand
ugacuggacuguguaaucg

SEQ ID NO: 1559913 - RNA, 19 nt, Homo sapiens
  misc_RNA (1)...(19): siRNA sense strand
gaacaacaggaggcagaga

SEQ ID NO: 1559914 - RNA, 19 nt, Homo sapiens
  misc_RNA (1)...(19): siRNA sense strand
ggagagacugaaacaagau

SEQ ID NO: 1559915 - RNA, 19 nt, Homo sapiens
  misc_RNA (1)...(19): siRNA sense strand
gaaggaauuacuggagaga

SEQ ID NO: 1559916 - RNA, 19 nt, Homo sapiens
  misc_RNA (1)...(19): siRNA sense strand
gaagagaggaaaaggcauu

SEQ ID NO: 1559917 - RNA, 19 nt, Homo sapiens
  misc_RNA (1)...(19): siRNA sense strand
gguagaugagagugacaua

SEQ ID NO: 1559918 - RNA, 19 nt, Homo sapiens
  misc_RNA (1)...(19): siRNA sense strand
gacugaaacaagauacgua

SEQ ID NO: 1559919 - RNA, 19 nt, Homo sapiens
  misc_RNA (1)...(19): siRNA sense strand
uaugaagguuauagaacga

SEQ ID NO: 1559920 - RNA, 19 nt, Homo sapiens
  misc_RNA (1)...(19): siRNA sense strand
aagaugaugaugaugauga

SEQ ID NO: 1559921 - RNA, 19 nt, Homo sapiens
  misc_RNA (1)...(19): siRNA sense strand
ugaaacaagauacguaugg

SEQ ID NO: 1559922 - RNA, 19 nt, Homo sapiens
  misc_RNA (1)...(19): siRNA sense strand
ugagaaagcacuggagcaa

SEQ ID NO: 1559923 - RNA, 19 nt, Homo sapiens
  misc_RNA (1)...(19): siRNA sense strand
cugcucagcuggacaaugc

SEQ ID NO: 1559924 - RNA, 19 nt, Homo sapiens
  misc_RNA (1)...(19): siRNA sense strand
cuacuuguauaugaagguu

SEQ ID NO: 1559925 - RNA, 19 nt, Homo sapiens
  misc_RNA (1)...(19): siRNA sense strand
aaauaagaaccaagacuca

SEQ ID NO: 1559926 - RNA, 19 nt, Homo sapiens
  misc_RNA (1)...(19): siRNA sense strand
gacagugcuacuuguauau

SEQ ID NO: 1559927 - RNA, 19 nt, Homo sapiens
  misc_RNA (1)...(19): siRNA sense strand
augaagaucaggaugguaa

SEQ ID NO: 1559928 - RNA, 19 nt, Homo sapiens
  misc_RNA (1)...(19): siRNA sense strand
ugacauaagugauuuugag

SEQ ID NO: 1559929 - RNA, 19 nt, Homo sapiens
  misc_RNA (1)...(19): siRNA sense strand
aagaucacccaauaccuaa

SEQ ID NO: 1559930 - RNA, 19 nt, Homo sapiens
  misc_RNA (1)...(19): siRNA sense strand
guaagcagagauucaccaa

SEQ ID NO: 1559931 - RNA, 19 nt, Homo sapiens
  misc_RNA (1)...(19): siRNA sense strand
ggaaaaggcauuaauagcu

SEQ ID NO: 1559932 - RNA, 19 nt, Homo sapiens
  misc_RNA (1)...(19): siRNA sense strand
gaagauggugagguagaug

SEQ ID NO: 1559933 - RNA, 19 nt, Homo sapiens
  misc_RNA (1)...(19): siRNA sense strand
gaaaagaagagaggaaaag

SEQ ID NO: 1559934 - RNA, 19 nt, Homo sapiens
  misc_RNA (1)...(19): siRNA sense strand
acgagccuauguggaaaua

SEQ ID NO: 1559935 - RNA, 19 nt, Homo sapiens
  misc_RNA (1)...(19): siRNA sense strand
agaugagagugacauaagu

SEQ ID NO: 1559936 - RNA, 19 nt, Homo sapiens
  misc_RNA (1)...(19): siRNA sense strand
ccuggcaaauagucaguau

SEQ ID NO: 1559937 - RNA, 19 nt, Homo sapiens
  misc_RNA (1)...(19): siRNA sense strand
aauacgagcaggagacaga

SEQ ID NO: 1559938 - RNA, 19 nt, Homo sapiens
  misc_RNA (1)...(19): siRNA sense strand
aaaacgagccuauguggaa

SEQ ID NO: 1559939 - RNA, 19 nt, Homo sapiens
  misc_RNA (1)...(19): siRNA sense strand
uugaggauauggauaaacu

SEQ ID NO: 1559940 - RNA, 19 nt, Homo sapiens
  misc_RNA (1)...(19): siRNA sense strand
uagaugagagugacauaag

SEQ ID NO: 1559941 - RNA, 19 nt, Homo sapiens
  misc_RNA (1)...(19): siRNA sense strand
ugccagcagugaugaagau

SEQ ID NO: 1559942 - RNA, 19 nt, Homo sapiens
  misc_RNA (1)...(19): siRNA sense strand
aaaugaauauagccugacu

SEQ ID NO: 1559943 - RNA, 19 nt, Homo sapiens
  misc_RNA (1)...(19): siRNA sense strand
gagaaaggacagugcuacu

SEQ ID NO: 1559944 - RNA, 19 nt, Homo sapiens
  misc_RNA (1)...(19): siRNA sense strand
gaaacacaaaggcaaaaug

SEQ ID NO: 1559945 - RNA, 19 nt, Homo sapiens
  misc_RNA (1)...(19): siRNA sense strand
gaugaagaucaggauggua

SEQ ID NO: 1559946 - RNA, 19 nt, Homo sapiens
  misc_RNA (1)...(19): siRNA sense strand
gaggaaaaggcauuaauag

SEQ ID NO: 1559947 - RNA, 19 nt, Homo sapiens
  misc_RNA (1)...(19): siRNA sense strand
gagaaaagaagagaggaaa

SEQ ID NO: 1559948 - RNA, 19 nt, Homo sapiens
  misc_RNA (1)...(19): siRNA sense strand
cuuguuccuuugaguaaga

SEQ ID NO: 1559949 - RNA, 19 nt, Homo sapiens
  misc_RNA (1)...(19): siRNA sense strand
ugggaacggguccggcuua

SEQ ID NO: 1559950 - RNA, 19 nt, Homo sapiens
  misc_RNA (1)...(19): siRNA sense strand
agaaaggacagugcuacuu

SEQ ID NO: 1559951 - RNA, 19 nt, Homo sapiens
  misc_RNA (1)...(19): siRNA sense strand
aguaugccacuauuaaaga

SEQ ID NO: 1559952 - RNA, 19 nt, Homo sapiens
  misc_RNA (1)...(19): siRNA sense strand
gguggagcguagggagaaa

SEQ ID NO: 1559953 - RNA, 19 nt, Homo sapiens
  misc_RNA (1)...(19): siRNA sense strand
uuauagaacgagcggcuuu

SEQ ID NO: 1559954 - RNA, 19 nt, Homo sapiens
  misc_RNA (1)...(19): siRNA sense strand
auaagaaccaagacucaga

SEQ ID NO: 1559955 - RNA, 19 nt, Homo sapiens
  misc_RNA (1)...(19): siRNA sense strand
cacuggagcaaauagauga

SEQ ID NO: 1559956 - RNA, 19 nt, Homo sapiens
  misc_RNA (1)...(19): siRNA sense strand
gacagagcccguggccaaa

SEQ ID NO: 1559957 - RNA, 19 nt, Homo sapiens
  misc_RNA (1)...(19): siRNA sense strand
caguaugccacuauuaaag

SEQ ID NO: 1559958 - RNA, 19 nt, Homo sapiens
  misc_RNA (1)...(19): siRNA sense strand
auacguauggcgacaucua

SEQ ID NO: 1559959 - RNA, 19 nt, Homo sapiens
  misc_RNA (1)...(19): siRNA sense strand
agucaguaugccacuauua

SEQ ID NO: 1559960 - RNA, 19 nt, Homo sapiens
  misc_RNA (1)...(19): siRNA sense strand
aaauguaagcagagauuca

SEQ ID NO: 1559961 - RNA, 19 nt, Homo sapiens
  misc_RNA (1)...(19): siRNA sense strand
ccguuucauucgacacaaa

SEQ ID NO: 1559962 - RNA, 19 nt, Homo sapiens
  misc_RNA (1)...(19): siRNA sense strand
agaugaugaugaugaugau

SEQ ID NO: 1559963 - RNA, 19 nt, Homo sapiens
  misc_RNA (1)...(19): siRNA sense strand
cauaagugauuuugaggau

SEQ ID NO: 1559964 - RNA, 19 nt, Homo sapiens
  misc_RNA (1)...(19): siRNA sense strand
acuaggaaacaagcaauuu

SEQ ID NO: 1559965 - RNA, 19 nt, Homo sapiens
  misc_RNA (1)...(19): siRNA sense strand
ggaaaucucuucagcagaa

SEQ ID NO: 1559966 - RNA, 19 nt, Homo sapiens
  misc_RNA (1)...(19): siRNA sense strand
ucacagaacugcuuuacaa

SEQ ID NO: 1559967 - RNA, 19 nt, Homo sapiens
  misc_RNA (1)...(19): siRNA sense strand
gaaaccagaaugaauguua

SEQ ID NO: 1559968 - RNA, 19 nt, Homo sapiens
  misc_RNA (1)...(19): siRNA sense strand
ugacagaacuggaaauuca

SEQ ID NO: 1559969 - RNA, 19 nt, Homo sapiens
  misc_RNA (1)...(19): siRNA sense strand
cagagaaagugcccaguua

SEQ ID NO: 1559970 - RNA, 19 nt, Homo sapiens
  misc_RNA (1)...(19): siRNA sense strand
gcacaacgacuaaagauau

SEQ ID NO: 1559971 - RNA, 19 nt, Homo sapiens
  misc_RNA (1)...(19): siRNA sense strand
gaagaaacguaaccaucaa

SEQ ID NO: 1559972 - RNA, 19 nt, Homo sapiens
  misc_RNA (1)...(19): siRNA sense strand
aaagauauccucucuauga

SEQ ID NO: 1559973 - RNA, 19 nt, Homo sapiens
  misc_RNA (1)...(19): siRNA sense strand
cuaaagauauccucucuau

SEQ ID NO: 1559974 - RNA, 19 nt, Homo sapiens
  misc_RNA (1)...(19): siRNA sense strand
agaaguaacucgacuauag

SEQ ID NO: 1559975 - RNA, 19 nt, Homo sapiens
  misc_RNA (1)...(19): siRNA sense strand
ggaaaagacugacuuguau

SEQ ID NO: 1559976 - RNA, 19 nt, Homo sapiens
  misc_RNA (1)...(19): siRNA sense strand
guaaagaaaucacagaacu

SEQ ID NO: 1559977 - RNA, 19 nt, Homo sapiens
  misc_RNA (1)...(19): siRNA sense strand
ccucagugcuaccaaguua

SEQ ID NO: 1559978 - RNA, 19 nt, Homo sapiens
  misc_RNA (1)...(19): siRNA sense strand
caacaauauuuacggcuuu

SEQ ID NO: 1559979 - RNA, 19 nt, Homo sapiens
  misc_RNA (1)...(19): siRNA sense strand
gaacugcuuuacaaacuca

SEQ ID NO: 1559980 - RNA, 19 nt, Homo sapiens
  misc_RNA (1)...(19): siRNA sense strand
guacacacuucacaccaaa

SEQ ID NO: 1559981 - RNA, 19 nt, Homo sapiens
  misc_RNA (1)...(19): siRNA sense strand
gaagaaguaacucgacuau

SEQ ID NO: 1559982 - RNA, 19 nt, Homo sapiens
  misc_RNA (1)...(19): siRNA sense strand
gauauccucucuaugaaag

SEQ ID NO: 1559983 - RNA, 19 nt, Homo sapiens
  misc_RNA (1)...(19): siRNA sense strand
aagaagacaucaaggcauu

SEQ ID NO: 1559984 - RNA, 19 nt, Homo sapiens
  misc_RNA (1)...(19): siRNA sense strand
gaagacaucaaggcauuaa

SEQ ID NO: 1559985 - RNA, 19 nt, Homo sapiens
  misc_RNA (1)...(19): siRNA sense strand
gacaaacaaugcacaacga

SEQ ID NO: 1559986 - RNA, 19 nt, Homo sapiens
  misc_RNA (1)...(19): siRNA sense strand
guacauggaucaagcuaac

SEQ ID NO: 1559987 - RNA, 19 nt, Homo sapiens
  misc_RNA (1)...(19): siRNA sense strand
uaaagaagaaggugacaga

SEQ ID NO: 1559988 - RNA, 19 nt, Homo sapiens
  misc_RNA (1)...(19): siRNA sense strand
gaaaucacagaacugcuuu

SEQ ID NO: 1559989 - RNA, 19 nt, Homo sapiens
  misc_RNA (1)...(19): siRNA sense strand
gaaggugacagaacuggaa

SEQ ID NO: 1559990 - RNA, 19 nt, Homo sapiens
  misc_RNA (1)...(19): siRNA sense strand
gauacauugucuagagauu

SEQ ID NO: 1559991 - RNA, 19 nt, Homo sapiens
  misc_RNA (1)...(19): siRNA sense strand
aagacugacuuguaucaaa

SEQ ID NO: 1559992 - RNA, 19 nt, Homo sapiens
  misc_RNA (1)...(19): siRNA sense strand
cuaccaaguuagaagaauu

SEQ ID NO: 1559993 - RNA, 19 nt, Homo sapiens
  misc_RNA (1)...(19): siRNA sense strand
ccacugaccaucuugagaa

SEQ ID NO: 1559994 - RNA, 19 nt, Homo sapiens
  misc_RNA (1)...(19): siRNA sense strand
gaagacaaacaaugcacaa

SEQ ID NO: 1559995 - RNA, 19 nt, Homo sapiens
  misc_RNA (1)...(19): siRNA sense strand
cuucaaaucucuccaaggu

SEQ ID NO: 1559996 - RNA, 19 nt, Homo sapiens
  misc_RNA (1)...(19): siRNA sense strand
caaguuagaagaauucauc

SEQ ID NO: 1559997 - RNA, 19 nt, Homo sapiens
  misc_RNA (1)...(19): siRNA sense strand
aaacaaugcacaacgacua

SEQ ID NO: 1559998 - RNA, 19 nt, Homo sapiens
  misc_RNA (1)...(19): siRNA sense strand
ccagaaugaauguuaauga

SEQ ID NO: 1559999 - RNA, 19 nt, Homo sapiens
  misc_RNA (1)...(19): siRNA sense strand
ugaagaaacguaaccauca

SEQ ID NO: 1560000 - RNA, 19 nt, Homo sapiens
  misc_RNA (1)...(19): siRNA sense strand
guagugcuccaagauguua

SEQ ID NO: 1560001 - RNA, 19 nt, Homo sapiens
  misc_RNA (1)...(19): siRNA sense strand
ccagagauacuguccauuc

SEQ ID NO: 1560002 - RNA, 19 nt, Homo sapiens
  misc_RNA (1)...(19): siRNA sense strand
aaaugaaucuuccaguagu

SEQ ID NO: 1560003 - RNA, 19 nt, Homo sapiens
  misc_RNA (1)...(19): siRNA sense strand
cagagauacuguccauuca

SEQ ID NO: 1560004 - RNA, 19 nt, Homo sapiens
  misc_RNA (1)...(19): siRNA sense strand
uaccacaaauguaagauuc

SEQ ID NO: 1560005 - RNA, 19 nt, Homo sapiens
  misc_RNA (1)...(19): siRNA sense strand
agaagaaggugacagaacu

SEQ ID NO: 1560006 - RNA, 19 nt, Homo sapiens
  misc_RNA (1)...(19): siRNA sense strand
ucaaggcauuaaagaagaa

SEQ ID NO: 1560007 - RNA, 19 nt, Homo sapiens
  misc_RNA (1)...(19): siRNA sense strand
gauguggacuucaaaucuc

SEQ ID NO: 1560008 - RNA, 19 nt, Homo sapiens
  misc_RNA (1)...(19): siRNA sense strand
cagaacugcuuuacaaacu

SEQ ID NO: 1560009 - RNA, 19 nt, Homo sapiens
  misc_RNA (1)...(19): siRNA sense strand
gagauacuguccauucacu

SEQ ID NO: 1560010 - RNA, 19 nt, Homo sapiens
  misc_RNA (1)...(19): siRNA sense strand
cuacagacauggaaaucuc

SEQ ID NO: 1560011 - RNA, 19 nt, Homo sapiens
  misc_RNA (1)...(19): siRNA sense strand
gacuaaagauauccucucu

SEQ ID NO: 1560012 - RNA, 19 nt, Homo sapiens
  misc_RNA (1)...(19): siRNA sense strand
gaauuccugcuccacgaua

SEQ ID NO: 1560013 - RNA, 19 nt, Homo sapiens
  misc_RNA (1)...(19): siRNA sense strand
ggagaaagggguaaagaaa

SEQ ID NO: 1560014 - RNA, 19 nt, Homo sapiens
  misc_RNA (1)...(19): siRNA sense strand
caucaaggcauuaaagaag

SEQ ID NO: 1560015 - RNA, 19 nt, Homo sapiens
  misc_RNA (1)...(19): siRNA sense strand
ggcuuuauuuguuccuuaa

SEQ ID NO: 1560016 - RNA, 19 nt, Homo sapiens
  misc_RNA (1)...(19): siRNA sense strand
caaucugucucuccaucuu

SEQ ID NO: 1560017 - RNA, 19 nt, Homo sapiens
  misc_RNA (1)...(19): siRNA sense strand
gagaaagugcccaguuauc

SEQ ID NO: 1560018 - RNA, 19 nt, Homo sapiens
  misc_RNA (1)...(19): siRNA sense strand
cagcagaaccagagaaagu

SEQ ID NO: 1560019 - RNA, 19 nt, Homo sapiens
  misc_RNA (1)...(19): siRNA sense strand
caacucugaagaacacuuu

SEQ ID NO: 1560020 - RNA, 19 nt, Homo sapiens
  misc_RNA (1)...(19): siRNA sense strand
aagauauccucucuaugaa

SEQ ID NO: 1560021 - RNA, 19 nt, Homo sapiens
  misc_RNA (1)...(19): siRNA sense strand
cggcuuuauuuguuccuua

SEQ ID NO: 1560022 - RNA, 19 nt, Homo sapiens
  misc_RNA (1)...(19): siRNA sense strand
gcaaagccaaauauuuaca

SEQ ID NO: 1560023 - RNA, 19 nt, Homo sapiens
  misc_RNA (1)...(19): siRNA sense strand
caguagugcuccaagaugu

SEQ ID NO: 1560024 - RNA, 19 nt, Homo sapiens
  misc_RNA (1)...(19): siRNA sense strand
cagcaacucugaagaacac

SEQ ID NO: 1560025 - RNA, 19 nt, Homo sapiens
  misc_RNA (1)...(19): siRNA sense strand
gaacuuuucagccaaauga

SEQ ID NO: 1560026 - RNA, 19 nt, Homo sapiens
  misc_RNA (1)...(19): siRNA sense strand
gagcuugaccacaaucugu

SEQ ID NO: 1560027 - RNA, 19 nt, Homo sapiens
  misc_RNA (1)...(19): siRNA sense strand
ggacuucaaaucucuccaa

SEQ ID NO: 1560028 - RNA, 19 nt, Homo sapiens
  misc_RNA (1)...(19): siRNA sense strand
cacgauacauugucuagag

SEQ ID NO: 1560029 - RNA, 19 nt, Homo sapiens
  misc_RNA (1)...(19): siRNA sense strand
ggucauaacccagagauac

SEQ ID NO: 1560030 - RNA, 19 nt, Homo sapiens
  misc_RNA (1)...(19): siRNA sense strand
aaaguccacugaccaucuu

SEQ ID NO: 1560031 - RNA, 19 nt, Homo sapiens
  misc_RNA (1)...(19): siRNA sense strand
gaaagugcccaguuaucca

SEQ ID NO: 1560032 - RNA, 19 nt, Homo sapiens
  misc_RNA (1)...(19): siRNA sense strand
uccaguggcuucuuucuag

SEQ ID NO: 1560033 - RNA, 19 nt, Homo sapiens
  misc_RNA (1)...(19): siRNA sense strand
gacaucaaggcauuaaaga

SEQ ID NO: 1560034 - RNA, 19 nt, Homo sapiens
  misc_RNA (1)...(19): siRNA sense strand
aggcagauguggacuucaa

SEQ ID NO: 1560035 - RNA, 19 nt, Homo sapiens
  misc_RNA (1)...(19): siRNA sense strand
ccagagaaagugcccaguu

SEQ ID NO: 1560036 - RNA, 19 nt, Homo sapiens
  misc_RNA (1)...(19): siRNA sense strand
gaagaaggugacagaacug

SEQ ID NO: 1560037 - RNA, 19 nt, Homo sapiens
  misc_RNA (1)...(19): siRNA sense strand
ggaucaagcuaacuuuugu

SEQ ID NO: 1560038 - RNA, 19 nt, Homo sapiens
  misc_RNA (1)...(19): siRNA sense strand
ggugacagaacuggaaauu

SEQ ID NO: 1560039 - RNA, 19 nt, Homo sapiens
  misc_RNA (1)...(19): siRNA sense strand
cacaacgacuaaagauauc

SEQ ID NO: 1560040 - RNA, 19 nt, Homo sapiens
  misc_RNA (1)...(19): siRNA sense strand
gcagauguggacuucaaau

SEQ ID NO: 1560041 - RNA, 19 nt, Homo sapiens
  misc_RNA (1)...(19): siRNA sense strand
caaaguccacugaccaucu

SEQ ID NO: 1560042 - RNA, 19 nt, Homo sapiens
  misc_RNA (1)...(19): siRNA sense strand
agaaaucacagaacugcuu

SEQ ID NO: 1560043 - RNA, 19 nt, Homo sapiens
  misc_RNA (1)...(19): siRNA sense strand
uauccucucuaugaaagaa

SEQ ID NO: 1560044 - RNA, 19 nt, Homo sapiens
  misc_RNA (1)...(19): siRNA sense strand
ggguaaagaaaucacagaa

SEQ ID NO: 1560045 - RNA, 19 nt, Homo sapiens
  misc_RNA (1)...(19): siRNA sense strand
gcuaccaaguuagaagaau

SEQ ID NO: 1560046 - RNA, 19 nt, Homo sapiens
  misc_RNA (1)...(19): siRNA sense strand
uaaagaaaucacagaacug

SEQ ID NO: 1560047 - RNA, 19 nt, Homo sapiens
  misc_RNA (1)...(19): siRNA sense strand
agacugacuuguaucaaaa

SEQ ID NO: 1560048 - RNA, 19 nt, Homo sapiens
  misc_RNA (1)...(19): siRNA sense strand
uaccaaaaguccaggaaaa

SEQ ID NO: 1560049 - RNA, 19 nt, Homo sapiens
  misc_RNA (1)...(19): siRNA sense strand
gcuccacgauacauugucu

SEQ ID NO: 1560050 - RNA, 19 nt, Homo sapiens
  misc_RNA (1)...(19): siRNA sense strand
uaugaaagaagacaucaag

SEQ ID NO: 1560051 - RNA, 19 nt, Homo sapiens
  misc_RNA (1)...(19): siRNA sense strand
cuaggcagauguggacuuc

SEQ ID NO: 1560052 - RNA, 19 nt, Homo sapiens
  misc_RNA (1)...(19): siRNA sense strand
uaaugaagacaaacaaugc

SEQ ID NO: 1560053 - RNA, 19 nt, Homo sapiens
  misc_RNA (1)...(19): siRNA sense strand
caccaagauucaacuggau

SEQ ID NO: 1560054 - RNA, 19 nt, Homo sapiens
  misc_RNA (1)...(19): siRNA sense strand
caagcuaacuuuuguucau

SEQ ID NO: 1560055 - RNA, 19 nt, Homo sapiens
  misc_RNA (1)...(19): siRNA sense strand
aaacguaaccaucaaaaug

SEQ ID NO: 1560056 - RNA, 19 nt, Homo sapiens
  misc_RNA (1)...(19): siRNA sense strand
cacugaccaucuugagaaa

SEQ ID NO: 1560057 - RNA, 19 nt, Homo sapiens
  misc_RNA (1)...(19): siRNA sense strand
caaccagcaacucugaaga

SEQ ID NO: 1560058 - RNA, 19 nt, Homo sapiens
  misc_RNA (1)...(19): siRNA sense strand
aaacucugaagaaacguaa

SEQ ID NO: 1560059 - RNA, 19 nt, Homo sapiens
  misc_RNA (1)...(19): siRNA sense strand
ccaagauucaacuggauau

SEQ ID NO: 1560060 - RNA, 19 nt, Homo sapiens
  misc_RNA (1)...(19): siRNA sense strand
ccaguagugcuccaagaug

SEQ ID NO: 1560061 - RNA, 19 nt, Homo sapiens
  misc_RNA (1)...(19): siRNA sense strand
caaaugaaaacucugaaga

SEQ ID NO: 1560062 - RNA, 19 nt, Homo sapiens
  misc_RNA (1)...(19): siRNA sense strand
uacauugucuagagauucu

SEQ ID NO: 1560063 - RNA, 19 nt, Homo sapiens
  misc_RNA (1)...(19): siRNA sense strand
caagaugaugauaguuaug

SEQ ID NO: 1560064 - RNA, 19 nt, Homo sapiens
  misc_RNA (1)...(19): siRNA sense strand
agacaucaaggcauuaaag

SEQ ID NO: 1560065 - RNA, 19 nt, Homo sapiens
  misc_RNA (1)...(19): siRNA sense strand
ggucguaucagccuucuuu

SEQ ID NO: 1560066 - RNA, 19 nt, Homo sapiens
  misc_RNA (1)...(19): siRNA sense strand
ggaccuagcagcacacaga

SEQ ID NO: 1560067 - RNA, 19 nt, Homo sapiens
  misc_RNA (1)...(19): siRNA sense strand
gagcaugacccacgucuac

SEQ ID NO: 1560068 - RNA, 19 nt, Homo sapiens
  misc_RNA (1)...(19): siRNA sense strand
ccacagaagacagcuuuga

SEQ ID NO: 1560069 - RNA, 19 nt, Homo sapiens
  misc_RNA (1)...(19): siRNA sense strand
gggccgugcuggaagacaa

SEQ ID NO: 1560070 - RNA, 19 nt, Homo sapiens
  misc_RNA (1)...(19): siRNA sense strand
ucaaagccuugcuggucuu

SEQ ID NO: 1560071 - RNA, 19 nt, Homo sapiens
  misc_RNA (1)...(19): siRNA sense strand
ggagggcgaccaacucaag

SEQ ID NO: 1560072 - RNA, 19 nt, Homo sapiens
  misc_RNA (1)...(19): siRNA sense strand
gaggagggcgaccaacuca

SEQ ID NO: 1560073 - RNA, 19 nt, Homo sapiens
  misc_RNA (1)...(19): siRNA sense strand
ccacaccuaccacugcaaa

SEQ ID NO: 1560074 - RNA, 19 nt, Homo sapiens
  misc_RNA (1)...(19): siRNA sense strand
cguaucagccuucuuuguc

SEQ ID NO: 1560075 - RNA, 19 nt, Homo sapiens
  misc_RNA (1)...(19): siRNA sense strand
gcaugacccacgucuacga

SEQ ID NO: 1560076 - RNA, 19 nt, Homo sapiens
  misc_RNA (1)...(19): siRNA sense strand
ccacgucuacgaggacuug

SEQ ID NO: 1560077 - RNA, 19 nt, Homo sapiens
  misc_RNA (1)...(19): siRNA sense strand
cagcgaagcgggugaccau

SEQ ID NO: 1560078 - RNA, 19 nt, Homo sapiens
  misc_RNA (1)...(19): siRNA sense strand
cgagcucgguggacuuugc

SEQ ID NO: 1560079 - RNA, 19 nt, Homo sapiens
  misc_RNA (1)...(19): siRNA sense strand
cgccacagaagacagcuuu

SEQ ID NO: 1560080 - RNA, 19 nt, Homo sapiens
  misc_RNA (1)...(19): siRNA sense strand
gagggcgaccaacucaaga

SEQ ID NO: 1560081 - RNA, 19 nt, Homo sapiens
  misc_RNA (1)...(19): siRNA sense strand
ugaggccccuggucaguaa

SEQ ID NO: 1560082 - RNA, 19 nt, Homo sapiens
  misc_RNA (1)...(19): siRNA sense strand
gcucagcgcuggaaacuuu

SEQ ID NO: 1560083 - RNA, 19 nt, Homo sapiens
  misc_RNA (1)...(19): siRNA sense strand
gagaaugacuucagcauca

SEQ ID NO: 1560084 - RNA, 19 nt, Homo sapiens
  misc_RNA (1)...(19): siRNA sense strand
caucaaccaugacugcaaa

SEQ ID NO: 1560085 - RNA, 19 nt, Homo sapiens
  misc_RNA (1)...(19): siRNA sense strand
gcuaugggcugccuuacgu

SEQ ID NO: 1560086 - RNA, 19 nt, Homo sapiens
  misc_RNA (1)...(19): siRNA sense strand
gggacgaggugacaugcuu

SEQ ID NO: 1560087 - RNA, 19 nt, Homo sapiens
  misc_RNA (1)...(19): siRNA sense strand
gaagaaugagcacugugaa

SEQ ID NO: 1560088 - RNA, 19 nt, Homo sapiens
  misc_RNA (1)...(19): siRNA sense strand
gaaggagcuuuccgaacca

SEQ ID NO: 1560089 - RNA, 19 nt, Homo sapiens
  misc_RNA (1)...(19): siRNA sense strand
cacgagaacugugcgagaa

SEQ ID NO: 1560090 - RNA, 19 nt, Homo sapiens
  misc_RNA (1)...(19): siRNA sense strand
cgagaagaaugagcacugu

SEQ ID NO: 1560091 - RNA, 19 nt, Homo sapiens
  misc_RNA (1)...(19): siRNA sense strand
agaagaaugagcacuguga

SEQ ID NO: 1560092 - RNA, 19 nt, Homo sapiens
  misc_RNA (1)...(19): siRNA sense strand
agaaugagcacugugaaug

SEQ ID NO: 1560093 - RNA, 19 nt, Homo sapiens
  misc_RNA (1)...(19): siRNA sense strand
gaaugagcacugugaaugc

SEQ ID NO: 1560094 - RNA, 19 nt, Homo sapiens
  misc_RNA (1)...(19): siRNA sense strand
gaaggugcuccgggacauu

SEQ ID NO: 1560095 - RNA, 19 nt, Homo sapiens
  misc_RNA (1)...(19): siRNA sense strand
cagagugacagcacgagaa

SEQ ID NO: 1560096 - RNA, 19 nt, Homo sapiens
  misc_RNA (1)...(19): siRNA sense strand
ggaugucggcggugaagag

SEQ ID NO: 1560097 - RNA, 19 nt, Homo sapiens
  misc_RNA (1)...(19): siRNA sense strand
ugagaggaaaggugaagga

SEQ ID NO: 1560098 - RNA, 19 nt, Homo sapiens
  misc_RNA (1)...(19): siRNA sense strand
gguuuccgcacccauaaga

SEQ ID NO: 1560099 - RNA, 19 nt, Homo sapiens
  misc_RNA (1)...(19): siRNA sense strand
ugaaggugcuccgggacau

SEQ ID NO: 1560100 - RNA, 19 nt, Homo sapiens
  misc_RNA (1)...(19): siRNA sense strand
gcagcaaggccuggacagu

SEQ ID NO: 1560101 - RNA, 19 nt, Homo sapiens
  misc_RNA (1)...(19): siRNA sense strand
gcaaugagaugguggauaa

SEQ ID NO: 1560102 - RNA, 19 nt, Homo sapiens
  misc_RNA (1)...(19): siRNA sense strand
gaacagacauugaagacuu

SEQ ID NO: 1560103 - RNA, 19 nt, Homo sapiens
  misc_RNA (1)...(19): siRNA sense strand
cagaauagcuuucaacaug

SEQ ID NO: 1560104 - RNA, 19 nt, Homo sapiens
  misc_RNA (1)...(19): siRNA sense strand
gaagggcaguuauucauga

SEQ ID NO: 1560105 - RNA, 19 nt, Homo sapiens
  misc_RNA (1)...(19): siRNA sense strand
caauagcccugaauaugua

SEQ ID NO: 1560106 - RNA, 19 nt, Homo sapiens
  misc_RNA (1)...(19): siRNA sense strand
gagaggcgauuucguuuau

SEQ ID NO: 1560107 - RNA, 19 nt, Homo sapiens
  misc_RNA (1)...(19): siRNA sense strand
gaacuugucuccagaagcu

SEQ ID NO: 1560108 - RNA, 19 nt, Homo sapiens
  misc_RNA (1)...(19): siRNA sense strand
gaggcgauuucguuuauuu

SEQ ID NO: 1560109 - RNA, 19 nt, Homo sapiens
  misc_RNA (1)...(19): siRNA sense strand
gcaauagcccugaauaugu

SEQ ID NO: 1560110 - RNA, 19 nt, Homo sapiens
  misc_RNA (1)...(19): siRNA sense strand
gaauagcuuucaacauguu

SEQ ID NO: 1560111 - RNA, 19 nt, Homo sapiens
  misc_RNA (1)...(19): siRNA sense strand
gaaugaauaccaucaguga

SEQ ID NO: 1560112 - RNA, 19 nt, Homo sapiens
  misc_RNA (1)...(19): siRNA sense strand
caucacaaguuuaguaaca

SEQ ID NO: 1560113 - RNA, 19 nt, Homo sapiens
  misc_RNA (1)...(19): siRNA sense strand
ccuagaagacuuugcaaua

SEQ ID NO: 1560114 - RNA, 19 nt, Homo sapiens
  misc_RNA (1)...(19): siRNA sense strand
ggagaggcgauuucguuua

SEQ ID NO: 1560115 - RNA, 19 nt, Homo sapiens
  misc_RNA (1)...(19): siRNA sense strand
uaaacaaccuagaagacuu

SEQ ID NO: 1560116 - RNA, 19 nt, Homo sapiens
  misc_RNA (1)...(19): siRNA sense strand
caagagauauucaggaaaa

SEQ ID NO: 1560117 - RNA, 19 nt, Homo sapiens
  misc_RNA (1)...(19): siRNA sense strand
gggauacacugagacguaa

SEQ ID NO: 1560118 - RNA, 19 nt, Homo sapiens
  misc_RNA (1)...(19): siRNA sense strand
gaaaagggcaucacauuug

SEQ ID NO: 1560119 - RNA, 19 nt, Homo sapiens
  misc_RNA (1)...(19): siRNA sense strand
ugacaucacaaguuuagua

SEQ ID NO: 1560120 - RNA, 19 nt, Homo sapiens
  misc_RNA (1)...(19): siRNA sense strand
ggauaccauucuccuacua

SEQ ID NO: 1560121 - RNA, 19 nt, Homo sapiens
  misc_RNA (1)...(19): siRNA sense strand
gaaaaugugcguuacagua

SEQ ID NO: 1560122 - RNA, 19 nt, Homo sapiens
  misc_RNA (1)...(19): siRNA sense strand
uccagaagcuauugggaua

SEQ ID NO: 1560123 - RNA, 19 nt, Homo sapiens
  misc_RNA (1)...(19): siRNA sense strand
gaaagacagacuccauaga

SEQ ID NO: 1560124 - RNA, 19 nt, Homo sapiens
  misc_RNA (1)...(19): siRNA sense strand
gaaaggcucaucgaagcua

SEQ ID NO: 1560125 - RNA, 19 nt, Homo sapiens
  misc_RNA (1)...(19): siRNA sense strand
aaaugugcguuacaguaua

SEQ ID NO: 1560126 - RNA, 19 nt, Homo sapiens
  misc_RNA (1)...(19): siRNA sense strand
gaagaagauuuugcucaua

SEQ ID NO: 1560127 - RNA, 19 nt, Homo sapiens
  misc_RNA (1)...(19): siRNA sense strand
caacauguuugacacugau

SEQ ID NO: 1560128 - RNA, 19 nt, Homo sapiens
  misc_RNA (1)...(19): siRNA sense strand
gagagaaauuaaaggagau

SEQ ID NO: 1560129 - RNA, 19 nt, Homo sapiens
  misc_RNA (1)...(19): siRNA sense strand
cuagaagacuuugcaauag

SEQ ID NO: 1560130 - RNA, 19 nt, Homo sapiens
  misc_RNA (1)...(19): siRNA sense strand
uaaaacagaugcugaggaa

SEQ ID NO: 1560131 - RNA, 19 nt, Homo sapiens
  misc_RNA (1)...(19): siRNA sense strand
uaaaggagaugaagaaaag

SEQ ID NO: 1560132 - RNA, 19 nt, Homo sapiens
  misc_RNA (1)...(19): siRNA sense strand
caacagaugagcccaaagu

SEQ ID NO: 1560133 - RNA, 19 nt, Homo sapiens
  misc_RNA (1)...(19): siRNA sense strand
cuacucaaauggaaugaau

SEQ ID NO: 1560134 - RNA, 19 nt, Homo sapiens
  misc_RNA (1)...(19): siRNA sense strand
ccaaggagacgguugcuau

SEQ ID NO: 1560135 - RNA, 19 nt, Homo sapiens
  misc_RNA (1)...(19): siRNA sense strand
ccaaacaggaauuaaauca

SEQ ID NO: 1560136 - RNA, 19 nt, Homo sapiens
  misc_RNA (1)...(19): siRNA sense strand
uaaacgugccgucuaugua

SEQ ID NO: 1560137 - RNA, 19 nt, Homo sapiens
  misc_RNA (1)...(19): siRNA sense strand
ucacaaguuuaguaacaga

SEQ ID NO: 1560138 - RNA, 19 nt, Homo sapiens
  misc_RNA (1)...(19): siRNA sense strand
gcagaacagacauugaaga

SEQ ID NO: 1560139 - RNA, 19 nt, Homo sapiens
  misc_RNA (1)...(19): siRNA sense strand
gauaaucuccaaacagaag

SEQ ID NO: 1560140 - RNA, 19 nt, Homo sapiens
  misc_RNA (1)...(19): siRNA sense strand
aacagacauugaagacuua

SEQ ID NO: 1560141 - RNA, 19 nt, Homo sapiens
  misc_RNA (1)...(19): siRNA sense strand
gaaauuaaaggagaugaag

SEQ ID NO: 1560142 - RNA, 19 nt, Homo sapiens
  misc_RNA (1)...(19): siRNA sense strand
gacaucacaaguuuaguaa

SEQ ID NO: 1560143 - RNA, 19 nt, Homo sapiens
  misc_RNA (1)...(19): siRNA sense strand
uaacagauacuacacuucu

SEQ ID NO: 1560144 - RNA, 19 nt, Homo sapiens
  misc_RNA (1)...(19): siRNA sense strand
uugaagacuuagaccuuua

SEQ ID NO: 1560145 - RNA, 19 nt, Homo sapiens
  misc_RNA (1)...(19): siRNA sense strand
gucuucaacuuuauggaua

SEQ ID NO: 1560146 - RNA, 19 nt, Homo sapiens
  misc_RNA (1)...(19): siRNA sense strand
ucgcagagcgugcugauga

SEQ ID NO: 1560147 - RNA, 19 nt, Homo sapiens
  misc_RNA (1)...(19): siRNA sense strand
aauccugccugaagaaaga

SEQ ID NO: 1560148 - RNA, 19 nt, Homo sapiens
  misc_RNA (1)...(19): siRNA sense strand
aaacaaccuagaagacuuu

SEQ ID NO: 1560149 - RNA, 19 nt, Homo sapiens
  misc_RNA (1)...(19): siRNA sense strand
gauaccauucuccuacuaa

SEQ ID NO: 1560150 - RNA, 19 nt, Homo sapiens
  misc_RNA (1)...(19): siRNA sense strand
ugaauaccaucagugaaga

SEQ ID NO: 1560151 - RNA, 19 nt, Homo sapiens
  misc_RNA (1)...(19): siRNA sense strand
agggcaagaugaauuuaaa

SEQ ID NO: 1560152 - RNA, 19 nt, Homo sapiens
  misc_RNA (1)...(19): siRNA sense strand
cgauuucguuuauuugcuu

SEQ ID NO: 1560153 - RNA, 19 nt, Homo sapiens
  misc_RNA (1)...(19): siRNA sense strand
gggagaggcgauuucguuu

SEQ ID NO: 1560154 - RNA, 19 nt, Homo sapiens
  misc_RNA (1)...(19): siRNA sense strand
acacugagacguaacacaa

SEQ ID NO: 1560155 - RNA, 19 nt, Homo sapiens
  misc_RNA (1)...(19): siRNA sense strand
agaauagcuuucaacaugu

SEQ ID NO: 1560156 - RNA, 19 nt, Homo sapiens
  misc_RNA (1)...(19): siRNA sense strand
caugcaggguucagaauag

SEQ ID NO: 1560157 - RNA, 19 nt, Homo sapiens
  misc_RNA (1)...(19): siRNA sense strand
agaauuccuuuccuacuca

SEQ ID NO: 1560158 - RNA, 19 nt, Homo sapiens
  misc_RNA (1)...(19): siRNA sense strand
uauagggcaagaugaauuu

SEQ ID NO: 1560159 - RNA, 19 nt, Homo sapiens
  misc_RNA (1)...(19): siRNA sense strand
uaccaucagugaagaagau

SEQ ID NO: 1560160 - RNA, 19 nt, Homo sapiens
  misc_RNA (1)...(19): siRNA sense strand
caaggagacgguugcuauu

SEQ ID NO: 1560161 - RNA, 19 nt, Homo sapiens
  misc_RNA (1)...(19): siRNA sense strand
uagaauuccuuuccuacuc

SEQ ID NO: 1560162 - RNA, 19 nt, Homo sapiens
  misc_RNA (1)...(19): siRNA sense strand
uucaagagauauucaggaa

SEQ ID NO: 1560163 - RNA, 19 nt, Homo sapiens
  misc_RNA (1)...(19): siRNA sense strand
gcuauuggcagaacagaca

SEQ ID NO: 1560164 - RNA, 19 nt, Homo sapiens
  misc_RNA (1)...(19): siRNA sense strand
uacaacagaugagcccaaa

SEQ ID NO: 1560165 - RNA, 19 nt, Homo sapiens
  misc_RNA (1)...(19): siRNA sense strand
auaaaacaguccagaagua

SEQ ID NO: 1560166 - RNA, 19 nt, Homo sapiens
  misc_RNA (1)...(19): siRNA sense strand
ccacaugcaggguucagaa

SEQ ID NO: 1560167 - RNA, 19 nt, Homo sapiens
  misc_RNA (1)...(19): siRNA sense strand
uggcagaacagacauugaa

SEQ ID NO: 1560168 - RNA, 19 nt, Homo sapiens
  misc_RNA (1)...(19): siRNA sense strand
gaauuccuuuccuacucaa

SEQ ID NO: 1560169 - RNA, 19 nt, Homo sapiens
  misc_RNA (1)...(19): siRNA sense strand
aaacagaugcugaggaacu

SEQ ID NO: 1560170 - RNA, 19 nt, Homo sapiens
  misc_RNA (1)...(19): siRNA sense strand
aaagacagacuccauagag

SEQ ID NO: 1560171 - RNA, 19 nt, Homo sapiens
  misc_RNA (1)...(19): siRNA sense strand
aaaagggcaucacauuuga

SEQ ID NO: 1560172 - RNA, 19 nt, Homo sapiens
  misc_RNA (1)...(19): siRNA sense strand
gaauaccaucagugaagaa

SEQ ID NO: 1560173 - RNA, 19 nt, Homo sapiens
  misc_RNA (1)...(19): siRNA sense strand
cagaagcuauugggauaca

SEQ ID NO: 1560174 - RNA, 19 nt, Homo sapiens
  misc_RNA (1)...(19): siRNA sense strand
gugcaaugcugcgucuuca

SEQ ID NO: 1560175 - RNA, 19 nt, Homo sapiens
  misc_RNA (1)...(19): siRNA sense strand
caaccuagaagacuuugca

SEQ ID NO: 1560176 - RNA, 19 nt, Homo sapiens
  misc_RNA (1)...(19): siRNA sense strand
gaaugugaagggcaguuau

SEQ ID NO: 1560177 - RNA, 19 nt, Homo sapiens
  misc_RNA (1)...(19): siRNA sense strand
caaguuuaguaacagauac

SEQ ID NO: 1560178 - RNA, 19 nt, Homo sapiens
  misc_RNA (1)...(19): siRNA sense strand
gccaagcacuguuuucaga

SEQ ID NO: 1560179 - RNA, 19 nt, Homo sapiens
  misc_RNA (1)...(19): siRNA sense strand
ugggauacacugagacgua

SEQ ID NO: 1560180 - RNA, 19 nt, Homo sapiens
  misc_RNA (1)...(19): siRNA sense strand
gcaaugcugcgucuucaac

SEQ ID NO: 1560181 - RNA, 19 nt, Homo sapiens
  misc_RNA (1)...(19): siRNA sense strand
cgggagaggcgauuucguu

SEQ ID NO: 1560182 - RNA, 19 nt, Homo sapiens
  misc_RNA (1)...(19): siRNA sense strand
aaacgugccgucuauguag

SEQ ID NO: 1560183 - RNA, 19 nt, Homo sapiens
  misc_RNA (1)...(19): siRNA sense strand
gcaagaugaauuuaaacgu

SEQ ID NO: 1560184 - RNA, 19 nt, Homo sapiens
  misc_RNA (1)...(19): siRNA sense strand
ucaaauggaaugaauacca

SEQ ID NO: 1560185 - RNA, 19 nt, Homo sapiens
  misc_RNA (1)...(19): siRNA sense strand
acagaugagcccaaaguug

SEQ ID NO: 1560186 - RNA, 19 nt, Homo sapiens
  misc_RNA (1)...(19): siRNA sense strand
caaauccugccugaagaaa

SEQ ID NO: 1560187 - RNA, 19 nt, Homo sapiens
  misc_RNA (1)...(19): siRNA sense strand
aaucaaaugcucgcagaaa

SEQ ID NO: 1560188 - RNA, 19 nt, Homo sapiens
  misc_RNA (1)...(19): siRNA sense strand
ucaaauccugccugaagaa

SEQ ID NO: 1560189 - RNA, 19 nt, Homo sapiens
  misc_RNA (1)...(19): siRNA sense strand
cuacuggacucaaauuuuc

SEQ ID NO: 1560190 - RNA, 19 nt, Homo sapiens
  misc_RNA (1)...(19): siRNA sense strand
cuauugggauacacugaga

SEQ ID NO: 1560191 - RNA, 19 nt, Homo sapiens
  misc_RNA (1)...(19): siRNA sense strand
ucaaaugcucgcagaaaca

SEQ ID NO: 1560192 - RNA, 19 nt, Homo sapiens
  misc_RNA (1)...(19): siRNA sense strand
ugaaagacagacuccauag

SEQ ID NO: 1560193 - RNA, 19 nt, Homo sapiens
  misc_RNA (1)...(19): siRNA sense strand
uguagcuacuggacucaaa

SEQ ID NO: 1560194 - RNA, 19 nt, Homo sapiens
  misc_RNA (1)...(19): siRNA sense strand
uagaagacuuugcaauagc

SEQ ID NO: 1560195 - RNA, 19 nt, Homo sapiens
  misc_RNA (1)...(19): siRNA sense strand
uaccauucuccuacuaaua

SEQ ID NO: 1560196 - RNA, 19 nt, Homo sapiens
  misc_RNA (1)...(19): siRNA sense strand
cuauagggcaagaugaauu

SEQ ID NO: 1560197 - RNA, 19 nt, Homo sapiens
  misc_RNA (1)...(19): siRNA sense strand
caguauaccugaagaaaag

SEQ ID NO: 1560198 - RNA, 19 nt, Homo sapiens
  misc_RNA (1)...(19): siRNA sense strand
guuacaguauaccugaaga

SEQ ID NO: 1560199 - RNA, 19 nt, Homo sapiens
  misc_RNA (1)...(19): siRNA sense strand
acagauacuacacuucuug

SEQ ID NO: 1560200 - RNA, 19 nt, Homo sapiens
  misc_RNA (1)...(19): siRNA sense strand
cacaagccaagcacuguuu

SEQ ID NO: 1560201 - RNA, 19 nt, Homo sapiens
  misc_RNA (1)...(19): siRNA sense strand
ggacuucccugaugugcua

SEQ ID NO: 1560202 - RNA, 19 nt, Homo sapiens
  misc_RNA (1)...(19): siRNA sense strand
gcaaggaguucaaggacuu

SEQ ID NO: 1560203 - RNA, 19 nt, Homo sapiens
  misc_RNA (1)...(19): siRNA sense strand
gaacaagaucguuauccua

SEQ ID NO: 1560204 - RNA, 19 nt, Homo sapiens
  misc_RNA (1)...(19): siRNA sense strand
caacaagaccuucgcuuuc

SEQ ID NO: 1560205 - RNA, 19 nt, Homo sapiens
  misc_RNA (1)...(19): siRNA sense strand
acaaugaccucgucuacau

SEQ ID NO: 1560206 - RNA, 19 nt, Homo sapiens
  misc_RNA (1)...(19): siRNA sense strand
gcaaccagcugaccacacu

SEQ ID NO: 1560207 - RNA, 19 nt, Homo sapiens
  misc_RNA (1)...(19): siRNA sense strand
ccaacaagaccuucgcuuu

SEQ ID NO: 1560208 - RNA, 19 nt, Homo sapiens
  misc_RNA (1)...(19): siRNA sense strand
caagaucguuauccuacug

SEQ ID NO: 1560209 - RNA, 19 nt, Homo sapiens
  misc_RNA (1)...(19): siRNA sense strand
ucaaggacuucccugaugu

SEQ ID NO: 1560210 - RNA, 19 nt, Homo sapiens
  misc_RNA (1)...(19): siRNA sense strand
caacaugaagaugauauga

SEQ ID NO: 1560211 - RNA, 19 nt, Homo sapiens
  misc_RNA (1)...(19): siRNA sense strand
acacaaagcacaacaucga

SEQ ID NO: 1560212 - RNA, 19 nt, Homo sapiens
  misc_RNA (1)...(19): siRNA sense strand
ugaccaagcuggacaucag

SEQ ID NO: 1560213 - RNA, 19 nt, Homo sapiens
  misc_RNA (1)...(19): siRNA sense strand
ccaugggcuucaucucuuu

SEQ ID NO: 1560214 - RNA, 19 nt, Homo sapiens
  misc_RNA (1)...(19): siRNA sense strand
gcuggcggcucaacuucaa

SEQ ID NO: 1560215 - RNA, 19 nt, Homo sapiens
  misc_RNA (1)...(19): siRNA sense strand
cuacuggacuacauguuuc

SEQ ID NO: 1560216 - RNA, 19 nt, Homo sapiens
  misc_RNA (1)...(19): siRNA sense strand
caacacaaagcacaacauc

SEQ ID NO: 1560217 - RNA, 19 nt, Homo sapiens
  misc_RNA (1)...(19): siRNA sense strand
ugaccacacuggaggaauc

SEQ ID NO: 1560218 - RNA, 19 nt, Homo sapiens
  misc_RNA (1)...(19): siRNA sense strand
aacaagaccuucgcuuuca

SEQ ID NO: 1560219 - RNA, 19 nt, Homo sapiens
  misc_RNA (1)...(19): siRNA sense strand
caucaagacccucaucauc

SEQ ID NO: 1560220 - RNA, 19 nt, Homo sapiens
  misc_RNA (1)...(19): siRNA sense strand
gcaaggcccagcagguguu

SEQ ID NO: 1560221 - RNA, 19 nt, Homo sapiens
  misc_RNA (1)...(19): siRNA sense strand
ucaacaaccucuucaaccu

SEQ ID NO: 1560222 - RNA, 19 nt, Homo sapiens
  misc_RNA (1)...(19): siRNA sense strand
ucaaugccauccgggacua

SEQ ID NO: 1560223 - RNA, 19 nt, Homo sapiens
  misc_RNA (1)...(19): siRNA sense strand
gacaucagcgagaacaaga

SEQ ID NO: 1560224 - RNA, 19 nt, Homo sapiens
  misc_RNA (1)...(19): siRNA sense strand
gcgagaacaagaucguuau

SEQ ID NO: 1560225 - RNA, 19 nt, Homo sapiens
  misc_RNA (1)...(19): siRNA sense strand
ccuacuggacuacauguuu

SEQ ID NO: 1560226 - RNA, 19 nt, Homo sapiens
  misc_RNA (1)...(19): siRNA sense strand
ggacaucagcgagaacaag

SEQ ID NO: 1560227 - RNA, 19 nt, Homo sapiens
  misc_RNA (1)...(19): siRNA sense strand
gcaaccgccugaagcucau

SEQ ID NO: 1560228 - RNA, 19 nt, Homo sapiens
  misc_RNA (1)...(19): siRNA sense strand
gcaagggcaacacaaagca

SEQ ID NO: 1560229 - RNA, 19 nt, Homo sapiens
  misc_RNA (1)...(19): siRNA sense strand
gccacacggugcaguuugu

SEQ ID NO: 1560230 - RNA, 19 nt, Homo sapiens
  misc_RNA (1)...(19): siRNA sense strand
ggcaagaaccgcaucaaaa

SEQ ID NO: 1560231 - RNA, 19 nt, Homo sapiens
  misc_RNA (1)...(19): siRNA sense strand
cgacaaugaccucgucuac

SEQ ID NO: 1560232 - RNA, 19 nt, Homo sapiens
  misc_RNA (1)...(19): siRNA sense strand
caaagcacaacaucgagau

SEQ ID NO: 1560233 - RNA, 19 nt, Homo sapiens
  misc_RNA (1)...(19): siRNA sense strand
uucaaggacuucccugaug

SEQ ID NO: 1560234 - RNA, 19 nt, Homo sapiens
  misc_RNA (1)...(19): siRNA sense strand
gcucaaccaggacgaguuc

SEQ ID NO: 1560235 - RNA, 19 nt, Homo sapiens
  misc_RNA (1)...(19): siRNA sense strand
caccuggucucagccaaga

SEQ ID NO: 1560236 - RNA, 19 nt, Homo sapiens
  misc_RNA (1)...(19): siRNA sense strand
uguacaaccucaagucacu

SEQ ID NO: 1560237 - RNA, 19 nt, Homo sapiens
  misc_RNA (1)...(19): siRNA sense strand
ccauugagggcuccauguu

SEQ ID NO: 1560238 - RNA, 19 nt, Homo sapiens
  misc_RNA (1)...(19): siRNA sense strand
agaacaagaucguuauccu

SEQ ID NO: 1560239 - RNA, 19 nt, Homo sapiens
  misc_RNA (1)...(19): siRNA sense strand
gcaacacaaagcacaacau

SEQ ID NO: 1560240 - RNA, 19 nt, Homo sapiens
  misc_RNA (1)...(19): siRNA sense strand
gggcaagggcaacacaaag

SEQ ID NO: 1560241 - RNA, 19 nt, Homo sapiens
  misc_RNA (1)...(19): siRNA sense strand
cgggacuacuccuucaaga

SEQ ID NO: 1560242 - RNA, 19 nt, Homo sapiens
  misc_RNA (1)...(19): siRNA sense strand
gcaagaaccgcaucaaaac

SEQ ID NO: 1560243 - RNA, 19 nt, Homo sapiens
  misc_RNA (1)...(19): siRNA sense strand
ugacgucccuguccaucac

SEQ ID NO: 1560244 - RNA, 19 nt, Homo sapiens
  misc_RNA (1)...(19): siRNA sense strand
guucaaggacuucccugau

SEQ ID NO: 1560245 - RNA, 19 nt, Homo sapiens
  misc_RNA (1)...(19): siRNA sense strand
gacaaugaccucgucuaca

SEQ ID NO: 1560246 - RNA, 19 nt, Homo sapiens
  misc_RNA (1)...(19): siRNA sense strand
gacaucaagacccucauca

SEQ ID NO: 1560247 - RNA, 19 nt, Homo sapiens
  misc_RNA (1)...(19): siRNA sense strand
gcucacagucuucccugau

SEQ ID NO: 1560248 - RNA, 19 nt, Homo sapiens
  misc_RNA (1)...(19): siRNA sense strand
gcuacugcccaacuacuuc

SEQ ID NO: 1560249 - RNA, 19 nt, Homo sapiens
  misc_RNA (1)...(19): siRNA sense strand
cauugagggcuccauguug

SEQ ID NO: 1560250 - RNA, 19 nt, Homo sapiens
  misc_RNA (1)...(19): siRNA sense strand
caucacacacugcaaucug

SEQ ID NO: 1560251 - RNA, 19 nt, Homo sapiens
  misc_RNA (1)...(19): siRNA sense strand
aggcaagaaccgcaucaaa

SEQ ID NO: 1560252 - RNA, 19 nt, Homo sapiens
  misc_RNA (1)...(19): siRNA sense strand
accaugggcuucaucucuu

SEQ ID NO: 1560253 - RNA, 19 nt, Homo sapiens
  misc_RNA (1)...(19): siRNA sense strand
agcugacgcuggagaaaug

SEQ ID NO: 1560254 - RNA, 19 nt, Homo sapiens
  misc_RNA (1)...(19): siRNA sense strand
agacaaagcugaggacuaa

SEQ ID NO: 1560255 - RNA, 19 nt, Homo sapiens
  misc_RNA (1)...(19): siRNA sense strand
cgacagcgaugaggaaauu

SEQ ID NO: 1560256 - RNA, 19 nt, Homo sapiens
  misc_RNA (1)...(19): siRNA sense strand
ggacuaaggauaaagaaga

SEQ ID NO: 1560257 - RNA, 19 nt, Homo sapiens
  misc_RNA (1)...(19): siRNA sense strand
cggaguggcugacaucauu

SEQ ID NO: 1560258 - RNA, 19 nt, Homo sapiens
  misc_RNA (1)...(19): siRNA sense strand
aggcagagcuggcagauuc

SEQ ID NO: 1560259 - RNA, 19 nt, Homo sapiens
  misc_RNA (1)...(19): siRNA sense strand
gaucuccguuccugucuga

SEQ ID NO: 1560260 - RNA, 19 nt, Homo sapiens
  misc_RNA (1)...(19): siRNA sense strand
ggauaaagaagagaagaaa

SEQ ID NO: 1560261 - RNA, 19 nt, Homo sapiens
  misc_RNA (1)...(19): siRNA sense strand
gaaguuaagugaggugaac

SEQ ID NO: 1560262 - RNA, 19 nt, Homo sapiens
  misc_RNA (1)...(19): siRNA sense strand
gaacaagcgccuccaggau

SEQ ID NO: 1560263 - RNA, 19 nt, Homo sapiens
  misc_RNA (1)...(19): siRNA sense strand
ccacagagacgucccaaca

SEQ ID NO: 1560264 - RNA, 19 nt, Homo sapiens
  misc_RNA (1)...(19): siRNA sense strand
gcugaggacuaaggauaaa

SEQ ID NO: 1560265 - RNA, 19 nt, Homo sapiens
  misc_RNA (1)...(19): siRNA sense strand
gauaacagcaacagugaca

SEQ ID NO: 1560266 - RNA, 19 nt, Homo sapiens
  misc_RNA (1)...(19): siRNA sense strand
caucauugacuguguggua

SEQ ID NO: 1560267 - RNA, 19 nt, Homo sapiens
  misc_RNA (1)...(19): siRNA sense strand
gggauaacagcaacaguga

SEQ ID NO: 1560268 - RNA, 19 nt, Homo sapiens
  misc_RNA (1)...(19): siRNA sense strand
gcaggauccuuuugcuuuu

SEQ ID NO: 1560269 - RNA, 19 nt, Homo sapiens
  misc_RNA (1)...(19): siRNA sense strand
aaaagcagccuucgccuua

SEQ ID NO: 1560270 - RNA, 19 nt, Homo sapiens
  misc_RNA (1)...(19): siRNA sense strand
cguagugucuguggacuug

SEQ ID NO: 1560271 - RNA, 19 nt, Homo sapiens
  misc_RNA (1)...(19): siRNA sense strand
ccacauggccacccaccuu

SEQ ID NO: 1560272 - RNA, 19 nt, Homo sapiens
  misc_RNA (1)...(19): siRNA sense strand
aagcugaggacuaaggaua

SEQ ID NO: 1560273 - RNA, 19 nt, Homo sapiens
  misc_RNA (1)...(19): siRNA sense strand
cagcugaccugggcaugga

SEQ ID NO: 1560274 - RNA, 19 nt, Homo sapiens
  misc_RNA (1)...(19): siRNA sense strand
gacuaaggauaaagaagag

SEQ ID NO: 1560275 - RNA, 19 nt, Homo sapiens
  misc_RNA (1)...(19): siRNA sense strand
acagagcuaucaccuacug

SEQ ID NO: 1560276 - RNA, 19 nt, Homo sapiens
  misc_RNA (1)...(19): siRNA sense strand
gagacagagcuaucaccua

SEQ ID NO: 1560277 - RNA, 19 nt, Homo sapiens
  misc_RNA (1)...(19): siRNA sense strand
gcaacagggccaagaggau

SEQ ID NO: 1560278 - RNA, 19 nt, Homo sapiens
  misc_RNA (1)...(19): siRNA sense strand
ugaucuaucccuccugaaa

SEQ ID NO: 1560279 - RNA, 19 nt, Homo sapiens
  misc_RNA (1)...(19): siRNA sense strand
cuggacaacucuccucugu

SEQ ID NO: 1560280 - RNA, 19 nt, Homo sapiens
  misc_RNA (1)...(19): siRNA sense strand
gggccaagaggaugaagug

SEQ ID NO: 1560281 - RNA, 19 nt, Homo sapiens
  misc_RNA (1)...(19): siRNA sense strand
cuaaggauaaagaagagaa

SEQ ID NO: 1560282 - RNA, 19 nt, Homo sapiens
  misc_RNA (1)...(19): siRNA sense strand
cauugacugugugguacua

SEQ ID NO: 1560283 - RNA, 19 nt, Homo sapiens
  misc_RNA (1)...(19): siRNA sense strand
aaagcagccuucgccuuau

SEQ ID NO: 1560284 - RNA, 19 nt, Homo sapiens
  misc_RNA (1)...(19): siRNA sense strand
acaagcgccuccaggaucu

SEQ ID NO: 1560285 - RNA, 19 nt, Homo sapiens
  misc_RNA (1)...(19): siRNA sense strand
ugaggacuaaggauaaaga

SEQ ID NO: 1560286 - RNA, 19 nt, Homo sapiens
  misc_RNA (1)...(19): siRNA sense strand
caaagcugaggacuaagga

SEQ ID NO: 1560287 - RNA, 19 nt, Homo sapiens
  misc_RNA (1)...(19): siRNA sense strand
aagcucuccuucuucuuug

SEQ ID NO: 1560288 - RNA, 19 nt, Homo sapiens
  misc_RNA (1)...(19): siRNA sense strand
gaggacuaaggauaaagaa

SEQ ID NO: 1560289 - RNA, 19 nt, Homo sapiens
  misc_RNA (1)...(19): siRNA sense strand
gaucuaucccuccugaaac

SEQ ID NO: 1560290 - RNA, 19 nt, Homo sapiens
  misc_RNA (1)...(19): siRNA sense strand
caagccaccucagggucaa

SEQ ID NO: 1560291 - RNA, 19 nt, Homo sapiens
  misc_RNA (1)...(19): siRNA sense strand
cucgggcacucaagaaguu

SEQ ID NO: 1560292 - RNA, 19 nt, Homo sapiens
  misc_RNA (1)...(19): siRNA sense strand
gaguggcugacaucauuga

SEQ ID NO: 1560293 - RNA, 19 nt, Homo sapiens
  misc_RNA (1)...(19): siRNA sense strand
aagcagccuucgccuuauc

SEQ ID NO: 1560294 - RNA, 19 nt, Homo sapiens
  misc_RNA (1)...(19): siRNA sense strand
ggaguggcugacaucauug

SEQ ID NO: 1560295 - RNA, 19 nt, Homo sapiens
  misc_RNA (1)...(19): siRNA sense strand
aagacaaagcugaggacua

SEQ ID NO: 1560296 - RNA, 19 nt, Homo sapiens
  misc_RNA (1)...(19): siRNA sense strand
gcucggaguggcugacauc

SEQ ID NO: 1560297 - RNA, 19 nt, Homo sapiens
  misc_RNA (1)...(19): siRNA sense strand
ggauaucucuuguaaaugu

SEQ ID NO: 1560298 - RNA, 19 nt, Homo sapiens
  misc_RNA (1)...(19): siRNA sense strand
agacaaaccuuacaaaugu

SEQ ID NO: 1560299 - RNA, 19 nt, Homo sapiens
  misc_RNA (1)...(19): siRNA sense strand
gguaaggucuucacacaaa

SEQ ID NO: 1560300 - RNA, 19 nt, Homo sapiens
  misc_RNA (1)...(19): siRNA sense strand
gguaaagccuucagucaaa

SEQ ID NO: 1560301 - RNA, 19 nt, Homo sapiens
  misc_RNA (1)...(19): siRNA sense strand
gaaagaugaugaaggaaau

SEQ ID NO: 1560302 - RNA, 19 nt, Homo sapiens
  misc_RNA (1)...(19): siRNA sense strand
ggagaagccuuacaagugu

SEQ ID NO: 1560303 - RNA, 19 nt, Homo sapiens
  misc_RNA (1)...(19): siRNA sense strand
ugagaaaccuuauaagugu

SEQ ID NO: 1560304 - RNA, 19 nt, Homo sapiens
  misc_RNA (1)...(19): siRNA sense strand
ggaaaggucuucagucaac

SEQ ID NO: 1560305 - RNA, 19 nt, Homo sapiens
  misc_RNA (1)...(19): siRNA sense strand
ugagaaaccuuacaagugu

SEQ ID NO: 1560306 - RNA, 19 nt, Homo sapiens
  misc_RNA (1)...(19): siRNA sense strand
ggaaacaggcauauugaaa

SEQ ID NO: 1560307 - RNA, 19 nt, Homo sapiens
  misc_RNA (1)...(19): siRNA sense strand
ggcaaggucuuuacucaaa

SEQ ID NO: 1560308 - RNA, 19 nt, Homo sapiens
  misc_RNA (1)...(19): siRNA sense strand
gcaggaaacaggcauauug

SEQ ID NO: 1560309 - RNA, 19 nt, Homo sapiens
  misc_RNA (1)...(19): siRNA sense strand
gggaaagccuucaguguuc

SEQ ID NO: 1560310 - RNA, 19 nt, Homo sapiens
  misc_RNA (1)...(19): siRNA sense strand
ggcaaggucuucacucaaa

SEQ ID NO: 1560311 - RNA, 19 nt, Homo sapiens
  misc_RNA (1)...(19): siRNA sense strand
caguaugcauucaaacuua

SEQ ID NO: 1560312 - RNA, 19 nt, Homo sapiens
  misc_RNA (1)...(19): siRNA sense strand
ggcaaggucuucagucaaa

SEQ ID NO: 1560313 - RNA, 19 nt, Homo sapiens
  misc_RNA (1)...(19): siRNA sense strand
ggaaagaugaugaaggaaa

SEQ ID NO: 1560314 - RNA, 19 nt, Homo sapiens
  misc_RNA (1)...(19): siRNA sense strand
gcuaacaagucauaagaga

SEQ ID NO: 1560315 - RNA, 19 nt, Homo sapiens
  misc_RNA (1)...(19): siRNA sense strand
agagaaaccuuacaagugu

SEQ ID NO: 1560316 - RNA, 19 nt, Homo sapiens
  misc_RNA (1)...(19): siRNA sense strand
agagaaaccuuacaagugu

SEQ ID NO: 1560317 - RNA, 19 nt, Homo sapiens
  misc_RNA (1)...(19): siRNA sense strand
gagagaaaccuuacaagug

SEQ ID NO: 1560318 - RNA, 19 nt, Homo sapiens
  misc_RNA (1)...(19): siRNA sense strand
gagagaaaccuuacaagug

SEQ ID NO: 1560319 - RNA, 19 nt, Homo sapiens
  misc_RNA (1)...(19): siRNA sense strand
guggaaagaugaugaagga

SEQ ID NO: 1560320 - RNA, 19 nt, Homo sapiens
  misc_RNA (1)...(19): siRNA sense strand
gagacaaaccuuacaaaug

SEQ ID NO: 1560321 - RNA, 19 nt, Homo sapiens
  misc_RNA (1)...(19): siRNA sense strand
uagaagagcucaacgugau

SEQ ID NO: 1560322 - RNA, 19 nt, Homo sapiens
  misc_RNA (1)...(19): siRNA sense strand
gagaaaccuuauaagugua

SEQ ID NO: 1560323 - RNA, 19 nt, Homo sapiens
  misc_RNA (1)...(19): siRNA sense strand
gcaaaucaucgaagaauuc

SEQ ID NO: 1560324 - RNA, 19 nt, Homo sapiens
  misc_RNA (1)...(19): siRNA sense strand
guacagggacgucauguug

SEQ ID NO: 1560325 - RNA, 19 nt, Homo sapiens
  misc_RNA (1)...(19): siRNA sense strand
gagaaaagccuuacaaaug

SEQ ID NO: 1560326 - RNA, 19 nt, Homo sapiens
  misc_RNA (1)...(19): siRNA sense strand
gaagaacaauaugggagaa

SEQ ID NO: 1560327 - RNA, 19 nt, Homo sapiens
  misc_RNA (1)...(19): siRNA sense strand
gggagaagccuuacaagug

SEQ ID NO: 1560328 - RNA, 19 nt, Homo sapiens
  misc_RNA (1)...(19): siRNA sense strand
guggaaaggucuucaguca

SEQ ID NO: 1560329 - RNA, 19 nt, Homo sapiens
  misc_RNA (1)...(19): siRNA sense strand
gaucauccauaccggagaa

SEQ ID NO: 1560330 - RNA, 19 nt, Homo sapiens
  misc_RNA (1)...(19): siRNA sense strand
cuggauaucucuuguaaau

SEQ ID NO: 1560331 - RNA, 19 nt, Homo sapiens
  misc_RNA (1)...(19): siRNA sense strand
ucaaggauguggccauaga

SEQ ID NO: 1560332 - RNA, 19 nt, Homo sapiens
  misc_RNA (1)...(19): siRNA sense strand
gacaauacauacuggacaa

SEQ ID NO: 1560333 - RNA, 19 nt, Homo sapiens
  misc_RNA (1)...(19): siRNA sense strand
gcaaggcauuggagaguuc

SEQ ID NO: 1560334 - RNA, 19 nt, Homo sapiens
  misc_RNA (1)...(19): siRNA sense strand
gggaaagccuucaguaugc

SEQ ID NO: 1560335 - RNA, 19 nt, Homo sapiens
  misc_RNA (1)...(19): siRNA sense strand
uuacaagugugaugaaugu

SEQ ID NO: 1560336 - RNA, 19 nt, Homo sapiens
  misc_RNA (1)...(19): siRNA sense strand
gcaaaucauagaagaauuc

SEQ ID NO: 1560337 - RNA, 19 nt, Homo sapiens
  misc_RNA (1)...(19): siRNA sense strand
ggucaucagagaauucaua

SEQ ID NO: 1560338 - RNA, 19 nt, Homo sapiens
  misc_RNA (1)...(19): siRNA sense strand
gaagaauucauaguggaua

SEQ ID NO: 1560339 - RNA, 19 nt, Homo sapiens
  misc_RNA (1)...(19): siRNA sense strand
aaacucacaucuugcaaau

SEQ ID NO: 1560340 - RNA, 19 nt, Homo sapiens
  misc_RNA (1)...(19): siRNA sense strand
agucaaacaucacaacuug

SEQ ID NO: 1560341 - RNA, 19 nt, Homo sapiens
  misc_RNA (1)...(19): siRNA sense strand
ggagagaaaccuuacaagu

SEQ ID NO: 1560342 - RNA, 19 nt, Homo sapiens
  misc_RNA (1)...(19): siRNA sense strand
acucacaucuugcaaauca

SEQ ID NO: 1560343 - RNA, 19 nt, Homo sapiens
  misc_RNA (1)...(19): siRNA sense strand
cggcaaagcauuuagugua

SEQ ID NO: 1560344 - RNA, 19 nt, Homo sapiens
  misc_RNA (1)...(19): siRNA sense strand
ggagagaaaccuuacaagu

SEQ ID NO: 1560345 - RNA, 19 nt, Homo sapiens
  misc_RNA (1)...(19): siRNA sense strand
gagaagccuuaccagugua

SEQ ID NO: 1560346 - RNA, 19 nt, Homo sapiens
  misc_RNA (1)...(19): siRNA sense strand
ggagacaaaccuuacaaau

SEQ ID NO: 1560347 - RNA, 19 nt, Homo sapiens
  misc_RNA (1)...(19): siRNA sense strand
gcaaagcaucggcgaauuc

SEQ ID NO: 1560348 - RNA, 19 nt, Homo sapiens
  misc_RNA (1)...(19): siRNA sense strand
gcgguaaggucuucacaca

SEQ ID NO: 1560349 - RNA, 19 nt, Homo sapiens
  misc_RNA (1)...(19): siRNA sense strand
gcaagucaucgaagaauuc

SEQ ID NO: 1560350 - RNA, 19 nt, Homo sapiens
  misc_RNA (1)...(19): siRNA sense strand
agagaagccuuaccagugu

SEQ ID NO: 1560351 - RNA, 19 nt, Homo sapiens
  misc_RNA (1)...(19): siRNA sense strand
aagcaucggcgaauucaua

SEQ ID NO: 1560352 - RNA, 19 nt, Homo sapiens
  misc_RNA (1)...(19): siRNA sense strand
ggauguggccauagaauuc

SEQ ID NO: 1560353 - RNA, 19 nt, Homo sapiens
  misc_RNA (1)...(19): siRNA sense strand
gugagaaaccuuauaagug

SEQ ID NO: 1560354 - RNA, 19 nt, Homo sapiens
  misc_RNA (1)...(19): siRNA sense strand
uaacuaagcaucagaucau

SEQ ID NO: 1560355 - RNA, 19 nt, Homo sapiens
  misc_RNA (1)...(19): siRNA sense strand
ucccugaacugcagcaauu

SEQ ID NO: 1560356 - RNA, 19 nt, Homo sapiens
  misc_RNA (1)...(19): siRNA sense strand
uagaagggcugcaggaaac

SEQ ID NO: 1560357 - RNA, 19 nt, Homo sapiens
  misc_RNA (1)...(19): siRNA sense strand
ucacaucuugcaaaucaua

SEQ ID NO: 1560358 - RNA, 19 nt, Homo sapiens
  misc_RNA (1)...(19): siRNA sense strand
gcaaagcauuuaguguaca

SEQ ID NO: 1560359 - RNA, 19 nt, Homo sapiens
  misc_RNA (1)...(19): siRNA sense strand
gugagaaaccuuacaagug

SEQ ID NO: 1560360 - RNA, 19 nt, Homo sapiens
  misc_RNA (1)...(19): siRNA sense strand
cauaagagaauucauacug

SEQ ID NO: 1560361 - RNA, 19 nt, Homo sapiens
  misc_RNA (1)...(19): siRNA sense strand
gaaacaggcauauugaaaa

SEQ ID NO: 1560362 - RNA, 19 nt, Homo sapiens
  misc_RNA (1)...(19): siRNA sense strand
uuacaggugugaugagugu

SEQ ID NO: 1560363 - RNA, 19 nt, Homo sapiens
  misc_RNA (1)...(19): siRNA sense strand
ggugagaaaccuuauaagu

SEQ ID NO: 1560364 - RNA, 19 nt, Homo sapiens
  misc_RNA (1)...(19): siRNA sense strand
gaaaaucucccugguagaa

SEQ ID NO: 1560365 - RNA, 19 nt, Homo sapiens
  misc_RNA (1)...(19): siRNA sense strand
ggucuucagucaaccuuca

SEQ ID NO: 1560366 - RNA, 19 nt, Homo sapiens
  misc_RNA (1)...(19): siRNA sense strand
guucaaaccuaacaaucca

SEQ ID NO: 1560367 - RNA, 19 nt, Homo sapiens
  misc_RNA (1)...(19): siRNA sense strand
gaaaaucagcuuggaguaa

SEQ ID NO: 1560368 - RNA, 19 nt, Homo sapiens
  misc_RNA (1)...(19): siRNA sense strand
uaguguacauucaaaccua

SEQ ID NO: 1560369 - RNA, 19 nt, Homo sapiens
  misc_RNA (1)...(19): siRNA sense strand
ggcaaagcauuuaguguac

SEQ ID NO: 1560370 - RNA, 19 nt, Homo sapiens
  misc_RNA (1)...(19): siRNA sense strand
agaaaagccuuacaaaugu

SEQ ID NO: 1560371 - RNA, 19 nt, Homo sapiens
  misc_RNA (1)...(19): siRNA sense strand
caucagagaauucauacug

SEQ ID NO: 1560372 - RNA, 19 nt, Homo sapiens
  misc_RNA (1)...(19): siRNA sense strand
gagugucaguggaaagaug

SEQ ID NO: 1560373 - RNA, 19 nt, Homo sapiens
  misc_RNA (1)...(19): siRNA sense strand
caucgaagaauucauagug

SEQ ID NO: 1560374 - RNA, 19 nt, Homo sapiens
  misc_RNA (1)...(19): siRNA sense strand
ccuuauagguguaaugagu

SEQ ID NO: 1560375 - RNA, 19 nt, Homo sapiens
  misc_RNA (1)...(19): siRNA sense strand
caaagcauuuaguguacau

SEQ ID NO: 1560376 - RNA, 19 nt, Homo sapiens
  misc_RNA (1)...(19): siRNA sense strand
gagaguucauacuggagaa

SEQ ID NO: 1560377 - RNA, 19 nt, Homo sapiens
  misc_RNA (1)...(19): siRNA sense strand
gaagucuccuaauaaucga

SEQ ID NO: 1560378 - RNA, 19 nt, Homo sapiens
  misc_RNA (1)...(19): siRNA sense strand
aaccuggucucccuggaua

SEQ ID NO: 1560379 - RNA, 19 nt, Homo sapiens
  misc_RNA (1)...(19): siRNA sense strand
guggcaaggucuuuacuca

SEQ ID NO: 1560380 - RNA, 19 nt, Homo sapiens
  misc_RNA (1)...(19): siRNA sense strand
ucacggcuaacaagucaua

SEQ ID NO: 1560381 - RNA, 19 nt, Homo sapiens
  misc_RNA (1)...(19): siRNA sense strand
ggaaagccuucaguaugca

SEQ ID NO: 1560382 - RNA, 19 nt, Homo sapiens
  misc_RNA (1)...(19): siRNA sense strand
auucauaccuugcaaagca

SEQ ID NO: 1560383 - RNA, 19 nt, Homo sapiens
  misc_RNA (1)...(19): siRNA sense strand
agucaucgaagaauucaua

SEQ ID NO: 1560384 - RNA, 19 nt, Homo sapiens
  misc_RNA (1)...(19): siRNA sense strand
cauacgacuuugaguguca

SEQ ID NO: 1560385 - RNA, 19 nt, Homo sapiens
  misc_RNA (1)...(19): siRNA sense strand
guggcaaggucuucacuca

SEQ ID NO: 1560386 - RNA, 19 nt, Homo sapiens
  misc_RNA (1)...(19): siRNA sense strand
auucguaccuugcaauuca

SEQ ID NO: 1560387 - RNA, 19 nt, Homo sapiens
  misc_RNA (1)...(19): siRNA sense strand
guggcaaggucuucaguca

SEQ ID NO: 1560388 - RNA, 19 nt, Homo sapiens
  misc_RNA (1)...(19): siRNA sense strand
caggaaacaggcauauuga

SEQ ID NO: 1560389 - RNA, 19 nt, Homo sapiens
  misc_RNA (1)...(19): siRNA sense strand
aaaucucccugguagaaga

SEQ ID NO: 1560390 - RNA, 19 nt, Homo sapiens
  misc_RNA (1)...(19): siRNA sense strand
gcauuuaguguacauucaa

SEQ ID NO: 1560391 - RNA, 19 nt, Homo sapiens
  misc_RNA (1)...(19): siRNA sense strand
gacgucauguuggagaauu

SEQ ID NO: 1560392 - RNA, 19 nt, Homo sapiens
  misc_RNA (1)...(19): siRNA sense strand
cacucaguauucacacuua

SEQ ID NO: 1560393 - RNA, 19 nt, Homo sapiens
  misc_RNA (1)...(19): siRNA sense strand
gcacaauucauaccuugca

SEQ ID NO: 1560394 - RNA, 19 nt, Homo sapiens
  misc_RNA (1)...(19): siRNA sense strand
acacaucaggucauccaua

SEQ ID NO: 1560395 - RNA, 19 nt, Homo sapiens
  misc_RNA (1)...(19): siRNA sense strand
aaaccuagcuacccaucag

SEQ ID NO: 1560396 - RNA, 19 nt, Homo sapiens
  misc_RNA (1)...(19): siRNA sense strand
acucaaaacucacaucuug

SEQ ID NO: 1560397 - RNA, 19 nt, Homo sapiens
  misc_RNA (1)...(19): siRNA sense strand
ggaaugcuauuuacacaua

SEQ ID NO: 1560398 - RNA, 19 nt, Homo sapiens
  misc_RNA (1)...(19): siRNA sense strand
ggaauugccuucauagaaa

SEQ ID NO: 1560399 - RNA, 19 nt, Homo sapiens
  misc_RNA (1)...(19): siRNA sense strand
gggaauaacuuuagaagga

SEQ ID NO: 1560400 - RNA, 19 nt, Homo sapiens
  misc_RNA (1)...(19): siRNA sense strand
gggaaacccuuuauuugua

SEQ ID NO: 1560401 - RNA, 19 nt, Homo sapiens
  misc_RNA (1)...(19): siRNA sense strand
ggagaaagccuaugaaugu

SEQ ID NO: 1560402 - RNA, 19 nt, Homo sapiens
  misc_RNA (1)...(19): siRNA sense strand
ggagagaaacccuauauuu

SEQ ID NO: 1560403 - RNA, 19 nt, Homo sapiens
  misc_RNA (1)...(19): siRNA sense strand
caacaaauaugggaaauuc

SEQ ID NO: 1560404 - RNA, 19 nt, Homo sapiens
  misc_RNA (1)...(19): siRNA sense strand
ggaagugccuuuaggaaga

SEQ ID NO: 1560405 - RNA, 19 nt, Homo sapiens
  misc_RNA (1)...(19): siRNA sense strand
gaagagcuauggacacaga

SEQ ID NO: 1560406 - RNA, 19 nt, Homo sapiens
  misc_RNA (1)...(19): siRNA sense strand
gagagaaacccuauauuug

SEQ ID NO: 1560407 - RNA, 19 nt, Homo sapiens
  misc_RNA (1)...(19): siRNA sense strand
ucagagaccucaaacagaa

SEQ ID NO: 1560408 - RNA, 19 nt, Homo sapiens
  misc_RNA (1)...(19): siRNA sense strand
gaagaagucauaccucauu

SEQ ID NO: 1560409 - RNA, 19 nt, Homo sapiens
  misc_RNA (1)...(19): siRNA sense strand
ggaaacccuuuauuuguau

SEQ ID NO: 1560410 - RNA, 19 nt, Homo sapiens
  misc_RNA (1)...(19): siRNA sense strand
gggaaagccuucaguagga

SEQ ID NO: 1560411 - RNA, 19 nt, Homo sapiens
  misc_RNA (1)...(19): siRNA sense strand
gagcaaccauuugaccaua

SEQ ID NO: 1560412 - RNA, 19 nt, Homo sapiens
  misc_RNA (1)...(19): siRNA sense strand
ggaauaacuuuagaaggaa

SEQ ID NO: 1560413 - RNA, 19 nt, Homo sapiens
  misc_RNA (1)...(19): siRNA sense strand
gagaagagcuauggacaca

SEQ ID NO: 1560414 - RNA, 19 nt, Homo sapiens
  misc_RNA (1)...(19): siRNA sense strand
gcaagaaccguauuacaau

SEQ ID NO: 1560415 - RNA, 19 nt, Homo sapiens
  misc_RNA (1)...(19): siRNA sense strand
gagaaaccguaucagugua

SEQ ID NO: 1560416 - RNA, 19 nt, Homo sapiens
  misc_RNA (1)...(19): siRNA sense strand
ggaaggcauuuauccagaa

SEQ ID NO: 1560417 - RNA, 19 nt, Homo sapiens
  misc_RNA (1)...(19): siRNA sense strand
gaaagaguucucaguggua

SEQ ID NO: 1560418 - RNA, 19 nt, Homo sapiens
  misc_RNA (1)...(19): siRNA sense strand
agaaaucacuccucaauac

SEQ ID NO: 1560419 - RNA, 19 nt, Homo sapiens
  misc_RNA (1)...(19): siRNA sense strand
gagaaaccauaugaaugua

SEQ ID NO: 1560420 - RNA, 19 nt, Homo sapiens
  misc_RNA (1)...(19): siRNA sense strand
gaagacaacccucacuguu

SEQ ID NO: 1560421 - RNA, 19 nt, Homo sapiens
  misc_RNA (1)...(19): siRNA sense strand
gaacaucagcgaauucaca

SEQ ID NO: 1560422 - RNA, 19 nt, Homo sapiens
  misc_RNA (1)...(19): siRNA sense strand
gagaaaucacuccucaaua

SEQ ID NO: 1560423 - RNA, 19 nt, Homo sapiens
  misc_RNA (1)...(19): siRNA sense strand
cagaauacauacaggagaa

SEQ ID NO: 1560424 - RNA, 19 nt, Homo sapiens
  misc_RNA (1)...(19): siRNA sense strand
gagaaacccuauauuugca

SEQ ID NO: 1560425 - RNA, 19 nt, Homo sapiens
  misc_RNA (1)...(19): siRNA sense strand
agucauaccucauugauca

SEQ ID NO: 1560426 - RNA, 19 nt, Homo sapiens
  misc_RNA (1)...(19): siRNA sense strand
guucaucacagaauacaua

SEQ ID NO: 1560427 - RNA, 19 nt, Homo sapiens
  misc_RNA (1)...(19): siRNA sense strand
gaagucauaccucauugaa

SEQ ID NO: 1560428 - RNA, 19 nt, Homo sapiens
  misc_RNA (1)...(19): siRNA sense strand
cgagaaaccauaugaaugu

SEQ ID NO: 1560429 - RNA, 19 nt, Homo sapiens
  misc_RNA (1)...(19): siRNA sense strand
gaagugccuuuaggaagaa

SEQ ID NO: 1560430 - RNA, 19 nt, Homo sapiens
  misc_RNA (1)...(19): siRNA sense strand
ggaaagccuucaguaggaa

SEQ ID NO: 1560431 - RNA, 19 nt, Homo sapiens
  misc_RNA (1)...(19): siRNA sense strand
ucagaaaacucacaaggua

SEQ ID NO: 1560432 - RNA, 19 nt, Homo sapiens
  misc_RNA (1)...(19): siRNA sense strand
ggaacaaggagaagagcua

SEQ ID NO: 1560433 - RNA, 19 nt, Homo sapiens
  misc_RNA (1)...(19): siRNA sense strand
gaugaaaggaaugcuauuu

SEQ ID NO: 1560434 - RNA, 19 nt, Homo sapiens
  misc_RNA (1)...(19): siRNA sense strand
gaauauaaaccugauggaa

SEQ ID NO: 1560435 - RNA, 19 nt, Homo sapiens
  misc_RNA (1)...(19): siRNA sense strand
ggcaagaaccguauuacaa

SEQ ID NO: 1560436 - RNA, 19 nt, Homo sapiens
  misc_RNA (1)...(19): siRNA sense strand
ugaaaggaaugcuauuuac

SEQ ID NO: 1560437 - RNA, 19 nt, Homo sapiens
  misc_RNA (1)...(19): siRNA sense strand
gaaaggccuuccgucagaa

SEQ ID NO: 1560438 - RNA, 19 nt, Homo sapiens
  misc_RNA (1)...(19): siRNA sense strand
agacaacccucacuguuca

SEQ ID NO: 1560439 - RNA, 19 nt, Homo sapiens
  misc_RNA (1)...(19): siRNA sense strand
cagugaaucuccauaaaca

SEQ ID NO: 1560440 - RNA, 19 nt, Homo sapiens
  misc_RNA (1)...(19): siRNA sense strand
gaaaggaaugcuauuuaca

SEQ ID NO: 1560441 - RNA, 19 nt, Homo sapiens
  misc_RNA (1)...(19): siRNA sense strand
gcaaccauuugaccauaau

SEQ ID NO: 1560442 - RNA, 19 nt, Homo sapiens
  misc_RNA (1)...(19): siRNA sense strand
guaaacaggagcuuauuca

SEQ ID NO: 1560443 - RNA, 19 nt, Homo sapiens
  misc_RNA (1)...(19): siRNA sense strand
ggaaaacuauugccacuuc

SEQ ID NO: 1560444 - RNA, 19 nt, Homo sapiens
  misc_RNA (1)...(19): siRNA sense strand
ggagagaaaccguaucagu

SEQ ID NO: 1560445 - RNA, 19 nt, Homo sapiens
  misc_RNA (1)...(19): siRNA sense strand
agucauaccucauugaaca

SEQ ID NO: 1560446 - RNA, 19 nt, Homo sapiens
  misc_RNA (1)...(19): siRNA sense strand
uuacagggaugugauguug

SEQ ID NO: 1560447 - RNA, 19 nt, Homo sapiens
  misc_RNA (1)...(19): siRNA sense strand
aaagaguucucagugguaa

SEQ ID NO: 1560448 - RNA, 19 nt, Homo sapiens
  misc_RNA (1)...(19): siRNA sense strand
agauggaauugccuucaua

SEQ ID NO: 1560449 - RNA, 19 nt, Homo sapiens
  misc_RNA (1)...(19): siRNA sense strand
cagaacuagucauuagaaa

SEQ ID NO: 1560450 - RNA, 19 nt, Homo sapiens
  misc_RNA (1)...(19): siRNA sense strand
gcgagaaaccauaugaaug

SEQ ID NO: 1560451 - RNA, 19 nt, Homo sapiens
  misc_RNA (1)...(19): siRNA sense strand
gaaacccuauauuugcaau

SEQ ID NO: 1560452 - RNA, 19 nt, Homo sapiens
  misc_RNA (1)...(19): siRNA sense strand
agacagcccucacccuuca

SEQ ID NO: 1560453 - RNA, 19 nt, Homo sapiens
  misc_RNA (1)...(19): siRNA sense strand
ccaaguaaucuuauggaaa

SEQ ID NO: 1560454 - RNA, 19 nt, Homo sapiens
  misc_RNA (1)...(19): siRNA sense strand
gaaucuccauaaacaaaca

SEQ ID NO: 1560455 - RNA, 19 nt, Homo sapiens
  misc_RNA (1)...(19): siRNA sense strand
gugaaucuccauaaacaaa

SEQ ID NO: 1560456 - RNA, 19 nt, Homo sapiens
  misc_RNA (1)...(19): siRNA sense strand
ggaugugacuguggacuuc

SEQ ID NO: 1560457 - RNA, 19 nt, Homo sapiens
  misc_RNA (1)...(19): siRNA sense strand
guucuucaguuguaaguca

SEQ ID NO: 1560458 - RNA, 19 nt, Homo sapiens
  misc_RNA (1)...(19): siRNA sense strand
gaagucauaccucauugau

SEQ ID NO: 1560459 - RNA, 19 nt, Homo sapiens
  misc_RNA (1)...(19): siRNA sense strand
gaaguucaaagaauaccaa

SEQ ID NO: 1560460 - RNA, 19 nt, Homo sapiens
  misc_RNA (1)...(19): siRNA sense strand
gaacaaggagaagagcuau

SEQ ID NO: 1560461 - RNA, 19 nt, Homo sapiens
  misc_RNA (1)...(19): siRNA sense strand
guagaaaccacgggaauuc

SEQ ID NO: 1560462 - RNA, 19 nt, Homo sapiens
  misc_RNA (1)...(19): siRNA sense strand
ccauaugaauguaaacagu

SEQ ID NO: 1560463 - RNA, 19 nt, Homo sapiens
  misc_RNA (1)...(19): siRNA sense strand
gcauuuauccagaagacaa

SEQ ID NO: 1560464 - RNA, 19 nt, Homo sapiens
  misc_RNA (1)...(19): siRNA sense strand
gaaggcauuuauccagaag

SEQ ID NO: 1560465 - RNA, 19 nt, Homo sapiens
  misc_RNA (1)...(19): siRNA sense strand
gagaaagccuaugaauguc

SEQ ID NO: 1560466 - RNA, 19 nt, Homo sapiens
  misc_RNA (1)...(19): siRNA sense strand
gaaguuuggugacaguacu

SEQ ID NO: 1560467 - RNA, 19 nt, Homo sapiens
  misc_RNA (1)...(19): siRNA sense strand
aaagagaaguuuggugaca

SEQ ID NO: 1560468 - RNA, 19 nt, Homo sapiens
  misc_RNA (1)...(19): siRNA sense strand
cuaauuaaggagagaagua

SEQ ID NO: 1560469 - RNA, 19 nt, Homo sapiens
  misc_RNA (1)...(19): siRNA sense strand
gggagaaagccuaugaaug

SEQ ID NO: 1560470 - RNA, 19 nt, Homo sapiens
  misc_RNA (1)...(19): siRNA sense strand
ggaagucauaccucauuga

SEQ ID NO: 1560471 - RNA, 19 nt, Homo sapiens
  misc_RNA (1)...(19): siRNA sense strand
gaaauuccucugcagaaag

SEQ ID NO: 1560472 - RNA, 19 nt, Homo sapiens
  misc_RNA (1)...(19): siRNA sense strand
uuucagaacuagucauuag

SEQ ID NO: 1560473 - RNA, 19 nt, Homo sapiens
  misc_RNA (1)...(19): siRNA sense strand
guccauccaaguaaucuua

SEQ ID NO: 1560474 - RNA, 19 nt, Homo sapiens
  misc_RNA (1)...(19): siRNA sense strand
caaguuggaacaaggagaa

SEQ ID NO: 1560475 - RNA, 19 nt, Homo sapiens
  misc_RNA (1)...(19): siRNA sense strand
gaaggccacccucacuaga

SEQ ID NO: 1560476 - RNA, 19 nt, Homo sapiens
  misc_RNA (1)...(19): siRNA sense strand
uggaauugccuucauagaa

SEQ ID NO: 1560477 - RNA, 19 nt, Homo sapiens
  misc_RNA (1)...(19): siRNA sense strand
aaacaaacagaaagaguuc

SEQ ID NO: 1560478 - RNA, 19 nt, Homo sapiens
  misc_RNA (1)...(19): siRNA sense strand
uuacagcuaccuagaagaa

SEQ ID NO: 1560479 - RNA, 19 nt, Homo sapiens
  misc_RNA (1)...(19): siRNA sense strand
caauggguguccucagugu

SEQ ID NO: 1560480 - RNA, 19 nt, Homo sapiens
  misc_RNA (1)...(19): siRNA sense strand
agaaggcaauccucacugu

SEQ ID NO: 1560481 - RNA, 19 nt, Homo sapiens
  misc_RNA (1)...(19): siRNA sense strand
caacuagacccugcucaga

SEQ ID NO: 1560482 - RNA, 19 nt, Homo sapiens
  misc_RNA (1)...(19): siRNA sense strand
gaaaccguaucaguguaau

SEQ ID NO: 1560483 - RNA, 19 nt, Homo sapiens
  misc_RNA (1)...(19): siRNA sense strand
acagcuaccuagaagaaga

SEQ ID NO: 1560484 - RNA, 19 nt, Homo sapiens
  misc_RNA (1)...(19): siRNA sense strand
gaccauaaugaaugugaaa

SEQ ID NO: 1560485 - RNA, 19 nt, Homo sapiens
  misc_RNA (1)...(19): siRNA sense strand
caggagagaaacccuauau

SEQ ID NO: 1560486 - RNA, 19 nt, Homo sapiens
  misc_RNA (1)...(19): siRNA sense strand
gaagcccucugccuacaac

SEQ ID NO: 1560487 - RNA, 19 nt, Homo sapiens
  misc_RNA (1)...(19): siRNA sense strand
acagggaugugauguugga

SEQ ID NO: 1560488 - RNA, 19 nt, Homo sapiens
  misc_RNA (1)...(19): siRNA sense strand
ucagaacuagucauuagaa

SEQ ID NO: 1560489 - RNA, 19 nt, Homo sapiens
  misc_RNA (1)...(19): siRNA sense strand
gaauugccuucauagaaaa

SEQ ID NO: 1560490 - RNA, 19 nt, Homo sapiens
  misc_RNA (1)...(19): siRNA sense strand
gagcuuauucagcaucaga

SEQ ID NO: 1560491 - RNA, 19 nt, Homo sapiens
  misc_RNA (1)...(19): siRNA sense strand
gguagaaaccacgggaauu

SEQ ID NO: 1560492 - RNA, 19 nt, Homo sapiens
  misc_RNA (1)...(19): siRNA sense strand
aaacuauugccacuucgua

SEQ ID NO: 1560493 - RNA, 19 nt, Homo sapiens
  misc_RNA (1)...(19): siRNA sense strand
uaggaaaucaaaccucauu

SEQ ID NO: 1560494 - RNA, 19 nt, Homo sapiens
  misc_RNA (1)...(19): siRNA sense strand
gaacucacacaggagagaa

SEQ ID NO: 1560495 - RNA, 19 nt, Homo sapiens
  misc_RNA (1)...(19): siRNA sense strand
agagaaaccguaucagugu

SEQ ID NO: 1560496 - RNA, 19 nt, Homo sapiens
  misc_RNA (1)...(19): siRNA sense strand
cuaugaauguccucagugu

SEQ ID NO: 1560497 - RNA, 19 nt, Homo sapiens
  misc_RNA (1)...(19): siRNA sense strand
gaccaucuguuguuaauua

SEQ ID NO: 1560498 - RNA, 19 nt, Homo sapiens
  misc_RNA (1)...(19): siRNA sense strand
ucacagccaugaugaaaua

SEQ ID NO: 1560499 - RNA, 19 nt, Homo sapiens
  misc_RNA (1)...(19): siRNA sense strand
ggucaggacuucaagauug

SEQ ID NO: 1560500 - RNA, 19 nt, Homo sapiens
  misc_RNA (1)...(19): siRNA sense strand
ccucgaaccugaagauaua

SEQ ID NO: 1560501 - RNA, 19 nt, Homo sapiens
  misc_RNA (1)...(19): siRNA sense strand
uaaagaccaucuguuguua

SEQ ID NO: 1560502 - RNA, 19 nt, Homo sapiens
  misc_RNA (1)...(19): siRNA sense strand
caagagaguuuaugucauc

SEQ ID NO: 1560503 - RNA, 19 nt, Homo sapiens
  misc_RNA (1)...(19): siRNA sense strand
cuagauagcuacaaaucaa

SEQ ID NO: 1560504 - RNA, 19 nt, Homo sapiens
  misc_RNA (1)...(19): siRNA sense strand
caagauugcuccacacauc

SEQ ID NO: 1560505 - RNA, 19 nt, Homo sapiens
  misc_RNA (1)...(19): siRNA sense strand
uggcagaaauugucucaaa

SEQ ID NO: 1560506 - RNA, 19 nt, Homo sapiens
  misc_RNA (1)...(19): siRNA sense strand
acacaaacuucaaccaaga

SEQ ID NO: 1560507 - RNA, 19 nt, Homo sapiens
  misc_RNA (1)...(19): siRNA sense strand
gaaugaagaaacuuacuga

SEQ ID NO: 1560508 - RNA, 19 nt, Homo sapiens
  misc_RNA (1)...(19): siRNA sense strand
gcagaaauugucucaaaga

SEQ ID NO: 1560509 - RNA, 19 nt, Homo sapiens
  misc_RNA (1)...(19): siRNA sense strand
ggaauacuguaaacccaau

SEQ ID NO: 1560510 - RNA, 19 nt, Homo sapiens
  misc_RNA (1)...(19): siRNA sense strand
gaaguauuacagcaaagua

SEQ ID NO: 1560511 - RNA, 19 nt, Homo sapiens
  misc_RNA (1)...(19): siRNA sense strand
gaacagucuuugccagagu

SEQ ID NO: 1560512 - RNA, 19 nt, Homo sapiens
  misc_RNA (1)...(19): siRNA sense strand
ugaaauaucagaccuagau

SEQ ID NO: 1560513 - RNA, 19 nt, Homo sapiens
  misc_RNA (1)...(19): siRNA sense strand
agaccuagauagcuacaaa

SEQ ID NO: 1560514 - RNA, 19 nt, Homo sapiens
  misc_RNA (1)...(19): siRNA sense strand
ccaacagacucgugcauuc

SEQ ID NO: 1560515 - RNA, 19 nt, Homo sapiens
  misc_RNA (1)...(19): siRNA sense strand
ccaugaagccgauguuuau

SEQ ID NO: 1560516 - RNA, 19 nt, Homo sapiens
  misc_RNA (1)...(19): siRNA sense strand
ugaagccgauguuuauguu

SEQ ID NO: 1560517 - RNA, 19 nt, Homo sapiens
  misc_RNA (1)...(19): siRNA sense strand
uaaauuuaccagccagaua

SEQ ID NO: 1560518 - RNA, 19 nt, Homo sapiens
  misc_RNA (1)...(19): siRNA sense strand
ugaagcaauggaaguauua

SEQ ID NO: 1560519 - RNA, 19 nt, Homo sapiens
  misc_RNA (1)...(19): siRNA sense strand
ccaagccuguucuuucuau

SEQ ID NO: 1560520 - RNA, 19 nt, Homo sapiens
  misc_RNA (1)...(19): siRNA sense strand
gagcagaagaucacagaga

SEQ ID NO: 1560521 - RNA, 19 nt, Homo sapiens
  misc_RNA (1)...(19): siRNA sense strand
ccaagagugauuaaaguaa

SEQ ID NO: 1560522 - RNA, 19 nt, Homo sapiens
  misc_RNA (1)...(19): siRNA sense strand
gguugaugcuuccuacuga

SEQ ID NO: 1560523 - RNA, 19 nt, Homo sapiens
  misc_RNA (1)...(19): siRNA sense strand
gaagcacuaucucagucuu

SEQ ID NO: 1560524 - RNA, 19 nt, Homo sapiens
  misc_RNA (1)...(19): siRNA sense strand
gcauucagcagcaguauca

SEQ ID NO: 1560525 - RNA, 19 nt, Homo sapiens
  misc_RNA (1)...(19): siRNA sense strand
ugaaugauuuaccaagaga

SEQ ID NO: 1560526 - RNA, 19 nt, Homo sapiens
  misc_RNA (1)...(19): siRNA sense strand
ccucuugacugaagcaaug

SEQ ID NO: 1560527 - RNA, 19 nt, Homo sapiens
  misc_RNA (1)...(19): siRNA sense strand
caaccaagagugauuaaag

SEQ ID NO: 1560528 - RNA, 19 nt, Homo sapiens
  misc_RNA (1)...(19): siRNA sense strand
aaaccaagccuguucuuuc

SEQ ID NO: 1560529 - RNA, 19 nt, Homo sapiens
  misc_RNA (1)...(19): siRNA sense strand
gacaaugaauggguugaug

SEQ ID NO: 1560530 - RNA, 19 nt, Homo sapiens
  misc_RNA (1)...(19): siRNA sense strand
ccuuaucccucuugacuga

SEQ ID NO: 1560531 - RNA, 19 nt, Homo sapiens
  misc_RNA (1)...(19): siRNA sense strand
uuaaagaccaucuguuguu

SEQ ID NO: 1560532 - RNA, 19 nt, Homo sapiens
  misc_RNA (1)...(19): siRNA sense strand
aaacuucaaccaagaguga

SEQ ID NO: 1560533 - RNA, 19 nt, Homo sapiens
  misc_RNA (1)...(19): siRNA sense strand
caagagugauuaaaguaac

SEQ ID NO: 1560534 - RNA, 19 nt, Homo sapiens
  misc_RNA (1)...(19): siRNA sense strand
ucacagagaagcacuaucu

SEQ ID NO: 1560535 - RNA, 19 nt, Homo sapiens
  misc_RNA (1)...(19): siRNA sense strand
ucaccuugcugcuggaaga

SEQ ID NO: 1560536 - RNA, 19 nt, Homo sapiens
  misc_RNA (1)...(19): siRNA sense strand
uccgaauucuguucuuuaa

SEQ ID NO: 1560537 - RNA, 19 nt, Homo sapiens
  misc_RNA (1)...(19): siRNA sense strand
caucagaucacagccauga

SEQ ID NO: 1560538 - RNA, 19 nt, Homo sapiens
  misc_RNA (1)...(19): siRNA sense strand
cugaagcaauggaaguauu

SEQ ID NO: 1560539 - RNA, 19 nt, Homo sapiens
  misc_RNA (1)...(19): siRNA sense strand
uaacuuggacaaugaaugg

SEQ ID NO: 1560540 - RNA, 19 nt, Homo sapiens
  misc_RNA (1)...(19): siRNA sense strand
ucaaagacacaaacuucaa

SEQ ID NO: 1560541 - RNA, 19 nt, Homo sapiens
  misc_RNA (1)...(19): siRNA sense strand
aauuaaagaccaucuguug

SEQ ID NO: 1560542 - RNA, 19 nt, Homo sapiens
  misc_RNA (1)...(19): siRNA sense strand
ccaagagaguuuaugucau

SEQ ID NO: 1560543 - RNA, 19 nt, Homo sapiens
  misc_RNA (1)...(19): siRNA sense strand
aaauuuaccagccagauau

SEQ ID NO: 1560544 - RNA, 19 nt, Homo sapiens
  misc_RNA (1)...(19): siRNA sense strand
aagaccaucuguuguuaau

SEQ ID NO: 1560545 - RNA, 19 nt, Homo sapiens
  misc_RNA (1)...(19): siRNA sense strand
uauaucagcauccaagaga

SEQ ID NO: 1560546 - RNA, 19 nt, Homo sapiens
  misc_RNA (1)...(19): siRNA sense strand
gcuacaaaucaaacaguaa

SEQ ID NO: 1560547 - RNA, 19 nt, Homo sapiens
  misc_RNA (1)...(19): siRNA sense strand
agcagaagaucacagagaa

SEQ ID NO: 1560548 - RNA, 19 nt, Homo sapiens
  misc_RNA (1)...(19): siRNA sense strand
caacagacucgugcauuca

SEQ ID NO: 1560549 - RNA, 19 nt, Homo sapiens
  misc_RNA (1)...(19): siRNA sense strand
ggcaaaagcaguuauuaaa

SEQ ID NO: 1560550 - RNA, 19 nt, Homo sapiens
  misc_RNA (1)...(19): siRNA sense strand
gcccggaauuggcagaaau

SEQ ID NO: 1560551 - RNA, 19 nt, Homo sapiens
  misc_RNA (1)...(19): siRNA sense strand
guccgaauucuguucuuua

SEQ ID NO: 1560552 - RNA, 19 nt, Homo sapiens
  misc_RNA (1)...(19): siRNA sense strand
ggcagaaauugucucaaag

SEQ ID NO: 1560553 - RNA, 19 nt, Homo sapiens
  misc_RNA (1)...(19): siRNA sense strand
ugauuuaccaagagaguuu

SEQ ID NO: 1560554 - RNA, 19 nt, Homo sapiens
  misc_RNA (1)...(19): siRNA sense strand
caggaugggcaugagauua

SEQ ID NO: 1560555 - RNA, 19 nt, Homo sapiens
  misc_RNA (1)...(19): siRNA sense strand
gcaggaugggcaugagauu

SEQ ID NO: 1560556 - RNA, 19 nt, Homo sapiens
  misc_RNA (1)...(19): siRNA sense strand
cccaugaagccgauguuua

SEQ ID NO: 1560557 - RNA, 19 nt, Homo sapiens
  misc_RNA (1)...(19): siRNA sense strand
aaccaagagugauuaaagu

SEQ ID NO: 1560558 - RNA, 19 nt, Homo sapiens
  misc_RNA (1)...(19): siRNA sense strand
ggaugggaauacuguaaac

SEQ ID NO: 1560559 - RNA, 19 nt, Homo sapiens
  misc_RNA (1)...(19): siRNA sense strand
caaggaagcccucgaaccu

SEQ ID NO: 1560560 - RNA, 19 nt, Homo sapiens
  misc_RNA (1)...(19): siRNA sense strand
gcuggaagagugcacagaa

SEQ ID NO: 1560561 - RNA, 19 nt, Homo sapiens
  misc_RNA (1)...(19): siRNA sense strand
ucucaaagacacaaacuuc

SEQ ID NO: 1560562 - RNA, 19 nt, Homo sapiens
  misc_RNA (1)...(19): siRNA sense strand
caaacagcaucagaucaca

SEQ ID NO: 1560563 - RNA, 19 nt, Homo sapiens
  misc_RNA (1)...(19): siRNA sense strand
cuggaagagugcacagaaa

SEQ ID NO: 1560564 - RNA, 19 nt, Homo sapiens
  misc_RNA (1)...(19): siRNA sense strand
aagccuguucuuucuauua

SEQ ID NO: 1560565 - RNA, 19 nt, Homo sapiens
  misc_RNA (1)...(19): siRNA sense strand
gaagccgauguuuauguuu

SEQ ID NO: 1560566 - RNA, 19 nt, Homo sapiens
  misc_RNA (1)...(19): siRNA sense strand
caucaaacagcaucagauc

SEQ ID NO: 1560567 - RNA, 19 nt, Homo sapiens
  misc_RNA (1)...(19): siRNA sense strand
gaagauauaccccaugaag

SEQ ID NO: 1560568 - RNA, 19 nt, Homo sapiens
  misc_RNA (1)...(19): siRNA sense strand
gaucacagagaagcacuau

SEQ ID NO: 1560569 - RNA, 19 nt, Homo sapiens
  misc_RNA (1)...(19): siRNA sense strand
aaacaggagcagaagauca

SEQ ID NO: 1560570 - RNA, 19 nt, Homo sapiens
  misc_RNA (1)...(19): siRNA sense strand
aaccaagccuguucuuucu

SEQ ID NO: 1560571 - RNA, 19 nt, Homo sapiens
  misc_RNA (1)...(19): siRNA sense strand
aagccgauguuuauguuuc

SEQ ID NO: 1560572 - RNA, 19 nt, Homo sapiens
  misc_RNA (1)...(19): siRNA sense strand
agacacaaacuucaaccaa

SEQ ID NO: 1560573 - RNA, 19 nt, Homo sapiens
  misc_RNA (1)...(19): siRNA sense strand
uaucagcauccaagagaaa

SEQ ID NO: 1560574 - RNA, 19 nt, Homo sapiens
  misc_RNA (1)...(19): siRNA sense strand
ggaaguauuacagcaaagu

SEQ ID NO: 1560575 - RNA, 19 nt, Homo sapiens
  misc_RNA (1)...(19): siRNA sense strand
gacugaagcaauggaagua

SEQ ID NO: 1560576 - RNA, 19 nt, Homo sapiens
  misc_RNA (1)...(19): siRNA sense strand
ggaugggcaugagauuaca

SEQ ID NO: 1560577 - RNA, 19 nt, Homo sapiens
  misc_RNA (1)...(19): siRNA sense strand
aaagaccaucuguuguuaa

SEQ ID NO: 1560578 - RNA, 19 nt, Homo sapiens
  misc_RNA (1)...(19): siRNA sense strand
caagccuguucuuucuauu

SEQ ID NO: 1560579 - RNA, 19 nt, Homo sapiens
  misc_RNA (1)...(19): siRNA sense strand
gcacagaaaagcugaaucu

SEQ ID NO: 1560580 - RNA, 19 nt, Homo sapiens
  misc_RNA (1)...(19): siRNA sense strand
gggaaaagaaacaaugaaa

SEQ ID NO: 1560581 - RNA, 19 nt, Homo sapiens
  misc_RNA (1)...(19): siRNA sense strand
uauuugcagucucaguuug

SEQ ID NO: 1560582 - RNA, 19 nt, Homo sapiens
  misc_RNA (1)...(19): siRNA sense strand
gcuuccuacugauaucaaa

SEQ ID NO: 1560583 - RNA, 19 nt, Homo sapiens
  misc_RNA (1)...(19): siRNA sense strand
gaugcuuccuacugauauc

SEQ ID NO: 1560584 - RNA, 19 nt, Homo sapiens
  misc_RNA (1)...(19): siRNA sense strand
gugauuaaaguaacagcuu

SEQ ID NO: 1560585 - RNA, 19 nt, Homo sapiens
  misc_RNA (1)...(19): siRNA sense strand
gauuuaccaagagaguuua

SEQ ID NO: 1560586 - RNA, 19 nt, Homo sapiens
  misc_RNA (1)...(19): siRNA sense strand
caaagacacaaacuucaac

SEQ ID NO: 1560587 - RNA, 19 nt, Homo sapiens
  misc_RNA (1)...(19): siRNA sense strand
ggacaaugaauggguugau

SEQ ID NO: 1560588 - RNA, 19 nt, Homo sapiens
  misc_RNA (1)...(19): siRNA sense strand
agcuacaaaucaaacagua

SEQ ID NO: 1560589 - RNA, 19 nt, Homo sapiens
  misc_RNA (1)...(19): siRNA sense strand
guaacuuggacaaugaaug

SEQ ID NO: 1560590 - RNA, 19 nt, Homo sapiens
  misc_RNA (1)...(19): siRNA sense strand
aaagcugaaucugaacaug

SEQ ID NO: 1560591 - RNA, 19 nt, Homo sapiens
  misc_RNA (1)...(19): siRNA sense strand
gaauacuguaaacccaauu

SEQ ID NO: 1560592 - RNA, 19 nt, Homo sapiens
  misc_RNA (1)...(19): siRNA sense strand
auggaaguauuacagcaaa

SEQ ID NO: 1560593 - RNA, 19 nt, Homo sapiens
  misc_RNA (1)...(19): siRNA sense strand
ggaucuagaacagucuuug

SEQ ID NO: 1560594 - RNA, 19 nt, Homo sapiens
  misc_RNA (1)...(19): siRNA sense strand
cagcaaaguagcccugaag

SEQ ID NO: 1560595 - RNA, 19 nt, Homo sapiens
  misc_RNA (1)...(19): siRNA sense strand
augaagaaacuuacugaga

SEQ ID NO: 1560596 - RNA, 19 nt, Homo sapiens
  misc_RNA (1)...(19): siRNA sense strand
ugacugaagcaauggaagu

SEQ ID NO: 1560597 - RNA, 19 nt, Homo sapiens
  misc_RNA (1)...(19): siRNA sense strand
gagcugaacggccuuaaga

SEQ ID NO: 1560598 - RNA, 19 nt, Homo sapiens
  misc_RNA (1)...(19): siRNA sense strand
gaaaguuccuacucgucaa

SEQ ID NO: 1560599 - RNA, 19 nt, Homo sapiens
  misc_RNA (1)...(19): siRNA sense strand
ggcagaagcuguccaaacu

SEQ ID NO: 1560600 - RNA, 19 nt, Homo sapiens
  misc_RNA (1)...(19): siRNA sense strand
gaggaucgccuguaacuac

SEQ ID NO: 1560601 - RNA, 19 nt, Homo sapiens
  misc_RNA (1)...(19): siRNA sense strand
ggaagaccgugugcgugaa

SEQ ID NO: 1560602 - RNA, 19 nt, Homo sapiens
  misc_RNA (1)...(19): siRNA sense strand
acaauaaccaccaggauuc

SEQ ID NO: 1560603 - RNA, 19 nt, Homo sapiens
  misc_RNA (1)...(19): siRNA sense strand
cgagggacgugccaagaag

SEQ ID NO: 1560604 - RNA, 19 nt, Homo sapiens
  misc_RNA (1)...(19): siRNA sense strand
gaacggcuauaaaacuuuc

SEQ ID NO: 1560605 - RNA, 19 nt, Homo sapiens
  misc_RNA (1)...(19): siRNA sense strand
gcaggugccgugcuacuca

SEQ ID NO: 1560606 - RNA, 19 nt, Homo sapiens
  misc_RNA (1)...(19): siRNA sense strand
uacaauaaccaccaggauu

SEQ ID NO: 1560607 - RNA, 19 nt, Homo sapiens
  misc_RNA (1)...(19): siRNA sense strand
gcgaacggcuauaaaacuu

SEQ ID NO: 1560608 - RNA, 19 nt, Homo sapiens
  misc_RNA (1)...(19): siRNA sense strand
uggcugaccuugacuacag

SEQ ID NO: 1560609 - RNA, 19 nt, Homo sapiens
  misc_RNA (1)...(19): siRNA sense strand
ugaacggccuuaagaagcu

SEQ ID NO: 1560610 - RNA, 19 nt, Homo sapiens
  misc_RNA (1)...(19): siRNA sense strand
gcugaacggccuuaagaag

SEQ ID NO: 1560611 - RNA, 19 nt, Homo sapiens
  misc_RNA (1)...(19): siRNA sense strand
gggcagaagcuguccaaac

SEQ ID NO: 1560612 - RNA, 19 nt, Homo sapiens
  misc_RNA (1)...(19): siRNA sense strand
gaagaccgugugcgugaag

SEQ ID NO: 1560613 - RNA, 19 nt, Homo sapiens
  misc_RNA (1)...(19): siRNA sense strand
caagaagcgcaaggaguga

SEQ ID NO: 1560614 - RNA, 19 nt, Homo sapiens
  misc_RNA (1)...(19): siRNA sense strand
gugccgugcuacucauaug

SEQ ID NO: 1560615 - RNA, 19 nt, Homo sapiens
  misc_RNA (1)...(19): siRNA sense strand
gcagaagcuguccaaacug

SEQ ID NO: 1560616 - RNA, 19 nt, Homo sapiens
  misc_RNA (1)...(19): siRNA sense strand
cuacucauaugggcagaag

SEQ ID NO: 1560617 - RNA, 19 nt, Homo sapiens
  misc_RNA (1)...(19): siRNA sense strand
ucgaggcgcucaggaagca

SEQ ID NO: 1560618 - RNA, 19 nt, Homo sapiens
  misc_RNA (1)...(19): siRNA sense strand
ccgagggacgugccaagaa

SEQ ID NO: 1560619 - RNA, 19 nt, Homo sapiens
  misc_RNA (1)...(19): siRNA sense strand
gacgauggcugcugcauug

SEQ ID NO: 1560620 - RNA, 19 nt, Homo sapiens
  misc_RNA (1)...(19): siRNA sense strand
aaacaagccaccugcauua

SEQ ID NO: 1560621 - RNA, 19 nt, Homo sapiens
  misc_RNA (1)...(19): siRNA sense strand
gaaucggacuaccucauaa

SEQ ID NO: 1560622 - RNA, 19 nt, Homo sapiens
  misc_RNA (1)...(19): siRNA sense strand
ggaaucggacuaccucaua

SEQ ID NO: 1560623 - RNA, 19 nt, Homo sapiens
  misc_RNA (1)...(19): siRNA sense strand
agaaacaggugcagugcua

SEQ ID NO: 1560624 - RNA, 19 nt, Homo sapiens
  misc_RNA (1)...(19): siRNA sense strand
caagccaccugcauuauca

SEQ ID NO: 1560625 - RNA, 19 nt, Homo sapiens
  misc_RNA (1)...(19): siRNA sense strand
gaggauguuugcacacuug

SEQ ID NO: 1560626 - RNA, 19 nt, Homo sapiens
  misc_RNA (1)...(19): siRNA sense strand
caaacaagccaccugcauu

SEQ ID NO: 1560627 - RNA, 19 nt, Homo sapiens
  misc_RNA (1)...(19): siRNA sense strand
ccucauaaaugggauguau

SEQ ID NO: 1560628 - RNA, 19 nt, Homo sapiens
  misc_RNA (1)...(19): siRNA sense strand
ccaccugcauuaucaaaca

SEQ ID NO: 1560629 - RNA, 19 nt, Homo sapiens
  misc_RNA (1)...(19): siRNA sense strand
gcugcuaccucuucaacug

SEQ ID NO: 1560630 - RNA, 19 nt, Homo sapiens
  misc_RNA (1)...(19): siRNA sense strand
cggacuaccucauaaaugg

SEQ ID NO: 1560631 - RNA, 19 nt, Homo sapiens
  misc_RNA (1)...(19): siRNA sense strand
ggaggauguuugcacacuu

SEQ ID NO: 1560632 - RNA, 19 nt, Homo sapiens
  misc_RNA (1)...(19): siRNA sense strand
gugcagcaguguccugaug

SEQ ID NO: 1560633 - RNA, 19 nt, Homo sapiens
  misc_RNA (1)...(19): siRNA sense strand
ccacagggccgagugaaga

SEQ ID NO: 1560634 - RNA, 19 nt, Homo sapiens
  misc_RNA (1)...(19): siRNA sense strand
gcuaccacuucuucuguga

SEQ ID NO: 1560635 - RNA, 19 nt, Homo sapiens
  misc_RNA (1)...(19): siRNA sense strand
gaaccacagggccgaguga

SEQ ID NO: 1560636 - RNA, 19 nt, Homo sapiens
  misc_RNA (1)...(19): siRNA sense strand
gauggcugcugcauugaca

SEQ ID NO: 1560637 - RNA, 19 nt, Homo sapiens
  misc_RNA (1)...(19): siRNA sense strand
gacuacgacuggugaaaca

SEQ ID NO: 1560638 - RNA, 19 nt, Homo sapiens
  misc_RNA (1)...(19): siRNA sense strand
agucaaaucauuccuguga

SEQ ID NO: 1560639 - RNA, 19 nt, Homo sapiens
  misc_RNA (1)...(19): siRNA sense strand
ccagagagucaaaucauuc

SEQ ID NO: 1560640 - RNA, 19 nt, Homo sapiens
  misc_RNA (1)...(19): siRNA sense strand
ggugaaacagaaacugaaa

SEQ ID NO: 1560641 - RNA, 19 nt, Homo sapiens
  misc_RNA (1)...(19): siRNA sense strand
ggaccagagagucaaauca

SEQ ID NO: 1560642 - RNA, 19 nt, Homo sapiens
  misc_RNA (1)...(19): siRNA sense strand
ucacugcucugcugcuucu

SEQ ID NO: 1560643 - RNA, 19 nt, Homo sapiens
  misc_RNA (1)...(19): siRNA sense strand
gcgcuggguuuggcuauca

SEQ ID NO: 1560644 - RNA, 19 nt, Homo sapiens
  misc_RNA (1)...(19): siRNA sense strand
acaugaaggugccucaauc

SEQ ID NO: 1560645 - RNA, 19 nt, Homo sapiens
  misc_RNA (1)...(19): siRNA sense strand
uagcaaggcugggcaggau

SEQ ID NO: 1560646 - RNA, 19 nt, Homo sapiens
  misc_RNA (1)...(19): siRNA sense strand
acagagaagaggaaucauu

SEQ ID NO: 1560647 - RNA, 19 nt, Homo sapiens
  misc_RNA (1)...(19): siRNA sense strand
acacagagaagaggaauca

SEQ ID NO: 1560648 - RNA, 19 nt, Homo sapiens
  misc_RNA (1)...(19): siRNA sense strand
gaccagagagucaaaucau

SEQ ID NO: 1560649 - RNA, 19 nt, Homo sapiens
  misc_RNA (1)...(19): siRNA sense strand
aaggaugcgccuccacuua

SEQ ID NO: 1560650 - RNA, 19 nt, Homo sapiens
  misc_RNA (1)...(19): siRNA sense strand
ccucagggaagaacagaaa

SEQ ID NO: 1560651 - RNA, 19 nt, Homo sapiens
  misc_RNA (1)...(19): siRNA sense strand
gcaaggcugggcaggaugu

SEQ ID NO: 1560652 - RNA, 19 nt, Homo sapiens
  misc_RNA (1)...(19): siRNA sense strand
caucugaggaaucggacua

SEQ ID NO: 1560653 - RNA, 19 nt, Homo sapiens
  misc_RNA (1)...(19): siRNA sense strand
gacaugaaggugccucaau

SEQ ID NO: 1560654 - RNA, 19 nt, Homo sapiens
  misc_RNA (1)...(19): siRNA sense strand
caaacacagagaagaggaa

SEQ ID NO: 1560655 - RNA, 19 nt, Homo sapiens
  misc_RNA (1)...(19): siRNA sense strand
acagaaaagaggaaaguua

SEQ ID NO: 1560656 - RNA, 19 nt, Homo sapiens
  misc_RNA (1)...(19): siRNA sense strand
gaaagccacugccccaaac

SEQ ID NO: 1560657 - RNA, 19 nt, Homo sapiens
  misc_RNA (1)...(19): siRNA sense strand
gaacagaaaagaggaaagu

SEQ ID NO: 1560658 - RNA, 19 nt, Homo sapiens
  misc_RNA (1)...(19): siRNA sense strand
accagagagucaaaucauu

SEQ ID NO: 1560659 - RNA, 19 nt, Homo sapiens
  misc_RNA (1)...(19): siRNA sense strand
ggugacuccuugguggaaa

SEQ ID NO: 1560660 - RNA, 19 nt, Homo sapiens
  misc_RNA (1)...(19): siRNA sense strand
gcucggcugcuaccucuuc

SEQ ID NO: 1560661 - RNA, 19 nt, Homo sapiens
  misc_RNA (1)...(19): siRNA sense strand
ucauaaaugggauguaucu

SEQ ID NO: 1560662 - RNA, 19 nt, Homo sapiens
  misc_RNA (1)...(19): siRNA sense strand
ccaaacaagccaccugcau

SEQ ID NO: 1560663 - RNA, 19 nt, Homo sapiens
  misc_RNA (1)...(19): siRNA sense strand
caugaaggugccucaauca

SEQ ID NO: 1560664 - RNA, 19 nt, Homo sapiens
  misc_RNA (1)...(19): siRNA sense strand
cauuacaucugaggaaucg

SEQ ID NO: 1560665 - RNA, 19 nt, Homo sapiens
  misc_RNA (1)...(19): siRNA sense strand
uaucacugcucugcugcuu

SEQ ID NO: 1560666 - RNA, 19 nt, Homo sapiens
  misc_RNA (1)...(19): siRNA sense strand
ccugugaugccagauagua

SEQ ID NO: 1560667 - RNA, 19 nt, Homo sapiens
  misc_RNA (1)...(19): siRNA sense strand
uaucaaacacagagaagag

SEQ ID NO: 1560668 - RNA, 19 nt, Homo sapiens
  misc_RNA (1)...(19): siRNA sense strand
gggccuggaccacaagaug

SEQ ID NO: 1560669 - RNA, 19 nt, Homo sapiens
  misc_RNA (1)...(19): siRNA sense strand
ugacgauggcugcugcauu

SEQ ID NO: 1560670 - RNA, 19 nt, Homo sapiens
  misc_RNA (1)...(19): siRNA sense strand
ggacaugaaggugccucaa

SEQ ID NO: 1560671 - RNA, 19 nt, Homo sapiens
  misc_RNA (1)...(19): siRNA sense strand
gccgcaacgucugcaaguu

SEQ ID NO: 1560672 - RNA, 19 nt, Homo sapiens
  misc_RNA (1)...(19): siRNA sense strand
ggaugcgccuccacuuagc

SEQ ID NO: 1560673 - RNA, 19 nt, Homo sapiens
  misc_RNA (1)...(19): siRNA sense strand
gaacacccagccccagaaa

SEQ ID NO: 1560674 - RNA, 19 nt, Homo sapiens
  misc_RNA (1)...(19): siRNA sense strand
cagaaaagaggaaaguuau

SEQ ID NO: 1560675 - RNA, 19 nt, Homo sapiens
  misc_RNA (1)...(19): siRNA sense strand
ccgcaacgucugcaaguuc

SEQ ID NO: 1560676 - RNA, 19 nt, Homo sapiens
  misc_RNA (1)...(19): siRNA sense strand
guccugaugggucugauga

SEQ ID NO: 1560677 - RNA, 19 nt, Homo sapiens
  misc_RNA (1)...(19): siRNA sense strand
uacgacuggugaaacagaa

SEQ ID NO: 1560678 - RNA, 19 nt, Homo sapiens
  misc_RNA (1)...(19): siRNA sense strand
ccugaugggucugaugaag

SEQ ID NO: 1560679 - RNA, 19 nt, Homo sapiens
  misc_RNA (1)...(19): siRNA sense strand
gaaaggcaguucuaaauga

SEQ ID NO: 1560680 - RNA, 19 nt, Homo sapiens
  misc_RNA (1)...(19): siRNA sense strand
gggaaagacuucaguguaa

SEQ ID NO: 1560681 - RNA, 19 nt, Homo sapiens
  misc_RNA (1)...(19): siRNA sense strand
caaagacgaugauagcuaa

SEQ ID NO: 1560682 - RNA, 19 nt, Homo sapiens
  misc_RNA (1)...(19): siRNA sense strand
gcagaaaccugacaaaguc

SEQ ID NO: 1560683 - RNA, 19 nt, Homo sapiens
  misc_RNA (1)...(19): siRNA sense strand
gaacaccacucaguugaaa

SEQ ID NO: 1560684 - RNA, 19 nt, Homo sapiens
  misc_RNA (1)...(19): siRNA sense strand
gauguaagcaugcauauaa

SEQ ID NO: 1560685 - RNA, 19 nt, Homo sapiens
  misc_RNA (1)...(19): siRNA sense strand
caagaaaugucaagaacaa

SEQ ID NO: 1560686 - RNA, 19 nt, Homo sapiens
  misc_RNA (1)...(19): siRNA sense strand
cuacuugucugaugauaua

SEQ ID NO: 1560687 - RNA, 19 nt, Homo sapiens
  misc_RNA (1)...(19): siRNA sense strand
gagaggaacugcaaauugu

SEQ ID NO: 1560688 - RNA, 19 nt, Homo sapiens
  misc_RNA (1)...(19): siRNA sense strand
guaagaagcccuuggaauu

SEQ ID NO: 1560689 - RNA, 19 nt, Homo sapiens
  misc_RNA (1)...(19): siRNA sense strand
ggaaaugucuaaagcacaa

SEQ ID NO: 1560690 - RNA, 19 nt, Homo sapiens
  misc_RNA (1)...(19): siRNA sense strand
caacacaucucuaaaggau

SEQ ID NO: 1560691 - RNA, 19 nt, Homo sapiens
  misc_RNA (1)...(19): siRNA sense strand
caagaacaaucaaguaaug

SEQ ID NO: 1560692 - RNA, 19 nt, Homo sapiens
  misc_RNA (1)...(19): siRNA sense strand
gaacucagcacgacagauu

SEQ ID NO: 1560693 - RNA, 19 nt, Homo sapiens
  misc_RNA (1)...(19): siRNA sense strand
gauucuaacucacagauuu

SEQ ID NO: 1560694 - RNA, 19 nt, Homo sapiens
  misc_RNA (1)...(19): siRNA sense strand
gaaagaggccuuaaaugug

SEQ ID NO: 1560695 - RNA, 19 nt, Homo sapiens
  misc_RNA (1)...(19): siRNA sense strand
gcacauuucaguccuauuu

SEQ ID NO: 1560696 - RNA, 19 nt, Homo sapiens
  misc_RNA (1)...(19): siRNA sense strand
gaagaaacccaugauugua

SEQ ID NO: 1560697 - RNA, 19 nt, Homo sapiens
  misc_RNA (1)...(19): siRNA sense strand
gaagacggauuagaaaugu

SEQ ID NO: 1560698 - RNA, 19 nt, Homo sapiens
  misc_RNA (1)...(19): siRNA sense strand
caacagagacccaagaaga

SEQ ID NO: 1560699 - RNA, 19 nt, Homo sapiens
  misc_RNA (1)...(19): siRNA sense strand
aauaucagcugccuucuaa

SEQ ID NO: 1560700 - RNA, 19 nt, Homo sapiens
  misc_RNA (1)...(19): siRNA sense strand
gaauauacuuucagugcaa

SEQ ID NO: 1560701 - RNA, 19 nt, Homo sapiens
  misc_RNA (1)...(19): siRNA sense strand
gaacaggaguaucauuuac

SEQ ID NO: 1560702 - RNA, 19 nt, Homo sapiens
  misc_RNA (1)...(19): siRNA sense strand
caaagucgaagacggauua

SEQ ID NO: 1560703 - RNA, 19 nt, Homo sapiens
  misc_RNA (1)...(19): siRNA sense strand
agucauagauucaauggua

SEQ ID NO: 1560704 - RNA, 19 nt, Homo sapiens
  misc_RNA (1)...(19): siRNA sense strand
gcagagacugaaagaauua

SEQ ID NO: 1560705 - RNA, 19 nt, Homo sapiens
  misc_RNA (1)...(19): siRNA sense strand
aaauguagcuucuaaguca

SEQ ID NO: 1560706 - RNA, 19 nt, Homo sapiens
  misc_RNA (1)...(19): siRNA sense strand
gcagcaaucugaauguguu

SEQ ID NO: 1560707 - RNA, 19 nt, Homo sapiens
  misc_RNA (1)...(19): siRNA sense strand
gcauauaaaucauguagag

SEQ ID NO: 1560708 - RNA, 19 nt, Homo sapiens
  misc_RNA (1)...(19): siRNA sense strand
caaaggcccuggaagaugu

SEQ ID NO: 1560709 - RNA, 19 nt, Homo sapiens
  misc_RNA (1)...(19): siRNA sense strand
aaagaagcauguacccaua

SEQ ID NO: 1560710 - RNA, 19 nt, Homo sapiens
  misc_RNA (1)...(19): siRNA sense strand
ucaaagcugugacccagua

SEQ ID NO: 1560711 - RNA, 19 nt, Homo sapiens
  misc_RNA (1)...(19): siRNA sense strand
caagagaaaucaagagucu

SEQ ID NO: 1560712 - RNA, 19 nt, Homo sapiens
  misc_RNA (1)...(19): siRNA sense strand
agacaggcguuguuuguuu

SEQ ID NO: 1560713 - RNA, 19 nt, Homo sapiens
  misc_RNA (1)...(19): siRNA sense strand
agaagcaacuccuaucaaa

SEQ ID NO: 1560714 - RNA, 19 nt, Homo sapiens
  misc_RNA (1)...(19): siRNA sense strand
ugacagaacuaugcagaaa

SEQ ID NO: 1560715 - RNA, 19 nt, Homo sapiens
  misc_RNA (1)...(19): siRNA sense strand
ccaagaagaccaaauaaau

SEQ ID NO: 1560716 - RNA, 19 nt, Homo sapiens
  misc_RNA (1)...(19): siRNA sense strand
gcacaacugcuucuacuug

SEQ ID NO: 1560717 - RNA, 19 nt, Homo sapiens
  misc_RNA (1)...(19): siRNA sense strand
gguaauagcagagguaauu

SEQ ID NO: 1560718 - RNA, 19 nt, Homo sapiens
  misc_RNA (1)...(19): siRNA sense strand
gcagaaagguaucaugcau

SEQ ID NO: 1560719 - RNA, 19 nt, Homo sapiens
  misc_RNA (1)...(19): siRNA sense strand
ugaaagaggccuuaaaugu

SEQ ID NO: 1560720 - RNA, 19 nt, Homo sapiens
  misc_RNA (1)...(19): siRNA sense strand
ccacagucauguuugagua

SEQ ID NO: 1560721 - RNA, 19 nt, Homo sapiens
  misc_RNA (1)...(19): siRNA sense strand
gaacuucugcucuuuacaa

SEQ ID NO: 1560722 - RNA, 19 nt, Homo sapiens
  misc_RNA (1)...(19): siRNA sense strand
aaacacgacucuauugaug

SEQ ID NO: 1560723 - RNA, 19 nt, Homo sapiens
  misc_RNA (1)...(19): siRNA sense strand
ccaaacauuuacaaccaua

SEQ ID NO: 1560724 - RNA, 19 nt, Homo sapiens
  misc_RNA (1)...(19): siRNA sense strand
aaagaggccuuaaaugugu

SEQ ID NO: 1560725 - RNA, 19 nt, Homo sapiens
  misc_RNA (1)...(19): siRNA sense strand
gagcagaaaugaucaagac

SEQ ID NO: 1560726 - RNA, 19 nt, Homo sapiens
  misc_RNA (1)...(19): siRNA sense strand
acacaucucuaaaggauug

SEQ ID NO: 1560727 - RNA, 19 nt, Homo sapiens
  misc_RNA (1)...(19): siRNA sense strand
gaaauggaccagcauacaa

SEQ ID NO: 1560728 - RNA, 19 nt, Homo sapiens
  misc_RNA (1)...(19): siRNA sense strand
cuacgagaaucaucuauug

SEQ ID NO: 1560729 - RNA, 19 nt, Homo sapiens
  misc_RNA (1)...(19): siRNA sense strand
gaaaagaaguccacagcaa

SEQ ID NO: 1560730 - RNA, 19 nt, Homo sapiens
  misc_RNA (1)...(19): siRNA sense strand
guagauauucuuccucuuu

SEQ ID NO: 1560731 - RNA, 19 nt, Homo sapiens
  misc_RNA (1)...(19): siRNA sense strand
acaagucacccauuuauaa

SEQ ID NO: 1560732 - RNA, 19 nt, Homo sapiens
  misc_RNA (1)...(19): siRNA sense strand
gaaaucagguacugcaaac

SEQ ID NO: 1560733 - RNA, 19 nt, Homo sapiens
  misc_RNA (1)...(19): siRNA sense strand
caacuucuaucauccacuu

SEQ ID NO: 1560734 - RNA, 19 nt, Homo sapiens
  misc_RNA (1)...(19): siRNA sense strand
aaacagaauuggguaagaa

SEQ ID NO: 1560735 - RNA, 19 nt, Homo sapiens
  misc_RNA (1)...(19): siRNA sense strand
gaaagacuucaguguaauu

SEQ ID NO: 1560736 - RNA, 19 nt, Homo sapiens
  misc_RNA (1)...(19): siRNA sense strand
ggaaagacuucaguguaau

SEQ ID NO: 1560737 - RNA, 19 nt, Homo sapiens
  misc_RNA (1)...(19): siRNA sense strand
ccacuugaauccuuuaauc

SEQ ID NO: 1560738 - RNA, 19 nt, Homo sapiens
  misc_RNA (1)...(19): siRNA sense strand
guaacaagucacccauuua

SEQ ID NO: 1560739 - RNA, 19 nt, Homo sapiens
  misc_RNA (1)...(19): siRNA sense strand
gcaagucccaugcacaauu

SEQ ID NO: 1560740 - RNA, 19 nt, Homo sapiens
  misc_RNA (1)...(19): siRNA sense strand
ggauugugcuggaaagaau

SEQ ID NO: 1560741 - RNA, 19 nt, Homo sapiens
  misc_RNA (1)...(19): siRNA sense strand
uaacaagucacccauuuau

SEQ ID NO: 1560742 - RNA, 19 nt, Homo sapiens
  misc_RNA (1)...(19): siRNA sense strand
guagugagaacaaacuuaa

SEQ ID NO: 1560743 - RNA, 19 nt, Homo sapiens
  misc_RNA (1)...(19): siRNA sense strand
gagccaagucucagguuua

SEQ ID NO: 1560744 - RNA, 19 nt, Homo sapiens
  misc_RNA (1)...(19): siRNA sense strand
ccacaccacucuucaaugg

SEQ ID NO: 1560745 - RNA, 19 nt, Homo sapiens
  misc_RNA (1)...(19): siRNA sense strand
gcacuuaaacgacuucauc

SEQ ID NO: 1560746 - RNA, 19 nt, Homo sapiens
  misc_RNA (1)...(19): siRNA sense strand
gacccaagaagaccaaaua

SEQ ID NO: 1560747 - RNA, 19 nt, Homo sapiens
  misc_RNA (1)...(19): siRNA sense strand
gugauaaccaucuuucuaa

SEQ ID NO: 1560748 - RNA, 19 nt, Homo sapiens
  misc_RNA (1)...(19): siRNA sense strand
cgagaaucaucuauuguga

SEQ ID NO: 1560749 - RNA, 19 nt, Homo sapiens
  misc_RNA (1)...(19): siRNA sense strand
gcagccaaaugcagucuga

SEQ ID NO: 1560750 - RNA, 19 nt, Homo sapiens
  misc_RNA (1)...(19): siRNA sense strand
acaauaccaucuccauaaa

SEQ ID NO: 1560751 - RNA, 19 nt, Homo sapiens
  misc_RNA (1)...(19): siRNA sense strand
uguaacaagucacccauuu

SEQ ID NO: 1560752 - RNA, 19 nt, Homo sapiens
  misc_RNA (1)...(19): siRNA sense strand
ucacagaacaggaguauca

SEQ ID NO: 1560753 - RNA, 19 nt, Homo sapiens
  misc_RNA (1)...(19): siRNA sense strand
cacaauaccaucuccauaa

SEQ ID NO: 1560754 - RNA, 19 nt, Homo sapiens
  misc_RNA (1)...(19): siRNA sense strand
cagcauuuauuccuacauu

SEQ ID NO: 1560755 - RNA, 19 nt, Homo sapiens
  misc_RNA (1)...(19): siRNA sense strand
uaaaucauguagagggaaa

SEQ ID NO: 1560756 - RNA, 19 nt, Homo sapiens
  misc_RNA (1)...(19): siRNA sense strand
ggaaaucagguacugcaaa

SEQ ID NO: 1560757 - RNA, 19 nt, Homo sapiens
  misc_RNA (1)...(19): siRNA sense strand
uuagugaaauccaaccuuu

SEQ ID NO: 1560758 - RNA, 19 nt, Homo sapiens
  misc_RNA (1)...(19): siRNA sense strand
ugagaucucuucaaacagu

SEQ ID NO: 1560759 - RNA, 19 nt, Homo sapiens
  misc_RNA (1)...(19): siRNA sense strand
gaauaucagcugccuucua

SEQ ID NO: 1560760 - RNA, 19 nt, Homo sapiens
  misc_RNA (1)...(19): siRNA sense strand
cagcaugucuagcuugaga

SEQ ID NO: 1560761 - RNA, 19 nt, Homo sapiens
  misc_RNA (1)...(19): siRNA sense strand
ggaauuugaagaugaaaga

SEQ ID NO: 1560762 - RNA, 19 nt, Homo sapiens
  misc_RNA (1)...(19): siRNA sense strand
cagaagaaacccaugauug

SEQ ID NO: 1560763 - RNA, 19 nt, Homo sapiens
  misc_RNA (1)...(19): siRNA sense strand
ccacccaucucacauaaca

SEQ ID NO: 1560764 - RNA, 19 nt, Homo sapiens
  misc_RNA (1)...(19): siRNA sense strand
acacguuccugcagcauuu

SEQ ID NO: 1560765 - RNA, 19 nt, Homo sapiens
  misc_RNA (1)...(19): siRNA sense strand
cuacaucucuagguuuaaa

SEQ ID NO: 1560766 - RNA, 19 nt, Homo sapiens
  misc_RNA (1)...(19): siRNA sense strand
cccauaauguggcaucuaa

SEQ ID NO: 1560767 - RNA, 19 nt, Homo sapiens
  misc_RNA (1)...(19): siRNA sense strand
gaaauacauugaagaacac

SEQ ID NO: 1560768 - RNA, 19 nt, Homo sapiens
  misc_RNA (1)...(19): siRNA sense strand
cagaacaggaguaucauuu

SEQ ID NO: 1560769 - RNA, 19 nt, Homo sapiens
  misc_RNA (1)...(19): siRNA sense strand
caagaagaccaaauaaauc

SEQ ID NO: 1560770 - RNA, 19 nt, Homo sapiens
  misc_RNA (1)...(19): siRNA sense strand
gcauugccuuugucugaaa

SEQ ID NO: 1560771 - RNA, 19 nt, Homo sapiens
  misc_RNA (1)...(19): siRNA sense strand
ugauauagaugaggaccua

SEQ ID NO: 1560772 - RNA, 19 nt, Homo sapiens
  misc_RNA (1)...(19): siRNA sense strand
ccauagugaugccaggaua

SEQ ID NO: 1560773 - RNA, 19 nt, Homo sapiens
  misc_RNA (1)...(19): siRNA sense strand
caagccaucuggaaagugu

SEQ ID NO: 1560774 - RNA, 19 nt, Homo sapiens
  misc_RNA (1)...(19): siRNA sense strand
caagucacccauuuauaaa

SEQ ID NO: 1560775 - RNA, 19 nt, Homo sapiens
  misc_RNA (1)...(19): siRNA sense strand
gaaaugucaagaacaauca

SEQ ID NO: 1560776 - RNA, 19 nt, Homo sapiens
  misc_RNA (1)...(19): siRNA sense strand
gagaacaccacucaguuga

SEQ ID NO: 1560777 - RNA, 19 nt, Homo sapiens
  misc_RNA (1)...(19): siRNA sense strand
ccaaagacgaugauagcua

SEQ ID NO: 1560778 - RNA, 19 nt, Homo sapiens
  misc_RNA (1)...(19): siRNA sense strand
caagucccaugcacaauuc

SEQ ID NO: 1560779 - RNA, 19 nt, Homo sapiens
  misc_RNA (1)...(19): siRNA sense strand
ggagugaggucguggguua

SEQ ID NO: 1560780 - RNA, 19 nt, Homo sapiens
  misc_RNA (1)...(19): siRNA sense strand
ggaagcggguggacagcaa

SEQ ID NO: 1560781 - RNA, 19 nt, Homo sapiens
  misc_RNA (1)...(19): siRNA sense strand
ggaaguaacauccuuugca

SEQ ID NO: 1560782 - RNA, 19 nt, Homo sapiens
  misc_RNA (1)...(19): siRNA sense strand
ggugaacccugccaagaag

SEQ ID NO: 1560783 - RNA, 19 nt, Homo sapiens
  misc_RNA (1)...(19): siRNA sense strand
gacugcagcugccaucgaa

SEQ ID NO: 1560784 - RNA, 19 nt, Homo sapiens
  misc_RNA (1)...(19): siRNA sense strand
guacaaaggccagaaacug

SEQ ID NO: 1560785 - RNA, 19 nt, Homo sapiens
  misc_RNA (1)...(19): siRNA sense strand
cugcagggcuccagcaaug

SEQ ID NO: 1560786 - RNA, 19 nt, Homo sapiens
  misc_RNA (1)...(19): siRNA sense strand
aguccaagaucucgccuuu

SEQ ID NO: 1560787 - RNA, 19 nt, Homo sapiens
  misc_RNA (1)...(19): siRNA sense strand
gggccucugucaaguacaa

SEQ ID NO: 1560788 - RNA, 19 nt, Homo sapiens
  misc_RNA (1)...(19): siRNA sense strand
caaguacaaaggccagaaa

SEQ ID NO: 1560789 - RNA, 19 nt, Homo sapiens
  misc_RNA (1)...(19): siRNA sense strand
uugcagccaucaacaaguu

SEQ ID NO: 1560790 - RNA, 19 nt, Homo sapiens
  misc_RNA (1)...(19): siRNA sense strand
uccaagaucucgccuuucu

SEQ ID NO: 1560791 - RNA, 19 nt, Homo sapiens
  misc_RNA (1)...(19): siRNA sense strand
ggacgucaacagccagaug

SEQ ID NO: 1560792 - RNA, 19 nt, Homo sapiens
  misc_RNA (1)...(19): siRNA sense strand
aggaguugcugauggaaga

SEQ ID NO: 1560793 - RNA, 19 nt, Homo sapiens
  misc_RNA (1)...(19): siRNA sense strand
gcacaccuaccucgacaag

SEQ ID NO: 1560794 - RNA, 19 nt, Homo sapiens
  misc_RNA (1)...(19): siRNA sense strand
ucgacaagcuuaagaucuc

SEQ ID NO: 1560795 - RNA, 19 nt, Homo sapiens
  misc_RNA (1)...(19): siRNA sense strand
acaccuaccucgacaagcu

SEQ ID NO: 1560796 - RNA, 19 nt, Homo sapiens
  misc_RNA (1)...(19): siRNA sense strand
ggaggaggacgaggacgaa

SEQ ID NO: 1560797 - RNA, 19 nt, Homo sapiens
  misc_RNA (1)...(19): siRNA sense strand
ggagccaggagcacaccua

SEQ ID NO: 1560798 - RNA, 19 nt, Homo sapiens
  misc_RNA (1)...(19): siRNA sense strand
gcugggccucugucaagua

SEQ ID NO: 1560799 - RNA, 19 nt, Homo sapiens
  misc_RNA (1)...(19): siRNA sense strand
gaaacuggacaaguacaag

SEQ ID NO: 1560800 - RNA, 19 nt, Homo sapiens
  misc_RNA (1)...(19): siRNA sense strand
gguggaaguaacauccuuu

SEQ ID NO: 1560801 - RNA, 19 nt, Homo sapiens
  misc_RNA (1)...(19): siRNA sense strand
aggaggaguugcugaugga

SEQ ID NO: 1560802 - RNA, 19 nt, Homo sapiens
  misc_RNA (1)...(19): siRNA sense strand
ggaggaggaguugcugaug

SEQ ID NO: 1560803 - RNA, 19 nt, Homo sapiens
  misc_RNA (1)...(19): siRNA sense strand
acgcacagauggacuacca

SEQ ID NO: 1560804 - RNA, 19 nt, Homo sapiens
  misc_RNA (1)...(19): siRNA sense strand
gaugccuccucccgagaug

SEQ ID NO: 1560805 - RNA, 19 nt, Homo sapiens
  misc_RNA (1)...(19): siRNA sense strand
ugcgggugcuccucaaaga

SEQ ID NO: 1560806 - RNA, 19 nt, Homo sapiens
  misc_RNA (1)...(19): siRNA sense strand
ggaggaggaggacguucug

SEQ ID NO: 1560807 - RNA, 19 nt, Homo sapiens
  misc_RNA (1)...(19): siRNA sense strand
ccagacggaaggaucaugu

SEQ ID NO: 1560808 - RNA, 19 nt, Homo sapiens
  misc_RNA (1)...(19): siRNA sense strand
gaucuaccagagccuguuc

SEQ ID NO: 1560809 - RNA, 19 nt, Homo sapiens
  misc_RNA (1)...(19): siRNA sense strand
ugagagcccagccagugaa

SEQ ID NO: 1560810 - RNA, 19 nt, Homo sapiens
  misc_RNA (1)...(19): siRNA sense strand
agaugcugcugguggaguu

SEQ ID NO: 1560811 - RNA, 19 nt, Homo sapiens
  misc_RNA (1)...(19): siRNA sense strand
ugccaucucugcaggacau

SEQ ID NO: 1560812 - RNA, 19 nt, Homo sapiens
  misc_RNA (1)...(19): siRNA sense strand
ccaaauaucccaagaggaa

SEQ ID NO: 1560813 - RNA, 19 nt, Homo sapiens
  misc_RNA (1)...(19): siRNA sense strand
cagcacccaugguuuauuu

SEQ ID NO: 1560814 - RNA, 19 nt, Homo sapiens
  misc_RNA (1)...(19): siRNA sense strand
gaacggaggacucuaaugg

SEQ ID NO: 1560815 - RNA, 19 nt, Homo sapiens
  misc_RNA (1)...(19): siRNA sense strand
ugacggcacuguggaagua

SEQ ID NO: 1560816 - RNA, 19 nt, Homo sapiens
  misc_RNA (1)...(19): siRNA sense strand
gaggaacggaggacucuaa

SEQ ID NO: 1560817 - RNA, 19 nt, Homo sapiens
  misc_RNA (1)...(19): siRNA sense strand
gagacgccgugacuuugaa

SEQ ID NO: 1560818 - RNA, 19 nt, Homo sapiens
  misc_RNA (1)...(19): siRNA sense strand
acucacacauggagaacua

SEQ ID NO: 1560819 - RNA, 19 nt, Homo sapiens
  misc_RNA (1)...(19): siRNA sense strand
ggagacgccgugacuuuga

SEQ ID NO: 1560820 - RNA, 19 nt, Homo sapiens
  misc_RNA (1)...(19): siRNA sense strand
acaccaagaugcagaaguc

SEQ ID NO: 1560821 - RNA, 19 nt, Homo sapiens
  misc_RNA (1)...(19): siRNA sense strand
ggucgugagccgugaguuu

SEQ ID NO: 1560822 - RNA, 19 nt, Homo sapiens
  misc_RNA (1)...(19): siRNA sense strand
acagagaacauaccagaga

SEQ ID NO: 1560823 - RNA, 19 nt, Homo sapiens
  misc_RNA (1)...(19): siRNA sense strand
acccaugguuuauuucaaa

SEQ ID NO: 1560824 - RNA, 19 nt, Homo sapiens
  misc_RNA (1)...(19): siRNA sense strand
aaacccaaauaucccaaga

SEQ ID NO: 1560825 - RNA, 19 nt, Homo sapiens
  misc_RNA (1)...(19): siRNA sense strand
ugcgggagaucguguggua

SEQ ID NO: 1560826 - RNA, 19 nt, Homo sapiens
  misc_RNA (1)...(19): siRNA sense strand
guccggaucucagacaaug

SEQ ID NO: 1560827 - RNA, 19 nt, Homo sapiens
  misc_RNA (1)...(19): siRNA sense strand
acggaggacucuaaugguu

SEQ ID NO: 1560828 - RNA, 19 nt, Homo sapiens
  misc_RNA (1)...(19): siRNA sense strand
gcacccaugguuuauuuca

SEQ ID NO: 1560829 - RNA, 19 nt, Homo sapiens
  misc_RNA (1)...(19): siRNA sense strand
caucgugucuggaggaaaa

SEQ ID NO: 1560830 - RNA, 19 nt, Homo sapiens
  misc_RNA (1)...(19): siRNA sense strand
cagacaauggucccuauga

SEQ ID NO: 1560831 - RNA, 19 nt, Homo sapiens
  misc_RNA (1)...(19): siRNA sense strand
agacaauggucccuaugag

SEQ ID NO: 1560832 - RNA, 19 nt, Homo sapiens
  misc_RNA (1)...(19): siRNA sense strand
gaaggugguccuggcauca

SEQ ID NO: 1560833 - RNA, 19 nt, Homo sapiens
  misc_RNA (1)...(19): siRNA sense strand
gacaauggucccuaugagu

SEQ ID NO: 1560834 - RNA, 19 nt, Homo sapiens
  misc_RNA (1)...(19): siRNA sense strand
cuaccaagcccagaacuuc

SEQ ID NO: 1560835 - RNA, 19 nt, Homo sapiens
  misc_RNA (1)...(19): siRNA sense strand
cggcucaucguguuugaaa

SEQ ID NO: 1560836 - RNA, 19 nt, Homo sapiens
  misc_RNA (1)...(19): siRNA sense strand
gccaaccacagagaacaua

SEQ ID NO: 1560837 - RNA, 19 nt, Homo sapiens
  misc_RNA (1)...(19): siRNA sense strand
ggaacggaggacucuaaug

SEQ ID NO: 1560838 - RNA, 19 nt, Homo sapiens
  misc_RNA (1)...(19): siRNA sense strand
caccaacuacucacacaug

SEQ ID NO: 1560839 - RNA, 19 nt, Homo sapiens
  misc_RNA (1)...(19): siRNA sense strand
ccaaaggacccaaaauugu

SEQ ID NO: 1560840 - RNA, 19 nt, Homo sapiens
  misc_RNA (1)...(19): siRNA sense strand
aguguaacuucaagacaga

SEQ ID NO: 1560841 - RNA, 19 nt, Homo sapiens
  misc_RNA (1)...(19): siRNA sense strand
cuggagacgccgugacuuu

SEQ ID NO: 1560842 - RNA, 19 nt, Homo sapiens
  misc_RNA (1)...(19): siRNA sense strand
caggcaacaucuuccucaa

SEQ ID NO: 1560843 - RNA, 19 nt, Homo sapiens
  misc_RNA (1)...(19): siRNA sense strand
gcuccucccaccuccauug

SEQ ID NO: 1560844 - RNA, 19 nt, Homo sapiens
  misc_RNA (1)...(19): siRNA sense strand
gcaacaucuuccucaacgu

SEQ ID NO: 1560845 - RNA, 19 nt, Homo sapiens
  misc_RNA (1)...(19): siRNA sense strand
gugcucgcccugacaguga

SEQ ID NO: 1560846 - RNA, 19 nt, Homo sapiens
  misc_RNA (1)...(19): siRNA sense strand
acccacagaucgacaacga

SEQ ID NO: 1560847 - RNA, 19 nt, Homo sapiens
  misc_RNA (1)...(19): siRNA sense strand
agugguggcugcugacaca

SEQ ID NO: 1560848 - RNA, 19 nt, Homo sapiens
  misc_RNA (1)...(19): siRNA sense strand
ccucccaccuccauugaag

SEQ ID NO: 1560849 - RNA, 19 nt, Homo sapiens
  misc_RNA (1)...(19): siRNA sense strand
cacccaugguuuauuucaa

SEQ ID NO: 1560850 - RNA, 19 nt, Homo sapiens
  misc_RNA (1)...(19): siRNA sense strand
caaaggacccaaaauugug

SEQ ID NO: 1560851 - RNA, 19 nt, Homo sapiens
  misc_RNA (1)...(19): siRNA sense strand
gauucugguccauggguuu

SEQ ID NO: 1560852 - RNA, 19 nt, Homo sapiens
  misc_RNA (1)...(19): siRNA sense strand
ggcaucaggcaacaucuuc

SEQ ID NO: 1560853 - RNA, 19 nt, Homo sapiens
  misc_RNA (1)...(19): siRNA sense strand
gccauguucuccaccaacu

SEQ ID NO: 1560854 - RNA, 19 nt, Homo sapiens
  misc_RNA (1)...(19): siRNA sense strand
caccuucgacgccauguuc

SEQ ID NO: 1560855 - RNA, 19 nt, Homo sapiens
  misc_RNA (1)...(19): siRNA sense strand
gcuaccaagcccagaacuu

SEQ ID NO: 1560856 - RNA, 19 nt, Homo sapiens
  misc_RNA (1)...(19): siRNA sense strand
ggaggaaugugauaacuag

SEQ ID NO: 1560857 - RNA, 19 nt, Homo sapiens
  misc_RNA (1)...(19): siRNA sense strand
ucucucagcuuucguguug

SEQ ID NO: 1560858 - RNA, 19 nt, Homo sapiens
  misc_RNA (1)...(19): siRNA sense strand
uuacugagccucuggauga

SEQ ID NO: 1560859 - RNA, 19 nt, Homo sapiens
  misc_RNA (1)...(19): siRNA sense strand
ggaagucaacuaugcuuug

SEQ ID NO: 1560860 - RNA, 19 nt, Homo sapiens
  misc_RNA (1)...(19): siRNA sense strand
gcgagcgucucucagcuuu

SEQ ID NO: 1560861 - RNA, 19 nt, Homo sapiens
  misc_RNA (1)...(19): siRNA sense strand
gaagucaacuaugcuuugg

SEQ ID NO: 1560862 - RNA, 19 nt, Homo sapiens
  misc_RNA (1)...(19): siRNA sense strand
gcacugaggaagcugagaa

SEQ ID NO: 1560863 - RNA, 19 nt, Homo sapiens
  misc_RNA (1)...(19): siRNA sense strand
agaaggccauggagaagga

SEQ ID NO: 1560864 - RNA, 19 nt, Homo sapiens
  misc_RNA (1)...(19): siRNA sense strand
cguggaacguggucuuugu

SEQ ID NO: 1560865 - RNA, 19 nt, Homo sapiens
  misc_RNA (1)...(19): siRNA sense strand
gagcgucucucagcuuucg

SEQ ID NO: 1560866 - RNA, 19 nt, Homo sapiens
  misc_RNA (1)...(19): siRNA sense strand
gcagaaggccauggagaag

SEQ ID NO: 1560867 - RNA, 19 nt, Homo sapiens
  misc_RNA (1)...(19): siRNA sense strand
gggaagucaacuaugcuuu

SEQ ID NO: 1560868 - RNA, 19 nt, Homo sapiens
  misc_RNA (1)...(19): siRNA sense strand
ccagggcccaccuuacuga

SEQ ID NO: 1560869 - RNA, 19 nt, Homo sapiens
  misc_RNA (1)...(19): siRNA sense strand
ccggaggacugugaugaug

SEQ ID NO: 1560870 - RNA, 19 nt, Homo sapiens
  misc_RNA (1)...(19): siRNA sense strand
cgaccgggaagucaacuau

SEQ ID NO: 1560871 - RNA, 19 nt, Homo sapiens
  misc_RNA (1)...(19): siRNA sense strand
ugccagagccagcacuaaa

SEQ ID NO: 1560872 - RNA, 19 nt, Homo sapiens
  misc_RNA (1)...(19): siRNA sense strand
gagccagcacuaaaguaga

SEQ ID NO: 1560873 - RNA, 19 nt, Homo sapiens
  misc_RNA (1)...(19): siRNA sense strand
cagagccagcacuaaagua

SEQ ID NO: 1560874 - RNA, 19 nt, Homo sapiens
  misc_RNA (1)...(19): siRNA sense strand
gaugccgaauuccaagagu

SEQ ID NO: 1560875 - RNA, 19 nt, Homo sapiens
  misc_RNA (1)...(19): siRNA sense strand
gcccagguguuuggagaca

SEQ ID NO: 1560876 - RNA, 19 nt, Homo sapiens
  misc_RNA (1)...(19): siRNA sense strand
ccagagccagcacuaaagu

SEQ ID NO: 1560877 - RNA, 19 nt, Homo sapiens
  misc_RNA (1)...(19): siRNA sense strand
uggaggaaugugauaacua

SEQ ID NO: 1560878 - RNA, 19 nt, Homo sapiens
  misc_RNA (1)...(19): siRNA sense strand
gaaaggagcacaagaaauu

SEQ ID NO: 1560879 - RNA, 19 nt, Homo sapiens
  misc_RNA (1)...(19): siRNA sense strand
gaacauagaugcuuuuauc

SEQ ID NO: 1560880 - RNA, 19 nt, Homo sapiens
  misc_RNA (1)...(19): siRNA sense strand
gcaggugacuagccaaauu

SEQ ID NO: 1560881 - RNA, 19 nt, Homo sapiens
  misc_RNA (1)...(19): siRNA sense strand
caagaaagacaagaacaua

SEQ ID NO: 1560882 - RNA, 19 nt, Homo sapiens
  misc_RNA (1)...(19): siRNA sense strand
ccaaguacgugauccaaug

SEQ ID NO: 1560883 - RNA, 19 nt, Homo sapiens
  misc_RNA (1)...(19): siRNA sense strand
gcaauacuuggguuacuua

SEQ ID NO: 1560884 - RNA, 19 nt, Homo sapiens
  misc_RNA (1)...(19): siRNA sense strand
ugaaagaagccaagaaaga

SEQ ID NO: 1560885 - RNA, 19 nt, Homo sapiens
  misc_RNA (1)...(19): siRNA sense strand
caguaaagguuguguuguu

SEQ ID NO: 1560886 - RNA, 19 nt, Homo sapiens
  misc_RNA (1)...(19): siRNA sense strand
gaucuuggauuggaaagga

SEQ ID NO: 1560887 - RNA, 19 nt, Homo sapiens
  misc_RNA (1)...(19): siRNA sense strand
aaacaggaauuaucguuca

SEQ ID NO: 1560888 - RNA, 19 nt, Homo sapiens
  misc_RNA (1)...(19): siRNA sense strand
acaagaacauagaugcuuu

SEQ ID NO: 1560889 - RNA, 19 nt, Homo sapiens
  misc_RNA (1)...(19): siRNA sense strand
acacucauguaacaccuua

SEQ ID NO: 1560890 - RNA, 19 nt, Homo sapiens
  misc_RNA (1)...(19): siRNA sense strand
gauaaaauguucccgaaug

SEQ ID NO: 1560891 - RNA, 19 nt, Homo sapiens
  misc_RNA (1)...(19): siRNA sense strand
ggaagcaauacuuggguua

SEQ ID NO: 1560892 - RNA, 19 nt, Homo sapiens
  misc_RNA (1)...(19): siRNA sense strand
gaauaaggacuccauagca

SEQ ID NO: 1560893 - RNA, 19 nt, Homo sapiens
  misc_RNA (1)...(19): siRNA sense strand
gaauuaucguucacacuca

SEQ ID NO: 1560894 - RNA, 19 nt, Homo sapiens
  misc_RNA (1)...(19): siRNA sense strand
gcacaaacaggaauuaucg

SEQ ID NO: 1560895 - RNA, 19 nt, Homo sapiens
  misc_RNA (1)...(19): siRNA sense strand
gaaagaagccaagaaagac

SEQ ID NO: 1560896 - RNA, 19 nt, Homo sapiens
  misc_RNA (1)...(19): siRNA sense strand
gcacaaauucagcugcuau

SEQ ID NO: 1560897 - RNA, 19 nt, Homo sapiens
  misc_RNA (1)...(19): siRNA sense strand
caggguucaugaaguauuu

SEQ ID NO: 1560898 - RNA, 19 nt, Homo sapiens
  misc_RNA (1)...(19): siRNA sense strand
aaauucagcugcuaugaca

SEQ ID NO: 1560899 - RNA, 19 nt, Homo sapiens
  misc_RNA (1)...(19): siRNA sense strand
acacaauacugacuuugga

SEQ ID NO: 1560900 - RNA, 19 nt, Homo sapiens
  misc_RNA (1)...(19): siRNA sense strand
ggaaaggagcacaagaaau

SEQ ID NO: 1560901 - RNA, 19 nt, Homo sapiens
  misc_RNA (1)...(19): siRNA sense strand
gaaagacaagaacauagau

SEQ ID NO: 1560902 - RNA, 19 nt, Homo sapiens
  misc_RNA (1)...(19): siRNA sense strand
agaacacaauacugacuuu

SEQ ID NO: 1560903 - RNA, 19 nt, Homo sapiens
  misc_RNA (1)...(19): siRNA sense strand
gugacuagccaaauucauu

SEQ ID NO: 1560904 - RNA, 19 nt, Homo sapiens
  misc_RNA (1)...(19): siRNA sense strand
aaagugaggaccugugaaa

SEQ ID NO: 1560905 - RNA, 19 nt, Homo sapiens
  misc_RNA (1)...(19): siRNA sense strand
gaacacaauacugacuuug

SEQ ID NO: 1560906 - RNA, 19 nt, Homo sapiens
  misc_RNA (1)...(19): siRNA sense strand
agaaagacaagaacauaga

SEQ ID NO: 1560907 - RNA, 19 nt, Homo sapiens
  misc_RNA (1)...(19): siRNA sense strand
aauaaggacuccauagcau

SEQ ID NO: 1560908 - RNA, 19 nt, Homo sapiens
  misc_RNA (1)...(19): siRNA sense strand
aguaaagguuguguuguuu

SEQ ID NO: 1560909 - RNA, 19 nt, Homo sapiens
  misc_RNA (1)...(19): siRNA sense strand
uauccaccaucacuaaaug

SEQ ID NO: 1560910 - RNA, 19 nt, Homo sapiens
  misc_RNA (1)...(19): siRNA sense strand
aaugagaucuuggauugga

SEQ ID NO: 1560911 - RNA, 19 nt, Homo sapiens
  misc_RNA (1)...(19): siRNA sense strand
ggaauaaggacuccauagc

SEQ ID NO: 1560912 - RNA, 19 nt, Homo sapiens
  misc_RNA (1)...(19): siRNA sense strand
gacaagaacauagaugcuu

SEQ ID NO: 1560913 - RNA, 19 nt, Homo sapiens
  misc_RNA (1)...(19): siRNA sense strand
ugacgcaucuuuuacuuug

SEQ ID NO: 1560914 - RNA, 19 nt, Homo sapiens
  misc_RNA (1)...(19): siRNA sense strand
caaguacgugauccaauga

SEQ ID NO: 1560915 - RNA, 19 nt, Homo sapiens
  misc_RNA (1)...(19): siRNA sense strand
cagcugcuaugacaauuuu

SEQ ID NO: 1560916 - RNA, 19 nt, Homo sapiens
  misc_RNA (1)...(19): siRNA sense strand
cucgucauccugagaauua

SEQ ID NO: 1560917 - RNA, 19 nt, Homo sapiens
  misc_RNA (1)...(19): siRNA sense strand
uugauuggauucaguaaag

SEQ ID NO: 1560918 - RNA, 19 nt, Homo sapiens
  misc_RNA (1)...(19): siRNA sense strand
gauccaguccuucucauac

SEQ ID NO: 1560919 - RNA, 19 nt, Homo sapiens
  misc_RNA (1)...(19): siRNA sense strand
ccaagaaagacaagaacau

SEQ ID NO: 1560920 - RNA, 19 nt, Homo sapiens
  misc_RNA (1)...(19): siRNA sense strand
aaacuggagucuagaaaau

SEQ ID NO: 1560921 - RNA, 19 nt, Homo sapiens
  misc_RNA (1)...(19): siRNA sense strand
ugaugagucugccaugagu

SEQ ID NO: 1560922 - RNA, 19 nt, Homo sapiens
  misc_RNA (1)...(19): siRNA sense strand
guagauccaguccuucuca

SEQ ID NO: 1560923 - RNA, 19 nt, Homo sapiens
  misc_RNA (1)...(19): siRNA sense strand
auacugacuuuggagcuuu

SEQ ID NO: 1560924 - RNA, 19 nt, Homo sapiens
  misc_RNA (1)...(19): siRNA sense strand
uccauagcaucuaacugua

SEQ ID NO: 1560925 - RNA, 19 nt, Homo sapiens
  misc_RNA (1)...(19): siRNA sense strand
uggaaaggagcacaagaaa

SEQ ID NO: 1560926 - RNA, 19 nt, Homo sapiens
  misc_RNA (1)...(19): siRNA sense strand
acaaacaggaauuaucguu

SEQ ID NO: 1560927 - RNA, 19 nt, Homo sapiens
  misc_RNA (1)...(19): siRNA sense strand
uaaagguuguguuguuuug

SEQ ID NO: 1560928 - RNA, 19 nt, Homo sapiens
  misc_RNA (1)...(19): siRNA sense strand
gagaauuaucaaugggaaa

SEQ ID NO: 1560929 - RNA, 19 nt, Homo sapiens
  misc_RNA (1)...(19): siRNA sense strand
gaaaacuggagucuagaaa

SEQ ID NO: 1560930 - RNA, 19 nt, Homo sapiens
  misc_RNA (1)...(19): siRNA sense strand
gcccaccgguuccccaaua

SEQ ID NO: 1560931 - RNA, 19 nt, Homo sapiens
  misc_RNA (1)...(19): siRNA sense strand
aaaggagcacaagaaauuu

SEQ ID NO: 1560932 - RNA, 19 nt, Homo sapiens
  misc_RNA (1)...(19): siRNA sense strand
auacuuggguuacuuaucc

SEQ ID NO: 1560933 - RNA, 19 nt, Homo sapiens
  misc_RNA (1)...(19): siRNA sense strand
cuccauagcaucuaacugu

SEQ ID NO: 1560934 - RNA, 19 nt, Homo sapiens
  misc_RNA (1)...(19): siRNA sense strand
gaauugaaagaagccaaga

SEQ ID NO: 1560935 - RNA, 19 nt, Homo sapiens
  misc_RNA (1)...(19): siRNA sense strand
cacuaaaugacgcaucuuu

SEQ ID NO: 1560936 - RNA, 19 nt, Homo sapiens
  misc_RNA (1)...(19): siRNA sense strand
gcuggaugguggucauucu

SEQ ID NO: 1560937 - RNA, 19 nt, Homo sapiens
  misc_RNA (1)...(19): siRNA sense strand
cagaacacaauacugacuu

SEQ ID NO: 1560938 - RNA, 19 nt, Homo sapiens
  misc_RNA (1)...(19): siRNA sense strand
guacgugauccaaugagau

SEQ ID NO: 1560939 - RNA, 19 nt, Homo sapiens
  misc_RNA (1)...(19): siRNA sense strand
ucugaugagucugccauga

SEQ ID NO: 1560940 - RNA, 19 nt, Homo sapiens
  misc_RNA (1)...(19): siRNA sense strand
uccaguccuucucauacua

SEQ ID NO: 1560941 - RNA, 19 nt, Homo sapiens
  misc_RNA (1)...(19): siRNA sense strand
gaagcaauacuuggguuac

SEQ ID NO: 1560942 - RNA, 19 nt, Homo sapiens
  misc_RNA (1)...(19): siRNA sense strand
caaauucagcugcuaugac

SEQ ID NO: 1560943 - RNA, 19 nt, Homo sapiens
  misc_RNA (1)...(19): siRNA sense strand
uaaggacuccauagcaucu

SEQ ID NO: 1560944 - RNA, 19 nt, Homo sapiens
  misc_RNA (1)...(19): siRNA sense strand
cguucacacucauguaaca

SEQ ID NO: 1560945 - RNA, 19 nt, Homo sapiens
  misc_RNA (1)...(19): siRNA sense strand
aaagacaagaacauagaug

SEQ ID NO: 1560946 - RNA, 19 nt, Homo sapiens
  misc_RNA (1)...(19): siRNA sense strand
aaagaagccaagaaagaca

SEQ ID NO: 1560947 - RNA, 19 nt, Homo sapiens
  misc_RNA (1)...(19): siRNA sense strand
ggaaaacuggagucuagaa

SEQ ID NO: 1560948 - RNA, 19 nt, Homo sapiens
  misc_RNA (1)...(19): siRNA sense strand
aggacuccauagcaucuaa

SEQ ID NO: 1560949 - RNA, 19 nt, Homo sapiens
  misc_RNA (1)...(19): siRNA sense strand
auugaaagaagccaagaaa

SEQ ID NO: 1560950 - RNA, 19 nt, Homo sapiens
  misc_RNA (1)...(19): siRNA sense strand
uuggaaaggagcacaagaa

SEQ ID NO: 1560951 - RNA, 19 nt, Homo sapiens
  misc_RNA (1)...(19): siRNA sense strand
cuugaaagaauuugcacaa

SEQ ID NO: 1560952 - RNA, 19 nt, Homo sapiens
  misc_RNA (1)...(19): siRNA sense strand
aagaaagacaagaacauag

SEQ ID NO: 1560953 - RNA, 19 nt, Homo sapiens
  misc_RNA (1)...(19): siRNA sense strand
ugagaucuuggauuggaaa

SEQ ID NO: 1560954 - RNA, 19 nt, Homo sapiens
  misc_RNA (1)...(19): siRNA sense strand
cauucuggaggaagcaaua

SEQ ID NO: 1560955 - RNA, 19 nt, Homo sapiens
  misc_RNA (1)...(19): siRNA sense strand
gguggucauucuggaggaa

SEQ ID NO: 1560956 - RNA, 19 nt, Homo sapiens
  misc_RNA (1)...(19): siRNA sense strand
ugaguuggcuuguggauua

SEQ ID NO: 1560957 - RNA, 19 nt, Homo sapiens
  misc_RNA (1)...(19): siRNA sense strand
uaaccaaacucucucaaga

SEQ ID NO: 1560958 - RNA, 19 nt, Homo sapiens
  misc_RNA (1)...(19): siRNA sense strand
cggaauauguucagcauuu

SEQ ID NO: 1560959 - RNA, 19 nt, Homo sapiens
  misc_RNA (1)...(19): siRNA sense strand
ggaagggccugcagcaauc

SEQ ID NO: 1560960 - RNA, 19 nt, Homo sapiens
  misc_RNA (1)...(19): siRNA sense strand
caaacucucucaagacuac

SEQ ID NO: 1560961 - RNA, 19 nt, Homo sapiens
  misc_RNA (1)...(19): siRNA sense strand
gcucuucccuguaccguau

SEQ ID NO: 1560962 - RNA, 19 nt, Homo sapiens
  misc_RNA (1)...(19): siRNA sense strand
uauaaacucuaccagcauu

SEQ ID NO: 1560963 - RNA, 19 nt, Homo sapiens
  misc_RNA (1)...(19): siRNA sense strand
ggaauauguucagcauuug

SEQ ID NO: 1560964 - RNA, 19 nt, Homo sapiens
  misc_RNA (1)...(19): siRNA sense strand
cauacaagcucuauuugag

SEQ ID NO: 1560965 - RNA, 19 nt, Homo sapiens
  misc_RNA (1)...(19): siRNA sense strand
uucauagccuuucuacuua

SEQ ID NO: 1560966 - RNA, 19 nt, Homo sapiens
  misc_RNA (1)...(19): siRNA sense strand
gguuucaacuggacuucua

SEQ ID NO: 1560967 - RNA, 19 nt, Homo sapiens
  misc_RNA (1)...(19): siRNA sense strand
caccauacaagcucuauuu

SEQ ID NO: 1560968 - RNA, 19 nt, Homo sapiens
  misc_RNA (1)...(19): siRNA sense strand
cuucauagccuuucuacuu

SEQ ID NO: 1560969 - RNA, 19 nt, Homo sapiens
  misc_RNA (1)...(19): siRNA sense strand
cgucuucucucucuucaug

SEQ ID NO: 1560970 - RNA, 19 nt, Homo sapiens
  misc_RNA (1)...(19): siRNA sense strand
ggacuucuaucaggucuac

SEQ ID NO: 1560971 - RNA, 19 nt, Homo sapiens
  misc_RNA (1)...(19): siRNA sense strand
ucaaauugccauccucuau

SEQ ID NO: 1560972 - RNA, 19 nt, Homo sapiens
  misc_RNA (1)...(19): siRNA sense strand
ccacagcccugcucuucuc

SEQ ID NO: 1560973 - RNA, 19 nt, Homo sapiens
  misc_RNA (1)...(19): siRNA sense strand
ucacuaugcugcuuaacca

SEQ ID NO: 1560974 - RNA, 19 nt, Homo sapiens
  misc_RNA (1)...(19): siRNA sense strand
ggcuggaacugucaagaug

SEQ ID NO: 1560975 - RNA, 19 nt, Homo sapiens
  misc_RNA (1)...(19): siRNA sense strand
gcuuguggauuauacuuuc

SEQ ID NO: 1560976 - RNA, 19 nt, Homo sapiens
  misc_RNA (1)...(19): siRNA sense strand
gcuggugacugccuaccuu

SEQ ID NO: 1560977 - RNA, 19 nt, Homo sapiens
  misc_RNA (1)...(19): siRNA sense strand
caaauugccauccucuaug

SEQ ID NO: 1560978 - RNA, 19 nt, Homo sapiens
  misc_RNA (1)...(19): siRNA sense strand
aaauugccauccucuaugu

SEQ ID NO: 1560979 - RNA, 19 nt, Homo sapiens
  misc_RNA (1)...(19): siRNA sense strand
gaauucuuguguccucuuc

SEQ ID NO: 1560980 - RNA, 19 nt, Homo sapiens
  misc_RNA (1)...(19): siRNA sense strand
cauagccuuucuacuuauu

SEQ ID NO: 1560981 - RNA, 19 nt, Homo sapiens
  misc_RNA (1)...(19): siRNA sense strand
gauuauacuuucccagcau

SEQ ID NO: 1560982 - RNA, 19 nt, Homo sapiens
  misc_RNA (1)...(19): siRNA sense strand
ccuccucccuuguggauug

SEQ ID NO: 1560983 - RNA, 19 nt, Homo sapiens
  misc_RNA (1)...(19): siRNA sense strand
ccauacaagcucuauuuga

SEQ ID NO: 1560984 - RNA, 19 nt, Homo sapiens
  misc_RNA (1)...(19): siRNA sense strand
cauuugcucugcugucaug

SEQ ID NO: 1560985 - RNA, 19 nt, Homo sapiens
  misc_RNA (1)...(19): siRNA sense strand
cuaccagcauuacuacuuc

SEQ ID NO: 1560986 - RNA, 19 nt, Homo sapiens
  misc_RNA (1)...(19): siRNA sense strand
aaacaggcacucggaauau

SEQ ID NO: 1560987 - RNA, 19 nt, Homo sapiens
  misc_RNA (1)...(19): siRNA sense strand
gagagugucaucuucaucu

SEQ ID NO: 1560988 - RNA, 19 nt, Homo sapiens
  misc_RNA (1)...(19): siRNA sense strand
ucauagccuuucuacuuau

SEQ ID NO: 1560989 - RNA, 19 nt, Homo sapiens
  misc_RNA (1)...(19): siRNA sense strand
gagugucaucuucaucuuu

SEQ ID NO: 1560990 - RNA, 19 nt, Homo sapiens
  misc_RNA (1)...(19): siRNA sense strand
uagccuuucuacuuauuga

SEQ ID NO: 1560991 - RNA, 19 nt, Homo sapiens
  misc_RNA (1)...(19): siRNA sense strand
agugucaucuucaucuuug

SEQ ID NO: 1560992 - RNA, 19 nt, Homo sapiens
  misc_RNA (1)...(19): siRNA sense strand
gcucugcugucauggugau

SEQ ID NO: 1560993 - RNA, 19 nt, Homo sapiens
  misc_RNA (1)...(19): siRNA sense strand
gaucccagcuaccuuugcu

SEQ ID NO: 1560994 - RNA, 19 nt, Homo sapiens
  misc_RNA (1)...(19): siRNA sense strand
gcuuggcucuucccuguac

SEQ ID NO: 1560995 - RNA, 19 nt, Homo sapiens
  misc_RNA (1)...(19): siRNA sense strand
guggaucccagcuaccuuu

SEQ ID NO: 1560996 - RNA, 19 nt, Homo sapiens
  misc_RNA (1)...(19): siRNA sense strand
gcauuaucuucuccagcuu

SEQ ID NO: 1560997 - RNA, 19 nt, Homo sapiens
  misc_RNA (1)...(19): siRNA sense strand
agacuacuuugugcugcua

SEQ ID NO: 1560998 - RNA, 19 nt, Homo sapiens
  misc_RNA (1)...(19): siRNA sense strand
ccggguaccucugcacuca

SEQ ID NO: 1560999 - RNA, 19 nt, Homo sapiens
  misc_RNA (1)...(19): siRNA sense strand
gcaggcugguguacucaac

SEQ ID NO: 1561000 - RNA, 19 nt, Homo sapiens
  misc_RNA (1)...(19): siRNA sense strand
gggcuggaacugucaagau

SEQ ID NO: 1561001 - RNA, 19 nt, Homo sapiens
  misc_RNA (1)...(19): siRNA sense strand
gcucaucgucgucuucucu

SEQ ID NO: 1561002 - RNA, 19 nt, Homo sapiens
  misc_RNA (1)...(19): siRNA sense strand
ccucuacaguccucuuugg

SEQ ID NO: 1561003 - RNA, 19 nt, Homo sapiens
  misc_RNA (1)...(19): siRNA sense strand
agagcaggcugguguacuc

SEQ ID NO: 1561004 - RNA, 19 nt, Homo sapiens
  misc_RNA (1)...(19): siRNA sense strand
gaguuggcuuguggauuau

SEQ ID NO: 1561005 - RNA, 19 nt, Homo sapiens
  misc_RNA (1)...(19): siRNA sense strand
uuacucacuaugcugcuua

SEQ ID NO: 1561006 - RNA, 19 nt, Homo sapiens
  misc_RNA (1)...(19): siRNA sense strand
uggaagggccugcagcaau

SEQ ID NO: 1561007 - RNA, 19 nt, Homo sapiens
  misc_RNA (1)...(19): siRNA sense strand
agaaaggugaucccugaga

SEQ ID NO: 1561008 - RNA, 19 nt, Homo sapiens
  misc_RNA (1)...(19): siRNA sense strand
cagcaaucccuccuuccuu

SEQ ID NO: 1561009 - RNA, 19 nt, Homo sapiens
  misc_RNA (1)...(19): siRNA sense strand
uaucuucuccagcuucaug

SEQ ID NO: 1561010 - RNA, 19 nt, Homo sapiens
  misc_RNA (1)...(19): siRNA sense strand
caucuucaucuuugucuuc

SEQ ID NO: 1561011 - RNA, 19 nt, Homo sapiens
  misc_RNA (1)...(19): siRNA sense strand
gcaccauacaagcucuauu

SEQ ID NO: 1561012 - RNA, 19 nt, Homo sapiens
  misc_RNA (1)...(19): siRNA sense strand
gugacugccuaccuugcuu

SEQ ID NO: 1561013 - RNA, 19 nt, Homo sapiens
  misc_RNA (1)...(19): siRNA sense strand
ggacucuucaccgugguaa

SEQ ID NO: 1561014 - RNA, 19 nt, Homo sapiens
  misc_RNA (1)...(19): siRNA sense strand
aaaacaggcacucggaaua

SEQ ID NO: 1561015 - RNA, 19 nt, Homo sapiens
  misc_RNA (1)...(19): siRNA sense strand
cucccugacuuacucacua

SEQ ID NO: 1561016 - RNA, 19 nt, Homo sapiens
  misc_RNA (1)...(19): siRNA sense strand
gcaguggugggacucuuca

SEQ ID NO: 1561017 - RNA, 19 nt, Homo sapiens
  misc_RNA (1)...(19): siRNA sense strand
gacagagcaggcuggugua

SEQ ID NO: 1561018 - RNA, 19 nt, Homo sapiens
  misc_RNA (1)...(19): siRNA sense strand
ggaguccuucauagccuuu

SEQ ID NO: 1561019 - RNA, 19 nt, Homo sapiens
  misc_RNA (1)...(19): siRNA sense strand
auacaagcucuauuugaga

SEQ ID NO: 1561020 - RNA, 19 nt, Homo sapiens
  misc_RNA (1)...(19): siRNA sense strand
cuaccucuauaaacucuac

SEQ ID NO: 1561021 - RNA, 19 nt, Homo sapiens
  misc_RNA (1)...(19): siRNA sense strand
ccgguggaguccuucauag

SEQ ID NO: 1561022 - RNA, 19 nt, Homo sapiens
  misc_RNA (1)...(19): siRNA sense strand
agaguccgguggaguccuu

SEQ ID NO: 1561023 - RNA, 19 nt, Homo sapiens
  misc_RNA (1)...(19): siRNA sense strand
agagugucaucuucaucuu

SEQ ID NO: 1561024 - RNA, 19 nt, Homo sapiens
  misc_RNA (1)...(19): siRNA sense strand
ccaaacucucucaagacua

SEQ ID NO: 1561025 - RNA, 19 nt, Homo sapiens
  misc_RNA (1)...(19): siRNA sense strand
gaauauguucagcauuugc

SEQ ID NO: 1561026 - RNA, 19 nt, Homo sapiens
  misc_RNA (1)...(19): siRNA sense strand
cuacugaggagcccuaugc

SEQ ID NO: 1561027 - RNA, 19 nt, Homo sapiens
  misc_RNA (1)...(19): siRNA sense strand
caaauccgcugacugaaau

SEQ ID NO: 1561028 - RNA, 19 nt, Homo sapiens
  misc_RNA (1)...(19): siRNA sense strand
agagaaagacaaagaguua

SEQ ID NO: 1561029 - RNA, 19 nt, Homo sapiens
  misc_RNA (1)...(19): siRNA sense strand
ucccuuagcugacgaauau

SEQ ID NO: 1561030 - RNA, 19 nt, Homo sapiens
  misc_RNA (1)...(19): siRNA sense strand
auacuuaaguguccuacua

SEQ ID NO: 1561031 - RNA, 19 nt, Homo sapiens
  misc_RNA (1)...(19): siRNA sense strand
gaauaugacccuauguuuc

SEQ ID NO: 1561032 - RNA, 19 nt, Homo sapiens
  misc_RNA (1)...(19): siRNA sense strand
agaguugaaucagcaauua

SEQ ID NO: 1561033 - RNA, 19 nt, Homo sapiens
  misc_RNA (1)...(19): siRNA sense strand
gaacaagacagaccgagau

SEQ ID NO: 1561034 - RNA, 19 nt, Homo sapiens
  misc_RNA (1)...(19): siRNA sense strand
gacccuauguuuccuaaug

SEQ ID NO: 1561035 - RNA, 19 nt, Homo sapiens
  misc_RNA (1)...(19): siRNA sense strand
caaaggacgaaacaaagua

SEQ ID NO: 1561036 - RNA, 19 nt, Homo sapiens
  misc_RNA (1)...(19): siRNA sense strand
ugacugaaauacuuaagug

SEQ ID NO: 1561037 - RNA, 19 nt, Homo sapiens
  misc_RNA (1)...(19): siRNA sense strand
gcaacuccuuccucgcuaa

SEQ ID NO: 1561038 - RNA, 19 nt, Homo sapiens
  misc_RNA (1)...(19): siRNA sense strand
uaaagcgguuguugacuug

SEQ ID NO: 1561039 - RNA, 19 nt, Homo sapiens
  misc_RNA (1)...(19): siRNA sense strand
ugacgaauaugacccuaug

SEQ ID NO: 1561040 - RNA, 19 nt, Homo sapiens
  misc_RNA (1)...(19): siRNA sense strand
ucagaugaccggcaaauug

SEQ ID NO: 1561041 - RNA, 19 nt, Homo sapiens
  misc_RNA (1)...(19): siRNA sense strand
ggauuuggcagaacaaguu

SEQ ID NO: 1561042 - RNA, 19 nt, Homo sapiens
  misc_RNA (1)...(19): siRNA sense strand
uuaaagcgguuguugacuu

SEQ ID NO: 1561043 - RNA, 19 nt, Homo sapiens
  misc_RNA (1)...(19): siRNA sense strand
acaagaucaugcagaagua

SEQ ID NO: 1561044 - RNA, 19 nt, Homo sapiens
  misc_RNA (1)...(19): siRNA sense strand
agacagacaugaagcaagu

SEQ ID NO: 1561045 - RNA, 19 nt, Homo sapiens
  misc_RNA (1)...(19): siRNA sense strand
cgaauaugacccuauguuu

SEQ ID NO: 1561046 - RNA, 19 nt, Homo sapiens
  misc_RNA (1)...(19): siRNA sense strand
gaaauagaagaaagggaaa

SEQ ID NO: 1561047 - RNA, 19 nt, Homo sapiens
  misc_RNA (1)...(19): siRNA sense strand
cgggagagguggaugaaga

SEQ ID NO: 1561048 - RNA, 19 nt, Homo sapiens
  misc_RNA (1)...(19): siRNA sense strand
caagaagucagauucaaau

SEQ ID NO: 1561049 - RNA, 19 nt, Homo sapiens
  misc_RNA (1)...(19): siRNA sense strand
gaaagaugcauccaagaag

SEQ ID NO: 1561050 - RNA, 19 nt, Homo sapiens
  misc_RNA (1)...(19): siRNA sense strand
agagguggaugaagacuug

SEQ ID NO: 1561051 - RNA, 19 nt, Homo sapiens
  misc_RNA (1)...(19): siRNA sense strand
ccaagaagucagauucaaa

SEQ ID NO: 1561052 - RNA, 19 nt, Homo sapiens
  misc_RNA (1)...(19): siRNA sense strand
gcaauuaaagcgguuguug

SEQ ID NO: 1561053 - RNA, 19 nt, Homo sapiens
  misc_RNA (1)...(19): siRNA sense strand
gaagaaggcagcucucacu

SEQ ID NO: 1561054 - RNA, 19 nt, Homo sapiens
  misc_RNA (1)...(19): siRNA sense strand
ggucuuggauuuggcagaa

SEQ ID NO: 1561055 - RNA, 19 nt, Homo sapiens
  misc_RNA (1)...(19): siRNA sense strand
ucaaacuucugcagucuca

SEQ ID NO: 1561056 - RNA, 19 nt, Homo sapiens
  misc_RNA (1)...(19): siRNA sense strand
ucaaauccgcugacugaaa

SEQ ID NO: 1561057 - RNA, 19 nt, Homo sapiens
  misc_RNA (1)...(19): siRNA sense strand
gagaccagauccagauucu

SEQ ID NO: 1561058 - RNA, 19 nt, Homo sapiens
  misc_RNA (1)...(19): siRNA sense strand
ugaugaagcaguacggaua

SEQ ID NO: 1561059 - RNA, 19 nt, Homo sapiens
  misc_RNA (1)...(19): siRNA sense strand
aaagaugcauccaagaagu

SEQ ID NO: 1561060 - RNA, 19 nt, Homo sapiens
  misc_RNA (1)...(19): siRNA sense strand
agaaagaugcauccaagaa

SEQ ID NO: 1561061 - RNA, 19 nt, Homo sapiens
  misc_RNA (1)...(19): siRNA sense strand
gaaauacuuaaguguccua

SEQ ID NO: 1561062 - RNA, 19 nt, Homo sapiens
  misc_RNA (1)...(19): siRNA sense strand
uaaguguccuacuaaagug

SEQ ID NO: 1561063 - RNA, 19 nt, Homo sapiens
  misc_RNA (1)...(19): siRNA sense strand
ggacaaauucagggucuug

SEQ ID NO: 1561064 - RNA, 19 nt, Homo sapiens
  misc_RNA (1)...(19): siRNA sense strand
caauuaaagcgguuguuga

SEQ ID NO: 1561065 - RNA, 19 nt, Homo sapiens
  misc_RNA (1)...(19): siRNA sense strand
cugaugaagaugaagauua

SEQ ID NO: 1561066 - RNA, 19 nt, Homo sapiens
  misc_RNA (1)...(19): siRNA sense strand
gagaguugaaucagcaauu

SEQ ID NO: 1561067 - RNA, 19 nt, Homo sapiens
  misc_RNA (1)...(19): siRNA sense strand
ccugagcacugccuuguca

SEQ ID NO: 1561068 - RNA, 19 nt, Homo sapiens
  misc_RNA (1)...(19): siRNA sense strand
guacgaggaacaagacaga

SEQ ID NO: 1561069 - RNA, 19 nt, Homo sapiens
  misc_RNA (1)...(19): siRNA sense strand
cuacuaaaguggucuuacu

SEQ ID NO: 1561070 - RNA, 19 nt, Homo sapiens
  misc_RNA (1)...(19): siRNA sense strand
gaugaagcaguacggauau

SEQ ID NO: 1561071 - RNA, 19 nt, Homo sapiens
  misc_RNA (1)...(19): siRNA sense strand
acagaaggcugguccaaaa

SEQ ID NO: 1561072 - RNA, 19 nt, Homo sapiens
  misc_RNA (1)...(19): siRNA sense strand
ggaaagacaaaaggaaaua

SEQ ID NO: 1561073 - RNA, 19 nt, Homo sapiens
  misc_RNA (1)...(19): siRNA sense strand
ggacucaagaccucgauca

SEQ ID NO: 1561074 - RNA, 19 nt, Homo sapiens
  misc_RNA (1)...(19): siRNA sense strand
ggagaccagugacucaaaa

SEQ ID NO: 1561075 - RNA, 19 nt, Homo sapiens
  misc_RNA (1)...(19): siRNA sense strand
gcauguuucuacaauuugg

SEQ ID NO: 1561076 - RNA, 19 nt, Homo sapiens
  misc_RNA (1)...(19): siRNA sense strand
cgcacaagaucaugcagaa

SEQ ID NO: 1561077 - RNA, 19 nt, Homo sapiens
  misc_RNA (1)...(19): siRNA sense strand
ccuguacgaugaccuagga

SEQ ID NO: 1561078 - RNA, 19 nt, Homo sapiens
  misc_RNA (1)...(19): siRNA sense strand
gaguugaaucagcaauuaa

SEQ ID NO: 1561079 - RNA, 19 nt, Homo sapiens
  misc_RNA (1)...(19): siRNA sense strand
ccaaaggacgaaacaaagu

SEQ ID NO: 1561080 - RNA, 19 nt, Homo sapiens
  misc_RNA (1)...(19): siRNA sense strand
gagaaagaugcauccaaga

SEQ ID NO: 1561081 - RNA, 19 nt, Homo sapiens
  misc_RNA (1)...(19): siRNA sense strand
gaaguucugauucccuuag

SEQ ID NO: 1561082 - RNA, 19 nt, Homo sapiens
  misc_RNA (1)...(19): siRNA sense strand
aaaccaaggaagaauguga

SEQ ID NO: 1561083 - RNA, 19 nt, Homo sapiens
  misc_RNA (1)...(19): siRNA sense strand
gcacgguggcgcacaagau

SEQ ID NO: 1561084 - RNA, 19 nt, Homo sapiens
  misc_RNA (1)...(19): siRNA sense strand
gcguaaagacagacaugaa

SEQ ID NO: 1561085 - RNA, 19 nt, Homo sapiens
  misc_RNA (1)...(19): siRNA sense strand
cagaugaccggcaaauugu

SEQ ID NO: 1561086 - RNA, 19 nt, Homo sapiens
  misc_RNA (1)...(19): siRNA sense strand
auucaaauccgcugacuga

SEQ ID NO: 1561087 - RNA, 19 nt, Homo sapiens
  misc_RNA (1)...(19): siRNA sense strand
ugacuugaaugggagguau

SEQ ID NO: 1561088 - RNA, 19 nt, Homo sapiens
  misc_RNA (1)...(19): siRNA sense strand
uuaaguguccuacuaaagu

SEQ ID NO: 1561089 - RNA, 19 nt, Homo sapiens
  misc_RNA (1)...(19): siRNA sense strand
gagaggaacgacagagaca

SEQ ID NO: 1561090 - RNA, 19 nt, Homo sapiens
  misc_RNA (1)...(19): siRNA sense strand
ggaaguugaaaccaaggaa

SEQ ID NO: 1561091 - RNA, 19 nt, Homo sapiens
  misc_RNA (1)...(19): siRNA sense strand
gaucacagucuuccaaagc

SEQ ID NO: 1561092 - RNA, 19 nt, Homo sapiens
  misc_RNA (1)...(19): siRNA sense strand
aauucagggucuuggauuu

SEQ ID NO: 1561093 - RNA, 19 nt, Homo sapiens
  misc_RNA (1)...(19): siRNA sense strand
ggacgaaacaaaguacagu

SEQ ID NO: 1561094 - RNA, 19 nt, Homo sapiens
  misc_RNA (1)...(19): siRNA sense strand
gagaggaggaaaagaagua

SEQ ID NO: 1561095 - RNA, 19 nt, Homo sapiens
  misc_RNA (1)...(19): siRNA sense strand
guaaaagcauguuucuaca

SEQ ID NO: 1561096 - RNA, 19 nt, Homo sapiens
  misc_RNA (1)...(19): siRNA sense strand
ugaagcaguacggauauuu

SEQ ID NO: 1561097 - RNA, 19 nt, Homo sapiens
  misc_RNA (1)...(19): siRNA sense strand
gccaaaggacgaaacaaag

SEQ ID NO: 1561098 - RNA, 19 nt, Homo sapiens
  misc_RNA (1)...(19): siRNA sense strand
guagugaagcgccaaagag

SEQ ID NO: 1561099 - RNA, 19 nt, Homo sapiens
  misc_RNA (1)...(19): siRNA sense strand
caaauucagggucuuggau

SEQ ID NO: 1561100 - RNA, 19 nt, Homo sapiens
  misc_RNA (1)...(19): siRNA sense strand
gaagcaguacggauauuuu

SEQ ID NO: 1561101 - RNA, 19 nt, Homo sapiens
  misc_RNA (1)...(19): siRNA sense strand
cauccaagaagucagauuc

SEQ ID NO: 1561102 - RNA, 19 nt, Homo sapiens
  misc_RNA (1)...(19): siRNA sense strand
ggacacuccaccgcaugua

SEQ ID NO: 1561103 - RNA, 19 nt, Homo sapiens
  misc_RNA (1)...(19): siRNA sense strand
cacaagaucaugcagaagu

SEQ ID NO: 1561104 - RNA, 19 nt, Homo sapiens
  misc_RNA (1)...(19): siRNA sense strand
caagacagaccgagaucuc

SEQ ID NO: 1561105 - RNA, 19 nt, Homo sapiens
  misc_RNA (1)...(19): siRNA sense strand
uagagaaagacaaagaguu

SEQ ID NO: 1561106 - RNA, 19 nt, Homo sapiens
  misc_RNA (1)...(19): siRNA sense strand
ggagaccagauccagauuc

SEQ ID NO: 1561107 - RNA, 19 nt, Homo sapiens
  misc_RNA (1)...(19): siRNA sense strand
guagagaaagacaaagagu

SEQ ID NO: 1561108 - RNA, 19 nt, Homo sapiens
  misc_RNA (1)...(19): siRNA sense strand
gguaaaagcauguuucuac

SEQ ID NO: 1561109 - RNA, 19 nt, Homo sapiens
  misc_RNA (1)...(19): siRNA sense strand
ugaaaccaaggaagaaugu

SEQ ID NO: 1561110 - RNA, 19 nt, Homo sapiens
  misc_RNA (1)...(19): siRNA sense strand
acuaaaguggucuuacuaa

SEQ ID NO: 1561111 - RNA, 19 nt, Homo sapiens
  misc_RNA (1)...(19): siRNA sense strand
ccgcugacugaaauacuua

SEQ ID NO: 1561112 - RNA, 19 nt, Homo sapiens
  misc_RNA (1)...(19): siRNA sense strand
caaagagaggaacgacaga

SEQ ID NO: 1561113 - RNA, 19 nt, Homo sapiens
  misc_RNA (1)...(19): siRNA sense strand
uggcaaaguuggaaaaugu

SEQ ID NO: 1561114 - RNA, 19 nt, Homo sapiens
  misc_RNA (1)...(19): siRNA sense strand
uaaagacagacaugaagca

SEQ ID NO: 1561115 - RNA, 19 nt, Homo sapiens
  misc_RNA (1)...(19): siRNA sense strand
acaugaagcaaguggguuu

SEQ ID NO: 1561116 - RNA, 19 nt, Homo sapiens
  misc_RNA (1)...(19): siRNA sense strand
uagugaagcgccaaagaga

SEQ ID NO: 1561117 - RNA, 19 nt, Homo sapiens
  misc_RNA (1)...(19): siRNA sense strand
gauuuggcagaacaaguuu

SEQ ID NO: 1561118 - RNA, 19 nt, Homo sapiens
  misc_RNA (1)...(19): siRNA sense strand
cagagaaagaugcauccaa

SEQ ID NO: 1561119 - RNA, 19 nt, Homo sapiens
  misc_RNA (1)...(19): siRNA sense strand
gaagauuaugagcgagaga

SEQ ID NO: 1561120 - RNA, 19 nt, Homo sapiens
  misc_RNA (1)...(19): siRNA sense strand
cccacccacuucucuggua

SEQ ID NO: 1561121 - RNA, 19 nt, Homo sapiens
  misc_RNA (1)...(19): siRNA sense strand
caaagagccaaaggacgaa

SEQ ID NO: 1561122 - RNA, 19 nt, Homo sapiens
  misc_RNA (1)...(19): siRNA sense strand
aagcgguuguugacuugaa

SEQ ID NO: 1561123 - RNA, 19 nt, Homo sapiens
  misc_RNA (1)...(19): siRNA sense strand
gaauuugagagaguugaau

SEQ ID NO: 1561124 - RNA, 19 nt, Homo sapiens
  misc_RNA (1)...(19): siRNA sense strand
acuuaaguguccuacuaaa

SEQ ID NO: 1561125 - RNA, 19 nt, Homo sapiens
  misc_RNA (1)...(19): siRNA sense strand
uccaagaagucagauucaa

SEQ ID NO: 1561126 - RNA, 19 nt, Homo sapiens
  misc_RNA (1)...(19): siRNA sense strand
agccaaaggacgaaacaaa

SEQ ID NO: 1561127 - RNA, 19 nt, Homo sapiens
  misc_RNA (1)...(19): siRNA sense strand
gcaaagagauguacaggau

SEQ ID NO: 1561128 - RNA, 19 nt, Homo sapiens
  misc_RNA (1)...(19): siRNA sense strand
gagagaauguggagaugug

SEQ ID NO: 1561129 - RNA, 19 nt, Homo sapiens
  misc_RNA (1)...(19): siRNA sense strand
gugaggagaugaugagaga

SEQ ID NO: 1561130 - RNA, 19 nt, Homo sapiens
  misc_RNA (1)...(19): siRNA sense strand
caggaggacuuacaggaaa

SEQ ID NO: 1561131 - RNA, 19 nt, Homo sapiens
  misc_RNA (1)...(19): siRNA sense strand
gccagaagaugaaguagag

SEQ ID NO: 1561132 - RNA, 19 nt, Homo sapiens
  misc_RNA (1)...(19): siRNA sense strand
gaaagucagacgaggaaga

SEQ ID NO: 1561133 - RNA, 19 nt, Homo sapiens
  misc_RNA (1)...(19): siRNA sense strand
aaaggcaucugagcaguga

SEQ ID NO: 1561134 - RNA, 19 nt, Homo sapiens
  misc_RNA (1)...(19): siRNA sense strand
aaguagagccugaugauga

SEQ ID NO: 1561135 - RNA, 19 nt, Homo sapiens
  misc_RNA (1)...(19): siRNA sense strand
gaugagagaauguggagau

SEQ ID NO: 1561136 - RNA, 19 nt, Homo sapiens
  misc_RNA (1)...(19): siRNA sense strand
gggaaagccagaagaugaa

SEQ ID NO: 1561137 - RNA, 19 nt, Homo sapiens
  misc_RNA (1)...(19): siRNA sense strand
agggacaacuggaagauga

SEQ ID NO: 1561138 - RNA, 19 nt, Homo sapiens
  misc_RNA (1)...(19): siRNA sense strand
gaggagaugaugagagaau

SEQ ID NO: 1561139 - RNA, 19 nt, Homo sapiens
  misc_RNA (1)...(19): siRNA sense strand
gaugagggaagccaggaaa

SEQ ID NO: 1561140 - RNA, 19 nt, Homo sapiens
  misc_RNA (1)...(19): siRNA sense strand
aguagagccugaugaugaa

SEQ ID NO: 1561141 - RNA, 19 nt, Homo sapiens
  misc_RNA (1)...(19): siRNA sense strand
gaaguagagccugaugaug

SEQ ID NO: 1561142 - RNA, 19 nt, Homo sapiens
  misc_RNA (1)...(19): siRNA sense strand
aaagccagaagaugaagua

SEQ ID NO: 1561143 - RNA, 19 nt, Homo sapiens
  misc_RNA (1)...(19): siRNA sense strand
ucaagaggagcuaaggaaa

SEQ ID NO: 1561144 - RNA, 19 nt, Homo sapiens
  misc_RNA (1)...(19): siRNA sense strand
gagauguacaggauccauu

SEQ ID NO: 1561145 - RNA, 19 nt, Homo sapiens
  misc_RNA (1)...(19): siRNA sense strand
agggaaagccagaagauga

SEQ ID NO: 1561146 - RNA, 19 nt, Homo sapiens
  misc_RNA (1)...(19): siRNA sense strand
gcagugaggagaugaugag

SEQ ID NO: 1561147 - RNA, 19 nt, Homo sapiens
  misc_RNA (1)...(19): siRNA sense strand
ugaaguagagccugaugau

SEQ ID NO: 1561148 - RNA, 19 nt, Homo sapiens
  misc_RNA (1)...(19): siRNA sense strand
ucaggaggacuuacaggaa

SEQ ID NO: 1561149 - RNA, 19 nt, Homo sapiens
  misc_RNA (1)...(19): siRNA sense strand
ggagaugaugagagaaugu

SEQ ID NO: 1561150 - RNA, 19 nt, Homo sapiens
  misc_RNA (1)...(19): siRNA sense strand
aaagucagacgaggaagaa

SEQ ID NO: 1561151 - RNA, 19 nt, Homo sapiens
  misc_RNA (1)...(19): siRNA sense strand
uuacaggaaaggcaucuga

SEQ ID NO: 1561152 - RNA, 19 nt, Homo sapiens
  misc_RNA (1)...(19): siRNA sense strand
ggacucucaggaggacuua

SEQ ID NO: 1561153 - RNA, 19 nt, Homo sapiens
  misc_RNA (1)...(19): siRNA sense strand
gagggaaagccagaagaug

SEQ ID NO: 1561154 - RNA, 19 nt, Homo sapiens
  misc_RNA (1)...(19): siRNA sense strand
agacagaaugcgagggaaa

SEQ ID NO: 1561155 - RNA, 19 nt, Homo sapiens
  misc_RNA (1)...(19): siRNA sense strand
uucauuggaugcaaagaga

SEQ ID NO: 1561156 - RNA, 19 nt, Homo sapiens
  misc_RNA (1)...(19): siRNA sense strand
agaaugcgagggaaagaga

SEQ ID NO: 1561157 - RNA, 19 nt, Homo sapiens
  misc_RNA (1)...(19): siRNA sense strand
gagaugaugagagaaugug

SEQ ID NO: 1561158 - RNA, 19 nt, Homo sapiens
  misc_RNA (1)...(19): siRNA sense strand
caagaggagcuaaggaaaa

SEQ ID NO: 1561159 - RNA, 19 nt, Homo sapiens
  misc_RNA (1)...(19): siRNA sense strand
cgagggaaagccagaagau

SEQ ID NO: 1561160 - RNA, 19 nt, Homo sapiens
  misc_RNA (1)...(19): siRNA sense strand
gaaagccagaagaugaagu

SEQ ID NO: 1561161 - RNA, 19 nt, Homo sapiens
  misc_RNA (1)...(19): siRNA sense strand
gaugaaguagagccugaug

SEQ ID NO: 1561162 - RNA, 19 nt, Homo sapiens
  misc_RNA (1)...(19): siRNA sense strand
gagcagugaggagaugaug

SEQ ID NO: 1561163 - RNA, 19 nt, Homo sapiens
  misc_RNA (1)...(19): siRNA sense strand
aaggaaaccuggaaaacga

SEQ ID NO: 1561164 - RNA, 19 nt, Homo sapiens
  misc_RNA (1)...(19): siRNA sense strand
aaaugaaggaaaccuggaa

SEQ ID NO: 1561165 - RNA, 19 nt, Homo sapiens
  misc_RNA (1)...(19): siRNA sense strand
ggaagggucucucuuguua

SEQ ID NO: 1561166 - RNA, 19 nt, Homo sapiens
  misc_RNA (1)...(19): siRNA sense strand
gcuccaggccgacaucuug

SEQ ID NO: 1561167 - RNA, 19 nt, Homo sapiens
  misc_RNA (1)...(19): siRNA sense strand
caacuuccuggaugggaua

SEQ ID NO: 1561168 - RNA, 19 nt, Homo sapiens
  misc_RNA (1)...(19): siRNA sense strand
gcuggaagggucucucuug

SEQ ID NO: 1561169 - RNA, 19 nt, Homo sapiens
  misc_RNA (1)...(19): siRNA sense strand
gcgcagaggaagaggagaa

SEQ ID NO: 1561170 - RNA, 19 nt, Homo sapiens
  misc_RNA (1)...(19): siRNA sense strand
gccaguacgugaugcugau

SEQ ID NO: 1561171 - RNA, 19 nt, Homo sapiens
  misc_RNA (1)...(19): siRNA sense strand
gaaguacguggaccagagu

SEQ ID NO: 1561172 - RNA, 19 nt, Homo sapiens
  misc_RNA (1)...(19): siRNA sense strand
ggacuucuuccgccaguac

SEQ ID NO: 1561173 - RNA, 19 nt, Homo sapiens
  misc_RNA (1)...(19): siRNA sense strand
uggaugggauaguggacuu

SEQ ID NO: 1561174 - RNA, 19 nt, Homo sapiens
  misc_RNA (1)...(19): siRNA sense strand
cuggaagggucucucuugu

SEQ ID NO: 1561175 - RNA, 19 nt, Homo sapiens
  misc_RNA (1)...(19): siRNA sense strand
ccuauuacccaucguccuu

SEQ ID NO: 1561176 - RNA, 19 nt, Homo sapiens
  misc_RNA (1)...(19): siRNA sense strand
gaagggucucucuuguuag

SEQ ID NO: 1561177 - RNA, 19 nt, Homo sapiens
  misc_RNA (1)...(19): siRNA sense strand
ggucaucacccggcagaag

SEQ ID NO: 1561178 - RNA, 19 nt, Homo sapiens
  misc_RNA (1)...(19): siRNA sense strand
ccgaggaagcccuggauuc

SEQ ID NO: 1561179 - RNA, 19 nt, Homo sapiens
  misc_RNA (1)...(19): siRNA sense strand
caaaucaacugacacuaaa

SEQ ID NO: 1561180 - RNA, 19 nt, Homo sapiens
  misc_RNA (1)...(19): siRNA sense strand
gcaaaucaacugacacuaa

SEQ ID NO: 1561181 - RNA, 19 nt, Homo sapiens
  misc_RNA (1)...(19): siRNA sense strand
cacaagcccuuaaaugaua

SEQ ID NO: 1561182 - RNA, 19 nt, Homo sapiens
  misc_RNA (1)...(19): siRNA sense strand
cgagagagccauaacauuu

SEQ ID NO: 1561183 - RNA, 19 nt, Homo sapiens
  misc_RNA (1)...(19): siRNA sense strand
gagagagccauaacauuua

SEQ ID NO: 1561184 - RNA, 19 nt, Homo sapiens
  misc_RNA (1)...(19): siRNA sense strand
guagaaaccaacccaauaa

SEQ ID NO: 1561185 - RNA, 19 nt, Homo sapiens
  misc_RNA (1)...(19): siRNA sense strand
gguagaaaccaacccaaua

SEQ ID NO: 1561186 - RNA, 19 nt, Homo sapiens
  misc_RNA (1)...(19): siRNA sense strand
gaaaccaacccaauaaaca

SEQ ID NO: 1561187 - RNA, 19 nt, Homo sapiens
  misc_RNA (1)...(19): siRNA sense strand
gaaguaugauucuccaucu

SEQ ID NO: 1561188 - RNA, 19 nt, Homo sapiens
  misc_RNA (1)...(19): siRNA sense strand
aaauguagauuccgugcua

SEQ ID NO: 1561189 - RNA, 19 nt, Homo sapiens
  misc_RNA (1)...(19): siRNA sense strand
gagauaagaaguaugauuc

SEQ ID NO: 1561190 - RNA, 19 nt, Homo sapiens
  misc_RNA (1)...(19): siRNA sense strand
gcaaacaauuuccccauaa

SEQ ID NO: 1561191 - RNA, 19 nt, Homo sapiens
  misc_RNA (1)...(19): siRNA sense strand
caaauaguuucacccauca

SEQ ID NO: 1561192 - RNA, 19 nt, Homo sapiens
  misc_RNA (1)...(19): siRNA sense strand
ggagagucccauuuauuaa

SEQ ID NO: 1561193 - RNA, 19 nt, Homo sapiens
  misc_RNA (1)...(19): siRNA sense strand
gagaugaaagcaaacaauu

SEQ ID NO: 1561194 - RNA, 19 nt, Homo sapiens
  misc_RNA (1)...(19): siRNA sense strand
ugacauauauccauaccau

SEQ ID NO: 1561195 - RNA, 19 nt, Homo sapiens
  misc_RNA (1)...(19): siRNA sense strand
uggagagucccauuuauua

SEQ ID NO: 1561196 - RNA, 19 nt, Homo sapiens
  misc_RNA (1)...(19): siRNA sense strand
gcugcagggugucagaaua

SEQ ID NO: 1561197 - RNA, 19 nt, Homo sapiens
  misc_RNA (1)...(19): siRNA sense strand
gaagugauacagcuggaaa

SEQ ID NO: 1561198 - RNA, 19 nt, Homo sapiens
  misc_RNA (1)...(19): siRNA sense strand
uaacagucaugagauaaga

SEQ ID NO: 1561199 - RNA, 19 nt, Homo sapiens
  misc_RNA (1)...(19): siRNA sense strand
gaaaauuggucucucacaa

SEQ ID NO: 1561200 - RNA, 19 nt, Homo sapiens
  misc_RNA (1)...(19): siRNA sense strand
ugucacagauacaaauuga

SEQ ID NO: 1561201 - RNA, 19 nt, Homo sapiens
  misc_RNA (1)...(19): siRNA sense strand
acagcgagcucgaaacaga

SEQ ID NO: 1561202 - RNA, 19 nt, Homo sapiens
  misc_RNA (1)...(19): siRNA sense strand
aaaaugagccuccuaauga

SEQ ID NO: 1561203 - RNA, 19 nt, Homo sapiens
  misc_RNA (1)...(19): siRNA sense strand
cagggaaaguugagaugaa

SEQ ID NO: 1561204 - RNA, 19 nt, Homo sapiens
  misc_RNA (1)...(19): siRNA sense strand
ucacaaacaccaauaaugg

SEQ ID NO: 1561205 - RNA, 19 nt, Homo sapiens
  misc_RNA (1)...(19): siRNA sense strand
caugagauaagaaguauga

SEQ ID NO: 1561206 - RNA, 19 nt, Homo sapiens
  misc_RNA (1)...(19): siRNA sense strand
caacauucaugcagcucuu

SEQ ID NO: 1561207 - RNA, 19 nt, Homo sapiens
  misc_RNA (1)...(19): siRNA sense strand
gagagaaugacaucaggaa

SEQ ID NO: 1561208 - RNA, 19 nt, Homo sapiens
  misc_RNA (1)...(19): siRNA sense strand
gaaaaugagccuccuaaug

SEQ ID NO: 1561209 - RNA, 19 nt, Homo sapiens
  misc_RNA (1)...(19): siRNA sense strand
ucacaagcccuuaaaugau

SEQ ID NO: 1561210 - RNA, 19 nt, Homo sapiens
  misc_RNA (1)...(19): siRNA sense strand
gaucacaaacaccaauaau

SEQ ID NO: 1561211 - RNA, 19 nt, Homo sapiens
  misc_RNA (1)...(19): siRNA sense strand
aaguugagaugaaagcaaa

SEQ ID NO: 1561212 - RNA, 19 nt, Homo sapiens
  misc_RNA (1)...(19): siRNA sense strand
cuucgagggugcacuacua

SEQ ID NO: 1561213 - RNA, 19 nt, Homo sapiens
  misc_RNA (1)...(19): siRNA sense strand
acauauauccauaccauga

SEQ ID NO: 1561214 - RNA, 19 nt, Homo sapiens
  misc_RNA (1)...(19): siRNA sense strand
caauaaugguuggaaauac

SEQ ID NO: 1561215 - RNA, 19 nt, Homo sapiens
  misc_RNA (1)...(19): siRNA sense strand
gaaaacagcgagcucgaaa

SEQ ID NO: 1561216 - RNA, 19 nt, Homo sapiens
  misc_RNA (1)...(19): siRNA sense strand
gcagcucuucugggaauua

SEQ ID NO: 1561217 - RNA, 19 nt, Homo sapiens
  misc_RNA (1)...(19): siRNA sense strand
ugugaggucugugcucuuu

SEQ ID NO: 1561218 - RNA, 19 nt, Homo sapiens
  misc_RNA (1)...(19): siRNA sense strand
caaacaauuuccccauaaa

SEQ ID NO: 1561219 - RNA, 19 nt, Homo sapiens
  misc_RNA (1)...(19): siRNA sense strand
gacacuaaagggaaaugua

SEQ ID NO: 1561220 - RNA, 19 nt, Homo sapiens
  misc_RNA (1)...(19): siRNA sense strand
aaacagcgagcucgaaaca

SEQ ID NO: 1561221 - RNA, 19 nt, Homo sapiens
  misc_RNA (1)...(19): siRNA sense strand
uaccaugaauguuaugauc

SEQ ID NO: 1561222 - RNA, 19 nt, Homo sapiens
  misc_RNA (1)...(19): siRNA sense strand
gucaugagauaagaaguau

SEQ ID NO: 1561223 - RNA, 19 nt, Homo sapiens
  misc_RNA (1)...(19): siRNA sense strand
ucaacgagaagaagaucua

SEQ ID NO: 1561224 - RNA, 19 nt, Homo sapiens
  misc_RNA (1)...(19): siRNA sense strand
ccauguggguaaagcgaaa

SEQ ID NO: 1561225 - RNA, 19 nt, Homo sapiens
  misc_RNA (1)...(19): siRNA sense strand
uaaagaaggaagugauaca

SEQ ID NO: 1561226 - RNA, 19 nt, Homo sapiens
  misc_RNA (1)...(19): siRNA sense strand
auccauaccaugaauguua

SEQ ID NO: 1561227 - RNA, 19 nt, Homo sapiens
  misc_RNA (1)...(19): siRNA sense strand
uaaagggaaauguagauuc

SEQ ID NO: 1561228 - RNA, 19 nt, Homo sapiens
  misc_RNA (1)...(19): siRNA sense strand
gagaagaagaucuaaaaga

SEQ ID NO: 1561229 - RNA, 19 nt, Homo sapiens
  misc_RNA (1)...(19): siRNA sense strand
cagcucuucugggaauuaa

SEQ ID NO: 1561230 - RNA, 19 nt, Homo sapiens
  misc_RNA (1)...(19): siRNA sense strand
gacauagagucuccaucug

SEQ ID NO: 1561231 - RNA, 19 nt, Homo sapiens
  misc_RNA (1)...(19): siRNA sense strand
ugaggucugugcucuuugu

SEQ ID NO: 1561232 - RNA, 19 nt, Homo sapiens
  misc_RNA (1)...(19): siRNA sense strand
gcgaaaauauauagcaugu

SEQ ID NO: 1561233 - RNA, 19 nt, Homo sapiens
  misc_RNA (1)...(19): siRNA sense strand
gagcuucuucuacuucaga

SEQ ID NO: 1561234 - RNA, 19 nt, Homo sapiens
  misc_RNA (1)...(19): siRNA sense strand
gaagauguuguuccucaag

SEQ ID NO: 1561235 - RNA, 19 nt, Homo sapiens
  misc_RNA (1)...(19): siRNA sense strand
ugauacagcuggaaaugcu

SEQ ID NO: 1561236 - RNA, 19 nt, Homo sapiens
  misc_RNA (1)...(19): siRNA sense strand
cucacaagcccuuaaauga

SEQ ID NO: 1561237 - RNA, 19 nt, Homo sapiens
  misc_RNA (1)...(19): siRNA sense strand
uagauuccgugcuauugug

SEQ ID NO: 1561238 - RNA, 19 nt, Homo sapiens
  misc_RNA (1)...(19): siRNA sense strand
gagaaugacaucaggaaaa

SEQ ID NO: 1561239 - RNA, 19 nt, Homo sapiens
  misc_RNA (1)...(19): siRNA sense strand
agagagccauaacauuuag

SEQ ID NO: 1561240 - RNA, 19 nt, Homo sapiens
  misc_RNA (1)...(19): siRNA sense strand
agggaaaguugagaugaaa

SEQ ID NO: 1561241 - RNA, 19 nt, Homo sapiens
  misc_RNA (1)...(19): siRNA sense strand
uagaaaccaacccaauaaa

SEQ ID NO: 1561242 - RNA, 19 nt, Homo sapiens
  misc_RNA (1)...(19): siRNA sense strand
caacgagaagaagaucuaa

SEQ ID NO: 1561243 - RNA, 19 nt, Homo sapiens
  misc_RNA (1)...(19): siRNA sense strand
ugucuuuaccauccaaaua

SEQ ID NO: 1561244 - RNA, 19 nt, Homo sapiens
  misc_RNA (1)...(19): siRNA sense strand
gagagucccauuuauuaac

SEQ ID NO: 1561245 - RNA, 19 nt, Homo sapiens
  misc_RNA (1)...(19): siRNA sense strand
acuaaagaaggaagugaua

SEQ ID NO: 1561246 - RNA, 19 nt, Homo sapiens
  misc_RNA (1)...(19): siRNA sense strand
agagucccauuuauuaaca

SEQ ID NO: 1561247 - RNA, 19 nt, Homo sapiens
  misc_RNA (1)...(19): siRNA sense strand
agucaugagauaagaagua

SEQ ID NO: 1561248 - RNA, 19 nt, Homo sapiens
  misc_RNA (1)...(19): siRNA sense strand
guagauuccgugcuauugu

SEQ ID NO: 1561249 - RNA, 19 nt, Homo sapiens
  misc_RNA (1)...(19): siRNA sense strand
gcaugucuuuaccauccaa

SEQ ID NO: 1561250 - RNA, 19 nt, Homo sapiens
  misc_RNA (1)...(19): siRNA sense strand
uauagcaugucuuuaccau

SEQ ID NO: 1561251 - RNA, 19 nt, Homo sapiens
  misc_RNA (1)...(19): siRNA sense strand
caaccucccaggaagaugu

SEQ ID NO: 1561252 - RNA, 19 nt, Homo sapiens
  misc_RNA (1)...(19): siRNA sense strand
caucugcugaucccaauau

SEQ ID NO: 1561253 - RNA, 19 nt, Homo sapiens
  misc_RNA (1)...(19): siRNA sense strand
ccagaaaauuggucucuca

SEQ ID NO: 1561254 - RNA, 19 nt, Homo sapiens
  misc_RNA (1)...(19): siRNA sense strand
acacuaaagggaaauguag

SEQ ID NO: 1561255 - RNA, 19 nt, Homo sapiens
  misc_RNA (1)...(19): siRNA sense strand
ucucacaagcccuuaaaug

SEQ ID NO: 1561256 - RNA, 19 nt, Homo sapiens
  misc_RNA (1)...(19): siRNA sense strand
ucacugagagaaugacauc

SEQ ID NO: 1561257 - RNA, 19 nt, Homo sapiens
  misc_RNA (1)...(19): siRNA sense strand
gcucgaaacagagauccaa

SEQ ID NO: 1561258 - RNA, 19 nt, Homo sapiens
  misc_RNA (1)...(19): siRNA sense strand
uccauaccaugaauguuau

SEQ ID NO: 1561259 - RNA, 19 nt, Homo sapiens
  misc_RNA (1)...(19): siRNA sense strand
cauauauccauaccaugaa

SEQ ID NO: 1561260 - RNA, 19 nt, Homo sapiens
  misc_RNA (1)...(19): siRNA sense strand
cuccaucugcuaugugaua

SEQ ID NO: 1561261 - RNA, 19 nt, Homo sapiens
  misc_RNA (1)...(19): siRNA sense strand
ugagaugaaagcaaacaau

SEQ ID NO: 1561262 - RNA, 19 nt, Homo sapiens
  misc_RNA (1)...(19): siRNA sense strand
ggaaaguugagaugaaagc

SEQ ID NO: 1561263 - RNA, 19 nt, Homo sapiens
  misc_RNA (1)...(19): siRNA sense strand
cuaaagggaaauguagauu

SEQ ID NO: 1561264 - RNA, 19 nt, Homo sapiens
  misc_RNA (1)...(19): siRNA sense strand
gauucuccaucugcuaugu

SEQ ID NO: 1561265 - RNA, 19 nt, Homo sapiens
  misc_RNA (1)...(19): siRNA sense strand
ucccauuuauuaacaguca

SEQ ID NO: 1561266 - RNA, 19 nt, Homo sapiens
  misc_RNA (1)...(19): siRNA sense strand
ggguaaagcgaaaauauau

SEQ ID NO: 1561267 - RNA, 19 nt, Homo sapiens
  misc_RNA (1)...(19): siRNA sense strand
gaaaguugagaugaaagca

SEQ ID NO: 1561268 - RNA, 19 nt, Homo sapiens
  misc_RNA (1)...(19): siRNA sense strand
augcagcucuucugggaau

SEQ ID NO: 1561269 - RNA, 19 nt, Homo sapiens
  misc_RNA (1)...(19): siRNA sense strand
ccaugaauguuaugaucac

SEQ ID NO: 1561270 - RNA, 19 nt, Homo sapiens
  misc_RNA (1)...(19): siRNA sense strand
aaaugagccuccuaaugac

SEQ ID NO: 1561271 - RNA, 19 nt, Homo sapiens
  misc_RNA (1)...(19): siRNA sense strand
cacagcaaccucccaggaa

SEQ ID NO: 1561272 - RNA, 19 nt, Homo sapiens
  misc_RNA (1)...(19): siRNA sense strand
aaaccaacccaauaaacag

SEQ ID NO: 1561273 - RNA, 19 nt, Homo sapiens
  misc_RNA (1)...(19): siRNA sense strand
ugaucacaaacaccaauaa

SEQ ID NO: 1561274 - RNA, 19 nt, Homo sapiens
  misc_RNA (1)...(19): siRNA sense strand
ucagggaaaguugagauga

SEQ ID NO: 1561275 - RNA, 19 nt, Homo sapiens
  misc_RNA (1)...(19): siRNA sense strand
cagcaaccucccaggaaga

SEQ ID NO: 1561276 - RNA, 19 nt, Homo sapiens
  misc_RNA (1)...(19): siRNA sense strand
cugcugaucccaauaugau

SEQ ID NO: 1561277 - RNA, 19 nt, Homo sapiens
  misc_RNA (1)...(19): siRNA sense strand
ggaagugauacagcuggaa

SEQ ID NO: 1561278 - RNA, 19 nt, Homo sapiens
  misc_RNA (1)...(19): siRNA sense strand
agaaugacaucaggaaaau

SEQ ID NO: 1561279 - RNA, 19 nt, Homo sapiens
  misc_RNA (1)...(19): siRNA sense strand
caaaguaucugaagaagaa

SEQ ID NO: 1561280 - RNA, 19 nt, Homo sapiens
  misc_RNA (1)...(19): siRNA sense strand
gaagaaaggcaaagaaaua

SEQ ID NO: 1561281 - RNA, 19 nt, Homo sapiens
  misc_RNA (1)...(19): siRNA sense strand
gaggaaagcuggucacgaa

SEQ ID NO: 1561282 - RNA, 19 nt, Homo sapiens
  misc_RNA (1)...(19): siRNA sense strand
gaaagggaauuauggaaga

SEQ ID NO: 1561283 - RNA, 19 nt, Homo sapiens
  misc_RNA (1)...(19): siRNA sense strand
gagaugaauugauagagua

SEQ ID NO: 1561284 - RNA, 19 nt, Homo sapiens
  misc_RNA (1)...(19): siRNA sense strand
aaagaagccuguccaguuu

SEQ ID NO: 1561285 - RNA, 19 nt, Homo sapiens
  misc_RNA (1)...(19): siRNA sense strand
caaagaagccuguccaguu

SEQ ID NO: 1561286 - RNA, 19 nt, Homo sapiens
  misc_RNA (1)...(19): siRNA sense strand
ggaaaagcauaaugucuua

SEQ ID NO: 1561287 - RNA, 19 nt, Homo sapiens
  misc_RNA (1)...(19): siRNA sense strand
caaacaacaucuccugcua

SEQ ID NO: 1561288 - RNA, 19 nt, Homo sapiens
  misc_RNA (1)...(19): siRNA sense strand
gaauacacaugcagcaaau

SEQ ID NO: 1561289 - RNA, 19 nt, Homo sapiens
  misc_RNA (1)...(19): siRNA sense strand
gagcagaaacgaagugaaa

SEQ ID NO: 1561290 - RNA, 19 nt, Homo sapiens
  misc_RNA (1)...(19): siRNA sense strand
caaauagcauugugaguca

SEQ ID NO: 1561291 - RNA, 19 nt, Homo sapiens
  misc_RNA (1)...(19): siRNA sense strand
caauugcccuuguggauga

SEQ ID NO: 1561292 - RNA, 19 nt, Homo sapiens
  misc_RNA (1)...(19): siRNA sense strand
caagauagauacaaagaac

SEQ ID NO: 1561293 - RNA, 19 nt, Homo sapiens
  misc_RNA (1)...(19): siRNA sense strand
ggaaccaguugacauugaa

SEQ ID NO: 1561294 - RNA, 19 nt, Homo sapiens
  misc_RNA (1)...(19): siRNA sense strand
gcacagaaacaguuaagug

SEQ ID NO: 1561295 - RNA, 19 nt, Homo sapiens
  misc_RNA (1)...(19): siRNA sense strand
uuucaagucuggagauuaa

SEQ ID NO: 1561296 - RNA, 19 nt, Homo sapiens
  misc_RNA (1)...(19): siRNA sense strand
gaagaaagggaauuaugga

SEQ ID NO: 1561297 - RNA, 19 nt, Homo sapiens
  misc_RNA (1)...(19): siRNA sense strand
gaaauaaagaggcauuagu

SEQ ID NO: 1561298 - RNA, 19 nt, Homo sapiens
  misc_RNA (1)...(19): siRNA sense strand
acaaagaacuucaggaaaa

SEQ ID NO: 1561299 - RNA, 19 nt, Homo sapiens
  misc_RNA (1)...(19): siRNA sense strand
ggagauuaaacucaaagua

SEQ ID NO: 1561300 - RNA, 19 nt, Homo sapiens
  misc_RNA (1)...(19): siRNA sense strand
gaacaagagaugaauugau

SEQ ID NO: 1561301 - RNA, 19 nt, Homo sapiens
  misc_RNA (1)...(19): siRNA sense strand
ucacgaagcccucagcauu

SEQ ID NO: 1561302 - RNA, 19 nt, Homo sapiens
  misc_RNA (1)...(19): siRNA sense strand
guacauuucugcaauugag

SEQ ID NO: 1561303 - RNA, 19 nt, Homo sapiens
  misc_RNA (1)...(19): siRNA sense strand
gaaaggcaaagaaauaaag

SEQ ID NO: 1561304 - RNA, 19 nt, Homo sapiens
  misc_RNA (1)...(19): siRNA sense strand
ggaagaaaggcaaagaaau

SEQ ID NO: 1561305 - RNA, 19 nt, Homo sapiens
  misc_RNA (1)...(19): siRNA sense strand
gaacagaaggaaauauugg

SEQ ID NO: 1561306 - RNA, 19 nt, Homo sapiens
  misc_RNA (1)...(19): siRNA sense strand
caagucauccgccaaagaa

SEQ ID NO: 1561307 - RNA, 19 nt, Homo sapiens
  misc_RNA (1)...(19): siRNA sense strand
ugaccacucuucuuccauu

SEQ ID NO: 1561308 - RNA, 19 nt, Homo sapiens
  misc_RNA (1)...(19): siRNA sense strand
cagaaacaguuaagugcuu

SEQ ID NO: 1561309 - RNA, 19 nt, Homo sapiens
  misc_RNA (1)...(19): siRNA sense strand
gaucaagucauccgccaaa

SEQ ID NO: 1561310 - RNA, 19 nt, Homo sapiens
  misc_RNA (1)...(19): siRNA sense strand
uaaacaggauguggaauca

SEQ ID NO: 1561311 - RNA, 19 nt, Homo sapiens
  misc_RNA (1)...(19): siRNA sense strand
agaaggaacuguuaaaaga

SEQ ID NO: 1561312 - RNA, 19 nt, Homo sapiens
  misc_RNA (1)...(19): siRNA sense strand
cacgaagcccucagcauua

SEQ ID NO: 1561313 - RNA, 19 nt, Homo sapiens
  misc_RNA (1)...(19): siRNA sense strand
gaaaagaacaagagaugaa

SEQ ID NO: 1561314 - RNA, 19 nt, Homo sapiens
  misc_RNA (1)...(19): siRNA sense strand
ggaugaauauaaggcacua

SEQ ID NO: 1561315 - RNA, 19 nt, Homo sapiens
  misc_RNA (1)...(19): siRNA sense strand
uaacauacagcuucagcaa

SEQ ID NO: 1561316 - RNA, 19 nt, Homo sapiens
  misc_RNA (1)...(19): siRNA sense strand
gaaacaguuaagugcuuua

SEQ ID NO: 1561317 - RNA, 19 nt, Homo sapiens
  misc_RNA (1)...(19): siRNA sense strand
gcaacaaguagaagcuauu

SEQ ID NO: 1561318 - RNA, 19 nt, Homo sapiens
  misc_RNA (1)...(19): siRNA sense strand
gaagcccucagcauuauug

SEQ ID NO: 1561319 - RNA, 19 nt, Homo sapiens
  misc_RNA (1)...(19): siRNA sense strand
aacaacaucuccugcuauu

SEQ ID NO: 1561320 - RNA, 19 nt, Homo sapiens
  misc_RNA (1)...(19): siRNA sense strand
uaaggcagcaauaauagaa

SEQ ID NO: 1561321 - RNA, 19 nt, Homo sapiens
  misc_RNA (1)...(19): siRNA sense strand
aaacaagaauuggaagaca

SEQ ID NO: 1561322 - RNA, 19 nt, Homo sapiens
  misc_RNA (1)...(19): siRNA sense strand
gcaaugaaggaugcaguuu

SEQ ID NO: 1561323 - RNA, 19 nt, Homo sapiens
  misc_RNA (1)...(19): siRNA sense strand
aacaggauguggaaucauu

SEQ ID NO: 1561324 - RNA, 19 nt, Homo sapiens
  misc_RNA (1)...(19): siRNA sense strand
caagagaugaauugauaga

SEQ ID NO: 1561325 - RNA, 19 nt, Homo sapiens
  misc_RNA (1)...(19): siRNA sense strand
uguuaaggcagcaauaaua

SEQ ID NO: 1561326 - RNA, 19 nt, Homo sapiens
  misc_RNA (1)...(19): siRNA sense strand
caaguagaagcuauugaaa

SEQ ID NO: 1561327 - RNA, 19 nt, Homo sapiens
  misc_RNA (1)...(19): siRNA sense strand
aaugaaggaugcaguuuua

SEQ ID NO: 1561328 - RNA, 19 nt, Homo sapiens
  misc_RNA (1)...(19): siRNA sense strand
acaaguagaagcuauugaa

SEQ ID NO: 1561329 - RNA, 19 nt, Homo sapiens
  misc_RNA (1)...(19): siRNA sense strand
cggaaccaguugacauuga

SEQ ID NO: 1561330 - RNA, 19 nt, Homo sapiens
  misc_RNA (1)...(19): siRNA sense strand
agaaacaguuaagugcuuu

SEQ ID NO: 1561331 - RNA, 19 nt, Homo sapiens
  misc_RNA (1)...(19): siRNA sense strand
gaagacagaacaugcaaaa

SEQ ID NO: 1561332 - RNA, 19 nt, Homo sapiens
  misc_RNA (1)...(19): siRNA sense strand
gaaggaugcaguuuuaaaa

SEQ ID NO: 1561333 - RNA, 19 nt, Homo sapiens
  misc_RNA (1)...(19): siRNA sense strand
gaggaagaaaggcaaagaa

SEQ ID NO: 1561334 - RNA, 19 nt, Homo sapiens
  misc_RNA (1)...(19): siRNA sense strand
gugaggaguugcuaaaugc

SEQ ID NO: 1561335 - RNA, 19 nt, Homo sapiens
  misc_RNA (1)...(19): siRNA sense strand
agagaugaauugauagagu

SEQ ID NO: 1561336 - RNA, 19 nt, Homo sapiens
  misc_RNA (1)...(19): siRNA sense strand
ccauuggguuuaacugaug

SEQ ID NO: 1561337 - RNA, 19 nt, Homo sapiens
  misc_RNA (1)...(19): siRNA sense strand
gaagagcagaaacgaagug

SEQ ID NO: 1561338 - RNA, 19 nt, Homo sapiens
  misc_RNA (1)...(19): siRNA sense strand
acaguacauuucugcaauu

SEQ ID NO: 1561339 - RNA, 19 nt, Homo sapiens
  misc_RNA (1)...(19): siRNA sense strand
auacaaagaacuucaggaa

SEQ ID NO: 1561340 - RNA, 19 nt, Homo sapiens
  misc_RNA (1)...(19): siRNA sense strand
uaucuaacauacagcuuca

SEQ ID NO: 1561341 - RNA, 19 nt, Homo sapiens
  misc_RNA (1)...(19): siRNA sense strand
ucaagaacagaaggaaaua

SEQ ID NO: 1561342 - RNA, 19 nt, Homo sapiens
  misc_RNA (1)...(19): siRNA sense strand
ugugaggaguugcuaaaug

SEQ ID NO: 1561343 - RNA, 19 nt, Homo sapiens
  misc_RNA (1)...(19): siRNA sense strand
caacaaguagaagcuauug

SEQ ID NO: 1561344 - RNA, 19 nt, Homo sapiens
  misc_RNA (1)...(19): siRNA sense strand
cagagaaggaacuguuaaa

SEQ ID NO: 1561345 - RNA, 19 nt, Homo sapiens
  misc_RNA (1)...(19): siRNA sense strand
ggaaaaguguuuggaggaa

SEQ ID NO: 1561346 - RNA, 19 nt, Homo sapiens
  misc_RNA (1)...(19): siRNA sense strand
caacaucuccugcuauucc

SEQ ID NO: 1561347 - RNA, 19 nt, Homo sapiens
  misc_RNA (1)...(19): siRNA sense strand
ucagcaaucucaagaacag

SEQ ID NO: 1561348 - RNA, 19 nt, Homo sapiens
  misc_RNA (1)...(19): siRNA sense strand
gcagcaaauagcauuguga

SEQ ID NO: 1561349 - RNA, 19 nt, Homo sapiens
  misc_RNA (1)...(19): siRNA sense strand
ggugaaacccaaacaacau

SEQ ID NO: 1561350 - RNA, 19 nt, Homo sapiens
  misc_RNA (1)...(19): siRNA sense strand
ggaagacagaacaugcaaa

SEQ ID NO: 1561351 - RNA, 19 nt, Homo sapiens
  misc_RNA (1)...(19): siRNA sense strand
ggaauuauggaagacagaa

SEQ ID NO: 1561352 - RNA, 19 nt, Homo sapiens
  misc_RNA (1)...(19): siRNA sense strand
ggaggaagaaaggcaaaga

SEQ ID NO: 1561353 - RNA, 19 nt, Homo sapiens
  misc_RNA (1)...(19): siRNA sense strand
cauugugagucaaacuauu

SEQ ID NO: 1561354 - RNA, 19 nt, Homo sapiens
  misc_RNA (1)...(19): siRNA sense strand
uaagucaggaaacuguuaa

SEQ ID NO: 1561355 - RNA, 19 nt, Homo sapiens
  misc_RNA (1)...(19): siRNA sense strand
uaaagaggcauuaguaucc

SEQ ID NO: 1561356 - RNA, 19 nt, Homo sapiens
  misc_RNA (1)...(19): siRNA sense strand
cagaaggaaauauuggaaa

SEQ ID NO: 1561357 - RNA, 19 nt, Homo sapiens
  misc_RNA (1)...(19): siRNA sense strand
acauacagcuucagcaaaa

SEQ ID NO: 1561358 - RNA, 19 nt, Homo sapiens
  misc_RNA (1)...(19): siRNA sense strand
gauccuggagccaauguau

SEQ ID NO: 1561359 - RNA, 19 nt, Homo sapiens
  misc_RNA (1)...(19): siRNA sense strand
acacucaucuggauaucuc

SEQ ID NO: 1561360 - RNA, 19 nt, Homo sapiens
  misc_RNA (1)...(19): siRNA sense strand
ggaaguggugaaacccaaa

SEQ ID NO: 1561361 - RNA, 19 nt, Homo sapiens
  misc_RNA (1)...(19): siRNA sense strand
aagaacaagagaugaauug

SEQ ID NO: 1561362 - RNA, 19 nt, Homo sapiens
  misc_RNA (1)...(19): siRNA sense strand
ugaagaaagggaauuaugg

SEQ ID NO: 1561363 - RNA, 19 nt, Homo sapiens
  misc_RNA (1)...(19): siRNA sense strand
gaccacucuucuuccauug

SEQ ID NO: 1561364 - RNA, 19 nt, Homo sapiens
  misc_RNA (1)...(19): siRNA sense strand
aaacaacaucuccugcuau

SEQ ID NO: 1561365 - RNA, 19 nt, Homo sapiens
  misc_RNA (1)...(19): siRNA sense strand
agaaaaggcucgaucaagu

SEQ ID NO: 1561366 - RNA, 19 nt, Homo sapiens
  misc_RNA (1)...(19): siRNA sense strand
gagaauacacaugcagcaa

SEQ ID NO: 1561367 - RNA, 19 nt, Homo sapiens
  misc_RNA (1)...(19): siRNA sense strand
gacagaacaugcaaaagau

SEQ ID NO: 1561368 - RNA, 19 nt, Homo sapiens
  misc_RNA (1)...(19): siRNA sense strand
gcauuaguauccgcugcaa

SEQ ID NO: 1561369 - RNA, 19 nt, Homo sapiens
  misc_RNA (1)...(19): siRNA sense strand
aaacaguacauuucugcaa

SEQ ID NO: 1561370 - RNA, 19 nt, Homo sapiens
  misc_RNA (1)...(19): siRNA sense strand
ucagcauuauuguggauga

SEQ ID NO: 1561371 - RNA, 19 nt, Homo sapiens
  misc_RNA (1)...(19): siRNA sense strand
acagagaauuaaacaggau

SEQ ID NO: 1561372 - RNA, 19 nt, Homo sapiens
  misc_RNA (1)...(19): siRNA sense strand
gcaaucaacacacacucau

SEQ ID NO: 1561373 - RNA, 19 nt, Homo sapiens
  misc_RNA (1)...(19): siRNA sense strand
agaauacacaugcagcaaa

SEQ ID NO: 1561374 - RNA, 19 nt, Homo sapiens
  misc_RNA (1)...(19): siRNA sense strand
caguacauuucugcaauug

SEQ ID NO: 1561375 - RNA, 19 nt, Homo sapiens
  misc_RNA (1)...(19): siRNA sense strand
gaagaggcagugaaaagaa

SEQ ID NO: 1561376 - RNA, 19 nt, Homo sapiens
  misc_RNA (1)...(19): siRNA sense strand
guuaaggcagcaauaauag

SEQ ID NO: 1561377 - RNA, 19 nt, Homo sapiens
  misc_RNA (1)...(19): siRNA sense strand
gcuauacaagaacaaagaa

SEQ ID NO: 1561378 - RNA, 19 nt, Homo sapiens
  misc_RNA (1)...(19): siRNA sense strand
gagaaacaggcacacaagu

SEQ ID NO: 1561379 - RNA, 19 nt, Homo sapiens
  misc_RNA (1)...(19): siRNA sense strand
gaucagcuauguccaaacu

SEQ ID NO: 1561380 - RNA, 19 nt, Homo sapiens
  misc_RNA (1)...(19): siRNA sense strand
ucauaaagggcuccucuua

SEQ ID NO: 1561381 - RNA, 19 nt, Homo sapiens
  misc_RNA (1)...(19): siRNA sense strand
gcagauggcugggcacucu

SEQ ID NO: 1561382 - RNA, 19 nt, Homo sapiens
  misc_RNA (1)...(19): siRNA sense strand
ggaaagguguucgucauac

SEQ ID NO: 1561383 - RNA, 19 nt, Homo sapiens
  misc_RNA (1)...(19): siRNA sense strand
caucuccaauuucuacauu

SEQ ID NO: 1561384 - RNA, 19 nt, Homo sapiens
  misc_RNA (1)...(19): siRNA sense strand
gaaagguguucgucauacu

SEQ ID NO: 1561385 - RNA, 19 nt, Homo sapiens
  misc_RNA (1)...(19): siRNA sense strand
caucguggccuauaaacaa

SEQ ID NO: 1561386 - RNA, 19 nt, Homo sapiens
  misc_RNA (1)...(19): siRNA sense strand
ggucuucucccgcugcuuu

SEQ ID NO: 1561387 - RNA, 19 nt, Homo sapiens
  misc_RNA (1)...(19): siRNA sense strand
gcccugcucuacagccuuu

SEQ ID NO: 1561388 - RNA, 19 nt, Homo sapiens
  misc_RNA (1)...(19): siRNA sense strand
ucagcuauguccaaacuca

SEQ ID NO: 1561389 - RNA, 19 nt, Homo sapiens
  misc_RNA (1)...(19): siRNA sense strand
ggagacaucauagagaaau

SEQ ID NO: 1561390 - RNA, 19 nt, Homo sapiens
  misc_RNA (1)...(19): siRNA sense strand
gggcuccucuuauggaaag

SEQ ID NO: 1561391 - RNA, 19 nt, Homo sapiens
  misc_RNA (1)...(19): siRNA sense strand
gagacaucauagagaaaug

SEQ ID NO: 1561392 - RNA, 19 nt, Homo sapiens
  misc_RNA (1)...(19): siRNA sense strand
ugacauccaccuuguacaa

SEQ ID NO: 1561393 - RNA, 19 nt, Homo sapiens
  misc_RNA (1)...(19): siRNA sense strand
gcaggugggcuaugguaug

SEQ ID NO: 1561394 - RNA, 19 nt, Homo sapiens
  misc_RNA (1)...(19): siRNA sense strand
cgugagcugugccucguuu

SEQ ID NO: 1561395 - RNA, 19 nt, Homo sapiens
  misc_RNA (1)...(19): siRNA sense strand
gaaaagcaaaaccccauaa

SEQ ID NO: 1561396 - RNA, 19 nt, Homo sapiens
  misc_RNA (1)...(19): siRNA sense strand
cuuugugggugcuaucaua

SEQ ID NO: 1561397 - RNA, 19 nt, Homo sapiens
  misc_RNA (1)...(19): siRNA sense strand
ccucuuggcuuuugugaaa

SEQ ID NO: 1561398 - RNA, 19 nt, Homo sapiens
  misc_RNA (1)...(19): siRNA sense strand
ugugggugcuaucauauau

SEQ ID NO: 1561399 - RNA, 19 nt, Homo sapiens
  misc_RNA (1)...(19): siRNA sense strand
gcuuugcucucuccuccuu

SEQ ID NO: 1561400 - RNA, 19 nt, Homo sapiens
  misc_RNA (1)...(19): siRNA sense strand
ccgaucagcuauguccaaa

SEQ ID NO: 1561401 - RNA, 19 nt, Homo sapiens
  misc_RNA (1)...(19): siRNA sense strand
ugauugggauggucuccuu

SEQ ID NO: 1561402 - RNA, 19 nt, Homo sapiens
  misc_RNA (1)...(19): siRNA sense strand
cagcuguccuuggcucuga

SEQ ID NO: 1561403 - RNA, 19 nt, Homo sapiens
  misc_RNA (1)...(19): siRNA sense strand
caccauugccuugcucuuu

SEQ ID NO: 1561404 - RNA, 19 nt, Homo sapiens
  misc_RNA (1)...(19): siRNA sense strand
ucuaccagcucaccaugga

SEQ ID NO: 1561405 - RNA, 19 nt, Homo sapiens
  misc_RNA (1)...(19): siRNA sense strand
uggaaagguguucgucaua

SEQ ID NO: 1561406 - RNA, 19 nt, Homo sapiens
  misc_RNA (1)...(19): siRNA sense strand
gggagccucucgguuggaa

SEQ ID NO: 1561407 - RNA, 19 nt, Homo sapiens
  misc_RNA (1)...(19): siRNA sense strand
uuagcaucguggccuauaa

SEQ ID NO: 1561408 - RNA, 19 nt, Homo sapiens
  misc_RNA (1)...(19): siRNA sense strand
auggagacaucauagagaa

SEQ ID NO: 1561409 - RNA, 19 nt, Homo sapiens
  misc_RNA (1)...(19): siRNA sense strand
cuauaaacaagucccauug

SEQ ID NO: 1561410 - RNA, 19 nt, Homo sapiens
  misc_RNA (1)...(19): siRNA sense strand
acaaccauccgaucagcua

SEQ ID NO: 1561411 - RNA, 19 nt, Homo sapiens
  misc_RNA (1)...(19): siRNA sense strand
caagucccauugucaccau

SEQ ID NO: 1561412 - RNA, 19 nt, Homo sapiens
  misc_RNA (1)...(19): siRNA sense strand
uagcaucguggccuauaaa

SEQ ID NO: 1561413 - RNA, 19 nt, Homo sapiens
  misc_RNA (1)...(19): siRNA sense strand
uuugugggcuccugcuuug

SEQ ID NO: 1561414 - RNA, 19 nt, Homo sapiens
  misc_RNA (1)...(19): siRNA sense strand
aaagggcuccucuuaugga

SEQ ID NO: 1561415 - RNA, 19 nt, Homo sapiens
  misc_RNA (1)...(19): siRNA sense strand
gugcaggugggcuauggua

SEQ ID NO: 1561416 - RNA, 19 nt, Homo sapiens
  misc_RNA (1)...(19): siRNA sense strand
ccgggcaucucuucaagca

SEQ ID NO: 1561417 - RNA, 19 nt, Homo sapiens
  misc_RNA (1)...(19): siRNA sense strand
ccuauaaacaagucccauu

SEQ ID NO: 1561418 - RNA, 19 nt, Homo sapiens
  misc_RNA (1)...(19): siRNA sense strand
gcucucuccuccuuucucu

SEQ ID NO: 1561419 - RNA, 19 nt, Homo sapiens
  misc_RNA (1)...(19): siRNA sense strand
accauugccuugcucuuug

SEQ ID NO: 1561420 - RNA, 19 nt, Homo sapiens
  misc_RNA (1)...(19): siRNA sense strand
agagccaucuccaauuucu

SEQ ID NO: 1561421 - RNA, 19 nt, Homo sapiens
  misc_RNA (1)...(19): siRNA sense strand
uaaagggcuccucuuaugg

SEQ ID NO: 1561422 - RNA, 19 nt, Homo sapiens
  misc_RNA (1)...(19): siRNA sense strand
ggaaaagcaaaaccccaua

SEQ ID NO: 1561423 - RNA, 19 nt, Homo sapiens
  misc_RNA (1)...(19): siRNA sense strand
cuggccaucauuccaauua

SEQ ID NO: 1561424 - RNA, 19 nt, Homo sapiens
  misc_RNA (1)...(19): siRNA sense strand
ggguacaccaucuucauca

SEQ ID NO: 1561425 - RNA, 19 nt, Homo sapiens
  misc_RNA (1)...(19): siRNA sense strand
caggugggcuaugguaugg

SEQ ID NO: 1561426 - RNA, 19 nt, Homo sapiens
  misc_RNA (1)...(19): siRNA sense strand
ccauugccuugcucuuugu

SEQ ID NO: 1561427 - RNA, 19 nt, Homo sapiens
  misc_RNA (1)...(19): siRNA sense strand
cgucacaaccauccgauca

SEQ ID NO: 1561428 - RNA, 19 nt, Homo sapiens
  misc_RNA (1)...(19): siRNA sense strand
gcaggguacaccaucuuca

SEQ ID NO: 1561429 - RNA, 19 nt, Homo sapiens
  misc_RNA (1)...(19): siRNA sense strand
ugaccggcguggugacauc

SEQ ID NO: 1561430 - RNA, 19 nt, Homo sapiens
  misc_RNA (1)...(19): siRNA sense strand
acauccaccuuguacaaca

SEQ ID NO: 1561431 - RNA, 19 nt, Homo sapiens
  misc_RNA (1)...(19): siRNA sense strand
ggccugugcugguaggauu

SEQ ID NO: 1561432 - RNA, 19 nt, Homo sapiens
  misc_RNA (1)...(19): siRNA sense strand
ggcauggccugugcuggua

SEQ ID NO: 1561433 - RNA, 19 nt, Homo sapiens
  misc_RNA (1)...(19): siRNA sense strand
caucgaggacaauuacauu

SEQ ID NO: 1561434 - RNA, 19 nt, Homo sapiens
  misc_RNA (1)...(19): siRNA sense strand
acagguggcugaagaugag

SEQ ID NO: 1561435 - RNA, 19 nt, Homo sapiens
  misc_RNA (1)...(19): siRNA sense strand
ggaccacuucucccucuga

SEQ ID NO: 1561436 - RNA, 19 nt, Homo sapiens
  misc_RNA (1)...(19): siRNA sense strand
gccgauaccaugccagcua

SEQ ID NO: 1561437 - RNA, 19 nt, Homo sapiens
  misc_RNA (1)...(19): siRNA sense strand
gaagaugaggaugaugaug

SEQ ID NO: 1561438 - RNA, 19 nt, Homo sapiens
  misc_RNA (1)...(19): siRNA sense strand
cugaagaugaggaugauga

SEQ ID NO: 1561439 - RNA, 19 nt, Homo sapiens
  misc_RNA (1)...(19): siRNA sense strand
gguccucucgcuccucauu

SEQ ID NO: 1561440 - RNA, 19 nt, Homo sapiens
  misc_RNA (1)...(19): siRNA sense strand
cgaggacaauuacauucag

SEQ ID NO: 1561441 - RNA, 19 nt, Homo sapiens
  misc_RNA (1)...(19): siRNA sense strand
uggcugaagaugaggauga

SEQ ID NO: 1561442 - RNA, 19 nt, Homo sapiens
  misc_RNA (1)...(19): siRNA sense strand
cauugcacuugcugccaaa

SEQ ID NO: 1561443 - RNA, 19 nt, Homo sapiens
  misc_RNA (1)...(19): siRNA sense strand
ggaaagccuucagcuacua

SEQ ID NO: 1561444 - RNA, 19 nt, Homo sapiens
  misc_RNA (1)...(19): siRNA sense strand
gaacuacacguccagauuc

SEQ ID NO: 1561445 - RNA, 19 nt, Homo sapiens
  misc_RNA (1)...(19): siRNA sense strand
gggcagcgccucaacauug

SEQ ID NO: 1561446 - RNA, 19 nt, Homo sapiens
  misc_RNA (1)...(19): siRNA sense strand
gcaagacccuccgugugaa

SEQ ID NO: 1561447 - RNA, 19 nt, Homo sapiens
  misc_RNA (1)...(19): siRNA sense strand
ggacguucacgcucuauga

SEQ ID NO: 1561448 - RNA, 19 nt, Homo sapiens
  misc_RNA (1)...(19): siRNA sense strand
gggaaagccuucagcuacu

SEQ ID NO: 1561449 - RNA, 19 nt, Homo sapiens
  misc_RNA (1)...(19): siRNA sense strand
ccugagcccuccagcaaga

SEQ ID NO: 1561450 - RNA, 19 nt, Homo sapiens
  misc_RNA (1)...(19): siRNA sense strand
ggaaacugcagucgaagca

SEQ ID NO: 1561451 - RNA, 19 nt, Homo sapiens
  misc_RNA (1)...(19): siRNA sense strand
gaacacggagcgcagaaac

SEQ ID NO: 1561452 - RNA, 19 nt, Homo sapiens
  misc_RNA (1)...(19): siRNA sense strand
agaacuacacguccagauu

SEQ ID NO: 1561453 - RNA, 19 nt, Homo sapiens
  misc_RNA (1)...(19): siRNA sense strand
ucuaugacuuugacaacug

SEQ ID NO: 1561454 - RNA, 19 nt, Homo sapiens
  misc_RNA (1)...(19): siRNA sense strand
cacaggugcugguggaaca

SEQ ID NO: 1561455 - RNA, 19 nt, Homo sapiens
  misc_RNA (1)...(19): siRNA sense strand
guucacgcucuaugacuuu

SEQ ID NO: 1561456 - RNA, 19 nt, Homo sapiens
  misc_RNA (1)...(19): siRNA sense strand
agcaagacccuccguguga

SEQ ID NO: 1561457 - RNA, 19 nt, Homo sapiens
  misc_RNA (1)...(19): siRNA sense strand
gagaacacggagcgcagaa

SEQ ID NO: 1561458 - RNA, 19 nt, Homo sapiens
  misc_RNA (1)...(19): siRNA sense strand
gcuacgcggugccagugau

SEQ ID NO: 1561459 - RNA, 19 nt, Homo sapiens
  misc_RNA (1)...(19): siRNA sense strand
gacccuccgugugaagcua

SEQ ID NO: 1561460 - RNA, 19 nt, Homo sapiens
  misc_RNA (1)...(19): siRNA sense strand
cguucacgcucuaugacuu

SEQ ID NO: 1561461 - RNA, 19 nt, Homo sapiens
  misc_RNA (1)...(19): siRNA sense strand
ccuacugcguggacgagaa

SEQ ID NO: 1561462 - RNA, 19 nt, Homo sapiens
  misc_RNA (1)...(19): siRNA sense strand
cagcagcaaguccgggaaa

SEQ ID NO: 1561463 - RNA, 19 nt, Homo sapiens
  misc_RNA (1)...(19): siRNA sense strand
gaaagccuucagcuacuac

SEQ ID NO: 1561464 - RNA, 19 nt, Homo sapiens
  misc_RNA (1)...(19): siRNA sense strand
ccucaugcacaccaucuau

SEQ ID NO: 1561465 - RNA, 19 nt, Homo sapiens
  misc_RNA (1)...(19): siRNA sense strand
gagaacuacacguccagau

SEQ ID NO: 1561466 - RNA, 19 nt, Homo sapiens
  misc_RNA (1)...(19): siRNA sense strand
ggacaggccuuauaagauc

SEQ ID NO: 1561467 - RNA, 19 nt, Homo sapiens
  misc_RNA (1)...(19): siRNA sense strand
caacuugucuuucauucaa

SEQ ID NO: 1561468 - RNA, 19 nt, Homo sapiens
  misc_RNA (1)...(19): siRNA sense strand
gcagcuaccuuuagucaau

SEQ ID NO: 1561469 - RNA, 19 nt, Homo sapiens
  misc_RNA (1)...(19): siRNA sense strand
gcaaauaucauccuuccaa

SEQ ID NO: 1561470 - RNA, 19 nt, Homo sapiens
  misc_RNA (1)...(19): siRNA sense strand
gaaagcagcagaauugcaa

SEQ ID NO: 1561471 - RNA, 19 nt, Homo sapiens
  misc_RNA (1)...(19): siRNA sense strand
aaagauggcucaaccaaag

SEQ ID NO: 1561472 - RNA, 19 nt, Homo sapiens
  misc_RNA (1)...(19): siRNA sense strand
gaagagacagccaaggaaa

SEQ ID NO: 1561473 - RNA, 19 nt, Homo sapiens
  misc_RNA (1)...(19): siRNA sense strand
caaauaucauccuuccaaa

SEQ ID NO: 1561474 - RNA, 19 nt, Homo sapiens
  misc_RNA (1)...(19): siRNA sense strand
gcuaaaagcugcucuggaa

SEQ ID NO: 1561475 - RNA, 19 nt, Homo sapiens
  misc_RNA (1)...(19): siRNA sense strand
gcagaaucuuacuuuguuu

SEQ ID NO: 1561476 - RNA, 19 nt, Homo sapiens
  misc_RNA (1)...(19): siRNA sense strand
agagaaagcagcagaauug

SEQ ID NO: 1561477 - RNA, 19 nt, Homo sapiens
  misc_RNA (1)...(19): siRNA sense strand
cugauagacucacuuagua

SEQ ID NO: 1561478 - RNA, 19 nt, Homo sapiens
  misc_RNA (1)...(19): siRNA sense strand
caaggaaccagaggaguua

SEQ ID NO: 1561479 - RNA, 19 nt, Homo sapiens
  misc_RNA (1)...(19): siRNA sense strand
gaggacaggccuuauaaga

SEQ ID NO: 1561480 - RNA, 19 nt, Homo sapiens
  misc_RNA (1)...(19): siRNA sense strand
aguagaaucucgccuggua

SEQ ID NO: 1561481 - RNA, 19 nt, Homo sapiens
  misc_RNA (1)...(19): siRNA sense strand
ccaaagaggacaggccuua

SEQ ID NO: 1561482 - RNA, 19 nt, Homo sapiens
  misc_RNA (1)...(19): siRNA sense strand
gcaaauccagcaagcacua

SEQ ID NO: 1561483 - RNA, 19 nt, Homo sapiens
  misc_RNA (1)...(19): siRNA sense strand
gaaauggcagcaaaggaaa

SEQ ID NO: 1561484 - RNA, 19 nt, Homo sapiens
  misc_RNA (1)...(19): siRNA sense strand
gcacuggccuuugaagagu

SEQ ID NO: 1561485 - RNA, 19 nt, Homo sapiens
  misc_RNA (1)...(19): siRNA sense strand
cagaaagaauggcggcaaa

SEQ ID NO: 1561486 - RNA, 19 nt, Homo sapiens
  misc_RNA (1)...(19): siRNA sense strand
uaauucagaugcucaggaa

SEQ ID NO: 1561487 - RNA, 19 nt, Homo sapiens
  misc_RNA (1)...(19): siRNA sense strand
aaucaaaccuggcugaaag

SEQ ID NO: 1561488 - RNA, 19 nt, Homo sapiens
  misc_RNA (1)...(19): siRNA sense strand
ucagggaguauaugaaaua

SEQ ID NO: 1561489 - RNA, 19 nt, Homo sapiens
  misc_RNA (1)...(19): siRNA sense strand
gcacaggaaacaauaaaca

SEQ ID NO: 1561490 - RNA, 19 nt, Homo sapiens
  misc_RNA (1)...(19): siRNA sense strand
aaagaggacaggccuuaua

SEQ ID NO: 1561491 - RNA, 19 nt, Homo sapiens
  misc_RNA (1)...(19): siRNA sense strand
cacaagaggaagaauauuu

SEQ ID NO: 1561492 - RNA, 19 nt, Homo sapiens
  misc_RNA (1)...(19): siRNA sense strand
acaaacagcagcuaccuuu

SEQ ID NO: 1561493 - RNA, 19 nt, Homo sapiens
  misc_RNA (1)...(19): siRNA sense strand
gauagacucacuuaguaaa

SEQ ID NO: 1561494 - RNA, 19 nt, Homo sapiens
  misc_RNA (1)...(19): siRNA sense strand
gagcagaaucuuacuuugu

SEQ ID NO: 1561495 - RNA, 19 nt, Homo sapiens
  misc_RNA (1)...(19): siRNA sense strand
uaaacaaacuccaaaugac

SEQ ID NO: 1561496 - RNA, 19 nt, Homo sapiens
  misc_RNA (1)...(19): siRNA sense strand
ugaaauggcagcaaaggaa

SEQ ID NO: 1561497 - RNA, 19 nt, Homo sapiens
  misc_RNA (1)...(19): siRNA sense strand
gcucgaguaugcuuuguca

SEQ ID NO: 1561498 - RNA, 19 nt, Homo sapiens
  misc_RNA (1)...(19): siRNA sense strand
ggaugaaacagaaagaaug

SEQ ID NO: 1561499 - RNA, 19 nt, Homo sapiens
  misc_RNA (1)...(19): siRNA sense strand
ggaagagacagccaaggaa

SEQ ID NO: 1561500 - RNA, 19 nt, Homo sapiens
  misc_RNA (1)...(19): siRNA sense strand
ggagguacaagcagugaaa

SEQ ID NO: 1561501 - RNA, 19 nt, Homo sapiens
  misc_RNA (1)...(19): siRNA sense strand
caugaaagucuaccagaaa

SEQ ID NO: 1561502 - RNA, 19 nt, Homo sapiens
  misc_RNA (1)...(19): siRNA sense strand
caaagacaccaacaggaaa

SEQ ID NO: 1561503 - RNA, 19 nt, Homo sapiens
  misc_RNA (1)...(19): siRNA sense strand
gaaaauggcagcacaggaa

SEQ ID NO: 1561504 - RNA, 19 nt, Homo sapiens
  misc_RNA (1)...(19): siRNA sense strand
agugguaggucauuugaaa

SEQ ID NO: 1561505 - RNA, 19 nt, Homo sapiens
  misc_RNA (1)...(19): siRNA sense strand
caacauagaguuucuuuug

SEQ ID NO: 1561506 - RNA, 19 nt, Homo sapiens
  misc_RNA (1)...(19): siRNA sense strand
cagaagacaguuuggaauu

SEQ ID NO: 1561507 - RNA, 19 nt, Homo sapiens
  misc_RNA (1)...(19): siRNA sense strand
caaggaaagccaagcagaa

SEQ ID NO: 1561508 - RNA, 19 nt, Homo sapiens
  misc_RNA (1)...(19): siRNA sense strand
ggaaauacugauagacuca

SEQ ID NO: 1561509 - RNA, 19 nt, Homo sapiens
  misc_RNA (1)...(19): siRNA sense strand
ucaauauucccaagaugua

SEQ ID NO: 1561510 - RNA, 19 nt, Homo sapiens
  misc_RNA (1)...(19): siRNA sense strand
aauagaagguuccgacaca

SEQ ID NO: 1561511 - RNA, 19 nt, Homo sapiens
  misc_RNA (1)...(19): siRNA sense strand
caaacagcagcuaccuuua

SEQ ID NO: 1561512 - RNA, 19 nt, Homo sapiens
  misc_RNA (1)...(19): siRNA sense strand
gaagagaaagcagcagaau

SEQ ID NO: 1561513 - RNA, 19 nt, Homo sapiens
  misc_RNA (1)...(19): siRNA sense strand
gaaagcaagcauggaggua

SEQ ID NO: 1561514 - RNA, 19 nt, Homo sapiens
  misc_RNA (1)...(19): siRNA sense strand
gacuguccaugaauuuauu

SEQ ID NO: 1561515 - RNA, 19 nt, Homo sapiens
  misc_RNA (1)...(19): siRNA sense strand
cagcuguccuuucagaaga

SEQ ID NO: 1561516 - RNA, 19 nt, Homo sapiens
  misc_RNA (1)...(19): siRNA sense strand
acaaagacaccaacaggaa

SEQ ID NO: 1561517 - RNA, 19 nt, Homo sapiens
  misc_RNA (1)...(19): siRNA sense strand
ccagaggaguuacuucaag

SEQ ID NO: 1561518 - RNA, 19 nt, Homo sapiens
  misc_RNA (1)...(19): siRNA sense strand
gggaagagacagccaagga

SEQ ID NO: 1561519 - RNA, 19 nt, Homo sapiens
  misc_RNA (1)...(19): siRNA sense strand
uaugaaccguaacaugaaa

SEQ ID NO: 1561520 - RNA, 19 nt, Homo sapiens
  misc_RNA (1)...(19): siRNA sense strand
caaauagcaacauagaguu

SEQ ID NO: 1561521 - RNA, 19 nt, Homo sapiens
  misc_RNA (1)...(19): siRNA sense strand
acagguuucugcucgagua

SEQ ID NO: 1561522 - RNA, 19 nt, Homo sapiens
  misc_RNA (1)...(19): siRNA sense strand
aaagagcacaggcaucaaa

SEQ ID NO: 1561523 - RNA, 19 nt, Homo sapiens
  misc_RNA (1)...(19): siRNA sense strand
acacugaauucuggaggua

SEQ ID NO: 1561524 - RNA, 19 nt, Homo sapiens
  misc_RNA (1)...(19): siRNA sense strand
agcagaaucuuacuuuguu

SEQ ID NO: 1561525 - RNA, 19 nt, Homo sapiens
  misc_RNA (1)...(19): siRNA sense strand
ggagccagcacuuuauuuc

SEQ ID NO: 1561526 - RNA, 19 nt, Homo sapiens
  misc_RNA (1)...(19): siRNA sense strand
ggagugguaggucauuuga

SEQ ID NO: 1561527 - RNA, 19 nt, Homo sapiens
  misc_RNA (1)...(19): siRNA sense strand
gaaaucaaaccuggcugaa

SEQ ID NO: 1561528 - RNA, 19 nt, Homo sapiens
  misc_RNA (1)...(19): siRNA sense strand
gaauucuggagguaaagua

SEQ ID NO: 1561529 - RNA, 19 nt, Homo sapiens
  misc_RNA (1)...(19): siRNA sense strand
acaugaaagucuaccagaa

SEQ ID NO: 1561530 - RNA, 19 nt, Homo sapiens
  misc_RNA (1)...(19): siRNA sense strand
caauugagaggaugaaaca

SEQ ID NO: 1561531 - RNA, 19 nt, Homo sapiens
  misc_RNA (1)...(19): siRNA sense strand
ggccucaacccaauucaaa

SEQ ID NO: 1561532 - RNA, 19 nt, Homo sapiens
  misc_RNA (1)...(19): siRNA sense strand
acaaauagcaacauagagu

SEQ ID NO: 1561533 - RNA, 19 nt, Homo sapiens
  misc_RNA (1)...(19): siRNA sense strand
gaagacaguuuggaauucc

SEQ ID NO: 1561534 - RNA, 19 nt, Homo sapiens
  misc_RNA (1)...(19): siRNA sense strand
aaacaaacuccaaaugaca

SEQ ID NO: 1561535 - RNA, 19 nt, Homo sapiens
  misc_RNA (1)...(19): siRNA sense strand
uccgauuccuagauuaaua

SEQ ID NO: 1561536 - RNA, 19 nt, Homo sapiens
  misc_RNA (1)...(19): siRNA sense strand
gcuccgauuccuagauuaa

SEQ ID NO: 1561537 - RNA, 19 nt, Homo sapiens
  misc_RNA (1)...(19): siRNA sense strand
gcaguagcacaaccaaaga

SEQ ID NO: 1561538 - RNA, 19 nt, Homo sapiens
  misc_RNA (1)...(19): siRNA sense strand
ucaaggaaccagaggaguu

SEQ ID NO: 1561539 - RNA, 19 nt, Homo sapiens
  misc_RNA (1)...(19): siRNA sense strand
agaagacaguuuggaauuc

SEQ ID NO: 1561540 - RNA, 19 nt, Homo sapiens
  misc_RNA (1)...(19): siRNA sense strand
aaaaugaaauggcagcaaa

SEQ ID NO: 1561541 - RNA, 19 nt, Homo sapiens
  misc_RNA (1)...(19): siRNA sense strand
aagaggacaggccuuauaa

SEQ ID NO: 1561542 - RNA, 19 nt, Homo sapiens
  misc_RNA (1)...(19): siRNA sense strand
aaucacaagaggaagaaua

SEQ ID NO: 1561543 - RNA, 19 nt, Homo sapiens
  misc_RNA (1)...(19): siRNA sense strand
aaacagcagcuaccuuuag

SEQ ID NO: 1561544 - RNA, 19 nt, Homo sapiens
  misc_RNA (1)...(19): siRNA sense strand
uuuaugaaccguaacauga

SEQ ID NO: 1561545 - RNA, 19 nt, Homo sapiens
  misc_RNA (1)...(19): siRNA sense strand
gcagcacaggaaacaauaa

SEQ ID NO: 1561546 - RNA, 19 nt, Homo sapiens
  misc_RNA (1)...(19): siRNA sense strand
ugagccaacuagcuuucua

SEQ ID NO: 1561547 - RNA, 19 nt, Homo sapiens
  misc_RNA (1)...(19): siRNA sense strand
auacugauagacucacuua

SEQ ID NO: 1561548 - RNA, 19 nt, Homo sapiens
  misc_RNA (1)...(19): siRNA sense strand
gacucgcacuccagagaaa

SEQ ID NO: 1561549 - RNA, 19 nt, Homo sapiens
  misc_RNA (1)...(19): siRNA sense strand
ccucagggaguauaugaaa

SEQ ID NO: 1561550 - RNA, 19 nt, Homo sapiens
  misc_RNA (1)...(19): siRNA sense strand
cauccagaaugaagaguca

SEQ ID NO: 1561551 - RNA, 19 nt, Homo sapiens
  misc_RNA (1)...(19): siRNA sense strand
cagcacaggaaacaauaaa

SEQ ID NO: 1561552 - RNA, 19 nt, Homo sapiens
  misc_RNA (1)...(19): siRNA sense strand
gaugaaacagaaagaaugg

SEQ ID NO: 1561553 - RNA, 19 nt, Homo sapiens
  misc_RNA (1)...(19): siRNA sense strand
ugugugaccucaucgaauc

SEQ ID NO: 1561554 - RNA, 19 nt, Homo sapiens
  misc_RNA (1)...(19): siRNA sense strand
cauuggagaugcugaggau

SEQ ID NO: 1561555 - RNA, 19 nt, Homo sapiens
  misc_RNA (1)...(19): siRNA sense strand
cuuuagcuuuggagaauuu

SEQ ID NO: 1561556 - RNA, 19 nt, Homo sapiens
  misc_RNA (1)...(19): siRNA sense strand
uugagaggaugaaacagaa

SEQ ID NO: 1561557 - RNA, 19 nt, Homo sapiens
  misc_RNA (1)...(19): siRNA sense strand
guauacaaagucugcauug

SEQ ID NO: 1561558 - RNA, 19 nt, Homo sapiens
  misc_RNA (1)...(19): siRNA sense strand
ugagggaacggcaacuaaa

SEQ ID NO: 1561559 - RNA, 19 nt, Homo sapiens
  misc_RNA (1)...(19): siRNA sense strand
ugugagagaagaagagaaa

SEQ ID NO: 1561560 - RNA, 19 nt, Homo sapiens
  misc_RNA (1)...(19): siRNA sense strand
ugauagacucacuuaguaa

SEQ ID NO: 1561561 - RNA, 19 nt, Homo sapiens
  misc_RNA (1)...(19): siRNA sense strand
cagcagcuaccuuuaguca

SEQ ID NO: 1561562 - RNA, 19 nt, Homo sapiens
  misc_RNA (1)...(19): siRNA sense strand
agccagcacuuuauuucaa

SEQ ID NO: 1561563 - RNA, 19 nt, Homo sapiens
  misc_RNA (1)...(19): siRNA sense strand
caaauuuauugccaacacu

SEQ ID NO: 1561564 - RNA, 19 nt, Homo sapiens
  misc_RNA (1)...(19): siRNA sense strand
uucagaugcucaggaaaua

SEQ ID NO: 1561565 - RNA, 19 nt, Homo sapiens
  misc_RNA (1)...(19): siRNA sense strand
gagagaagaagagaaagca

SEQ ID NO: 1561566 - RNA, 19 nt, Homo sapiens
  misc_RNA (1)...(19): siRNA sense strand
gaagaucuccuuugccuua

SEQ ID NO: 1561567 - RNA, 19 nt, Homo sapiens
  misc_RNA (1)...(19): siRNA sense strand
gcagagaauucuagacuug

SEQ ID NO: 1561568 - RNA, 19 nt, Homo sapiens
  misc_RNA (1)...(19): siRNA sense strand
caaaagaucuuaugcauga

SEQ ID NO: 1561569 - RNA, 19 nt, Homo sapiens
  misc_RNA (1)...(19): siRNA sense strand
gaacugacccugugcaaau

SEQ ID NO: 1561570 - RNA, 19 nt, Homo sapiens
  misc_RNA (1)...(19): siRNA sense strand
gaagagacgaagaaacuga

SEQ ID NO: 1561571 - RNA, 19 nt, Homo sapiens
  misc_RNA (1)...(19): siRNA sense strand
ccaacuaucuggagaaggu

SEQ ID NO: 1561572 - RNA, 19 nt, Homo sapiens
  misc_RNA (1)...(19): siRNA sense strand
gaacaaugugaacaggaua

SEQ ID NO: 1561573 - RNA, 19 nt, Homo sapiens
  misc_RNA (1)...(19): siRNA sense strand
cauugaagaucuccaacaa

SEQ ID NO: 1561574 - RNA, 19 nt, Homo sapiens
  misc_RNA (1)...(19): siRNA sense strand
gcaaugagaaggagacgau

SEQ ID NO: 1561575 - RNA, 19 nt, Homo sapiens
  misc_RNA (1)...(19): siRNA sense strand
gaucuccuuugccuuaaga

SEQ ID NO: 1561576 - RNA, 19 nt, Homo sapiens
  misc_RNA (1)...(19): siRNA sense strand
gcaaacuggccacugauga

SEQ ID NO: 1561577 - RNA, 19 nt, Homo sapiens
  misc_RNA (1)...(19): siRNA sense strand
cgaugcaguuccugaauga

SEQ ID NO: 1561578 - RNA, 19 nt, Homo sapiens
  misc_RNA (1)...(19): siRNA sense strand
gaaagcagagaauucuaga

SEQ ID NO: 1561579 - RNA, 19 nt, Homo sapiens
  misc_RNA (1)...(19): siRNA sense strand
ccaauggugugcccggauu

SEQ ID NO: 1561580 - RNA, 19 nt, Homo sapiens
  misc_RNA (1)...(19): siRNA sense strand
gaacaggauaucccaaugg

SEQ ID NO: 1561581 - RNA, 19 nt, Homo sapiens
  misc_RNA (1)...(19): siRNA sense strand
gaagaucuccaacaaaaga

SEQ ID NO: 1561582 - RNA, 19 nt, Homo sapiens
  misc_RNA (1)...(19): siRNA sense strand
agaaggagacgaugcaguu

SEQ ID NO: 1561583 - RNA, 19 nt, Homo sapiens
  misc_RNA (1)...(19): siRNA sense strand
uggagucucugaaggaaga

SEQ ID NO: 1561584 - RNA, 19 nt, Homo sapiens
  misc_RNA (1)...(19): siRNA sense strand
gcaugaaagcagagaauuc

SEQ ID NO: 1561585 - RNA, 19 nt, Homo sapiens
  misc_RNA (1)...(19): siRNA sense strand
ugacagacucgccaacuau

SEQ ID NO: 1561586 - RNA, 19 nt, Homo sapiens
  misc_RNA (1)...(19): siRNA sense strand
gauccaagaacaaugugaa

SEQ ID NO: 1561587 - RNA, 19 nt, Homo sapiens
  misc_RNA (1)...(19): siRNA sense strand
ugaacaggauaucccaaug

SEQ ID NO: 1561588 - RNA, 19 nt, Homo sapiens
  misc_RNA (1)...(19): siRNA sense strand
agaacaaugugaacaggau

SEQ ID NO: 1561589 - RNA, 19 nt, Homo sapiens
  misc_RNA (1)...(19): siRNA sense strand
ggaacugacccugugcaaa

SEQ ID NO: 1561590 - RNA, 19 nt, Homo sapiens
  misc_RNA (1)...(19): siRNA sense strand
gaugucagacuccaagcuu

SEQ ID NO: 1561591 - RNA, 19 nt, Homo sapiens
  misc_RNA (1)...(19): siRNA sense strand
acacacugcucuccugagu

SEQ ID NO: 1561592 - RNA, 19 nt, Homo sapiens
  misc_RNA (1)...(19): siRNA sense strand
uaucagcguuacuucaaca

SEQ ID NO: 1561593 - RNA, 19 nt, Homo sapiens
  misc_RNA (1)...(19): siRNA sense strand
uugaagaucuccaacaaaa

SEQ ID NO: 1561594 - RNA, 19 nt, Homo sapiens
  misc_RNA (1)...(19): siRNA sense strand
caacaccauugaagaucuc

SEQ ID NO: 1561595 - RNA, 19 nt, Homo sapiens
  misc_RNA (1)...(19): siRNA sense strand
cuccugccaugcuacuuua

SEQ ID NO: 1561596 - RNA, 19 nt, Homo sapiens
  misc_RNA (1)...(19): siRNA sense strand
acugcaaacuggccacuga

SEQ ID NO: 1561597 - RNA, 19 nt, Homo sapiens
  misc_RNA (1)...(19): siRNA sense strand
gaccaacgcagagcuggaa

SEQ ID NO: 1561598 - RNA, 19 nt, Homo sapiens
  misc_RNA (1)...(19): siRNA sense strand
ugaaagcagagaauucuag

SEQ ID NO: 1561599 - RNA, 19 nt, Homo sapiens
  misc_RNA (1)...(19): siRNA sense strand
gcccggauuaucagcguua

SEQ ID NO: 1561600 - RNA, 19 nt, Homo sapiens
  misc_RNA (1)...(19): siRNA sense strand
ucaagcugcuccguggaaa

SEQ ID NO: 1561601 - RNA, 19 nt, Homo sapiens
  misc_RNA (1)...(19): siRNA sense strand
acuggccacugaugacuuu

SEQ ID NO: 1561602 - RNA, 19 nt, Homo sapiens
  misc_RNA (1)...(19): siRNA sense strand
ggaacugugccugguguga

SEQ ID NO: 1561603 - RNA, 19 nt, Homo sapiens
  misc_RNA (1)...(19): siRNA sense strand
uggcacggcuuccgguugu

SEQ ID NO: 1561604 - RNA, 19 nt, Homo sapiens
  misc_RNA (1)...(19): siRNA sense strand
cuguacagcuugacaacug

SEQ ID NO: 1561605 - RNA, 19 nt, Homo sapiens
  misc_RNA (1)...(19): siRNA sense strand
gauuaucagcguuacuuca

SEQ ID NO: 1561606 - RNA, 19 nt, Homo sapiens
  misc_RNA (1)...(19): siRNA sense strand
gguguucacuagcaaugag

SEQ ID NO: 1561607 - RNA, 19 nt, Homo sapiens
  misc_RNA (1)...(19): siRNA sense strand
gagauucagcccaggcaau

SEQ ID NO: 1561608 - RNA, 19 nt, Homo sapiens
  misc_RNA (1)...(19): siRNA sense strand
gaaacugaggcccuucuac

SEQ ID NO: 1561609 - RNA, 19 nt, Homo sapiens
  misc_RNA (1)...(19): siRNA sense strand
agucaaaguaugagaguga

SEQ ID NO: 1561610 - RNA, 19 nt, Homo sapiens
  misc_RNA (1)...(19): siRNA sense strand
gaaggagacgaugcaguuc

SEQ ID NO: 1561611 - RNA, 19 nt, Homo sapiens
  misc_RNA (1)...(19): siRNA sense strand
caauggugugcccggauua

SEQ ID NO: 1561612 - RNA, 19 nt, Homo sapiens
  misc_RNA (1)...(19): siRNA sense strand
caugaaagcagagaauucu

SEQ ID NO: 1561613 - RNA, 19 nt, Homo sapiens
  misc_RNA (1)...(19): siRNA sense strand
gcuguuagaggcugacauc

SEQ ID NO: 1561614 - RNA, 19 nt, Homo sapiens
  misc_RNA (1)...(19): siRNA sense strand
ggccacugaugacuuuaag

SEQ ID NO: 1561615 - RNA, 19 nt, Homo sapiens
  misc_RNA (1)...(19): siRNA sense strand
gaucuuaugcaugaaagca

SEQ ID NO: 1561616 - RNA, 19 nt, Homo sapiens
  misc_RNA (1)...(19): siRNA sense strand
gucaaaguaugagagugaa

SEQ ID NO: 1561617 - RNA, 19 nt, Homo sapiens
  misc_RNA (1)...(19): siRNA sense strand
ucacuagcaaugagaagga

SEQ ID NO: 1561618 - RNA, 19 nt, Homo sapiens
  misc_RNA (1)...(19): siRNA sense strand
augacagacucgccaacua

SEQ ID NO: 1561619 - RNA, 19 nt, Homo sapiens
  misc_RNA (1)...(19): siRNA sense strand
acgaugcaguuccugaaug

SEQ ID NO: 1561620 - RNA, 19 nt, Homo sapiens
  misc_RNA (1)...(19): siRNA sense strand
caggauccaagaacaaugu

SEQ ID NO: 1561621 - RNA, 19 nt, Homo sapiens
  misc_RNA (1)...(19): siRNA sense strand
gugaacaggauaucccaau

SEQ ID NO: 1561622 - RNA, 19 nt, Homo sapiens
  misc_RNA (1)...(19): siRNA sense strand
ccaagaacaaugugaacag

SEQ ID NO: 1561623 - RNA, 19 nt, Homo sapiens
  misc_RNA (1)...(19): siRNA sense strand
cuacuuuacugggaguugu

SEQ ID NO: 1561624 - RNA, 19 nt, Homo sapiens
  misc_RNA (1)...(19): siRNA sense strand
acugggaguuguaauaguc

SEQ ID NO: 1561625 - RNA, 19 nt, Homo sapiens
  misc_RNA (1)...(19): siRNA sense strand
acuccaagcuuccuaucca

SEQ ID NO: 1561626 - RNA, 19 nt, Homo sapiens
  misc_RNA (1)...(19): siRNA sense strand
ccuccugccaugcuacuuu

SEQ ID NO: 1561627 - RNA, 19 nt, Homo sapiens
  misc_RNA (1)...(19): siRNA sense strand
aagaucuccuuugccuuaa

SEQ ID NO: 1561628 - RNA, 19 nt, Homo sapiens
  misc_RNA (1)...(19): siRNA sense strand
guaauagucccugcuuggu

SEQ ID NO: 1561629 - RNA, 19 nt, Homo sapiens
  misc_RNA (1)...(19): siRNA sense strand
uguggagucucugaaggaa

SEQ ID NO: 1561630 - RNA, 19 nt, Homo sapiens
  misc_RNA (1)...(19): siRNA sense strand
uaagucaaaguaugagagu

SEQ ID NO: 1561631 - RNA, 19 nt, Homo sapiens
  misc_RNA (1)...(19): siRNA sense strand
gaauucuagacuugcugua

SEQ ID NO: 1561632 - RNA, 19 nt, Homo sapiens
  misc_RNA (1)...(19): siRNA sense strand
gacgaugcaguuccugaau

SEQ ID NO: 1561633 - RNA, 19 nt, Homo sapiens
  misc_RNA (1)...(19): siRNA sense strand
gaacaucucuugugguauu

SEQ ID NO: 1561634 - RNA, 19 nt, Homo sapiens
  misc_RNA (1)...(19): siRNA sense strand
gaaagcaagucaagcaaau

SEQ ID NO: 1561635 - RNA, 19 nt, Homo sapiens
  misc_RNA (1)...(19): siRNA sense strand
cagaacaucucuuguggua

SEQ ID NO: 1561636 - RNA, 19 nt, Homo sapiens
  misc_RNA (1)...(19): siRNA sense strand
caaccuaucauaucuguuu

SEQ ID NO: 1561637 - RNA, 19 nt, Homo sapiens
  misc_RNA (1)...(19): siRNA sense strand
cauaaucacucuaauugga

SEQ ID NO: 1561638 - RNA, 19 nt, Homo sapiens
  misc_RNA (1)...(19): siRNA sense strand
gaacccugcugguggcuuu

SEQ ID NO: 1561639 - RNA, 19 nt, Homo sapiens
  misc_RNA (1)...(19): siRNA sense strand
gcaaauuacuucucacaac

SEQ ID NO: 1561640 - RNA, 19 nt, Homo sapiens
  misc_RNA (1)...(19): siRNA sense strand
gaacaguccuggccuacuc

SEQ ID NO: 1561641 - RNA, 19 nt, Homo sapiens
  misc_RNA (1)...(19): siRNA sense strand
ggaaacggcuagcaacuac

SEQ ID NO: 1561642 - RNA, 19 nt, Homo sapiens
  misc_RNA (1)...(19): siRNA sense strand
cuacuuggcuucuguguuc

SEQ ID NO: 1561643 - RNA, 19 nt, Homo sapiens
  misc_RNA (1)...(19): siRNA sense strand
ugacagcuaugguuggaaa

SEQ ID NO: 1561644 - RNA, 19 nt, Homo sapiens
  misc_RNA (1)...(19): siRNA sense strand
gagaacacaucgaguuugg

SEQ ID NO: 1561645 - RNA, 19 nt, Homo sapiens
  misc_RNA (1)...(19): siRNA sense strand
cuucauggcugcucgcuuu

SEQ ID NO: 1561646 - RNA, 19 nt, Homo sapiens
  misc_RNA (1)...(19): siRNA sense strand
cguuugcaguugauuauua

SEQ ID NO: 1561647 - RNA, 19 nt, Homo sapiens
  misc_RNA (1)...(19): siRNA sense strand
gcaagcuccuguaaacugu

SEQ ID NO: 1561648 - RNA, 19 nt, Homo sapiens
  misc_RNA (1)...(19): siRNA sense strand
ucaagcaaauuacuucuca

SEQ ID NO: 1561649 - RNA, 19 nt, Homo sapiens
  misc_RNA (1)...(19): siRNA sense strand
aaaggacacuuaccguuug

SEQ ID NO: 1561650 - RNA, 19 nt, Homo sapiens
  misc_RNA (1)...(19): siRNA sense strand
ccagaaagauuauguuacg

SEQ ID NO: 1561651 - RNA, 19 nt, Homo sapiens
  misc_RNA (1)...(19): siRNA sense strand
caaauuacuucucacaacu

SEQ ID NO: 1561652 - RNA, 19 nt, Homo sapiens
  misc_RNA (1)...(19): siRNA sense strand
aggaggcaaugaauacuua

SEQ ID NO: 1561653 - RNA, 19 nt, Homo sapiens
  misc_RNA (1)...(19): siRNA sense strand
ggccagaaagauuauguua

SEQ ID NO: 1561654 - RNA, 19 nt, Homo sapiens
  misc_RNA (1)...(19): siRNA sense strand
uaacuuaggaggcaaugaa

SEQ ID NO: 1561655 - RNA, 19 nt, Homo sapiens
  misc_RNA (1)...(19): siRNA sense strand
gaaaauggcuugcaaugcu

SEQ ID NO: 1561656 - RNA, 19 nt, Homo sapiens
  misc_RNA (1)...(19): siRNA sense strand
guggauggcuacauauaug

SEQ ID NO: 1561657 - RNA, 19 nt, Homo sapiens
  misc_RNA (1)...(19): siRNA sense strand
aagcaagucaagcaaauua

SEQ ID NO: 1561658 - RNA, 19 nt, Homo sapiens
  misc_RNA (1)...(19): siRNA sense strand
cuacauauaugaccagaac

SEQ ID NO: 1561659 - RNA, 19 nt, Homo sapiens
  misc_RNA (1)...(19): siRNA sense strand
gaagcacaaccuaucauau

SEQ ID NO: 1561660 - RNA, 19 nt, Homo sapiens
  misc_RNA (1)...(19): siRNA sense strand
cacaagcaguagcauguuu

SEQ ID NO: 1561661 - RNA, 19 nt, Homo sapiens
  misc_RNA (1)...(19): siRNA sense strand
uacaagguccuguuaguaa

SEQ ID NO: 1561662 - RNA, 19 nt, Homo sapiens
  misc_RNA (1)...(19): siRNA sense strand
ggccucauuuaucuuuaua

SEQ ID NO: 1561663 - RNA, 19 nt, Homo sapiens
  misc_RNA (1)...(19): siRNA sense strand
gcauuuggccucauuuauc

SEQ ID NO: 1561664 - RNA, 19 nt, Homo sapiens
  misc_RNA (1)...(19): siRNA sense strand
caagguccuguuaguaaua

SEQ ID NO: 1561665 - RNA, 19 nt, Homo sapiens
  misc_RNA (1)...(19): siRNA sense strand
acacuuaccguuuggcuaa

SEQ ID NO: 1561666 - RNA, 19 nt, Homo sapiens
  misc_RNA (1)...(19): siRNA sense strand
gggagaacacaucgaguuu

SEQ ID NO: 1561667 - RNA, 19 nt, Homo sapiens
  misc_RNA (1)...(19): siRNA sense strand
acacuaaagcuuccagaaa

SEQ ID NO: 1561668 - RNA, 19 nt, Homo sapiens
  misc_RNA (1)...(19): siRNA sense strand
uguaaacugucagaacuuu

SEQ ID NO: 1561669 - RNA, 19 nt, Homo sapiens
  misc_RNA (1)...(19): siRNA sense strand
cuucaggccagaaagauua

SEQ ID NO: 1561670 - RNA, 19 nt, Homo sapiens
  misc_RNA (1)...(19): siRNA sense strand
gggacgauaugaagaagca

SEQ ID NO: 1561671 - RNA, 19 nt, Homo sapiens
  misc_RNA (1)...(19): siRNA sense strand
gggaaacggcuagcaacua

SEQ ID NO: 1561672 - RNA, 19 nt, Homo sapiens
  misc_RNA (1)...(19): siRNA sense strand
ugggagcucucaaggugua

SEQ ID NO: 1561673 - RNA, 19 nt, Homo sapiens
  misc_RNA (1)...(19): siRNA sense strand
guccuggccuacucucuuu

SEQ ID NO: 1561674 - RNA, 19 nt, Homo sapiens
  misc_RNA (1)...(19): siRNA sense strand
aguggaaccuggucuguga

SEQ ID NO: 1561675 - RNA, 19 nt, Homo sapiens
  misc_RNA (1)...(19): siRNA sense strand
cacuaaagcuuccagaaac

SEQ ID NO: 1561676 - RNA, 19 nt, Homo sapiens
  misc_RNA (1)...(19): siRNA sense strand
cagcggcguuugcaguuga

SEQ ID NO: 1561677 - RNA, 19 nt, Homo sapiens
  misc_RNA (1)...(19): siRNA sense strand
cagcauuuggccucauuua

SEQ ID NO: 1561678 - RNA, 19 nt, Homo sapiens
  misc_RNA (1)...(19): siRNA sense strand
ugaauucuguuaacuuagg

SEQ ID NO: 1561679 - RNA, 19 nt, Homo sapiens
  misc_RNA (1)...(19): siRNA sense strand
ggagaacacaucgaguuug

SEQ ID NO: 1561680 - RNA, 19 nt, Homo sapiens
  misc_RNA (1)...(19): siRNA sense strand
aaacuggagucagagaaug

SEQ ID NO: 1561681 - RNA, 19 nt, Homo sapiens
  misc_RNA (1)...(19): siRNA sense strand
ggaggaggcugcaaaacug

SEQ ID NO: 1561682 - RNA, 19 nt, Homo sapiens
  misc_RNA (1)...(19): siRNA sense strand
ggugacagcuaugguugga

SEQ ID NO: 1561683 - RNA, 19 nt, Homo sapiens
  misc_RNA (1)...(19): siRNA sense strand
cuacaagguccuguuagua

SEQ ID NO: 1561684 - RNA, 19 nt, Homo sapiens
  misc_RNA (1)...(19): siRNA sense strand
ggaauaagagggagaacac

SEQ ID NO: 1561685 - RNA, 19 nt, Homo sapiens
  misc_RNA (1)...(19): siRNA sense strand
cauuuggccucauuuaucu

SEQ ID NO: 1561686 - RNA, 19 nt, Homo sapiens
  misc_RNA (1)...(19): siRNA sense strand
gaauucuguuaacuuagga

SEQ ID NO: 1561687 - RNA, 19 nt, Homo sapiens
  misc_RNA (1)...(19): siRNA sense strand
caagguguagcaggaauaa

SEQ ID NO: 1561688 - RNA, 19 nt, Homo sapiens
  misc_RNA (1)...(19): siRNA sense strand
gacaaggucgggaggagaa

SEQ ID NO: 1561689 - RNA, 19 nt, Homo sapiens
  misc_RNA (1)...(19): siRNA sense strand
agaagcacaaccuaucaua

SEQ ID NO: 1561690 - RNA, 19 nt, Homo sapiens
  misc_RNA (1)...(19): siRNA sense strand
uauaugaccagaacacaug

SEQ ID NO: 1561691 - RNA, 19 nt, Homo sapiens
  misc_RNA (1)...(19): siRNA sense strand
cgaguuugggcuaugaaua

SEQ ID NO: 1561692 - RNA, 19 nt, Homo sapiens
  misc_RNA (1)...(19): siRNA sense strand
caucgaguuugggcuauga

SEQ ID NO: 1561693 - RNA, 19 nt, Homo sapiens
  misc_RNA (1)...(19): siRNA sense strand
ugaaagcaagucaagcaaa

SEQ ID NO: 1561694 - RNA, 19 nt, Homo sapiens
  misc_RNA (1)...(19): siRNA sense strand
ggcagcauuuggccucauu

SEQ ID NO: 1561695 - RNA, 19 nt, Homo sapiens
  misc_RNA (1)...(19): siRNA sense strand
cacaaccuaucauaucugu

SEQ ID NO: 1561696 - RNA, 19 nt, Homo sapiens
  misc_RNA (1)...(19): siRNA sense strand
acaagguccuguuaguaau

SEQ ID NO: 1561697 - RNA, 19 nt, Homo sapiens
  misc_RNA (1)...(19): siRNA sense strand
gcagcggcguuugcaguug

SEQ ID NO: 1561698 - RNA, 19 nt, Homo sapiens
  misc_RNA (1)...(19): siRNA sense strand
uccauaaucacucuaauug

SEQ ID NO: 1561699 - RNA, 19 nt, Homo sapiens
  misc_RNA (1)...(19): siRNA sense strand
cuaaucugguucacuggaa

SEQ ID NO: 1561700 - RNA, 19 nt, Homo sapiens
  misc_RNA (1)...(19): siRNA sense strand
ccuacaagguccuguuagu

SEQ ID NO: 1561701 - RNA, 19 nt, Homo sapiens
  misc_RNA (1)...(19): siRNA sense strand
ccuguaaacugucagaacu

SEQ ID NO: 1561702 - RNA, 19 nt, Homo sapiens
  misc_RNA (1)...(19): siRNA sense strand
auaccacaguuguuuguug

SEQ ID NO: 1561703 - RNA, 19 nt, Homo sapiens
  misc_RNA (1)...(19): siRNA sense strand
uaacuggagcauuacgaaa

SEQ ID NO: 1561704 - RNA, 19 nt, Homo sapiens
  misc_RNA (1)...(19): siRNA sense strand
caaugugagucagguuguu

SEQ ID NO: 1561705 - RNA, 19 nt, Homo sapiens
  misc_RNA (1)...(19): siRNA sense strand
ggauucuggucuuggugaa

SEQ ID NO: 1561706 - RNA, 19 nt, Homo sapiens
  misc_RNA (1)...(19): siRNA sense strand
gagaaugaaagcaagucaa

SEQ ID NO: 1561707 - RNA, 19 nt, Homo sapiens
  misc_RNA (1)...(19): siRNA sense strand
gaucuucauaccacaguug

SEQ ID NO: 1561708 - RNA, 19 nt, Homo sapiens
  misc_RNA (1)...(19): siRNA sense strand
gaccucagcagcauuugga

SEQ ID NO: 1561709 - RNA, 19 nt, Homo sapiens
  misc_RNA (1)...(19): siRNA sense strand
ugagcuguauccaaccauu

SEQ ID NO: 1561710 - RNA, 19 nt, Homo sapiens
  misc_RNA (1)...(19): siRNA sense strand
ggcaugaagucucggacau

SEQ ID NO: 1561711 - RNA, 19 nt, Homo sapiens
  misc_RNA (1)...(19): siRNA sense strand
cuucauaccacaguuguuu

SEQ ID NO: 1561712 - RNA, 19 nt, Homo sapiens
  misc_RNA (1)...(19): siRNA sense strand
ggccuguggugucguuaug

SEQ ID NO: 1561713 - RNA, 19 nt, Homo sapiens
  misc_RNA (1)...(19): siRNA sense strand
ggcaagcuccuguaaacug

SEQ ID NO: 1561714 - RNA, 19 nt, Homo sapiens
  misc_RNA (1)...(19): siRNA sense strand
gcaggaauaagagggagaa

SEQ ID NO: 1561715 - RNA, 19 nt, Homo sapiens
  misc_RNA (1)...(19): siRNA sense strand
gcauuuggaucuucauacc

SEQ ID NO: 1561716 - RNA, 19 nt, Homo sapiens
  misc_RNA (1)...(19): siRNA sense strand
ccuccuggguguaguggaa

SEQ ID NO: 1561717 - RNA, 19 nt, Homo sapiens
  misc_RNA (1)...(19): siRNA sense strand
gggcgucuguccauuugca

SEQ ID NO: 1561718 - RNA, 19 nt, Homo sapiens
  misc_RNA (1)...(19): siRNA sense strand
gaccagaacacauggaaaa

SEQ ID NO: 1561719 - RNA, 19 nt, Homo sapiens
  misc_RNA (1)...(19): siRNA sense strand
gaguuugggcuaugaauac

SEQ ID NO: 1561720 - RNA, 19 nt, Homo sapiens
  misc_RNA (1)...(19): siRNA sense strand
uuguguggauggcuacaua

SEQ ID NO: 1561721 - RNA, 19 nt, Homo sapiens
  misc_RNA (1)...(19): siRNA sense strand
aauaauagugggcuggaaa

SEQ ID NO: 1561722 - RNA, 19 nt, Homo sapiens
  misc_RNA (1)...(19): siRNA sense strand
cagcagcauuuggaucuuc

SEQ ID NO: 1561723 - RNA, 19 nt, Homo sapiens
  misc_RNA (1)...(19): siRNA sense strand
gcacaaccuaucauaucug

SEQ ID NO: 1561724 - RNA, 19 nt, Homo sapiens
  misc_RNA (1)...(19): siRNA sense strand
aagcacaaccuaucauauc

SEQ ID NO: 1561725 - RNA, 19 nt, Homo sapiens
  misc_RNA (1)...(19): siRNA sense strand
guucagaagcacaaccuau

SEQ ID NO: 1561726 - RNA, 19 nt, Homo sapiens
  misc_RNA (1)...(19): siRNA sense strand
gcaaugugagucagguugu

SEQ ID NO: 1561727 - RNA, 19 nt, Homo sapiens
  misc_RNA (1)...(19): siRNA sense strand
uggaauagcagcggcguuu

SEQ ID NO: 1561728 - RNA, 19 nt, Homo sapiens
  misc_RNA (1)...(19): siRNA sense strand
ccguuuggcuaaucugguu

SEQ ID NO: 1561729 - RNA, 19 nt, Homo sapiens
  misc_RNA (1)...(19): siRNA sense strand
gcaagucaagcaaauuacu

SEQ ID NO: 1561730 - RNA, 19 nt, Homo sapiens
  misc_RNA (1)...(19): siRNA sense strand
gaggcaaugaauacuuaaa

SEQ ID NO: 1561731 - RNA, 19 nt, Homo sapiens
  misc_RNA (1)...(19): siRNA sense strand
ggaggcaaugaauacuuaa

SEQ ID NO: 1561732 - RNA, 19 nt, Homo sapiens
  misc_RNA (1)...(19): siRNA sense strand
cugguucacuggaaguuug

SEQ ID NO: 1561733 - RNA, 19 nt, Homo sapiens
  misc_RNA (1)...(19): siRNA sense strand
gaaauugaccuaaguguuu

SEQ ID NO: 1561734 - RNA, 19 nt, Homo sapiens
  misc_RNA (1)...(19): siRNA sense strand
gaagaagauuugucugaaa

SEQ ID NO: 1561735 - RNA, 19 nt, Homo sapiens
  misc_RNA (1)...(19): siRNA sense strand
gaagacaccuccacaacug

SEQ ID NO: 1561736 - RNA, 19 nt, Homo sapiens
  misc_RNA (1)...(19): siRNA sense strand
ggagagagauacugcaaau

SEQ ID NO: 1561737 - RNA, 19 nt, Homo sapiens
  misc_RNA (1)...(19): siRNA sense strand
caacucaccuacagaaaga

SEQ ID NO: 1561738 - RNA, 19 nt, Homo sapiens
  misc_RNA (1)...(19): siRNA sense strand
agacauaacugcccuugaa

SEQ ID NO: 1561739 - RNA, 19 nt, Homo sapiens
  misc_RNA (1)...(19): siRNA sense strand
uaagaucacugagccauuu

SEQ ID NO: 1561740 - RNA, 19 nt, Homo sapiens
  misc_RNA (1)...(19): siRNA sense strand
ccacgucacuucaguaaau

SEQ ID NO: 1561741 - RNA, 19 nt, Homo sapiens
  misc_RNA (1)...(19): siRNA sense strand
uaacugcccuugaagaaga

SEQ ID NO: 1561742 - RNA, 19 nt, Homo sapiens
  misc_RNA (1)...(19): siRNA sense strand
ggaagaaucaucuacagaa

SEQ ID NO: 1561743 - RNA, 19 nt, Homo sapiens
  misc_RNA (1)...(19): siRNA sense strand
gaacauuucaugccaguga

SEQ ID NO: 1561744 - RNA, 19 nt, Homo sapiens
  misc_RNA (1)...(19): siRNA sense strand
gcagagaucucaauaaccu

SEQ ID NO: 1561745 - RNA, 19 nt, Homo sapiens
  misc_RNA (1)...(19): siRNA sense strand
acaacaaacugacagcuaa

SEQ ID NO: 1561746 - RNA, 19 nt, Homo sapiens
  misc_RNA (1)...(19): siRNA sense strand
cuacaaaccuaguggaaga

SEQ ID NO: 1561747 - RNA, 19 nt, Homo sapiens
  misc_RNA (1)...(19): siRNA sense strand
aagcugauaugagcaauua

SEQ ID NO: 1561748 - RNA, 19 nt, Homo sapiens
  misc_RNA (1)...(19): siRNA sense strand
ggaacuaccucuguauuag

SEQ ID NO: 1561749 - RNA, 19 nt, Homo sapiens
  misc_RNA (1)...(19): siRNA sense strand
gagagauacugcaaaugaa

SEQ ID NO: 1561750 - RNA, 19 nt, Homo sapiens
  misc_RNA (1)...(19): siRNA sense strand
ugaagucucuggcacacua

SEQ ID NO: 1561751 - RNA, 19 nt, Homo sapiens
  misc_RNA (1)...(19): siRNA sense strand
gaagaaucaucuacagaag

SEQ ID NO: 1561752 - RNA, 19 nt, Homo sapiens
  misc_RNA (1)...(19): siRNA sense strand
ugacaaugcuauucccaaa

SEQ ID NO: 1561753 - RNA, 19 nt, Homo sapiens
  misc_RNA (1)...(19): siRNA sense strand
gcugauaugagcaauuaua

SEQ ID NO: 1561754 - RNA, 19 nt, Homo sapiens
  misc_RNA (1)...(19): siRNA sense strand
agaaucaucuacagaagaa

SEQ ID NO: 1561755 - RNA, 19 nt, Homo sapiens
  misc_RNA (1)...(19): siRNA sense strand
caacaacucaccuacagaa

SEQ ID NO: 1561756 - RNA, 19 nt, Homo sapiens
  misc_RNA (1)...(19): siRNA sense strand
gcuccugccuuuccacgua

SEQ ID NO: 1561757 - RNA, 19 nt, Homo sapiens
  misc_RNA (1)...(19): siRNA sense strand
agaaagaaauuaccucucu

SEQ ID NO: 1561758 - RNA, 19 nt, Homo sapiens
  misc_RNA (1)...(19): siRNA sense strand
aagauacucugcuaacuga

SEQ ID NO: 1561759 - RNA, 19 nt, Homo sapiens
  misc_RNA (1)...(19): siRNA sense strand
gaagauacucugcuaacug

SEQ ID NO: 1561760 - RNA, 19 nt, Homo sapiens
  misc_RNA (1)...(19): siRNA sense strand
gaacuaccucuguauuaga

SEQ ID NO: 1561761 - RNA, 19 nt, Homo sapiens
  misc_RNA (1)...(19): siRNA sense strand
ugaaacggauaucuuugaa

SEQ ID NO: 1561762 - RNA, 19 nt, Homo sapiens
  misc_RNA (1)...(19): siRNA sense strand
aaagauaaacgggaagaua

SEQ ID NO: 1561763 - RNA, 19 nt, Homo sapiens
  misc_RNA (1)...(19): siRNA sense strand
agagagauacugcaaauga

SEQ ID NO: 1561764 - RNA, 19 nt, Homo sapiens
  misc_RNA (1)...(19): siRNA sense strand
caacugaaacggauaucuu

SEQ ID NO: 1561765 - RNA, 19 nt, Homo sapiens
  misc_RNA (1)...(19): siRNA sense strand
gaaagaagaacccgaugag

SEQ ID NO: 1561766 - RNA, 19 nt, Homo sapiens
  misc_RNA (1)...(19): siRNA sense strand
gaaagcuucacuacuauuc

SEQ ID NO: 1561767 - RNA, 19 nt, Homo sapiens
  misc_RNA (1)...(19): siRNA sense strand
gaagauuugucugaaacug

SEQ ID NO: 1561768 - RNA, 19 nt, Homo sapiens
  misc_RNA (1)...(19): siRNA sense strand
caaacuccauaacaagaga

SEQ ID NO: 1561769 - RNA, 19 nt, Homo sapiens
  misc_RNA (1)...(19): siRNA sense strand
ggauaucuuugaacuacug

SEQ ID NO: 1561770 - RNA, 19 nt, Homo sapiens
  misc_RNA (1)...(19): siRNA sense strand
aaacggauaucuuugaacu

SEQ ID NO: 1561771 - RNA, 19 nt, Homo sapiens
  misc_RNA (1)...(19): siRNA sense strand
agaagaagauuugucugaa

SEQ ID NO: 1561772 - RNA, 19 nt, Homo sapiens
  misc_RNA (1)...(19): siRNA sense strand
ccagugcuguggcuacauu

SEQ ID NO: 1561773 - RNA, 19 nt, Homo sapiens
  misc_RNA (1)...(19): siRNA sense strand
ucaauaaccucugaagucu

SEQ ID NO: 1561774 - RNA, 19 nt, Homo sapiens
  misc_RNA (1)...(19): siRNA sense strand
caacaacuacagacaacaa

SEQ ID NO: 1561775 - RNA, 19 nt, Homo sapiens
  misc_RNA (1)...(19): siRNA sense strand
gaauauuucaucaccaguu

SEQ ID NO: 1561776 - RNA, 19 nt, Homo sapiens
  misc_RNA (1)...(19): siRNA sense strand
acaaugcuauucccaaauc

SEQ ID NO: 1561777 - RNA, 19 nt, Homo sapiens
  misc_RNA (1)...(19): siRNA sense strand
cguugucccugcaucaaua

SEQ ID NO: 1561778 - RNA, 19 nt, Homo sapiens
  misc_RNA (1)...(19): siRNA sense strand
gacaacaaacugacagcua

SEQ ID NO: 1561779 - RNA, 19 nt, Homo sapiens
  misc_RNA (1)...(19): siRNA sense strand
gcuguugaauccagauaug

SEQ ID NO: 1561780 - RNA, 19 nt, Homo sapiens
  misc_RNA (1)...(19): siRNA sense strand
ucugcuaacugaugaagaa

SEQ ID NO: 1561781 - RNA, 19 nt, Homo sapiens
  misc_RNA (1)...(19): siRNA sense strand
gaccacgucacuucaguaa

SEQ ID NO: 1561782 - RNA, 19 nt, Homo sapiens
  misc_RNA (1)...(19): siRNA sense strand
aagaagaacccgaugaguu

SEQ ID NO: 1561783 - RNA, 19 nt, Homo sapiens
  misc_RNA (1)...(19): siRNA sense strand
ggaagauacucugcuaacu

SEQ ID NO: 1561784 - RNA, 19 nt, Homo sapiens
  misc_RNA (1)...(19): siRNA sense strand
uaacugacucugaugagaa

SEQ ID NO: 1561785 - RNA, 19 nt, Homo sapiens
  misc_RNA (1)...(19): siRNA sense strand
uaaccgaaauugaccuaag

SEQ ID NO: 1561786 - RNA, 19 nt, Homo sapiens
  misc_RNA (1)...(19): siRNA sense strand
gagacucuauuaccgaaca

SEQ ID NO: 1561787 - RNA, 19 nt, Homo sapiens
  misc_RNA (1)...(19): siRNA sense strand
aaacucaaaucagaagaug

SEQ ID NO: 1561788 - RNA, 19 nt, Homo sapiens
  misc_RNA (1)...(19): siRNA sense strand
acuacaaacuccauaacaa

SEQ ID NO: 1561789 - RNA, 19 nt, Homo sapiens
  misc_RNA (1)...(19): siRNA sense strand
uggaacuaccucuguauua

SEQ ID NO: 1561790 - RNA, 19 nt, Homo sapiens
  misc_RNA (1)...(19): siRNA sense strand
aucaauagcuacaaaccua

SEQ ID NO: 1561791 - RNA, 19 nt, Homo sapiens
  misc_RNA (1)...(19): siRNA sense strand
cacaggagaugcagagauc

SEQ ID NO: 1561792 - RNA, 19 nt, Homo sapiens
  misc_RNA (1)...(19): siRNA sense strand
aagaaagcuucacuacuau

SEQ ID NO: 1561793 - RNA, 19 nt, Homo sapiens
  misc_RNA (1)...(19): siRNA sense strand
gaaaauaaccgaaauugac

SEQ ID NO: 1561794 - RNA, 19 nt, Homo sapiens
  misc_RNA (1)...(19): siRNA sense strand
cagaaacaacuauuacuuc

SEQ ID NO: 1561795 - RNA, 19 nt, Homo sapiens
  misc_RNA (1)...(19): siRNA sense strand
cauaacugcccuugaagaa

SEQ ID NO: 1561796 - RNA, 19 nt, Homo sapiens
  misc_RNA (1)...(19): siRNA sense strand
gaaguuuaucacuguguuu

SEQ ID NO: 1561797 - RNA, 19 nt, Homo sapiens
  misc_RNA (1)...(19): siRNA sense strand
caacaaacugacagcuaaa

SEQ ID NO: 1561798 - RNA, 19 nt, Homo sapiens
  misc_RNA (1)...(19): siRNA sense strand
uacauuaacugacucugau

SEQ ID NO: 1561799 - RNA, 19 nt, Homo sapiens
  misc_RNA (1)...(19): siRNA sense strand
aaagaaauuaccucucuga

SEQ ID NO: 1561800 - RNA, 19 nt, Homo sapiens
  misc_RNA (1)...(19): siRNA sense strand
ggaagacaccuccacaacu

SEQ ID NO: 1561801 - RNA, 19 nt, Homo sapiens
  misc_RNA (1)...(19): siRNA sense strand
gcuaacugaugaagaaacu

SEQ ID NO: 1561802 - RNA, 19 nt, Homo sapiens
  misc_RNA (1)...(19): siRNA sense strand
ugacucugaugagaaguuu

SEQ ID NO: 1561803 - RNA, 19 nt, Homo sapiens
  misc_RNA (1)...(19): siRNA sense strand
cgaaauugaccuaaguguu

SEQ ID NO: 1561804 - RNA, 19 nt, Homo sapiens
  misc_RNA (1)...(19): siRNA sense strand
gaagagaaaauaaccgaaa

SEQ ID NO: 1561805 - RNA, 19 nt, Homo sapiens
  misc_RNA (1)...(19): siRNA sense strand
ccaaugucccugcugauga

SEQ ID NO: 1561806 - RNA, 19 nt, Homo sapiens
  misc_RNA (1)...(19): siRNA sense strand
gaugcagagaucucaauaa

SEQ ID NO: 1561807 - RNA, 19 nt, Homo sapiens
  misc_RNA (1)...(19): siRNA sense strand
ugaaagaagaacccgauga

SEQ ID NO: 1561808 - RNA, 19 nt, Homo sapiens
  misc_RNA (1)...(19): siRNA sense strand
gcuauucccaaaucagaaa

SEQ ID NO: 1561809 - RNA, 19 nt, Homo sapiens
  misc_RNA (1)...(19): siRNA sense strand
ccaaaucagaaacaacuau

SEQ ID NO: 1561810 - RNA, 19 nt, Homo sapiens
  misc_RNA (1)...(19): siRNA sense strand
gagaccacgucacuucagu

SEQ ID NO: 1561811 - RNA, 19 nt, Homo sapiens
  misc_RNA (1)...(19): siRNA sense strand
cugcaucaauagcuacaaa

SEQ ID NO: 1561812 - RNA, 19 nt, Homo sapiens
  misc_RNA (1)...(19): siRNA sense strand
guuuaucacuguguuugaa

SEQ ID NO: 1561813 - RNA, 19 nt, Homo sapiens
  misc_RNA (1)...(19): siRNA sense strand
ucacuacuauuccagacau

SEQ ID NO: 1561814 - RNA, 19 nt, Homo sapiens
  misc_RNA (1)...(19): siRNA sense strand
caaugucccugcugaugag

SEQ ID NO: 1561815 - RNA, 19 nt, Homo sapiens
  misc_RNA (1)...(19): siRNA sense strand
ccacugacauagcaaaaga

SEQ ID NO: 1561816 - RNA, 19 nt, Homo sapiens
  misc_RNA (1)...(19): siRNA sense strand
cuacauuaacugacucuga

SEQ ID NO: 1561817 - RNA, 19 nt, Homo sapiens
  misc_RNA (1)...(19): siRNA sense strand
gaagcugauaugagcaauu

SEQ ID NO: 1561818 - RNA, 19 nt, Homo sapiens
  misc_RNA (1)...(19): siRNA sense strand
aauaaccucugaagucucu

SEQ ID NO: 1561819 - RNA, 19 nt, Homo sapiens
  misc_RNA (1)...(19): siRNA sense strand
gauauccucuuagcuacca

SEQ ID NO: 1561820 - RNA, 19 nt, Homo sapiens
  misc_RNA (1)...(19): siRNA sense strand
gauacucugcuaacugaug

SEQ ID NO: 1561821 - RNA, 19 nt, Homo sapiens
  misc_RNA (1)...(19): siRNA sense strand
cagagacuguaccuaagau

SEQ ID NO: 1561822 - RNA, 19 nt, Homo sapiens
  misc_RNA (1)...(19): siRNA sense strand
gucugaaacugauaauaca

SEQ ID NO: 1561823 - RNA, 19 nt, Homo sapiens
  misc_RNA (1)...(19): siRNA sense strand
aaaccuaguggaagaauca

SEQ ID NO: 1561824 - RNA, 19 nt, Homo sapiens
  misc_RNA (1)...(19): siRNA sense strand
gucaacaacucaccuacag

SEQ ID NO: 1561825 - RNA, 19 nt, Homo sapiens
  misc_RNA (1)...(19): siRNA sense strand
gagacuguaccuaagauca

SEQ ID NO: 1561826 - RNA, 19 nt, Homo sapiens
  misc_RNA (1)...(19): siRNA sense strand
aagaagauuugucugaaac

SEQ ID NO: 1561827 - RNA, 19 nt, Homo sapiens
  misc_RNA (1)...(19): siRNA sense strand
auacucugcuaacugauga

SEQ ID NO: 1561828 - RNA, 19 nt, Homo sapiens
  misc_RNA (1)...(19): siRNA sense strand
ccucuuagcuaccauugac

SEQ ID NO: 1561829 - RNA, 19 nt, Homo sapiens
  misc_RNA (1)...(19): siRNA sense strand
ucaccuacagaaagaaauu

SEQ ID NO: 1561830 - RNA, 19 nt, Homo sapiens
  misc_RNA (1)...(19): siRNA sense strand
agaaguuuaucacuguguu

SEQ ID NO: 1561831 - RNA, 19 nt, Homo sapiens
  misc_RNA (1)...(19): siRNA sense strand
gaaacugauaauacagaga

SEQ ID NO: 1561832 - RNA, 19 nt, Homo sapiens
  misc_RNA (1)...(19): siRNA sense strand
ccacaacugaaacggauau

SEQ ID NO: 1561833 - RNA, 19 nt, Homo sapiens
  misc_RNA (1)...(19): siRNA sense strand
ccucugugcucuacuauga

SEQ ID NO: 1561834 - RNA, 19 nt, Homo sapiens
  misc_RNA (1)...(19): siRNA sense strand
ggucacagcugcggaguuc

SEQ ID NO: 1561835 - RNA, 19 nt, Homo sapiens
  misc_RNA (1)...(19): siRNA sense strand
ccaccucugugcucuacua

SEQ ID NO: 1561836 - RNA, 19 nt, Homo sapiens
  misc_RNA (1)...(19): siRNA sense strand
ccgcuggacuccugcauga

SEQ ID NO: 1561837 - RNA, 19 nt, Homo sapiens
  misc_RNA (1)...(19): siRNA sense strand
cuacucagccuauuacugu

SEQ ID NO: 1561838 - RNA, 19 nt, Homo sapiens
  misc_RNA (1)...(19): siRNA sense strand
gcuuugaccugacccagau

SEQ ID NO: 1561839 - RNA, 19 nt, Homo sapiens
  misc_RNA (1)...(19): siRNA sense strand
gucaugagcuucgucaaca

SEQ ID NO: 1561840 - RNA, 19 nt, Homo sapiens
  misc_RNA (1)...(19): siRNA sense strand
gcgcaagcaccgcaacaug

SEQ ID NO: 1561841 - RNA, 19 nt, Homo sapiens
  misc_RNA (1)...(19): siRNA sense strand
gcaagcaccgcaacauggu

SEQ ID NO: 1561842 - RNA, 19 nt, Homo sapiens
  misc_RNA (1)...(19): siRNA sense strand
gcauccaccugcucaacag

SEQ ID NO: 1561843 - RNA, 19 nt, Homo sapiens
  misc_RNA (1)...(19): siRNA sense strand
gccucuauguggagacuga

SEQ ID NO: 1561844 - RNA, 19 nt, Homo sapiens
  misc_RNA (1)...(19): siRNA sense strand
gcaugaacgccaccaacca

SEQ ID NO: 1561845 - RNA, 19 nt, Homo sapiens
  misc_RNA (1)...(19): siRNA sense strand
ggucaugagcuucgucaac

SEQ ID NO: 1561846 - RNA, 19 nt, Homo sapiens
  misc_RNA (1)...(19): siRNA sense strand
gcuggcuggugcuggaugu

SEQ ID NO: 1561847 - RNA, 19 nt, Homo sapiens
  misc_RNA (1)...(19): siRNA sense strand
gaccaucucugcccucuuu

SEQ ID NO: 1561848 - RNA, 19 nt, Homo sapiens
  misc_RNA (1)...(19): siRNA sense strand
ggaguacgcucaacaagau

SEQ ID NO: 1561849 - RNA, 19 nt, Homo sapiens
  misc_RNA (1)...(19): siRNA sense strand
agaaggagcugcgacaauu

SEQ ID NO: 1561850 - RNA, 19 nt, Homo sapiens
  misc_RNA (1)...(19): siRNA sense strand
ucagaauucuugugcuuga

SEQ ID NO: 1561851 - RNA, 19 nt, Homo sapiens
  misc_RNA (1)...(19): siRNA sense strand
ggacuuggucaccuacuuu

SEQ ID NO: 1561852 - RNA, 19 nt, Homo sapiens
  misc_RNA (1)...(19): siRNA sense strand
caucagaauucuugugcuu

SEQ ID NO: 1561853 - RNA, 19 nt, Homo sapiens
  misc_RNA (1)...(19): siRNA sense strand
gaauucuugugcuugauga

SEQ ID NO: 1561854 - RNA, 19 nt, Homo sapiens
  misc_RNA (1)...(19): siRNA sense strand
gggagaagauggacuuggu

SEQ ID NO: 1561855 - RNA, 19 nt, Homo sapiens
  misc_RNA (1)...(19): siRNA sense strand
gacgggccuugaccucuua

SEQ ID NO: 1561856 - RNA, 19 nt, Homo sapiens
  misc_RNA (1)...(19): siRNA sense strand
gugcccagcucaaggagaa

SEQ ID NO: 1561857 - RNA, 19 nt, Homo sapiens
  misc_RNA (1)...(19): siRNA sense strand
ugaaauggccgaccaguac

SEQ ID NO: 1561858 - RNA, 19 nt, Homo sapiens
  misc_RNA (1)...(19): siRNA sense strand
gggaugagcccagggagaa

SEQ ID NO: 1561859 - RNA, 19 nt, Homo sapiens
  misc_RNA (1)...(19): siRNA sense strand
gcauugcacaaccaaguuu

SEQ ID NO: 1561860 - RNA, 19 nt, Homo sapiens
  misc_RNA (1)...(19): siRNA sense strand
gaaggagcugcgacaauuc

SEQ ID NO: 1561861 - RNA, 19 nt, Homo sapiens
  misc_RNA (1)...(19): siRNA sense strand
ggacaucagaauucuugug

SEQ ID NO: 1561862 - RNA, 19 nt, Homo sapiens
  misc_RNA (1)...(19): siRNA sense strand
cgagugauguggacaagcu

SEQ ID NO: 1561863 - RNA, 19 nt, Homo sapiens
  misc_RNA (1)...(19): siRNA sense strand
ggcugacgcuuacaagauc

SEQ ID NO: 1561864 - RNA, 19 nt, Homo sapiens
  misc_RNA (1)...(19): siRNA sense strand
agacgggccuugaccucuu

SEQ ID NO: 1561865 - RNA, 19 nt, Homo sapiens
  misc_RNA (1)...(19): siRNA sense strand
guacuacgggaaaggcaaa

SEQ ID NO: 1561866 - RNA, 19 nt, Homo sapiens
  misc_RNA (1)...(19): siRNA sense strand
ccacgcugcuagagugcaa

SEQ ID NO: 1561867 - RNA, 19 nt, Homo sapiens
  misc_RNA (1)...(19): siRNA sense strand
ggaguuaagcgagcagcaa

SEQ ID NO: 1561868 - RNA, 19 nt, Homo sapiens
  misc_RNA (1)...(19): siRNA sense strand
agauggacuuggucaccua

SEQ ID NO: 1561869 - RNA, 19 nt, Homo sapiens
  misc_RNA (1)...(19): siRNA sense strand
caaccaaguuuugugacua

SEQ ID NO: 1561870 - RNA, 19 nt, Homo sapiens
  misc_RNA (1)...(19): siRNA sense strand
ggugucggcugacgcuuac

SEQ ID NO: 1561871 - RNA, 19 nt, Homo sapiens
  misc_RNA (1)...(19): siRNA sense strand
ccagggagaagauggacuu

SEQ ID NO: 1561872 - RNA, 19 nt, Homo sapiens
  misc_RNA (1)...(19): siRNA sense strand
gaaccacaaggccuucaag

SEQ ID NO: 1561873 - RNA, 19 nt, Homo sapiens
  misc_RNA (1)...(19): siRNA sense strand
guggacaaguaccgugaug

SEQ ID NO: 1561874 - RNA, 19 nt, Homo sapiens
  misc_RNA (1)...(19): siRNA sense strand
cugaugaccugaagaagcu

SEQ ID NO: 1561875 - RNA, 19 nt, Homo sapiens
  misc_RNA (1)...(19): siRNA sense strand
cgggacaucagaauucuug

SEQ ID NO: 1561876 - RNA, 19 nt, Homo sapiens
  misc_RNA (1)...(19): siRNA sense strand
guccugcaccaucauauga

SEQ ID NO: 1561877 - RNA, 19 nt, Homo sapiens
  misc_RNA (1)...(19): siRNA sense strand
ggacugugcccagcucaag

SEQ ID NO: 1561878 - RNA, 19 nt, Homo sapiens
  misc_RNA (1)...(19): siRNA sense strand
ggaggucagggccaucuuc

SEQ ID NO: 1561879 - RNA, 19 nt, Homo sapiens
  misc_RNA (1)...(19): siRNA sense strand
gggucaucguggacaagua

SEQ ID NO: 1561880 - RNA, 19 nt, Homo sapiens
  misc_RNA (1)...(19): siRNA sense strand
gaugagcccagggagaaga

SEQ ID NO: 1561881 - RNA, 19 nt, Homo sapiens
  misc_RNA (1)...(19): siRNA sense strand
ggggcaagcucuauuccuu

SEQ ID NO: 1561882 - RNA, 19 nt, Homo sapiens
  misc_RNA (1)...(19): siRNA sense strand
cggcugaugaccugaagaa

SEQ ID NO: 1561883 - RNA, 19 nt, Homo sapiens
  misc_RNA (1)...(19): siRNA sense strand
gcagaggaguacgcucaac

SEQ ID NO: 1561884 - RNA, 19 nt, Homo sapiens
  misc_RNA (1)...(19): siRNA sense strand
ugaccaagaagagcucuga

SEQ ID NO: 1561885 - RNA, 19 nt, Homo sapiens
  misc_RNA (1)...(19): siRNA sense strand
aguacaagcggcucgauga

SEQ ID NO: 1561886 - RNA, 19 nt, Homo sapiens
  misc_RNA (1)...(19): siRNA sense strand
caagaaggagcugcgacaa

SEQ ID NO: 1561887 - RNA, 19 nt, Homo sapiens
  misc_RNA (1)...(19): siRNA sense strand
ggaaccacaaggccuucaa

SEQ ID NO: 1561888 - RNA, 19 nt, Homo sapiens
  misc_RNA (1)...(19): siRNA sense strand
gcugacgcuuacaagauca

SEQ ID NO: 1561889 - RNA, 19 nt, Homo sapiens
  misc_RNA (1)...(19): siRNA sense strand
cggcugacgcuuacaagau

SEQ ID NO: 1561890 - RNA, 19 nt, Homo sapiens
  misc_RNA (1)...(19): siRNA sense strand
ggucaucguggacaaguac

SEQ ID NO: 1561891 - RNA, 19 nt, Homo sapiens
  misc_RNA (1)...(19): siRNA sense strand
gaggucagggccaucuuca

SEQ ID NO: 1561892 - RNA, 19 nt, Homo sapiens
  misc_RNA (1)...(19): siRNA sense strand
gaggaguacgcucaacaag

SEQ ID NO: 1561893 - RNA, 19 nt, Homo sapiens
  misc_RNA (1)...(19): siRNA sense strand
ggacguagcccaagguauu

SEQ ID NO: 1561894 - RNA, 19 nt, Homo sapiens
  misc_RNA (1)...(19): siRNA sense strand
cagggaagcuccauaaaug

SEQ ID NO: 1561895 - RNA, 19 nt, Homo sapiens
  misc_RNA (1)...(19): siRNA sense strand
gguauucucuccuauggaa

SEQ ID NO: 1561896 - RNA, 19 nt, Homo sapiens
  misc_RNA (1)...(19): siRNA sense strand
cagcagagccacugagauu
